United States Patent Application Publication US 2005/0244851 A1 - sequence listing, part 153

SEQ ID NO: 5974171 - DNA, 25 bp, Homo sapien
aatttagggctatgctaatcccata

SEQ ID NO: 5974172 - DNA, 25 bp, Homo sapien
aaacaattccacgttggagtagaag

SEQ ID NO: 5974173 - DNA, 25 bp, Homo sapien
gggctatgctaatcccataggggtc

SEQ ID NO: 5974174 - DNA, 25 bp, Homo sapien
acacatacttgttgtccctaacttg

SEQ ID NO: 5974175 - DNA, 25 bp, Homo sapien
tcttggctaaggagtagtcgcgctg

SEQ ID NO: 5974176 - DNA, 25 bp, Homo sapien
aagggaagtccaatgttgtgtgaat

SEQ ID NO: 5974177 - DNA, 25 bp, Homo sapien
tttgagctggtataatgtttaagga

SEQ ID NO: 5974178 - DNA, 25 bp, Homo sapien
tggaaaaaaatttcccgctgacatt

SEQ ID NO: 5974179 - DNA, 25 bp, Homo sapien
acatacttgttgtccctaacttgat

SEQ ID NO: 5974180 - DNA, 25 bp, Homo sapien
ttacacatacttgttgtccctaact

SEQ ID NO: 5974181 - DNA, 25 bp, Homo sapien
aatgtcaggactgcttgtatcgcct

SEQ ID NO: 5974182 - DNA, 25 bp, Homo sapien
gggcttaccagggaaaattgtttgc

SEQ ID NO: 5974183 - DNA, 25 bp, Homo sapien
gggccattcaaagggaagtccaatg

SEQ ID NO: 5974184 - DNA, 25 bp, Homo sapien
attatttactaatttggtgaagaca

SEQ ID NO: 5974185 - DNA, 25 bp, Homo sapien
aatcccataggggtccgcatcggta

SEQ ID NO: 5974186 - DNA, 25 bp, Homo sapien
gctatcaaattcttggctaaggagt

SEQ ID NO: 5974187 - DNA, 25 bp, Homo sapien
tattacacatacttgttgtccctaa

SEQ ID NO: 5974188 - DNA, 25 bp, Homo sapien
aggactgcttgtatcgccttttttt

SEQ ID NO: 5974189 - DNA, 25 bp, Homo sapien
ttaggaataaccttgtcaagaaatc

SEQ ID NO: 5974190 - DNA, 25 bp, Homo sapien
acaattccacgttggagtagaagat

SEQ ID NO: 5974191 - DNA, 25 bp, Homo sapien
cagtccgatatcaatttggagcaat

SEQ ID NO: 5974192 - DNA, 25 bp, Homo sapien
tgatgttgctctaatgaattagccg

SEQ ID NO: 5974193 - DNA, 25 bp, Homo sapien
cgttcatttcagctttcttttggaa

SEQ ID NO: 5974194 - DNA, 25 bp, Homo sapien
caatggggaaaggcgaataaactaa

SEQ ID NO: 5974195 - DNA, 25 bp, Homo sapien
ctaatttggtgaagacagcttcttt

SEQ ID NO: 5974196 - DNA, 25 bp, Homo sapien
atcccttacctgtaatgagcatggt

SEQ ID NO: 5974197 - DNA, 25 bp, Homo sapien
tttacctagcggtaatttttccata

SEQ ID NO: 5974198 - DNA, 25 bp, Homo sapien
tgctttgaccaattcctgccttgtt

SEQ ID NO: 5974199 - DNA, 25 bp, Homo sapien
ttggagagagcttgaaattaaagcg

SEQ ID NO: 5974200 - DNA, 25 bp, Homo sapien
tcatttgtattcaaaaattctggca

SEQ ID NO: 5974201 - DNA, 25 bp, Homo sapien
tagacagggcttaccagggaaaatt

SEQ ID NO: 5974202 - DNA, 25 bp, Homo sapien
cccttacctgtaatgagcatggtat

SEQ ID NO: 5974203 - DNA, 25 bp, Homo sapien
tgctctaatgaattagccgccaatg

SEQ ID NO: 5974204 - DNA, 25 bp, Homo sapien
agtagtcgcgctgattcaaactcaa

SEQ ID NO: 5974205 - DNA, 25 bp, Homo sapien
cttttaggagtgagtgctttgacca

SEQ ID NO: 5974206 - DNA, 25 bp, Homo sapien
gatatcaatttggagcaatattgtt

SEQ ID NO: 5974207 - DNA, 25 bp, Homo sapien
tacctgtaatgagcatggtatttgt

SEQ ID NO: 5974208 - DNA, 25 bp, Homo sapien
gaattagacagggcttaccagggaa

SEQ ID NO: 5974209 - DNA, 25 bp, Homo sapien
ctctaatgaattagccgccaatgac

SEQ ID NO: 5974210 - DNA, 25 bp, Homo sapien
attctatgatgacgttctttaatgg

SEQ ID NO: 5974211 - DNA, 25 bp, Homo sapien
attgtcataaatatcaatggggaaa

SEQ ID NO: 5974212 - DNA, 25 bp, Homo sapien
catttcagctttcttttggaaaaaa

SEQ ID NO: 5974213 - DNA, 25 bp, Homo sapien
attctggcatcaatctcgttcattt

SEQ ID NO: 5974214 - DNA, 25 bp, Homo sapien
cgcatcttttcaacttgaactgatg

SEQ ID NO: 5974215 - DNA, 25 bp, Homo sapien
taagcgttgcgttcattcgagtgag

SEQ ID NO: 5974216 - DNA, 25 bp, Homo sapien
tgaacagggagttccgttggagtga

SEQ ID NO: 5974217 - DNA, 25 bp, Homo sapien
ttcaacttgaactgatgagtgcata

SEQ ID NO: 5974218 - DNA, 25 bp, Homo sapien
aacatctgcgtttgaacagggagtt

SEQ ID NO: 5974219 - DNA, 25 bp, Homo sapien
agtgagtgctttgaccaattcctgc

SEQ ID NO: 5974220 - DNA, 25 bp, Homo sapien
gtataacgtccagccactggactac

SEQ ID NO: 5974221 - DNA, 25 bp, Homo sapien
ataattgaatggatttgttatgcac

SEQ ID NO: 5974222 - DNA, 25 bp, Homo sapien
aattccacgttggagtagaagatat

SEQ ID NO: 5974223 - DNA, 25 bp, Homo sapien
tggcatcaatctcgttcatttcagc

SEQ ID NO: 5974224 - DNA, 25 bp, Homo sapien
gcaatatcccagctgttggcagtca

SEQ ID NO: 5974225 - DNA, 25 bp, Homo sapien
taacttgatgaccgcatcatcttgg

SEQ ID NO: 5974226 - DNA, 25 bp, Homo sapien
gcgggccattcaaagggaagtccaa

SEQ ID NO: 5974227 - DNA, 25 bp, Homo sapien
caataagtttaaaaggattgcgcat

SEQ ID NO: 5974228 - DNA, 25 bp, Homo sapien
gaatggatttgttatgcacttcatt

SEQ ID NO: 5974229 - DNA, 25 bp, Homo sapien
ttgcaatatcccagctgttggcagt

SEQ ID NO: 5974230 - DNA, 25 bp, Homo sapien
gcagtcagagatgctatcaaattct

SEQ ID NO: 5974231 - DNA, 25 bp, Homo sapien
gaccaattcctgccttgttttatat

SEQ ID NO: 5974232 - DNA, 25 bp, Homo sapien
tataagcgttgcgttcattcgagtg

SEQ ID NO: 5974233 - DNA, 25 bp, Homo sapien
aatataagcgttgcgttcattcgag

SEQ ID NO: 5974234 - DNA, 25 bp, Homo sapien
ggagttcaagtgaatggaccgtctt

SEQ ID NO: 5974235 - DNA, 25 bp, Homo sapien
tttcacatgtcagaatattgtcata

SEQ ID NO: 5974236 - DNA, 25 bp, Homo sapien
tagggctatgctaatcccatagggg

SEQ ID NO: 5974237 - DNA, 25 bp, Homo sapien
tttgaaagacgattgaaataggctg

SEQ ID NO: 5974238 - DNA, 25 bp, Homo sapien
gcgaataaactaaacccttttgagc

SEQ ID NO: 5974239 - DNA, 25 bp, Homo sapien
ctttatagtttgccatcgtgcaaat

SEQ ID NO: 5974240 - DNA, 25 bp, Homo sapien
aacccttttgagctggtataatgtt

SEQ ID NO: 5974241 - DNA, 25 bp, Homo sapien
atacttgttgtccctaacttgatga

SEQ ID NO: 5974242 - DNA, 25 bp, Homo sapien
actattacaatattacacatacttg

SEQ ID NO: 5974243 - DNA, 25 bp, Homo sapien
atcggtaaatatagaacagtccgat

SEQ ID NO: 5974244 - DNA, 25 bp, Homo sapien
attcctttatagtttgccatcgtgc

SEQ ID NO: 5974245 - DNA, 25 bp, Homo sapien
gtaatttttccataacgactttcaa

SEQ ID NO: 5974246 - DNA, 25 bp, Homo sapien
gtcaagaaatctggaaatcccttac

SEQ ID NO: 5974247 - DNA, 25 bp, Homo sapien
ggagtgagtgctttgaccaattcct

SEQ ID NO: 5974248 - DNA, 25 bp, Homo sapien
ttttaggaataaccttgtcaagaaa

SEQ ID NO: 5974249 - DNA, 25 bp, Homo sapien
cagggagttccgttggagtgaccat

SEQ ID NO: 5974250 - DNA, 25 bp, Homo sapien
ggaaatcccttacctgtaatgagca

SEQ ID NO: 5974251 - DNA, 25 bp, Homo sapien
ttctttaatggtgaagttgcaatat

SEQ ID NO: 5974252 - DNA, 25 bp, Homo sapien
tctcactgtagtgtttttacctagc

SEQ ID NO: 5974253 - DNA, 25 bp, Homo sapien
gggaagtccaatgttgtgtgaatgt

SEQ ID NO: 5974254 - DNA, 25 bp, Homo sapien
gtcagaatattgtcataaatatcaa

SEQ ID NO: 5974255 - DNA, 25 bp, Homo sapien
gttgtccctaacttgatgaccgcat

SEQ ID NO: 5974256 - DNA, 25 bp, Homo sapien
aggggtccgcatcggtaaatataga

SEQ ID NO: 5974257 - DNA, 25 bp, Homo sapien
tttcccgctgacattctatgatgac

SEQ ID NO: 5974258 - DNA, 25 bp, Homo sapien
aatttggtgaagacagcttcttttt

SEQ ID NO: 5974259 - DNA, 25 bp, Homo sapien
tgagtgctttgaccaattcctgcct

SEQ ID NO: 5974260 - DNA, 25 bp, Homo sapien
gacagggcttaccagggaaaattgt

SEQ ID NO: 5974261 - DNA, 25 bp, Homo sapien
tcccagctgttggcagtcagagatg

SEQ ID NO: 5974262 - DNA, 25 bp, Homo sapien
ataacgtccagccactggactacgt

SEQ ID NO: 5974263 - DNA, 25 bp, Homo sapien
attgcgcatcttttcaacttgaact

SEQ ID NO: 5974264 - DNA, 25 bp, Homo sapien
aaattcttggctaaggagtagtcgc

SEQ ID NO: 5974265 - DNA, 25 bp, Homo sapien
tatcccagctgttggcagtcagaga

SEQ ID NO: 5974266 - DNA, 25 bp, Homo sapien
tgcgcatcttttcaacttgaactga

SEQ ID NO: 5974267 - DNA, 25 bp, Homo sapien
gagcatggtatttgtactcaacttg

SEQ ID NO: 5974268 - DNA, 25 bp, Homo sapien
gcgttcattcgagtgagtataattt

SEQ ID NO: 5974269 - DNA, 25 bp, Homo sapien
tccctaacttgatgaccgcatcatc

SEQ ID NO: 5974270 - DNA, 25 bp, Homo sapien
ttgtgccaaaacttgcgtaatacga

SEQ ID NO: 5974271 - DNA, 25 bp, Homo sapien
ttggctaaggagtagtcgcgctgat

SEQ ID NO: 5974272 - DNA, 25 bp, Homo sapien
atatcaatggggaaaggcgaataaa

SEQ ID NO: 5974273 - DNA, 25 bp, Homo sapien
gaagttgcaatatcccagctgttgg

SEQ ID NO: 5974274 - DNA, 25 bp, Homo sapien
atggatttgttatgcacttcattat

SEQ ID NO: 5974275 - DNA, 25 bp, Homo sapien
tcctgccttgttttatattttttcc

SEQ ID NO: 5974276 - DNA, 25 bp, Homo sapien
gctgacattctatgatgacgttctt

SEQ ID NO: 5974277 - DNA, 25 bp, Homo sapien
gtccgcatcggtaaatatagaacag

SEQ ID NO: 5974278 - DNA, 25 bp, Homo sapien
tttggttcattttcacatgtcagaa

SEQ ID NO: 5974279 - DNA, 25 bp, Homo sapien
tttgtactcaacttgtgataattat

SEQ ID NO: 5974280 - DNA, 25 bp, Homo sapien
gaatattgtcataaatatcaatggg

SEQ ID NO: 5974281 - DNA, 25 bp, Homo sapien
tatgctaatcccataggggtccgca

SEQ ID NO: 5974282 - DNA, 25 bp, Homo sapien
tgagccaaaacatctgcgtttgaac

SEQ ID NO: 5974283 - DNA, 25 bp, Homo sapien
actgtagtgtttttacctagcggta

SEQ ID NO: 5974284 - DNA, 25 bp, Homo sapien
atagatgcgggccattcaaagggaa

SEQ ID NO: 5974285 - DNA, 25 bp, Homo sapien
gcatagatgcgggccattcaaaggg

SEQ ID NO: 5974286 - DNA, 25 bp, Homo sapien
agatgcgggccattcaaagggaagt

SEQ ID NO: 5974287 - DNA, 25 bp, Homo sapien
tcattattttgtgccaaaacttgcg

SEQ ID NO: 5974288 - DNA, 25 bp, Homo sapien
tgtcaggactgcttgtatcgccttt

SEQ ID NO: 5974289 - DNA, 25 bp, Homo sapien
ggagtgaccattggagttcaagtga

SEQ ID NO: 5974290 - DNA, 25 bp, Homo sapien
ccatcgtgcaaatataagcgttgcg

SEQ ID NO: 5974291 - DNA, 25 bp, Homo sapien
cgcgctgattcaaactcaataattg

SEQ ID NO: 5974292 - DNA, 25 bp, Homo sapien
catcatcttggaaaaatggaattag

SEQ ID NO: 5974293 - DNA, 25 bp, Homo sapien
tatgatgacgttctttaatggtgaa

SEQ ID NO: 5974294 - DNA, 25 bp, Homo sapien
gccactggactacgtttgcttgtct

SEQ ID NO: 5974295 - DNA, 25 bp, Homo sapien
gatgaccgcatcatcttggaaaaat

SEQ ID NO: 5974296 - DNA, 25 bp, Homo sapien
tgaccgcatcatcttggaaaaatgg

SEQ ID NO: 5974297 - DNA, 25 bp, Homo sapien
atgagcatggtatttgtactcaact

SEQ ID NO: 5974298 - DNA, 25 bp, Homo sapien
cctaacttgatgaccgcatcatctt

SEQ ID NO: 5974299 - DNA, 25 bp, Homo sapien
atacgaattcctttatagtttgcca

SEQ ID NO: 5974300 - DNA, 25 bp, Homo sapien
actacgtttgcttgtctttgaaaca

SEQ ID NO: 5974301 - DNA, 25 bp, Homo sapien
accgcatcatcttggaaaaatggaa

SEQ ID NO: 5974302 - DNA, 25 bp, Homo sapien
gtgagtataatttagggctatgcta

SEQ ID NO: 5974303 - DNA, 25 bp, Homo sapien
atgtttaaggattttcttggagaga

SEQ ID NO: 5974304 - DNA, 25 bp, Homo sapien
tactcaacttgtgataattatttac

SEQ ID NO: 5974305 - DNA, 25 bp, Homo sapien
gtccgatatcaatttggagcaatat

SEQ ID NO: 5974306 - DNA, 25 bp, Homo sapien
attattttgtgccaaaacttgcgta

SEQ ID NO: 5974307 - DNA, 25 bp, Homo sapien
gagtagaagatatctctcactgtag

SEQ ID NO: 5974308 - DNA, 25 bp, Homo sapien
gtgaagttgcaatatcccagctgtt

SEQ ID NO: 5974309 - DNA, 25 bp, Homo sapien
agtcagagatgctatcaaattcttg

SEQ ID NO: 5974310 - DNA, 25 bp, Homo sapien
aatattacacatacttgttgtccct

SEQ ID NO: 5974311 - DNA, 25 bp, Homo sapien
ccttgtcaagaaatctggaaatccc

SEQ ID NO: 5974312 - DNA, 25 bp, Homo sapien
gccattcaaagggaagtccaatgtt

SEQ ID NO: 5974313 - DNA, 25 bp, Homo sapien
gccaaaacttgcgtaatacgaattc

SEQ ID NO: 5974314 - DNA, 25 bp, Homo sapien
tttttccataacgactttcaataag

SEQ ID NO: 5974315 - DNA, 25 bp, Homo sapien
ttttccgcaatccctccaaagccat

SEQ ID NO: 5974316 - DNA, 25 bp, Homo sapien
ctgttggcagtcagagatgctatca

SEQ ID NO: 5974317 - DNA, 25 bp, Homo sapien
gcatcaatctcgttcatttcagctt

SEQ ID NO: 5974318 - DNA, 25 bp, Homo sapien
gtttaaggattttcttggagagagc

SEQ ID NO: 5974319 - DNA, 25 bp, Homo sapien
tgaattagccgccaatgacaggaaa

SEQ ID NO: 5974320 - DNA, 25 bp, Homo sapien
gaaaaatggaattagacagggctta

SEQ ID NO: 5974321 - DNA, 25 bp, Homo sapien
tacctagcggtaatttttccataac

SEQ ID NO: 5974322 - DNA, 25 bp, Homo sapien
tactaatttggtgaagacagcttct

SEQ ID NO: 5974323 - DNA, 25 bp, Homo sapien
agttgcaatatcccagctgttggca

SEQ ID NO: 5974324 - DNA, 25 bp, Homo sapien
tgaatggaccgtcttttaggagtga

SEQ ID NO: 5974325 - DNA, 25 bp, Homo sapien
agtccaatgttgtgtgaatgtcagg

SEQ ID NO: 5974326 - DNA, 25 bp, Homo sapien
caatgacaggaaatgcttaatatga

SEQ ID NO: 5974327 - DNA, 25 bp, Homo sapien
ggatttgttatgcacttcattattt

SEQ ID NO: 5974328 - DNA, 25 bp, Homo sapien
gggaaaattgtttgcttttgcatct

SEQ ID NO: 5974329 - DNA, 25 bp, Homo sapien
cgtccagccactggactacgtttgc

SEQ ID NO: 5974330 - DNA, 25 bp, Homo sapien
tcaaattcttggctaaggagtagtc

SEQ ID NO: 5974331 - DNA, 25 bp, Homo sapien
aattagccgccaatgacaggaaatg

SEQ ID NO: 5974332 - DNA, 25 bp, Homo sapien
gactgcttgtatcgccttttttttt

SEQ ID NO: 5974333 - DNA, 25 bp, Homo sapien
gtagaagatatctctcactgtagtg

SEQ ID NO: 5974334 - DNA, 25 bp, Homo sapien
atatagaacagtccgatatcaattt

SEQ ID NO: 5974335 - DNA, 25 bp, Homo sapien
agagatgctatcaaattcttggcta

SEQ ID NO: 5974336 - DNA, 25 bp, Homo sapien
ggattttcttggagagagcttgaaa

SEQ ID NO: 5974337 - DNA, 25 bp, Homo sapien
tctttggttcattttcacatgtcag

SEQ ID NO: 5974338 - DNA, 25 bp, Homo sapien
actgatgagtgcatagatgcgggcc

SEQ ID NO: 5974339 - DNA, 25 bp, Homo sapien
agagagcttgaaattaaagcgtata

SEQ ID NO: 5974340 - DNA, 25 bp, Homo sapien
ttgcgttcattcgagtgagtataat

SEQ ID NO: 5974341 - DNA, 25 bp, Homo sapien
tgccatcgtgcaaatataagcgttg

SEQ ID NO: 5974342 - DNA, 25 bp, Homo sapien
gaataaactaaacccttttgagctg

SEQ ID NO: 5974343 - DNA, 25 bp, Homo sapien
tgtgtgaatgtcaggactgcttgta

SEQ ID NO: 5974344 - DNA, 25 bp, Homo sapien
caatctcgttcatttcagctttctt

SEQ ID NO: 5974345 - DNA, 25 bp, Homo sapien
ctcaataattgaatggatttgttat

SEQ ID NO: 5974346 - DNA, 25 bp, Homo sapien
tgaaagacgattgaaataggctgtt

SEQ ID NO: 5974347 - DNA, 25 bp, Homo sapien
tgacattctatgatgacgttcttta

SEQ ID NO: 5974348 - DNA, 25 bp, Homo sapien
cgtgcaaatataagcgttgcgttca

SEQ ID NO: 5974349 - DNA, 25 bp, Homo sapien
ctgttgatgttgctctaatgaatta

SEQ ID NO: 5974350 - DNA, 25 bp, Homo sapien
gcttaccagggaaaattgtttgctt

SEQ ID NO: 5974351 - DNA, 25 bp, Homo sapien
ttgtattcaaaaattctggcatcaa

SEQ ID NO: 5974352 - DNA, 25 bp, Homo sapien
acagcttctttttccactattacaa

SEQ ID NO: 5974353 - DNA, 25 bp, Homo sapien
ttcatttcagctttcttttggaaaa

SEQ ID NO: 5974354 - DNA, 25 bp, Homo sapien
tacgtttgcttgtctttgaaacaat

SEQ ID NO: 5974355 - DNA, 25 bp, Homo sapien
tttatattttttccgcaatccctcc

SEQ ID NO: 5974356 - DNA, 25 bp, Homo sapien
gagtgcatagatgcgggccattcaa

SEQ ID NO: 5974357 - DNA, 25 bp, Homo sapien
tgaaattaaagcgtataacgtccag

SEQ ID NO: 5974358 - DNA, 25 bp, Homo sapien
gttgctctaatgaattagccgccaa

SEQ ID NO: 5974359 - DNA, 25 bp, Homo sapien
cgtttgcttgtctttgaaacaattc

SEQ ID NO: 5974360 - DNA, 25 bp, Homo sapien
tctatgatgacgttctttaatggtg

SEQ ID NO: 5974361 - DNA, 25 bp, Homo sapien
cgttggagtgaccattggagttcaa

SEQ ID NO: 5974362 - DNA, 25 bp, Homo sapien
cgttctttaatggtgaagttgcaat

SEQ ID NO: 5974363 - DNA, 25 bp, Homo sapien
ataatttagggctatgctaatccca

SEQ ID NO: 5974364 - DNA, 25 bp, Homo sapien
tgttttatattttttccgcaatccc

SEQ ID NO: 5974365 - DNA, 25 bp, Homo sapien
caataattgaatggatttgttatgc

SEQ ID NO: 5974366 - DNA, 25 bp, Homo sapien
cttgaaattaaagcgtataacgtcc

SEQ ID NO: 5974367 - DNA, 25 bp, Homo sapien
aatatcccagctgttggcagtcaga

SEQ ID NO: 5974368 - DNA, 25 bp, Homo sapien
agatgctatcaaattcttggctaag

SEQ ID NO: 5974369 - DNA, 25 bp, Homo sapien
tcctttatagtttgccatcgtgcaa

SEQ ID NO: 5974370 - DNA, 25 bp, Homo sapien
agaagatatctctcactgtagtgtt

SEQ ID NO: 5974371 - DNA, 25 bp, Homo sapien
aaatcccttacctgtaatgagcatg

SEQ ID NO: 5974372 - DNA, 25 bp, Homo sapien
tcaatttggagcaatattgttctag

SEQ ID NO: 5974373 - DNA, 25 bp, Homo sapien
gcatggtatttgtactcaacttgtg

SEQ ID NO: 5974374 - DNA, 25 bp, Homo sapien
gtgccaaaacttgcgtaatacgaat

SEQ ID NO: 5974375 - DNA, 25 bp, Homo sapien
agtgaccattggagttcaagtgaat

SEQ ID NO: 5974376 - DNA, 25 bp, Homo sapien
tctggcatcaatctcgttcatttca

SEQ ID NO: 5974377 - DNA, 25 bp, Homo sapien
attgtttgcttttgcatctttggtt

SEQ ID NO: 5974378 - DNA, 25 bp, Homo sapien
acattctatgatgacgttctttaat

SEQ ID NO: 5974379 - DNA, 25 bp, Homo sapien
cagaatattgtcataaatatcaatg

SEQ ID NO: 5974380 - DNA, 25 bp, Homo sapien
atcaatggggaaaggcgaataaact

SEQ ID NO: 5974381 - DNA, 25 bp, Homo sapien
ataaatatcaatggggaaaggcgaa

SEQ ID NO: 5974382 - DNA, 25 bp, Homo sapien
ccgcatcggtaaatatagaacagtc

SEQ ID NO: 5974383 - DNA, 25 bp, Homo sapien
ttggagttcaagtgaatggaccgtc

SEQ ID NO: 5974384 - DNA, 25 bp, Homo sapien
aaaatttcccgctgacattctatga

SEQ ID NO: 5974385 - DNA, 25 bp, Homo sapien
tcagagatgctatcaaattcttggc

SEQ ID NO: 5974386 - DNA, 25 bp, Homo sapien
tgtaatgagcatggtatttgtactc

SEQ ID NO: 5974387 - DNA, 25 bp, Homo sapien
aaattgtttgcttttgcatctttgg

SEQ ID NO: 5974388 - DNA, 25 bp, Homo sapien
caaactcaataattgaatggatttg

SEQ ID NO: 5974389 - DNA, 25 bp, Homo sapien
gaagacagcttctttttccactatt

SEQ ID NO: 5974390 - DNA, 25 bp, Homo sapien
tcttggagagagcttgaaattaaag

SEQ ID NO: 5974391 - DNA, 25 bp, Homo sapien
tcacatgtcagaatattgtcataaa

SEQ ID NO: 5974392 - DNA, 25 bp, Homo sapien
ggactacgtttgcttgtctttgaaa

SEQ ID NO: 5974393 - DNA, 25 bp, Homo sapien
tcttttcaacttgaactgatgagtg

SEQ ID NO: 5974394 - DNA, 25 bp, Homo sapien
tccaatgttgtgtgaatgtcaggac

SEQ ID NO: 5974395 - DNA, 25 bp, Homo sapien
cttcattattttgtgccaaaacttg

SEQ ID NO: 5974396 - DNA, 25 bp, Homo sapien
ggaaatgcttaatatgagccaaaac

SEQ ID NO: 5974397 - DNA, 25 bp, Homo sapien
tcataaatatcaatggggaaaggcg

SEQ ID NO: 5974398 - DNA, 25 bp, Homo sapien
tgtactcaacttgtgataattattt

SEQ ID NO: 5974399 - DNA, 25 bp, Homo sapien
ttcaataagtttaaaaggattgcgc

SEQ ID NO: 5974400 - DNA, 25 bp, Homo sapien
gtttaaaaggattgcgcatcttttc

SEQ ID NO: 5974401 - DNA, 25 bp, Homo sapien
tggtgaagttgcaatatcccagctg

SEQ ID NO: 5974402 - DNA, 25 bp, Homo sapien
cctgtaatgagcatggtatttgtac

SEQ ID NO: 5974403 - DNA, 25 bp, Homo sapien
agagcttgaaattaaagcgtataac

SEQ ID NO: 5974404 - DNA, 25 bp, Homo sapien
tcatcttggaaaaatggaattagac

SEQ ID NO: 5974405 - DNA, 25 bp, Homo sapien
ttgttgtccctaacttgatgaccgc

SEQ ID NO: 5974406 - DNA, 25 bp, Homo sapien
tcattttcacatgtcagaatattgt

SEQ ID NO: 5974407 - DNA, 25 bp, Homo sapien
ccaattcctgccttgttttatattt

SEQ ID NO: 5974408 - DNA, 25 bp, Homo sapien
ttttttgttttgaaagacgattgaa

SEQ ID NO: 5974409 - DNA, 25 bp, Homo sapien
aaaacatctgcgtttgaacagggag

SEQ ID NO: 5974410 - DNA, 25 bp, Homo sapien
aacagtccgatatcaatttggagca

SEQ ID NO: 5974411 - DNA, 25 bp, Homo sapien
atcgtgcaaatataagcgttgcgtt

SEQ ID NO: 5974412 - DNA, 25 bp, Homo sapien
accattggagttcaagtgaatggac

SEQ ID NO: 5974413 - DNA, 25 bp, Homo sapien
ttgaaataggctgttgatgttgctc

SEQ ID NO: 5974414 - DNA, 25 bp, Homo sapien
tttggaaaaaaatttcccgctgaca

SEQ ID NO: 5974415 - DNA, 25 bp, Homo sapien
aagatatctctcactgtagtgtttt

SEQ ID NO: 5974416 - DNA, 25 bp, Homo sapien
tgcacttcattattttgtgccaaaa

SEQ ID NO: 5974417 - DNA, 25 bp, Homo sapien
ttgaatggatttgttatgcacttca

SEQ ID NO: 5974418 - DNA, 25 bp, Homo sapien
tgtttgcttttgcatctttggttca

SEQ ID NO: 5974419 - DNA, 25 bp, Homo sapien
gtattcaaaaattctggcatcaatc

SEQ ID NO: 5974420 - DNA, 25 bp, Homo sapien
caacttgtgataattatttactaat

SEQ ID NO: 5974421 - DNA, 25 bp, Homo sapien
caatgttgtgtgaatgtcaggactg

SEQ ID NO: 5974422 - DNA, 25 bp, Homo sapien
tattttttccgcaatccctccaaag

SEQ ID NO: 5974423 - DNA, 25 bp, Homo sapien
tggagcaatattgttctagtttttt

SEQ ID NO: 5974424 - DNA, 25 bp, Homo sapien
gttcattttcacatgtcagaatatt

SEQ ID NO: 5974425 - DNA, 25 bp, Homo sapien
tgtagtgtttttacctagcggtaat

SEQ ID NO: 5974426 - DNA, 25 bp, Homo sapien
tttagggctatgctaatcccatagg

SEQ ID NO: 5974427 - DNA, 25 bp, Homo sapien
tccataacgactttcaataagttta

SEQ ID NO: 5974428 - DNA, 25 bp, Homo sapien
tttccataacgactttcaataagtt

SEQ ID NO: 5974429 - DNA, 25 bp, Homo sapien
tggttcattttcacatgtcagaata

SEQ ID NO: 5974430 - DNA, 25 bp, Homo sapien
attcttggctaaggagtagtcgcgc

SEQ ID NO: 5974431 - DNA, 25 bp, Homo sapien
ggtataatgtttaaggattttcttg

SEQ ID NO: 5974432 - DNA, 25 bp, Homo sapien
aacagggagttccgttggagtgacc

SEQ ID NO: 5974433 - DNA, 25 bp, Homo sapien
cactggactacgtttgcttgtcttt

SEQ ID NO: 5974434 - DNA, 25 bp, Homo sapien
gggtccgcatcggtaaatatagaac

SEQ ID NO: 5974435 - DNA, 25 bp, Homo sapien
aaatctggaaatcccttacctgtaa

SEQ ID NO: 5974436 - DNA, 25 bp, Homo sapien
gaataaccttgtcaagaaatctgga

SEQ ID NO: 5974437 - DNA, 25 bp, Homo sapien
ataggggtccgcatcggtaaatata

SEQ ID NO: 5974438 - DNA, 25 bp, Homo sapien
tccagccactggactacgtttgctt

SEQ ID NO: 5974439 - DNA, 25 bp, Homo sapien
ccacgttggagtagaagatatctct

SEQ ID NO: 5974440 - DNA, 25 bp, Homo sapien
tatctctcactgtagtgtttttacc

SEQ ID NO: 5974441 - DNA, 25 bp, Homo sapien
aatggtgaagttgcaatatcccagc

SEQ ID NO: 5974442 - DNA, 25 bp, Homo sapien
gagtgagtataatttagggctatgc

SEQ ID NO: 5974443 - DNA, 25 bp, Homo sapien
acatgtcagaatattgtcataaata

SEQ ID NO: 5974444 - DNA, 25 bp, Homo sapien
atcaatctcgttcatttcagctttc

SEQ ID NO: 5974445 - DNA, 25 bp, Homo sapien
cataacgactttcaataagtttaaa

SEQ ID NO: 5974446 - DNA, 25 bp, Homo sapien
ggattgcgcatcttttcaacttgaa

SEQ ID NO: 5974447 - DNA, 25 bp, Homo sapien
atgcgggccattcaaagggaagtcc

SEQ ID NO: 5974448 - DNA, 25 bp, Homo sapien
acgattgaaataggctgttgatgtt

SEQ ID NO: 5974449 - DNA, 25 bp, Homo sapien
atagaacagtccgatatcaatttgg

SEQ ID NO: 5974450 - DNA, 25 bp, Homo sapien
aaattctggcatcaatctcgttcat

SEQ ID NO: 5974451 - DNA, 25 bp, Homo sapien
tgctaatcccataggggtccgcatc

SEQ ID NO: 5974452 - DNA, 25 bp, Homo sapien
tgtctttgaaacaattccacgttgg

SEQ ID NO: 5974453 - DNA, 25 bp, Homo sapien
tttgccatcgtgcaaatataagcgt

SEQ ID NO: 5974454 - DNA, 25 bp, Homo sapien
taggagtgagtgctttgaccaattc

SEQ ID NO: 5974455 - DNA, 25 bp, Homo sapien
aaatatcaatggggaaaggcgaata

SEQ ID NO: 5974456 - DNA, 25 bp, Homo sapien
acttgttgtccctaacttgatgacc

SEQ ID NO: 5974457 - DNA, 25 bp, Homo sapien
aatttcccgctgacattctatgatg

SEQ ID NO: 5974458 - DNA, 25 bp, Homo sapien
atgtcagaatattgtcataaatatc

SEQ ID NO: 5974459 - DNA, 25 bp, Homo sapien
caggaaatgcttaatatgagccaaa

SEQ ID NO: 5974460 - DNA, 25 bp, Homo sapien
atcttggaaaaatggaattagacag

SEQ ID NO: 5974461 - DNA, 25 bp, Homo sapien
tatcaatttggagcaatattgttct

SEQ ID NO: 5974462 - DNA, 25 bp, Homo sapien
atgacaggaaatgcttaatatgagc

SEQ ID NO: 5974463 - DNA, 25 bp, Homo sapien
catcttttcaacttgaactgatgag

SEQ ID NO: 5974464 - DNA, 25 bp, Homo sapien
tcccataggggtccgcatcggtaaa

SEQ ID NO: 5974465 - DNA, 25 bp, Homo sapien
tgcatctttggttcattttcacatg

SEQ ID NO: 5974466 - DNA, 25 bp, Homo sapien
aattgaatggatttgttatgcactt

SEQ ID NO: 5974467 - DNA, 25 bp, Homo sapien
ccataggggtccgcatcggtaaata

SEQ ID NO: 5974468 - DNA, 25 bp, Homo sapien
ctaaggagtagtcgcgctgattcaa

SEQ ID NO: 5974469 - DNA, 25 bp, Homo sapien
ttaaggattttcttggagagagctt

SEQ ID NO: 5974470 - DNA, 25 bp, Homo sapien
gacgttctttaatggtgaagttgca

SEQ ID NO: 5974471 - DNA, 25 bp, Homo sapien
atgagtgcatagatgcgggccattc

SEQ ID NO: 5974472 - DNA, 25 bp, Homo sapien
ttgcgtaatacgaattcctttatag

SEQ ID NO: 5974473 - DNA, 25 bp, Homo sapien
tgaaacaattccacgttggagtaga

SEQ ID NO: 5974474 - DNA, 25 bp, Homo sapien
tgtgaatgtcaggactgcttgtatc

SEQ ID NO: 5974475 - DNA, 25 bp, Homo sapien
tggtgaagacagcttctttttccac

SEQ ID NO: 5974476 - DNA, 25 bp, Homo sapien
attcaaaaattctggcatcaatctc

SEQ ID NO: 5974477 - DNA, 25 bp, Homo sapien
ttgaccaattcctgccttgttttat

SEQ ID NO: 5974478 - DNA, 25 bp, Homo sapien
aaattaaagcgtataacgtccagcc

SEQ ID NO: 5974479 - DNA, 25 bp, Homo sapien
aataggctgttgatgttgctctaat

SEQ ID NO: 5974480 - DNA, 25 bp, Homo sapien
ttacaatattacacatacttgttgt

SEQ ID NO: 5974481 - DNA, 25 bp, Homo sapien
ctggactacgtttgcttgtctttga

SEQ ID NO: 5974482 - DNA, 25 bp, Homo sapien
agcttgaaattaaagcgtataacgt

SEQ ID NO: 5974483 - DNA, 25 bp, Homo sapien
aaatgcttaatatgagccaaaacat

SEQ ID NO: 5974484 - DNA, 25 bp, Homo sapien
gagtataatttagggctatgctaat

SEQ ID NO: 5974485 - DNA, 25 bp, Homo sapien
attcgagtgagtataatttagggct

SEQ ID NO: 5974486 - DNA, 25 bp, Homo sapien
tttgcttttgcatctttggttcatt

SEQ ID NO: 5974487 - DNA, 25 bp, Homo sapien
aaggattttcttggagagagcttga

SEQ ID NO: 5974488 - DNA, 25 bp, Homo sapien
catctttggttcattttcacatgtc

SEQ ID NO: 5974489 - DNA, 25 bp, Homo sapien
gattgaaataggctgttgatgttgc

SEQ ID NO: 5974490 - DNA, 25 bp, Homo sapien
gttggagtagaagatatctctcact

SEQ ID NO: 5974491 - DNA, 25 bp, Homo sapien
agctgttggcagtcagagatgctat

SEQ ID NO: 5974492 - DNA, 25 bp, Homo sapien
ggctgttgatgttgctctaatgaat

SEQ ID NO: 5974493 - DNA, 25 bp, Homo sapien
aatggaccgtcttttaggagtgagt

SEQ ID NO: 5974494 - DNA, 25 bp, Homo sapien
gaccgtcttttaggagtgagtgctt

SEQ ID NO: 5974495 - DNA, 25 bp, Homo sapien
cggtaaatatagaacagtccgatat

SEQ ID NO: 5974496 - DNA, 25 bp, Homo sapien
aaagacgattgaaataggctgttga

SEQ ID NO: 5974497 - DNA, 25 bp, Homo sapien
ttcaaactcaataattgaatggatt

SEQ ID NO: 5974498 - DNA, 25 bp, Homo sapien
ggtatttgtactcaacttgtgataa

SEQ ID NO: 5974499 - DNA, 25 bp, Homo sapien
ttaatggtgaagttgcaatatccca

SEQ ID NO: 5974500 - DNA, 25 bp, Homo sapien
taaagcgtataacgtccagccactg

SEQ ID NO: 5974501 - DNA, 25 bp, Homo sapien
cagccactggactacgtttgcttgt

SEQ ID NO: 5974502 - DNA, 25 bp, Homo sapien
tttgcatctttggttcattttcaca

SEQ ID NO: 5974503 - DNA, 25 bp, Homo sapien
aaggattgcgcatcttttcaacttg

SEQ ID NO: 5974504 - DNA, 25 bp, Homo sapien
agtgaatggaccgtcttttaggagt

SEQ ID NO: 5974505 - DNA, 25 bp, Homo sapien
ttcaagtgaatggaccgtcttttag

SEQ ID NO: 5974506 - DNA, 25 bp, Homo sapien
gattcaaactcaataattgaatgga

SEQ ID NO: 5974507 - DNA, 25 bp, Homo sapien
gaaaattgtttgcttttgcatcttt

SEQ ID NO: 5974508 - DNA, 25 bp, Homo sapien
tgtccctaacttgatgaccgcatca

SEQ ID NO: 5974509 - DNA, 25 bp, Homo sapien
ttgtcaagaaatctggaaatccctt

SEQ ID NO: 5974510 - DNA, 25 bp, Homo sapien
caaagggaagtccaatgttgtgtga

SEQ ID NO: 5974511 - DNA, 25 bp, Homo sapien
gtaaatatagaacagtccgatatca

SEQ ID NO: 5974512 - DNA, 25 bp, Homo sapien
caaaacttgcgtaatacgaattcct

SEQ ID NO: 5974513 - DNA, 25 bp, Homo sapien
ctcaacttgtgataattatttacta

SEQ ID NO: 5974514 - DNA, 25 bp, Homo sapien
attaaagcgtataacgtccagccac

SEQ ID NO: 5974515 - DNA, 25 bp, Homo sapien
atttgtattcaaaaattctggcatc

SEQ ID NO: 5974516 - DNA, 25 bp, Homo sapien
cgtttgaacagggagttccgttgga

SEQ ID NO: 5974517 - DNA, 25 bp, Homo sapien
cgctgattcaaactcaataattgaa

SEQ ID NO: 5974518 - DNA, 25 bp, Homo sapien
gcgtaatacgaattcctttatagtt

SEQ ID NO: 5974519 - DNA, 25 bp, Homo sapien
tggagtagaagatatctctcactgt

SEQ ID NO: 5974520 - DNA, 25 bp, Homo sapien
ttttcaacttgaactgatgagtgca

SEQ ID NO: 5974521 - DNA, 25 bp, Homo sapien
ctttaatggtgaagttgcaatatcc

SEQ ID NO: 5974522 - DNA, 25 bp, Homo sapien
ttgttttgaaagacgattgaaatag

SEQ ID NO: 5974523 - DNA, 25 bp, Homo sapien
gccaatgacaggaaatgcttaatat

SEQ ID NO: 5974524 - DNA, 25 bp, Homo sapien
tgcaaatataagcgttgcgttcatt

SEQ ID NO: 5974525 - DNA, 25 bp, Homo sapien
cacttcattattttgtgccaaaact

SEQ ID NO: 5974526 - DNA, 25 bp, Homo sapien
tgaatgtcaggactgcttgtatcgc

SEQ ID NO: 5974527 - DNA, 25 bp, Homo sapien
taatgagcatggtatttgtactcaa

SEQ ID NO: 5974528 - DNA, 25 bp, Homo sapien
ttttgtgccaaaacttgcgtaatac

SEQ ID NO: 5974529 - DNA, 25 bp, Homo sapien
atggtatttgtactcaacttgtgat

SEQ ID NO: 5974530 - DNA, 25 bp, Homo sapien
ttttttaggaataaccttgtcaaga

SEQ ID NO: 5974531 - DNA, 25 bp, Homo sapien
gtgaagacagcttctttttccacta

SEQ ID NO: 5974532 - DNA, 25 bp, Homo sapien
ccgatatcaatttggagcaatattg

SEQ ID NO: 5974533 - DNA, 25 bp, Homo sapien
gatatctctcactgtagtgttttta

SEQ ID NO: 5974534 - DNA, 25 bp, Homo sapien
tatttgtactcaacttgtgataatt

SEQ ID NO: 5974535 - DNA, 25 bp, Homo sapien
gcgtataacgtccagccactggact

SEQ ID NO: 5974536 - DNA, 25 bp, Homo sapien
aaggagtagtcgcgctgattcaaac

SEQ ID NO: 5974537 - DNA, 25 bp, Homo sapien
ggctaaggagtagtcgcgctgattc

SEQ ID NO: 5974538 - DNA, 25 bp, Homo sapien
ttccacgttggagtagaagatatct

SEQ ID NO: 5974539 - DNA, 25 bp, Homo sapien
cagggaaaattgtttgcttttgcat

SEQ ID NO: 5974540 - DNA, 25 bp, Homo sapien
aacgtccagccactggactacgttt

SEQ ID NO: 5974541 - DNA, 25 bp, Homo sapien
ttaatatgagccaaaacatctgcgt

SEQ ID NO: 5974542 - DNA, 25 bp, Homo sapien
ccagctgttggcagtcagagatgct

SEQ ID NO: 5974543 - DNA, 25 bp, Homo sapien
tgcttgtctttgaaacaattccacg

SEQ ID NO: 5974544 - DNA, 25 bp, Homo sapien
tggaattagacagggcttaccaggg

SEQ ID NO: 5974545 - DNA, 25 bp, Homo sapien
attagacagggcttaccagggaaaa

SEQ ID NO: 5974546 - DNA, 25 bp, Homo sapien
gaagtccaatgttgtgtgaatgtca

SEQ ID NO: 5974547 - DNA, 25 bp, Homo sapien
attttcttggagagagcttgaaatt

SEQ ID NO: 5974548 - DNA, 25 bp, Homo sapien
ataaccttgtcaagaaatctggaaa

SEQ ID NO: 5974549 - DNA, 25 bp, Homo sapien
tgcgtttgaacagggagttccgttg

SEQ ID NO: 5974550 - DNA, 25 bp, Homo sapien
ctaatgaattagccgccaatgacag

SEQ ID NO: 5974551 - DNA, 25 bp, Homo sapien
actaaacccttttgagctggtataa

SEQ ID NO: 5974552 - DNA, 25 bp, Homo sapien
accagggaaaattgtttgcttttgc

SEQ ID NO: 5974553 - DNA, 25 bp, Homo sapien
gaaaaaaatttcccgctgacattct

SEQ ID NO: 5974554 - DNA, 25 bp, Homo sapien
ctggtataatgtttaaggattttct

SEQ ID NO: 5974555 - DNA, 25 bp, Homo sapien
gttatgcacttcattattttgtgcc

SEQ ID NO: 5974556 - DNA, 25 bp, Homo sapien
agcgttgcgttcattcgagtgagta

SEQ ID NO: 5974557 - DNA, 25 bp, Homo sapien
tatgcacttcattattttgtgccaa

SEQ ID NO: 5974558 - DNA, 25 bp, Homo sapien
aaccttgtcaagaaatctggaaatc

SEQ ID NO: 5974559 - DNA, 25 bp, Homo sapien
aggaataaccttgtcaagaaatctg

SEQ ID NO: 5974560 - DNA, 25 bp, Homo sapien
aactcaataattgaatggatttgtt

SEQ ID NO: 5974561 - DNA, 25 bp, Homo sapien
gtcttttaggagtgagtgctttgac

SEQ ID NO: 5974562 - DNA, 25 bp, Homo sapien
cttttgagctggtataatgtttaag

SEQ ID NO: 5974563 - DNA, 25 bp, Homo sapien
ttttgttttgaaagacgattgaaat

SEQ ID NO: 5974564 - DNA, 25 bp, Homo sapien
tgatgagtgcatagatgcgggccat

SEQ ID NO: 5974565 - DNA, 25 bp, Homo sapien
tgtcataaatatcaatggggaaagg

SEQ ID NO: 5974566 - DNA, 25 bp, Homo sapien
ttttttccgcaatccctccaaagcc

SEQ ID NO: 5974567 - DNA, 25 bp, Homo sapien
agccgccaatgacaggaaatgctta

SEQ ID NO: 5974568 - DNA, 25 bp, Homo sapien
tcattcgagtgagtataatttaggg

SEQ ID NO: 5974569 - DNA, 25 bp, Homo sapien
aaaatggaattagacagggcttacc

SEQ ID NO: 5974570 - DNA, 25 bp, Homo sapien
atgttgtgtgaatgtcaggactgct

SEQ ID NO: 5974571 - DNA, 25 bp, Homo sapien
tagtcgcgctgattcaaactcaata

SEQ ID NO: 5974572 - DNA, 25 bp, Homo sapien
tttgaaacaattccacgttggagta

SEQ ID NO: 5974573 - DNA, 25 bp, Homo sapien
tcaggactgcttgtatcgccttttt

SEQ ID NO: 5974574 - DNA, 25 bp, Homo sapien
gttgtgtgaatgtcaggactgcttg

SEQ ID NO: 5974575 - DNA, 25 bp, Homo sapien
atagtttgccatcgtgcaaatataa

SEQ ID NO: 5974576 - DNA, 25 bp, Homo sapien
ctaatcccataggggtccgcatcgg

SEQ ID NO: 5974577 - DNA, 25 bp, Homo sapien
tggcagtcagagatgctatcaaatt

SEQ ID NO: 5974578 - DNA, 25 bp, Homo sapien
acgttggagtagaagatatctctca

SEQ ID NO: 5974579 - DNA, 25 bp, Homo sapien
gcatcggtaaatatagaacagtccg

SEQ ID NO: 5974580 - DNA, 25 bp, Homo sapien
aaaaattctggcatcaatctcgttc

SEQ ID NO: 5974581 - DNA, 25 bp, Homo sapien
gttggcagtcagagatgctatcaaa

SEQ ID NO: 5974582 - DNA, 25 bp, Homo sapien
gaaataggctgttgatgttgctcta

SEQ ID NO: 5974583 - DNA, 25 bp, Homo sapien
ccgctgacattctatgatgacgttc

SEQ ID NO: 5974584 - DNA, 25 bp, Homo sapien
aaatatagaacagtccgatatcaat

SEQ ID NO: 5974585 - DNA, 25 bp, Homo sapien
aagtttaaaaggattgcgcatcttt

SEQ ID NO: 5974586 - DNA, 25 bp, Homo sapien
tataatgtttaaggattttcttgga

SEQ ID NO: 5974587 - DNA, 25 bp, Homo sapien
agaaatctggaaatcccttacctgt

SEQ ID NO: 5974588 - DNA, 25 bp, Homo sapien
ctggaaatcccttacctgtaatgag

SEQ ID NO: 5974589 - DNA, 25 bp, Homo sapien
tagcggtaatttttccataacgact

SEQ ID NO: 5974590 - DNA, 25 bp, Homo sapien
atctggaaatcccttacctgtaatg

SEQ ID NO: 5974591 - DNA, 25 bp, Homo sapien
catctgcgtttgaacagggagttcc

SEQ ID NO: 5974592 - DNA, 25 bp, Homo sapien
taggctgttgatgttgctctaatga

SEQ ID NO: 5974593 - DNA, 25 bp, Homo sapien
tctttgaaacaattccacgttggag

SEQ ID NO: 5974594 - DNA, 25 bp, Homo sapien
aatggaattagacagggcttaccag

SEQ ID NO: 5974595 - DNA, 25 bp, Homo sapien
aatttggagcaatattgttctagtt

SEQ ID NO: 5974596 - DNA, 25 bp, Homo sapien
ccaaaacatctgcgtttgaacaggg

SEQ ID NO: 5974597 - DNA, 25 bp, Homo sapien
tgcttttgcatctttggttcatttt

SEQ ID NO: 5974598 - DNA, 25 bp, Homo sapien
gtacgaaaggtacgggagagccaga

SEQ ID NO: 5974599 - DNA, 25 bp, Homo sapien
aaggcataaaggaagatgccttgtc

SEQ ID NO: 5974600 - DNA, 25 bp, Homo sapien
gaaggagctcttgtccacggtgatg

SEQ ID NO: 5974601 - DNA, 25 bp, Homo sapien
aagaggcagtggatcgtaatgagaa

SEQ ID NO: 5974602 - DNA, 25 bp, Homo sapien
cttgacgagctgaagaagatcaagg

SEQ ID NO: 5974603 - DNA, 25 bp, Homo sapien
catcatggtcagagaacagaaggcc

SEQ ID NO: 5974604 - DNA, 25 bp, Homo sapien
attggcagctgccatcacagctagc

SEQ ID NO: 5974605 - DNA, 25 bp, Homo sapien
gctttcggacaagctagaccaacag

SEQ ID NO: 5974606 - DNA, 25 bp, Homo sapien
gtaaattctggagctcgaaaaagga

SEQ ID NO: 5974607 - DNA, 25 bp, Homo sapien
gacaagcaggctttaaaagatgagg

SEQ ID NO: 5974608 - DNA, 25 bp, Homo sapien
aaagcaaggcataaaggaagatgcc

SEQ ID NO: 5974609 - DNA, 25 bp, Homo sapien
agtgtccaaggctggggtgatacgg

SEQ ID NO: 5974610 - DNA, 25 bp, Homo sapien
agcaaggcataaaggaagatgcctt

SEQ ID NO: 5974611 - DNA, 25 bp, Homo sapien
ttgctgaacgggtagccagaggttt

SEQ ID NO: 5974612 - DNA, 25 bp, Homo sapien
gcccaaaagaagtacgatgaagcgt

SEQ ID NO: 5974613 - DNA, 25 bp, Homo sapien
cgcaagcagctaggccaaaaagcca

SEQ ID NO: 5974614 - DNA, 25 bp, Homo sapien
tcttgtccacggtgatgagagagaa

SEQ ID NO: 5974615 - DNA, 25 bp, Homo sapien
aacgtctccgcttactacaacggcc

SEQ ID NO: 5974616 - DNA, 25 bp, Homo sapien
gtgatggtaaattctggagctcgaa

SEQ ID NO: 5974617 - DNA, 25 bp, Homo sapien
gatactgctaagaagcgtttcgaag

SEQ ID NO: 5974618 - DNA, 25 bp, Homo sapien
aggcgaaggaggacttgaaacagta

SEQ ID NO: 5974619 - DNA, 25 bp, Homo sapien
gaataattgtcggcagtgcagcatt

SEQ ID NO: 5974620 - DNA, 25 bp, Homo sapien
actttaatgagctttcggacaagct

SEQ ID NO: 5974621 - DNA, 25 bp, Homo sapien
ccccacagttgggaaagctacataa

SEQ ID NO: 5974622 - DNA, 25 bp, Homo sapien
cgttgaaaaagtacgatgaagccaa

SEQ ID NO: 5974623 - DNA, 25 bp, Homo sapien
cgtctccgcttactacaacggccag

SEQ ID NO: 5974624 - DNA, 25 bp, Homo sapien
ataaagcaaggcataaaggaagatg

SEQ ID NO: 5974625 - DNA, 25 bp, Homo sapien
agtacgatgaagcgttgaaaaagta

SEQ ID NO: 5974626 - DNA, 25 bp, Homo sapien
gtagccagaggtttagaaggatggg

SEQ ID NO: 5974627 - DNA, 25 bp, Homo sapien
agaggatgctcagacacgcaagcag

SEQ ID NO: 5974628 - DNA, 25 bp, Homo sapien
caagcagctaggccaaaaagccaag

SEQ ID NO: 5974629 - DNA, 25 bp, Homo sapien
agccatcggggaatttgatactgct

SEQ ID NO: 5974630 - DNA, 25 bp, Homo sapien
atgagctttcggacaagctagacca

SEQ ID NO: 5974631 - DNA, 25 bp, Homo sapien
aagaatggaatgataagggtgatgg

SEQ ID NO: 5974632 - DNA, 25 bp, Homo sapien
tacaacaaaggggagcaaagcgagc

SEQ ID NO: 5974633 - DNA, 25 bp, Homo sapien
ccaaggtcgacaatgacaagcaggc

SEQ ID NO: 5974634 - DNA, 25 bp, Homo sapien
aggaagccaagagaaatgcttcttc

SEQ ID NO: 5974635 - DNA, 25 bp, Homo sapien
gtttcgaagaggcagtggatcgtaa

SEQ ID NO: 5974636 - DNA, 25 bp, Homo sapien
cctcgcaaagcatcttcaattgggg

SEQ ID NO: 5974637 - DNA, 25 bp, Homo sapien
tgtccaaggctggggtgatacggca

SEQ ID NO: 5974638 - DNA, 25 bp, Homo sapien
agttcagcacccccacagttgggaa

SEQ ID NO: 5974639 - DNA, 25 bp, Homo sapien
gatatcaccggaagaggatgctcag

SEQ ID NO: 5974640 - DNA, 25 bp, Homo sapien
cttactacaacggccaggagtacgg

SEQ ID NO: 5974641 - DNA, 25 bp, Homo sapien
atgagaaggagctcttgtccacggt

SEQ ID NO: 5974642 - DNA, 25 bp, Homo sapien
acgatttaagatggaattatgagaa

SEQ ID NO: 5974643 - DNA, 25 bp, Homo sapien
gggtgaaacagccgctcaactttcc

SEQ ID NO: 5974644 - DNA, 25 bp, Homo sapien
acgtgtccgatgccatggactcgtt

SEQ ID NO: 5974645 - DNA, 25 bp, Homo sapien
agaagcgtttcgaagaggcagtgga

SEQ ID NO: 5974646 - DNA, 25 bp, Homo sapien
gatgctcagacacgcaagcagctag

SEQ ID NO: 5974647 - DNA, 25 bp, Homo sapien
tactgctaagaagcgtttcgaagag

SEQ ID NO: 5974648 - DNA, 25 bp, Homo sapien
actcgttatctaaggcgaaggagga

SEQ ID NO: 5974649 - DNA, 25 bp, Homo sapien
gccgctctggacagagcatccattg

SEQ ID NO: 5974650 - DNA, 25 bp, Homo sapien
ggacttgaaacagtacggcagccac

SEQ ID NO: 5974651 - DNA, 25 bp, Homo sapien
gaaagctacataacataaagcaagg

SEQ ID NO: 5974652 - DNA, 25 bp, Homo sapien
catcaagaataattgtcggcagtgc

SEQ ID NO: 5974653 - DNA, 25 bp, Homo sapien
tggtctggatggacttccaaggtcg

SEQ ID NO: 5974654 - DNA, 25 bp, Homo sapien
agagccagagactttaatgagcttt

SEQ ID NO: 5974655 - DNA, 25 bp, Homo sapien
acgggtagccagaggtttagaagga

SEQ ID NO: 5974656 - DNA, 25 bp, Homo sapien
atggacttccaaggtcgacaatgac

SEQ ID NO: 5974657 - DNA, 25 bp, Homo sapien
caaagaatggaatgataagggtgat

SEQ ID NO: 5974658 - DNA, 25 bp, Homo sapien
tcgacaatgacaagcaggctttaaa

SEQ ID NO: 5974659 - DNA, 25 bp, Homo sapien
gtggatcgtaatgagaaggagctct

SEQ ID NO: 5974660 - DNA, 25 bp, Homo sapien
atcggggaatttgatactgctaaga

SEQ ID NO: 5974661 - DNA, 25 bp, Homo sapien
attcttcctcgcaaagcatcttcaa

SEQ ID NO: 5974662 - DNA, 25 bp, Homo sapien
gtcttgacgagctgaagaagatcaa

SEQ ID NO: 5974663 - DNA, 25 bp, Homo sapien
tacggcacaggagtttggtagagaa

SEQ ID NO: 5974664 - DNA, 25 bp, Homo sapien
cacgcaagcagctaggccaaaaagc

SEQ ID NO: 5974665 - DNA, 25 bp, Homo sapien
taacataaagcaaggcataaaggaa

SEQ ID NO: 5974666 - DNA, 25 bp, Homo sapien
ctctggacagagcatccattgagta

SEQ ID NO: 5974667 - DNA, 25 bp, Homo sapien
ggctccaaaggtaactaagcgtgtg

SEQ ID NO: 5974668 - DNA, 25 bp, Homo sapien
cataacataaagcaaggcataaagg

SEQ ID NO: 5974669 - DNA, 25 bp, Homo sapien
cttcttcagagccaagcgaggcgca

SEQ ID NO: 5974670 - DNA, 25 bp, Homo sapien
tacggcagttcagcacccccacagt

SEQ ID NO: 5974671 - DNA, 25 bp, Homo sapien
cgaggcgcaaaaacgtcttgacgag

SEQ ID NO: 5974672 - DNA, 25 bp, Homo sapien
aaaaggctagggaagaggctccaaa

SEQ ID NO: 5974673 - DNA, 25 bp, Homo sapien
ggccaaaaagccaaggattcttcct

SEQ ID NO: 5974674 - DNA, 25 bp, Homo sapien
agccaaggattcttcctcgcaaagc

SEQ ID NO: 5974675 - DNA, 25 bp, Homo sapien
aagagaaatgcttcttcagagccaa

SEQ ID NO: 5974676 - DNA, 25 bp, Homo sapien
cctgttgaagaataacacgggtgac

SEQ ID NO: 5974677 - DNA, 25 bp, Homo sapien
aaaagtacgatgaagccaagaacaa

SEQ ID NO: 5974678 - DNA, 25 bp, Homo sapien
gaaaggaacagtaatcctttgaaac

SEQ ID NO: 5974679 - DNA, 25 bp, Homo sapien
ccacggtgatgagagagaagaaggc

SEQ ID NO: 5974680 - DNA, 25 bp, Homo sapien
aagatgccttgtcgttaaaagacgc

SEQ ID NO: 5974681 - DNA, 25 bp, Homo sapien
cagattgctgaacgggtagccagag

SEQ ID NO: 5974682 - DNA, 25 bp, Homo sapien
tggcagctgccatcacagctagcat

SEQ ID NO: 5974683 - DNA, 25 bp, Homo sapien
ccatcggggaatttgatactgctaa

SEQ ID NO: 5974684 - DNA, 25 bp, Homo sapien
aaacgtcttgacgagctgaagaaga

SEQ ID NO: 5974685 - DNA, 25 bp, Homo sapien
aggaaaggaacagtaatcctttgaa

SEQ ID NO: 5974686 - DNA, 25 bp, Homo sapien
agctagcatcatggtcagagaacag

SEQ ID NO: 5974687 - DNA, 25 bp, Homo sapien
tggggtgaaacagccgctcaacttt

SEQ ID NO: 5974688 - DNA, 25 bp, Homo sapien
gcacaggagtttggtagagaagagt

SEQ ID NO: 5974689 - DNA, 25 bp, Homo sapien
agcaaagcgagcaacagattgctga

SEQ ID NO: 5974690 - DNA, 25 bp, Homo sapien
agcaggctttaaaagatgaggccca

SEQ ID NO: 5974691 - DNA, 25 bp, Homo sapien
accggaagaggatgctcagacacgc

SEQ ID NO: 5974692 - DNA, 25 bp, Homo sapien
acagttgggaaagctacataacata

SEQ ID NO: 5974693 - DNA, 25 bp, Homo sapien
tccgcttactacaacggccaggagt

SEQ ID NO: 5974694 - DNA, 25 bp, Homo sapien
gcgtgtgatatcaccggaagaggat

SEQ ID NO: 5974695 - DNA, 25 bp, Homo sapien
cagtggatcgtaatgagaaggagct

SEQ ID NO: 5974696 - DNA, 25 bp, Homo sapien
cgctaatactgaagaagccgctgca

SEQ ID NO: 5974697 - DNA, 25 bp, Homo sapien
tcacagctagcatcatggtcagaga

SEQ ID NO: 5974698 - DNA, 25 bp, Homo sapien
ggtggtctggatggacttccaaggt

SEQ ID NO: 5974699 - DNA, 25 bp, Homo sapien
aagaacgtgtccgatgccatggact

SEQ ID NO: 5974700 - DNA, 25 bp, Homo sapien
caattgggggtttagtgaggctgaa

SEQ ID NO: 5974701 - DNA, 25 bp, Homo sapien
tagaccaacaggaaaggaacagtaa

SEQ ID NO: 5974702 - DNA, 25 bp, Homo sapien
aagcgagcaacagattgctgaacgg

SEQ ID NO: 5974703 - DNA, 25 bp, Homo sapien
ggctagggaagaggctccaaaggta

SEQ ID NO: 5974704 - DNA, 25 bp, Homo sapien
gaccaacaggaaaggaacagtaatc

SEQ ID NO: 5974705 - DNA, 25 bp, Homo sapien
gtttagtgaggctgaaagaaggaaa

SEQ ID NO: 5974706 - DNA, 25 bp, Homo sapien
tatctaaggcgaaggaggacttgaa

SEQ ID NO: 5974707 - DNA, 25 bp, Homo sapien
aaggaacagtaatcctttgaaacgc

SEQ ID NO: 5974708 - DNA, 25 bp, Homo sapien
aaggaagatgccttgtcgttaaaag

SEQ ID NO: 5974709 - DNA, 25 bp, Homo sapien
catccattgagtacgaaaggtacgg

SEQ ID NO: 5974710 - DNA, 25 bp, Homo sapien
aaggtcgacaatgacaagcaggctt

SEQ ID NO: 5974711 - DNA, 25 bp, Homo sapien
gaagcgttgaaaaagtacgatgaag

SEQ ID NO: 5974712 - DNA, 25 bp, Homo sapien
caaaggggagcaaagcgagcaacag

SEQ ID NO: 5974713 - DNA, 25 bp, Homo sapien
aacggccaggagtacggcagttcag

SEQ ID NO: 5974714 - DNA, 25 bp, Homo sapien
ccttgtcgttaaaagacgcgcttct

SEQ ID NO: 5974715 - DNA, 25 bp, Homo sapien
cgatgaagcgttgaaaaagtacgat

SEQ ID NO: 5974716 - DNA, 25 bp, Homo sapien
cggcacaggagtttggtagagaaga

SEQ ID NO: 5974717 - DNA, 25 bp, Homo sapien
tcaaaaggctagggaagaggctcca

SEQ ID NO: 5974718 - DNA, 25 bp, Homo sapien
actttccaaggacgaaatggacgat

SEQ ID NO: 5974719 - DNA, 25 bp, Homo sapien
aaattctggagctcgaaaaaggact

SEQ ID NO: 5974720 - DNA, 25 bp, Homo sapien
cagctaggccaaaaagccaaggatt

SEQ ID NO: 5974721 - DNA, 25 bp, Homo sapien
cggccaggagtacggcagttcagca

SEQ ID NO: 5974722 - DNA, 25 bp, Homo sapien
gagaaggagctcttgtccacggtga

SEQ ID NO: 5974723 - DNA, 25 bp, Homo sapien
aggagctcttgtccacggtgatgag

SEQ ID NO: 5974724 - DNA, 25 bp, Homo sapien
atgtcatcaagaataattgtcggca

SEQ ID NO: 5974725 - DNA, 25 bp, Homo sapien
acgtcttgacgagctgaagaagatc

SEQ ID NO: 5974726 - DNA, 25 bp, Homo sapien
aacagattgctgaacgggtagccag

SEQ ID NO: 5974727 - DNA, 25 bp, Homo sapien
atggtcagagaacagaaggccaagg

SEQ ID NO: 5974728 - DNA, 25 bp, Homo sapien
agaagaaggccgctctggacagagc

SEQ ID NO: 5974729 - DNA, 25 bp, Homo sapien
ctagcatcatggtcagagaacagaa

SEQ ID NO: 5974730 - DNA, 25 bp, Homo sapien
acaacggccaggagtacggcagttc

SEQ ID NO: 5974731 - DNA, 25 bp, Homo sapien
tgaaagaaggaaagccatagccatc

SEQ ID NO: 5974732 - DNA, 25 bp, Homo sapien
aagagagggcaacgtctccgcttac

SEQ ID NO: 5974733 - DNA, 25 bp, Homo sapien
gctggggtgatacggcacaggagtt

SEQ ID NO: 5974734 - DNA, 25 bp, Homo sapien
aattgtcggcagtgcagcattggca

SEQ ID NO: 5974735 - DNA, 25 bp, Homo sapien
tgctcagacacgcaagcagctaggc

SEQ ID NO: 5974736 - DNA, 25 bp, Homo sapien
tacataacataaagcaaggcataaa

SEQ ID NO: 5974737 - DNA, 25 bp, Homo sapien
taacacgggtgacgctaatactgaa

SEQ ID NO: 5974738 - DNA, 25 bp, Homo sapien
ggacaagctagaccaacaggaaagg

SEQ ID NO: 5974739 - DNA, 25 bp, Homo sapien
aggagtttggtagagaagagttgga

SEQ ID NO: 5974740 - DNA, 25 bp, Homo sapien
aagacgcgcttctgggcgtatctca

SEQ ID NO: 5974741 - DNA, 25 bp, Homo sapien
aggctggggtgatacggcacaggag

SEQ ID NO: 5974742 - DNA, 25 bp, Homo sapien
aggtaactaagcgtgtgatatcacc

SEQ ID NO: 5974743 - DNA, 25 bp, Homo sapien
aaagccaaggattcttcctcgcaaa

SEQ ID NO: 5974744 - DNA, 25 bp, Homo sapien
ggtttggttacaacaaaggggagca

SEQ ID NO: 5974745 - DNA, 25 bp, Homo sapien
caaagcgagcaacagattgctgaac

SEQ ID NO: 5974746 - DNA, 25 bp, Homo sapien
acacgggtgacgctaatactgaaga

SEQ ID NO: 5974747 - DNA, 25 bp, Homo sapien
aacagccgctcaactttccaaggac

SEQ ID NO: 5974748 - DNA, 25 bp, Homo sapien
attgggggtttagtgaggctgaaag

SEQ ID NO: 5974749 - DNA, 25 bp, Homo sapien
cgctcaactttccaaggacgaaatg

SEQ ID NO: 5974750 - DNA, 25 bp, Homo sapien
aaaagatgaggcccaaaagaagtac

SEQ ID NO: 5974751 - DNA, 25 bp, Homo sapien
gcagctgccatcacagctagcatca

SEQ ID NO: 5974752 - DNA, 25 bp, Homo sapien
cataaaggaagatgccttgtcgtta

SEQ ID NO: 5974753 - DNA, 25 bp, Homo sapien
acaggagtttggtagagaagagttg

SEQ ID NO: 5974754 - DNA, 25 bp, Homo sapien
taatgagctttcggacaagctagac

SEQ ID NO: 5974755 - DNA, 25 bp, Homo sapien
aatcctttgaaacgcctgttgaaga

SEQ ID NO: 5974756 - DNA, 25 bp, Homo sapien
ggacttccaaggtcgacaatgacaa

SEQ ID NO: 5974757 - DNA, 25 bp, Homo sapien
aggacgaaatggacgatttaagatg

SEQ ID NO: 5974758 - DNA, 25 bp, Homo sapien
gaagatcaaggaaaagggctggttt

SEQ ID NO: 5974759 - DNA, 25 bp, Homo sapien
gatgccttgtcgttaaaagacgcgc

SEQ ID NO: 5974760 - DNA, 25 bp, Homo sapien
caagggtcagagaagagagggcaac

SEQ ID NO: 5974761 - DNA, 25 bp, Homo sapien
tgccatggactcgttatctaaggcg

SEQ ID NO: 5974762 - DNA, 25 bp, Homo sapien
tgaggctgaaagaaggaaagccata

SEQ ID NO: 5974763 - DNA, 25 bp, Homo sapien
agcatcatggtcagagaacagaagg

SEQ ID NO: 5974764 - DNA, 25 bp, Homo sapien
gattgctgaacgggtagccagaggt

SEQ ID NO: 5974765 - DNA, 25 bp, Homo sapien
gatgaggcccaaaagaagtacgatg

SEQ ID NO: 5974766 - DNA, 25 bp, Homo sapien
tcttcaattgggggtttagtgaggc

SEQ ID NO: 5974767 - DNA, 25 bp, Homo sapien
gttacaacaaaggggagcaaagcga

SEQ ID NO: 5974768 - DNA, 25 bp, Homo sapien
aacagaaggccaagggtcagagaag

SEQ ID NO: 5974769 - DNA, 25 bp, Homo sapien
gcgaaggaggacttgaaacagtacg

SEQ ID NO: 5974770 - DNA, 25 bp, Homo sapien
cgctgcaagaagtgtccaaggctgg

SEQ ID NO: 5974771 - DNA, 25 bp, Homo sapien
tagagaagagttggaggaagccaag

SEQ ID NO: 5974772 - DNA, 25 bp, Homo sapien
tcagagaacagaaggccaagggtca

SEQ ID NO: 5974773 - DNA, 25 bp, Homo sapien
ggaggaagccaagagaaatgcttct

SEQ ID NO: 5974774 - DNA, 25 bp, Homo sapien
aagggtgatggtaaattctggagct

SEQ ID NO: 5974775 - DNA, 25 bp, Homo sapien
aaagcatcttcaattgggggtttag

SEQ ID NO: 5974776 - DNA, 25 bp, Homo sapien
gtgatatcaccggaagaggatgctc

SEQ ID NO: 5974777 - DNA, 25 bp, Homo sapien
acggcagccactggtggtctggatg

SEQ ID NO: 5974778 - DNA, 25 bp, Homo sapien
acagctagcatcatggtcagagaac

SEQ ID NO: 5974779 - DNA, 25 bp, Homo sapien
tgaggcccaaaagaagtacgatgaa

SEQ ID NO: 5974780 - DNA, 25 bp, Homo sapien
gggtagccagaggtttagaaggatg

SEQ ID NO: 5974781 - DNA, 25 bp, Homo sapien
tcaaagaaacaactggataagaacg

SEQ ID NO: 5974782 - DNA, 25 bp, Homo sapien
ggaatgataagggtgatggtaaatt

SEQ ID NO: 5974783 - DNA, 25 bp, Homo sapien
ccaaaagaagtacgatgaagcgttg

SEQ ID NO: 5974784 - DNA, 25 bp, Homo sapien
ggctttaaaagatgaggcccaaaag

SEQ ID NO: 5974785 - DNA, 25 bp, Homo sapien
tgcagcattggcagctgccatcaca

SEQ ID NO: 5974786 - DNA, 25 bp, Homo sapien
agagaagagagggcaacgtctccgc

SEQ ID NO: 5974787 - DNA, 25 bp, Homo sapien
atggactcgttatctaaggcgaagg

SEQ ID NO: 5974788 - DNA, 25 bp, Homo sapien
gcgagcaacagattgctgaacgggt

SEQ ID NO: 5974789 - DNA, 25 bp, Homo sapien
aagaaggccgctctggacagagcat

SEQ ID NO: 5974790 - DNA, 25 bp, Homo sapien
cattgagtacgaaaggtacgggaga

SEQ ID NO: 5974791 - DNA, 25 bp, Homo sapien
cggggaatttgatactgctaagaag

SEQ ID NO: 5974792 - DNA, 25 bp, Homo sapien
ctagggaagaggctccaaaggtaac

SEQ ID NO: 5974793 - DNA, 25 bp, Homo sapien
ttgggaaagctacataacataaagc

SEQ ID NO: 5974794 - DNA, 25 bp, Homo sapien
tactacaacggccaggagtacggca

SEQ ID NO: 5974795 - DNA, 25 bp, Homo sapien
ctgcaagaagtgtccaaggctgggg

SEQ ID NO: 5974796 - DNA, 25 bp, Homo sapien
aaagccatagccatcggggaatttg

SEQ ID NO: 5974797 - DNA, 25 bp, Homo sapien
catcacagctagcatcatggtcaga

SEQ ID NO: 5974798 - DNA, 25 bp, Homo sapien
tcgttatctaaggcgaaggaggact

SEQ ID NO: 5974799 - DNA, 25 bp, Homo sapien
agcgaggcgcaaaaacgtcttgacg

SEQ ID NO: 5974800 - DNA, 25 bp, Homo sapien
ggatggacttccaaggtcgacaatg

SEQ ID NO: 5974801 - DNA, 25 bp, Homo sapien
gtgtccgatgccatggactcgttat

SEQ ID NO: 5974802 - DNA, 25 bp, Homo sapien
gtacgatgaagccaagaacaaattc

SEQ ID NO: 5974803 - DNA, 25 bp, Homo sapien
gctgaacgggtagccagaggtttag

SEQ ID NO: 5974804 - DNA, 25 bp, Homo sapien
acttgaaacagtacggcagccactg

SEQ ID NO: 5974805 - DNA, 25 bp, Homo sapien
atgagaattcaaagaaacaactgga

SEQ ID NO: 5974806 - DNA, 25 bp, Homo sapien
aaggaaagccatagccatcggggaa

SEQ ID NO: 5974807 - DNA, 25 bp, Homo sapien
gaaaaagtacgatgaagccaagaac

SEQ ID NO: 5974808 - DNA, 25 bp, Homo sapien
gaaggccaagggtcagagaagagag

SEQ ID NO: 5974809 - DNA, 25 bp, Homo sapien
ggtcagagaacagaaggccaagggt

SEQ ID NO: 5974810 - DNA, 25 bp, Homo sapien
gccaagggtcagagaagagagggca

SEQ ID NO: 5974811 - DNA, 25 bp, Homo sapien
gctggtttggttacaacaaagggga

SEQ ID NO: 5974812 - DNA, 25 bp, Homo sapien
caatgacaagcaggctttaaaagat

SEQ ID NO: 5974813 - DNA, 25 bp, Homo sapien
gcaagaagtgtccaaggctggggtg

SEQ ID NO: 5974814 - DNA, 25 bp, Homo sapien
aatgataagggtgatggtaaattct

SEQ ID NO: 5974815 - DNA, 25 bp, Homo sapien
taagaagcgtttcgaagaggcagtg

SEQ ID NO: 5974816 - DNA, 25 bp, Homo sapien
ggactcgttatctaaggcgaaggag

SEQ ID NO: 5974817 - DNA, 25 bp, Homo sapien
ttcgaagaggcagtggatcgtaatg

SEQ ID NO: 5974818 - DNA, 25 bp, Homo sapien
agaacagaaggccaagggtcagaga

SEQ ID NO: 5974819 - DNA, 25 bp, Homo sapien
gtctggatggacttccaaggtcgac

SEQ ID NO: 5974820 - DNA, 25 bp, Homo sapien
cagccgctcaactttccaaggacga

SEQ ID NO: 5974821 - DNA, 25 bp, Homo sapien
gatgagagagaagaaggccgctctg

SEQ ID NO: 5974822 - DNA, 25 bp, Homo sapien
ggatcgtaatgagaaggagctcttg

SEQ ID NO: 5974823 - DNA, 25 bp, Homo sapien
aaaaacgtcttgacgagctgaagaa

SEQ ID NO: 5974824 - DNA, 25 bp, Homo sapien
catcttcaattgggggtttagtgag

SEQ ID NO: 5974825 - DNA, 25 bp, Homo sapien
agtgaggctgaaagaaggaaagcca

SEQ ID NO: 5974826 - DNA, 25 bp, Homo sapien
ttgatactgctaagaagcgtttcga

SEQ ID NO: 5974827 - DNA, 25 bp, Homo sapien
gagaaatgcttcttcagagccaagc

SEQ ID NO: 5974828 - DNA, 25 bp, Homo sapien
aagaataattgtcggcagtgcagca

SEQ ID NO: 5974829 - DNA, 25 bp, Homo sapien
aagccgctgcaagaagtgtccaagg

SEQ ID NO: 5974830 - DNA, 25 bp, Homo sapien
tatcaccggaagaggatgctcagac

SEQ ID NO: 5974831 - DNA, 25 bp, Homo sapien
ttgaaacagtacggcagccactggt

SEQ ID NO: 5974832 - DNA, 25 bp, Homo sapien
caaggacgaaatggacgatttaaga

SEQ ID NO: 5974833 - DNA, 25 bp, Homo sapien
tcctttgaaacgcctgttgaagaat

SEQ ID NO: 5974834 - DNA, 25 bp, Homo sapien
cagcattggcagctgccatcacagc

SEQ ID NO: 5974835 - DNA, 25 bp, Homo sapien
gccgctcaactttccaaggacgaaa

SEQ ID NO: 5974836 - DNA, 25 bp, Homo sapien
ggagagccagagactttaatgagct

SEQ ID NO: 5974837 - DNA, 25 bp, Homo sapien
gggtgacgctaatactgaagaagcc

SEQ ID NO: 5974838 - DNA, 25 bp, Homo sapien
gcaaaaacgtcttgacgagctgaag

SEQ ID NO: 5974839 - DNA, 25 bp, Homo sapien
ggacagagcatccattgagtacgaa

SEQ ID NO: 5974840 - DNA, 25 bp, Homo sapien
ggtacgggagagccagagactttaa

SEQ ID NO: 5974841 - DNA, 25 bp, Homo sapien
ctggacagagcatccattgagtacg

SEQ ID NO: 5974842 - DNA, 25 bp, Homo sapien
aaggggagcaaagcgagcaacagat

SEQ ID NO: 5974843 - DNA, 25 bp, Homo sapien
aagtacgatgaagccaagaacaaat

SEQ ID NO: 5974844 - DNA, 25 bp, Homo sapien
gagcaacagattgctgaacgggtag

SEQ ID NO: 5974845 - DNA, 25 bp, Homo sapien
gctacataacataaagcaaggcata

SEQ ID NO: 5974846 - DNA, 25 bp, Homo sapien
ttaaaagatgaggcccaaaagaagt

SEQ ID NO: 5974847 - DNA, 25 bp, Homo sapien
cagtacggcagccactggtggtctg

SEQ ID NO: 5974848 - DNA, 25 bp, Homo sapien
ggaagaggctccaaaggtaactaag

SEQ ID NO: 5974849 - DNA, 25 bp, Homo sapien
gaagtacgatgaagcgttgaaaaag

SEQ ID NO: 5974850 - DNA, 25 bp, Homo sapien
aaggctagggaagaggctccaaagg

SEQ ID NO: 5974851 - DNA, 25 bp, Homo sapien
gtttggtagagaagagttggaggaa

SEQ ID NO: 5974852 - DNA, 25 bp, Homo sapien
caagcgaggcgcaaaaacgtcttga

SEQ ID NO: 5974853 - DNA, 25 bp, Homo sapien
gagctgaagaagatcaaggaaaagg

SEQ ID NO: 5974854 - DNA, 25 bp, Homo sapien
acccccacagttgggaaagctacat

SEQ ID NO: 5974855 - DNA, 25 bp, Homo sapien
gagtttggtagagaagagttggagg

SEQ ID NO: 5974856 - DNA, 25 bp, Homo sapien
gtacggcagccactggtggtctgga

SEQ ID NO: 5974857 - DNA, 25 bp, Homo sapien
gaacgtgtccgatgccatggactcg

SEQ ID NO: 5974858 - DNA, 25 bp, Homo sapien
ggcagtggatcgtaatgagaaggag

SEQ ID NO: 5974859 - DNA, 25 bp, Homo sapien
ctggataagaacgtgtccgatgcca

SEQ ID NO: 5974860 - DNA, 25 bp, Homo sapien
gcattggcagctgccatcacagcta

SEQ ID NO: 5974861 - DNA, 25 bp, Homo sapien
tgaagaagatcaaggaaaagggctg

SEQ ID NO: 5974862 - DNA, 25 bp, Homo sapien
gtccgatgccatggactcgttatct

SEQ ID NO: 5974863 - DNA, 25 bp, Homo sapien
gccaagcgaggcgcaaaaacgtctt

SEQ ID NO: 5974864 - DNA, 25 bp, Homo sapien
caagcaggctttaaaagatgaggcc

SEQ ID NO: 5974865 - DNA, 25 bp, Homo sapien
gccactggtggtctggatggacttc

SEQ ID NO: 5974866 - DNA, 25 bp, Homo sapien
ggtagagaagagttggaggaagcca

SEQ ID NO: 5974867 - DNA, 25 bp, Homo sapien
aggcccaaaagaagtacgatgaagc

SEQ ID NO: 5974868 - DNA, 25 bp, Homo sapien
gatggggtgaaacagccgctcaact

SEQ ID NO: 5974869 - DNA, 25 bp, Homo sapien
gaatggaatgataagggtgatggta

SEQ ID NO: 5974870 - DNA, 25 bp, Homo sapien
ggataagaacgtgtccgatgccatg

SEQ ID NO: 5974871 - DNA, 25 bp, Homo sapien
agggaagaggctccaaaggtaacta

SEQ ID NO: 5974872 - DNA, 25 bp, Homo sapien
cactggtggtctggatggacttcca

SEQ ID NO: 5974873 - DNA, 25 bp, Homo sapien
agactttaatgagctttcggacaag

SEQ ID NO: 5974874 - DNA, 25 bp, Homo sapien
tcttcagagccaagcgaggcgcaaa

SEQ ID NO: 5974875 - DNA, 25 bp, Homo sapien
gccaggagtacggcagttcagcacc

SEQ ID NO: 5974876 - DNA, 25 bp, Homo sapien
ccaagagaaatgcttcttcagagcc

SEQ ID NO: 5974877 - DNA, 25 bp, Homo sapien
ctacaacggccaggagtacggcagt

SEQ ID NO: 5974878 - DNA, 25 bp, Homo sapien
gaagaggatgctcagacacgcaagc

SEQ ID NO: 5974879 - DNA, 25 bp, Homo sapien
acgggtgacgctaatactgaagaag

SEQ ID NO: 5974880 - DNA, 25 bp, Homo sapien
cggcagttcagcacccccacagttg

SEQ ID NO: 5974881 - DNA, 25 bp, Homo sapien
gggtgatacggcacaggagtttggt

SEQ ID NO: 5974882 - DNA, 25 bp, Homo sapien
acgatgaagccaagaacaaattcaa

SEQ ID NO: 5974883 - DNA, 25 bp, Homo sapien
gaagagttggaggaagccaagagaa

SEQ ID NO: 5974884 - DNA, 25 bp, Homo sapien
taggccaaaaagccaaggattcttc

SEQ ID NO: 5974885 - DNA, 25 bp, Homo sapien
atagccatcggggaatttgatactg

SEQ ID NO: 5974886 - DNA, 25 bp, Homo sapien
gacgaaatggacgatttaagatgga

SEQ ID NO: 5974887 - DNA, 25 bp, Homo sapien
ttcctcgcaaagcatcttcaattgg

SEQ ID NO: 5974888 - DNA, 25 bp, Homo sapien
agaaggaaagccatagccatcgggg

SEQ ID NO: 5974889 - DNA, 25 bp, Homo sapien
agcgttgaaaaagtacgatgaagcc

SEQ ID NO: 5974890 - DNA, 25 bp, Homo sapien
aagaagtacgatgaagcgttgaaaa

SEQ ID NO: 5974891 - DNA, 25 bp, Homo sapien
agaagagagggcaacgtctccgctt

SEQ ID NO: 5974892 - DNA, 25 bp, Homo sapien
tttccaaggacgaaatggacgattt

SEQ ID NO: 5974893 - DNA, 25 bp, Homo sapien
ctcagacacgcaagcagctaggcca

SEQ ID NO: 5974894 - DNA, 25 bp, Homo sapien
atgaagcgttgaaaaagtacgatga

SEQ ID NO: 5974895 - DNA, 25 bp, Homo sapien
cagagccaagcgaggcgcaaaaacg

SEQ ID NO: 5974896 - DNA, 25 bp, Homo sapien
ttgaagaataacacgggtgacgcta

SEQ ID NO: 5974897 - DNA, 25 bp, Homo sapien
ggaacagtaatcctttgaaacgcct

SEQ ID NO: 5974898 - DNA, 25 bp, Homo sapien
attcaaagaaacaactggataagaa

SEQ ID NO: 5974899 - DNA, 25 bp, Homo sapien
ttgaaacgcctgttgaagaataaca

SEQ ID NO: 5974900 - DNA, 25 bp, Homo sapien
agatcaaggaaaagggctggtttgg

SEQ ID NO: 5974901 - DNA, 25 bp, Homo sapien
gtcggcagtgcagcattggcagctg

SEQ ID NO: 5974902 - DNA, 25 bp, Homo sapien
cagtaatcctttgaaacgcctgttg

SEQ ID NO: 5974903 - DNA, 25 bp, Homo sapien
aaacaactggataagaacgtgtccg

SEQ ID NO: 5974904 - DNA, 25 bp, Homo sapien
tctgggcgtatctcaaaaggctagg

SEQ ID NO: 5974905 - DNA, 25 bp, Homo sapien
cgcttactacaacggccaggagtac

SEQ ID NO: 5974906 - DNA, 25 bp, Homo sapien
agggtcagagaagagagggcaacgt

SEQ ID NO: 5974907 - DNA, 25 bp, Homo sapien
ataagggtgatggtaaattctggag

SEQ ID NO: 5974908 - DNA, 25 bp, Homo sapien
aaaaagccaaggattcttcctcgca

SEQ ID NO: 5974909 - DNA, 25 bp, Homo sapien
gaatttgatactgctaagaagcgtt

SEQ ID NO: 5974910 - DNA, 25 bp, Homo sapien
aaggtacgggagagccagagacttt

SEQ ID NO: 5974911 - DNA, 25 bp, Homo sapien
ccagagactttaatgagctttcgga

SEQ ID NO: 5974912 - DNA, 25 bp, Homo sapien
ccaacaggaaaggaacagtaatcct

SEQ ID NO: 5974913 - DNA, 25 bp, Homo sapien
ggcgtatctcaaaaggctagggaag

SEQ ID NO: 5974914 - DNA, 25 bp, Homo sapien
acttccaaggtcgacaatgacaagc

SEQ ID NO: 5974915 - DNA, 25 bp, Homo sapien
cgttaaaagacgcgcttctgggcgt

SEQ ID NO: 5974916 - DNA, 25 bp, Homo sapien
tgagagagaagaaggccgctctgga

SEQ ID NO: 5974917 - DNA, 25 bp, Homo sapien
agaaacaactggataagaacgtgtc

SEQ ID NO: 5974918 - DNA, 25 bp, Homo sapien
ggaaagccatagccatcggggaatt

SEQ ID NO: 5974919 - DNA, 25 bp, Homo sapien
gccaagaacaaattcaaagaatgga

SEQ ID NO: 5974920 - DNA, 25 bp, Homo sapien
acgaaaggtacgggagagccagaga

SEQ ID NO: 5974921 - DNA, 25 bp, Homo sapien
cgcgcttctgggcgtatctcaaaag

SEQ ID NO: 5974922 - DNA, 25 bp, Homo sapien
gcaaagcatcttcaattgggggttt

SEQ ID NO: 5974923 - DNA, 25 bp, Homo sapien
tacgatgaagcgttgaaaaagtacg

SEQ ID NO: 5974924 - DNA, 25 bp, Homo sapien
gacaatgacaagcaggctttaaaag

SEQ ID NO: 5974925 - DNA, 25 bp, Homo sapien
gagctttcggacaagctagaccaac

SEQ ID NO: 5974926 - DNA, 25 bp, Homo sapien
ttggaggaagccaagagaaatgctt

SEQ ID NO: 5974927 - DNA, 25 bp, Homo sapien
acagagcatccattgagtacgaaag

SEQ ID NO: 5974928 - DNA, 25 bp, Homo sapien
atgacaagcaggctttaaaagatga

SEQ ID NO: 5974929 - DNA, 25 bp, Homo sapien
tgacgagctgaagaagatcaaggaa

SEQ ID NO: 5974930 - DNA, 25 bp, Homo sapien
ggattcttcctcgcaaagcatcttc

SEQ ID NO: 5974931 - DNA, 25 bp, Homo sapien
gcgtttcgaagaggcagtggatcgt

SEQ ID NO: 5974932 - DNA, 25 bp, Homo sapien
tggggtgatacggcacaggagtttg

SEQ ID NO: 5974933 - DNA, 25 bp, Homo sapien
gacgcgcttctgggcgtatctcaaa

SEQ ID NO: 5974934 - DNA, 25 bp, Homo sapien
agcagctaggccaaaaagccaagga

SEQ ID NO: 5974935 - DNA, 25 bp, Homo sapien
gacgctaatactgaagaagccgctg

SEQ ID NO: 5974936 - DNA, 25 bp, Homo sapien
gatgaagccaagaacaaattcaaag

SEQ ID NO: 5974937 - DNA, 25 bp, Homo sapien
cagacacgcaagcagctaggccaaa

SEQ ID NO: 5974938 - DNA, 25 bp, Homo sapien
aggaggacttgaaacagtacggcag

SEQ ID NO: 5974939 - DNA, 25 bp, Homo sapien
cttctgggcgtatctcaaaaggcta

SEQ ID NO: 5974940 - DNA, 25 bp, Homo sapien
aagcgtttcgaagaggcagtggatc

SEQ ID NO: 5974941 - DNA, 25 bp, Homo sapien
tcagagaagagagggcaacgtctcc

SEQ ID NO: 5974942 - DNA, 25 bp, Homo sapien
gctgaaagaaggaaagccatagcca

SEQ ID NO: 5974943 - DNA, 25 bp, Homo sapien
aggatggggtgaaacagccgctcaa

SEQ ID NO: 5974944 - DNA, 25 bp, Homo sapien
aatgcttcttcagagccaagcgagg

SEQ ID NO: 5974945 - DNA, 25 bp, Homo sapien
ttcagagccaagcgaggcgcaaaaa

SEQ ID NO: 5974946 - DNA, 25 bp, Homo sapien
aaaggtaactaagcgtgtgatatca

SEQ ID NO: 5974947 - DNA, 25 bp, Homo sapien
ctaagcgtgtgatatcaccggaaga

SEQ ID NO: 5974948 - DNA, 25 bp, Homo sapien
agaagccgctgcaagaagtgtccaa

SEQ ID NO: 5974949 - DNA, 25 bp, Homo sapien
cgctctggacagagcatccattgag

SEQ ID NO: 5974950 - DNA, 25 bp, Homo sapien
gatggtaaattctggagctcgaaaa

SEQ ID NO: 5974951 - DNA, 25 bp, Homo sapien
gaaggccgctctggacagagcatcc

SEQ ID NO: 5974952 - DNA, 25 bp, Homo sapien
gaagaataacacgggtgacgctaat

SEQ ID NO: 5974953 - DNA, 25 bp, Homo sapien
gccatcacagctagcatcatggtca

SEQ ID NO: 5974954 - DNA, 25 bp, Homo sapien
ggtcgacaatgacaagcaggcttta

SEQ ID NO: 5974955 - DNA, 25 bp, Homo sapien
gaaggaggacttgaaacagtacggc

SEQ ID NO: 5974956 - DNA, 25 bp, Homo sapien
cggtgatgagagagaagaaggccgc

SEQ ID NO: 5974957 - DNA, 25 bp, Homo sapien
tcgcaaagcatcttcaattgggggt

SEQ ID NO: 5974958 - DNA, 25 bp, Homo sapien
ataagaacgtgtccgatgccatgga

SEQ ID NO: 5974959 - DNA, 25 bp, Homo sapien
tccaaggacgaaatggacgatttaa

SEQ ID NO: 5974960 - DNA, 25 bp, Homo sapien
agtacggcagttcagcacccccaca

SEQ ID NO: 5974961 - DNA, 25 bp, Homo sapien
agccagagactttaatgagctttcg

SEQ ID NO: 5974962 - DNA, 25 bp, Homo sapien
ttgaaaaagtacgatgaagccaaga

SEQ ID NO: 5974963 - DNA, 25 bp, Homo sapien
ttaaaagacgcgcttctgggcgtat

SEQ ID NO: 5974964 - DNA, 25 bp, Homo sapien
ccaaggattcttcctcgcaaagcat

SEQ ID NO: 5974965 - DNA, 25 bp, Homo sapien
gtaatcctttgaaacgcctgttgaa

SEQ ID NO: 5974966 - DNA, 25 bp, Homo sapien
cgtatctcaaaaggctagggaagag

SEQ ID NO: 5974967 - DNA, 25 bp, Homo sapien
tggtaaattctggagctcgaaaaag

SEQ ID NO: 5974968 - DNA, 25 bp, Homo sapien
tgggcgtatctcaaaaggctaggga

SEQ ID NO: 5974969 - DNA, 25 bp, Homo sapien
tgttgaagaataacacgggtgacgc

SEQ ID NO: 5974970 - DNA, 25 bp, Homo sapien
gaaacgcctgttgaagaataacacg

SEQ ID NO: 5974971 - DNA, 25 bp, Homo sapien
agttgggaaagctacataacataaa

SEQ ID NO: 5974972 - DNA, 25 bp, Homo sapien
tgccttgtcgttaaaagacgcgctt

SEQ ID NO: 5974973 - DNA, 25 bp, Homo sapien
gaaaggtacgggagagccagagact

SEQ ID NO: 5974974 - DNA, 25 bp, Homo sapien
taatgagaaggagctcttgtccacg

SEQ ID NO: 5974975 - DNA, 25 bp, Homo sapien
aaaagaagtacgatgaagcgttgaa

SEQ ID NO: 5974976 - DNA, 25 bp, Homo sapien
atttgatactgctaagaagcgtttc

SEQ ID NO: 5974977 - DNA, 25 bp, Homo sapien
gaggcagtggatcgtaatgagaagg

SEQ ID NO: 5974978 - DNA, 25 bp, Homo sapien
agaataacacgggtgacgctaatac

SEQ ID NO: 5974979 - DNA, 25 bp, Homo sapien
agccaagagaaatgcttcttcagag

SEQ ID NO: 5974980 - DNA, 25 bp, Homo sapien
tgaagccaagaacaaattcaaagaa

SEQ ID NO: 5974981 - DNA, 25 bp, Homo sapien
gaaacagtacggcagccactggtgg

SEQ ID NO: 5974982 - DNA, 25 bp, Homo sapien
ttgtcgttaaaagacgcgcttctgg

SEQ ID NO: 5974983 - DNA, 25 bp, Homo sapien
ccatggactcgttatctaaggcgaa

SEQ ID NO: 5974984 - DNA, 25 bp, Homo sapien
tatctcaaaaggctagggaagaggc

SEQ ID NO: 5974985 - DNA, 25 bp, Homo sapien
ataattgtcggcagtgcagcattgg

SEQ ID NO: 5974986 - DNA, 25 bp, Homo sapien
aacaaaggggagcaaagcgagcaac

SEQ ID NO: 5974987 - DNA, 25 bp, Homo sapien
gggaaagctacataacataaagcaa

SEQ ID NO: 5974988 - DNA, 25 bp, Homo sapien
attctggagctcgaaaaaggactag

SEQ ID NO: 5974989 - DNA, 25 bp, Homo sapien
tctaaggcgaaggaggacttgaaac

SEQ ID NO: 5974990 - DNA, 25 bp, Homo sapien
ctgaagaagccgctgcaagaagtgt

SEQ ID NO: 5974991 - DNA, 25 bp, Homo sapien
ccacagttgggaaagctacataaca

SEQ ID NO: 5974992 - DNA, 25 bp, Homo sapien
aagaagatcaaggaaaagggctggt

SEQ ID NO: 5974993 - DNA, 25 bp, Homo sapien
gaaatgcttcttcagagccaagcga

SEQ ID NO: 5974994 - DNA, 25 bp, Homo sapien
taaaggaagatgccttgtcgttaaa

SEQ ID NO: 5974995 - DNA, 25 bp, Homo sapien
tactgaagaagccgctgcaagaagt

SEQ ID NO: 5974996 - DNA, 25 bp, Homo sapien
aagaggctccaaaggtaactaagcg

SEQ ID NO: 5974997 - DNA, 25 bp, Homo sapien
agagttggaggaagccaagagaaat

SEQ ID NO: 5974998 - DNA, 25 bp, Homo sapien
cgggagagccagagactttaatgag

SEQ ID NO: 5974999 - DNA, 25 bp, Homo sapien
tctcaaaaggctagggaagaggctc

SEQ ID NO: 5975000 - DNA, 25 bp, Homo sapien
gatgccatggactcgttatctaagg

SEQ ID NO: 5975001 - DNA, 25 bp, Homo sapien
aaaagacgcgcttctgggcgtatct

SEQ ID NO: 5975002 - DNA, 25 bp, Homo sapien
aaggattcttcctcgcaaagcatct

SEQ ID NO: 5975003 - DNA, 25 bp, Homo sapien
cgcttctgggcgtatctcaaaaggc

SEQ ID NO: 5975004 - DNA, 25 bp, Homo sapien
gctgaagaagatcaaggaaaagggc

SEQ ID NO: 5975005 - DNA, 25 bp, Homo sapien
gtcgttaaaagacgcgcttctgggc

SEQ ID NO: 5975006 - DNA, 25 bp, Homo sapien
cgaaatggacgatttaagatggaat

SEQ ID NO: 5975007 - DNA, 25 bp, Homo sapien
ttatgagaattcaaagaaacaactg

SEQ ID NO: 5975008 - DNA, 25 bp, Homo sapien
gagtacgaaaggtacgggagagcca

SEQ ID NO: 5975009 - DNA, 25 bp, Homo sapien
ttgagtacgaaaggtacgggagagc

SEQ ID NO: 5975010 - DNA, 25 bp, Homo sapien
ctggatggacttccaaggtcgacaa

SEQ ID NO: 5975011 - DNA, 25 bp, Homo sapien
tccattgagtacgaaaggtacggga

SEQ ID NO: 5975012 - DNA, 25 bp, Homo sapien
ccgatgccatggactcgttatctaa

SEQ ID NO: 5975013 - DNA, 25 bp, Homo sapien
tctccgcttactacaacggccagga

SEQ ID NO: 5975014 - DNA, 25 bp, Homo sapien
gctaagaagcgtttcgaagaggcag

SEQ ID NO: 5975015 - DNA, 25 bp, Homo sapien
gagaattcaaagaaacaactggata

SEQ ID NO: 5975016 - DNA, 25 bp, Homo sapien
tagaaggatggggtgaaacagccgc

SEQ ID NO: 5975017 - DNA, 25 bp, Homo sapien
gagagggcaacgtctccgcttacta

SEQ ID NO: 5975018 - DNA, 25 bp, Homo sapien
aagatgaggcccaaaagaagtacga

SEQ ID NO: 5975019 - DNA, 25 bp, Homo sapien
gaaacagccgctcaactttccaagg

SEQ ID NO: 5975020 - DNA, 25 bp, Homo sapien
gagggcaacgtctccgcttactaca

SEQ ID NO: 5975021 - DNA, 25 bp, Homo sapien
agagaagaaggccgctctggacaga

SEQ ID NO: 5975022 - DNA, 25 bp, Homo sapien
gtgtgatatcaccggaagaggatgc

SEQ ID NO: 5975023 - DNA, 25 bp, Homo sapien
tggttacaacaaaggggagcaaagc

SEQ ID NO: 5975024 - DNA, 25 bp, Homo sapien
gccgctgcaagaagtgtccaaggct

SEQ ID NO: 5975025 - DNA, 25 bp, Homo sapien
ctgctaagaagcgtttcgaagaggc

SEQ ID NO: 5975026 - DNA, 25 bp, Homo sapien
agctgccatcacagctagcatcatg

SEQ ID NO: 5975027 - DNA, 25 bp, Homo sapien
gatacggcacaggagtttggtagag

SEQ ID NO: 5975028 - DNA, 25 bp, Homo sapien
acaagctagaccaacaggaaaggaa

SEQ ID NO: 5975029 - DNA, 25 bp, Homo sapien
caggctttaaaagatgaggcccaaa

SEQ ID NO: 5975030 - DNA, 25 bp, Homo sapien
ctgccatcacagctagcatcatggt

SEQ ID NO: 5975031 - DNA, 25 bp, Homo sapien
gacacgcaagcagctaggccaaaaa

SEQ ID NO: 5975032 - DNA, 25 bp, Homo sapien
aacgcctgttgaagaataacacggg

SEQ ID NO: 5975033 - DNA, 25 bp, Homo sapien
tacgggagagccagagactttaatg

SEQ ID NO: 5975034 - DNA, 25 bp, Homo sapien
agagcatccattgagtacgaaaggt

SEQ ID NO: 5975035 - DNA, 25 bp, Homo sapien
aacagtacggcagccactggtggtc

SEQ ID NO: 5975036 - DNA, 25 bp, Homo sapien
aggcgcaaaaacgtcttgacgagct

SEQ ID NO: 5975037 - DNA, 25 bp, Homo sapien
gaagaagccgctgcaagaagtgtcc

SEQ ID NO: 5975038 - DNA, 25 bp, Homo sapien
atggacgatttaagatggaattatg

SEQ ID NO: 5975039 - DNA, 25 bp, Homo sapien
gcagttcagcacccccacagttggg

SEQ ID NO: 5975040 - DNA, 25 bp, Homo sapien
gagccaagcgaggcgcaaaaacgtc

SEQ ID NO: 5975041 - DNA, 25 bp, Homo sapien
tgaacgggtagccagaggtttagaa

SEQ ID NO: 5975042 - DNA, 25 bp, Homo sapien
acataaagcaaggcataaaggaaga

SEQ ID NO: 5975043 - DNA, 25 bp, Homo sapien
gtgacgctaatactgaagaagccgc

SEQ ID NO: 5975044 - DNA, 25 bp, Homo sapien
gctaggccaaaaagccaaggattct

SEQ ID NO: 5975045 - DNA, 25 bp, Homo sapien
cgaagaggcagtggatcgtaatgag

SEQ ID NO: 5975046 - DNA, 25 bp, Homo sapien
agagagaagaaggccgctctggaca

SEQ ID NO: 5975047 - DNA, 25 bp, Homo sapien
ctttgaaacgcctgttgaagaataa

SEQ ID NO: 5975048 - DNA, 25 bp, Homo sapien
cagccactggtggtctggatggact

SEQ ID NO: 5975049 - DNA, 25 bp, Homo sapien
tcttcctcgcaaagcatcttcaatt

SEQ ID NO: 5975050 - DNA, 25 bp, Homo sapien
aataacacgggtgacgctaatactg

SEQ ID NO: 5975051 - DNA, 25 bp, Homo sapien
gagctcttgtccacggtgatgagag

SEQ ID NO: 5975052 - DNA, 25 bp, Homo sapien
gaggctccaaaggtaactaagcgtg

SEQ ID NO: 5975053 - DNA, 25 bp, Homo sapien
agagaacagaaggccaagggtcaga

SEQ ID NO: 5975054 - DNA, 25 bp, Homo sapien
ggtcagagaagagagggcaacgtct

SEQ ID NO: 5975055 - DNA, 25 bp, Homo sapien
aagcgtgtgatatcaccggaagagg

SEQ ID NO: 5975056 - DNA, 25 bp, Homo sapien
ccatagccatcggggaatttgatac

SEQ ID NO: 5975057 - DNA, 25 bp, Homo sapien
gagaagagttggaggaagccaagag

SEQ ID NO: 5975058 - DNA, 25 bp, Homo sapien
aaagaaacaactggataagaacgtg

SEQ ID NO: 5975059 - DNA, 25 bp, Homo sapien
aggctgaaagaaggaaagccatagc

SEQ ID NO: 5975060 - DNA, 25 bp, Homo sapien
tgcttcttcagagccaagcgaggcg

SEQ ID NO: 5975061 - DNA, 25 bp, Homo sapien
aagctagaccaacaggaaaggaaca

SEQ ID NO: 5975062 - DNA, 25 bp, Homo sapien
aatactgaagaagccgctgcaagaa

SEQ ID NO: 5975063 - DNA, 25 bp, Homo sapien
cgtaatgagaaggagctcttgtcca

SEQ ID NO: 5975064 - DNA, 25 bp, Homo sapien
caggagtacggcagttcagcacccc

SEQ ID NO: 5975065 - DNA, 25 bp, Homo sapien
tccaaggctggggtgatacggcaca

SEQ ID NO: 5975066 - DNA, 25 bp, Homo sapien
ttccaaggtcgacaatgacaagcag

SEQ ID NO: 5975067 - DNA, 25 bp, Homo sapien
aaatggacgatttaagatggaatta

SEQ ID NO: 5975068 - DNA, 25 bp, Homo sapien
tcaagaataattgtcggcagtgcag

SEQ ID NO: 5975069 - DNA, 25 bp, Homo sapien
ccaaaggtaactaagcgtgtgatat

SEQ ID NO: 5975070 - DNA, 25 bp, Homo sapien
gctagaccaacaggaaaggaacagt

SEQ ID NO: 5975071 - DNA, 25 bp, Homo sapien
tgggggtttagtgaggctgaaagaa

SEQ ID NO: 5975072 - DNA, 25 bp, Homo sapien
gaattcaaagaaacaactggataag

SEQ ID NO: 5975073 - DNA, 25 bp, Homo sapien
gctcttgtccacggtgatgagagag

SEQ ID NO: 5975074 - DNA, 25 bp, Homo sapien
ccaaaaagccaaggattcttcctcg

SEQ ID NO: 5975075 - DNA, 25 bp, Homo sapien
gcgcaaaaacgtcttgacgagctga

SEQ ID NO: 5975076 - DNA, 25 bp, Homo sapien
cggaagaggatgctcagacacgcaa

SEQ ID NO: 5975077 - DNA, 25 bp, Homo sapien
agcatcttcaattgggggtttagtg

SEQ ID NO: 5975078 - DNA, 25 bp, Homo sapien
aacagtaatcctttgaaacgcctgt

SEQ ID NO: 5975079 - DNA, 25 bp, Homo sapien
gcagtgcagcattggcagctgccat

SEQ ID NO: 5975080 - DNA, 25 bp, Homo sapien
ttgtccacggtgatgagagagaaga

SEQ ID NO: 5975081 - DNA, 25 bp, Homo sapien
atcgtaatgagaaggagctcttgtc

SEQ ID NO: 5975082 - DNA, 25 bp, Homo sapien
gggaatttgatactgctaagaagcg

SEQ ID NO: 5975083 - DNA, 25 bp, Homo sapien
gtgatacggcacaggagtttggtag

SEQ ID NO: 5975084 - DNA, 25 bp, Homo sapien
gggtgatggtaaattctggagctcg

SEQ ID NO: 5975085 - DNA, 25 bp, Homo sapien
aggccaagggtcagagaagagaggg

SEQ ID NO: 5975086 - DNA, 25 bp, Homo sapien
taaggcgaaggaggacttgaaacag

SEQ ID NO: 5975087 - DNA, 25 bp, Homo sapien
ttagtgaggctgaaagaaggaaagc

SEQ ID NO: 5975088 - DNA, 25 bp, Homo sapien
gaagtgtccaaggctggggtgatac

SEQ ID NO: 5975089 - DNA, 25 bp, Homo sapien
tcaaggaaaagggctggtttggtta

SEQ ID NO: 5975090 - DNA, 25 bp, Homo sapien
ggacgatttaagatggaattatgag

SEQ ID NO: 5975091 - DNA, 25 bp, Homo sapien
ctcaactttccaaggacgaaatgga

SEQ ID NO: 5975092 - DNA, 25 bp, Homo sapien
agttggaggaagccaagagaaatgc

SEQ ID NO: 5975093 - DNA, 25 bp, Homo sapien
atggaatgataagggtgatggtaaa

SEQ ID NO: 5975094 - DNA, 25 bp, Homo sapien
cagcacccccacagttgggaaagct

SEQ ID NO: 5975095 - DNA, 25 bp, Homo sapien
gtgatgagagagaagaaggccgctc

SEQ ID NO: 5975096 - DNA, 25 bp, Homo sapien
gttatctaaggcgaaggaggacttg

SEQ ID NO: 5975097 - DNA, 25 bp, Homo sapien
acaggaaaggaacagtaatcctttg

SEQ ID NO: 5975098 - DNA, 25 bp, Homo sapien
acaactggataagaacgtgtccgat

SEQ ID NO: 5975099 - DNA, 25 bp, Homo sapien
ctaatactgaagaagccgctgcaag

SEQ ID NO: 5975100 - DNA, 25 bp, Homo sapien
ggagtacggcagttcagcaccccca

SEQ ID NO: 5975101 - DNA, 25 bp, Homo sapien
cggcagtgcagcattggcagctgcc

SEQ ID NO: 5975102 - DNA, 25 bp, Homo sapien
aagccaagaacaaattcaaagaatg

SEQ ID NO: 5975103 - DNA, 25 bp, Homo sapien
ggcagccactggtggtctggatgga

SEQ ID NO: 5975104 - DNA, 25 bp, Homo sapien
ttggtagagaagagttggaggaagc

SEQ ID NO: 5975105 - DNA, 25 bp, Homo sapien
gtcatcaagaataattgtcggcagt

SEQ ID NO: 5975106 - DNA, 25 bp, Homo sapien
gggtttagtgaggctgaaagaagga

SEQ ID NO: 5975107 - DNA, 25 bp, Homo sapien
ggagcaaagcgagcaacagattgct

SEQ ID NO: 5975108 - DNA, 25 bp, Homo sapien
agcatccattgagtacgaaaggtac

SEQ ID NO: 5975109 - DNA, 25 bp, Homo sapien
ttgtcggcagtgcagcattggcagc

SEQ ID NO: 5975110 - DNA, 25 bp, Homo sapien
aactaagcgtgtgatatcaccggaa

SEQ ID NO: 5975111 - DNA, 25 bp, Homo sapien
gcaacagattgctgaacgggtagcc

SEQ ID NO: 5975112 - DNA, 25 bp, Homo sapien
ctggtggtctggatggacttccaag

SEQ ID NO: 5975113 - DNA, 25 bp, Homo sapien
gaaggatggggtgaaacagccgctc

SEQ ID NO: 5975114 - DNA, 25 bp, Homo sapien
tcaccggaagaggatgctcagacac

SEQ ID NO: 5975115 - DNA, 25 bp, Homo sapien
gaagccaagagaaatgcttcttcag

SEQ ID NO: 5975116 - DNA, 25 bp, Homo sapien
aaagaaggaaagccatagccatcgg

SEQ ID NO: 5975117 - DNA, 25 bp, Homo sapien
ttcagcacccccacagttgggaaag

SEQ ID NO: 5975118 - DNA, 25 bp, Homo sapien
tcggacaagctagaccaacaggaaa

SEQ ID NO: 5975119 - DNA, 25 bp, Homo sapien
ctccaaaggtaactaagcgtgtgat

SEQ ID NO: 5975120 - DNA, 25 bp, Homo sapien
agccatagccatcggggaatttgat

SEQ ID NO: 5975121 - DNA, 25 bp, Homo sapien
caaggctggggtgatacggcacagg

SEQ ID NO: 5975122 - DNA, 25 bp, Homo sapien
tttaatgagctttcggacaagctag

SEQ ID NO: 5975123 - DNA, 25 bp, Homo sapien
agagactttaatgagctttcggaca

SEQ ID NO: 5975124 - DNA, 25 bp, Homo sapien
aggatgctcagacacgcaagcagct

SEQ ID NO: 5975125 - DNA, 25 bp, Homo sapien
gtccacggtgatgagagagaagaag

SEQ ID NO: 5975126 - DNA, 25 bp, Homo sapien
caactttccaaggacgaaatggacg

SEQ ID NO: 5975127 - DNA, 25 bp, Homo sapien
aagaagtgtccaaggctggggtgat

SEQ ID NO: 5975128 - DNA, 25 bp, Homo sapien
cagaaggccaagggtcagagaagag

SEQ ID NO: 5975129 - DNA, 25 bp, Homo sapien
acgagctgaagaagatcaaggaaaa

SEQ ID NO: 5975130 - DNA, 25 bp, Homo sapien
tgataagggtgatggtaaattctgg

SEQ ID NO: 5975131 - DNA, 25 bp, Homo sapien
ggaagatgccttgtcgttaaaagac

SEQ ID NO: 5975132 - DNA, 25 bp, Homo sapien
gtaactaagcgtgtgatatcaccgg

SEQ ID NO: 5975133 - DNA, 25 bp, Homo sapien
ctttaaaagatgaggcccaaaagaa

SEQ ID NO: 5975134 - DNA, 25 bp, Homo sapien
gaaaagggctggtttggttacaaca

SEQ ID NO: 5975135 - DNA, 25 bp, Homo sapien
agtgcagcattggcagctgccatca

SEQ ID NO: 5975136 - DNA, 25 bp, Homo sapien
tcatggtcagagaacagaaggccaa

SEQ ID NO: 5975137 - DNA, 25 bp, Homo sapien
gcaacgtctccgcttactacaacgg

SEQ ID NO: 5975138 - DNA, 25 bp, Homo sapien
gtgaaacagccgctcaactttccaa

SEQ ID NO: 5975139 - DNA, 25 bp, Homo sapien
aggccgctctggacagagcatccat

SEQ ID NO: 5975140 - DNA, 25 bp, Homo sapien
gggcaacgtctccgcttactacaac

SEQ ID NO: 5975141 - DNA, 25 bp, Homo sapien
gaggacttgaaacagtacggcagcc

SEQ ID NO: 5975142 - DNA, 25 bp, Homo sapien
cgcctgttgaagaataacacgggtg

SEQ ID NO: 5975143 - DNA, 25 bp, Homo sapien
aagctacataacataaagcaaggca

SEQ ID NO: 5975144 - DNA, 25 bp, Homo sapien
ggcataaaggaagatgccttgtcgt

SEQ ID NO: 5975145 - DNA, 25 bp, Homo sapien
ggggagcaaagcgagcaacagattg

SEQ ID NO: 5975146 - DNA, 25 bp, Homo sapien
gcacccccacagttgggaaagctac

SEQ ID NO: 5975147 - DNA, 25 bp, Homo sapien
tttcggacaagctagaccaacagga

SEQ ID NO: 5975148 - DNA, 25 bp, Homo sapien
aactggataagaacgtgtccgatgc

SEQ ID NO: 5975149 - DNA, 25 bp, Homo sapien
tatgttatgtagctttcccaactgt

SEQ ID NO: 5975150 - DNA, 25 bp, Homo sapien
acccgttcagcaatctgttgctcgc

SEQ ID NO: 5975151 - DNA, 25 bp, Homo sapien
gttcagcaatctgttgctcgctttg

SEQ ID NO: 5975152 - DNA, 25 bp, Homo sapien
gcgtcttttaacgacaaggcatctt

SEQ ID NO: 5975153 - DNA, 25 bp, Homo sapien
atcgtactttttcaacgcttcatcg

SEQ ID NO: 5975154 - DNA, 25 bp, Homo sapien
gtacttcttttgggcctcatctttt

SEQ ID NO: 5975155 - DNA, 25 bp, Homo sapien
agtccatggcatcggacacgttctt

SEQ ID NO: 5975156 - DNA, 25 bp, Homo sapien
tggtctagcttgtccgaaagctcat

SEQ ID NO: 5975157 - DNA, 25 bp, Homo sapien
ttgagcggctgtttcaccccatcct

SEQ ID NO: 5975158 - DNA, 25 bp, Homo sapien
ggggtgctgaactgccgtactcctg

SEQ ID NO: 5975159 - DNA, 25 bp, Homo sapien
gtctgagcatcctcttccggtgata

SEQ ID NO: 5975160 - DNA, 25 bp, Homo sapien
ggtgatatcacacgcttagttacct

SEQ ID NO: 5975161 - DNA, 25 bp, Homo sapien
tcttctctctcatcaccgtggacaa

SEQ ID NO: 5975162 - DNA, 25 bp, Homo sapien
atcttttaaagcctgcttgtcattg

SEQ ID NO: 5975163 - DNA, 25 bp, Homo sapien
tctctggctctcccgtacctttcgt

SEQ ID NO: 5975164 - DNA, 25 bp, Homo sapien
gaagaagcatttctcttggcttcct

SEQ ID NO: 5975165 - DNA, 25 bp, Homo sapien
aagcgcgtcttttaacgacaaggca

SEQ ID NO: 5975166 - DNA, 25 bp, Homo sapien
gcggctgtttcaccccatccttcta

SEQ ID NO: 5975167 - DNA, 25 bp, Homo sapien
ctttgaatttgttcttggcttcatc

SEQ ID NO: 5975168 - DNA, 25 bp, Homo sapien
ctcgtcaagacgtttttgcgcctcg

SEQ ID NO: 5975169 - DNA, 25 bp, Homo sapien
accagtggctgccgtactgtttcaa

SEQ ID NO: 5975170 - DNA, 25 bp, Homo sapien
tccgaaagctcattaaagtctctgg

SEQ ID NO: 5975171 - DNA, 25 bp, Homo sapien
ccttttccttgatcttcttcagctc

SEQ ID NO: 5975172 - DNA, 25 bp, Homo sapien
caaattccccgatggctatggcttt

SEQ ID NO: 5975173 - DNA, 25 bp, Homo sapien
ttcttgcagcggcttcttcagtatt

SEQ ID NO: 5975174 - DNA, 25 bp, Homo sapien
tatccagttgtttctttgaattctc

SEQ ID NO: 5975175 - DNA, 25 bp, Homo sapien
tgcagcggcttcttcagtattagcg

SEQ ID NO: 5975176 - DNA, 25 bp, Homo sapien
ccgttgtagtaagcggagacgttgc

SEQ ID NO: 5975177 - DNA, 25 bp, Homo sapien
ctcaatggatgctctgtccagagcg

SEQ ID NO: 5975178 - DNA, 25 bp, Homo sapien
cagtggctgccgtactgtttcaagt

SEQ ID NO: 5975179 - DNA, 25 bp, Homo sapien
cagcccttttccttgatcttcttca

SEQ ID NO: 5975180 - DNA, 25 bp, Homo sapien
ttgtcattgtcgaccttggaagtcc

SEQ ID NO: 5975181 - DNA, 25 bp, Homo sapien
gtaagcggagacgttgccctctctt

SEQ ID NO: 5975182 - DNA, 25 bp, Homo sapien
cttttaaagcctgcttgtcattgtc

SEQ ID NO: 5975183 - DNA, 25 bp, Homo sapien
aattgaagatgctttgcgaggaaga

SEQ ID NO: 5975184 - DNA, 25 bp, Homo sapien
ttcgccttagataacgagtccatgg

SEQ ID NO: 5975185 - DNA, 25 bp, Homo sapien
tggctatggctttccttctttcagc

SEQ ID NO: 5975186 - DNA, 25 bp, Homo sapien
tgcgcctcgcttggctctgaagaag

SEQ ID NO: 5975187 - DNA, 25 bp, Homo sapien
cgccttagataacgagtccatggca

SEQ ID NO: 5975188 - DNA, 25 bp, Homo sapien
acctttcgtactcaatggatgctct

SEQ ID NO: 5975189 - DNA, 25 bp, Homo sapien
ctgttgctcgctttgctcccctttg

SEQ ID NO: 5975190 - DNA, 25 bp, Homo sapien
tgtgggggtgctgaactgccgtact

SEQ ID NO: 5975191 - DNA, 25 bp, Homo sapien
cttccctagccttttgagatacgcc

SEQ ID NO: 5975192 - DNA, 25 bp, Homo sapien
tgttcctttcctgttggtctagctt

SEQ ID NO: 5975193 - DNA, 25 bp, Homo sapien
ctgcactgccgacaattattcttga

SEQ ID NO: 5975194 - DNA, 25 bp, Homo sapien
cagcggcttcttcagtattagcgtc

SEQ ID NO: 5975195 - DNA, 25 bp, Homo sapien
actgttcctttcctgttggtctagc

SEQ ID NO: 5975196 - DNA, 25 bp, Homo sapien
cttcttctctctcatcaccgtggac

SEQ ID NO: 5975197 - DNA, 25 bp, Homo sapien
tccagagcggccttcttctctctca

SEQ ID NO: 5975198 - DNA, 25 bp, Homo sapien
tttcgtccttggaaagttgagcggc

SEQ ID NO: 5975199 - DNA, 25 bp, Homo sapien
cacacgcttagttacctttggagcc

SEQ ID NO: 5975200 - DNA, 25 bp, Homo sapien
tttgcgcctcgcttggctctgaaga

SEQ ID NO: 5975201 - DNA, 25 bp, Homo sapien
acttcttgcagcggcttcttcagta

SEQ ID NO: 5975202 - DNA, 25 bp, Homo sapien
ttctcttggcttcctccaactcttc

SEQ ID NO: 5975203 - DNA, 25 bp, Homo sapien
acgcttcatcgtacttcttttgggc

SEQ ID NO: 5975204 - DNA, 25 bp, Homo sapien
agatacgcccagaagcgcgtctttt

SEQ ID NO: 5975205 - DNA, 25 bp, Homo sapien
ttgttcttggcttcatcgtactttt

SEQ ID NO: 5975206 - DNA, 25 bp, Homo sapien
caatctgttgctcgctttgctcccc

SEQ ID NO: 5975207 - DNA, 25 bp, Homo sapien
cgttcttatccagttgtttctttga

SEQ ID NO: 5975208 - DNA, 25 bp, Homo sapien
ctccttcgccttagataacgagtcc

SEQ ID NO: 5975209 - DNA, 25 bp, Homo sapien
ccagaagcgcgtcttttaacgacaa

SEQ ID NO: 5975210 - DNA, 25 bp, Homo sapien
ttcagcctcactaaacccccaattg

SEQ ID NO: 5975211 - DNA, 25 bp, Homo sapien
ttgaagatgctttgcgaggaagaat

SEQ ID NO: 5975212 - DNA, 25 bp, Homo sapien
gctcgctttgctcccctttgttgta

SEQ ID NO: 5975213 - DNA, 25 bp, Homo sapien
cgtcaagacgtttttgcgcctcgct

SEQ ID NO: 5975214 - DNA, 25 bp, Homo sapien
agcaatctgttgctcgctttgctcc

SEQ ID NO: 5975215 - DNA, 25 bp, Homo sapien
cagaccaccagtggctgccgtactg

SEQ ID NO: 5975216 - DNA, 25 bp, Homo sapien
ttggaaagttgagcggctgtttcac

SEQ ID NO: 5975217 - DNA, 25 bp, Homo sapien
tttatgttatgtagctttcccaact

SEQ ID NO: 5975218 - DNA, 25 bp, Homo sapien
tcgtacttcttttgggcctcatctt

SEQ ID NO: 5975219 - DNA, 25 bp, Homo sapien
ccttggaaagttgagcggctgtttc

SEQ ID NO: 5975220 - DNA, 25 bp, Homo sapien
tcctgttggtctagcttgtccgaaa

SEQ ID NO: 5975221 - DNA, 25 bp, Homo sapien
ccttgatcttcttcagctcgtcaag

SEQ ID NO: 5975222 - DNA, 25 bp, Homo sapien
gcctcactaaacccccaattgaaga

SEQ ID NO: 5975223 - DNA, 25 bp, Homo sapien
agataacgagtccatggcatcggac

SEQ ID NO: 5975224 - DNA, 25 bp, Homo sapien
ttcaacgcttcatcgtacttctttt

SEQ ID NO: 5975225 - DNA, 25 bp, Homo sapien
aatgctgcactgccgacaattattc

SEQ ID NO: 5975226 - DNA, 25 bp, Homo sapien
ctagtcctttttcgagctccagaat

SEQ ID NO: 5975227 - DNA, 25 bp, Homo sapien
atcgtccatttcgtccttggaaagt

SEQ ID NO: 5975228 - DNA, 25 bp, Homo sapien
ctccagaatttaccatcacccttat

SEQ ID NO: 5975229 - DNA, 25 bp, Homo sapien
tcagctcgtcaagacgtttttgcgc

SEQ ID NO: 5975230 - DNA, 25 bp, Homo sapien
cttgtccgaaagctcattaaagtct

SEQ ID NO: 5975231 - DNA, 25 bp, Homo sapien
gagcggccttcttctctctcatcac

SEQ ID NO: 5975232 - DNA, 25 bp, Homo sapien
cttggcttcctccaactcttctcta

SEQ ID NO: 5975233 - DNA, 25 bp, Homo sapien
gctttgcgaggaagaatccttggct

SEQ ID NO: 5975234 - DNA, 25 bp, Homo sapien
catcaccgtggacaagagctccttc

SEQ ID NO: 5975235 - DNA, 25 bp, Homo sapien
tggctttttggcctagctgcttgcg

SEQ ID NO: 5975236 - DNA, 25 bp, Homo sapien
tgctgaactgccgtactcctggccg

SEQ ID NO: 5975237 - DNA, 25 bp, Homo sapien
tgtccagagcggccttcttctctct

SEQ ID NO: 5975238 - DNA, 25 bp, Homo sapien
gcttggctctgaagaagcatttctc

SEQ ID NO: 5975239 - DNA, 25 bp, Homo sapien
tacctttggagcctcttccctagcc

SEQ ID NO: 5975240 - DNA, 25 bp, Homo sapien
atatcacacgcttagttacctttgg

SEQ ID NO: 5975241 - DNA, 25 bp, Homo sapien
catccagaccaccagtggctgccgt

SEQ ID NO: 5975242 - DNA, 25 bp, Homo sapien
ctcattacgatccactgcctcttcg

SEQ ID NO: 5975243 - DNA, 25 bp, Homo sapien
aaggcatcttcctttatgccttgct

SEQ ID NO: 5975244 - DNA, 25 bp, Homo sapien
tgggcctcatcttttaaagcctgct

SEQ ID NO: 5975245 - DNA, 25 bp, Homo sapien
agtctctggctctcccgtacctttc

SEQ ID NO: 5975246 - DNA, 25 bp, Homo sapien
ccttagataacgagtccatggcatc

SEQ ID NO: 5975247 - DNA, 25 bp, Homo sapien
caacaggcgtttcaaaggattactg

SEQ ID NO: 5975248 - DNA, 25 bp, Homo sapien
actgccgacaattattcttgatgac

SEQ ID NO: 5975249 - DNA, 25 bp, Homo sapien
agagctccttctcattacgatccac

SEQ ID NO: 5975250 - DNA, 25 bp, Homo sapien
gtttcaaaggattactgttcctttc

SEQ ID NO: 5975251 - DNA, 25 bp, Homo sapien
gaccaccagtggctgccgtactgtt

SEQ ID NO: 5975252 - DNA, 25 bp, Homo sapien
tgttgtaaccaaaccagcccttttc

SEQ ID NO: 5975253 - DNA, 25 bp, Homo sapien
gcctagctgcttgcgtgtctgagca

SEQ ID NO: 5975254 - DNA, 25 bp, Homo sapien
aaacctctggctacccgttcagcaa

SEQ ID NO: 5975255 - DNA, 25 bp, Homo sapien
gatcttcttcagctcgtcaagacgt

SEQ ID NO: 5975256 - DNA, 25 bp, Homo sapien
cgtactttttcaacgcttcatcgta

SEQ ID NO: 5975257 - DNA, 25 bp, Homo sapien
gcatttctcttggcttcctccaact

SEQ ID NO: 5975258 - DNA, 25 bp, Homo sapien
cgcctcgcttggctctgaagaagca

SEQ ID NO: 5975259 - DNA, 25 bp, Homo sapien
gtgtctgagcatcctcttccggtga

SEQ ID NO: 5975260 - DNA, 25 bp, Homo sapien
tcgctttgctcccctttgttgtaac

SEQ ID NO: 5975261 - DNA, 25 bp, Homo sapien
tgtccgaaagctcattaaagtctct

SEQ ID NO: 5975262 - DNA, 25 bp, Homo sapien
cagctgccaatgctgcactgccgac

SEQ ID NO: 5975263 - DNA, 25 bp, Homo sapien
ccgatggctatggctttccttcttt

SEQ ID NO: 5975264 - DNA, 25 bp, Homo sapien
caagagctccttctcattacgatcc

SEQ ID NO: 5975265 - DNA, 25 bp, Homo sapien
atttgttcttggcttcatcgtactt

SEQ ID NO: 5975266 - DNA, 25 bp, Homo sapien
aggaagaatccttggctttttggcc

SEQ ID NO: 5975267 - DNA, 25 bp, Homo sapien
ctttttcaacgcttcatcgtacttc

SEQ ID NO: 5975268 - DNA, 25 bp, Homo sapien
accttggaagtccatccagaccacc

SEQ ID NO: 5975269 - DNA, 25 bp, Homo sapien
gtcgaccttggaagtccatccagac

SEQ ID NO: 5975270 - DNA, 25 bp, Homo sapien
ggaaagttgagcggctgtttcaccc

SEQ ID NO: 5975271 - DNA, 25 bp, Homo sapien
ttgtcgaccttggaagtccatccag

SEQ ID NO: 5975272 - DNA, 25 bp, Homo sapien
ctcactaaacccccaattgaagatg

SEQ ID NO: 5975273 - DNA, 25 bp, Homo sapien
accaaactcctgtgccgtatcaccc

SEQ ID NO: 5975274 - DNA, 25 bp, Homo sapien
ctgcttgcgtgtctgagcatcctct

SEQ ID NO: 5975275 - DNA, 25 bp, Homo sapien
cgtttttgcgcctcgcttggctctg

SEQ ID NO: 5975276 - DNA, 25 bp, Homo sapien
acaggcgtttcaaaggattactgtt

SEQ ID NO: 5975277 - DNA, 25 bp, Homo sapien
gtttcaagtcctccttcgccttaga

SEQ ID NO: 5975278 - DNA, 25 bp, Homo sapien
ctcattaaagtctctggctctcccg

SEQ ID NO: 5975279 - DNA, 25 bp, Homo sapien
ccttggccttctgttctctgaccat

SEQ ID NO: 5975280 - DNA, 25 bp, Homo sapien
ttctttcagcctcactaaaccccca

SEQ ID NO: 5975281 - DNA, 25 bp, Homo sapien
gaagatgctttgcgaggaagaatcc

SEQ ID NO: 5975282 - DNA, 25 bp, Homo sapien
ctttcccaactgtgggggtgctgaa

SEQ ID NO: 5975283 - DNA, 25 bp, Homo sapien
tatgccttgctttatgttatgtagc

SEQ ID NO: 5975284 - DNA, 25 bp, Homo sapien
cattaaagtctctggctctcccgta

SEQ ID NO: 5975285 - DNA, 25 bp, Homo sapien
accgtggacaagagctccttctcat

SEQ ID NO: 5975286 - DNA, 25 bp, Homo sapien
tcttccggtgatatcacacgcttag

SEQ ID NO: 5975287 - DNA, 25 bp, Homo sapien
atcacccttatcattccattctttg

SEQ ID NO: 5975288 - DNA, 25 bp, Homo sapien
cacccgtgttattcttcaacaggcg

SEQ ID NO: 5975289 - DNA, 25 bp, Homo sapien
tggaagtccatccagaccaccagtg

SEQ ID NO: 5975290 - DNA, 25 bp, Homo sapien
cgtactcaatggatgctctgtccag

SEQ ID NO: 5975291 - DNA, 25 bp, Homo sapien
tcatcttttaaagcctgcttgtcat

SEQ ID NO: 5975292 - DNA, 25 bp, Homo sapien
ctcttccctagccttttgagatacg

SEQ ID NO: 5975293 - DNA, 25 bp, Homo sapien
ttgatcttcttcagctcgtcaagac

SEQ ID NO: 5975294 - DNA, 25 bp, Homo sapien
acacttcttgcagcggcttcttcag

SEQ ID NO: 5975295 - DNA, 25 bp, Homo sapien
cctagccttttgagatacgcccaga

SEQ ID NO: 5975296 - DNA, 25 bp, Homo sapien
gcgtttcaaaggattactgttcctt

SEQ ID NO: 5975297 - DNA, 25 bp, Homo sapien
tactcaatggatgctctgtccagag

SEQ ID NO: 5975298 - DNA, 25 bp, Homo sapien
tgatatcacacgcttagttaccttt

SEQ ID NO: 5975299 - DNA, 25 bp, Homo sapien
gttgccctctcttctctgacccttg

SEQ ID NO: 5975300 - DNA, 25 bp, Homo sapien
tgagatacgcccagaagcgcgtctt

SEQ ID NO: 5975301 - DNA, 25 bp, Homo sapien
cttggaagtccatccagaccaccag

SEQ ID NO: 5975302 - DNA, 25 bp, Homo sapien
actcctggccgttgtagtaagcgga

SEQ ID NO: 5975303 - DNA, 25 bp, Homo sapien
ctggctacccgttcagcaatctgtt

SEQ ID NO: 5975304 - DNA, 25 bp, Homo sapien
ggagacgttgccctctcttctctga

SEQ ID NO: 5975305 - DNA, 25 bp, Homo sapien
tccatccagaccaccagtggctgcc

SEQ ID NO: 5975306 - DNA, 25 bp, Homo sapien
ctctcatcaccgtggacaagagctc

SEQ ID NO: 5975307 - DNA, 25 bp, Homo sapien
ttctcattacgatccactgcctctt

SEQ ID NO: 5975308 - DNA, 25 bp, Homo sapien
tgatgctagctgtgatggcagctgc

SEQ ID NO: 5975309 - DNA, 25 bp, Homo sapien
tgccttgctttatgttatgtagctt

SEQ ID NO: 5975310 - DNA, 25 bp, Homo sapien
tgtgccgtatcaccccagccttgga

SEQ ID NO: 5975311 - DNA, 25 bp, Homo sapien
ggatgctctgtccagagcggccttc

SEQ ID NO: 5975312 - DNA, 25 bp, Homo sapien
ccgttcagcaatctgttgctcgctt

SEQ ID NO: 5975313 - DNA, 25 bp, Homo sapien
cgagctccagaatttaccatcaccc

SEQ ID NO: 5975314 - DNA, 25 bp, Homo sapien
gcggcttcttcagtattagcgtcac

SEQ ID NO: 5975315 - DNA, 25 bp, Homo sapien
ttctgttctctgaccatgatgctag

SEQ ID NO: 5975316 - DNA, 25 bp, Homo sapien
gccttcttctctctcatcaccgtgg

SEQ ID NO: 5975317 - DNA, 25 bp, Homo sapien
ttcgtactcaatggatgctctgtcc

SEQ ID NO: 5975318 - DNA, 25 bp, Homo sapien
gttacctttggagcctcttccctag

SEQ ID NO: 5975319 - DNA, 25 bp, Homo sapien
ctttttcgagctccagaatttacca

SEQ ID NO: 5975320 - DNA, 25 bp, Homo sapien
gcctcttccctagccttttgagata

SEQ ID NO: 5975321 - DNA, 25 bp, Homo sapien
tctcccgtacctttcgtactcaatg

SEQ ID NO: 5975322 - DNA, 25 bp, Homo sapien
gctctgtccagagcggccttcttct

SEQ ID NO: 5975323 - DNA, 25 bp, Homo sapien
tgccgtatcaccccagccttggaca

SEQ ID NO: 5975324 - DNA, 25 bp, Homo sapien
ccaatgctgcactgccgacaattat

SEQ ID NO: 5975325 - DNA, 25 bp, Homo sapien
tccatcttaaatcgtccatttcgtc

SEQ ID NO: 5975326 - DNA, 25 bp, Homo sapien
cttagttacctttggagcctcttcc

SEQ ID NO: 5975327 - DNA, 25 bp, Homo sapien
ctcatcaccgtggacaagagctcct

SEQ ID NO: 5975328 - DNA, 25 bp, Homo sapien
agtcctccttcgccttagataacga

SEQ ID NO: 5975329 - DNA, 25 bp, Homo sapien
tggacaagagctccttctcattacg

SEQ ID NO: 5975330 - DNA, 25 bp, Homo sapien
cttcttagcagtatcaaattccccg

SEQ ID NO: 5975331 - DNA, 25 bp, Homo sapien
aattccccgatggctatggctttcc

SEQ ID NO: 5975332 - DNA, 25 bp, Homo sapien
ttaaagtctctggctctcccgtacc

SEQ ID NO: 5975333 - DNA, 25 bp, Homo sapien
ccttcgccttagataacgagtccat

SEQ ID NO: 5975334 - DNA, 25 bp, Homo sapien
gacgtttttgcgcctcgcttggctc

SEQ ID NO: 5975335 - DNA, 25 bp, Homo sapien
tcaccgtggacaagagctccttctc

SEQ ID NO: 5975336 - DNA, 25 bp, Homo sapien
atgtagctttcccaactgtgggggt

SEQ ID NO: 5975337 - DNA, 25 bp, Homo sapien
cctgtgccgtatcaccccagccttg

SEQ ID NO: 5975338 - DNA, 25 bp, Homo sapien
acgacaaggcatcttcctttatgcc

SEQ ID NO: 5975339 - DNA, 25 bp, Homo sapien
atgctctgtccagagcggccttctt

SEQ ID NO: 5975340 - DNA, 25 bp, Homo sapien
atgctagctgtgatggcagctgcca

SEQ ID NO: 5975341 - DNA, 25 bp, Homo sapien
cccgtgttattcttcaacaggcgtt

SEQ ID NO: 5975342 - DNA, 25 bp, Homo sapien
tcttggcttcatcgtactttttcaa

SEQ ID NO: 5975343 - DNA, 25 bp, Homo sapien
ccgtactcctggccgttgtagtaag

SEQ ID NO: 5975344 - DNA, 25 bp, Homo sapien
cgcttagttacctttggagcctctt

SEQ ID NO: 5975345 - DNA, 25 bp, Homo sapien
tctctgaccatgatgctagctgtga

SEQ ID NO: 5975346 - DNA, 25 bp, Homo sapien
catcttcctttatgccttgctttat

SEQ ID NO: 5975347 - DNA, 25 bp, Homo sapien
tagccttttgagatacgcccagaag

SEQ ID NO: 5975348 - DNA, 25 bp, Homo sapien
tccttctaaacctctggctacccgt

SEQ ID NO: 5975349 - DNA, 25 bp, Homo sapien
ctggccgttgtagtaagcggagacg

SEQ ID NO: 5975350 - DNA, 25 bp, Homo sapien
tgccgtactcctggccgttgtagta

SEQ ID NO: 5975351 - DNA, 25 bp, Homo sapien
ataacgagtccatggcatcggacac

SEQ ID NO: 5975352 - DNA, 25 bp, Homo sapien
tactgtttcaagtcctccttcgcct

SEQ ID NO: 5975353 - DNA, 25 bp, Homo sapien
cagttgtttctttgaattctcataa

SEQ ID NO: 5975354 - DNA, 25 bp, Homo sapien
tccttctttcagcctcactaaaccc

SEQ ID NO: 5975355 - DNA, 25 bp, Homo sapien
tcccgtacctttcgtactcaatgga

SEQ ID NO: 5975356 - DNA, 25 bp, Homo sapien
ccccgatggctatggctttccttct

SEQ ID NO: 5975357 - DNA, 25 bp, Homo sapien
tgccaatgctgcactgccgacaatt

SEQ ID NO: 5975358 - DNA, 25 bp, Homo sapien
aaatcgtccatttcgtccttggaaa

SEQ ID NO: 5975359 - DNA, 25 bp, Homo sapien
tgctcccctttgttgtaaccaaacc

SEQ ID NO: 5975360 - DNA, 25 bp, Homo sapien
ccggtgatatcacacgcttagttac

SEQ ID NO: 5975361 - DNA, 25 bp, Homo sapien
ttttcaacgcttcatcgtacttctt

SEQ ID NO: 5975362 - DNA, 25 bp, Homo sapien
gccgtactgtttcaagtcctccttc

SEQ ID NO: 5975363 - DNA, 25 bp, Homo sapien
caacgcttcatcgtacttcttttgg

SEQ ID NO: 5975364 - DNA, 25 bp, Homo sapien
tgccctctcttctctgacccttggc

SEQ ID NO: 5975365 - DNA, 25 bp, Homo sapien
atcaccccagccttggacacttctt

SEQ ID NO: 5975366 - DNA, 25 bp, Homo sapien
gttgctcgctttgctcccctttgtt

SEQ ID NO: 5975367 - DNA, 25 bp, Homo sapien
taaagcctgcttgtcattgtcgacc

SEQ ID NO: 5975368 - DNA, 25 bp, Homo sapien
ttcagtattagcgtcacccgtgtta

SEQ ID NO: 5975369 - DNA, 25 bp, Homo sapien
gcgtcacccgtgttattcttcaaca

SEQ ID NO: 5975370 - DNA, 25 bp, Homo sapien
cttgcagcggcttcttcagtattag

SEQ ID NO: 5975371 - DNA, 25 bp, Homo sapien
cttggctttttggcctagctgcttg

SEQ ID NO: 5975372 - DNA, 25 bp, Homo sapien
ttaaatcgtccatttcgtccttgga

SEQ ID NO: 5975373 - DNA, 25 bp, Homo sapien
ctgaagaagcatttctcttggcttc

SEQ ID NO: 5975374 - DNA, 25 bp, Homo sapien
gattactgttcctttcctgttggtc

SEQ ID NO: 5975375 - DNA, 25 bp, Homo sapien
ctctggctacccgttcagcaatctg

SEQ ID NO: 5975376 - DNA, 25 bp, Homo sapien
ctcttctctgacccttggccttctg

SEQ ID NO: 5975377 - DNA, 25 bp, Homo sapien
acgatccactgcctcttcgaaacgc

SEQ ID NO: 5975378 - DNA, 25 bp, Homo sapien
cgaccttggaagtccatccagacca

SEQ ID NO: 5975379 - DNA, 25 bp, Homo sapien
caccccagccttggacacttcttgc

SEQ ID NO: 5975380 - DNA, 25 bp, Homo sapien
tcagcaatctgttgctcgctttgct

SEQ ID NO: 5975381 - DNA, 25 bp, Homo sapien
atttctcttggcttcctccaactct

SEQ ID NO: 5975382 - DNA, 25 bp, Homo sapien
tgacccttggccttctgttctctga

SEQ ID NO: 5975383 - DNA, 25 bp, Homo sapien
tggctttccttctttcagcctcact

SEQ ID NO: 5975384 - DNA, 25 bp, Homo sapien
cttcttcagtattagcgtcacccgt

SEQ ID NO: 5975385 - DNA, 25 bp, Homo sapien
accagcccttttccttgatcttctt

SEQ ID NO: 5975386 - DNA, 25 bp, Homo sapien
agctttcccaactgtgggggtgctg

SEQ ID NO: 5975387 - DNA, 25 bp, Homo sapien
gtcacccgtgttattcttcaacagg

SEQ ID NO: 5975388 - DNA, 25 bp, Homo sapien
tcaagacgtttttgcgcctcgcttg

SEQ ID NO: 5975389 - DNA, 25 bp, Homo sapien
taacgacaaggcatcttcctttatg

SEQ ID NO: 5975390 - DNA, 25 bp, Homo sapien
tcctttttcgagctccagaatttac

SEQ ID NO: 5975391 - DNA, 25 bp, Homo sapien
cgtgttattcttcaacaggcgtttc

SEQ ID NO: 5975392 - DNA, 25 bp, Homo sapien
ccttgctttatgttatgtagctttc

SEQ ID NO: 5975393 - DNA, 25 bp, Homo sapien
ctgcctcttcgaaacgcttcttagc

SEQ ID NO: 5975394 - DNA, 25 bp, Homo sapien
tcttcctttatgccttgctttatgt

SEQ ID NO: 5975395 - DNA, 25 bp, Homo sapien
agcttgtccgaaagctcattaaagt

SEQ ID NO: 5975396 - DNA, 25 bp, Homo sapien
cactaaacccccaattgaagatgct

SEQ ID NO: 5975397 - DNA, 25 bp, Homo sapien
tagcgtcacccgtgttattcttcaa

SEQ ID NO: 5975398 - DNA, 25 bp, Homo sapien
cttatccagttgtttctttgaattc

SEQ ID NO: 5975399 - DNA, 25 bp, Homo sapien
tggcatcggacacgttcttatccag

SEQ ID NO: 5975400 - DNA, 25 bp, Homo sapien
catccttctaaacctctggctaccc

SEQ ID NO: 5975401 - DNA, 25 bp, Homo sapien
aagcggagacgttgccctctcttct

SEQ ID NO: 5975402 - DNA, 25 bp, Homo sapien
ccttctgttctctgaccatgatgct

SEQ ID NO: 5975403 - DNA, 25 bp, Homo sapien
gcgtgtctgagcatcctcttccggt

SEQ ID NO: 5975404 - DNA, 25 bp, Homo sapien
gcctcttcgaaacgcttcttagcag

SEQ ID NO: 5975405 - DNA, 25 bp, Homo sapien
taattccatcttaaatcgtccattt

SEQ ID NO: 5975406 - DNA, 25 bp, Homo sapien
cttcagctcgtcaagacgtttttgc

SEQ ID NO: 5975407 - DNA, 25 bp, Homo sapien
accatgatgctagctgtgatggcag

SEQ ID NO: 5975408 - DNA, 25 bp, Homo sapien
tccactgcctcttcgaaacgcttct

SEQ ID NO: 5975409 - DNA, 25 bp, Homo sapien
agaatttaccatcacccttatcatt

SEQ ID NO: 5975410 - DNA, 25 bp, Homo sapien
ttctcataattccatcttaaatcgt

SEQ ID NO: 5975411 - DNA, 25 bp, Homo sapien
cctttggagcctcttccctagcctt

SEQ ID NO: 5975412 - DNA, 25 bp, Homo sapien
ccatcacccttatcattccattctt

SEQ ID NO: 5975413 - DNA, 25 bp, Homo sapien
ccagccttggacacttcttgcagcg

SEQ ID NO: 5975414 - DNA, 25 bp, Homo sapien
tttgagatacgcccagaagcgcgtc

SEQ ID NO: 5975415 - DNA, 25 bp, Homo sapien
gtctagcttgtccgaaagctcatta

SEQ ID NO: 5975416 - DNA, 25 bp, Homo sapien
atctgttgctcgctttgctcccctt

SEQ ID NO: 5975417 - DNA, 25 bp, Homo sapien
cattacgatccactgcctcttcgaa

SEQ ID NO: 5975418 - DNA, 25 bp, Homo sapien
ggtgctgaactgccgtactcctggc

SEQ ID NO: 5975419 - DNA, 25 bp, Homo sapien
ctgttctctgaccatgatgctagct

SEQ ID NO: 5975420 - DNA, 25 bp, Homo sapien
gttctctgaccatgatgctagctgt

SEQ ID NO: 5975421 - DNA, 25 bp, Homo sapien
tcttcttcagctcgtcaagacgttt

SEQ ID NO: 5975422 - DNA, 25 bp, Homo sapien
gcggccttcttctctctcatcaccg

SEQ ID NO: 5975423 - DNA, 25 bp, Homo sapien
aactcctgtgccgtatcaccccagc

SEQ ID NO: 5975424 - DNA, 25 bp, Homo sapien
tcccctttgttgtaaccaaaccagc

SEQ ID NO: 5975425 - DNA, 25 bp, Homo sapien
caagtcctccttcgccttagataac

SEQ ID NO: 5975426 - DNA, 25 bp, Homo sapien
tcttaaatcgtccatttcgtccttg

SEQ ID NO: 5975427 - DNA, 25 bp, Homo sapien
tggcttcctccaactcttctctacc

SEQ ID NO: 5975428 - DNA, 25 bp, Homo sapien
gtcttttaacgacaaggcatcttcc

SEQ ID NO: 5975429 - DNA, 25 bp, Homo sapien
ctcttcgaaacgcttcttagcagta

SEQ ID NO: 5975430 - DNA, 25 bp, Homo sapien
ccttctcattacgatccactgcctc

SEQ ID NO: 5975431 - DNA, 25 bp, Homo sapien
atacgcccagaagcgcgtcttttaa

SEQ ID NO: 5975432 - DNA, 25 bp, Homo sapien
agtcctttttcgagctccagaattt

SEQ ID NO: 5975433 - DNA, 25 bp, Homo sapien
tttaacgacaaggcatcttccttta

SEQ ID NO: 5975434 - DNA, 25 bp, Homo sapien
ctcataattccatcttaaatcgtcc

SEQ ID NO: 5975435 - DNA, 25 bp, Homo sapien
ctctctcatcaccgtggacaagagc

SEQ ID NO: 5975436 - DNA, 25 bp, Homo sapien
ctaccaaactcctgtgccgtatcac

SEQ ID NO: 5975437 - DNA, 25 bp, Homo sapien
ttgcgtgtctgagcatcctcttccg

SEQ ID NO: 5975438 - DNA, 25 bp, Homo sapien
cagagcggccttcttctctctcatc

SEQ ID NO: 5975439 - DNA, 25 bp, Homo sapien
taccatcacccttatcattccattc

SEQ ID NO: 5975440 - DNA, 25 bp, Homo sapien
ttccttgatcttcttcagctcgtca

SEQ ID NO: 5975441 - DNA, 25 bp, Homo sapien
ttggcttcatcgtactttttcaacg

SEQ ID NO: 5975442 - DNA, 25 bp, Homo sapien
ctctaccaaactcctgtgccgtatc

SEQ ID NO: 5975443 - DNA, 25 bp, Homo sapien
tttgcgaggaagaatccttggcttt

SEQ ID NO: 5975444 - DNA, 25 bp, Homo sapien
ttggacacttcttgcagcggcttct

SEQ ID NO: 5975445 - DNA, 25 bp, Homo sapien
ttcctccaactcttctctaccaaac

SEQ ID NO: 5975446 - DNA, 25 bp, Homo sapien
tcgcttggctctgaagaagcatttc

SEQ ID NO: 5975447 - DNA, 25 bp, Homo sapien
gagcatcctcttccggtgatatcac

SEQ ID NO: 5975448 - DNA, 25 bp, Homo sapien
cctccaactcttctctaccaaactc

SEQ ID NO: 5975449 - DNA, 25 bp, Homo sapien
gctttttggcctagctgcttgcgtg

SEQ ID NO: 5975450 - DNA, 25 bp, Homo sapien
tctgacccttggccttctgttctct

SEQ ID NO: 5975451 - DNA, 25 bp, Homo sapien
tgggggtgctgaactgccgtactcc

SEQ ID NO: 5975452 - DNA, 25 bp, Homo sapien
tctggctctcccgtacctttcgtac

SEQ ID NO: 5975453 - DNA, 25 bp, Homo sapien
ggcctcatcttttaaagcctgcttg

SEQ ID NO: 5975454 - DNA, 25 bp, Homo sapien
catgatgctagctgtgatggcagct

SEQ ID NO: 5975455 - DNA, 25 bp, Homo sapien
gttcttggcttcatcgtactttttc

SEQ ID NO: 5975456 - DNA, 25 bp, Homo sapien
aggcgtttcaaaggattactgttcc

SEQ ID NO: 5975457 - DNA, 25 bp, Homo sapien
catcttaaatcgtccatttcgtcct

SEQ ID NO: 5975458 - DNA, 25 bp, Homo sapien
tccagttgtttctttgaattctcat

SEQ ID NO: 5975459 - DNA, 25 bp, Homo sapien
cgtactgtttcaagtcctccttcgc

SEQ ID NO: 5975460 - DNA, 25 bp, Homo sapien
gcatcctcttccggtgatatcacac

SEQ ID NO: 5975461 - DNA, 25 bp, Homo sapien
ctaaacccccaattgaagatgcttt

SEQ ID NO: 5975462 - DNA, 25 bp, Homo sapien
acttcttttgggcctcatcttttaa

SEQ ID NO: 5975463 - DNA, 25 bp, Homo sapien
caaactcctgtgccgtatcacccca

SEQ ID NO: 5975464 - DNA, 25 bp, Homo sapien
gaactgccgtactcctggccgttgt

SEQ ID NO: 5975465 - DNA, 25 bp, Homo sapien
tttaaagcctgcttgtcattgtcga

SEQ ID NO: 5975466 - DNA, 25 bp, Homo sapien
ccagaatttaccatcacccttatca

SEQ ID NO: 5975467 - DNA, 25 bp, Homo sapien
cataattccatcttaaatcgtccat

SEQ ID NO: 5975468 - DNA, 25 bp, Homo sapien
tttggcctagctgcttgcgtgtctg

SEQ ID NO: 5975469 - DNA, 25 bp, Homo sapien
caaaggattactgttcctttcctgt

SEQ ID NO: 5975470 - DNA, 25 bp, Homo sapien
attcttcaacaggcgtttcaaagga

SEQ ID NO: 5975471 - DNA, 25 bp, Homo sapien
ccccagccttggacacttcttgcag

SEQ ID NO: 5975472 - DNA, 25 bp, Homo sapien
gtagctttcccaactgtgggggtgc

SEQ ID NO: 5975473 - DNA, 25 bp, Homo sapien
gcactgccgacaattattcttgatg

SEQ ID NO: 5975474 - DNA, 25 bp, Homo sapien
gagcctcttccctagccttttgaga

SEQ ID NO: 5975475 - DNA, 25 bp, Homo sapien
cttttgagatacgcccagaagcgcg

SEQ ID NO: 5975476 - DNA, 25 bp, Homo sapien
ttctttgaatttgttcttggcttca

SEQ ID NO: 5975477 - DNA, 25 bp, Homo sapien
aaacccccaattgaagatgctttgc

SEQ ID NO: 5975478 - DNA, 25 bp, Homo sapien
ttccccgatggctatggctttcctt

SEQ ID NO: 5975479 - DNA, 25 bp, Homo sapien
catggcatcggacacgttcttatcc

SEQ ID NO: 5975480 - DNA, 25 bp, Homo sapien
tttttggcctagctgcttgcgtgtc

SEQ ID NO: 5975481 - DNA, 25 bp, Homo sapien
gctatggctttccttctttcagcct

SEQ ID NO: 5975482 - DNA, 25 bp, Homo sapien
ccaaaccagcccttttccttgatct

SEQ ID NO: 5975483 - DNA, 25 bp, Homo sapien
catttcgtccttggaaagttgagcg

SEQ ID NO: 5975484 - DNA, 25 bp, Homo sapien
tccttggctttttggcctagctgct

SEQ ID NO: 5975485 - DNA, 25 bp, Homo sapien
gctgtgatggcagctgccaatgctg

SEQ ID NO: 5975486 - DNA, 25 bp, Homo sapien
tggctctcccgtacctttcgtactc

SEQ ID NO: 5975487 - DNA, 25 bp, Homo sapien
ggctacccgttcagcaatctgttgc

SEQ ID NO: 5975488 - DNA, 25 bp, Homo sapien
tgccgacaattattcttgatgacat

SEQ ID NO: 5975489 - DNA, 25 bp, Homo sapien
acccttggccttctgttctctgacc

SEQ ID NO: 5975490 - DNA, 25 bp, Homo sapien
gaagtccatccagaccaccagtggc

SEQ ID NO: 5975491 - DNA, 25 bp, Homo sapien
ctagctgcttgcgtgtctgagcatc

SEQ ID NO: 5975492 - DNA, 25 bp, Homo sapien
ctcctgtgccgtatcaccccagcct

SEQ ID NO: 5975493 - DNA, 25 bp, Homo sapien
ttagcagtatcaaattccccgatgg

SEQ ID NO: 5975494 - DNA, 25 bp, Homo sapien
aaagctcattaaagtctctggctct

SEQ ID NO: 5975495 - DNA, 25 bp, Homo sapien
ggccgttgtagtaagcggagacgtt

SEQ ID NO: 5975496 - DNA, 25 bp, Homo sapien
aacgcttcttagcagtatcaaattc

SEQ ID NO: 5975497 - DNA, 25 bp, Homo sapien
ccaccagtggctgccgtactgtttc

SEQ ID NO: 5975498 - DNA, 25 bp, Homo sapien
cgagtccatggcatcggacacgttc

SEQ ID NO: 5975499 - DNA, 25 bp, Homo sapien
ttatgtagctttcccaactgtgggg

SEQ ID NO: 5975500 - DNA, 25 bp, Homo sapien
ttacgatccactgcctcttcgaaac

SEQ ID NO: 5975501 - DNA, 25 bp, Homo sapien
ctgccgtactgtttcaagtcctcct

SEQ ID NO: 5975502 - DNA, 25 bp, Homo sapien
ggccttctgttctctgaccatgatg

SEQ ID NO: 5975503 - DNA, 25 bp, Homo sapien
agacgttgccctctcttctctgacc

SEQ ID NO: 5975504 - DNA, 25 bp, Homo sapien
gctctcccgtacctttcgtactcaa

SEQ ID NO: 5975505 - DNA, 25 bp, Homo sapien
cacgttcttatccagttgtttcttt

SEQ ID NO: 5975506 - DNA, 25 bp, Homo sapien
gcggagacgttgccctctcttctct

SEQ ID NO: 5975507 - DNA, 25 bp, Homo sapien
tcgtccttggaaagttgagcggctg

SEQ ID NO: 5975508 - DNA, 25 bp, Homo sapien
tcgaaacgcttcttagcagtatcaa

SEQ ID NO: 5975509 - DNA, 25 bp, Homo sapien
tctgaccatgatgctagctgtgatg

SEQ ID NO: 5975510 - DNA, 25 bp, Homo sapien
tatggctttccttctttcagcctca

SEQ ID NO: 5975511 - DNA, 25 bp, Homo sapien
atcctcttccggtgatatcacacgc

SEQ ID NO: 5975512 - DNA, 25 bp, Homo sapien
cctcttccggtgatatcacacgctt

SEQ ID NO: 5975513 - DNA, 25 bp, Homo sapien
cagtattagcgtcacccgtgttatt

SEQ ID NO: 5975514 - DNA, 25 bp, Homo sapien
gatggctatggctttccttctttca

SEQ ID NO: 5975515 - DNA, 25 bp, Homo sapien
tgctgcactgccgacaattattctt

SEQ ID NO: 5975516 - DNA, 25 bp, Homo sapien
tcttctctaccaaactcctgtgccg

SEQ ID NO: 5975517 - DNA, 25 bp, Homo sapien
ccttggacacttcttgcagcggctt

SEQ ID NO: 5975518 - DNA, 25 bp, Homo sapien
tttgggcctcatcttttaaagcctg

SEQ ID NO: 5975519 - DNA, 25 bp, Homo sapien
gtactcctggccgttgtagtaagcg

SEQ ID NO: 5975520 - DNA, 25 bp, Homo sapien
ggacacttcttgcagcggcttcttc

SEQ ID NO: 5975521 - DNA, 25 bp, Homo sapien
ctttcgtactcaatggatgctctgt

SEQ ID NO: 5975522 - DNA, 25 bp, Homo sapien
gcgcgtcttttaacgacaaggcatc

SEQ ID NO: 5975523 - DNA, 25 bp, Homo sapien
acctctggctacccgttcagcaatc

SEQ ID NO: 5975524 - DNA, 25 bp, Homo sapien
agctgcttgcgtgtctgagcatcct

SEQ ID NO: 5975525 - DNA, 25 bp, Homo sapien
gcatcggacacgttcttatccagtt

SEQ ID NO: 5975526 - DNA, 25 bp, Homo sapien
tccctagccttttgagatacgccca

SEQ ID NO: 5975527 - DNA, 25 bp, Homo sapien
gtatcaaattccccgatggctatgg

SEQ ID NO: 5975528 - DNA, 25 bp, Homo sapien
gcttcctccaactcttctctaccaa

SEQ ID NO: 5975529 - DNA, 25 bp, Homo sapien
cctcgcttggctctgaagaagcatt

SEQ ID NO: 5975530 - DNA, 25 bp, Homo sapien
atggcagctgccaatgctgcactgc

SEQ ID NO: 5975531 - DNA, 25 bp, Homo sapien
cattctttgaatttgttcttggctt

SEQ ID NO: 5975532 - DNA, 25 bp, Homo sapien
tagctgtgatggcagctgccaatgc

SEQ ID NO: 5975533 - DNA, 25 bp, Homo sapien
tcttcaacaggcgtttcaaaggatt

SEQ ID NO: 5975534 - DNA, 25 bp, Homo sapien
caactgtgggggtgctgaactgccg

SEQ ID NO: 5975535 - DNA, 25 bp, Homo sapien
cgcttcttagcagtatcaaattccc

SEQ ID NO: 5975536 - DNA, 25 bp, Homo sapien
ttctaaacctctggctacccgttca

SEQ ID NO: 5975537 - DNA, 25 bp, Homo sapien
tttaccatcacccttatcattccat

SEQ ID NO: 5975538 - DNA, 25 bp, Homo sapien
agccttggacacttcttgcagcggc

SEQ ID NO: 5975539 - DNA, 25 bp, Homo sapien
gccttttgagatacgcccagaagcg

SEQ ID NO: 5975540 - DNA, 25 bp, Homo sapien
gcttgtcattgtcgaccttggaagt

SEQ ID NO: 5975541 - DNA, 25 bp, Homo sapien
tcttcagtattagcgtcacccgtgt

SEQ ID NO: 5975542 - DNA, 25 bp, Homo sapien
gatccactgcctcttcgaaacgctt

SEQ ID NO: 5975543 - DNA, 25 bp, Homo sapien
gcctgcttgtcattgtcgaccttgg

SEQ ID NO: 5975544 - DNA, 25 bp, Homo sapien
caatggatgctctgtccagagcggc

SEQ ID NO: 5975545 - DNA, 25 bp, Homo sapien
tgtgatggcagctgccaatgctgca

SEQ ID NO: 5975546 - DNA, 25 bp, Homo sapien
acgttgccctctcttctctgaccct

SEQ ID NO: 5975547 - DNA, 25 bp, Homo sapien
ttttcgagctccagaatttaccatc

SEQ ID NO: 5975548 - DNA, 25 bp, Homo sapien
gttggtctagcttgtccgaaagctc

SEQ ID NO: 5975549 - DNA, 25 bp, Homo sapien
aatccttggctttttggcctagctg

SEQ ID NO: 5975550 - DNA, 25 bp, Homo sapien
gcccttttccttgatcttcttcagc

SEQ ID NO: 5975551 - DNA, 25 bp, Homo sapien
ctgagcatcctcttccggtgatatc

SEQ ID NO: 5975552 - DNA, 25 bp, Homo sapien
ctccttctcattacgatccactgcc

SEQ ID NO: 5975553 - DNA, 25 bp, Homo sapien
gagcggctgtttcaccccatccttc

SEQ ID NO: 5975554 - DNA, 25 bp, Homo sapien
aacgagtccatggcatcggacacgt

SEQ ID NO: 5975555 - DNA, 25 bp, Homo sapien
agctcgtcaagacgtttttgcgcct

SEQ ID NO: 5975556 - DNA, 25 bp, Homo sapien
tgttatgtagctttcccaactgtgg

SEQ ID NO: 5975557 - DNA, 25 bp, Homo sapien
tccagaccaccagtggctgccgtac

SEQ ID NO: 5975558 - DNA, 25 bp, Homo sapien
tttttgcgcctcgcttggctctgaa

SEQ ID NO: 5975559 - DNA, 25 bp, Homo sapien
aggattactgttcctttcctgttgg

SEQ ID NO: 5975560 - DNA, 25 bp, Homo sapien
tagtaagcggagacgttgccctctc

SEQ ID NO: 5975561 - DNA, 25 bp, Homo sapien
gttgtagtaagcggagacgttgccc

SEQ ID NO: 5975562 - DNA, 25 bp, Homo sapien
agatgctttgcgaggaagaatcctt

SEQ ID NO: 5975563 - DNA, 25 bp, Homo sapien
ttattcttcaacaggcgtttcaaag

SEQ ID NO: 5975564 - DNA, 25 bp, Homo sapien
ccgtacctttcgtactcaatggatg

SEQ ID NO: 5975565 - DNA, 25 bp, Homo sapien
ccaattgaagatgctttgcgaggaa

SEQ ID NO: 5975566 - DNA, 25 bp, Homo sapien
ctgcttgtcattgtcgaccttggaa

SEQ ID NO: 5975567 - DNA, 25 bp, Homo sapien
gctttatgttatgtagctttcccaa

SEQ ID NO: 5975568 - DNA, 25 bp, Homo sapien
gcccagaagcgcgtcttttaacgac

SEQ ID NO: 5975569 - DNA, 25 bp, Homo sapien
cagtatcaaattccccgatggctat

SEQ ID NO: 5975570 - DNA, 25 bp, Homo sapien
cttttgggcctcatcttttaaagcc

SEQ ID NO: 5975571 - DNA, 25 bp, Homo sapien
cccaactgtgggggtgctgaactgc

SEQ ID NO: 5975572 - DNA, 25 bp, Homo sapien
tcttagcagtatcaaattccccgat

SEQ ID NO: 5975573 - DNA, 25 bp, Homo sapien
gctagctgtgatggcagctgccaat

SEQ ID NO: 5975574 - DNA, 25 bp, Homo sapien
gacaagagctccttctcattacgat

SEQ ID NO: 5975575 - DNA, 25 bp, Homo sapien
ccccaattgaagatgctttgcgagg

SEQ ID NO: 5975576 - DNA, 25 bp, Homo sapien
ttactgttcctttcctgttggtcta

SEQ ID NO: 5975577 - DNA, 25 bp, Homo sapien
attccatcttaaatcgtccatttcg

SEQ ID NO: 5975578 - DNA, 25 bp, Homo sapien
gtattagcgtcacccgtgttattct

SEQ ID NO: 5975579 - DNA, 25 bp, Homo sapien
agaatccttggctttttggcctagc

SEQ ID NO: 5975580 - DNA, 25 bp, Homo sapien
gtggctgccgtactgtttcaagtcc

SEQ ID NO: 5975581 - DNA, 25 bp, Homo sapien
gacaaggcatcttcctttatgcctt

SEQ ID NO: 5975582 - DNA, 25 bp, Homo sapien
ttcaacaggcgtttcaaaggattac

SEQ ID NO: 5975583 - DNA, 25 bp, Homo sapien
cgaaagctcattaaagtctctggct

SEQ ID NO: 5975584 - DNA, 25 bp, Homo sapien
ggcatcttcctttatgccttgcttt

SEQ ID NO: 5975585 - DNA, 25 bp, Homo sapien
tcatcgtactttttcaacgcttcat

SEQ ID NO: 5975586 - DNA, 25 bp, Homo sapien
atcaaattccccgatggctatggct

SEQ ID NO: 5975587 - DNA, 25 bp, Homo sapien
catcgtacttcttttgggcctcatc

SEQ ID NO: 5975588 - DNA, 25 bp, Homo sapien
ggcttcatcgtactttttcaacgct

SEQ ID NO: 5975589 - DNA, 25 bp, Homo sapien
cctcatcttttaaagcctgcttgtc

SEQ ID NO: 5975590 - DNA, 25 bp, Homo sapien
acccccaattgaagatgctttgcga

SEQ ID NO: 5975591 - DNA, 25 bp, Homo sapien
agcagtatcaaattccccgatggct

SEQ ID NO: 5975592 - DNA, 25 bp, Homo sapien
ttcttcagctcgtcaagacgttttt

SEQ ID NO: 5975593 - DNA, 25 bp, Homo sapien
gtcattgtcgaccttggaagtccat

SEQ ID NO: 5975594 - DNA, 25 bp, Homo sapien
gcttcatcgtacttcttttgggcct

SEQ ID NO: 5975595 - DNA, 25 bp, Homo sapien
cttcatcgtactttttcaacgcttc

SEQ ID NO: 5975596 - DNA, 25 bp, Homo sapien
agctcattaaagtctctggctctcc

SEQ ID NO: 5975597 - DNA, 25 bp, Homo sapien
gacacgttcttatccagttgtttct

SEQ ID NO: 5975598 - DNA, 25 bp, Homo sapien
aagcctgcttgtcattgtcgacctt

SEQ ID NO: 5975599 - DNA, 25 bp, Homo sapien
ttttccttgatcttcttcagctcgt

SEQ ID NO: 5975600 - DNA, 25 bp, Homo sapien
tcctccttcgccttagataacgagt

SEQ ID NO: 5975601 - DNA, 25 bp, Homo sapien
tgtagtaagcggagacgttgccctc

SEQ ID NO: 5975602 - DNA, 25 bp, Homo sapien
ttggctctgaagaagcatttctctt

SEQ ID NO: 5975603 - DNA, 25 bp, Homo sapien
ttagataacgagtccatggcatcgg

SEQ ID NO: 5975604 - DNA, 25 bp, Homo sapien
ttcaagtcctccttcgccttagata

SEQ ID NO: 5975605 - DNA, 25 bp, Homo sapien
ttgctttatgttatgtagctttccc

SEQ ID NO: 5975606 - DNA, 25 bp, Homo sapien
ctttcagcctcactaaacccccaat

SEQ ID NO: 5975607 - DNA, 25 bp, Homo sapien
tggcctagctgcttgcgtgtctgag

SEQ ID NO: 5975608 - DNA, 25 bp, Homo sapien
gctgccaatgctgcactgccgacaa

SEQ ID NO: 5975609 - DNA, 25 bp, Homo sapien
ggcttcttcagtattagcgtcaccc

SEQ ID NO: 5975610 - DNA, 25 bp, Homo sapien
ttgaatttgttcttggcttcatcgt

SEQ ID NO: 5975611 - DNA, 25 bp, Homo sapien
cctttatgccttgctttatgttatg

SEQ ID NO: 5975612 - DNA, 25 bp, Homo sapien
cacgcttagttacctttggagcctc

SEQ ID NO: 5975613 - DNA, 25 bp, Homo sapien
actgccgtactcctggccgttgtag

SEQ ID NO: 5975614 - DNA, 25 bp, Homo sapien
aatttaccatcacccttatcattcc

SEQ ID NO: 5975615 - DNA, 25 bp, Homo sapien
agctccttctcattacgatccactg

SEQ ID NO: 5975616 - DNA, 25 bp, Homo sapien
ctgtttcaagtcctccttcgcctta

SEQ ID NO: 5975617 - DNA, 25 bp, Homo sapien
cgaggaagaatccttggctttttgg

SEQ ID NO: 5975618 - DNA, 25 bp, Homo sapien
tttggagcctcttccctagcctttt

SEQ ID NO: 5975619 - DNA, 25 bp, Homo sapien
gtccttggaaagttgagcggctgtt

SEQ ID NO: 5975620 - DNA, 25 bp, Homo sapien
tcctggccgttgtagtaagcggaga

SEQ ID NO: 5975621 - DNA, 25 bp, Homo sapien
atggatgctctgtccagagcggcct

SEQ ID NO: 5975622 - DNA, 25 bp, Homo sapien
cctttcctgttggtctagcttgtcc

SEQ ID NO: 5975623 - DNA, 25 bp, Homo sapien
ttggccttctgttctctgaccatga

SEQ ID NO: 5975624 - DNA, 25 bp, Homo sapien
tctgtccagagcggccttcttctct

SEQ ID NO: 5975625 - DNA, 25 bp, Homo sapien
atcacacgcttagttacctttggag

SEQ ID NO: 5975626 - DNA, 25 bp, Homo sapien
tactttttcaacgcttcatcgtact

SEQ ID NO: 5975627 - DNA, 25 bp, Homo sapien
cgtggacaagagctccttctcatta

SEQ ID NO: 5975628 - DNA, 25 bp, Homo sapien
agctccagaatttaccatcaccctt

SEQ ID NO: 5975629 - DNA, 25 bp, Homo sapien
ctcttggcttcctccaactcttctc

SEQ ID NO: 5975630 - DNA, 25 bp, Homo sapien
aaagtctctggctctcccgtacctt

SEQ ID NO: 5975631 - DNA, 25 bp, Homo sapien
gaatttgttcttggcttcatcgtac

SEQ ID NO: 5975632 - DNA, 25 bp, Homo sapien
tggagcctcttccctagccttttga

SEQ ID NO: 5975633 - DNA, 25 bp, Homo sapien
atgctttgcgaggaagaatccttgg

SEQ ID NO: 5975634 - DNA, 25 bp, Homo sapien
ggctctgaagaagcatttctcttgg

SEQ ID NO: 5975635 - DNA, 25 bp, Homo sapien
agaagcgcgtcttttaacgacaagg

SEQ ID NO: 5975636 - DNA, 25 bp, Homo sapien
acgcccagaagcgcgtcttttaacg

SEQ ID NO: 5975637 - DNA, 25 bp, Homo sapien
gtacctttcgtactcaatggatgct

SEQ ID NO: 5975638 - DNA, 25 bp, Homo sapien
gtatcaccccagccttggacacttc

SEQ ID NO: 5975639 - DNA, 25 bp, Homo sapien
ggctgccgtactgtttcaagtcctc

SEQ ID NO: 5975640 - DNA, 25 bp, Homo sapien
ttcccaactgtgggggtgctgaact

SEQ ID NO: 5975641 - DNA, 25 bp, Homo sapien
aaaccagcccttttccttgatcttc

SEQ ID NO: 5975642 - DNA, 25 bp, Homo sapien
gctttgctcccctttgttgtaacca

SEQ ID NO: 5975643 - DNA, 25 bp, Homo sapien
tccaactcttctctaccaaactcct

SEQ ID NO: 5975644 - DNA, 25 bp, Homo sapien
ccgtatcaccccagccttggacact

SEQ ID NO: 5975645 - DNA, 25 bp, Homo sapien
ctctgaagaagcatttctcttggct

SEQ ID NO: 5975646 - DNA, 25 bp, Homo sapien
ctacccgttcagcaatctgttgctc

SEQ ID NO: 5975647 - DNA, 25 bp, Homo sapien
cttctctgacccttggccttctgtt

SEQ ID NO: 5975648 - DNA, 25 bp, Homo sapien
ctgaactgccgtactcctggccgtt

SEQ ID NO: 5975649 - DNA, 25 bp, Homo sapien
taaccaaaccagcccttttccttga

SEQ ID NO: 5975650 - DNA, 25 bp, Homo sapien
tccatggcatcggacacgttcttat

SEQ ID NO: 5975651 - DNA, 25 bp, Homo sapien
ggcagctgccaatgctgcactgccg

SEQ ID NO: 5975652 - DNA, 25 bp, Homo sapien
attagcgtcacccgtgttattcttc

SEQ ID NO: 5975653 - DNA, 25 bp, Homo sapien
agttgagcggctgtttcaccccatc

SEQ ID NO: 5975654 - DNA, 25 bp, Homo sapien
ttcaaaggattactgttcctttcct

SEQ ID NO: 5975655 - DNA, 25 bp, Homo sapien
ttcctttcctgttggtctagcttgt

SEQ ID NO: 5975656 - DNA, 25 bp, Homo sapien
tttcctgttggtctagcttgtccga

SEQ ID NO: 5975657 - DNA, 25 bp, Homo sapien
gcttgcgtgtctgagcatcctcttc

SEQ ID NO: 5975658 - DNA, 25 bp, Homo sapien
aagcatttctcttggcttcctccaa

SEQ ID NO: 5975659 - DNA, 25 bp, Homo sapien
tccattctttgaatttgttcttggc

SEQ ID NO: 5975660 - DNA, 25 bp, Homo sapien
cggacacgttcttatccagttgttt

SEQ ID NO: 5975661 - DNA, 25 bp, Homo sapien
tgatggcagctgccaatgctgcact

SEQ ID NO: 5975662 - DNA, 25 bp, Homo sapien
ctgttggtctagcttgtccgaaagc

SEQ ID NO: 5975663 - DNA, 25 bp, Homo sapien
cttcgaaacgcttcttagcagtatc

SEQ ID NO: 5975664 - DNA, 25 bp, Homo sapien
cattgtcgaccttggaagtccatcc

SEQ ID NO: 5975665 - DNA, 25 bp, Homo sapien
tccatttcgtccttggaaagttgag

SEQ ID NO: 5975666 - DNA, 25 bp, Homo sapien
gctttccttctttcagcctcactaa

SEQ ID NO: 5975667 - DNA, 25 bp, Homo sapien
ttcttatccagttgtttctttgaat

SEQ ID NO: 5975668 - DNA, 25 bp, Homo sapien
tctctgacccttggccttctgttct

SEQ ID NO: 5975669 - DNA, 25 bp, Homo sapien
ttcctttatgccttgctttatgtta

SEQ ID NO: 5975670 - DNA, 25 bp, Homo sapien
gaaacgcttcttagcagtatcaaat

SEQ ID NO: 5975671 - DNA, 25 bp, Homo sapien
ttctctctcatcaccgtggacaaga

SEQ ID NO: 5975672 - DNA, 25 bp, Homo sapien
tgaccatgatgctagctgtgatggc

SEQ ID NO: 5975673 - DNA, 25 bp, Homo sapien
ttccggtgatatcacacgcttagtt

SEQ ID NO: 5975674 - DNA, 25 bp, Homo sapien
cttttaacgacaaggcatcttcctt

SEQ ID NO: 5975675 - DNA, 25 bp, Homo sapien
atcggacacgttcttatccagttgt

SEQ ID NO: 5975676 - DNA, 25 bp, Homo sapien
ttcgagctccagaatttaccatcac

SEQ ID NO: 5975677 - DNA, 25 bp, Homo sapien
cactgcctcttcgaaacgcttctta

SEQ ID NO: 5975678 - DNA, 25 bp, Homo sapien
ctagcttgtccgaaagctcattaaa

SEQ ID NO: 5975679 - DNA, 25 bp, Homo sapien
tagttacctttggagcctcttccct

SEQ ID NO: 5975680 - DNA, 25 bp, Homo sapien
aaagttgagcggctgtttcacccca

SEQ ID NO: 5975681 - DNA, 25 bp, Homo sapien
actgtgggggtgctgaactgccgta

SEQ ID NO: 5975682 - DNA, 25 bp, Homo sapien
cccatccttctaaacctctggctac

SEQ ID NO: 5975683 - DNA, 25 bp, Homo sapien
ttcttttgggcctcatcttttaaag

SEQ ID NO: 5975684 - DNA, 25 bp, Homo sapien
ttcatcgtacttcttttgggcctca

SEQ ID NO: 5975685 - DNA, 25 bp, Homo sapien
ctaaacctctggctacccgttcagc

SEQ ID NO: 5975686 - DNA, 25 bp, Homo sapien
caactcttctctaccaaactcctgt

SEQ ID NO: 5975687 - DNA, 25 bp, Homo sapien
tttccttctttcagcctcactaaac

SEQ ID NO: 5975688 - DNA, 25 bp, Homo sapien
ctctcttctctgacccttggccttc

SEQ ID NO: 5975689 - DNA, 25 bp, Homo sapien
tgttattcttcaacaggcgtttcaa

SEQ ID NO: 5975690 - DNA, 25 bp, Homo sapien
agaagcatttctcttggcttcctcc

SEQ ID NO: 5975691 - DNA, 25 bp, Homo sapien
ttctctaccaaactcctgtgccgta

SEQ ID NO: 5975692 - DNA, 25 bp, Homo sapien
tgcgaggaagaatccttggcttttt

SEQ ID NO: 5975693 - DNA, 25 bp, Homo sapien
cgtccatttcgtccttggaaagttg

SEQ ID NO: 5975694 - DNA, 25 bp, Homo sapien
aagacgtttttgcgcctcgcttggc

SEQ ID NO: 5975695 - DNA, 25 bp, Homo sapien
agtccatccagaccaccagtggctg

SEQ ID NO: 5975696 - DNA, 25 bp, Homo sapien
actcttctctaccaaactcctgtgc

SEQ ID NO: 5975697 - DNA, 25 bp, Homo sapien
tttatgccttgctttatgttatgta

SEQ ID NO: 5975698 - DNA, 25 bp, Homo sapien
gaagaatccttggctttttggccta

SEQ ID NO: 5975699 - DNA, 25 bp, Homo sapien
ccctctcttctctgacccttggcct

SEQ ID NO: 5975700 - DNA, 25 bp, Homo sapien
ggaaggtgagggcaacgacgaagat

SEQ ID NO: 5975701 - DNA, 25 bp, Homo sapien
agaacgatttagagattgacgagga

SEQ ID NO: 5975702 - DNA, 25 bp, Homo sapien
ggtcatcctgtccactctgcagaac

SEQ ID NO: 5975703 - DNA, 25 bp, Homo sapien
atcctgtccactctgcagaacttcg

SEQ ID NO: 5975704 - DNA, 25 bp, Homo sapien
cgatgcggttgagggtcgtggatgt

SEQ ID NO: 5975705 - DNA, 25 bp, Homo sapien
ctgctctgtgcccatcctcgcggtt

SEQ ID NO: 5975706 - DNA, 25 bp, Homo sapien
taagggaggaagagttcctcaagtg

SEQ ID NO: 5975707 - DNA, 25 bp, Homo sapien
gctagactccagcaagccctggata

SEQ ID NO: 5975708 - DNA, 25 bp, Homo sapien
gaggccgggaaccaaaggtccttca

SEQ ID NO: 5975709 - DNA, 25 bp, Homo sapien
gacctcgacgtcgtcgtcctctcct

SEQ ID NO: 5975710 - DNA, 25 bp, Homo sapien
tcgtctgctctgtgcccatcctcgc

SEQ ID NO: 5975711 - DNA, 25 bp, Homo sapien
tgttacccaacttttgtaccagcat

SEQ ID NO: 5975712 - DNA, 25 bp, Homo sapien
agggccagtagccgcagcagagtaa

SEQ ID NO: 5975713 - DNA, 25 bp, Homo sapien
tggacgaggaagagtccgatgaaga

SEQ ID NO: 5975714 - DNA, 25 bp, Homo sapien
ctgtttgactgcgtcgcgggcgtgc

SEQ ID NO: 5975715 - DNA, 25 bp, Homo sapien
agaagaaaagaggcgaacgagactc

SEQ ID NO: 5975716 - DNA, 25 bp, Homo sapien
tttgtaccagcataaacgaagtgct

SEQ ID NO: 5975717 - DNA, 25 bp, Homo sapien
gaaagaggtcgtagcaagaagaaaa

SEQ ID NO: 5975718 - DNA, 25 bp, Homo sapien
cataaacgaagtgctagactccagc

SEQ ID NO: 5975719 - DNA, 25 bp, Homo sapien
ggaggctacgtcagagccatgcaac

SEQ ID NO: 5975720 - DNA, 25 bp, Homo sapien
gggtcgtggatgtggattctgaaga

SEQ ID NO: 5975721 - DNA, 25 bp, Homo sapien
gactaaacctgacggaacacaatcg

SEQ ID NO: 5975722 - DNA, 25 bp, Homo sapien
ggccgggaaccaaaggtccttcatc

SEQ ID NO: 5975723 - DNA, 25 bp, Homo sapien
tagactccagcaagccctggatagc

SEQ ID NO: 5975724 - DNA, 25 bp, Homo sapien
agttccactacgatctgggcatgaa

SEQ ID NO: 5975725 - DNA, 25 bp, Homo sapien
accgtgttgaggcaggacccctcga

SEQ ID NO: 5975726 - DNA, 25 bp, Homo sapien
ccatgcaactactcaccaagggtgc

SEQ ID NO: 5975727 - DNA, 25 bp, Homo sapien
agcacgtcatgcacctgtttgactg

SEQ ID NO: 5975728 - DNA, 25 bp, Homo sapien
aaccaaaggtccttcatcctctaca

SEQ ID NO: 5975729 - DNA, 25 bp, Homo sapien
agtagccgcagcagagtaagggagg

SEQ ID NO: 5975730 - DNA, 25 bp, Homo sapien
catcctcgcggttagaaagaagctg

SEQ ID NO: 5975731 - DNA, 25 bp, Homo sapien
gaaaagaggcgaacgagactcaaac

SEQ ID NO: 5975732 - DNA, 25 bp, Homo sapien
acattgtccactgggagccctcgaa

SEQ ID NO: 5975733 - DNA, 25 bp, Homo sapien
cgacggcgacgatatggacgaggaa

SEQ ID NO: 5975734 - DNA, 25 bp, Homo sapien
cgcagcagagtaagggaggaagagt

SEQ ID NO: 5975735 - DNA, 25 bp, Homo sapien
accaagggtgccggcgcagaggccg

SEQ ID NO: 5975736 - DNA, 25 bp, Homo sapien
cctcgacgtcgtcgtcctctccttg

SEQ ID NO: 5975737 - DNA, 25 bp, Homo sapien
catcctctacacggacctgagcagc

SEQ ID NO: 5975738 - DNA, 25 bp, Homo sapien
gcgcagaggccgggaaccaaaggtc

SEQ ID NO: 5975739 - DNA, 25 bp, Homo sapien
ggagttccactacgatctgggcatg

SEQ ID NO: 5975740 - DNA, 25 bp, Homo sapien
tcggtcatcctgtccactctgcaga

SEQ ID NO: 5975741 - DNA, 25 bp, Homo sapien
agcagtctgtcgcggtcgagaagca

SEQ ID NO: 5975742 - DNA, 25 bp, Homo sapien
atgaagagcaagtgagcgatataga

SEQ ID NO: 5975743 - DNA, 25 bp, Homo sapien
aggggccacagggaaagaggtcgta

SEQ ID NO: 5975744 - DNA, 25 bp, Homo sapien
tctcatgggcgcagctgtcaaccag

SEQ ID NO: 5975745 - DNA, 25 bp, Homo sapien
ctctgcagaacttcgtctgctctgt

SEQ ID NO: 5975746 - DNA, 25 bp, Homo sapien
cgggcgtgctcgacgacctcgacgt

SEQ ID NO: 5975747 - DNA, 25 bp, Homo sapien
gcaactcgacggaggctacgtcaga

SEQ ID NO: 5975748 - DNA, 25 bp, Homo sapien
agcaagtgagcgatatagagaacga

SEQ ID NO: 5975749 - DNA, 25 bp, Homo sapien
tcctctacacggacctgagcagcga

SEQ ID NO: 5975750 - DNA, 25 bp, Homo sapien
tccactctgcagaacttcgtctgct

SEQ ID NO: 5975751 - DNA, 25 bp, Homo sapien
gcagaacttcgtctgctctgtgccc

SEQ ID NO: 5975752 - DNA, 25 bp, Homo sapien
ccctggatagccaagtacgagatca

SEQ ID NO: 5975753 - DNA, 25 bp, Homo sapien
ggcgacggcgacgatatggacgagg

SEQ ID NO: 5975754 - DNA, 25 bp, Homo sapien
atccgtacccaaaacacctcctcaa

SEQ ID NO: 5975755 - DNA, 25 bp, Homo sapien
gatccacggcctcaagccagtcgcc

SEQ ID NO: 5975756 - DNA, 25 bp, Homo sapien
aacttttgtaccagcataaacgaag

SEQ ID NO: 5975757 - DNA, 25 bp, Homo sapien
gatgtggattctgaagaggaaggtg

SEQ ID NO: 5975758 - DNA, 25 bp, Homo sapien
agccctggatagccaagtacgagat

SEQ ID NO: 5975759 - DNA, 25 bp, Homo sapien
agagttcctcaagtggaccgtgttg

SEQ ID NO: 5975760 - DNA, 25 bp, Homo sapien
cgatgaagagcaagtgagcgatata

SEQ ID NO: 5975761 - DNA, 25 bp, Homo sapien
aacttcgtctgctctgtgcccatcc

SEQ ID NO: 5975762 - DNA, 25 bp, Homo sapien
ctgtcaaccagggagacaccgtcta

SEQ ID NO: 5975763 - DNA, 25 bp, Homo sapien
ggtcgtagcaagaagaaaagaggcg

SEQ ID NO: 5975764 - DNA, 25 bp, Homo sapien
acgagatcagcatccgtggccacga

SEQ ID NO: 5975765 - DNA, 25 bp, Homo sapien
gactccagcaagccctggatagcca

SEQ ID NO: 5975766 - DNA, 25 bp, Homo sapien
gaggagttccactacgatctgggca

SEQ ID NO: 5975767 - DNA, 25 bp, Homo sapien
attgacgaggagttccactacgatc

SEQ ID NO: 5975768 - DNA, 25 bp, Homo sapien
aatcagaaagcacgtcatgcacctg

SEQ ID NO: 5975769 - DNA, 25 bp, Homo sapien
caagaagaaaagaggcgaacgagac

SEQ ID NO: 5975770 - DNA, 25 bp, Homo sapien
caaaacacctcctcaacgagatgat

SEQ ID NO: 5975771 - DNA, 25 bp, Homo sapien
catccgtggccacgaaaacgaagac

SEQ ID NO: 5975772 - DNA, 25 bp, Homo sapien
gactcaaacgtgagcagtctgtcgc

SEQ ID NO: 5975773 - DNA, 25 bp, Homo sapien
ggtgagggcaacgacgaagatgacg

SEQ ID NO: 5975774 - DNA, 25 bp, Homo sapien
atgatccacggcctcaagccagtcg

SEQ ID NO: 5975775 - DNA, 25 bp, Homo sapien
aagtggaccgtgttgaggcaggacc

SEQ ID NO: 5975776 - DNA, 25 bp, Homo sapien
actcaccaagggtgccggcgcagag

SEQ ID NO: 5975777 - DNA, 25 bp, Homo sapien
ctccttgacccatccgtacccaaaa

SEQ ID NO: 5975778 - DNA, 25 bp, Homo sapien
agagaacgatttagagattgacgag

SEQ ID NO: 5975779 - DNA, 25 bp, Homo sapien
gccggcgcagaggccgggaaccaaa

SEQ ID NO: 5975780 - DNA, 25 bp, Homo sapien
cacggacgactcccagatgttcgcc

SEQ ID NO: 5975781 - DNA, 25 bp, Homo sapien
taccagcataaacgaagtgctagac

SEQ ID NO: 5975782 - DNA, 25 bp, Homo sapien
cacggtggagttcgactcggagcag

SEQ ID NO: 5975783 - DNA, 25 bp, Homo sapien
gggagacaccgtctacattgtccac

SEQ ID NO: 5975784 - DNA, 25 bp, Homo sapien
aacgatttagagattgacgaggagt

SEQ ID NO: 5975785 - DNA, 25 bp, Homo sapien
acgttgccagaatcagaaagcacgt

SEQ ID NO: 5975786 - DNA, 25 bp, Homo sapien
atgcaactactcaccaagggtgccg

SEQ ID NO: 5975787 - DNA, 25 bp, Homo sapien
cctatctcatgggcgcagctgtcaa

SEQ ID NO: 5975788 - DNA, 25 bp, Homo sapien
ttagagattgacgaggagttccact

SEQ ID NO: 5975789 - DNA, 25 bp, Homo sapien
gaacgagactcaaacgtgagcagtc

SEQ ID NO: 5975790 - DNA, 25 bp, Homo sapien
cgaagatgacgacgacggcgacggc

SEQ ID NO: 5975791 - DNA, 25 bp, Homo sapien
cgtcctctccttgacccatccgtac

SEQ ID NO: 5975792 - DNA, 25 bp, Homo sapien
cgtgccaagcgcaagggcatcagcg

SEQ ID NO: 5975793 - DNA, 25 bp, Homo sapien
tccactgggagccctcgaagcccac

SEQ ID NO: 5975794 - DNA, 25 bp, Homo sapien
aaaggtccttcatcctctacacgga

SEQ ID NO: 5975795 - DNA, 25 bp, Homo sapien
agggaggaagagttcctcaagtgga

SEQ ID NO: 5975796 - DNA, 25 bp, Homo sapien
cgtacccaaaacacctcctcaacga

SEQ ID NO: 5975797 - DNA, 25 bp, Homo sapien
acgacgacggcgacggcgacgatat

SEQ ID NO: 5975798 - DNA, 25 bp, Homo sapien
gcagggccagtagccgcagcagagt

SEQ ID NO: 5975799 - DNA, 25 bp, Homo sapien
cgaaaacgaagacgtgtctctggag

SEQ ID NO: 5975800 - DNA, 25 bp, Homo sapien
gtacgagatcagcatccgtggccac

SEQ ID NO: 5975801 - DNA, 25 bp, Homo sapien
aagaagctgaaacgtgccaagcgca

SEQ ID NO: 5975802 - DNA, 25 bp, Homo sapien
caaccagggagacaccgtctacatt

SEQ ID NO: 5975803 - DNA, 25 bp, Homo sapien
gtgctagactccagcaagccctgga

SEQ ID NO: 5975804 - DNA, 25 bp, Homo sapien
acctgagcagcgagtccacctacgc

SEQ ID NO: 5975805 - DNA, 25 bp, Homo sapien
gcgtcgcgggcgtgctcgacgacct

SEQ ID NO: 5975806 - DNA, 25 bp, Homo sapien
cgtcgtcgtcctctccttgacccat

SEQ ID NO: 5975807 - DNA, 25 bp, Homo sapien
gcagaggccgggaaccaaaggtcct

SEQ ID NO: 5975808 - DNA, 25 bp, Homo sapien
cacagggaaagaggtcgtagcaaga

SEQ ID NO: 5975809 - DNA, 25 bp, Homo sapien
aggaagagttcctcaagtggaccgt

SEQ ID NO: 5975810 - DNA, 25 bp, Homo sapien
cccacggacgactcccagatgttcg

SEQ ID NO: 5975811 - DNA, 25 bp, Homo sapien
tctggagcaactcgacggaggctac

SEQ ID NO: 5975812 - DNA, 25 bp, Homo sapien
acgcccaccacggtggagttcgact

SEQ ID NO: 5975813 - DNA, 25 bp, Homo sapien
cgagatgatccacggcctcaagcca

SEQ ID NO: 5975814 - DNA, 25 bp, Homo sapien
agtaagggaggaagagttcctcaag

SEQ ID NO: 5975815 - DNA, 25 bp, Homo sapien
taaacgaagtgctagactccagcaa

SEQ ID NO: 5975816 - DNA, 25 bp, Homo sapien
ctaaacctgacggaacacaatcgaa

SEQ ID NO: 5975817 - DNA, 25 bp, Homo sapien
accagggagacaccgtctacattgt

SEQ ID NO: 5975818 - DNA, 25 bp, Homo sapien
ctactcaccaagggtgccggcgcag

SEQ ID NO: 5975819 - DNA, 25 bp, Homo sapien
caagtgagcgatatagagaacgatt

SEQ ID NO: 5975820 - DNA, 25 bp, Homo sapien
cgggaaccaaaggtccttcatcctc

SEQ ID NO: 5975821 - DNA, 25 bp, Homo sapien
gttagaaagaagctgaaacgtgcca

SEQ ID NO: 5975822 - DNA, 25 bp, Homo sapien
cactgggagccctcgaagcccacgg

SEQ ID NO: 5975823 - DNA, 25 bp, Homo sapien
gtcgagaagcagggccagtagccgc

SEQ ID NO: 5975824 - DNA, 25 bp, Homo sapien
agagccatgcaactactcaccaagg

SEQ ID NO: 5975825 - DNA, 25 bp, Homo sapien
attgtccactgggagccctcgaagc

SEQ ID NO: 5975826 - DNA, 25 bp, Homo sapien
tcaccaagggtgccggcgcagaggc

SEQ ID NO: 5975827 - DNA, 25 bp, Homo sapien
cgacggcgacggcgacgatatggac

SEQ ID NO: 5975828 - DNA, 25 bp, Homo sapien
tgtctctggagcaactcgacggagg

SEQ ID NO: 5975829 - DNA, 25 bp, Homo sapien
gagggtcgtggatgtggattctgaa

SEQ ID NO: 5975830 - DNA, 25 bp, Homo sapien
ccaagtacgagatcagcatccgtgg

SEQ ID NO: 5975831 - DNA, 25 bp, Homo sapien
agcaagaagaaaagaggcgaacgag

SEQ ID NO: 5975832 - DNA, 25 bp, Homo sapien
gccaacgttgccagaatcagaaagc

SEQ ID NO: 5975833 - DNA, 25 bp, Homo sapien
tgctgctccctctcggtcatcctgt

SEQ ID NO: 5975834 - DNA, 25 bp, Homo sapien
ggcaggacccctcgatgcggttgag

SEQ ID NO: 5975835 - DNA, 25 bp, Homo sapien
cagggagacaccgtctacattgtcc

SEQ ID NO: 5975836 - DNA, 25 bp, Homo sapien
tctgtgcccatcctcgcggttagaa

SEQ ID NO: 5975837 - DNA, 25 bp, Homo sapien
aatcgaatctacacagcatcaaaac

SEQ ID NO: 5975838 - DNA, 25 bp, Homo sapien
gtcgtcctctccttgacccatccgt

SEQ ID NO: 5975839 - DNA, 25 bp, Homo sapien
agccaagtacgagatcagcatccgt

SEQ ID NO: 5975840 - DNA, 25 bp, Homo sapien
tgttgaggcaggacccctcgatgcg

SEQ ID NO: 5975841 - DNA, 25 bp, Homo sapien
aacgtgccaagcgcaagggcatcag

SEQ ID NO: 5975842 - DNA, 25 bp, Homo sapien
gcccaccacggtggagttcgactcg

SEQ ID NO: 5975843 - DNA, 25 bp, Homo sapien
atatagagaacgatttagagattga

SEQ ID NO: 5975844 - DNA, 25 bp, Homo sapien
acctgacggaacacaatcgaatcta

SEQ ID NO: 5975845 - DNA, 25 bp, Homo sapien
gcctcaagccagtcgccctgtgctg

SEQ ID NO: 5975846 - DNA, 25 bp, Homo sapien
tccacctacgccctgacctatctca

SEQ ID NO: 5975847 - DNA, 25 bp, Homo sapien
cgacggaggctacgtcagagccatg

SEQ ID NO: 5975848 - DNA, 25 bp, Homo sapien
tacgatctgggcatgaaagtgttac

SEQ ID NO: 5975849 - DNA, 25 bp, Homo sapien
aagacgtgtctctggagcaactcga

SEQ ID NO: 5975850 - DNA, 25 bp, Homo sapien
tcggagcagatggaaaggggccaca

SEQ ID NO: 5975851 - DNA, 25 bp, Homo sapien
agcataaacgaagtgctagactcca

SEQ ID NO: 5975852 - DNA, 25 bp, Homo sapien
ctctacacggacctgagcagcgagt

SEQ ID NO: 5975853 - DNA, 25 bp, Homo sapien
agctgtcaaccagggagacaccgtc

SEQ ID NO: 5975854 - DNA, 25 bp, Homo sapien
acccaacttttgtaccagcataaac

SEQ ID NO: 5975855 - DNA, 25 bp, Homo sapien
aaaacgaagacgtgtctctggagca

SEQ ID NO: 5975856 - DNA, 25 bp, Homo sapien
gacgtcgtcgtcctctccttgaccc

SEQ ID NO: 5975857 - DNA, 25 bp, Homo sapien
ccaccacggtggagttcgactcgga

SEQ ID NO: 5975858 - DNA, 25 bp, Homo sapien
cgcggttagaaagaagctgaaacgt

SEQ ID NO: 5975859 - DNA, 25 bp, Homo sapien
tgagcgatatagagaacgatttaga

SEQ ID NO: 5975860 - DNA, 25 bp, Homo sapien
tagccgcagcagagtaagggaggaa

SEQ ID NO: 5975861 - DNA, 25 bp, Homo sapien
ccaaaggtccttcatcctctacacg

SEQ ID NO: 5975862 - DNA, 25 bp, Homo sapien
gggcgcagctgtcaaccagggagac

SEQ ID NO: 5975863 - DNA, 25 bp, Homo sapien
ttgactgcgtcgcgggcgtgctcga

SEQ ID NO: 5975864 - DNA, 25 bp, Homo sapien
cggttagaaagaagctgaaacgtgc

SEQ ID NO: 5975865 - DNA, 25 bp, Homo sapien
gaaaggggccacagggaaagaggtc

SEQ ID NO: 5975866 - DNA, 25 bp, Homo sapien
gcgaacgagactcaaacgtgagcag

SEQ ID NO: 5975867 - DNA, 25 bp, Homo sapien
gccgcagcagagtaagggaggaaga

SEQ ID NO: 5975868 - DNA, 25 bp, Homo sapien
atattgctgactaaacctgacggaa

SEQ ID NO: 5975869 - DNA, 25 bp, Homo sapien
acggcgacgatatggacgaggaaga

SEQ ID NO: 5975870 - DNA, 25 bp, Homo sapien
cgagaagcagggccagtagccgcag

SEQ ID NO: 5975871 - DNA, 25 bp, Homo sapien
ccctgacctatctcatgggcgcagc

SEQ ID NO: 5975872 - DNA, 25 bp, Homo sapien
acacctcctcaacgagatgatccac

SEQ ID NO: 5975873 - DNA, 25 bp, Homo sapien
gttgccagaatcagaaagcacgtca

SEQ ID NO: 5975874 - DNA, 25 bp, Homo sapien
ctcgacgacctcgacgtcgtcgtcc

SEQ ID NO: 5975875 - DNA, 25 bp, Homo sapien
ctgcagaacttcgtctgctctgtgc

SEQ ID NO: 5975876 - DNA, 25 bp, Homo sapien
agggcaacgacgaagatgacgacga

SEQ ID NO: 5975877 - DNA, 25 bp, Homo sapien
cgtggatgtggattctgaagaggaa

SEQ ID NO: 5975878 - DNA, 25 bp, Homo sapien
ctccagcaagccctggatagccaag

SEQ ID NO: 5975879 - DNA, 25 bp, Homo sapien
agaagagcatattgctgactaaacc

SEQ ID NO: 5975880 - DNA, 25 bp, Homo sapien
cgactcccagatgttcgccaacgtt

SEQ ID NO: 5975881 - DNA, 25 bp, Homo sapien
tcagaaagcacgtcatgcacctgtt

SEQ ID NO: 5975882 - DNA, 25 bp, Homo sapien
cgacgatatggacgaggaagagtcc

SEQ ID NO: 5975883 - DNA, 25 bp, Homo sapien
caagccctggatagccaagtacgag

SEQ ID NO: 5975884 - DNA, 25 bp, Homo sapien
cgatttagagattgacgaggagttc

SEQ ID NO: 5975885 - DNA, 25 bp, Homo sapien
gaagagttcctcaagtggaccgtgt

SEQ ID NO: 5975886 - DNA, 25 bp, Homo sapien
aagagcatattgctgactaaacctg

SEQ ID NO: 5975887 - DNA, 25 bp, Homo sapien
tgtgctgctccctctcggtcatcct

SEQ ID NO: 5975888 - DNA, 25 bp, Homo sapien
tatggacgaggaagagtccgatgaa

SEQ ID NO: 5975889 - DNA, 25 bp, Homo sapien
agttcctcaagtggaccgtgttgag

SEQ ID NO: 5975890 - DNA, 25 bp, Homo sapien
gagacaccgtctacattgtccactg

SEQ ID NO: 5975891 - DNA, 25 bp, Homo sapien
tggccacgaaaacgaagacgtgtct

SEQ ID NO: 5975892 - DNA, 25 bp, Homo sapien
agtgagcgatatagagaacgattta

SEQ ID NO: 5975893 - DNA, 25 bp, Homo sapien
ctcctcaacgagatgatccacggcc

SEQ ID NO: 5975894 - DNA, 25 bp, Homo sapien
aactcgacggaggctacgtcagagc

SEQ ID NO: 5975895 - DNA, 25 bp, Homo sapien
ggccagtagccgcagcagagtaagg

SEQ ID NO: 5975896 - DNA, 25 bp, Homo sapien
aaggtgagggcaacgacgaagatga

SEQ ID NO: 5975897 - DNA, 25 bp, Homo sapien
acaatcgaatctacacagcatcaaa

SEQ ID NO: 5975898 - DNA, 25 bp, Homo sapien
tggagcaactcgacggaggctacgt

SEQ ID NO: 5975899 - DNA, 25 bp, Homo sapien
agagattgacgaggagttccactac

SEQ ID NO: 5975900 - DNA, 25 bp, Homo sapien
gatatggacgaggaagagtccgatg

SEQ ID NO: 5975901 - DNA, 25 bp, Homo sapien
gaagagcaagtgagcgatatagaga

SEQ ID NO: 5975902 - DNA, 25 bp, Homo sapien
acgaggagttccactacgatctggg

SEQ ID NO: 5975903 - DNA, 25 bp, Homo sapien
tcatgcacctgtttgactgcgtcgc

SEQ ID NO: 5975904 - DNA, 25 bp, Homo sapien
gcggttgagggtcgtggatgtggat

SEQ ID NO: 5975905 - DNA, 25 bp, Homo sapien
attgctgactaaacctgacggaaca

SEQ ID NO: 5975906 - DNA, 25 bp, Homo sapien
ctacacggacctgagcagcgagtcc

SEQ ID NO: 5975907 - DNA, 25 bp, Homo sapien
ggattctgaagaggaaggtgagggc

SEQ ID NO: 5975908 - DNA, 25 bp, Homo sapien
tgacgaggagttccactacgatctg

SEQ ID NO: 5975909 - DNA, 25 bp, Homo sapien
ttcatcctctacacggacctgagca

SEQ ID NO: 5975910 - DNA, 25 bp, Homo sapien
ctctccttgacccatccgtacccaa

SEQ ID NO: 5975911 - DNA, 25 bp, Homo sapien
tgccaagcgcaagggcatcagcgag

SEQ ID NO: 5975912 - DNA, 25 bp, Homo sapien
gtcgcggtcgagaagcagggccagt

SEQ ID NO: 5975913 - DNA, 25 bp, Homo sapien
aagaaaagaggcgaacgagactcaa

SEQ ID NO: 5975914 - DNA, 25 bp, Homo sapien
atttagagattgacgaggagttcca

SEQ ID NO: 5975915 - DNA, 25 bp, Homo sapien
tcgtagcaagaagaaaagaggcgaa

SEQ ID NO: 5975916 - DNA, 25 bp, Homo sapien
gctctgtgcccatcctcgcggttag

SEQ ID NO: 5975917 - DNA, 25 bp, Homo sapien
cacggcctcaagccagtcgccctgt

SEQ ID NO: 5975918 - DNA, 25 bp, Homo sapien
gaggtcgtagcaagaagaaaagagg

SEQ ID NO: 5975919 - DNA, 25 bp, Homo sapien
cccatcctcgcggttagaaagaagc

SEQ ID NO: 5975920 - DNA, 25 bp, Homo sapien
acgagactcaaacgtgagcagtctg

SEQ ID NO: 5975921 - DNA, 25 bp, Homo sapien
ccagcaagccctggatagccaagta

SEQ ID NO: 5975922 - DNA, 25 bp, Homo sapien
gagcagcgagtccacctacgccctg

SEQ ID NO: 5975923 - DNA, 25 bp, Homo sapien
gagactcaaacgtgagcagtctgtc

SEQ ID NO: 5975924 - DNA, 25 bp, Homo sapien
agccagtcgccctgtgctgctccct

SEQ ID NO: 5975925 - DNA, 25 bp, Homo sapien
ctcaagccagtcgccctgtgctgct

SEQ ID NO: 5975926 - DNA, 25 bp, Homo sapien
gggaaagaggtcgtagcaagaagaa

SEQ ID NO: 5975927 - DNA, 25 bp, Homo sapien
aaacacctcctcaacgagatgatcc

SEQ ID NO: 5975928 - DNA, 25 bp, Homo sapien
cgatatagagaacgatttagagatt

SEQ ID NO: 5975929 - DNA, 25 bp, Homo sapien
tcgaagcccacggacgactcccaga

SEQ ID NO: 5975930 - DNA, 25 bp, Homo sapien
atgttcgccaacgttgccagaatca

SEQ ID NO: 5975931 - DNA, 25 bp, Homo sapien
gccacgaaaacgaagacgtgtctct

SEQ ID NO: 5975932 - DNA, 25 bp, Homo sapien
gccctcgaagcccacggacgactcc

SEQ ID NO: 5975933 - DNA, 25 bp, Homo sapien
acggacctgagcagcgagtccacct

SEQ ID NO: 5975934 - DNA, 25 bp, Homo sapien
ccagtagccgcagcagagtaaggga

SEQ ID NO: 5975935 - DNA, 25 bp, Homo sapien
agattgacgaggagttccactacga

SEQ ID NO: 5975936 - DNA, 25 bp, Homo sapien
ctggatagccaagtacgagatcagc

SEQ ID NO: 5975937 - DNA, 25 bp, Homo sapien
gtccttcatcctctacacggacctg

SEQ ID NO: 5975938 - DNA, 25 bp, Homo sapien
cactctgcagaacttcgtctgctct

SEQ ID NO: 5975939 - DNA, 25 bp, Homo sapien
tagaaagaagctgaaacgtgccaag

SEQ ID NO: 5975940 - DNA, 25 bp, Homo sapien
aaacgcccaccacggtggagttcga

SEQ ID NO: 5975941 - DNA, 25 bp, Homo sapien
cgaggaagagtccgatgaagagcaa

SEQ ID NO: 5975942 - DNA, 25 bp, Homo sapien
gctacgtcagagccatgcaactact

SEQ ID NO: 5975943 - DNA, 25 bp, Homo sapien
tacgtcagagccatgcaactactca

SEQ ID NO: 5975944 - DNA, 25 bp, Homo sapien
ccagtcgccctgtgctgctccctct

SEQ ID NO: 5975945 - DNA, 25 bp, Homo sapien
aggtccttcatcctctacacggacc

SEQ ID NO: 5975946 - DNA, 25 bp, Homo sapien
cggcgcagaggccgggaaccaaagg

SEQ ID NO: 5975947 - DNA, 25 bp, Homo sapien
gatgacgacgacggcgacggcgacg

SEQ ID NO: 5975948 - DNA, 25 bp, Homo sapien
ttcctcaagtggaccgtgttgaggc

SEQ ID NO: 5975949 - DNA, 25 bp, Homo sapien
agtcgccctgtgctgctccctctcg

SEQ ID NO: 5975950 - DNA, 25 bp, Homo sapien
gagcaactcgacggaggctacgtca

SEQ ID NO: 5975951 - DNA, 25 bp, Homo sapien
gaagagtccgatgaagagcaagtga

SEQ ID NO: 5975952 - DNA, 25 bp, Homo sapien
tgtaccagcataaacgaagtgctag

SEQ ID NO: 5975953 - DNA, 25 bp, Homo sapien
ccagaatcagaaagcacgtcatgca

SEQ ID NO: 5975954 - DNA, 25 bp, Homo sapien
aaagcacgtcatgcacctgtttgac

SEQ ID NO: 5975955 - DNA, 25 bp, Homo sapien
ggacctgagcagcgagtccacctac

SEQ ID NO: 5975956 - DNA, 25 bp, Homo sapien
aagtgctagactccagcaagccctg

SEQ ID NO: 5975957 - DNA, 25 bp, Homo sapien
cggaacacaatcgaatctacacagc

SEQ ID NO: 5975958 - DNA, 25 bp, Homo sapien
cgacgacctcgacgtcgtcgtcctc

SEQ ID NO: 5975959 - DNA, 25 bp, Homo sapien
tcagcatccgtggccacgaaaacga

SEQ ID NO: 5975960 - DNA, 25 bp, Homo sapien
gatcagcatccgtggccacgaaaac

SEQ ID NO: 5975961 - DNA, 25 bp, Homo sapien
cgccctgacctatctcatgggcgca

SEQ ID NO: 5975962 - DNA, 25 bp, Homo sapien
gacgaagatgacgacgacggcgacg

SEQ ID NO: 5975963 - DNA, 25 bp, Homo sapien
cgtcatgcacctgtttgactgcgtc

SEQ ID NO: 5975964 - DNA, 25 bp, Homo sapien
ggaccgtgttgaggcaggacccctc

SEQ ID NO: 5975965 - DNA, 25 bp, Homo sapien
tgagcagtctgtcgcggtcgagaag

SEQ ID NO: 5975966 - DNA, 25 bp, Homo sapien
tcgacgtcgtcgtcctctccttgac

SEQ ID NO: 5975967 - DNA, 25 bp, Homo sapien
gcagctgtcaaccagggagacaccg

SEQ ID NO: 5975968 - DNA, 25 bp, Homo sapien
gcacctgtttgactgcgtcgcgggc

SEQ ID NO: 5975969 - DNA, 25 bp, Homo sapien
acccctcgatgcggttgagggtcgt

SEQ ID NO: 5975970 - DNA, 25 bp, Homo sapien
cggtggagttcgactcggagcagat

SEQ ID NO: 5975971 - DNA, 25 bp, Homo sapien
acacaatcgaatctacacagcatca

SEQ ID NO: 5975972 - DNA, 25 bp, Homo sapien
tcctctccttgacccatccgtaccc

SEQ ID NO: 5975973 - DNA, 25 bp, Homo sapien
gggagccctcgaagcccacggacga

SEQ ID NO: 5975974 - DNA, 25 bp, Homo sapien
cgaagtgctagactccagcaagccc

SEQ ID NO: 5975975 - DNA, 25 bp, Homo sapien
cggcctcaagccagtcgccctgtgc

SEQ ID NO: 5975976 - DNA, 25 bp, Homo sapien
cgtgttgaggcaggacccctcgatg

SEQ ID NO: 5975977 - DNA, 25 bp, Homo sapien
cctcgaagcccacggacgactccca

SEQ ID NO: 5975978 - DNA, 25 bp, Homo sapien
aaagaggcgaacgagactcaaacgt

SEQ ID NO: 5975979 - DNA, 25 bp, Homo sapien
ggatagccaagtacgagatcagcat

SEQ ID NO: 5975980 - DNA, 25 bp, Homo sapien
cttcgtctgctctgtgcccatcctc

SEQ ID NO: 5975981 - DNA, 25 bp, Homo sapien
agaagcagggccagtagccgcagca

SEQ ID NO: 5975982 - DNA, 25 bp, Homo sapien
agagtccgatgaagagcaagtgagc

SEQ ID NO: 5975983 - DNA, 25 bp, Homo sapien
gcagagtaagggaggaagagttcct

SEQ ID NO: 5975984 - DNA, 25 bp, Homo sapien
gctccctctcggtcatcctgtccac

SEQ ID NO: 5975985 - DNA, 25 bp, Homo sapien
gcaactactcaccaagggtgccggc

SEQ ID NO: 5975986 - DNA, 25 bp, Homo sapien
ggaggaagagttcctcaagtggacc

SEQ ID NO: 5975987 - DNA, 25 bp, Homo sapien
ctgacctatctcatgggcgcagctg

SEQ ID NO: 5975988 - DNA, 25 bp, Homo sapien
gtctgctctgtgcccatcctcgcgg

SEQ ID NO: 5975989 - DNA, 25 bp, Homo sapien
attctgaagaggaaggtgagggcaa

SEQ ID NO: 5975990 - DNA, 25 bp, Homo sapien
atgcggttgagggtcgtggatgtgg

SEQ ID NO: 5975991 - DNA, 25 bp, Homo sapien
ccctcgatgcggttgagggtcgtgg

SEQ ID NO: 5975992 - DNA, 25 bp, Homo sapien
agagtaagggaggaagagttcctca

SEQ ID NO: 5975993 - DNA, 25 bp, Homo sapien
acggcgacggcgacgatatggacga

SEQ ID NO: 5975994 - DNA, 25 bp, Homo sapien
tatctcatgggcgcagctgtcaacc

SEQ ID NO: 5975995 - DNA, 25 bp, Homo sapien
ttgagggtcgtggatgtggattctg

SEQ ID NO: 5975996 - DNA, 25 bp, Homo sapien
tacccaaaacacctcctcaacgaga

SEQ ID NO: 5975997 - DNA, 25 bp, Homo sapien
caacgttgccagaatcagaaagcac

SEQ ID NO: 5975998 - DNA, 25 bp, Homo sapien
ttgaggcaggacccctcgatgcggt

SEQ ID NO: 5975999 - DNA, 25 bp, Homo sapien
cgatctgggcatgaaagtgttaccc

SEQ ID NO: 5976000 - DNA, 25 bp, Homo sapien
cgtcagagccatgcaactactcacc

SEQ ID NO: 5976001 - DNA, 25 bp, Homo sapien
gagccctcgaagcccacggacgact

SEQ ID NO: 5976002 - DNA, 25 bp, Homo sapien
agaatcagaaagcacgtcatgcacc

SEQ ID NO: 5976003 - DNA, 25 bp, Homo sapien
cggacgactcccagatgttcgccaa

SEQ ID NO: 5976004 - DNA, 25 bp, Homo sapien
gaggcaggacccctcgatgcggttg

SEQ ID NO: 5976005 - DNA, 25 bp, Homo sapien
gacgaggaagagtccgatgaagagc

SEQ ID NO: 5976006 - DNA, 25 bp, Homo sapien
cgtgagcagtctgtcgcggtcgaga

SEQ ID NO: 5976007 - DNA, 25 bp, Homo sapien
atagccaagtacgagatcagcatcc

SEQ ID NO: 5976008 - DNA, 25 bp, Homo sapien
caaacgtgagcagtctgtcgcggtc

SEQ ID NO: 5976009 - DNA, 25 bp, Homo sapien
gtcgtggatgtggattctgaagagg

SEQ ID NO: 5976010 - DNA, 25 bp, Homo sapien
agagcaagtgagcgatatagagaac

SEQ ID NO: 5976011 - DNA, 25 bp, Homo sapien
ggttgagggtcgtggatgtggattc

SEQ ID NO: 5976012 - DNA, 25 bp, Homo sapien
atagagaacgatttagagattgacg

SEQ ID NO: 5976013 - DNA, 25 bp, Homo sapien
ctgactaaacctgacggaacacaat

SEQ ID NO: 5976014 - DNA, 25 bp, Homo sapien
tgtccactctgcagaacttcgtctg

SEQ ID NO: 5976015 - DNA, 25 bp, Homo sapien
cagtctgtcgcggtcgagaagcagg

SEQ ID NO: 5976016 - DNA, 25 bp, Homo sapien
acacggacctgagcagcgagtccac

SEQ ID NO: 5976017 - DNA, 25 bp, Homo sapien
aacgtgagcagtctgtcgcggtcga

SEQ ID NO: 5976018 - DNA, 25 bp, Homo sapien
cctacgccctgacctatctcatggg

SEQ ID NO: 5976019 - DNA, 25 bp, Homo sapien
cttttgtaccagcataaacgaagtg

SEQ ID NO: 5976020 - DNA, 25 bp, Homo sapien
gaaacgtgccaagcgcaagggcatc

SEQ ID NO: 5976021 - DNA, 25 bp, Homo sapien
aagtacgagatcagcatccgtggcc

SEQ ID NO: 5976022 - DNA, 25 bp, Homo sapien
actcggagcagatggaaaggggcca

SEQ ID NO: 5976023 - DNA, 25 bp, Homo sapien
gagcatattgctgactaaacctgac

SEQ ID NO: 5976024 - DNA, 25 bp, Homo sapien
ttccactacgatctgggcatgaaag

SEQ ID NO: 5976025 - DNA, 25 bp, Homo sapien
gaggaaggtgagggcaacgacgaag

SEQ ID NO: 5976026 - DNA, 25 bp, Homo sapien
agaggcgaacgagactcaaacgtga

SEQ ID NO: 5976027 - DNA, 25 bp, Homo sapien
gtctgtcgcggtcgagaagcagggc

SEQ ID NO: 5976028 - DNA, 25 bp, Homo sapien
ctgtcgcggtcgagaagcagggcca

SEQ ID NO: 5976029 - DNA, 25 bp, Homo sapien
ggacccctcgatgcggttgagggtc

SEQ ID NO: 5976030 - DNA, 25 bp, Homo sapien
gcgcagctgtcaaccagggagacac

SEQ ID NO: 5976031 - DNA, 25 bp, Homo sapien
tcagagccatgcaactactcaccaa

SEQ ID NO: 5976032 - DNA, 25 bp, Homo sapien
tcgtcgtcctctccttgacccatcc

SEQ ID NO: 5976033 - DNA, 25 bp, Homo sapien
acctcctcaacgagatgatccacgg

SEQ ID NO: 5976034 - DNA, 25 bp, Homo sapien
gtttgactgcgtcgcgggcgtgctc

SEQ ID NO: 5976035 - DNA, 25 bp, Homo sapien
tccgtggccacgaaaacgaagacgt

SEQ ID NO: 5976036 - DNA, 25 bp, Homo sapien
tgagggcaacgacgaagatgacgac

SEQ ID NO: 5976037 - DNA, 25 bp, Homo sapien
tctcggtcatcctgtccactctgca

SEQ ID NO: 5976038 - DNA, 25 bp, Homo sapien
agaacttcgtctgctctgtgcccat

SEQ ID NO: 5976039 - DNA, 25 bp, Homo sapien
agtccgatgaagagcaagtgagcga

SEQ ID NO: 5976040 - DNA, 25 bp, Homo sapien
atgggcgcagctgtcaaccagggag

SEQ ID NO: 5976041 - DNA, 25 bp, Homo sapien
tcctcgcggttagaaagaagctgaa

SEQ ID NO: 5976042 - DNA, 25 bp, Homo sapien
cgactcggagcagatggaaaggggc

SEQ ID NO: 5976043 - DNA, 25 bp, Homo sapien
tcaacgagatgatccacggcctcaa

SEQ ID NO: 5976044 - DNA, 25 bp, Homo sapien
gccacagggaaagaggtcgtagcaa

SEQ ID NO: 5976045 - DNA, 25 bp, Homo sapien
tcgccaacgttgccagaatcagaaa

SEQ ID NO: 5976046 - DNA, 25 bp, Homo sapien
gtgccggcgcagaggccgggaacca

SEQ ID NO: 5976047 - DNA, 25 bp, Homo sapien
agcatccgtggccacgaaaacgaag

SEQ ID NO: 5976048 - DNA, 25 bp, Homo sapien
ctcgacggaggctacgtcagagcca

SEQ ID NO: 5976049 - DNA, 25 bp, Homo sapien
gtggaccgtgttgaggcaggacccc

SEQ ID NO: 5976050 - DNA, 25 bp, Homo sapien
tctgaagaggaaggtgagggcaacg

SEQ ID NO: 5976051 - DNA, 25 bp, Homo sapien
tccctctcggtcatcctgtccactc

SEQ ID NO: 5976052 - DNA, 25 bp, Homo sapien
gttcgccaacgttgccagaatcaga

SEQ ID NO: 5976053 - DNA, 25 bp, Homo sapien
ccagcataaacgaagtgctagactc

SEQ ID NO: 5976054 - DNA, 25 bp, Homo sapien
gacgtgtctctggagcaactcgacg

SEQ ID NO: 5976055 - DNA, 25 bp, Homo sapien
ctgacggaacacaatcgaatctaca

SEQ ID NO: 5976056 - DNA, 25 bp, Homo sapien
atgaaagtgttacccaacttttgta

SEQ ID NO: 5976057 - DNA, 25 bp, Homo sapien
atgcagaagagcatattgctgacta

SEQ ID NO: 5976058 - DNA, 25 bp, Homo sapien
agatgttcgccaacgttgccagaat

SEQ ID NO: 5976059 - DNA, 25 bp, Homo sapien
tgtgcccatcctcgcggttagaaag

SEQ ID NO: 5976060 - DNA, 25 bp, Homo sapien
ccaagcgcaagggcatcagcgagtg

SEQ ID NO: 5976061 - DNA, 25 bp, Homo sapien
gccctgtgctgctccctctcggtca

SEQ ID NO: 5976062 - DNA, 25 bp, Homo sapien
gagatcagcatccgtggccacgaaa

SEQ ID NO: 5976063 - DNA, 25 bp, Homo sapien
gaacacaatcgaatctacacagcat

SEQ ID NO: 5976064 - DNA, 25 bp, Homo sapien
tgctgactaaacctgacggaacaca

SEQ ID NO: 5976065 - DNA, 25 bp, Homo sapien
atctgggcatgaaagtgttacccaa

SEQ ID NO: 5976066 - DNA, 25 bp, Homo sapien
tgcccatcctcgcggttagaaagaa

SEQ ID NO: 5976067 - DNA, 25 bp, Homo sapien
gtcaaccagggagacaccgtctaca

SEQ ID NO: 5976068 - DNA, 25 bp, Homo sapien
cctcaagtggaccgtgttgaggcag

SEQ ID NO: 5976069 - DNA, 25 bp, Homo sapien
caacgacgaagatgacgacgacggc

SEQ ID NO: 5976070 - DNA, 25 bp, Homo sapien
ggagttcgactcggagcagatggaa

SEQ ID NO: 5976071 - DNA, 25 bp, Homo sapien
aagaggaaggtgagggcaacgacga

SEQ ID NO: 5976072 - DNA, 25 bp, Homo sapien
cacctacgccctgacctatctcatg

SEQ ID NO: 5976073 - DNA, 25 bp, Homo sapien
agatgatccacggcctcaagccagt

SEQ ID NO: 5976074 - DNA, 25 bp, Homo sapien
ccaacttttgtaccagcataaacga

SEQ ID NO: 5976075 - DNA, 25 bp, Homo sapien
acagcatcaaaacggaaacgcccac

SEQ ID NO: 5976076 - DNA, 25 bp, Homo sapien
tgacgacgacggcgacggcgacgat

SEQ ID NO: 5976077 - DNA, 25 bp, Homo sapien
atgcacctgtttgactgcgtcgcgg

SEQ ID NO: 5976078 - DNA, 25 bp, Homo sapien
acgatatggacgaggaagagtccga

SEQ ID NO: 5976079 - DNA, 25 bp, Homo sapien
agcaagccctggatagccaagtacg

SEQ ID NO: 5976080 - DNA, 25 bp, Homo sapien
aacgaagtgctagactccagcaagc

SEQ ID NO: 5976081 - DNA, 25 bp, Homo sapien
agaaagcacgtcatgcacctgtttg

SEQ ID NO: 5976082 - DNA, 25 bp, Homo sapien
atctacacagcatcaaaacggaaac

SEQ ID NO: 5976083 - DNA, 25 bp, Homo sapien
gacgactcccagatgttcgccaacg

SEQ ID NO: 5976084 - DNA, 25 bp, Homo sapien
ggcgacgatatggacgaggaagagt

SEQ ID NO: 5976085 - DNA, 25 bp, Homo sapien
gtggagttcgactcggagcagatgg

SEQ ID NO: 5976086 - DNA, 25 bp, Homo sapien
tcatgggcgcagctgtcaaccaggg

SEQ ID NO: 5976087 - DNA, 25 bp, Homo sapien
gacctatctcatgggcgcagctgtc

SEQ ID NO: 5976088 - DNA, 25 bp, Homo sapien
gcagcgagtccacctacgccctgac

SEQ ID NO: 5976089 - DNA, 25 bp, Homo sapien
tgccagaatcagaaagcacgtcatg

SEQ ID NO: 5976090 - DNA, 25 bp, Homo sapien
ccatccgtacccaaaacacctcctc

SEQ ID NO: 5976091 - DNA, 25 bp, Homo sapien
cccaaaacacctcctcaacgagatg

SEQ ID NO: 5976092 - DNA, 25 bp, Homo sapien
gggcatgaaagtgttacccaacttt

SEQ ID NO: 5976093 - DNA, 25 bp, Homo sapien
ctgctccctctcggtcatcctgtcc

SEQ ID NO: 5976094 - DNA, 25 bp, Homo sapien
aagaggtcgtagcaagaagaaaaga

SEQ ID NO: 5976095 - DNA, 25 bp, Homo sapien
ttacccaacttttgtaccagcataa

SEQ ID NO: 5976096 - DNA, 25 bp, Homo sapien
aagcagggccagtagccgcagcaga

SEQ ID NO: 5976097 - DNA, 25 bp, Homo sapien
ctgagcagcgagtccacctacgccc

SEQ ID NO: 5976098 - DNA, 25 bp, Homo sapien
agcatcaaaacggaaacgcccacca

SEQ ID NO: 5976099 - DNA, 25 bp, Homo sapien
accacggtggagttcgactcggagc

SEQ ID NO: 5976100 - DNA, 25 bp, Homo sapien
catcaaaacggaaacgcccaccacg

SEQ ID NO: 5976101 - DNA, 25 bp, Homo sapien
agcccacggacgactcccagatgtt

SEQ ID NO: 5976102 - DNA, 25 bp, Homo sapien
cacgtcatgcacctgtttgactgcg

SEQ ID NO: 5976103 - DNA, 25 bp, Homo sapien
cctctcggtcatcctgtccactctg

SEQ ID NO: 5976104 - DNA, 25 bp, Homo sapien
tcgccctgtgctgctccctctcggt

SEQ ID NO: 5976105 - DNA, 25 bp, Homo sapien
tggatgtggattctgaagaggaagg

SEQ ID NO: 5976106 - DNA, 25 bp, Homo sapien
gacggaacacaatcgaatctacaca

SEQ ID NO: 5976107 - DNA, 25 bp, Homo sapien
gtcgcgggcgtgctcgacgacctcg

SEQ ID NO: 5976108 - DNA, 25 bp, Homo sapien
acgacgaagatgacgacgacggcga

SEQ ID NO: 5976109 - DNA, 25 bp, Homo sapien
acggaggctacgtcagagccatgca

SEQ ID NO: 5976110 - DNA, 25 bp, Homo sapien
tcgaatctacacagcatcaaaacgg

SEQ ID NO: 5976111 - DNA, 25 bp, Homo sapien
ggcgtgctcgacgacctcgacgtcg

SEQ ID NO: 5976112 - DNA, 25 bp, Homo sapien
ctcgcggttagaaagaagctgaaac

SEQ ID NO: 5976113 - DNA, 25 bp, Homo sapien
gggccacagggaaagaggtcgtagc

SEQ ID NO: 5976114 - DNA, 25 bp, Homo sapien
tccgatgaagagcaagtgagcgata

SEQ ID NO: 5976115 - DNA, 25 bp, Homo sapien
cctcaacgagatgatccacggcctc

SEQ ID NO: 5976116 - DNA, 25 bp, Homo sapien
tcaagtggaccgtgttgaggcagga

SEQ ID NO: 5976117 - DNA, 25 bp, Homo sapien
caagggtgccggcgcagaggccggg

SEQ ID NO: 5976118 - DNA, 25 bp, Homo sapien
aacgaagacgtgtctctggagcaac

SEQ ID NO: 5976119 - DNA, 25 bp, Homo sapien
gtctacattgtccactgggagccct

SEQ ID NO: 5976120 - DNA, 25 bp, Homo sapien
agtccacctacgccctgacctatct

SEQ ID NO: 5976121 - DNA, 25 bp, Homo sapien
ccactacgatctgggcatgaaagtg

SEQ ID NO: 5976122 - DNA, 25 bp, Homo sapien
cagggaaagaggtcgtagcaagaag

SEQ ID NO: 5976123 - DNA, 25 bp, Homo sapien
ccttgacccatccgtacccaaaaca

SEQ ID NO: 5976124 - DNA, 25 bp, Homo sapien
tctctggagcaactcgacggaggct

SEQ ID NO: 5976125 - DNA, 25 bp, Homo sapien
gcagaagagcatattgctgactaaa

SEQ ID NO: 5976126 - DNA, 25 bp, Homo sapien
cgaagacgtgtctctggagcaactc

SEQ ID NO: 5976127 - DNA, 25 bp, Homo sapien
gcatgaaagtgttacccaacttttg

SEQ ID NO: 5976128 - DNA, 25 bp, Homo sapien
cgtgctcgacgacctcgacgtcgtc

SEQ ID NO: 5976129 - DNA, 25 bp, Homo sapien
cgcggtcgagaagcagggccagtag

SEQ ID NO: 5976130 - DNA, 25 bp, Homo sapien
gtagcaagaagaaaagaggcgaacg

SEQ ID NO: 5976131 - DNA, 25 bp, Homo sapien
aactactcaccaagggtgccggcgc

SEQ ID NO: 5976132 - DNA, 25 bp, Homo sapien
aggaagagtccgatgaagagcaagt

SEQ ID NO: 5976133 - DNA, 25 bp, Homo sapien
gaatctacacagcatcaaaacggaa

SEQ ID NO: 5976134 - DNA, 25 bp, Homo sapien
ctgcgtcgcgggcgtgctcgacgac

SEQ ID NO: 5976135 - DNA, 25 bp, Homo sapien
agctgaaacgtgccaagcgcaaggg

SEQ ID NO: 5976136 - DNA, 25 bp, Homo sapien
caggacccctcgatgcggttgaggg

SEQ ID NO: 5976137 - DNA, 25 bp, Homo sapien
acctgtttgactgcgtcgcgggcgt

SEQ ID NO: 5976138 - DNA, 25 bp, Homo sapien
tgctcgacgacctcgacgtcgtcgt

SEQ ID NO: 5976139 - DNA, 25 bp, Homo sapien
aggctacgtcagagccatgcaacta

SEQ ID NO: 5976140 - DNA, 25 bp, Homo sapien
ggaaccaaaggtccttcatcctcta

SEQ ID NO: 5976141 - DNA, 25 bp, Homo sapien
cggtcgagaagcagggccagtagcc

SEQ ID NO: 5976142 - DNA, 25 bp, Homo sapien
gaagcccacggacgactcccagatg

SEQ ID NO: 5976143 - DNA, 25 bp, Homo sapien
tgaagaggaaggtgagggcaacgac

SEQ ID NO: 5976144 - DNA, 25 bp, Homo sapien
gaagctgaaacgtgccaagcgcaag

SEQ ID NO: 5976145 - DNA, 25 bp, Homo sapien
aggcgaacgagactcaaacgtgagc

SEQ ID NO: 5976146 - DNA, 25 bp, Homo sapien
cgtgtctctggagcaactcgacgga

SEQ ID NO: 5976147 - DNA, 25 bp, Homo sapien
cacgaaaacgaagacgtgtctctgg

SEQ ID NO: 5976148 - DNA, 25 bp, Homo sapien
caagccagtcgccctgtgctgctcc

SEQ ID NO: 5976149 - DNA, 25 bp, Homo sapien
tgtccactgggagccctcgaagccc

SEQ ID NO: 5976150 - DNA, 25 bp, Homo sapien
cgtggccacgaaaacgaagacgtgt

SEQ ID NO: 5976151 - DNA, 25 bp, Homo sapien
agttcgactcggagcagatggaaag

SEQ ID NO: 5976152 - DNA, 25 bp, Homo sapien
actcccagatgttcgccaacgttgc

SEQ ID NO: 5976153 - DNA, 25 bp, Homo sapien
ttgacccatccgtacccaaaacacc

SEQ ID NO: 5976154 - DNA, 25 bp, Homo sapien
ctcaaacgtgagcagtctgtcgcgg

SEQ ID NO: 5976155 - DNA, 25 bp, Homo sapien
ctacacagcatcaaaacggaaacgc

SEQ ID NO: 5976156 - DNA, 25 bp, Homo sapien
ggcaacgacgaagatgacgacgacg

SEQ ID NO: 5976157 - DNA, 25 bp, Homo sapien
tcatcctgtccactctgcagaactt

SEQ ID NO: 5976158 - DNA, 25 bp, Homo sapien
actacgatctgggcatgaaagtgtt

SEQ ID NO: 5976159 - DNA, 25 bp, Homo sapien
acgacctcgacgtcgtcgtcctctc

SEQ ID NO: 5976160 - DNA, 25 bp, Homo sapien
agggtgccggcgcagaggccgggaa

SEQ ID NO: 5976161 - DNA, 25 bp, Homo sapien
aacgagatgatccacggcctcaagc

SEQ ID NO: 5976162 - DNA, 25 bp, Homo sapien
gaaagaagctgaaacgtgccaagcg

SEQ ID NO: 5976163 - DNA, 25 bp, Homo sapien
gacccatccgtacccaaaacacctc

SEQ ID NO: 5976164 - DNA, 25 bp, Homo sapien
gcatattgctgactaaacctgacgg

SEQ ID NO: 5976165 - DNA, 25 bp, Homo sapien
ctgggagccctcgaagcccacggac

SEQ ID NO: 5976166 - DNA, 25 bp, Homo sapien
agcgatatagagaacgatttagaga

SEQ ID NO: 5976167 - DNA, 25 bp, Homo sapien
aaacctgacggaacacaatcgaatc

SEQ ID NO: 5976168 - DNA, 25 bp, Homo sapien
ctgggcatgaaagtgttacccaact

SEQ ID NO: 5976169 - DNA, 25 bp, Homo sapien
gactgcgtcgcgggcgtgctcgacg

SEQ ID NO: 5976170 - DNA, 25 bp, Homo sapien
cagcagagtaagggaggaagagttc

SEQ ID NO: 5976171 - DNA, 25 bp, Homo sapien
gacgacggcgacggcgacgatatgg

SEQ ID NO: 5976172 - DNA, 25 bp, Homo sapien
ctcgatgcggttgagggtcgtggat

SEQ ID NO: 5976173 - DNA, 25 bp, Homo sapien
acacagcatcaaaacggaaacgccc

SEQ ID NO: 5976174 - DNA, 25 bp, Homo sapien
cgcgggcgtgctcgacgacctcgac

SEQ ID NO: 5976175 - DNA, 25 bp, Homo sapien
tccacggcctcaagccagtcgccct

SEQ ID NO: 5976176 - DNA, 25 bp, Homo sapien
cctgtccactctgcagaacttcgtc

SEQ ID NO: 5976177 - DNA, 25 bp, Homo sapien
agtgttacccaacttttgtaccagc

SEQ ID NO: 5976178 - DNA, 25 bp, Homo sapien
ctacattgtccactgggagccctcg

SEQ ID NO: 5976179 - DNA, 25 bp, Homo sapien
ggaaacgcccaccacggtggagttc

SEQ ID NO: 5976180 - DNA, 25 bp, Homo sapien
aagatgacgacgacggcgacggcga

SEQ ID NO: 5976181 - DNA, 25 bp, Homo sapien
agccatgcaactactcaccaagggt

SEQ ID NO: 5976182 - DNA, 25 bp, Homo sapien
tacgccctgacctatctcatgggcg

SEQ ID NO: 5976183 - DNA, 25 bp, Homo sapien
ccttcatcctctacacggacctgag

SEQ ID NO: 5976184 - DNA, 25 bp, Homo sapien
gacaccgtctacattgtccactggg

SEQ ID NO: 5976185 - DNA, 25 bp, Homo sapien
cctgtgctgctccctctcggtcatc

SEQ ID NO: 5976186 - DNA, 25 bp, Homo sapien
ttcgactcggagcagatggaaaggg

SEQ ID NO: 5976187 - DNA, 25 bp, Homo sapien
tgtggattctgaagaggaaggtgag

SEQ ID NO: 5976188 - DNA, 25 bp, Homo sapien
caccgtctacattgtccactgggag

SEQ ID NO: 5976189 - DNA, 25 bp, Homo sapien
tcccagatgttcgccaacgttgcca

SEQ ID NO: 5976190 - DNA, 25 bp, Homo sapien
cgagtccacctacgccctgacctat

SEQ ID NO: 5976191 - DNA, 25 bp, Homo sapien
ccgtctacattgtccactgggagcc

SEQ ID NO: 5976192 - DNA, 25 bp, Homo sapien
ctgaaacgtgccaagcgcaagggca

SEQ ID NO: 5976193 - DNA, 25 bp, Homo sapien
ccagatgttcgccaacgttgccaga

SEQ ID NO: 5976194 - DNA, 25 bp, Homo sapien
agcgagtccacctacgccctgacct

SEQ ID NO: 5976195 - DNA, 25 bp, Homo sapien
tggctctgacgtagcctccgtcgag

SEQ ID NO: 5976196 - DNA, 25 bp, Homo sapien
tgtggcccctttccatctgctccga

SEQ ID NO: 5976197 - DNA, 25 bp, Homo sapien
aacactttcatgcccagatcgtagt

SEQ ID NO: 5976198 - DNA, 25 bp, Homo sapien
ccctggttgacagctgcgcccatga

SEQ ID NO: 5976199 - DNA, 25 bp, Homo sapien
ctttctaaccgcgaggatgggcaca

SEQ ID NO: 5976200 - DNA, 25 bp, Homo sapien
ctcaaccgcatcgaggggtcctgcc

SEQ ID NO: 5976201 - DNA, 25 bp, Homo sapien
agtcgtccgtgggcttcgagggctc

SEQ ID NO: 5976202 - DNA, 25 bp, Homo sapien
gccgtcgtcgtcatcttcgtcgttg

SEQ ID NO: 5976203 - DNA, 25 bp, Homo sapien
aacatctgggagtcgtccgtgggct

SEQ ID NO: 5976204 - DNA, 25 bp, Homo sapien
tatatcgctcacttgctcttcatcg

SEQ ID NO: 5976205 - DNA, 25 bp, Homo sapien
ctggttgacagctgcgcccatgaga

SEQ ID NO: 5976206 - DNA, 25 bp, Homo sapien
gtggacaggatgaccgagagggagc

SEQ ID NO: 5976207 - DNA, 25 bp, Homo sapien
ttgaggccgtggatcatctcgttga

SEQ ID NO: 5976208 - DNA, 25 bp, Homo sapien
cggcacccttggtgagtagttgcat

SEQ ID NO: 5976209 - DNA, 25 bp, Homo sapien
tcgccgtcgccgtcgtcgtcatctt

SEQ ID NO: 5976210 - DNA, 25 bp, Homo sapien
gacctttggttcccggcctctgcgc

SEQ ID NO: 5976211 - DNA, 25 bp, Homo sapien
gtgtctccctggttgacagctgcgc

SEQ ID NO: 5976212 - DNA, 25 bp, Homo sapien
ttgctacgacctctttccctgtggc

SEQ ID NO: 5976213 - DNA, 25 bp, Homo sapien
gcccctttccatctgctccgagtcg

SEQ ID NO: 5976214 - DNA, 25 bp, Homo sapien
atccacatccacgaccctcaaccgc

SEQ ID NO: 5976215 - DNA, 25 bp, Homo sapien
gtacggatgggtcaaggagaggacg

SEQ ID NO: 5976216 - DNA, 25 bp, Homo sapien
gaggacgacgacgtcgaggtcgtcg

SEQ ID NO: 5976217 - DNA, 25 bp, Homo sapien
tcttcctcgtccatatcgtcgccgt

SEQ ID NO: 5976218 - DNA, 25 bp, Homo sapien
tggtgggcgtttccgttttgatgct

SEQ ID NO: 5976219 - DNA, 25 bp, Homo sapien
ttcccggcctctgcgccggcaccct

SEQ ID NO: 5976220 - DNA, 25 bp, Homo sapien
gtcttcgttttcgtggccacggatg

SEQ ID NO: 5976221 - DNA, 25 bp, Homo sapien
ccatatcgtcgccgtcgccgtcgtc

SEQ ID NO: 5976222 - DNA, 25 bp, Homo sapien
ttgacagctgcgcccatgagatagg

SEQ ID NO: 5976223 - DNA, 25 bp, Homo sapien
atgggcacagagcagacgaagttct

SEQ ID NO: 5976224 - DNA, 25 bp, Homo sapien
aggacctttggttcccggcctctgc

SEQ ID NO: 5976225 - DNA, 25 bp, Homo sapien
tgctcaggtccgtgtagaggatgaa

SEQ ID NO: 5976226 - DNA, 25 bp, Homo sapien
ccacatccacgaccctcaaccgcat

SEQ ID NO: 5976227 - DNA, 25 bp, Homo sapien
ttcagcttctttctaaccgcgagga

SEQ ID NO: 5976228 - DNA, 25 bp, Homo sapien
gcgacgcagtcaaacaggtgcatga

SEQ ID NO: 5976229 - DNA, 25 bp, Homo sapien
ggtttagtcagcaatatgctcttct

SEQ ID NO: 5976230 - DNA, 25 bp, Homo sapien
aggtggactcgctgctcaggtccgt

SEQ ID NO: 5976231 - DNA, 25 bp, Homo sapien
ccgcgacgcagtcaaacaggtgcat

SEQ ID NO: 5976232 - DNA, 25 bp, Homo sapien
acccttggtgagtagttgcatggct

SEQ ID NO: 5976233 - DNA, 25 bp, Homo sapien
gggcttcgagggctcccagtggaca

SEQ ID NO: 5976234 - DNA, 25 bp, Homo sapien
tcctgcctcaacacggtccacttga

SEQ ID NO: 5976235 - DNA, 25 bp, Homo sapien
gctgcgcccatgagataggtcaggg

SEQ ID NO: 5976236 - DNA, 25 bp, Homo sapien
ttcgagggctcccagtggacaatgt

SEQ ID NO: 5976237 - DNA, 25 bp, Homo sapien
cgtacttggctatccagggcttgct

SEQ ID NO: 5976238 - DNA, 25 bp, Homo sapien
gacgcagtcaaacaggtgcatgacg

SEQ ID NO: 5976239 - DNA, 25 bp, Homo sapien
gactgctcacgtttgagtctcgttc

SEQ ID NO: 5976240 - DNA, 25 bp, Homo sapien
cttctcgaccgcgacagactgctca

SEQ ID NO: 5976241 - DNA, 25 bp, Homo sapien
ttgctggagtctagcacttcgttta

SEQ ID NO: 5976242 - DNA, 25 bp, Homo sapien
caaaagttgggtaacactttcatgc

SEQ ID NO: 5976243 - DNA, 25 bp, Homo sapien
ggacaggatgaccgagagggagcag

SEQ ID NO: 5976244 - DNA, 25 bp, Homo sapien
tgcagagtggacaggatgaccgaga

SEQ ID NO: 5976245 - DNA, 25 bp, Homo sapien
agcctccgtcgagttgctccagaga

SEQ ID NO: 5976246 - DNA, 25 bp, Homo sapien
cccatgagataggtcagggcgtagg

SEQ ID NO: 5976247 - DNA, 25 bp, Homo sapien
ataggtcagggcgtaggtggactcg

SEQ ID NO: 5976248 - DNA, 25 bp, Homo sapien
ctgctccgagtcgaactccaccgtg

SEQ ID NO: 5976249 - DNA, 25 bp, Homo sapien
cgaggtcgtcgagcacgcccgcgac

SEQ ID NO: 5976250 - DNA, 25 bp, Homo sapien
accgcatcgaggggtcctgcctcaa

SEQ ID NO: 5976251 - DNA, 25 bp, Homo sapien
gtgctttctgattctggcaacgttg

SEQ ID NO: 5976252 - DNA, 25 bp, Homo sapien
tctggcaacgttggcgaacatctgg

SEQ ID NO: 5976253 - DNA, 25 bp, Homo sapien
gctggtacaaaagttgggtaacact

SEQ ID NO: 5976254 - DNA, 25 bp, Homo sapien
ttttgggtacggatgggtcaaggag

SEQ ID NO: 5976255 - DNA, 25 bp, Homo sapien
ttgggtaacactttcatgcccagat

SEQ ID NO: 5976256 - DNA, 25 bp, Homo sapien
gtcgtcgagcacgcccgcgacgcag

SEQ ID NO: 5976257 - DNA, 25 bp, Homo sapien
ctgatgcccttgcgcttggcacgtt

SEQ ID NO: 5976258 - DNA, 25 bp, Homo sapien
actggcttgaggccgtggatcatct

SEQ ID NO: 5976259 - DNA, 25 bp, Homo sapien
tctaaatcgttctctatatcgctca

SEQ ID NO: 5976260 - DNA, 25 bp, Homo sapien
gtttatgctggtacaaaagttgggt

SEQ ID NO: 5976261 - DNA, 25 bp, Homo sapien
gcgtaggtggactcgctgctcaggt

SEQ ID NO: 5976262 - DNA, 25 bp, Homo sapien
gaactcttcctcccttactctgctg

SEQ ID NO: 5976263 - DNA, 25 bp, Homo sapien
caccttcctcttcagaatccacatc

SEQ ID NO: 5976264 - DNA, 25 bp, Homo sapien
tggcacgtttcagcttctttctaac

SEQ ID NO: 5976265 - DNA, 25 bp, Homo sapien
cgctgatgcccttgcgcttggcacg

SEQ ID NO: 5976266 - DNA, 25 bp, Homo sapien
tctgacgtagcctccgtcgagttgc

SEQ ID NO: 5976267 - DNA, 25 bp, Homo sapien
gtctcgttcgcctcttttcttcttg

SEQ ID NO: 5976268 - DNA, 25 bp, Homo sapien
acgtgctttctgattctggcaacgt

SEQ ID NO: 5976269 - DNA, 25 bp, Homo sapien
ttcgcctcttttcttcttgctacga

SEQ ID NO: 5976270 - DNA, 25 bp, Homo sapien
gctacgacctctttccctgtggccc

SEQ ID NO: 5976271 - DNA, 25 bp, Homo sapien
gcacgtttcagcttctttctaaccg

SEQ ID NO: 5976272 - DNA, 25 bp, Homo sapien
cttcgttttcgtggccacggatgct

SEQ ID NO: 5976273 - DNA, 25 bp, Homo sapien
cactcgctgatgcccttgcgcttgg

SEQ ID NO: 5976274 - DNA, 25 bp, Homo sapien
catctcgttgaggaggtgttttggg

SEQ ID NO: 5976275 - DNA, 25 bp, Homo sapien
gctcttcatcggactcttcctcgtc

SEQ ID NO: 5976276 - DNA, 25 bp, Homo sapien
tgatctcgtacttggctatccaggg

SEQ ID NO: 5976277 - DNA, 25 bp, Homo sapien
gccgtcgccgtcgtcgtcatcttcg

SEQ ID NO: 5976278 - DNA, 25 bp, Homo sapien
cccttgcgcttggcacgtttcagct

SEQ ID NO: 5976279 - DNA, 25 bp, Homo sapien
gtcaaacaggtgcatgacgtgcttt

SEQ ID NO: 5976280 - DNA, 25 bp, Homo sapien
tcgttttcgtggccacggatgctga

SEQ ID NO: 5976281 - DNA, 25 bp, Homo sapien
gatgaccgagagggagcagcacagg

SEQ ID NO: 5976282 - DNA, 25 bp, Homo sapien
gtagtggaactcctcgtcaatctct

SEQ ID NO: 5976283 - DNA, 25 bp, Homo sapien
catcgaggggtcctgcctcaacacg

SEQ ID NO: 5976284 - DNA, 25 bp, Homo sapien
aaagttgggtaacactttcatgccc

SEQ ID NO: 5976285 - DNA, 25 bp, Homo sapien
ggcgaacatctgggagtcgtccgtg

SEQ ID NO: 5976286 - DNA, 25 bp, Homo sapien
ggttgacagctgcgcccatgagata

SEQ ID NO: 5976287 - DNA, 25 bp, Homo sapien
cccagatcgtagtggaactcctcgt

SEQ ID NO: 5976288 - DNA, 25 bp, Homo sapien
cgttcgcctcttttcttcttgctac

SEQ ID NO: 5976289 - DNA, 25 bp, Homo sapien
gggtcaaggagaggacgacgacgtc

SEQ ID NO: 5976290 - DNA, 25 bp, Homo sapien
cagcacagggcgactggcttgaggc

SEQ ID NO: 5976291 - DNA, 25 bp, Homo sapien
ttcatgcccagatcgtagtggaact

SEQ ID NO: 5976292 - DNA, 25 bp, Homo sapien
ggacgacgacgtcgaggtcgtcgag

SEQ ID NO: 5976293 - DNA, 25 bp, Homo sapien
acacgtcttcgttttcgtggccacg

SEQ ID NO: 5976294 - DNA, 25 bp, Homo sapien
ctttcatgcccagatcgtagtggaa

SEQ ID NO: 5976295 - DNA, 25 bp, Homo sapien
tctctaaatcgttctctatatcgct

SEQ ID NO: 5976296 - DNA, 25 bp, Homo sapien
tagacggtgtctccctggttgacag

SEQ ID NO: 5976297 - DNA, 25 bp, Homo sapien
gtggatcatctcgttgaggaggtgt

SEQ ID NO: 5976298 - DNA, 25 bp, Homo sapien
gacctctttccctgtggcccctttc

SEQ ID NO: 5976299 - DNA, 25 bp, Homo sapien
gttgcatggctctgacgtagcctcc

SEQ ID NO: 5976300 - DNA, 25 bp, Homo sapien
tgatgctgtgtagattcgattgtgt

SEQ ID NO: 5976301 - DNA, 25 bp, Homo sapien
tcgtttatgctggtacaaaagttgg

SEQ ID NO: 5976302 - DNA, 25 bp, Homo sapien
ttactctgctgcggctactggccct

SEQ ID NO: 5976303 - DNA, 25 bp, Homo sapien
gctcacgtttgagtctcgttcgcct

SEQ ID NO: 5976304 - DNA, 25 bp, Homo sapien
gcctctgcgccggcacccttggtga

SEQ ID NO: 5976305 - DNA, 25 bp, Homo sapien
cttcttgctacgacctctttccctg

SEQ ID NO: 5976306 - DNA, 25 bp, Homo sapien
ttctaaccgcgaggatgggcacaga

SEQ ID NO: 5976307 - DNA, 25 bp, Homo sapien
gcgaggatgggcacagagcagacga

SEQ ID NO: 5976308 - DNA, 25 bp, Homo sapien
tcgctcacttgctcttcatcggact

SEQ ID NO: 5976309 - DNA, 25 bp, Homo sapien
acggatgctgatctcgtacttggct

SEQ ID NO: 5976310 - DNA, 25 bp, Homo sapien
acaatgtagacggtgtctccctggt

SEQ ID NO: 5976311 - DNA, 25 bp, Homo sapien
gctggagtctagcacttcgtttatg

SEQ ID NO: 5976312 - DNA, 25 bp, Homo sapien
acggatgggtcaaggagaggacgac

SEQ ID NO: 5976313 - DNA, 25 bp, Homo sapien
ttcctcttcagaatccacatccacg

SEQ ID NO: 5976314 - DNA, 25 bp, Homo sapien
gagaggacgacgacgtcgaggtcgt

SEQ ID NO: 5976315 - DNA, 25 bp, Homo sapien
tccgtcgagttgctccagagacacg

SEQ ID NO: 5976316 - DNA, 25 bp, Homo sapien
ttccgtcaggtttagtcagcaatat

SEQ ID NO: 5976317 - DNA, 25 bp, Homo sapien
gagcacgcccgcgacgcagtcaaac

SEQ ID NO: 5976318 - DNA, 25 bp, Homo sapien
gccctgcttctcgaccgcgacagac

SEQ ID NO: 5976319 - DNA, 25 bp, Homo sapien
ttgagtctcgttcgcctcttttctt

SEQ ID NO: 5976320 - DNA, 25 bp, Homo sapien
actggccctgcttctcgaccgcgac

SEQ ID NO: 5976321 - DNA, 25 bp, Homo sapien
ttgctcttcatcggactcttcctcg

SEQ ID NO: 5976322 - DNA, 25 bp, Homo sapien
gtccgtgggcttcgagggctcccag

SEQ ID NO: 5976323 - DNA, 25 bp, Homo sapien
gagttgctccagagacacgtcttcg

SEQ ID NO: 5976324 - DNA, 25 bp, Homo sapien
agtagttgcatggctctgacgtagc

SEQ ID NO: 5976325 - DNA, 25 bp, Homo sapien
tttggttcccggcctctgcgccggc

SEQ ID NO: 5976326 - DNA, 25 bp, Homo sapien
tgctccagagacacgtcttcgtttt

SEQ ID NO: 5976327 - DNA, 25 bp, Homo sapien
tgaaggacctttggttcccggcctc

SEQ ID NO: 5976328 - DNA, 25 bp, Homo sapien
tagaggatgaaggacctttggttcc

SEQ ID NO: 5976329 - DNA, 25 bp, Homo sapien
tcacttgctcttcatcggactcttc

SEQ ID NO: 5976330 - DNA, 25 bp, Homo sapien
gaggatgggcacagagcagacgaag

SEQ ID NO: 5976331 - DNA, 25 bp, Homo sapien
gtttccgttttgatgctgtgtagat

SEQ ID NO: 5976332 - DNA, 25 bp, Homo sapien
gaggtgttttgggtacggatgggtc

SEQ ID NO: 5976333 - DNA, 25 bp, Homo sapien
gtaacactttcatgcccagatcgta

SEQ ID NO: 5976334 - DNA, 25 bp, Homo sapien
gctcacttgctcttcatcggactct

SEQ ID NO: 5976335 - DNA, 25 bp, Homo sapien
ccagagacacgtcttcgttttcgtg

SEQ ID NO: 5976336 - DNA, 25 bp, Homo sapien
agcagacgaagttctgcagagtgga

SEQ ID NO: 5976337 - DNA, 25 bp, Homo sapien
tctgggagtcgtccgtgggcttcga

SEQ ID NO: 5976338 - DNA, 25 bp, Homo sapien
cgagtcgaactccaccgtggtgggc

SEQ ID NO: 5976339 - DNA, 25 bp, Homo sapien
gaccgcgacagactgctcacgtttg

SEQ ID NO: 5976340 - DNA, 25 bp, Homo sapien
catcggactcttcctcgtccatatc

SEQ ID NO: 5976341 - DNA, 25 bp, Homo sapien
catggctctgacgtagcctccgtcg

SEQ ID NO: 5976342 - DNA, 25 bp, Homo sapien
aggaactcttcctcccttactctgc

SEQ ID NO: 5976343 - DNA, 25 bp, Homo sapien
tagattcgattgtgttccgtcaggt

SEQ ID NO: 5976344 - DNA, 25 bp, Homo sapien
ccctcaaccgcatcgaggggtcctg

SEQ ID NO: 5976345 - DNA, 25 bp, Homo sapien
ctcaggtccgtgtagaggatgaagg

SEQ ID NO: 5976346 - DNA, 25 bp, Homo sapien
tatccagggcttgctggagtctagc

SEQ ID NO: 5976347 - DNA, 25 bp, Homo sapien
cagaatccacatccacgaccctcaa

SEQ ID NO: 5976348 - DNA, 25 bp, Homo sapien
ttctttctaaccgcgaggatgggca

SEQ ID NO: 5976349 - DNA, 25 bp, Homo sapien
gaggatgaaggacctttggttcccg

SEQ ID NO: 5976350 - DNA, 25 bp, Homo sapien
atatcgtcgccgtcgccgtcgtcgt

SEQ ID NO: 5976351 - DNA, 25 bp, Homo sapien
attgtgttccgtcaggtttagtcag

SEQ ID NO: 5976352 - DNA, 25 bp, Homo sapien
cgttgccctcaccttcctcttcaga

SEQ ID NO: 5976353 - DNA, 25 bp, Homo sapien
gttgctccagagacacgtcttcgtt

SEQ ID NO: 5976354 - DNA, 25 bp, Homo sapien
atgctgatctcgtacttggctatcc

SEQ ID NO: 5976355 - DNA, 25 bp, Homo sapien
actcgctgctcaggtccgtgtagag

SEQ ID NO: 5976356 - DNA, 25 bp, Homo sapien
tgcttctcgaccgcgacagactgct

SEQ ID NO: 5976357 - DNA, 25 bp, Homo sapien
tacaaaagttgggtaacactttcat

SEQ ID NO: 5976358 - DNA, 25 bp, Homo sapien
atcttcgtcgttgccctcaccttcc

SEQ ID NO: 5976359 - DNA, 25 bp, Homo sapien
acagggcgactggcttgaggccgtg

SEQ ID NO: 5976360 - DNA, 25 bp, Homo sapien
tgacgtgctttctgattctggcaac

SEQ ID NO: 5976361 - DNA, 25 bp, Homo sapien
gacgacgtcgaggtcgtcgagcacg

SEQ ID NO: 5976362 - DNA, 25 bp, Homo sapien
tctatatcgctcacttgctcttcat

SEQ ID NO: 5976363 - DNA, 25 bp, Homo sapien
cgtcgagttgctccagagacacgtc

SEQ ID NO: 5976364 - DNA, 25 bp, Homo sapien
cagagtggacaggatgaccgagagg

SEQ ID NO: 5976365 - DNA, 25 bp, Homo sapien
aggagaggacgacgacgtcgaggtc

SEQ ID NO: 5976366 - DNA, 25 bp, Homo sapien
gcgccggcacccttggtgagtagtt

SEQ ID NO: 5976367 - DNA, 25 bp, Homo sapien
cgtggtgggcgtttccgttttgatg

SEQ ID NO: 5976368 - DNA, 25 bp, Homo sapien
tgcccttgcgcttggcacgtttcag

SEQ ID NO: 5976369 - DNA, 25 bp, Homo sapien
tctcgttgaggaggtgttttgggta

SEQ ID NO: 5976370 - DNA, 25 bp, Homo sapien
tcgagttgctccagagacacgtctt

SEQ ID NO: 5976371 - DNA, 25 bp, Homo sapien
aacaggtgcatgacgtgctttctga

SEQ ID NO: 5976372 - DNA, 25 bp, Homo sapien
ccgttttgatgctgtgtagattcga

SEQ ID NO: 5976373 - DNA, 25 bp, Homo sapien
gacagctgcgcccatgagataggtc

SEQ ID NO: 5976374 - DNA, 25 bp, Homo sapien
cgactggcttgaggccgtggatcat

SEQ ID NO: 5976375 - DNA, 25 bp, Homo sapien
agagggagcagcacagggcgactgg

SEQ ID NO: 5976376 - DNA, 25 bp, Homo sapien
tacgacctctttccctgtggcccct

SEQ ID NO: 5976377 - DNA, 25 bp, Homo sapien
gggtaacactttcatgcccagatcg

SEQ ID NO: 5976378 - DNA, 25 bp, Homo sapien
acgaccctcaaccgcatcgaggggt

SEQ ID NO: 5976379 - DNA, 25 bp, Homo sapien
tcacgtttgagtctcgttcgcctct

SEQ ID NO: 5976380 - DNA, 25 bp, Homo sapien
tctgcagagtggacaggatgaccga

SEQ ID NO: 5976381 - DNA, 25 bp, Homo sapien
gttttgatgctgtgtagattcgatt

SEQ ID NO: 5976382 - DNA, 25 bp, Homo sapien
ttcctcccttactctgctgcggcta

SEQ ID NO: 5976383 - DNA, 25 bp, Homo sapien
cgaacatctgggagtcgtccgtggg

SEQ ID NO: 5976384 - DNA, 25 bp, Homo sapien
ggccacggatgctgatctcgtactt

SEQ ID NO: 5976385 - DNA, 25 bp, Homo sapien
gcaacgttggcgaacatctgggagt

SEQ ID NO: 5976386 - DNA, 25 bp, Homo sapien
cggtgtctccctggttgacagctgc

SEQ ID NO: 5976387 - DNA, 25 bp, Homo sapien
accgagagggagcagcacagggcga

SEQ ID NO: 5976388 - DNA, 25 bp, Homo sapien
ccctttccatctgctccgagtcgaa

SEQ ID NO: 5976389 - DNA, 25 bp, Homo sapien
tgtgtagattcgattgtgttccgtc

SEQ ID NO: 5976390 - DNA, 25 bp, Homo sapien
gatgaaggacctttggttcccggcc

SEQ ID NO: 5976391 - DNA, 25 bp, Homo sapien
cagggcgtaggtggactcgctgctc

SEQ ID NO: 5976392 - DNA, 25 bp, Homo sapien
cctcgtccatatcgtcgccgtcgcc

SEQ ID NO: 5976393 - DNA, 25 bp, Homo sapien
actcctcgtcaatctctaaatcgtt

SEQ ID NO: 5976394 - DNA, 25 bp, Homo sapien
ccatctgctccgagtcgaactccac

SEQ ID NO: 5976395 - DNA, 25 bp, Homo sapien
cacttcgtttatgctggtacaaaag

SEQ ID NO: 5976396 - DNA, 25 bp, Homo sapien
gcttgaggccgtggatcatctcgtt

SEQ ID NO: 5976397 - DNA, 25 bp, Homo sapien
cagtggacaatgtagacggtgtctc

SEQ ID NO: 5976398 - DNA, 25 bp, Homo sapien
tcgtggccacggatgctgatctcgt

SEQ ID NO: 5976399 - DNA, 25 bp, Homo sapien
tctgctgcggctactggccctgctt

SEQ ID NO: 5976400 - DNA, 25 bp, Homo sapien
cttcgtttatgctggtacaaaagtt

SEQ ID NO: 5976401 - DNA, 25 bp, Homo sapien
gacagactgctcacgtttgagtctc

SEQ ID NO: 5976402 - DNA, 25 bp, Homo sapien
tcttcagaatccacatccacgaccc

SEQ ID NO: 5976403 - DNA, 25 bp, Homo sapien
cagatcgtagtggaactcctcgtca

SEQ ID NO: 5976404 - DNA, 25 bp, Homo sapien
gcggctactggccctgcttctcgac

SEQ ID NO: 5976405 - DNA, 25 bp, Homo sapien
gccctcaccttcctcttcagaatcc

SEQ ID NO: 5976406 - DNA, 25 bp, Homo sapien
acgtagcctccgtcgagttgctcca

SEQ ID NO: 5976407 - DNA, 25 bp, Homo sapien
ctagcacttcgtttatgctggtaca

SEQ ID NO: 5976408 - DNA, 25 bp, Homo sapien
ctcaacacggtccacttgaggaact

SEQ ID NO: 5976409 - DNA, 25 bp, Homo sapien
cgcctcttttcttcttgctacgacc

SEQ ID NO: 5976410 - DNA, 25 bp, Homo sapien
gcacccttggtgagtagttgcatgg

SEQ ID NO: 5976411 - DNA, 25 bp, Homo sapien
taaatcgttctctatatcgctcact

SEQ ID NO: 5976412 - DNA, 25 bp, Homo sapien
atgggtcaaggagaggacgacgacg

SEQ ID NO: 5976413 - DNA, 25 bp, Homo sapien
catgcccagatcgtagtggaactcc

SEQ ID NO: 5976414 - DNA, 25 bp, Homo sapien
gaggccgtggatcatctcgttgagg

SEQ ID NO: 5976415 - DNA, 25 bp, Homo sapien
acagagcagacgaagttctgcagag

SEQ ID NO: 5976416 - DNA, 25 bp, Homo sapien
cgtcgccgtcgtcgtcatcttcgtc

SEQ ID NO: 5976417 - DNA, 25 bp, Homo sapien
gtggacaatgtagacggtgtctccc

SEQ ID NO: 5976418 - DNA, 25 bp, Homo sapien
cagtcaaacaggtgcatgacgtgct

SEQ ID NO: 5976419 - DNA, 25 bp, Homo sapien
caggtgcatgacgtgctttctgatt

SEQ ID NO: 5976420 - DNA, 25 bp, Homo sapien
tgcatggctctgacgtagcctccgt

SEQ ID NO: 5976421 - DNA, 25 bp, Homo sapien
tagtcagcaatatgctcttctgcat

SEQ ID NO: 5976422 - DNA, 25 bp, Homo sapien
aagttctgcagagtggacaggatga

SEQ ID NO: 5976423 - DNA, 25 bp, Homo sapien
gaggggtcctgcctcaacacggtcc

SEQ ID NO: 5976424 - DNA, 25 bp, Homo sapien
gaggaggtgttttgggtacggatgg

SEQ ID NO: 5976425 - DNA, 25 bp, Homo sapien
ggatgctgatctcgtacttggctat

SEQ ID NO: 5976426 - DNA, 25 bp, Homo sapien
tggcttgaggccgtggatcatctcg

SEQ ID NO: 5976427 - DNA, 25 bp, Homo sapien
tggttcccggcctctgcgccggcac

SEQ ID NO: 5976428 - DNA, 25 bp, Homo sapien
agtggaactcctcgtcaatctctaa

SEQ ID NO: 5976429 - DNA, 25 bp, Homo sapien
agttgggtaacactttcatgcccag

SEQ ID NO: 5976430 - DNA, 25 bp, Homo sapien
gggcgtaggtggactcgctgctcag

SEQ ID NO: 5976431 - DNA, 25 bp, Homo sapien
ccttactctgctgcggctactggcc

SEQ ID NO: 5976432 - DNA, 25 bp, Homo sapien
ccgtggatcatctcgttgaggaggt

SEQ ID NO: 5976433 - DNA, 25 bp, Homo sapien
cagggcttgctggagtctagcactt

SEQ ID NO: 5976434 - DNA, 25 bp, Homo sapien
tccgagtcgaactccaccgtggtgg

SEQ ID NO: 5976435 - DNA, 25 bp, Homo sapien
ttatgctggtacaaaagttgggtaa

SEQ ID NO: 5976436 - DNA, 25 bp, Homo sapien
agggagcagcacagggcgactggct

SEQ ID NO: 5976437 - DNA, 25 bp, Homo sapien
gcttcgagggctcccagtggacaat

SEQ ID NO: 5976438 - DNA, 25 bp, Homo sapien
ccgtgggcttcgagggctcccagtg

SEQ ID NO: 5976439 - DNA, 25 bp, Homo sapien
gctgatctcgtacttggctatccag

SEQ ID NO: 5976440 - DNA, 25 bp, Homo sapien
tttcgtggccacggatgctgatctc

SEQ ID NO: 5976441 - DNA, 25 bp, Homo sapien
tacttggctatccagggcttgctgg

SEQ ID NO: 5976442 - DNA, 25 bp, Homo sapien
tatcgctcacttgctcttcatcgga

SEQ ID NO: 5976443 - DNA, 25 bp, Homo sapien
cctcccttactctgctgcggctact

SEQ ID NO: 5976444 - DNA, 25 bp, Homo sapien
gttctgcagagtggacaggatgacc

SEQ ID NO: 5976445 - DNA, 25 bp, Homo sapien
acgtcgaggtcgtcgagcacgcccg

SEQ ID NO: 5976446 - DNA, 25 bp, Homo sapien
tgacgtagcctccgtcgagttgctc

SEQ ID NO: 5976447 - DNA, 25 bp, Homo sapien
gtagcctccgtcgagttgctccaga

SEQ ID NO: 5976448 - DNA, 25 bp, Homo sapien
ctcccagtggacaatgtagacggtg

SEQ ID NO: 5976449 - DNA, 25 bp, Homo sapien
caacacggtccacttgaggaactct

SEQ ID NO: 5976450 - DNA, 25 bp, Homo sapien
atgctgtgtagattcgattgtgttc

SEQ ID NO: 5976451 - DNA, 25 bp, Homo sapien
ttgggtacggatgggtcaaggagag

SEQ ID NO: 5976452 - DNA, 25 bp, Homo sapien
aggtcagggcgtaggtggactcgct

SEQ ID NO: 5976453 - DNA, 25 bp, Homo sapien
gtcaggtttagtcagcaatatgctc

SEQ ID NO: 5976454 - DNA, 25 bp, Homo sapien
tccgtgtagaggatgaaggaccttt

SEQ ID NO: 5976455 - DNA, 25 bp, Homo sapien
tcgtcgttgccctcaccttcctctt

SEQ ID NO: 5976456 - DNA, 25 bp, Homo sapien
ggtccgtgtagaggatgaaggacct

SEQ ID NO: 5976457 - DNA, 25 bp, Homo sapien
tgattctggcaacgttggcgaacat

SEQ ID NO: 5976458 - DNA, 25 bp, Homo sapien
ggtgcatgacgtgctttctgattct

SEQ ID NO: 5976459 - DNA, 25 bp, Homo sapien
ggagtcgtccgtgggcttcgagggc

SEQ ID NO: 5976460 - DNA, 25 bp, Homo sapien
tcttcatcggactcttcctcgtcca

SEQ ID NO: 5976461 - DNA, 25 bp, Homo sapien
tgtgttccgtcaggtttagtcagca

SEQ ID NO: 5976462 - DNA, 25 bp, Homo sapien
gagtctagcacttcgtttatgctgg

SEQ ID NO: 5976463 - DNA, 25 bp, Homo sapien
caaccgcatcgaggggtcctgcctc

SEQ ID NO: 5976464 - DNA, 25 bp, Homo sapien
tcggactcttcctcgtccatatcgt

SEQ ID NO: 5976465 - DNA, 25 bp, Homo sapien
ggagcagcacagggcgactggcttg

SEQ ID NO: 5976466 - DNA, 25 bp, Homo sapien
gagtctcgttcgcctcttttcttct

SEQ ID NO: 5976467 - DNA, 25 bp, Homo sapien
ctgcggctactggccctgcttctcg

SEQ ID NO: 5976468 - DNA, 25 bp, Homo sapien
tttagtcagcaatatgctcttctgc

SEQ ID NO: 5976469 - DNA, 25 bp, Homo sapien
gtcgttgccctcaccttcctcttca

SEQ ID NO: 5976470 - DNA, 25 bp, Homo sapien
cgcagtcaaacaggtgcatgacgtg

SEQ ID NO: 5976471 - DNA, 25 bp, Homo sapien
gcgacagactgctcacgtttgagtc

SEQ ID NO: 5976472 - DNA, 25 bp, Homo sapien
gtcaaggagaggacgacgacgtcga

SEQ ID NO: 5976473 - DNA, 25 bp, Homo sapien
cactttcatgcccagatcgtagtgg

SEQ ID NO: 5976474 - DNA, 25 bp, Homo sapien
tctgattctggcaacgttggcgaac

SEQ ID NO: 5976475 - DNA, 25 bp, Homo sapien
cgttggcgaacatctgggagtcgtc

SEQ ID NO: 5976476 - DNA, 25 bp, Homo sapien
ctccctggttgacagctgcgcccat

SEQ ID NO: 5976477 - DNA, 25 bp, Homo sapien
cttggcacgtttcagcttctttcta

SEQ ID NO: 5976478 - DNA, 25 bp, Homo sapien
gtgggcttcgagggctcccagtgga

SEQ ID NO: 5976479 - DNA, 25 bp, Homo sapien
cgaagttctgcagagtggacaggat

SEQ ID NO: 5976480 - DNA, 25 bp, Homo sapien
gttttcgtggccacggatgctgatc

SEQ ID NO: 5976481 - DNA, 25 bp, Homo sapien
aatgtagacggtgtctccctggttg

SEQ ID NO: 5976482 - DNA, 25 bp, Homo sapien
tgtagaggatgaaggacctttggtt

SEQ ID NO: 5976483 - DNA, 25 bp, Homo sapien
ggcgactggcttgaggccgtggatc

SEQ ID NO: 5976484 - DNA, 25 bp, Homo sapien
ggtgagtagttgcatggctctgacg

SEQ ID NO: 5976485 - DNA, 25 bp, Homo sapien
atgctggtacaaaagttgggtaaca

SEQ ID NO: 5976486 - DNA, 25 bp, Homo sapien
actcttcctcgtccatatcgtcgcc

SEQ ID NO: 5976487 - DNA, 25 bp, Homo sapien
cgacgtcgaggtcgtcgagcacgcc

SEQ ID NO: 5976488 - DNA, 25 bp, Homo sapien
tgaggaactcttcctcccttactct

SEQ ID NO: 5976489 - DNA, 25 bp, Homo sapien
ggctcccagtggacaatgtagacgg

SEQ ID NO: 5976490 - DNA, 25 bp, Homo sapien
ctgcgccggcacccttggtgagtag

SEQ ID NO: 5976491 - DNA, 25 bp, Homo sapien
gaatccacatccacgaccctcaacc

SEQ ID NO: 5976492 - DNA, 25 bp, Homo sapien
tgcccagatcgtagtggaactcctc

SEQ ID NO: 5976493 - DNA, 25 bp, Homo sapien
ttggcgaacatctgggagtcgtccg

SEQ ID NO: 5976494 - DNA, 25 bp, Homo sapien
gattcgattgtgttccgtcaggttt

SEQ ID NO: 5976495 - DNA, 25 bp, Homo sapien
tcgaccgcgacagactgctcacgtt

SEQ ID NO: 5976496 - DNA, 25 bp, Homo sapien
cccagtggacaatgtagacggtgtc

SEQ ID NO: 5976497 - DNA, 25 bp, Homo sapien
catgagataggtcagggcgtaggtg

SEQ ID NO: 5976498 - DNA, 25 bp, Homo sapien
ccgcgacagactgctcacgtttgag

SEQ ID NO: 5976499 - DNA, 25 bp, Homo sapien
ctcaccttcctcttcagaatccaca

SEQ ID NO: 5976500 - DNA, 25 bp, Homo sapien
cgcttggcacgtttcagcttctttc

SEQ ID NO: 5976501 - DNA, 25 bp, Homo sapien
gttctctatatcgctcacttgctct

SEQ ID NO: 5976502 - DNA, 25 bp, Homo sapien
cgcccatgagataggtcagggcgta

SEQ ID NO: 5976503 - DNA, 25 bp, Homo sapien
acgacgacgtcgaggtcgtcgagca

SEQ ID NO: 5976504 - DNA, 25 bp, Homo sapien
atctgctccgagtcgaactccaccg

SEQ ID NO: 5976505 - DNA, 25 bp, Homo sapien
cctttggttcccggcctctgcgccg

SEQ ID NO: 5976506 - DNA, 25 bp, Homo sapien
gtaggtggactcgctgctcaggtcc

SEQ ID NO: 5976507 - DNA, 25 bp, Homo sapien
tccagggcttgctggagtctagcac

SEQ ID NO: 5976508 - DNA, 25 bp, Homo sapien
atcatctcgttgaggaggtgttttg

SEQ ID NO: 5976509 - DNA, 25 bp, Homo sapien
tcgtcgtcatcttcgtcgttgccct

SEQ ID NO: 5976510 - DNA, 25 bp, Homo sapien
cagctgcgcccatgagataggtcag

SEQ ID NO: 5976511 - DNA, 25 bp, Homo sapien
tcttcctcccttactctgctgcggc

SEQ ID NO: 5976512 - DNA, 25 bp, Homo sapien
tctctatatcgctcacttgctcttc

SEQ ID NO: 5976513 - DNA, 25 bp, Homo sapien
acgtcttcgttttcgtggccacgga

SEQ ID NO: 5976514 - DNA, 25 bp, Homo sapien
agagacacgtcttcgttttcgtggc

SEQ ID NO: 5976515 - DNA, 25 bp, Homo sapien
tgagataggtcagggcgtaggtgga

SEQ ID NO: 5976516 - DNA, 25 bp, Homo sapien
gggcacagagcagacgaagttctgc

SEQ ID NO: 5976517 - DNA, 25 bp, Homo sapien
ggccgtggatcatctcgttgaggag

SEQ ID NO: 5976518 - DNA, 25 bp, Homo sapien
gccggcacccttggtgagtagttgc

SEQ ID NO: 5976519 - DNA, 25 bp, Homo sapien
ggtgttttgggtacggatgggtcaa

SEQ ID NO: 5976520 - DNA, 25 bp, Homo sapien
tctcgaccgcgacagactgctcacg

SEQ ID NO: 5976521 - DNA, 25 bp, Homo sapien
ggacaatgtagacggtgtctccctg

SEQ ID NO: 5976522 - DNA, 25 bp, Homo sapien
ttttcttcttgctacgacctctttc

SEQ ID NO: 5976523 - DNA, 25 bp, Homo sapien
ctttccatctgctccgagtcgaact

SEQ ID NO: 5976524 - DNA, 25 bp, Homo sapien
tttctgattctggcaacgttggcga

SEQ ID NO: 5976525 - DNA, 25 bp, Homo sapien
cgagagggagcagcacagggcgact

SEQ ID NO: 5976526 - DNA, 25 bp, Homo sapien
aatctctaaatcgttctctatatcg

SEQ ID NO: 5976527 - DNA, 25 bp, Homo sapien
gcgtttccgttttgatgctgtgtag

SEQ ID NO: 5976528 - DNA, 25 bp, Homo sapien
gcttgctggagtctagcacttcgtt

SEQ ID NO: 5976529 - DNA, 25 bp, Homo sapien
ctgctcacgtttgagtctcgttcgc

SEQ ID NO: 5976530 - DNA, 25 bp, Homo sapien
tcgccgtcgtcgtcatcttcgtcgt

SEQ ID NO: 5976531 - DNA, 25 bp, Homo sapien
ttggtgagtagttgcatggctctga

SEQ ID NO: 5976532 - DNA, 25 bp, Homo sapien
atcgtcgccgtcgccgtcgtcgtca

SEQ ID NO: 5976533 - DNA, 25 bp, Homo sapien
tggccctgcttctcgaccgcgacag

SEQ ID NO: 5976534 - DNA, 25 bp, Homo sapien
actcttcctcccttactctgctgcg

SEQ ID NO: 5976535 - DNA, 25 bp, Homo sapien
agggcgactggcttgaggccgtgga

SEQ ID NO: 5976536 - DNA, 25 bp, Homo sapien
acgtttcagcttctttctaaccgcg

SEQ ID NO: 5976537 - DNA, 25 bp, Homo sapien
gaactcctcgtcaatctctaaatcg

SEQ ID NO: 5976538 - DNA, 25 bp, Homo sapien
actctgctgcggctactggccctgc

SEQ ID NO: 5976539 - DNA, 25 bp, Homo sapien
tcgtccgtgggcttcgagggctccc

SEQ ID NO: 5976540 - DNA, 25 bp, Homo sapien
gggtacggatgggtcaaggagagga

SEQ ID NO: 5976541 - DNA, 25 bp, Homo sapien
gatgcccttgcgcttggcacgtttc

SEQ ID NO: 5976542 - DNA, 25 bp, Homo sapien
tccacttgaggaactcttcctccct

SEQ ID NO: 5976543 - DNA, 25 bp, Homo sapien
gcacgcccgcgacgcagtcaaacag

SEQ ID NO: 5976544 - DNA, 25 bp, Homo sapien
gtcgaggtcgtcgagcacgcccgcg

SEQ ID NO: 5976545 - DNA, 25 bp, Homo sapien
aacgttggcgaacatctgggagtcg

SEQ ID NO: 5976546 - DNA, 25 bp, Homo sapien
tgtagacggtgtctccctggttgac

SEQ ID NO: 5976547 - DNA, 25 bp, Homo sapien
tcaatctctaaatcgttctctatat

SEQ ID NO: 5976548 - DNA, 25 bp, Homo sapien
tggctatccagggcttgctggagtc

SEQ ID NO: 5976549 - DNA, 25 bp, Homo sapien
ctactggccctgcttctcgaccgcg

SEQ ID NO: 5976550 - DNA, 25 bp, Homo sapien
tagttgcatggctctgacgtagcct

SEQ ID NO: 5976551 - DNA, 25 bp, Homo sapien
gtcagggcgtaggtggactcgctgc

SEQ ID NO: 5976552 - DNA, 25 bp, Homo sapien
catgacgtgctttctgattctggca

SEQ ID NO: 5976553 - DNA, 25 bp, Homo sapien
gctgctcaggtccgtgtagaggatg

SEQ ID NO: 5976554 - DNA, 25 bp, Homo sapien
gtcgtcatcttcgtcgttgccctca

SEQ ID NO: 5976555 - DNA, 25 bp, Homo sapien
gatcgtagtggaactcctcgtcaat

SEQ ID NO: 5976556 - DNA, 25 bp, Homo sapien
cggcctctgcgccggcacccttggt

SEQ ID NO: 5976557 - DNA, 25 bp, Homo sapien
caaggagaggacgacgacgtcgagg

SEQ ID NO: 5976558 - DNA, 25 bp, Homo sapien
cgagggctcccagtggacaatgtag

SEQ ID NO: 5976559 - DNA, 25 bp, Homo sapien
ggatcatctcgttgaggaggtgttt

SEQ ID NO: 5976560 - DNA, 25 bp, Homo sapien
cgtgtagaggatgaaggacctttgg

SEQ ID NO: 5976561 - DNA, 25 bp, Homo sapien
gcctcaacacggtccacttgaggaa

SEQ ID NO: 5976562 - DNA, 25 bp, Homo sapien
ggactcttcctcgtccatatcgtcg

SEQ ID NO: 5976563 - DNA, 25 bp, Homo sapien
atccacgaccctcaaccgcatcgag

SEQ ID NO: 5976564 - DNA, 25 bp, Homo sapien
ttgaggaggtgttttgggtacggat

SEQ ID NO: 5976565 - DNA, 25 bp, Homo sapien
ccttggtgagtagttgcatggctct

SEQ ID NO: 5976566 - DNA, 25 bp, Homo sapien
ttcctcgtccatatcgtcgccgtcg

SEQ ID NO: 5976567 - DNA, 25 bp, Homo sapien
ggggtcctgcctcaacacggtccac

SEQ ID NO: 5976568 - DNA, 25 bp, Homo sapien
cctcttcagaatccacatccacgac

SEQ ID NO: 5976569 - DNA, 25 bp, Homo sapien
gtggactcgctgctcaggtccgtgt

SEQ ID NO: 5976570 - DNA, 25 bp, Homo sapien
gaactccaccgtggtgggcgtttcc

SEQ ID NO: 5976571 - DNA, 25 bp, Homo sapien
agagcagacgaagttctgcagagtg

SEQ ID NO: 5976572 - DNA, 25 bp, Homo sapien
ccacgaccctcaaccgcatcgaggg

SEQ ID NO: 5976573 - DNA, 25 bp, Homo sapien
ctcgtcaatctctaaatcgttctct

SEQ ID NO: 5976574 - DNA, 25 bp, Homo sapien
ttgccctcaccttcctcttcagaat

SEQ ID NO: 5976575 - DNA, 25 bp, Homo sapien
ggctactggccctgcttctcgaccg

SEQ ID NO: 5976576 - DNA, 25 bp, Homo sapien
agtcgaactccaccgtggtgggcgt

SEQ ID NO: 5976577 - DNA, 25 bp, Homo sapien
gctccgagtcgaactccaccgtggt

SEQ ID NO: 5976578 - DNA, 25 bp, Homo sapien
gacggtgtctccctggttgacagct

SEQ ID NO: 5976579 - DNA, 25 bp, Homo sapien
aaccgcgaggatgggcacagagcag

SEQ ID NO: 5976580 - DNA, 25 bp, Homo sapien
ggtccacttgaggaactcttcctcc

SEQ ID NO: 5976581 - DNA, 25 bp, Homo sapien
ccgcgaggatgggcacagagcagac

SEQ ID NO: 5976582 - DNA, 25 bp, Homo sapien
tgaccgagagggagcagcacagggc

SEQ ID NO: 5976583 - DNA, 25 bp, Homo sapien
tcgctgctcaggtccgtgtagagga

SEQ ID NO: 5976584 - DNA, 25 bp, Homo sapien
cgattgtgttccgtcaggtttagtc

SEQ ID NO: 5976585 - DNA, 25 bp, Homo sapien
caaacaggtgcatgacgtgctttct

SEQ ID NO: 5976586 - DNA, 25 bp, Homo sapien
tcgtccatatcgtcgccgtcgccgt

SEQ ID NO: 5976587 - DNA, 25 bp, Homo sapien
acgtttgagtctcgttcgcctcttt

SEQ ID NO: 5976588 - DNA, 25 bp, Homo sapien
gagtggacaggatgaccgagaggga

SEQ ID NO: 5976589 - DNA, 25 bp, Homo sapien
ctcgtacttggctatccagggcttg

SEQ ID NO: 5976590 - DNA, 25 bp, Homo sapien
tggaactcctcgtcaatctctaaat

SEQ ID NO: 5976591 - DNA, 25 bp, Homo sapien
cctccgtcgagttgctccagagaca

SEQ ID NO: 5976592 - DNA, 25 bp, Homo sapien
agataggtcagggcgtaggtggact

SEQ ID NO: 5976593 - DNA, 25 bp, Homo sapien
tgttccgtcaggtttagtcagcaat

SEQ ID NO: 5976594 - DNA, 25 bp, Homo sapien
gcccgcgacgcagtcaaacaggtgc

SEQ ID NO: 5976595 - DNA, 25 bp, Homo sapien
tggagtctagcacttcgtttatgct

SEQ ID NO: 5976596 - DNA, 25 bp, Homo sapien
ggatgggcacagagcagacgaagtt

SEQ ID NO: 5976597 - DNA, 25 bp, Homo sapien
acacggtccacttgaggaactcttc

SEQ ID NO: 5976598 - DNA, 25 bp, Homo sapien
ctctgcgccggcacccttggtgagt

SEQ ID NO: 5976599 - DNA, 25 bp, Homo sapien
cgtcgagcacgcccgcgacgcagtc

SEQ ID NO: 5976600 - DNA, 25 bp, Homo sapien
gctatccagggcttgctggagtcta

SEQ ID NO: 5976601 - DNA, 25 bp, Homo sapien
agcacttcgtttatgctggtacaaa

SEQ ID NO: 5976602 - DNA, 25 bp, Homo sapien
gtttgagtctcgttcgcctcttttc

SEQ ID NO: 5976603 - DNA, 25 bp, Homo sapien
gtgggcgtttccgttttgatgctgt

SEQ ID NO: 5976604 - DNA, 25 bp, Homo sapien
aggatgaccgagagggagcagcaca

SEQ ID NO: 5976605 - DNA, 25 bp, Homo sapien
tgcgcttggcacgtttcagcttctt

SEQ ID NO: 5976606 - DNA, 25 bp, Homo sapien
ccgtcaggtttagtcagcaatatgc

SEQ ID NO: 5976607 - DNA, 25 bp, Homo sapien
agcagcacagggcgactggcttgag

SEQ ID NO: 5976608 - DNA, 25 bp, Homo sapien
tcatcttcgtcgttgccctcacctt

SEQ ID NO: 5976609 - DNA, 25 bp, Homo sapien
agggctcccagtggacaatgtagac

SEQ ID NO: 5976610 - DNA, 25 bp, Homo sapien
tgttttgggtacggatgggtcaagg

SEQ ID NO: 5976611 - DNA, 25 bp, Homo sapien
acatccacgaccctcaaccgcatcg

SEQ ID NO: 5976612 - DNA, 25 bp, Homo sapien
tgtagattcgattgtgttccgtcag

SEQ ID NO: 5976613 - DNA, 25 bp, Homo sapien
cagacgaagttctgcagagtggaca

SEQ ID NO: 5976614 - DNA, 25 bp, Homo sapien
gctgtgtagattcgattgtgttccg

SEQ ID NO: 5976615 - DNA, 25 bp, Homo sapien
tgcatgacgtgctttctgattctgg

SEQ ID NO: 5976616 - DNA, 25 bp, Homo sapien
ggatgggtcaaggagaggacgacga

SEQ ID NO: 5976617 - DNA, 25 bp, Homo sapien
gtccatatcgtcgccgtcgccgtcg

SEQ ID NO: 5976618 - DNA, 25 bp, Homo sapien
gggcgtttccgttttgatgctgtgt

SEQ ID NO: 5976619 - DNA, 25 bp, Homo sapien
gaccctcaaccgcatcgaggggtcc

SEQ ID NO: 5976620 - DNA, 25 bp, Homo sapien
cgtcatcttcgtcgttgccctcacc

SEQ ID NO: 5976621 - DNA, 25 bp, Homo sapien
ttcgattgtgttccgtcaggtttag

SEQ ID NO: 5976622 - DNA, 25 bp, Homo sapien
cctgcttctcgaccgcgacagactg

SEQ ID NO: 5976623 - DNA, 25 bp, Homo sapien
ttccatctgctccgagtcgaactcc

SEQ ID NO: 5976624 - DNA, 25 bp, Homo sapien
gcttctttctaaccgcgaggatggg

SEQ ID NO: 5976625 - DNA, 25 bp, Homo sapien
cagactgctcacgtttgagtctcgt

SEQ ID NO: 5976626 - DNA, 25 bp, Homo sapien
cgtcaatctctaaatcgttctctat

SEQ ID NO: 5976627 - DNA, 25 bp, Homo sapien
acaggatgaccgagagggagcagca

SEQ ID NO: 5976628 - DNA, 25 bp, Homo sapien
ctcgttcgcctcttttcttcttgct

SEQ ID NO: 5976629 - DNA, 25 bp, Homo sapien
ctgcctcaacacggtccacttgagg

SEQ ID NO: 5976630 - DNA, 25 bp, Homo sapien
ttcttcttgctacgacctctttccc

SEQ ID NO: 5976631 - DNA, 25 bp, Homo sapien
gcacagggcgactggcttgaggccg

SEQ ID NO: 5976632 - DNA, 25 bp, Homo sapien
ttccgttttgatgctgtgtagattc

SEQ ID NO: 5976633 - DNA, 25 bp, Homo sapien
tcgttctctatatcgctcacttgct

SEQ ID NO: 5976634 - DNA, 25 bp, Homo sapien
gacgaagttctgcagagtggacagg

SEQ ID NO: 5976635 - DNA, 25 bp, Homo sapien
acgcccgcgacgcagtcaaacaggt

SEQ ID NO: 5976636 - DNA, 25 bp, Homo sapien
gggcttgctggagtctagcacttcg

SEQ ID NO: 5976637 - DNA, 25 bp, Homo sapien
tcgagcacgcccgcgacgcagtcaa

SEQ ID NO: 5976638 - DNA, 25 bp, Homo sapien
tgggagtcgtccgtgggcttcgagg

SEQ ID NO: 5976639 - DNA, 25 bp, Homo sapien
ttcatcggactcttcctcgtccata

SEQ ID NO: 5976640 - DNA, 25 bp, Homo sapien
tggcccctttccatctgctccgagt

SEQ ID NO: 5976641 - DNA, 25 bp, Homo sapien
attctggcaacgttggcgaacatct

SEQ ID NO: 5976642 - DNA, 25 bp, Homo sapien
cttgaggaactcttcctcccttact

SEQ ID NO: 5976643 - DNA, 25 bp, Homo sapien
cgcatcgaggggtcctgcctcaaca

SEQ ID NO: 5976644 - DNA, 25 bp, Homo sapien
gctctgacgtagcctccgtcgagtt

SEQ ID NO: 5976645 - DNA, 25 bp, Homo sapien
aggtcgtcgagcacgcccgcgacgc

SEQ ID NO: 5976646 - DNA, 25 bp, Homo sapien
ggtcctgcctcaacacggtccactt

SEQ ID NO: 5976647 - DNA, 25 bp, Homo sapien
cttcgtcgttgccctcaccttcctc

SEQ ID NO: 5976648 - DNA, 25 bp, Homo sapien
cttggctatccagggcttgctggag

SEQ ID NO: 5976649 - DNA, 25 bp, Homo sapien
cgtcgtcgtcatcttcgtcgttgcc

SEQ ID NO: 5976650 - DNA, 25 bp, Homo sapien
cacttgaggaactcttcctccctta

SEQ ID NO: 5976651 - DNA, 25 bp, Homo sapien
tcccttactctgctgcggctactgg

SEQ ID NO: 5976652 - DNA, 25 bp, Homo sapien
atctcgtacttggctatccagggct

SEQ ID NO: 5976653 - DNA, 25 bp, Homo sapien
aatcgttctctatatcgctcacttg

SEQ ID NO: 5976654 - DNA, 25 bp, Homo sapien
tcgaggggtcctgcctcaacacggt

SEQ ID NO: 5976655 - DNA, 25 bp, Homo sapien
ctccagagacacgtcttcgttttcg

SEQ ID NO: 5976656 - DNA, 25 bp, Homo sapien
caggtccgtgtagaggatgaaggac

SEQ ID NO: 5976657 - DNA, 25 bp, Homo sapien
tgctgcggctactggccctgcttct

SEQ ID NO: 5976658 - DNA, 25 bp, Homo sapien
gtggccacggatgctgatctcgtac

SEQ ID NO: 5976659 - DNA, 25 bp, Homo sapien
tcctcgtcaatctctaaatcgttct

SEQ ID NO: 5976660 - DNA, 25 bp, Homo sapien
cttgcgcttggcacgtttcagcttc

SEQ ID NO: 5976661 - DNA, 25 bp, Homo sapien
cctcttttcttcttgctacgacctc

SEQ ID NO: 5976662 - DNA, 25 bp, Homo sapien
tcttgctacgacctctttccctgtg

SEQ ID NO: 5976663 - DNA, 25 bp, Homo sapien
ctaaccgcgaggatgggcacagagc

SEQ ID NO: 5976664 - DNA, 25 bp, Homo sapien
tggcaacgttggcgaacatctggga

SEQ ID NO: 5976665 - DNA, 25 bp, Homo sapien
ccttcctcttcagaatccacatcca

SEQ ID NO: 5976666 - DNA, 25 bp, Homo sapien
tcgaactccaccgtggtgggcgttt

SEQ ID NO: 5976667 - DNA, 25 bp, Homo sapien
acggtccacttgaggaactcttcct

SEQ ID NO: 5976668 - DNA, 25 bp, Homo sapien
ggactcgctgctcaggtccgtgtag

SEQ ID NO: 5976669 - DNA, 25 bp, Homo sapien
gtctccctggttgacagctgcgccc

SEQ ID NO: 5976670 - DNA, 25 bp, Homo sapien
tcgttgaggaggtgttttgggtacg

SEQ ID NO: 5976671 - DNA, 25 bp, Homo sapien
tcgtagtggaactcctcgtcaatct

SEQ ID NO: 5976672 - DNA, 25 bp, Homo sapien
catctgggagtcgtccgtgggcttc

SEQ ID NO: 5976673 - DNA, 25 bp, Homo sapien
ttcagaatccacatccacgaccctc

SEQ ID NO: 5976674 - DNA, 25 bp, Homo sapien
cgtcgccgtcgccgtcgtcgtcatc

SEQ ID NO: 5976675 - DNA, 25 bp, Homo sapien
gcacagagcagacgaagttctgcag

SEQ ID NO: 5976676 - DNA, 25 bp, Homo sapien
tcttttcttcttgctacgacctctt

SEQ ID NO: 5976677 - DNA, 25 bp, Homo sapien
cccggcctctgcgccggcacccttg

SEQ ID NO: 5976678 - DNA, 25 bp, Homo sapien
tgcgcccatgagataggtcagggcg

SEQ ID NO: 5976679 - DNA, 25 bp, Homo sapien
cagcttctttctaaccgcgaggatg

SEQ ID NO: 5976680 - DNA, 25 bp, Homo sapien
ccacggatgctgatctcgtacttgg

SEQ ID NO: 5976681 - DNA, 25 bp, Homo sapien
gtttcagcttctttctaaccgcgag

SEQ ID NO: 5976682 - DNA, 25 bp, Homo sapien
caggtttagtcagcaatatgctctt

SEQ ID NO: 5976683 - DNA, 25 bp, Homo sapien
gtctagcacttcgtttatgctggta

SEQ ID NO: 5976684 - DNA, 25 bp, Homo sapien
acttgctcttcatcggactcttcct

SEQ ID NO: 5976685 - DNA, 25 bp, Homo sapien
ctcgctgatgcccttgcgcttggca

SEQ ID NO: 5976686 - DNA, 25 bp, Homo sapien
tgagtagttgcatggctctgacgta

SEQ ID NO: 5976687 - DNA, 25 bp, Homo sapien
agacacgtcttcgttttcgtggcca

SEQ ID NO: 5976688 - DNA, 25 bp, Homo sapien
tttgatgctgtgtagattcgattgt

SEQ ID NO: 5976689 - DNA, 25 bp, Homo sapien
gctttctgattctggcaacgttggc

SEQ ID NO: 5976690 - DNA, 25 bp, Homo sapien
gaagaaaccgagtgttgagccaaac

SEQ ID NO: 5976691 - DNA, 25 bp, Homo sapien
aagacttggataaattaactgaagc

SEQ ID NO: 5976692 - DNA, 25 bp, Homo sapien
aatcatcagagggacacttcatcaa

SEQ ID NO: 5976693 - DNA, 25 bp, Homo sapien
atatatcttggcggaatccgtccaa

SEQ ID NO: 5976694 - DNA, 25 bp, Homo sapien
ctcgagatctgtaaccttcatagta

SEQ ID NO: 5976695 - DNA, 25 bp, Homo sapien
atattcaagagtcacaagcaaattg

SEQ ID NO: 5976696 - DNA, 25 bp, Homo sapien
ttgctcattgtcaagcaggactctc

SEQ ID NO: 5976697 - DNA, 25 bp, Homo sapien
acttcgatgaaacgaaccgattcat

SEQ ID NO: 5976698 - DNA, 25 bp, Homo sapien
actcagtagacgaggaagttaccag

SEQ ID NO: 5976699 - DNA, 25 bp, Homo sapien
atctaataaggaaaggttacacgct

SEQ ID NO: 5976700 - DNA, 25 bp, Homo sapien
attacatctctttgagaaaatgggt

SEQ ID NO: 5976701 - DNA, 25 bp, Homo sapien
atccactgctttgcccaacatggtt

SEQ ID NO: 5976702 - DNA, 25 bp, Homo sapien
caggatattaggaggcatatatctt

SEQ ID NO: 5976703 - DNA, 25 bp, Homo sapien
accaggatattaggaggcatatatc

SEQ ID NO: 5976704 - DNA, 25 bp, Homo sapien
cgatgaaacgaaccgattcattgat

SEQ ID NO: 5976705 - DNA, 25 bp, Homo sapien
aggtgcagttgtggtaagtgggtca

SEQ ID NO: 5976706 - DNA, 25 bp, Homo sapien
ggcggttacaactggaaaggatcta

SEQ ID NO: 5976707 - DNA, 25 bp, Homo sapien
attggtctccaattctggaatgttt

SEQ ID NO: 5976708 - DNA, 25 bp, Homo sapien
cgaacctttaaaatggatgcaacct

SEQ ID NO: 5976709 - DNA, 25 bp, Homo sapien
tttaaagattcggagtcgtcgcaag

SEQ ID NO: 5976710 - DNA, 25 bp, Homo sapien
ccccaatgaagttgagtattcgccc

SEQ ID NO: 5976711 - DNA, 25 bp, Homo sapien
atatcttggcggaatccgtccaatt

SEQ ID NO: 5976712 - DNA, 25 bp, Homo sapien
ggatcaatttcccttacaatccact

SEQ ID NO: 5976713 - DNA, 25 bp, Homo sapien
tcaagagtcacaagcaaattgctct

SEQ ID NO: 5976714 - DNA, 25 bp, Homo sapien
tatcaaattccaggtcattccagag

SEQ ID NO: 5976715 - DNA, 25 bp, Homo sapien
atacccatcgatgatgatgatgtga

SEQ ID NO: 5976716 - DNA, 25 bp, Homo sapien
gttcaagtaaagttggcggttacaa

SEQ ID NO: 5976717 - DNA, 25 bp, Homo sapien
gtaaggaatcatcagagggacactt

SEQ ID NO: 5976718 - DNA, 25 bp, Homo sapien
aacaattacatctctttgagaaaat

SEQ ID NO: 5976719 - DNA, 25 bp, Homo sapien
tcaagtaaagttggcggttacaact

SEQ ID NO: 5976720 - DNA, 25 bp, Homo sapien
agtattcgcccagattagtagattt

SEQ ID NO: 5976721 - DNA, 25 bp, Homo sapien
ctctcgagatctgtaaccttcatag

SEQ ID NO: 5976722 - DNA, 25 bp, Homo sapien
ttaccaggatattaggaggcatata

SEQ ID NO: 5976723 - DNA, 25 bp, Homo sapien
cccagcctataagcagtggaagctg

SEQ ID NO: 5976724 - DNA, 25 bp, Homo sapien
aaaaacatacccatcgatgatgatg

SEQ ID NO: 5976725 - DNA, 25 bp, Homo sapien
gcgcatgacccaccaagtaaggaat

SEQ ID NO: 5976726 - DNA, 25 bp, Homo sapien
cgatgatgatgatgtgactgatgtg

SEQ ID NO: 5976727 - DNA, 25 bp, Homo sapien
aagtggatcaatttcccttacaatc

SEQ ID NO: 5976728 - DNA, 25 bp, Homo sapien
ctacatctttcatcgcgcatgaccc

SEQ ID NO: 5976729 - DNA, 25 bp, Homo sapien
aaatgcaaactcagtagacgaggaa

SEQ ID NO: 5976730 - DNA, 25 bp, Homo sapien
aggactctcgagatctgtaaccttc

SEQ ID NO: 5976731 - DNA, 25 bp, Homo sapien
caatttcccttacaatccactgctt

SEQ ID NO: 5976732 - DNA, 25 bp, Homo sapien
gtaaccttcatagtagcctacctaa

SEQ ID NO: 5976733 - DNA, 25 bp, Homo sapien
ttagtagatttcaagaagaaaccac

SEQ ID NO: 5976734 - DNA, 25 bp, Homo sapien
actcccatcgtattattgatattca

SEQ ID NO: 5976735 - DNA, 25 bp, Homo sapien
taagtgggtcatccccgctatccac

SEQ ID NO: 5976736 - DNA, 25 bp, Homo sapien
gcagtgagatgtaagaagtgcagaa

SEQ ID NO: 5976737 - DNA, 25 bp, Homo sapien
ggatctaggtgcagttgtggtaagt

SEQ ID NO: 5976738 - DNA, 25 bp, Homo sapien
atggaacaattacatctctttgaga

SEQ ID NO: 5976739 - DNA, 25 bp, Homo sapien
ccgcagtgagatgtaagaagtgcag

SEQ ID NO: 5976740 - DNA, 25 bp, Homo sapien
aattaactgaagctgagaagagcaa

SEQ ID NO: 5976741 - DNA, 25 bp, Homo sapien
tatccacctgcaaactagtaaagtg

SEQ ID NO: 5976742 - DNA, 25 bp, Homo sapien
agtgcagaaccaaattggcgttatc

SEQ ID NO: 5976743 - DNA, 25 bp, Homo sapien
atccatcgggcagcgaattggtctc

SEQ ID NO: 5976744 - DNA, 25 bp, Homo sapien
tgactgatgtgctgcaatacttcga

SEQ ID NO: 5976745 - DNA, 25 bp, Homo sapien
gagaagagcaaggtcaccgcagtga

SEQ ID NO: 5976746 - DNA, 25 bp, Homo sapien
agaaaatgggtggagattttgtcga

SEQ ID NO: 5976747 - DNA, 25 bp, Homo sapien
caactggaaaggatctaggtgcagt

SEQ ID NO: 5976748 - DNA, 25 bp, Homo sapien
tgggtcatccccgctatccacctgc

SEQ ID NO: 5976749 - DNA, 25 bp, Homo sapien
attattgaccacagaccattgggtg

SEQ ID NO: 5976750 - DNA, 25 bp, Homo sapien
cctgcaaactagtaaagtggatcaa

SEQ ID NO: 5976751 - DNA, 25 bp, Homo sapien
gagattttgtcgatttcgacaaccc

SEQ ID NO: 5976752 - DNA, 25 bp, Homo sapien
cccttacaatccactgctttgccca

SEQ ID NO: 5976753 - DNA, 25 bp, Homo sapien
gagtatctaataaggaaaggttaca

SEQ ID NO: 5976754 - DNA, 25 bp, Homo sapien
atgcaaactcagtagacgaggaagt

SEQ ID NO: 5976755 - DNA, 25 bp, Homo sapien
ttacacgctaaaaaacatacccatc

SEQ ID NO: 5976756 - DNA, 25 bp, Homo sapien
caggctgttcaagtaaagttggcgg

SEQ ID NO: 5976757 - DNA, 25 bp, Homo sapien
gaaccaaattggcgttatctacatc

SEQ ID NO: 5976758 - DNA, 25 bp, Homo sapien
ttcgatgaaacgaaccgattcattg

SEQ ID NO: 5976759 - DNA, 25 bp, Homo sapien
tggttaattttgaatccgagaaagt

SEQ ID NO: 5976760 - DNA, 25 bp, Homo sapien
gtagcctacctaatgtatcgttatg

SEQ ID NO: 5976761 - DNA, 25 bp, Homo sapien
cgttatggattgtcactatcaatgg

SEQ ID NO: 5976762 - DNA, 25 bp, Homo sapien
gaagctgagaagagcaaggtcaccg

SEQ ID NO: 5976763 - DNA, 25 bp, Homo sapien
ttccccaatgaagttgagtattcgc

SEQ ID NO: 5976764 - DNA, 25 bp, Homo sapien
ggaggcatatatcttggcggaatcc

SEQ ID NO: 5976765 - DNA, 25 bp, Homo sapien
aaaccgagtgttgagccaaacgaga

SEQ ID NO: 5976766 - DNA, 25 bp, Homo sapien
tggagattttgtcgatttcgacaac

SEQ ID NO: 5976767 - DNA, 25 bp, Homo sapien
cattgggtgcagaatttaacattac

SEQ ID NO: 5976768 - DNA, 25 bp, Homo sapien
tttcatcgaacctttaaaatggatg

SEQ ID NO: 5976769 - DNA, 25 bp, Homo sapien
cagagtatctaataaggaaaggtta

SEQ ID NO: 5976770 - DNA, 25 bp, Homo sapien
gaccacagaccattgggtgcagaat

SEQ ID NO: 5976771 - DNA, 25 bp, Homo sapien
gaaaggatctaggtgcagttgtggt

SEQ ID NO: 5976772 - DNA, 25 bp, Homo sapien
taaaaaacatacccatcgatgatga

SEQ ID NO: 5976773 - DNA, 25 bp, Homo sapien
caagagggccgccaactcccatcgt

SEQ ID NO: 5976774 - DNA, 25 bp, Homo sapien
ttggcggttacaactggaaaggatc

SEQ ID NO: 5976775 - DNA, 25 bp, Homo sapien
tattctttctgttatcaaattccag

SEQ ID NO: 5976776 - DNA, 25 bp, Homo sapien
gcaagacttggataaattaactgaa

SEQ ID NO: 5976777 - DNA, 25 bp, Homo sapien
ctataagcagtggaagctgaagcaa

SEQ ID NO: 5976778 - DNA, 25 bp, Homo sapien
aagggaagttttcatgtccaggctg

SEQ ID NO: 5976779 - DNA, 25 bp, Homo sapien
cccaccaagtaaggaatcatcagag

SEQ ID NO: 5976780 - DNA, 25 bp, Homo sapien
aaggaatcatcagagggacacttca

SEQ ID NO: 5976781 - DNA, 25 bp, Homo sapien
gttgagtattcgcccagattagtag

SEQ ID NO: 5976782 - DNA, 25 bp, Homo sapien
atggatgcaacctgaactacaaggc

SEQ ID NO: 5976783 - DNA, 25 bp, Homo sapien
cgtattattgatattcaagagtcac

SEQ ID NO: 5976784 - DNA, 25 bp, Homo sapien
agatctgtaaccttcatagtagcct

SEQ ID NO: 5976785 - DNA, 25 bp, Homo sapien
gaagagcaaggtcaccgcagtgaga

SEQ ID NO: 5976786 - DNA, 25 bp, Homo sapien
ttcgcccagattagtagatttcaag

SEQ ID NO: 5976787 - DNA, 25 bp, Homo sapien
ttttgctcattgtcaagcaggactc

SEQ ID NO: 5976788 - DNA, 25 bp, Homo sapien
ccaacatggttaattttgaatccga

SEQ ID NO: 5976789 - DNA, 25 bp, Homo sapien
agtagatttcaagaagaaaccacaa

SEQ ID NO: 5976790 - DNA, 25 bp, Homo sapien
tacctaatgtatcgttatggattgt

SEQ ID NO: 5976791 - DNA, 25 bp, Homo sapien
cctaatgtatcgttatggattgtca

SEQ ID NO: 5976792 - DNA, 25 bp, Homo sapien
ccatcgtattattgatattcaagag

SEQ ID NO: 5976793 - DNA, 25 bp, Homo sapien
caatccactgctttgcccaacatgg

SEQ ID NO: 5976794 - DNA, 25 bp, Homo sapien
caacgtggtgctgtttttgctcatt

SEQ ID NO: 5976795 - DNA, 25 bp, Homo sapien
caagttagatccatcgggcagcgaa

SEQ ID NO: 5976796 - DNA, 25 bp, Homo sapien
tcatggaacaattacatctctttga

SEQ ID NO: 5976797 - DNA, 25 bp, Homo sapien
ccaagtaaggaatcatcagagggac

SEQ ID NO: 5976798 - DNA, 25 bp, Homo sapien
caatctatcaagttagatccatcgg

SEQ ID NO: 5976799 - DNA, 25 bp, Homo sapien
ctgttatcaaattccaggtcattcc

SEQ ID NO: 5976800 - DNA, 25 bp, Homo sapien
tggtctccaattctggaatgtttaa

SEQ ID NO: 5976801 - DNA, 25 bp, Homo sapien
tccaattattgaccacagaccattg

SEQ ID NO: 5976802 - DNA, 25 bp, Homo sapien
ttatggattgtcactatcaatggct

SEQ ID NO: 5976803 - DNA, 25 bp, Homo sapien
cagattagtagatttcaagaagaaa

SEQ ID NO: 5976804 - DNA, 25 bp, Homo sapien
cacttcatcaagagggccgccaact

SEQ ID NO: 5976805 - DNA, 25 bp, Homo sapien
cagaaccaaattggcgttatctaca

SEQ ID NO: 5976806 - DNA, 25 bp, Homo sapien
cagcgaattggtctccaattctgga

SEQ ID NO: 5976807 - DNA, 25 bp, Homo sapien
gcagtggaagctgaagcaatctatc

SEQ ID NO: 5976808 - DNA, 25 bp, Homo sapien
tttcatggaacaattacatctcttt

SEQ ID NO: 5976809 - DNA, 25 bp, Homo sapien
ggcaagcaagagttagaagggaagt

SEQ ID NO: 5976810 - DNA, 25 bp, Homo sapien
atgacccaccaagtaaggaatcatc

SEQ ID NO: 5976811 - DNA, 25 bp, Homo sapien
taaattaactgaagctgagaagagc

SEQ ID NO: 5976812 - DNA, 25 bp, Homo sapien
tgttgagccaaacgagaatttcatg

SEQ ID NO: 5976813 - DNA, 25 bp, Homo sapien
accaaattggcgttatctacatctt

SEQ ID NO: 5976814 - DNA, 25 bp, Homo sapien
tcaatgcttgttccccaatgaagtt

SEQ ID NO: 5976815 - DNA, 25 bp, Homo sapien
ccaatgaagttgagtattcgcccag

SEQ ID NO: 5976816 - DNA, 25 bp, Homo sapien
caactcccatcgtattattgatatt

SEQ ID NO: 5976817 - DNA, 25 bp, Homo sapien
agaagggaagttttcatgtccaggc

SEQ ID NO: 5976818 - DNA, 25 bp, Homo sapien
gaagaaaccacaacgtggtgctgtt

SEQ ID NO: 5976819 - DNA, 25 bp, Homo sapien
cgagatctgtaaccttcatagtagc

SEQ ID NO: 5976820 - DNA, 25 bp, Homo sapien
gctctcattttttcatcgaaccttt

SEQ ID NO: 5976821 - DNA, 25 bp, Homo sapien
ttgaccacagaccattgggtgcaga

SEQ ID NO: 5976822 - DNA, 25 bp, Homo sapien
gaagttaccaggatattaggaggca

SEQ ID NO: 5976823 - DNA, 25 bp, Homo sapien
gtgctgcaatacttcgatgaaacga

SEQ ID NO: 5976824 - DNA, 25 bp, Homo sapien
attgtcactatcaatggctatgcac

SEQ ID NO: 5976825 - DNA, 25 bp, Homo sapien
agaggaagaaaccgagtgttgagcc

SEQ ID NO: 5976826 - DNA, 25 bp, Homo sapien
ttcccttacaatccactgctttgcc

SEQ ID NO: 5976827 - DNA, 25 bp, Homo sapien
ttcatagtagcctacctaatgtatc

SEQ ID NO: 5976828 - DNA, 25 bp, Homo sapien
tgaatccgagaaagtaaatagataa

SEQ ID NO: 5976829 - DNA, 25 bp, Homo sapien
tggaaaggatctaggtgcagttgtg

SEQ ID NO: 5976830 - DNA, 25 bp, Homo sapien
aagaagaaaccacaacgtggtgctg

SEQ ID NO: 5976831 - DNA, 25 bp, Homo sapien
taatgtatcgttatggattgtcact

SEQ ID NO: 5976832 - DNA, 25 bp, Homo sapien
catagtagcctacctaatgtatcgt

SEQ ID NO: 5976833 - DNA, 25 bp, Homo sapien
atctaggtgcagttgtggtaagtgg

SEQ ID NO: 5976834 - DNA, 25 bp, Homo sapien
tagtagcctacctaatgtatcgtta

SEQ ID NO: 5976835 - DNA, 25 bp, Homo sapien
ttttcatgtccaggctgttcaagta

SEQ ID NO: 5976836 - DNA, 25 bp, Homo sapien
tggctatgcacgctgtcaagaggaa

SEQ ID NO: 5976837 - DNA, 25 bp, Homo sapien
tcattgtcaagcaggactctcgaga

SEQ ID NO: 5976838 - DNA, 25 bp, Homo sapien
aagtaaggaatcatcagagggacac

SEQ ID NO: 5976839 - DNA, 25 bp, Homo sapien
acgtggtgctgtttttgctcattgt

SEQ ID NO: 5976840 - DNA, 25 bp, Homo sapien
caaattgctctcattttttcatcga

SEQ ID NO: 5976841 - DNA, 25 bp, Homo sapien
catgtccaggctgttcaagtaaagt

SEQ ID NO: 5976842 - DNA, 25 bp, Homo sapien
gcccaacatggttaattttgaatcc

SEQ ID NO: 5976843 - DNA, 25 bp, Homo sapien
ttttgtcgatttcgacaacccagcc

SEQ ID NO: 5976844 - DNA, 25 bp, Homo sapien
gagtcacaagcaaattgctctcatt

SEQ ID NO: 5976845 - DNA, 25 bp, Homo sapien
ttgagccaaacgagaatttcatgga

SEQ ID NO: 5976846 - DNA, 25 bp, Homo sapien
gggacacttcatcaagagggccgcc

SEQ ID NO: 5976847 - DNA, 25 bp, Homo sapien
caaattggcgttatctacatctttc

SEQ ID NO: 5976848 - DNA, 25 bp, Homo sapien
cgctgtcaagaggaagaaaccgagt

SEQ ID NO: 5976849 - DNA, 25 bp, Homo sapien
gcggaatccgtccaattattgacca

SEQ ID NO: 5976850 - DNA, 25 bp, Homo sapien
gtatctaataaggaaaggttacacg

SEQ ID NO: 5976851 - DNA, 25 bp, Homo sapien
atgtatcgttatggattgtcactat

SEQ ID NO: 5976852 - DNA, 25 bp, Homo sapien
aagcaggactctcgagatctgtaac

SEQ ID NO: 5976853 - DNA, 25 bp, Homo sapien
gagtcgtcgcaagacttggataaat

SEQ ID NO: 5976854 - DNA, 25 bp, Homo sapien
gatttcaagaagaaaccacaacgtg

SEQ ID NO: 5976855 - DNA, 25 bp, Homo sapien
aatttaacattactcatattctttc

SEQ ID NO: 5976856 - DNA, 25 bp, Homo sapien
tgtcactatcaatggctatgcacgc

SEQ ID NO: 5976857 - DNA, 25 bp, Homo sapien
agaccattgggtgcagaatttaaca

SEQ ID NO: 5976858 - DNA, 25 bp, Homo sapien
tgatattcaagagtcacaagcaaat

SEQ ID NO: 5976859 - DNA, 25 bp, Homo sapien
acagaccattgggtgcagaatttaa

SEQ ID NO: 5976860 - DNA, 25 bp, Homo sapien
cacctgcaaactagtaaagtggatc

SEQ ID NO: 5976861 - DNA, 25 bp, Homo sapien
tgggtggagattttgtcgatttcga

SEQ ID NO: 5976862 - DNA, 25 bp, Homo sapien
acaaggcaagcaagagttagaaggg

SEQ ID NO: 5976863 - DNA, 25 bp, Homo sapien
agatgtaagaagtgcagaaccaaat

SEQ ID NO: 5976864 - DNA, 25 bp, Homo sapien
gaaacgaaccgattcattgatcaat

SEQ ID NO: 5976865 - DNA, 25 bp, Homo sapien
atcgtattattgatattcaagagtc

SEQ ID NO: 5976866 - DNA, 25 bp, Homo sapien
attaggaggcatatatcttggcgga

SEQ ID NO: 5976867 - DNA, 25 bp, Homo sapien
gcaggactctcgagatctgtaacct

SEQ ID NO: 5976868 - DNA, 25 bp, Homo sapien
atgcaacctgaactacaaggcaagc

SEQ ID NO: 5976869 - DNA, 25 bp, Homo sapien
acatctttcatcgcgcatgacccac

SEQ ID NO: 5976870 - DNA, 25 bp, Homo sapien
ctgaagcaatctatcaagttagatc

SEQ ID NO: 5976871 - DNA, 25 bp, Homo sapien
actatcaatggctatgcacgctgtc

SEQ ID NO: 5976872 - DNA, 25 bp, Homo sapien
tatcaatggctatgcacgctgtcaa

SEQ ID NO: 5976873 - DNA, 25 bp, Homo sapien
acaacccagcctataagcagtggaa

SEQ ID NO: 5976874 - DNA, 25 bp, Homo sapien
atttcgacaacccagcctataagca

SEQ ID NO: 5976875 - DNA, 25 bp, Homo sapien
gctaaaaaacatacccatcgatgat

SEQ ID NO: 5976876 - DNA, 25 bp, Homo sapien
gacttggataaattaactgaagctg

SEQ ID NO: 5976877 - DNA, 25 bp, Homo sapien
ggttacacgctaaaaaacataccca

SEQ ID NO: 5976878 - DNA, 25 bp, Homo sapien
aatgtttaaagattcggagtcgtcg

SEQ ID NO: 5976879 - DNA, 25 bp, Homo sapien
aagttgagtattcgcccagattagt

SEQ ID NO: 5976880 - DNA, 25 bp, Homo sapien
aaactcagtagacgaggaagttacc

SEQ ID NO: 5976881 - DNA, 25 bp, Homo sapien
aacatggttaattttgaatccgaga

SEQ ID NO: 5976882 - DNA, 25 bp, Homo sapien
tagatttcaagaagaaaccacaacg

SEQ ID NO: 5976883 - DNA, 25 bp, Homo sapien
ggctggaaatgcaaactcagtagac

SEQ ID NO: 5976884 - DNA, 25 bp, Homo sapien
tgttccccaatgaagttgagtattc

SEQ ID NO: 5976885 - DNA, 25 bp, Homo sapien
cgagaatttcatggaacaattacat

SEQ ID NO: 5976886 - DNA, 25 bp, Homo sapien
tttaacattactcatattctttctg

SEQ ID NO: 5976887 - DNA, 25 bp, Homo sapien
catcgcgcatgacccaccaagtaag

SEQ ID NO: 5976888 - DNA, 25 bp, Homo sapien
gtctccaattctggaatgtttaaag

SEQ ID NO: 5976889 - DNA, 25 bp, Homo sapien
gctatccacctgcaaactagtaaag

SEQ ID NO: 5976890 - DNA, 25 bp, Homo sapien
gatcaatgcttgttccccaatgaag

SEQ ID NO: 5976891 - DNA, 25 bp, Homo sapien
cgatttcgacaacccagcctataag

SEQ ID NO: 5976892 - DNA, 25 bp, Homo sapien
ggaatgtttaaagattcggagtcgt

SEQ ID NO: 5976893 - DNA, 25 bp, Homo sapien
atcaagagggccgccaactcccatc

SEQ ID NO: 5976894 - DNA, 25 bp, Homo sapien
gacccaccaagtaaggaatcatcag

SEQ ID NO: 5976895 - DNA, 25 bp, Homo sapien
agggccgccaactcccatcgtatta

SEQ ID NO: 5976896 - DNA, 25 bp, Homo sapien
tatgcacgctgtcaagaggaagaaa

SEQ ID NO: 5976897 - DNA, 25 bp, Homo sapien
aacctttaaaatggatgcaacctga

SEQ ID NO: 5976898 - DNA, 25 bp, Homo sapien
taaagattcggagtcgtcgcaagac

SEQ ID NO: 5976899 - DNA, 25 bp, Homo sapien
taaaatggatgcaacctgaactaca

SEQ ID NO: 5976900 - DNA, 25 bp, Homo sapien
aatggctatgcacgctgtcaagagg

SEQ ID NO: 5976901 - DNA, 25 bp, Homo sapien
acatacccatcgatgatgatgatgt

SEQ ID NO: 5976902 - DNA, 25 bp, Homo sapien
gttacaactggaaaggatctaggtg

SEQ ID NO: 5976903 - DNA, 25 bp, Homo sapien
aacctgaactacaaggcaagcaaga

SEQ ID NO: 5976904 - DNA, 25 bp, Homo sapien
tgaactacaaggcaagcaagagtta

SEQ ID NO: 5976905 - DNA, 25 bp, Homo sapien
gattagtagatttcaagaagaaacc

SEQ ID NO: 5976906 - DNA, 25 bp, Homo sapien
atctacatctttcatcgcgcatgac

SEQ ID NO: 5976907 - DNA, 25 bp, Homo sapien
aatgaagttgagtattcgcccagat

SEQ ID NO: 5976908 - DNA, 25 bp, Homo sapien
ctatcaagttagatccatcgggcag

SEQ ID NO: 5976909 - DNA, 25 bp, Homo sapien
gcagaatttaacattactcatattc

SEQ ID NO: 5976910 - DNA, 25 bp, Homo sapien
ctgagaagagcaaggtcaccgcagt

SEQ ID NO: 5976911 - DNA, 25 bp, Homo sapien
aacgagaatttcatggaacaattac

SEQ ID NO: 5976912 - DNA, 25 bp, Homo sapien
gattcattgatcaatgcttgttccc

SEQ ID NO: 5976913 - DNA, 25 bp, Homo sapien
agaatttcatggaacaattacatct

SEQ ID NO: 5976914 - DNA, 25 bp, Homo sapien
agttagaagggaagttttcatgtcc

SEQ ID NO: 5976915 - DNA, 25 bp, Homo sapien
cgggcagcgaattggtctccaattc

SEQ ID NO: 5976916 - DNA, 25 bp, Homo sapien
gcatgacccaccaagtaaggaatca

SEQ ID NO: 5976917 - DNA, 25 bp, Homo sapien
attttgaatccgagaaagtaaatag

SEQ ID NO: 5976918 - DNA, 25 bp, Homo sapien
ggtggagattttgtcgatttcgaca

SEQ ID NO: 5976919 - DNA, 25 bp, Homo sapien
aattctggaatgtttaaagattcgg

SEQ ID NO: 5976920 - DNA, 25 bp, Homo sapien
gattcggagtcgtcgcaagacttgg

SEQ ID NO: 5976921 - DNA, 25 bp, Homo sapien
tgcaatacttcgatgaaacgaaccg

SEQ ID NO: 5976922 - DNA, 25 bp, Homo sapien
agttggcggttacaactggaaagga

SEQ ID NO: 5976923 - DNA, 25 bp, Homo sapien
ctttctgttatcaaattccaggtca

SEQ ID NO: 5976924 - DNA, 25 bp, Homo sapien
cttggataaattaactgaagctgag

SEQ ID NO: 5976925 - DNA, 25 bp, Homo sapien
tagacgaggaagttaccaggatatt

SEQ ID NO: 5976926 - DNA, 25 bp, Homo sapien
caattattgaccacagaccattggg

SEQ ID NO: 5976927 - DNA, 25 bp, Homo sapien
gctgcaatacttcgatgaaacgaac

SEQ ID NO: 5976928 - DNA, 25 bp, Homo sapien
aacccagcctataagcagtggaagc

SEQ ID NO: 5976929 - DNA, 25 bp, Homo sapien
taattttgaatccgagaaagtaaat

SEQ ID NO: 5976930 - DNA, 25 bp, Homo sapien
gccaactcccatcgtattattgata

SEQ ID NO: 5976931 - DNA, 25 bp, Homo sapien
attgatattcaagagtcacaagcaa

SEQ ID NO: 5976932 - DNA, 25 bp, Homo sapien
tgagtattcgcccagattagtagat

SEQ ID NO: 5976933 - DNA, 25 bp, Homo sapien
gtggatcaatttcccttacaatcca

SEQ ID NO: 5976934 - DNA, 25 bp, Homo sapien
atctatcaagttagatccatcgggc

SEQ ID NO: 5976935 - DNA, 25 bp, Homo sapien
cagcctataagcagtggaagctgaa

SEQ ID NO: 5976936 - DNA, 25 bp, Homo sapien
agaatttaacattactcatattctt

SEQ ID NO: 5976937 - DNA, 25 bp, Homo sapien
gacgaggaagttaccaggatattag

SEQ ID NO: 5976938 - DNA, 25 bp, Homo sapien
agttaccaggatattaggaggcata

SEQ ID NO: 5976939 - DNA, 25 bp, Homo sapien
tgcttgttccccaatgaagttgagt

SEQ ID NO: 5976940 - DNA, 25 bp, Homo sapien
ctggaaatgcaaactcagtagacga

SEQ ID NO: 5976941 - DNA, 25 bp, Homo sapien
caaacgagaatttcatggaacaatt

SEQ ID NO: 5976942 - DNA, 25 bp, Homo sapien
atggctggaaatgcaaactcagtag

SEQ ID NO: 5976943 - DNA, 25 bp, Homo sapien
cttcatcaagagggccgccaactcc

SEQ ID NO: 5976944 - DNA, 25 bp, Homo sapien
agagttagaagggaagttttcatgt

SEQ ID NO: 5976945 - DNA, 25 bp, Homo sapien
acattactcatattctttctgttat

SEQ ID NO: 5976946 - DNA, 25 bp, Homo sapien
ttgatcaatgcttgttccccaatga

SEQ ID NO: 5976947 - DNA, 25 bp, Homo sapien
tgtccaggctgttcaagtaaagttg

SEQ ID NO: 5976948 - DNA, 25 bp, Homo sapien
tggcggaatccgtccaattattgac

SEQ ID NO: 5976949 - DNA, 25 bp, Homo sapien
aagcagtggaagctgaagcaatcta

SEQ ID NO: 5976950 - DNA, 25 bp, Homo sapien
ggtgctgtttttgctcattgtcaag

SEQ ID NO: 5976951 - DNA, 25 bp, Homo sapien
caagcaagagttagaagggaagttt

SEQ ID NO: 5976952 - DNA, 25 bp, Homo sapien
agcaaattgctctcattttttcatc

SEQ ID NO: 5976953 - DNA, 25 bp, Homo sapien
cgttatctacatctttcatcgcgca

SEQ ID NO: 5976954 - DNA, 25 bp, Homo sapien
gtatcgttatggattgtcactatca

SEQ ID NO: 5976955 - DNA, 25 bp, Homo sapien
ttcattgatcaatgcttgttcccca

SEQ ID NO: 5976956 - DNA, 25 bp, Homo sapien
tcccatcgtattattgatattcaag

SEQ ID NO: 5976957 - DNA, 25 bp, Homo sapien
tgatgatgtgactgatgtgctgcaa

SEQ ID NO: 5976958 - DNA, 25 bp, Homo sapien
ttgtcgatttcgacaacccagccta

SEQ ID NO: 5976959 - DNA, 25 bp, Homo sapien
caagagttagaagggaagttttcat

SEQ ID NO: 5976960 - DNA, 25 bp, Homo sapien
caagaggaagaaaccgagtgttgag

SEQ ID NO: 5976961 - DNA, 25 bp, Homo sapien
aactacaaggcaagcaagagttaga

SEQ ID NO: 5976962 - DNA, 25 bp, Homo sapien
ctccaattctggaatgtttaaagat

SEQ ID NO: 5976963 - DNA, 25 bp, Homo sapien
tgagaaaatgggtggagattttgtc

SEQ ID NO: 5976964 - DNA, 25 bp, Homo sapien
atcaagttagatccatcgggcagcg

SEQ ID NO: 5976965 - DNA, 25 bp, Homo sapien
atccccgctatccacctgcaaacta

SEQ ID NO: 5976966 - DNA, 25 bp, Homo sapien
cctacctaatgtatcgttatggatt

SEQ ID NO: 5976967 - DNA, 25 bp, Homo sapien
cgacaacccagcctataagcagtgg

SEQ ID NO: 5976968 - DNA, 25 bp, Homo sapien
tctttgagaaaatgggtggagattt

SEQ ID NO: 5976969 - DNA, 25 bp, Homo sapien
acccatcgatgatgatgatgtgact

SEQ ID NO: 5976970 - DNA, 25 bp, Homo sapien
ttcatcgcgcatgacccaccaagta

SEQ ID NO: 5976971 - DNA, 25 bp, Homo sapien
ccgccaactcccatcgtattattga

SEQ ID NO: 5976972 - DNA, 25 bp, Homo sapien
tccaggtcattccagagtatctaat

SEQ ID NO: 5976973 - DNA, 25 bp, Homo sapien
tacaactggaaaggatctaggtgca

SEQ ID NO: 5976974 - DNA, 25 bp, Homo sapien
cagagggacacttcatcaagagggc

SEQ ID NO: 5976975 - DNA, 25 bp, Homo sapien
gtgcagttgtggtaagtgggtcatc

SEQ ID NO: 5976976 - DNA, 25 bp, Homo sapien
agatccatcgggcagcgaattggtc

SEQ ID NO: 5976977 - DNA, 25 bp, Homo sapien
ctttcatcgcgcatgacccaccaag

SEQ ID NO: 5976978 - DNA, 25 bp, Homo sapien
ttggcgttatctacatctttcatcg

SEQ ID NO: 5976979 - DNA, 25 bp, Homo sapien
tggaagctgaagcaatctatcaagt

SEQ ID NO: 5976980 - DNA, 25 bp, Homo sapien
ttagaagggaagttttcatgtccag

SEQ ID NO: 5976981 - DNA, 25 bp, Homo sapien
cctttaaaatggatgcaacctgaac

SEQ ID NO: 5976982 - DNA, 25 bp, Homo sapien
tgcacgctgtcaagaggaagaaacc

SEQ ID NO: 5976983 - DNA, 25 bp, Homo sapien
gggtgcagaatttaacattactcat

SEQ ID NO: 5976984 - DNA, 25 bp, Homo sapien
tccgtccaattattgaccacagacc

SEQ ID NO: 5976985 - DNA, 25 bp, Homo sapien
tacatctctttgagaaaatgggtgg

SEQ ID NO: 5976986 - DNA, 25 bp, Homo sapien
cgtccaattattgaccacagaccat

SEQ ID NO: 5976987 - DNA, 25 bp, Homo sapien
tcatcagagggacacttcatcaaga

SEQ ID NO: 5976988 - DNA, 25 bp, Homo sapien
tttgaatccgagaaagtaaatagat

SEQ ID NO: 5976989 - DNA, 25 bp, Homo sapien
aaggcaagcaagagttagaagggaa

SEQ ID NO: 5976990 - DNA, 25 bp, Homo sapien
aggaagaaaccgagtgttgagccaa

SEQ ID NO: 5976991 - DNA, 25 bp, Homo sapien
gccaaacgagaatttcatggaacaa

SEQ ID NO: 5976992 - DNA, 25 bp, Homo sapien
agtagacgaggaagttaccaggata

SEQ ID NO: 5976993 - DNA, 25 bp, Homo sapien
ccaattctggaatgtttaaagattc

SEQ ID NO: 5976994 - DNA, 25 bp, Homo sapien
tccagagtatctaataaggaaaggt

SEQ ID NO: 5976995 - DNA, 25 bp, Homo sapien
taaagtggatcaatttcccttacaa

SEQ ID NO: 5976996 - DNA, 25 bp, Homo sapien
tggataaattaactgaagctgagaa

SEQ ID NO: 5976997 - DNA, 25 bp, Homo sapien
tgaagttgagtattcgcccagatta

SEQ ID NO: 5976998 - DNA, 25 bp, Homo sapien
ctcatattctttctgttatcaaatt

SEQ ID NO: 5976999 - DNA, 25 bp, Homo sapien
agttagatccatcgggcagcgaatt

SEQ ID NO: 5977000 - DNA, 25 bp, Homo sapien
tcactatcaatggctatgcacgctg

SEQ ID NO: 5977001 - DNA, 25 bp, Homo sapien
caaggtcaccgcagtgagatgtaag

SEQ ID NO: 5977002 - DNA, 25 bp, Homo sapien
ctgtaaccttcatagtagcctacct

SEQ ID NO: 5977003 - DNA, 25 bp, Homo sapien
tcgcgcatgacccaccaagtaagga

SEQ ID NO: 5977004 - DNA, 25 bp, Homo sapien
accacaacgtggtgctgtttttgct

SEQ ID NO: 5977005 - DNA, 25 bp, Homo sapien
taggaggcatatatcttggcggaat

SEQ ID NO: 5977006 - DNA, 25 bp, Homo sapien
aaccgattcattgatcaatgcttgt

SEQ ID NO: 5977007 - DNA, 25 bp, Homo sapien
cgagtgttgagccaaacgagaattt

SEQ ID NO: 5977008 - DNA, 25 bp, Homo sapien
gataaattaactgaagctgagaaga

SEQ ID NO: 5977009 - DNA, 25 bp, Homo sapien
tgagatgtaagaagtgcagaaccaa

SEQ ID NO: 5977010 - DNA, 25 bp, Homo sapien
agtaaagttggcggttacaactgga

SEQ ID NO: 5977011 - DNA, 25 bp, Homo sapien
gcgaattggtctccaattctggaat

SEQ ID NO: 5977012 - DNA, 25 bp, Homo sapien
tgtcaagcaggactctcgagatctg

SEQ ID NO: 5977013 - DNA, 25 bp, Homo sapien
ttgcccaacatggttaattttgaat

SEQ ID NO: 5977014 - DNA, 25 bp, Homo sapien
tcatcaagagggccgccaactccca

SEQ ID NO: 5977015 - DNA, 25 bp, Homo sapien
gctcattgtcaagcaggactctcga

SEQ ID NO: 5977016 - DNA, 25 bp, Homo sapien
tgtttaaagattcggagtcgtcgca

SEQ ID NO: 5977017 - DNA, 25 bp, Homo sapien
aaaccacaacgtggtgctgtttttg

SEQ ID NO: 5977018 - DNA, 25 bp, Homo sapien
gaattggtctccaattctggaatgt

SEQ ID NO: 5977019 - DNA, 25 bp, Homo sapien
atgtaagaagtgcagaaccaaattg

SEQ ID NO: 5977020 - DNA, 25 bp, Homo sapien
tcgcaagacttggataaattaactg

SEQ ID NO: 5977021 - DNA, 25 bp, Homo sapien
aaccttcatagtagcctacctaatg

SEQ ID NO: 5977022 - DNA, 25 bp, Homo sapien
agtggaagctgaagcaatctatcaa

SEQ ID NO: 5977023 - DNA, 25 bp, Homo sapien
cgtcgcaagacttggataaattaac

SEQ ID NO: 5977024 - DNA, 25 bp, Homo sapien
atctttcatcgcgcatgacccacca

SEQ ID NO: 5977025 - DNA, 25 bp, Homo sapien
atgaaacgaaccgattcattgatca

SEQ ID NO: 5977026 - DNA, 25 bp, Homo sapien
attcaagagtcacaagcaaattgct

SEQ ID NO: 5977027 - DNA, 25 bp, Homo sapien
ggcgttatctacatctttcatcgcg

SEQ ID NO: 5977028 - DNA, 25 bp, Homo sapien
ctgttcaagtaaagttggcggttac

SEQ ID NO: 5977029 - DNA, 25 bp, Homo sapien
ttcgacaacccagcctataagcagt

SEQ ID NO: 5977030 - DNA, 25 bp, Homo sapien
ttatctacatctttcatcgcgcatg

SEQ ID NO: 5977031 - DNA, 25 bp, Homo sapien
gggaagttttcatgtccaggctgtt

SEQ ID NO: 5977032 - DNA, 25 bp, Homo sapien
attgtcaagcaggactctcgagatc

SEQ ID NO: 5977033 - DNA, 25 bp, Homo sapien
aagaagtgcagaaccaaattggcgt

SEQ ID NO: 5977034 - DNA, 25 bp, Homo sapien
ggattgtcactatcaatggctatgc

SEQ ID NO: 5977035 - DNA, 25 bp, Homo sapien
caatacttcgatgaaacgaaccgat

SEQ ID NO: 5977036 - DNA, 25 bp, Homo sapien
aacgaaccgattcattgatcaatgc

SEQ ID NO: 5977037 - DNA, 25 bp, Homo sapien
gactctcgagatctgtaaccttcat

SEQ ID NO: 5977038 - DNA, 25 bp, Homo sapien
atcttggcggaatccgtccaattat

SEQ ID NO: 5977039 - DNA, 25 bp, Homo sapien
ccgattcattgatcaatgcttgttc

SEQ ID NO: 5977040 - DNA, 25 bp, Homo sapien
tcaatggctatgcacgctgtcaaga

SEQ ID NO: 5977041 - DNA, 25 bp, Homo sapien
tcatcgaacctttaaaatggatgca

SEQ ID NO: 5977042 - DNA, 25 bp, Homo sapien
ttgctctcattttttcatcgaacct

SEQ ID NO: 5977043 - DNA, 25 bp, Homo sapien
tgcaaactagtaaagtggatcaatt

SEQ ID NO: 5977044 - DNA, 25 bp, Homo sapien
attccagagtatctaataaggaaag

SEQ ID NO: 5977045 - DNA, 25 bp, Homo sapien
tcaagaagaaaccacaacgtggtgc

SEQ ID NO: 5977046 - DNA, 25 bp, Homo sapien
catggttaattttgaatccgagaaa

SEQ ID NO: 5977047 - DNA, 25 bp, Homo sapien
ttcatgtccaggctgttcaagtaaa

SEQ ID NO: 5977048 - DNA, 25 bp, Homo sapien
acgctaaaaaacatacccatcgatg

SEQ ID NO: 5977049 - DNA, 25 bp, Homo sapien
agcaagagttagaagggaagttttc

SEQ ID NO: 5977050 - DNA, 25 bp, Homo sapien
gcagttgtggtaagtgggtcatccc

SEQ ID NO: 5977051 - DNA, 25 bp, Homo sapien
tgtgactgatgtgctgcaatacttc

SEQ ID NO: 5977052 - DNA, 25 bp, Homo sapien
tgatgtgctgcaatacttcgatgaa

SEQ ID NO: 5977053 - DNA, 25 bp, Homo sapien
atcgatgatgatgatgtgactgatg

SEQ ID NO: 5977054 - DNA, 25 bp, Homo sapien
ggccgccaactcccatcgtattatt

SEQ ID NO: 5977055 - DNA, 25 bp, Homo sapien
atcgaacctttaaaatggatgcaac

SEQ ID NO: 5977056 - DNA, 25 bp, Homo sapien
ggcagcgaattggtctccaattctg

SEQ ID NO: 5977057 - DNA, 25 bp, Homo sapien
ttaactgaagctgagaagagcaagg

SEQ ID NO: 5977058 - DNA, 25 bp, Homo sapien
cattgatcaatgcttgttccccaat

SEQ ID NO: 5977059 - DNA, 25 bp, Homo sapien
gtttttgctcattgtcaagcaggac

SEQ ID NO: 5977060 - DNA, 25 bp, Homo sapien
aattggcgttatctacatctttcat

SEQ ID NO: 5977061 - DNA, 25 bp, Homo sapien
tcaagcaggactctcgagatctgta

SEQ ID NO: 5977062 - DNA, 25 bp, Homo sapien
gatgatgatgtgactgatgtgctgc

SEQ ID NO: 5977063 - DNA, 25 bp, Homo sapien
ctacaaggcaagcaagagttagaag

SEQ ID NO: 5977064 - DNA, 25 bp, Homo sapien
ttgtggtaagtgggtcatccccgct

SEQ ID NO: 5977065 - DNA, 25 bp, Homo sapien
tttcaagaagaaaccacaacgtggt

SEQ ID NO: 5977066 - DNA, 25 bp, Homo sapien
cgaaccgattcattgatcaatgctt

SEQ ID NO: 5977067 - DNA, 25 bp, Homo sapien
agagcaaggtcaccgcagtgagatg

SEQ ID NO: 5977068 - DNA, 25 bp, Homo sapien
gtcaagaggaagaaaccgagtgttg

SEQ ID NO: 5977069 - DNA, 25 bp, Homo sapien
tattcgcccagattagtagatttca

SEQ ID NO: 5977070 - DNA, 25 bp, Homo sapien
tctctttgagaaaatgggtggagat

SEQ ID NO: 5977071 - DNA, 25 bp, Homo sapien
taacattactcatattctttctgtt

SEQ ID NO: 5977072 - DNA, 25 bp, Homo sapien
cttgttccccaatgaagttgagtat

SEQ ID NO: 5977073 - DNA, 25 bp, Homo sapien
atggattgtcactatcaatggctat

SEQ ID NO: 5977074 - DNA, 25 bp, Homo sapien
ttattgatattcaagagtcacaagc

SEQ ID NO: 5977075 - DNA, 25 bp, Homo sapien
gtggtgctgtttttgctcattgtca

SEQ ID NO: 5977076 - DNA, 25 bp, Homo sapien
cacaagcaaattgctctcatttttt

SEQ ID NO: 5977077 - DNA, 25 bp, Homo sapien
gcctataagcagtggaagctgaagc

SEQ ID NO: 5977078 - DNA, 25 bp, Homo sapien
actggaaaggatctaggtgcagttg

SEQ ID NO: 5977079 - DNA, 25 bp, Homo sapien
gtcacaagcaaattgctctcatttt

SEQ ID NO: 5977080 - DNA, 25 bp, Homo sapien
atcgttatggattgtcactatcaat

SEQ ID NO: 5977081 - DNA, 25 bp, Homo sapien
cttacaatccactgctttgcccaac

SEQ ID NO: 5977082 - DNA, 25 bp, Homo sapien
aaaatgggtggagattttgtcgatt

SEQ ID NO: 5977083 - DNA, 25 bp, Homo sapien
atattaggaggcatatatcttggcg

SEQ ID NO: 5977084 - DNA, 25 bp, Homo sapien
agcaaggtcaccgcagtgagatgta

SEQ ID NO: 5977085 - DNA, 25 bp, Homo sapien
ggtaagtgggtcatccccgctatcc

SEQ ID NO: 5977086 - DNA, 25 bp, Homo sapien
agaaaccacaacgtggtgctgtttt

SEQ ID NO: 5977087 - DNA, 25 bp, Homo sapien
accattgggtgcagaatttaacatt

SEQ ID NO: 5977088 - DNA, 25 bp, Homo sapien
ttctggaatgtttaaagattcggag

SEQ ID NO: 5977089 - DNA, 25 bp, Homo sapien
cgaggaagttaccaggatattagga

SEQ ID NO: 5977090 - DNA, 25 bp, Homo sapien
agtaaagtggatcaatttcccttac

SEQ ID NO: 5977091 - DNA, 25 bp, Homo sapien
atcagagggacacttcatcaagagg

SEQ ID NO: 5977092 - DNA, 25 bp, Homo sapien
ctttgcccaacatggttaattttga

SEQ ID NO: 5977093 - DNA, 25 bp, Homo sapien
gttatcaaattccaggtcattccag

SEQ ID NO: 5977094 - DNA, 25 bp, Homo sapien
tctcattttttcatcgaacctttaa

SEQ ID NO: 5977095 - DNA, 25 bp, Homo sapien
gttaattttgaatccgagaaagtaa

SEQ ID NO: 5977096 - DNA, 25 bp, Homo sapien
tcaaattccaggtcattccagagta

SEQ ID NO: 5977097 - DNA, 25 bp, Homo sapien
ccactgctttgcccaacatggttaa

SEQ ID NO: 5977098 - DNA, 25 bp, Homo sapien
caggtcattccagagtatctaataa

SEQ ID NO: 5977099 - DNA, 25 bp, Homo sapien
agaaaccgagtgttgagccaaacga

SEQ ID NO: 5977100 - DNA, 25 bp, Homo sapien
aggcatatatcttggcggaatccgt

SEQ ID NO: 5977101 - DNA, 25 bp, Homo sapien
gctatgcacgctgtcaagaggaaga

SEQ ID NO: 5977102 - DNA, 25 bp, Homo sapien
aagattcggagtcgtcgcaagactt

SEQ ID NO: 5977103 - DNA, 25 bp, Homo sapien
caattacatctctttgagaaaatgg

SEQ ID NO: 5977104 - DNA, 25 bp, Homo sapien
agctgagaagagcaaggtcaccgca

SEQ ID NO: 5977105 - DNA, 25 bp, Homo sapien
gtaagaagtgcagaaccaaattggc

SEQ ID NO: 5977106 - DNA, 25 bp, Homo sapien
aggaagttaccaggatattaggagg

SEQ ID NO: 5977107 - DNA, 25 bp, Homo sapien
caccaagtaaggaatcatcagaggg

SEQ ID NO: 5977108 - DNA, 25 bp, Homo sapien
tccaggctgttcaagtaaagttggc

SEQ ID NO: 5977109 - DNA, 25 bp, Homo sapien
gtggtaagtgggtcatccccgctat

SEQ ID NO: 5977110 - DNA, 25 bp, Homo sapien
agcaatctatcaagttagatccatc

SEQ ID NO: 5977111 - DNA, 25 bp, Homo sapien
tacaatccactgctttgcccaacat

SEQ ID NO: 5977112 - DNA, 25 bp, Homo sapien
aatgcttgttccccaatgaagttga

SEQ ID NO: 5977113 - DNA, 25 bp, Homo sapien
ataagcagtggaagctgaagcaatc

SEQ ID NO: 5977114 - DNA, 25 bp, Homo sapien
cacgctgtcaagaggaagaaaccga

SEQ ID NO: 5977115 - DNA, 25 bp, Homo sapien
ccgctatccacctgcaaactagtaa

SEQ ID NO: 5977116 - DNA, 25 bp, Homo sapien
ggctgttcaagtaaagttggcggtt

SEQ ID NO: 5977117 - DNA, 25 bp, Homo sapien
atcgggcagcgaattggtctccaat

SEQ ID NO: 5977118 - DNA, 25 bp, Homo sapien
aggtcaccgcagtgagatgtaagaa

SEQ ID NO: 5977119 - DNA, 25 bp, Homo sapien
gaaaggttacacgctaaaaaacata

SEQ ID NO: 5977120 - DNA, 25 bp, Homo sapien
ggatgcaacctgaactacaaggcaa

SEQ ID NO: 5977121 - DNA, 25 bp, Homo sapien
ctgtcaagaggaagaaaccgagtgt

SEQ ID NO: 5977122 - DNA, 25 bp, Homo sapien
aactgaagctgagaagagcaaggtc

SEQ ID NO: 5977123 - DNA, 25 bp, Homo sapien
aaatggatgcaacctgaactacaag

SEQ ID NO: 5977124 - DNA, 25 bp, Homo sapien
aactagtaaagtggatcaatttccc

SEQ ID NO: 5977125 - DNA, 25 bp, Homo sapien
cccagattagtagatttcaagaaga

SEQ ID NO: 5977126 - DNA, 25 bp, Homo sapien
aatccgtccaattattgaccacaga

SEQ ID NO: 5977127 - DNA, 25 bp, Homo sapien
ggaacaattacatctctttgagaaa

SEQ ID NO: 5977128 - DNA, 25 bp, Homo sapien
attccaggtcattccagagtatcta

SEQ ID NO: 5977129 - DNA, 25 bp, Homo sapien
ttctgttatcaaattccaggtcatt

SEQ ID NO: 5977130 - DNA, 25 bp, Homo sapien
atgatgatgatgtgactgatgtgct

SEQ ID NO: 5977131 - DNA, 25 bp, Homo sapien
agagggccgccaactcccatcgtat

SEQ ID NO: 5977132 - DNA, 25 bp, Homo sapien
gattttgtcgatttcgacaacccag

SEQ ID NO: 5977133 - DNA, 25 bp, Homo sapien
gaagcaatctatcaagttagatcca

SEQ ID NO: 5977134 - DNA, 25 bp, Homo sapien
ctaggtgcagttgtggtaagtgggt

SEQ ID NO: 5977135 - DNA, 25 bp, Homo sapien
atacttcgatgaaacgaaccgattc

SEQ ID NO: 5977136 - DNA, 25 bp, Homo sapien
ctgaagctgagaagagcaaggtcac

SEQ ID NO: 5977137 - DNA, 25 bp, Homo sapien
ttgggtgcagaatttaacattactc

SEQ ID NO: 5977138 - DNA, 25 bp, Homo sapien
aatttcatggaacaattacatctct

SEQ ID NO: 5977139 - DNA, 25 bp, Homo sapien
ggtcatccccgctatccacctgcaa

SEQ ID NO: 5977140 - DNA, 25 bp, Homo sapien
tccacctgcaaactagtaaagtgga

SEQ ID NO: 5977141 - DNA, 25 bp, Homo sapien
cctgaactacaaggcaagcaagagt

SEQ ID NO: 5977142 - DNA, 25 bp, Homo sapien
ggaaatgcaaactcagtagacgagg

SEQ ID NO: 5977143 - DNA, 25 bp, Homo sapien
agtgttgagccaaacgagaatttca

SEQ ID NO: 5977144 - DNA, 25 bp, Homo sapien
agtgggtcatccccgctatccacct

SEQ ID NO: 5977145 - DNA, 25 bp, Homo sapien
ccatcgggcagcgaattggtctcca

SEQ ID NO: 5977146 - DNA, 25 bp, Homo sapien
gtgcagaatttaacattactcatat

SEQ ID NO: 5977147 - DNA, 25 bp, Homo sapien
actgatgtgctgcaatacttcgatg

SEQ ID NO: 5977148 - DNA, 25 bp, Homo sapien
atctgtaaccttcatagtagcctac

SEQ ID NO: 5977149 - DNA, 25 bp, Homo sapien
gcatatatcttggcggaatccgtcc

SEQ ID NO: 5977150 - DNA, 25 bp, Homo sapien
aaggatctaggtgcagttgtggtaa

SEQ ID NO: 5977151 - DNA, 25 bp, Homo sapien
gcaacctgaactacaaggcaagcaa

SEQ ID NO: 5977152 - DNA, 25 bp, Homo sapien
acacgctaaaaaacatacccatcga

SEQ ID NO: 5977153 - DNA, 25 bp, Homo sapien
cggttacaactggaaaggatctagg

SEQ ID NO: 5977154 - DNA, 25 bp, Homo sapien
gaagttttcatgtccaggctgttca

SEQ ID NO: 5977155 - DNA, 25 bp, Homo sapien
actgctttgcccaacatggttaatt

SEQ ID NO: 5977156 - DNA, 25 bp, Homo sapien
attactcatattctttctgttatca

SEQ ID NO: 5977157 - DNA, 25 bp, Homo sapien
aaattccaggtcattccagagtatc

SEQ ID NO: 5977158 - DNA, 25 bp, Homo sapien
ctggaatgtttaaagattcggagtc

SEQ ID NO: 5977159 - DNA, 25 bp, Homo sapien
tttaaaatggatgcaacctgaacta

SEQ ID NO: 5977160 - DNA, 25 bp, Homo sapien
tgctttgcccaacatggttaatttt

SEQ ID NO: 5977161 - DNA, 25 bp, Homo sapien
tgctgtttttgctcattgtcaagca

SEQ ID NO: 5977162 - DNA, 25 bp, Homo sapien
ggaatccgtccaattattgaccaca

SEQ ID NO: 5977163 - DNA, 25 bp, Homo sapien
gagccaaacgagaatttcatggaac

SEQ ID NO: 5977164 - DNA, 25 bp, Homo sapien
ggaatcatcagagggacacttcatc

SEQ ID NO: 5977165 - DNA, 25 bp, Homo sapien
aagagtcacaagcaaattgctctca

SEQ ID NO: 5977166 - DNA, 25 bp, Homo sapien
taaagttggcggttacaactggaaa

SEQ ID NO: 5977167 - DNA, 25 bp, Homo sapien
tactcatattctttctgttatcaaa

SEQ ID NO: 5977168 - DNA, 25 bp, Homo sapien
ccttcatagtagcctacctaatgta

SEQ ID NO: 5977169 - DNA, 25 bp, Homo sapien
ccccgctatccacctgcaaactagt

SEQ ID NO: 5977170 - DNA, 25 bp, Homo sapien
atcaatttcccttacaatccactgc

SEQ ID NO: 5977171 - DNA, 25 bp, Homo sapien
ttctttctgttatcaaattccaggt

SEQ ID NO: 5977172 - DNA, 25 bp, Homo sapien
aatgggtggagattttgtcgatttc

SEQ ID NO: 5977173 - DNA, 25 bp, Homo sapien
ccacagaccattgggtgcagaattt

SEQ ID NO: 5977174 - DNA, 25 bp, Homo sapien
tcattttttcatcgaacctttaaaa

SEQ ID NO: 5977175 - DNA, 25 bp, Homo sapien
ctaataaggaaaggttacacgctaa

SEQ ID NO: 5977176 - DNA, 25 bp, Homo sapien
gagggacacttcatcaagagggccg

SEQ ID NO: 5977177 - DNA, 25 bp, Homo sapien
agtgagatgtaagaagtgcagaacc

SEQ ID NO: 5977178 - DNA, 25 bp, Homo sapien
gatgtgactgatgtgctgcaatact

SEQ ID NO: 5977179 - DNA, 25 bp, Homo sapien
atttcccttacaatccactgctttg

SEQ ID NO: 5977180 - DNA, 25 bp, Homo sapien
tcagtagacgaggaagttaccagga

SEQ ID NO: 5977181 - DNA, 25 bp, Homo sapien
agcctacctaatgtatcgttatgga

SEQ ID NO: 5977182 - DNA, 25 bp, Homo sapien
gcaaactcagtagacgaggaagtta

SEQ ID NO: 5977183 - DNA, 25 bp, Homo sapien
tgcagaaccaaattggcgttatcta

SEQ ID NO: 5977184 - DNA, 25 bp, Homo sapien
gacacttcatcaagagggccgccaa

SEQ ID NO: 5977185 - DNA, 25 bp, Homo sapien
ctgtttttgctcattgtcaagcagg

SEQ ID NO: 5977186 - DNA, 25 bp, Homo sapien
agttttcatgtccaggctgttcaag

SEQ ID NO: 5977187 - DNA, 25 bp, Homo sapien
ggatattaggaggcatatatcttgg

SEQ ID NO: 5977188 - DNA, 25 bp, Homo sapien
tttttcatcgaacctttaaaatgga

SEQ ID NO: 5977189 - DNA, 25 bp, Homo sapien
tcattccagagtatctaataaggaa

SEQ ID NO: 5977190 - DNA, 25 bp, Homo sapien
ccatcgatgatgatgatgtgactga

SEQ ID NO: 5977191 - DNA, 25 bp, Homo sapien
catctctttgagaaaatgggtggag

SEQ ID NO: 5977192 - DNA, 25 bp, Homo sapien
cgcccagattagtagatttcaagaa

SEQ ID NO: 5977193 - DNA, 25 bp, Homo sapien
cggagtcgtcgcaagacttggataa

SEQ ID NO: 5977194 - DNA, 25 bp, Homo sapien
gtcaccgcagtgagatgtaagaagt

SEQ ID NO: 5977195 - DNA, 25 bp, Homo sapien
ggtcattccagagtatctaataagg

SEQ ID NO: 5977196 - DNA, 25 bp, Homo sapien
gtcgatttcgacaacccagcctata

SEQ ID NO: 5977197 - DNA, 25 bp, Homo sapien
tcatccccgctatccacctgcaaac

SEQ ID NO: 5977198 - DNA, 25 bp, Homo sapien
caagcaaattgctctcattttttca

SEQ ID NO: 5977199 - DNA, 25 bp, Homo sapien
tattgaccacagaccattgggtgca

SEQ ID NO: 5977200 - DNA, 25 bp, Homo sapien
ttagatccatcgggcagcgaattgg

SEQ ID NO: 5977201 - DNA, 25 bp, Homo sapien
aaacatacccatcgatgatgatgat

SEQ ID NO: 5977202 - DNA, 25 bp, Homo sapien
accgagtgttgagccaaacgagaat

SEQ ID NO: 5977203 - DNA, 25 bp, Homo sapien
ctagtaaagtggatcaatttccctt

SEQ ID NO: 5977204 - DNA, 25 bp, Homo sapien
tattattgatattcaagagtcacaa

SEQ ID NO: 5977205 - DNA, 25 bp, Homo sapien
cttggcggaatccgtccaattattg

SEQ ID NO: 5977206 - DNA, 25 bp, Homo sapien
gtcgtcgcaagacttggataaatta

SEQ ID NO: 5977207 - DNA, 25 bp, Homo sapien
agttgtggtaagtgggtcatccccg

SEQ ID NO: 5977208 - DNA, 25 bp, Homo sapien
atgatgtgactgatgtgctgcaata

SEQ ID NO: 5977209 - DNA, 25 bp, Homo sapien
cacaacgtggtgctgtttttgctca

SEQ ID NO: 5977210 - DNA, 25 bp, Homo sapien
atgtgctgcaatacttcgatgaaac

SEQ ID NO: 5977211 - DNA, 25 bp, Homo sapien
gaagctgaagcaatctatcaagtta

SEQ ID NO: 5977212 - DNA, 25 bp, Homo sapien
catattctttctgttatcaaattcc

SEQ ID NO: 5977213 - DNA, 25 bp, Homo sapien
caccgcagtgagatgtaagaagtgc

SEQ ID NO: 5977214 - DNA, 25 bp, Homo sapien
agctgaagcaatctatcaagttaga

SEQ ID NO: 5977215 - DNA, 25 bp, Homo sapien
ttcggagtcgtcgcaagacttggat

SEQ ID NO: 5977216 - DNA, 25 bp, Homo sapien
caaactagtaaagtggatcaatttc

SEQ ID NO: 5977217 - DNA, 25 bp, Homo sapien
gaagtgcagaaccaaattggcgtta

SEQ ID NO: 5977218 - DNA, 25 bp, Homo sapien
aattgctctcattttttcatcgaac

SEQ ID NO: 5977219 - DNA, 25 bp, Homo sapien
agtcacatcatcatcatcgatgggt

SEQ ID NO: 5977220 - DNA, 25 bp, Homo sapien
gtcatgcgcgatgaaagatgtagat

SEQ ID NO: 5977221 - DNA, 25 bp, Homo sapien
cctcttgatgaagtgtccctctgat

SEQ ID NO: 5977222 - DNA, 25 bp, Homo sapien
tgacaatgagcaaaaacagcaccac

SEQ ID NO: 5977223 - DNA, 25 bp, Homo sapien
tagtttgcaggtggatagcggggat

SEQ ID NO: 5977224 - DNA, 25 bp, Homo sapien
tcctttccagttgtaaccgccaact

SEQ ID NO: 5977225 - DNA, 25 bp, Homo sapien
aatatcaataatacgatgggagttg

SEQ ID NO: 5977226 - DNA, 25 bp, Homo sapien
gtccctctgatgattccttacttgg

SEQ ID NO: 5977227 - DNA, 25 bp, Homo sapien
aggctactatgaaggttacagatct

SEQ ID NO: 5977228 - DNA, 25 bp, Homo sapien
gaaggttacagatctcgagagtcct

SEQ ID NO: 5977229 - DNA, 25 bp, Homo sapien
attccttacttggtgggtcatgcgc

SEQ ID NO: 5977230 - DNA, 25 bp, Homo sapien
gtaagggaaattgatccactttact

SEQ ID NO: 5977231 - DNA, 25 bp, Homo sapien
gcttccactgcttataggctgggtt

SEQ ID NO: 5977232 - DNA, 25 bp, Homo sapien
atgagtaatgttaaattctgcaccc

SEQ ID NO: 5977233 - DNA, 25 bp, Homo sapien
aagaatatgagtaatgttaaattct

SEQ ID NO: 5977234 - DNA, 25 bp, Homo sapien
acttcttacatctcactgcggtgac

SEQ ID NO: 5977235 - DNA, 25 bp, Homo sapien
cagcttcagttaatttatccaagtc

SEQ ID NO: 5977236 - DNA, 25 bp, Homo sapien
tcaataatacgatgggagttggcgg

SEQ ID NO: 5977237 - DNA, 25 bp, Homo sapien
tctgcacccaatggtctgtggtcaa

SEQ ID NO: 5977238 - DNA, 25 bp, Homo sapien
aagatgtagataacgccaatttggt

SEQ ID NO: 5977239 - DNA, 25 bp, Homo sapien
ttgctcttctcagcttcagttaatt

SEQ ID NO: 5977240 - DNA, 25 bp, Homo sapien
cgttgtggtttcttcttgaaatcta

SEQ ID NO: 5977241 - DNA, 25 bp, Homo sapien
attgatagtgacaatccataacgat

SEQ ID NO: 5977242 - DNA, 25 bp, Homo sapien
gatcctttccagttgtaaccgccaa

SEQ ID NO: 5977243 - DNA, 25 bp, Homo sapien
tacattaggtaggctactatgaagg

SEQ ID NO: 5977244 - DNA, 25 bp, Homo sapien
ttcccttctaactcttgcttgcctt

SEQ ID NO: 5977245 - DNA, 25 bp, Homo sapien
atttggttctgcacttcttacatct

SEQ ID NO: 5977246 - DNA, 25 bp, Homo sapien
ctccgaatctttaaacattccagaa

SEQ ID NO: 5977247 - DNA, 25 bp, Homo sapien
tcttgatgaagtgtccctctgatga

SEQ ID NO: 5977248 - DNA, 25 bp, Homo sapien
ggctcaacactcggtttcttcctct

SEQ ID NO: 5977249 - DNA, 25 bp, Homo sapien
ccctctgatgattccttacttggtg

SEQ ID NO: 5977250 - DNA, 25 bp, Homo sapien
agagatgtaattgttccatgaaatt

SEQ ID NO: 5977251 - DNA, 25 bp, Homo sapien
ttgcttgtgactcttgaatatcaat

SEQ ID NO: 5977252 - DNA, 25 bp, Homo sapien
ccacccattttctcaaagagatgta

SEQ ID NO: 5977253 - DNA, 25 bp, Homo sapien
acgactccgaatctttaaacattcc

SEQ ID NO: 5977254 - DNA, 25 bp, Homo sapien
caatggtctgtggtcaataattgga

SEQ ID NO: 5977255 - DNA, 25 bp, Homo sapien
tgcgacgactccgaatctttaaaca

SEQ ID NO: 5977256 - DNA, 25 bp, Homo sapien
cagatctcgagagtcctgcttgaca

SEQ ID NO: 5977257 - DNA, 25 bp, Homo sapien
tcacatcatcatcatcgatgggtat

SEQ ID NO: 5977258 - DNA, 25 bp, Homo sapien
tctcgagagtcctgcttgacaatga

SEQ ID NO: 5977259 - DNA, 25 bp, Homo sapien
atgaaaacttcccttctaactcttg

SEQ ID NO: 5977260 - DNA, 25 bp, Homo sapien
tgggcaaagcagtggattgtaaggg

SEQ ID NO: 5977261 - DNA, 25 bp, Homo sapien
catgcgcgatgaaagatgtagataa

SEQ ID NO: 5977262 - DNA, 25 bp, Homo sapien
caatttggttctgcacttcttacat

SEQ ID NO: 5977263 - DNA, 25 bp, Homo sapien
tacatctcactgcggtgaccttgct

SEQ ID NO: 5977264 - DNA, 25 bp, Homo sapien
atactcaacttcattggggaacaag

SEQ ID NO: 5977265 - DNA, 25 bp, Homo sapien
tgaacagcctggacatgaaaacttc

SEQ ID NO: 5977266 - DNA, 25 bp, Homo sapien
cccttctaactcttgcttgccttgt

SEQ ID NO: 5977267 - DNA, 25 bp, Homo sapien
tctaactcttgcttgccttgtagtt

SEQ ID NO: 5977268 - DNA, 25 bp, Homo sapien
ttaaacattccagaattggagacca

SEQ ID NO: 5977269 - DNA, 25 bp, Homo sapien
cctcgtctactgagtttgcatttcc

SEQ ID NO: 5977270 - DNA, 25 bp, Homo sapien
ccacttaccacaactgcacctagat

SEQ ID NO: 5977271 - DNA, 25 bp, Homo sapien
cagttaatttatccaagtcttgcga

SEQ ID NO: 5977272 - DNA, 25 bp, Homo sapien
cagaaagaatatgagtaatgttaaa

SEQ ID NO: 5977273 - DNA, 25 bp, Homo sapien
tgagcaaaaacagcaccacgttgtg

SEQ ID NO: 5977274 - DNA, 25 bp, Homo sapien
actgcggtgaccttgctcttctcag

SEQ ID NO: 5977275 - DNA, 25 bp, Homo sapien
taatctgggcgaatactcaacttca

SEQ ID NO: 5977276 - DNA, 25 bp, Homo sapien
gatgattccttacttggtgggtcat

SEQ ID NO: 5977277 - DNA, 25 bp, Homo sapien
tagataacgccaatttggttctgca

SEQ ID NO: 5977278 - DNA, 25 bp, Homo sapien
ggtaacttcctcgtctactgagttt

SEQ ID NO: 5977279 - DNA, 25 bp, Homo sapien
catctcactgcggtgaccttgctct

SEQ ID NO: 5977280 - DNA, 25 bp, Homo sapien
ggacggattccgccaagatatatgc

SEQ ID NO: 5977281 - DNA, 25 bp, Homo sapien
gattgcttcagcttccactgcttat

SEQ ID NO: 5977282 - DNA, 25 bp, Homo sapien
caaagcagtggattgtaagggaaat

SEQ ID NO: 5977283 - DNA, 25 bp, Homo sapien
cttgacaatgagcaaaaacagcacc

SEQ ID NO: 5977284 - DNA, 25 bp, Homo sapien
ctggtaacttcctcgtctactgagt

SEQ ID NO: 5977285 - DNA, 25 bp, Homo sapien
aaacattccagaattggagaccaat

SEQ ID NO: 5977286 - DNA, 25 bp, Homo sapien
aacagcaccacgttgtggtttcttc

SEQ ID NO: 5977287 - DNA, 25 bp, Homo sapien
gaattggagaccaattcgctgcccg

SEQ ID NO: 5977288 - DNA, 25 bp, Homo sapien
taacgatacattaggtaggctacta

SEQ ID NO: 5977289 - DNA, 25 bp, Homo sapien
tcgtctactgagtttgcatttccag

SEQ ID NO: 5977290 - DNA, 25 bp, Homo sapien
cacctagatcctttccagttgtaac

SEQ ID NO: 5977291 - DNA, 25 bp, Homo sapien
aggttgcatccattttaaaggttcg

SEQ ID NO: 5977292 - DNA, 25 bp, Homo sapien
cactttactagtttgcaggtggata

SEQ ID NO: 5977293 - DNA, 25 bp, Homo sapien
gaaatcgacaaaatctccacccatt

SEQ ID NO: 5977294 - DNA, 25 bp, Homo sapien
ttcagcttccactgcttataggctg

SEQ ID NO: 5977295 - DNA, 25 bp, Homo sapien
ttcatcgaagtattgcagcacatca

SEQ ID NO: 5977296 - DNA, 25 bp, Homo sapien
cacgttgtggtttcttcttgaaatc

SEQ ID NO: 5977297 - DNA, 25 bp, Homo sapien
cgacgactccgaatctttaaacatt

SEQ ID NO: 5977298 - DNA, 25 bp, Homo sapien
taacttgatagattgcttcagcttc

SEQ ID NO: 5977299 - DNA, 25 bp, Homo sapien
gacaaaatctccacccattttctca

SEQ ID NO: 5977300 - DNA, 25 bp, Homo sapien
ccatgttgggcaaagcagtggattg

SEQ ID NO: 5977301 - DNA, 25 bp, Homo sapien
tcggtttcttcctcttgacagcgtg

SEQ ID NO: 5977302 - DNA, 25 bp, Homo sapien
tacagatctcgagagtcctgcttga

SEQ ID NO: 5977303 - DNA, 25 bp, Homo sapien
atctactaatctgggcgaatactca

SEQ ID NO: 5977304 - DNA, 25 bp, Homo sapien
gggaaattgatccactttactagtt

SEQ ID NO: 5977305 - DNA, 25 bp, Homo sapien
tggtcaataattggacggattccgc

SEQ ID NO: 5977306 - DNA, 25 bp, Homo sapien
aaaaaatgagagcaatttgcttgtg

SEQ ID NO: 5977307 - DNA, 25 bp, Homo sapien
aattgatccactttactagtttgca

SEQ ID NO: 5977308 - DNA, 25 bp, Homo sapien
acaatgagcaaaaacagcaccacgt

SEQ ID NO: 5977309 - DNA, 25 bp, Homo sapien
tcgatgaaaaaatgagagcaatttg

SEQ ID NO: 5977310 - DNA, 25 bp, Homo sapien
aaaattaaccatgttgggcaaagca

SEQ ID NO: 5977311 - DNA, 25 bp, Homo sapien
tatgttttttagcgtgtaacctttc

SEQ ID NO: 5977312 - DNA, 25 bp, Homo sapien
atgttgggcaaagcagtggattgta

SEQ ID NO: 5977313 - DNA, 25 bp, Homo sapien
aggttacagatctcgagagtcctgc

SEQ ID NO: 5977314 - DNA, 25 bp, Homo sapien
gagaccaattcgctgcccgatggat

SEQ ID NO: 5977315 - DNA, 25 bp, Homo sapien
gggtcatgcgcgatgaaagatgtag

SEQ ID NO: 5977316 - DNA, 25 bp, Homo sapien
cctcctaatatcctggtaacttcct

SEQ ID NO: 5977317 - DNA, 25 bp, Homo sapien
gttgtcgaaatcgacaaaatctcca

SEQ ID NO: 5977318 - DNA, 25 bp, Homo sapien
ccaagtcttgcgacgactccgaatc

SEQ ID NO: 5977319 - DNA, 25 bp, Homo sapien
gggaacaagcattgatcaatgaatc

SEQ ID NO: 5977320 - DNA, 25 bp, Homo sapien
gcttcagcttccactgcttataggc

SEQ ID NO: 5977321 - DNA, 25 bp, Homo sapien
catcgatgggtatgttttttagcgt

SEQ ID NO: 5977322 - DNA, 25 bp, Homo sapien
gcttgtgactcttgaatatcaataa

SEQ ID NO: 5977323 - DNA, 25 bp, Homo sapien
gactcttgaatatcaataatacgat

SEQ ID NO: 5977324 - DNA, 25 bp, Homo sapien
gataacgccaatttggttctgcact

SEQ ID NO: 5977325 - DNA, 25 bp, Homo sapien
agcaaaaacagcaccacgttgtggt

SEQ ID NO: 5977326 - DNA, 25 bp, Homo sapien
actgcttataggctgggttgtcgaa

SEQ ID NO: 5977327 - DNA, 25 bp, Homo sapien
atcatcatcatcgatgggtatgttt

SEQ ID NO: 5977328 - DNA, 25 bp, Homo sapien
tatatgcctcctaatatcctggtaa

SEQ ID NO: 5977329 - DNA, 25 bp, Homo sapien
gatgggagttggcggccctcttgat

SEQ ID NO: 5977330 - DNA, 25 bp, Homo sapien
gaatctttaaacattccagaattgg

SEQ ID NO: 5977331 - DNA, 25 bp, Homo sapien
gcatagccattgatagtgacaatcc

SEQ ID NO: 5977332 - DNA, 25 bp, Homo sapien
gtgtccctctgatgattccttactt

SEQ ID NO: 5977333 - DNA, 25 bp, Homo sapien
gcctggacatgaaaacttcccttct

SEQ ID NO: 5977334 - DNA, 25 bp, Homo sapien
atagcggggatgacccacttaccac

SEQ ID NO: 5977335 - DNA, 25 bp, Homo sapien
ttcctcttgacagcgtgcatagcca

SEQ ID NO: 5977336 - DNA, 25 bp, Homo sapien
attctgcacccaatggtctgtggtc

SEQ ID NO: 5977337 - DNA, 25 bp, Homo sapien
ggtctgtggtcaataattggacgga

SEQ ID NO: 5977338 - DNA, 25 bp, Homo sapien
tgggtatgttttttagcgtgtaacc

SEQ ID NO: 5977339 - DNA, 25 bp, Homo sapien
aggtaggctactatgaaggttacag

SEQ ID NO: 5977340 - DNA, 25 bp, Homo sapien
gacagcgtgcatagccattgatagt

SEQ ID NO: 5977341 - DNA, 25 bp, Homo sapien
atgaaagatgtagataacgccaatt

SEQ ID NO: 5977342 - DNA, 25 bp, Homo sapien
atctccacccattttctcaaagaga

SEQ ID NO: 5977343 - DNA, 25 bp, Homo sapien
gccctcttgatgaagtgtccctctg

SEQ ID NO: 5977344 - DNA, 25 bp, Homo sapien
tttctcggattcaaaattaaccatg

SEQ ID NO: 5977345 - DNA, 25 bp, Homo sapien
tgatcaatgaatcggttcgtttcat

SEQ ID NO: 5977346 - DNA, 25 bp, Homo sapien
acttcccttctaactcttgcttgcc

SEQ ID NO: 5977347 - DNA, 25 bp, Homo sapien
tgtagttcaggttgcatccatttta

SEQ ID NO: 5977348 - DNA, 25 bp, Homo sapien
catgaaattctcgtttggctcaaca

SEQ ID NO: 5977349 - DNA, 25 bp, Homo sapien
cttacttggtgggtcatgcgcgatg

SEQ ID NO: 5977350 - DNA, 25 bp, Homo sapien
ccattttctcaaagagatgtaattg

SEQ ID NO: 5977351 - DNA, 25 bp, Homo sapien
ttatctatttactttctcggattca

SEQ ID NO: 5977352 - DNA, 25 bp, Homo sapien
ctatgaaggttacagatctcgagag

SEQ ID NO: 5977353 - DNA, 25 bp, Homo sapien
gagtaatgttaaattctgcacccaa

SEQ ID NO: 5977354 - DNA, 25 bp, Homo sapien
agcaatttgcttgtgactcttgaat

SEQ ID NO: 5977355 - DNA, 25 bp, Homo sapien
gaagtattgcagcacatcagtcaca

SEQ ID NO: 5977356 - DNA, 25 bp, Homo sapien
ggacatgaaaacttcccttctaact

SEQ ID NO: 5977357 - DNA, 25 bp, Homo sapien
gcttcagttaatttatccaagtctt

SEQ ID NO: 5977358 - DNA, 25 bp, Homo sapien
gggcgaatactcaacttcattgggg

SEQ ID NO: 5977359 - DNA, 25 bp, Homo sapien
ttaaattctgcacccaatggtctgt

SEQ ID NO: 5977360 - DNA, 25 bp, Homo sapien
gcaggtggatagcggggatgaccca

SEQ ID NO: 5977361 - DNA, 25 bp, Homo sapien
actagtttgcaggtggatagcgggg

SEQ ID NO: 5977362 - DNA, 25 bp, Homo sapien
caatgaatcggttcgtttcatcgaa

SEQ ID NO: 5977363 - DNA, 25 bp, Homo sapien
cgcgatgaaagatgtagataacgcc

SEQ ID NO: 5977364 - DNA, 25 bp, Homo sapien
acgatgggagttggcggccctcttg

SEQ ID NO: 5977365 - DNA, 25 bp, Homo sapien
ccttattagatactctggaatgacc

SEQ ID NO: 5977366 - DNA, 25 bp, Homo sapien
gaacaagcattgatcaatgaatcgg

SEQ ID NO: 5977367 - DNA, 25 bp, Homo sapien
gcgtgcatagccattgatagtgaca

SEQ ID NO: 5977368 - DNA, 25 bp, Homo sapien
atgaaggttacagatctcgagagtc

SEQ ID NO: 5977369 - DNA, 25 bp, Homo sapien
ttaggtaggctactatgaaggttac

SEQ ID NO: 5977370 - DNA, 25 bp, Homo sapien
acggattccgccaagatatatgcct

SEQ ID NO: 5977371 - DNA, 25 bp, Homo sapien
tgaatatcaataatacgatgggagt

SEQ ID NO: 5977372 - DNA, 25 bp, Homo sapien
atcggttcgtttcatcgaagtattg

SEQ ID NO: 5977373 - DNA, 25 bp, Homo sapien
gcagtggattgtaagggaaattgat

SEQ ID NO: 5977374 - DNA, 25 bp, Homo sapien
agcgtgtaacctttccttattagat

SEQ ID NO: 5977375 - DNA, 25 bp, Homo sapien
gttacagatctcgagagtcctgctt

SEQ ID NO: 5977376 - DNA, 25 bp, Homo sapien
ttcgctgcccgatggatctaacttg

SEQ ID NO: 5977377 - DNA, 25 bp, Homo sapien
gtttgcaggtggatagcggggatga

SEQ ID NO: 5977378 - DNA, 25 bp, Homo sapien
ctaatatcctggtaacttcctcgtc

SEQ ID NO: 5977379 - DNA, 25 bp, Homo sapien
attgatcaatgaatcggttcgtttc

SEQ ID NO: 5977380 - DNA, 25 bp, Homo sapien
actaatctgggcgaatactcaactt

SEQ ID NO: 5977381 - DNA, 25 bp, Homo sapien
ttgcagcacatcagtcacatcatca

SEQ ID NO: 5977382 - DNA, 25 bp, Homo sapien
tgcttgacaatgagcaaaaacagca

SEQ ID NO: 5977383 - DNA, 25 bp, Homo sapien
agatgtaattgttccatgaaattct

SEQ ID NO: 5977384 - DNA, 25 bp, Homo sapien
ataattggacggattccgccaagat

SEQ ID NO: 5977385 - DNA, 25 bp, Homo sapien
tcttcctcttgacagcgtgcatagc

SEQ ID NO: 5977386 - DNA, 25 bp, Homo sapien
gtgactcttgaatatcaataatacg

SEQ ID NO: 5977387 - DNA, 25 bp, Homo sapien
atgtaattgttccatgaaattctcg

SEQ ID NO: 5977388 - DNA, 25 bp, Homo sapien
ctgcccgatggatctaacttgatag

SEQ ID NO: 5977389 - DNA, 25 bp, Homo sapien
ttaaaggttcgatgaaaaaatgaga

SEQ ID NO: 5977390 - DNA, 25 bp, Homo sapien
aaccatgttgggcaaagcagtggat

SEQ ID NO: 5977391 - DNA, 25 bp, Homo sapien
tcgaaatcgacaaaatctccaccca

SEQ ID NO: 5977392 - DNA, 25 bp, Homo sapien
aagatatatgcctcctaatatcctg

SEQ ID NO: 5977393 - DNA, 25 bp, Homo sapien
catcagtcacatcatcatcatcgat

SEQ ID NO: 5977394 - DNA, 25 bp, Homo sapien
gaatcggttcgtttcatcgaagtat

SEQ ID NO: 5977395 - DNA, 25 bp, Homo sapien
tgcctcctaatatcctggtaacttc

SEQ ID NO: 5977396 - DNA, 25 bp, Homo sapien
tctcgtttggctcaacactcggttt

SEQ ID NO: 5977397 - DNA, 25 bp, Homo sapien
accacgttgtggtttcttcttgaaa

SEQ ID NO: 5977398 - DNA, 25 bp, Homo sapien
aacagcctggacatgaaaacttccc

SEQ ID NO: 5977399 - DNA, 25 bp, Homo sapien
taggctgggttgtcgaaatcgacaa

SEQ ID NO: 5977400 - DNA, 25 bp, Homo sapien
ctccacccattttctcaaagagatg

SEQ ID NO: 5977401 - DNA, 25 bp, Homo sapien
ttactttctcggattcaaaattaac

SEQ ID NO: 5977402 - DNA, 25 bp, Homo sapien
aagtcttgcgacgactccgaatctt

SEQ ID NO: 5977403 - DNA, 25 bp, Homo sapien
gccaactttacttgaacagcctgga

SEQ ID NO: 5977404 - DNA, 25 bp, Homo sapien
tacttggtgggtcatgcgcgatgaa

SEQ ID NO: 5977405 - DNA, 25 bp, Homo sapien
tgaagtgtccctctgatgattcctt

SEQ ID NO: 5977406 - DNA, 25 bp, Homo sapien
ttctgcacttcttacatctcactgc

SEQ ID NO: 5977407 - DNA, 25 bp, Homo sapien
acccacttaccacaactgcacctag

SEQ ID NO: 5977408 - DNA, 25 bp, Homo sapien
tcgagagtcctgcttgacaatgagc

SEQ ID NO: 5977409 - DNA, 25 bp, Homo sapien
ccaattcgctgcccgatggatctaa

SEQ ID NO: 5977410 - DNA, 25 bp, Homo sapien
attggagaccaattcgctgcccgat

SEQ ID NO: 5977411 - DNA, 25 bp, Homo sapien
atagtgacaatccataacgatacat

SEQ ID NO: 5977412 - DNA, 25 bp, Homo sapien
ggattcaaaattaaccatgttgggc

SEQ ID NO: 5977413 - DNA, 25 bp, Homo sapien
tagatcctttccagttgtaaccgcc

SEQ ID NO: 5977414 - DNA, 25 bp, Homo sapien
tagattgcttcagcttccactgctt

SEQ ID NO: 5977415 - DNA, 25 bp, Homo sapien
atcatcgatgggtatgttttttagc

SEQ ID NO: 5977416 - DNA, 25 bp, Homo sapien
cataacgatacattaggtaggctac

SEQ ID NO: 5977417 - DNA, 25 bp, Homo sapien
ccattgatagtgacaatccataacg

SEQ ID NO: 5977418 - DNA, 25 bp, Homo sapien
cttggtgggtcatgcgcgatgaaag

SEQ ID NO: 5977419 - DNA, 25 bp, Homo sapien
ggtttcttcttgaaatctactaatc

SEQ ID NO: 5977420 - DNA, 25 bp, Homo sapien
gtcctgcttgacaatgagcaaaaac

SEQ ID NO: 5977421 - DNA, 25 bp, Homo sapien
ggatagcggggatgacccacttacc

SEQ ID NO: 5977422 - DNA, 25 bp, Homo sapien
tcaaaattaaccatgttgggcaaag

SEQ ID NO: 5977423 - DNA, 25 bp, Homo sapien
gtcttgcgacgactccgaatcttta

SEQ ID NO: 5977424 - DNA, 25 bp, Homo sapien
ggctgggttgtcgaaatcgacaaaa

SEQ ID NO: 5977425 - DNA, 25 bp, Homo sapien
gcttgccttgtagttcaggttgcat

SEQ ID NO: 5977426 - DNA, 25 bp, Homo sapien
gatactctggaatgacctggaattt

SEQ ID NO: 5977427 - DNA, 25 bp, Homo sapien
atctatttactttctcggattcaaa

SEQ ID NO: 5977428 - DNA, 25 bp, Homo sapien
acaatccataacgatacattaggta

SEQ ID NO: 5977429 - DNA, 25 bp, Homo sapien
aaaggttcgatgaaaaaatgagagc

SEQ ID NO: 5977430 - DNA, 25 bp, Homo sapien
tgcgcgatgaaagatgtagataacg

SEQ ID NO: 5977431 - DNA, 25 bp, Homo sapien
ggtttcttcctcttgacagcgtgca

SEQ ID NO: 5977432 - DNA, 25 bp, Homo sapien
ggcggccctcttgatgaagtgtccc

SEQ ID NO: 5977433 - DNA, 25 bp, Homo sapien
cttgaatatcaataatacgatggga

SEQ ID NO: 5977434 - DNA, 25 bp, Homo sapien
ttcctcgtctactgagtttgcattt

SEQ ID NO: 5977435 - DNA, 25 bp, Homo sapien
tggatctaacttgatagattgcttc

SEQ ID NO: 5977436 - DNA, 25 bp, Homo sapien
gaatatgagtaatgttaaattctgc

SEQ ID NO: 5977437 - DNA, 25 bp, Homo sapien
aagtgtccctctgatgattccttac

SEQ ID NO: 5977438 - DNA, 25 bp, Homo sapien
gctactatgaaggttacagatctcg

SEQ ID NO: 5977439 - DNA, 25 bp, Homo sapien
cttgaaatctactaatctgggcgaa

SEQ ID NO: 5977440 - DNA, 25 bp, Homo sapien
aatcgacaaaatctccacccatttt

SEQ ID NO: 5977441 - DNA, 25 bp, Homo sapien
ctggaatgacctggaatttgataac

SEQ ID NO: 5977442 - DNA, 25 bp, Homo sapien
ttatccaagtcttgcgacgactccg

SEQ ID NO: 5977443 - DNA, 25 bp, Homo sapien
accacaactgcacctagatcctttc

SEQ ID NO: 5977444 - DNA, 25 bp, Homo sapien
tcttgacagcgtgcatagccattga

SEQ ID NO: 5977445 - DNA, 25 bp, Homo sapien
cggggatgacccacttaccacaact

SEQ ID NO: 5977446 - DNA, 25 bp, Homo sapien
gcattgatcaatgaatcggttcgtt

SEQ ID NO: 5977447 - DNA, 25 bp, Homo sapien
cgatgaaagatgtagataacgccaa

SEQ ID NO: 5977448 - DNA, 25 bp, Homo sapien
ttgatagattgcttcagcttccact

SEQ ID NO: 5977449 - DNA, 25 bp, Homo sapien
ctctggaatgacctggaatttgata

SEQ ID NO: 5977450 - DNA, 25 bp, Homo sapien
gatagattgcttcagcttccactgc

SEQ ID NO: 5977451 - DNA, 25 bp, Homo sapien
ttaaccatgttgggcaaagcagtgg

SEQ ID NO: 5977452 - DNA, 25 bp, Homo sapien
aaacttcccttctaactcttgcttg

SEQ ID NO: 5977453 - DNA, 25 bp, Homo sapien
gatctaacttgatagattgcttcag

SEQ ID NO: 5977454 - DNA, 25 bp, Homo sapien
gtttcatcgaagtattgcagcacat

SEQ ID NO: 5977455 - DNA, 25 bp, Homo sapien
aatttgataacagaaagaatatgag

SEQ ID NO: 5977456 - DNA, 25 bp, Homo sapien
caataattggacggattccgccaag

SEQ ID NO: 5977457 - DNA, 25 bp, Homo sapien
gtgggtcatgcgcgatgaaagatgt

SEQ ID NO: 5977458 - DNA, 25 bp, Homo sapien
agcacatcagtcacatcatcatcat

SEQ ID NO: 5977459 - DNA, 25 bp, Homo sapien
aatgttaaattctgcacccaatggt

SEQ ID NO: 5977460 - DNA, 25 bp, Homo sapien
gagagtcctgcttgacaatgagcaa

SEQ ID NO: 5977461 - DNA, 25 bp, Homo sapien
ttgccttgtagttcaggttgcatcc

SEQ ID NO: 5977462 - DNA, 25 bp, Homo sapien
taatttatccaagtcttgcgacgac

SEQ ID NO: 5977463 - DNA, 25 bp, Homo sapien
tgaaaaaatgagagcaatttgcttg

SEQ ID NO: 5977464 - DNA, 25 bp, Homo sapien
gttccatgaaattctcgtttggctc

SEQ ID NO: 5977465 - DNA, 25 bp, Homo sapien
ttgatgaagtgtccctctgatgatt

SEQ ID NO: 5977466 - DNA, 25 bp, Homo sapien
actcggtttcttcctcttgacagcg

SEQ ID NO: 5977467 - DNA, 25 bp, Homo sapien
agtggattgtaagggaaattgatcc

SEQ ID NO: 5977468 - DNA, 25 bp, Homo sapien
ccttgctcttctcagcttcagttaa

SEQ ID NO: 5977469 - DNA, 25 bp, Homo sapien
cagcgtgcatagccattgatagtga

SEQ ID NO: 5977470 - DNA, 25 bp, Homo sapien
gtaggctactatgaaggttacagat

SEQ ID NO: 5977471 - DNA, 25 bp, Homo sapien
aattaaccatgttgggcaaagcagt

SEQ ID NO: 5977472 - DNA, 25 bp, Homo sapien
cgctgcccgatggatctaacttgat

SEQ ID NO: 5977473 - DNA, 25 bp, Homo sapien
tgaaatctactaatctgggcgaata

SEQ ID NO: 5977474 - DNA, 25 bp, Homo sapien
ttggctcaacactcggtttcttcct

SEQ ID NO: 5977475 - DNA, 25 bp, Homo sapien
tgtcgaaatcgacaaaatctccacc

SEQ ID NO: 5977476 - DNA, 25 bp, Homo sapien
aaagagatgtaattgttccatgaaa

SEQ ID NO: 5977477 - DNA, 25 bp, Homo sapien
aattgttccatgaaattctcgtttg

SEQ ID NO: 5977478 - DNA, 25 bp, Homo sapien
aatgagagcaatttgcttgtgactc

SEQ ID NO: 5977479 - DNA, 25 bp, Homo sapien
cttataggctgggttgtcgaaatcg

SEQ ID NO: 5977480 - DNA, 25 bp, Homo sapien
ttgttccatgaaattctcgtttggc

SEQ ID NO: 5977481 - DNA, 25 bp, Homo sapien
cttctaactcttgcttgccttgtag

SEQ ID NO: 5977482 - DNA, 25 bp, Homo sapien
cgtgtaacctttccttattagatac

SEQ ID NO: 5977483 - DNA, 25 bp, Homo sapien
atttactttctcggattcaaaatta

SEQ ID NO: 5977484 - DNA, 25 bp, Homo sapien
gactccgaatctttaaacattccag

SEQ ID NO: 5977485 - DNA, 25 bp, Homo sapien
gatgtagataacgccaatttggttc

SEQ ID NO: 5977486 - DNA, 25 bp, Homo sapien
ttttaaaggttcgatgaaaaaatga

SEQ ID NO: 5977487 - DNA, 25 bp, Homo sapien
cattaggtaggctactatgaaggtt

SEQ ID NO: 5977488 - DNA, 25 bp, Homo sapien
ctggaatttgataacagaaagaata

SEQ ID NO: 5977489 - DNA, 25 bp, Homo sapien
aaccgccaactttacttgaacagcc

SEQ ID NO: 5977490 - DNA, 25 bp, Homo sapien
acatcatcatcatcgatgggtatgt

SEQ ID NO: 5977491 - DNA, 25 bp, Homo sapien
aacttcattggggaacaagcattga

SEQ ID NO: 5977492 - DNA, 25 bp, Homo sapien
ttgcaggtggatagcggggatgacc

SEQ ID NO: 5977493 - DNA, 25 bp, Homo sapien
aagcagtggattgtaagggaaattg

SEQ ID NO: 5977494 - DNA, 25 bp, Homo sapien
taatacgatgggagttggcggccct

SEQ ID NO: 5977495 - DNA, 25 bp, Homo sapien
tgcacctagatcctttccagttgta

SEQ ID NO: 5977496 - DNA, 25 bp, Homo sapien
tactctggaatgacctggaatttga

SEQ ID NO: 5977497 - DNA, 25 bp, Homo sapien
caaaaacagcaccacgttgtggttt

SEQ ID NO: 5977498 - DNA, 25 bp, Homo sapien
gaaaacttcccttctaactcttgct

SEQ ID NO: 5977499 - DNA, 25 bp, Homo sapien
cgccaagatatatgcctcctaatat

SEQ ID NO: 5977500 - DNA, 25 bp, Homo sapien
cagcttccactgcttataggctggg

SEQ ID NO: 5977501 - DNA, 25 bp, Homo sapien
tcaggttgcatccattttaaaggtt

SEQ ID NO: 5977502 - DNA, 25 bp, Homo sapien
attggggaacaagcattgatcaatg

SEQ ID NO: 5977503 - DNA, 25 bp, Homo sapien
tatcaataatacgatgggagttggc

SEQ ID NO: 5977504 - DNA, 25 bp, Homo sapien
tccactttactagtttgcaggtgga

SEQ ID NO: 5977505 - DNA, 25 bp, Homo sapien
ttggttctgcacttcttacatctca

SEQ ID NO: 5977506 - DNA, 25 bp, Homo sapien
tgcttataggctgggttgtcgaaat

SEQ ID NO: 5977507 - DNA, 25 bp, Homo sapien
cttcattggggaacaagcattgatc

SEQ ID NO: 5977508 - DNA, 25 bp, Homo sapien
tccttacttggtgggtcatgcgcga

SEQ ID NO: 5977509 - DNA, 25 bp, Homo sapien
gaaattgatccactttactagtttg

SEQ ID NO: 5977510 - DNA, 25 bp, Homo sapien
ttaccacaactgcacctagatcctt

SEQ ID NO: 5977511 - DNA, 25 bp, Homo sapien
attcaaaattaaccatgttgggcaa

SEQ ID NO: 5977512 - DNA, 25 bp, Homo sapien
attagatactctggaatgacctgga

SEQ ID NO: 5977513 - DNA, 25 bp, Homo sapien
gatggatctaacttgatagattgct

SEQ ID NO: 5977514 - DNA, 25 bp, Homo sapien
caatttgcttgtgactcttgaatat

SEQ ID NO: 5977515 - DNA, 25 bp, Homo sapien
actcaacttcattggggaacaagca

SEQ ID NO: 5977516 - DNA, 25 bp, Homo sapien
tcgacaaaatctccacccattttct

SEQ ID NO: 5977517 - DNA, 25 bp, Homo sapien
tccagttgtaaccgccaactttact

SEQ ID NO: 5977518 - DNA, 25 bp, Homo sapien
gatgaaaaaatgagagcaatttgct

SEQ ID NO: 5977519 - DNA, 25 bp, Homo sapien
ctgggcgaatactcaacttcattgg

SEQ ID NO: 5977520 - DNA, 25 bp, Homo sapien
ctcaacactcggtttcttcctcttg

SEQ ID NO: 5977521 - DNA, 25 bp, Homo sapien
tccattttaaaggttcgatgaaaaa

SEQ ID NO: 5977522 - DNA, 25 bp, Homo sapien
gcccgatggatctaacttgatagat

SEQ ID NO: 5977523 - DNA, 25 bp, Homo sapien
gttcgtttcatcgaagtattgcagc

SEQ ID NO: 5977524 - DNA, 25 bp, Homo sapien
aaattctcgtttggctcaacactcg

SEQ ID NO: 5977525 - DNA, 25 bp, Homo sapien
aataatacgatgggagttggcggcc

SEQ ID NO: 5977526 - DNA, 25 bp, Homo sapien
tatcctggtaacttcctcgtctact

SEQ ID NO: 5977527 - DNA, 25 bp, Homo sapien
aaaacagcaccacgttgtggtttct

SEQ ID NO: 5977528 - DNA, 25 bp, Homo sapien
cttgaacagcctggacatgaaaact

SEQ ID NO: 5977529 - DNA, 25 bp, Homo sapien
gaatactcaacttcattggggaaca

SEQ ID NO: 5977530 - DNA, 25 bp, Homo sapien
gtggtttcttcttgaaatctactaa

SEQ ID NO: 5977531 - DNA, 25 bp, Homo sapien
gagtcctgcttgacaatgagcaaaa

SEQ ID NO: 5977532 - DNA, 25 bp, Homo sapien
atctttaaacattccagaattggag

SEQ ID NO: 5977533 - DNA, 25 bp, Homo sapien
ttgcttgccttgtagttcaggttgc

SEQ ID NO: 5977534 - DNA, 25 bp, Homo sapien
agttgtaaccgccaactttacttga

SEQ ID NO: 5977535 - DNA, 25 bp, Homo sapien
taacgccaatttggttctgcacttc

SEQ ID NO: 5977536 - DNA, 25 bp, Homo sapien
taactcttgcttgccttgtagttca

SEQ ID NO: 5977537 - DNA, 25 bp, Homo sapien
ttgcttcagcttccactgcttatag

SEQ ID NO: 5977538 - DNA, 25 bp, Homo sapien
cacaactgcacctagatcctttcca

SEQ ID NO: 5977539 - DNA, 25 bp, Homo sapien
ttgatccactttactagtttgcagg

SEQ ID NO: 5977540 - DNA, 25 bp, Homo sapien
ctttaaacattccagaattggagac

SEQ ID NO: 5977541 - DNA, 25 bp, Homo sapien
ctggacatgaaaacttcccttctaa

SEQ ID NO: 5977542 - DNA, 25 bp, Homo sapien
aaatctccacccattttctcaaaga

SEQ ID NO: 5977543 - DNA, 25 bp, Homo sapien
agtattgcagcacatcagtcacatc

SEQ ID NO: 5977544 - DNA, 25 bp, Homo sapien
ccaagatatatgcctcctaatatcc

SEQ ID NO: 5977545 - DNA, 25 bp, Homo sapien
cctagatcctttccagttgtaaccg

SEQ ID NO: 5977546 - DNA, 25 bp, Homo sapien
cagcctggacatgaaaacttccctt

SEQ ID NO: 5977547 - DNA, 25 bp, Homo sapien
gcacttcttacatctcactgcggtg

SEQ ID NO: 5977548 - DNA, 25 bp, Homo sapien
atatgagtaatgttaaattctgcac

SEQ ID NO: 5977549 - DNA, 25 bp, Homo sapien
agttggcggccctcttgatgaagtg

SEQ ID NO: 5977550 - DNA, 25 bp, Homo sapien
taacttcctcgtctactgagtttgc

SEQ ID NO: 5977551 - DNA, 25 bp, Homo sapien
tagttcaggttgcatccattttaaa

SEQ ID NO: 5977552 - DNA, 25 bp, Homo sapien
cagcaccacgttgtggtttcttctt

SEQ ID NO: 5977553 - DNA, 25 bp, Homo sapien
tcgaagtattgcagcacatcagtca

SEQ ID NO: 5977554 - DNA, 25 bp, Homo sapien
tctcggattcaaaattaaccatgtt

SEQ ID NO: 5977555 - DNA, 25 bp, Homo sapien
tttccagttgtaaccgccaacttta

SEQ ID NO: 5977556 - DNA, 25 bp, Homo sapien
gtgcatagccattgatagtgacaat

SEQ ID NO: 5977557 - DNA, 25 bp, Homo sapien
tggagaccaattcgctgcccgatgg

SEQ ID NO: 5977558 - DNA, 25 bp, Homo sapien
agccattgatagtgacaatccataa

SEQ ID NO: 5977559 - DNA, 25 bp, Homo sapien
gcaccacgttgtggtttcttcttga

SEQ ID NO: 5977560 - DNA, 25 bp, Homo sapien
ctactgagtttgcatttccagccat

SEQ ID NO: 5977561 - DNA, 25 bp, Homo sapien
gttaatttatccaagtcttgcgacg

SEQ ID NO: 5977562 - DNA, 25 bp, Homo sapien
aacagaaagaatatgagtaatgtta

SEQ ID NO: 5977563 - DNA, 25 bp, Homo sapien
acgatacattaggtaggctactatg

SEQ ID NO: 5977564 - DNA, 25 bp, Homo sapien
ctgggttgtcgaaatcgacaaaatc

SEQ ID NO: 5977565 - DNA, 25 bp, Homo sapien
ttccttattagatactctggaatga

SEQ ID NO: 5977566 - DNA, 25 bp, Homo sapien
tgggagttggcggccctcttgatga

SEQ ID NO: 5977567 - DNA, 25 bp, Homo sapien
ccgaatctttaaacattccagaatt

SEQ ID NO: 5977568 - DNA, 25 bp, Homo sapien
gatctcgagagtcctgcttgacaat

SEQ ID NO: 5977569 - DNA, 25 bp, Homo sapien
cagaattggagaccaattcgctgcc

SEQ ID NO: 5977570 - DNA, 25 bp, Homo sapien
acaagcattgatcaatgaatcggtt

SEQ ID NO: 5977571 - DNA, 25 bp, Homo sapien
tcactgcggtgaccttgctcttctc

SEQ ID NO: 5977572 - DNA, 25 bp, Homo sapien
ttactagtttgcaggtggatagcgg

SEQ ID NO: 5977573 - DNA, 25 bp, Homo sapien
tcgtttcatcgaagtattgcagcac

SEQ ID NO: 5977574 - DNA, 25 bp, Homo sapien
tgtaacctttccttattagatactc

SEQ ID NO: 5977575 - DNA, 25 bp, Homo sapien
caactgcacctagatcctttccagt

SEQ ID NO: 5977576 - DNA, 25 bp, Homo sapien
cacatcagtcacatcatcatcatcg

SEQ ID NO: 5977577 - DNA, 25 bp, Homo sapien
ttgtggtttcttcttgaaatctact

SEQ ID NO: 5977578 - DNA, 25 bp, Homo sapien
ctactaatctgggcgaatactcaac

SEQ ID NO: 5977579 - DNA, 25 bp, Homo sapien
ccactgcttataggctgggttgtcg

SEQ ID NO: 5977580 - DNA, 25 bp, Homo sapien
gtgaccttgctcttctcagcttcag

SEQ ID NO: 5977581 - DNA, 25 bp, Homo sapien
tgacccacttaccacaactgcacct

SEQ ID NO: 5977582 - DNA, 25 bp, Homo sapien
tgagagcaatttgcttgtgactctt

SEQ ID NO: 5977583 - DNA, 25 bp, Homo sapien
atagccattgatagtgacaatccat

SEQ ID NO: 5977584 - DNA, 25 bp, Homo sapien
acactcggtttcttcctcttgacag

SEQ ID NO: 5977585 - DNA, 25 bp, Homo sapien
tcttcttgaaatctactaatctggg

SEQ ID NO: 5977586 - DNA, 25 bp, Homo sapien
tccagaattggagaccaattcgctg

SEQ ID NO: 5977587 - DNA, 25 bp, Homo sapien
aaattctgcacccaatggtctgtgg

SEQ ID NO: 5977588 - DNA, 25 bp, Homo sapien
gccaatttggttctgcacttcttac

SEQ ID NO: 5977589 - DNA, 25 bp, Homo sapien
cttacatctcactgcggtgaccttg

SEQ ID NO: 5977590 - DNA, 25 bp, Homo sapien
cggtgaccttgctcttctcagcttc

SEQ ID NO: 5977591 - DNA, 25 bp, Homo sapien
agtgacaatccataacgatacatta

SEQ ID NO: 5977592 - DNA, 25 bp, Homo sapien
acttaccacaactgcacctagatcc

SEQ ID NO: 5977593 - DNA, 25 bp, Homo sapien
tggggaacaagcattgatcaatgaa

SEQ ID NO: 5977594 - DNA, 25 bp, Homo sapien
gatatatgcctcctaatatcctggt

SEQ ID NO: 5977595 - DNA, 25 bp, Homo sapien
aatatcctggtaacttcctcgtcta

SEQ ID NO: 5977596 - DNA, 25 bp, Homo sapien
gggttgtcgaaatcgacaaaatctc

SEQ ID NO: 5977597 - DNA, 25 bp, Homo sapien
attctcgtttggctcaacactcggt

SEQ ID NO: 5977598 - DNA, 25 bp, Homo sapien
cttgcgacgactccgaatctttaaa

SEQ ID NO: 5977599 - DNA, 25 bp, Homo sapien
atctgggcgaatactcaacttcatt

SEQ ID NO: 5977600 - DNA, 25 bp, Homo sapien
tttgataacagaaagaatatgagta

SEQ ID NO: 5977601 - DNA, 25 bp, Homo sapien
gaccttgctcttctcagcttcagtt

SEQ ID NO: 5977602 - DNA, 25 bp, Homo sapien
gctcttctcagcttcagttaattta

SEQ ID NO: 5977603 - DNA, 25 bp, Homo sapien
attccagaattggagaccaattcgc

SEQ ID NO: 5977604 - DNA, 25 bp, Homo sapien
tggattgtaagggaaattgatccac

SEQ ID NO: 5977605 - DNA, 25 bp, Homo sapien
tgatagtgacaatccataacgatac

SEQ ID NO: 5977606 - DNA, 25 bp, Homo sapien
gtaaccgccaactttacttgaacag

SEQ ID NO: 5977607 - DNA, 25 bp, Homo sapien
tttctcaaagagatgtaattgttcc

SEQ ID NO: 5977608 - DNA, 25 bp, Homo sapien
tcctggtaacttcctcgtctactga

SEQ ID NO: 5977609 - DNA, 25 bp, Homo sapien
gatgaagtgtccctctgatgattcc

SEQ ID NO: 5977610 - DNA, 25 bp, Homo sapien
cccaatggtctgtggtcaataattg

SEQ ID NO: 5977611 - DNA, 25 bp, Homo sapien
ctctgatgattccttacttggtggg

SEQ ID NO: 5977612 - DNA, 25 bp, Homo sapien
tgtggtcaataattggacggattcc

SEQ ID NO: 5977613 - DNA, 25 bp, Homo sapien
tctaacttgatagattgcttcagct

SEQ ID NO: 5977614 - DNA, 25 bp, Homo sapien
aaaatgagagcaatttgcttgtgac

SEQ ID NO: 5977615 - DNA, 25 bp, Homo sapien
ttgtaaccgccaactttacttgaac

SEQ ID NO: 5977616 - DNA, 25 bp, Homo sapien
tatgcctcctaatatcctggtaact

SEQ ID NO: 5977617 - DNA, 25 bp, Homo sapien
taacctttccttattagatactctg

SEQ ID NO: 5977618 - DNA, 25 bp, Homo sapien
acatgaaaacttcccttctaactct

SEQ ID NO: 5977619 - DNA, 25 bp, Homo sapien
ggaatttgataacagaaagaatatg

SEQ ID NO: 5977620 - DNA, 25 bp, Homo sapien
ttgtgactcttgaatatcaataata

SEQ ID NO: 5977621 - DNA, 25 bp, Homo sapien
ctgatgattccttacttggtgggtc

SEQ ID NO: 5977622 - DNA, 25 bp, Homo sapien
ttccactgcttataggctgggttgt

SEQ ID NO: 5977623 - DNA, 25 bp, Homo sapien
tgcacccaatggtctgtggtcaata

SEQ ID NO: 5977624 - DNA, 25 bp, Homo sapien
gttcgatgaaaaaatgagagcaatt

SEQ ID NO: 5977625 - DNA, 25 bp, Homo sapien
tgtagataacgccaatttggttctg

SEQ ID NO: 5977626 - DNA, 25 bp, Homo sapien
aggttcgatgaaaaaatgagagcaa

SEQ ID NO: 5977627 - DNA, 25 bp, Homo sapien
tttacttgaacagcctggacatgaa

SEQ ID NO: 5977628 - DNA, 25 bp, Homo sapien
acttcctcgtctactgagtttgcat

SEQ ID NO: 5977629 - DNA, 25 bp, Homo sapien
acctggaatttgataacagaaagaa

SEQ ID NO: 5977630 - DNA, 25 bp, Homo sapien
tgcggtgaccttgctcttctcagct

SEQ ID NO: 5977631 - DNA, 25 bp, Homo sapien
attttctcaaagagatgtaattgtt

SEQ ID NO: 5977632 - DNA, 25 bp, Homo sapien
cggccctcttgatgaagtgtccctc

SEQ ID NO: 5977633 - DNA, 25 bp, Homo sapien
tggtgggtcatgcgcgatgaaagat

SEQ ID NO: 5977634 - DNA, 25 bp, Homo sapien
gaccaattcgctgcccgatggatct

SEQ ID NO: 5977635 - DNA, 25 bp, Homo sapien
tcattggggaacaagcattgatcaa

SEQ ID NO: 5977636 - DNA, 25 bp, Homo sapien
atcaatgaatcggttcgtttcatcg

SEQ ID NO: 5977637 - DNA, 25 bp, Homo sapien
acgccaatttggttctgcacttctt

SEQ ID NO: 5977638 - DNA, 25 bp, Homo sapien
tgcatccattttaaaggttcgatga

SEQ ID NO: 5977639 - DNA, 25 bp, Homo sapien
cacccaatggtctgtggtcaataat

SEQ ID NO: 5977640 - DNA, 25 bp, Homo sapien
aagggaaattgatccactttactag

SEQ ID NO: 5977641 - DNA, 25 bp, Homo sapien
agagcaatttgcttgtgactcttga

SEQ ID NO: 5977642 - DNA, 25 bp, Homo sapien
tgataacagaaagaatatgagtaat

SEQ ID NO: 5977643 - DNA, 25 bp, Homo sapien
tttcttcttgaaatctactaatctg

SEQ ID NO: 5977644 - DNA, 25 bp, Homo sapien
tcggattcaaaattaaccatgttgg

SEQ ID NO: 5977645 - DNA, 25 bp, Homo sapien
tttcttcctcttgacagcgtgcata

SEQ ID NO: 5977646 - DNA, 25 bp, Homo sapien
gatgacccacttaccacaactgcac

SEQ ID NO: 5977647 - DNA, 25 bp, Homo sapien
tactatgaaggttacagatctcgag

SEQ ID NO: 5977648 - DNA, 25 bp, Homo sapien
actgcacctagatcctttccagttg

SEQ ID NO: 5977649 - DNA, 25 bp, Homo sapien
gtttggctcaacactcggtttcttc

SEQ ID NO: 5977650 - DNA, 25 bp, Homo sapien
gatccactttactagtttgcaggtg

SEQ ID NO: 5977651 - DNA, 25 bp, Homo sapien
tacttgaacagcctggacatgaaaa

SEQ ID NO: 5977652 - DNA, 25 bp, Homo sapien
aaatctactaatctgggcgaatact

SEQ ID NO: 5977653 - DNA, 25 bp, Homo sapien
gcgaatactcaacttcattggggaa

SEQ ID NO: 5977654 - DNA, 25 bp, Homo sapien
tccgccaagatatatgcctcctaat

SEQ ID NO: 5977655 - DNA, 25 bp, Homo sapien
gccttgtagttcaggttgcatccat

SEQ ID NO: 5977656 - DNA, 25 bp, Homo sapien
gttgcatccattttaaaggttcgat

SEQ ID NO: 5977657 - DNA, 25 bp, Homo sapien
gtggatagcggggatgacccactta

SEQ ID NO: 5977658 - DNA, 25 bp, Homo sapien
gattgtaagggaaattgatccactt

SEQ ID NO: 5977659 - DNA, 25 bp, Homo sapien
gtcaataattggacggattccgcca

SEQ ID NO: 5977660 - DNA, 25 bp, Homo sapien
gcagcacatcagtcacatcatcatc

SEQ ID NO: 5977661 - DNA, 25 bp, Homo sapien
gggatgacccacttaccacaactgc

SEQ ID NO: 5977662 - DNA, 25 bp, Homo sapien
tagatactctggaatgacctggaat

SEQ ID NO: 5977663 - DNA, 25 bp, Homo sapien
ctgcacttcttacatctcactgcgg

SEQ ID NO: 5977664 - DNA, 25 bp, Homo sapien
ttggacggattccgccaagatatat

SEQ ID NO: 5977665 - DNA, 25 bp, Homo sapien
gaaagatgtagataacgccaatttg

SEQ ID NO: 5977666 - DNA, 25 bp, Homo sapien
tctcactgcggtgaccttgctcttc

SEQ ID NO: 5977667 - DNA, 25 bp, Homo sapien
cggttcgtttcatcgaagtattgca

SEQ ID NO: 5977668 - DNA, 25 bp, Homo sapien
tcatcatcgatgggtatgtttttta

SEQ ID NO: 5977669 - DNA, 25 bp, Homo sapien
ttcagttaatttatccaagtcttgc

SEQ ID NO: 5977670 - DNA, 25 bp, Homo sapien
aatgacctggaatttgataacagaa

SEQ ID NO: 5977671 - DNA, 25 bp, Homo sapien
tcgtttggctcaacactcggtttct

SEQ ID NO: 5977672 - DNA, 25 bp, Homo sapien
atggtctgtggtcaataattggacg

SEQ ID NO: 5977673 - DNA, 25 bp, Homo sapien
ttggcggccctcttgatgaagtgtc

SEQ ID NO: 5977674 - DNA, 25 bp, Homo sapien
atgaatcggttcgtttcatcgaagt

SEQ ID NO: 5977675 - DNA, 25 bp, Homo sapien
acctttccttattagatactctgga

SEQ ID NO: 5977676 - DNA, 25 bp, Homo sapien
gatgggtatgttttttagcgtgtaa

SEQ ID NO: 5977677 - DNA, 25 bp, Homo sapien
tgaaattctcgtttggctcaacact

SEQ ID NO: 5977678 - DNA, 25 bp, Homo sapien
gatacattaggtaggctactatgaa

SEQ ID NO: 5977679 - DNA, 25 bp, Homo sapien
tctcaaagagatgtaattgttccat

SEQ ID NO: 5977680 - DNA, 25 bp, Homo sapien
aatccataacgatacattaggtagg

SEQ ID NO: 5977681 - DNA, 25 bp, Homo sapien
tgacctggaatttgataacagaaag

SEQ ID NO: 5977682 - DNA, 25 bp, Homo sapien
aggtggatagcggggatgacccact

SEQ ID NO: 5977683 - DNA, 25 bp, Homo sapien
ggattccgccaagatatatgcctcc

SEQ ID NO: 5977684 - DNA, 25 bp, Homo sapien
ggttctgcacttcttacatctcact

SEQ ID NO: 5977685 - DNA, 25 bp, Homo sapien
catccattttaaaggttcgatgaaa

SEQ ID NO: 5977686 - DNA, 25 bp, Homo sapien
actttacttgaacagcctggacatg

SEQ ID NO: 5977687 - DNA, 25 bp, Homo sapien
atccaagtcttgcgacgactccgaa

SEQ ID NO: 5977688 - DNA, 25 bp, Homo sapien
tccatgaaattctcgtttggctcaa

SEQ ID NO: 5977689 - DNA, 25 bp, Homo sapien
aattggacggattccgccaagatat

SEQ ID NO: 5977690 - DNA, 25 bp, Homo sapien
ggagttggcggccctcttgatgaag

SEQ ID NO: 5977691 - DNA, 25 bp, Homo sapien
actcttgcttgccttgtagttcagg

SEQ ID NO: 5977692 - DNA, 25 bp, Homo sapien
actttctcggattcaaaattaacca

SEQ ID NO: 5977693 - DNA, 25 bp, Homo sapien
gttcaggttgcatccattttaaagg

SEQ ID NO: 5977694 - DNA, 25 bp, Homo sapien
ctttactagtttgcaggtggatagc

SEQ ID NO: 5977695 - DNA, 25 bp, Homo sapien
gtaatgttaaattctgcacccaatg

SEQ ID NO: 5977696 - DNA, 25 bp, Homo sapien
tattgcagcacatcagtcacatcat

SEQ ID NO: 5977697 - DNA, 25 bp, Homo sapien
acttgatagattgcttcagcttcca

SEQ ID NO: 5977698 - DNA, 25 bp, Homo sapien
ctcttgaatatcaataatacgatgg

SEQ ID NO: 5977699 - DNA, 25 bp, Homo sapien
aatgagcaaaaacagcaccacgttg

SEQ ID NO: 5977700 - DNA, 25 bp, Homo sapien
atacgatgggagttggcggccctct

SEQ ID NO: 5977701 - DNA, 25 bp, Homo sapien
ataacagaaagaatatgagtaatgt

SEQ ID NO: 5977702 - DNA, 25 bp, Homo sapien
atttgcttgtgactcttgaatatca

SEQ ID NO: 5977703 - DNA, 25 bp, Homo sapien
catcgaagtattgcagcacatcagt

SEQ ID NO: 5977704 - DNA, 25 bp, Homo sapien
caacactcggtttcttcctcttgac

SEQ ID NO: 5977705 - DNA, 25 bp, Homo sapien
aagcattgatcaatgaatcggttcg

SEQ ID NO: 5977706 - DNA, 25 bp, Homo sapien
ttgtaagggaaattgatccacttta

SEQ ID NO: 5977707 - DNA, 25 bp, Homo sapien
tataggctgggttgtcgaaatcgac

SEQ ID NO: 5977708 - DNA, 25 bp, Homo sapien
caactttacttgaacagcctggaca

SEQ ID NO: 5977709 - DNA, 25 bp, Homo sapien
tcaaagagatgtaattgttccatga

SEQ ID NO: 5977710 - DNA, 25 bp, Homo sapien
ctttccttattagatactctggaat

SEQ ID NO: 5977711 - DNA, 25 bp, Homo sapien
cttgtagttcaggttgcatccattt

SEQ ID NO: 5977712 - DNA, 25 bp, Homo sapien
ccgatggatctaacttgatagattg

SEQ ID NO: 5977713 - DNA, 25 bp, Homo sapien
tcctaatatcctggtaacttcctcg

SEQ ID NO: 5977714 - DNA, 25 bp, Homo sapien
gttgggcaaagcagtggattgtaag

SEQ ID NO: 5977715 - DNA, 25 bp, Homo sapien
ttcttacatctcactgcggtgacct

SEQ ID NO: 5977716 - DNA, 25 bp, Homo sapien
ggaatgacctggaatttgataacag

SEQ ID NO: 5977717 - DNA, 25 bp, Homo sapien
ttagcgtgtaacctttccttattag

SEQ ID NO: 5977718 - DNA, 25 bp, Homo sapien
acattccagaattggagaccaattc

SEQ ID NO: 5977719 - DNA, 25 bp, Homo sapien
tctgtggtcaataattggacggatt

SEQ ID NO: 5977720 - DNA, 25 bp, Homo sapien
tcgatgggtatgttttttagcgtgt

SEQ ID NO: 5977721 - DNA, 25 bp, Homo sapien
gtctactgagtttgcatttccagcc

SEQ ID NO: 5977722 - DNA, 25 bp, Homo sapien
cctcttgacagcgtgcatagccatt

SEQ ID NO: 5977723 - DNA, 25 bp, Homo sapien
ttgacagcgtgcatagccattgata

SEQ ID NO: 5977724 - DNA, 25 bp, Homo sapien
ttattagatactctggaatgacctg

SEQ ID NO: 5977725 - DNA, 25 bp, Homo sapien
ggcaaagcagtggattgtaagggaa

SEQ ID NO: 5977726 - DNA, 25 bp, Homo sapien
tgattccttacttggtgggtcatgc

SEQ ID NO: 5977727 - DNA, 25 bp, Homo sapien
ccgccaactttacttgaacagcctg

SEQ ID NO: 5977728 - DNA, 25 bp, Homo sapien
gaaagaatatgagtaatgttaaatt

SEQ ID NO: 5977729 - DNA, 25 bp, Homo sapien
catcatcatcgatgggtatgttttt

SEQ ID NO: 5977730 - DNA, 25 bp, Homo sapien
attccgccaagatatatgcctccta

SEQ ID NO: 5977731 - DNA, 25 bp, Homo sapien
cctgcttgacaatgagcaaaaacag

SEQ ID NO: 5977732 - DNA, 25 bp, Homo sapien
tcttctcagcttcagttaatttatc

SEQ ID NO: 5977733 - DNA, 25 bp, Homo sapien
tccataacgatacattaggtaggct

SEQ ID NO: 5977734 - DNA, 25 bp, Homo sapien
ctcagcttcagttaatttatccaag

SEQ ID NO: 5977735 - DNA, 25 bp, Homo sapien
ctatttactttctcggattcaaaat

SEQ ID NO: 5977736 - DNA, 25 bp, Homo sapien
agcggggatgacccacttaccacaa

SEQ ID NO: 5977737 - DNA, 25 bp, Homo sapien
tgacaatccataacgatacattagg

SEQ ID NO: 5977738 - DNA, 25 bp, Homo sapien
acccattttctcaaagagatgtaat

SEQ ID NO: 5977739 - DNA, 25 bp, Homo sapien
ttctcagcttcagttaatttatcca

SEQ ID NO: 5977740 - DNA, 25 bp, Homo sapien
tcagtcacatcatcatcatcgatgg

SEQ ID NO: 5977741 - DNA, 25 bp, Homo sapien
aattcgctgcccgatggatctaact

SEQ ID NO: 5977742 - DNA, 25 bp, Homo sapien
ttcttgaaatctactaatctgggcg

SEQ ID NO: 5977743 - DNA, 25 bp, Homo sapien
gtaattgttccatgaaattctcgtt

SEQ ID NO: 5977744 - DNA, 25 bp, Homo sapien
tcaacttcattggggaacaagcatt

SEQ ID NO: 5977745 - DNA, 25 bp, Homo sapien
tgttaaattctgcacccaatggtct

SEQ ID NO: 5977746 - DNA, 25 bp, Homo sapien
tcttgcttgccttgtagttcaggtt

SEQ ID NO: 5977747 - DNA, 25 bp, Homo sapien
atttatccaagtcttgcgacgactc

SEQ ID NO: 5977748 - DNA, 25 bp, Homo sapien
gaattttaaggcgaatgacaagtct

SEQ ID NO: 5977749 - DNA, 25 bp, Homo sapien
ttcataccgtttctacaatcttcta

SEQ ID NO: 5977750 - DNA, 25 bp, Homo sapien
gtcaataagcaacaatatgaatttt

SEQ ID NO: 5977751 - DNA, 25 bp, Homo sapien
cagcccctttatctttccacatggc

SEQ ID NO: 5977752 - DNA, 25 bp, Homo sapien
ttcgaggctataacattagaaaacg

SEQ ID NO: 5977753 - DNA, 25 bp, Homo sapien
tgtccaattgcaataatggtattgc

SEQ ID NO: 5977754 - DNA, 25 bp, Homo sapien
ccagctaaagatttaggtgatcagt

SEQ ID NO: 5977755 - DNA, 25 bp, Homo sapien
gatcagttatccactaaattgcaca

SEQ ID NO: 5977756 - DNA, 25 bp, Homo sapien
cacataatctggacaactttcggaa

SEQ ID NO: 5977757 - DNA, 25 bp, Homo sapien
ggagatggccacctttaggttatga

SEQ ID NO: 5977758 - DNA, 25 bp, Homo sapien
ttcggaatcagacgctgattgcaga

SEQ ID NO: 5977759 - DNA, 25 bp, Homo sapien
gcccaaacaagatactgctatatac

SEQ ID NO: 5977760 - DNA, 25 bp, Homo sapien
atgaattttaaggcgaatgacaagt

SEQ ID NO: 5977761 - DNA, 25 bp, Homo sapien
aagaagaaattataaagctcaaaac

SEQ ID NO: 5977762 - DNA, 25 bp, Homo sapien
taatctggacaactttcggaatcag

SEQ ID NO: 5977763 - DNA, 25 bp, Homo sapien
atacaaatcatgcacataatctgga

SEQ ID NO: 5977764 - DNA, 25 bp, Homo sapien
cgaatcaaattagatcgacgatgtc

SEQ ID NO: 5977765 - DNA, 25 bp, Homo sapien
agagtattcaaattctgcacaccaa

SEQ ID NO: 5977766 - DNA, 25 bp, Homo sapien
ttcctgtttgtaagaactgtttaac

SEQ ID NO: 5977767 - DNA, 25 bp, Homo sapien
agctaaagatttaggtgatcagtta

SEQ ID NO: 5977768 - DNA, 25 bp, Homo sapien
gatttatataggagacatatcaatg

SEQ ID NO: 5977769 - DNA, 25 bp, Homo sapien
ccacttcttcacggacgactgactc

SEQ ID NO: 5977770 - DNA, 25 bp, Homo sapien
ttcttcacggacgactgactctaat

SEQ ID NO: 5977771 - DNA, 25 bp, Homo sapien
ggtactgatgtcgggagattgttcg

SEQ ID NO: 5977772 - DNA, 25 bp, Homo sapien
atcgtgcgattagcaacgtgaaaac

SEQ ID NO: 5977773 - DNA, 25 bp, Homo sapien
aggaacgtttgcaaaggacagtaaa

SEQ ID NO: 5977774 - DNA, 25 bp, Homo sapien
ttgcaataataacgtatccaatgat

SEQ ID NO: 5977775 - DNA, 25 bp, Homo sapien
caaaaacaggcgcagattctcctca

SEQ ID NO: 5977776 - DNA, 25 bp, Homo sapien
atctgcttttatcaaagaacggtcg

SEQ ID NO: 5977777 - DNA, 25 bp, Homo sapien
ctccctgtatatccaaagcaaattc

SEQ ID NO: 5977778 - DNA, 25 bp, Homo sapien
ttaggttatgaagcagtatctgccg

SEQ ID NO: 5977779 - DNA, 25 bp, Homo sapien
gccaaaaacggagtctaaggaaaga

SEQ ID NO: 5977780 - DNA, 25 bp, Homo sapien
aaacaagatactgctatataccaag

SEQ ID NO: 5977781 - DNA, 25 bp, Homo sapien
atgcttgagacgagagatcgtgcga

SEQ ID NO: 5977782 - DNA, 25 bp, Homo sapien
tcgacgatgtcttccccagatataa

SEQ ID NO: 5977783 - DNA, 25 bp, Homo sapien
gaacttgttacagatttatatagga

SEQ ID NO: 5977784 - DNA, 25 bp, Homo sapien
agaatgagtccggatacgaattcat

SEQ ID NO: 5977785 - DNA, 25 bp, Homo sapien
tcgcaacttttaatgggaacatcat

SEQ ID NO: 5977786 - DNA, 25 bp, Homo sapien
tgaaatagtgtccaattgcaataat

SEQ ID NO: 5977787 - DNA, 25 bp, Homo sapien
agaagccaaaaacggagtctaagga

SEQ ID NO: 5977788 - DNA, 25 bp, Homo sapien
aatggtattgcctctaccgccgcaa

SEQ ID NO: 5977789 - DNA, 25 bp, Homo sapien
gtgattgtaatatagaatcaagcgg

SEQ ID NO: 5977790 - DNA, 25 bp, Homo sapien
ggaaatgtcgagctcttgaggaacg

SEQ ID NO: 5977791 - DNA, 25 bp, Homo sapien
agtgaaatagtgtccaattgcaata

SEQ ID NO: 5977792 - DNA, 25 bp, Homo sapien
aagttcgcaacttttaatgggaaca

SEQ ID NO: 5977793 - DNA, 25 bp, Homo sapien
aacaccattatggagaagagatgag

SEQ ID NO: 5977794 - DNA, 25 bp, Homo sapien
ccatctcaaatagtgtttctagttc

SEQ ID NO: 5977795 - DNA, 25 bp, Homo sapien
aggaaagaagcgattctcacctatc

SEQ ID NO: 5977796 - DNA, 25 bp, Homo sapien
gcagttcaattgcgtgaatcgcaag

SEQ ID NO: 5977797 - DNA, 25 bp, Homo sapien
aaattataaagctcaaaactagaat

SEQ ID NO: 5977798 - DNA, 25 bp, Homo sapien
ttctcctcaattacctcacttatca

SEQ ID NO: 5977799 - DNA, 25 bp, Homo sapien
atggagctatgctttgtaatgcgtg

SEQ ID NO: 5977800 - DNA, 25 bp, Homo sapien
cggtcgcaaagctaacagagtaaca

SEQ ID NO: 5977801 - DNA, 25 bp, Homo sapien
tccggatacgaattcattacaccat

SEQ ID NO: 5977802 - DNA, 25 bp, Homo sapien
ctgctatataccaagagaagttact

SEQ ID NO: 5977803 - DNA, 25 bp, Homo sapien
aactgcccaaacaagatactgctat

SEQ ID NO: 5977804 - DNA, 25 bp, Homo sapien
cgcaactctggcacccacttcttca

SEQ ID NO: 5977805 - DNA, 25 bp, Homo sapien
tcaattacctcacttatcaatgctg

SEQ ID NO: 5977806 - DNA, 25 bp, Homo sapien
acgactgactctaatccatccgagg

SEQ ID NO: 5977807 - DNA, 25 bp, Homo sapien
acaactttcggaatcagacgctgat

SEQ ID NO: 5977808 - DNA, 25 bp, Homo sapien
tcatttcataccgtttctacaatct

SEQ ID NO: 5977809 - DNA, 25 bp, Homo sapien
attcagtaacatcaaaaacaggcgc

SEQ ID NO: 5977810 - DNA, 25 bp, Homo sapien
tcgcaattcaacgcagcctctttcc

SEQ ID NO: 5977811 - DNA, 25 bp, Homo sapien
ggcgcagattctcctcaattacctc

SEQ ID NO: 5977812 - DNA, 25 bp, Homo sapien
gagacgacaccgcctcatttcatac

SEQ ID NO: 5977813 - DNA, 25 bp, Homo sapien
atagtgtccaattgcaataatggta

SEQ ID NO: 5977814 - DNA, 25 bp, Homo sapien
gatacgaattcattacaccatatat

SEQ ID NO: 5977815 - DNA, 25 bp, Homo sapien
aaagtaatacaaatcatgcacataa

SEQ ID NO: 5977816 - DNA, 25 bp, Homo sapien
gagcatggagctatgctttgtaatg

SEQ ID NO: 5977817 - DNA, 25 bp, Homo sapien
tactgcgaagatatccaagaagcca

SEQ ID NO: 5977818 - DNA, 25 bp, Homo sapien
ttcacaatccatctcaaatagtgtt

SEQ ID NO: 5977819 - DNA, 25 bp, Homo sapien
attatggagaagagatgagcatgga

SEQ ID NO: 5977820 - DNA, 25 bp, Homo sapien
agcctaaactgcccaaacaagatac

SEQ ID NO: 5977821 - DNA, 25 bp, Homo sapien
aaaatcaagtgaaaacctcaacagc

SEQ ID NO: 5977822 - DNA, 25 bp, Homo sapien
atccaaagcaaattcacaatccatc

SEQ ID NO: 5977823 - DNA, 25 bp, Homo sapien
aaacaatggatgccaattgcaataa

SEQ ID NO: 5977824 - DNA, 25 bp, Homo sapien
attagcaacgtgaaaaccgagacga

SEQ ID NO: 5977825 - DNA, 25 bp, Homo sapien
agcggtcgcaaagctaacagagtaa

SEQ ID NO: 5977826 - DNA, 25 bp, Homo sapien
caattgcaataatggtattgcctct

SEQ ID NO: 5977827 - DNA, 25 bp, Homo sapien
tttaaggcgaatgacaagtcttttt

SEQ ID NO: 5977828 - DNA, 25 bp, Homo sapien
agtatctgccgagcaaaaatcggca

SEQ ID NO: 5977829 - DNA, 25 bp, Homo sapien
gtttgaaaactgatgtaataaagtc

SEQ ID NO: 5977830 - DNA, 25 bp, Homo sapien
agaaattataaagctcaaaactaga

SEQ ID NO: 5977831 - DNA, 25 bp, Homo sapien
atatccaaagcaaattcacaatcca

SEQ ID NO: 5977832 - DNA, 25 bp, Homo sapien
tgagtccggatacgaattcattaca

SEQ ID NO: 5977833 - DNA, 25 bp, Homo sapien
ctttatctttccacatggcttctat

SEQ ID NO: 5977834 - DNA, 25 bp, Homo sapien
atatctgctaagcgtaacgacccag

SEQ ID NO: 5977835 - DNA, 25 bp, Homo sapien
cggaatcagacgctgattgcagagc

SEQ ID NO: 5977836 - DNA, 25 bp, Homo sapien
gtgtttctagttctgatgtttctgg

SEQ ID NO: 5977837 - DNA, 25 bp, Homo sapien
ctgcacaccaatctgcttttatcaa

SEQ ID NO: 5977838 - DNA, 25 bp, Homo sapien
ttgttcgagaccaaacttaaagcct

SEQ ID NO: 5977839 - DNA, 25 bp, Homo sapien
ataggaaaagtaatacaaatcatgc

SEQ ID NO: 5977840 - DNA, 25 bp, Homo sapien
ttcaattgcgtgaatcgcaagcagg

SEQ ID NO: 5977841 - DNA, 25 bp, Homo sapien
tgcaataatggtattgcctctaccg

SEQ ID NO: 5977842 - DNA, 25 bp, Homo sapien
attttaaggcgaatgacaagtcttt

SEQ ID NO: 5977843 - DNA, 25 bp, Homo sapien
tccccctcaatgcttcacattcagt

SEQ ID NO: 5977844 - DNA, 25 bp, Homo sapien
atgtcttccccagatataatatctg

SEQ ID NO: 5977845 - DNA, 25 bp, Homo sapien
tgaaaatcacccagctaaagattta

SEQ ID NO: 5977846 - DNA, 25 bp, Homo sapien
gatataatatctgctaagcgtaacg

SEQ ID NO: 5977847 - DNA, 25 bp, Homo sapien
gcaagcaggagcgtcaataagcaac

SEQ ID NO: 5977848 - DNA, 25 bp, Homo sapien
atgtaataaagtctcgaaataggaa

SEQ ID NO: 5977849 - DNA, 25 bp, Homo sapien
aactttcggaatcagacgctgattg

SEQ ID NO: 5977850 - DNA, 25 bp, Homo sapien
gcgaagatatccaagaagccaaaaa

SEQ ID NO: 5977851 - DNA, 25 bp, Homo sapien
cagatttatataggagacatatcaa

SEQ ID NO: 5977852 - DNA, 25 bp, Homo sapien
ccattatggagaagagatgagcatg

SEQ ID NO: 5977853 - DNA, 25 bp, Homo sapien
ccgagcaaaaatcggcagttcaatt

SEQ ID NO: 5977854 - DNA, 25 bp, Homo sapien
acgcagcctctttccccctcaatgc

SEQ ID NO: 5977855 - DNA, 25 bp, Homo sapien
agagatcgtgcgattagcaacgtga

SEQ ID NO: 5977856 - DNA, 25 bp, Homo sapien
tgtaatgcgtgtggtctctttttaa

SEQ ID NO: 5977857 - DNA, 25 bp, Homo sapien
tcaatgctgcttggaagcttgagca

SEQ ID NO: 5977858 - DNA, 25 bp, Homo sapien
acatcatctactgcgaagatatcca

SEQ ID NO: 5977859 - DNA, 25 bp, Homo sapien
acccacttcttcacggacgactgac

SEQ ID NO: 5977860 - DNA, 25 bp, Homo sapien
atctttccacatggcttctattaac

SEQ ID NO: 5977861 - DNA, 25 bp, Homo sapien
tcacggacgactgactctaatccat

SEQ ID NO: 5977862 - DNA, 25 bp, Homo sapien
gaatgacaagtctttttccacatct

SEQ ID NO: 5977863 - DNA, 25 bp, Homo sapien
tttgtaatgcgtgtggtctcttttt

SEQ ID NO: 5977864 - DNA, 25 bp, Homo sapien
acatggcttctattaacgacatgct

SEQ ID NO: 5977865 - DNA, 25 bp, Homo sapien
gacagtaaaacaagaagggaataaa

SEQ ID NO: 5977866 - DNA, 25 bp, Homo sapien
tagaggtactgatgtcgggagattg

SEQ ID NO: 5977867 - DNA, 25 bp, Homo sapien
ccctttatctttccacatggcttct

SEQ ID NO: 5977868 - DNA, 25 bp, Homo sapien
tttatataggagacatatcaatgaa

SEQ ID NO: 5977869 - DNA, 25 bp, Homo sapien
ttctgatgtttctggacgaaaattt

SEQ ID NO: 5977870 - DNA, 25 bp, Homo sapien
atgggaacatcatctactgcgaaga

SEQ ID NO: 5977871 - DNA, 25 bp, Homo sapien
atgagttagaacttgttacagattt

SEQ ID NO: 5977872 - DNA, 25 bp, Homo sapien
ctaaagatttaggtgatcagttatc

SEQ ID NO: 5977873 - DNA, 25 bp, Homo sapien
tcccaagttatacggacgttaaaga

SEQ ID NO: 5977874 - DNA, 25 bp, Homo sapien
gattgtaatatagaatcaagcggtc

SEQ ID NO: 5977875 - DNA, 25 bp, Homo sapien
accgaatcaaattagatcgacgatg

SEQ ID NO: 5977876 - DNA, 25 bp, Homo sapien
ctgatgtcgggagattgttcgagac

SEQ ID NO: 5977877 - DNA, 25 bp, Homo sapien
cggaagtgaaatagtgtccaattgc

SEQ ID NO: 5977878 - DNA, 25 bp, Homo sapien
ccacatggcttctattaacgacatg

SEQ ID NO: 5977879 - DNA, 25 bp, Homo sapien
aagcaggagcgtcaataagcaacaa

SEQ ID NO: 5977880 - DNA, 25 bp, Homo sapien
acttcttcacggacgactgactcta

SEQ ID NO: 5977881 - DNA, 25 bp, Homo sapien
tctattaacgacatgcttgagacga

SEQ ID NO: 5977882 - DNA, 25 bp, Homo sapien
tatataggagacatatcaatgaatt

SEQ ID NO: 5977883 - DNA, 25 bp, Homo sapien
atgatgctaatgttcctgtttgtaa

SEQ ID NO: 5977884 - DNA, 25 bp, Homo sapien
gatgccaattgcaataataacgtat

SEQ ID NO: 5977885 - DNA, 25 bp, Homo sapien
gtatatccaaagcaaattcacaatc

SEQ ID NO: 5977886 - DNA, 25 bp, Homo sapien
gcgtcaataagcaacaatatgaatt

SEQ ID NO: 5977887 - DNA, 25 bp, Homo sapien
acggacgactgactctaatccatcc

SEQ ID NO: 5977888 - DNA, 25 bp, Homo sapien
aaatgtcgagctcttgaggaacgtt

SEQ ID NO: 5977889 - DNA, 25 bp, Homo sapien
caggcgcagattctcctcaattacc

SEQ ID NO: 5977890 - DNA, 25 bp, Homo sapien
attctcacctatcagcaacaaaatt

SEQ ID NO: 5977891 - DNA, 25 bp, Homo sapien
gaagatatccaagaagccaaaaacg

SEQ ID NO: 5977892 - DNA, 25 bp, Homo sapien
tctactgctggaagaatgagtccgg

SEQ ID NO: 5977893 - DNA, 25 bp, Homo sapien
ataatggtattgcctctaccgccgc

SEQ ID NO: 5977894 - DNA, 25 bp, Homo sapien
atgtcgagctcttgaggaacgtttg

SEQ ID NO: 5977895 - DNA, 25 bp, Homo sapien
caagttatacggacgttaaagagta

SEQ ID NO: 5977896 - DNA, 25 bp, Homo sapien
taatatctgctaagcgtaacgaccc

SEQ ID NO: 5977897 - DNA, 25 bp, Homo sapien
ctgactctaatccatccgaggtacc

SEQ ID NO: 5977898 - DNA, 25 bp, Homo sapien
gcgaatgacaagtctttttccacat

SEQ ID NO: 5977899 - DNA, 25 bp, Homo sapien
gcttgagacgagagatcgtgcgatt

SEQ ID NO: 5977900 - DNA, 25 bp, Homo sapien
taatacaaatcatgcacataatctg

SEQ ID NO: 5977901 - DNA, 25 bp, Homo sapien
cctcaatgcttcacattcagtaaca

SEQ ID NO: 5977902 - DNA, 25 bp, Homo sapien
actctggcacccacttcttcacgga

SEQ ID NO: 5977903 - DNA, 25 bp, Homo sapien
tctttttaaagcttcatgggaaacc

SEQ ID NO: 5977904 - DNA, 25 bp, Homo sapien
cctaaactgcccaaacaagatactg

SEQ ID NO: 5977905 - DNA, 25 bp, Homo sapien
tctctttttaaagcttcatgggaaa

SEQ ID NO: 5977906 - DNA, 25 bp, Homo sapien
gcacccacttcttcacggacgactg

SEQ ID NO: 5977907 - DNA, 25 bp, Homo sapien
cacatctactgctggaagaatgagt

SEQ ID NO: 5977908 - DNA, 25 bp, Homo sapien
ggtcgcaattcaacgcagcctcttt

SEQ ID NO: 5977909 - DNA, 25 bp, Homo sapien
tttaacctctacaacaccattatgg

SEQ ID NO: 5977910 - DNA, 25 bp, Homo sapien
tgccaattgcaataataacgtatcc

SEQ ID NO: 5977911 - DNA, 25 bp, Homo sapien
aacttttaatgggaacatcatctac

SEQ ID NO: 5977912 - DNA, 25 bp, Homo sapien
atctggacaactttcggaatcagac

SEQ ID NO: 5977913 - DNA, 25 bp, Homo sapien
aaaacgagataatgtatttgaacca

SEQ ID NO: 5977914 - DNA, 25 bp, Homo sapien
aaagcgaagaagaagggcatattgg

SEQ ID NO: 5977915 - DNA, 25 bp, Homo sapien
acggtcgcaattcaacgcagcctct

SEQ ID NO: 5977916 - DNA, 25 bp, Homo sapien
acaatcttctaaagctccctgtata

SEQ ID NO: 5977917 - DNA, 25 bp, Homo sapien
tggatgccaattgcaataataacgt

SEQ ID NO: 5977918 - DNA, 25 bp, Homo sapien
agaaaacgagataatgtatttgaac

SEQ ID NO: 5977919 - DNA, 25 bp, Homo sapien
ctttaggttatgaagcagtatctgc

SEQ ID NO: 5977920 - DNA, 25 bp, Homo sapien
tcagttatccactaaattgcacaaa

SEQ ID NO: 5977921 - DNA, 25 bp, Homo sapien
aaccaaaatcaagtgaaaacctcaa

SEQ ID NO: 5977922 - DNA, 25 bp, Homo sapien
gcaacaatatgaattttaaggcgaa

SEQ ID NO: 5977923 - DNA, 25 bp, Homo sapien
taaactgcccaaacaagatactgct

SEQ ID NO: 5977924 - DNA, 25 bp, Homo sapien
ctgtatatccaaagcaaattcacaa

SEQ ID NO: 5977925 - DNA, 25 bp, Homo sapien
acattcagtaacatcaaaaacaggc

SEQ ID NO: 5977926 - DNA, 25 bp, Homo sapien
catatattacctaaaaatcaagtta

SEQ ID NO: 5977927 - DNA, 25 bp, Homo sapien
actagaataaatgagttagaacttg

SEQ ID NO: 5977928 - DNA, 25 bp, Homo sapien
agttctgatgtttctggacgaaaat

SEQ ID NO: 5977929 - DNA, 25 bp, Homo sapien
cttaaatcaaagcgaagaagaaggg

SEQ ID NO: 5977930 - DNA, 25 bp, Homo sapien
ttctacaatcttctaaagctccctg

SEQ ID NO: 5977931 - DNA, 25 bp, Homo sapien
gaataaatgagttagaacttgttac

SEQ ID NO: 5977932 - DNA, 25 bp, Homo sapien
ttcatgggaaacccaggccaattag

SEQ ID NO: 5977933 - DNA, 25 bp, Homo sapien
aaccgagacgacaccgcctcatttc

SEQ ID NO: 5977934 - DNA, 25 bp, Homo sapien
agctccctgtatatccaaagcaaat

SEQ ID NO: 5977935 - DNA, 25 bp, Homo sapien
tatgaagcagtatctgccgagcaaa

SEQ ID NO: 5977936 - DNA, 25 bp, Homo sapien
ttgtaagaactgtttaacctctaca

SEQ ID NO: 5977937 - DNA, 25 bp, Homo sapien
gttcgcaacttttaatgggaacatc

SEQ ID NO: 5977938 - DNA, 25 bp, Homo sapien
ttgcagagcttaagggtgattgtaa

SEQ ID NO: 5977939 - DNA, 25 bp, Homo sapien
ctatgctttgtaatgcgtgtggtct

SEQ ID NO: 5977940 - DNA, 25 bp, Homo sapien
ttgttacagatttatataggagaca

SEQ ID NO: 5977941 - DNA, 25 bp, Homo sapien
ctttcggaatcagacgctgattgca

SEQ ID NO: 5977942 - DNA, 25 bp, Homo sapien
ttacaccatatattacctaaaaatc

SEQ ID NO: 5977943 - DNA, 25 bp, Homo sapien
aggtaccgaatcaaattagatcgac

SEQ ID NO: 5977944 - DNA, 25 bp, Homo sapien
tgaaccaaaatcaagtgaaaacctc

SEQ ID NO: 5977945 - DNA, 25 bp, Homo sapien
caatccatctcaaatagtgtttcta

SEQ ID NO: 5977946 - DNA, 25 bp, Homo sapien
aggttatgaagcagtatctgccgag

SEQ ID NO: 5977947 - DNA, 25 bp, Homo sapien
ttgcaaaggacagtaaaacaagaag

SEQ ID NO: 5977948 - DNA, 25 bp, Homo sapien
gggcatattgggagatggccacctt

SEQ ID NO: 5977949 - DNA, 25 bp, Homo sapien
aatagtgtttctagttctgatgttt

SEQ ID NO: 5977950 - DNA, 25 bp, Homo sapien
tttctggacgaaaatttgaaaatca

SEQ ID NO: 5977951 - DNA, 25 bp, Homo sapien
tttaatgggaacatcatctactgcg

SEQ ID NO: 5977952 - DNA, 25 bp, Homo sapien
ggaagcttgagcagtacttcaatat

SEQ ID NO: 5977953 - DNA, 25 bp, Homo sapien
ggacgactgactctaatccatccga

SEQ ID NO: 5977954 - DNA, 25 bp, Homo sapien
aaagctccctgtatatccaaagcaa

SEQ ID NO: 5977955 - DNA, 25 bp, Homo sapien
gtaataaagtctcgaaataggaaaa

SEQ ID NO: 5977956 - DNA, 25 bp, Homo sapien
taatgggaacatcatctactgcgaa

SEQ ID NO: 5977957 - DNA, 25 bp, Homo sapien
aagggtgattgtaatatagaatcaa

SEQ ID NO: 5977958 - DNA, 25 bp, Homo sapien
atcaaagaacggtcgcaattcaacg

SEQ ID NO: 5977959 - DNA, 25 bp, Homo sapien
tcaaattagatcgacgatgtcttcc

SEQ ID NO: 5977960 - DNA, 25 bp, Homo sapien
agcgattctcacctatcagcaacaa

SEQ ID NO: 5977961 - DNA, 25 bp, Homo sapien
ttccacatggcttctattaacgaca

SEQ ID NO: 5977962 - DNA, 25 bp, Homo sapien
aggctacaactcttcgaggctataa

SEQ ID NO: 5977963 - DNA, 25 bp, Homo sapien
actgtttaacctctacaacaccatt

SEQ ID NO: 5977964 - DNA, 25 bp, Homo sapien
aattcaacgcagcctctttccccct

SEQ ID NO: 5977965 - DNA, 25 bp, Homo sapien
tgaggaacgtttgcaaaggacagta

SEQ ID NO: 5977966 - DNA, 25 bp, Homo sapien
caggccaattagtttgaaaactgat

SEQ ID NO: 5977967 - DNA, 25 bp, Homo sapien
gtgaaaacctcaacagcttaaatca

SEQ ID NO: 5977968 - DNA, 25 bp, Homo sapien
aaattagaggtactgatgtcgggag

SEQ ID NO: 5977969 - DNA, 25 bp, Homo sapien
tatctgccgagcaaaaatcggcagt

SEQ ID NO: 5977970 - DNA, 25 bp, Homo sapien
gttatgaagcagtatctgccgagca

SEQ ID NO: 5977971 - DNA, 25 bp, Homo sapien
cgcaaagctaacagagtaacatctg

SEQ ID NO: 5977972 - DNA, 25 bp, Homo sapien
ctagttctgatgtttctggacgaaa

SEQ ID NO: 5977973 - DNA, 25 bp, Homo sapien
aacgtgaaaaccgagacgacaccgc

SEQ ID NO: 5977974 - DNA, 25 bp, Homo sapien
catccgaggtaccgaatcaaattag

SEQ ID NO: 5977975 - DNA, 25 bp, Homo sapien
agatgagcatggagctatgctttgt

SEQ ID NO: 5977976 - DNA, 25 bp, Homo sapien
caagcggtcgcaaagctaacagagt

SEQ ID NO: 5977977 - DNA, 25 bp, Homo sapien
cccagcccctttatctttccacatg

SEQ ID NO: 5977978 - DNA, 25 bp, Homo sapien
tataatatctgctaagcgtaacgac

SEQ ID NO: 5977979 - DNA, 25 bp, Homo sapien
gtaagaactgtttaacctctacaac

SEQ ID NO: 5977980 - DNA, 25 bp, Homo sapien
aagtgaaaacctcaacagcttaaat

SEQ ID NO: 5977981 - DNA, 25 bp, Homo sapien
catgcacataatctggacaactttc

SEQ ID NO: 5977982 - DNA, 25 bp, Homo sapien
aacaaaattagaggtactgatgtcg

SEQ ID NO: 5977983 - DNA, 25 bp, Homo sapien
ggtctctttttaaagcttcatggga

SEQ ID NO: 5977984 - DNA, 25 bp, Homo sapien
ttgaaaactgatgtaataaagtctc

SEQ ID NO: 5977985 - DNA, 25 bp, Homo sapien
ctgcgaagatatccaagaagccaaa

SEQ ID NO: 5977986 - DNA, 25 bp, Homo sapien
acatgcttgagacgagagatcgtgc

SEQ ID NO: 5977987 - DNA, 25 bp, Homo sapien
aatgcttcacattcagtaacatcaa

SEQ ID NO: 5977988 - DNA, 25 bp, Homo sapien
atggcttctattaacgacatgcttg

SEQ ID NO: 5977989 - DNA, 25 bp, Homo sapien
ccgagacgacaccgcctcatttcat

SEQ ID NO: 5977990 - DNA, 25 bp, Homo sapien
cgaggtaccgaatcaaattagatcg

SEQ ID NO: 5977991 - DNA, 25 bp, Homo sapien
gacgaaaatttgaaaatcacccagc

SEQ ID NO: 5977992 - DNA, 25 bp, Homo sapien
gcaggagcgtcaataagcaacaata

SEQ ID NO: 5977993 - DNA, 25 bp, Homo sapien
ggccacctttaggttatgaagcagt

SEQ ID NO: 5977994 - DNA, 25 bp, Homo sapien
aggaaaagtaatacaaatcatgcac

SEQ ID NO: 5977995 - DNA, 25 bp, Homo sapien
gaattagacgggaaatgtcgagctc

SEQ ID NO: 5977996 - DNA, 25 bp, Homo sapien
ttgtaatatagaatcaagcggtcgc

SEQ ID NO: 5977997 - DNA, 25 bp, Homo sapien
aaaaccgagacgacaccgcctcatt

SEQ ID NO: 5977998 - DNA, 25 bp, Homo sapien
atcggcagttcaattgcgtgaatcg

SEQ ID NO: 5977999 - DNA, 25 bp, Homo sapien
ttttatcaaagaacggtcgcaattc

SEQ ID NO: 5978000 - DNA, 25 bp, Homo sapien
tatagaatcaagcggtcgcaaagct

SEQ ID NO: 5978001 - DNA, 25 bp, Homo sapien
ttctaaagctccctgtatatccaaa

SEQ ID NO: 5978002 - DNA, 25 bp, Homo sapien
aagcttgagcagtacttcaatatca

SEQ ID NO: 5978003 - DNA, 25 bp, Homo sapien
gggagattgttcgagaccaaactta

SEQ ID NO: 5978004 - DNA, 25 bp, Homo sapien
ttcattacaccatatattacctaaa

SEQ ID NO: 5978005 - DNA, 25 bp, Homo sapien
aacaagaagggaataaaggaggata

SEQ ID NO: 5978006 - DNA, 25 bp, Homo sapien
gttagaacttgttacagatttatat

SEQ ID NO: 5978007 - DNA, 25 bp, Homo sapien
gaactgtttaacctctacaacacca

SEQ ID NO: 5978008 - DNA, 25 bp, Homo sapien
aattcacaatccatctcaaatagtg

SEQ ID NO: 5978009 - DNA, 25 bp, Homo sapien
ggacaaacaatggatgccaattgca

SEQ ID NO: 5978010 - DNA, 25 bp, Homo sapien
tccatccgaggtaccgaatcaaatt

SEQ ID NO: 5978011 - DNA, 25 bp, Homo sapien
cttatcaatgctgcttggaagcttg

SEQ ID NO: 5978012 - DNA, 25 bp, Homo sapien
cagacgctgattgcagagcttaagg

SEQ ID NO: 5978013 - DNA, 25 bp, Homo sapien
taatggacaaacaatggatgccaat

SEQ ID NO: 5978014 - DNA, 25 bp, Homo sapien
ctacaatcttctaaagctccctgta

SEQ ID NO: 5978015 - DNA, 25 bp, Homo sapien
aaatcatgcacataatctggacaac

SEQ ID NO: 5978016 - DNA, 25 bp, Homo sapien
gattctcctcaattacctcacttat

SEQ ID NO: 5978017 - DNA, 25 bp, Homo sapien
aacaggcgcagattctcctcaatta

SEQ ID NO: 5978018 - DNA, 25 bp, Homo sapien
acctcacttatcaatgctgcttgga

SEQ ID NO: 5978019 - DNA, 25 bp, Homo sapien
aggacagtaaaacaagaagggaata

SEQ ID NO: 5978020 - DNA, 25 bp, Homo sapien
tctttccccctcaatgcttcacatt

SEQ ID NO: 5978021 - DNA, 25 bp, Homo sapien
caaaattagaggtactgatgtcggg

SEQ ID NO: 5978022 - DNA, 25 bp, Homo sapien
acaagatactgctatataccaagag

SEQ ID NO: 5978023 - DNA, 25 bp, Homo sapien
taatgcgtgtggtctctttttaaag

SEQ ID NO: 5978024 - DNA, 25 bp, Homo sapien
gtttctacaatcttctaaagctccc

SEQ ID NO: 5978025 - DNA, 25 bp, Homo sapien
taaatcaaagcgaagaagaagggca

SEQ ID NO: 5978026 - DNA, 25 bp, Homo sapien
ctcaacagcttaaatcaaagcgaag

SEQ ID NO: 5978027 - DNA, 25 bp, Homo sapien
agaagaagaaattataaagctcaaa

SEQ ID NO: 5978028 - DNA, 25 bp, Homo sapien
atcagacgctgattgcagagcttaa

SEQ ID NO: 5978029 - DNA, 25 bp, Homo sapien
tgggagatggccacctttaggttat

SEQ ID NO: 5978030 - DNA, 25 bp, Homo sapien
tataaagctcaaaactagaataaat

SEQ ID NO: 5978031 - DNA, 25 bp, Homo sapien
agtaatacaaatcatgcacataatc

SEQ ID NO: 5978032 - DNA, 25 bp, Homo sapien
ctcaaatagtgtttctagttctgat

SEQ ID NO: 5978033 - DNA, 25 bp, Homo sapien
tttttaaagcttcatgggaaaccca

SEQ ID NO: 5978034 - DNA, 25 bp, Homo sapien
taacatcaaaaacaggcgcagattc

SEQ ID NO: 5978035 - DNA, 25 bp, Homo sapien
ataacgtatccaatgatgctaatgt

SEQ ID NO: 5978036 - DNA, 25 bp, Homo sapien
caaattctgcacaccaatctgcttt

SEQ ID NO: 5978037 - DNA, 25 bp, Homo sapien
agcgaagaagaagggcatattggga

SEQ ID NO: 5978038 - DNA, 25 bp, Homo sapien
ttacctcacttatcaatgctgcttg

SEQ ID NO: 5978039 - DNA, 25 bp, Homo sapien
atcatctactgcgaagatatccaag

SEQ ID NO: 5978040 - DNA, 25 bp, Homo sapien
caaatagtgtttctagttctgatgt

SEQ ID NO: 5978041 - DNA, 25 bp, Homo sapien
ggagtctaaggaaagaagcgattct

SEQ ID NO: 5978042 - DNA, 25 bp, Homo sapien
aagaagaagggcatattgggagatg

SEQ ID NO: 5978043 - DNA, 25 bp, Homo sapien
ttcaacgcagcctctttccccctca

SEQ ID NO: 5978044 - DNA, 25 bp, Homo sapien
atgaattagacgggaaatgtcgagc

SEQ ID NO: 5978045 - DNA, 25 bp, Homo sapien
attagatcgacgatgtcttccccag

SEQ ID NO: 5978046 - DNA, 25 bp, Homo sapien
tctggacgaaaatttgaaaatcacc

SEQ ID NO: 5978047 - DNA, 25 bp, Homo sapien
agtctttttccacatctactgctgg

SEQ ID NO: 5978048 - DNA, 25 bp, Homo sapien
gacgctgattgcagagcttaagggt

SEQ ID NO: 5978049 - DNA, 25 bp, Homo sapien
aaatagtgtccaattgcaataatgg

SEQ ID NO: 5978050 - DNA, 25 bp, Homo sapien
taaggaaagaagcgattctcaccta

SEQ ID NO: 5978051 - DNA, 25 bp, Homo sapien
tagtttgaaaactgatgtaataaag

SEQ ID NO: 5978052 - DNA, 25 bp, Homo sapien
ataagcaacaatatgaattttaagg

SEQ ID NO: 5978053 - DNA, 25 bp, Homo sapien
gttcgagaccaaacttaaagcctaa

SEQ ID NO: 5978054 - DNA, 25 bp, Homo sapien
tattaacgacatgcttgagacgaga

SEQ ID NO: 5978055 - DNA, 25 bp, Homo sapien
ctgctggaagaatgagtccggatac

SEQ ID NO: 5978056 - DNA, 25 bp, Homo sapien
gacaagtctttttccacatctactg

SEQ ID NO: 5978057 - DNA, 25 bp, Homo sapien
cttctattaacgacatgcttgagac

SEQ ID NO: 5978058 - DNA, 25 bp, Homo sapien
atttcataccgtttctacaatcttc

SEQ ID NO: 5978059 - DNA, 25 bp, Homo sapien
gcaaaggacagtaaaacaagaaggg

SEQ ID NO: 5978060 - DNA, 25 bp, Homo sapien
gcaaaaatcggcagttcaattgcgt

SEQ ID NO: 5978061 - DNA, 25 bp, Homo sapien
aattcattacaccatatattaccta

SEQ ID NO: 5978062 - DNA, 25 bp, Homo sapien
atctcaaatagtgtttctagttctg

SEQ ID NO: 5978063 - DNA, 25 bp, Homo sapien
tggtattgcctctaccgccgcaact

SEQ ID NO: 5978064 - DNA, 25 bp, Homo sapien
aattacctcacttatcaatgctgct

SEQ ID NO: 5978065 - DNA, 25 bp, Homo sapien
tgcctctaccgccgcaactctggca

SEQ ID NO: 5978066 - DNA, 25 bp, Homo sapien
aaagagtattcaaattctgcacacc

SEQ ID NO: 5978067 - DNA, 25 bp, Homo sapien
agcgtaacgacccagcccctttatc

SEQ ID NO: 5978068 - DNA, 25 bp, Homo sapien
acgtttgcaaaggacagtaaaacaa

SEQ ID NO: 5978069 - DNA, 25 bp, Homo sapien
ccaaaatcaagtgaaaacctcaaca

SEQ ID NO: 5978070 - DNA, 25 bp, Homo sapien
agatggccacctttaggttatgaag

SEQ ID NO: 5978071 - DNA, 25 bp, Homo sapien
ttatctttccacatggcttctatta

SEQ ID NO: 5978072 - DNA, 25 bp, Homo sapien
cttaagggtgattgtaatatagaat

SEQ ID NO: 5978073 - DNA, 25 bp, Homo sapien
acaccatatattacctaaaaatcaa

SEQ ID NO: 5978074 - DNA, 25 bp, Homo sapien
tgctgcttggaagcttgagcagtac

SEQ ID NO: 5978075 - DNA, 25 bp, Homo sapien
gagttagaacttgttacagatttat

SEQ ID NO: 5978076 - DNA, 25 bp, Homo sapien
gaagaatgagtccggatacgaattc

SEQ ID NO: 5978077 - DNA, 25 bp, Homo sapien
caagtctttttccacatctactgct

SEQ ID NO: 5978078 - DNA, 25 bp, Homo sapien
atatcaatgaattagacgggaaatg

SEQ ID NO: 5978079 - DNA, 25 bp, Homo sapien
atttaggtgatcagttatccactaa

SEQ ID NO: 5978080 - DNA, 25 bp, Homo sapien
tcgagaccaaacttaaagcctaaac

SEQ ID NO: 5978081 - DNA, 25 bp, Homo sapien
acctcaacagcttaaatcaaagcga

SEQ ID NO: 5978082 - DNA, 25 bp, Homo sapien
ctcttgaggaacgtttgcaaaggac

SEQ ID NO: 5978083 - DNA, 25 bp, Homo sapien
tttaaagcttcatgggaaacccagg

SEQ ID NO: 5978084 - DNA, 25 bp, Homo sapien
ctaatgttcctgtttgtaagaactg

SEQ ID NO: 5978085 - DNA, 25 bp, Homo sapien
aataatggacaaacaatggatgcca

SEQ ID NO: 5978086 - DNA, 25 bp, Homo sapien
ccaattgcaataataacgtatccaa

SEQ ID NO: 5978087 - DNA, 25 bp, Homo sapien
ccaaagcaaattcacaatccatctc

SEQ ID NO: 5978088 - DNA, 25 bp, Homo sapien
aaagcctaaactgcccaaacaagat

SEQ ID NO: 5978089 - DNA, 25 bp, Homo sapien
aaaatcacccagctaaagatttagg

SEQ ID NO: 5978090 - DNA, 25 bp, Homo sapien
cctcaattacctcacttatcaatgc

SEQ ID NO: 5978091 - DNA, 25 bp, Homo sapien
aatcgcaagcaggagcgtcaataag

SEQ ID NO: 5978092 - DNA, 25 bp, Homo sapien
cacaatccatctcaaatagtgtttc

SEQ ID NO: 5978093 - DNA, 25 bp, Homo sapien
ataacggaagtgaaatagtgtccaa

SEQ ID NO: 5978094 - DNA, 25 bp, Homo sapien
aatgttcctgtttgtaagaactgtt

SEQ ID NO: 5978095 - DNA, 25 bp, Homo sapien
atggcatcgcaggctacaactcttc

SEQ ID NO: 5978096 - DNA, 25 bp, Homo sapien
tatggagaagagatgagcatggagc

SEQ ID NO: 5978097 - DNA, 25 bp, Homo sapien
gtcgcaaagctaacagagtaacatc

SEQ ID NO: 5978098 - DNA, 25 bp, Homo sapien
aaagatttaggtgatcagttatcca

SEQ ID NO: 5978099 - DNA, 25 bp, Homo sapien
ccaagagaagttacttacgttccca

SEQ ID NO: 5978100 - DNA, 25 bp, Homo sapien
cgtgcgattagcaacgtgaaaaccg

SEQ ID NO: 5978101 - DNA, 25 bp, Homo sapien
gatactgctatataccaagagaagt

SEQ ID NO: 5978102 - DNA, 25 bp, Homo sapien
aatgctgcttggaagcttgagcagt

SEQ ID NO: 5978103 - DNA, 25 bp, Homo sapien
aaataacggaagtgaaatagtgtcc

SEQ ID NO: 5978104 - DNA, 25 bp, Homo sapien
cgctgattgcagagcttaagggtga

SEQ ID NO: 5978105 - DNA, 25 bp, Homo sapien
atggccacctttaggttatgaagca

SEQ ID NO: 5978106 - DNA, 25 bp, Homo sapien
tcacccagctaaagatttaggtgat

SEQ ID NO: 5978107 - DNA, 25 bp, Homo sapien
ccaattagtttgaaaactgatgtaa

SEQ ID NO: 5978108 - DNA, 25 bp, Homo sapien
gcttcatgggaaacccaggccaatt

SEQ ID NO: 5978109 - DNA, 25 bp, Homo sapien
aatcacccagctaaagatttaggtg

SEQ ID NO: 5978110 - DNA, 25 bp, Homo sapien
aacaatatgaattttaaggcgaatg

SEQ ID NO: 5978111 - DNA, 25 bp, Homo sapien
gatgtttctggacgaaaatttgaaa

SEQ ID NO: 5978112 - DNA, 25 bp, Homo sapien
gccgcaactctggcacccacttctt

SEQ ID NO: 5978113 - DNA, 25 bp, Homo sapien
gcacaccaatctgcttttatcaaag

SEQ ID NO: 5978114 - DNA, 25 bp, Homo sapien
acttgttacagatttatataggaga

SEQ ID NO: 5978115 - DNA, 25 bp, Homo sapien
tccaattgcaataatggtattgcct

SEQ ID NO: 5978116 - DNA, 25 bp, Homo sapien
ctgattgcagagcttaagggtgatt

SEQ ID NO: 5978117 - DNA, 25 bp, Homo sapien
gtttgcaaaggacagtaaaacaaga

SEQ ID NO: 5978118 - DNA, 25 bp, Homo sapien
tcaaagcgaagaagaagggcatatt

SEQ ID NO: 5978119 - DNA, 25 bp, Homo sapien
cctctaccgccgcaactctggcacc

SEQ ID NO: 5978120 - DNA, 25 bp, Homo sapien
aatcttctaaagctccctgtatatc

SEQ ID NO: 5978121 - DNA, 25 bp, Homo sapien
aatcaaagcgaagaagaagggcata

SEQ ID NO: 5978122 - DNA, 25 bp, Homo sapien
tcaagtgaaaacctcaacagcttaa

SEQ ID NO: 5978123 - DNA, 25 bp, Homo sapien
ctgcttttatcaaagaacggtcgca

SEQ ID NO: 5978124 - DNA, 25 bp, Homo sapien
tttgaaccaaaatcaagtgaaaacc

SEQ ID NO: 5978125 - DNA, 25 bp, Homo sapien
agacatatcaatgaattagacggga

SEQ ID NO: 5978126 - DNA, 25 bp, Homo sapien
atcaaaaacaggcgcagattctcct

SEQ ID NO: 5978127 - DNA, 25 bp, Homo sapien
aagtctcgaaataggaaaagtaata

SEQ ID NO: 5978128 - DNA, 25 bp, Homo sapien
ccaaacaagatactgctatatacca

SEQ ID NO: 5978129 - DNA, 25 bp, Homo sapien
caactcttcgaggctataacattag

SEQ ID NO: 5978130 - DNA, 25 bp, Homo sapien
ggacaactttcggaatcagacgctg

SEQ ID NO: 5978131 - DNA, 25 bp, Homo sapien
gactgactctaatccatccgaggta

SEQ ID NO: 5978132 - DNA, 25 bp, Homo sapien
tacttcaatatcaaataacggaagt

SEQ ID NO: 5978133 - DNA, 25 bp, Homo sapien
atccatctcaaatagtgtttctagt

SEQ ID NO: 5978134 - DNA, 25 bp, Homo sapien
ctctacaacaccattatggagaaga

SEQ ID NO: 5978135 - DNA, 25 bp, Homo sapien
gctaagcgtaacgacccagcccctt

SEQ ID NO: 5978136 - DNA, 25 bp, Homo sapien
tgatgtaataaagtctcgaaatagg

SEQ ID NO: 5978137 - DNA, 25 bp, Homo sapien
gttacagatttatataggagacata

SEQ ID NO: 5978138 - DNA, 25 bp, Homo sapien
taagaataatggacaaacaatggat

SEQ ID NO: 5978139 - DNA, 25 bp, Homo sapien
tcacctatcagcaacaaaattagag

SEQ ID NO: 5978140 - DNA, 25 bp, Homo sapien
attgcgtgaatcgcaagcaggagcg

SEQ ID NO: 5978141 - DNA, 25 bp, Homo sapien
gcagagcttaagggtgattgtaata

SEQ ID NO: 5978142 - DNA, 25 bp, Homo sapien
ataatgtatttgaaccaaaatcaag

SEQ ID NO: 5978143 - DNA, 25 bp, Homo sapien
ggagacatatcaatgaattagacgg

SEQ ID NO: 5978144 - DNA, 25 bp, Homo sapien
tacgaattcattacaccatatatta

SEQ ID NO: 5978145 - DNA, 25 bp, Homo sapien
aattgcaataataacgtatccaatg

SEQ ID NO: 5978146 - DNA, 25 bp, Homo sapien
caatatgaattttaaggcgaatgac

SEQ ID NO: 5978147 - DNA, 25 bp, Homo sapien
aggcgaatgacaagtctttttccac

SEQ ID NO: 5978148 - DNA, 25 bp, Homo sapien
tatcaatgctgcttggaagcttgag

SEQ ID NO: 5978149 - DNA, 25 bp, Homo sapien
tttttccacatctactgctggaaga

SEQ ID NO: 5978150 - DNA, 25 bp, Homo sapien
tcaatgcttcacattcagtaacatc

SEQ ID NO: 5978151 - DNA, 25 bp, Homo sapien
caataagcaacaatatgaattttaa

SEQ ID NO: 5978152 - DNA, 25 bp, Homo sapien
tgccgagcaaaaatcggcagttcaa

SEQ ID NO: 5978153 - DNA, 25 bp, Homo sapien
ctgcccaaacaagatactgctatat

SEQ ID NO: 5978154 - DNA, 25 bp, Homo sapien
acggagtctaaggaaagaagcgatt

SEQ ID NO: 5978155 - DNA, 25 bp, Homo sapien
tattcaaattctgcacaccaatctg

SEQ ID NO: 5978156 - DNA, 25 bp, Homo sapien
ttaacgacatgcttgagacgagaga

SEQ ID NO: 5978157 - DNA, 25 bp, Homo sapien
tacttacgttcccaagttatacgga

SEQ ID NO: 5978158 - DNA, 25 bp, Homo sapien
gaacgtttgcaaaggacagtaaaac

SEQ ID NO: 5978159 - DNA, 25 bp, Homo sapien
taccgccgcaactctggcacccact

SEQ ID NO: 5978160 - DNA, 25 bp, Homo sapien
acctctacaacaccattatggagaa

SEQ ID NO: 5978161 - DNA, 25 bp, Homo sapien
cacttatcaatgctgcttggaagct

SEQ ID NO: 5978162 - DNA, 25 bp, Homo sapien
gcagtatctgccgagcaaaaatcgg

SEQ ID NO: 5978163 - DNA, 25 bp, Homo sapien
caatgatgctaatgttcctgtttgt

SEQ ID NO: 5978164 - DNA, 25 bp, Homo sapien
aagaacggtcgcaattcaacgcagc

SEQ ID NO: 5978165 - DNA, 25 bp, Homo sapien
cgacaccgcctcatttcataccgtt

SEQ ID NO: 5978166 - DNA, 25 bp, Homo sapien
gcgtgtggtctctttttaaagcttc

SEQ ID NO: 5978167 - DNA, 25 bp, Homo sapien
ggcatcgcaggctacaactcttcga

SEQ ID NO: 5978168 - DNA, 25 bp, Homo sapien
agctatgctttgtaatgcgtgtggt

SEQ ID NO: 5978169 - DNA, 25 bp, Homo sapien
taaagcttcatgggaaacccaggcc

SEQ ID NO: 5978170 - DNA, 25 bp, Homo sapien
atccactaaattgcacaaagaagaa

SEQ ID NO: 5978171 - DNA, 25 bp, Homo sapien
catctactgcgaagatatccaagaa

SEQ ID NO: 5978172 - DNA, 25 bp, Homo sapien
cgttaaagagtattcaaattctgca

SEQ ID NO: 5978173 - DNA, 25 bp, Homo sapien
tcaaataacggaagtgaaatagtgt

SEQ ID NO: 5978174 - DNA, 25 bp, Homo sapien
ttaaagagtattcaaattctgcaca

SEQ ID NO: 5978175 - DNA, 25 bp, Homo sapien
ctgatgtttctggacgaaaatttga

SEQ ID NO: 5978176 - DNA, 25 bp, Homo sapien
caactctggcacccacttcttcacg

SEQ ID NO: 5978177 - DNA, 25 bp, Homo sapien
cagattctcctcaattacctcactt

SEQ ID NO: 5978178 - DNA, 25 bp, Homo sapien
cccaggccaattagtttgaaaactg

SEQ ID NO: 5978179 - DNA, 25 bp, Homo sapien
cggatacgaattcattacaccatat

SEQ ID NO: 5978180 - DNA, 25 bp, Homo sapien
gctggaagaatgagtccggatacga

SEQ ID NO: 5978181 - DNA, 25 bp, Homo sapien
aatatagaatcaagcggtcgcaaag

SEQ ID NO: 5978182 - DNA, 25 bp, Homo sapien
aagaagcgattctcacctatcagca

SEQ ID NO: 5978183 - DNA, 25 bp, Homo sapien
atattgggagatggccacctttagg

SEQ ID NO: 5978184 - DNA, 25 bp, Homo sapien
cctcatttcataccgtttctacaat

SEQ ID NO: 5978185 - DNA, 25 bp, Homo sapien
tcacattcagtaacatcaaaaacag

SEQ ID NO: 5978186 - DNA, 25 bp, Homo sapien
acatcaaaaacaggcgcagattctc

SEQ ID NO: 5978187 - DNA, 25 bp, Homo sapien
atcatgcacataatctggacaactt

SEQ ID NO: 5978188 - DNA, 25 bp, Homo sapien
tggagaagagatgagcatggagcta

SEQ ID NO: 5978189 - DNA, 25 bp, Homo sapien
tgcgattagcaacgtgaaaaccgag

SEQ ID NO: 5978190 - DNA, 25 bp, Homo sapien
gagacgagagatcgtgcgattagca

SEQ ID NO: 5978191 - DNA, 25 bp, Homo sapien
cttttaatgggaacatcatctactg

SEQ ID NO: 5978192 - DNA, 25 bp, Homo sapien
tgggaaacccaggccaattagtttg

SEQ ID NO: 5978193 - DNA, 25 bp, Homo sapien
gtgatcagttatccactaaattgca

SEQ ID NO: 5978194 - DNA, 25 bp, Homo sapien
gaaagaagcgattctcacctatcag

SEQ ID NO: 5978195 - DNA, 25 bp, Homo sapien
taggagacatatcaatgaattagac

SEQ ID NO: 5978196 - DNA, 25 bp, Homo sapien
acagcttaaatcaaagcgaagaaga

SEQ ID NO: 5978197 - DNA, 25 bp, Homo sapien
tattacctaaaaatcaagttaagaa

SEQ ID NO: 5978198 - DNA, 25 bp, Homo sapien
gctataacattagaaaacgagataa

SEQ ID NO: 5978199 - DNA, 25 bp, Homo sapien
gacgatgtcttccccagatataata

SEQ ID NO: 5978200 - DNA, 25 bp, Homo sapien
tggcacccacttcttcacggacgac

SEQ ID NO: 5978201 - DNA, 25 bp, Homo sapien
tgaatcgcaagcaggagcgtcaata

SEQ ID NO: 5978202 - DNA, 25 bp, Homo sapien
gtcgagctcttgaggaacgtttgca

SEQ ID NO: 5978203 - DNA, 25 bp, Homo sapien
ttatccactaaattgcacaaagaag

SEQ ID NO: 5978204 - DNA, 25 bp, Homo sapien
aagggcatattgggagatggccacc

SEQ ID NO: 5978205 - DNA, 25 bp, Homo sapien
aatcaagttaagaataatggacaaa

SEQ ID NO: 5978206 - DNA, 25 bp, Homo sapien
agtccggatacgaattcattacacc

SEQ ID NO: 5978207 - DNA, 25 bp, Homo sapien
ttctagttctgatgtttctggacga

SEQ ID NO: 5978208 - DNA, 25 bp, Homo sapien
taataacgtatccaatgatgctaat

SEQ ID NO: 5978209 - DNA, 25 bp, Homo sapien
cgacatgcttgagacgagagatcgt

SEQ ID NO: 5978210 - DNA, 25 bp, Homo sapien
aggtgatcagttatccactaaattg

SEQ ID NO: 5978211 - DNA, 25 bp, Homo sapien
aagatactgctatataccaagagaa

SEQ ID NO: 5978212 - DNA, 25 bp, Homo sapien
aaaaatcggcagttcaattgcgtga

SEQ ID NO: 5978213 - DNA, 25 bp, Homo sapien
ttctgcacaccaatctgcttttatc

SEQ ID NO: 5978214 - DNA, 25 bp, Homo sapien
tctgccgagcaaaaatcggcagttc

SEQ ID NO: 5978215 - DNA, 25 bp, Homo sapien
ctcacttatcaatgctgcttggaag

SEQ ID NO: 5978216 - DNA, 25 bp, Homo sapien
atcaatgaattagacgggaaatgtc

SEQ ID NO: 5978217 - DNA, 25 bp, Homo sapien
gatgctaatgttcctgtttgtaaga

SEQ ID NO: 5978218 - DNA, 25 bp, Homo sapien
aaactgatgtaataaagtctcgaaa

SEQ ID NO: 5978219 - DNA, 25 bp, Homo sapien
cttcacattcagtaacatcaaaaac

SEQ ID NO: 5978220 - DNA, 25 bp, Homo sapien
ctgtttgtaagaactgtttaacctc

SEQ ID NO: 5978221 - DNA, 25 bp, Homo sapien
tgcttcacattcagtaacatcaaaa

SEQ ID NO: 5978222 - DNA, 25 bp, Homo sapien
tatcaaataacggaagtgaaatagt

SEQ ID NO: 5978223 - DNA, 25 bp, Homo sapien
ttcaaattctgcacaccaatctgct

SEQ ID NO: 5978224 - DNA, 25 bp, Homo sapien
cttcaatatcaaataacggaagtga

SEQ ID NO: 5978225 - DNA, 25 bp, Homo sapien
atgagcatggagctatgctttgtaa

SEQ ID NO: 5978226 - DNA, 25 bp, Homo sapien
accatatattacctaaaaatcaagt

SEQ ID NO: 5978227 - DNA, 25 bp, Homo sapien
catcgcaggctacaactcttcgagg

SEQ ID NO: 5978228 - DNA, 25 bp, Homo sapien
tgtatttgaaccaaaatcaagtgaa

SEQ ID NO: 5978229 - DNA, 25 bp, Homo sapien
gagaccaaacttaaagcctaaactg

SEQ ID NO: 5978230 - DNA, 25 bp, Homo sapien
aataataacgtatccaatgatgcta

SEQ ID NO: 5978231 - DNA, 25 bp, Homo sapien
agagatgagcatggagctatgcttt

SEQ ID NO: 5978232 - DNA, 25 bp, Homo sapien
tgtttctggacgaaaatttgaaaat

SEQ ID NO: 5978233 - DNA, 25 bp, Homo sapien
tctttttccacatctactgctggaa

SEQ ID NO: 5978234 - DNA, 25 bp, Homo sapien
gcttttatcaaagaacggtcgcaat

SEQ ID NO: 5978235 - DNA, 25 bp, Homo sapien
gctaacagagtaacatctgaagata

SEQ ID NO: 5978236 - DNA, 25 bp, Homo sapien
cggcagttcaattgcgtgaatcgca

SEQ ID NO: 5978237 - DNA, 25 bp, Homo sapien
atgacaagtctttttccacatctac

SEQ ID NO: 5978238 - DNA, 25 bp, Homo sapien
acaccaatctgcttttatcaaagaa

SEQ ID NO: 5978239 - DNA, 25 bp, Homo sapien
acaatggatgccaattgcaataata

SEQ ID NO: 5978240 - DNA, 25 bp, Homo sapien
ttaggtgatcagttatccactaaat

SEQ ID NO: 5978241 - DNA, 25 bp, Homo sapien
gcaacaaaattagaggtactgatgt

SEQ ID NO: 5978242 - DNA, 25 bp, Homo sapien
aacggaagtgaaatagtgtccaatt

SEQ ID NO: 5978243 - DNA, 25 bp, Homo sapien
cgtatccaatgatgctaatgttcct

SEQ ID NO: 5978244 - DNA, 25 bp, Homo sapien
tactgctggaagaatgagtccggat

SEQ ID NO: 5978245 - DNA, 25 bp, Homo sapien
aggagcgtcaataagcaacaatatg

SEQ ID NO: 5978246 - DNA, 25 bp, Homo sapien
taccgtttctacaatcttctaaagc

SEQ ID NO: 5978247 - DNA, 25 bp, Homo sapien
atgcgtgtggtctctttttaaagct

SEQ ID NO: 5978248 - DNA, 25 bp, Homo sapien
aatcaaattagatcgacgatgtctt

SEQ ID NO: 5978249 - DNA, 25 bp, Homo sapien
gaagaagggcatattgggagatggc

SEQ ID NO: 5978250 - DNA, 25 bp, Homo sapien
gacgagagatcgtgcgattagcaac

SEQ ID NO: 5978251 - DNA, 25 bp, Homo sapien
gagaagagatgagcatggagctatg

SEQ ID NO: 5978252 - DNA, 25 bp, Homo sapien
gcagcctctttccccctcaatgctt

SEQ ID NO: 5978253 - DNA, 25 bp, Homo sapien
ccctgtatatccaaagcaaattcac

SEQ ID NO: 5978254 - DNA, 25 bp, Homo sapien
cgattagcaacgtgaaaaccgagac

SEQ ID NO: 5978255 - DNA, 25 bp, Homo sapien
gtttgtaagaactgtttaacctcta

SEQ ID NO: 5978256 - DNA, 25 bp, Homo sapien
tccaatgatgctaatgttcctgttt

SEQ ID NO: 5978257 - DNA, 25 bp, Homo sapien
caaagaacggtcgcaattcaacgca

SEQ ID NO: 5978258 - DNA, 25 bp, Homo sapien
cccctcaatgcttcacattcagtaa

SEQ ID NO: 5978259 - DNA, 25 bp, Homo sapien
ctgcttggaagcttgagcagtactt

SEQ ID NO: 5978260 - DNA, 25 bp, Homo sapien
tggaagaatgagtccggatacgaat

SEQ ID NO: 5978261 - DNA, 25 bp, Homo sapien
caattgcgtgaatcgcaagcaggag

SEQ ID NO: 5978262 - DNA, 25 bp, Homo sapien
gcttgagcagtacttcaatatcaaa

SEQ ID NO: 5978263 - DNA, 25 bp, Homo sapien
cgagctcttgaggaacgtttgcaaa

SEQ ID NO: 5978264 - DNA, 25 bp, Homo sapien
tcaagttaagaataatggacaaaca

SEQ ID NO: 5978265 - DNA, 25 bp, Homo sapien
acttaaagcctaaactgcccaaaca

SEQ ID NO: 5978266 - DNA, 25 bp, Homo sapien
gcaacttttaatgggaacatcatct

SEQ ID NO: 5978267 - DNA, 25 bp, Homo sapien
aagaactgtttaacctctacaacac

SEQ ID NO: 5978268 - DNA, 25 bp, Homo sapien
caatctgcttttatcaaagaacggt

SEQ ID NO: 5978269 - DNA, 25 bp, Homo sapien
atctgctaagcgtaacgacccagcc

SEQ ID NO: 5978270 - DNA, 25 bp, Homo sapien
ttagaaaacgagataatgtatttga

SEQ ID NO: 5978271 - DNA, 25 bp, Homo sapien
cgggaaatgtcgagctcttgaggaa

SEQ ID NO: 5978272 - DNA, 25 bp, Homo sapien
cgagagatcgtgcgattagcaacgt

SEQ ID NO: 5978273 - DNA, 25 bp, Homo sapien
tgctaatgttcctgtttgtaagaac

SEQ ID NO: 5978274 - DNA, 25 bp, Homo sapien
cgattctcacctatcagcaacaaaa

SEQ ID NO: 5978275 - DNA, 25 bp, Homo sapien
agtaacatcaaaaacaggcgcagat

SEQ ID NO: 5978276 - DNA, 25 bp, Homo sapien
tagaacttgttacagatttatatag

SEQ ID NO: 5978277 - DNA, 25 bp, Homo sapien
cttgaggaacgtttgcaaaggacag

SEQ ID NO: 5978278 - DNA, 25 bp, Homo sapien
acatatcaatgaattagacgggaaa

SEQ ID NO: 5978279 - DNA, 25 bp, Homo sapien
atgctttgtaatgcgtgtggtctct

SEQ ID NO: 5978280 - DNA, 25 bp, Homo sapien
tcgcaagcaggagcgtcaataagca

SEQ ID NO: 5978281 - DNA, 25 bp, Homo sapien
aatgagtccggatacgaattcatta

SEQ ID NO: 5978282 - DNA, 25 bp, Homo sapien
tcgcaggctacaactcttcgaggct

SEQ ID NO: 5978283 - DNA, 25 bp, Homo sapien
gaaaactgatgtaataaagtctcga

SEQ ID NO: 5978284 - DNA, 25 bp, Homo sapien
gacgttaaagagtattcaaattctg

SEQ ID NO: 5978285 - DNA, 25 bp, Homo sapien
tatattacctaaaaatcaagttaag

SEQ ID NO: 5978286 - DNA, 25 bp, Homo sapien
gacgacaccgcctcatttcataccg

SEQ ID NO: 5978287 - DNA, 25 bp, Homo sapien
agtgtccaattgcaataatggtatt

SEQ ID NO: 5978288 - DNA, 25 bp, Homo sapien
aaatcggcagttcaattgcgtgaat

SEQ ID NO: 5978289 - DNA, 25 bp, Homo sapien
attgcctctaccgccgcaactctgg

SEQ ID NO: 5978290 - DNA, 25 bp, Homo sapien
tagacgggaaatgtcgagctcttga

SEQ ID NO: 5978291 - DNA, 25 bp, Homo sapien
gtaccgaatcaaattagatcgacga

SEQ ID NO: 5978292 - DNA, 25 bp, Homo sapien
cattacaccatatattacctaaaaa

SEQ ID NO: 5978293 - DNA, 25 bp, Homo sapien
gaacggtcgcaattcaacgcagcct

SEQ ID NO: 5978294 - DNA, 25 bp, Homo sapien
tgaaaaccgagacgacaccgcctca

SEQ ID NO: 5978295 - DNA, 25 bp, Homo sapien
ctaatccatccgaggtaccgaatca

SEQ ID NO: 5978296 - DNA, 25 bp, Homo sapien
gagattgttcgagaccaaacttaaa

SEQ ID NO: 5978297 - DNA, 25 bp, Homo sapien
tataccaagagaagttacttacgtt

SEQ ID NO: 5978298 - DNA, 25 bp, Homo sapien
aatggatgccaattgcaataataac

SEQ ID NO: 5978299 - DNA, 25 bp, Homo sapien
cataatctggacaactttcggaatc

SEQ ID NO: 5978300 - DNA, 25 bp, Homo sapien
tatacggacgttaaagagtattcaa

SEQ ID NO: 5978301 - DNA, 25 bp, Homo sapien
tctactgcgaagatatccaagaagc

SEQ ID NO: 5978302 - DNA, 25 bp, Homo sapien
gaagagatgagcatggagctatgct

SEQ ID NO: 5978303 - DNA, 25 bp, Homo sapien
aaatgagttagaacttgttacagat

SEQ ID NO: 5978304 - DNA, 25 bp, Homo sapien
tggacgaaaatttgaaaatcaccca

SEQ ID NO: 5978305 - DNA, 25 bp, Homo sapien
agtattcaaattctgcacaccaatc

SEQ ID NO: 5978306 - DNA, 25 bp, Homo sapien
gaaaacctcaacagcttaaatcaaa

SEQ ID NO: 5978307 - DNA, 25 bp, Homo sapien
gcaattcaacgcagcctctttcccc

SEQ ID NO: 5978308 - DNA, 25 bp, Homo sapien
gattgttcgagaccaaacttaaagc

SEQ ID NO: 5978309 - DNA, 25 bp, Homo sapien
ggccaattagtttgaaaactgatgt

SEQ ID NO: 5978310 - DNA, 25 bp, Homo sapien
aagctaacagagtaacatctgaaga

SEQ ID NO: 5978311 - DNA, 25 bp, Homo sapien
tgcgtgaatcgcaagcaggagcgtc

SEQ ID NO: 5978312 - DNA, 25 bp, Homo sapien
ggcttctattaacgacatgcttgag

SEQ ID NO: 5978313 - DNA, 25 bp, Homo sapien
ttgagacgagagatcgtgcgattag

SEQ ID NO: 5978314 - DNA, 25 bp, Homo sapien
cgaggctataacattagaaaacgag

SEQ ID NO: 5978315 - DNA, 25 bp, Homo sapien
actgatgtaataaagtctcgaaata

SEQ ID NO: 5978316 - DNA, 25 bp, Homo sapien
aatcaagtgaaaacctcaacagctt

SEQ ID NO: 5978317 - DNA, 25 bp, Homo sapien
acctatcagcaacaaaattagaggt

SEQ ID NO: 5978318 - DNA, 25 bp, Homo sapien
acaaatcatgcacataatctggaca

SEQ ID NO: 5978319 - DNA, 25 bp, Homo sapien
cgtgaaaaccgagacgacaccgcct

SEQ ID NO: 5978320 - DNA, 25 bp, Homo sapien
tgtttaacctctacaacaccattat

SEQ ID NO: 5978321 - DNA, 25 bp, Homo sapien
attgcaataatggtattgcctctac

SEQ ID NO: 5978322 - DNA, 25 bp, Homo sapien
gcaataataacgtatccaatgatgc

SEQ ID NO: 5978323 - DNA, 25 bp, Homo sapien
gtcttccccagatataatatctgct

SEQ ID NO: 5978324 - DNA, 25 bp, Homo sapien
tacggacgttaaagagtattcaaat

SEQ ID NO: 5978325 - DNA, 25 bp, Homo sapien
acaacaccattatggagaagagatg

SEQ ID NO: 5978326 - DNA, 25 bp, Homo sapien
gtaatatagaatcaagcggtcgcaa

SEQ ID NO: 5978327 - DNA, 25 bp, Homo sapien
gcaacgtgaaaaccgagacgacacc

SEQ ID NO: 5978328 - DNA, 25 bp, Homo sapien
tctaaggaaagaagcgattctcacc

SEQ ID NO: 5978329 - DNA, 25 bp, Homo sapien
ttgagcagtacttcaatatcaaata

SEQ ID NO: 5978330 - DNA, 25 bp, Homo sapien
tactgctatataccaagagaagtta

SEQ ID NO: 5978331 - DNA, 25 bp, Homo sapien
tatttgaaccaaaatcaagtgaaaa

SEQ ID NO: 5978332 - DNA, 25 bp, Homo sapien
cttcacggacgactgactctaatcc

SEQ ID NO: 5978333 - DNA, 25 bp, Homo sapien
aagcaacaatatgaattttaaggcg

SEQ ID NO: 5978334 - DNA, 25 bp, Homo sapien
tttccccctcaatgcttcacattca

SEQ ID NO: 5978335 - DNA, 25 bp, Homo sapien
cagatataatatctgctaagcgtaa

SEQ ID NO: 5978336 - DNA, 25 bp, Homo sapien
gcaggctacaactcttcgaggctat

SEQ ID NO: 5978337 - DNA, 25 bp, Homo sapien
gcatggagctatgctttgtaatgcg

SEQ ID NO: 5978338 - DNA, 25 bp, Homo sapien
ctctaatccatccgaggtaccgaat

SEQ ID NO: 5978339 - DNA, 25 bp, Homo sapien
gaagtgaaatagtgtccaattgcaa

SEQ ID NO: 5978340 - DNA, 25 bp, Homo sapien
atcagcaacaaaattagaggtactg

SEQ ID NO: 5978341 - DNA, 25 bp, Homo sapien
gtggtctctttttaaagcttcatgg

SEQ ID NO: 5978342 - DNA, 25 bp, Homo sapien
ctgctaagcgtaacgacccagcccc

SEQ ID NO: 5978343 - DNA, 25 bp, Homo sapien
cataccgtttctacaatcttctaaa

SEQ ID NO: 5978344 - DNA, 25 bp, Homo sapien
ccgtttctacaatcttctaaagctc

SEQ ID NO: 5978345 - DNA, 25 bp, Homo sapien
acgacccagcccctttatctttcca

SEQ ID NO: 5978346 - DNA, 25 bp, Homo sapien
taacctctacaacaccattatggag

SEQ ID NO: 5978347 - DNA, 25 bp, Homo sapien
catgggaaacccaggccaattagtt

SEQ ID NO: 5978348 - DNA, 25 bp, Homo sapien
acccagctaaagatttaggtgatca

SEQ ID NO: 5978349 - DNA, 25 bp, Homo sapien
tataggagacatatcaatgaattag

SEQ ID NO: 5978350 - DNA, 25 bp, Homo sapien
gaatcagacgctgattgcagagctt

SEQ ID NO: 5978351 - DNA, 25 bp, Homo sapien
attataaagctcaaaactagaataa

SEQ ID NO: 5978352 - DNA, 25 bp, Homo sapien
ctcctcaattacctcacttatcaat

SEQ ID NO: 5978353 - DNA, 25 bp, Homo sapien
cagcaacaaaattagaggtactgat

SEQ ID NO: 5978354 - DNA, 25 bp, Homo sapien
gagcgtcaataagcaacaatatgaa

SEQ ID NO: 5978355 - DNA, 25 bp, Homo sapien
gggtgattgtaatatagaatcaagc

SEQ ID NO: 5978356 - DNA, 25 bp, Homo sapien
aatgtatttgaaccaaaatcaagtg

SEQ ID NO: 5978357 - DNA, 25 bp, Homo sapien
aaattagatcgacgatgtcttcccc

SEQ ID NO: 5978358 - DNA, 25 bp, Homo sapien
tatccaatgatgctaatgttcctgt

SEQ ID NO: 5978359 - DNA, 25 bp, Homo sapien
aacgtatccaatgatgctaatgttc

SEQ ID NO: 5978360 - DNA, 25 bp, Homo sapien
agaataatggacaaacaatggatgc

SEQ ID NO: 5978361 - DNA, 25 bp, Homo sapien
gattgcagagcttaagggtgattgt

SEQ ID NO: 5978362 - DNA, 25 bp, Homo sapien
gctttgtaatgcgtgtggtctcttt

SEQ ID NO: 5978363 - DNA, 25 bp, Homo sapien
agttcaattgcgtgaatcgcaagca

SEQ ID NO: 5978364 - DNA, 25 bp, Homo sapien
atggacaaacaatggatgccaattg

SEQ ID NO: 5978365 - DNA, 25 bp, Homo sapien
gaacatcatctactgcgaagatatc

SEQ ID NO: 5978366 - DNA, 25 bp, Homo sapien
ttacctaaaaatcaagttaagaata

SEQ ID NO: 5978367 - DNA, 25 bp, Homo sapien
tcgggagattgttcgagaccaaact

SEQ ID NO: 5978368 - DNA, 25 bp, Homo sapien
aattctgcacaccaatctgctttta

SEQ ID NO: 5978369 - DNA, 25 bp, Homo sapien
tcttcgaggctataacattagaaaa

SEQ ID NO: 5978370 - DNA, 25 bp, Homo sapien
gggaacatcatctactgcgaagata

SEQ ID NO: 5978371 - DNA, 25 bp, Homo sapien
agagcttaagggtgattgtaatata

SEQ ID NO: 5978372 - DNA, 25 bp, Homo sapien
gttaagaataatggacaaacaatgg

SEQ ID NO: 5978373 - DNA, 25 bp, Homo sapien
gtgtggtctctttttaaagcttcat

SEQ ID NO: 5978374 - DNA, 25 bp, Homo sapien
tagatcgacgatgtcttccccagat

SEQ ID NO: 5978375 - DNA, 25 bp, Homo sapien
accaatctgcttttatcaaagaacg

SEQ ID NO: 5978376 - DNA, 25 bp, Homo sapien
tttgaaaatcacccagctaaagatt

SEQ ID NO: 5978377 - DNA, 25 bp, Homo sapien
cttccccagatataatatctgctaa

SEQ ID NO: 5978378 - DNA, 25 bp, Homo sapien
gttatacggacgttaaagagtattc

SEQ ID NO: 5978379 - DNA, 25 bp, Homo sapien
aagcagtatctgccgagcaaaaatc

SEQ ID NO: 5978380 - DNA, 25 bp, Homo sapien
aacgagataatgtatttgaaccaaa

SEQ ID NO: 5978381 - DNA, 25 bp, Homo sapien
tacagatttatataggagacatatc

SEQ ID NO: 5978382 - DNA, 25 bp, Homo sapien
taaggcgaatgacaagtctttttcc

SEQ ID NO: 5978383 - DNA, 25 bp, Homo sapien
ctggacaactttcggaatcagacgc

SEQ ID NO: 5978384 - DNA, 25 bp, Homo sapien
gagcaaaaatcggcagttcaattgc

SEQ ID NO: 5978385 - DNA, 25 bp, Homo sapien
gcatattgggagatggccaccttta

SEQ ID NO: 5978386 - DNA, 25 bp, Homo sapien
ataaagtctcgaaataggaaaagta

SEQ ID NO: 5978387 - DNA, 25 bp, Homo sapien
gtctcgaaataggaaaagtaataca

SEQ ID NO: 5978388 - DNA, 25 bp, Homo sapien
tcaatatcaaataacggaagtgaaa

SEQ ID NO: 5978389 - DNA, 25 bp, Homo sapien
tccacatctactgctggaagaatga

SEQ ID NO: 5978390 - DNA, 25 bp, Homo sapien
tcttctaaagctccctgtatatcca

SEQ ID NO: 5978391 - DNA, 25 bp, Homo sapien
ctaaagctccctgtatatccaaagc

SEQ ID NO: 5978392 - DNA, 25 bp, Homo sapien
aaaacaggcgcagattctcctcaat

SEQ ID NO: 5978393 - DNA, 25 bp, Homo sapien
aatccatccgaggtaccgaatcaaa

SEQ ID NO: 5978394 - DNA, 25 bp, Homo sapien
ctatcagcaacaaaattagaggtac

SEQ ID NO: 5978395 - DNA, 25 bp, Homo sapien
tccgaggtaccgaatcaaattagat

SEQ ID NO: 5978396 - DNA, 25 bp, Homo sapien
ccaaacttaaagcctaaactgccca

SEQ ID NO: 5978397 - DNA, 25 bp, Homo sapien
tgcacataatctggacaactttcgg

SEQ ID NO: 5978398 - DNA, 25 bp, Homo sapien
atatccaagaagccaaaaacggagt

SEQ ID NO: 5978399 - DNA, 25 bp, Homo sapien
aaaatcaagttaagaataatggaca

SEQ ID NO: 5978400 - DNA, 25 bp, Homo sapien
tgaagcagtatctgccgagcaaaaa

SEQ ID NO: 5978401 - DNA, 25 bp, Homo sapien
cgaagaagaagggcatattgggaga

SEQ ID NO: 5978402 - DNA, 25 bp, Homo sapien
caataatggtattgcctctaccgcc

SEQ ID NO: 5978403 - DNA, 25 bp, Homo sapien
gtttctagttctgatgtttctggac

SEQ ID NO: 5978404 - DNA, 25 bp, Homo sapien
caaattcacaatccatctcaaatag

SEQ ID NO: 5978405 - DNA, 25 bp, Homo sapien
caaagctaacagagtaacatctgaa

SEQ ID NO: 5978406 - DNA, 25 bp, Homo sapien
agcaaattcacaatccatctcaaat

SEQ ID NO: 5978407 - DNA, 25 bp, Homo sapien
tctaccgccgcaactctggcaccca

SEQ ID NO: 5978408 - DNA, 25 bp, Homo sapien
gaatcaagcggtcgcaaagctaaca

SEQ ID NO: 5978409 - DNA, 25 bp, Homo sapien
taacagagtaacatctgaagataaa

SEQ ID NO: 5978410 - DNA, 25 bp, Homo sapien
acaccgcctcatttcataccgtttc

SEQ ID NO: 5978411 - DNA, 25 bp, Homo sapien
agtctaaggaaagaagcgattctca

SEQ ID NO: 5978412 - DNA, 25 bp, Homo sapien
accgcctcatttcataccgtttcta

SEQ ID NO: 5978413 - DNA, 25 bp, Homo sapien
gaggtactgatgtcgggagattgtt

SEQ ID NO: 5978414 - DNA, 25 bp, Homo sapien
tcagtaacatcaaaaacaggcgcag

SEQ ID NO: 5978415 - DNA, 25 bp, Homo sapien
gctatataccaagagaagttactta

SEQ ID NO: 5978416 - DNA, 25 bp, Homo sapien
ttggaagcttgagcagtacttcaat

SEQ ID NO: 5978417 - DNA, 25 bp, Homo sapien
gaagaaattataaagctcaaaacta

SEQ ID NO: 5978418 - DNA, 25 bp, Homo sapien
aaacctcaacagcttaaatcaaagc

SEQ ID NO: 5978419 - DNA, 25 bp, Homo sapien
cgtgaatcgcaagcaggagcgtcaa

SEQ ID NO: 5978420 - DNA, 25 bp, Homo sapien
tccccagatataatatctgctaagc

SEQ ID NO: 5978421 - DNA, 25 bp, Homo sapien
taccaagagaagttacttacgttcc

SEQ ID NO: 5978422 - DNA, 25 bp, Homo sapien
caccattatggagaagagatgagca

SEQ ID NO: 5978423 - DNA, 25 bp, Homo sapien
gatcgacgatgtcttccccagatat

SEQ ID NO: 5978424 - DNA, 25 bp, Homo sapien
gtattgcctctaccgccgcaactct

SEQ ID NO: 5978425 - DNA, 25 bp, Homo sapien
ctacaacaccattatggagaagaga

SEQ ID NO: 5978426 - DNA, 25 bp, Homo sapien
agataatgtatttgaaccaaaatca

SEQ ID NO: 5978427 - DNA, 25 bp, Homo sapien
tagcaacgtgaaaaccgagacgaca

SEQ ID NO: 5978428 - DNA, 25 bp, Homo sapien
cccagatataatatctgctaagcgt

SEQ ID NO: 5978429 - DNA, 25 bp, Homo sapien
aaagcaaattcacaatccatctcaa

SEQ ID NO: 5978430 - DNA, 25 bp, Homo sapien
attagacgggaaatgtcgagctctt

SEQ ID NO: 5978431 - DNA, 25 bp, Homo sapien
tttccacatctactgctggaagaat

SEQ ID NO: 5978432 - DNA, 25 bp, Homo sapien
gatgtcgggagattgttcgagacca

SEQ ID NO: 5978433 - DNA, 25 bp, Homo sapien
cctctttccccctcaatgcttcaca

SEQ ID NO: 5978434 - DNA, 25 bp, Homo sapien
ccaagaagccaaaaacggagtctaa

SEQ ID NO: 5978435 - DNA, 25 bp, Homo sapien
gactctaatccatccgaggtaccga

SEQ ID NO: 5978436 - DNA, 25 bp, Homo sapien
agatttaggtgatcagttatccact

SEQ ID NO: 5978437 - DNA, 25 bp, Homo sapien
ccactaaattgcacaaagaagaaga

SEQ ID NO: 5978438 - DNA, 25 bp, Homo sapien
gacccagcccctttatctttccaca

SEQ ID NO: 5978439 - DNA, 25 bp, Homo sapien
cggacgttaaagagtattcaaattc

SEQ ID NO: 5978440 - DNA, 25 bp, Homo sapien
caacgcagcctctttccccctcaat

SEQ ID NO: 5978441 - DNA, 25 bp, Homo sapien
gaccaaacttaaagcctaaactgcc

SEQ ID NO: 5978442 - DNA, 25 bp, Homo sapien
taagcgtaacgacccagccccttta

SEQ ID NO: 5978443 - DNA, 25 bp, Homo sapien
gaaaagtaatacaaatcatgcacat

SEQ ID NO: 5978444 - DNA, 25 bp, Homo sapien
agcttaagggtgattgtaatataga

SEQ ID NO: 5978445 - DNA, 25 bp, Homo sapien
agcctctttccccctcaatgcttca

SEQ ID NO: 5978446 - DNA, 25 bp, Homo sapien
tacaactcttcgaggctataacatt

SEQ ID NO: 5978447 - DNA, 25 bp, Homo sapien
gcccctttatctttccacatggctt

SEQ ID NO: 5978448 - DNA, 25 bp, Homo sapien
tagtgtttctagttctgatgtttct

SEQ ID NO: 5978449 - DNA, 25 bp, Homo sapien
aaacggagtctaaggaaagaagcga

SEQ ID NO: 5978450 - DNA, 25 bp, Homo sapien
ttaaagcctaaactgcccaaacaag

SEQ ID NO: 5978451 - DNA, 25 bp, Homo sapien
attagaggtactgatgtcgggagat

SEQ ID NO: 5978452 - DNA, 25 bp, Homo sapien
taacgacccagcccctttatctttc

SEQ ID NO: 5978453 - DNA, 25 bp, Homo sapien
tctcacctatcagcaacaaaattag

SEQ ID NO: 5978454 - DNA, 25 bp, Homo sapien
acagagtaacatctgaagataaaaa

SEQ ID NO: 5978455 - DNA, 25 bp, Homo sapien
acctttaggttatgaagcagtatct

SEQ ID NO: 5978456 - DNA, 25 bp, Homo sapien
tctggcacccacttcttcacggacg

SEQ ID NO: 5978457 - DNA, 25 bp, Homo sapien
gaagcgattctcacctatcagcaac

SEQ ID NO: 5978458 - DNA, 25 bp, Homo sapien
gcagtacttcaatatcaaataacgg

SEQ ID NO: 5978459 - DNA, 25 bp, Homo sapien
ggagctatgctttgtaatgcgtgtg

SEQ ID NO: 5978460 - DNA, 25 bp, Homo sapien
taaagctcaaaactagaataaatga

SEQ ID NO: 5978461 - DNA, 25 bp, Homo sapien
tgtcgggagattgttcgagaccaaa

SEQ ID NO: 5978462 - DNA, 25 bp, Homo sapien
gctacaactcttcgaggctataaca

SEQ ID NO: 5978463 - DNA, 25 bp, Homo sapien
cgaattcattacaccatatattacc

SEQ ID NO: 5978464 - DNA, 25 bp, Homo sapien
tagaatcaagcggtcgcaaagctaa

SEQ ID NO: 5978465 - DNA, 25 bp, Homo sapien
attgggagatggccacctttaggtt

SEQ ID NO: 5978466 - DNA, 25 bp, Homo sapien
aatttgaaaatcacccagctaaaga

SEQ ID NO: 5978467 - DNA, 25 bp, Homo sapien
agctcttgaggaacgtttgcaaagg

SEQ ID NO: 5978468 - DNA, 25 bp, Homo sapien
ccacctttaggttatgaagcagtat

SEQ ID NO: 5978469 - DNA, 25 bp, Homo sapien
tactgatgtcgggagattgttcgag

SEQ ID NO: 5978470 - DNA, 25 bp, Homo sapien
agatatccaagaagccaaaaacgga

SEQ ID NO: 5978471 - DNA, 25 bp, Homo sapien
atatgaattttaaggcgaatgacaa

SEQ ID NO: 5978472 - DNA, 25 bp, Homo sapien
cgcagattctcctcaattacctcac

SEQ ID NO: 5978473 - DNA, 25 bp, Homo sapien
ccgccgcaactctggcacccacttc

SEQ ID NO: 5978474 - DNA, 25 bp, Homo sapien
cgaaaatttgaaaatcacccagcta

SEQ ID NO: 5978475 - DNA, 25 bp, Homo sapien
agatcgtgcgattagcaacgtgaaa

SEQ ID NO: 5978476 - DNA, 25 bp, Homo sapien
ttatcaaagaacggtcgcaattcaa

SEQ ID NO: 5978477 - DNA, 25 bp, Homo sapien
aagcttcatgggaaacccaggccaa

SEQ ID NO: 5978478 - DNA, 25 bp, Homo sapien
caacagcttaaatcaaagcgaagaa

SEQ ID NO: 5978479 - DNA, 25 bp, Homo sapien
aacgacatgcttgagacgagagatc

SEQ ID NO: 5978480 - DNA, 25 bp, Homo sapien
caatgaattagacgggaaatgtcga

SEQ ID NO: 5978481 - DNA, 25 bp, Homo sapien
ctcgaaataggaaaagtaatacaaa

SEQ ID NO: 5978482 - DNA, 25 bp, Homo sapien
gagcagtacttcaatatcaaataac

SEQ ID NO: 5978483 - DNA, 25 bp, Homo sapien
gcttggaagcttgagcagtacttca

SEQ ID NO: 5978484 - DNA, 25 bp, Homo sapien
ataaatgagttagaacttgttacag

SEQ ID NO: 5978485 - DNA, 25 bp, Homo sapien
tgttcctgtttgtaagaactgttta

SEQ ID NO: 5978486 - DNA, 25 bp, Homo sapien
catctactgctggaagaatgagtcc

SEQ ID NO: 5978487 - DNA, 25 bp, Homo sapien
ctttccacatggcttctattaacga

SEQ ID NO: 5978488 - DNA, 25 bp, Homo sapien
agaagggcatattgggagatggcca

SEQ ID NO: 5978489 - DNA, 25 bp, Homo sapien
gacgggaaatgtcgagctcttgagg

SEQ ID NO: 5978490 - DNA, 25 bp, Homo sapien
aaaatttgaaaatcacccagctaaa

SEQ ID NO: 5978491 - DNA, 25 bp, Homo sapien
tatataccaagagaagttacttacg

SEQ ID NO: 5978492 - DNA, 25 bp, Homo sapien
atcaagcggtcgcaaagctaacaga

SEQ ID NO: 5978493 - DNA, 25 bp, Homo sapien
agtacttcaatatcaaataacggaa

SEQ ID NO: 5978494 - DNA, 25 bp, Homo sapien
cgagataatgtatttgaaccaaaat

SEQ ID NO: 5978495 - DNA, 25 bp, Homo sapien
actcttcgaggctataacattagaa

SEQ ID NO: 5978496 - DNA, 25 bp, Homo sapien
agttatccactaaattgcacaaaga

SEQ ID NO: 5978497 - DNA, 25 bp, Homo sapien
aggctataacattagaaaacgagat

SEQ ID NO: 5978498 - DNA, 25 bp, Homo sapien
acaaacaatggatgccaattgcaat

SEQ ID NO: 5978499 - DNA, 25 bp, Homo sapien
atccaagaagccaaaaacggagtct

SEQ ID NO: 5978500 - DNA, 25 bp, Homo sapien
ggaaacccaggccaattagtttgaa

SEQ ID NO: 5978501 - DNA, 25 bp, Homo sapien
cgatgtcttccccagatataatatc

SEQ ID NO: 5978502 - DNA, 25 bp, Homo sapien
cgcctcatttcataccgtttctaca

SEQ ID NO: 5978503 - DNA, 25 bp, Homo sapien
gtactgctcaagcttccaagcagca

SEQ ID NO: 5978504 - DNA, 25 bp, Homo sapien
atcagaactagaaacactatttgag

SEQ ID NO: 5978505 - DNA, 25 bp, Homo sapien
aacggtatgaaatgaggcggtgtcg

SEQ ID NO: 5978506 - DNA, 25 bp, Homo sapien
tgaggcggtgtcgtctcggttttca

SEQ ID NO: 5978507 - DNA, 25 bp, Homo sapien
aatcgcacgatctctcgtctcaagc

SEQ ID NO: 5978508 - DNA, 25 bp, Homo sapien
taaacagttcttacaaacaggaaca

SEQ ID NO: 5978509 - DNA, 25 bp, Homo sapien
ttacaaagcatagctccatgctcat

SEQ ID NO: 5978510 - DNA, 25 bp, Homo sapien
cttcttgttttactgtcctttgcaa

SEQ ID NO: 5978511 - DNA, 25 bp, Homo sapien
tggcatccattgtttgtccattatt

SEQ ID NO: 5978512 - DNA, 25 bp, Homo sapien
ttgctttggatatacagggagcttt

SEQ ID NO: 5978513 - DNA, 25 bp, Homo sapien
aacaatctcccgacatcagtacctc

SEQ ID NO: 5978514 - DNA, 25 bp, Homo sapien
ctcgttttctaatgttatagcctcg

SEQ ID NO: 5978515 - DNA, 25 bp, Homo sapien
attgaagtactgctcaagcttccaa

SEQ ID NO: 5978516 - DNA, 25 bp, Homo sapien
ttgatgttactgaatgtgaagcatt

SEQ ID NO: 5978517 - DNA, 25 bp, Homo sapien
agcatgtcgttaatagaagccatgt

SEQ ID NO: 5978518 - DNA, 25 bp, Homo sapien
tttggttcaaatacattatctcgtt

SEQ ID NO: 5978519 - DNA, 25 bp, Homo sapien
aattggacactatttcacttccgtt

SEQ ID NO: 5978520 - DNA, 25 bp, Homo sapien
cgtaagtaacttctcttggtatata

SEQ ID NO: 5978521 - DNA, 25 bp, Homo sapien
aatttgattcggtacctcggatgga

SEQ ID NO: 5978522 - DNA, 25 bp, Homo sapien
aatcacccttaagctctgcaatcag

SEQ ID NO: 5978523 - DNA, 25 bp, Homo sapien
ggattagagtcagtcgtccgtgaag

SEQ ID NO: 5978524 - DNA, 25 bp, Homo sapien
tccaagcagcattgataagtgaggt

SEQ ID NO: 5978525 - DNA, 25 bp, Homo sapien
ttagcagatattatatctggggaag

SEQ ID NO: 5978526 - DNA, 25 bp, Homo sapien
tgcttcataacctaaaggtggccat

SEQ ID NO: 5978527 - DNA, 25 bp, Homo sapien
ttcgccttaaaattcatattgttgc

SEQ ID NO: 5978528 - DNA, 25 bp, Homo sapien
tattacttttcctatttcgagactt

SEQ ID NO: 5978529 - DNA, 25 bp, Homo sapien
cctatttcgagactttattacatca

SEQ ID NO: 5978530 - DNA, 25 bp, Homo sapien
tttttggcttcttggatatcttcgc

SEQ ID NO: 5978531 - DNA, 25 bp, Homo sapien
cagatgttactctgttagctttgcg

SEQ ID NO: 5978532 - DNA, 25 bp, Homo sapien
cacctaaatctttagctgggtgatt

SEQ ID NO: 5978533 - DNA, 25 bp, Homo sapien
gttttcacgttgctaatcgcacgat

SEQ ID NO: 5978534 - DNA, 25 bp, Homo sapien
aagccatgtggaaagataaaggggc

SEQ ID NO: 5978535 - DNA, 25 bp, Homo sapien
gatttttgctcggcagatactgctt

SEQ ID NO: 5978536 - DNA, 25 bp, Homo sapien
aagtgaggtaattgaggagaatctg

SEQ ID NO: 5978537 - DNA, 25 bp, Homo sapien
aggctttaagtttggtctcgaacaa

SEQ ID NO: 5978538 - DNA, 25 bp, Homo sapien
gaatttgctttggatatacagggag

SEQ ID NO: 5978539 - DNA, 25 bp, Homo sapien
aaatctgtaacaagttctaactcat

SEQ ID NO: 5978540 - DNA, 25 bp, Homo sapien
tttttgctcggcagatactgcttca

SEQ ID NO: 5978541 - DNA, 25 bp, Homo sapien
gacatcgtcgatctaatttgattcg

SEQ ID NO: 5978542 - DNA, 25 bp, Homo sapien
ttcttggatatcttcgcagtagatg

SEQ ID NO: 5978543 - DNA, 25 bp, Homo sapien
tggaaagataaaggggctgggtcgt

SEQ ID NO: 5978544 - DNA, 25 bp, Homo sapien
ctcaagcatgtcgttaatagaagcc

SEQ ID NO: 5978545 - DNA, 25 bp, Homo sapien
gcctgtttttgatgttactgaatgt

SEQ ID NO: 5978546 - DNA, 25 bp, Homo sapien
gcattgataagtgaggtaattgagg

SEQ ID NO: 5978547 - DNA, 25 bp, Homo sapien
ggggctgggtcgttacgcttagcag

SEQ ID NO: 5978548 - DNA, 25 bp, Homo sapien
atctggggaagacatcgtcgatcta

SEQ ID NO: 5978549 - DNA, 25 bp, Homo sapien
caatcagcgtctgattccgaaagtt

SEQ ID NO: 5978550 - DNA, 25 bp, Homo sapien
ggtgccagagttgcggcggtagagg

SEQ ID NO: 5978551 - DNA, 25 bp, Homo sapien
agcagtatcttgtttgggcagttta

SEQ ID NO: 5978552 - DNA, 25 bp, Homo sapien
tctttaacgtccgtataacttggga

SEQ ID NO: 5978553 - DNA, 25 bp, Homo sapien
ctcaagcttccaagcagcattgata

SEQ ID NO: 5978554 - DNA, 25 bp, Homo sapien
atgatgttcccattaaaagttgcga

SEQ ID NO: 5978555 - DNA, 25 bp, Homo sapien
gcacgatctctcgtctcaagcatgt

SEQ ID NO: 5978556 - DNA, 25 bp, Homo sapien
tgatattgaagtactgctcaagctt

SEQ ID NO: 5978557 - DNA, 25 bp, Homo sapien
ggctgggtcgttacgcttagcagat

SEQ ID NO: 5978558 - DNA, 25 bp, Homo sapien
gaggttttcacttgattttggttca

SEQ ID NO: 5978559 - DNA, 25 bp, Homo sapien
tttaggtaatatatggtgtaatgaa

SEQ ID NO: 5978560 - DNA, 25 bp, Homo sapien
atattgaagtactgctcaagcttcc

SEQ ID NO: 5978561 - DNA, 25 bp, Homo sapien
gtatatagcagtatcttgtttgggc

SEQ ID NO: 5978562 - DNA, 25 bp, Homo sapien
gattatgtgcatgatttgtattact

SEQ ID NO: 5978563 - DNA, 25 bp, Homo sapien
ttgatttttaggtaatatatggtgt

SEQ ID NO: 5978564 - DNA, 25 bp, Homo sapien
tattgttgcttattgacgctcctgc

SEQ ID NO: 5978565 - DNA, 25 bp, Homo sapien
tgtattacttttcctatttcgagac

SEQ ID NO: 5978566 - DNA, 25 bp, Homo sapien
tcaaatacattatctcgttttctaa

SEQ ID NO: 5978567 - DNA, 25 bp, Homo sapien
ggaaagaggctgcgttgaattgcga

SEQ ID NO: 5978568 - DNA, 25 bp, Homo sapien
gttaaacagttcttacaaacaggaa

SEQ ID NO: 5978569 - DNA, 25 bp, Homo sapien
cagtacctctaattttgttgctgat

SEQ ID NO: 5978570 - DNA, 25 bp, Homo sapien
atttgaatactctttaacgtccgta

SEQ ID NO: 5978571 - DNA, 25 bp, Homo sapien
gactttattacatcagttttcaaac

SEQ ID NO: 5978572 - DNA, 25 bp, Homo sapien
tattatatctggggaagacatcgtc

SEQ ID NO: 5978573 - DNA, 25 bp, Homo sapien
tgtccattattcttaacttgatttt

SEQ ID NO: 5978574 - DNA, 25 bp, Homo sapien
cctaaatctttagctgggtgatttt

SEQ ID NO: 5978575 - DNA, 25 bp, Homo sapien
ttaaaaagagaccacacgcattaca

SEQ ID NO: 5978576 - DNA, 25 bp, Homo sapien
aatcgcttctttccttagactccgt

SEQ ID NO: 5978577 - DNA, 25 bp, Homo sapien
atgaaatgaggcggtgtcgtctcgg

SEQ ID NO: 5978578 - DNA, 25 bp, Homo sapien
gagaatctgcgcctgtttttgatgt

SEQ ID NO: 5978579 - DNA, 25 bp, Homo sapien
aagctgttgaggttttcacttgatt

SEQ ID NO: 5978580 - DNA, 25 bp, Homo sapien
actccgtttttggcttcttggatat

SEQ ID NO: 5978581 - DNA, 25 bp, Homo sapien
gaagattgtagaaacggtatgaaat

SEQ ID NO: 5978582 - DNA, 25 bp, Homo sapien
ttattctagttttgagctttataat

SEQ ID NO: 5978583 - DNA, 25 bp, Homo sapien
tgaagtactgctcaagcttccaagc

SEQ ID NO: 5978584 - DNA, 25 bp, Homo sapien
ttgagatggattgtgaatttgcttt

SEQ ID NO: 5978585 - DNA, 25 bp, Homo sapien
tattgacgctcctgcttgcgattca

SEQ ID NO: 5978586 - DNA, 25 bp, Homo sapien
tttcccatgaagctttaaaaagaga

SEQ ID NO: 5978587 - DNA, 25 bp, Homo sapien
agaaacatcagaactagaaacacta

SEQ ID NO: 5978588 - DNA, 25 bp, Homo sapien
tacctcggatggattagagtcagtc

SEQ ID NO: 5978589 - DNA, 25 bp, Homo sapien
tttactgtcctttgcaaacgttcct

SEQ ID NO: 5978590 - DNA, 25 bp, Homo sapien
aattgaactgccgatttttgctcgg

SEQ ID NO: 5978591 - DNA, 25 bp, Homo sapien
attgataagtgaggtaattgaggag

SEQ ID NO: 5978592 - DNA, 25 bp, Homo sapien
gaacattagcatcattggatacgtt

SEQ ID NO: 5978593 - DNA, 25 bp, Homo sapien
tcggtacctcggatggattagagtc

SEQ ID NO: 5978594 - DNA, 25 bp, Homo sapien
cgttacgcttagcagatattatatc

SEQ ID NO: 5978595 - DNA, 25 bp, Homo sapien
cctaaaggtggccatctcccaatat

SEQ ID NO: 5978596 - DNA, 25 bp, Homo sapien
gacatttcccgtctaattcattgat

SEQ ID NO: 5978597 - DNA, 25 bp, Homo sapien
ggaagacatcgtcgatctaatttga

SEQ ID NO: 5978598 - DNA, 25 bp, Homo sapien
tcaagagctcgacatttcccgtcta

SEQ ID NO: 5978599 - DNA, 25 bp, Homo sapien
cacgcattacaaagcatagctccat

SEQ ID NO: 5978600 - DNA, 25 bp, Homo sapien
gttgctgataggtgagaatcgcttc

SEQ ID NO: 5978601 - DNA, 25 bp, Homo sapien
ttgttttactgtcctttgcaaacgt

SEQ ID NO: 5978602 - DNA, 25 bp, Homo sapien
acatcagtacctctaattttgttgc

SEQ ID NO: 5978603 - DNA, 25 bp, Homo sapien
ttttctaatgttatagcctcgaaga

SEQ ID NO: 5978604 - DNA, 25 bp, Homo sapien
ctttattacatcagttttcaaacta

SEQ ID NO: 5978605 - DNA, 25 bp, Homo sapien
cctcgaagagttgtagcctgcgatg

SEQ ID NO: 5978606 - DNA, 25 bp, Homo sapien
ctcctgcttgcgattcacgcaattg

SEQ ID NO: 5978607 - DNA, 25 bp, Homo sapien
gttttgagctttataatttcttctt

SEQ ID NO: 5978608 - DNA, 25 bp, Homo sapien
tgtaatgaattcgtatccggactca

SEQ ID NO: 5978609 - DNA, 25 bp, Homo sapien
cgccttaaaattcatattgttgctt

SEQ ID NO: 5978610 - DNA, 25 bp, Homo sapien
gttatttgatattgaagtactgctc

SEQ ID NO: 5978611 - DNA, 25 bp, Homo sapien
tacttttcctatttcgagactttat

SEQ ID NO: 5978612 - DNA, 25 bp, Homo sapien
atcattggatacgttattattgcaa

SEQ ID NO: 5978613 - DNA, 25 bp, Homo sapien
agcatagctccatgctcatctcttc

SEQ ID NO: 5978614 - DNA, 25 bp, Homo sapien
ttgataaaagcagattggtgtgcag

SEQ ID NO: 5978615 - DNA, 25 bp, Homo sapien
tctcctatataaatctgtaacaagt

SEQ ID NO: 5978616 - DNA, 25 bp, Homo sapien
atagaagccatgtggaaagataaag

SEQ ID NO: 5978617 - DNA, 25 bp, Homo sapien
tagaaacggtatgaaatgaggcggt

SEQ ID NO: 5978618 - DNA, 25 bp, Homo sapien
gctgggtgattttcaaattttcgtc

SEQ ID NO: 5978619 - DNA, 25 bp, Homo sapien
acaatcacccttaagctctgcaatc

SEQ ID NO: 5978620 - DNA, 25 bp, Homo sapien
tgttactgaatgtgaagcattgagg

SEQ ID NO: 5978621 - DNA, 25 bp, Homo sapien
caatttagtggataactgatcacct

SEQ ID NO: 5978622 - DNA, 25 bp, Homo sapien
tgtgcaatttagtggataactgatc

SEQ ID NO: 5978623 - DNA, 25 bp, Homo sapien
gtagaggcaataccattattgcaat

SEQ ID NO: 5978624 - DNA, 25 bp, Homo sapien
gtagatgtggaaaaagacttgtcat

SEQ ID NO: 5978625 - DNA, 25 bp, Homo sapien
tgcgttgaattgcgaccgttctttg

SEQ ID NO: 5978626 - DNA, 25 bp, Homo sapien
ttggatacgttattattgcaattgg

SEQ ID NO: 5978627 - DNA, 25 bp, Homo sapien
atctgtaacaagttctaactcattt

SEQ ID NO: 5978628 - DNA, 25 bp, Homo sapien
tctttgtgcaatttagtggataact

SEQ ID NO: 5978629 - DNA, 25 bp, Homo sapien
tttgattcggtacctcggatggatt

SEQ ID NO: 5978630 - DNA, 25 bp, Homo sapien
cccttcttcttcgctttgatttaag

SEQ ID NO: 5978631 - DNA, 25 bp, Homo sapien
tactgtcctttgcaaacgttcctca

SEQ ID NO: 5978632 - DNA, 25 bp, Homo sapien
atctaatttgattcggtacctcgga

SEQ ID NO: 5978633 - DNA, 25 bp, Homo sapien
ggttttcacttgattttggttcaaa

SEQ ID NO: 5978634 - DNA, 25 bp, Homo sapien
cttggtatatagcagtatcttgttt

SEQ ID NO: 5978635 - DNA, 25 bp, Homo sapien
taaatctttagctgggtgattttca

SEQ ID NO: 5978636 - DNA, 25 bp, Homo sapien
gctccatgctcatctcttctccata

SEQ ID NO: 5978637 - DNA, 25 bp, Homo sapien
gtgttgtagaggttaaacagttctt

SEQ ID NO: 5978638 - DNA, 25 bp, Homo sapien
ttgcggcggtagaggcaataccatt

SEQ ID NO: 5978639 - DNA, 25 bp, Homo sapien
tcttcttctttgtgcaatttagtgg

SEQ ID NO: 5978640 - DNA, 25 bp, Homo sapien
ggtttcccatgaagctttaaaaaga

SEQ ID NO: 5978641 - DNA, 25 bp, Homo sapien
ttgaggttttcacttgattttggtt

SEQ ID NO: 5978642 - DNA, 25 bp, Homo sapien
atcagttttcaaactaattggcctg

SEQ ID NO: 5978643 - DNA, 25 bp, Homo sapien
cttgattttggttcaaatacattat

SEQ ID NO: 5978644 - DNA, 25 bp, Homo sapien
ctgataggtgagaatcgcttctttc

SEQ ID NO: 5978645 - DNA, 25 bp, Homo sapien
ccagagttgcggcggtagaggcaat

SEQ ID NO: 5978646 - DNA, 25 bp, Homo sapien
ttgacgctcctgcttgcgattcacg

SEQ ID NO: 5978647 - DNA, 25 bp, Homo sapien
gattccgaaagttgtccagattatg

SEQ ID NO: 5978648 - DNA, 25 bp, Homo sapien
tttcaaattttcgtccagaaacatc

SEQ ID NO: 5978649 - DNA, 25 bp, Homo sapien
cagattggtgtgcagaatttgaata

SEQ ID NO: 5978650 - DNA, 25 bp, Homo sapien
ttcttctttgtgcaatttagtggat

SEQ ID NO: 5978651 - DNA, 25 bp, Homo sapien
gggtcgttacgcttagcagatatta

SEQ ID NO: 5978652 - DNA, 25 bp, Homo sapien
gttgcttattgacgctcctgcttgc

SEQ ID NO: 5978653 - DNA, 25 bp, Homo sapien
tgtgaagcattgagggggaaagagg

SEQ ID NO: 5978654 - DNA, 25 bp, Homo sapien
catttcccgtctaattcattgatat

SEQ ID NO: 5978655 - DNA, 25 bp, Homo sapien
gttttactgtcctttgcaaacgttc

SEQ ID NO: 5978656 - DNA, 25 bp, Homo sapien
gattgtgaatttgctttggatatac

SEQ ID NO: 5978657 - DNA, 25 bp, Homo sapien
aattggcctgggtttcccatgaagc

SEQ ID NO: 5978658 - DNA, 25 bp, Homo sapien
tctatattacaatcacccttaagct

SEQ ID NO: 5978659 - DNA, 25 bp, Homo sapien
tccgtttttggcttcttggatatct

SEQ ID NO: 5978660 - DNA, 25 bp, Homo sapien
agctttgcgaccgcttgattctata

SEQ ID NO: 5978661 - DNA, 25 bp, Homo sapien
gcgtctgattccgaaagttgtccag

SEQ ID NO: 5978662 - DNA, 25 bp, Homo sapien
agagttgcggcggtagaggcaatac

SEQ ID NO: 5978663 - DNA, 25 bp, Homo sapien
attttcgtccagaaacatcagaact

SEQ ID NO: 5978664 - DNA, 25 bp, Homo sapien
ttcctcaagagctcgacatttcccg

SEQ ID NO: 5978665 - DNA, 25 bp, Homo sapien
catgtggaaagataaaggggctggg

SEQ ID NO: 5978666 - DNA, 25 bp, Homo sapien
atttattctagttttgagctttata

SEQ ID NO: 5978667 - DNA, 25 bp, Homo sapien
cacacgcattacaaagcatagctcc

SEQ ID NO: 5978668 - DNA, 25 bp, Homo sapien
agaagccatgtggaaagataaaggg

SEQ ID NO: 5978669 - DNA, 25 bp, Homo sapien
acactatttcacttccgttatttga

SEQ ID NO: 5978670 - DNA, 25 bp, Homo sapien
ctgattccgaaagttgtccagatta

SEQ ID NO: 5978671 - DNA, 25 bp, Homo sapien
gatatgtctcctatataaatctgta

SEQ ID NO: 5978672 - DNA, 25 bp, Homo sapien
tgctgataggtgagaatcgcttctt

SEQ ID NO: 5978673 - DNA, 25 bp, Homo sapien
agatactgcttcataacctaaaggt

SEQ ID NO: 5978674 - DNA, 25 bp, Homo sapien
tttgtattacttttcctatttcgag

SEQ ID NO: 5978675 - DNA, 25 bp, Homo sapien
ccagaaacatcagaactagaaacac

SEQ ID NO: 5978676 - DNA, 25 bp, Homo sapien
aaacaggaacattagcatcattgga

SEQ ID NO: 5978677 - DNA, 25 bp, Homo sapien
ccagcagtagatgtggaaaaagact

SEQ ID NO: 5978678 - DNA, 25 bp, Homo sapien
tctgttagctttgcgaccgcttgat

SEQ ID NO: 5978679 - DNA, 25 bp, Homo sapien
catagctccatgctcatctcttctc

SEQ ID NO: 5978680 - DNA, 25 bp, Homo sapien
gtcctttgcaaacgttcctcaagag

SEQ ID NO: 5978681 - DNA, 25 bp, Homo sapien
aataccattattgcaattggacact

SEQ ID NO: 5978682 - DNA, 25 bp, Homo sapien
tgagaatcgcttctttccttagact

SEQ ID NO: 5978683 - DNA, 25 bp, Homo sapien
atcagcgtctgattccgaaagttgt

SEQ ID NO: 5978684 - DNA, 25 bp, Homo sapien
gcaattggacactatttcacttccg

SEQ ID NO: 5978685 - DNA, 25 bp, Homo sapien
ggtgtgcagaatttgaatactcttt

SEQ ID NO: 5978686 - DNA, 25 bp, Homo sapien
ttgttgctgataggtgagaatcgct

SEQ ID NO: 5978687 - DNA, 25 bp, Homo sapien
tttcgagactttattacatcagttt

SEQ ID NO: 5978688 - DNA, 25 bp, Homo sapien
aatgaggcggtgtcgtctcggtttt

SEQ ID NO: 5978689 - DNA, 25 bp, Homo sapien
tgaatgtgaagcattgagggggaaa

SEQ ID NO: 5978690 - DNA, 25 bp, Homo sapien
tgtagaaacggtatgaaatgaggcg

SEQ ID NO: 5978691 - DNA, 25 bp, Homo sapien
tgggcagtttaggctttaagtttgg

SEQ ID NO: 5978692 - DNA, 25 bp, Homo sapien
tgtttgggcagtttaggctttaagt

SEQ ID NO: 5978693 - DNA, 25 bp, Homo sapien
ttcattgatatgtctcctatataaa

SEQ ID NO: 5978694 - DNA, 25 bp, Homo sapien
atttaagctgttgaggttttcactt

SEQ ID NO: 5978695 - DNA, 25 bp, Homo sapien
gatggattgtgaatttgctttggat

SEQ ID NO: 5978696 - DNA, 25 bp, Homo sapien
atcagtacctctaattttgttgctg

SEQ ID NO: 5978697 - DNA, 25 bp, Homo sapien
acgatctctcgtctcaagcatgtcg

SEQ ID NO: 5978698 - DNA, 25 bp, Homo sapien
ttcacttgattttggttcaaataca

SEQ ID NO: 5978699 - DNA, 25 bp, Homo sapien
tttaagtttggtctcgaacaatctc

SEQ ID NO: 5978700 - DNA, 25 bp, Homo sapien
tgatcacctaaatctttagctgggt

SEQ ID NO: 5978701 - DNA, 25 bp, Homo sapien
ttgtcattcgccttaaaattcatat

SEQ ID NO: 5978702 - DNA, 25 bp, Homo sapien
gcaataccattattgcaattggaca

SEQ ID NO: 5978703 - DNA, 25 bp, Homo sapien
tgtgcagaatttgaatactctttaa

SEQ ID NO: 5978704 - DNA, 25 bp, Homo sapien
aattttgttgctgataggtgagaat

SEQ ID NO: 5978705 - DNA, 25 bp, Homo sapien
tttggcttcttggatatcttcgcag

SEQ ID NO: 5978706 - DNA, 25 bp, Homo sapien
ttaagctgttgaggttttcacttga

SEQ ID NO: 5978707 - DNA, 25 bp, Homo sapien
ttgaattgcgaccgttctttgataa

SEQ ID NO: 5978708 - DNA, 25 bp, Homo sapien
ttggcctgggtttcccatgaagctt

SEQ ID NO: 5978709 - DNA, 25 bp, Homo sapien
attggcatccattgtttgtccatta

SEQ ID NO: 5978710 - DNA, 25 bp, Homo sapien
acgcaattgaactgccgatttttgc

SEQ ID NO: 5978711 - DNA, 25 bp, Homo sapien
ggcagtttaggctttaagtttggtc

SEQ ID NO: 5978712 - DNA, 25 bp, Homo sapien
tccgtataacttgggaacgtaagta

SEQ ID NO: 5978713 - DNA, 25 bp, Homo sapien
tatgtctcctatataaatctgtaac

SEQ ID NO: 5978714 - DNA, 25 bp, Homo sapien
ttactctgttagctttgcgaccgct

SEQ ID NO: 5978715 - DNA, 25 bp, Homo sapien
tcgttaatagaagccatgtggaaag

SEQ ID NO: 5978716 - DNA, 25 bp, Homo sapien
tgcaattggcatccattgtttgtcc

SEQ ID NO: 5978717 - DNA, 25 bp, Homo sapien
tagctccatgctcatctcttctcca

SEQ ID NO: 5978718 - DNA, 25 bp, Homo sapien
gctgttgaggttttcacttgatttt

SEQ ID NO: 5978719 - DNA, 25 bp, Homo sapien
atttagtggataactgatcacctaa

SEQ ID NO: 5978720 - DNA, 25 bp, Homo sapien
tcggatggattagagtcagtcgtcc

SEQ ID NO: 5978721 - DNA, 25 bp, Homo sapien
atgtgcatgatttgtattacttttc

SEQ ID NO: 5978722 - DNA, 25 bp, Homo sapien
ggaacgtaagtaacttctcttggta

SEQ ID NO: 5978723 - DNA, 25 bp, Homo sapien
tcccaatatgcccttcttcttcgct

SEQ ID NO: 5978724 - DNA, 25 bp, Homo sapien
tcgtctcaagcatgtcgttaataga

SEQ ID NO: 5978725 - DNA, 25 bp, Homo sapien
tgtcgttaatagaagccatgtggaa

SEQ ID NO: 5978726 - DNA, 25 bp, Homo sapien
ggtgagaatcgcttctttccttaga

SEQ ID NO: 5978727 - DNA, 25 bp, Homo sapien
aaggtggccatctcccaatatgccc

SEQ ID NO: 5978728 - DNA, 25 bp, Homo sapien
agcttccaagcagcattgataagtg

SEQ ID NO: 5978729 - DNA, 25 bp, Homo sapien
agaggctgcgttgaattgcgaccgt

SEQ ID NO: 5978730 - DNA, 25 bp, Homo sapien
gcttgattctatattacaatcaccc

SEQ ID NO: 5978731 - DNA, 25 bp, Homo sapien
tggatatcttcgcagtagatgatgt

SEQ ID NO: 5978732 - DNA, 25 bp, Homo sapien
tctcccaatatgcccttcttcttcg

SEQ ID NO: 5978733 - DNA, 25 bp, Homo sapien
gctttagaagattgtagaaacggta

SEQ ID NO: 5978734 - DNA, 25 bp, Homo sapien
tcgctttgatttaagctgttgaggt

SEQ ID NO: 5978735 - DNA, 25 bp, Homo sapien
taatatatggtgtaatgaattcgta

SEQ ID NO: 5978736 - DNA, 25 bp, Homo sapien
tgtctcctatataaatctgtaacaa

SEQ ID NO: 5978737 - DNA, 25 bp, Homo sapien
tcttcagatgttactctgttagctt

SEQ ID NO: 5978738 - DNA, 25 bp, Homo sapien
ccgatttttgctcggcagatactgc

SEQ ID NO: 5978739 - DNA, 25 bp, Homo sapien
ttcctatttcgagactttattacat

SEQ ID NO: 5978740 - DNA, 25 bp, Homo sapien
atttgagatggattgtgaatttgct

SEQ ID NO: 5978741 - DNA, 25 bp, Homo sapien
taggtaatatatggtgtaatgaatt

SEQ ID NO: 5978742 - DNA, 25 bp, Homo sapien
acattagcatcattggatacgttat

SEQ ID NO: 5978743 - DNA, 25 bp, Homo sapien
agtttggtctcgaacaatctcccga

SEQ ID NO: 5978744 - DNA, 25 bp, Homo sapien
tgtagaggttaaacagttcttacaa

SEQ ID NO: 5978745 - DNA, 25 bp, Homo sapien
attgaggagaatctgcgcctgtttt

SEQ ID NO: 5978746 - DNA, 25 bp, Homo sapien
ctaatttgattcggtacctcggatg

SEQ ID NO: 5978747 - DNA, 25 bp, Homo sapien
gaaagataaaggggctgggtcgtta

SEQ ID NO: 5978748 - DNA, 25 bp, Homo sapien
tcgacatttcccgtctaattcattg

SEQ ID NO: 5978749 - DNA, 25 bp, Homo sapien
caagcagcattgataagtgaggtaa

SEQ ID NO: 5978750 - DNA, 25 bp, Homo sapien
ctctaattttgttgctgataggtga

SEQ ID NO: 5978751 - DNA, 25 bp, Homo sapien
acttccgttatttgatattgaagta

SEQ ID NO: 5978752 - DNA, 25 bp, Homo sapien
gaagagttgtagcctgcgatgccat

SEQ ID NO: 5978753 - DNA, 25 bp, Homo sapien
accacacgcattacaaagcatagct

SEQ ID NO: 5978754 - DNA, 25 bp, Homo sapien
ctttgcgaccgcttgattctatatt

SEQ ID NO: 5978755 - DNA, 25 bp, Homo sapien
ctgggtcgttacgcttagcagatat

SEQ ID NO: 5978756 - DNA, 25 bp, Homo sapien
gacgctcctgcttgcgattcacgca

SEQ ID NO: 5978757 - DNA, 25 bp, Homo sapien
gagctttagaagattgtagaaacgg

SEQ ID NO: 5978758 - DNA, 25 bp, Homo sapien
tttgatttaagctgttgaggttttc

SEQ ID NO: 5978759 - DNA, 25 bp, Homo sapien
agttgcggcggtagaggcaatacca

SEQ ID NO: 5978760 - DNA, 25 bp, Homo sapien
tagctgggtgattttcaaattttcg

SEQ ID NO: 5978761 - DNA, 25 bp, Homo sapien
tctttccttagactccgtttttggc

SEQ ID NO: 5978762 - DNA, 25 bp, Homo sapien
atggtgtaatgaattcgtatccgga

SEQ ID NO: 5978763 - DNA, 25 bp, Homo sapien
ttccgttatttgatattgaagtact

SEQ ID NO: 5978764 - DNA, 25 bp, Homo sapien
caagcatgtcgttaatagaagccat

SEQ ID NO: 5978765 - DNA, 25 bp, Homo sapien
gggagctttagaagattgtagaaac

SEQ ID NO: 5978766 - DNA, 25 bp, Homo sapien
agcagattggtgtgcagaatttgaa

SEQ ID NO: 5978767 - DNA, 25 bp, Homo sapien
tgcaatttagtggataactgatcac

SEQ ID NO: 5978768 - DNA, 25 bp, Homo sapien
tcctatataaatctgtaacaagttc

SEQ ID NO: 5978769 - DNA, 25 bp, Homo sapien
gaatactctttaacgtccgtataac

SEQ ID NO: 5978770 - DNA, 25 bp, Homo sapien
ctaattttgttgctgataggtgaga

SEQ ID NO: 5978771 - DNA, 25 bp, Homo sapien
tgcaatcagcgtctgattccgaaag

SEQ ID NO: 5978772 - DNA, 25 bp, Homo sapien
gctttggatatacagggagctttag

SEQ ID NO: 5978773 - DNA, 25 bp, Homo sapien
taaaggtggccatctcccaatatgc

SEQ ID NO: 5978774 - DNA, 25 bp, Homo sapien
tatcctcctttattcccttcttgtt

SEQ ID NO: 5978775 - DNA, 25 bp, Homo sapien
ttcttaacttgatttttaggtaata

SEQ ID NO: 5978776 - DNA, 25 bp, Homo sapien
atccggactcattcttccagcagta

SEQ ID NO: 5978777 - DNA, 25 bp, Homo sapien
tgccgatttttgctcggcagatact

SEQ ID NO: 5978778 - DNA, 25 bp, Homo sapien
actgcttcataacctaaaggtggcc

SEQ ID NO: 5978779 - DNA, 25 bp, Homo sapien
gcaattgaactgccgatttttgctc

SEQ ID NO: 5978780 - DNA, 25 bp, Homo sapien
tgataagtgaggtaattgaggagaa

SEQ ID NO: 5978781 - DNA, 25 bp, Homo sapien
cgcagtagatgatgttcccattaaa

SEQ ID NO: 5978782 - DNA, 25 bp, Homo sapien
gtctgattccgaaagttgtccagat

SEQ ID NO: 5978783 - DNA, 25 bp, Homo sapien
ttcgcagtagatgatgttcccatta

SEQ ID NO: 5978784 - DNA, 25 bp, Homo sapien
cttcataacctaaaggtggccatct

SEQ ID NO: 5978785 - DNA, 25 bp, Homo sapien
taactgatcacctaaatctttagct

SEQ ID NO: 5978786 - DNA, 25 bp, Homo sapien
tttcgtccagaaacatcagaactag

SEQ ID NO: 5978787 - DNA, 25 bp, Homo sapien
catattgttgcttattgacgctcct

SEQ ID NO: 5978788 - DNA, 25 bp, Homo sapien
acaggaacattagcatcattggata

SEQ ID NO: 5978789 - DNA, 25 bp, Homo sapien
gagactttattacatcagttttcaa

SEQ ID NO: 5978790 - DNA, 25 bp, Homo sapien
agactccgtttttggcttcttggat

SEQ ID NO: 5978791 - DNA, 25 bp, Homo sapien
tgcttgcgattcacgcaattgaact

SEQ ID NO: 5978792 - DNA, 25 bp, Homo sapien
cgatctaatttgattcggtacctcg

SEQ ID NO: 5978793 - DNA, 25 bp, Homo sapien
atctcccgacatcagtacctctaat

SEQ ID NO: 5978794 - DNA, 25 bp, Homo sapien
aaagaggctgcgttgaattgcgacc

SEQ ID NO: 5978795 - DNA, 25 bp, Homo sapien
tgttgaggttttcacttgattttgg

SEQ ID NO: 5978796 - DNA, 25 bp, Homo sapien
tcttctccataatggtgttgtagag

SEQ ID NO: 5978797 - DNA, 25 bp, Homo sapien
tttggatatacagggagctttagaa

SEQ ID NO: 5978798 - DNA, 25 bp, Homo sapien
ctcgaacaatctcccgacatcagta

SEQ ID NO: 5978799 - DNA, 25 bp, Homo sapien
tagaagattgtagaaacggtatgaa

SEQ ID NO: 5978800 - DNA, 25 bp, Homo sapien
gaggtaattgaggagaatctgcgcc

SEQ ID NO: 5978801 - DNA, 25 bp, Homo sapien
cgcattacaaagcatagctccatgc

SEQ ID NO: 5978802 - DNA, 25 bp, Homo sapien
attttggttcaaatacattatctcg

SEQ ID NO: 5978803 - DNA, 25 bp, Homo sapien
tcgcacgatctctcgtctcaagcat

SEQ ID NO: 5978804 - DNA, 25 bp, Homo sapien
ccgttatttgatattgaagtactgc

SEQ ID NO: 5978805 - DNA, 25 bp, Homo sapien
ggtaattgaggagaatctgcgcctg

SEQ ID NO: 5978806 - DNA, 25 bp, Homo sapien
tcttccagcagtagatgtggaaaaa

SEQ ID NO: 5978807 - DNA, 25 bp, Homo sapien
agggggaaagaggctgcgttgaatt

SEQ ID NO: 5978808 - DNA, 25 bp, Homo sapien
taatagaagccatgtggaaagataa

SEQ ID NO: 5978809 - DNA, 25 bp, Homo sapien
gcggcggtagaggcaataccattat

SEQ ID NO: 5978810 - DNA, 25 bp, Homo sapien
ataatggtgttgtagaggttaaaca

SEQ ID NO: 5978811 - DNA, 25 bp, Homo sapien
tatttcgagactttattacatcagt

SEQ ID NO: 5978812 - DNA, 25 bp, Homo sapien
agcagtagatgtggaaaaagacttg

SEQ ID NO: 5978813 - DNA, 25 bp, Homo sapien
tcatttattctagttttgagcttta

SEQ ID NO: 5978814 - DNA, 25 bp, Homo sapien
tttatcttcagatgttactctgtta

SEQ ID NO: 5978815 - DNA, 25 bp, Homo sapien
ttgaatactctttaacgtccgtata

SEQ ID NO: 5978816 - DNA, 25 bp, Homo sapien
aaacatcagaactagaaacactatt

SEQ ID NO: 5978817 - DNA, 25 bp, Homo sapien
tacagggagctttagaagattgtag

SEQ ID NO: 5978818 - DNA, 25 bp, Homo sapien
tagagtcagtcgtccgtgaagaagt

SEQ ID NO: 5978819 - DNA, 25 bp, Homo sapien
tgattttggttcaaatacattatct

SEQ ID NO: 5978820 - DNA, 25 bp, Homo sapien
tttgtccattattcttaacttgatt

SEQ ID NO: 5978821 - DNA, 25 bp, Homo sapien
atatatggtgtaatgaattcgtatc

SEQ ID NO: 5978822 - DNA, 25 bp, Homo sapien
cttattgacgctcctgcttgcgatt

SEQ ID NO: 5978823 - DNA, 25 bp, Homo sapien
gtctcggttttcacgttgctaatcg

SEQ ID NO: 5978824 - DNA, 25 bp, Homo sapien
ctaatcgcacgatctctcgtctcaa

SEQ ID NO: 5978825 - DNA, 25 bp, Homo sapien
aatgttatagcctcgaagagttgta

SEQ ID NO: 5978826 - DNA, 25 bp, Homo sapien
tcacccttaagctctgcaatcagcg

SEQ ID NO: 5978827 - DNA, 25 bp, Homo sapien
ggacactatttcacttccgttattt

SEQ ID NO: 5978828 - DNA, 25 bp, Homo sapien
acctctaattttgttgctgataggt

SEQ ID NO: 5978829 - DNA, 25 bp, Homo sapien
actatttcacttccgttatttgata

SEQ ID NO: 5978830 - DNA, 25 bp, Homo sapien
cgctcctgcttgcgattcacgcaat

SEQ ID NO: 5978831 - DNA, 25 bp, Homo sapien
ttatagcctcgaagagttgtagcct

SEQ ID NO: 5978832 - DNA, 25 bp, Homo sapien
ctggggaagacatcgtcgatctaat

SEQ ID NO: 5978833 - DNA, 25 bp, Homo sapien
cttcgctttgatttaagctgttgag

SEQ ID NO: 5978834 - DNA, 25 bp, Homo sapien
cacttgattttggttcaaatacatt

SEQ ID NO: 5978835 - DNA, 25 bp, Homo sapien
tgcgaccgttctttgataaaagcag

SEQ ID NO: 5978836 - DNA, 25 bp, Homo sapien
attcggtacctcggatggattagag

SEQ ID NO: 5978837 - DNA, 25 bp, Homo sapien
tatttgatattgaagtactgctcaa

SEQ ID NO: 5978838 - DNA, 25 bp, Homo sapien
tgtccagattatgtgcatgatttgt

SEQ ID NO: 5978839 - DNA, 25 bp, Homo sapien
acgcttagcagatattatatctggg

SEQ ID NO: 5978840 - DNA, 25 bp, Homo sapien
aactaattggcctgggtttcccatg

SEQ ID NO: 5978841 - DNA, 25 bp, Homo sapien
aatggtgttgtagaggttaaacagt

SEQ ID NO: 5978842 - DNA, 25 bp, Homo sapien
ccgtctaattcattgatatgtctcc

SEQ ID NO: 5978843 - DNA, 25 bp, Homo sapien
gagtcagtcgtccgtgaagaagtgg

SEQ ID NO: 5978844 - DNA, 25 bp, Homo sapien
cgtttttggcttcttggatatcttc

SEQ ID NO: 5978845 - DNA, 25 bp, Homo sapien
tgttcccattaaaagttgcgaactt

SEQ ID NO: 5978846 - DNA, 25 bp, Homo sapien
cattcgccttaaaattcatattgtt

SEQ ID NO: 5978847 - DNA, 25 bp, Homo sapien
acaaacaggaacattagcatcattg

SEQ ID NO: 5978848 - DNA, 25 bp, Homo sapien
caagttctaactcatttattctagt

SEQ ID NO: 5978849 - DNA, 25 bp, Homo sapien
tgggtgattttcaaattttcgtcca

SEQ ID NO: 5978850 - DNA, 25 bp, Homo sapien
ctcggcagatactgcttcataacct

SEQ ID NO: 5978851 - DNA, 25 bp, Homo sapien
atatctggggaagacatcgtcgatc

SEQ ID NO: 5978852 - DNA, 25 bp, Homo sapien
tggatatacagggagctttagaaga

SEQ ID NO: 5978853 - DNA, 25 bp, Homo sapien
ttttgatgttactgaatgtgaagca

SEQ ID NO: 5978854 - DNA, 25 bp, Homo sapien
ttgattctatattacaatcaccctt

SEQ ID NO: 5978855 - DNA, 25 bp, Homo sapien
cttggatatcttcgcagtagatgat

SEQ ID NO: 5978856 - DNA, 25 bp, Homo sapien
ttttcctatttcgagactttattac

SEQ ID NO: 5978857 - DNA, 25 bp, Homo sapien
ttaggctttaagtttggtctcgaac

SEQ ID NO: 5978858 - DNA, 25 bp, Homo sapien
ttacaatcacccttaagctctgcaa

SEQ ID NO: 5978859 - DNA, 25 bp, Homo sapien
taaaagcagattggtgtgcagaatt

SEQ ID NO: 5978860 - DNA, 25 bp, Homo sapien
cagtttaggctttaagtttggtctc

SEQ ID NO: 5978861 - DNA, 25 bp, Homo sapien
aagttgtccagattatgtgcatgat

SEQ ID NO: 5978862 - DNA, 25 bp, Homo sapien
ccgcttgattctatattacaatcac

SEQ ID NO: 5978863 - DNA, 25 bp, Homo sapien
ctttgataaaagcagattggtgtgc

SEQ ID NO: 5978864 - DNA, 25 bp, Homo sapien
ggggaagacatcgtcgatctaattt

SEQ ID NO: 5978865 - DNA, 25 bp, Homo sapien
cgaccgttctttgataaaagcagat

SEQ ID NO: 5978866 - DNA, 25 bp, Homo sapien
gaaatgaggcggtgtcgtctcggtt

SEQ ID NO: 5978867 - DNA, 25 bp, Homo sapien
caattggcatccattgtttgtccat

SEQ ID NO: 5978868 - DNA, 25 bp, Homo sapien
acgttattattgcaattggcatcca

SEQ ID NO: 5978869 - DNA, 25 bp, Homo sapien
gtatgaaatgaggcggtgtcgtctc

SEQ ID NO: 5978870 - DNA, 25 bp, Homo sapien
tgatttaagctgttgaggttttcac

SEQ ID NO: 5978871 - DNA, 25 bp, Homo sapien
acttgatttttaggtaatatatggt

SEQ ID NO: 5978872 - DNA, 25 bp, Homo sapien
tcgtcgatctaatttgattcggtac

SEQ ID NO: 5978873 - DNA, 25 bp, Homo sapien
ttctccataatggtgttgtagaggt

SEQ ID NO: 5978874 - DNA, 25 bp, Homo sapien
attgtagaaacggtatgaaatgagg

SEQ ID NO: 5978875 - DNA, 25 bp, Homo sapien
gtatcttgtttgggcagtttaggct

SEQ ID NO: 5978876 - DNA, 25 bp, Homo sapien
ctcggttttcacgttgctaatcgca

SEQ ID NO: 5978877 - DNA, 25 bp, Homo sapien
atggattagagtcagtcgtccgtga

SEQ ID NO: 5978878 - DNA, 25 bp, Homo sapien
actcattcttccagcagtagatgtg

SEQ ID NO: 5978879 - DNA, 25 bp, Homo sapien
ctttaaaaagagaccacacgcatta

SEQ ID NO: 5978880 - DNA, 25 bp, Homo sapien
tttttatcttcagatgttactctgt

SEQ ID NO: 5978881 - DNA, 25 bp, Homo sapien
tcataacctaaaggtggccatctcc

SEQ ID NO: 5978882 - DNA, 25 bp, Homo sapien
cgtccgtgaagaagtgggtgccaga

SEQ ID NO: 5978883 - DNA, 25 bp, Homo sapien
tgggtttcccatgaagctttaaaaa

SEQ ID NO: 5978884 - DNA, 25 bp, Homo sapien
gtgaatttgctttggatatacaggg

SEQ ID NO: 5978885 - DNA, 25 bp, Homo sapien
cggttttcacgttgctaatcgcacg

SEQ ID NO: 5978886 - DNA, 25 bp, Homo sapien
actagaaacactatttgagatggat

SEQ ID NO: 5978887 - DNA, 25 bp, Homo sapien
gctttgatttaagctgttgaggttt

SEQ ID NO: 5978888 - DNA, 25 bp, Homo sapien
agctttaaaaagagaccacacgcat

SEQ ID NO: 5978889 - DNA, 25 bp, Homo sapien
cagtatcttgtttgggcagtttagg

SEQ ID NO: 5978890 - DNA, 25 bp, Homo sapien
tcattcttccagcagtagatgtgga

SEQ ID NO: 5978891 - DNA, 25 bp, Homo sapien
gtcagtcgtccgtgaagaagtgggt

SEQ ID NO: 5978892 - DNA, 25 bp, Homo sapien
tctagttttgagctttataatttct

SEQ ID NO: 5978893 - DNA, 25 bp, Homo sapien
gaggttaaacagttcttacaaacag

SEQ ID NO: 5978894 - DNA, 25 bp, Homo sapien
ctatataaatctgtaacaagttcta

SEQ ID NO: 5978895 - DNA, 25 bp, Homo sapien
gaaacggtatgaaatgaggcggtgt

SEQ ID NO: 5978896 - DNA, 25 bp, Homo sapien
ttagtggataactgatcacctaaat

SEQ ID NO: 5978897 - DNA, 25 bp, Homo sapien
cctgggtttcccatgaagctttaaa

SEQ ID NO: 5978898 - DNA, 25 bp, Homo sapien
ttgatatgtctcctatataaatctg

SEQ ID NO: 5978899 - DNA, 25 bp, Homo sapien
gcggtgtcgtctcggttttcacgtt

SEQ ID NO: 5978900 - DNA, 25 bp, Homo sapien
cctcaagagctcgacatttcccgtc

SEQ ID NO: 5978901 - DNA, 25 bp, Homo sapien
gtgaggtaattgaggagaatctgcg

SEQ ID NO: 5978902 - DNA, 25 bp, Homo sapien
ccggactcattcttccagcagtaga

SEQ ID NO: 5978903 - DNA, 25 bp, Homo sapien
atcacctaaatctttagctgggtga

SEQ ID NO: 5978904 - DNA, 25 bp, Homo sapien
tggattgtgaatttgctttggatat

SEQ ID NO: 5978905 - DNA, 25 bp, Homo sapien
agtgggtgccagagttgcggcggta

SEQ ID NO: 5978906 - DNA, 25 bp, Homo sapien
aatgtgaagcattgagggggaaaga

SEQ ID NO: 5978907 - DNA, 25 bp, Homo sapien
ccattgtttgtccattattcttaac

SEQ ID NO: 5978908 - DNA, 25 bp, Homo sapien
gtttaggctttaagtttggtctcga

SEQ ID NO: 5978909 - DNA, 25 bp, Homo sapien
cttgcgattcacgcaattgaactgc

SEQ ID NO: 5978910 - DNA, 25 bp, Homo sapien
ggtaatatatggtgtaatgaattcg

SEQ ID NO: 5978911 - DNA, 25 bp, Homo sapien
taggtgagaatcgcttctttcctta

SEQ ID NO: 5978912 - DNA, 25 bp, Homo sapien
actgaatgtgaagcattgaggggga

SEQ ID NO: 5978913 - DNA, 25 bp, Homo sapien
ttaaaattcatattgttgcttattg

SEQ ID NO: 5978914 - DNA, 25 bp, Homo sapien
caatctcccgacatcagtacctcta

SEQ ID NO: 5978915 - DNA, 25 bp, Homo sapien
attgcaattggcatccattgtttgt

SEQ ID NO: 5978916 - DNA, 25 bp, Homo sapien
attgagggggaaagaggctgcgttg

SEQ ID NO: 5978917 - DNA, 25 bp, Homo sapien
tgcagaatttgaatactctttaacg

SEQ ID NO: 5978918 - DNA, 25 bp, Homo sapien
attattgcaattggacactatttca

SEQ ID NO: 5978919 - DNA, 25 bp, Homo sapien
ccgaaagttgtccagattatgtgca

SEQ ID NO: 5978920 - DNA, 25 bp, Homo sapien
gattggtgtgcagaatttgaatact

SEQ ID NO: 5978921 - DNA, 25 bp, Homo sapien
tgcccttcttcttcgctttgattta

SEQ ID NO: 5978922 - DNA, 25 bp, Homo sapien
gaccgcttgattctatattacaatc

SEQ ID NO: 5978923 - DNA, 25 bp, Homo sapien
tggtctcgaacaatctcccgacatc

SEQ ID NO: 5978924 - DNA, 25 bp, Homo sapien
cggtagaggcaataccattattgca

SEQ ID NO: 5978925 - DNA, 25 bp, Homo sapien
ctgtcctttgcaaacgttcctcaag

SEQ ID NO: 5978926 - DNA, 25 bp, Homo sapien
acgttgctaatcgcacgatctctcg

SEQ ID NO: 5978927 - DNA, 25 bp, Homo sapien
cagcgtctgattccgaaagttgtcc

SEQ ID NO: 5978928 - DNA, 25 bp, Homo sapien
ggatggattagagtcagtcgtccgt

SEQ ID NO: 5978929 - DNA, 25 bp, Homo sapien
atgaagctttaaaaagagaccacac

SEQ ID NO: 5978930 - DNA, 25 bp, Homo sapien
aggctgcgttgaattgcgaccgttc

SEQ ID NO: 5978931 - DNA, 25 bp, Homo sapien
ctatttgagatggattgtgaatttg

SEQ ID NO: 5978932 - DNA, 25 bp, Homo sapien
agtggataactgatcacctaaatct

SEQ ID NO: 5978933 - DNA, 25 bp, Homo sapien
ggtgtaatgaattcgtatccggact

SEQ ID NO: 5978934 - DNA, 25 bp, Homo sapien
gaagctttaaaaagagaccacacgc

SEQ ID NO: 5978935 - DNA, 25 bp, Homo sapien
tctcgtctcaagcatgtcgttaata

SEQ ID NO: 5978936 - DNA, 25 bp, Homo sapien
tggccatctcccaatatgcccttct

SEQ ID NO: 5978937 - DNA, 25 bp, Homo sapien
ttgttgcttattgacgctcctgctt

SEQ ID NO: 5978938 - DNA, 25 bp, Homo sapien
caaacgttcctcaagagctcgacat

SEQ ID NO: 5978939 - DNA, 25 bp, Homo sapien
tttgctcggcagatactgcttcata

SEQ ID NO: 5978940 - DNA, 25 bp, Homo sapien
ttacatcagttttcaaactaattgg

SEQ ID NO: 5978941 - DNA, 25 bp, Homo sapien
aagctctgcaatcagcgtctgattc

SEQ ID NO: 5978942 - DNA, 25 bp, Homo sapien
ggcctgggtttcccatgaagcttta

SEQ ID NO: 5978943 - DNA, 25 bp, Homo sapien
tattattgcaattggcatccattgt

SEQ ID NO: 5978944 - DNA, 25 bp, Homo sapien
attcttccagcagtagatgtggaaa

SEQ ID NO: 5978945 - DNA, 25 bp, Homo sapien
ttccgaaagttgtccagattatgtg

SEQ ID NO: 5978946 - DNA, 25 bp, Homo sapien
aaattttcgtccagaaacatcagaa

SEQ ID NO: 5978947 - DNA, 25 bp, Homo sapien
cactatttgagatggattgtgaatt

SEQ ID NO: 5978948 - DNA, 25 bp, Homo sapien
attcacgcaattgaactgccgattt

SEQ ID NO: 5978949 - DNA, 25 bp, Homo sapien
tttggtctcgaacaatctcccgaca

SEQ ID NO: 5978950 - DNA, 25 bp, Homo sapien
tcacttccgttatttgatattgaag

SEQ ID NO: 5978951 - DNA, 25 bp, Homo sapien
ctcatctcttctccataatggtgtt

SEQ ID NO: 5978952 - DNA, 25 bp, Homo sapien
agattgtagaaacggtatgaaatga

SEQ ID NO: 5978953 - DNA, 25 bp, Homo sapien
tttagctgggtgattttcaaatttt

SEQ ID NO: 5978954 - DNA, 25 bp, Homo sapien
gcttagcagatattatatctgggga

SEQ ID NO: 5978955 - DNA, 25 bp, Homo sapien
caagcttccaagcagcattgataag

SEQ ID NO: 5978956 - DNA, 25 bp, Homo sapien
gataggtgagaatcgcttctttcct

SEQ ID NO: 5978957 - DNA, 25 bp, Homo sapien
actctgttagctttgcgaccgcttg

SEQ ID NO: 5978958 - DNA, 25 bp, Homo sapien
tcaaattttcgtccagaaacatcag

SEQ ID NO: 5978959 - DNA, 25 bp, Homo sapien
gtccagaaacatcagaactagaaac

SEQ ID NO: 5978960 - DNA, 25 bp, Homo sapien
cagggagctttagaagattgtagaa

SEQ ID NO: 5978961 - DNA, 25 bp, Homo sapien
ttcatattgttgcttattgacgctc

SEQ ID NO: 5978962 - DNA, 25 bp, Homo sapien
acccttaagctctgcaatcagcgtc

SEQ ID NO: 5978963 - DNA, 25 bp, Homo sapien
agcagcattgataagtgaggtaatt

SEQ ID NO: 5978964 - DNA, 25 bp, Homo sapien
gatatcttcgcagtagatgatgttc

SEQ ID NO: 5978965 - DNA, 25 bp, Homo sapien
aaaattcatattgttgcttattgac

SEQ ID NO: 5978966 - DNA, 25 bp, Homo sapien
tcttcttcgctttgatttaagctgt

SEQ ID NO: 5978967 - DNA, 25 bp, Homo sapien
ctcccgacatcagtacctctaattt

SEQ ID NO: 5978968 - DNA, 25 bp, Homo sapien
tcccatgaagctttaaaaagagacc

SEQ ID NO: 5978969 - DNA, 25 bp, Homo sapien
ttttgttgctgataggtgagaatcg

SEQ ID NO: 5978970 - DNA, 25 bp, Homo sapien
cattggatacgttattattgcaatt

SEQ ID NO: 5978971 - DNA, 25 bp, Homo sapien
atatagcagtatcttgtttgggcag

SEQ ID NO: 5978972 - DNA, 25 bp, Homo sapien
tggcttcttggatatcttcgcagta

SEQ ID NO: 5978973 - DNA, 25 bp, Homo sapien
agatgtggaaaaagacttgtcattc

SEQ ID NO: 5978974 - DNA, 25 bp, Homo sapien
aagagctcgacatttcccgtctaat

SEQ ID NO: 5978975 - DNA, 25 bp, Homo sapien
cttctttgtgcaatttagtggataa

SEQ ID NO: 5978976 - DNA, 25 bp, Homo sapien
tattacaatcacccttaagctctgc

SEQ ID NO: 5978977 - DNA, 25 bp, Homo sapien
tttgatattgaagtactgctcaagc

SEQ ID NO: 5978978 - DNA, 25 bp, Homo sapien
gcgaccgcttgattctatattacaa

SEQ ID NO: 5978979 - DNA, 25 bp, Homo sapien
gttgtagaggttaaacagttcttac

SEQ ID NO: 5978980 - DNA, 25 bp, Homo sapien
gaatctgcgcctgtttttgatgtta

SEQ ID NO: 5978981 - DNA, 25 bp, Homo sapien
gataaaagcagattggtgtgcagaa

SEQ ID NO: 5978982 - DNA, 25 bp, Homo sapien
ccattattgcaattggacactattt

SEQ ID NO: 5978983 - DNA, 25 bp, Homo sapien
atatggtgtaatgaattcgtatccg

SEQ ID NO: 5978984 - DNA, 25 bp, Homo sapien
gttaatagaagccatgtggaaagat

SEQ ID NO: 5978985 - DNA, 25 bp, Homo sapien
ccttaagctctgcaatcagcgtctg

SEQ ID NO: 5978986 - DNA, 25 bp, Homo sapien
aaggggctgggtcgttacgcttagc

SEQ ID NO: 5978987 - DNA, 25 bp, Homo sapien
gtcgtccgtgaagaagtgggtgcca

SEQ ID NO: 5978988 - DNA, 25 bp, Homo sapien
agcctcgaagagttgtagcctgcga

SEQ ID NO: 5978989 - DNA, 25 bp, Homo sapien
gcatccattgtttgtccattattct

SEQ ID NO: 5978990 - DNA, 25 bp, Homo sapien
tcgtccagaaacatcagaactagaa

SEQ ID NO: 5978991 - DNA, 25 bp, Homo sapien
gatatacagggagctttagaagatt

SEQ ID NO: 5978992 - DNA, 25 bp, Homo sapien
gataaaggggctgggtcgttacgct

SEQ ID NO: 5978993 - DNA, 25 bp, Homo sapien
ttattgcaattggcatccattgttt

SEQ ID NO: 5978994 - DNA, 25 bp, Homo sapien
ttggtgtgcagaatttgaatactct

SEQ ID NO: 5978995 - DNA, 25 bp, Homo sapien
gtctcaagcatgtcgttaatagaag

SEQ ID NO: 5978996 - DNA, 25 bp, Homo sapien
ggaaaaagacttgtcattcgcctta

SEQ ID NO: 5978997 - DNA, 25 bp, Homo sapien
ttagactccgtttttggcttcttgg

SEQ ID NO: 5978998 - DNA, 25 bp, Homo sapien
aagacatcgtcgatctaatttgatt

SEQ ID NO: 5978999 - DNA, 25 bp, Homo sapien
attagcatcattggatacgttatta

SEQ ID NO: 5979000 - DNA, 25 bp, Homo sapien
cgaacaatctcccgacatcagtacc

SEQ ID NO: 5979001 - DNA, 25 bp, Homo sapien
tgctcggcagatactgcttcataac

SEQ ID NO: 5979002 - DNA, 25 bp, Homo sapien
gatctctcgtctcaagcatgtcgtt

SEQ ID NO: 5979003 - DNA, 25 bp, Homo sapien
atccattgtttgtccattattctta

SEQ ID NO: 5979004 - DNA, 25 bp, Homo sapien
tctgcaatcagcgtctgattccgaa

SEQ ID NO: 5979005 - DNA, 25 bp, Homo sapien
tttagaagattgtagaaacggtatg

SEQ ID NO: 5979006 - DNA, 25 bp, Homo sapien
gttcttacaaacaggaacattagca

SEQ ID NO: 5979007 - DNA, 25 bp, Homo sapien
tagcatcattggatacgttattatt

SEQ ID NO: 5979008 - DNA, 25 bp, Homo sapien
gcattgagggggaaagaggctgcgt

SEQ ID NO: 5979009 - DNA, 25 bp, Homo sapien
aattcattgatatgtctcctatata

SEQ ID NO: 5979010 - DNA, 25 bp, Homo sapien
cttaacttgatttttaggtaatata

SEQ ID NO: 5979011 - DNA, 25 bp, Homo sapien
aggcaataccattattgcaattgga

SEQ ID NO: 5979012 - DNA, 25 bp, Homo sapien
gcatgatttgtattacttttcctat

SEQ ID NO: 5979013 - DNA, 25 bp, Homo sapien
tttttaggtaatatatggtgtaatg

SEQ ID NO: 5979014 - DNA, 25 bp, Homo sapien
agatgatgttcccattaaaagttgc

SEQ ID NO: 5979015 - DNA, 25 bp, Homo sapien
ttctaatgttatagcctcgaagagt

SEQ ID NO: 5979016 - DNA, 25 bp, Homo sapien
ataacctaaaggtggccatctccca

SEQ ID NO: 5979017 - DNA, 25 bp, Homo sapien
gaagtgggtgccagagttgcggcgg

SEQ ID NO: 5979018 - DNA, 25 bp, Homo sapien
tagaaacactatttgagatggattg

SEQ ID NO: 5979019 - DNA, 25 bp, Homo sapien
cagcattgataagtgaggtaattga

SEQ ID NO: 5979020 - DNA, 25 bp, Homo sapien
tgattttcaaattttcgtccagaaa

SEQ ID NO: 5979021 - DNA, 25 bp, Homo sapien
aacgtaagtaacttctcttggtata

SEQ ID NO: 5979022 - DNA, 25 bp, Homo sapien
agagaccacacgcattacaaagcat

SEQ ID NO: 5979023 - DNA, 25 bp, Homo sapien
cgacatcagtacctctaattttgtt

SEQ ID NO: 5979024 - DNA, 25 bp, Homo sapien
ttgcgaccgcttgattctatattac

SEQ ID NO: 5979025 - DNA, 25 bp, Homo sapien
agaatcgcttctttccttagactcc

SEQ ID NO: 5979026 - DNA, 25 bp, Homo sapien
aagcattgagggggaaagaggctgc

SEQ ID NO: 5979027 - DNA, 25 bp, Homo sapien
tttgagctttataatttcttcttct

SEQ ID NO: 5979028 - DNA, 25 bp, Homo sapien
gaaagttgtccagattatgtgcatg

SEQ ID NO: 5979029 - DNA, 25 bp, Homo sapien
ataagtgaggtaattgaggagaatc

SEQ ID NO: 5979030 - DNA, 25 bp, Homo sapien
gtcgatctaatttgattcggtacct

SEQ ID NO: 5979031 - DNA, 25 bp, Homo sapien
gctgcgttgaattgcgaccgttctt

SEQ ID NO: 5979032 - DNA, 25 bp, Homo sapien
tgggtgccagagttgcggcggtaga

SEQ ID NO: 5979033 - DNA, 25 bp, Homo sapien
ctgtttttgatgttactgaatgtga

SEQ ID NO: 5979034 - DNA, 25 bp, Homo sapien
cccttcttgttttactgtcctttgc

SEQ ID NO: 5979035 - DNA, 25 bp, Homo sapien
tgagggggaaagaggctgcgttgaa

SEQ ID NO: 5979036 - DNA, 25 bp, Homo sapien
tccagattatgtgcatgatttgtat

SEQ ID NO: 5979037 - DNA, 25 bp, Homo sapien
gctcgacatttcccgtctaattcat

SEQ ID NO: 5979038 - DNA, 25 bp, Homo sapien
ggggaaagaggctgcgttgaattgc

SEQ ID NO: 5979039 - DNA, 25 bp, Homo sapien
ttacgcttagcagatattatatctg

SEQ ID NO: 5979040 - DNA, 25 bp, Homo sapien
ttgcaattggacactatttcacttc

SEQ ID NO: 5979041 - DNA, 25 bp, Homo sapien
cagtcgtccgtgaagaagtgggtgc

SEQ ID NO: 5979042 - DNA, 25 bp, Homo sapien
cgttttctaatgttatagcctcgaa

SEQ ID NO: 5979043 - DNA, 25 bp, Homo sapien
tgtggaaagataaaggggctgggtc

SEQ ID NO: 5979044 - DNA, 25 bp, Homo sapien
tttcccgtctaattcattgatatgt

SEQ ID NO: 5979045 - DNA, 25 bp, Homo sapien
agtaacttctcttggtatatagcag

SEQ ID NO: 5979046 - DNA, 25 bp, Homo sapien
gttgctaatcgcacgatctctcgtc

SEQ ID NO: 5979047 - DNA, 25 bp, Homo sapien
attctagttttgagctttataattt

SEQ ID NO: 5979048 - DNA, 25 bp, Homo sapien
ctgcgcctgtttttgatgttactga

SEQ ID NO: 5979049 - DNA, 25 bp, Homo sapien
tccgtgaagaagtgggtgccagagt

SEQ ID NO: 5979050 - DNA, 25 bp, Homo sapien
cagaactagaaacactatttgagat

SEQ ID NO: 5979051 - DNA, 25 bp, Homo sapien
gtagatgatgttcccattaaaagtt

SEQ ID NO: 5979052 - DNA, 25 bp, Homo sapien
taacttgatttttaggtaatatatg

SEQ ID NO: 5979053 - DNA, 25 bp, Homo sapien
cggtatgaaatgaggcggtgtcgtc

SEQ ID NO: 5979054 - DNA, 25 bp, Homo sapien
cccgacatcagtacctctaattttg

SEQ ID NO: 5979055 - DNA, 25 bp, Homo sapien
attctatattacaatcacccttaag

SEQ ID NO: 5979056 - DNA, 25 bp, Homo sapien
gtcattcgccttaaaattcatattg

SEQ ID NO: 5979057 - DNA, 25 bp, Homo sapien
tttcacgttgctaatcgcacgatct

SEQ ID NO: 5979058 - DNA, 25 bp, Homo sapien
aaagcatagctccatgctcatctct

SEQ ID NO: 5979059 - DNA, 25 bp, Homo sapien
ttcagatgttactctgttagctttg

SEQ ID NO: 5979060 - DNA, 25 bp, Homo sapien
atactgcttcataacctaaaggtgg

SEQ ID NO: 5979061 - DNA, 25 bp, Homo sapien
ctccataatggtgttgtagaggtta

SEQ ID NO: 5979062 - DNA, 25 bp, Homo sapien
tggataactgatcacctaaatcttt

SEQ ID NO: 5979063 - DNA, 25 bp, Homo sapien
cctcggatggattagagtcagtcgt

SEQ ID NO: 5979064 - DNA, 25 bp, Homo sapien
taagtaacttctcttggtatatagc

SEQ ID NO: 5979065 - DNA, 25 bp, Homo sapien
aacactatttgagatggattgtgaa

SEQ ID NO: 5979066 - DNA, 25 bp, Homo sapien
gagatggattgtgaatttgctttgg

SEQ ID NO: 5979067 - DNA, 25 bp, Homo sapien
agaggcaataccattattgcaattg

SEQ ID NO: 5979068 - DNA, 25 bp, Homo sapien
gagctcgacatttcccgtctaattc

SEQ ID NO: 5979069 - DNA, 25 bp, Homo sapien
cgttgaattgcgaccgttctttgat

SEQ ID NO: 5979070 - DNA, 25 bp, Homo sapien
ttccagcagtagatgtggaaaaaga

SEQ ID NO: 5979071 - DNA, 25 bp, Homo sapien
tttattcccttcttgttttactgtc

SEQ ID NO: 5979072 - DNA, 25 bp, Homo sapien
gtttttgatgttactgaatgtgaag

SEQ ID NO: 5979073 - DNA, 25 bp, Homo sapien
gaattgcgaccgttctttgataaaa

SEQ ID NO: 5979074 - DNA, 25 bp, Homo sapien
tcttcgcagtagatgatgttcccat

SEQ ID NO: 5979075 - DNA, 25 bp, Homo sapien
gcgcctgtttttgatgttactgaat

SEQ ID NO: 5979076 - DNA, 25 bp, Homo sapien
ccatgaagctttaaaaagagaccac

SEQ ID NO: 5979077 - DNA, 25 bp, Homo sapien
gtacctctaattttgttgctgatag

SEQ ID NO: 5979078 - DNA, 25 bp, Homo sapien
ggatacgttattattgcaattggca

SEQ ID NO: 5979079 - DNA, 25 bp, Homo sapien
attcgtatccggactcattcttcca

SEQ ID NO: 5979080 - DNA, 25 bp, Homo sapien
tcgagactttattacatcagttttc

SEQ ID NO: 5979081 - DNA, 25 bp, Homo sapien
tctcttctccataatggtgttgtag

SEQ ID NO: 5979082 - DNA, 25 bp, Homo sapien
tattcttaacttgatttttaggtaa

SEQ ID NO: 5979083 - DNA, 25 bp, Homo sapien
tatcttcgcagtagatgatgttccc

SEQ ID NO: 5979084 - DNA, 25 bp, Homo sapien
taccattattgcaattggacactat

SEQ ID NO: 5979085 - DNA, 25 bp, Homo sapien
tctctcgtctcaagcatgtcgttaa

SEQ ID NO: 5979086 - DNA, 25 bp, Homo sapien
gtaacaagttctaactcatttattc

SEQ ID NO: 5979087 - DNA, 25 bp, Homo sapien
gaaacactatttgagatggattgtg

SEQ ID NO: 5979088 - DNA, 25 bp, Homo sapien
gttgtccagattatgtgcatgattt

SEQ ID NO: 5979089 - DNA, 25 bp, Homo sapien
taatgaattcgtatccggactcatt

SEQ ID NO: 5979090 - DNA, 25 bp, Homo sapien
ttatgtgcatgatttgtattacttt

SEQ ID NO: 5979091 - DNA, 25 bp, Homo sapien
cagtagatgatgttcccattaaaag

SEQ ID NO: 5979092 - DNA, 25 bp, Homo sapien
atagcctcgaagagttgtagcctgc

SEQ ID NO: 5979093 - DNA, 25 bp, Homo sapien
tgggaacgtaagtaacttctcttgg

SEQ ID NO: 5979094 - DNA, 25 bp, Homo sapien
tggtatatagcagtatcttgtttgg

SEQ ID NO: 5979095 - DNA, 25 bp, Homo sapien
tgaagaagtgggtgccagagttgcg

SEQ ID NO: 5979096 - DNA, 25 bp, Homo sapien
gcatcattggatacgttattattgc

SEQ ID NO: 5979097 - DNA, 25 bp, Homo sapien
ccataatggtgttgtagaggttaaa

SEQ ID NO: 5979098 - DNA, 25 bp, Homo sapien
tccatgctcatctcttctccataat

SEQ ID NO: 5979099 - DNA, 25 bp, Homo sapien
tgctcatctcttctccataatggtg

SEQ ID NO: 5979100 - DNA, 25 bp, Homo sapien
agcagatattatatctggggaagac

SEQ ID NO: 5979101 - DNA, 25 bp, Homo sapien
tactctttaacgtccgtataacttg

SEQ ID NO: 5979102 - DNA, 25 bp, Homo sapien
tttgcaaacgttcctcaagagctcg

SEQ ID NO: 5979103 - DNA, 25 bp, Homo sapien
atcttgtttgggcagtttaggcttt

SEQ ID NO: 5979104 - DNA, 25 bp, Homo sapien
tggttcaaatacattatctcgtttt

SEQ ID NO: 5979105 - DNA, 25 bp, Homo sapien
atgaattcgtatccggactcattct

SEQ ID NO: 5979106 - DNA, 25 bp, Homo sapien
tcacgttgctaatcgcacgatctct

SEQ ID NO: 5979107 - DNA, 25 bp, Homo sapien
gatttttaggtaatatatggtgtaa

SEQ ID NO: 5979108 - DNA, 25 bp, Homo sapien
taagtttggtctcgaacaatctccc

SEQ ID NO: 5979109 - DNA, 25 bp, Homo sapien
attgcgaccgttctttgataaaagc

SEQ ID NO: 5979110 - DNA, 25 bp, Homo sapien
tatcttcagatgttactctgttagc

SEQ ID NO: 5979111 - DNA, 25 bp, Homo sapien
ggcggtagaggcaataccattattg

SEQ ID NO: 5979112 - DNA, 25 bp, Homo sapien
aatctttagctgggtgattttcaaa

SEQ ID NO: 5979113 - DNA, 25 bp, Homo sapien
ttgaactgccgatttttgctcggca

SEQ ID NO: 5979114 - DNA, 25 bp, Homo sapien
cgttctttgataaaagcagattggt

SEQ ID NO: 5979115 - DNA, 25 bp, Homo sapien
cttgtttgggcagtttaggctttaa

SEQ ID NO: 5979116 - DNA, 25 bp, Homo sapien
tagttttgagctttataatttcttc

SEQ ID NO: 5979117 - DNA, 25 bp, Homo sapien
gaatttgaatactctttaacgtccg

SEQ ID NO: 5979118 - DNA, 25 bp, Homo sapien
ctgtaacaagttctaactcatttat

SEQ ID NO: 5979119 - DNA, 25 bp, Homo sapien
gaactagaaacactatttgagatgg

SEQ ID NO: 5979120 - DNA, 25 bp, Homo sapien
gaattcgtatccggactcattcttc

SEQ ID NO: 5979121 - DNA, 25 bp, Homo sapien
ggtgattttcaaattttcgtccaga

SEQ ID NO: 5979122 - DNA, 25 bp, Homo sapien
ggtggccatctcccaatatgccctt

SEQ ID NO: 5979123 - DNA, 25 bp, Homo sapien
gaactgccgatttttgctcggcaga

SEQ ID NO: 5979124 - DNA, 25 bp, Homo sapien
tatgcccttcttcttcgctttgatt

SEQ ID NO: 5979125 - DNA, 25 bp, Homo sapien
aaagcagattggtgtgcagaatttg

SEQ ID NO: 5979126 - DNA, 25 bp, Homo sapien
cattgatatgtctcctatataaatc

SEQ ID NO: 5979127 - DNA, 25 bp, Homo sapien
aaagacttgtcattcgccttaaaat

SEQ ID NO: 5979128 - DNA, 25 bp, Homo sapien
acttgtcattcgccttaaaattcat

SEQ ID NO: 5979129 - DNA, 25 bp, Homo sapien
aagtactgctcaagcttccaagcag

SEQ ID NO: 5979130 - DNA, 25 bp, Homo sapien
tcacgcaattgaactgccgattttt

SEQ ID NO: 5979131 - DNA, 25 bp, Homo sapien
gatgttactctgttagctttgcgac

SEQ ID NO: 5979132 - DNA, 25 bp, Homo sapien
aggaacattagcatcattggatacg

SEQ ID NO: 5979133 - DNA, 25 bp, Homo sapien
aacgttcctcaagagctcgacattt

SEQ ID NO: 5979134 - DNA, 25 bp, Homo sapien
ttcttcgctttgatttaagctgttg

SEQ ID NO: 5979135 - DNA, 25 bp, Homo sapien
ttctcttggtatatagcagtatctt

SEQ ID NO: 5979136 - DNA, 25 bp, Homo sapien
catctcttctccataatggtgttgt

SEQ ID NO: 5979137 - DNA, 25 bp, Homo sapien
tcccgtctaattcattgatatgtct

SEQ ID NO: 5979138 - DNA, 25 bp, Homo sapien
gatgttcccattaaaagttgcgaac

SEQ ID NO: 5979139 - DNA, 25 bp, Homo sapien
tgcgattcacgcaattgaactgccg

SEQ ID NO: 5979140 - DNA, 25 bp, Homo sapien
cagattatgtgcatgatttgtatta

SEQ ID NO: 5979141 - DNA, 25 bp, Homo sapien
agaccacacgcattacaaagcatag

SEQ ID NO: 5979142 - DNA, 25 bp, Homo sapien
aggagaatctgcgcctgtttttgat

SEQ ID NO: 5979143 - DNA, 25 bp, Homo sapien
tgctaatcgcacgatctctcgtctc

SEQ ID NO: 5979144 - DNA, 25 bp, Homo sapien
tgcaaacgttcctcaagagctcgac

SEQ ID NO: 5979145 - DNA, 25 bp, Homo sapien
cctttgcaaacgttcctcaagagct

SEQ ID NO: 5979146 - DNA, 25 bp, Homo sapien
ctaattggcctgggtttcccatgaa

SEQ ID NO: 5979147 - DNA, 25 bp, Homo sapien
aatatgcccttcttcttcgctttga

SEQ ID NO: 5979148 - DNA, 25 bp, Homo sapien
atctgcgcctgtttttgatgttact

SEQ ID NO: 5979149 - DNA, 25 bp, Homo sapien
ggtgtcgtctcggttttcacgttgc

SEQ ID NO: 5979150 - DNA, 25 bp, Homo sapien
ttagctttgcgaccgcttgattcta

SEQ ID NO: 5979151 - DNA, 25 bp, Homo sapien
tgcttattgacgctcctgcttgcga

SEQ ID NO: 5979152 - DNA, 25 bp, Homo sapien
taacttctcttggtatatagcagta

SEQ ID NO: 5979153 - DNA, 25 bp, Homo sapien
ttttcacttgattttggttcaaata

SEQ ID NO: 5979154 - DNA, 25 bp, Homo sapien
tgtttgtccattattcttaacttga

SEQ ID NO: 5979155 - DNA, 25 bp, Homo sapien
agacttgtcattcgccttaaaattc

SEQ ID NO: 5979156 - DNA, 25 bp, Homo sapien
tcttacaaacaggaacattagcatc

SEQ ID NO: 5979157 - DNA, 25 bp, Homo sapien
atgtggaaaaagacttgtcattcgc

SEQ ID NO: 5979158 - DNA, 25 bp, Homo sapien
ctaattcattgatatgtctcctata

SEQ ID NO: 5979159 - DNA, 25 bp, Homo sapien
tattgcaattggacactatttcact

SEQ ID NO: 5979160 - DNA, 25 bp, Homo sapien
taattgaggagaatctgcgcctgtt

SEQ ID NO: 5979161 - DNA, 25 bp, Homo sapien
catctcccaatatgcccttcttctt

SEQ ID NO: 5979162 - DNA, 25 bp, Homo sapien
ggactcattcttccagcagtagatg

SEQ ID NO: 5979163 - DNA, 25 bp, Homo sapien
ttcaaactaattggcctgggtttcc

SEQ ID NO: 5979164 - DNA, 25 bp, Homo sapien
tcgaagagttgtagcctgcgatgcc

SEQ ID NO: 5979165 - DNA, 25 bp, Homo sapien
cagttttcaaactaattggcctggg

SEQ ID NO: 5979166 - DNA, 25 bp, Homo sapien
tatacagggagctttagaagattgt

SEQ ID NO: 5979167 - DNA, 25 bp, Homo sapien
cagtagatgtggaaaaagacttgtc

SEQ ID NO: 5979168 - DNA, 25 bp, Homo sapien
catgtcgttaatagaagccatgtgg

SEQ ID NO: 5979169 - DNA, 25 bp, Homo sapien
ctcttggtatatagcagtatcttgt

SEQ ID NO: 5979170 - DNA, 25 bp, Homo sapien
atttgctttggatatacagggagct

SEQ ID NO: 5979171 - DNA, 25 bp, Homo sapien
gccatctcccaatatgcccttcttc

SEQ ID NO: 5979172 - DNA, 25 bp, Homo sapien
cagaatttgaatactctttaacgtc

SEQ ID NO: 5979173 - DNA, 25 bp, Homo sapien
ttacaaacaggaacattagcatcat

SEQ ID NO: 5979174 - DNA, 25 bp, Homo sapien
acatcagaactagaaacactatttg

SEQ ID NO: 5979175 - DNA, 25 bp, Homo sapien
accgttctttgataaaagcagattg

SEQ ID NO: 5979176 - DNA, 25 bp, Homo sapien
atctcgttttctaatgttatagcct

SEQ ID NO: 5979177 - DNA, 25 bp, Homo sapien
cctgcttgcgattcacgcaattgaa

SEQ ID NO: 5979178 - DNA, 25 bp, Homo sapien
acatcagttttcaaactaattggcc

SEQ ID NO: 5979179 - DNA, 25 bp, Homo sapien
tatattacaatcacccttaagctct

SEQ ID NO: 5979180 - DNA, 25 bp, Homo sapien
aagaagtgggtgccagagttgcggc

SEQ ID NO: 5979181 - DNA, 25 bp, Homo sapien
catgctcatctcttctccataatgg

SEQ ID NO: 5979182 - DNA, 25 bp, Homo sapien
aaaaagacttgtcattcgccttaaa

SEQ ID NO: 5979183 - DNA, 25 bp, Homo sapien
catcgtcgatctaatttgattcggt

SEQ ID NO: 5979184 - DNA, 25 bp, Homo sapien
tgaggagaatctgcgcctgtttttg

SEQ ID NO: 5979185 - DNA, 25 bp, Homo sapien
gataactgatcacctaaatctttag

SEQ ID NO: 5979186 - DNA, 25 bp, Homo sapien
tcgtctcggttttcacgttgctaat

SEQ ID NO: 5979187 - DNA, 25 bp, Homo sapien
tgctcaagcttccaagcagcattga

SEQ ID NO: 5979188 - DNA, 25 bp, Homo sapien
ctaatgttatagcctcgaagagttg

SEQ ID NO: 5979189 - DNA, 25 bp, Homo sapien
actgctcaagcttccaagcagcatt

SEQ ID NO: 5979190 - DNA, 25 bp, Homo sapien
cagttcttacaaacaggaacattag

SEQ ID NO: 5979191 - DNA, 25 bp, Homo sapien
tttgtgcaatttagtggataactga

SEQ ID NO: 5979192 - DNA, 25 bp, Homo sapien
cgtgaagaagtgggtgccagagttg

SEQ ID NO: 5979193 - DNA, 25 bp, Homo sapien
tcttgttttactgtcctttgcaaac

SEQ ID NO: 5979194 - DNA, 25 bp, Homo sapien
gttattattgcaattggcatccatt

SEQ ID NO: 5979195 - DNA, 25 bp, Homo sapien
gatgttactgaatgtgaagcattga

SEQ ID NO: 5979196 - DNA, 25 bp, Homo sapien
aattcatattgttgcttattgacgc

SEQ ID NO: 5979197 - DNA, 25 bp, Homo sapien
actgatcacctaaatctttagctgg

SEQ ID NO: 5979198 - DNA, 25 bp, Homo sapien
taaaggggctgggtcgttacgctta

SEQ ID NO: 5979199 - DNA, 25 bp, Homo sapien
gctttaagtttggtctcgaacaatc

SEQ ID NO: 5979200 - DNA, 25 bp, Homo sapien
gatattatatctggggaagacatcg

SEQ ID NO: 5979201 - DNA, 25 bp, Homo sapien
ttactgaatgtgaagcattgagggg

SEQ ID NO: 5979202 - DNA, 25 bp, Homo sapien
aaaaagagaccacacgcattacaaa

SEQ ID NO: 5979203 - DNA, 25 bp, Homo sapien
tgttatagcctcgaagagttgtagc

SEQ ID NO: 5979204 - DNA, 25 bp, Homo sapien
gccatgtggaaagataaaggggctg

SEQ ID NO: 5979205 - DNA, 25 bp, Homo sapien
cgttcctcaagagctcgacatttcc

SEQ ID NO: 5979206 - DNA, 25 bp, Homo sapien
caaactaattggcctgggtttccca

SEQ ID NO: 5979207 - DNA, 25 bp, Homo sapien
tgtcgtctcggttttcacgttgcta

SEQ ID NO: 5979208 - DNA, 25 bp, Homo sapien
acaaagcatagctccatgctcatct

SEQ ID NO: 5979209 - DNA, 25 bp, Homo sapien
gtatccggactcattcttccagcag

SEQ ID NO: 5979210 - DNA, 25 bp, Homo sapien
ttaagctctgcaatcagcgtctgat

SEQ ID NO: 5979211 - DNA, 25 bp, Homo sapien
tggtgttgtagaggttaaacagttc

SEQ ID NO: 5979212 - DNA, 25 bp, Homo sapien
ttatctcgttttctaatgttatagc

SEQ ID NO: 5979213 - DNA, 25 bp, Homo sapien
tattcccttcttgttttactgtcct

SEQ ID NO: 5979214 - DNA, 25 bp, Homo sapien
tctttagctgggtgattttcaaatt

SEQ ID NO: 5979215 - DNA, 25 bp, Homo sapien
tccttagactccgtttttggcttct

SEQ ID NO: 5979216 - DNA, 25 bp, Homo sapien
tttcacttccgttatttgatattga

SEQ ID NO: 5979217 - DNA, 25 bp, Homo sapien
ttatatctggggaagacatcgtcga

SEQ ID NO: 5979218 - DNA, 25 bp, Homo sapien
cgattcacgcaattgaactgccgat

SEQ ID NO: 5979219 - DNA, 25 bp, Homo sapien
cagatattatatctggggaagacat

SEQ ID NO: 5979220 - DNA, 25 bp, Homo sapien
gtctcgaacaatctcccgacatcag

SEQ ID NO: 5979221 - DNA, 25 bp, Homo sapien
gctctgcaatcagcgtctgattccg

SEQ ID NO: 5979222 - DNA, 25 bp, Homo sapien
attagagtcagtcgtccgtgaagaa

SEQ ID NO: 5979223 - DNA, 25 bp, Homo sapien
aaagagaccacacgcattacaaagc

SEQ ID NO: 5979224 - DNA, 25 bp, Homo sapien
ccaatatgcccttcttcttcgcttt

SEQ ID NO: 5979225 - DNA, 25 bp, Homo sapien
cggcagatactgcttcataacctaa

SEQ ID NO: 5979226 - DNA, 25 bp, Homo sapien
gcagatactgcttcataacctaaag

SEQ ID NO: 5979227 - DNA, 25 bp, Homo sapien
attttcaaattttcgtccagaaaca

SEQ ID NO: 5979228 - DNA, 25 bp, Homo sapien
gtctaattcattgatatgtctccta

SEQ ID NO: 5979229 - DNA, 25 bp, Homo sapien
cattacaaagcatagctccatgctc

SEQ ID NO: 5979230 - DNA, 25 bp, Homo sapien
tagaggttaaacagttcttacaaac

SEQ ID NO: 5979231 - DNA, 25 bp, Homo sapien
gtggaaaaagacttgtcattcgcct

SEQ ID NO: 5979232 - DNA, 25 bp, Homo sapien
aggcggtgtcgtctcggttttcacg

SEQ ID NO: 5979233 - DNA, 25 bp, Homo sapien
gtgcatgatttgtattacttttcct

SEQ ID NO: 5979234 - DNA, 25 bp, Homo sapien
gttcaaatacattatctcgttttct

SEQ ID NO: 5979235 - DNA, 25 bp, Homo sapien
tgccagagttgcggcggtagaggca

SEQ ID NO: 5979236 - DNA, 25 bp, Homo sapien
ttctttgataaaagcagattggtgt

SEQ ID NO: 5979237 - DNA, 25 bp, Homo sapien
tgttagctttgcgaccgcttgattc

SEQ ID NO: 5979238 - DNA, 25 bp, Homo sapien
gcttcttggatatcttcgcagtaga

SEQ ID NO: 5979239 - DNA, 25 bp, Homo sapien
tgaagcattgagggggaaagaggct

SEQ ID NO: 5979240 - DNA, 25 bp, Homo sapien
tgattcggtacctcggatggattag

SEQ ID NO: 5979241 - DNA, 25 bp, Homo sapien
tcgcttctttccttagactccgttt

SEQ ID NO: 5979242 - DNA, 25 bp, Homo sapien
atagcagtatcttgtttgggcagtt

SEQ ID NO: 5979243 - DNA, 25 bp, Homo sapien
tcgtatccggactcattcttccagc

SEQ ID NO: 5979244 - DNA, 25 bp, Homo sapien
aacagttcttacaaacaggaacatt

SEQ ID NO: 5979245 - DNA, 25 bp, Homo sapien
cttccaagcagcattgataagtgag

SEQ ID NO: 5979246 - DNA, 25 bp, Homo sapien
actgccgatttttgctcggcagata

SEQ ID NO: 5979247 - DNA, 25 bp, Homo sapien
atataaatctgtaacaagttctaac

SEQ ID NO: 5979248 - DNA, 25 bp, Homo sapien
ttgtgaatttgctttggatatacag

SEQ ID NO: 5979249 - DNA, 25 bp, Homo sapien
ccttaaaattcatattgttgcttat

SEQ ID NO: 5979250 - DNA, 25 bp, Homo sapien
atacgttattattgcaattggcatc

SEQ ID NO: 5979251 - DNA, 25 bp, Homo sapien
ataaatctgtaacaagttctaactc

SEQ ID NO: 5979252 - DNA, 25 bp, Homo sapien
ggtacctcggatggattagagtcag

SEQ ID NO: 5979253 - DNA, 25 bp, Homo sapien
tgttactctgttagctttgcgaccg

SEQ ID NO: 5979254 - DNA, 25 bp, Homo sapien
acttctcttggtatatagcagtatc

SEQ ID NO: 5979255 - DNA, 25 bp, Homo sapien
ttggacactatttcacttccgttat

SEQ ID NO: 5979256 - DNA, 25 bp, Homo sapien
gtcgttacgcttagcagatattata

SEQ ID NO: 5979257 - DNA, 25 bp, Homo sapien
aacctaaaggtggccatctcccaat

SEQ ID NO: 5979258 - DNA, 25 bp, Homo sapien
aagagaagggtacaagccaagtagg

SEQ ID NO: 5979259 - DNA, 25 bp, Homo sapien
ggagcctagggcctatggcacaaag

SEQ ID NO: 5979260 - DNA, 25 bp, Homo sapien
taaatttgaccgtgtggacttccac

SEQ ID NO: 5979261 - DNA, 25 bp, Homo sapien
attatggaattggagcgccaagaaa

SEQ ID NO: 5979262 - DNA, 25 bp, Homo sapien
aattatcttccctataagaaactgc

SEQ ID NO: 5979263 - DNA, 25 bp, Homo sapien
ggaaatggcttaaagatatatgtga

SEQ ID NO: 5979264 - DNA, 25 bp, Homo sapien
agaatcatacagagatgtagtgatt

SEQ ID NO: 5979265 - DNA, 25 bp, Homo sapien
ttctcattataactcatcaagccgt

SEQ ID NO: 5979266 - DNA, 25 bp, Homo sapien
aggagaaataaatttgaccgtgtgg

SEQ ID NO: 5979267 - DNA, 25 bp, Homo sapien
acagaagagacgtgagtggaaatgt

SEQ ID NO: 5979268 - DNA, 25 bp, Homo sapien
gactctcctttggaagacaaatttt

SEQ ID NO: 5979269 - DNA, 25 bp, Homo sapien
actaaacttcatcaactgctcaatg

SEQ ID NO: 5979270 - DNA, 25 bp, Homo sapien
acaatatgaaagattttatgaacct

SEQ ID NO: 5979271 - DNA, 25 bp, Homo sapien
ctgcagtgagtacatataaagagaa

SEQ ID NO: 5979272 - DNA, 25 bp, Homo sapien
tatatatgcatattttatgaacgtt

SEQ ID NO: 5979273 - DNA, 25 bp, Homo sapien
ctgattatgaaaactctgaacctca

SEQ ID NO: 5979274 - DNA, 25 bp, Homo sapien
attttaaactcagagaattggctgc

SEQ ID NO: 5979275 - DNA, 25 bp, Homo sapien
tgatcaagctggagcctagggccta

SEQ ID NO: 5979276 - DNA, 25 bp, Homo sapien
cacggcgaatcgatctataacgtag

SEQ ID NO: 5979277 - DNA, 25 bp, Homo sapien
cacttgatgaattagacgctggcgt

SEQ ID NO: 5979278 - DNA, 25 bp, Homo sapien
tttcgatgctactaatagtacacgt

SEQ ID NO: 5979279 - DNA, 25 bp, Homo sapien
taaaccaaaatatatctggctctcc

SEQ ID NO: 5979280 - DNA, 25 bp, Homo sapien
gagagcgcaggagaaataaatttga

SEQ ID NO: 5979281 - DNA, 25 bp, Homo sapien
attcaaccgatgtttttagagagct

SEQ ID NO: 5979282 - DNA, 25 bp, Homo sapien
tgataatgacaaatacgagtacaga

SEQ ID NO: 5979283 - DNA, 25 bp, Homo sapien
tggctctcccgtcacggcgaatcga

SEQ ID NO: 5979284 - DNA, 25 bp, Homo sapien
aatcatacagagatgtagtgattcg

SEQ ID NO: 5979285 - DNA, 25 bp, Homo sapien
gtaggattgtattttatgttatgaa

SEQ ID NO: 5979286 - DNA, 25 bp, Homo sapien
ataacgctaaggatatcggtagcac

SEQ ID NO: 5979287 - DNA, 25 bp, Homo sapien
tcaggtacttatcgtggttatccat

SEQ ID NO: 5979288 - DNA, 25 bp, Homo sapien
tacagtactatttccaacgataatg

SEQ ID NO: 5979289 - DNA, 25 bp, Homo sapien
atcaactgctcaatgactctccttt

SEQ ID NO: 5979290 - DNA, 25 bp, Homo sapien
aagattttaaagcacgtgataatga

SEQ ID NO: 5979291 - DNA, 25 bp, Homo sapien
gacgctggcgtttgtgacggaatga

SEQ ID NO: 5979292 - DNA, 25 bp, Homo sapien
cacatctcctgattatgaaaactct

SEQ ID NO: 5979293 - DNA, 25 bp, Homo sapien
aaggaaatggcttaaagatatatgt

SEQ ID NO: 5979294 - DNA, 25 bp, Homo sapien
cgtggttatccataaaagccaagtg

SEQ ID NO: 5979295 - DNA, 25 bp, Homo sapien
aaccaaaatatatctggctctcccg

SEQ ID NO: 5979296 - DNA, 25 bp, Homo sapien
cgtgataatgacaaatacgagtaca

SEQ ID NO: 5979297 - DNA, 25 bp, Homo sapien
aattacagaagagacgtgagtggaa

SEQ ID NO: 5979298 - DNA, 25 bp, Homo sapien
tttcagtacgctaaaaaattggagc

SEQ ID NO: 5979299 - DNA, 25 bp, Homo sapien
taataagatcagaacatatttggaa

SEQ ID NO: 5979300 - DNA, 25 bp, Homo sapien
ttggcctaccagctagaggaaagtc

SEQ ID NO: 5979301 - DNA, 25 bp, Homo sapien
acggaatgacgtatgaggaaattga

SEQ ID NO: 5979302 - DNA, 25 bp, Homo sapien
agtacgctaaaaaattggagcagtt

SEQ ID NO: 5979303 - DNA, 25 bp, Homo sapien
gtggagaatcatacagagatgtagt

SEQ ID NO: 5979304 - DNA, 25 bp, Homo sapien
attcgtttagagcccgtcattatgg

SEQ ID NO: 5979305 - DNA, 25 bp, Homo sapien
attggctgcccaaaatgccataaaa

SEQ ID NO: 5979306 - DNA, 25 bp, Homo sapien
gtagtgattcgtttagagcccgtca

SEQ ID NO: 5979307 - DNA, 25 bp, Homo sapien
tagggcctatggcacaaaggtcacc

SEQ ID NO: 5979308 - DNA, 25 bp, Homo sapien
accaaaattaaagcaaacatccctg

SEQ ID NO: 5979309 - DNA, 25 bp, Homo sapien
aaaaaattggagcagttagtgaaag

SEQ ID NO: 5979310 - DNA, 25 bp, Homo sapien
atgtagtgattcgtttagagcccgt

SEQ ID NO: 5979311 - DNA, 25 bp, Homo sapien
agaaactgcaatggaaagcacttga

SEQ ID NO: 5979312 - DNA, 25 bp, Homo sapien
aagagacgtgagtggaaatgtccca

SEQ ID NO: 5979313 - DNA, 25 bp, Homo sapien
aaattaaagcaaacatccctgcagt

SEQ ID NO: 5979314 - DNA, 25 bp, Homo sapien
atggaaagcacttgatgaattagac

SEQ ID NO: 5979315 - DNA, 25 bp, Homo sapien
agcacatctcctgattatgaaaact

SEQ ID NO: 5979316 - DNA, 25 bp, Homo sapien
actaaagaagacggatctgtggcag

SEQ ID NO: 5979317 - DNA, 25 bp, Homo sapien
agaagagacgtgagtggaaatgtcc

SEQ ID NO: 5979318 - DNA, 25 bp, Homo sapien
gtgaaaagaataatattcaaccgat

SEQ ID NO: 5979319 - DNA, 25 bp, Homo sapien
gaatccccttggatgtcaatcccac

SEQ ID NO: 5979320 - DNA, 25 bp, Homo sapien
acggatctgtggcagttttcgatgc

SEQ ID NO: 5979321 - DNA, 25 bp, Homo sapien
atccctgcagtgagtacatataaag

SEQ ID NO: 5979322 - DNA, 25 bp, Homo sapien
cggtagcacatctcctgattatgaa

SEQ ID NO: 5979323 - DNA, 25 bp, Homo sapien
gagacgtgagtggaaatgtcccaat

SEQ ID NO: 5979324 - DNA, 25 bp, Homo sapien
ttatttcccaaaaaattatcaggta

SEQ ID NO: 5979325 - DNA, 25 bp, Homo sapien
cccgtcattatggaattggagcgcc

SEQ ID NO: 5979326 - DNA, 25 bp, Homo sapien
atacagagatgtagtgattcgttta

SEQ ID NO: 5979327 - DNA, 25 bp, Homo sapien
attaaagcaaacatccctgcagtga

SEQ ID NO: 5979328 - DNA, 25 bp, Homo sapien
atccccttggatgtcaatcccacta

SEQ ID NO: 5979329 - DNA, 25 bp, Homo sapien
agctggagcctagggcctatggcac

SEQ ID NO: 5979330 - DNA, 25 bp, Homo sapien
ccccaaaaagataaggatatgacgt

SEQ ID NO: 5979331 - DNA, 25 bp, Homo sapien
agatgtagtgattcgtttagagccc

SEQ ID NO: 5979332 - DNA, 25 bp, Homo sapien
gagcgcaggagaaataaatttgacc

SEQ ID NO: 5979333 - DNA, 25 bp, Homo sapien
acagagatgtagtgattcgtttaga

SEQ ID NO: 5979334 - DNA, 25 bp, Homo sapien
gaaatgtcccaatggatgctgagtt

SEQ ID NO: 5979335 - DNA, 25 bp, Homo sapien
aaaattggcggggattcatcactgt

SEQ ID NO: 5979336 - DNA, 25 bp, Homo sapien
gtgggaaattacagaagagacgtga

SEQ ID NO: 5979337 - DNA, 25 bp, Homo sapien
atgacgttcattaagttggtcaata

SEQ ID NO: 5979338 - DNA, 25 bp, Homo sapien
tttggaaagtaggattgtattttat

SEQ ID NO: 5979339 - DNA, 25 bp, Homo sapien
caggaggaatccccttggatgtcaa

SEQ ID NO: 5979340 - DNA, 25 bp, Homo sapien
ttggacccccaaaaagataaggata

SEQ ID NO: 5979341 - DNA, 25 bp, Homo sapien
ggtgtatatatgcatattttatgaa

SEQ ID NO: 5979342 - DNA, 25 bp, Homo sapien
cacaggaggaatccccttggatgtc

SEQ ID NO: 5979343 - DNA, 25 bp, Homo sapien
cggggattcatcactgtctgaaaga

SEQ ID NO: 5979344 - DNA, 25 bp, Homo sapien
tcatgtggcggaagctgattttttg

SEQ ID NO: 5979345 - DNA, 25 bp, Homo sapien
gaaattacagaagagacgtgagtgg

SEQ ID NO: 5979346 - DNA, 25 bp, Homo sapien
acgagtacagatatcgtggtggaga

SEQ ID NO: 5979347 - DNA, 25 bp, Homo sapien
agccaagtaggtgagctttctcaaa

SEQ ID NO: 5979348 - DNA, 25 bp, Homo sapien
aaactgcaatggaaagcacttgatg

SEQ ID NO: 5979349 - DNA, 25 bp, Homo sapien
agccaagtgttttaatgtgggaaat

SEQ ID NO: 5979350 - DNA, 25 bp, Homo sapien
ctataacgtagagaaaaaaattggc

SEQ ID NO: 5979351 - DNA, 25 bp, Homo sapien
agcagttagtgaaagagagcgcagg

SEQ ID NO: 5979352 - DNA, 25 bp, Homo sapien
tcgtttagagcccgtcattatggaa

SEQ ID NO: 5979353 - DNA, 25 bp, Homo sapien
taatattcaaccgatgtttttagag

SEQ ID NO: 5979354 - DNA, 25 bp, Homo sapien
caacaaacggcaaattatcttccct

SEQ ID NO: 5979355 - DNA, 25 bp, Homo sapien
ttatgaatattcgtcctaaaccaaa

SEQ ID NO: 5979356 - DNA, 25 bp, Homo sapien
gctggagtaacgatcatgaactgat

SEQ ID NO: 5979357 - DNA, 25 bp, Homo sapien
gataatggttggcctaccagctaga

SEQ ID NO: 5979358 - DNA, 25 bp, Homo sapien
tacatataaagagaagggtacaagc

SEQ ID NO: 5979359 - DNA, 25 bp, Homo sapien
aggaatccccttggatgtcaatccc

SEQ ID NO: 5979360 - DNA, 25 bp, Homo sapien
atgtgggaaattacagaagagacgt

SEQ ID NO: 5979361 - DNA, 25 bp, Homo sapien
tatatctggctctcccgtcacggcg

SEQ ID NO: 5979362 - DNA, 25 bp, Homo sapien
taattttaaactcagagaattggct

SEQ ID NO: 5979363 - DNA, 25 bp, Homo sapien
ctacacacattgatcaagctggagc

SEQ ID NO: 5979364 - DNA, 25 bp, Homo sapien
taaagaagacggatctgtggcagtt

SEQ ID NO: 5979365 - DNA, 25 bp, Homo sapien
tctcctgattatgaaaactctgaac

SEQ ID NO: 5979366 - DNA, 25 bp, Homo sapien
atcgtggtggagaatcatacagaga

SEQ ID NO: 5979367 - DNA, 25 bp, Homo sapien
ctaaaaaattggagcagttagtgaa

SEQ ID NO: 5979368 - DNA, 25 bp, Homo sapien
tttaaactcagagaattggctgccc

SEQ ID NO: 5979369 - DNA, 25 bp, Homo sapien
actatttccaacgataatgatatca

SEQ ID NO: 5979370 - DNA, 25 bp, Homo sapien
ctcatcaagccgtacttcggtgtat

SEQ ID NO: 5979371 - DNA, 25 bp, Homo sapien
tcggtgtatatatgcatattttatg

SEQ ID NO: 5979372 - DNA, 25 bp, Homo sapien
tccacaggaggaatccccttggatg

SEQ ID NO: 5979373 - DNA, 25 bp, Homo sapien
atatcggtagcacatctcctgatta

SEQ ID NO: 5979374 - DNA, 25 bp, Homo sapien
gtatgtgtgataatggttggcctac

SEQ ID NO: 5979375 - DNA, 25 bp, Homo sapien
gatgctgagttttttaacttcgaaa

SEQ ID NO: 5979376 - DNA, 25 bp, Homo sapien
aactcatcaagccgtacttcggtgt

SEQ ID NO: 5979377 - DNA, 25 bp, Homo sapien
agctgattttttggaaagaattaga

SEQ ID NO: 5979378 - DNA, 25 bp, Homo sapien
ttactaaagaagacggatctgtggc

SEQ ID NO: 5979379 - DNA, 25 bp, Homo sapien
gaaaactctgaacctcatgtggcgg

SEQ ID NO: 5979380 - DNA, 25 bp, Homo sapien
cctataagaaactgcaatggaaagc

SEQ ID NO: 5979381 - DNA, 25 bp, Homo sapien
ttataactcatcaagccgtacttcg

SEQ ID NO: 5979382 - DNA, 25 bp, Homo sapien
ataaggatatgacgttcattaagtt

SEQ ID NO: 5979383 - DNA, 25 bp, Homo sapien
gtgaaagagagcgcaggagaaataa

SEQ ID NO: 5979384 - DNA, 25 bp, Homo sapien
cttgatgaattagacgctggcgttt

SEQ ID NO: 5979385 - DNA, 25 bp, Homo sapien
cctgaagattttaaagcacgtgata

SEQ ID NO: 5979386 - DNA, 25 bp, Homo sapien
agtggaaatgtcccaatggatgctg

SEQ ID NO: 5979387 - DNA, 25 bp, Homo sapien
ataatgacaaatacgagtacagata

SEQ ID NO: 5979388 - DNA, 25 bp, Homo sapien
aggattgtattttatgttatgaata

SEQ ID NO: 5979389 - DNA, 25 bp, Homo sapien
aaatggcttaaagatatatgtgaaa

SEQ ID NO: 5979390 - DNA, 25 bp, Homo sapien
gagcgccaagaaaatgttctcatta

SEQ ID NO: 5979391 - DNA, 25 bp, Homo sapien
acattgatcaagctggagcctaggg

SEQ ID NO: 5979392 - DNA, 25 bp, Homo sapien
ctatggcacaaaggtcaccaaaatt

SEQ ID NO: 5979393 - DNA, 25 bp, Homo sapien
aaaatacagataattttaaactcag

SEQ ID NO: 5979394 - DNA, 25 bp, Homo sapien
catgaactgattataaataacgcta

SEQ ID NO: 5979395 - DNA, 25 bp, Homo sapien
tccaacgataatgatatcaaagtat

SEQ ID NO: 5979396 - DNA, 25 bp, Homo sapien
actgcaatggaaagcacttgatgaa

SEQ ID NO: 5979397 - DNA, 25 bp, Homo sapien
gctgcccaaaatgccataaaagata

SEQ ID NO: 5979398 - DNA, 25 bp, Homo sapien
gtacttatcgtggttatccataaaa

SEQ ID NO: 5979399 - DNA, 25 bp, Homo sapien
aagcaaacatccctgcagtgagtac

SEQ ID NO: 5979400 - DNA, 25 bp, Homo sapien
cgtttgtgacggaatgacgtatgag

SEQ ID NO: 5979401 - DNA, 25 bp, Homo sapien
ggcacaaaggtcaccaaaattaaag

SEQ ID NO: 5979402 - DNA, 25 bp, Homo sapien
ggagcagttagtgaaagagagcgca

SEQ ID NO: 5979403 - DNA, 25 bp, Homo sapien
gtactatttccaacgataatgatat

SEQ ID NO: 5979404 - DNA, 25 bp, Homo sapien
aacatatttggaaagtaggattgta

SEQ ID NO: 5979405 - DNA, 25 bp, Homo sapien
ctgattttttggaaagaattagaca

SEQ ID NO: 5979406 - DNA, 25 bp, Homo sapien
tgcaatggaaagcacttgatgaatt

SEQ ID NO: 5979407 - DNA, 25 bp, Homo sapien
ccaaaaagataaggatatgacgttc

SEQ ID NO: 5979408 - DNA, 25 bp, Homo sapien
cagagaattggctgcccaaaatgcc

SEQ ID NO: 5979409 - DNA, 25 bp, Homo sapien
cagttagtgaaagagagcgcaggag

SEQ ID NO: 5979410 - DNA, 25 bp, Homo sapien
ccagctagaggaaagtcttttattt

SEQ ID NO: 5979411 - DNA, 25 bp, Homo sapien
caaaaaattatcaggtacttatcgt

SEQ ID NO: 5979412 - DNA, 25 bp, Homo sapien
aaaaaattggcggggattcatcact

SEQ ID NO: 5979413 - DNA, 25 bp, Homo sapien
agacggatctgtggcagttttcgat

SEQ ID NO: 5979414 - DNA, 25 bp, Homo sapien
gggaaattacagaagagacgtgagt

SEQ ID NO: 5979415 - DNA, 25 bp, Homo sapien
aacgatcatgaactgattataaata

SEQ ID NO: 5979416 - DNA, 25 bp, Homo sapien
tccaccttaaaaagaacacaacaaa

SEQ ID NO: 5979417 - DNA, 25 bp, Homo sapien
aactcagagaattggctgcccaaaa

SEQ ID NO: 5979418 - DNA, 25 bp, Homo sapien
gccaagaaaatgttctcattataac

SEQ ID NO: 5979419 - DNA, 25 bp, Homo sapien
caagaaaatgttctcattataactc

SEQ ID NO: 5979420 - DNA, 25 bp, Homo sapien
aatacagataattttaaactcagag

SEQ ID NO: 5979421 - DNA, 25 bp, Homo sapien
ggcggggattcatcactgtctgaaa

SEQ ID NO: 5979422 - DNA, 25 bp, Homo sapien
aaccgatgtttttagagagctggag

SEQ ID NO: 5979423 - DNA, 25 bp, Homo sapien
gagaattggctgcccaaaatgccat

SEQ ID NO: 5979424 - DNA, 25 bp, Homo sapien
gagtacagatatcgtggtggagaat

SEQ ID NO: 5979425 - DNA, 25 bp, Homo sapien
caatgactctcctttggaagacaaa

SEQ ID NO: 5979426 - DNA, 25 bp, Homo sapien
atgaatattcgtcctaaaccaaaat

SEQ ID NO: 5979427 - DNA, 25 bp, Homo sapien
agaagtagtaattaataagatcaga

SEQ ID NO: 5979428 - DNA, 25 bp, Homo sapien
caaaatgccataaaagatattgtta

SEQ ID NO: 5979429 - DNA, 25 bp, Homo sapien
aagtaggtgagctttctcaaagctc

SEQ ID NO: 5979430 - DNA, 25 bp, Homo sapien
gaaaaaaattggcggggattcatca

SEQ ID NO: 5979431 - DNA, 25 bp, Homo sapien
aatgacaaatacgagtacagatatc

SEQ ID NO: 5979432 - DNA, 25 bp, Homo sapien
atcgatctataacgtagagaaaaaa

SEQ ID NO: 5979433 - DNA, 25 bp, Homo sapien
tgttctcattataactcatcaagcc

SEQ ID NO: 5979434 - DNA, 25 bp, Homo sapien
cagtactatttccaacgataatgat

SEQ ID NO: 5979435 - DNA, 25 bp, Homo sapien
tgttatgaatattcgtcctaaacca

SEQ ID NO: 5979436 - DNA, 25 bp, Homo sapien
tccctataagaaactgcaatggaaa

SEQ ID NO: 5979437 - DNA, 25 bp, Homo sapien
gggcctatggcacaaaggtcaccaa

SEQ ID NO: 5979438 - DNA, 25 bp, Homo sapien
tacacgtaaaagaaggaaatggctt

SEQ ID NO: 5979439 - DNA, 25 bp, Homo sapien
ttttactaaagaagacggatctgtg

SEQ ID NO: 5979440 - DNA, 25 bp, Homo sapien
gaaaagaataatattcaaccgatgt

SEQ ID NO: 5979441 - DNA, 25 bp, Homo sapien
gaatattcgtcctaaaccaaaatat

SEQ ID NO: 5979442 - DNA, 25 bp, Homo sapien
tttaatgtgggaaattacagaagag

SEQ ID NO: 5979443 - DNA, 25 bp, Homo sapien
atgccataaaagatattgttaattt

SEQ ID NO: 5979444 - DNA, 25 bp, Homo sapien
atcgtggttatccataaaagccaag

SEQ ID NO: 5979445 - DNA, 25 bp, Homo sapien
agcacttgatgaattagacgctggc

SEQ ID NO: 5979446 - DNA, 25 bp, Homo sapien
cctagggcctatggcacaaaggtca

SEQ ID NO: 5979447 - DNA, 25 bp, Homo sapien
tttccaacgataatgatatcaaagt

SEQ ID NO: 5979448 - DNA, 25 bp, Homo sapien
tcctgattatgaaaactctgaacct

SEQ ID NO: 5979449 - DNA, 25 bp, Homo sapien
gataattttaaactcagagaattgg

SEQ ID NO: 5979450 - DNA, 25 bp, Homo sapien
agaacatatttggaaagtaggattg

SEQ ID NO: 5979451 - DNA, 25 bp, Homo sapien
tcatacagagatgtagtgattcgtt

SEQ ID NO: 5979452 - DNA, 25 bp, Homo sapien
cacgtaaaagaaggaaatggcttaa

SEQ ID NO: 5979453 - DNA, 25 bp, Homo sapien
gtcctaaaccaaaatatatctggct

SEQ ID NO: 5979454 - DNA, 25 bp, Homo sapien
ttttaaagcacgtgataatgacaaa

SEQ ID NO: 5979455 - DNA, 25 bp, Homo sapien
tggctgcccaaaatgccataaaaga

SEQ ID NO: 5979456 - DNA, 25 bp, Homo sapien
ttcccaaaaaattatcaggtactta

SEQ ID NO: 5979457 - DNA, 25 bp, Homo sapien
gaacgttccacaggaggaatcccct

SEQ ID NO: 5979458 - DNA, 25 bp, Homo sapien
taagaaactgcaatggaaagcactt

SEQ ID NO: 5979459 - DNA, 25 bp, Homo sapien
aattggcggggattcatcactgtct

SEQ ID NO: 5979460 - DNA, 25 bp, Homo sapien
gagaagggtacaagccaagtaggtg

SEQ ID NO: 5979461 - DNA, 25 bp, Homo sapien
attttatgttatgaatattcgtcct

SEQ ID NO: 5979462 - DNA, 25 bp, Homo sapien
ttataaataacgctaaggatatcgg

SEQ ID NO: 5979463 - DNA, 25 bp, Homo sapien
ggacccccaaaaagataaggatatg

SEQ ID NO: 5979464 - DNA, 25 bp, Homo sapien
gttccacaggaggaatccccttgga

SEQ ID NO: 5979465 - DNA, 25 bp, Homo sapien
atgaattagacgctggcgtttgtga

SEQ ID NO: 5979466 - DNA, 25 bp, Homo sapien
agataaggatatgacgttcattaag

SEQ ID NO: 5979467 - DNA, 25 bp, Homo sapien
caatggaaagcacttgatgaattag

SEQ ID NO: 5979468 - DNA, 25 bp, Homo sapien
gaaattgaaaaagaatatcctgaag

SEQ ID NO: 5979469 - DNA, 25 bp, Homo sapien
ctgtggcagttttcgatgctactaa

SEQ ID NO: 5979470 - DNA, 25 bp, Homo sapien
tccataaaagccaagtgttttaatg

SEQ ID NO: 5979471 - DNA, 25 bp, Homo sapien
ggatatgacgttcattaagttggtc

SEQ ID NO: 5979472 - DNA, 25 bp, Homo sapien
caaaattaaagcaaacatccctgca

SEQ ID NO: 5979473 - DNA, 25 bp, Homo sapien
tcccaatggatgctgagttttttaa

SEQ ID NO: 5979474 - DNA, 25 bp, Homo sapien
ggcctaccagctagaggaaagtctt

SEQ ID NO: 5979475 - DNA, 25 bp, Homo sapien
acagatatcgtggtggagaatcata

SEQ ID NO: 5979476 - DNA, 25 bp, Homo sapien
gcgcaggagaaataaatttgaccgt

SEQ ID NO: 5979477 - DNA, 25 bp, Homo sapien
gttagtgaaagagagcgcaggagaa

SEQ ID NO: 5979478 - DNA, 25 bp, Homo sapien
attgatcaagctggagcctagggcc

SEQ ID NO: 5979479 - DNA, 25 bp, Homo sapien
aaagcacttgatgaattagacgctg

SEQ ID NO: 5979480 - DNA, 25 bp, Homo sapien
tcactgtctgaaagaggctttcagt

SEQ ID NO: 5979481 - DNA, 25 bp, Homo sapien
catataaagagaagggtacaagcca

SEQ ID NO: 5979482 - DNA, 25 bp, Homo sapien
attaataagatcagaacatatttgg

SEQ ID NO: 5979483 - DNA, 25 bp, Homo sapien
aacttcatcaactgctcaatgactc

SEQ ID NO: 5979484 - DNA, 25 bp, Homo sapien
aataaatttgaccgtgtggacttcc

SEQ ID NO: 5979485 - DNA, 25 bp, Homo sapien
tgaccgtgtggacttccaccttaaa

SEQ ID NO: 5979486 - DNA, 25 bp, Homo sapien
gtagcacatctcctgattatgaaaa

SEQ ID NO: 5979487 - DNA, 25 bp, Homo sapien
ttttttaacttcgaaaatacagata

SEQ ID NO: 5979488 - DNA, 25 bp, Homo sapien
tatggaattggagcgccaagaaaat

SEQ ID NO: 5979489 - DNA, 25 bp, Homo sapien
acacattgatcaagctggagcctag

SEQ ID NO: 5979490 - DNA, 25 bp, Homo sapien
tatttggaaagtaggattgtatttt

SEQ ID NO: 5979491 - DNA, 25 bp, Homo sapien
cactacacacattgatcaagctgga

SEQ ID NO: 5979492 - DNA, 25 bp, Homo sapien
ggaggaatccccttggatgtcaatc

SEQ ID NO: 5979493 - DNA, 25 bp, Homo sapien
atatgacgttcattaagttggtcaa

SEQ ID NO: 5979494 - DNA, 25 bp, Homo sapien
cagttttcgatgctactaatagtac

SEQ ID NO: 5979495 - DNA, 25 bp, Homo sapien
tataagaaactgcaatggaaagcac

SEQ ID NO: 5979496 - DNA, 25 bp, Homo sapien
acaaatacgagtacagatatcgtgg

SEQ ID NO: 5979497 - DNA, 25 bp, Homo sapien
tgagtggaaatgtcccaatggatgc

SEQ ID NO: 5979498 - DNA, 25 bp, Homo sapien
tctcccgtcacggcgaatcgatcta

SEQ ID NO: 5979499 - DNA, 25 bp, Homo sapien
ttgaaaaagaatatcctgaagattt

SEQ ID NO: 5979500 - DNA, 25 bp, Homo sapien
agaataatattcaaccgatgttttt

SEQ ID NO: 5979501 - DNA, 25 bp, Homo sapien
ttttatgaacgttccacaggaggaa

SEQ ID NO: 5979502 - DNA, 25 bp, Homo sapien
gaaagtaggattgtattttatgtta

SEQ ID NO: 5979503 - DNA, 25 bp, Homo sapien
cacgtgataatgacaaatacgagta

SEQ ID NO: 5979504 - DNA, 25 bp, Homo sapien
ggaatgacgtatgaggaaattgaaa

SEQ ID NO: 5979505 - DNA, 25 bp, Homo sapien
cgtacttcggtgtatatatgcatat

SEQ ID NO: 5979506 - DNA, 25 bp, Homo sapien
gtaggtgagctttctcaaagctcaa

SEQ ID NO: 5979507 - DNA, 25 bp, Homo sapien
tcgatgctactaatagtacacgtaa

SEQ ID NO: 5979508 - DNA, 25 bp, Homo sapien
ttagagcccgtcattatggaattgg

SEQ ID NO: 5979509 - DNA, 25 bp, Homo sapien
gattatgaaaactctgaacctcatg

SEQ ID NO: 5979510 - DNA, 25 bp, Homo sapien
agcctagggcctatggcacaaaggt

SEQ ID NO: 5979511 - DNA, 25 bp, Homo sapien
caactgctcaatgactctcctttgg

SEQ ID NO: 5979512 - DNA, 25 bp, Homo sapien
ggatctgtggcagttttcgatgcta

SEQ ID NO: 5979513 - DNA, 25 bp, Homo sapien
gttttcgatgctactaatagtacac

SEQ ID NO: 5979514 - DNA, 25 bp, Homo sapien
ttttttactaaagaagacggatctg

SEQ ID NO: 5979515 - DNA, 25 bp, Homo sapien
agggtacaagccaagtaggtgagct

SEQ ID NO: 5979516 - DNA, 25 bp, Homo sapien
cgttcattaagttggtcaatattat

SEQ ID NO: 5979517 - DNA, 25 bp, Homo sapien
ctgattataaataacgctaaggata

SEQ ID NO: 5979518 - DNA, 25 bp, Homo sapien
tgtttttagagagctggagtaacga

SEQ ID NO: 5979519 - DNA, 25 bp, Homo sapien
gaattggctgcccaaaatgccataa

SEQ ID NO: 5979520 - DNA, 25 bp, Homo sapien
ttttaacttcgaaaatacagataat

SEQ ID NO: 5979521 - DNA, 25 bp, Homo sapien
atatcgtggtggagaatcatacaga

SEQ ID NO: 5979522 - DNA, 25 bp, Homo sapien
aaaagaatatcctgaagattttaaa

SEQ ID NO: 5979523 - DNA, 25 bp, Homo sapien
gcagtgagtacatataaagagaagg

SEQ ID NO: 5979524 - DNA, 25 bp, Homo sapien
aaagccaagtgttttaatgtgggaa

SEQ ID NO: 5979525 - DNA, 25 bp, Homo sapien
tcccgtcacggcgaatcgatctata

SEQ ID NO: 5979526 - DNA, 25 bp, Homo sapien
taaactcagagaattggctgcccaa

SEQ ID NO: 5979527 - DNA, 25 bp, Homo sapien
caaattatcttccctataagaaact

SEQ ID NO: 5979528 - DNA, 25 bp, Homo sapien
gagctttctcaaagctcaactaaac

SEQ ID NO: 5979529 - DNA, 25 bp, Homo sapien
agaaaatgttctcattataactcat

SEQ ID NO: 5979530 - DNA, 25 bp, Homo sapien
ataagatcagaacatatttggaaag

SEQ ID NO: 5979531 - DNA, 25 bp, Homo sapien
ggttggcctaccagctagaggaaag

SEQ ID NO: 5979532 - DNA, 25 bp, Homo sapien
agacaatatgaaagattttatgaac

SEQ ID NO: 5979533 - DNA, 25 bp, Homo sapien
aaagcacgtgataatgacaaatacg

SEQ ID NO: 5979534 - DNA, 25 bp, Homo sapien
aactgattataaataacgctaagga

SEQ ID NO: 5979535 - DNA, 25 bp, Homo sapien
ttatgaacgttccacaggaggaatc

SEQ ID NO: 5979536 - DNA, 25 bp, Homo sapien
tcttttatttcccaaaaaattatca

SEQ ID NO: 5979537 - DNA, 25 bp, Homo sapien
tatccataaaagccaagtgttttaa

SEQ ID NO: 5979538 - DNA, 25 bp, Homo sapien
ggcggaagctgattttttggaaaga

SEQ ID NO: 5979539 - DNA, 25 bp, Homo sapien
caaagtatgtgtgataatggttggc

SEQ ID NO: 5979540 - DNA, 25 bp, Homo sapien
aaaatatatctggctctcccgtcac

SEQ ID NO: 5979541 - DNA, 25 bp, Homo sapien
cctaaaccaaaatatatctggctct

SEQ ID NO: 5979542 - DNA, 25 bp, Homo sapien
tcattatggaattggagcgccaaga

SEQ ID NO: 5979543 - DNA, 25 bp, Homo sapien
tgacaaatacgagtacagatatcgt

SEQ ID NO: 5979544 - DNA, 25 bp, Homo sapien
agaacacaacaaacggcaaattatc

SEQ ID NO: 5979545 - DNA, 25 bp, Homo sapien
gaaataaatttgaccgtgtggactt

SEQ ID NO: 5979546 - DNA, 25 bp, Homo sapien
ggatgtcaatcccactacacacatt

SEQ ID NO: 5979547 - DNA, 25 bp, Homo sapien
tggtggagaatcatacagagatgta

SEQ ID NO: 5979548 - DNA, 25 bp, Homo sapien
tcatcaactgctcaatgactctcct

SEQ ID NO: 5979549 - DNA, 25 bp, Homo sapien
tgaactgattataaataacgctaag

SEQ ID NO: 5979550 - DNA, 25 bp, Homo sapien
attagacgctggcgtttgtgacgga

SEQ ID NO: 5979551 - DNA, 25 bp, Homo sapien
atgactctcctttggaagacaaatt

SEQ ID NO: 5979552 - DNA, 25 bp, Homo sapien
aagtagtaattaataagatcagaac

SEQ ID NO: 5979553 - DNA, 25 bp, Homo sapien
gtattttatgttatgaatattcgtc

SEQ ID NO: 5979554 - DNA, 25 bp, Homo sapien
aaagataaggatatgacgttcatta

SEQ ID NO: 5979555 - DNA, 25 bp, Homo sapien
tctggctctcccgtcacggcgaatc

SEQ ID NO: 5979556 - DNA, 25 bp, Homo sapien
tgagttttttaacttcgaaaataca

SEQ ID NO: 5979557 - DNA, 25 bp, Homo sapien
tgctgagttttttaacttcgaaaat

SEQ ID NO: 5979558 - DNA, 25 bp, Homo sapien
tcaccaaaattaaagcaaacatccc

SEQ ID NO: 5979559 - DNA, 25 bp, Homo sapien
gattataaataacgctaaggatatc

SEQ ID NO: 5979560 - DNA, 25 bp, Homo sapien
actgctcaatgactctcctttggaa

SEQ ID NO: 5979561 - DNA, 25 bp, Homo sapien
ttcatcactgtctgaaagaggcttt

SEQ ID NO: 5979562 - DNA, 25 bp, Homo sapien
tgaagattttaaagcacgtgataat

SEQ ID NO: 5979563 - DNA, 25 bp, Homo sapien
gtttagagcccgtcattatggaatt

SEQ ID NO: 5979564 - DNA, 25 bp, Homo sapien
gagagctggagtaacgatcatgaac

SEQ ID NO: 5979565 - DNA, 25 bp, Homo sapien
ctactaatagtacacgtaaaagaag

SEQ ID NO: 5979566 - DNA, 25 bp, Homo sapien
aagaagacggatctgtggcagtttt

SEQ ID NO: 5979567 - DNA, 25 bp, Homo sapien
tataaagagaagggtacaagccaag

SEQ ID NO: 5979568 - DNA, 25 bp, Homo sapien
gccgtacttcggtgtatatatgcat

SEQ ID NO: 5979569 - DNA, 25 bp, Homo sapien
atctgtggcagttttcgatgctact

SEQ ID NO: 5979570 - DNA, 25 bp, Homo sapien
gaagacggatctgtggcagttttcg

SEQ ID NO: 5979571 - DNA, 25 bp, Homo sapien
gcaggagaaataaatttgaccgtgt

SEQ ID NO: 5979572 - DNA, 25 bp, Homo sapien
aggtacttatcgtggttatccataa

SEQ ID NO: 5979573 - DNA, 25 bp, Homo sapien
ttggcggggattcatcactgtctga

SEQ ID NO: 5979574 - DNA, 25 bp, Homo sapien
aagccgtacttcggtgtatatatgc

SEQ ID NO: 5979575 - DNA, 25 bp, Homo sapien
tcaaagctcaactaaacttcatcaa

SEQ ID NO: 5979576 - DNA, 25 bp, Homo sapien
tgaaagattttatgaacctttggac

SEQ ID NO: 5979577 - DNA, 25 bp, Homo sapien
aaagaataatattcaaccgatgttt

SEQ ID NO: 5979578 - DNA, 25 bp, Homo sapien
attggagcgccaagaaaatgttctc

SEQ ID NO: 5979579 - DNA, 25 bp, Homo sapien
cttccctataagaaactgcaatgga

SEQ ID NO: 5979580 - DNA, 25 bp, Homo sapien
atcaaagtatgtgtgataatggttg

SEQ ID NO: 5979581 - DNA, 25 bp, Homo sapien
tttgtgacggaatgacgtatgagga

SEQ ID NO: 5979582 - DNA, 25 bp, Homo sapien
gattcatcactgtctgaaagaggct

SEQ ID NO: 5979583 - DNA, 25 bp, Homo sapien
gaagggtacaagccaagtaggtgag

SEQ ID NO: 5979584 - DNA, 25 bp, Homo sapien
aaattatcaggtacttatcgtggtt

SEQ ID NO: 5979585 - DNA, 25 bp, Homo sapien
ttatgaaaactctgaacctcatgtg

SEQ ID NO: 5979586 - DNA, 25 bp, Homo sapien
gcctatggcacaaaggtcaccaaaa

SEQ ID NO: 5979587 - DNA, 25 bp, Homo sapien
tagacgctggcgtttgtgacggaat

SEQ ID NO: 5979588 - DNA, 25 bp, Homo sapien
gacttccaccttaaaaagaacacaa

SEQ ID NO: 5979589 - DNA, 25 bp, Homo sapien
agaggctttcagtacgctaaaaaat

SEQ ID NO: 5979590 - DNA, 25 bp, Homo sapien
aaagaggctttcagtacgctaaaaa

SEQ ID NO: 5979591 - DNA, 25 bp, Homo sapien
aagtatgtgtgataatggttggcct

SEQ ID NO: 5979592 - DNA, 25 bp, Homo sapien
gttttaatgtgggaaattacagaag

SEQ ID NO: 5979593 - DNA, 25 bp, Homo sapien
tttttagagagctggagtaacgatc

SEQ ID NO: 5979594 - DNA, 25 bp, Homo sapien
tatgttatgaatattcgtcctaaac

SEQ ID NO: 5979595 - DNA, 25 bp, Homo sapien
gattttaaagcacgtgataatgaca

SEQ ID NO: 5979596 - DNA, 25 bp, Homo sapien
ttatcttccctataagaaactgcaa

SEQ ID NO: 5979597 - DNA, 25 bp, Homo sapien
ccaagtgttttaatgtgggaaatta

SEQ ID NO: 5979598 - DNA, 25 bp, Homo sapien
cttccaccttaaaaagaacacaaca

SEQ ID NO: 5979599 - DNA, 25 bp, Homo sapien
aatgttctcattataactcatcaag

SEQ ID NO: 5979600 - DNA, 25 bp, Homo sapien
gttatccataaaagccaagtgtttt

SEQ ID NO: 5979601 - DNA, 25 bp, Homo sapien
tttagagagctggagtaacgatcat

SEQ ID NO: 5979602 - DNA, 25 bp, Homo sapien
cggaagctgattttttggaaagaat

SEQ ID NO: 5979603 - DNA, 25 bp, Homo sapien
tctcaaagctcaactaaacttcatc

SEQ ID NO: 5979604 - DNA, 25 bp, Homo sapien
atgtggcggaagctgattttttgga

SEQ ID NO: 5979605 - DNA, 25 bp, Homo sapien
acggcaaattatcttccctataaga

SEQ ID NO: 5979606 - DNA, 25 bp, Homo sapien
ccaagtaggtgagctttctcaaagc

SEQ ID NO: 5979607 - DNA, 25 bp, Homo sapien
agagcccgtcattatggaattggag

SEQ ID NO: 5979608 - DNA, 25 bp, Homo sapien
tcagtacgctaaaaaattggagcag

SEQ ID NO: 5979609 - DNA, 25 bp, Homo sapien
ttggagcagttagtgaaagagagcg

SEQ ID NO: 5979610 - DNA, 25 bp, Homo sapien
cccaaaatgccataaaagatattgt

SEQ ID NO: 5979611 - DNA, 25 bp, Homo sapien
ccttggatgtcaatcccactacaca

SEQ ID NO: 5979612 - DNA, 25 bp, Homo sapien
caacgataatgatatcaaagtatgt

SEQ ID NO: 5979613 - DNA, 25 bp, Homo sapien
ctcagagaattggctgcccaaaatg

SEQ ID NO: 5979614 - DNA, 25 bp, Homo sapien
cgtcattatggaattggagcgccaa

SEQ ID NO: 5979615 - DNA, 25 bp, Homo sapien
tcgtcctaaaccaaaatatatctgg

SEQ ID NO: 5979616 - DNA, 25 bp, Homo sapien
aacgctaaggatatcggtagcacat

SEQ ID NO: 5979617 - DNA, 25 bp, Homo sapien
ggtacaagccaagtaggtgagcttt

SEQ ID NO: 5979618 - DNA, 25 bp, Homo sapien
actaatagtacacgtaaaagaagga

SEQ ID NO: 5979619 - DNA, 25 bp, Homo sapien
acttatcgtggttatccataaaagc

SEQ ID NO: 5979620 - DNA, 25 bp, Homo sapien
gtaacgatcatgaactgattataaa

SEQ ID NO: 5979621 - DNA, 25 bp, Homo sapien
atggttggcctaccagctagaggaa

SEQ ID NO: 5979622 - DNA, 25 bp, Homo sapien
tacagataattttaaactcagagaa

SEQ ID NO: 5979623 - DNA, 25 bp, Homo sapien
aagatcagaacatatttggaaagta

SEQ ID NO: 5979624 - DNA, 25 bp, Homo sapien
cgtgtggacttccaccttaaaaaga

SEQ ID NO: 5979625 - DNA, 25 bp, Homo sapien
cgtgagtggaaatgtcccaatggat

SEQ ID NO: 5979626 - DNA, 25 bp, Homo sapien
cgatcatgaactgattataaataac

SEQ ID NO: 5979627 - DNA, 25 bp, Homo sapien
tgacgtatgaggaaattgaaaaaga

SEQ ID NO: 5979628 - DNA, 25 bp, Homo sapien
cgctggcgtttgtgacggaatgacg

SEQ ID NO: 5979629 - DNA, 25 bp, Homo sapien
atgaaaactctgaacctcatgtggc

SEQ ID NO: 5979630 - DNA, 25 bp, Homo sapien
aattgaaaaagaatatcctgaagat

SEQ ID NO: 5979631 - DNA, 25 bp, Homo sapien
cctcatgtggcggaagctgattttt

SEQ ID NO: 5979632 - DNA, 25 bp, Homo sapien
gcgaatcgatctataacgtagagaa

SEQ ID NO: 5979633 - DNA, 25 bp, Homo sapien
ggagaatcatacagagatgtagtga

SEQ ID NO: 5979634 - DNA, 25 bp, Homo sapien
aaagctcaactaaacttcatcaact

SEQ ID NO: 5979635 - DNA, 25 bp, Homo sapien
tttctcaaagctcaactaaacttca

SEQ ID NO: 5979636 - DNA, 25 bp, Homo sapien
ttgtattttatgttatgaatattcg

SEQ ID NO: 5979637 - DNA, 25 bp, Homo sapien
tgtatatatgcatattttatgaacg

SEQ ID NO: 5979638 - DNA, 25 bp, Homo sapien
tcaaccgatgtttttagagagctgg

SEQ ID NO: 5979639 - DNA, 25 bp, Homo sapien
tggaaatgtcccaatggatgctgag

SEQ ID NO: 5979640 - DNA, 25 bp, Homo sapien
gtcacggcgaatcgatctataacgt

SEQ ID NO: 5979641 - DNA, 25 bp, Homo sapien
tggaattggagcgccaagaaaatgt

SEQ ID NO: 5979642 - DNA, 25 bp, Homo sapien
taaacttcatcaactgctcaatgac

SEQ ID NO: 5979643 - DNA, 25 bp, Homo sapien
aaataacgctaaggatatcggtagc

SEQ ID NO: 5979644 - DNA, 25 bp, Homo sapien
tgaacctcatgtggcggaagctgat

SEQ ID NO: 5979645 - DNA, 25 bp, Homo sapien
atggcacaaaggtcaccaaaattaa

SEQ ID NO: 5979646 - DNA, 25 bp, Homo sapien
gtggcagttttcgatgctactaata

SEQ ID NO: 5979647 - DNA, 25 bp, Homo sapien
ctaaggatatcggtagcacatctcc

SEQ ID NO: 5979648 - DNA, 25 bp, Homo sapien
atgaacgttccacaggaggaatccc

SEQ ID NO: 5979649 - DNA, 25 bp, Homo sapien
catcaagccgtacttcggtgtatat

SEQ ID NO: 5979650 - DNA, 25 bp, Homo sapien
caatcccactacacacattgatcaa

SEQ ID NO: 5979651 - DNA, 25 bp, Homo sapien
tttatgttatgaatattcgtcctaa

SEQ ID NO: 5979652 - DNA, 25 bp, Homo sapien
acacacattgatcaagctggagcct

SEQ ID NO: 5979653 - DNA, 25 bp, Homo sapien
acgataatgatatcaaagtatgtgt

SEQ ID NO: 5979654 - DNA, 25 bp, Homo sapien
aaatacgagtacagatatcgtggtg

SEQ ID NO: 5979655 - DNA, 25 bp, Homo sapien
aacacaacaaacggcaaattatctt

SEQ ID NO: 5979656 - DNA, 25 bp, Homo sapien
aaaatgttctcattataactcatca

SEQ ID NO: 5979657 - DNA, 25 bp, Homo sapien
tgtgacggaatgacgtatgaggaaa

SEQ ID NO: 5979658 - DNA, 25 bp, Homo sapien
taaagagaagggtacaagccaagta

SEQ ID NO: 5979659 - DNA, 25 bp, Homo sapien
cgctaaaaaattggagcagttagtg

SEQ ID NO: 5979660 - DNA, 25 bp, Homo sapien
ggcgtttgtgacggaatgacgtatg

SEQ ID NO: 5979661 - DNA, 25 bp, Homo sapien
gagaaataaatttgaccgtgtggac

SEQ ID NO: 5979662 - DNA, 25 bp, Homo sapien
tttgaccgtgtggacttccacctta

SEQ ID NO: 5979663 - DNA, 25 bp, Homo sapien
aaaattggagcagttagtgaaagag

SEQ ID NO: 5979664 - DNA, 25 bp, Homo sapien
ttaaagcacgtgataatgacaaata

SEQ ID NO: 5979665 - DNA, 25 bp, Homo sapien
atcatgaactgattataaataacgc

SEQ ID NO: 5979666 - DNA, 25 bp, Homo sapien
gagctggagtaacgatcatgaactg

SEQ ID NO: 5979667 - DNA, 25 bp, Homo sapien
ctggagcctagggcctatggcacaa

SEQ ID NO: 5979668 - DNA, 25 bp, Homo sapien
ttaacttcgaaaatacagataattt

SEQ ID NO: 5979669 - DNA, 25 bp, Homo sapien
aaacggcaaattatcttccctataa

SEQ ID NO: 5979670 - DNA, 25 bp, Homo sapien
agtacacgtaaaagaaggaaatggc

SEQ ID NO: 5979671 - DNA, 25 bp, Homo sapien
ctcaactaaacttcatcaactgctc

SEQ ID NO: 5979672 - DNA, 25 bp, Homo sapien
tggaaagtaggattgtattttatgt

SEQ ID NO: 5979673 - DNA, 25 bp, Homo sapien
aggtgagctttctcaaagctcaact

SEQ ID NO: 5979674 - DNA, 25 bp, Homo sapien
tgtggacttccaccttaaaaagaac

SEQ ID NO: 5979675 - DNA, 25 bp, Homo sapien
atcccactacacacattgatcaagc

SEQ ID NO: 5979676 - DNA, 25 bp, Homo sapien
atgtcaatcccactacacacattga

SEQ ID NO: 5979677 - DNA, 25 bp, Homo sapien
aaaaagataaggatatgacgttcat

SEQ ID NO: 5979678 - DNA, 25 bp, Homo sapien
atacgagtacagatatcgtggtgga

SEQ ID NO: 5979679 - DNA, 25 bp, Homo sapien
aagtgttttaatgtgggaaattaca

SEQ ID NO: 5979680 - DNA, 25 bp, Homo sapien
ctcaatgactctcctttggaagaca

SEQ ID NO: 5979681 - DNA, 25 bp, Homo sapien
tattttatgaacgttccacaggagg

SEQ ID NO: 5979682 - DNA, 25 bp, Homo sapien
agctagaggaaagtcttttatttcc

SEQ ID NO: 5979683 - DNA, 25 bp, Homo sapien
attcgtcctaaaccaaaatatatct

SEQ ID NO: 5979684 - DNA, 25 bp, Homo sapien
gattttttggaaagaattagacaat

SEQ ID NO: 5979685 - DNA, 25 bp, Homo sapien
aagagagcgcaggagaaataaattt

SEQ ID NO: 5979686 - DNA, 25 bp, Homo sapien
ggggtacagtactatttccaacgat

SEQ ID NO: 5979687 - DNA, 25 bp, Homo sapien
agtaattaataagatcagaacatat

SEQ ID NO: 5979688 - DNA, 25 bp, Homo sapien
tcaagccgtacttcggtgtatatat

SEQ ID NO: 5979689 - DNA, 25 bp, Homo sapien
actctgaacctcatgtggcggaagc

SEQ ID NO: 5979690 - DNA, 25 bp, Homo sapien
tgcccaaaatgccataaaagatatt

SEQ ID NO: 5979691 - DNA, 25 bp, Homo sapien
caagctggagcctagggcctatggc

SEQ ID NO: 5979692 - DNA, 25 bp, Homo sapien
cggcgaatcgatctataacgtagag

SEQ ID NO: 5979693 - DNA, 25 bp, Homo sapien
taaaagccaagtgttttaatgtggg

SEQ ID NO: 5979694 - DNA, 25 bp, Homo sapien
atcggtagcacatctcctgattatg

SEQ ID NO: 5979695 - DNA, 25 bp, Homo sapien
tggttatccataaaagccaagtgtt

SEQ ID NO: 5979696 - DNA, 25 bp, Homo sapien
cgctaaggatatcggtagcacatct

SEQ ID NO: 5979697 - DNA, 25 bp, Homo sapien
ttggatgtcaatcccactacacaca

SEQ ID NO: 5979698 - DNA, 25 bp, Homo sapien
gatcagaacatatttggaaagtagg

SEQ ID NO: 5979699 - DNA, 25 bp, Homo sapien
gctctcccgtcacggcgaatcgatc

SEQ ID NO: 5979700 - DNA, 25 bp, Homo sapien
aagtaggattgtattttatgttatg

SEQ ID NO: 5979701 - DNA, 25 bp, Homo sapien
gataatgatatcaaagtatgtgtga

SEQ ID NO: 5979702 - DNA, 25 bp, Homo sapien
cacaaaggtcaccaaaattaaagca

SEQ ID NO: 5979703 - DNA, 25 bp, Homo sapien
atggcttaaagatatatgtgaaaag

SEQ ID NO: 5979704 - DNA, 25 bp, Homo sapien
tacttcggtgtatatatgcatattt

SEQ ID NO: 5979705 - DNA, 25 bp, Homo sapien
ttcattaagttggtcaatattattg

SEQ ID NO: 5979706 - DNA, 25 bp, Homo sapien
aaagaaggaaatggcttaaagatat

SEQ ID NO: 5979707 - DNA, 25 bp, Homo sapien
aaagaacacaacaaacggcaaatta

SEQ ID NO: 5979708 - DNA, 25 bp, Homo sapien
agtgattcgtttagagcccgtcatt

SEQ ID NO: 5979709 - DNA, 25 bp, Homo sapien
gacgtgagtggaaatgtcccaatgg

SEQ ID NO: 5979710 - DNA, 25 bp, Homo sapien
taccagctagaggaaagtcttttat

SEQ ID NO: 5979711 - DNA, 25 bp, Homo sapien
cctaccagctagaggaaagtctttt

SEQ ID NO: 5979712 - DNA, 25 bp, Homo sapien
ccaatggatgctgagttttttaact

SEQ ID NO: 5979713 - DNA, 25 bp, Homo sapien
tatcaggtacttatcgtggttatcc

SEQ ID NO: 5979714 - DNA, 25 bp, Homo sapien
atgtgtgataatggttggcctacca

SEQ ID NO: 5979715 - DNA, 25 bp, Homo sapien
ggcaaattatcttccctataagaaa

SEQ ID NO: 5979716 - DNA, 25 bp, Homo sapien
ccgatgtttttagagagctggagta

SEQ ID NO: 5979717 - DNA, 25 bp, Homo sapien
ccaaaatatatctggctctcccgtc

SEQ ID NO: 5979718 - DNA, 25 bp, Homo sapien
tagagagctggagtaacgatcatga

SEQ ID NO: 5979719 - DNA, 25 bp, Homo sapien
tgattcgtttagagcccgtcattat

SEQ ID NO: 5979720 - DNA, 25 bp, Homo sapien
gaattagacgctggcgtttgtgacg

SEQ ID NO: 5979721 - DNA, 25 bp, Homo sapien
aaaaattatcaggtacttatcgtgg

SEQ ID NO: 5979722 - DNA, 25 bp, Homo sapien
agatatcgtggtggagaatcataca

SEQ ID NO: 5979723 - DNA, 25 bp, Homo sapien
tcagaacatatttggaaagtaggat

SEQ ID NO: 5979724 - DNA, 25 bp, Homo sapien
tatctggctctcccgtcacggcgaa

SEQ ID NO: 5979725 - DNA, 25 bp, Homo sapien
agcacgtgataatgacaaatacgag

SEQ ID NO: 5979726 - DNA, 25 bp, Homo sapien
atattcaaccgatgtttttagagag

SEQ ID NO: 5979727 - DNA, 25 bp, Homo sapien
cccaaaaaattatcaggtacttatc

SEQ ID NO: 5979728 - DNA, 25 bp, Homo sapien
atcttccctataagaaactgcaatg

SEQ ID NO: 5979729 - DNA, 25 bp, Homo sapien
tgctactaatagtacacgtaaaaga

SEQ ID NO: 5979730 - DNA, 25 bp, Homo sapien
tatgaaagattttatgaacctttgg

SEQ ID NO: 5979731 - DNA, 25 bp, Homo sapien
tggagcgccaagaaaatgttctcat

SEQ ID NO: 5979732 - DNA, 25 bp, Homo sapien
caaaggtcaccaaaattaaagcaaa

SEQ ID NO: 5979733 - DNA, 25 bp, Homo sapien
cagataattttaaactcagagaatt

SEQ ID NO: 5979734 - DNA, 25 bp, Homo sapien
gtagtaattaataagatcagaacat

SEQ ID NO: 5979735 - DNA, 25 bp, Homo sapien
atcaagctggagcctagggcctatg

SEQ ID NO: 5979736 - DNA, 25 bp, Homo sapien
gaatcgatctataacgtagagaaaa

SEQ ID NO: 5979737 - DNA, 25 bp, Homo sapien
gaaagagagcgcaggagaaataaat

SEQ ID NO: 5979738 - DNA, 25 bp, Homo sapien
gaaaaagaatatcctgaagatttta

SEQ ID NO: 5979739 - DNA, 25 bp, Homo sapien
aatatatctggctctcccgtcacgg

SEQ ID NO: 5979740 - DNA, 25 bp, Homo sapien
aaggtcaccaaaattaaagcaaaca

SEQ ID NO: 5979741 - DNA, 25 bp, Homo sapien
aaactctgaacctcatgtggcggaa

SEQ ID NO: 5979742 - DNA, 25 bp, Homo sapien
gtcaatcccactacacacattgatc

SEQ ID NO: 5979743 - DNA, 25 bp, Homo sapien
gtgataatggttggcctaccagcta

SEQ ID NO: 5979744 - DNA, 25 bp, Homo sapien
ctagaggaaagtcttttatttccca

SEQ ID NO: 5979745 - DNA, 25 bp, Homo sapien
ttacagaagagacgtgagtggaaat

SEQ ID NO: 5979746 - DNA, 25 bp, Homo sapien
aggctttcagtacgctaaaaaattg

SEQ ID NO: 5979747 - DNA, 25 bp, Homo sapien
tgatgaattagacgctggcgtttgt

SEQ ID NO: 5979748 - DNA, 25 bp, Homo sapien
gtgtgataatggttggcctaccagc

SEQ ID NO: 5979749 - DNA, 25 bp, Homo sapien
atagtacacgtaaaagaaggaaatg

SEQ ID NO: 5979750 - DNA, 25 bp, Homo sapien
ataaataacgctaaggatatcggta

SEQ ID NO: 5979751 - DNA, 25 bp, Homo sapien
ctctcctttggaagacaaattttaa

SEQ ID NO: 5979752 - DNA, 25 bp, Homo sapien
gattttatgaacctttggaccccca

SEQ ID NO: 5979753 - DNA, 25 bp, Homo sapien
atattcgtcctaaaccaaaatatat

SEQ ID NO: 5979754 - DNA, 25 bp, Homo sapien
aatttgaccgtgtggacttccacct

SEQ ID NO: 5979755 - DNA, 25 bp, Homo sapien
acatccctgcagtgagtacatataa

SEQ ID NO: 5979756 - DNA, 25 bp, Homo sapien
gaattggagcgccaagaaaatgttc

SEQ ID NO: 5979757 - DNA, 25 bp, Homo sapien
cttcggtgtatatatgcatatttta

SEQ ID NO: 5979758 - DNA, 25 bp, Homo sapien
taatgtgggaaattacagaagagac

SEQ ID NO: 5979759 - DNA, 25 bp, Homo sapien
gtgagctttctcaaagctcaactaa

SEQ ID NO: 5979760 - DNA, 25 bp, Homo sapien
cttcatcaactgctcaatgactctc

SEQ ID NO: 5979761 - DNA, 25 bp, Homo sapien
ggaaagcacttgatgaattagacgc

SEQ ID NO: 5979762 - DNA, 25 bp, Homo sapien
gtgttttaatgtgggaaattacaga

SEQ ID NO: 5979763 - DNA, 25 bp, Homo sapien
aaggatatcggtagcacatctcctg

SEQ ID NO: 5979764 - DNA, 25 bp, Homo sapien
acaaacggcaaattatcttccctat

SEQ ID NO: 5979765 - DNA, 25 bp, Homo sapien
tgctcaatgactctcctttggaaga

SEQ ID NO: 5979766 - DNA, 25 bp, Homo sapien
aaggatatgacgttcattaagttgg

SEQ ID NO: 5979767 - DNA, 25 bp, Homo sapien
tgacggaatgacgtatgaggaaatt

SEQ ID NO: 5979768 - DNA, 25 bp, Homo sapien
actgtctgaaagaggctttcagtac

SEQ ID NO: 5979769 - DNA, 25 bp, Homo sapien
caagccaagtaggtgagctttctca

SEQ ID NO: 5979770 - DNA, 25 bp, Homo sapien
taaaaagaacacaacaaacggcaaa

SEQ ID NO: 5979771 - DNA, 25 bp, Homo sapien
atggggtacagtactatttccaacg

SEQ ID NO: 5979772 - DNA, 25 bp, Homo sapien
ttatcgtggttatccataaaagcca

SEQ ID NO: 5979773 - DNA, 25 bp, Homo sapien
aaacatccctgcagtgagtacatat

SEQ ID NO: 5979774 - DNA, 25 bp, Homo sapien
tggatgctgagttttttaacttcga

SEQ ID NO: 5979775 - DNA, 25 bp, Homo sapien
gcaaacatccctgcagtgagtacat

SEQ ID NO: 5979776 - DNA, 25 bp, Homo sapien
tctgaaagaggctttcagtacgcta

SEQ ID NO: 5979777 - DNA, 25 bp, Homo sapien
acccccaaaaagataaggatatgac

SEQ ID NO: 5979778 - DNA, 25 bp, Homo sapien
aattggagcagttagtgaaagagag

SEQ ID NO: 5979779 - DNA, 25 bp, Homo sapien
ctggcgtttgtgacggaatgacgta

SEQ ID NO: 5979780 - DNA, 25 bp, Homo sapien
tacgctaaaaaattggagcagttag

SEQ ID NO: 5979781 - DNA, 25 bp, Homo sapien
gtggcggaagctgattttttggaaa

SEQ ID NO: 5979782 - DNA, 25 bp, Homo sapien
catattttatgaacgttccacagga

SEQ ID NO: 5979783 - DNA, 25 bp, Homo sapien
acgttccacaggaggaatccccttg

SEQ ID NO: 5979784 - DNA, 25 bp, Homo sapien
atcctgaagattttaaagcacgtga

SEQ ID NO: 5979785 - DNA, 25 bp, Homo sapien
catctcctgattatgaaaactctga

SEQ ID NO: 5979786 - DNA, 25 bp, Homo sapien
gatgtttttagagagctggagtaac

SEQ ID NO: 5979787 - DNA, 25 bp, Homo sapien
tatttccaacgataatgatatcaaa

SEQ ID NO: 5979788 - DNA, 25 bp, Homo sapien
tgaaagaggctttcagtacgctaaa

SEQ ID NO: 5979789 - DNA, 25 bp, Homo sapien
cattaagttggtcaatattattgaa

SEQ ID NO: 5979790 - DNA, 25 bp, Homo sapien
gggattcatcactgtctgaaagagg

SEQ ID NO: 5979791 - DNA, 25 bp, Homo sapien
agctcaactaaacttcatcaactgc

SEQ ID NO: 5979792 - DNA, 25 bp, Homo sapien
gagtaacgatcatgaactgattata

SEQ ID NO: 5979793 - DNA, 25 bp, Homo sapien
tatgcatattttatgaacgttccac

SEQ ID NO: 5979794 - DNA, 25 bp, Homo sapien
gtacagatatcgtggtggagaatca

SEQ ID NO: 5979795 - DNA, 25 bp, Homo sapien
agagatgtagtgattcgtttagagc

SEQ ID NO: 5979796 - DNA, 25 bp, Homo sapien
ccccttggatgtcaatcccactaca

SEQ ID NO: 5979797 - DNA, 25 bp, Homo sapien
aataatattcaaccgatgtttttag

SEQ ID NO: 5979798 - DNA, 25 bp, Homo sapien
cgtggtggagaatcatacagagatg

SEQ ID NO: 5979799 - DNA, 25 bp, Homo sapien
cccactacacacattgatcaagctg

SEQ ID NO: 5979800 - DNA, 25 bp, Homo sapien
cataaaagccaagtgttttaatgtg

SEQ ID NO: 5979801 - DNA, 25 bp, Homo sapien
ccctgcagtgagtacatataaagag

SEQ ID NO: 5979802 - DNA, 25 bp, Homo sapien
ccgtcacggcgaatcgatctataac

SEQ ID NO: 5979803 - DNA, 25 bp, Homo sapien
gatgctactaatagtacacgtaaaa

SEQ ID NO: 5979804 - DNA, 25 bp, Homo sapien
agaaggaaatggcttaaagatatat

SEQ ID NO: 5979805 - DNA, 25 bp, Homo sapien
tgtcccaatggatgctgagtttttt

SEQ ID NO: 5979806 - DNA, 25 bp, Homo sapien
aatgtcccaatggatgctgagtttt

SEQ ID NO: 5979807 - DNA, 25 bp, Homo sapien
aatggatgctgagttttttaacttc

SEQ ID NO: 5979808 - DNA, 25 bp, Homo sapien
gaatatcctgaagattttaaagcac

SEQ ID NO: 5979809 - DNA, 25 bp, Homo sapien
tctgaacctcatgtggcggaagctg

SEQ ID NO: 5979810 - DNA, 25 bp, Homo sapien
gctttctcaaagctcaactaaactt

SEQ ID NO: 5979811 - DNA, 25 bp, Homo sapien
caactaaacttcatcaactgctcaa

SEQ ID NO: 5979812 - DNA, 25 bp, Homo sapien
tgcatattttatgaacgttccacag

SEQ ID NO: 5979813 - DNA, 25 bp, Homo sapien
taatggttggcctaccagctagagg

SEQ ID NO: 5979814 - DNA, 25 bp, Homo sapien
agcccgtcattatggaattggagcg

SEQ ID NO: 5979815 - DNA, 25 bp, Homo sapien
taatagtacacgtaaaagaaggaaa

SEQ ID NO: 5979816 - DNA, 25 bp, Homo sapien
ggcagttttcgatgctactaatagt

SEQ ID NO: 5979817 - DNA, 25 bp, Homo sapien
ggtacagtactatttccaacgataa

SEQ ID NO: 5979818 - DNA, 25 bp, Homo sapien
aatatgaaagattttatgaaccttt

SEQ ID NO: 5979819 - DNA, 25 bp, Homo sapien
tggagtaacgatcatgaactgatta

SEQ ID NO: 5979820 - DNA, 25 bp, Homo sapien
tatatgcatattttatgaacgttcc

SEQ ID NO: 5979821 - DNA, 25 bp, Homo sapien
aagaatatcctgaagattttaaagc

SEQ ID NO: 5979822 - DNA, 25 bp, Homo sapien
ggatatcggtagcacatctcctgat

SEQ ID NO: 5979823 - DNA, 25 bp, Homo sapien
cattataactcatcaagccgtactt

SEQ ID NO: 5979824 - DNA, 25 bp, Homo sapien
cacaacaaacggcaaattatcttcc

SEQ ID NO: 5979825 - DNA, 25 bp, Homo sapien
agtgagtacatataaagagaagggt

SEQ ID NO: 5979826 - DNA, 25 bp, Homo sapien
gcgccaagaaaatgttctcattata

SEQ ID NO: 5979827 - DNA, 25 bp, Homo sapien
tacaagccaagtaggtgagctttct

SEQ ID NO: 5979828 - DNA, 25 bp, Homo sapien
ggtcaccaaaattaaagcaaacatc

SEQ ID NO: 5979829 - DNA, 25 bp, Homo sapien
catcactgtctgaaagaggctttca

SEQ ID NO: 5979830 - DNA, 25 bp, Homo sapien
attatcaggtacttatcgtggttat

SEQ ID NO: 5979831 - DNA, 25 bp, Homo sapien
aacctcatgtggcggaagctgattt

SEQ ID NO: 5979832 - DNA, 25 bp, Homo sapien
gaagaagtagtaattaataagatca

SEQ ID NO: 5979833 - DNA, 25 bp, Homo sapien
cttaaaaagaacacaacaaacggca

SEQ ID NO: 5979834 - DNA, 25 bp, Homo sapien
tagtgaaagagagcgcaggagaaat

SEQ ID NO: 5979835 - DNA, 25 bp, Homo sapien
ctcattataactcatcaagccgtac

SEQ ID NO: 5979836 - DNA, 25 bp, Homo sapien
aatgacgtatgaggaaattgaaaaa

SEQ ID NO: 5979837 - DNA, 25 bp, Homo sapien
taaagcaaacatccctgcagtgagt

SEQ ID NO: 5979838 - DNA, 25 bp, Homo sapien
tggacttccaccttaaaaagaacac

SEQ ID NO: 5979839 - DNA, 25 bp, Homo sapien
gacgttcattaagttggtcaatatt

SEQ ID NO: 5979840 - DNA, 25 bp, Homo sapien
tgtctgaaagaggctttcagtacgc

SEQ ID NO: 5979841 - DNA, 25 bp, Homo sapien
catatttggaaagtaggattgtatt

SEQ ID NO: 5979842 - DNA, 25 bp, Homo sapien
aaatgccataaaagatattgttaat

SEQ ID NO: 5979843 - DNA, 25 bp, Homo sapien
gctttcagtacgctaaaaaattgga

SEQ ID NO: 5979844 - DNA, 25 bp, Homo sapien
atatcctgaagattttaaagcacgt

SEQ ID NO: 5979845 - DNA, 25 bp, Homo sapien
gaagctgattttttggaaagaatta

SEQ ID NO: 5979846 - DNA, 25 bp, Homo sapien
ataactcatcaagccgtacttcggt

SEQ ID NO: 5979847 - DNA, 25 bp, Homo sapien
aactcagcatccattgggacatttc

SEQ ID NO: 5979848 - DNA, 25 bp, Homo sapien
aactgccacagatccgtcttcttta

SEQ ID NO: 5979849 - DNA, 25 bp, Homo sapien
gtccaaaggttcataaaatctttca

SEQ ID NO: 5979850 - DNA, 25 bp, Homo sapien
tccttagcgttatttataatcagtt

SEQ ID NO: 5979851 - DNA, 25 bp, Homo sapien
aaaaaactcagcatccattgggaca

SEQ ID NO: 5979852 - DNA, 25 bp, Homo sapien
tctttccaaaaaatcagcttccgcc

SEQ ID NO: 5979853 - DNA, 25 bp, Homo sapien
tatcacgtgctttaaaatcttcagg

SEQ ID NO: 5979854 - DNA, 25 bp, Homo sapien
gtctaattcatcaagtgctttccat

SEQ ID NO: 5979855 - DNA, 25 bp, Homo sapien
cataacataaaatacaatcctactt

SEQ ID NO: 5979856 - DNA, 25 bp, Homo sapien
cctgcgctctctttcactaactgct

SEQ ID NO: 5979857 - DNA, 25 bp, Homo sapien
atactttgatatcattatcgttgga

SEQ ID NO: 5979858 - DNA, 25 bp, Homo sapien
actcacgtctcttctgtaatttccc

SEQ ID NO: 5979859 - DNA, 25 bp, Homo sapien
tgtctaattctttccaaaaaatcag

SEQ ID NO: 5979860 - DNA, 25 bp, Homo sapien
ctaattcatcaagtgctttccattg

SEQ ID NO: 5979861 - DNA, 25 bp, Homo sapien
aatatcttttatggcattttgggca

SEQ ID NO: 5979862 - DNA, 25 bp, Homo sapien
tgatgaatccccgccaatttttttc

SEQ ID NO: 5979863 - DNA, 25 bp, Homo sapien
tgtgtagtgggattgacatccaagg

SEQ ID NO: 5979864 - DNA, 25 bp, Homo sapien
ttagttgagctttgagaaagctcac

SEQ ID NO: 5979865 - DNA, 25 bp, Homo sapien
tgtttgctttaattttggtgacctt

SEQ ID NO: 5979866 - DNA, 25 bp, Homo sapien
cactaactgctccaattttttagcg

SEQ ID NO: 5979867 - DNA, 25 bp, Homo sapien
tacaatcctactttccaaatatgtt

SEQ ID NO: 5979868 - DNA, 25 bp, Homo sapien
aaaggagagtcattgagcagttgat

SEQ ID NO: 5979869 - DNA, 25 bp, Homo sapien
cttggcttttatggataaccacgat

SEQ ID NO: 5979870 - DNA, 25 bp, Homo sapien
cttagcgttatttataatcagttca

SEQ ID NO: 5979871 - DNA, 25 bp, Homo sapien
tgggggtccaaaggttcataaaatc

SEQ ID NO: 5979872 - DNA, 25 bp, Homo sapien
gcatcgaaaactgccacagatccgt

SEQ ID NO: 5979873 - DNA, 25 bp, Homo sapien
gccacagatccgtcttctttagtaa

SEQ ID NO: 5979874 - DNA, 25 bp, Homo sapien
atattttggtttaggacgaatattc

SEQ ID NO: 5979875 - DNA, 25 bp, Homo sapien
ttttgggcagccaattctctgagtt

SEQ ID NO: 5979876 - DNA, 25 bp, Homo sapien
acatcggttgaatattattcttttc

SEQ ID NO: 5979877 - DNA, 25 bp, Homo sapien
taatcaggagatgtgctaccgatat

SEQ ID NO: 5979878 - DNA, 25 bp, Homo sapien
tattagtagcatcgaaaactgccac

SEQ ID NO: 5979879 - DNA, 25 bp, Homo sapien
taatttcccacattaaaacacttgg

SEQ ID NO: 5979880 - DNA, 25 bp, Homo sapien
ctgtggaacgttcataaaatatgca

SEQ ID NO: 5979881 - DNA, 25 bp, Homo sapien
gtcatatccttatctttttgggggt

SEQ ID NO: 5979882 - DNA, 25 bp, Homo sapien
gggatgtttgctttaattttggtga

SEQ ID NO: 5979883 - DNA, 25 bp, Homo sapien
taatgaacgtcatatccttatcttt

SEQ ID NO: 5979884 - DNA, 25 bp, Homo sapien
atgtactcactgcagggatgtttgc

SEQ ID NO: 5979885 - DNA, 25 bp, Homo sapien
ctccaattccataatgacgggctct

SEQ ID NO: 5979886 - DNA, 25 bp, Homo sapien
cattgagcagttgatgaagtttagt

SEQ ID NO: 5979887 - DNA, 25 bp, Homo sapien
catcaagtgctttccattgcagttt

SEQ ID NO: 5979888 - DNA, 25 bp, Homo sapien
gtctcttctgtaatttcccacatta

SEQ ID NO: 5979889 - DNA, 25 bp, Homo sapien
tcctgtggaacgttcataaaatatg

SEQ ID NO: 5979890 - DNA, 25 bp, Homo sapien
atgaacgtcatatccttatcttttt

SEQ ID NO: 5979891 - DNA, 25 bp, Homo sapien
gtttaggacgaatattcataacata

SEQ ID NO: 5979892 - DNA, 25 bp, Homo sapien
ggaagtccacacggtcaaatttatt

SEQ ID NO: 5979893 - DNA, 25 bp, Homo sapien
ttgggcagccaattctctgagttta

SEQ ID NO: 5979894 - DNA, 25 bp, Homo sapien
gatatccttagcgttatttataatc

SEQ ID NO: 5979895 - DNA, 25 bp, Homo sapien
attaacaatatcttttatggcattt

SEQ ID NO: 5979896 - DNA, 25 bp, Homo sapien
tgatgagttataatgagaacatttt

SEQ ID NO: 5979897 - DNA, 25 bp, Homo sapien
ccaattctctgagtttaaaattatc

SEQ ID NO: 5979898 - DNA, 25 bp, Homo sapien
aaatcttcaggatattctttttcaa

SEQ ID NO: 5979899 - DNA, 25 bp, Homo sapien
caggagatgtgctaccgatatcctt

SEQ ID NO: 5979900 - DNA, 25 bp, Homo sapien
ttcctctagctggtaggccaaccat

SEQ ID NO: 5979901 - DNA, 25 bp, Homo sapien
tttgatatcattatcgttggaaata

SEQ ID NO: 5979902 - DNA, 25 bp, Homo sapien
tgggacatttccactcacgtctctt

SEQ ID NO: 5979903 - DNA, 25 bp, Homo sapien
ttcatcaagtgctttccattgcagt

SEQ ID NO: 5979904 - DNA, 25 bp, Homo sapien
tctgtaatttcccacattaaaacac

SEQ ID NO: 5979905 - DNA, 25 bp, Homo sapien
cataggccctaggctccagcttgat

SEQ ID NO: 5979906 - DNA, 25 bp, Homo sapien
attctccaccacgatatctgtactc

SEQ ID NO: 5979907 - DNA, 25 bp, Homo sapien
ccataatgacgggctctaaacgaat

SEQ ID NO: 5979908 - DNA, 25 bp, Homo sapien
acagtgatgaatccccgccaatttt

SEQ ID NO: 5979909 - DNA, 25 bp, Homo sapien
tcacatatatctttaagccatttcc

SEQ ID NO: 5979910 - DNA, 25 bp, Homo sapien
cccacattaaaacacttggctttta

SEQ ID NO: 5979911 - DNA, 25 bp, Homo sapien
ctttccaaatatgttctgatcttat

SEQ ID NO: 5979912 - DNA, 25 bp, Homo sapien
aacttaatgaacgtcatatccttat

SEQ ID NO: 5979913 - DNA, 25 bp, Homo sapien
ggcattttgggcagccaattctctg

SEQ ID NO: 5979914 - DNA, 25 bp, Homo sapien
aatttcctcatacgtcattccgtca

SEQ ID NO: 5979915 - DNA, 25 bp, Homo sapien
aatttgtcttccaaaggagagtcat

SEQ ID NO: 5979916 - DNA, 25 bp, Homo sapien
gcagttgatgaagtttagttgagct

SEQ ID NO: 5979917 - DNA, 25 bp, Homo sapien
aggccaaccattatcacacatactt

SEQ ID NO: 5979918 - DNA, 25 bp, Homo sapien
gtgccataggccctaggctccagct

SEQ ID NO: 5979919 - DNA, 25 bp, Homo sapien
gctggtaggccaaccattatcacac

SEQ ID NO: 5979920 - DNA, 25 bp, Homo sapien
gatgtttgctttaattttggtgacc

SEQ ID NO: 5979921 - DNA, 25 bp, Homo sapien
agccagatatattttggtttaggac

SEQ ID NO: 5979922 - DNA, 25 bp, Homo sapien
tgaaagcctctttcagacagtgatg

SEQ ID NO: 5979923 - DNA, 25 bp, Homo sapien
tgacctttgtgccataggccctagg

SEQ ID NO: 5979924 - DNA, 25 bp, Homo sapien
ttttatggataaccacgataagtac

SEQ ID NO: 5979925 - DNA, 25 bp, Homo sapien
atcgaaaactgccacagatccgtct

SEQ ID NO: 5979926 - DNA, 25 bp, Homo sapien
tgtaatttcccacattaaaacactt

SEQ ID NO: 5979927 - DNA, 25 bp, Homo sapien
tcaagtgctttccattgcagtttct

SEQ ID NO: 5979928 - DNA, 25 bp, Homo sapien
cgtcattccgtcacaaacgccagcg

SEQ ID NO: 5979929 - DNA, 25 bp, Homo sapien
aaaacacttggcttttatggataac

SEQ ID NO: 5979930 - DNA, 25 bp, Homo sapien
tttcaatttcctcatacgtcattcc

SEQ ID NO: 5979931 - DNA, 25 bp, Homo sapien
ggaacgttcataaaatatgcatata

SEQ ID NO: 5979932 - DNA, 25 bp, Homo sapien
gctaccgatatccttagcgttattt

SEQ ID NO: 5979933 - DNA, 25 bp, Homo sapien
ctctctaaaaacatcggttgaatat

SEQ ID NO: 5979934 - DNA, 25 bp, Homo sapien
gtaggccaaccattatcacacatac

SEQ ID NO: 5979935 - DNA, 25 bp, Homo sapien
tgtatgattctccaccacgatatct

SEQ ID NO: 5979936 - DNA, 25 bp, Homo sapien
ctcttctgtaatttcccacattaaa

SEQ ID NO: 5979937 - DNA, 25 bp, Homo sapien
gggattgacatccaaggggattcct

SEQ ID NO: 5979938 - DNA, 25 bp, Homo sapien
cacttggcttttatggataaccacg

SEQ ID NO: 5979939 - DNA, 25 bp, Homo sapien
acattttcttggcgctccaattcca

SEQ ID NO: 5979940 - DNA, 25 bp, Homo sapien
tgatcttattaattactacttcttc

SEQ ID NO: 5979941 - DNA, 25 bp, Homo sapien
ggcgctccaattccataatgacggg

SEQ ID NO: 5979942 - DNA, 25 bp, Homo sapien
cgtatttgtcattatcacgtgcttt

SEQ ID NO: 5979943 - DNA, 25 bp, Homo sapien
ggaagataatttgccgtttgttgtg

SEQ ID NO: 5979944 - DNA, 25 bp, Homo sapien
cttaatgaacgtcatatccttatct

SEQ ID NO: 5979945 - DNA, 25 bp, Homo sapien
taatgagaacattttcttggcgctc

SEQ ID NO: 5979946 - DNA, 25 bp, Homo sapien
ttcgccgtgacgggagagccagata

SEQ ID NO: 5979947 - DNA, 25 bp, Homo sapien
tcacaaacgccagcgtctaattcat

SEQ ID NO: 5979948 - DNA, 25 bp, Homo sapien
gccaaccattatcacacatactttg

SEQ ID NO: 5979949 - DNA, 25 bp, Homo sapien
taaacgaatcactacatctctgtat

SEQ ID NO: 5979950 - DNA, 25 bp, Homo sapien
ttatagggaagataatttgccgttt

SEQ ID NO: 5979951 - DNA, 25 bp, Homo sapien
tcttttacgtgtactattagtagca

SEQ ID NO: 5979952 - DNA, 25 bp, Homo sapien
atatcattatcgttggaaatagtac

SEQ ID NO: 5979953 - DNA, 25 bp, Homo sapien
tctttttaaggtggaagtccacacg

SEQ ID NO: 5979954 - DNA, 25 bp, Homo sapien
ttttatggcattttgggcagccaat

SEQ ID NO: 5979955 - DNA, 25 bp, Homo sapien
ttttggtgacctttgtgccataggc

SEQ ID NO: 5979956 - DNA, 25 bp, Homo sapien
ccttctctttatatgtactcactgc

SEQ ID NO: 5979957 - DNA, 25 bp, Homo sapien
attatcacgtgctttaaaatcttca

SEQ ID NO: 5979958 - DNA, 25 bp, Homo sapien
ccaaaggttcataaaatctttcata

SEQ ID NO: 5979959 - DNA, 25 bp, Homo sapien
agctctctaaaaacatcggttgaat

SEQ ID NO: 5979960 - DNA, 25 bp, Homo sapien
ttccactcacgtctcttctgtaatt

SEQ ID NO: 5979961 - DNA, 25 bp, Homo sapien
tttccaaaaaatcagcttccgccac

SEQ ID NO: 5979962 - DNA, 25 bp, Homo sapien
ctcacctacttggcttgtacccttc

SEQ ID NO: 5979963 - DNA, 25 bp, Homo sapien
cttctgtaatttcccacattaaaac

SEQ ID NO: 5979964 - DNA, 25 bp, Homo sapien
cagttcatgatcgttactccagctc

SEQ ID NO: 5979965 - DNA, 25 bp, Homo sapien
cattgcagtttcttatagggaagat

SEQ ID NO: 5979966 - DNA, 25 bp, Homo sapien
gagaacattttcttggcgctccaat

SEQ ID NO: 5979967 - DNA, 25 bp, Homo sapien
tagatcgattcgccgtgacgggaga

SEQ ID NO: 5979968 - DNA, 25 bp, Homo sapien
agtgatgaatccccgccaatttttt

SEQ ID NO: 5979969 - DNA, 25 bp, Homo sapien
taatcagttcatgatcgttactcca

SEQ ID NO: 5979970 - DNA, 25 bp, Homo sapien
tccaccacgatatctgtactcgtat

SEQ ID NO: 5979971 - DNA, 25 bp, Homo sapien
atgttctgatcttattaattactac

SEQ ID NO: 5979972 - DNA, 25 bp, Homo sapien
gttcagagttttcataatcaggaga

SEQ ID NO: 5979973 - DNA, 25 bp, Homo sapien
cttttcacatatatctttaagccat

SEQ ID NO: 5979974 - DNA, 25 bp, Homo sapien
gccacatgaggttcagagttttcat

SEQ ID NO: 5979975 - DNA, 25 bp, Homo sapien
attccgtcacaaacgccagcgtcta

SEQ ID NO: 5979976 - DNA, 25 bp, Homo sapien
aagataatttgccgtttgttgtgtt

SEQ ID NO: 5979977 - DNA, 25 bp, Homo sapien
aggtggaagtccacacggtcaaatt

SEQ ID NO: 5979978 - DNA, 25 bp, Homo sapien
tgtattttcgaagttaaaaaactca

SEQ ID NO: 5979979 - DNA, 25 bp, Homo sapien
tacatctctgtatgattctccacca

SEQ ID NO: 5979980 - DNA, 25 bp, Homo sapien
tcaatttcctcatacgtcattccgt

SEQ ID NO: 5979981 - DNA, 25 bp, Homo sapien
aaccacgataagtacctgataattt

SEQ ID NO: 5979982 - DNA, 25 bp, Homo sapien
tattcataacataaaatacaatcct

SEQ ID NO: 5979983 - DNA, 25 bp, Homo sapien
ttttacgtgtactattagtagcatc

SEQ ID NO: 5979984 - DNA, 25 bp, Homo sapien
gtccacacggtcaaatttatttctc

SEQ ID NO: 5979985 - DNA, 25 bp, Homo sapien
tgaggttcagagttttcataatcag

SEQ ID NO: 5979986 - DNA, 25 bp, Homo sapien
cgaatcactacatctctgtatgatt

SEQ ID NO: 5979987 - DNA, 25 bp, Homo sapien
actgcagggatgtttgctttaattt

SEQ ID NO: 5979988 - DNA, 25 bp, Homo sapien
ctcctgcgctctctttcactaactg

SEQ ID NO: 5979989 - DNA, 25 bp, Homo sapien
tttgagaaagctcacctacttggct

SEQ ID NO: 5979990 - DNA, 25 bp, Homo sapien
tcagagttttcataatcaggagatg

SEQ ID NO: 5979991 - DNA, 25 bp, Homo sapien
atagggaagataatttgccgtttgt

SEQ ID NO: 5979992 - DNA, 25 bp, Homo sapien
tgataattttttgggaaataaaaga

SEQ ID NO: 5979993 - DNA, 25 bp, Homo sapien
atatgtactcactgcagggatgttt

SEQ ID NO: 5979994 - DNA, 25 bp, Homo sapien
ttggtgacctttgtgccataggccc

SEQ ID NO: 5979995 - DNA, 25 bp, Homo sapien
tctttttcaatttcctcatacgtca

SEQ ID NO: 5979996 - DNA, 25 bp, Homo sapien
atcagttcatgatcgttactccagc

SEQ ID NO: 5979997 - DNA, 25 bp, Homo sapien
tgtactcgtatttgtcattatcacg

SEQ ID NO: 5979998 - DNA, 25 bp, Homo sapien
attttcttggcgctccaattccata

SEQ ID NO: 5979999 - DNA, 25 bp, Homo sapien
gtgtactattagtagcatcgaaaac

SEQ ID NO: 5980000 - DNA, 25 bp, Homo sapien
gcgttatttataatcagttcatgat

SEQ ID NO: 5980001 - DNA, 25 bp, Homo sapien
ttctctgagtttaaaattatctgta

SEQ ID NO: 5980002 - DNA, 25 bp, Homo sapien
acatttccactcacgtctcttctgt

SEQ ID NO: 5980003 - DNA, 25 bp, Homo sapien
ggaaataaaagactttcctctagct

SEQ ID NO: 5980004 - DNA, 25 bp, Homo sapien
acctttgtgccataggccctaggct

SEQ ID NO: 5980005 - DNA, 25 bp, Homo sapien
ttctcctgcgctctctttcactaac

SEQ ID NO: 5980006 - DNA, 25 bp, Homo sapien
gtggaagtccacacggtcaaattta

SEQ ID NO: 5980007 - DNA, 25 bp, Homo sapien
acgggctctaaacgaatcactacat

SEQ ID NO: 5980008 - DNA, 25 bp, Homo sapien
aaattaacaatatcttttatggcat

SEQ ID NO: 5980009 - DNA, 25 bp, Homo sapien
cctctagctggtaggccaaccatta

SEQ ID NO: 5980010 - DNA, 25 bp, Homo sapien
caattttttagcgtactgaaagcct

SEQ ID NO: 5980011 - DNA, 25 bp, Homo sapien
ttaaaatttgtcttccaaaggagag

SEQ ID NO: 5980012 - DNA, 25 bp, Homo sapien
gttctgatcttattaattactactt

SEQ ID NO: 5980013 - DNA, 25 bp, Homo sapien
aatgacgggctctaaacgaatcact

SEQ ID NO: 5980014 - DNA, 25 bp, Homo sapien
gcagccaattctctgagtttaaaat

SEQ ID NO: 5980015 - DNA, 25 bp, Homo sapien
cgaaaactgccacagatccgtcttc

SEQ ID NO: 5980016 - DNA, 25 bp, Homo sapien
caccacgatatctgtactcgtattt

SEQ ID NO: 5980017 - DNA, 25 bp, Homo sapien
gtgctttaaaatcttcaggatattc

SEQ ID NO: 5980018 - DNA, 25 bp, Homo sapien
ctaaaaacatcggttgaatattatt

SEQ ID NO: 5980019 - DNA, 25 bp, Homo sapien
ttaaaaaactcagcatccattggga

SEQ ID NO: 5980020 - DNA, 25 bp, Homo sapien
ctctacgttatagatcgattcgccg

SEQ ID NO: 5980021 - DNA, 25 bp, Homo sapien
cgaagtacggcttgatgagttataa

SEQ ID NO: 5980022 - DNA, 25 bp, Homo sapien
cacctacttggcttgtacccttctc

SEQ ID NO: 5980023 - DNA, 25 bp, Homo sapien
agtttcttatagggaagataatttg

SEQ ID NO: 5980024 - DNA, 25 bp, Homo sapien
taacaatatcttttatggcattttg

SEQ ID NO: 5980025 - DNA, 25 bp, Homo sapien
tgggaaataaaagactttcctctag

SEQ ID NO: 5980026 - DNA, 25 bp, Homo sapien
aggagagtcattgagcagttgatga

SEQ ID NO: 5980027 - DNA, 25 bp, Homo sapien
ctctttcactaactgctccaatttt

SEQ ID NO: 5980028 - DNA, 25 bp, Homo sapien
atgatcgttactccagctctctaaa

SEQ ID NO: 5980029 - DNA, 25 bp, Homo sapien
ttaaaacacttggcttttatggata

SEQ ID NO: 5980030 - DNA, 25 bp, Homo sapien
taaaatcttcaggatattctttttc

SEQ ID NO: 5980031 - DNA, 25 bp, Homo sapien
ccaaaggagagtcattgagcagttg

SEQ ID NO: 5980032 - DNA, 25 bp, Homo sapien
tcgattcgccgtgacgggagagcca

SEQ ID NO: 5980033 - DNA, 25 bp, Homo sapien
gtttagttgagctttgagaaagctc

SEQ ID NO: 5980034 - DNA, 25 bp, Homo sapien
gcttgatcaatgtgtgtagtgggat

SEQ ID NO: 5980035 - DNA, 25 bp, Homo sapien
acacggtcaaatttatttctcctgc

SEQ ID NO: 5980036 - DNA, 25 bp, Homo sapien
tggcttttatggataaccacgataa

SEQ ID NO: 5980037 - DNA, 25 bp, Homo sapien
tcgaagttaaaaaactcagcatcca

SEQ ID NO: 5980038 - DNA, 25 bp, Homo sapien
aaatatgcatatatacaccgaagta

SEQ ID NO: 5980039 - DNA, 25 bp, Homo sapien
ttcataacataaaatacaatcctac

SEQ ID NO: 5980040 - DNA, 25 bp, Homo sapien
attgggacatttccactcacgtctc

SEQ ID NO: 5980041 - DNA, 25 bp, Homo sapien
gtactgaaagcctctttcagacagt

SEQ ID NO: 5980042 - DNA, 25 bp, Homo sapien
aaaaatcagcttccgccacatgagg

SEQ ID NO: 5980043 - DNA, 25 bp, Homo sapien
ccaaatatgttctgatcttattaat

SEQ ID NO: 5980044 - DNA, 25 bp, Homo sapien
ttcataatcaggagatgtgctaccg

SEQ ID NO: 5980045 - DNA, 25 bp, Homo sapien
atggataaccacgataagtacctga

SEQ ID NO: 5980046 - DNA, 25 bp, Homo sapien
gctttgagaaagctcacctacttgg

SEQ ID NO: 5980047 - DNA, 25 bp, Homo sapien
aacgaatcactacatctctgtatga

SEQ ID NO: 5980048 - DNA, 25 bp, Homo sapien
tacttggcttgtacccttctcttta

SEQ ID NO: 5980049 - DNA, 25 bp, Homo sapien
tccgtcacaaacgccagcgtctaat

SEQ ID NO: 5980050 - DNA, 25 bp, Homo sapien
acccttctctttatatgtactcact

SEQ ID NO: 5980051 - DNA, 25 bp, Homo sapien
atccattgggacatttccactcacg

SEQ ID NO: 5980052 - DNA, 25 bp, Homo sapien
tgtagtgggattgacatccaagggg

SEQ ID NO: 5980053 - DNA, 25 bp, Homo sapien
gccataggccctaggctccagcttg

SEQ ID NO: 5980054 - DNA, 25 bp, Homo sapien
acacatactttgatatcattatcgt

SEQ ID NO: 5980055 - DNA, 25 bp, Homo sapien
tttcgaagttaaaaaactcagcatc

SEQ ID NO: 5980056 - DNA, 25 bp, Homo sapien
tttttagcgtactgaaagcctcttt

SEQ ID NO: 5980057 - DNA, 25 bp, Homo sapien
taccgatatccttagcgttatttat

SEQ ID NO: 5980058 - DNA, 25 bp, Homo sapien
aatacaatcctactttccaaatatg

SEQ ID NO: 5980059 - DNA, 25 bp, Homo sapien
atatatacaccgaagtacggcttga

SEQ ID NO: 5980060 - DNA, 25 bp, Homo sapien
tgtgtgtagtgggattgacatccaa

SEQ ID NO: 5980061 - DNA, 25 bp, Homo sapien
ctccagctctctaaaaacatcggtt

SEQ ID NO: 5980062 - DNA, 25 bp, Homo sapien
gagttataatgagaacattttcttg

SEQ ID NO: 5980063 - DNA, 25 bp, Homo sapien
ctttgtgccataggccctaggctcc

SEQ ID NO: 5980064 - DNA, 25 bp, Homo sapien
tatctgtattttcgaagttaaaaaa

SEQ ID NO: 5980065 - DNA, 25 bp, Homo sapien
tgctttaattttggtgacctttgtg

SEQ ID NO: 5980066 - DNA, 25 bp, Homo sapien
attttttagcgtactgaaagcctct

SEQ ID NO: 5980067 - DNA, 25 bp, Homo sapien
tccaaggggattcctcctgtggaac

SEQ ID NO: 5980068 - DNA, 25 bp, Homo sapien
gtgctaccgatatccttagcgttat

SEQ ID NO: 5980069 - DNA, 25 bp, Homo sapien
acggcttgatgagttataatgagaa

SEQ ID NO: 5980070 - DNA, 25 bp, Homo sapien
atcttcaggatattctttttcaatt

SEQ ID NO: 5980071 - DNA, 25 bp, Homo sapien
ttgagcagttgatgaagtttagttg

SEQ ID NO: 5980072 - DNA, 25 bp, Homo sapien
tgattctccaccacgatatctgtac

SEQ ID NO: 5980073 - DNA, 25 bp, Homo sapien
gataagtacctgataattttttggg

SEQ ID NO: 5980074 - DNA, 25 bp, Homo sapien
acaaacgccagcgtctaattcatca

SEQ ID NO: 5980075 - DNA, 25 bp, Homo sapien
tttcagacagtgatgaatccccgcc

SEQ ID NO: 5980076 - DNA, 25 bp, Homo sapien
cagcatccattgggacatttccact

SEQ ID NO: 5980077 - DNA, 25 bp, Homo sapien
ccgccacatgaggttcagagttttc

SEQ ID NO: 5980078 - DNA, 25 bp, Homo sapien
ggccctaggctccagcttgatcaat

SEQ ID NO: 5980079 - DNA, 25 bp, Homo sapien
cttcaggatattctttttcaatttc

SEQ ID NO: 5980080 - DNA, 25 bp, Homo sapien
atgcatatatacaccgaagtacggc

SEQ ID NO: 5980081 - DNA, 25 bp, Homo sapien
tttaaaatcttcaggatattctttt

SEQ ID NO: 5980082 - DNA, 25 bp, Homo sapien
actacatctctgtatgattctccac

SEQ ID NO: 5980083 - DNA, 25 bp, Homo sapien
acgttatagatcgattcgccgtgac

SEQ ID NO: 5980084 - DNA, 25 bp, Homo sapien
ctgagtttaaaattatctgtatttt

SEQ ID NO: 5980085 - DNA, 25 bp, Homo sapien
tactcgtatttgtcattatcacgtg

SEQ ID NO: 5980086 - DNA, 25 bp, Homo sapien
tatttgtcattatcacgtgctttaa

SEQ ID NO: 5980087 - DNA, 25 bp, Homo sapien
acgatatctgtactcgtatttgtca

SEQ ID NO: 5980088 - DNA, 25 bp, Homo sapien
ttctctacgttatagatcgattcgc

SEQ ID NO: 5980089 - DNA, 25 bp, Homo sapien
tttcacatatatctttaagccattt

SEQ ID NO: 5980090 - DNA, 25 bp, Homo sapien
attatctgtattttcgaagttaaaa

SEQ ID NO: 5980091 - DNA, 25 bp, Homo sapien
tcttggcgctccaattccataatga

SEQ ID NO: 5980092 - DNA, 25 bp, Homo sapien
ctttcactaactgctccaatttttt

SEQ ID NO: 5980093 - DNA, 25 bp, Homo sapien
tctctgtatgattctccaccacgat

SEQ ID NO: 5980094 - DNA, 25 bp, Homo sapien
tttcttatagggaagataatttgcc

SEQ ID NO: 5980095 - DNA, 25 bp, Homo sapien
tttggtttaggacgaatattcataa

SEQ ID NO: 5980096 - DNA, 25 bp, Homo sapien
gacgaatattcataacataaaatac

SEQ ID NO: 5980097 - DNA, 25 bp, Homo sapien
acgtctcttctgtaatttcccacat

SEQ ID NO: 5980098 - DNA, 25 bp, Homo sapien
tcaatgtgtgtagtgggattgacat

SEQ ID NO: 5980099 - DNA, 25 bp, Homo sapien
gctccagcttgatcaatgtgtgtag

SEQ ID NO: 5980100 - DNA, 25 bp, Homo sapien
aaaggttcataaaatctttcatatt

SEQ ID NO: 5980101 - DNA, 25 bp, Homo sapien
gctttaaaatcttcaggatattctt

SEQ ID NO: 5980102 - DNA, 25 bp, Homo sapien
acgtgctttaaaatcttcaggatat

SEQ ID NO: 5980103 - DNA, 25 bp, Homo sapien
aagtccacacggtcaaatttatttc

SEQ ID NO: 5980104 - DNA, 25 bp, Homo sapien
tcttatagggaagataatttgccgt

SEQ ID NO: 5980105 - DNA, 25 bp, Homo sapien
taattctttccaaaaaatcagcttc

SEQ ID NO: 5980106 - DNA, 25 bp, Homo sapien
gaacattttcttggcgctccaattc

SEQ ID NO: 5980107 - DNA, 25 bp, Homo sapien
ctctgagtttaaaattatctgtatt

SEQ ID NO: 5980108 - DNA, 25 bp, Homo sapien
aggggattcctcctgtggaacgttc

SEQ ID NO: 5980109 - DNA, 25 bp, Homo sapien
ataatgacgggctctaaacgaatca

SEQ ID NO: 5980110 - DNA, 25 bp, Homo sapien
atatattttggtttaggacgaatat

SEQ ID NO: 5980111 - DNA, 25 bp, Homo sapien
ccctaggctccagcttgatcaatgt

SEQ ID NO: 5980112 - DNA, 25 bp, Homo sapien
acgccagcgtctaattcatcaagtg

SEQ ID NO: 5980113 - DNA, 25 bp, Homo sapien
aacacttggcttttatggataacca

SEQ ID NO: 5980114 - DNA, 25 bp, Homo sapien
aattttggtgacctttgtgccatag

SEQ ID NO: 5980115 - DNA, 25 bp, Homo sapien
atatgttctgatcttattaattact

SEQ ID NO: 5980116 - DNA, 25 bp, Homo sapien
atttctcctgcgctctctttcacta

SEQ ID NO: 5980117 - DNA, 25 bp, Homo sapien
accgaagtacggcttgatgagttat

SEQ ID NO: 5980118 - DNA, 25 bp, Homo sapien
ttcaataatattgaccaacttaatg

SEQ ID NO: 5980119 - DNA, 25 bp, Homo sapien
cagggatgtttgctttaattttggt

SEQ ID NO: 5980120 - DNA, 25 bp, Homo sapien
ttatatgtactcactgcagggatgt

SEQ ID NO: 5980121 - DNA, 25 bp, Homo sapien
tataatgagaacattttcttggcgc

SEQ ID NO: 5980122 - DNA, 25 bp, Homo sapien
catccaaggggattcctcctgtgga

SEQ ID NO: 5980123 - DNA, 25 bp, Homo sapien
gagcagttgatgaagtttagttgag

SEQ ID NO: 5980124 - DNA, 25 bp, Homo sapien
cattttgggcagccaattctctgag

SEQ ID NO: 5980125 - DNA, 25 bp, Homo sapien
cgccgtgacgggagagccagatata

SEQ ID NO: 5980126 - DNA, 25 bp, Homo sapien
ctacgttatagatcgattcgccgtg

SEQ ID NO: 5980127 - DNA, 25 bp, Homo sapien
aaaactgccacagatccgtcttctt

SEQ ID NO: 5980128 - DNA, 25 bp, Homo sapien
tattgaccaacttaatgaacgtcat

SEQ ID NO: 5980129 - DNA, 25 bp, Homo sapien
cacatgaggttcagagttttcataa

SEQ ID NO: 5980130 - DNA, 25 bp, Homo sapien
ttttttctctacgttatagatcgat

SEQ ID NO: 5980131 - DNA, 25 bp, Homo sapien
acgataagtacctgataattttttg

SEQ ID NO: 5980132 - DNA, 25 bp, Homo sapien
aggacgaatattcataacataaaat

SEQ ID NO: 5980133 - DNA, 25 bp, Homo sapien
aaagctcacctacttggcttgtacc

SEQ ID NO: 5980134 - DNA, 25 bp, Homo sapien
agaaagctcacctacttggcttgta

SEQ ID NO: 5980135 - DNA, 25 bp, Homo sapien
ttgtgccataggccctaggctccag

SEQ ID NO: 5980136 - DNA, 25 bp, Homo sapien
tctgatcttattaattactacttct

SEQ ID NO: 5980137 - DNA, 25 bp, Homo sapien
ccacacggtcaaatttatttctcct

SEQ ID NO: 5980138 - DNA, 25 bp, Homo sapien
cttcttttacgtgtactattagtag

SEQ ID NO: 5980139 - DNA, 25 bp, Homo sapien
actgaaagcctctttcagacagtga

SEQ ID NO: 5980140 - DNA, 25 bp, Homo sapien
gccagcgtctaattcatcaagtgct

SEQ ID NO: 5980141 - DNA, 25 bp, Homo sapien
ccaacttaatgaacgtcatatcctt

SEQ ID NO: 5980142 - DNA, 25 bp, Homo sapien
caaccattatcacacatactttgat

SEQ ID NO: 5980143 - DNA, 25 bp, Homo sapien
ttcataaaatatgcatatatacacc

SEQ ID NO: 5980144 - DNA, 25 bp, Homo sapien
gatgaagtttagttgagctttgaga

SEQ ID NO: 5980145 - DNA, 25 bp, Homo sapien
cagatccgtcttctttagtaaaaaa

SEQ ID NO: 5980146 - DNA, 25 bp, Homo sapien
ttctctttatatgtactcactgcag

SEQ ID NO: 5980147 - DNA, 25 bp, Homo sapien
tgatatcattatcgttggaaatagt

SEQ ID NO: 5980148 - DNA, 25 bp, Homo sapien
gcgtactgaaagcctctttcagaca

SEQ ID NO: 5980149 - DNA, 25 bp, Homo sapien
aggctccagcttgatcaatgtgtgt

SEQ ID NO: 5980150 - DNA, 25 bp, Homo sapien
ccgatatccttagcgttatttataa

SEQ ID NO: 5980151 - DNA, 25 bp, Homo sapien
ccacgatatctgtactcgtatttgt

SEQ ID NO: 5980152 - DNA, 25 bp, Homo sapien
catatccttatctttttgggggtcc

SEQ ID NO: 5980153 - DNA, 25 bp, Homo sapien
tcctcatacgtcattccgtcacaaa

SEQ ID NO: 5980154 - DNA, 25 bp, Homo sapien
aggttcataaaatctttcatattgt

SEQ ID NO: 5980155 - DNA, 25 bp, Homo sapien
gtgctttccattgcagtttcttata

SEQ ID NO: 5980156 - DNA, 25 bp, Homo sapien
ataatattgaccaacttaatgaacg

SEQ ID NO: 5980157 - DNA, 25 bp, Homo sapien
ccaattccataatgacgggctctaa

SEQ ID NO: 5980158 - DNA, 25 bp, Homo sapien
gcgtctaattcatcaagtgctttcc

SEQ ID NO: 5980159 - DNA, 25 bp, Homo sapien
gccaatttttttctctacgttatag

SEQ ID NO: 5980160 - DNA, 25 bp, Homo sapien
ctgccacagatccgtcttctttagt

SEQ ID NO: 5980161 - DNA, 25 bp, Homo sapien
tgcgctctctttcactaactgctcc

SEQ ID NO: 5980162 - DNA, 25 bp, Homo sapien
tacgtcattccgtcacaaacgccag

SEQ ID NO: 5980163 - DNA, 25 bp, Homo sapien
ctaactgctccaattttttagcgta

SEQ ID NO: 5980164 - DNA, 25 bp, Homo sapien
gtgacgggagagccagatatatttt

SEQ ID NO: 5980165 - DNA, 25 bp, Homo sapien
ttgatcaatgtgtgtagtgggattg

SEQ ID NO: 5980166 - DNA, 25 bp, Homo sapien
gaccaacttaatgaacgtcatatcc

SEQ ID NO: 5980167 - DNA, 25 bp, Homo sapien
aaatcagcttccgccacatgaggtt

SEQ ID NO: 5980168 - DNA, 25 bp, Homo sapien
ttgatgaagtttagttgagctttga

SEQ ID NO: 5980169 - DNA, 25 bp, Homo sapien
aactgctccaattttttagcgtact

SEQ ID NO: 5980170 - DNA, 25 bp, Homo sapien
agacagtgatgaatccccgccaatt

SEQ ID NO: 5980171 - DNA, 25 bp, Homo sapien
gattgacatccaaggggattcctcc

SEQ ID NO: 5980172 - DNA, 25 bp, Homo sapien
tttgccgtttgttgtgttcttttta

SEQ ID NO: 5980173 - DNA, 25 bp, Homo sapien
tatccttatctttttgggggtccaa

SEQ ID NO: 5980174 - DNA, 25 bp, Homo sapien
cctctttcagacagtgatgaatccc

SEQ ID NO: 5980175 - DNA, 25 bp, Homo sapien
taatttgccgtttgttgtgttcttt

SEQ ID NO: 5980176 - DNA, 25 bp, Homo sapien
aacgttcataaaatatgcatatata

SEQ ID NO: 5980177 - DNA, 25 bp, Homo sapien
gttatttataatcagttcatgatcg

SEQ ID NO: 5980178 - DNA, 25 bp, Homo sapien
agatatattttggtttaggacgaat

SEQ ID NO: 5980179 - DNA, 25 bp, Homo sapien
acaatatcttttatggcattttggg

SEQ ID NO: 5980180 - DNA, 25 bp, Homo sapien
ttgcagtttcttatagggaagataa

SEQ ID NO: 5980181 - DNA, 25 bp, Homo sapien
ggtgacctttgtgccataggcccta

SEQ ID NO: 5980182 - DNA, 25 bp, Homo sapien
tctgtactcgtatttgtcattatca

SEQ ID NO: 5980183 - DNA, 25 bp, Homo sapien
tttgtcattatcacgtgctttaaaa

SEQ ID NO: 5980184 - DNA, 25 bp, Homo sapien
gcttgtacccttctctttatatgta

SEQ ID NO: 5980185 - DNA, 25 bp, Homo sapien
gccatttccttcttttacgtgtact

SEQ ID NO: 5980186 - DNA, 25 bp, Homo sapien
ggacatttccactcacgtctcttct

SEQ ID NO: 5980187 - DNA, 25 bp, Homo sapien
atgagaacattttcttggcgctcca

SEQ ID NO: 5980188 - DNA, 25 bp, Homo sapien
agctcacctacttggcttgtaccct

SEQ ID NO: 5980189 - DNA, 25 bp, Homo sapien
gtacggcttgatgagttataatgag

SEQ ID NO: 5980190 - DNA, 25 bp, Homo sapien
tgacgggctctaaacgaatcactac

SEQ ID NO: 5980191 - DNA, 25 bp, Homo sapien
gggattcctcctgtggaacgttcat

SEQ ID NO: 5980192 - DNA, 25 bp, Homo sapien
agttgagctttgagaaagctcacct

SEQ ID NO: 5980193 - DNA, 25 bp, Homo sapien
gattcgccgtgacgggagagccaga

SEQ ID NO: 5980194 - DNA, 25 bp, Homo sapien
ttccgccacatgaggttcagagttt

SEQ ID NO: 5980195 - DNA, 25 bp, Homo sapien
agttaaaaaactcagcatccattgg

SEQ ID NO: 5980196 - DNA, 25 bp, Homo sapien
tgttgtgttctttttaaggtggaag

SEQ ID NO: 5980197 - DNA, 25 bp, Homo sapien
tatctgtactcgtatttgtcattat

SEQ ID NO: 5980198 - DNA, 25 bp, Homo sapien
agatgtgctaccgatatccttagcg

SEQ ID NO: 5980199 - DNA, 25 bp, Homo sapien
atttccactcacgtctcttctgtaa

SEQ ID NO: 5980200 - DNA, 25 bp, Homo sapien
aatgtgtgtagtgggattgacatcc

SEQ ID NO: 5980201 - DNA, 25 bp, Homo sapien
tttcttggcgctccaattccataat

SEQ ID NO: 5980202 - DNA, 25 bp, Homo sapien
tcttttatggcattttgggcagcca

SEQ ID NO: 5980203 - DNA, 25 bp, Homo sapien
tggcttgtacccttctctttatatg

SEQ ID NO: 5980204 - DNA, 25 bp, Homo sapien
cctacttggcttgtacccttctctt

SEQ ID NO: 5980205 - DNA, 25 bp, Homo sapien
aagtgctttccattgcagtttctta

SEQ ID NO: 5980206 - DNA, 25 bp, Homo sapien
ttgtgttctttttaaggtggaagtc

SEQ ID NO: 5980207 - DNA, 25 bp, Homo sapien
aattctctgagtttaaaattatctg

SEQ ID NO: 5980208 - DNA, 25 bp, Homo sapien
tcactgcagggatgtttgctttaat

SEQ ID NO: 5980209 - DNA, 25 bp, Homo sapien
acgtgtactattagtagcatcgaaa

SEQ ID NO: 5980210 - DNA, 25 bp, Homo sapien
agtagcatcgaaaactgccacagat

SEQ ID NO: 5980211 - DNA, 25 bp, Homo sapien
tactccagctctctaaaaacatcgg

SEQ ID NO: 5980212 - DNA, 25 bp, Homo sapien
gacatccaaggggattcctcctgtg

SEQ ID NO: 5980213 - DNA, 25 bp, Homo sapien
atttcccacattaaaacacttggct

SEQ ID NO: 5980214 - DNA, 25 bp, Homo sapien
gctttccattgcagtttcttatagg

SEQ ID NO: 5980215 - DNA, 25 bp, Homo sapien
caatcctactttccaaatatgttct

SEQ ID NO: 5980216 - DNA, 25 bp, Homo sapien
atatatctttaagccatttccttct

SEQ ID NO: 5980217 - DNA, 25 bp, Homo sapien
gatcaatgtgtgtagtgggattgac

SEQ ID NO: 5980218 - DNA, 25 bp, Homo sapien
acatactttgatatcattatcgttg

SEQ ID NO: 5980219 - DNA, 25 bp, Homo sapien
cattatcgttggaaatagtactgta

SEQ ID NO: 5980220 - DNA, 25 bp, Homo sapien
ctttatatgtactcactgcagggat

SEQ ID NO: 5980221 - DNA, 25 bp, Homo sapien
gcatatatacaccgaagtacggctt

SEQ ID NO: 5980222 - DNA, 25 bp, Homo sapien
gtgttctttttaaggtggaagtcca

SEQ ID NO: 5980223 - DNA, 25 bp, Homo sapien
tttgctttaattttggtgacctttg

SEQ ID NO: 5980224 - DNA, 25 bp, Homo sapien
gtcattgagcagttgatgaagttta

SEQ ID NO: 5980225 - DNA, 25 bp, Homo sapien
tcatgatcgttactccagctctcta

SEQ ID NO: 5980226 - DNA, 25 bp, Homo sapien
tagtgggattgacatccaaggggat

SEQ ID NO: 5980227 - DNA, 25 bp, Homo sapien
tactttccaaatatgttctgatctt

SEQ ID NO: 5980228 - DNA, 25 bp, Homo sapien
gaagttaaaaaactcagcatccatt

SEQ ID NO: 5980229 - DNA, 25 bp, Homo sapien
ttatttctcctgcgctctctttcac

SEQ ID NO: 5980230 - DNA, 25 bp, Homo sapien
tcattatcacgtgctttaaaatctt

SEQ ID NO: 5980231 - DNA, 25 bp, Homo sapien
ataaaatacaatcctactttccaaa

SEQ ID NO: 5980232 - DNA, 25 bp, Homo sapien
ttggcgctccaattccataatgacg

SEQ ID NO: 5980233 - DNA, 25 bp, Homo sapien
aaagcctctttcagacagtgatgaa

SEQ ID NO: 5980234 - DNA, 25 bp, Homo sapien
tatgattctccaccacgatatctgt

SEQ ID NO: 5980235 - DNA, 25 bp, Homo sapien
ctttcctctagctggtaggccaacc

SEQ ID NO: 5980236 - DNA, 25 bp, Homo sapien
gatcgattcgccgtgacgggagagc

SEQ ID NO: 5980237 - DNA, 25 bp, Homo sapien
tgagaaagctcacctacttggcttg

SEQ ID NO: 5980238 - DNA, 25 bp, Homo sapien
cagcgtctaattcatcaagtgcttt

SEQ ID NO: 5980239 - DNA, 25 bp, Homo sapien
tgaagtttagttgagctttgagaaa

SEQ ID NO: 5980240 - DNA, 25 bp, Homo sapien
tccaattttttagcgtactgaaagc

SEQ ID NO: 5980241 - DNA, 25 bp, Homo sapien
cattaaaacacttggcttttatgga

SEQ ID NO: 5980242 - DNA, 25 bp, Homo sapien
aaataaaagactttcctctagctgg

SEQ ID NO: 5980243 - DNA, 25 bp, Homo sapien
ctaggctccagcttgatcaatgtgt

SEQ ID NO: 5980244 - DNA, 25 bp, Homo sapien
aaacgccagcgtctaattcatcaag

SEQ ID NO: 5980245 - DNA, 25 bp, Homo sapien
aaaagactttcctctagctggtagg

SEQ ID NO: 5980246 - DNA, 25 bp, Homo sapien
aatattgaccaacttaatgaacgtc

SEQ ID NO: 5980247 - DNA, 25 bp, Homo sapien
catctctgtatgattctccaccacg

SEQ ID NO: 5980248 - DNA, 25 bp, Homo sapien
aaaaacatcggttgaatattattct

SEQ ID NO: 5980249 - DNA, 25 bp, Homo sapien
aagactttcctctagctggtaggcc

SEQ ID NO: 5980250 - DNA, 25 bp, Homo sapien
tatccttagcgttatttataatcag

SEQ ID NO: 5980251 - DNA, 25 bp, Homo sapien
ttcctcctgtggaacgttcataaaa

SEQ ID NO: 5980252 - DNA, 25 bp, Homo sapien
gttcataaaatctttcatattgtct

SEQ ID NO: 5980253 - DNA, 25 bp, Homo sapien
cgctctctttcactaactgctccaa

SEQ ID NO: 5980254 - DNA, 25 bp, Homo sapien
tctccaccacgatatctgtactcgt

SEQ ID NO: 5980255 - DNA, 25 bp, Homo sapien
tccaaaaaatcagcttccgccacat

SEQ ID NO: 5980256 - DNA, 25 bp, Homo sapien
ccagatatattttggtttaggacga

SEQ ID NO: 5980257 - DNA, 25 bp, Homo sapien
agagccagatatattttggtttagg

SEQ ID NO: 5980258 - DNA, 25 bp, Homo sapien
cacagatccgtcttctttagtaaaa

SEQ ID NO: 5980259 - DNA, 25 bp, Homo sapien
ggcttgatgagttataatgagaaca

SEQ ID NO: 5980260 - DNA, 25 bp, Homo sapien
tctgtatgattctccaccacgatat

SEQ ID NO: 5980261 - DNA, 25 bp, Homo sapien
ttcccacattaaaacacttggcttt

SEQ ID NO: 5980262 - DNA, 25 bp, Homo sapien
ccattgggacatttccactcacgtc

SEQ ID NO: 5980263 - DNA, 25 bp, Homo sapien
ttatggcattttgggcagccaattc

SEQ ID NO: 5980264 - DNA, 25 bp, Homo sapien
tacctgataattttttgggaaataa

SEQ ID NO: 5980265 - DNA, 25 bp, Homo sapien
cgttggaaatagtactgtaccccat

SEQ ID NO: 5980266 - DNA, 25 bp, Homo sapien
acatatatctttaagccatttcctt

SEQ ID NO: 5980267 - DNA, 25 bp, Homo sapien
ctctttatatgtactcactgcaggg

SEQ ID NO: 5980268 - DNA, 25 bp, Homo sapien
atggcattttgggcagccaattctc

SEQ ID NO: 5980269 - DNA, 25 bp, Homo sapien
tttaaggtggaagtccacacggtca

SEQ ID NO: 5980270 - DNA, 25 bp, Homo sapien
ctcagcatccattgggacatttcca

SEQ ID NO: 5980271 - DNA, 25 bp, Homo sapien
gagtcattgagcagttgatgaagtt

SEQ ID NO: 5980272 - DNA, 25 bp, Homo sapien
aaaatacaatcctactttccaaata

SEQ ID NO: 5980273 - DNA, 25 bp, Homo sapien
cttgatgagttataatgagaacatt

SEQ ID NO: 5980274 - DNA, 25 bp, Homo sapien
catttccttcttttacgtgtactat

SEQ ID NO: 5980275 - DNA, 25 bp, Homo sapien
acataaaatacaatcctactttcca

SEQ ID NO: 5980276 - DNA, 25 bp, Homo sapien
ccagctctctaaaaacatcggttga

SEQ ID NO: 5980277 - DNA, 25 bp, Homo sapien
acgtcatatccttatctttttgggg

SEQ ID NO: 5980278 - DNA, 25 bp, Homo sapien
attttcgaagttaaaaaactcagca

SEQ ID NO: 5980279 - DNA, 25 bp, Homo sapien
tcattccgtcacaaacgccagcgtc

SEQ ID NO: 5980280 - DNA, 25 bp, Homo sapien
aggttcagagttttcataatcagga

SEQ ID NO: 5980281 - DNA, 25 bp, Homo sapien
tcacacatactttgatatcattatc

SEQ ID NO: 5980282 - DNA, 25 bp, Homo sapien
tgtcttccaaaggagagtcattgag

SEQ ID NO: 5980283 - DNA, 25 bp, Homo sapien
atcaggagatgtgctaccgatatcc

SEQ ID NO: 5980284 - DNA, 25 bp, Homo sapien
tatttataatcagttcatgatcgtt

SEQ ID NO: 5980285 - DNA, 25 bp, Homo sapien
ctcatacgtcattccgtcacaaacg

SEQ ID NO: 5980286 - DNA, 25 bp, Homo sapien
tcacgtctcttctgtaatttcccac

SEQ ID NO: 5980287 - DNA, 25 bp, Homo sapien
agttgatgaagtttagttgagcttt

SEQ ID NO: 5980288 - DNA, 25 bp, Homo sapien
ttcactaactgctccaattttttag

SEQ ID NO: 5980289 - DNA, 25 bp, Homo sapien
atgagttataatgagaacattttct

SEQ ID NO: 5980290 - DNA, 25 bp, Homo sapien
atcagcttccgccacatgaggttca

SEQ ID NO: 5980291 - DNA, 25 bp, Homo sapien
actattagtagcatcgaaaactgcc

SEQ ID NO: 5980292 - DNA, 25 bp, Homo sapien
tgtcattatcacgtgctttaaaatc

SEQ ID NO: 5980293 - DNA, 25 bp, Homo sapien
tttccttcttttacgtgtactatta

SEQ ID NO: 5980294 - DNA, 25 bp, Homo sapien
gctctaaacgaatcactacatctct

SEQ ID NO: 5980295 - DNA, 25 bp, Homo sapien
taaaatatgcatatatacaccgaag

SEQ ID NO: 5980296 - DNA, 25 bp, Homo sapien
aaattatctgtattttcgaagttaa

SEQ ID NO: 5980297 - DNA, 25 bp, Homo sapien
tccttcttttacgtgtactattagt

SEQ ID NO: 5980298 - DNA, 25 bp, Homo sapien
aagtttagttgagctttgagaaagc

SEQ ID NO: 5980299 - DNA, 25 bp, Homo sapien
gacgggagagccagatatattttgg

SEQ ID NO: 5980300 - DNA, 25 bp, Homo sapien
gagagtcattgagcagttgatgaag

SEQ ID NO: 5980301 - DNA, 25 bp, Homo sapien
aagtacggcttgatgagttataatg

SEQ ID NO: 5980302 - DNA, 25 bp, Homo sapien
taaggtggaagtccacacggtcaaa

SEQ ID NO: 5980303 - DNA, 25 bp, Homo sapien
ttagtagcatcgaaaactgccacag

SEQ ID NO: 5980304 - DNA, 25 bp, Homo sapien
caaaaaatcagcttccgccacatga

SEQ ID NO: 5980305 - DNA, 25 bp, Homo sapien
cttggcttgtacccttctctttata

SEQ ID NO: 5980306 - DNA, 25 bp, Homo sapien
gactttcctctagctggtaggccaa

SEQ ID NO: 5980307 - DNA, 25 bp, Homo sapien
aaaactcagcatccattgggacatt

SEQ ID NO: 5980308 - DNA, 25 bp, Homo sapien
tagcgtactgaaagcctctttcaga

SEQ ID NO: 5980309 - DNA, 25 bp, Homo sapien
cgctccaattccataatgacgggct

SEQ ID NO: 5980310 - DNA, 25 bp, Homo sapien
tagctggtaggccaaccattatcac

SEQ ID NO: 5980311 - DNA, 25 bp, Homo sapien
tcacgtgctttaaaatcttcaggat

SEQ ID NO: 5980312 - DNA, 25 bp, Homo sapien
taagtacctgataattttttgggaa

SEQ ID NO: 5980313 - DNA, 25 bp, Homo sapien
attgtctaattctttccaaaaaatc

SEQ ID NO: 5980314 - DNA, 25 bp, Homo sapien
ttttcataatcaggagatgtgctac

SEQ ID NO: 5980315 - DNA, 25 bp, Homo sapien
aattccataatgacgggctctaaac

SEQ ID NO: 5980316 - DNA, 25 bp, Homo sapien
tatagatcgattcgccgtgacggga

SEQ ID NO: 5980317 - DNA, 25 bp, Homo sapien
taacataaaatacaatcctactttc

SEQ ID NO: 5980318 - DNA, 25 bp, Homo sapien
gcttttatggataaccacgataagt

SEQ ID NO: 5980319 - DNA, 25 bp, Homo sapien
gagctttgagaaagctcacctactt

SEQ ID NO: 5980320 - DNA, 25 bp, Homo sapien
ggagagccagatatattttggttta

SEQ ID NO: 5980321 - DNA, 25 bp, Homo sapien
ttaattttggtgacctttgtgccat

SEQ ID NO: 5980322 - DNA, 25 bp, Homo sapien
tttgtcttccaaaggagagtcattg

SEQ ID NO: 5980323 - DNA, 25 bp, Homo sapien
ttccaaaggagagtcattgagcagt

SEQ ID NO: 5980324 - DNA, 25 bp, Homo sapien
tttccattgcagtttcttataggga

SEQ ID NO: 5980325 - DNA, 25 bp, Homo sapien
atgtgctaccgatatccttagcgtt

SEQ ID NO: 5980326 - DNA, 25 bp, Homo sapien
atatacaccgaagtacggcttgatg

SEQ ID NO: 5980327 - DNA, 25 bp, Homo sapien
gtgggattgacatccaaggggattc

SEQ ID NO: 5980328 - DNA, 25 bp, Homo sapien
gggctctaaacgaatcactacatct

SEQ ID NO: 5980329 - DNA, 25 bp, Homo sapien
tccattgcagtttcttatagggaag

SEQ ID NO: 5980330 - DNA, 25 bp, Homo sapien
aatcactacatctctgtatgattct

SEQ ID NO: 5980331 - DNA, 25 bp, Homo sapien
tataatcagttcatgatcgttactc

SEQ ID NO: 5980332 - DNA, 25 bp, Homo sapien
ccacgataagtacctgataattttt

SEQ ID NO: 5980333 - DNA, 25 bp, Homo sapien
ccgtgacgggagagccagatatatt

SEQ ID NO: 5980334 - DNA, 25 bp, Homo sapien
gtactattagtagcatcgaaaactg

SEQ ID NO: 5980335 - DNA, 25 bp, Homo sapien
tccagcttgatcaatgtgtgtagtg

SEQ ID NO: 5980336 - DNA, 25 bp, Homo sapien
cacattaaaacacttggcttttatg

SEQ ID NO: 5980337 - DNA, 25 bp, Homo sapien
tgcagggatgtttgctttaattttg

SEQ ID NO: 5980338 - DNA, 25 bp, Homo sapien
atcggttgaatattattcttttcac

SEQ ID NO: 5980339 - DNA, 25 bp, Homo sapien
actttgatatcattatcgttggaaa

SEQ ID NO: 5980340 - DNA, 25 bp, Homo sapien
cctcctgtggaacgttcataaaata

SEQ ID NO: 5980341 - DNA, 25 bp, Homo sapien
tcaaatttatttctcctgcgctctc

SEQ ID NO: 5980342 - DNA, 25 bp, Homo sapien
gattcctcctgtggaacgttcataa

SEQ ID NO: 5980343 - DNA, 25 bp, Homo sapien
ttacgtgtactattagtagcatcga

SEQ ID NO: 5980344 - DNA, 25 bp, Homo sapien
gtactcactgcagggatgtttgctt

SEQ ID NO: 5980345 - DNA, 25 bp, Homo sapien
cctactttccaaatatgttctgatc

SEQ ID NO: 5980346 - DNA, 25 bp, Homo sapien
acaccgaagtacggcttgatgagtt

SEQ ID NO: 5980347 - DNA, 25 bp, Homo sapien
tcgttactccagctctctaaaaaca

SEQ ID NO: 5980348 - DNA, 25 bp, Homo sapien
agggaagataatttgccgtttgttg

SEQ ID NO: 5980349 - DNA, 25 bp, Homo sapien
tcttccaaaggagagtcattgagca

SEQ ID NO: 5980350 - DNA, 25 bp, Homo sapien
agcctctttcagacagtgatgaatc

SEQ ID NO: 5980351 - DNA, 25 bp, Homo sapien
attttggtttaggacgaatattcat

SEQ ID NO: 5980352 - DNA, 25 bp, Homo sapien
gttctttttaaggtggaagtccaca

SEQ ID NO: 5980353 - DNA, 25 bp, Homo sapien
tagcatcgaaaactgccacagatcc

SEQ ID NO: 5980354 - DNA, 25 bp, Homo sapien
atacaccgaagtacggcttgatgag

SEQ ID NO: 5980355 - DNA, 25 bp, Homo sapien
ctctctttcactaactgctccaatt

SEQ ID NO: 5980356 - DNA, 25 bp, Homo sapien
aaacatcggttgaatattattcttt

SEQ ID NO: 5980357 - DNA, 25 bp, Homo sapien
tctagctggtaggccaaccattatc

SEQ ID NO: 5980358 - DNA, 25 bp, Homo sapien
aaaatttgtcttccaaaggagagtc

SEQ ID NO: 5980359 - DNA, 25 bp, Homo sapien
caaggggattcctcctgtggaacgt

SEQ ID NO: 5980360 - DNA, 25 bp, Homo sapien
tctaaacgaatcactacatctctgt

SEQ ID NO: 5980361 - DNA, 25 bp, Homo sapien
ttgacatccaaggggattcctcctg

SEQ ID NO: 5980362 - DNA, 25 bp, Homo sapien
gcatccattgggacatttccactca

SEQ ID NO: 5980363 - DNA, 25 bp, Homo sapien
tctttcagacagtgatgaatccccg

SEQ ID NO: 5980364 - DNA, 25 bp, Homo sapien
tggtaggccaaccattatcacacat

SEQ ID NO: 5980365 - DNA, 25 bp, Homo sapien
cgttcataaaatatgcatatataca

SEQ ID NO: 5980366 - DNA, 25 bp, Homo sapien
ctctaaaaacatcggttgaatatta

SEQ ID NO: 5980367 - DNA, 25 bp, Homo sapien
cgaatattcataacataaaatacaa

SEQ ID NO: 5980368 - DNA, 25 bp, Homo sapien
tttttcaatttcctcatacgtcatt

SEQ ID NO: 5980369 - DNA, 25 bp, Homo sapien
ttgaccaacttaatgaacgtcatat

SEQ ID NO: 5980370 - DNA, 25 bp, Homo sapien
atcgttggaaatagtactgtacccc

SEQ ID NO: 5980371 - DNA, 25 bp, Homo sapien
agccaattctctgagtttaaaatta

SEQ ID NO: 5980372 - DNA, 25 bp, Homo sapien
ggataaccacgataagtacctgata

SEQ ID NO: 5980373 - DNA, 25 bp, Homo sapien
attctttccaaaaaatcagcttccg

SEQ ID NO: 5980374 - DNA, 25 bp, Homo sapien
ttccaaatatgttctgatcttatta

SEQ ID NO: 5980375 - DNA, 25 bp, Homo sapien
gttactccagctctctaaaaacatc

SEQ ID NO: 5980376 - DNA, 25 bp, Homo sapien
gatatctgtactcgtatttgtcatt

SEQ ID NO: 5980377 - DNA, 25 bp, Homo sapien
gcagtttcttatagggaagataatt

SEQ ID NO: 5980378 - DNA, 25 bp, Homo sapien
ctgctccaattttttagcgtactga

SEQ ID NO: 5980379 - DNA, 25 bp, Homo sapien
tagcgttatttataatcagttcatg

SEQ ID NO: 5980380 - DNA, 25 bp, Homo sapien
ctttaattttggtgacctttgtgcc

SEQ ID NO: 5980381 - DNA, 25 bp, Homo sapien
tttagcgtactgaaagcctctttca

SEQ ID NO: 5980382 - DNA, 25 bp, Homo sapien
ttaggacgaatattcataacataaa

SEQ ID NO: 5980383 - DNA, 25 bp, Homo sapien
cataatcaggagatgtgctaccgat

SEQ ID NO: 5980384 - DNA, 25 bp, Homo sapien
ggtcaaatttatttctcctgcgctc

SEQ ID NO: 5980385 - DNA, 25 bp, Homo sapien
atatgcatatatacaccgaagtacg

SEQ ID NO: 5980386 - DNA, 25 bp, Homo sapien
tcactacatctctgtatgattctcc

SEQ ID NO: 5980387 - DNA, 25 bp, Homo sapien
gataatttgccgtttgttgtgttct

SEQ ID NO: 5980388 - DNA, 25 bp, Homo sapien
tggtttaggacgaatattcataaca

SEQ ID NO: 5980389 - DNA, 25 bp, Homo sapien
ttccataatgacgggctctaaacga

SEQ ID NO: 5980390 - DNA, 25 bp, Homo sapien
aattcatcaagtgctttccattgca

SEQ ID NO: 5980391 - DNA, 25 bp, Homo sapien
tatcttttatggcattttgggcagc

SEQ ID NO: 5980392 - DNA, 25 bp, Homo sapien
atcattatcgttggaaatagtactg

SEQ ID NO: 5980393 - DNA, 25 bp, Homo sapien
catgaggttcagagttttcataatc

SEQ ID NO: 5980394 - DNA, 25 bp, Homo sapien
ataaccacgataagtacctgataat

SEQ ID NO: 5980395 - DNA, 25 bp, Homo sapien
ccactcacgtctcttctgtaatttc

SEQ ID NO: 5980396 - DNA, 25 bp, Homo sapien
tttataatcagttcatgatcgttac

SEQ ID NO: 5980397 - DNA, 25 bp, Homo sapien
cgggagagccagatatattttggtt

SEQ ID NO: 5980398 - DNA, 25 bp, Homo sapien
gttataatgagaacattttcttggc

SEQ ID NO: 5980399 - DNA, 25 bp, Homo sapien
ttgagctttgagaaagctcacctac

SEQ ID NO: 5980400 - DNA, 25 bp, Homo sapien
atatctttaagccatttccttcttt

SEQ ID NO: 5980401 - DNA, 25 bp, Homo sapien
tctaattctttccaaaaaatcagct

SEQ ID NO: 5980402 - DNA, 25 bp, Homo sapien
cgtcacaaacgccagcgtctaattc

SEQ ID NO: 5980403 - DNA, 25 bp, Homo sapien
ctcgtatttgtcattatcacgtgct

SEQ ID NO: 5980404 - DNA, 25 bp, Homo sapien
atttatttctcctgcgctctctttc

SEQ ID NO: 5980405 - DNA, 25 bp, Homo sapien
gcttccgccacatgaggttcagagt

SEQ ID NO: 5980406 - DNA, 25 bp, Homo sapien
ttatcgttggaaatagtactgtacc

SEQ ID NO: 5980407 - DNA, 25 bp, Homo sapien
gggcagccaattctctgagtttaaa

SEQ ID NO: 5980408 - DNA, 25 bp, Homo sapien
tttgttgtgttctttttaaggtgga

SEQ ID NO: 5980409 - DNA, 25 bp, Homo sapien
cagcttccgccacatgaggttcaga

SEQ ID NO: 5980410 - DNA, 25 bp, Homo sapien
ttttctctacgttatagatcgattc

SEQ ID NO: 5980411 - DNA, 25 bp, Homo sapien
tcagacagtgatgaatccccgccaa

SEQ ID NO: 5980412 - DNA, 25 bp, Homo sapien
taggccctaggctccagcttgatca

SEQ ID NO: 5980413 - DNA, 25 bp, Homo sapien
aagccatttccttcttttacgtgta

SEQ ID NO: 5980414 - DNA, 25 bp, Homo sapien
ttatggataaccacgataagtacct

SEQ ID NO: 5980415 - DNA, 25 bp, Homo sapien
tgccgtttgttgtgttctttttaag

SEQ ID NO: 5980416 - DNA, 25 bp, Homo sapien
catacgtcattccgtcacaaacgcc

SEQ ID NO: 5980417 - DNA, 25 bp, Homo sapien
gtggaacgttcataaaatatgcata

SEQ ID NO: 5980418 - DNA, 25 bp, Homo sapien
gttatagatcgattcgccgtgacgg

SEQ ID NO: 5980419 - DNA, 25 bp, Homo sapien
atcctactttccaaatatgttctga

SEQ ID NO: 5980420 - DNA, 25 bp, Homo sapien
caataatattgaccaacttaatgaa

SEQ ID NO: 5980421 - DNA, 25 bp, Homo sapien
cataaaatatgcatatatacaccga

SEQ ID NO: 5980422 - DNA, 25 bp, Homo sapien
ttaagccatttccttcttttacgtg

SEQ ID NO: 5980423 - DNA, 25 bp, Homo sapien
tttcctcatacgtcattccgtcaca

SEQ ID NO: 5980424 - DNA, 25 bp, Homo sapien
cagcttgatcaatgtgtgtagtggg

SEQ ID NO: 5980425 - DNA, 25 bp, Homo sapien
gctccaattttttagcgtactgaaa

SEQ ID NO: 5980426 - DNA, 25 bp, Homo sapien
gaacgtcatatccttatctttttgg

SEQ ID NO: 5980427 - DNA, 25 bp, Homo sapien
gatcgttactccagctctctaaaaa

SEQ ID NO: 5980428 - DNA, 25 bp, Homo sapien
ataaaagactttcctctagctggta

SEQ ID NO: 5980429 - DNA, 25 bp, Homo sapien
agagttttcataatcaggagatgtg

SEQ ID NO: 5980430 - DNA, 25 bp, Homo sapien
ggagatgtgctaccgatatccttag

SEQ ID NO: 5980431 - DNA, 25 bp, Homo sapien
acggtcaaatttatttctcctgcgc

SEQ ID NO: 5980432 - DNA, 25 bp, Homo sapien
actcactgcagggatgtttgcttta

SEQ ID NO: 5980433 - DNA, 25 bp, Homo sapien
aaatttatttctcctgcgctctctt

SEQ ID NO: 5980434 - DNA, 25 bp, Homo sapien
agttttcataatcaggagatgtgct

SEQ ID NO: 5980435 - DNA, 25 bp, Homo sapien
gttcatgatcgttactccagctctc

SEQ ID NO: 5980436 - DNA, 25 bp, Homo sapien
atgaagaggccacttcgcttttcca

SEQ ID NO: 5980437 - DNA, 25 bp, Homo sapien
ctgcctgccgcgcccgtagggtcta

SEQ ID NO: 5980438 - DNA, 25 bp, Homo sapien
gagacgattccaggcctgcaaggta

SEQ ID NO: 5980439 - DNA, 25 bp, Homo sapien
gtgatccgcggaccaagatcacgta

SEQ ID NO: 5980440 - DNA, 25 bp, Homo sapien
gaatctgagaaacggtagaaatttc

SEQ ID NO: 5980441 - DNA, 25 bp, Homo sapien
agaagttctggacccacagaaattg

SEQ ID NO: 5980442 - DNA, 25 bp, Homo sapien
gaccaagatcacgtaccatgtgcag

SEQ ID NO: 5980443 - DNA, 25 bp, Homo sapien
aacgacgctcgctacaactacgtgg

SEQ ID NO: 5980444 - DNA, 25 bp, Homo sapien
aagtgagacctcccatcactaccgt

SEQ ID NO: 5980445 - DNA, 25 bp, Homo sapien
tttcaccagttgcctcatgtgaaca

SEQ ID NO: 5980446 - DNA, 25 bp, Homo sapien
accagttgcctcatgtgaacaattg

SEQ ID NO: 5980447 - DNA, 25 bp, Homo sapien
gtttcaatacggagtcatggagtac

SEQ ID NO: 5980448 - DNA, 25 bp, Homo sapien
ccagttttgtcacaaagtatctgcc

SEQ ID NO: 5980449 - DNA, 25 bp, Homo sapien
aggtatgcctcattgtccgacaggt

SEQ ID NO: 5980450 - DNA, 25 bp, Homo sapien
accatgtgcagaatctgagaaacgg

SEQ ID NO: 5980451 - DNA, 25 bp, Homo sapien
cctcccatcactaccgtggagcacg

SEQ ID NO: 5980452 - DNA, 25 bp, Homo sapien
agaggccacttcgcttttccagaaa

SEQ ID NO: 5980453 - DNA, 25 bp, Homo sapien
cttatcagcacgacaagttgatatt

SEQ ID NO: 5980454 - DNA, 25 bp, Homo sapien
gagcacgcgggcgacgagtcttctt

SEQ ID NO: 5980455 - DNA, 25 bp, Homo sapien
atatttacgtcgatgatcttatttg

SEQ ID NO: 5980456 - DNA, 25 bp, Homo sapien
agtatttcgacacacagtcgggacg

SEQ ID NO: 5980457 - DNA, 25 bp, Homo sapien
ccatcactaccgtggagcacgcggg

SEQ ID NO: 5980458 - DNA, 25 bp, Homo sapien
tcttatttgccgtgcaacggtccaa

SEQ ID NO: 5980459 - DNA, 25 bp, Homo sapien
accgtggagcacgcgggcgacgagt

SEQ ID NO: 5980460 - DNA, 25 bp, Homo sapien
caaggtaagcagccagaccctcatc

SEQ ID NO: 5980461 - DNA, 25 bp, Homo sapien
atggagtaccaattccccaaggaca

SEQ ID NO: 5980462 - DNA, 25 bp, Homo sapien
aattccccaaggacatgttctactc

SEQ ID NO: 5980463 - DNA, 25 bp, Homo sapien
ctttcgcctaccagttttgtcacaa

SEQ ID NO: 5980464 - DNA, 25 bp, Homo sapien
ttcgcctaccagttttgtcacaaag

SEQ ID NO: 5980465 - DNA, 25 bp, Homo sapien
ttgtccgacaggttccaagacgcaa

SEQ ID NO: 5980466 - DNA, 25 bp, Homo sapien
ctgccgcgcccgtagggtctaaggg

SEQ ID NO: 5980467 - DNA, 25 bp, Homo sapien
tcagaacgagacattcgagccaagt

SEQ ID NO: 5980468 - DNA, 25 bp, Homo sapien
caggttagtgcttatcagcacgaca

SEQ ID NO: 5980469 - DNA, 25 bp, Homo sapien
gcgtatctgtccgattcctacctcc

SEQ ID NO: 5980470 - DNA, 25 bp, Homo sapien
cagaatctgagaaacggtagaaatt

SEQ ID NO: 5980471 - DNA, 25 bp, Homo sapien
gccacttcgcttttccagaaagaag

SEQ ID NO: 5980472 - DNA, 25 bp, Homo sapien
attccaggcctgcaaggtaagcagc

SEQ ID NO: 5980473 - DNA, 25 bp, Homo sapien
ggcaagtatttcgacacacagtcgg

SEQ ID NO: 5980474 - DNA, 25 bp, Homo sapien
tccaacctagagaaaatattggaac

SEQ ID NO: 5980475 - DNA, 25 bp, Homo sapien
ggagtaccaattccccaaggacatg

SEQ ID NO: 5980476 - DNA, 25 bp, Homo sapien
gcgtctctcaggagggctacgttgt

SEQ ID NO: 5980477 - DNA, 25 bp, Homo sapien
tcgtcaaagtgagacctcccatcac

SEQ ID NO: 5980478 - DNA, 25 bp, Homo sapien
acttccacaacctgcctttgtactg

SEQ ID NO: 5980479 - DNA, 25 bp, Homo sapien
gagcattactcctgagaacgacgct

SEQ ID NO: 5980480 - DNA, 25 bp, Homo sapien
atttactttcaccagttgcctcatg

SEQ ID NO: 5980481 - DNA, 25 bp, Homo sapien
tactcctgagaacgacgctcgctac

SEQ ID NO: 5980482 - DNA, 25 bp, Homo sapien
ggcgtcattgcatactgtgccattg

SEQ ID NO: 5980483 - DNA, 25 bp, Homo sapien
ttagtgcttatcagcacgacaagtt

SEQ ID NO: 5980484 - DNA, 25 bp, Homo sapien
gcttttccagaaagaagttctggac

SEQ ID NO: 5980485 - DNA, 25 bp, Homo sapien
gacgattccaggcctgcaaggtaag

SEQ ID NO: 5980486 - DNA, 25 bp, Homo sapien
atgcgtttcaatacggagtcatgga

SEQ ID NO: 5980487 - DNA, 25 bp, Homo sapien
caatacggagtcatggagtaccaat

SEQ ID NO: 5980488 - DNA, 25 bp, Homo sapien
acgatcccgtacttccacaacctgc

SEQ ID NO: 5980489 - DNA, 25 bp, Homo sapien
tcacaatcgctgctggcgtcattgc

SEQ ID NO: 5980490 - DNA, 25 bp, Homo sapien
aaggacatgttctactcggcaagac

SEQ ID NO: 5980491 - DNA, 25 bp, Homo sapien
gcgacgagtcttctttacacaagca

SEQ ID NO: 5980492 - DNA, 25 bp, Homo sapien
catccgtacaggatcccgaagagca

SEQ ID NO: 5980493 - DNA, 25 bp, Homo sapien
tggaactggttcctctttcgcctac

SEQ ID NO: 5980494 - DNA, 25 bp, Homo sapien
caaggagcacgactccttgcagcac

SEQ ID NO: 5980495 - DNA, 25 bp, Homo sapien
aatcccaggtcccactgggacaagc

SEQ ID NO: 5980496 - DNA, 25 bp, Homo sapien
taccagttttgtcacaaagtatctg

SEQ ID NO: 5980497 - DNA, 25 bp, Homo sapien
gcctgccgcgcccgtagggtctaag

SEQ ID NO: 5980498 - DNA, 25 bp, Homo sapien
agggcacttttggtggaacgctggt

SEQ ID NO: 5980499 - DNA, 25 bp, Homo sapien
attggaactggttcctctttcgcct

SEQ ID NO: 5980500 - DNA, 25 bp, Homo sapien
tgcctttgtactgccacagtttcag

SEQ ID NO: 5980501 - DNA, 25 bp, Homo sapien
acgctcgctacaactacgtggcctt

SEQ ID NO: 5980502 - DNA, 25 bp, Homo sapien
cggaccaagatcacgtaccatgtgc

SEQ ID NO: 5980503 - DNA, 25 bp, Homo sapien
cagtttcagtgtctcgctcgaccac

SEQ ID NO: 5980504 - DNA, 25 bp, Homo sapien
ccgacaggttccaagacgcaacctc

SEQ ID NO: 5980505 - DNA, 25 bp, Homo sapien
caggatcccgaagagcattactcct

SEQ ID NO: 5980506 - DNA, 25 bp, Homo sapien
ggatctatcttaagatttcgaatcc

SEQ ID NO: 5980507 - DNA, 25 bp, Homo sapien
agaacgacgctcgctacaactacgt

SEQ ID NO: 5980508 - DNA, 25 bp, Homo sapien
tggacccacagaaattgagcaggta

SEQ ID NO: 5980509 - DNA, 25 bp, Homo sapien
ttcagtgtctcgctcgaccacacga

SEQ ID NO: 5980510 - DNA, 25 bp, Homo sapien
gcaagtatgtggatgcgtttcaata

SEQ ID NO: 5980511 - DNA, 25 bp, Homo sapien
tttgtactgccacagtttcagtgtc

SEQ ID NO: 5980512 - DNA, 25 bp, Homo sapien
gtcaaagtgagacctcccatcacta

SEQ ID NO: 5980513 - DNA, 25 bp, Homo sapien
ctaccgtggagcacgcgggcgacga

SEQ ID NO: 5980514 - DNA, 25 bp, Homo sapien
taagggcacttttggtggaacgctg

SEQ ID NO: 5980515 - DNA, 25 bp, Homo sapien
gtgtctcgctcgaccacacgattta

SEQ ID NO: 5980516 - DNA, 25 bp, Homo sapien
gcaagacacaccgacgagctggatt

SEQ ID NO: 5980517 - DNA, 25 bp, Homo sapien
cttcgcttttccagaaagaagttct

SEQ ID NO: 5980518 - DNA, 25 bp, Homo sapien
catactgtgccattgaacttcttcc

SEQ ID NO: 5980519 - DNA, 25 bp, Homo sapien
agctggattatttcgtcaaagtgag

SEQ ID NO: 5980520 - DNA, 25 bp, Homo sapien
ccgacgagctggattatttcgtcaa

SEQ ID NO: 5980521 - DNA, 25 bp, Homo sapien
acaatcgctgctggcgtcattgcat

SEQ ID NO: 5980522 - DNA, 25 bp, Homo sapien
cgtatttcatcaagggtggtgatcc

SEQ ID NO: 5980523 - DNA, 25 bp, Homo sapien
tctggacccacagaaattgagcagg

SEQ ID NO: 5980524 - DNA, 25 bp, Homo sapien
agaacgagacattcgagccaagttc

SEQ ID NO: 5980525 - DNA, 25 bp, Homo sapien
gtccgattcctacctcctactcacg

SEQ ID NO: 5980526 - DNA, 25 bp, Homo sapien
tgcatactgtgccattgaacttctt

SEQ ID NO: 5980527 - DNA, 25 bp, Homo sapien
cattgaacttcttccccacatcgct

SEQ ID NO: 5980528 - DNA, 25 bp, Homo sapien
gtacagggcaagtatttcgacacac

SEQ ID NO: 5980529 - DNA, 25 bp, Homo sapien
gcagcactgggagacgattccaggc

SEQ ID NO: 5980530 - DNA, 25 bp, Homo sapien
aattgagcaggtatgcctcattgtc

SEQ ID NO: 5980531 - DNA, 25 bp, Homo sapien
tccgtacaggatcccgaagagcatt

SEQ ID NO: 5980532 - DNA, 25 bp, Homo sapien
tatcacaatcgctgctggcgtcatt

SEQ ID NO: 5980533 - DNA, 25 bp, Homo sapien
caggttccaagacgcaacctcgatg

SEQ ID NO: 5980534 - DNA, 25 bp, Homo sapien
aagacgcaacctcgatgagcaagta

SEQ ID NO: 5980535 - DNA, 25 bp, Homo sapien
gaaattgagcaggtatgcctcattg

SEQ ID NO: 5980536 - DNA, 25 bp, Homo sapien
atctgcctgccgcgcccgtagggtc

SEQ ID NO: 5980537 - DNA, 25 bp, Homo sapien
tcagcacgacaagttgatatttacg

SEQ ID NO: 5980538 - DNA, 25 bp, Homo sapien
tcccaggtcccactgggacaagcac

SEQ ID NO: 5980539 - DNA, 25 bp, Homo sapien
aagttgatatttacgtcgatgatct

SEQ ID NO: 5980540 - DNA, 25 bp, Homo sapien
ccagaaagaagttctggacccacag

SEQ ID NO: 5980541 - DNA, 25 bp, Homo sapien
cactgggagacgattccaggcctgc

SEQ ID NO: 5980542 - DNA, 25 bp, Homo sapien
ctctttcgcctaccagttttgtcac

SEQ ID NO: 5980543 - DNA, 25 bp, Homo sapien
atttcatccataagcaggttagtgc

SEQ ID NO: 5980544 - DNA, 25 bp, Homo sapien
ttcctacctcctactcacgatcccg

SEQ ID NO: 5980545 - DNA, 25 bp, Homo sapien
gacaggttccaagacgcaacctcga

SEQ ID NO: 5980546 - DNA, 25 bp, Homo sapien
tgtgcagaatctgagaaacggtaga

SEQ ID NO: 5980547 - DNA, 25 bp, Homo sapien
ggtcagaacgagacattcgagccaa

SEQ ID NO: 5980548 - DNA, 25 bp, Homo sapien
tccccacatcgctacattcgtattt

SEQ ID NO: 5980549 - DNA, 25 bp, Homo sapien
tgtctacgggtcagaacgagacatt

SEQ ID NO: 5980550 - DNA, 25 bp, Homo sapien
gcacgactccttgcagcactgggag

SEQ ID NO: 5980551 - DNA, 25 bp, Homo sapien
atctgagaaacggtagaaatttcat

SEQ ID NO: 5980552 - DNA, 25 bp, Homo sapien
cacagaaattgagcaggtatgcctc

SEQ ID NO: 5980553 - DNA, 25 bp, Homo sapien
ggttagtgcttatcagcacgacaag

SEQ ID NO: 5980554 - DNA, 25 bp, Homo sapien
aagcagccagaccctcatcgttatg

SEQ ID NO: 5980555 - DNA, 25 bp, Homo sapien
atgtggatgcgtttcaatacggagt

SEQ ID NO: 5980556 - DNA, 25 bp, Homo sapien
gcaagcgtctctcaggagggctacg

SEQ ID NO: 5980557 - DNA, 25 bp, Homo sapien
tgcaacggtccaaggagcacgactc

SEQ ID NO: 5980558 - DNA, 25 bp, Homo sapien
gttgtctacgggtcagaacgagaca

SEQ ID NO: 5980559 - DNA, 25 bp, Homo sapien
gcatcatccgtacaggatcccgaag

SEQ ID NO: 5980560 - DNA, 25 bp, Homo sapien
ctatcttaagatttcgaatcccagg

SEQ ID NO: 5980561 - DNA, 25 bp, Homo sapien
gtttcagtgtctcgctcgaccacac

SEQ ID NO: 5980562 - DNA, 25 bp, Homo sapien
gggagacgattccaggcctgcaagg

SEQ ID NO: 5980563 - DNA, 25 bp, Homo sapien
ccacaacctgcctttgtactgccac

SEQ ID NO: 5980564 - DNA, 25 bp, Homo sapien
acgtaccatgtgcagaatctgagaa

SEQ ID NO: 5980565 - DNA, 25 bp, Homo sapien
cgaagagcattactcctgagaacga

SEQ ID NO: 5980566 - DNA, 25 bp, Homo sapien
ggagggctacgttgtctacgggtca

SEQ ID NO: 5980567 - DNA, 25 bp, Homo sapien
tccataagcaggttagtgcttatca

SEQ ID NO: 5980568 - DNA, 25 bp, Homo sapien
gtagggtctaagggcacttttggtg

SEQ ID NO: 5980569 - DNA, 25 bp, Homo sapien
caccgacgagctggattatttcgtc

SEQ ID NO: 5980570 - DNA, 25 bp, Homo sapien
tctacgggtcagaacgagacattcg

SEQ ID NO: 5980571 - DNA, 25 bp, Homo sapien
ccaggtcccactgggacaagcacct

SEQ ID NO: 5980572 - DNA, 25 bp, Homo sapien
cgagctggattatttcgtcaaagtg

SEQ ID NO: 5980573 - DNA, 25 bp, Homo sapien
catgtgcagaatctgagaaacggta

SEQ ID NO: 5980574 - DNA, 25 bp, Homo sapien
cgcggaccaagatcacgtaccatgt

SEQ ID NO: 5980575 - DNA, 25 bp, Homo sapien
caggcctgcaaggtaagcagccaga

SEQ ID NO: 5980576 - DNA, 25 bp, Homo sapien
cactgggacaagcacctcgtacagg

SEQ ID NO: 5980577 - DNA, 25 bp, Homo sapien
aacgagacattcgagccaagttctg

SEQ ID NO: 5980578 - DNA, 25 bp, Homo sapien
ccaaaatggccatgtccaacctaga

SEQ ID NO: 5980579 - DNA, 25 bp, Homo sapien
aggagcacgactccttgcagcactg

SEQ ID NO: 5980580 - DNA, 25 bp, Homo sapien
gtatctgcctgccgcgcccgtaggg

SEQ ID NO: 5980581 - DNA, 25 bp, Homo sapien
cagttgcctcatgtgaacaattgga

SEQ ID NO: 5980582 - DNA, 25 bp, Homo sapien
cacacgatttactttcaccagttgc

SEQ ID NO: 5980583 - DNA, 25 bp, Homo sapien
agtcatggagtaccaattccccaag

SEQ ID NO: 5980584 - DNA, 25 bp, Homo sapien
acagggcaagtatttcgacacacag

SEQ ID NO: 5980585 - DNA, 25 bp, Homo sapien
cgtggagcacgcgggcgacgagtct

SEQ ID NO: 5980586 - DNA, 25 bp, Homo sapien
gtcgatgatcttatttgccgtgcaa

SEQ ID NO: 5980587 - DNA, 25 bp, Homo sapien
cctaccagttttgtcacaaagtatc

SEQ ID NO: 5980588 - DNA, 25 bp, Homo sapien
cgatttactttcaccagttgcctca

SEQ ID NO: 5980589 - DNA, 25 bp, Homo sapien
cgattccaggcctgcaaggtaagca

SEQ ID NO: 5980590 - DNA, 25 bp, Homo sapien
cataagcaggttagtgcttatcagc

SEQ ID NO: 5980591 - DNA, 25 bp, Homo sapien
gatcttatttgccgtgcaacggtcc

SEQ ID NO: 5980592 - DNA, 25 bp, Homo sapien
tcaccagttgcctcatgtgaacaat

SEQ ID NO: 5980593 - DNA, 25 bp, Homo sapien
ctgtgccattgaacttcttccccac

SEQ ID NO: 5980594 - DNA, 25 bp, Homo sapien
acctagagaaaatattggaactggt

SEQ ID NO: 5980595 - DNA, 25 bp, Homo sapien
ccccaaggacatgttctactcggca

SEQ ID NO: 5980596 - DNA, 25 bp, Homo sapien
gacccacagaaattgagcaggtatg

SEQ ID NO: 5980597 - DNA, 25 bp, Homo sapien
ttactttcaccagttgcctcatgtg

SEQ ID NO: 5980598 - DNA, 25 bp, Homo sapien
acgcatcatggcaagcgtctctcag

SEQ ID NO: 5980599 - DNA, 25 bp, Homo sapien
gtcccactgggacaagcacctcgta

SEQ ID NO: 5980600 - DNA, 25 bp, Homo sapien
caaagtgagacctcccatcactacc

SEQ ID NO: 5980601 - DNA, 25 bp, Homo sapien
tgtccaacctagagaaaatattgga

SEQ ID NO: 5980602 - DNA, 25 bp, Homo sapien
aaatattggaactggttcctctttc

SEQ ID NO: 5980603 - DNA, 25 bp, Homo sapien
cacagtcgggacgcatcatggcaag

SEQ ID NO: 5980604 - DNA, 25 bp, Homo sapien
cttccccacatcgctacattcgtat

SEQ ID NO: 5980605 - DNA, 25 bp, Homo sapien
gagacctcccatcactaccgtggag

SEQ ID NO: 5980606 - DNA, 25 bp, Homo sapien
caacggtccaaggagcacgactcct

SEQ ID NO: 5980607 - DNA, 25 bp, Homo sapien
atttgccgtgcaacggtccaaggag

SEQ ID NO: 5980608 - DNA, 25 bp, Homo sapien
atttcgaatcccaggtcccactggg

SEQ ID NO: 5980609 - DNA, 25 bp, Homo sapien
cctacctcctactcacgatcccgta

SEQ ID NO: 5980610 - DNA, 25 bp, Homo sapien
cggtagaaatttcatccataagcag

SEQ ID NO: 5980611 - DNA, 25 bp, Homo sapien
tcctactcacgatcccgtacttcca

SEQ ID NO: 5980612 - DNA, 25 bp, Homo sapien
gaacttcttccccacatcgctacat

SEQ ID NO: 5980613 - DNA, 25 bp, Homo sapien
acgcgggcgacgagtcttctttaca

SEQ ID NO: 5980614 - DNA, 25 bp, Homo sapien
cacatcgctacattcgtatttcatc

SEQ ID NO: 5980615 - DNA, 25 bp, Homo sapien
cactaccgtggagcacgcgggcgac

SEQ ID NO: 5980616 - DNA, 25 bp, Homo sapien
gcattactcctgagaacgacgctcg

SEQ ID NO: 5980617 - DNA, 25 bp, Homo sapien
tgctggcgtcattgcatactgtgcc

SEQ ID NO: 5980618 - DNA, 25 bp, Homo sapien
ccgtacttccacaacctgcctttgt

SEQ ID NO: 5980619 - DNA, 25 bp, Homo sapien
aagatcacgtaccatgtgcagaatc

SEQ ID NO: 5980620 - DNA, 25 bp, Homo sapien
ggtctaagggcacttttggtggaac

SEQ ID NO: 5980621 - DNA, 25 bp, Homo sapien
aaagaagttctggacccacagaaat

SEQ ID NO: 5980622 - DNA, 25 bp, Homo sapien
ctcctgagaacgacgctcgctacaa

SEQ ID NO: 5980623 - DNA, 25 bp, Homo sapien
tgtactgccacagtttcagtgtctc

SEQ ID NO: 5980624 - DNA, 25 bp, Homo sapien
ctacgttgtctacgggtcagaacga

SEQ ID NO: 5980625 - DNA, 25 bp, Homo sapien
ctttacacaagcatcatccgtacag

SEQ ID NO: 5980626 - DNA, 25 bp, Homo sapien
actttcaccagttgcctcatgtgaa

SEQ ID NO: 5980627 - DNA, 25 bp, Homo sapien
ggcctgcaaggtaagcagccagacc

SEQ ID NO: 5980628 - DNA, 25 bp, Homo sapien
gcgggcgacgagtcttctttacaca

SEQ ID NO: 5980629 - DNA, 25 bp, Homo sapien
acggtccaaggagcacgactccttg

SEQ ID NO: 5980630 - DNA, 25 bp, Homo sapien
cacagtttcagtgtctcgctcgacc

SEQ ID NO: 5980631 - DNA, 25 bp, Homo sapien
gacgagctggattatttcgtcaaag

SEQ ID NO: 5980632 - DNA, 25 bp, Homo sapien
ggtccaaggagcacgactccttgca

SEQ ID NO: 5980633 - DNA, 25 bp, Homo sapien
ggagtcatggagtaccaattcccca

SEQ ID NO: 5980634 - DNA, 25 bp, Homo sapien
gttgatatttacgtcgatgatctta

SEQ ID NO: 5980635 - DNA, 25 bp, Homo sapien
tcgcttttccagaaagaagttctgg

SEQ ID NO: 5980636 - DNA, 25 bp, Homo sapien
ctgagaaacggtagaaatttcatcc

SEQ ID NO: 5980637 - DNA, 25 bp, Homo sapien
ctggtatcacaatcgctgctggcgt

SEQ ID NO: 5980638 - DNA, 25 bp, Homo sapien
cagaaattgagcaggtatgcctcat

SEQ ID NO: 5980639 - DNA, 25 bp, Homo sapien
cgacaagttgatatttacgtcgatg

SEQ ID NO: 5980640 - DNA, 25 bp, Homo sapien
gccattgaacttcttccccacatcg

SEQ ID NO: 5980641 - DNA, 25 bp, Homo sapien
aagcgtctctcaggagggctacgtt

SEQ ID NO: 5980642 - DNA, 25 bp, Homo sapien
tggagcacgcgggcgacgagtcttc

SEQ ID NO: 5980643 - DNA, 25 bp, Homo sapien
atcgttatgaagaggccacttcgct

SEQ ID NO: 5980644 - DNA, 25 bp, Homo sapien
ctgccacagtttcagtgtctcgctc

SEQ ID NO: 5980645 - DNA, 25 bp, Homo sapien
tggccatgtccaacctagagaaaat

SEQ ID NO: 5980646 - DNA, 25 bp, Homo sapien
gttcctctttcgcctaccagttttg

SEQ ID NO: 5980647 - DNA, 25 bp, Homo sapien
aagttctggacccacagaaattgag

SEQ ID NO: 5980648 - DNA, 25 bp, Homo sapien
gcagccagaccctcatcgttatgaa

SEQ ID NO: 5980649 - DNA, 25 bp, Homo sapien
acaattggatctatcttaagatttc

SEQ ID NO: 5980650 - DNA, 25 bp, Homo sapien
atgcctcattgtccgacaggttcca

SEQ ID NO: 5980651 - DNA, 25 bp, Homo sapien
gtagaaatttcatccataagcaggt

SEQ ID NO: 5980652 - DNA, 25 bp, Homo sapien
gtggaacgctggtatcacaatcgct

SEQ ID NO: 5980653 - DNA, 25 bp, Homo sapien
cgtgcaacggtccaaggagcacgac

SEQ ID NO: 5980654 - DNA, 25 bp, Homo sapien
ggattatttcgtcaaagtgagacct

SEQ ID NO: 5980655 - DNA, 25 bp, Homo sapien
cccactgggacaagcacctcgtaca

SEQ ID NO: 5980656 - DNA, 25 bp, Homo sapien
gactccttgcagcactgggagacga

SEQ ID NO: 5980657 - DNA, 25 bp, Homo sapien
gattcctacctcctactcacgatcc

SEQ ID NO: 5980658 - DNA, 25 bp, Homo sapien
cgttatgaagaggccacttcgcttt

SEQ ID NO: 5980659 - DNA, 25 bp, Homo sapien
ggcacttttggtggaacgctggtat

SEQ ID NO: 5980660 - DNA, 25 bp, Homo sapien
gtgaacaattggatctatcttaaga

SEQ ID NO: 5980661 - DNA, 25 bp, Homo sapien
tgcctcatgtgaacaattggatcta

SEQ ID NO: 5980662 - DNA, 25 bp, Homo sapien
atgatcttatttgccgtgcaacggt

SEQ ID NO: 5980663 - DNA, 25 bp, Homo sapien
accacacgatttactttcaccagtt

SEQ ID NO: 5980664 - DNA, 25 bp, Homo sapien
gacgcaacctcgatgagcaagtatg

SEQ ID NO: 5980665 - DNA, 25 bp, Homo sapien
cgcaacctcgatgagcaagtatgtg

SEQ ID NO: 5980666 - DNA, 25 bp, Homo sapien
tacaggatcccgaagagcattactc

SEQ ID NO: 5980667 - DNA, 25 bp, Homo sapien
caaagtatctgcctgccgcgcccgt

SEQ ID NO: 5980668 - DNA, 25 bp, Homo sapien
atcaagggtggtgatccgcggacca

SEQ ID NO: 5980669 - DNA, 25 bp, Homo sapien
cgcctaccagttttgtcacaaagta

SEQ ID NO: 5980670 - DNA, 25 bp, Homo sapien
gccgcgcccgtagggtctaagggca

SEQ ID NO: 5980671 - DNA, 25 bp, Homo sapien
gagcaggtatgcctcattgtccgac

SEQ ID NO: 5980672 - DNA, 25 bp, Homo sapien
aagcatcatccgtacaggatcccga

SEQ ID NO: 5980673 - DNA, 25 bp, Homo sapien
ttcttccccacatcgctacattcgt

SEQ ID NO: 5980674 - DNA, 25 bp, Homo sapien
cgaccacacgatttactttcaccag

SEQ ID NO: 5980675 - DNA, 25 bp, Homo sapien
ttctttacacaagcatcatccgtac

SEQ ID NO: 5980676 - DNA, 25 bp, Homo sapien
atgttctactcggcaagacacaccg

SEQ ID NO: 5980677 - DNA, 25 bp, Homo sapien
atcatggcaagcgtctctcaggagg

SEQ ID NO: 5980678 - DNA, 25 bp, Homo sapien
ctcgctcgaccacacgatttacttt

SEQ ID NO: 5980679 - DNA, 25 bp, Homo sapien
aagacacaccgacgagctggattat

SEQ ID NO: 5980680 - DNA, 25 bp, Homo sapien
agggcaagtatttcgacacacagtc

SEQ ID NO: 5980681 - DNA, 25 bp, Homo sapien
ctcattgtccgacaggttccaagac

SEQ ID NO: 5980682 - DNA, 25 bp, Homo sapien
ccagaccctcatcgttatgaagagg

SEQ ID NO: 5980683 - DNA, 25 bp, Homo sapien
tacgtggcctttgcgtatctgtccg

SEQ ID NO: 5980684 - DNA, 25 bp, Homo sapien
agggctacgttgtctacgggtcaga

SEQ ID NO: 5980685 - DNA, 25 bp, Homo sapien
ctggcgtcattgcatactgtgccat

SEQ ID NO: 5980686 - DNA, 25 bp, Homo sapien
cgggtcagaacgagacattcgagcc

SEQ ID NO: 5980687 - DNA, 25 bp, Homo sapien
gtcgggacgcatcatggcaagcgtc

SEQ ID NO: 5980688 - DNA, 25 bp, Homo sapien
ggttccaagacgcaacctcgatgag

SEQ ID NO: 5980689 - DNA, 25 bp, Homo sapien
ctactcacgatcccgtacttccaca

SEQ ID NO: 5980690 - DNA, 25 bp, Homo sapien
ttttccagaaagaagttctggaccc

SEQ ID NO: 5980691 - DNA, 25 bp, Homo sapien
cttaagatttcgaatcccaggtccc

SEQ ID NO: 5980692 - DNA, 25 bp, Homo sapien
agcactgggagacgattccaggcct

SEQ ID NO: 5980693 - DNA, 25 bp, Homo sapien
tacgggtcagaacgagacattcgag

SEQ ID NO: 5980694 - DNA, 25 bp, Homo sapien
atgtgaacaattggatctatcttaa

SEQ ID NO: 5980695 - DNA, 25 bp, Homo sapien
cgacgctcgctacaactacgtggcc

SEQ ID NO: 5980696 - DNA, 25 bp, Homo sapien
ccttgcagcactgggagacgattcc

SEQ ID NO: 5980697 - DNA, 25 bp, Homo sapien
ttccccaaggacatgttctactcgg

SEQ ID NO: 5980698 - DNA, 25 bp, Homo sapien
acctcgatgagcaagtatgtggatg

SEQ ID NO: 5980699 - DNA, 25 bp, Homo sapien
tatttcgacacacagtcgggacgca

SEQ ID NO: 5980700 - DNA, 25 bp, Homo sapien
tcccgtacttccacaacctgccttt

SEQ ID NO: 5980701 - DNA, 25 bp, Homo sapien
atttacgtcgatgatcttatttgcc

SEQ ID NO: 5980702 - DNA, 25 bp, Homo sapien
acaacctgcctttgtactgccacag

SEQ ID NO: 5980703 - DNA, 25 bp, Homo sapien
ttatttgccgtgcaacggtccaagg

SEQ ID NO: 5980704 - DNA, 25 bp, Homo sapien
cctgcctttgtactgccacagtttc

SEQ ID NO: 5980705 - DNA, 25 bp, Homo sapien
gcttccaaaatggccatgtccaacc

SEQ ID NO: 5980706 - DNA, 25 bp, Homo sapien
gtgccattgaacttcttccccacat

SEQ ID NO: 5980707 - DNA, 25 bp, Homo sapien
gagaaacggtagaaatttcatccat

SEQ ID NO: 5980708 - DNA, 25 bp, Homo sapien
atgagcaagtatgtggatgcgtttc

SEQ ID NO: 5980709 - DNA, 25 bp, Homo sapien
tggttcctctttcgcctaccagttt

SEQ ID NO: 5980710 - DNA, 25 bp, Homo sapien
tcgctacattcgtatttcatcaagg

SEQ ID NO: 5980711 - DNA, 25 bp, Homo sapien
ttcaatacggagtcatggagtacca

SEQ ID NO: 5980712 - DNA, 25 bp, Homo sapien
ctgggacaagcacctcgtacagggc

SEQ ID NO: 5980713 - DNA, 25 bp, Homo sapien
tggcaagcgtctctcaggagggcta

SEQ ID NO: 5980714 - DNA, 25 bp, Homo sapien
aggtaagcagccagaccctcatcgt

SEQ ID NO: 5980715 - DNA, 25 bp, Homo sapien
gaacaattggatctatcttaagatt

SEQ ID NO: 5980716 - DNA, 25 bp, Homo sapien
acaagttgatatttacgtcgatgat

SEQ ID NO: 5980717 - DNA, 25 bp, Homo sapien
tatttcatcaagggtggtgatccgc

SEQ ID NO: 5980718 - DNA, 25 bp, Homo sapien
gacacaccgacgagctggattattt

SEQ ID NO: 5980719 - DNA, 25 bp, Homo sapien
acacaagcatcatccgtacaggatc

SEQ ID NO: 5980720 - DNA, 25 bp, Homo sapien
cctgagaacgacgctcgctacaact

SEQ ID NO: 5980721 - DNA, 25 bp, Homo sapien
tgcttatcagcacgacaagttgata

SEQ ID NO: 5980722 - DNA, 25 bp, Homo sapien
atcatccgtacaggatcccgaagag

SEQ ID NO: 5980723 - DNA, 25 bp, Homo sapien
cgctggtatcacaatcgctgctggc

SEQ ID NO: 5980724 - DNA, 25 bp, Homo sapien
ttgtcacaaagtatctgcctgccgc

SEQ ID NO: 5980725 - DNA, 25 bp, Homo sapien
agtcttctttacacaagcatcatcc

SEQ ID NO: 5980726 - DNA, 25 bp, Homo sapien
tgagaacgacgctcgctacaactac

SEQ ID NO: 5980727 - DNA, 25 bp, Homo sapien
agtgcttatcagcacgacaagttga

SEQ ID NO: 5980728 - DNA, 25 bp, Homo sapien
tggcctttgcgtatctgtccgattc

SEQ ID NO: 5980729 - DNA, 25 bp, Homo sapien
cattcgtatttcatcaagggtggtg

SEQ ID NO: 5980730 - DNA, 25 bp, Homo sapien
gatccgcggaccaagatcacgtacc

SEQ ID NO: 5980731 - DNA, 25 bp, Homo sapien
cccgaagagcattactcctgagaac

SEQ ID NO: 5980732 - DNA, 25 bp, Homo sapien
tttcgacacacagtcgggacgcatc

SEQ ID NO: 5980733 - DNA, 25 bp, Homo sapien
ttacgtcgatgatcttatttgccgt

SEQ ID NO: 5980734 - DNA, 25 bp, Homo sapien
acgttgtctacgggtcagaacgaga

SEQ ID NO: 5980735 - DNA, 25 bp, Homo sapien
tccgcggaccaagatcacgtaccat

SEQ ID NO: 5980736 - DNA, 25 bp, Homo sapien
ttgccgtgcaacggtccaaggagca

SEQ ID NO: 5980737 - DNA, 25 bp, Homo sapien
tcgacacacagtcgggacgcatcat

SEQ ID NO: 5980738 - DNA, 25 bp, Homo sapien
tgcagaatctgagaaacggtagaaa

SEQ ID NO: 5980739 - DNA, 25 bp, Homo sapien
ggctacgttgtctacgggtcagaac

SEQ ID NO: 5980740 - DNA, 25 bp, Homo sapien
aatcgctgctggcgtcattgcatac

SEQ ID NO: 5980741 - DNA, 25 bp, Homo sapien
tcttctttacacaagcatcatccgt

SEQ ID NO: 5980742 - DNA, 25 bp, Homo sapien
ccaagatcacgtaccatgtgcagaa

SEQ ID NO: 5980743 - DNA, 25 bp, Homo sapien
cacttcgcttttccagaaagaagtt

SEQ ID NO: 5980744 - DNA, 25 bp, Homo sapien
cgtcattgcatactgtgccattgaa

SEQ ID NO: 5980745 - DNA, 25 bp, Homo sapien
tggtgatccgcggaccaagatcacg

SEQ ID NO: 5980746 - DNA, 25 bp, Homo sapien
gtaagcagccagaccctcatcgtta

SEQ ID NO: 5980747 - DNA, 25 bp, Homo sapien
tcatggagtaccaattccccaagga

SEQ ID NO: 5980748 - DNA, 25 bp, Homo sapien
gggacaagcacctcgtacagggcaa

SEQ ID NO: 5980749 - DNA, 25 bp, Homo sapien
gttctactcggcaagacacaccgac

SEQ ID NO: 5980750 - DNA, 25 bp, Homo sapien
ctgggagacgattccaggcctgcaa

SEQ ID NO: 5980751 - DNA, 25 bp, Homo sapien
gtatgcctcattgtccgacaggttc

SEQ ID NO: 5980752 - DNA, 25 bp, Homo sapien
ctctcaggagggctacgttgtctac

SEQ ID NO: 5980753 - DNA, 25 bp, Homo sapien
agatttcgaatcccaggtcccactg

SEQ ID NO: 5980754 - DNA, 25 bp, Homo sapien
tcattgcatactgtgccattgaact

SEQ ID NO: 5980755 - DNA, 25 bp, Homo sapien
tacaactacgtggcctttgcgtatc

SEQ ID NO: 5980756 - DNA, 25 bp, Homo sapien
cgagtcttctttacacaagcatcat

SEQ ID NO: 5980757 - DNA, 25 bp, Homo sapien
gacgagtcttctttacacaagcatc

SEQ ID NO: 5980758 - DNA, 25 bp, Homo sapien
agtaccaattccccaaggacatgtt

SEQ ID NO: 5980759 - DNA, 25 bp, Homo sapien
cagtgtctcgctcgaccacacgatt

SEQ ID NO: 5980760 - DNA, 25 bp, Homo sapien
gagtgcttccaaaatggccatgtcc

SEQ ID NO: 5980761 - DNA, 25 bp, Homo sapien
accctcatcgttatgaagaggccac

SEQ ID NO: 5980762 - DNA, 25 bp, Homo sapien
gccatgtccaacctagagaaaatat

SEQ ID NO: 5980763 - DNA, 25 bp, Homo sapien
agaccctcatcgttatgaagaggcc

SEQ ID NO: 5980764 - DNA, 25 bp, Homo sapien
gcatcatggcaagcgtctctcagga

SEQ ID NO: 5980765 - DNA, 25 bp, Homo sapien
ggacgcatcatggcaagcgtctctc

SEQ ID NO: 5980766 - DNA, 25 bp, Homo sapien
attactcctgagaacgacgctcgct

SEQ ID NO: 5980767 - DNA, 25 bp, Homo sapien
cacgatttactttcaccagttgcct

SEQ ID NO: 5980768 - DNA, 25 bp, Homo sapien
tactgccacagtttcagtgtctcgc

SEQ ID NO: 5980769 - DNA, 25 bp, Homo sapien
atacggagtcatggagtaccaattc

SEQ ID NO: 5980770 - DNA, 25 bp, Homo sapien
caacctagagaaaatattggaactg

SEQ ID NO: 5980771 - DNA, 25 bp, Homo sapien
atattggaactggttcctctttcgc

SEQ ID NO: 5980772 - DNA, 25 bp, Homo sapien
tcccatcactaccgtggagcacgcg

SEQ ID NO: 5980773 - DNA, 25 bp, Homo sapien
atcactaccgtggagcacgcgggcg

SEQ ID NO: 5980774 - DNA, 25 bp, Homo sapien
caagcacctcgtacagggcaagtat

SEQ ID NO: 5980775 - DNA, 25 bp, Homo sapien
caacctcgatgagcaagtatgtgga

SEQ ID NO: 5980776 - DNA, 25 bp, Homo sapien
cctgcaaggtaagcagccagaccct

SEQ ID NO: 5980777 - DNA, 25 bp, Homo sapien
acggagtcatggagtaccaattccc

SEQ ID NO: 5980778 - DNA, 25 bp, Homo sapien
gacacacagtcgggacgcatcatgg

SEQ ID NO: 5980779 - DNA, 25 bp, Homo sapien
gagcaagtatgtggatgcgtttcaa

SEQ ID NO: 5980780 - DNA, 25 bp, Homo sapien
ctcaggagggctacgttgtctacgg

SEQ ID NO: 5980781 - DNA, 25 bp, Homo sapien
gcacgcgggcgacgagtcttcttta

SEQ ID NO: 5980782 - DNA, 25 bp, Homo sapien
ttccaagacgcaacctcgatgagca

SEQ ID NO: 5980783 - DNA, 25 bp, Homo sapien
ccgattcctacctcctactcacgat

SEQ ID NO: 5980784 - DNA, 25 bp, Homo sapien
cacctcgtacagggcaagtatttcg

SEQ ID NO: 5980785 - DNA, 25 bp, Homo sapien
taagcaggttagtgcttatcagcac

SEQ ID NO: 5980786 - DNA, 25 bp, Homo sapien
ttgcagcactgggagacgattccag

SEQ ID NO: 5980787 - DNA, 25 bp, Homo sapien
cctcatcgttatgaagaggccactt

SEQ ID NO: 5980788 - DNA, 25 bp, Homo sapien
ctcgatgagcaagtatgtggatgcg

SEQ ID NO: 5980789 - DNA, 25 bp, Homo sapien
ggaacgctggtatcacaatcgctgc

SEQ ID NO: 5980790 - DNA, 25 bp, Homo sapien
taagatttcgaatcccaggtcccac

SEQ ID NO: 5980791 - DNA, 25 bp, Homo sapien
cgcgcccgtagggtctaagggcact

SEQ ID NO: 5980792 - DNA, 25 bp, Homo sapien
gatcacgtaccatgtgcagaatctg

SEQ ID NO: 5980793 - DNA, 25 bp, Homo sapien
gtgcttccaaaatggccatgtccaa

SEQ ID NO: 5980794 - DNA, 25 bp, Homo sapien
gctgctggcgtcattgcatactgtg

SEQ ID NO: 5980795 - DNA, 25 bp, Homo sapien
tcacgtaccatgtgcagaatctgag

SEQ ID NO: 5980796 - DNA, 25 bp, Homo sapien
ttccacaacctgcctttgtactgcc

SEQ ID NO: 5980797 - DNA, 25 bp, Homo sapien
actcacgatcccgtacttccacaac

SEQ ID NO: 5980798 - DNA, 25 bp, Homo sapien
tgatatttacgtcgatgatcttatt

SEQ ID NO: 5980799 - DNA, 25 bp, Homo sapien
ccaaggacatgttctactcggcaag

SEQ ID NO: 5980800 - DNA, 25 bp, Homo sapien
actggttcctctttcgcctaccagt

SEQ ID NO: 5980801 - DNA, 25 bp, Homo sapien
gccacagtttcagtgtctcgctcga

SEQ ID NO: 5980802 - DNA, 25 bp, Homo sapien
agggtctaagggcacttttggtgga

SEQ ID NO: 5980803 - DNA, 25 bp, Homo sapien
ttggatctatcttaagatttcgaat

SEQ ID NO: 5980804 - DNA, 25 bp, Homo sapien
tatttcgtcaaagtgagacctccca

SEQ ID NO: 5980805 - DNA, 25 bp, Homo sapien
aggccacttcgcttttccagaaaga

SEQ ID NO: 5980806 - DNA, 25 bp, Homo sapien
gtctcgctcgaccacacgatttact

SEQ ID NO: 5980807 - DNA, 25 bp, Homo sapien
cggcaagacacaccgacgagctgga

SEQ ID NO: 5980808 - DNA, 25 bp, Homo sapien
gcctcattgtccgacaggttccaag

SEQ ID NO: 5980809 - DNA, 25 bp, Homo sapien
tttcgtcaaagtgagacctcccatc

SEQ ID NO: 5980810 - DNA, 25 bp, Homo sapien
ttgaacttcttccccacatcgctac

SEQ ID NO: 5980811 - DNA, 25 bp, Homo sapien
tttggtggaacgctggtatcacaat

SEQ ID NO: 5980812 - DNA, 25 bp, Homo sapien
aggtcccactgggacaagcacctcg

SEQ ID NO: 5980813 - DNA, 25 bp, Homo sapien
acttcttccccacatcgctacattc

SEQ ID NO: 5980814 - DNA, 25 bp, Homo sapien
aacgctggtatcacaatcgctgctg

SEQ ID NO: 5980815 - DNA, 25 bp, Homo sapien
caggagggctacgttgtctacgggt

SEQ ID NO: 5980816 - DNA, 25 bp, Homo sapien
agcacctcgtacagggcaagtattt

SEQ ID NO: 5980817 - DNA, 25 bp, Homo sapien
atcccgaagagcattactcctgaga

SEQ ID NO: 5980818 - DNA, 25 bp, Homo sapien
ggatgcgtttcaatacggagtcatg

SEQ ID NO: 5980819 - DNA, 25 bp, Homo sapien
attgcatactgtgccattgaacttc

SEQ ID NO: 5980820 - DNA, 25 bp, Homo sapien
caagggtggtgatccgcggaccaag

SEQ ID NO: 5980821 - DNA, 25 bp, Homo sapien
gcgtttcaatacggagtcatggagt

SEQ ID NO: 5980822 - DNA, 25 bp, Homo sapien
gaaacggtagaaatttcatccataa

SEQ ID NO: 5980823 - DNA, 25 bp, Homo sapien
tcatgtgaacaattggatctatctt

SEQ ID NO: 5980824 - DNA, 25 bp, Homo sapien
ttcatccataagcaggttagtgctt

SEQ ID NO: 5980825 - DNA, 25 bp, Homo sapien
gtcacaaagtatctgcctgccgcgc

SEQ ID NO: 5980826 - DNA, 25 bp, Homo sapien
ctccttgcagcactgggagacgatt

SEQ ID NO: 5980827 - DNA, 25 bp, Homo sapien
ctcgaccacacgatttactttcacc

SEQ ID NO: 5980828 - DNA, 25 bp, Homo sapien
aaatttcatccataagcaggttagt

SEQ ID NO: 5980829 - DNA, 25 bp, Homo sapien
ctttgcgtatctgtccgattcctac

SEQ ID NO: 5980830 - DNA, 25 bp, Homo sapien
tctaagggcacttttggtggaacgc

SEQ ID NO: 5980831 - DNA, 25 bp, Homo sapien
cccacatcgctacattcgtatttca

SEQ ID NO: 5980832 - DNA, 25 bp, Homo sapien
cctcgtacagggcaagtatttcgac

SEQ ID NO: 5980833 - DNA, 25 bp, Homo sapien
tcgtacagggcaagtatttcgacac

SEQ ID NO: 5980834 - DNA, 25 bp, Homo sapien
cgggacgcatcatggcaagcgtctc

SEQ ID NO: 5980835 - DNA, 25 bp, Homo sapien
gtgagacctcccatcactaccgtgg

SEQ ID NO: 5980836 - DNA, 25 bp, Homo sapien
cattgtccgacaggttccaagacgc

SEQ ID NO: 5980837 - DNA, 25 bp, Homo sapien
catcgctacattcgtatttcatcaa

SEQ ID NO: 5980838 - DNA, 25 bp, Homo sapien
attatttcgtcaaagtgagacctcc

SEQ ID NO: 5980839 - DNA, 25 bp, Homo sapien
tgcaaggtaagcagccagaccctca

SEQ ID NO: 5980840 - DNA, 25 bp, Homo sapien
cgctcgaccacacgatttactttca

SEQ ID NO: 5980841 - DNA, 25 bp, Homo sapien
acgactccttgcagcactgggagac

SEQ ID NO: 5980842 - DNA, 25 bp, Homo sapien
catggcaagcgtctctcaggagggc

SEQ ID NO: 5980843 - DNA, 25 bp, Homo sapien
ggatcccgaagagcattactcctga

SEQ ID NO: 5980844 - DNA, 25 bp, Homo sapien
gtaccatgtgcagaatctgagaaac

SEQ ID NO: 5980845 - DNA, 25 bp, Homo sapien
gtccgacaggttccaagacgcaacc

SEQ ID NO: 5980846 - DNA, 25 bp, Homo sapien
cgtacaggatcccgaagagcattac

SEQ ID NO: 5980847 - DNA, 25 bp, Homo sapien
cacgacaagttgatatttacgtcga

SEQ ID NO: 5980848 - DNA, 25 bp, Homo sapien
agagaaaatattggaactggttcct

SEQ ID NO: 5980849 - DNA, 25 bp, Homo sapien
tctactcggcaagacacaccgacga

SEQ ID NO: 5980850 - DNA, 25 bp, Homo sapien
ttttgtcacaaagtatctgcctgcc

SEQ ID NO: 5980851 - DNA, 25 bp, Homo sapien
aacggtagaaatttcatccataagc

SEQ ID NO: 5980852 - DNA, 25 bp, Homo sapien
cgatgagcaagtatgtggatgcgtt

SEQ ID NO: 5980853 - DNA, 25 bp, Homo sapien
ctgtccgattcctacctcctactca

SEQ ID NO: 5980854 - DNA, 25 bp, Homo sapien
ttatgaagaggccacttcgcttttc

SEQ ID NO: 5980855 - DNA, 25 bp, Homo sapien
gagcacgactccttgcagcactggg

SEQ ID NO: 5980856 - DNA, 25 bp, Homo sapien
ggtatcacaatcgctgctggcgtca

SEQ ID NO: 5980857 - DNA, 25 bp, Homo sapien
gctcgctacaactacgtggcctttg

SEQ ID NO: 5980858 - DNA, 25 bp, Homo sapien
cagtcgggacgcatcatggcaagcg

SEQ ID NO: 5980859 - DNA, 25 bp, Homo sapien
catccataagcaggttagtgcttat

SEQ ID NO: 5980860 - DNA, 25 bp, Homo sapien
actacgtggcctttgcgtatctgtc

SEQ ID NO: 5980861 - DNA, 25 bp, Homo sapien
caagtatttcgacacacagtcggga

SEQ ID NO: 5980862 - DNA, 25 bp, Homo sapien
acgtcgatgatcttatttgccgtgc

SEQ ID NO: 5980863 - DNA, 25 bp, Homo sapien
aaaatggccatgtccaacctagaga

SEQ ID NO: 5980864 - DNA, 25 bp, Homo sapien
cgatgatcttatttgccgtgcaacg

SEQ ID NO: 5980865 - DNA, 25 bp, Homo sapien
tcgctacaactacgtggcctttgcg

SEQ ID NO: 5980866 - DNA, 25 bp, Homo sapien
gtatctgtccgattcctacctccta

SEQ ID NO: 5980867 - DNA, 25 bp, Homo sapien
gccgtgcaacggtccaaggagcacg

SEQ ID NO: 5980868 - DNA, 25 bp, Homo sapien
agccagaccctcatcgttatgaaga

SEQ ID NO: 5980869 - DNA, 25 bp, Homo sapien
gttgcctcatgtgaacaattggatc

SEQ ID NO: 5980870 - DNA, 25 bp, Homo sapien
cctcatgtgaacaattggatctatc

SEQ ID NO: 5980871 - DNA, 25 bp, Homo sapien
cgtggcctttgcgtatctgtccgat

SEQ ID NO: 5980872 - DNA, 25 bp, Homo sapien
atctgtccgattcctacctcctact

SEQ ID NO: 5980873 - DNA, 25 bp, Homo sapien
ttccagaaagaagttctggacccac

SEQ ID NO: 5980874 - DNA, 25 bp, Homo sapien
ggtggtgatccgcggaccaagatca

SEQ ID NO: 5980875 - DNA, 25 bp, Homo sapien
agcacgacaagttgatatttacgtc

SEQ ID NO: 5980876 - DNA, 25 bp, Homo sapien
gttctggacccacagaaattgagca

SEQ ID NO: 5980877 - DNA, 25 bp, Homo sapien
tcctctttcgcctaccagttttgtc

SEQ ID NO: 5980878 - DNA, 25 bp, Homo sapien
cctttgtactgccacagtttcagtg

SEQ ID NO: 5980879 - DNA, 25 bp, Homo sapien
ctagagaaaatattggaactggttc

SEQ ID NO: 5980880 - DNA, 25 bp, Homo sapien
tatcagcacgacaagttgatattta

SEQ ID NO: 5980881 - DNA, 25 bp, Homo sapien
atctatcttaagatttcgaatccca

SEQ ID NO: 5980882 - DNA, 25 bp, Homo sapien
acatgttctactcggcaagacacac

SEQ ID NO: 5980883 - DNA, 25 bp, Homo sapien
acaagcatcatccgtacaggatccc

SEQ ID NO: 5980884 - DNA, 25 bp, Homo sapien
tcacgatcccgtacttccacaacct

SEQ ID NO: 5980885 - DNA, 25 bp, Homo sapien
ttgcgtatctgtccgattcctacct

SEQ ID NO: 5980886 - DNA, 25 bp, Homo sapien
tactgtgccattgaacttcttcccc

SEQ ID NO: 5980887 - DNA, 25 bp, Homo sapien
ggacatgttctactcggcaagacac

SEQ ID NO: 5980888 - DNA, 25 bp, Homo sapien
atcttaagatttcgaatcccaggtc

SEQ ID NO: 5980889 - DNA, 25 bp, Homo sapien
ccaagacgcaacctcgatgagcaag

SEQ ID NO: 5980890 - DNA, 25 bp, Homo sapien
tccaggcctgcaaggtaagcagcca

SEQ ID NO: 5980891 - DNA, 25 bp, Homo sapien
cacttttggtggaacgctggtatca

SEQ ID NO: 5980892 - DNA, 25 bp, Homo sapien
gacctcccatcactaccgtggagca

SEQ ID NO: 5980893 - DNA, 25 bp, Homo sapien
agggtggtgatccgcggaccaagat

SEQ ID NO: 5980894 - DNA, 25 bp, Homo sapien
ttacacaagcatcatccgtacagga

SEQ ID NO: 5980895 - DNA, 25 bp, Homo sapien
agcaggttagtgcttatcagcacga

SEQ ID NO: 5980896 - DNA, 25 bp, Homo sapien
ctggattatttcgtcaaagtgagac

SEQ ID NO: 5980897 - DNA, 25 bp, Homo sapien
gtggatgcgtttcaatacggagtca

SEQ ID NO: 5980898 - DNA, 25 bp, Homo sapien
catgtccaacctagagaaaatattg

SEQ ID NO: 5980899 - DNA, 25 bp, Homo sapien
ttcgaatcccaggtcccactgggac

SEQ ID NO: 5980900 - DNA, 25 bp, Homo sapien
aagagcattactcctgagaacgacg

SEQ ID NO: 5980901 - DNA, 25 bp, Homo sapien
cgaatcccaggtcccactgggacaa

SEQ ID NO: 5980902 - DNA, 25 bp, Homo sapien
ttgagcaggtatgcctcattgtccg

SEQ ID NO: 5980903 - DNA, 25 bp, Homo sapien
ccaattccccaaggacatgttctac

SEQ ID NO: 5980904 - DNA, 25 bp, Homo sapien
aagtatctgcctgccgcgcccgtag

SEQ ID NO: 5980905 - DNA, 25 bp, Homo sapien
gctacaactacgtggcctttgcgta

SEQ ID NO: 5980906 - DNA, 25 bp, Homo sapien
gtctctcaggagggctacgttgtct

SEQ ID NO: 5980907 - DNA, 25 bp, Homo sapien
ttccaaaatggccatgtccaaccta

SEQ ID NO: 5980908 - DNA, 25 bp, Homo sapien
tacattcgtatttcatcaagggtgg

SEQ ID NO: 5980909 - DNA, 25 bp, Homo sapien
gaactggttcctctttcgcctacca

SEQ ID NO: 5980910 - DNA, 25 bp, Homo sapien
taccaattccccaaggacatgttct

SEQ ID NO: 5980911 - DNA, 25 bp, Homo sapien
tcatcaagggtggtgatccgcggac

SEQ ID NO: 5980912 - DNA, 25 bp, Homo sapien
gacaagcacctcgtacagggcaagt

SEQ ID NO: 5980913 - DNA, 25 bp, Homo sapien
gaagaggccacttcgcttttccaga

SEQ ID NO: 5980914 - DNA, 25 bp, Homo sapien
gtacttccacaacctgcctttgtac

SEQ ID NO: 5980915 - DNA, 25 bp, Homo sapien
tcatcgttatgaagaggccacttcg

SEQ ID NO: 5980916 - DNA, 25 bp, Homo sapien
cacacagtcgggacgcatcatggca

SEQ ID NO: 5980917 - DNA, 25 bp, Homo sapien
agttttgtcacaaagtatctgcctg

SEQ ID NO: 5980918 - DNA, 25 bp, Homo sapien
gggcgacgagtcttctttacacaag

SEQ ID NO: 5980919 - DNA, 25 bp, Homo sapien
gatcccgtacttccacaacctgcct

SEQ ID NO: 5980920 - DNA, 25 bp, Homo sapien
gctacattcgtatttcatcaagggt

SEQ ID NO: 5980921 - DNA, 25 bp, Homo sapien
gcaggtatgcctcattgtccgacag

SEQ ID NO: 5980922 - DNA, 25 bp, Homo sapien
atgagtgcttccaaaatggccatgt

SEQ ID NO: 5980923 - DNA, 25 bp, Homo sapien
tactcggcaagacacaccgacgagc

SEQ ID NO: 5980924 - DNA, 25 bp, Homo sapien
tttcatcaagggtggtgatccgcgg

SEQ ID NO: 5980925 - DNA, 25 bp, Homo sapien
cttttggtggaacgctggtatcaca

SEQ ID NO: 5980926 - DNA, 25 bp, Homo sapien
gcctttgcgtatctgtccgattcct

SEQ ID NO: 5980927 - DNA, 25 bp, Homo sapien
tccaaggagcacgactccttgcagc

SEQ ID NO: 5980928 - DNA, 25 bp, Homo sapien
tacctcctactcacgatcccgtact

SEQ ID NO: 5980929 - DNA, 25 bp, Homo sapien
agaaaatattggaactggttcctct

SEQ ID NO: 5980930 - DNA, 25 bp, Homo sapien
cccacagaaattgagcaggtatgcc

SEQ ID NO: 5980931 - DNA, 25 bp, Homo sapien
aatggccatgtccaacctagagaaa

SEQ ID NO: 5980932 - DNA, 25 bp, Homo sapien
cacaccgacgagctggattatttcg

SEQ ID NO: 5980933 - DNA, 25 bp, Homo sapien
caactacgtggcctttgcgtatctg

SEQ ID NO: 5980934 - DNA, 25 bp, Homo sapien
ttcgtatttcatcaagggtggtgat

SEQ ID NO: 5980935 - DNA, 25 bp, Homo sapien
tggtggaacgctggtatcacaatcg

SEQ ID NO: 5980936 - DNA, 25 bp, Homo sapien
cctcctactcacgatcccgtacttc

SEQ ID NO: 5980937 - DNA, 25 bp, Homo sapien
cacaaagtatctgcctgccgcgccc

SEQ ID NO: 5980938 - DNA, 25 bp, Homo sapien
tcgctgctggcgtcattgcatactg

SEQ ID NO: 5980939 - DNA, 25 bp, Homo sapien
aacctgcctttgtactgccacagtt

SEQ ID NO: 5980940 - DNA, 25 bp, Homo sapien
agaaatttcatccataagcaggtta

SEQ ID NO: 5980941 - DNA, 25 bp, Homo sapien
ctcggcaagacacaccgacgagctg

SEQ ID NO: 5980942 - DNA, 25 bp, Homo sapien
gtatgtggatgcgtttcaatacgga

SEQ ID NO: 5980943 - DNA, 25 bp, Homo sapien
agaaagaagttctggacccacagaa

SEQ ID NO: 5980944 - DNA, 25 bp, Homo sapien
aagtatgtggatgcgtttcaatacg

SEQ ID NO: 5980945 - DNA, 25 bp, Homo sapien
aattggatctatcttaagatttcga

SEQ ID NO: 5980946 - DNA, 25 bp, Homo sapien
gtacggatgatgcttgtgtaaagaa

SEQ ID NO: 5980947 - DNA, 25 bp, Homo sapien
accagcgttccaccaaaagtgccct

SEQ ID NO: 5980948 - DNA, 25 bp, Homo sapien
tacgaggtgcttgtcccagtgggac

SEQ ID NO: 5980949 - DNA, 25 bp, Homo sapien
ggttggacatggccattttggaagc

SEQ ID NO: 5980950 - DNA, 25 bp, Homo sapien
ggtcgagcgagacactgaaactgtg

SEQ ID NO: 5980951 - DNA, 25 bp, Homo sapien
attggtactccatgactccgtattg

SEQ ID NO: 5980952 - DNA, 25 bp, Homo sapien
ttgatgaaatacgaatgtagcgatg

SEQ ID NO: 5980953 - DNA, 25 bp, Homo sapien
tacgtgatcttggtccgcggatcac

SEQ ID NO: 5980954 - DNA, 25 bp, Homo sapien
tcgaggttgcgtcttggaacctgtc

SEQ ID NO: 5980955 - DNA, 25 bp, Homo sapien
cctcttcataacgatgagggtctgg

SEQ ID NO: 5980956 - DNA, 25 bp, Homo sapien
tgaaagtaaatcgtgtggtcgagcg

SEQ ID NO: 5980957 - DNA, 25 bp, Homo sapien
cagtacaaaggcaggttgtggaagt

SEQ ID NO: 5980958 - DNA, 25 bp, Homo sapien
taaatcgtgtggtcgagcgagacac

SEQ ID NO: 5980959 - DNA, 25 bp, Homo sapien
ttgacgaaataatccagctcgtcgg

SEQ ID NO: 5980960 - DNA, 25 bp, Homo sapien
gtagcgatgtggggaagaagttcaa

SEQ ID NO: 5980961 - DNA, 25 bp, Homo sapien
ctgcttatggatgaaatttctaccg

SEQ ID NO: 5980962 - DNA, 25 bp, Homo sapien
aaagtaaatcgtgtggtcgagcgag

SEQ ID NO: 5980963 - DNA, 25 bp, Homo sapien
aacttctttctggaaaagcgaagtg

SEQ ID NO: 5980964 - DNA, 25 bp, Homo sapien
atgcaatgacgccagcagcgattgt

SEQ ID NO: 5980965 - DNA, 25 bp, Homo sapien
tgtacgaggtgcttgtcccagtggg

SEQ ID NO: 5980966 - DNA, 25 bp, Homo sapien
ccatgatgcgtcccgactgtgtgtc

SEQ ID NO: 5980967 - DNA, 25 bp, Homo sapien
tctcaggagtaatgctcttcgggat

SEQ ID NO: 5980968 - DNA, 25 bp, Homo sapien
cttagaccctacgggcgcggcaggc

SEQ ID NO: 5980969 - DNA, 25 bp, Homo sapien
tttctggaaaagcgaagtggcctct

SEQ ID NO: 5980970 - DNA, 25 bp, Homo sapien
taacctgcttatggatgaaatttct

SEQ ID NO: 5980971 - DNA, 25 bp, Homo sapien
aagaagactcgtcgcccgcgtgctc

SEQ ID NO: 5980972 - DNA, 25 bp, Homo sapien
gaagactcgtcgcccgcgtgctcca

SEQ ID NO: 5980973 - DNA, 25 bp, Homo sapien
atcgtgagtaggaggtaggaatcgg

SEQ ID NO: 5980974 - DNA, 25 bp, Homo sapien
gtgatgggaggtctcactttgacga

SEQ ID NO: 5980975 - DNA, 25 bp, Homo sapien
gctcgtcggtgtgtcttgccgagta

SEQ ID NO: 5980976 - DNA, 25 bp, Homo sapien
gtcttggaacctgtcggacaatgag

SEQ ID NO: 5980977 - DNA, 25 bp, Homo sapien
gatgggaggtctcactttgacgaaa

SEQ ID NO: 5980978 - DNA, 25 bp, Homo sapien
aatgtctcgttctgacccgtagaca

SEQ ID NO: 5980979 - DNA, 25 bp, Homo sapien
tttctaccgtttctcagattctgca

SEQ ID NO: 5980980 - DNA, 25 bp, Homo sapien
ggtgaaagtaaatcgtgtggtcgag

SEQ ID NO: 5980981 - DNA, 25 bp, Homo sapien
tctctaggttggacatggccatttt

SEQ ID NO: 5980982 - DNA, 25 bp, Homo sapien
attgttcacatgaggcaactggtga

SEQ ID NO: 5980983 - DNA, 25 bp, Homo sapien
gtgacaaaactggtaggcgaaagag

SEQ ID NO: 5980984 - DNA, 25 bp, Homo sapien
ggatgaaatttctaccgtttctcag

SEQ ID NO: 5980985 - DNA, 25 bp, Homo sapien
cacatacttgctcatcgaggttgcg

SEQ ID NO: 5980986 - DNA, 25 bp, Homo sapien
tgctccacggtagtgatgggaggtc

SEQ ID NO: 5980987 - DNA, 25 bp, Homo sapien
cgtagccctcctgagagacgcttgc

SEQ ID NO: 5980988 - DNA, 25 bp, Homo sapien
taaagaagactcgtcgcccgcgtgc

SEQ ID NO: 5980989 - DNA, 25 bp, Homo sapien
gcagcgattgtgataccagcgttcc

SEQ ID NO: 5980990 - DNA, 25 bp, Homo sapien
taggttggacatggccattttggaa

SEQ ID NO: 5980991 - DNA, 25 bp, Homo sapien
cgattgtgataccagcgttccacca

SEQ ID NO: 5980992 - DNA, 25 bp, Homo sapien
cagaacttggctcgaatgtctcgtt

SEQ ID NO: 5980993 - DNA, 25 bp, Homo sapien
gtgtggtcgagcgagacactgaaac

SEQ ID NO: 5980994 - DNA, 25 bp, Homo sapien
gcgcggcaggcagatactttgtgac

SEQ ID NO: 5980995 - DNA, 25 bp, Homo sapien
ttctgcacatggtacgtgatcttgg

SEQ ID NO: 5980996 - DNA, 25 bp, Homo sapien
taccttgcaggcctggaatcgtctc

SEQ ID NO: 5980997 - DNA, 25 bp, Homo sapien
cttgccatgatgcgtcccgactgtg

SEQ ID NO: 5980998 - DNA, 25 bp, Homo sapien
gtctcactttgacgaaataatccag

SEQ ID NO: 5980999 - DNA, 25 bp, Homo sapien
ttctcagattctgcacatggtacgt

SEQ ID NO: 5981000 - DNA, 25 bp, Homo sapien
tgctcaatttctgtgggtccagaac

SEQ ID NO: 5981001 - DNA, 25 bp, Homo sapien
ttggacatggccattttggaagcac

SEQ ID NO: 5981002 - DNA, 25 bp, Homo sapien
tccttggggaattggtactccatga

SEQ ID NO: 5981003 - DNA, 25 bp, Homo sapien
tcgtcggtgtgtcttgccgagtaga

SEQ ID NO: 5981004 - DNA, 25 bp, Homo sapien
ggacatggccattttggaagcactc

SEQ ID NO: 5981005 - DNA, 25 bp, Homo sapien
atgatgcttgtgtaaagaagactcg

SEQ ID NO: 5981006 - DNA, 25 bp, Homo sapien
aataagatcatcgacgtaaatatca

SEQ ID NO: 5981007 - DNA, 25 bp, Homo sapien
gtatgcaatgacgccagcagcgatt

SEQ ID NO: 5981008 - DNA, 25 bp, Homo sapien
aagaagttcaatggcacagtatgca

SEQ ID NO: 5981009 - DNA, 25 bp, Homo sapien
gcgagacactgaaactgtggcagta

SEQ ID NO: 5981010 - DNA, 25 bp, Homo sapien
tctggaaaagcgaagtggcctcttc

SEQ ID NO: 5981011 - DNA, 25 bp, Homo sapien
ataatccagctcgtcggtgtgtctt

SEQ ID NO: 5981012 - DNA, 25 bp, Homo sapien
gagcgagacactgaaactgtggcag

SEQ ID NO: 5981013 - DNA, 25 bp, Homo sapien
gacctgggattcgaaatcttaagat

SEQ ID NO: 5981014 - DNA, 25 bp, Homo sapien
atggatgaaatttctaccgtttctc

SEQ ID NO: 5981015 - DNA, 25 bp, Homo sapien
ggatgatgcttgtgtaaagaagact

SEQ ID NO: 5981016 - DNA, 25 bp, Homo sapien
tggggaattggtactccatgactcc

SEQ ID NO: 5981017 - DNA, 25 bp, Homo sapien
acctgtcggacaatgaggcatacct

SEQ ID NO: 5981018 - DNA, 25 bp, Homo sapien
ggcaaataagatcatcgacgtaaat

SEQ ID NO: 5981019 - DNA, 25 bp, Homo sapien
ctacgggcgcggcaggcagatactt

SEQ ID NO: 5981020 - DNA, 25 bp, Homo sapien
gacgaaataatccagctcgtcggtg

SEQ ID NO: 5981021 - DNA, 25 bp, Homo sapien
ctgtacggatgatgcttgtgtaaag

SEQ ID NO: 5981022 - DNA, 25 bp, Homo sapien
gaaactgtggcagtacaaaggcagg

SEQ ID NO: 5981023 - DNA, 25 bp, Homo sapien
agcgaagtggcctcttcataacgat

SEQ ID NO: 5981024 - DNA, 25 bp, Homo sapien
aagatagatccaattgttcacatga

SEQ ID NO: 5981025 - DNA, 25 bp, Homo sapien
gtagcgagcgtcgttctcaggagta

SEQ ID NO: 5981026 - DNA, 25 bp, Homo sapien
cctcctgagagacgcttgccatgat

SEQ ID NO: 5981027 - DNA, 25 bp, Homo sapien
tgcgtcccgactgtgtgtcgaaata

SEQ ID NO: 5981028 - DNA, 25 bp, Homo sapien
catacttgctcatcgaggttgcgtc

SEQ ID NO: 5981029 - DNA, 25 bp, Homo sapien
ctgagagacgcttgccatgatgcgt

SEQ ID NO: 5981030 - DNA, 25 bp, Homo sapien
agggtctggctgcttaccttgcagg

SEQ ID NO: 5981031 - DNA, 25 bp, Homo sapien
tccaattgttcacatgaggcaactg

SEQ ID NO: 5981032 - DNA, 25 bp, Homo sapien
cgttgcacggcaaataagatcatcg

SEQ ID NO: 5981033 - DNA, 25 bp, Homo sapien
gcaggttgtggaagtacgggatcgt

SEQ ID NO: 5981034 - DNA, 25 bp, Homo sapien
tcgagcgagacactgaaactgtggc

SEQ ID NO: 5981035 - DNA, 25 bp, Homo sapien
cttgctcatcgaggttgcgtcttgg

SEQ ID NO: 5981036 - DNA, 25 bp, Homo sapien
ggaccgttgcacggcaaataagatc

SEQ ID NO: 5981037 - DNA, 25 bp, Homo sapien
gtgtgtcgaaatacttgccctgtac

SEQ ID NO: 5981038 - DNA, 25 bp, Homo sapien
ctcactttgacgaaataatccagct

SEQ ID NO: 5981039 - DNA, 25 bp, Homo sapien
gtcgaaatacttgccctgtacgagg

SEQ ID NO: 5981040 - DNA, 25 bp, Homo sapien
cctgtacgaggtgcttgtcccagtg

SEQ ID NO: 5981041 - DNA, 25 bp, Homo sapien
tggaaaagcgaagtggcctcttcat

SEQ ID NO: 5981042 - DNA, 25 bp, Homo sapien
ttgcaggcctggaatcgtctcccag

SEQ ID NO: 5981043 - DNA, 25 bp, Homo sapien
cgtattgaaacgcatccacatactt

SEQ ID NO: 5981044 - DNA, 25 bp, Homo sapien
gcacggcaaataagatcatcgacgt

SEQ ID NO: 5981045 - DNA, 25 bp, Homo sapien
actaacctgcttatggatgaaattt

SEQ ID NO: 5981046 - DNA, 25 bp, Homo sapien
gccctgtacgaggtgcttgtcccag

SEQ ID NO: 5981047 - DNA, 25 bp, Homo sapien
gaggcatacctgctcaatttctgtg

SEQ ID NO: 5981048 - DNA, 25 bp, Homo sapien
ttatggatgaaatttctaccgtttc

SEQ ID NO: 5981049 - DNA, 25 bp, Homo sapien
ggattcgaaatcttaagatagatcc

SEQ ID NO: 5981050 - DNA, 25 bp, Homo sapien
gaaaagcgaagtggcctcttcataa

SEQ ID NO: 5981051 - DNA, 25 bp, Homo sapien
ccttgatgaaatacgaatgtagcga

SEQ ID NO: 5981052 - DNA, 25 bp, Homo sapien
ccgactgtgtgtcgaaatacttgcc

SEQ ID NO: 5981053 - DNA, 25 bp, Homo sapien
tcttcataacgatgagggtctggct

SEQ ID NO: 5981054 - DNA, 25 bp, Homo sapien
tgcccttagaccctacgggcgcggc

SEQ ID NO: 5981055 - DNA, 25 bp, Homo sapien
gaaacgcatccacatacttgctcat

SEQ ID NO: 5981056 - DNA, 25 bp, Homo sapien
tctttctggaaaagcgaagtggcct

SEQ ID NO: 5981057 - DNA, 25 bp, Homo sapien
tggtccgcggatcaccacccttgat

SEQ ID NO: 5981058 - DNA, 25 bp, Homo sapien
tagatccaattgttcacatgaggca

SEQ ID NO: 5981059 - DNA, 25 bp, Homo sapien
agcgattgtgataccagcgttccac

SEQ ID NO: 5981060 - DNA, 25 bp, Homo sapien
caattgttcacatgaggcaactggt

SEQ ID NO: 5981061 - DNA, 25 bp, Homo sapien
gatgcttgtgtaaagaagactcgtc

SEQ ID NO: 5981062 - DNA, 25 bp, Homo sapien
tcgacgtaaatatcaacttgtcgtg

SEQ ID NO: 5981063 - DNA, 25 bp, Homo sapien
gcctggaatcgtctcccagtgctgc

SEQ ID NO: 5981064 - DNA, 25 bp, Homo sapien
gtgtcttgccgagtagaacatgtcc

SEQ ID NO: 5981065 - DNA, 25 bp, Homo sapien
ggcagatactttgtgacaaaactgg

SEQ ID NO: 5981066 - DNA, 25 bp, Homo sapien
taagatcatcgacgtaaatatcaac

SEQ ID NO: 5981067 - DNA, 25 bp, Homo sapien
cttgtgtaaagaagactcgtcgccc

SEQ ID NO: 5981068 - DNA, 25 bp, Homo sapien
gacgtaaatatcaacttgtcgtgct

SEQ ID NO: 5981069 - DNA, 25 bp, Homo sapien
gcgtcttggaacctgtcggacaatg

SEQ ID NO: 5981070 - DNA, 25 bp, Homo sapien
gaccctacgggcgcggcaggcagat

SEQ ID NO: 5981071 - DNA, 25 bp, Homo sapien
cataacgatgagggtctggctgctt

SEQ ID NO: 5981072 - DNA, 25 bp, Homo sapien
aatcgtctcccagtgctgcaaggag

SEQ ID NO: 5981073 - DNA, 25 bp, Homo sapien
ataagcactaacctgcttatggatg

SEQ ID NO: 5981074 - DNA, 25 bp, Homo sapien
gtcggacaatgaggcatacctgctc

SEQ ID NO: 5981075 - DNA, 25 bp, Homo sapien
cgtaaatatcaacttgtcgtgctga

SEQ ID NO: 5981076 - DNA, 25 bp, Homo sapien
caggcagatactttgtgacaaaact

SEQ ID NO: 5981077 - DNA, 25 bp, Homo sapien
acatggccattttggaagcactcat

SEQ ID NO: 5981078 - DNA, 25 bp, Homo sapien
acgatgagggtctggctgcttacct

SEQ ID NO: 5981079 - DNA, 25 bp, Homo sapien
gattctgcacatggtacgtgatctt

SEQ ID NO: 5981080 - DNA, 25 bp, Homo sapien
cagatactttgtgacaaaactggta

SEQ ID NO: 5981081 - DNA, 25 bp, Homo sapien
aggcctggaatcgtctcccagtgct

SEQ ID NO: 5981082 - DNA, 25 bp, Homo sapien
tggaagtacgggatcgtgagtagga

SEQ ID NO: 5981083 - DNA, 25 bp, Homo sapien
gaattggtactccatgactccgtat

SEQ ID NO: 5981084 - DNA, 25 bp, Homo sapien
tcctgtacggatgatgcttgtgtaa

SEQ ID NO: 5981085 - DNA, 25 bp, Homo sapien
gttctcaggagtaatgctcttcggg

SEQ ID NO: 5981086 - DNA, 25 bp, Homo sapien
cagctcgtcggtgtgtcttgccgag

SEQ ID NO: 5981087 - DNA, 25 bp, Homo sapien
cgaatgtctcgttctgacccgtaga

SEQ ID NO: 5981088 - DNA, 25 bp, Homo sapien
ttgcgtcttggaacctgtcggacaa

SEQ ID NO: 5981089 - DNA, 25 bp, Homo sapien
gcgaaagaggaaccagttccaatat

SEQ ID NO: 5981090 - DNA, 25 bp, Homo sapien
gcaactggtgaaagtaaatcgtgtg

SEQ ID NO: 5981091 - DNA, 25 bp, Homo sapien
ttgtagcgagcgtcgttctcaggag

SEQ ID NO: 5981092 - DNA, 25 bp, Homo sapien
aagtggcctcttcataacgatgagg

SEQ ID NO: 5981093 - DNA, 25 bp, Homo sapien
acgccagcagcgattgtgataccag

SEQ ID NO: 5981094 - DNA, 25 bp, Homo sapien
ggcaggcagatactttgtgacaaaa

SEQ ID NO: 5981095 - DNA, 25 bp, Homo sapien
caccaaaagtgcccttagaccctac

SEQ ID NO: 5981096 - DNA, 25 bp, Homo sapien
ggcacagtatgcaatgacgccagca

SEQ ID NO: 5981097 - DNA, 25 bp, Homo sapien
aatcgtgtggtcgagcgagacactg

SEQ ID NO: 5981098 - DNA, 25 bp, Homo sapien
tgggaggtctcactttgacgaaata

SEQ ID NO: 5981099 - DNA, 25 bp, Homo sapien
acttggctcgaatgtctcgttctga

SEQ ID NO: 5981100 - DNA, 25 bp, Homo sapien
tctgacccgtagacaacgtagccct

SEQ ID NO: 5981101 - DNA, 25 bp, Homo sapien
tacctgctcaatttctgtgggtcca

SEQ ID NO: 5981102 - DNA, 25 bp, Homo sapien
gctgcttaccttgcaggcctggaat

SEQ ID NO: 5981103 - DNA, 25 bp, Homo sapien
gacaatgaggcatacctgctcaatt

SEQ ID NO: 5981104 - DNA, 25 bp, Homo sapien
agtgcccttagaccctacgggcgcg

SEQ ID NO: 5981105 - DNA, 25 bp, Homo sapien
cgagcgtcgttctcaggagtaatgc

SEQ ID NO: 5981106 - DNA, 25 bp, Homo sapien
ctgtggcagtacaaaggcaggttgt

SEQ ID NO: 5981107 - DNA, 25 bp, Homo sapien
gacactgaaactgtggcagtacaaa

SEQ ID NO: 5981108 - DNA, 25 bp, Homo sapien
gatacgcaaaggccacgtagttgta

SEQ ID NO: 5981109 - DNA, 25 bp, Homo sapien
tccacatacttgctcatcgaggttg

SEQ ID NO: 5981110 - DNA, 25 bp, Homo sapien
gtttctcagattctgcacatggtac

SEQ ID NO: 5981111 - DNA, 25 bp, Homo sapien
gagagacgcttgccatgatgcgtcc

SEQ ID NO: 5981112 - DNA, 25 bp, Homo sapien
ttcataacgatgagggtctggctgc

SEQ ID NO: 5981113 - DNA, 25 bp, Homo sapien
cttggaacctgtcggacaatgaggc

SEQ ID NO: 5981114 - DNA, 25 bp, Homo sapien
tctaggttggacatggccattttgg

SEQ ID NO: 5981115 - DNA, 25 bp, Homo sapien
agacaacgtagccctcctgagagac

SEQ ID NO: 5981116 - DNA, 25 bp, Homo sapien
atgtagcgatgtggggaagaagttc

SEQ ID NO: 5981117 - DNA, 25 bp, Homo sapien
atgaaatttctaccgtttctcagat

SEQ ID NO: 5981118 - DNA, 25 bp, Homo sapien
gttctgacccgtagacaacgtagcc

SEQ ID NO: 5981119 - DNA, 25 bp, Homo sapien
gtacaaaggcaggttgtggaagtac

SEQ ID NO: 5981120 - DNA, 25 bp, Homo sapien
tgagggtctggctgcttaccttgca

SEQ ID NO: 5981121 - DNA, 25 bp, Homo sapien
ataccagcgttccaccaaaagtgcc

SEQ ID NO: 5981122 - DNA, 25 bp, Homo sapien
ccacggtagtgatgggaggtctcac

SEQ ID NO: 5981123 - DNA, 25 bp, Homo sapien
gaaccagttccaatattttctctag

SEQ ID NO: 5981124 - DNA, 25 bp, Homo sapien
caaaggccacgtagttgtagcgagc

SEQ ID NO: 5981125 - DNA, 25 bp, Homo sapien
agtaaatcgtgtggtcgagcgagac

SEQ ID NO: 5981126 - DNA, 25 bp, Homo sapien
ggaagaagttcaatggcacagtatg

SEQ ID NO: 5981127 - DNA, 25 bp, Homo sapien
cacatgaggcaactggtgaaagtaa

SEQ ID NO: 5981128 - DNA, 25 bp, Homo sapien
tgtaaagaagactcgtcgcccgcgt

SEQ ID NO: 5981129 - DNA, 25 bp, Homo sapien
gtgctgataagcactaacctgctta

SEQ ID NO: 5981130 - DNA, 25 bp, Homo sapien
gccctcctgagagacgcttgccatg

SEQ ID NO: 5981131 - DNA, 25 bp, Homo sapien
gggacctgggattcgaaatcttaag

SEQ ID NO: 5981132 - DNA, 25 bp, Homo sapien
tcgttctcaggagtaatgctcttcg

SEQ ID NO: 5981133 - DNA, 25 bp, Homo sapien
ctcatcgaggttgcgtcttggaacc

SEQ ID NO: 5981134 - DNA, 25 bp, Homo sapien
aggttgtggaagtacgggatcgtga

SEQ ID NO: 5981135 - DNA, 25 bp, Homo sapien
gacgcttgccatgatgcgtcccgac

SEQ ID NO: 5981136 - DNA, 25 bp, Homo sapien
cccttagaccctacgggcgcggcag

SEQ ID NO: 5981137 - DNA, 25 bp, Homo sapien
tggaacctgtcggacaatgaggcat

SEQ ID NO: 5981138 - DNA, 25 bp, Homo sapien
cactgaaactgtggcagtacaaagg

SEQ ID NO: 5981139 - DNA, 25 bp, Homo sapien
cgtcgttctcaggagtaatgctctt

SEQ ID NO: 5981140 - DNA, 25 bp, Homo sapien
atgaggcatacctgctcaatttctg

SEQ ID NO: 5981141 - DNA, 25 bp, Homo sapien
gatgaaatacgaatgtagcgatgtg

SEQ ID NO: 5981142 - DNA, 25 bp, Homo sapien
tcaacttgtcgtgctgataagcact

SEQ ID NO: 5981143 - DNA, 25 bp, Homo sapien
attgtgataccagcgttccaccaaa

SEQ ID NO: 5981144 - DNA, 25 bp, Homo sapien
ccgtttctcagattctgcacatggt

SEQ ID NO: 5981145 - DNA, 25 bp, Homo sapien
aactgtggcagtacaaaggcaggtt

SEQ ID NO: 5981146 - DNA, 25 bp, Homo sapien
ctcccagtgctgcaaggagtcgtgc

SEQ ID NO: 5981147 - DNA, 25 bp, Homo sapien
actccgtattgaaacgcatccacat

SEQ ID NO: 5981148 - DNA, 25 bp, Homo sapien
atggcacagtatgcaatgacgccag

SEQ ID NO: 5981149 - DNA, 25 bp, Homo sapien
ttgaaacgcatccacatacttgctc

SEQ ID NO: 5981150 - DNA, 25 bp, Homo sapien
aaagcgaagtggcctcttcataacg

SEQ ID NO: 5981151 - DNA, 25 bp, Homo sapien
caatggcacagtatgcaatgacgcc

SEQ ID NO: 5981152 - DNA, 25 bp, Homo sapien
tacgcaaaggccacgtagttgtagc

SEQ ID NO: 5981153 - DNA, 25 bp, Homo sapien
ctccttggaccgttgcacggcaaat

SEQ ID NO: 5981154 - DNA, 25 bp, Homo sapien
cgaagtggcctcttcataacgatga

SEQ ID NO: 5981155 - DNA, 25 bp, Homo sapien
gtactccatgactccgtattgaaac

SEQ ID NO: 5981156 - DNA, 25 bp, Homo sapien
cagtgggacctgggattcgaaatct

SEQ ID NO: 5981157 - DNA, 25 bp, Homo sapien
ggaggtctcactttgacgaaataat

SEQ ID NO: 5981158 - DNA, 25 bp, Homo sapien
gggcgcggcaggcagatactttgtg

SEQ ID NO: 5981159 - DNA, 25 bp, Homo sapien
ctcaatttctgtgggtccagaactt

SEQ ID NO: 5981160 - DNA, 25 bp, Homo sapien
tgtgtaaagaagactcgtcgcccgc

SEQ ID NO: 5981161 - DNA, 25 bp, Homo sapien
atcttggtccgcggatcaccaccct

SEQ ID NO: 5981162 - DNA, 25 bp, Homo sapien
tgactccgtattgaaacgcatccac

SEQ ID NO: 5981163 - DNA, 25 bp, Homo sapien
taacgatgagggtctggctgcttac

SEQ ID NO: 5981164 - DNA, 25 bp, Homo sapien
tgcaaggagtcgtgctccttggacc

SEQ ID NO: 5981165 - DNA, 25 bp, Homo sapien
aatcttaagatagatccaattgttc

SEQ ID NO: 5981166 - DNA, 25 bp, Homo sapien
gatcctgtacggatgatgcttgtgt

SEQ ID NO: 5981167 - DNA, 25 bp, Homo sapien
gaatcggacagatacgcaaaggcca

SEQ ID NO: 5981168 - DNA, 25 bp, Homo sapien
accagttccaatattttctctaggt

SEQ ID NO: 5981169 - DNA, 25 bp, Homo sapien
gactgtgtgtcgaaatacttgccct

SEQ ID NO: 5981170 - DNA, 25 bp, Homo sapien
cggacagatacgcaaaggccacgta

SEQ ID NO: 5981171 - DNA, 25 bp, Homo sapien
catgaggcaactggtgaaagtaaat

SEQ ID NO: 5981172 - DNA, 25 bp, Homo sapien
tgacccgtagacaacgtagccctcc

SEQ ID NO: 5981173 - DNA, 25 bp, Homo sapien
aaataatccagctcgtcggtgtgtc

SEQ ID NO: 5981174 - DNA, 25 bp, Homo sapien
atggtacgtgatcttggtccgcgga

SEQ ID NO: 5981175 - DNA, 25 bp, Homo sapien
tactttgtgacaaaactggtaggcg

SEQ ID NO: 5981176 - DNA, 25 bp, Homo sapien
gcacatggtacgtgatcttggtccg

SEQ ID NO: 5981177 - DNA, 25 bp, Homo sapien
aatgacgccagcagcgattgtgata

SEQ ID NO: 5981178 - DNA, 25 bp, Homo sapien
tgtggaagtacgggatcgtgagtag

SEQ ID NO: 5981179 - DNA, 25 bp, Homo sapien
ctgtcggacaatgaggcatacctgc

SEQ ID NO: 5981180 - DNA, 25 bp, Homo sapien
gaacttggctcgaatgtctcgttct

SEQ ID NO: 5981181 - DNA, 25 bp, Homo sapien
gtagttgtagcgagcgtcgttctca

SEQ ID NO: 5981182 - DNA, 25 bp, Homo sapien
tcgtcgcccgcgtgctccacggtag

SEQ ID NO: 5981183 - DNA, 25 bp, Homo sapien
caccacccttgatgaaatacgaatg

SEQ ID NO: 5981184 - DNA, 25 bp, Homo sapien
cagcagcgattgtgataccagcgtt

SEQ ID NO: 5981185 - DNA, 25 bp, Homo sapien
tgataagcactaacctgcttatgga

SEQ ID NO: 5981186 - DNA, 25 bp, Homo sapien
agactcgtcgcccgcgtgctccacg

SEQ ID NO: 5981187 - DNA, 25 bp, Homo sapien
gccagcagcgattgtgataccagcg

SEQ ID NO: 5981188 - DNA, 25 bp, Homo sapien
gagacactgaaactgtggcagtaca

SEQ ID NO: 5981189 - DNA, 25 bp, Homo sapien
ccgagtagaacatgtccttggggaa

SEQ ID NO: 5981190 - DNA, 25 bp, Homo sapien
gtaggaatcggacagatacgcaaag

SEQ ID NO: 5981191 - DNA, 25 bp, Homo sapien
taaatatcaacttgtcgtgctgata

SEQ ID NO: 5981192 - DNA, 25 bp, Homo sapien
ccctacgggcgcggcaggcagatac

SEQ ID NO: 5981193 - DNA, 25 bp, Homo sapien
ggtagtgatgggaggtctcactttg

SEQ ID NO: 5981194 - DNA, 25 bp, Homo sapien
ccgtagacaacgtagccctcctgag

SEQ ID NO: 5981195 - DNA, 25 bp, Homo sapien
ctgcacatggtacgtgatcttggtc

SEQ ID NO: 5981196 - DNA, 25 bp, Homo sapien
cggacaatgaggcatacctgctcaa

SEQ ID NO: 5981197 - DNA, 25 bp, Homo sapien
cagtgctgcaaggagtcgtgctcct

SEQ ID NO: 5981198 - DNA, 25 bp, Homo sapien
tgataccagcgttccaccaaaagtg

SEQ ID NO: 5981199 - DNA, 25 bp, Homo sapien
gacagatacgcaaaggccacgtagt

SEQ ID NO: 5981200 - DNA, 25 bp, Homo sapien
agtaggaggtaggaatcggacagat

SEQ ID NO: 5981201 - DNA, 25 bp, Homo sapien
gcactaacctgcttatggatgaaat

SEQ ID NO: 5981202 - DNA, 25 bp, Homo sapien
cggtgtgtcttgccgagtagaacat

SEQ ID NO: 5981203 - DNA, 25 bp, Homo sapien
cgcccgcgtgctccacggtagtgat

SEQ ID NO: 5981204 - DNA, 25 bp, Homo sapien
cttggggaattggtactccatgact

SEQ ID NO: 5981205 - DNA, 25 bp, Homo sapien
ttggctcgaatgtctcgttctgacc

SEQ ID NO: 5981206 - DNA, 25 bp, Homo sapien
aacgcatccacatacttgctcatcg

SEQ ID NO: 5981207 - DNA, 25 bp, Homo sapien
atcaccacccttgatgaaatacgaa

SEQ ID NO: 5981208 - DNA, 25 bp, Homo sapien
acgaatgtagcgatgtggggaagaa

SEQ ID NO: 5981209 - DNA, 25 bp, Homo sapien
tcttaagatagatccaattgttcac

SEQ ID NO: 5981210 - DNA, 25 bp, Homo sapien
gagtcgtgctccttggaccgttgca

SEQ ID NO: 5981211 - DNA, 25 bp, Homo sapien
ggtctggctgcttaccttgcaggcc

SEQ ID NO: 5981212 - DNA, 25 bp, Homo sapien
ggggaagaagttcaatggcacagta

SEQ ID NO: 5981213 - DNA, 25 bp, Homo sapien
ctcgaatgtctcgttctgacccgta

SEQ ID NO: 5981214 - DNA, 25 bp, Homo sapien
agttgtagcgagcgtcgttctcagg

SEQ ID NO: 5981215 - DNA, 25 bp, Homo sapien
tcgaaatcttaagatagatccaatt

SEQ ID NO: 5981216 - DNA, 25 bp, Homo sapien
tgttcacatgaggcaactggtgaaa

SEQ ID NO: 5981217 - DNA, 25 bp, Homo sapien
aaaggcaggttgtggaagtacggga

SEQ ID NO: 5981218 - DNA, 25 bp, Homo sapien
gtccagaacttctttctggaaaagc

SEQ ID NO: 5981219 - DNA, 25 bp, Homo sapien
caaggagtcgtgctccttggaccgt

SEQ ID NO: 5981220 - DNA, 25 bp, Homo sapien
gctgataagcactaacctgcttatg

SEQ ID NO: 5981221 - DNA, 25 bp, Homo sapien
cgtgatcttggtccgcggatcacca

SEQ ID NO: 5981222 - DNA, 25 bp, Homo sapien
aacatgtccttggggaattggtact

SEQ ID NO: 5981223 - DNA, 25 bp, Homo sapien
gatgagggtctggctgcttaccttg

SEQ ID NO: 5981224 - DNA, 25 bp, Homo sapien
ccgcggatcaccacccttgatgaaa

SEQ ID NO: 5981225 - DNA, 25 bp, Homo sapien
gtcccagtgggacctgggattcgaa

SEQ ID NO: 5981226 - DNA, 25 bp, Homo sapien
ggttgcgtcttggaacctgtcggac

SEQ ID NO: 5981227 - DNA, 25 bp, Homo sapien
tgaggcaactggtgaaagtaaatcg

SEQ ID NO: 5981228 - DNA, 25 bp, Homo sapien
tgccgagtagaacatgtccttgggg

SEQ ID NO: 5981229 - DNA, 25 bp, Homo sapien
acttgccctgtacgaggtgcttgtc

SEQ ID NO: 5981230 - DNA, 25 bp, Homo sapien
ctgtgggtccagaacttctttctgg

SEQ ID NO: 5981231 - DNA, 25 bp, Homo sapien
aatatcaacttgtcgtgctgataag

SEQ ID NO: 5981232 - DNA, 25 bp, Homo sapien
agaacttctttctggaaaagcgaag

SEQ ID NO: 5981233 - DNA, 25 bp, Homo sapien
caatttctgtgggtccagaacttct

SEQ ID NO: 5981234 - DNA, 25 bp, Homo sapien
caatattttctctaggttggacatg

SEQ ID NO: 5981235 - DNA, 25 bp, Homo sapien
gtggggaagaagttcaatggcacag

SEQ ID NO: 5981236 - DNA, 25 bp, Homo sapien
gttccaccaaaagtgcccttagacc

SEQ ID NO: 5981237 - DNA, 25 bp, Homo sapien
actccatgactccgtattgaaacgc

SEQ ID NO: 5981238 - DNA, 25 bp, Homo sapien
gtgggacctgggattcgaaatctta

SEQ ID NO: 5981239 - DNA, 25 bp, Homo sapien
gaacctgtcggacaatgaggcatac

SEQ ID NO: 5981240 - DNA, 25 bp, Homo sapien
agaacatgtccttggggaattggta

SEQ ID NO: 5981241 - DNA, 25 bp, Homo sapien
gggatcctgtacggatgatgcttgt

SEQ ID NO: 5981242 - DNA, 25 bp, Homo sapien
ctccacggtagtgatgggaggtctc

SEQ ID NO: 5981243 - DNA, 25 bp, Homo sapien
ggccacgtagttgtagcgagcgtcg

SEQ ID NO: 5981244 - DNA, 25 bp, Homo sapien
caaataagatcatcgacgtaaatat

SEQ ID NO: 5981245 - DNA, 25 bp, Homo sapien
gtagacaacgtagccctcctgagag

SEQ ID NO: 5981246 - DNA, 25 bp, Homo sapien
acgtagttgtagcgagcgtcgttct

SEQ ID NO: 5981247 - DNA, 25 bp, Homo sapien
tcgggatcctgtacggatgatgctt

SEQ ID NO: 5981248 - DNA, 25 bp, Homo sapien
atcatcgacgtaaatatcaacttgt

SEQ ID NO: 5981249 - DNA, 25 bp, Homo sapien
gaagtacgggatcgtgagtaggagg

SEQ ID NO: 5981250 - DNA, 25 bp, Homo sapien
tgtccttggggaattggtactccat

SEQ ID NO: 5981251 - DNA, 25 bp, Homo sapien
aagcactaacctgcttatggatgaa

SEQ ID NO: 5981252 - DNA, 25 bp, Homo sapien
tcgtgctgataagcactaacctgct

SEQ ID NO: 5981253 - DNA, 25 bp, Homo sapien
ccttggaccgttgcacggcaaataa

SEQ ID NO: 5981254 - DNA, 25 bp, Homo sapien
acctgcttatggatgaaatttctac

SEQ ID NO: 5981255 - DNA, 25 bp, Homo sapien
aatccagctcgtcggtgtgtcttgc

SEQ ID NO: 5981256 - DNA, 25 bp, Homo sapien
ccttgcaggcctggaatcgtctccc

SEQ ID NO: 5981257 - DNA, 25 bp, Homo sapien
tgctcttcgggatcctgtacggatg

SEQ ID NO: 5981258 - DNA, 25 bp, Homo sapien
catcgacgtaaatatcaacttgtcg

SEQ ID NO: 5981259 - DNA, 25 bp, Homo sapien
tccatgactccgtattgaaacgcat

SEQ ID NO: 5981260 - DNA, 25 bp, Homo sapien
aggagtcgtgctccttggaccgttg

SEQ ID NO: 5981261 - DNA, 25 bp, Homo sapien
aggcgaaagaggaaccagttccaat

SEQ ID NO: 5981262 - DNA, 25 bp, Homo sapien
cgtgctccttggaccgttgcacggc

SEQ ID NO: 5981263 - DNA, 25 bp, Homo sapien
tgtgataccagcgttccaccaaaag

SEQ ID NO: 5981264 - DNA, 25 bp, Homo sapien
gagtaatgctcttcgggatcctgta

SEQ ID NO: 5981265 - DNA, 25 bp, Homo sapien
acaacgtagccctcctgagagacgc

SEQ ID NO: 5981266 - DNA, 25 bp, Homo sapien
aggagtaatgctcttcgggatcctg

SEQ ID NO: 5981267 - DNA, 25 bp, Homo sapien
cacagtatgcaatgacgccagcagc

SEQ ID NO: 5981268 - DNA, 25 bp, Homo sapien
cttgccgagtagaacatgtccttgg

SEQ ID NO: 5981269 - DNA, 25 bp, Homo sapien
gtgggtccagaacttctttctggaa

SEQ ID NO: 5981270 - DNA, 25 bp, Homo sapien
acggtagtgatgggaggtctcactt

SEQ ID NO: 5981271 - DNA, 25 bp, Homo sapien
aggcaactggtgaaagtaaatcgtg

SEQ ID NO: 5981272 - DNA, 25 bp, Homo sapien
gaatgtagcgatgtggggaagaagt

SEQ ID NO: 5981273 - DNA, 25 bp, Homo sapien
atgatgcgtcccgactgtgtgtcga

SEQ ID NO: 5981274 - DNA, 25 bp, Homo sapien
cagcgttccaccaaaagtgccctta

SEQ ID NO: 5981275 - DNA, 25 bp, Homo sapien
tgtctcgttctgacccgtagacaac

SEQ ID NO: 5981276 - DNA, 25 bp, Homo sapien
gtaatgctcttcgggatcctgtacg

SEQ ID NO: 5981277 - DNA, 25 bp, Homo sapien
attttctctaggttggacatggcca

SEQ ID NO: 5981278 - DNA, 25 bp, Homo sapien
agcgagcgtcgttctcaggagtaat

SEQ ID NO: 5981279 - DNA, 25 bp, Homo sapien
ttgccctgtacgaggtgcttgtccc

SEQ ID NO: 5981280 - DNA, 25 bp, Homo sapien
ggatcgtgagtaggaggtaggaatc

SEQ ID NO: 5981281 - DNA, 25 bp, Homo sapien
tgctccttggaccgttgcacggcaa

SEQ ID NO: 5981282 - DNA, 25 bp, Homo sapien
tggtaggcgaaagaggaaccagttc

SEQ ID NO: 5981283 - DNA, 25 bp, Homo sapien
gggtccagaacttctttctggaaaa

SEQ ID NO: 5981284 - DNA, 25 bp, Homo sapien
taggaggtaggaatcggacagatac

SEQ ID NO: 5981285 - DNA, 25 bp, Homo sapien
ggaggtaggaatcggacagatacgc

SEQ ID NO: 5981286 - DNA, 25 bp, Homo sapien
gtgtgtcttgccgagtagaacatgt

SEQ ID NO: 5981287 - DNA, 25 bp, Homo sapien
ggctcgaatgtctcgttctgacccg

SEQ ID NO: 5981288 - DNA, 25 bp, Homo sapien
gtggcagtacaaaggcaggttgtgg

SEQ ID NO: 5981289 - DNA, 25 bp, Homo sapien
gttgtggaagtacgggatcgtgagt

SEQ ID NO: 5981290 - DNA, 25 bp, Homo sapien
ctcttcgggatcctgtacggatgat

SEQ ID NO: 5981291 - DNA, 25 bp, Homo sapien
tgatcttggtccgcggatcaccacc

SEQ ID NO: 5981292 - DNA, 25 bp, Homo sapien
actggtaggcgaaagaggaaccagt

SEQ ID NO: 5981293 - DNA, 25 bp, Homo sapien
tctaccgtttctcagattctgcaca

SEQ ID NO: 5981294 - DNA, 25 bp, Homo sapien
tagccctcctgagagacgcttgcca

SEQ ID NO: 5981295 - DNA, 25 bp, Homo sapien
atcggacagatacgcaaaggccacg

SEQ ID NO: 5981296 - DNA, 25 bp, Homo sapien
ctttgacgaaataatccagctcgtc

SEQ ID NO: 5981297 - DNA, 25 bp, Homo sapien
gtcttgccgagtagaacatgtcctt

SEQ ID NO: 5981298 - DNA, 25 bp, Homo sapien
aggaaccagttccaatattttctct

SEQ ID NO: 5981299 - DNA, 25 bp, Homo sapien
ccacgtagttgtagcgagcgtcgtt

SEQ ID NO: 5981300 - DNA, 25 bp, Homo sapien
gtggcctcttcataacgatgagggt

SEQ ID NO: 5981301 - DNA, 25 bp, Homo sapien
gtggtcgagcgagacactgaaactg

SEQ ID NO: 5981302 - DNA, 25 bp, Homo sapien
gtaggcgaaagaggaaccagttcca

SEQ ID NO: 5981303 - DNA, 25 bp, Homo sapien
ggcagtacaaaggcaggttgtggaa

SEQ ID NO: 5981304 - DNA, 25 bp, Homo sapien
cgtgctccacggtagtgatgggagg

SEQ ID NO: 5981305 - DNA, 25 bp, Homo sapien
gtcggtgtgtcttgccgagtagaac

SEQ ID NO: 5981306 - DNA, 25 bp, Homo sapien
ggaatcgtctcccagtgctgcaagg

SEQ ID NO: 5981307 - DNA, 25 bp, Homo sapien
agcgtcgttctcaggagtaatgctc

SEQ ID NO: 5981308 - DNA, 25 bp, Homo sapien
tattgaaacgcatccacatacttgc

SEQ ID NO: 5981309 - DNA, 25 bp, Homo sapien
cagtatgcaatgacgccagcagcga

SEQ ID NO: 5981310 - DNA, 25 bp, Homo sapien
ctttgtgacaaaactggtaggcgaa

SEQ ID NO: 5981311 - DNA, 25 bp, Homo sapien
ctgaaactgtggcagtacaaaggca

SEQ ID NO: 5981312 - DNA, 25 bp, Homo sapien
cactttgacgaaataatccagctcg

SEQ ID NO: 5981313 - DNA, 25 bp, Homo sapien
ggcatacctgctcaatttctgtggg

SEQ ID NO: 5981314 - DNA, 25 bp, Homo sapien
ttggaccgttgcacggcaaataaga

SEQ ID NO: 5981315 - DNA, 25 bp, Homo sapien
cctgggattcgaaatcttaagatag

SEQ ID NO: 5981316 - DNA, 25 bp, Homo sapien
gatactttgtgacaaaactggtagg

SEQ ID NO: 5981317 - DNA, 25 bp, Homo sapien
acaaaggcaggttgtggaagtacgg

SEQ ID NO: 5981318 - DNA, 25 bp, Homo sapien
ggtacgtgatcttggtccgcggatc

SEQ ID NO: 5981319 - DNA, 25 bp, Homo sapien
gtagaacatgtccttggggaattgg

SEQ ID NO: 5981320 - DNA, 25 bp, Homo sapien
atacttgccctgtacgaggtgcttg

SEQ ID NO: 5981321 - DNA, 25 bp, Homo sapien
tggctgcttaccttgcaggcctgga

SEQ ID NO: 5981322 - DNA, 25 bp, Homo sapien
tttctctaggttggacatggccatt

SEQ ID NO: 5981323 - DNA, 25 bp, Homo sapien
ccacccttgatgaaatacgaatgta

SEQ ID NO: 5981324 - DNA, 25 bp, Homo sapien
aaactggtaggcgaaagaggaacca

SEQ ID NO: 5981325 - DNA, 25 bp, Homo sapien
gcggatcaccacccttgatgaaata

SEQ ID NO: 5981326 - DNA, 25 bp, Homo sapien
ctgtgtgtcgaaatacttgccctgt

SEQ ID NO: 5981327 - DNA, 25 bp, Homo sapien
cagattctgcacatggtacgtgatc

SEQ ID NO: 5981328 - DNA, 25 bp, Homo sapien
cttcgggatcctgtacggatgatgc

SEQ ID NO: 5981329 - DNA, 25 bp, Homo sapien
acgggcgcggcaggcagatactttg

SEQ ID NO: 5981330 - DNA, 25 bp, Homo sapien
cagatacgcaaaggccacgtagttg

SEQ ID NO: 5981331 - DNA, 25 bp, Homo sapien
gctgcaaggagtcgtgctccttgga

SEQ ID NO: 5981332 - DNA, 25 bp, Homo sapien
catccacatacttgctcatcgaggt

SEQ ID NO: 5981333 - DNA, 25 bp, Homo sapien
gcggcaggcagatactttgtgacaa

SEQ ID NO: 5981334 - DNA, 25 bp, Homo sapien
aatgctcttcgggatcctgtacgga

SEQ ID NO: 5981335 - DNA, 25 bp, Homo sapien
gcttatggatgaaatttctaccgtt

SEQ ID NO: 5981336 - DNA, 25 bp, Homo sapien
tccaccaaaagtgcccttagaccct

SEQ ID NO: 5981337 - DNA, 25 bp, Homo sapien
cgatgtggggaagaagttcaatggc

SEQ ID NO: 5981338 - DNA, 25 bp, Homo sapien
ttctgtgggtccagaacttctttct

SEQ ID NO: 5981339 - DNA, 25 bp, Homo sapien
tctcgttctgacccgtagacaacgt

SEQ ID NO: 5981340 - DNA, 25 bp, Homo sapien
agaggaaccagttccaatattttct

SEQ ID NO: 5981341 - DNA, 25 bp, Homo sapien
agatcatcgacgtaaatatcaactt

SEQ ID NO: 5981342 - DNA, 25 bp, Homo sapien
ttgtcccagtgggacctgggattcg

SEQ ID NO: 5981343 - DNA, 25 bp, Homo sapien
tgaaatacgaatgtagcgatgtggg

SEQ ID NO: 5981344 - DNA, 25 bp, Homo sapien
gtccgcggatcaccacccttgatga

SEQ ID NO: 5981345 - DNA, 25 bp, Homo sapien
gtcgcccgcgtgctccacggtagtg

SEQ ID NO: 5981346 - DNA, 25 bp, Homo sapien
gggaattggtactccatgactccgt

SEQ ID NO: 5981347 - DNA, 25 bp, Homo sapien
gcaatgacgccagcagcgattgtga

SEQ ID NO: 5981348 - DNA, 25 bp, Homo sapien
cgtgagtaggaggtaggaatcggac

SEQ ID NO: 5981349 - DNA, 25 bp, Homo sapien
cgggatcgtgagtaggaggtaggaa

SEQ ID NO: 5981350 - DNA, 25 bp, Homo sapien
agttcaatggcacagtatgcaatga

SEQ ID NO: 5981351 - DNA, 25 bp, Homo sapien
cctgctcaatttctgtgggtccaga

SEQ ID NO: 5981352 - DNA, 25 bp, Homo sapien
tgacgccagcagcgattgtgatacc

SEQ ID NO: 5981353 - DNA, 25 bp, Homo sapien
acccttgatgaaatacgaatgtagc

SEQ ID NO: 5981354 - DNA, 25 bp, Homo sapien
cgcaaaggccacgtagttgtagcga

SEQ ID NO: 5981355 - DNA, 25 bp, Homo sapien
attcgaaatcttaagatagatccaa

SEQ ID NO: 5981356 - DNA, 25 bp, Homo sapien
ctcagattctgcacatggtacgtga

SEQ ID NO: 5981357 - DNA, 25 bp, Homo sapien
gtgctgcaaggagtcgtgctccttg

SEQ ID NO: 5981358 - DNA, 25 bp, Homo sapien
aggtctcactttgacgaaataatcc

SEQ ID NO: 5981359 - DNA, 25 bp, Homo sapien
gatagatccaattgttcacatgagg

SEQ ID NO: 5981360 - DNA, 25 bp, Homo sapien
agcgatgtggggaagaagttcaatg

SEQ ID NO: 5981361 - DNA, 25 bp, Homo sapien
cccagtgggacctgggattcgaaat

SEQ ID NO: 5981362 - DNA, 25 bp, Homo sapien
cttctttctggaaaagcgaagtggc

SEQ ID NO: 5981363 - DNA, 25 bp, Homo sapien
ctggaatcgtctcccagtgctgcaa

SEQ ID NO: 5981364 - DNA, 25 bp, Homo sapien
gtgtcgaaatacttgccctgtacga

SEQ ID NO: 5981365 - DNA, 25 bp, Homo sapien
cgcgtgctccacggtagtgatggga

SEQ ID NO: 5981366 - DNA, 25 bp, Homo sapien
tacgggatcgtgagtaggaggtagg

SEQ ID NO: 5981367 - DNA, 25 bp, Homo sapien
cgaaataatccagctcgtcggtgtg

SEQ ID NO: 5981368 - DNA, 25 bp, Homo sapien
ttcacatgaggcaactggtgaaagt

SEQ ID NO: 5981369 - DNA, 25 bp, Homo sapien
agtacgggatcgtgagtaggaggta

SEQ ID NO: 5981370 - DNA, 25 bp, Homo sapien
gaagttcaatggcacagtatgcaat

SEQ ID NO: 5981371 - DNA, 25 bp, Homo sapien
gaaatttctaccgtttctcagattc

SEQ ID NO: 5981372 - DNA, 25 bp, Homo sapien
cagttccaatattttctctaggttg

SEQ ID NO: 5981373 - DNA, 25 bp, Homo sapien
tctggctgcttaccttgcaggcctg

SEQ ID NO: 5981374 - DNA, 25 bp, Homo sapien
aacttgtcgtgctgataagcactaa

SEQ ID NO: 5981375 - DNA, 25 bp, Homo sapien
tccgtattgaaacgcatccacatac

SEQ ID NO: 5981376 - DNA, 25 bp, Homo sapien
acccgtagacaacgtagccctcctg

SEQ ID NO: 5981377 - DNA, 25 bp, Homo sapien
gatccaattgttcacatgaggcaac

SEQ ID NO: 5981378 - DNA, 25 bp, Homo sapien
tcgtgtggtcgagcgagacactgaa

SEQ ID NO: 5981379 - DNA, 25 bp, Homo sapien
aggcaggttgtggaagtacgggatc

SEQ ID NO: 5981380 - DNA, 25 bp, Homo sapien
ttgcacggcaaataagatcatcgac

SEQ ID NO: 5981381 - DNA, 25 bp, Homo sapien
tgtcgtgctgataagcactaacctg

SEQ ID NO: 5981382 - DNA, 25 bp, Homo sapien
tacttgctcatcgaggttgcgtctt

SEQ ID NO: 5981383 - DNA, 25 bp, Homo sapien
catgtccttggggaattggtactcc

SEQ ID NO: 5981384 - DNA, 25 bp, Homo sapien
aggtaggaatcggacagatacgcaa

SEQ ID NO: 5981385 - DNA, 25 bp, Homo sapien
aactggtgaaagtaaatcgtgtggt

SEQ ID NO: 5981386 - DNA, 25 bp, Homo sapien
gcaggcctggaatcgtctcccagtg

SEQ ID NO: 5981387 - DNA, 25 bp, Homo sapien
ctggtgaaagtaaatcgtgtggtcg

SEQ ID NO: 5981388 - DNA, 25 bp, Homo sapien
tcaggagtaatgctcttcgggatcc

SEQ ID NO: 5981389 - DNA, 25 bp, Homo sapien
aaggccacgtagttgtagcgagcgt

SEQ ID NO: 5981390 - DNA, 25 bp, Homo sapien
gtcgtgctccttggaccgttgcacg

SEQ ID NO: 5981391 - DNA, 25 bp, Homo sapien
acggatgatgcttgtgtaaagaaga

SEQ ID NO: 5981392 - DNA, 25 bp, Homo sapien
aggtgcttgtcccagtgggacctgg

SEQ ID NO: 5981393 - DNA, 25 bp, Homo sapien
tgctcatcgaggttgcgtcttggaa

SEQ ID NO: 5981394 - DNA, 25 bp, Homo sapien
gttccaatattttctctaggttgga

SEQ ID NO: 5981395 - DNA, 25 bp, Homo sapien
tcgttctgacccgtagacaacgtag

SEQ ID NO: 5981396 - DNA, 25 bp, Homo sapien
ttcaatggcacagtatgcaatgacg

SEQ ID NO: 5981397 - DNA, 25 bp, Homo sapien
ggcctcttcataacgatgagggtct

SEQ ID NO: 5981398 - DNA, 25 bp, Homo sapien
gcttgtcccagtgggacctgggatt

SEQ ID NO: 5981399 - DNA, 25 bp, Homo sapien
aaatacgaatgtagcgatgtgggga

SEQ ID NO: 5981400 - DNA, 25 bp, Homo sapien
tgggattcgaaatcttaagatagat

SEQ ID NO: 5981401 - DNA, 25 bp, Homo sapien
tccaatattttctctaggttggaca

SEQ ID NO: 5981402 - DNA, 25 bp, Homo sapien
cgaaatacttgccctgtacgaggtg

SEQ ID NO: 5981403 - DNA, 25 bp, Homo sapien
cttggtccgcggatcaccacccttg

SEQ ID NO: 5981404 - DNA, 25 bp, Homo sapien
gcgttccaccaaaagtgcccttaga

SEQ ID NO: 5981405 - DNA, 25 bp, Homo sapien
cgaggtgcttgtcccagtgggacct

SEQ ID NO: 5981406 - DNA, 25 bp, Homo sapien
tagaccctacgggcgcggcaggcag

SEQ ID NO: 5981407 - DNA, 25 bp, Homo sapien
tcgtctcccagtgctgcaaggagtc

SEQ ID NO: 5981408 - DNA, 25 bp, Homo sapien
cttgtcgtgctgataagcactaacc

SEQ ID NO: 5981409 - DNA, 25 bp, Homo sapien
tgcttaccttgcaggcctggaatcg

SEQ ID NO: 5981410 - DNA, 25 bp, Homo sapien
actcgtcgcccgcgtgctccacggt

SEQ ID NO: 5981411 - DNA, 25 bp, Homo sapien
ccagaacttctttctggaaaagcga

SEQ ID NO: 5981412 - DNA, 25 bp, Homo sapien
ttaagatagatccaattgttcacat

SEQ ID NO: 5981413 - DNA, 25 bp, Homo sapien
cccagtgctgcaaggagtcgtgctc

SEQ ID NO: 5981414 - DNA, 25 bp, Homo sapien
tgagtaggaggtaggaatcggacag

SEQ ID NO: 5981415 - DNA, 25 bp, Homo sapien
aggaatcggacagatacgcaaaggc

SEQ ID NO: 5981416 - DNA, 25 bp, Homo sapien
cttaccttgcaggcctggaatcgtc

SEQ ID NO: 5981417 - DNA, 25 bp, Homo sapien
gacaaaactggtaggcgaaagagga

SEQ ID NO: 5981418 - DNA, 25 bp, Homo sapien
aaatacttgccctgtacgaggtgct

SEQ ID NO: 5981419 - DNA, 25 bp, Homo sapien
tgccatgatgcgtcccgactgtgtg

SEQ ID NO: 5981420 - DNA, 25 bp, Homo sapien
gagtagaacatgtccttggggaatt

SEQ ID NO: 5981421 - DNA, 25 bp, Homo sapien
cccgcgtgctccacggtagtgatgg

SEQ ID NO: 5981422 - DNA, 25 bp, Homo sapien
cgtcccgactgtgtgtcgaaatact

SEQ ID NO: 5981423 - DNA, 25 bp, Homo sapien
caaaactggtaggcgaaagaggaac

SEQ ID NO: 5981424 - DNA, 25 bp, Homo sapien
gtctcccagtgctgcaaggagtcgt

SEQ ID NO: 5981425 - DNA, 25 bp, Homo sapien
gaggttgcgtcttggaacctgtcgg

SEQ ID NO: 5981426 - DNA, 25 bp, Homo sapien
aatttctaccgtttctcagattctg

SEQ ID NO: 5981427 - DNA, 25 bp, Homo sapien
cgcttgccatgatgcgtcccgactg

SEQ ID NO: 5981428 - DNA, 25 bp, Homo sapien
ggatcaccacccttgatgaaatacg

SEQ ID NO: 5981429 - DNA, 25 bp, Homo sapien
catgactccgtattgaaacgcatcc

SEQ ID NO: 5981430 - DNA, 25 bp, Homo sapien
caatgaggcatacctgctcaatttc

SEQ ID NO: 5981431 - DNA, 25 bp, Homo sapien
atattttctctaggttggacatggc

SEQ ID NO: 5981432 - DNA, 25 bp, Homo sapien
aacgtagccctcctgagagacgctt

SEQ ID NO: 5981433 - DNA, 25 bp, Homo sapien
ttgtgacaaaactggtaggcgaaag

SEQ ID NO: 5981434 - DNA, 25 bp, Homo sapien
acggcaaataagatcatcgacgtaa

SEQ ID NO: 5981435 - DNA, 25 bp, Homo sapien
tccagctcgtcggtgtgtcttgccg

SEQ ID NO: 5981436 - DNA, 25 bp, Homo sapien
atttctgtgggtccagaacttcttt

SEQ ID NO: 5981437 - DNA, 25 bp, Homo sapien
gaaatcttaagatagatccaattgt

SEQ ID NO: 5981438 - DNA, 25 bp, Homo sapien
accgttgcacggcaaataagatcat

SEQ ID NO: 5981439 - DNA, 25 bp, Homo sapien
gatgcgtcccgactgtgtgtcgaaa

SEQ ID NO: 5981440 - DNA, 25 bp, Homo sapien
catcgaggttgcgtcttggaacctg

SEQ ID NO: 5981441 - DNA, 25 bp, Homo sapien
taccgtttctcagattctgcacatg

SEQ ID NO: 5981442 - DNA, 25 bp, Homo sapien
gtgcttgtcccagtgggacctggga

SEQ ID NO: 5981443 - DNA, 25 bp, Homo sapien
catacctgctcaatttctgtgggtc

SEQ ID NO: 5981444 - DNA, 25 bp, Homo sapien
tcctgagagacgcttgccatgatgc

SEQ ID NO: 5981445 - DNA, 25 bp, Homo sapien
atacgaatgtagcgatgtggggaag

SEQ ID NO: 5981446 - DNA, 25 bp, Homo sapien
gaaagaggaaccagttccaatattt

SEQ ID NO: 5981447 - DNA, 25 bp, Homo sapien
cgcatccacatacttgctcatcgag

SEQ ID NO: 5981448 - DNA, 25 bp, Homo sapien
tcccgactgtgtgtcgaaatacttg

SEQ ID NO: 5981449 - DNA, 25 bp, Homo sapien
acatggtacgtgatcttggtccgcg

SEQ ID NO: 5981450 - DNA, 25 bp, Homo sapien
tatcaacttgtcgtgctgataagca

SEQ ID NO: 5981451 - DNA, 25 bp, Homo sapien
tagtgatgggaggtctcactttgac

SEQ ID NO: 5981452 - DNA, 25 bp, Homo sapien
gagacgcttgccatgatgcgtcccg

SEQ ID NO: 5981453 - DNA, 25 bp, Homo sapien
tgcttgtgtaaagaagactcgtcgc

SEQ ID NO: 5981454 - DNA, 25 bp, Homo sapien
tggtactccatgactccgtattgaa

SEQ ID NO: 5981455 - DNA, 25 bp, Homo sapien
atgtggggaagaagttcaatggcac

SEQ ID NO: 5981456 - DNA, 25 bp, Homo sapien
gtttcttcctctttccttttgaaca

SEQ ID NO: 5981457 - DNA, 25 bp, Homo sapien
accataaaagcactaattgtaatta

SEQ ID NO: 5981458 - DNA, 25 bp, Homo sapien
ttatgacacaaccaccgatcaagaa

SEQ ID NO: 5981459 - DNA, 25 bp, Homo sapien
tttggaaaatattgattctcagcct

SEQ ID NO: 5981460 - DNA, 25 bp, Homo sapien
tacattcctttaataatcgtcacta

SEQ ID NO: 5981461 - DNA, 25 bp, Homo sapien
ttccttttgaacagcaacaacaacc

SEQ ID NO: 5981462 - DNA, 25 bp, Homo sapien
ttttctaatgatgaatccgcatcta

SEQ ID NO: 5981463 - DNA, 25 bp, Homo sapien
gagctctgaaagtaccagatcctct

SEQ ID NO: 5981464 - DNA, 25 bp, Homo sapien
atatgcatggaaaacttcacgctgc

SEQ ID NO: 5981465 - DNA, 25 bp, Homo sapien
tcctctttccttttgaacagcaaca

SEQ ID NO: 5981466 - DNA, 25 bp, Homo sapien
gctgccttagaagatggtttcttcc

SEQ ID NO: 5981467 - DNA, 25 bp, Homo sapien
acctattcaaaacccacaaatattc

SEQ ID NO: 5981468 - DNA, 25 bp, Homo sapien
aaatattgttcaatgaagagtttct

SEQ ID NO: 5981469 - DNA, 25 bp, Homo sapien
gccctcctactattacccattagaa

SEQ ID NO: 5981470 - DNA, 25 bp, Homo sapien
gctctgaaagtaccagatcctcttc

SEQ ID NO: 5981471 - DNA, 25 bp, Homo sapien
cattcctttaataatcgtcactata

SEQ ID NO: 5981472 - DNA, 25 bp, Homo sapien
cccatacacacaagacttctaccca

SEQ ID NO: 5981473 - DNA, 25 bp, Homo sapien
ctacgttccactcatcattcaataa

SEQ ID NO: 5981474 - DNA, 25 bp, Homo sapien
cttcctctttccttttgaacagcaa

SEQ ID NO: 5981475 - DNA, 25 bp, Homo sapien
tcatactcccaatatcaagatcagt

SEQ ID NO: 5981476 - DNA, 25 bp, Homo sapien
atacacaaccaattcatttaattaa

SEQ ID NO: 5981477 - DNA, 25 bp, Homo sapien
aacctcaggtgccctcctactatta

SEQ ID NO: 5981478 - DNA, 25 bp, Homo sapien
tttttcttttggatctacaatttcc

SEQ ID NO: 5981479 - DNA, 25 bp, Homo sapien
attagaaattgccttcgacgttgaa

SEQ ID NO: 5981480 - DNA, 25 bp, Homo sapien
acctaacatttattatgacacaacc

SEQ ID NO: 5981481 - DNA, 25 bp, Homo sapien
cacacaagacttctacccatatacc

SEQ ID NO: 5981482 - DNA, 25 bp, Homo sapien
atgaaactaatacaaatgcacaaaa

SEQ ID NO: 5981483 - DNA, 25 bp, Homo sapien
ctaatacaaatgcacaaaaagatat

SEQ ID NO: 5981484 - DNA, 25 bp, Homo sapien
aattatacctattcaaaacccacaa

SEQ ID NO: 5981485 - DNA, 25 bp, Homo sapien
tcaaaacccacaaatattcatgaat

SEQ ID NO: 5981486 - DNA, 25 bp, Homo sapien
atattgttcaatgaagagtttctga

SEQ ID NO: 5981487 - DNA, 25 bp, Homo sapien
ttattatgacaaggtcaggtttcaa

SEQ ID NO: 5981488 - DNA, 25 bp, Homo sapien
aaatggagatgatatcgatattagt

SEQ ID NO: 5981489 - DNA, 25 bp, Homo sapien
gaagttggcattttgaaaagtctga

SEQ ID NO: 5981490 - DNA, 25 bp, Homo sapien
ccaattcatttaattaatcctcaaa

SEQ ID NO: 5981491 - DNA, 25 bp, Homo sapien
caccacatactgataacatacattc

SEQ ID NO: 5981492 - DNA, 25 bp, Homo sapien
gcggatatgcatggaaaacttcacg

SEQ ID NO: 5981493 - DNA, 25 bp, Homo sapien
ttggatctacaatttcccctagaag

SEQ ID NO: 5981494 - DNA, 25 bp, Homo sapien
agatatgctgcggcttactccttca

SEQ ID NO: 5981495 - DNA, 25 bp, Homo sapien
cagatccatttatagatgaacctca

SEQ ID NO: 5981496 - DNA, 25 bp, Homo sapien
aattttgaattcaatgaattcccat

SEQ ID NO: 5981497 - DNA, 25 bp, Homo sapien
tcaatgaattcccatacacacaaga

SEQ ID NO: 5981498 - DNA, 25 bp, Homo sapien
atgatcaagattattatgacaaggt

SEQ ID NO: 5981499 - DNA, 25 bp, Homo sapien
catttatagatgaacctcaggtgcc

SEQ ID NO: 5981500 - DNA, 25 bp, Homo sapien
catcattcaataaccatgataactt

SEQ ID NO: 5981501 - DNA, 25 bp, Homo sapien
cctcaggtgccctcctactattacc

SEQ ID NO: 5981502 - DNA, 25 bp, Homo sapien
atggcaactggtcctgaaagaggaa

SEQ ID NO: 5981503 - DNA, 25 bp, Homo sapien
ggatatgcatggaaaacttcacgct

SEQ ID NO: 5981504 - DNA, 25 bp, Homo sapien
atatgctgcggcttactccttcagc

SEQ ID NO: 5981505 - DNA, 25 bp, Homo sapien
atgaggcagatccatttatagatga

SEQ ID NO: 5981506 - DNA, 25 bp, Homo sapien
gaactccaaactgtcaagatatgct

SEQ ID NO: 5981507 - DNA, 25 bp, Homo sapien
tcctactattacccattagaaattg

SEQ ID NO: 5981508 - DNA, 25 bp, Homo sapien
cgtccttgtttttcttttggatcta

SEQ ID NO: 5981509 - DNA, 25 bp, Homo sapien
taatgtatatgaggcagatccattt

SEQ ID NO: 5981510 - DNA, 25 bp, Homo sapien
agcaacaacaacctaacatttatta

SEQ ID NO: 5981511 - DNA, 25 bp, Homo sapien
cctttaataatcgtcactatagcaa

SEQ ID NO: 5981512 - DNA, 25 bp, Homo sapien
agagcaacagaaatggagatgatat

SEQ ID NO: 5981513 - DNA, 25 bp, Homo sapien
ttttgaattcaatgaattcccatac

SEQ ID NO: 5981514 - DNA, 25 bp, Homo sapien
agaacttggttcatacacaaccaat

SEQ ID NO: 5981515 - DNA, 25 bp, Homo sapien
aaagtaccagatcctcttcattatc

SEQ ID NO: 5981516 - DNA, 25 bp, Homo sapien
accaccgccatcactacaaaaatta

SEQ ID NO: 5981517 - DNA, 25 bp, Homo sapien
gttccactcatcattcaataaccat

SEQ ID NO: 5981518 - DNA, 25 bp, Homo sapien
gattattatgacaaggtcaggtttc

SEQ ID NO: 5981519 - DNA, 25 bp, Homo sapien
caccgccatcactacaaaaattaaa

SEQ ID NO: 5981520 - DNA, 25 bp, Homo sapien
atggagatgatatcgatattagtga

SEQ ID NO: 5981521 - DNA, 25 bp, Homo sapien
ccttagaagatggtttcttcctctt

SEQ ID NO: 5981522 - DNA, 25 bp, Homo sapien
atattgattctcagcctatttccaa

SEQ ID NO: 5981523 - DNA, 25 bp, Homo sapien
taccagatcctcttcattatcatct

SEQ ID NO: 5981524 - DNA, 25 bp, Homo sapien
atcctcttcattatcatctcttttt

SEQ ID NO: 5981525 - DNA, 25 bp, Homo sapien
ctgtcaagatatgctgcggcttact

SEQ ID NO: 5981526 - DNA, 25 bp, Homo sapien
agatgatatcgatattagtgacaca

SEQ ID NO: 5981527 - DNA, 25 bp, Homo sapien
attaatcctcaaatattgttcaatg

SEQ ID NO: 5981528 - DNA, 25 bp, Homo sapien
gttctaatgatcaagattattatga

SEQ ID NO: 5981529 - DNA, 25 bp, Homo sapien
tacgaaggactgcacaatggcaact

SEQ ID NO: 5981530 - DNA, 25 bp, Homo sapien
catgataactttcaaaagagcaaca

SEQ ID NO: 5981531 - DNA, 25 bp, Homo sapien
aaaagatatcaaaatattccaagaa

SEQ ID NO: 5981532 - DNA, 25 bp, Homo sapien
aaaaagttgaactccaaactgtcaa

SEQ ID NO: 5981533 - DNA, 25 bp, Homo sapien
caaactgtcaagatatgctgcggct

SEQ ID NO: 5981534 - DNA, 25 bp, Homo sapien
aagatcagtttccaccacatactga

SEQ ID NO: 5981535 - DNA, 25 bp, Homo sapien
tctcagcctatttccaaggaaacga

SEQ ID NO: 5981536 - DNA, 25 bp, Homo sapien
agcaaccataaaagcactaattgta

SEQ ID NO: 5981537 - DNA, 25 bp, Homo sapien
aaacgaaaactacgaaggactgcac

SEQ ID NO: 5981538 - DNA, 25 bp, Homo sapien
ttcctttaataatcgtcactatagc

SEQ ID NO: 5981539 - DNA, 25 bp, Homo sapien
atgctgcggcttactccttcagcag

SEQ ID NO: 5981540 - DNA, 25 bp, Homo sapien
cataaaagcactaattgtaattact

SEQ ID NO: 5981541 - DNA, 25 bp, Homo sapien
caatgaagagtttctgaatttggaa

SEQ ID NO: 5981542 - DNA, 25 bp, Homo sapien
aagagctctgaaagtaccagatcct

SEQ ID NO: 5981543 - DNA, 25 bp, Homo sapien
gaattcaatgaattcccatacacac

SEQ ID NO: 5981544 - DNA, 25 bp, Homo sapien
ataacaacgcctccgataatgtata

SEQ ID NO: 5981545 - DNA, 25 bp, Homo sapien
ccgataatgtatatgaggcagatcc

SEQ ID NO: 5981546 - DNA, 25 bp, Homo sapien
acagaaatggagatgatatcgatat

SEQ ID NO: 5981547 - DNA, 25 bp, Homo sapien
caaaaaacacggattcatactccca

SEQ ID NO: 5981548 - DNA, 25 bp, Homo sapien
ctttccttttgaacagcaacaacaa

SEQ ID NO: 5981549 - DNA, 25 bp, Homo sapien
tgcggcttactccttcagcagttct

SEQ ID NO: 5981550 - DNA, 25 bp, Homo sapien
aaaacttcacgctgccttagaagat

SEQ ID NO: 5981551 - DNA, 25 bp, Homo sapien
agcagttctaatgatcaagattatt

SEQ ID NO: 5981552 - DNA, 25 bp, Homo sapien
gatatcaaaatattccaagaaaatt

SEQ ID NO: 5981553 - DNA, 25 bp, Homo sapien
agtctgacaaaattgcctcatctca

SEQ ID NO: 5981554 - DNA, 25 bp, Homo sapien
aaactacgaaggactgcacaatggc

SEQ ID NO: 5981555 - DNA, 25 bp, Homo sapien
tatcctacaagtttagtaaaaccta

SEQ ID NO: 5981556 - DNA, 25 bp, Homo sapien
tcaataaattcaaaaaacacggatt

SEQ ID NO: 5981557 - DNA, 25 bp, Homo sapien
ttagaagatggtttcttcctctttc

SEQ ID NO: 5981558 - DNA, 25 bp, Homo sapien
tcaccaccgccatcactacaaaaat

SEQ ID NO: 5981559 - DNA, 25 bp, Homo sapien
actgataacatacattcctttaata

SEQ ID NO: 5981560 - DNA, 25 bp, Homo sapien
tgaacctcaggtgccctcctactat

SEQ ID NO: 5981561 - DNA, 25 bp, Homo sapien
ccaatatcaagatcagtttccacca

SEQ ID NO: 5981562 - DNA, 25 bp, Homo sapien
aattcatttaattaatcctcaaata

SEQ ID NO: 5981563 - DNA, 25 bp, Homo sapien
caacagaaatggagatgatatcgat

SEQ ID NO: 5981564 - DNA, 25 bp, Homo sapien
atccgcatctacgttccactcatca

SEQ ID NO: 5981565 - DNA, 25 bp, Homo sapien
caaatgcacaaaaagatatcaaaat

SEQ ID NO: 5981566 - DNA, 25 bp, Homo sapien
agcactaattgtaattactataata

SEQ ID NO: 5981567 - DNA, 25 bp, Homo sapien
caaaaagatatcaaaatattccaag

SEQ ID NO: 5981568 - DNA, 25 bp, Homo sapien
ggatctacaatttcccctagaagtt

SEQ ID NO: 5981569 - DNA, 25 bp, Homo sapien
accatgataactttcaaaagagcaa

SEQ ID NO: 5981570 - DNA, 25 bp, Homo sapien
tgttcaatgaagagtttctgaattt

SEQ ID NO: 5981571 - DNA, 25 bp, Homo sapien
caaaagagcaacagaaatggagatg

SEQ ID NO: 5981572 - DNA, 25 bp, Homo sapien
tgtaattactataataataccagca

SEQ ID NO: 5981573 - DNA, 25 bp, Homo sapien
tcccaatatcaagatcagtttccac

SEQ ID NO: 5981574 - DNA, 25 bp, Homo sapien
acaatttcccctagaagttggcatt

SEQ ID NO: 5981575 - DNA, 25 bp, Homo sapien
tagaattcctaaaaaagttgaactc

SEQ ID NO: 5981576 - DNA, 25 bp, Homo sapien
gaagagtttctgaatttggaaaata

SEQ ID NO: 5981577 - DNA, 25 bp, Homo sapien
gtcctgaaagaggaaaaaagagctc

SEQ ID NO: 5981578 - DNA, 25 bp, Homo sapien
tcgacgttgaaaaatcaccaccgcc

SEQ ID NO: 5981579 - DNA, 25 bp, Homo sapien
gcaataataacaacgcctccgataa

SEQ ID NO: 5981580 - DNA, 25 bp, Homo sapien
gataatgtatatgaggcagatccat

SEQ ID NO: 5981581 - DNA, 25 bp, Homo sapien
aattcaaaaaacacggattcatact

SEQ ID NO: 5981582 - DNA, 25 bp, Homo sapien
caactggtcctgaaagaggaaaaaa

SEQ ID NO: 5981583 - DNA, 25 bp, Homo sapien
gacacaaccaccgatcaagaagacc

SEQ ID NO: 5981584 - DNA, 25 bp, Homo sapien
ttatacctattcaaaacccacaaat

SEQ ID NO: 5981585 - DNA, 25 bp, Homo sapien
tccaccacatactgataacatacat

SEQ ID NO: 5981586 - DNA, 25 bp, Homo sapien
ctgcagaacttggttcatacacaac

SEQ ID NO: 5981587 - DNA, 25 bp, Homo sapien
tgataactttcaaaagagcaacaga

SEQ ID NO: 5981588 - DNA, 25 bp, Homo sapien
cctcttcattatcatctcttttttc

SEQ ID NO: 5981589 - DNA, 25 bp, Homo sapien
cactaattatacctattcaaaaccc

SEQ ID NO: 5981590 - DNA, 25 bp, Homo sapien
ccagatcctcttcattatcatctct

SEQ ID NO: 5981591 - DNA, 25 bp, Homo sapien
atcatctcttttttctaatgatgaa

SEQ ID NO: 5981592 - DNA, 25 bp, Homo sapien
ctaacatttattatgacacaaccac

SEQ ID NO: 5981593 - DNA, 25 bp, Homo sapien
tctcttttttctaatgatgaatccg

SEQ ID NO: 5981594 - DNA, 25 bp, Homo sapien
actccttcagcagttctaatgatca

SEQ ID NO: 5981595 - DNA, 25 bp, Homo sapien
ataccactaattatacctattcaaa

SEQ ID NO: 5981596 - DNA, 25 bp, Homo sapien
caagacttctacccatataccacta

SEQ ID NO: 5981597 - DNA, 25 bp, Homo sapien
ttgccttcgacgttgaaaaatcacc

SEQ ID NO: 5981598 - DNA, 25 bp, Homo sapien
atctacaatttcccctagaagttgg

SEQ ID NO: 5981599 - DNA, 25 bp, Homo sapien
tcaagattattatgacaaggtcagg

SEQ ID NO: 5981600 - DNA, 25 bp, Homo sapien
ttttggatctacaatttcccctaga

SEQ ID NO: 5981601 - DNA, 25 bp, Homo sapien
gtgacacaataaaatatgaaactaa

SEQ ID NO: 5981602 - DNA, 25 bp, Homo sapien
ttcaaaagagcaacagaaatggaga

SEQ ID NO: 5981603 - DNA, 25 bp, Homo sapien
agtaccagatcctcttcattatcat

SEQ ID NO: 5981604 - DNA, 25 bp, Homo sapien
acaacaacctaacatttattatgac

SEQ ID NO: 5981605 - DNA, 25 bp, Homo sapien
acagcaacaacaacctaacatttat

SEQ ID NO: 5981606 - DNA, 25 bp, Homo sapien
tcaagatcagtttccaccacatact

SEQ ID NO: 5981607 - DNA, 25 bp, Homo sapien
caacgcctccgataatgtatatgag

SEQ ID NO: 5981608 - DNA, 25 bp, Homo sapien
acaaaattgcctcatctcagctgca

SEQ ID NO: 5981609 - DNA, 25 bp, Homo sapien
tctaatgatcaagattattatgaca

SEQ ID NO: 5981610 - DNA, 25 bp, Homo sapien
aacttggttcatacacaaccaattc

SEQ ID NO: 5981611 - DNA, 25 bp, Homo sapien
attcaaaacccacaaatattcatga

SEQ ID NO: 5981612 - DNA, 25 bp, Homo sapien
cttgtttttcttttggatctacaat

SEQ ID NO: 5981613 - DNA, 25 bp, Homo sapien
atgtatatgaggcagatccatttat

SEQ ID NO: 5981614 - DNA, 25 bp, Homo sapien
gatcaagaagaccgtccttgttttt

SEQ ID NO: 5981615 - DNA, 25 bp, Homo sapien
cttcacgctgccttagaagatggtt

SEQ ID NO: 5981616 - DNA, 25 bp, Homo sapien
cagttctaatgatcaagattattat

SEQ ID NO: 5981617 - DNA, 25 bp, Homo sapien
ttcccctagaagttggcattttgaa

SEQ ID NO: 5981618 - DNA, 25 bp, Homo sapien
aatgaattcccatacacacaagact

SEQ ID NO: 5981619 - DNA, 25 bp, Homo sapien
tcatacacaaccaattcatttaatt

SEQ ID NO: 5981620 - DNA, 25 bp, Homo sapien
cgttgaaaaatcaccaccgccatca

SEQ ID NO: 5981621 - DNA, 25 bp, Homo sapien
gatcagtttccaccacatactgata

SEQ ID NO: 5981622 - DNA, 25 bp, Homo sapien
tcagctgcagaacttggttcataca

SEQ ID NO: 5981623 - DNA, 25 bp, Homo sapien
tggtttcttcctctttccttttgaa

SEQ ID NO: 5981624 - DNA, 25 bp, Homo sapien
ctatagcaaccataaaagcactaat

SEQ ID NO: 5981625 - DNA, 25 bp, Homo sapien
gatggtttcttcctctttccttttg

SEQ ID NO: 5981626 - DNA, 25 bp, Homo sapien
ctataataataccagcaataataac

SEQ ID NO: 5981627 - DNA, 25 bp, Homo sapien
ttcaaaaaacacggattcatactcc

SEQ ID NO: 5981628 - DNA, 25 bp, Homo sapien
attactataataataccagcaataa

SEQ ID NO: 5981629 - DNA, 25 bp, Homo sapien
catctcttttttctaatgatgaatc

SEQ ID NO: 5981630 - DNA, 25 bp, Homo sapien
cggcttactccttcagcagttctaa

SEQ ID NO: 5981631 - DNA, 25 bp, Homo sapien
taataccagcaataataacaacgcc

SEQ ID NO: 5981632 - DNA, 25 bp, Homo sapien
tagaaattgccttcgacgttgaaaa

SEQ ID NO: 5981633 - DNA, 25 bp, Homo sapien
gtatatgaggcagatccatttatag

SEQ ID NO: 5981634 - DNA, 25 bp, Homo sapien
catttattatgacacaaccaccgat

SEQ ID NO: 5981635 - DNA, 25 bp, Homo sapien
gtcactatagcaaccataaaagcac

SEQ ID NO: 5981636 - DNA, 25 bp, Homo sapien
aataataccagcaataataacaacg

SEQ ID NO: 5981637 - DNA, 25 bp, Homo sapien
ttactccttcagcagttctaatgat

SEQ ID NO: 5981638 - DNA, 25 bp, Homo sapien
ttatcatctcttttttctaatgatg

SEQ ID NO: 5981639 - DNA, 25 bp, Homo sapien
ggaaaaaagagctctgaaagtacca

SEQ ID NO: 5981640 - DNA, 25 bp, Homo sapien
aactgtcaagatatgctgcggctta

SEQ ID NO: 5981641 - DNA, 25 bp, Homo sapien
attcatactcccaatatcaagatca

SEQ ID NO: 5981642 - DNA, 25 bp, Homo sapien
cacaaccaccgatcaagaagaccgt

SEQ ID NO: 5981643 - DNA, 25 bp, Homo sapien
gatgaacctcaggtgccctcctact

SEQ ID NO: 5981644 - DNA, 25 bp, Homo sapien
tcaaatattgttcaatgaagagttt

SEQ ID NO: 5981645 - DNA, 25 bp, Homo sapien
ccatataccactaattatacctatt

SEQ ID NO: 5981646 - DNA, 25 bp, Homo sapien
tggaaaatattgattctcagcctat

SEQ ID NO: 5981647 - DNA, 25 bp, Homo sapien
gatccatttatagatgaacctcagg

SEQ ID NO: 5981648 - DNA, 25 bp, Homo sapien
ttttgaaaagtctgacaaaattgcc

SEQ ID NO: 5981649 - DNA, 25 bp, Homo sapien
tcacgctgccttagaagatggtttc

SEQ ID NO: 5981650 - DNA, 25 bp, Homo sapien
atgatatcgatattagtgacacaat

SEQ ID NO: 5981651 - DNA, 25 bp, Homo sapien
aatgatgaatccgcatctacgttcc

SEQ ID NO: 5981652 - DNA, 25 bp, Homo sapien
ctttcaaaagagcaacagaaatgga

SEQ ID NO: 5981653 - DNA, 25 bp, Homo sapien
attcaatgaattcccatacacacaa

SEQ ID NO: 5981654 - DNA, 25 bp, Homo sapien
aaggactgcacaatggcaactggtc

SEQ ID NO: 5981655 - DNA, 25 bp, Homo sapien
agtttccaccacatactgataacat

SEQ ID NO: 5981656 - DNA, 25 bp, Homo sapien
aaagtctgacaaaattgcctcatct

SEQ ID NO: 5981657 - DNA, 25 bp, Homo sapien
ccacatactgataacatacattcct

SEQ ID NO: 5981658 - DNA, 25 bp, Homo sapien
atggaaaacttcacgctgccttaga

SEQ ID NO: 5981659 - DNA, 25 bp, Homo sapien
aataataacaacgcctccgataatg

SEQ ID NO: 5981660 - DNA, 25 bp, Homo sapien
tttaattaatcctcaaatattgttc

SEQ ID NO: 5981661 - DNA, 25 bp, Homo sapien
aaatattgattctcagcctatttcc

SEQ ID NO: 5981662 - DNA, 25 bp, Homo sapien
gcctccgataatgtatatgaggcag

SEQ ID NO: 5981663 - DNA, 25 bp, Homo sapien
gcttactccttcagcagttctaatg

SEQ ID NO: 5981664 - DNA, 25 bp, Homo sapien
acgttccactcatcattcaataacc

SEQ ID NO: 5981665 - DNA, 25 bp, Homo sapien
gtttcaagaaatatcctacaagttt

SEQ ID NO: 5981666 - DNA, 25 bp, Homo sapien
gcatggaaaacttcacgctgcctta

SEQ ID NO: 5981667 - DNA, 25 bp, Homo sapien
taataatcgtcactatagcaaccat

SEQ ID NO: 5981668 - DNA, 25 bp, Homo sapien
ggcaactggtcctgaaagaggaaaa

SEQ ID NO: 5981669 - DNA, 25 bp, Homo sapien
ccgcatctacgttccactcatcatt

SEQ ID NO: 5981670 - DNA, 25 bp, Homo sapien
tatagatgaacctcaggtgccctcc

SEQ ID NO: 5981671 - DNA, 25 bp, Homo sapien
ataacatacattcctttaataatcg

SEQ ID NO: 5981672 - DNA, 25 bp, Homo sapien
taataacaacgcctccgataatgta

SEQ ID NO: 5981673 - DNA, 25 bp, Homo sapien
ggaaacgaaaactacgaaggactgc

SEQ ID NO: 5981674 - DNA, 25 bp, Homo sapien
ccgccatcactacaaaaattaaatt

SEQ ID NO: 5981675 - DNA, 25 bp, Homo sapien
catacacacaagacttctacccata

SEQ ID NO: 5981676 - DNA, 25 bp, Homo sapien
tctcagctgcagaacttggttcata

SEQ ID NO: 5981677 - DNA, 25 bp, Homo sapien
attgattctcagcctatttccaagg

SEQ ID NO: 5981678 - DNA, 25 bp, Homo sapien
acgctgccttagaagatggtttctt

SEQ ID NO: 5981679 - DNA, 25 bp, Homo sapien
gccatcactacaaaaattaaattca

SEQ ID NO: 5981680 - DNA, 25 bp, Homo sapien
agttgaactccaaactgtcaagata

SEQ ID NO: 5981681 - DNA, 25 bp, Homo sapien
ctacccatataccactaattatacc

SEQ ID NO: 5981682 - DNA, 25 bp, Homo sapien
cacaagacttctacccatataccac

SEQ ID NO: 5981683 - DNA, 25 bp, Homo sapien
acggattcatactcccaatatcaag

SEQ ID NO: 5981684 - DNA, 25 bp, Homo sapien
tattacccattagaaattgccttcg

SEQ ID NO: 5981685 - DNA, 25 bp, Homo sapien
aacttcacgctgccttagaagatgg

SEQ ID NO: 5981686 - DNA, 25 bp, Homo sapien
aacaacctaacatttattatgacac

SEQ ID NO: 5981687 - DNA, 25 bp, Homo sapien
gaggcagatccatttatagatgaac

SEQ ID NO: 5981688 - DNA, 25 bp, Homo sapien
aactaatacaaatgcacaaaaagat

SEQ ID NO: 5981689 - DNA, 25 bp, Homo sapien
tcagcctatttccaaggaaacgaaa

SEQ ID NO: 5981690 - DNA, 25 bp, Homo sapien
acaaccaattcatttaattaatcct

SEQ ID NO: 5981691 - DNA, 25 bp, Homo sapien
ttcttcctctttccttttgaacagc

SEQ ID NO: 5981692 - DNA, 25 bp, Homo sapien
aataaccatgataactttcaaaaga

SEQ ID NO: 5981693 - DNA, 25 bp, Homo sapien
tgacaaggtcaggtttcaagaaata

SEQ ID NO: 5981694 - DNA, 25 bp, Homo sapien
tccaaactgtcaagatatgctgcgg

SEQ ID NO: 5981695 - DNA, 25 bp, Homo sapien
ctaatgatgaatccgcatctacgtt

SEQ ID NO: 5981696 - DNA, 25 bp, Homo sapien
aattgcctcatctcagctgcagaac

SEQ ID NO: 5981697 - DNA, 25 bp, Homo sapien
agaagatggtttcttcctctttcct

SEQ ID NO: 5981698 - DNA, 25 bp, Homo sapien
gatatcgatattagtgacacaataa

SEQ ID NO: 5981699 - DNA, 25 bp, Homo sapien
atgcaagcggatatgcatggaaaac

SEQ ID NO: 5981700 - DNA, 25 bp, Homo sapien
cccctagaagttggcattttgaaaa

SEQ ID NO: 5981701 - DNA, 25 bp, Homo sapien
agaaatggagatgatatcgatatta

SEQ ID NO: 5981702 - DNA, 25 bp, Homo sapien
ttcccatacacacaagacttctacc

SEQ ID NO: 5981703 - DNA, 25 bp, Homo sapien
taattactataataataccagcaat

SEQ ID NO: 5981704 - DNA, 25 bp, Homo sapien
atctacgttccactcatcattcaat

SEQ ID NO: 5981705 - DNA, 25 bp, Homo sapien
tttcttttggatctacaatttcccc

SEQ ID NO: 5981706 - DNA, 25 bp, Homo sapien
gtgccctcctactattacccattag

SEQ ID NO: 5981707 - DNA, 25 bp, Homo sapien
aaatatgaaactaatacaaatgcac

SEQ ID NO: 5981708 - DNA, 25 bp, Homo sapien
tactataataataccagcaataata

SEQ ID NO: 5981709 - DNA, 25 bp, Homo sapien
tcgatattagtgacacaataaaata

SEQ ID NO: 5981710 - DNA, 25 bp, Homo sapien
gaaaactacgaaggactgcacaatg

SEQ ID NO: 5981711 - DNA, 25 bp, Homo sapien
gaggaaaaaagagctctgaaagtac

SEQ ID NO: 5981712 - DNA, 25 bp, Homo sapien
ttctaatgatgaatccgcatctacg

SEQ ID NO: 5981713 - DNA, 25 bp, Homo sapien
atagcaaccataaaagcactaattg

SEQ ID NO: 5981714 - DNA, 25 bp, Homo sapien
atgacacaaccaccgatcaagaaga

SEQ ID NO: 5981715 - DNA, 25 bp, Homo sapien
acacaaccaattcatttaattaatc

SEQ ID NO: 5981716 - DNA, 25 bp, Homo sapien
attcaataaccatgataactttcaa

SEQ ID NO: 5981717 - DNA, 25 bp, Homo sapien
aatcaccaccgccatcactacaaaa

SEQ ID NO: 5981718 - DNA, 25 bp, Homo sapien
cctagaagttggcattttgaaaagt

SEQ ID NO: 5981719 - DNA, 25 bp, Homo sapien
tcaggtttcaagaaatatcctacaa

SEQ ID NO: 5981720 - DNA, 25 bp, Homo sapien
gcaagcggatatgcatggaaaactt

SEQ ID NO: 5981721 - DNA, 25 bp, Homo sapien
ttgaaaagtctgacaaaattgcctc

SEQ ID NO: 5981722 - DNA, 25 bp, Homo sapien
atataccactaattatacctattca

SEQ ID NO: 5981723 - DNA, 25 bp, Homo sapien
taaccatgataactttcaaaagagc

SEQ ID NO: 5981724 - DNA, 25 bp, Homo sapien
ggaaaacttcacgctgccttagaag

SEQ ID NO: 5981725 - DNA, 25 bp, Homo sapien
attccaagaaaattttgaattcaat

SEQ ID NO: 5981726 - DNA, 25 bp, Homo sapien
cagcaataataacaacgcctccgat

SEQ ID NO: 5981727 - DNA, 25 bp, Homo sapien
taaaagcactaattgtaattactat

SEQ ID NO: 5981728 - DNA, 25 bp, Homo sapien
tttattatgacacaaccaccgatca

SEQ ID NO: 5981729 - DNA, 25 bp, Homo sapien
aaaatcaccaccgccatcactacaa

SEQ ID NO: 5981730 - DNA, 25 bp, Homo sapien
tgattctcagcctatttccaaggaa

SEQ ID NO: 5981731 - DNA, 25 bp, Homo sapien
aaagagcaacagaaatggagatgat

SEQ ID NO: 5981732 - DNA, 25 bp, Homo sapien
atgaagagtttctgaatttggaaaa

SEQ ID NO: 5981733 - DNA, 25 bp, Homo sapien
aacccacaaatattcatgaatcaat

SEQ ID NO: 5981734 - DNA, 25 bp, Homo sapien
aatttggaaaatattgattctcagc

SEQ ID NO: 5981735 - DNA, 25 bp, Homo sapien
tcagcagttctaatgatcaagatta

SEQ ID NO: 5981736 - DNA, 25 bp, Homo sapien
ctattcaaaacccacaaatattcat

SEQ ID NO: 5981737 - DNA, 25 bp, Homo sapien
tatgacaaggtcaggtttcaagaaa

SEQ ID NO: 5981738 - DNA, 25 bp, Homo sapien
accagcaataataacaacgcctccg

SEQ ID NO: 5981739 - DNA, 25 bp, Homo sapien
acacggattcatactcccaatatca

SEQ ID NO: 5981740 - DNA, 25 bp, Homo sapien
acccatataccactaattataccta

SEQ ID NO: 5981741 - DNA, 25 bp, Homo sapien
ttttgaacagcaacaacaacctaac

SEQ ID NO: 5981742 - DNA, 25 bp, Homo sapien
ctccgataatgtatatgaggcagat

SEQ ID NO: 5981743 - DNA, 25 bp, Homo sapien
gaaaatattgattctcagcctattt

SEQ ID NO: 5981744 - DNA, 25 bp, Homo sapien
caatggcaactggtcctgaaagagg

SEQ ID NO: 5981745 - DNA, 25 bp, Homo sapien
tgaattcccatacacacaagacttc

SEQ ID NO: 5981746 - DNA, 25 bp, Homo sapien
atttcccctagaagttggcattttg

SEQ ID NO: 5981747 - DNA, 25 bp, Homo sapien
gtcaagatatgctgcggcttactcc

SEQ ID NO: 5981748 - DNA, 25 bp, Homo sapien
actcccaatatcaagatcagtttcc

SEQ ID NO: 5981749 - DNA, 25 bp, Homo sapien
tgcacaatggcaactggtcctgaaa

SEQ ID NO: 5981750 - DNA, 25 bp, Homo sapien
ggactgcacaatggcaactggtcct

SEQ ID NO: 5981751 - DNA, 25 bp, Homo sapien
aagatatcaaaatattccaagaaaa

SEQ ID NO: 5981752 - DNA, 25 bp, Homo sapien
tagaagttggcattttgaaaagtct

SEQ ID NO: 5981753 - DNA, 25 bp, Homo sapien
ttcaaaagagttagaattcctaaaa

SEQ ID NO: 5981754 - DNA, 25 bp, Homo sapien
actattacccattagaaattgcctt

SEQ ID NO: 5981755 - DNA, 25 bp, Homo sapien
ataactttcaaaagagcaacagaaa

SEQ ID NO: 5981756 - DNA, 25 bp, Homo sapien
aggtgccctcctactattacccatt

SEQ ID NO: 5981757 - DNA, 25 bp, Homo sapien
ccattagaaattgccttcgacgttg

SEQ ID NO: 5981758 - DNA, 25 bp, Homo sapien
gacgttgaaaaatcaccaccgccat

SEQ ID NO: 5981759 - DNA, 25 bp, Homo sapien
actgcacaatggcaactggtcctga

SEQ ID NO: 5981760 - DNA, 25 bp, Homo sapien
actacgaaggactgcacaatggcaa

SEQ ID NO: 5981761 - DNA, 25 bp, Homo sapien
acatactgataacatacattccttt

SEQ ID NO: 5981762 - DNA, 25 bp, Homo sapien
tgacaaaattgcctcatctcagctg

SEQ ID NO: 5981763 - DNA, 25 bp, Homo sapien
ttgaactccaaactgtcaagatatg

SEQ ID NO: 5981764 - DNA, 25 bp, Homo sapien
tctgacaaaattgcctcatctcagc

SEQ ID NO: 5981765 - DNA, 25 bp, Homo sapien
aactttcaaaagagcaacagaaatg

SEQ ID NO: 5981766 - DNA, 25 bp, Homo sapien
attgtaattactataataataccag

SEQ ID NO: 5981767 - DNA, 25 bp, Homo sapien
tattatgacacaaccaccgatcaag

SEQ ID NO: 5981768 - DNA, 25 bp, Homo sapien
aatatcaagatcagtttccaccaca

SEQ ID NO: 5981769 - DNA, 25 bp, Homo sapien
tcattcaataaccatgataactttc

SEQ ID NO: 5981770 - DNA, 25 bp, Homo sapien
ggattcatactcccaatatcaagat

SEQ ID NO: 5981771 - DNA, 25 bp, Homo sapien
aaaacccacaaatattcatgaatca

SEQ ID NO: 5981772 - DNA, 25 bp, Homo sapien
caccgatcaagaagaccgtccttgt

SEQ ID NO: 5981773 - DNA, 25 bp, Homo sapien
gctgcggcttactccttcagcagtt

SEQ ID NO: 5981774 - DNA, 25 bp, Homo sapien
agatcctcttcattatcatctcttt

SEQ ID NO: 5981775 - DNA, 25 bp, Homo sapien
caaccaccgatcaagaagaccgtcc

SEQ ID NO: 5981776 - DNA, 25 bp, Homo sapien
tccttcagcagttctaatgatcaag

SEQ ID NO: 5981777 - DNA, 25 bp, Homo sapien
caacctaacatttattatgacacaa

SEQ ID NO: 5981778 - DNA, 25 bp, Homo sapien
aaaaaagagctctgaaagtaccaga

SEQ ID NO: 5981779 - DNA, 25 bp, Homo sapien
attctcagcctatttccaaggaaac

SEQ ID NO: 5981780 - DNA, 25 bp, Homo sapien
ttagtgacacaataaaatatgaaac

SEQ ID NO: 5981781 - DNA, 25 bp, Homo sapien
aattcccatacacacaagacttcta

SEQ ID NO: 5981782 - DNA, 25 bp, Homo sapien
ctctttccttttgaacagcaacaac

SEQ ID NO: 5981783 - DNA, 25 bp, Homo sapien
atatgaaactaatacaaatgcacaa

SEQ ID NO: 5981784 - DNA, 25 bp, Homo sapien
ttgaaaaatcaccaccgccatcact

SEQ ID NO: 5981785 - DNA, 25 bp, Homo sapien
atactcccaatatcaagatcagttt

SEQ ID NO: 5981786 - DNA, 25 bp, Homo sapien
gaattcctaaaaaagttgaactcca

SEQ ID NO: 5981787 - DNA, 25 bp, Homo sapien
accaccgatcaagaagaccgtcctt

SEQ ID NO: 5981788 - DNA, 25 bp, Homo sapien
gagttagaattcctaaaaaagttga

SEQ ID NO: 5981789 - DNA, 25 bp, Homo sapien
aacatacattcctttaataatcgtc

SEQ ID NO: 5981790 - DNA, 25 bp, Homo sapien
tcaataaccatgataactttcaaaa

SEQ ID NO: 5981791 - DNA, 25 bp, Homo sapien
taaaaaagttgaactccaaactgtc

SEQ ID NO: 5981792 - DNA, 25 bp, Homo sapien
tcaggtgccctcctactattaccca

SEQ ID NO: 5981793 - DNA, 25 bp, Homo sapien
ctactattacccattagaaattgcc

SEQ ID NO: 5981794 - DNA, 25 bp, Homo sapien
agcaacagaaatggagatgatatcg

SEQ ID NO: 5981795 - DNA, 25 bp, Homo sapien
acttctacccatataccactaatta

SEQ ID NO: 5981796 - DNA, 25 bp, Homo sapien
tcttttttctaatgatgaatccgca

SEQ ID NO: 5981797 - DNA, 25 bp, Homo sapien
aaggtcaggtttcaagaaatatcct

SEQ ID NO: 5981798 - DNA, 25 bp, Homo sapien
aaagcactaattgtaattactataa

SEQ ID NO: 5981799 - DNA, 25 bp, Homo sapien
cccacaaatattcatgaatcaataa

SEQ ID NO: 5981800 - DNA, 25 bp, Homo sapien
ccttttgaacagcaacaacaaccta

SEQ ID NO: 5981801 - DNA, 25 bp, Homo sapien
gttcatacacaaccaattcatttaa

SEQ ID NO: 5981802 - DNA, 25 bp, Homo sapien
taatgatcaagattattatgacaag

SEQ ID NO: 5981803 - DNA, 25 bp, Homo sapien
tcagtttccaccacatactgataac

SEQ ID NO: 5981804 - DNA, 25 bp, Homo sapien
acgaaaactacgaaggactgcacaa

SEQ ID NO: 5981805 - DNA, 25 bp, Homo sapien
acgcctccgataatgtatatgaggc

SEQ ID NO: 5981806 - DNA, 25 bp, Homo sapien
gaaaaatcaccaccgccatcactac

SEQ ID NO: 5981807 - DNA, 25 bp, Homo sapien
attatgacaaggtcaggtttcaaga

SEQ ID NO: 5981808 - DNA, 25 bp, Homo sapien
ttgaacagcaacaacaacctaacat

SEQ ID NO: 5981809 - DNA, 25 bp, Homo sapien
catctcagctgcagaacttggttca

SEQ ID NO: 5981810 - DNA, 25 bp, Homo sapien
actggtcctgaaagaggaaaaaaga

SEQ ID NO: 5981811 - DNA, 25 bp, Homo sapien
atacctattcaaaacccacaaatat

SEQ ID NO: 5981812 - DNA, 25 bp, Homo sapien
tggttcatacacaaccaattcattt

SEQ ID NO: 5981813 - DNA, 25 bp, Homo sapien
tacaaatgcacaaaaagatatcaaa

SEQ ID NO: 5981814 - DNA, 25 bp, Homo sapien
atgaatccgcatctacgttccactc

SEQ ID NO: 5981815 - DNA, 25 bp, Homo sapien
ttttttctaatgatgaatccgcatc

SEQ ID NO: 5981816 - DNA, 25 bp, Homo sapien
ctcatctcagctgcagaacttggtt

SEQ ID NO: 5981817 - DNA, 25 bp, Homo sapien
agttggcattttgaaaagtctgaca

SEQ ID NO: 5981818 - DNA, 25 bp, Homo sapien
agagtttctgaatttggaaaatatt

SEQ ID NO: 5981819 - DNA, 25 bp, Homo sapien
ttctacccatataccactaattata

SEQ ID NO: 5981820 - DNA, 25 bp, Homo sapien
aaaattgcctcatctcagctgcaga

SEQ ID NO: 5981821 - DNA, 25 bp, Homo sapien
caaccataaaagcactaattgtaat

SEQ ID NO: 5981822 - DNA, 25 bp, Homo sapien
caagatatgctgcggcttactcctt

SEQ ID NO: 5981823 - DNA, 25 bp, Homo sapien
tccaagaaaattttgaattcaatga

SEQ ID NO: 5981824 - DNA, 25 bp, Homo sapien
aataaattcaaaaaacacggattca

SEQ ID NO: 5981825 - DNA, 25 bp, Homo sapien
ttcatttaattaatcctcaaatatt

SEQ ID NO: 5981826 - DNA, 25 bp, Homo sapien
attgttcaatgaagagtttctgaat

SEQ ID NO: 5981827 - DNA, 25 bp, Homo sapien
ggagatgatatcgatattagtgaca

SEQ ID NO: 5981828 - DNA, 25 bp, Homo sapien
cactatagcaaccataaaagcacta

SEQ ID NO: 5981829 - DNA, 25 bp, Homo sapien
aacaacgcctccgataatgtatatg

SEQ ID NO: 5981830 - DNA, 25 bp, Homo sapien
taatcctcaaatattgttcaatgaa

SEQ ID NO: 5981831 - DNA, 25 bp, Homo sapien
tgatgaatccgcatctacgttccac

SEQ ID NO: 5981832 - DNA, 25 bp, Homo sapien
tgaatttggaaaatattgattctca

SEQ ID NO: 5981833 - DNA, 25 bp, Homo sapien
tttaataatcgtcactatagcaacc

SEQ ID NO: 5981834 - DNA, 25 bp, Homo sapien
aagaggaaaaaagagctctgaaagt

SEQ ID NO: 5981835 - DNA, 25 bp, Homo sapien
taaattcaaaaaacacggattcata

SEQ ID NO: 5981836 - DNA, 25 bp, Homo sapien
aatcaataaattcaaaaaacacgga

SEQ ID NO: 5981837 - DNA, 25 bp, Homo sapien
ttgaattcaatgaattcccatacac

SEQ ID NO: 5981838 - DNA, 25 bp, Homo sapien
aattgccttcgacgttgaaaaatca

SEQ ID NO: 5981839 - DNA, 25 bp, Homo sapien
catacattcctttaataatcgtcac

SEQ ID NO: 5981840 - DNA, 25 bp, Homo sapien
gatcaagattattatgacaaggtca

SEQ ID NO: 5981841 - DNA, 25 bp, Homo sapien
atcctcaaatattgttcaatgaaga

SEQ ID NO: 5981842 - DNA, 25 bp, Homo sapien
accactaattatacctattcaaaac

SEQ ID NO: 5981843 - DNA, 25 bp, Homo sapien
tgccttagaagatggtttcttcctc

SEQ ID NO: 5981844 - DNA, 25 bp, Homo sapien
aggtttcaagaaatatcctacaagt

SEQ ID NO: 5981845 - DNA, 25 bp, Homo sapien
gaatccgcatctacgttccactcat

SEQ ID NO: 5981846 - DNA, 25 bp, Homo sapien
tccttgtttttcttttggatctaca

SEQ ID NO: 5981847 - DNA, 25 bp, Homo sapien
aacatttattatgacacaaccaccg

SEQ ID NO: 5981848 - DNA, 25 bp, Homo sapien
ttgcctcatctcagctgcagaactt

SEQ ID NO: 5981849 - DNA, 25 bp, Homo sapien
agctgcagaacttggttcatacaca

SEQ ID NO: 5981850 - DNA, 25 bp, Homo sapien
catttaattaatcctcaaatattgt

SEQ ID NO: 5981851 - DNA, 25 bp, Homo sapien
cttggttcatacacaaccaattcat

SEQ ID NO: 5981852 - DNA, 25 bp, Homo sapien
ttcaatgaagagtttctgaatttgg

SEQ ID NO: 5981853 - DNA, 25 bp, Homo sapien
gcatctacgttccactcatcattca

SEQ ID NO: 5981854 - DNA, 25 bp, Homo sapien
tttccaccacatactgataacatac

SEQ ID NO: 5981855 - DNA, 25 bp, Homo sapien
ttcattatcatctcttttttctaat

SEQ ID NO: 5981856 - DNA, 25 bp, Homo sapien
tctgaatttggaaaatattgattct

SEQ ID NO: 5981857 - DNA, 25 bp, Homo sapien
caacaacaacctaacatttattatg

SEQ ID NO: 5981858 - DNA, 25 bp, Homo sapien
aatacaaatgcacaaaaagatatca

SEQ ID NO: 5981859 - DNA, 25 bp, Homo sapien
tttatagatgaacctcaggtgccct

SEQ ID NO: 5981860 - DNA, 25 bp, Homo sapien
tccactcatcattcaataaccatga

SEQ ID NO: 5981861 - DNA, 25 bp, Homo sapien
gccttcgacgttgaaaaatcaccac

SEQ ID NO: 5981862 - DNA, 25 bp, Homo sapien
ttggcattttgaaaagtctgacaaa

SEQ ID NO: 5981863 - DNA, 25 bp, Homo sapien
acaaggtcaggtttcaagaaatatc

SEQ ID NO: 5981864 - DNA, 25 bp, Homo sapien
tgtttttcttttggatctacaattt

SEQ ID NO: 5981865 - DNA, 25 bp, Homo sapien
caagaaatatcctacaagtttagta

SEQ ID NO: 5981866 - DNA, 25 bp, Homo sapien
tccatttatagatgaacctcaggtg

SEQ ID NO: 5981867 - DNA, 25 bp, Homo sapien
aattcaaaagagttagaattcctaa

SEQ ID NO: 5981868 - DNA, 25 bp, Homo sapien
tcgtcactatagcaaccataaaagc

SEQ ID NO: 5981869 - DNA, 25 bp, Homo sapien
ctacaatttcccctagaagttggca

SEQ ID NO: 5981870 - DNA, 25 bp, Homo sapien
agaaatatcctacaagtttagtaaa

SEQ ID NO: 5981871 - DNA, 25 bp, Homo sapien
ataataataccagcaataataacaa

SEQ ID NO: 5981872 - DNA, 25 bp, Homo sapien
cttcagcagttctaatgatcaagat

SEQ ID NO: 5981873 - DNA, 25 bp, Homo sapien
tcttttggatctacaatttccccta

SEQ ID NO: 5981874 - DNA, 25 bp, Homo sapien
atatgaggcagatccatttatagat

SEQ ID NO: 5981875 - DNA, 25 bp, Homo sapien
aatcgtcactatagcaaccataaaa

SEQ ID NO: 5981876 - DNA, 25 bp, Homo sapien
gaaattgccttcgacgttgaaaaat

SEQ ID NO: 5981877 - DNA, 25 bp, Homo sapien
cctcctactattacccattagaaat

SEQ ID NO: 5981878 - DNA, 25 bp, Homo sapien
aagattattatgacaaggtcaggtt

SEQ ID NO: 5981879 - DNA, 25 bp, Homo sapien
cgaaggactgcacaatggcaactgg

SEQ ID NO: 5981880 - DNA, 25 bp, Homo sapien
gaacagcaacaacaacctaacattt

SEQ ID NO: 5981881 - DNA, 25 bp, Homo sapien
cattatcatctcttttttctaatga

SEQ ID NO: 5981882 - DNA, 25 bp, Homo sapien
aaccaattcatttaattaatcctca

SEQ ID NO: 5981883 - DNA, 25 bp, Homo sapien
aagcggatatgcatggaaaacttca

SEQ ID NO: 5981884 - DNA, 25 bp, Homo sapien
gaaaagtctgacaaaattgcctcat

SEQ ID NO: 5981885 - DNA, 25 bp, Homo sapien
tgataacatacattcctttaataat

SEQ ID NO: 5981886 - DNA, 25 bp, Homo sapien
gaaactaatacaaatgcacaaaaag

SEQ ID NO: 5981887 - DNA, 25 bp, Homo sapien
cacaatggcaactggtcctgaaaga

SEQ ID NO: 5981888 - DNA, 25 bp, Homo sapien
ggtcaggtttcaagaaatatcctac

SEQ ID NO: 5981889 - DNA, 25 bp, Homo sapien
tgaaagtaccagatcctcttcatta

SEQ ID NO: 5981890 - DNA, 25 bp, Homo sapien
ggcagatccatttatagatgaacct

SEQ ID NO: 5981891 - DNA, 25 bp, Homo sapien
atactgataacatacattcctttaa

SEQ ID NO: 5981892 - DNA, 25 bp, Homo sapien
aaacacggattcatactcccaatat

SEQ ID NO: 5981893 - DNA, 25 bp, Homo sapien
ataatcgtcactatagcaaccataa

SEQ ID NO: 5981894 - DNA, 25 bp, Homo sapien
ttacccattagaaattgccttcgac

SEQ ID NO: 5981895 - DNA, 25 bp, Homo sapien
agacttctacccatataccactaat

SEQ ID NO: 5981896 - DNA, 25 bp, Homo sapien
ggcattttgaaaagtctgacaaaat

SEQ ID NO: 5981897 - DNA, 25 bp, Homo sapien
aaagttgaactccaaactgtcaaga

SEQ ID NO: 5981898 - DNA, 25 bp, Homo sapien
cctcaaatattgttcaatgaagagt

SEQ ID NO: 5981899 - DNA, 25 bp, Homo sapien
gcctcatctcagctgcagaacttgg

SEQ ID NO: 5981900 - DNA, 25 bp, Homo sapien
tcttcattatcatctcttttttcta

SEQ ID NO: 5981901 - DNA, 25 bp, Homo sapien
tatcgatattagtgacacaataaaa

SEQ ID NO: 5981902 - DNA, 25 bp, Homo sapien
aaaagagctctgaaagtaccagatc

SEQ ID NO: 5981903 - DNA, 25 bp, Homo sapien
ccgatcaagaagaccgtccttgttt

SEQ ID NO: 5981904 - DNA, 25 bp, Homo sapien
cttcgacgttgaaaaatcaccaccg

SEQ ID NO: 5981905 - DNA, 25 bp, Homo sapien
tcaagaagaccgtccttgtttttct

SEQ ID NO: 5981906 - DNA, 25 bp, Homo sapien
tagatgaacctcaggtgccctccta

SEQ ID NO: 5981907 - DNA, 25 bp, Homo sapien
taattaatcctcaaatattgttcaa

SEQ ID NO: 5981908 - DNA, 25 bp, Homo sapien
acccattagaaattgccttcgacgt

SEQ ID NO: 5981909 - DNA, 25 bp, Homo sapien
tctgaaagtaccagatcctcttcat

SEQ ID NO: 5981910 - DNA, 25 bp, Homo sapien
ctcatcattcaataaccatgataac

SEQ ID NO: 5981911 - DNA, 25 bp, Homo sapien
ctaattatacctattcaaaacccac

SEQ ID NO: 5981912 - DNA, 25 bp, Homo sapien
gcagaacttggttcatacacaacca

SEQ ID NO: 5981913 - DNA, 25 bp, Homo sapien
tatcaagatcagtttccaccacata

SEQ ID NO: 5981914 - DNA, 25 bp, Homo sapien
actccaaactgtcaagatatgctgc

SEQ ID NO: 5981915 - DNA, 25 bp, Homo sapien
agtttctgaatttggaaaatattga

SEQ ID NO: 5981916 - DNA, 25 bp, Homo sapien
tacacacaagacttctacccatata

SEQ ID NO: 5981917 - DNA, 25 bp, Homo sapien
aaaaacacggattcatactcccaat

SEQ ID NO: 5981918 - DNA, 25 bp, Homo sapien
ttcaagaaatatcctacaagtttag

SEQ ID NO: 5981919 - DNA, 25 bp, Homo sapien
ataccagcaataataacaacgcctc

SEQ ID NO: 5981920 - DNA, 25 bp, Homo sapien
cactcatcattcaataaccatgata

SEQ ID NO: 5981921 - DNA, 25 bp, Homo sapien
atgcatggaaaacttcacgctgcct

SEQ ID NO: 5981922 - DNA, 25 bp, Homo sapien
attgtgtcactaatatcgatatcat

SEQ ID NO: 5981923 - DNA, 25 bp, Homo sapien
aaacttgtaggatatttcttgaaac

SEQ ID NO: 5981924 - DNA, 25 bp, Homo sapien
ttattgaatgatgagtggaacgtag

SEQ ID NO: 5981925 - DNA, 25 bp, Homo sapien
attgctggtattattatagtaatta

SEQ ID NO: 5981926 - DNA, 25 bp, Homo sapien
tgcggattcatcattagaaaaaaga

SEQ ID NO: 5981927 - DNA, 25 bp, Homo sapien
actcttcattgaacaatatttgagg

SEQ ID NO: 5981928 - DNA, 25 bp, Homo sapien
atgagtggaacgtagatgcggattc

SEQ ID NO: 5981929 - DNA, 25 bp, Homo sapien
tattttattgtgtcactaatatcga

SEQ ID NO: 5981930 - DNA, 25 bp, Homo sapien
tgtagatccaaaagaaaaacaagga

SEQ ID NO: 5981931 - DNA, 25 bp, Homo sapien
aggatctggtactttcagagctctt

SEQ ID NO: 5981932 - DNA, 25 bp, Homo sapien
taggtataattagtggtatatgggt

SEQ ID NO: 5981933 - DNA, 25 bp, Homo sapien
ctgcctcatatacattatcggaggc

SEQ ID NO: 5981934 - DNA, 25 bp, Homo sapien
attagaaaaaagagatgataatgaa

SEQ ID NO: 5981935 - DNA, 25 bp, Homo sapien
attggttgtgtatgaaccaagttct

SEQ ID NO: 5981936 - DNA, 25 bp, Homo sapien
ctcatatacattatcggaggcgttg

SEQ ID NO: 5981937 - DNA, 25 bp, Homo sapien
gcagtccttcgtagttttcgtttcc

SEQ ID NO: 5981938 - DNA, 25 bp, Homo sapien
tcatgaatatttgtgggttttgaat

SEQ ID NO: 5981939 - DNA, 25 bp, Homo sapien
atggttattgaatgatgagtggaac

SEQ ID NO: 5981940 - DNA, 25 bp, Homo sapien
tgtcagacttttcaaaatgccaact

SEQ ID NO: 5981941 - DNA, 25 bp, Homo sapien
ttatcggaggcgttgttattattgc

SEQ ID NO: 5981942 - DNA, 25 bp, Homo sapien
cgattattaaaggaatgtatgttat

SEQ ID NO: 5981943 - DNA, 25 bp, Homo sapien
tcatggttattgaatgatgagtgga

SEQ ID NO: 5981944 - DNA, 25 bp, Homo sapien
gaaacctgaccttgtcataataatc

SEQ ID NO: 5981945 - DNA, 25 bp, Homo sapien
aaattcagaaactcttcattgaaca

SEQ ID NO: 5981946 - DNA, 25 bp, Homo sapien
tgaggttcatctataaatggatctg

SEQ ID NO: 5981947 - DNA, 25 bp, Homo sapien
gttgttgctgttcaaaaggaaagag

SEQ ID NO: 5981948 - DNA, 25 bp, Homo sapien
tctgttgctcttttgaaagttatca

SEQ ID NO: 5981949 - DNA, 25 bp, Homo sapien
gttttgaataggtataattagtggt

SEQ ID NO: 5981950 - DNA, 25 bp, Homo sapien
gatatttcttgaaacctgaccttgt

SEQ ID NO: 5981951 - DNA, 25 bp, Homo sapien
tgggagtatgaatccgtgttttttg

SEQ ID NO: 5981952 - DNA, 25 bp, Homo sapien
attttgtcagacttttcaaaatgcc

SEQ ID NO: 5981953 - DNA, 25 bp, Homo sapien
gcttttatggttgctatagtgacga

SEQ ID NO: 5981954 - DNA, 25 bp, Homo sapien
atgaggcaattttgtcagacttttc

SEQ ID NO: 5981955 - DNA, 25 bp, Homo sapien
tgctggtattattatagtaattaca

SEQ ID NO: 5981956 - DNA, 25 bp, Homo sapien
ttatagtaattacaattagtgcttt

SEQ ID NO: 5981957 - DNA, 25 bp, Homo sapien
atgttatcagtatgtggtggaaact

SEQ ID NO: 5981958 - DNA, 25 bp, Homo sapien
atggcggtggtgatttttcaacgtc

SEQ ID NO: 5981959 - DNA, 25 bp, Homo sapien
attgaatgatgagtggaacgtagat

SEQ ID NO: 5981960 - DNA, 25 bp, Homo sapien
tccatttctgttgctcttttgaaag

SEQ ID NO: 5981961 - DNA, 25 bp, Homo sapien
agtaagccgcagcatatcttgacag

SEQ ID NO: 5981962 - DNA, 25 bp, Homo sapien
aagttctgcagctgagatgaggcaa

SEQ ID NO: 5981963 - DNA, 25 bp, Homo sapien
atggttgctatagtgacgattatta

SEQ ID NO: 5981964 - DNA, 25 bp, Homo sapien
acgtcgaaggcaatttctaatgggt

SEQ ID NO: 5981965 - DNA, 25 bp, Homo sapien
ggggaaattgtagatccaaaagaaa

SEQ ID NO: 5981966 - DNA, 25 bp, Homo sapien
agaatcaatattttccaaattcaga

SEQ ID NO: 5981967 - DNA, 25 bp, Homo sapien
gagttcaacttttttaggaattcta

SEQ ID NO: 5981968 - DNA, 25 bp, Homo sapien
ggtagaagtcttgtgtgtatgggaa

SEQ ID NO: 5981969 - DNA, 25 bp, Homo sapien
tataattagtggtatatgggtagaa

SEQ ID NO: 5981970 - DNA, 25 bp, Homo sapien
atcatctccatttctgttgctcttt

SEQ ID NO: 5981971 - DNA, 25 bp, Homo sapien
ttttcaaaatgccaacttctagggg

SEQ ID NO: 5981972 - DNA, 25 bp, Homo sapien
tggtggaaactgatcttgatattgg

SEQ ID NO: 5981973 - DNA, 25 bp, Homo sapien
ttgctcttttgaaagttatcatggt

SEQ ID NO: 5981974 - DNA, 25 bp, Homo sapien
cctgaccttgtcataataatcttga

SEQ ID NO: 5981975 - DNA, 25 bp, Homo sapien
tagaaaaaagagatgataatgaaga

SEQ ID NO: 5981976 - DNA, 25 bp, Homo sapien
gctgttcaaaaggaaagaggaagaa

SEQ ID NO: 5981977 - DNA, 25 bp, Homo sapien
agcatatcttgacagtttggagttc

SEQ ID NO: 5981978 - DNA, 25 bp, Homo sapien
tttgaataggtataattagtggtat

SEQ ID NO: 5981979 - DNA, 25 bp, Homo sapien
cgatatcatctccatttctgttgct

SEQ ID NO: 5981980 - DNA, 25 bp, Homo sapien
ttttgaaagttatcatggttattga

SEQ ID NO: 5981981 - DNA, 25 bp, Homo sapien
aaccatcttctaaggcagcgtgaag

SEQ ID NO: 5981982 - DNA, 25 bp, Homo sapien
aaatggatctgcctcatatacatta

SEQ ID NO: 5981983 - DNA, 25 bp, Homo sapien
ttcattgaacaatatttgaggatta

SEQ ID NO: 5981984 - DNA, 25 bp, Homo sapien
atctgcctcatatacattatcggag

SEQ ID NO: 5981985 - DNA, 25 bp, Homo sapien
agtgatggcggtggtgatttttcaa

SEQ ID NO: 5981986 - DNA, 25 bp, Homo sapien
actaatatcgatatcatctccattt

SEQ ID NO: 5981987 - DNA, 25 bp, Homo sapien
tcttcattgaacaatatttgaggat

SEQ ID NO: 5981988 - DNA, 25 bp, Homo sapien
atgttaggttgttgttgctgttcaa

SEQ ID NO: 5981989 - DNA, 25 bp, Homo sapien
gctcttttgaaagttatcatggtta

SEQ ID NO: 5981990 - DNA, 25 bp, Homo sapien
cattgtgcagtccttcgtagttttc

SEQ ID NO: 5981991 - DNA, 25 bp, Homo sapien
aaggagtaagccgcagcatatcttg

SEQ ID NO: 5981992 - DNA, 25 bp, Homo sapien
tgccaacttctaggggaaattgtag

SEQ ID NO: 5981993 - DNA, 25 bp, Homo sapien
tattaaaggaatgtatgttatcagt

SEQ ID NO: 5981994 - DNA, 25 bp, Homo sapien
tcagtatgtggtggaaactgatctt

SEQ ID NO: 5981995 - DNA, 25 bp, Homo sapien
gtggtatatgggtagaagtcttgtg

SEQ ID NO: 5981996 - DNA, 25 bp, Homo sapien
cggaggcgttgttattattgctggt

SEQ ID NO: 5981997 - DNA, 25 bp, Homo sapien
gtcgaaggcaatttctaatgggtaa

SEQ ID NO: 5981998 - DNA, 25 bp, Homo sapien
tgtcataataatcttgatcattaga

SEQ ID NO: 5981999 - DNA, 25 bp, Homo sapien
ttctaatgggtaatagtaggagggc

SEQ ID NO: 5982000 - DNA, 25 bp, Homo sapien
cttggaatattttgatatctttttg

SEQ ID NO: 5982001 - DNA, 25 bp, Homo sapien
gacgattattaaaggaatgtatgtt

SEQ ID NO: 5982002 - DNA, 25 bp, Homo sapien
tatcttgacagtttggagttcaact

SEQ ID NO: 5982003 - DNA, 25 bp, Homo sapien
tcttcttgatcggtggttgtgtcat

SEQ ID NO: 5982004 - DNA, 25 bp, Homo sapien
ttgacagtttggagttcaacttttt

SEQ ID NO: 5982005 - DNA, 25 bp, Homo sapien
gatgcggattcatcattagaaaaaa

SEQ ID NO: 5982006 - DNA, 25 bp, Homo sapien
gttcatctataaatggatctgcctc

SEQ ID NO: 5982007 - DNA, 25 bp, Homo sapien
ttccttggaaataggctgagaatca

SEQ ID NO: 5982008 - DNA, 25 bp, Homo sapien
ggttgttgttgctgttcaaaaggaa

SEQ ID NO: 5982009 - DNA, 25 bp, Homo sapien
aaggcaatttctaatgggtaatagt

SEQ ID NO: 5982010 - DNA, 25 bp, Homo sapien
ggagggcacctgaggttcatctata

SEQ ID NO: 5982011 - DNA, 25 bp, Homo sapien
ctgctgaaggagtaagccgcagcat

SEQ ID NO: 5982012 - DNA, 25 bp, Homo sapien
ttgaaacctgaccttgtcataataa

SEQ ID NO: 5982013 - DNA, 25 bp, Homo sapien
gtggttgtgtcataataaatgttag

SEQ ID NO: 5982014 - DNA, 25 bp, Homo sapien
gtgtgtatgggaattcattgaattc

SEQ ID NO: 5982015 - DNA, 25 bp, Homo sapien
gtatgggaattcattgaattcaaaa

SEQ ID NO: 5982016 - DNA, 25 bp, Homo sapien
aaactgatcttgatattgggagtat

SEQ ID NO: 5982017 - DNA, 25 bp, Homo sapien
tgaagttttccatgcatatccgctt

SEQ ID NO: 5982018 - DNA, 25 bp, Homo sapien
tcattagaaaaaagagatgataatg

SEQ ID NO: 5982019 - DNA, 25 bp, Homo sapien
taattagtggtatatgggtagaagt

SEQ ID NO: 5982020 - DNA, 25 bp, Homo sapien
ttttcttggaatattttgatatctt

SEQ ID NO: 5982021 - DNA, 25 bp, Homo sapien
atctttttgtgcatttgtattagtt

SEQ ID NO: 5982022 - DNA, 25 bp, Homo sapien
catatacattatcggaggcgttgtt

SEQ ID NO: 5982023 - DNA, 25 bp, Homo sapien
ttattgctggtattattatagtaat

SEQ ID NO: 5982024 - DNA, 25 bp, Homo sapien
aagttttccatgcatatccgcttgc

SEQ ID NO: 5982025 - DNA, 25 bp, Homo sapien
gtttccttggaaataggctgagaat

SEQ ID NO: 5982026 - DNA, 25 bp, Homo sapien
caattagtgcttttatggttgctat

SEQ ID NO: 5982027 - DNA, 25 bp, Homo sapien
atgaattggttgtgtatgaaccaag

SEQ ID NO: 5982028 - DNA, 25 bp, Homo sapien
aataggtataattagtggtatatgg

SEQ ID NO: 5982029 - DNA, 25 bp, Homo sapien
tagatgcggattcatcattagaaaa

SEQ ID NO: 5982030 - DNA, 25 bp, Homo sapien
agtaggagggcacctgaggttcatc

SEQ ID NO: 5982031 - DNA, 25 bp, Homo sapien
gaggcaattttgtcagacttttcaa

SEQ ID NO: 5982032 - DNA, 25 bp, Homo sapien
tgcagctgagatgaggcaattttgt

SEQ ID NO: 5982033 - DNA, 25 bp, Homo sapien
gagtggaacgtagatgcggattcat

SEQ ID NO: 5982034 - DNA, 25 bp, Homo sapien
aacctgaccttgtcataataatctt

SEQ ID NO: 5982035 - DNA, 25 bp, Homo sapien
tgaatccgtgttttttgaatttatt

SEQ ID NO: 5982036 - DNA, 25 bp, Homo sapien
cctctttcaggaccagttgccattg

SEQ ID NO: 5982037 - DNA, 25 bp, Homo sapien
cttgtcataataatcttgatcatta

SEQ ID NO: 5982038 - DNA, 25 bp, Homo sapien
ggcaattttgtcagacttttcaaaa

SEQ ID NO: 5982039 - DNA, 25 bp, Homo sapien
gtgcagtccttcgtagttttcgttt

SEQ ID NO: 5982040 - DNA, 25 bp, Homo sapien
gaggcgttgttattattgctggtat

SEQ ID NO: 5982041 - DNA, 25 bp, Homo sapien
cattagaactgctgaaggagtaagc

SEQ ID NO: 5982042 - DNA, 25 bp, Homo sapien
ccaaattcagaaactcttcattgaa

SEQ ID NO: 5982043 - DNA, 25 bp, Homo sapien
cttgatattgggagtatgaatccgt

SEQ ID NO: 5982044 - DNA, 25 bp, Homo sapien
ctataaatggatctgcctcatatac

SEQ ID NO: 5982045 - DNA, 25 bp, Homo sapien
gtgcatttgtattagtttcatattt

SEQ ID NO: 5982046 - DNA, 25 bp, Homo sapien
tgaggattaattaaatgaattggtt

SEQ ID NO: 5982047 - DNA, 25 bp, Homo sapien
ttattgattcatgaatatttgtggg

SEQ ID NO: 5982048 - DNA, 25 bp, Homo sapien
cggtggttgtgtcataataaatgtt

SEQ ID NO: 5982049 - DNA, 25 bp, Homo sapien
ggtataattagtggtatatgggtag

SEQ ID NO: 5982050 - DNA, 25 bp, Homo sapien
ttttatggttgctatagtgacgatt

SEQ ID NO: 5982051 - DNA, 25 bp, Homo sapien
gaagtcttgtgtgtatgggaattca

SEQ ID NO: 5982052 - DNA, 25 bp, Homo sapien
tgttgctcttttgaaagttatcatg

SEQ ID NO: 5982053 - DNA, 25 bp, Homo sapien
attgaattcaaaattttcttggaat

SEQ ID NO: 5982054 - DNA, 25 bp, Homo sapien
cgttgttattattgctggtattatt

SEQ ID NO: 5982055 - DNA, 25 bp, Homo sapien
taggggaaattgtagatccaaaaga

SEQ ID NO: 5982056 - DNA, 25 bp, Homo sapien
ttgtgggttttgaataggtataatt

SEQ ID NO: 5982057 - DNA, 25 bp, Homo sapien
tctggtactttcagagctctttttt

SEQ ID NO: 5982058 - DNA, 25 bp, Homo sapien
ggaaactgatcttgatattgggagt

SEQ ID NO: 5982059 - DNA, 25 bp, Homo sapien
attgattcatgaatatttgtgggtt

SEQ ID NO: 5982060 - DNA, 25 bp, Homo sapien
gatctggtactttcagagctctttt

SEQ ID NO: 5982061 - DNA, 25 bp, Homo sapien
tattttccaaattcagaaactcttc

SEQ ID NO: 5982062 - DNA, 25 bp, Homo sapien
ggtgatttttcaacgtcgaaggcaa

SEQ ID NO: 5982063 - DNA, 25 bp, Homo sapien
tcactaatatcgatatcatctccat

SEQ ID NO: 5982064 - DNA, 25 bp, Homo sapien
tgaataggtataattagtggtatat

SEQ ID NO: 5982065 - DNA, 25 bp, Homo sapien
caaaaggaaagaggaagaaaccatc

SEQ ID NO: 5982066 - DNA, 25 bp, Homo sapien
attacaattagtgcttttatggttg

SEQ ID NO: 5982067 - DNA, 25 bp, Homo sapien
ttgaaagttatcatggttattgaat

SEQ ID NO: 5982068 - DNA, 25 bp, Homo sapien
aaaggaatgtatgttatcagtatgt

SEQ ID NO: 5982069 - DNA, 25 bp, Homo sapien
tgtggtggaaactgatcttgatatt

SEQ ID NO: 5982070 - DNA, 25 bp, Homo sapien
cgtgaagttttccatgcatatccgc

SEQ ID NO: 5982071 - DNA, 25 bp, Homo sapien
agagatgataatgaagaggatctgg

SEQ ID NO: 5982072 - DNA, 25 bp, Homo sapien
aagttatcatggttattgaatgatg

SEQ ID NO: 5982073 - DNA, 25 bp, Homo sapien
taaggcagcgtgaagttttccatgc

SEQ ID NO: 5982074 - DNA, 25 bp, Homo sapien
tcttgtgtgtatgggaattcattga

SEQ ID NO: 5982075 - DNA, 25 bp, Homo sapien
agggcacctgaggttcatctataaa

SEQ ID NO: 5982076 - DNA, 25 bp, Homo sapien
atatcatctccatttctgttgctct

SEQ ID NO: 5982077 - DNA, 25 bp, Homo sapien
aaatgaattggttgtgtatgaacca

SEQ ID NO: 5982078 - DNA, 25 bp, Homo sapien
tatgggtagaagtcttgtgtgtatg

SEQ ID NO: 5982079 - DNA, 25 bp, Homo sapien
aggttcatctataaatggatctgcc

SEQ ID NO: 5982080 - DNA, 25 bp, Homo sapien
gccattgtgcagtccttcgtagttt

SEQ ID NO: 5982081 - DNA, 25 bp, Homo sapien
gcagcgtgaagttttccatgcatat

SEQ ID NO: 5982082 - DNA, 25 bp, Homo sapien
gtgcttttatggttgctatagtgac

SEQ ID NO: 5982083 - DNA, 25 bp, Homo sapien
taggagggcacctgaggttcatcta

SEQ ID NO: 5982084 - DNA, 25 bp, Homo sapien
caatttctaatgggtaatagtagga

SEQ ID NO: 5982085 - DNA, 25 bp, Homo sapien
taataaatgttaggttgttgttgct

SEQ ID NO: 5982086 - DNA, 25 bp, Homo sapien
tgatattgggagtatgaatccgtgt

SEQ ID NO: 5982087 - DNA, 25 bp, Homo sapien
ggcaatttctaatgggtaatagtag

SEQ ID NO: 5982088 - DNA, 25 bp, Homo sapien
tacattatcggaggcgttgttatta

SEQ ID NO: 5982089 - DNA, 25 bp, Homo sapien
gaatgtatgttatcagtatgtggtg

SEQ ID NO: 5982090 - DNA, 25 bp, Homo sapien
aaagagatgataatgaagaggatct

SEQ ID NO: 5982091 - DNA, 25 bp, Homo sapien
agttgccattgtgcagtccttcgta

SEQ ID NO: 5982092 - DNA, 25 bp, Homo sapien
tgagaatcaatattttccaaattca

SEQ ID NO: 5982093 - DNA, 25 bp, Homo sapien
ggagtaagccgcagcatatcttgac

SEQ ID NO: 5982094 - DNA, 25 bp, Homo sapien
tatttgaggattaattaaatgaatt

SEQ ID NO: 5982095 - DNA, 25 bp, Homo sapien
attttgatatctttttgtgcatttg

SEQ ID NO: 5982096 - DNA, 25 bp, Homo sapien
tgaatttaatttttgtagtgatggc

SEQ ID NO: 5982097 - DNA, 25 bp, Homo sapien
atgggaattcattgaattcaaaatt

SEQ ID NO: 5982098 - DNA, 25 bp, Homo sapien
aatatttgaggattaattaaatgaa

SEQ ID NO: 5982099 - DNA, 25 bp, Homo sapien
gttctgcagctgagatgaggcaatt

SEQ ID NO: 5982100 - DNA, 25 bp, Homo sapien
gttttccatgcatatccgcttgcat

SEQ ID NO: 5982101 - DNA, 25 bp, Homo sapien
agcgtgaagttttccatgcatatcc

SEQ ID NO: 5982102 - DNA, 25 bp, Homo sapien
tgatcttgatattgggagtatgaat

SEQ ID NO: 5982103 - DNA, 25 bp, Homo sapien
tatacattatcggaggcgttgttat

SEQ ID NO: 5982104 - DNA, 25 bp, Homo sapien
gtttcatattttattgtgtcactaa

SEQ ID NO: 5982105 - DNA, 25 bp, Homo sapien
cataataaatgttaggttgttgttg

SEQ ID NO: 5982106 - DNA, 25 bp, Homo sapien
tacaattagtgcttttatggttgct

SEQ ID NO: 5982107 - DNA, 25 bp, Homo sapien
tgttgctgttcaaaaggaaagagga

SEQ ID NO: 5982108 - DNA, 25 bp, Homo sapien
tctaaggcagcgtgaagttttccat

SEQ ID NO: 5982109 - DNA, 25 bp, Homo sapien
atttttgtagtgatggcggtggtga

SEQ ID NO: 5982110 - DNA, 25 bp, Homo sapien
gacagtttggagttcaactttttta

SEQ ID NO: 5982111 - DNA, 25 bp, Homo sapien
gttattattgctggtattattatag

SEQ ID NO: 5982112 - DNA, 25 bp, Homo sapien
cggattcatcattagaaaaaagaga

SEQ ID NO: 5982113 - DNA, 25 bp, Homo sapien
gttatcagtatgtggtggaaactga

SEQ ID NO: 5982114 - DNA, 25 bp, Homo sapien
aatgatgagtggaacgtagatgcgg

SEQ ID NO: 5982115 - DNA, 25 bp, Homo sapien
aaacaaggacggtcttcttgatcgg

SEQ ID NO: 5982116 - DNA, 25 bp, Homo sapien
gtgggttttgaataggtataattag

SEQ ID NO: 5982117 - DNA, 25 bp, Homo sapien
agtatgaatccgtgttttttgaatt

SEQ ID NO: 5982118 - DNA, 25 bp, Homo sapien
gtgtcataataaatgttaggttgtt

SEQ ID NO: 5982119 - DNA, 25 bp, Homo sapien
ctaaacttgtaggatatttcttgaa

SEQ ID NO: 5982120 - DNA, 25 bp, Homo sapien
actgatcttgatattgggagtatga

SEQ ID NO: 5982121 - DNA, 25 bp, Homo sapien
aaggacggtcttcttgatcggtggt

SEQ ID NO: 5982122 - DNA, 25 bp, Homo sapien
atttctaatgggtaatagtaggagg

SEQ ID NO: 5982123 - DNA, 25 bp, Homo sapien
accttgtcataataatcttgatcat

SEQ ID NO: 5982124 - DNA, 25 bp, Homo sapien
ccgcagcatatcttgacagtttgga

SEQ ID NO: 5982125 - DNA, 25 bp, Homo sapien
tgtcactaatatcgatatcatctcc

SEQ ID NO: 5982126 - DNA, 25 bp, Homo sapien
taatcttgatcattagaactgctga

SEQ ID NO: 5982127 - DNA, 25 bp, Homo sapien
ttcaaaatgccaacttctaggggaa

SEQ ID NO: 5982128 - DNA, 25 bp, Homo sapien
ttaggaattctaactcttttgaatt

SEQ ID NO: 5982129 - DNA, 25 bp, Homo sapien
gggttttgaataggtataattagtg

SEQ ID NO: 5982130 - DNA, 25 bp, Homo sapien
tcttgacagtttggagttcaacttt

SEQ ID NO: 5982131 - DNA, 25 bp, Homo sapien
tgagatgaggcaattttgtcagact

SEQ ID NO: 5982132 - DNA, 25 bp, Homo sapien
ggaacgtagatgcggattcatcatt

SEQ ID NO: 5982133 - DNA, 25 bp, Homo sapien
agtcttgtgtgtatgggaattcatt

SEQ ID NO: 5982134 - DNA, 25 bp, Homo sapien
tttcaggaccagttgccattgtgca

SEQ ID NO: 5982135 - DNA, 25 bp, Homo sapien
ttaaaggaatgtatgttatcagtat

SEQ ID NO: 5982136 - DNA, 25 bp, Homo sapien
atcttgatcattagaactgctgaag

SEQ ID NO: 5982137 - DNA, 25 bp, Homo sapien
atcggtggttgtgtcataataaatg

SEQ ID NO: 5982138 - DNA, 25 bp, Homo sapien
ttccaaattcagaaactcttcattg

SEQ ID NO: 5982139 - DNA, 25 bp, Homo sapien
cagctgagatgaggcaattttgtca

SEQ ID NO: 5982140 - DNA, 25 bp, Homo sapien
ttgtgcatttgtattagtttcatat

SEQ ID NO: 5982141 - DNA, 25 bp, Homo sapien
ccaacttctaggggaaattgtagat

SEQ ID NO: 5982142 - DNA, 25 bp, Homo sapien
tgatcattagaactgctgaaggagt

SEQ ID NO: 5982143 - DNA, 25 bp, Homo sapien
ttggaaataggctgagaatcaatat

SEQ ID NO: 5982144 - DNA, 25 bp, Homo sapien
aaactcttcattgaacaatatttga

SEQ ID NO: 5982145 - DNA, 25 bp, Homo sapien
cattatcggaggcgttgttattatt

SEQ ID NO: 5982146 - DNA, 25 bp, Homo sapien
gcagcatatcttgacagtttggagt

SEQ ID NO: 5982147 - DNA, 25 bp, Homo sapien
tgatttttcaacgtcgaaggcaatt

SEQ ID NO: 5982148 - DNA, 25 bp, Homo sapien
ttcaacgtcgaaggcaatttctaat

SEQ ID NO: 5982149 - DNA, 25 bp, Homo sapien
ggtaatagtaggagggcacctgagg

SEQ ID NO: 5982150 - DNA, 25 bp, Homo sapien
aatattttccaaattcagaaactct

SEQ ID NO: 5982151 - DNA, 25 bp, Homo sapien
agaaactcttcattgaacaatattt

SEQ ID NO: 5982152 - DNA, 25 bp, Homo sapien
gtggaaactgatcttgatattggga

SEQ ID NO: 5982153 - DNA, 25 bp, Homo sapien
caaaatgccaacttctaggggaaat

SEQ ID NO: 5982154 - DNA, 25 bp, Homo sapien
ggtatatgggtagaagtcttgtgtg

SEQ ID NO: 5982155 - DNA, 25 bp, Homo sapien
gagctcttttttcctctttcaggac

SEQ ID NO: 5982156 - DNA, 25 bp, Homo sapien
tattatagtaattacaattagtgct

SEQ ID NO: 5982157 - DNA, 25 bp, Homo sapien
ttatggttgctatagtgacgattat

SEQ ID NO: 5982158 - DNA, 25 bp, Homo sapien
ttcatcattagaaaaaagagatgat

SEQ ID NO: 5982159 - DNA, 25 bp, Homo sapien
gctgagatgaggcaattttgtcaga

SEQ ID NO: 5982160 - DNA, 25 bp, Homo sapien
ataataatcttgatcattagaactg

SEQ ID NO: 5982161 - DNA, 25 bp, Homo sapien
cttctaggggaaattgtagatccaa

SEQ ID NO: 5982162 - DNA, 25 bp, Homo sapien
ttgtgtgtatgggaattcattgaat

SEQ ID NO: 5982163 - DNA, 25 bp, Homo sapien
acttgtaggatatttcttgaaacct

SEQ ID NO: 5982164 - DNA, 25 bp, Homo sapien
tgtatgaaccaagttctgcagctga

SEQ ID NO: 5982165 - DNA, 25 bp, Homo sapien
gaattggttgtgtatgaaccaagtt

SEQ ID NO: 5982166 - DNA, 25 bp, Homo sapien
ttcaaaaggaaagaggaagaaacca

SEQ ID NO: 5982167 - DNA, 25 bp, Homo sapien
aataatcttgatcattagaactgct

SEQ ID NO: 5982168 - DNA, 25 bp, Homo sapien
atatttgtgggttttgaataggtat

SEQ ID NO: 5982169 - DNA, 25 bp, Homo sapien
agatgataatgaagaggatctggta

SEQ ID NO: 5982170 - DNA, 25 bp, Homo sapien
gcctcatatacattatcggaggcgt

SEQ ID NO: 5982171 - DNA, 25 bp, Homo sapien
tttgtcagacttttcaaaatgccaa

SEQ ID NO: 5982172 - DNA, 25 bp, Homo sapien
tagaagtcttgtgtgtatgggaatt

SEQ ID NO: 5982173 - DNA, 25 bp, Homo sapien
gaaagaggaagaaaccatcttctaa

SEQ ID NO: 5982174 - DNA, 25 bp, Homo sapien
aggaccagttgccattgtgcagtcc

SEQ ID NO: 5982175 - DNA, 25 bp, Homo sapien
aggaatgtatgttatcagtatgtgg

SEQ ID NO: 5982176 - DNA, 25 bp, Homo sapien
tgggtaatagtaggagggcacctga

SEQ ID NO: 5982177 - DNA, 25 bp, Homo sapien
cacctgaggttcatctataaatgga

SEQ ID NO: 5982178 - DNA, 25 bp, Homo sapien
ctttttgtgcatttgtattagtttc

SEQ ID NO: 5982179 - DNA, 25 bp, Homo sapien
caacgtcgaaggcaatttctaatgg

SEQ ID NO: 5982180 - DNA, 25 bp, Homo sapien
atcgatatcatctccatttctgttg

SEQ ID NO: 5982181 - DNA, 25 bp, Homo sapien
ttaattaaatgaattggttgtgtat

SEQ ID NO: 5982182 - DNA, 25 bp, Homo sapien
tccgtgttttttgaatttattgatt

SEQ ID NO: 5982183 - DNA, 25 bp, Homo sapien
aactgctgaaggagtaagccgcagc

SEQ ID NO: 5982184 - DNA, 25 bp, Homo sapien
tggagttcaacttttttaggaattc

SEQ ID NO: 5982185 - DNA, 25 bp, Homo sapien
aggatatttcttgaaacctgacctt

SEQ ID NO: 5982186 - DNA, 25 bp, Homo sapien
atatcgatatcatctccatttctgt

SEQ ID NO: 5982187 - DNA, 25 bp, Homo sapien
tgtgtcactaatatcgatatcatct

SEQ ID NO: 5982188 - DNA, 25 bp, Homo sapien
tcagaaactcttcattgaacaatat

SEQ ID NO: 5982189 - DNA, 25 bp, Homo sapien
attgtagatccaaaagaaaaacaag

SEQ ID NO: 5982190 - DNA, 25 bp, Homo sapien
gtcataataaatgttaggttgttgt

SEQ ID NO: 5982191 - DNA, 25 bp, Homo sapien
gattcatcattagaaaaaagagatg

SEQ ID NO: 5982192 - DNA, 25 bp, Homo sapien
catctccatttctgttgctcttttg

SEQ ID NO: 5982193 - DNA, 25 bp, Homo sapien
tcatctataaatggatctgcctcat

SEQ ID NO: 5982194 - DNA, 25 bp, Homo sapien
aaattgtagatccaaaagaaaaaca

SEQ ID NO: 5982195 - DNA, 25 bp, Homo sapien
aagaaaccatcttctaaggcagcgt

SEQ ID NO: 5982196 - DNA, 25 bp, Homo sapien
tctgcagctgagatgaggcaatttt

SEQ ID NO: 5982197 - DNA, 25 bp, Homo sapien
ttaaatgaattggttgtgtatgaac

SEQ ID NO: 5982198 - DNA, 25 bp, Homo sapien
acttttcaaaatgccaacttctagg

SEQ ID NO: 5982199 - DNA, 25 bp, Homo sapien
atcttgatattgggagtatgaatcc

SEQ ID NO: 5982200 - DNA, 25 bp, Homo sapien
agaaaaacaaggacggtcttcttga

SEQ ID NO: 5982201 - DNA, 25 bp, Homo sapien
catatcttgacagtttggagttcaa

SEQ ID NO: 5982202 - DNA, 25 bp, Homo sapien
tctccatttctgttgctcttttgaa

SEQ ID NO: 5982203 - DNA, 25 bp, Homo sapien
tttactaaacttgtaggatatttct

SEQ ID NO: 5982204 - DNA, 25 bp, Homo sapien
tttgatatctttttgtgcatttgta

SEQ ID NO: 5982205 - DNA, 25 bp, Homo sapien
gaaaccatcttctaaggcagcgtga

SEQ ID NO: 5982206 - DNA, 25 bp, Homo sapien
aaataggctgagaatcaatattttc

SEQ ID NO: 5982207 - DNA, 25 bp, Homo sapien
agtaattacaattagtgcttttatg

SEQ ID NO: 5982208 - DNA, 25 bp, Homo sapien
ctaatgggtaatagtaggagggcac

SEQ ID NO: 5982209 - DNA, 25 bp, Homo sapien
attagtgcttttatggttgctatag

SEQ ID NO: 5982210 - DNA, 25 bp, Homo sapien
tcgtttccttggaaataggctgaga

SEQ ID NO: 5982211 - DNA, 25 bp, Homo sapien
gctgaaggagtaagccgcagcatat

SEQ ID NO: 5982212 - DNA, 25 bp, Homo sapien
gaccagttgccattgtgcagtcctt

SEQ ID NO: 5982213 - DNA, 25 bp, Homo sapien
agaactgctgaaggagtaagccgca

SEQ ID NO: 5982214 - DNA, 25 bp, Homo sapien
ggaagaaaccatcttctaaggcagc

SEQ ID NO: 5982215 - DNA, 25 bp, Homo sapien
aatgggtaatagtaggagggcacct

SEQ ID NO: 5982216 - DNA, 25 bp, Homo sapien
gaacaatatttgaggattaattaaa

SEQ ID NO: 5982217 - DNA, 25 bp, Homo sapien
tgatggcggtggtgatttttcaacg

SEQ ID NO: 5982218 - DNA, 25 bp, Homo sapien
gtactttcagagctcttttttcctc

SEQ ID NO: 5982219 - DNA, 25 bp, Homo sapien
attgggagtatgaatccgtgttttt

SEQ ID NO: 5982220 - DNA, 25 bp, Homo sapien
agccgcagcatatcttgacagtttg

SEQ ID NO: 5982221 - DNA, 25 bp, Homo sapien
tcttttgaaagttatcatggttatt

SEQ ID NO: 5982222 - DNA, 25 bp, Homo sapien
catttctgttgctcttttgaaagtt

SEQ ID NO: 5982223 - DNA, 25 bp, Homo sapien
gaatatttgtgggttttgaataggt

SEQ ID NO: 5982224 - DNA, 25 bp, Homo sapien
atctataaatggatctgcctcatat

SEQ ID NO: 5982225 - DNA, 25 bp, Homo sapien
gaaagttatcatggttattgaatga

SEQ ID NO: 5982226 - DNA, 25 bp, Homo sapien
catcattagaaaaaagagatgataa

SEQ ID NO: 5982227 - DNA, 25 bp, Homo sapien
ggaaattgtagatccaaaagaaaaa

SEQ ID NO: 5982228 - DNA, 25 bp, Homo sapien
ttgtgtcataataaatgttaggttg

SEQ ID NO: 5982229 - DNA, 25 bp, Homo sapien
aaatgttaggttgttgttgctgttc

SEQ ID NO: 5982230 - DNA, 25 bp, Homo sapien
ataaatgttaggttgttgttgctgt

SEQ ID NO: 5982231 - DNA, 25 bp, Homo sapien
ttcttgatcggtggttgtgtcataa

SEQ ID NO: 5982232 - DNA, 25 bp, Homo sapien
attattaaaggaatgtatgttatca

SEQ ID NO: 5982233 - DNA, 25 bp, Homo sapien
aggctgagaatcaatattttccaaa

SEQ ID NO: 5982234 - DNA, 25 bp, Homo sapien
gattaattaaatgaattggttgtgt

SEQ ID NO: 5982235 - DNA, 25 bp, Homo sapien
atttttcaacgtcgaaggcaatttc

SEQ ID NO: 5982236 - DNA, 25 bp, Homo sapien
gctgagaatcaatattttccaaatt

SEQ ID NO: 5982237 - DNA, 25 bp, Homo sapien
tttctgttgctcttttgaaagttat

SEQ ID NO: 5982238 - DNA, 25 bp, Homo sapien
ttttcaacgtcgaaggcaatttcta

SEQ ID NO: 5982239 - DNA, 25 bp, Homo sapien
acaaggacggtcttcttgatcggtg

SEQ ID NO: 5982240 - DNA, 25 bp, Homo sapien
ttgctatagtgacgattattaaagg

SEQ ID NO: 5982241 - DNA, 25 bp, Homo sapien
gtatgttatcagtatgtggtggaaa

SEQ ID NO: 5982242 - DNA, 25 bp, Homo sapien
aggattaattaaatgaattggttgt

SEQ ID NO: 5982243 - DNA, 25 bp, Homo sapien
tgatgagtggaacgtagatgcggat

SEQ ID NO: 5982244 - DNA, 25 bp, Homo sapien
ggatctgcctcatatacattatcgg

SEQ ID NO: 5982245 - DNA, 25 bp, Homo sapien
aaccaagttctgcagctgagatgag

SEQ ID NO: 5982246 - DNA, 25 bp, Homo sapien
ttagtttcatattttattgtgtcac

SEQ ID NO: 5982247 - DNA, 25 bp, Homo sapien
atattgggagtatgaatccgtgttt

SEQ ID NO: 5982248 - DNA, 25 bp, Homo sapien
attcagaaactcttcattgaacaat

SEQ ID NO: 5982249 - DNA, 25 bp, Homo sapien
taatttttgtagtgatggcggtggt

SEQ ID NO: 5982250 - DNA, 25 bp, Homo sapien
atgataatgaagaggatctggtact

SEQ ID NO: 5982251 - DNA, 25 bp, Homo sapien
actttcagagctcttttttcctctt

SEQ ID NO: 5982252 - DNA, 25 bp, Homo sapien
gctatagtgacgattattaaaggaa

SEQ ID NO: 5982253 - DNA, 25 bp, Homo sapien
tgtgtatgaaccaagttctgcagct

SEQ ID NO: 5982254 - DNA, 25 bp, Homo sapien
tgaaggagtaagccgcagcatatct

SEQ ID NO: 5982255 - DNA, 25 bp, Homo sapien
atggatctgcctcatatacattatc

SEQ ID NO: 5982256 - DNA, 25 bp, Homo sapien
gttaggttgttgttgctgttcaaaa

SEQ ID NO: 5982257 - DNA, 25 bp, Homo sapien
ataaatggatctgcctcatatacat

SEQ ID NO: 5982258 - DNA, 25 bp, Homo sapien
tgggtagaagtcttgtgtgtatggg

SEQ ID NO: 5982259 - DNA, 25 bp, Homo sapien
aggcagcgtgaagttttccatgcat

SEQ ID NO: 5982260 - DNA, 25 bp, Homo sapien
gtgtatgggaattcattgaattcaa

SEQ ID NO: 5982261 - DNA, 25 bp, Homo sapien
tcattgaattcaaaattttcttgga

SEQ ID NO: 5982262 - DNA, 25 bp, Homo sapien
aacgtagatgcggattcatcattag

SEQ ID NO: 5982263 - DNA, 25 bp, Homo sapien
gtagtgatggcggtggtgatttttc

SEQ ID NO: 5982264 - DNA, 25 bp, Homo sapien
tatatgggtagaagtcttgtgtgta

SEQ ID NO: 5982265 - DNA, 25 bp, Homo sapien
cggtggtgatttttcaacgtcgaag

SEQ ID NO: 5982266 - DNA, 25 bp, Homo sapien
ttagaactgctgaaggagtaagccg

SEQ ID NO: 5982267 - DNA, 25 bp, Homo sapien
taatgaagaggatctggtactttca

SEQ ID NO: 5982268 - DNA, 25 bp, Homo sapien
gaaaaaagagatgataatgaagagg

SEQ ID NO: 5982269 - DNA, 25 bp, Homo sapien
aattaaatgaattggttgtgtatga

SEQ ID NO: 5982270 - DNA, 25 bp, Homo sapien
tctaggggaaattgtagatccaaaa

SEQ ID NO: 5982271 - DNA, 25 bp, Homo sapien
ccagttgccattgtgcagtccttcg

SEQ ID NO: 5982272 - DNA, 25 bp, Homo sapien
taatatcgatatcatctccatttct

SEQ ID NO: 5982273 - DNA, 25 bp, Homo sapien
tgaccttgtcataataatcttgatc

SEQ ID NO: 5982274 - DNA, 25 bp, Homo sapien
ttgttgttgctgttcaaaaggaaag

SEQ ID NO: 5982275 - DNA, 25 bp, Homo sapien
agatgaggcaattttgtcagacttt

SEQ ID NO: 5982276 - DNA, 25 bp, Homo sapien
tcagacttttcaaaatgccaacttc

SEQ ID NO: 5982277 - DNA, 25 bp, Homo sapien
agaggatctggtactttcagagctc

SEQ ID NO: 5982278 - DNA, 25 bp, Homo sapien
tctttcaggaccagttgccattgtg

SEQ ID NO: 5982279 - DNA, 25 bp, Homo sapien
ttttattgtgtcactaatatcgata

SEQ ID NO: 5982280 - DNA, 25 bp, Homo sapien
atgaagaggatctggtactttcaga

SEQ ID NO: 5982281 - DNA, 25 bp, Homo sapien
tattattgctggtattattatagta

SEQ ID NO: 5982282 - DNA, 25 bp, Homo sapien
aatttaatttttgtagtgatggcgg

SEQ ID NO: 5982283 - DNA, 25 bp, Homo sapien
tcttttttcctctttcaggaccagt

SEQ ID NO: 5982284 - DNA, 25 bp, Homo sapien
gttatcatggttattgaatgatgag

SEQ ID NO: 5982285 - DNA, 25 bp, Homo sapien
atcggaggcgttgttattattgctg

SEQ ID NO: 5982286 - DNA, 25 bp, Homo sapien
tagtggtatatgggtagaagtcttg

SEQ ID NO: 5982287 - DNA, 25 bp, Homo sapien
ttgttattattgctggtattattat

SEQ ID NO: 5982288 - DNA, 25 bp, Homo sapien
gtaggatatttcttgaaacctgacc

SEQ ID NO: 5982289 - DNA, 25 bp, Homo sapien
ttgtaggatatttcttgaaacctga

SEQ ID NO: 5982290 - DNA, 25 bp, Homo sapien
ccaagttctgcagctgagatgaggc

SEQ ID NO: 5982291 - DNA, 25 bp, Homo sapien
tcttgaaacctgaccttgtcataat

SEQ ID NO: 5982292 - DNA, 25 bp, Homo sapien
ttttccaaattcagaaactcttcat

SEQ ID NO: 5982293 - DNA, 25 bp, Homo sapien
ggaaataggctgagaatcaatattt

SEQ ID NO: 5982294 - DNA, 25 bp, Homo sapien
acaatatttgaggattaattaaatg

SEQ ID NO: 5982295 - DNA, 25 bp, Homo sapien
aggaaagaggaagaaaccatcttct

SEQ ID NO: 5982296 - DNA, 25 bp, Homo sapien
agtatgtggtggaaactgatcttga

SEQ ID NO: 5982297 - DNA, 25 bp, Homo sapien
ttttcctctttcaggaccagttgcc

SEQ ID NO: 5982298 - DNA, 25 bp, Homo sapien
taggttgttgttgctgttcaaaagg

SEQ ID NO: 5982299 - DNA, 25 bp, Homo sapien
ggtcttcttgatcggtggttgtgtc

SEQ ID NO: 5982300 - DNA, 25 bp, Homo sapien
ggcacctgaggttcatctataaatg

SEQ ID NO: 5982301 - DNA, 25 bp, Homo sapien
tgaatgatgagtggaacgtagatgc

SEQ ID NO: 5982302 - DNA, 25 bp, Homo sapien
tttcttgaaacctgaccttgtcata

SEQ ID NO: 5982303 - DNA, 25 bp, Homo sapien
ccttggaaataggctgagaatcaat

SEQ ID NO: 5982304 - DNA, 25 bp, Homo sapien
ccatcttctaaggcagcgtgaagtt

SEQ ID NO: 5982305 - DNA, 25 bp, Homo sapien
atagtaggagggcacctgaggttca

SEQ ID NO: 5982306 - DNA, 25 bp, Homo sapien
atcttctaaggcagcgtgaagtttt

SEQ ID NO: 5982307 - DNA, 25 bp, Homo sapien
cattgaacaatatttgaggattaat

SEQ ID NO: 5982308 - DNA, 25 bp, Homo sapien
atcattagaactgctgaaggagtaa

SEQ ID NO: 5982309 - DNA, 25 bp, Homo sapien
ttgtagtgatggcggtggtgatttt

SEQ ID NO: 5982310 - DNA, 25 bp, Homo sapien
ttattgtgtcactaatatcgatatc

SEQ ID NO: 5982311 - DNA, 25 bp, Homo sapien
ttgtgcagtccttcgtagttttcgt

SEQ ID NO: 5982312 - DNA, 25 bp, Homo sapien
cttgatcggtggttgtgtcataata

SEQ ID NO: 5982313 - DNA, 25 bp, Homo sapien
tagtgcttttatggttgctatagtg

SEQ ID NO: 5982314 - DNA, 25 bp, Homo sapien
tcaatattttccaaattcagaaact

SEQ ID NO: 5982315 - DNA, 25 bp, Homo sapien
ggttgctatagtgacgattattaaa

SEQ ID NO: 5982316 - DNA, 25 bp, Homo sapien
cgtagatgcggattcatcattagaa

SEQ ID NO: 5982317 - DNA, 25 bp, Homo sapien
gttgtgtatgaaccaagttctgcag

SEQ ID NO: 5982318 - DNA, 25 bp, Homo sapien
ctggtattattatagtaattacaat

SEQ ID NO: 5982319 - DNA, 25 bp, Homo sapien
aatccgtgttttttgaatttattga

SEQ ID NO: 5982320 - DNA, 25 bp, Homo sapien
tatcatggttattgaatgatgagtg

SEQ ID NO: 5982321 - DNA, 25 bp, Homo sapien
ttttttcctctttcaggaccagttg

SEQ ID NO: 5982322 - DNA, 25 bp, Homo sapien
taattacaattagtgcttttatggt

SEQ ID NO: 5982323 - DNA, 25 bp, Homo sapien
acggtcttcttgatcggtggttgtg

SEQ ID NO: 5982324 - DNA, 25 bp, Homo sapien
taatagtaggagggcacctgaggtt

SEQ ID NO: 5982325 - DNA, 25 bp, Homo sapien
taagccgcagcatatcttgacagtt

SEQ ID NO: 5982326 - DNA, 25 bp, Homo sapien
gtggtgatttttcaacgtcgaaggc

SEQ ID NO: 5982327 - DNA, 25 bp, Homo sapien
cttctaaggcagcgtgaagttttcc

SEQ ID NO: 5982328 - DNA, 25 bp, Homo sapien
ttttgtagtgatggcggtggtgatt

SEQ ID NO: 5982329 - DNA, 25 bp, Homo sapien
cgaaggcaatttctaatgggtaata

SEQ ID NO: 5982330 - DNA, 25 bp, Homo sapien
atatctttttgtgcatttgtattag

SEQ ID NO: 5982331 - DNA, 25 bp, Homo sapien
tggttgtgtatgaaccaagttctgc

SEQ ID NO: 5982332 - DNA, 25 bp, Homo sapien
tatgtggtggaaactgatcttgata

SEQ ID NO: 5982333 - DNA, 25 bp, Homo sapien
aaaaagagatgataatgaagaggat

SEQ ID NO: 5982334 - DNA, 25 bp, Homo sapien
ggcggtggtgatttttcaacgtcga

SEQ ID NO: 5982335 - DNA, 25 bp, Homo sapien
gataatgaagaggatctggtacttt

SEQ ID NO: 5982336 - DNA, 25 bp, Homo sapien
tactaaacttgtaggatatttcttg

SEQ ID NO: 5982337 - DNA, 25 bp, Homo sapien
ggttgtgtcataataaatgttaggt

SEQ ID NO: 5982338 - DNA, 25 bp, Homo sapien
attcatgaatatttgtgggttttga

SEQ ID NO: 5982339 - DNA, 25 bp, Homo sapien
tcaggaccagttgccattgtgcagt

SEQ ID NO: 5982340 - DNA, 25 bp, Homo sapien
agacttttcaaaatgccaacttcta

SEQ ID NO: 5982341 - DNA, 25 bp, Homo sapien
tggtactttcagagctcttttttcc

SEQ ID NO: 5982342 - DNA, 25 bp, Homo sapien
tatttcttgaaacctgaccttgtca

SEQ ID NO: 5982343 - DNA, 25 bp, Homo sapien
tgttcaaaaggaaagaggaagaaac

SEQ ID NO: 5982344 - DNA, 25 bp, Homo sapien
tcataataatcttgatcattagaac

SEQ ID NO: 5982345 - DNA, 25 bp, Homo sapien
tgatcggtggttgtgtcataataaa

SEQ ID NO: 5982346 - DNA, 25 bp, Homo sapien
tttcgtttccttggaaataggctga

SEQ ID NO: 5982347 - DNA, 25 bp, Homo sapien
tttgaggattaattaaatgaattgg

SEQ ID NO: 5982348 - DNA, 25 bp, Homo sapien
gtgacgattattaaaggaatgtatg

SEQ ID NO: 5982349 - DNA, 25 bp, Homo sapien
ttcttggaatattttgatatctttt

SEQ ID NO: 5982350 - DNA, 25 bp, Homo sapien
aacttctaggggaaattgtagatcc

SEQ ID NO: 5982351 - DNA, 25 bp, Homo sapien
cttgatcattagaactgctgaagga

SEQ ID NO: 5982352 - DNA, 25 bp, Homo sapien
ttttaggaattctaactcttttgaa

SEQ ID NO: 5982353 - DNA, 25 bp, Homo sapien
ttcctctttcaggaccagttgccat

SEQ ID NO: 5982354 - DNA, 25 bp, Homo sapien
ataggctgagaatcaatattttcca

SEQ ID NO: 5982355 - DNA, 25 bp, Homo sapien
ttgccattgtgcagtccttcgtagt

SEQ ID NO: 5982356 - DNA, 25 bp, Homo sapien
gaagaggatctggtactttcagagc

SEQ ID NO: 5982357 - DNA, 25 bp, Homo sapien
gtggaacgtagatgcggattcatca

SEQ ID NO: 5982358 - DNA, 25 bp, Homo sapien
atagtaattacaattagtgctttta

SEQ ID NO: 5982359 - DNA, 25 bp, Homo sapien
cctgaggttcatctataaatggatc

SEQ ID NO: 5982360 - DNA, 25 bp, Homo sapien
tgatatctttttgtgcatttgtatt

SEQ ID NO: 5982361 - DNA, 25 bp, Homo sapien
tatagtgacgattattaaaggaatg

SEQ ID NO: 5982362 - DNA, 25 bp, Homo sapien
ggacggtcttcttgatcggtggttg

SEQ ID NO: 5982363 - DNA, 25 bp, Homo sapien
taggttttactaaacttgtaggata

SEQ ID NO: 5982364 - DNA, 25 bp, Homo sapien
aatgccaacttctaggggaaattgt

SEQ ID NO: 5982365 - DNA, 25 bp, Homo sapien
tagtgacgattattaaaggaatgta

SEQ ID NO: 5982366 - DNA, 25 bp, Homo sapien
tatgaatccgtgttttttgaattta

SEQ ID NO: 5982367 - DNA, 25 bp, Homo sapien
atttgtgggttttgaataggtataa

SEQ ID NO: 5982368 - DNA, 25 bp, Homo sapien
ggttattgaatgatgagtggaacgt

SEQ ID NO: 5982369 - DNA, 25 bp, Homo sapien
tgattcatgaatatttgtgggtttt

SEQ ID NO: 5982370 - DNA, 25 bp, Homo sapien
aaaaacaaggacggtcttcttgatc

SEQ ID NO: 5982371 - DNA, 25 bp, Homo sapien
attagtggtatatgggtagaagtct

SEQ ID NO: 5982372 - DNA, 25 bp, Homo sapien
aattttcttggaatattttgatatc

SEQ ID NO: 5982373 - DNA, 25 bp, Homo sapien
ttgaacaatatttgaggattaatta

SEQ ID NO: 5982374 - DNA, 25 bp, Homo sapien
tcaacttttttaggaattctaactc

SEQ ID NO: 5982375 - DNA, 25 bp, Homo sapien
tagatccaaaagaaaaacaaggacg

SEQ ID NO: 5982376 - DNA, 25 bp, Homo sapien
tatcagtatgtggtggaaactgatc

SEQ ID NO: 5982377 - DNA, 25 bp, Homo sapien
tttaatttttgtagtgatggcggtg

SEQ ID NO: 5982378 - DNA, 25 bp, Homo sapien
ttgctgttcaaaaggaaagaggaag

SEQ ID NO: 5982379 - DNA, 25 bp, Homo sapien
ggagtatgaatccgtgttttttgaa

SEQ ID NO: 5982380 - DNA, 25 bp, Homo sapien
tgaaccaagttctgcagctgagatg

SEQ ID NO: 5982381 - DNA, 25 bp, Homo sapien
atgaatatttgtgggttttgaatag

SEQ ID NO: 5982382 - DNA, 25 bp, Homo sapien
aagaggaagaaaccatcttctaagg

SEQ ID NO: 5982383 - DNA, 25 bp, Homo sapien
tatgaaccaagttctgcagctgaga

SEQ ID NO: 5982384 - DNA, 25 bp, Homo sapien
gaggaagaaaccatcttctaaggca

SEQ ID NO: 5982385 - DNA, 25 bp, Homo sapien
ggcgttgttattattgctggtatta

SEQ ID NO: 5982386 - DNA, 25 bp, Homo sapien
atgtatgttatcagtatgtggtgga

SEQ ID NO: 5982387 - DNA, 25 bp, Homo sapien
ttttgtgcatttgtattagtttcat

SEQ ID NO: 5982388 - DNA, 25 bp, Homo sapien
tccaacaaaattacctccctggaaa

SEQ ID NO: 5982389 - DNA, 25 bp, Homo sapien
aattccataccaagacttattaact

SEQ ID NO: 5982390 - DNA, 25 bp, Homo sapien
aaatttgactgatctggagaattta

SEQ ID NO: 5982391 - DNA, 25 bp, Homo sapien
gactatgaacttacctccatcccta

SEQ ID NO: 5982392 - DNA, 25 bp, Homo sapien
atggataagaattcagttaacaaag

SEQ ID NO: 5982393 - DNA, 25 bp, Homo sapien
cgcttggagaccatttatctggagg

SEQ ID NO: 5982394 - DNA, 25 bp, Homo sapien
gatacaaatcctgacttcatcactg

SEQ ID NO: 5982395 - DNA, 25 bp, Homo sapien
tctcagacagaacctgatcgaaagc

SEQ ID NO: 5982396 - DNA, 25 bp, Homo sapien
tttggacgtgacctccaacaaaatt

SEQ ID NO: 5982397 - DNA, 25 bp, Homo sapien
tggagaatttatacttcgtgcagaa

SEQ ID NO: 5982398 - DNA, 25 bp, Homo sapien
cgccctatcacgcttggagaccatt

SEQ ID NO: 5982399 - DNA, 25 bp, Homo sapien
agatttgaacctttataggttcaag

SEQ ID NO: 5982400 - DNA, 25 bp, Homo sapien
aatcactgaaaaacttagaattagg

SEQ ID NO: 5982401 - DNA, 25 bp, Homo sapien
tctaatgttaataagctcaccaaat

SEQ ID NO: 5982402 - DNA, 25 bp, Homo sapien
aaaatctagaagagttgaccaatct

SEQ ID NO: 5982403 - DNA, 25 bp, Homo sapien
aatctagaaaatttgactgatctgg

SEQ ID NO: 5982404 - DNA, 25 bp, Homo sapien
ataagaattcagttaacaaagatag

SEQ ID NO: 5982405 - DNA, 25 bp, Homo sapien
agaagattgatgcgacatatataag

SEQ ID NO: 5982406 - DNA, 25 bp, Homo sapien
tatgtctcagacagaacctgatcga

SEQ ID NO: 5982407 - DNA, 25 bp, Homo sapien
ctctatctgtcacataatttcatca

SEQ ID NO: 5982408 - DNA, 25 bp, Homo sapien
gaaggtctgtcaaacttggaagaaa

SEQ ID NO: 5982409 - DNA, 25 bp, Homo sapien
aacgtctctagacctgtcgtttaac

SEQ ID NO: 5982410 - DNA, 25 bp, Homo sapien
gtttaacaagatcaagcacatcaaa

SEQ ID NO: 5982411 - DNA, 25 bp, Homo sapien
aagaattcagttaacaaagatagtg

SEQ ID NO: 5982412 - DNA, 25 bp, Homo sapien
atattgtccatccaatctaataaat

SEQ ID NO: 5982413 - DNA, 25 bp, Homo sapien
caagattgttgaccttgatttttac

SEQ ID NO: 5982414 - DNA, 25 bp, Homo sapien
aactggaaaataagacttcgtatag

SEQ ID NO: 5982415 - DNA, 25 bp, Homo sapien
gacacaagatctgcctgatgatgta

SEQ ID NO: 5982416 - DNA, 25 bp, Homo sapien
ttgaccttgatttttacgataacaa

SEQ ID NO: 5982417 - DNA, 25 bp, Homo sapien
gaagaaaactgactatgaacttacc

SEQ ID NO: 5982418 - DNA, 25 bp, Homo sapien
cttggagaccatttatctggaggga

SEQ ID NO: 5982419 - DNA, 25 bp, Homo sapien
agattgaaggtctagagaaaaacct

SEQ ID NO: 5982420 - DNA, 25 bp, Homo sapien
ctgacatatgggcctcctttaacaa

SEQ ID NO: 5982421 - DNA, 25 bp, Homo sapien
aagttttaccccatgacaagattgt

SEQ ID NO: 5982422 - DNA, 25 bp, Homo sapien
atttgaagatattgtccatccaatc

SEQ ID NO: 5982423 - DNA, 25 bp, Homo sapien
tctagacctgtcgtttaacaagatc

SEQ ID NO: 5982424 - DNA, 25 bp, Homo sapien
caagatcaagcacatcaaaaatcta

SEQ ID NO: 5982425 - DNA, 25 bp, Homo sapien
aagtggaagttttaccccatgacaa

SEQ ID NO: 5982426 - DNA, 25 bp, Homo sapien
agatattgtccatccaatctaataa

SEQ ID NO: 5982427 - DNA, 25 bp, Homo sapien
ggtaataaggttcattctattgaac

SEQ ID NO: 5982428 - DNA, 25 bp, Homo sapien
cataatttcatcaccaagattgaag

SEQ ID NO: 5982429 - DNA, 25 bp, Homo sapien
gataacaaaattaaacatatctcct

SEQ ID NO: 5982430 - DNA, 25 bp, Homo sapien
taagacttcgtatagaagaaaactg

SEQ ID NO: 5982431 - DNA, 25 bp, Homo sapien
aacctgtccgccctatcacgcttgg

SEQ ID NO: 5982432 - DNA, 25 bp, Homo sapien
aaggttcattctattgaacccgatt

SEQ ID NO: 5982433 - DNA, 25 bp, Homo sapien
tcggaactgacacaagatctgcctg

SEQ ID NO: 5982434 - DNA, 25 bp, Homo sapien
ctgatgatgtagaggttattgactt

SEQ ID NO: 5982435 - DNA, 25 bp, Homo sapien
attgaaaatctagaagagttgacca

SEQ ID NO: 5982436 - DNA, 25 bp, Homo sapien
attgtccatccaatctaataaatta

SEQ ID NO: 5982437 - DNA, 25 bp, Homo sapien
caaattaacgtctctagacctgtcg

SEQ ID NO: 5982438 - DNA, 25 bp, Homo sapien
ctgactatgaacttacctccatccc

SEQ ID NO: 5982439 - DNA, 25 bp, Homo sapien
tcactgaaaaacttagaattaggtg

SEQ ID NO: 5982440 - DNA, 25 bp, Homo sapien
tggagaccatttatctggagggaaa

SEQ ID NO: 5982441 - DNA, 25 bp, Homo sapien
caaaattgaaaatctgtccactttg

SEQ ID NO: 5982442 - DNA, 25 bp, Homo sapien
ctattgaacccgattccttcgaagg

SEQ ID NO: 5982443 - DNA, 25 bp, Homo sapien
gagaccatttatctggagggaaacc

SEQ ID NO: 5982444 - DNA, 25 bp, Homo sapien
agatctgcctgatgatgtagaggtt

SEQ ID NO: 5982445 - DNA, 25 bp, Homo sapien
aacaagatagatcaatcctttgaga

SEQ ID NO: 5982446 - DNA, 25 bp, Homo sapien
tgaaggtctagagaaaaacctaaaa

SEQ ID NO: 5982447 - DNA, 25 bp, Homo sapien
atacttcgtgcagaacagcatttcc

SEQ ID NO: 5982448 - DNA, 25 bp, Homo sapien
tgaaaatctgtccactttgaaatca

SEQ ID NO: 5982449 - DNA, 25 bp, Homo sapien
ccatgacaagattgttgaccttgat

SEQ ID NO: 5982450 - DNA, 25 bp, Homo sapien
ccctattcaactggaaaataagact

SEQ ID NO: 5982451 - DNA, 25 bp, Homo sapien
cttgggtgaaaacctgtccgcccta

SEQ ID NO: 5982452 - DNA, 25 bp, Homo sapien
gtcaaacttggaagaaatttggttg

SEQ ID NO: 5982453 - DNA, 25 bp, Homo sapien
cgaaagacacaagattgaggttgta

SEQ ID NO: 5982454 - DNA, 25 bp, Homo sapien
ttaacaagatagatcaatcctttga

SEQ ID NO: 5982455 - DNA, 25 bp, Homo sapien
gtccatctaaaaatcaaatcgttag

SEQ ID NO: 5982456 - DNA, 25 bp, Homo sapien
acagaagattgatgcgacatatata

SEQ ID NO: 5982457 - DNA, 25 bp, Homo sapien
atgacaagattgttgaccttgattt

SEQ ID NO: 5982458 - DNA, 25 bp, Homo sapien
aacctttataggttcaagaatttga

SEQ ID NO: 5982459 - DNA, 25 bp, Homo sapien
ttaggtggtaataaggttcattcta

SEQ ID NO: 5982460 - DNA, 25 bp, Homo sapien
tcctttaacaagatagatcaatcct

SEQ ID NO: 5982461 - DNA, 25 bp, Homo sapien
ttgaagatattgtccatccaatcta

SEQ ID NO: 5982462 - DNA, 25 bp, Homo sapien
ttcatcaccaagattgaaggtctag

SEQ ID NO: 5982463 - DNA, 25 bp, Homo sapien
agacacaagattgaggttgtagacg

SEQ ID NO: 5982464 - DNA, 25 bp, Homo sapien
cttggtccatctaaaaatcaaatcg

SEQ ID NO: 5982465 - DNA, 25 bp, Homo sapien
ccatttatctggagggaaaccctat

SEQ ID NO: 5982466 - DNA, 25 bp, Homo sapien
acatatctcctctaatgttaataag

SEQ ID NO: 5982467 - DNA, 25 bp, Homo sapien
ggcctcctttaacaagatagatcaa

SEQ ID NO: 5982468 - DNA, 25 bp, Homo sapien
ctggagggaaaccctattcaactgg

SEQ ID NO: 5982469 - DNA, 25 bp, Homo sapien
ggaaaccctattcaactggaaaata

SEQ ID NO: 5982470 - DNA, 25 bp, Homo sapien
taatgttaataagctcaccaaatta

SEQ ID NO: 5982471 - DNA, 25 bp, Homo sapien
atctgcctgatgatgtagaggttat

SEQ ID NO: 5982472 - DNA, 25 bp, Homo sapien
accacctgtcaaatttaactgacat

SEQ ID NO: 5982473 - DNA, 25 bp, Homo sapien
ttccataccaagacttattaactta

SEQ ID NO: 5982474 - DNA, 25 bp, Homo sapien
tcgtttaacaagatcaagcacatca

SEQ ID NO: 5982475 - DNA, 25 bp, Homo sapien
tcaccaaattaacgtctctagacct

SEQ ID NO: 5982476 - DNA, 25 bp, Homo sapien
ctgcctgatgatgtagaggttattg

SEQ ID NO: 5982477 - DNA, 25 bp, Homo sapien
taataaggttcattctattgaaccc

SEQ ID NO: 5982478 - DNA, 25 bp, Homo sapien
aaaattaaacatatctcctctaatg

SEQ ID NO: 5982479 - DNA, 25 bp, Homo sapien
gaatttgaaacaattatgtctcaga

SEQ ID NO: 5982480 - DNA, 25 bp, Homo sapien
cttgatttttacgataacaaaatta

SEQ ID NO: 5982481 - DNA, 25 bp, Homo sapien
atcgaaagcataagcgaagtggaag

SEQ ID NO: 5982482 - DNA, 25 bp, Homo sapien
tcatcactgcagattcggaactgac

SEQ ID NO: 5982483 - DNA, 25 bp, Homo sapien
gtagaggttattgacttggtccatc

SEQ ID NO: 5982484 - DNA, 25 bp, Homo sapien
tgggtgaaaacctgtccgccctatc

SEQ ID NO: 5982485 - DNA, 25 bp, Homo sapien
ccctatcacgcttggagaccattta

SEQ ID NO: 5982486 - DNA, 25 bp, Homo sapien
tgtcaaatttaactgacatatgggc

SEQ ID NO: 5982487 - DNA, 25 bp, Homo sapien
aatctgtccactttgaaatcactga

SEQ ID NO: 5982488 - DNA, 25 bp, Homo sapien
ggttcaagaatttgaaacaattatg

SEQ ID NO: 5982489 - DNA, 25 bp, Homo sapien
cctttgagagcttgggtgaaaacct

SEQ ID NO: 5982490 - DNA, 25 bp, Homo sapien
caaaaatctagaaaatttgactgat

SEQ ID NO: 5982491 - DNA, 25 bp, Homo sapien
agacttcgtatagaagaaaactgac

SEQ ID NO: 5982492 - DNA, 25 bp, Homo sapien
tagaagagttgaccaatcttgaaga

SEQ ID NO: 5982493 - DNA, 25 bp, Homo sapien
catcaccaagattgaaggtctagag

SEQ ID NO: 5982494 - DNA, 25 bp, Homo sapien
atcaagcacatcaaaaatctagaaa

SEQ ID NO: 5982495 - DNA, 25 bp, Homo sapien
ggaagttttaccccatgacaagatt

SEQ ID NO: 5982496 - DNA, 25 bp, Homo sapien
ttgtagacgatacaaatcctgactt

SEQ ID NO: 5982497 - DNA, 25 bp, Homo sapien
cactttgaaatcactgaaaaactta

SEQ ID NO: 5982498 - DNA, 25 bp, Homo sapien
gaagagttgaccaatcttgaagagc

SEQ ID NO: 5982499 - DNA, 25 bp, Homo sapien
gaacagcatttccaaaattgaaaat

SEQ ID NO: 5982500 - DNA, 25 bp, Homo sapien
acacaagattgaggttgtagacgat

SEQ ID NO: 5982501 - DNA, 25 bp, Homo sapien
gttgggtaaaaattccataccaaga

SEQ ID NO: 5982502 - DNA, 25 bp, Homo sapien
gacttggtccatctaaaaatcaaat

SEQ ID NO: 5982503 - DNA, 25 bp, Homo sapien
cacaagatctgcctgatgatgtaga

SEQ ID NO: 5982504 - DNA, 25 bp, Homo sapien
tcaactggaaaataagacttcgtat

SEQ ID NO: 5982505 - DNA, 25 bp, Homo sapien
aaacttgaaccacctgtcaaattta

SEQ ID NO: 5982506 - DNA, 25 bp, Homo sapien
acttacatcctttaaagaatttgaa

SEQ ID NO: 5982507 - DNA, 25 bp, Homo sapien
gctcaccaaattaacgtctctagac

SEQ ID NO: 5982508 - DNA, 25 bp, Homo sapien
agaaaactgactatgaacttacctc

SEQ ID NO: 5982509 - DNA, 25 bp, Homo sapien
attccttcgaaggtctgtcaaactt

SEQ ID NO: 5982510 - DNA, 25 bp, Homo sapien
aactgacatatgggcctcctttaac

SEQ ID NO: 5982511 - DNA, 25 bp, Homo sapien
gaatttgaagatattgtccatccaa

SEQ ID NO: 5982512 - DNA, 25 bp, Homo sapien
tgggcctcctttaacaagatagatc

SEQ ID NO: 5982513 - DNA, 25 bp, Homo sapien
agagcttgggtgaaaacctgtccgc

SEQ ID NO: 5982514 - DNA, 25 bp, Homo sapien
accaaattaacgtctctagacctgt

SEQ ID NO: 5982515 - DNA, 25 bp, Homo sapien
tattgacttggtccatctaaaaatc

SEQ ID NO: 5982516 - DNA, 25 bp, Homo sapien
tgtcgtttaacaagatcaagcacat

SEQ ID NO: 5982517 - DNA, 25 bp, Homo sapien
gaagatttgaacctttataggttca

SEQ ID NO: 5982518 - DNA, 25 bp, Homo sapien
agagctctatctgtcacataatttc

SEQ ID NO: 5982519 - DNA, 25 bp, Homo sapien
cacgcttggagaccatttatctgga

SEQ ID NO: 5982520 - DNA, 25 bp, Homo sapien
cattctattgaacccgattccttcg

SEQ ID NO: 5982521 - DNA, 25 bp, Homo sapien
ataaggttcattctattgaacccga

SEQ ID NO: 5982522 - DNA, 25 bp, Homo sapien
ctggaaaataagacttcgtatagaa

SEQ ID NO: 5982523 - DNA, 25 bp, Homo sapien
atttatacttcgtgcagaacagcat

SEQ ID NO: 5982524 - DNA, 25 bp, Homo sapien
tctctagacctgtcgtttaacaaga

SEQ ID NO: 5982525 - DNA, 25 bp, Homo sapien
ctccctggaaaacttgaaccacctg

SEQ ID NO: 5982526 - DNA, 25 bp, Homo sapien
agcataagcgaagtggaagttttac

SEQ ID NO: 5982527 - DNA, 25 bp, Homo sapien
ccccatgacaagattgttgaccttg

SEQ ID NO: 5982528 - DNA, 25 bp, Homo sapien
acttacctccatccctacagaagat

SEQ ID NO: 5982529 - DNA, 25 bp, Homo sapien
ttgactgatctggagaatttatact

SEQ ID NO: 5982530 - DNA, 25 bp, Homo sapien
aatctagaagagttgaccaatcttg

SEQ ID NO: 5982531 - DNA, 25 bp, Homo sapien
cataagcgaagtggaagttttaccc

SEQ ID NO: 5982532 - DNA, 25 bp, Homo sapien
ttcgtgcagaacagcatttccaaaa

SEQ ID NO: 5982533 - DNA, 25 bp, Homo sapien
attcaactggaaaataagacttcgt

SEQ ID NO: 5982534 - DNA, 25 bp, Homo sapien
ctgacacaagatctgcctgatgatg

SEQ ID NO: 5982535 - DNA, 25 bp, Homo sapien
atagatcaatcctttgagagcttgg

SEQ ID NO: 5982536 - DNA, 25 bp, Homo sapien
catatgggcctcctttaacaagata

SEQ ID NO: 5982537 - DNA, 25 bp, Homo sapien
acttcgtgcagaacagcatttccaa

SEQ ID NO: 5982538 - DNA, 25 bp, Homo sapien
ttatacttcgtgcagaacagcattt

SEQ ID NO: 5982539 - DNA, 25 bp, Homo sapien
attgaaggtctagagaaaaacctaa

SEQ ID NO: 5982540 - DNA, 25 bp, Homo sapien
atctggagggaaaccctattcaact

SEQ ID NO: 5982541 - DNA, 25 bp, Homo sapien
ttaacgtctctagacctgtcgttta

SEQ ID NO: 5982542 - DNA, 25 bp, Homo sapien
acagcatttccaaaattgaaaatct

SEQ ID NO: 5982543 - DNA, 25 bp, Homo sapien
agcttgggtgaaaacctgtccgccc

SEQ ID NO: 5982544 - DNA, 25 bp, Homo sapien
caagatctgcctgatgatgtagagg

SEQ ID NO: 5982545 - DNA, 25 bp, Homo sapien
aacccgattccttcgaaggtctgtc

SEQ ID NO: 5982546 - DNA, 25 bp, Homo sapien
gatctggagaatttatacttcgtgc

SEQ ID NO: 5982547 - DNA, 25 bp, Homo sapien
atttaactgacatatgggcctcctt

SEQ ID NO: 5982548 - DNA, 25 bp, Homo sapien
gttaataagctcaccaaattaacgt

SEQ ID NO: 5982549 - DNA, 25 bp, Homo sapien
aactaactactttggacgtgacctc

SEQ ID NO: 5982550 - DNA, 25 bp, Homo sapien
tcaagaatttgaaacaattatgtct

SEQ ID NO: 5982551 - DNA, 25 bp, Homo sapien
aacctgatcgaaagcataagcgaag

SEQ ID NO: 5982552 - DNA, 25 bp, Homo sapien
cacataatttcatcaccaagattga

SEQ ID NO: 5982553 - DNA, 25 bp, Homo sapien
cgtatagaagaaaactgactatgaa

SEQ ID NO: 5982554 - DNA, 25 bp, Homo sapien
tccactttgaaatcactgaaaaact

SEQ ID NO: 5982555 - DNA, 25 bp, Homo sapien
aggttattgacttggtccatctaaa

SEQ ID NO: 5982556 - DNA, 25 bp, Homo sapien
atctcctctaatgttaataagctca

SEQ ID NO: 5982557 - DNA, 25 bp, Homo sapien
gtagacgatacaaatcctgacttca

SEQ ID NO: 5982558 - DNA, 25 bp, Homo sapien
cgattccttcgaaggtctgtcaaac

SEQ ID NO: 5982559 - DNA, 25 bp, Homo sapien
cctgtcgtttaacaagatcaagcac

SEQ ID NO: 5982560 - DNA, 25 bp, Homo sapien
ccctacagaagattgatgcgacata

SEQ ID NO: 5982561 - DNA, 25 bp, Homo sapien
tgcagaacagcatttccaaaattga

SEQ ID NO: 5982562 - DNA, 25 bp, Homo sapien
tctagaagagttgaccaatcttgaa

SEQ ID NO: 5982563 - DNA, 25 bp, Homo sapien
gacgtgacctccaacaaaattacct

SEQ ID NO: 5982564 - DNA, 25 bp, Homo sapien
tataggttcaagaatttgaaacaat

SEQ ID NO: 5982565 - DNA, 25 bp, Homo sapien
aagacgaaagacacaagattgaggt

SEQ ID NO: 5982566 - DNA, 25 bp, Homo sapien
cctctaatgttaataagctcaccaa

SEQ ID NO: 5982567 - DNA, 25 bp, Homo sapien
ggttgtagacgatacaaatcctgac

SEQ ID NO: 5982568 - DNA, 25 bp, Homo sapien
tcttgaagagctctatctgtcacat

SEQ ID NO: 5982569 - DNA, 25 bp, Homo sapien
ctggaaaacttgaaccacctgtcaa

SEQ ID NO: 5982570 - DNA, 25 bp, Homo sapien
agattgttgaccttgatttttacga

SEQ ID NO: 5982571 - DNA, 25 bp, Homo sapien
taataagctcaccaaattaacgtct

SEQ ID NO: 5982572 - DNA, 25 bp, Homo sapien
tcaaatttaactgacatatgggcct

SEQ ID NO: 5982573 - DNA, 25 bp, Homo sapien
catttccaaaattgaaaatctgtcc

SEQ ID NO: 5982574 - DNA, 25 bp, Homo sapien
taaaaattccataccaagacttatt

SEQ ID NO: 5982575 - DNA, 25 bp, Homo sapien
gtggtaataaggttcattctattga

SEQ ID NO: 5982576 - DNA, 25 bp, Homo sapien
attgaaaatctgtccactttgaaat

SEQ ID NO: 5982577 - DNA, 25 bp, Homo sapien
ctaactactttggacgtgacctcca

SEQ ID NO: 5982578 - DNA, 25 bp, Homo sapien
tctagaaaatttgactgatctggag

SEQ ID NO: 5982579 - DNA, 25 bp, Homo sapien
gaaaatttgactgatctggagaatt

SEQ ID NO: 5982580 - DNA, 25 bp, Homo sapien
ccctggaaaacttgaaccacctgtc

SEQ ID NO: 5982581 - DNA, 25 bp, Homo sapien
ctacagaagattgatgcgacatata

SEQ ID NO: 5982582 - DNA, 25 bp, Homo sapien
aacaattatgtctcagacagaacct

SEQ ID NO: 5982583 - DNA, 25 bp, Homo sapien
aaaacctgtccgccctatcacgctt

SEQ ID NO: 5982584 - DNA, 25 bp, Homo sapien
atcctttgagagcttgggtgaaaac

SEQ ID NO: 5982585 - DNA, 25 bp, Homo sapien
gagaatttatacttcgtgcagaaca

SEQ ID NO: 5982586 - DNA, 25 bp, Homo sapien
aatcttgaagagctctatctgtcac

SEQ ID NO: 5982587 - DNA, 25 bp, Homo sapien
ctatctgtcacataatttcatcacc

SEQ ID NO: 5982588 - DNA, 25 bp, Homo sapien
ctccatccctacagaagattgatgc

SEQ ID NO: 5982589 - DNA, 25 bp, Homo sapien
ttacatcctttaaagaatttgaaga

SEQ ID NO: 5982590 - DNA, 25 bp, Homo sapien
atttgactgatctggagaatttata

SEQ ID NO: 5982591 - DNA, 25 bp, Homo sapien
agaacctgatcgaaagcataagcga

SEQ ID NO: 5982592 - DNA, 25 bp, Homo sapien
aatcctgacttcatcactgcagatt

SEQ ID NO: 5982593 - DNA, 25 bp, Homo sapien
ctaaaaatcaaatcgttagaagatt

SEQ ID NO: 5982594 - DNA, 25 bp, Homo sapien
ggtaaaaattccataccaagactta

SEQ ID NO: 5982595 - DNA, 25 bp, Homo sapien
ttggttgggtaaaaattccatacca

SEQ ID NO: 5982596 - DNA, 25 bp, Homo sapien
tgtccatccaatctaataaattaaa

SEQ ID NO: 5982597 - DNA, 25 bp, Homo sapien
gcctgatgatgtagaggttattgac

SEQ ID NO: 5982598 - DNA, 25 bp, Homo sapien
attgaacccgattccttcgaaggtc

SEQ ID NO: 5982599 - DNA, 25 bp, Homo sapien
ataccaagacttattaacttacatc

SEQ ID NO: 5982600 - DNA, 25 bp, Homo sapien
acttgaaccacctgtcaaatttaac

SEQ ID NO: 5982601 - DNA, 25 bp, Homo sapien
agacgatacaaatcctgacttcatc

SEQ ID NO: 5982602 - DNA, 25 bp, Homo sapien
taccccatgacaagattgttgacct

SEQ ID NO: 5982603 - DNA, 25 bp, Homo sapien
tctggagaatttatacttcgtgcag

SEQ ID NO: 5982604 - DNA, 25 bp, Homo sapien
tgagagcttgggtgaaaacctgtcc

SEQ ID NO: 5982605 - DNA, 25 bp, Homo sapien
ggttcattctattgaacccgattcc

SEQ ID NO: 5982606 - DNA, 25 bp, Homo sapien
aataagacttcgtatagaagaaaac

SEQ ID NO: 5982607 - DNA, 25 bp, Homo sapien
tgaacccgattccttcgaaggtctg

SEQ ID NO: 5982608 - DNA, 25 bp, Homo sapien
aactgacacaagatctgcctgatga

SEQ ID NO: 5982609 - DNA, 25 bp, Homo sapien
acgatacaaatcctgacttcatcac

SEQ ID NO: 5982610 - DNA, 25 bp, Homo sapien
atccctacagaagattgatgcgaca

SEQ ID NO: 5982611 - DNA, 25 bp, Homo sapien
ccaatcttgaagagctctatctgtc

SEQ ID NO: 5982612 - DNA, 25 bp, Homo sapien
gacaagattgttgaccttgattttt

SEQ ID NO: 5982613 - DNA, 25 bp, Homo sapien
ctcctctaatgttaataagctcacc

SEQ ID NO: 5982614 - DNA, 25 bp, Homo sapien
aaaatctgtccactttgaaatcact

SEQ ID NO: 5982615 - DNA, 25 bp, Homo sapien
ggataagaattcagttaacaaagat

SEQ ID NO: 5982616 - DNA, 25 bp, Homo sapien
agacttattaacttacatcctttaa

SEQ ID NO: 5982617 - DNA, 25 bp, Homo sapien
gaacttacctccatccctacagaag

SEQ ID NO: 5982618 - DNA, 25 bp, Homo sapien
gtctgtcaaacttggaagaaatttg

SEQ ID NO: 5982619 - DNA, 25 bp, Homo sapien
aaaactgactatgaacttacctcca

SEQ ID NO: 5982620 - DNA, 25 bp, Homo sapien
ctatcacgcttggagaccatttatc

SEQ ID NO: 5982621 - DNA, 25 bp, Homo sapien
cctttataggttcaagaatttgaaa

SEQ ID NO: 5982622 - DNA, 25 bp, Homo sapien
aaccctattcaactggaaaataaga

SEQ ID NO: 5982623 - DNA, 25 bp, Homo sapien
gaccttgatttttacgataacaaaa

SEQ ID NO: 5982624 - DNA, 25 bp, Homo sapien
tgaagaaaaagacgaaagacacaag

SEQ ID NO: 5982625 - DNA, 25 bp, Homo sapien
ctaaaactaactactttggacgtga

SEQ ID NO: 5982626 - DNA, 25 bp, Homo sapien
gaaatcactgaaaaacttagaatta

SEQ ID NO: 5982627 - DNA, 25 bp, Homo sapien
cacctgtcaaatttaactgacatat

SEQ ID NO: 5982628 - DNA, 25 bp, Homo sapien
cgaaagcataagcgaagtggaagtt

SEQ ID NO: 5982629 - DNA, 25 bp, Homo sapien
ttgaaatcactgaaaaacttagaat

SEQ ID NO: 5982630 - DNA, 25 bp, Homo sapien
agattcggaactgacacaagatctg

SEQ ID NO: 5982631 - DNA, 25 bp, Homo sapien
atgttaataagctcaccaaattaac

SEQ ID NO: 5982632 - DNA, 25 bp, Homo sapien
gacgaaagacacaagattgaggttg

SEQ ID NO: 5982633 - DNA, 25 bp, Homo sapien
tcaaatcgttagaagatttgaacct

SEQ ID NO: 5982634 - DNA, 25 bp, Homo sapien
cctcctttaacaagatagatcaatc

SEQ ID NO: 5982635 - DNA, 25 bp, Homo sapien
cctgtccgccctatcacgcttggag

SEQ ID NO: 5982636 - DNA, 25 bp, Homo sapien
ctgatctggagaatttatacttcgt

SEQ ID NO: 5982637 - DNA, 25 bp, Homo sapien
ttgaccaatcttgaagagctctatc

SEQ ID NO: 5982638 - DNA, 25 bp, Homo sapien
tgtctcagacagaacctgatcgaaa

SEQ ID NO: 5982639 - DNA, 25 bp, Homo sapien
acctccatccctacagaagattgat

SEQ ID NO: 5982640 - DNA, 25 bp, Homo sapien
gaatttatacttcgtgcagaacagc

SEQ ID NO: 5982641 - DNA, 25 bp, Homo sapien
ttatctggagggaaaccctattcaa

SEQ ID NO: 5982642 - DNA, 25 bp, Homo sapien
ccatccctacagaagattgatgcga

SEQ ID NO: 5982643 - DNA, 25 bp, Homo sapien
ctttgaaatcactgaaaaacttaga

SEQ ID NO: 5982644 - DNA, 25 bp, Homo sapien
tttccaaaattgaaaatctgtccac

SEQ ID NO: 5982645 - DNA, 25 bp, Homo sapien
ttctattgaacccgattccttcgaa

SEQ ID NO: 5982646 - DNA, 25 bp, Homo sapien
aattaacgtctctagacctgtcgtt

SEQ ID NO: 5982647 - DNA, 25 bp, Homo sapien
ggaaaataagacttcgtatagaaga

SEQ ID NO: 5982648 - DNA, 25 bp, Homo sapien
attatgtctcagacagaacctgatc

SEQ ID NO: 5982649 - DNA, 25 bp, Homo sapien
tgatcgaaagcataagcgaagtgga

SEQ ID NO: 5982650 - DNA, 25 bp, Homo sapien
aagctcaccaaattaacgtctctag

SEQ ID NO: 5982651 - DNA, 25 bp, Homo sapien
tcgttagaagatttgaacctttata

SEQ ID NO: 5982652 - DNA, 25 bp, Homo sapien
tattaacttacatcctttaaagaat

SEQ ID NO: 5982653 - DNA, 25 bp, Homo sapien
taatttcatcaccaagattgaaggt

SEQ ID NO: 5982654 - DNA, 25 bp, Homo sapien
ataagctcaccaaattaacgtctct

SEQ ID NO: 5982655 - DNA, 25 bp, Homo sapien
tgatgtagaggttattgacttggtc

SEQ ID NO: 5982656 - DNA, 25 bp, Homo sapien
atctgtcacataatttcatcaccaa

SEQ ID NO: 5982657 - DNA, 25 bp, Homo sapien
ccataccaagacttattaacttaca

SEQ ID NO: 5982658 - DNA, 25 bp, Homo sapien
aggtctgtcaaacttggaagaaatt

SEQ ID NO: 5982659 - DNA, 25 bp, Homo sapien
gaagagctctatctgtcacataatt

SEQ ID NO: 5982660 - DNA, 25 bp, Homo sapien
atatctcctctaatgttaataagct

SEQ ID NO: 5982661 - DNA, 25 bp, Homo sapien
tgaacctttataggttcaagaattt

SEQ ID NO: 5982662 - DNA, 25 bp, Homo sapien
cgtctctagacctgtcgtttaacaa

SEQ ID NO: 5982663 - DNA, 25 bp, Homo sapien
ctatgaacttacctccatccctaca

SEQ ID NO: 5982664 - DNA, 25 bp, Homo sapien
ttgaggttgtagacgatacaaatcc

SEQ ID NO: 5982665 - DNA, 25 bp, Homo sapien
aaaagacgaaagacacaagattgag

SEQ ID NO: 5982666 - DNA, 25 bp, Homo sapien
aagaatttgaaacaattatgtctca

SEQ ID NO: 5982667 - DNA, 25 bp, Homo sapien
tctgtccactttgaaatcactgaaa

SEQ ID NO: 5982668 - DNA, 25 bp, Homo sapien
tcgaaggtctgtcaaacttggaaga

SEQ ID NO: 5982669 - DNA, 25 bp, Homo sapien
tagaagaaaactgactatgaactta

SEQ ID NO: 5982670 - DNA, 25 bp, Homo sapien
gttagaagatttgaacctttatagg

SEQ ID NO: 5982671 - DNA, 25 bp, Homo sapien
aattaaacatatctcctctaatgtt

SEQ ID NO: 5982672 - DNA, 25 bp, Homo sapien
tgaaaatctagaagagttgaccaat

SEQ ID NO: 5982673 - DNA, 25 bp, Homo sapien
ctgacttcatcactgcagattcgga

SEQ ID NO: 5982674 - DNA, 25 bp, Homo sapien
ctgtcacataatttcatcaccaaga

SEQ ID NO: 5982675 - DNA, 25 bp, Homo sapien
tgtccactttgaaatcactgaaaaa

SEQ ID NO: 5982676 - DNA, 25 bp, Homo sapien
taacaaaattaaacatatctcctct

SEQ ID NO: 5982677 - DNA, 25 bp, Homo sapien
tgacctccaacaaaattacctccct

SEQ ID NO: 5982678 - DNA, 25 bp, Homo sapien
aaagcataagcgaagtggaagtttt

SEQ ID NO: 5982679 - DNA, 25 bp, Homo sapien
tggacgtgacctccaacaaaattac

SEQ ID NO: 5982680 - DNA, 25 bp, Homo sapien
attgttgaccttgatttttacgata

SEQ ID NO: 5982681 - DNA, 25 bp, Homo sapien
gacatatgggcctcctttaacaaga

SEQ ID NO: 5982682 - DNA, 25 bp, Homo sapien
atttgaaacaattatgtctcagaca

SEQ ID NO: 5982683 - DNA, 25 bp, Homo sapien
tccaaaattgaaaatctgtccactt

SEQ ID NO: 5982684 - DNA, 25 bp, Homo sapien
tagaagatttgaacctttataggtt

SEQ ID NO: 5982685 - DNA, 25 bp, Homo sapien
aattaggtggtaataaggttcattc

SEQ ID NO: 5982686 - DNA, 25 bp, Homo sapien
cctgtcaaatttaactgacatatgg

SEQ ID NO: 5982687 - DNA, 25 bp, Homo sapien
atgtagaggttattgacttggtcca

SEQ ID NO: 5982688 - DNA, 25 bp, Homo sapien
agatcaagcacatcaaaaatctaga

SEQ ID NO: 5982689 - DNA, 25 bp, Homo sapien
cccgattccttcgaaggtctgtcaa

SEQ ID NO: 5982690 - DNA, 25 bp, Homo sapien
atcaatcctttgagagcttgggtga

SEQ ID NO: 5982691 - DNA, 25 bp, Homo sapien
tttaaagaatttgaagatattgtcc

SEQ ID NO: 5982692 - DNA, 25 bp, Homo sapien
acaaaattaaacatatctcctctaa

SEQ ID NO: 5982693 - DNA, 25 bp, Homo sapien
ttacctccatccctacagaagattg

SEQ ID NO: 5982694 - DNA, 25 bp, Homo sapien
ctgaaaaacttagaattaggtggta

SEQ ID NO: 5982695 - DNA, 25 bp, Homo sapien
agagttgaccaatcttgaagagctc

SEQ ID NO: 5982696 - DNA, 25 bp, Homo sapien
accaagattgaaggtctagagaaaa

SEQ ID NO: 5982697 - DNA, 25 bp, Homo sapien
acagaacctgatcgaaagcataagc

SEQ ID NO: 5982698 - DNA, 25 bp, Homo sapien
caagcacatcaaaaatctagaaaat

SEQ ID NO: 5982699 - DNA, 25 bp, Homo sapien
cttcgaaggtctgtcaaacttggaa

SEQ ID NO: 5982700 - DNA, 25 bp, Homo sapien
aactactttggacgtgacctccaac

SEQ ID NO: 5982701 - DNA, 25 bp, Homo sapien
ttcgtatagaagaaaactgactatg

SEQ ID NO: 5982702 - DNA, 25 bp, Homo sapien
ttaaacatatctcctctaatgttaa

SEQ ID NO: 5982703 - DNA, 25 bp, Homo sapien
agacagaacctgatcgaaagcataa

SEQ ID NO: 5982704 - DNA, 25 bp, Homo sapien
ctgcagattcggaactgacacaaga

SEQ ID NO: 5982705 - DNA, 25 bp, Homo sapien
tcagacagaacctgatcgaaagcat

SEQ ID NO: 5982706 - DNA, 25 bp, Homo sapien
cttcatcactgcagattcggaactg

SEQ ID NO: 5982707 - DNA, 25 bp, Homo sapien
agcacatcaaaaatctagaaaattt

SEQ ID NO: 5982708 - DNA, 25 bp, Homo sapien
attcggaactgacacaagatctgcc

SEQ ID NO: 5982709 - DNA, 25 bp, Homo sapien
ggaactgacacaagatctgcctgat

SEQ ID NO: 5982710 - DNA, 25 bp, Homo sapien
aaaattccataccaagacttattaa

SEQ ID NO: 5982711 - DNA, 25 bp, Homo sapien
tttgagagcttgggtgaaaacctgt

SEQ ID NO: 5982712 - DNA, 25 bp, Homo sapien
accaagacttattaacttacatcct

SEQ ID NO: 5982713 - DNA, 25 bp, Homo sapien
ttcattctattgaacccgattcctt

SEQ ID NO: 5982714 - DNA, 25 bp, Homo sapien
aacaagatcaagcacatcaaaaatc

SEQ ID NO: 5982715 - DNA, 25 bp, Homo sapien
gattgaggttgtagacgatacaaat

SEQ ID NO: 5982716 - DNA, 25 bp, Homo sapien
ttgaaacaattatgtctcagacaga

SEQ ID NO: 5982717 - DNA, 25 bp, Homo sapien
caagattgaaggtctagagaaaaac

SEQ ID NO: 5982718 - DNA, 25 bp, Homo sapien
gatgatgtagaggttattgacttgg

SEQ ID NO: 5982719 - DNA, 25 bp, Homo sapien
gaagatattgtccatccaatctaat

SEQ ID NO: 5982720 - DNA, 25 bp, Homo sapien
cgtgcagaacagcatttccaaaatt

SEQ ID NO: 5982721 - DNA, 25 bp, Homo sapien
gaaacaattatgtctcagacagaac

SEQ ID NO: 5982722 - DNA, 25 bp, Homo sapien
gcagattcggaactgacacaagatc

SEQ ID NO: 5982723 - DNA, 25 bp, Homo sapien
aaattgaaaatctagaagagttgac

SEQ ID NO: 5982724 - DNA, 25 bp, Homo sapien
ctattcaactggaaaataagacttc

SEQ ID NO: 5982725 - DNA, 25 bp, Homo sapien
tccgccctatcacgcttggagacca

SEQ ID NO: 5982726 - DNA, 25 bp, Homo sapien
aggtggtaataaggttcattctatt

SEQ ID NO: 5982727 - DNA, 25 bp, Homo sapien
ttagaattaggtggtaataaggttc

SEQ ID NO: 5982728 - DNA, 25 bp, Homo sapien
agatcaatcctttgagagcttgggt

SEQ ID NO: 5982729 - DNA, 25 bp, Homo sapien
taagcgaagtggaagttttacccca

SEQ ID NO: 5982730 - DNA, 25 bp, Homo sapien
cagaacagcatttccaaaattgaaa

SEQ ID NO: 5982731 - DNA, 25 bp, Homo sapien
acttcgtatagaagaaaactgacta

SEQ ID NO: 5982732 - DNA, 25 bp, Homo sapien
gtggaagttttaccccatgacaaga

SEQ ID NO: 5982733 - DNA, 25 bp, Homo sapien
cttattaacttacatcctttaaaga

SEQ ID NO: 5982734 - DNA, 25 bp, Homo sapien
tacaaatcctgacttcatcactgca

SEQ ID NO: 5982735 - DNA, 25 bp, Homo sapien
agatagatcaatcctttgagagctt

SEQ ID NO: 5982736 - DNA, 25 bp, Homo sapien
acatcctttaaagaatttgaagata

SEQ ID NO: 5982737 - DNA, 25 bp, Homo sapien
cctccaacaaaattacctccctgga

SEQ ID NO: 5982738 - DNA, 25 bp, Homo sapien
agaggttattgacttggtccatcta

SEQ ID NO: 5982739 - DNA, 25 bp, Homo sapien
tagaaaatttgactgatctggagaa

SEQ ID NO: 5982740 - DNA, 25 bp, Homo sapien
aaattgaaaatctgtccactttgaa

SEQ ID NO: 5982741 - DNA, 25 bp, Homo sapien
agttgaccaatcttgaagagctcta

SEQ ID NO: 5982742 - DNA, 25 bp, Homo sapien
aaatttaactgacatatgggcctcc

SEQ ID NO: 5982743 - DNA, 25 bp, Homo sapien
actttggacgtgacctccaacaaaa

SEQ ID NO: 5982744 - DNA, 25 bp, Homo sapien
aagaaaaagacgaaagacacaagat

SEQ ID NO: 5982745 - DNA, 25 bp, Homo sapien
tttaccccatgacaagattgttgac

SEQ ID NO: 5982746 - DNA, 25 bp, Homo sapien
taaagaatttgaagatattgtccat

SEQ ID NO: 5982747 - DNA, 25 bp, Homo sapien
tgttgaccttgatttttacgataac

SEQ ID NO: 5982748 - DNA, 25 bp, Homo sapien
gaaccacctgtcaaatttaactgac

SEQ ID NO: 5982749 - DNA, 25 bp, Homo sapien
gacttcatcactgcagattcggaac

SEQ ID NO: 5982750 - DNA, 25 bp, Homo sapien
cgaagtggaagttttaccccatgac

SEQ ID NO: 5982751 - DNA, 25 bp, Homo sapien
ctactttggacgtgacctccaacaa

SEQ ID NO: 5982752 - DNA, 25 bp, Homo sapien
gtcacataatttcatcaccaagatt

SEQ ID NO: 5982753 - DNA, 25 bp, Homo sapien
aagaatttgaagatattgtccatcc

SEQ ID NO: 5982754 - DNA, 25 bp, Homo sapien
tatgggcctcctttaacaagataga

SEQ ID NO: 5982755 - DNA, 25 bp, Homo sapien
ttgatgcgacatatataagaggctg

SEQ ID NO: 5982756 - DNA, 25 bp, Homo sapien
cgtgacctccaacaaaattacctcc

SEQ ID NO: 5982757 - DNA, 25 bp, Homo sapien
ttacctccctggaaaacttgaacca

SEQ ID NO: 5982758 - DNA, 25 bp, Homo sapien
ccatctaaaaatcaaatcgttagaa

SEQ ID NO: 5982759 - DNA, 25 bp, Homo sapien
tgtccgccctatcacgcttggagac

SEQ ID NO: 5982760 - DNA, 25 bp, Homo sapien
aagattgatgcgacatatataagag

SEQ ID NO: 5982761 - DNA, 25 bp, Homo sapien
agctctatctgtcacataatttcat

SEQ ID NO: 5982762 - DNA, 25 bp, Homo sapien
caatcctttgagagcttgggtgaaa

SEQ ID NO: 5982763 - DNA, 25 bp, Homo sapien
tgggtaaaaattccataccaagact

SEQ ID NO: 5982764 - DNA, 25 bp, Homo sapien
gaccatttatctggagggaaaccct

SEQ ID NO: 5982765 - DNA, 25 bp, Homo sapien
ttaactgacatatgggcctccttta

SEQ ID NO: 5982766 - DNA, 25 bp, Homo sapien
ggaaaacttgaaccacctgtcaaat

SEQ ID NO: 5982767 - DNA, 25 bp, Homo sapien
tcctgacttcatcactgcagattcg

SEQ ID NO: 5982768 - DNA, 25 bp, Homo sapien
gactgatctggagaatttatacttc

SEQ ID NO: 5982769 - DNA, 25 bp, Homo sapien
gaggttgtagacgatacaaatcctg

SEQ ID NO: 5982770 - DNA, 25 bp, Homo sapien
tatagaagaaaactgactatgaact

SEQ ID NO: 5982771 - DNA, 25 bp, Homo sapien
atcacgcttggagaccatttatctg

SEQ ID NO: 5982772 - DNA, 25 bp, Homo sapien
taacttacatcctttaaagaatttg

SEQ ID NO: 5982773 - DNA, 25 bp, Homo sapien
ttgaagagctctatctgtcacataa

SEQ ID NO: 5982774 - DNA, 25 bp, Homo sapien
ctgtcaaacttggaagaaatttggt

SEQ ID NO: 5982775 - DNA, 25 bp, Homo sapien
gttattgacttggtccatctaaaaa

SEQ ID NO: 5982776 - DNA, 25 bp, Homo sapien
cactgcagattcggaactgacacaa

SEQ ID NO: 5982777 - DNA, 25 bp, Homo sapien
ggtgaaaacctgtccgccctatcac

SEQ ID NO: 5982778 - DNA, 25 bp, Homo sapien
tccttcgaaggtctgtcaaacttgg

SEQ ID NO: 5982779 - DNA, 25 bp, Homo sapien
gttttaccccatgacaagattgttg

SEQ ID NO: 5982780 - DNA, 25 bp, Homo sapien
tgaaaacctgtccgccctatcacgc

SEQ ID NO: 5982781 - DNA, 25 bp, Homo sapien
agcatttccaaaattgaaaatctgt

SEQ ID NO: 5982782 - DNA, 25 bp, Homo sapien
aatcgttagaagatttgaaccttta

SEQ ID NO: 5982783 - DNA, 25 bp, Homo sapien
aaacatatctcctctaatgttaata

SEQ ID NO: 5982784 - DNA, 25 bp, Homo sapien
tagacctgtcgtttaacaagatcaa

SEQ ID NO: 5982785 - DNA, 25 bp, Homo sapien
atttatctggagggaaaccctattc

SEQ ID NO: 5982786 - DNA, 25 bp, Homo sapien
caattatgtctcagacagaacctga

SEQ ID NO: 5982787 - DNA, 25 bp, Homo sapien
ttaacaagatcaagcacatcaaaaa

SEQ ID NO: 5982788 - DNA, 25 bp, Homo sapien
gacctgtcgtttaacaagatcaagc

SEQ ID NO: 5982789 - DNA, 25 bp, Homo sapien
aaaatctagaaaatttgactgatct

SEQ ID NO: 5982790 - DNA, 25 bp, Homo sapien
ctttaacaagatagatcaatccttt

SEQ ID NO: 5982791 - DNA, 25 bp, Homo sapien
caagatagatcaatcctttgagagc

SEQ ID NO: 5982792 - DNA, 25 bp, Homo sapien
caagacttattaacttacatccttt

SEQ ID NO: 5982793 - DNA, 25 bp, Homo sapien
atcactgcagattcggaactgacac

SEQ ID NO: 5982794 - DNA, 25 bp, Homo sapien
gaaaaagacgaaagacacaagattg

SEQ ID NO: 5982795 - DNA, 25 bp, Homo sapien
atgaacttacctccatccctacaga

SEQ ID NO: 5982796 - DNA, 25 bp, Homo sapien
caaatcctgacttcatcactgcaga

SEQ ID NO: 5982797 - DNA, 25 bp, Homo sapien
aagattgaggttgtagacgatacaa

SEQ ID NO: 5982798 - DNA, 25 bp, Homo sapien
cctgatcgaaagcataagcgaagtg

SEQ ID NO: 5982799 - DNA, 25 bp, Homo sapien
agcgaagtggaagttttaccccatg

SEQ ID NO: 5982800 - DNA, 25 bp, Homo sapien
acaagattgaggttgtagacgatac

SEQ ID NO: 5982801 - DNA, 25 bp, Homo sapien
tcaccaagattgaaggtctagagaa

SEQ ID NO: 5982802 - DNA, 25 bp, Homo sapien
tggtccatctaaaaatcaaatcgtt

SEQ ID NO: 5982803 - DNA, 25 bp, Homo sapien
gaccaatcttgaagagctctatctg

SEQ ID NO: 5982804 - DNA, 25 bp, Homo sapien
atttcatcaccaagattgaaggtct

SEQ ID NO: 5982805 - DNA, 25 bp, Homo sapien
ggagggaaaccctattcaactggaa

SEQ ID NO: 5982806 - DNA, 25 bp, Homo sapien
gaattcagttaacaaagatagtgaa

SEQ ID NO: 5982807 - DNA, 25 bp, Homo sapien
aactgactatgaacttacctccatc

SEQ ID NO: 5982808 - DNA, 25 bp, Homo sapien
ttgacttggtccatctaaaaatcaa

SEQ ID NO: 5982809 - DNA, 25 bp, Homo sapien
aaagacacaagattgaggttgtaga

SEQ ID NO: 5982810 - DNA, 25 bp, Homo sapien
agaattaggtggtaataaggttcat

SEQ ID NO: 5982811 - DNA, 25 bp, Homo sapien
ttgaaccacctgtcaaatttaactg

SEQ ID NO: 5982812 - DNA, 25 bp, Homo sapien
gattgatgcgacatatataagaggc

SEQ ID NO: 5982813 - DNA, 25 bp, Homo sapien
ttttaggtttttctctagaccttca

SEQ ID NO: 5982814 - DNA, 25 bp, Homo sapien
atttgatttttagatggaccaagtc

SEQ ID NO: 5982815 - DNA, 25 bp, Homo sapien
aggagatatgtttaattttgttatc

SEQ ID NO: 5982816 - DNA, 25 bp, Homo sapien
tggtatggaatttttacccaaccaa

SEQ ID NO: 5982817 - DNA, 25 bp, Homo sapien
gagctcttcaagattggtcaactct

SEQ ID NO: 5982818 - DNA, 25 bp, Homo sapien
agtataaattctccagatcagtcaa

SEQ ID NO: 5982819 - DNA, 25 bp, Homo sapien
gctcttcaagattggtcaactcttc

SEQ ID NO: 5982820 - DNA, 25 bp, Homo sapien
cttcaatcttggtgatgaaattatg

SEQ ID NO: 5982821 - DNA, 25 bp, Homo sapien
gtttttctctagaccttcaatcttg

SEQ ID NO: 5982822 - DNA, 25 bp, Homo sapien
gtgacagatagagctcttcaagatt

SEQ ID NO: 5982823 - DNA, 25 bp, Homo sapien
gtatcgtctacaacctcaatcttgt

SEQ ID NO: 5982824 - DNA, 25 bp, Homo sapien
gttcaatagaatgaaccttattacc

SEQ ID NO: 5982825 - DNA, 25 bp, Homo sapien
gattggatggacaatatcttcaaat

SEQ ID NO: 5982826 - DNA, 25 bp, Homo sapien
acgaagtcttattttccagttgaat

SEQ ID NO: 5982827 - DNA, 25 bp, Homo sapien
tagagctcttcaagattggtcaact

SEQ ID NO: 5982828 - DNA, 25 bp, Homo sapien
tcacccaagctctcaaaggattgat

SEQ ID NO: 5982829 - DNA, 25 bp, Homo sapien
ttgttaaaggaggcccatatgtcag

SEQ ID NO: 5982830 - DNA, 25 bp, Homo sapien
gttatcgtaaaaatcaaggtcaaca

SEQ ID NO: 5982831 - DNA, 25 bp, Homo sapien
acgaagtataaattctccagatcag

SEQ ID NO: 5982832 - DNA, 25 bp, Homo sapien
cttgaacctataaaggttcaaatct

SEQ ID NO: 5982833 - DNA, 25 bp, Homo sapien
tcagtgatttcaaagtggacagatt

SEQ ID NO: 5982834 - DNA, 25 bp, Homo sapien
tgagacataattgtttcaaattctt

SEQ ID NO: 5982835 - DNA, 25 bp, Homo sapien
caaatttcttccaagtttgacagac

SEQ ID NO: 5982836 - DNA, 25 bp, Homo sapien
gcttatgctttcgatcaggttctgt

SEQ ID NO: 5982837 - DNA, 25 bp, Homo sapien
ggatttgtatcgtctacaacctcaa

SEQ ID NO: 5982838 - DNA, 25 bp, Homo sapien
cttatatatgtcgcatcaatcttct

SEQ ID NO: 5982839 - DNA, 25 bp, Homo sapien
gataaatggtctccaagcgtgatag

SEQ ID NO: 5982840 - DNA, 25 bp, Homo sapien
cttccacttcgcttatgctttcgat

SEQ ID NO: 5982841 - DNA, 25 bp, Homo sapien
gaagtataaattctccagatcagtc

SEQ ID NO: 5982842 - DNA, 25 bp, Homo sapien
ttgttatcgtaaaaatcaaggtcaa

SEQ ID NO: 5982843 - DNA, 25 bp, Homo sapien
aaaaatcaaggtcaacaatcttgtc

SEQ ID NO: 5982844 - DNA, 25 bp, Homo sapien
gaatagggtttccctccagataaat

SEQ ID NO: 5982845 - DNA, 25 bp, Homo sapien
tcgatcaggttctgtctgagacata

SEQ ID NO: 5982846 - DNA, 25 bp, Homo sapien
tgatgaaattatgtgacagatagag

SEQ ID NO: 5982847 - DNA, 25 bp, Homo sapien
ccatatgtcagttaaatttgacagg

SEQ ID NO: 5982848 - DNA, 25 bp, Homo sapien
tcatcaggcagatcttgtgtcagtt

SEQ ID NO: 5982849 - DNA, 25 bp, Homo sapien
gatagggcggacaggttttcaccca

SEQ ID NO: 5982850 - DNA, 25 bp, Homo sapien
aagtggacagattttcaattttgga

SEQ ID NO: 5982851 - DNA, 25 bp, Homo sapien
tttcgatcaggttctgtctgagaca

SEQ ID NO: 5982852 - DNA, 25 bp, Homo sapien
atcttgtgtctttcgtctttttctt

SEQ ID NO: 5982853 - DNA, 25 bp, Homo sapien
ctatacgaagtcttattttccagtt

SEQ ID NO: 5982854 - DNA, 25 bp, Homo sapien
gttccgaatctgcagtgatgaagtc

SEQ ID NO: 5982855 - DNA, 25 bp, Homo sapien
cagttttcttctatacgaagtctta

SEQ ID NO: 5982856 - DNA, 25 bp, Homo sapien
tcttggtatggaatttttacccaac

SEQ ID NO: 5982857 - DNA, 25 bp, Homo sapien
tctacatcatcaggcagatcttgtg

SEQ ID NO: 5982858 - DNA, 25 bp, Homo sapien
catggggtaaaacttccacttcgct

SEQ ID NO: 5982859 - DNA, 25 bp, Homo sapien
atcaaggtcaacaatcttgtcatgg

SEQ ID NO: 5982860 - DNA, 25 bp, Homo sapien
tagatggaccaagtcaataacctct

SEQ ID NO: 5982861 - DNA, 25 bp, Homo sapien
aaatcaaggtcaacaatcttgtcat

SEQ ID NO: 5982862 - DNA, 25 bp, Homo sapien
atcaggcagatcttgtgtcagttcc

SEQ ID NO: 5982863 - DNA, 25 bp, Homo sapien
gtggacagattttcaattttggaaa

SEQ ID NO: 5982864 - DNA, 25 bp, Homo sapien
ggaggcccatatgtcagttaaattt

SEQ ID NO: 5982865 - DNA, 25 bp, Homo sapien
cgatttgatttttagatggaccaag

SEQ ID NO: 5982866 - DNA, 25 bp, Homo sapien
tatatgtcgcatcaatcttctgtag

SEQ ID NO: 5982867 - DNA, 25 bp, Homo sapien
tctgtagggatggaggtaagttcat

SEQ ID NO: 5982868 - DNA, 25 bp, Homo sapien
agaggagatatgtttaattttgtta

SEQ ID NO: 5982869 - DNA, 25 bp, Homo sapien
cagataaatggtctccaagcgtgat

SEQ ID NO: 5982870 - DNA, 25 bp, Homo sapien
gcggacaggttttcacccaagctct

SEQ ID NO: 5982871 - DNA, 25 bp, Homo sapien
gggatggaggtaagttcatagtcag

SEQ ID NO: 5982872 - DNA, 25 bp, Homo sapien
gtgcttgatcttgttaaacgacagg

SEQ ID NO: 5982873 - DNA, 25 bp, Homo sapien
acagattttcaattttggaaatgct

SEQ ID NO: 5982874 - DNA, 25 bp, Homo sapien
aacctctacatcatcaggcagatct

SEQ ID NO: 5982875 - DNA, 25 bp, Homo sapien
ttgacaggtggttcaagttttccag

SEQ ID NO: 5982876 - DNA, 25 bp, Homo sapien
tttagatggaccaagtcaataacct

SEQ ID NO: 5982877 - DNA, 25 bp, Homo sapien
aacgatttgatttttagatggacca

SEQ ID NO: 5982878 - DNA, 25 bp, Homo sapien
cagttccgaatctgcagtgatgaag

SEQ ID NO: 5982879 - DNA, 25 bp, Homo sapien
catagtcagttttcttctatacgaa

SEQ ID NO: 5982880 - DNA, 25 bp, Homo sapien
atttggtgagcttattaacattaga

SEQ ID NO: 5982881 - DNA, 25 bp, Homo sapien
ggcagatcttgtgtcagttccgaat

SEQ ID NO: 5982882 - DNA, 25 bp, Homo sapien
cttgtgtctttcgtctttttcttca

SEQ ID NO: 5982883 - DNA, 25 bp, Homo sapien
gaggtaagttcatagtcagttttct

SEQ ID NO: 5982884 - DNA, 25 bp, Homo sapien
gatttttgatgtgcttgatcttgtt

SEQ ID NO: 5982885 - DNA, 25 bp, Homo sapien
tcttattttccagttgaatagggtt

SEQ ID NO: 5982886 - DNA, 25 bp, Homo sapien
ccaagtcaataacctctacatcatc

SEQ ID NO: 5982887 - DNA, 25 bp, Homo sapien
gacagatagagctcttcaagattgg

SEQ ID NO: 5982888 - DNA, 25 bp, Homo sapien
tcgcatcaatcttctgtagggatgg

SEQ ID NO: 5982889 - DNA, 25 bp, Homo sapien
tcacgtccaaagtagttagttttag

SEQ ID NO: 5982890 - DNA, 25 bp, Homo sapien
aggttttcacccaagctctcaaagg

SEQ ID NO: 5982891 - DNA, 25 bp, Homo sapien
tataaaggttcaaatcttctaacga

SEQ ID NO: 5982892 - DNA, 25 bp, Homo sapien
gtctagagacgttaatttggtgagc

SEQ ID NO: 5982893 - DNA, 25 bp, Homo sapien
gatggaggtaagttcatagtcagtt

SEQ ID NO: 5982894 - DNA, 25 bp, Homo sapien
caaccaaatttcttccaagtttgac

SEQ ID NO: 5982895 - DNA, 25 bp, Homo sapien
tttttgatgtgcttgatcttgttaa

SEQ ID NO: 5982896 - DNA, 25 bp, Homo sapien
taagttcatagtcagttttcttcta

SEQ ID NO: 5982897 - DNA, 25 bp, Homo sapien
gcacgaagtataaattctccagatc

SEQ ID NO: 5982898 - DNA, 25 bp, Homo sapien
attctttaaaggatgtaagttaata

SEQ ID NO: 5982899 - DNA, 25 bp, Homo sapien
taaattctccagatcagtcaaattt

SEQ ID NO: 5982900 - DNA, 25 bp, Homo sapien
caacaatcttgtcatggggtaaaac

SEQ ID NO: 5982901 - DNA, 25 bp, Homo sapien
gatagagctcttcaagattggtcaa

SEQ ID NO: 5982902 - DNA, 25 bp, Homo sapien
ttaaaggatgtaagttaataagtct

SEQ ID NO: 5982903 - DNA, 25 bp, Homo sapien
gtcaacaatcttgtcatggggtaaa

SEQ ID NO: 5982904 - DNA, 25 bp, Homo sapien
gtaaaacttccacttcgcttatgct

SEQ ID NO: 5982905 - DNA, 25 bp, Homo sapien
aatcgggttcaatagaatgaacctt

SEQ ID NO: 5982906 - DNA, 25 bp, Homo sapien
caatcttgtgtctttcgtctttttc

SEQ ID NO: 5982907 - DNA, 25 bp, Homo sapien
gatttttagatggaccaagtcaata

SEQ ID NO: 5982908 - DNA, 25 bp, Homo sapien
atgaaattatgtgacagatagagct

SEQ ID NO: 5982909 - DNA, 25 bp, Homo sapien
caacctcaatcttgtgtctttcgtc

SEQ ID NO: 5982910 - DNA, 25 bp, Homo sapien
tgagcttattaacattagaggagat

SEQ ID NO: 5982911 - DNA, 25 bp, Homo sapien
cagaccttcgaaggaatcgggttca

SEQ ID NO: 5982912 - DNA, 25 bp, Homo sapien
tgaacctataaaggttcaaatcttc

SEQ ID NO: 5982913 - DNA, 25 bp, Homo sapien
tcaaattcttgaacctataaaggtt

SEQ ID NO: 5982914 - DNA, 25 bp, Homo sapien
atggacaatatcttcaaattcttta

SEQ ID NO: 5982915 - DNA, 25 bp, Homo sapien
agattggtcaactcttctagatttt

SEQ ID NO: 5982916 - DNA, 25 bp, Homo sapien
accaaatttcttccaagtttgacag

SEQ ID NO: 5982917 - DNA, 25 bp, Homo sapien
attctaagtttttcagtgatttcaa

SEQ ID NO: 5982918 - DNA, 25 bp, Homo sapien
ttattagattggatggacaatatct

SEQ ID NO: 5982919 - DNA, 25 bp, Homo sapien
tggaggtcacgtccaaagtagttag

SEQ ID NO: 5982920 - DNA, 25 bp, Homo sapien
gttaatttggtgagcttattaacat

SEQ ID NO: 5982921 - DNA, 25 bp, Homo sapien
agagacgttaatttggtgagcttat

SEQ ID NO: 5982922 - DNA, 25 bp, Homo sapien
cagcctcttatatatgtcgcatcaa

SEQ ID NO: 5982923 - DNA, 25 bp, Homo sapien
tggtctccaagcgtgatagggcgga

SEQ ID NO: 5982924 - DNA, 25 bp, Homo sapien
caagattggtcaactcttctagatt

SEQ ID NO: 5982925 - DNA, 25 bp, Homo sapien
aaaggattgatctatcttgttaaag

SEQ ID NO: 5982926 - DNA, 25 bp, Homo sapien
ggtaagttcatagtcagttttcttc

SEQ ID NO: 5982927 - DNA, 25 bp, Homo sapien
acgttaatttggtgagcttattaac

SEQ ID NO: 5982928 - DNA, 25 bp, Homo sapien
tggggtaaaacttccacttcgctta

SEQ ID NO: 5982929 - DNA, 25 bp, Homo sapien
atgaaccttattaccacctaattct

SEQ ID NO: 5982930 - DNA, 25 bp, Homo sapien
cagatcttgtgtcagttccgaatct

SEQ ID NO: 5982931 - DNA, 25 bp, Homo sapien
tcttgttaaaggaggcccatatgtc

SEQ ID NO: 5982932 - DNA, 25 bp, Homo sapien
aataagtcttggtatggaattttta

SEQ ID NO: 5982933 - DNA, 25 bp, Homo sapien
ttaataagtcttggtatggaatttt

SEQ ID NO: 5982934 - DNA, 25 bp, Homo sapien
tctatcttgttaaaggaggcccata

SEQ ID NO: 5982935 - DNA, 25 bp, Homo sapien
taattttgttatcgtaaaaatcaag

SEQ ID NO: 5982936 - DNA, 25 bp, Homo sapien
ttgttaaacgacaggtctagagacg

SEQ ID NO: 5982937 - DNA, 25 bp, Homo sapien
gtcaataacctctacatcatcaggc

SEQ ID NO: 5982938 - DNA, 25 bp, Homo sapien
ccaagtttgacagaccttcgaagga

SEQ ID NO: 5982939 - DNA, 25 bp, Homo sapien
cctataaaggttcaaatcttctaac

SEQ ID NO: 5982940 - DNA, 25 bp, Homo sapien
tttttcagtgatttcaaagtggaca

SEQ ID NO: 5982941 - DNA, 25 bp, Homo sapien
taagttaataagtcttggtatggaa

SEQ ID NO: 5982942 - DNA, 25 bp, Homo sapien
ctagagacgttaatttggtgagctt

SEQ ID NO: 5982943 - DNA, 25 bp, Homo sapien
tacaacctcaatcttgtgtctttcg

SEQ ID NO: 5982944 - DNA, 25 bp, Homo sapien
tcttcaaattctttaaaggatgtaa

SEQ ID NO: 5982945 - DNA, 25 bp, Homo sapien
aaatgctgttctgcacgaagtataa

SEQ ID NO: 5982946 - DNA, 25 bp, Homo sapien
gttaaacgacaggtctagagacgtt

SEQ ID NO: 5982947 - DNA, 25 bp, Homo sapien
ctccagatcagtcaaattttctaga

SEQ ID NO: 5982948 - DNA, 25 bp, Homo sapien
tggaggtaagttcatagtcagtttt

SEQ ID NO: 5982949 - DNA, 25 bp, Homo sapien
ggacagattttcaattttggaaatg

SEQ ID NO: 5982950 - DNA, 25 bp, Homo sapien
cctccagataaatggtctccaagcg

SEQ ID NO: 5982951 - DNA, 25 bp, Homo sapien
aggcccatatgtcagttaaatttga

SEQ ID NO: 5982952 - DNA, 25 bp, Homo sapien
gatgtaagttaataagtcttggtat

SEQ ID NO: 5982953 - DNA, 25 bp, Homo sapien
gatcttgttaaacgacaggtctaga

SEQ ID NO: 5982954 - DNA, 25 bp, Homo sapien
ttgttggaggtcacgtccaaagtag

SEQ ID NO: 5982955 - DNA, 25 bp, Homo sapien
acaatcttgtcatggggtaaaactt

SEQ ID NO: 5982956 - DNA, 25 bp, Homo sapien
ttggatggacaatatcttcaaattc

SEQ ID NO: 5982957 - DNA, 25 bp, Homo sapien
aaattttctagatttttgatgtgct

SEQ ID NO: 5982958 - DNA, 25 bp, Homo sapien
ttccaagtttgacagaccttcgaag

SEQ ID NO: 5982959 - DNA, 25 bp, Homo sapien
atcagtcaaattttctagatttttg

SEQ ID NO: 5982960 - DNA, 25 bp, Homo sapien
ttttgttatcgtaaaaatcaaggtc

SEQ ID NO: 5982961 - DNA, 25 bp, Homo sapien
ttaacattagaggagatatgtttaa

SEQ ID NO: 5982962 - DNA, 25 bp, Homo sapien
tccagggaggtaattttgttggagg

SEQ ID NO: 5982963 - DNA, 25 bp, Homo sapien
tatgtcgcatcaatcttctgtaggg

SEQ ID NO: 5982964 - DNA, 25 bp, Homo sapien
aacgacaggtctagagacgttaatt

SEQ ID NO: 5982965 - DNA, 25 bp, Homo sapien
tcttctatacgaagtcttattttcc

SEQ ID NO: 5982966 - DNA, 25 bp, Homo sapien
tcttgttaaacgacaggtctagaga

SEQ ID NO: 5982967 - DNA, 25 bp, Homo sapien
gcatcaatcttctgtagggatggag

SEQ ID NO: 5982968 - DNA, 25 bp, Homo sapien
attgtttcaaattcttgaacctata

SEQ ID NO: 5982969 - DNA, 25 bp, Homo sapien
aaggaggcccatatgtcagttaaat

SEQ ID NO: 5982970 - DNA, 25 bp, Homo sapien
atcaatcttctgtagggatggaggt

SEQ ID NO: 5982971 - DNA, 25 bp, Homo sapien
cataattgtttcaaattcttgaacc

SEQ ID NO: 5982972 - DNA, 25 bp, Homo sapien
atttattagattggatggacaatat

SEQ ID NO: 5982973 - DNA, 25 bp, Homo sapien
aagcgtgatagggcggacaggtttt

SEQ ID NO: 5982974 - DNA, 25 bp, Homo sapien
ttgatctatcttgttaaaggaggcc

SEQ ID NO: 5982975 - DNA, 25 bp, Homo sapien
attttctagatttttgatgtgcttg

SEQ ID NO: 5982976 - DNA, 25 bp, Homo sapien
tggaccaagtcaataacctctacat

SEQ ID NO: 5982977 - DNA, 25 bp, Homo sapien
agatcagtcaaattttctagatttt

SEQ ID NO: 5982978 - DNA, 25 bp, Homo sapien
caaattctttaaaggatgtaagtta

SEQ ID NO: 5982979 - DNA, 25 bp, Homo sapien
atttgtatcgtctacaacctcaatc

SEQ ID NO: 5982980 - DNA, 25 bp, Homo sapien
gttaaaggaggcccatatgtcagtt

SEQ ID NO: 5982981 - DNA, 25 bp, Homo sapien
aattttggaaatgctgttctgcacg

SEQ ID NO: 5982982 - DNA, 25 bp, Homo sapien
gattgatctatcttgttaaaggagg

SEQ ID NO: 5982983 - DNA, 25 bp, Homo sapien
ggaggtaattttgttggaggtcacg

SEQ ID NO: 5982984 - DNA, 25 bp, Homo sapien
tctttaaaggatgtaagttaataag

SEQ ID NO: 5982985 - DNA, 25 bp, Homo sapien
ttggaaatgctgttctgcacgaagt

SEQ ID NO: 5982986 - DNA, 25 bp, Homo sapien
taaatttgacaggtggttcaagttt

SEQ ID NO: 5982987 - DNA, 25 bp, Homo sapien
taagtttttcagtgatttcaaagtg

SEQ ID NO: 5982988 - DNA, 25 bp, Homo sapien
caggtggttcaagttttccagggag

SEQ ID NO: 5982989 - DNA, 25 bp, Homo sapien
taaaggaggcccatatgtcagttaa

SEQ ID NO: 5982990 - DNA, 25 bp, Homo sapien
ctccaagcgtgatagggcggacagg

SEQ ID NO: 5982991 - DNA, 25 bp, Homo sapien
cacctaattctaagtttttcagtga

SEQ ID NO: 5982992 - DNA, 25 bp, Homo sapien
gaaattatgtgacagatagagctct

SEQ ID NO: 5982993 - DNA, 25 bp, Homo sapien
gcccatatgtcagttaaatttgaca

SEQ ID NO: 5982994 - DNA, 25 bp, Homo sapien
tgatttcaaagtggacagattttca

SEQ ID NO: 5982995 - DNA, 25 bp, Homo sapien
tctcaaaggattgatctatcttgtt

SEQ ID NO: 5982996 - DNA, 25 bp, Homo sapien
agttgaatagggtttccctccagat

SEQ ID NO: 5982997 - DNA, 25 bp, Homo sapien
ggatggacaatatcttcaaattctt

SEQ ID NO: 5982998 - DNA, 25 bp, Homo sapien
ttcaagattggtcaactcttctaga

SEQ ID NO: 5982999 - DNA, 25 bp, Homo sapien
acccaagctctcaaaggattgatct

SEQ ID NO: 5983000 - DNA, 25 bp, Homo sapien
agtcttattttccagttgaataggg

SEQ ID NO: 5983001 - DNA, 25 bp, Homo sapien
ggtgagcttattaacattagaggag

SEQ ID NO: 5983002 - DNA, 25 bp, Homo sapien
ttgaatagggtttccctccagataa

SEQ ID NO: 5983003 - DNA, 25 bp, Homo sapien
ggacaatatcttcaaattctttaaa

SEQ ID NO: 5983004 - DNA, 25 bp, Homo sapien
aattctccagatcagtcaaattttc

SEQ ID NO: 5983005 - DNA, 25 bp, Homo sapien
tttttagatggaccaagtcaataac

SEQ ID NO: 5983006 - DNA, 25 bp, Homo sapien
tgtcgcatcaatcttctgtagggat

SEQ ID NO: 5983007 - DNA, 25 bp, Homo sapien
tgcagtgatgaagtcaggatttgta

SEQ ID NO: 5983008 - DNA, 25 bp, Homo sapien
gacaggtggttcaagttttccaggg

SEQ ID NO: 5983009 - DNA, 25 bp, Homo sapien
ttggtgatgaaattatgtgacagat

SEQ ID NO: 5983010 - DNA, 25 bp, Homo sapien
aagtttgacagaccttcgaaggaat

SEQ ID NO: 5983011 - DNA, 25 bp, Homo sapien
tagaatgaaccttattaccacctaa

SEQ ID NO: 5983012 - DNA, 25 bp, Homo sapien
agacataattgtttcaaattcttga

SEQ ID NO: 5983013 - DNA, 25 bp, Homo sapien
tcgcttatgctttcgatcaggttct

SEQ ID NO: 5983014 - DNA, 25 bp, Homo sapien
attagattggatggacaatatcttc

SEQ ID NO: 5983015 - DNA, 25 bp, Homo sapien
aaaacttccacttcgcttatgcttt

SEQ ID NO: 5983016 - DNA, 25 bp, Homo sapien
gtgtcagttccgaatctgcagtgat

SEQ ID NO: 5983017 - DNA, 25 bp, Homo sapien
tggttcaagttttccagggaggtaa

SEQ ID NO: 5983018 - DNA, 25 bp, Homo sapien
agaccttcaatcttggtgatgaaat

SEQ ID NO: 5983019 - DNA, 25 bp, Homo sapien
gtctccaagcgtgatagggcggaca

SEQ ID NO: 5983020 - DNA, 25 bp, Homo sapien
tccctccagataaatggtctccaag

SEQ ID NO: 5983021 - DNA, 25 bp, Homo sapien
cctaattctaagtttttcagtgatt

SEQ ID NO: 5983022 - DNA, 25 bp, Homo sapien
aggttctgtctgagacataattgtt

SEQ ID NO: 5983023 - DNA, 25 bp, Homo sapien
tttaatttattagattggatggaca

SEQ ID NO: 5983024 - DNA, 25 bp, Homo sapien
gtcagttccgaatctgcagtgatga

SEQ ID NO: 5983025 - DNA, 25 bp, Homo sapien
ttcatagtcagttttcttctatacg

SEQ ID NO: 5983026 - DNA, 25 bp, Homo sapien
gaagtcttattttccagttgaatag

SEQ ID NO: 5983027 - DNA, 25 bp, Homo sapien
gaggtcacgtccaaagtagttagtt

SEQ ID NO: 5983028 - DNA, 25 bp, Homo sapien
atcttctgtagggatggaggtaagt

SEQ ID NO: 5983029 - DNA, 25 bp, Homo sapien
aatcttggtgatgaaattatgtgac

SEQ ID NO: 5983030 - DNA, 25 bp, Homo sapien
tttcaaattcttgaacctataaagg

SEQ ID NO: 5983031 - DNA, 25 bp, Homo sapien
cttattaacattagaggagatatgt

SEQ ID NO: 5983032 - DNA, 25 bp, Homo sapien
gttggaggtcacgtccaaagtagtt

SEQ ID NO: 5983033 - DNA, 25 bp, Homo sapien
ttaggtttttctctagaccttcaat

SEQ ID NO: 5983034 - DNA, 25 bp, Homo sapien
tgtagggatggaggtaagttcatag

SEQ ID NO: 5983035 - DNA, 25 bp, Homo sapien
aagctctcaaaggattgatctatct

SEQ ID NO: 5983036 - DNA, 25 bp, Homo sapien
caggcagatcttgtgtcagttccga

SEQ ID NO: 5983037 - DNA, 25 bp, Homo sapien
ttatgtgacagatagagctcttcaa

SEQ ID NO: 5983038 - DNA, 25 bp, Homo sapien
tttcaattttggaaatgctgttctg

SEQ ID NO: 5983039 - DNA, 25 bp, Homo sapien
aaaggatgtaagttaataagtcttg

SEQ ID NO: 5983040 - DNA, 25 bp, Homo sapien
gaaccttattaccacctaattctaa

SEQ ID NO: 5983041 - DNA, 25 bp, Homo sapien
agggtttccctccagataaatggtc

SEQ ID NO: 5983042 - DNA, 25 bp, Homo sapien
agcttattaacattagaggagatat

SEQ ID NO: 5983043 - DNA, 25 bp, Homo sapien
tcaatagaatgaaccttattaccac

SEQ ID NO: 5983044 - DNA, 25 bp, Homo sapien
taaatggtctccaagcgtgataggg

SEQ ID NO: 5983045 - DNA, 25 bp, Homo sapien
atagggtttccctccagataaatgg

SEQ ID NO: 5983046 - DNA, 25 bp, Homo sapien
agttcatagtcagttttcttctata

SEQ ID NO: 5983047 - DNA, 25 bp, Homo sapien
agggaggtaattttgttggaggtca

SEQ ID NO: 5983048 - DNA, 25 bp, Homo sapien
aattatgtgacagatagagctcttc

SEQ ID NO: 5983049 - DNA, 25 bp, Homo sapien
tcaattttggaaatgctgttctgca

SEQ ID NO: 5983050 - DNA, 25 bp, Homo sapien
cacttcgcttatgctttcgatcagg

SEQ ID NO: 5983051 - DNA, 25 bp, Homo sapien
ttctgcacgaagtataaattctcca

SEQ ID NO: 5983052 - DNA, 25 bp, Homo sapien
tatcttcaaattctttaaaggatgt

SEQ ID NO: 5983053 - DNA, 25 bp, Homo sapien
ttttctctagaccttcaatcttggt

SEQ ID NO: 5983054 - DNA, 25 bp, Homo sapien
caaggtcaacaatcttgtcatgggg

SEQ ID NO: 5983055 - DNA, 25 bp, Homo sapien
taagtcttggtatggaatttttacc

SEQ ID NO: 5983056 - DNA, 25 bp, Homo sapien
aacttccacttcgcttatgctttcg

SEQ ID NO: 5983057 - DNA, 25 bp, Homo sapien
aagtcaggatttgtatcgtctacaa

SEQ ID NO: 5983058 - DNA, 25 bp, Homo sapien
gacagaccttcgaaggaatcgggtt

SEQ ID NO: 5983059 - DNA, 25 bp, Homo sapien
ttctctagaccttcaatcttggtga

SEQ ID NO: 5983060 - DNA, 25 bp, Homo sapien
gtgatgaagtcaggatttgtatcgt

SEQ ID NO: 5983061 - DNA, 25 bp, Homo sapien
caataacctctacatcatcaggcag

SEQ ID NO: 5983062 - DNA, 25 bp, Homo sapien
cactatctttgttaactgaattctt

SEQ ID NO: 5983063 - DNA, 25 bp, Homo sapien
taattctaagtttttcagtgatttc

SEQ ID NO: 5983064 - DNA, 25 bp, Homo sapien
gtcagttttcttctatacgaagtct

SEQ ID NO: 5983065 - DNA, 25 bp, Homo sapien
cgaatctgcagtgatgaagtcagga

SEQ ID NO: 5983066 - DNA, 25 bp, Homo sapien
cagatagagctcttcaagattggtc

SEQ ID NO: 5983067 - DNA, 25 bp, Homo sapien
tttctagatttttgatgtgcttgat

SEQ ID NO: 5983068 - DNA, 25 bp, Homo sapien
atttgacaggtggttcaagttttcc

SEQ ID NO: 5983069 - DNA, 25 bp, Homo sapien
ctgcacgaagtataaattctccaga

SEQ ID NO: 5983070 - DNA, 25 bp, Homo sapien
tcttggtgatgaaattatgtgacag

SEQ ID NO: 5983071 - DNA, 25 bp, Homo sapien
tcgtaaaaatcaaggtcaacaatct

SEQ ID NO: 5983072 - DNA, 25 bp, Homo sapien
catcatcaggcagatcttgtgtcag

SEQ ID NO: 5983073 - DNA, 25 bp, Homo sapien
tctgcagtgatgaagtcaggatttg

SEQ ID NO: 5983074 - DNA, 25 bp, Homo sapien
tctagatttttgatgtgcttgatct

SEQ ID NO: 5983075 - DNA, 25 bp, Homo sapien
gctttcgatcaggttctgtctgaga

SEQ ID NO: 5983076 - DNA, 25 bp, Homo sapien
ggacaggttttcacccaagctctca

SEQ ID NO: 5983077 - DNA, 25 bp, Homo sapien
gggtaaaacttccacttcgcttatg

SEQ ID NO: 5983078 - DNA, 25 bp, Homo sapien
ctagaccttcaatcttggtgatgaa

SEQ ID NO: 5983079 - DNA, 25 bp, Homo sapien
ttggtgagcttattaacattagagg

SEQ ID NO: 5983080 - DNA, 25 bp, Homo sapien
caaagtggacagattttcaattttg

SEQ ID NO: 5983081 - DNA, 25 bp, Homo sapien
gcgtgatagggcggacaggttttca

SEQ ID NO: 5983082 - DNA, 25 bp, Homo sapien
ctatctttgttaactgaattcttat

SEQ ID NO: 5983083 - DNA, 25 bp, Homo sapien
ttctccagatcagtcaaattttcta

SEQ ID NO: 5983084 - DNA, 25 bp, Homo sapien
gggttcaatagaatgaaccttatta

SEQ ID NO: 5983085 - DNA, 25 bp, Homo sapien
tcaatcttggtgatgaaattatgtg

SEQ ID NO: 5983086 - DNA, 25 bp, Homo sapien
aggtcaacaatcttgtcatggggta

SEQ ID NO: 5983087 - DNA, 25 bp, Homo sapien
ctaacgatttgatttttagatggac

SEQ ID NO: 5983088 - DNA, 25 bp, Homo sapien
taaaggttcaaatcttctaacgatt

SEQ ID NO: 5983089 - DNA, 25 bp, Homo sapien
gtcatggggtaaaacttccacttcg

SEQ ID NO: 5983090 - DNA, 25 bp, Homo sapien
aggtctagagacgttaatttggtga

SEQ ID NO: 5983091 - DNA, 25 bp, Homo sapien
tctgtctgagacataattgtttcaa

SEQ ID NO: 5983092 - DNA, 25 bp, Homo sapien
gttttcacccaagctctcaaaggat

SEQ ID NO: 5983093 - DNA, 25 bp, Homo sapien
aatctgcagtgatgaagtcaggatt

SEQ ID NO: 5983094 - DNA, 25 bp, Homo sapien
tcttcaagattggtcaactcttcta

SEQ ID NO: 5983095 - DNA, 25 bp, Homo sapien
taaacgacaggtctagagacgttaa

SEQ ID NO: 5983096 - DNA, 25 bp, Homo sapien
atgtcagttaaatttgacaggtggt

SEQ ID NO: 5983097 - DNA, 25 bp, Homo sapien
tcgggttcaatagaatgaaccttat

SEQ ID NO: 5983098 - DNA, 25 bp, Homo sapien
caatcttctgtagggatggaggtaa

SEQ ID NO: 5983099 - DNA, 25 bp, Homo sapien
ccttcgaaggaatcgggttcaatag

SEQ ID NO: 5983100 - DNA, 25 bp, Homo sapien
ttgtatcgtctacaacctcaatctt

SEQ ID NO: 5983101 - DNA, 25 bp, Homo sapien
ttgatcttgttaaacgacaggtcta

SEQ ID NO: 5983102 - DNA, 25 bp, Homo sapien
ggtgatgaaattatgtgacagatag

SEQ ID NO: 5983103 - DNA, 25 bp, Homo sapien
tattaacattagaggagatatgttt

SEQ ID NO: 5983104 - DNA, 25 bp, Homo sapien
atgctttcgatcaggttctgtctga

SEQ ID NO: 5983105 - DNA, 25 bp, Homo sapien
atgtgcttgatcttgttaaacgaca

SEQ ID NO: 5983106 - DNA, 25 bp, Homo sapien
tctgagacataattgtttcaaattc

SEQ ID NO: 5983107 - DNA, 25 bp, Homo sapien
aatcttgtcatggggtaaaacttcc

SEQ ID NO: 5983108 - DNA, 25 bp, Homo sapien
tagggatggaggtaagttcatagtc

SEQ ID NO: 5983109 - DNA, 25 bp, Homo sapien
gaccttcgaaggaatcgggttcaat

SEQ ID NO: 5983110 - DNA, 25 bp, Homo sapien
ttgacagaccttcgaaggaatcggg

SEQ ID NO: 5983111 - DNA, 25 bp, Homo sapien
cctctacatcatcaggcagatcttg

SEQ ID NO: 5983112 - DNA, 25 bp, Homo sapien
ttcactatctttgttaactgaattc

SEQ ID NO: 5983113 - DNA, 25 bp, Homo sapien
aaggaatcgggttcaatagaatgaa

SEQ ID NO: 5983114 - DNA, 25 bp, Homo sapien
ttctaacgatttgatttttagatgg

SEQ ID NO: 5983115 - DNA, 25 bp, Homo sapien
tccgaatctgcagtgatgaagtcag

SEQ ID NO: 5983116 - DNA, 25 bp, Homo sapien
ttctatacgaagtcttattttccag

SEQ ID NO: 5983117 - DNA, 25 bp, Homo sapien
gggcggacaggttttcacccaagct

SEQ ID NO: 5983118 - DNA, 25 bp, Homo sapien
gctctcaaaggattgatctatcttg

SEQ ID NO: 5983119 - DNA, 25 bp, Homo sapien
ttttggaaatgctgttctgcacgaa

SEQ ID NO: 5983120 - DNA, 25 bp, Homo sapien
caggatttgtatcgtctacaacctc

SEQ ID NO: 5983121 - DNA, 25 bp, Homo sapien
aaattcttgaacctataaaggttca

SEQ ID NO: 5983122 - DNA, 25 bp, Homo sapien
tttcagtgatttcaaagtggacaga

SEQ ID NO: 5983123 - DNA, 25 bp, Homo sapien
ggaatcgggttcaatagaatgaacc

SEQ ID NO: 5983124 - DNA, 25 bp, Homo sapien
gcttgatcttgttaaacgacaggtc

SEQ ID NO: 5983125 - DNA, 25 bp, Homo sapien
tattttccagttgaatagggtttcc

SEQ ID NO: 5983126 - DNA, 25 bp, Homo sapien
aggtaattttgttggaggtcacgtc

SEQ ID NO: 5983127 - DNA, 25 bp, Homo sapien
tcaaaggattgatctatcttgttaa

SEQ ID NO: 5983128 - DNA, 25 bp, Homo sapien
aatggtctccaagcgtgatagggcg

SEQ ID NO: 5983129 - DNA, 25 bp, Homo sapien
tgaagtcaggatttgtatcgtctac

SEQ ID NO: 5983130 - DNA, 25 bp, Homo sapien
ttgatttttagatggaccaagtcaa

SEQ ID NO: 5983131 - DNA, 25 bp, Homo sapien
aggtttttctctagaccttcaatct

SEQ ID NO: 5983132 - DNA, 25 bp, Homo sapien
ggtttccctccagataaatggtctc

SEQ ID NO: 5983133 - DNA, 25 bp, Homo sapien
ccagttgaatagggtttccctccag

SEQ ID NO: 5983134 - DNA, 25 bp, Homo sapien
tataaattctccagatcagtcaaat

SEQ ID NO: 5983135 - DNA, 25 bp, Homo sapien
cattagaggagatatgtttaatttt

SEQ ID NO: 5983136 - DNA, 25 bp, Homo sapien
atttcaaagtggacagattttcaat

SEQ ID NO: 5983137 - DNA, 25 bp, Homo sapien
gatgaagtcaggatttgtatcgtct

SEQ ID NO: 5983138 - DNA, 25 bp, Homo sapien
tatcgtaaaaatcaaggtcaacaat

SEQ ID NO: 5983139 - DNA, 25 bp, Homo sapien
gtaaaaatcaaggtcaacaatcttg

SEQ ID NO: 5983140 - DNA, 25 bp, Homo sapien
cagttaaatttgacaggtggttcaa

SEQ ID NO: 5983141 - DNA, 25 bp, Homo sapien
tgatgtgcttgatcttgttaaacga

SEQ ID NO: 5983142 - DNA, 25 bp, Homo sapien
agtcttggtatggaatttttaccca

SEQ ID NO: 5983143 - DNA, 25 bp, Homo sapien
gtcaggatttgtatcgtctacaacc

SEQ ID NO: 5983144 - DNA, 25 bp, Homo sapien
aagtcaataacctctacatcatcag

SEQ ID NO: 5983145 - DNA, 25 bp, Homo sapien
tgtaagttaataagtcttggtatgg

SEQ ID NO: 5983146 - DNA, 25 bp, Homo sapien
atgtgacagatagagctcttcaaga

SEQ ID NO: 5983147 - DNA, 25 bp, Homo sapien
agattttcaattttggaaatgctgt

SEQ ID NO: 5983148 - DNA, 25 bp, Homo sapien
tatcttgttaaaggaggcccatatg

SEQ ID NO: 5983149 - DNA, 25 bp, Homo sapien
ctctagaccttcaatcttggtgatg

SEQ ID NO: 5983150 - DNA, 25 bp, Homo sapien
tttcttccaagtttgacagaccttc

SEQ ID NO: 5983151 - DNA, 25 bp, Homo sapien
aatcttctaacgatttgatttttag

SEQ ID NO: 5983152 - DNA, 25 bp, Homo sapien
cgacaggtctagagacgttaatttg

SEQ ID NO: 5983153 - DNA, 25 bp, Homo sapien
tcaggttctgtctgagacataattg

SEQ ID NO: 5983154 - DNA, 25 bp, Homo sapien
gttttcttctatacgaagtcttatt

SEQ ID NO: 5983155 - DNA, 25 bp, Homo sapien
ctttgttaactgaattcttatccat

SEQ ID NO: 5983156 - DNA, 25 bp, Homo sapien
ctcttatatatgtcgcatcaatctt

SEQ ID NO: 5983157 - DNA, 25 bp, Homo sapien
ttagaggagatatgtttaattttgt

SEQ ID NO: 5983158 - DNA, 25 bp, Homo sapien
acaggtctagagacgttaatttggt

SEQ ID NO: 5983159 - DNA, 25 bp, Homo sapien
ttgtcatggggtaaaacttccactt

SEQ ID NO: 5983160 - DNA, 25 bp, Homo sapien
tctacaacctcaatcttgtgtcttt

SEQ ID NO: 5983161 - DNA, 25 bp, Homo sapien
gttaaatttgacaggtggttcaagt

SEQ ID NO: 5983162 - DNA, 25 bp, Homo sapien
ttccagttgaatagggtttccctcc

SEQ ID NO: 5983163 - DNA, 25 bp, Homo sapien
agtttttcagtgatttcaaagtgga

SEQ ID NO: 5983164 - DNA, 25 bp, Homo sapien
cagtgatgaagtcaggatttgtatc

SEQ ID NO: 5983165 - DNA, 25 bp, Homo sapien
agacgttaatttggtgagcttatta

SEQ ID NO: 5983166 - DNA, 25 bp, Homo sapien
ttcaaagtggacagattttcaattt

SEQ ID NO: 5983167 - DNA, 25 bp, Homo sapien
tttcacccaagctctcaaaggattg

SEQ ID NO: 5983168 - DNA, 25 bp, Homo sapien
tcttgtcatggggtaaaacttccac

SEQ ID NO: 5983169 - DNA, 25 bp, Homo sapien
gtgatagggcggacaggttttcacc

SEQ ID NO: 5983170 - DNA, 25 bp, Homo sapien
tagattggatggacaatatcttcaa

SEQ ID NO: 5983171 - DNA, 25 bp, Homo sapien
gtcagttaaatttgacaggtggttc

SEQ ID NO: 5983172 - DNA, 25 bp, Homo sapien
tttccctccagataaatggtctcca

SEQ ID NO: 5983173 - DNA, 25 bp, Homo sapien
gtaattttgttggaggtcacgtcca

SEQ ID NO: 5983174 - DNA, 25 bp, Homo sapien
ttcaaattctttaaaggatgtaagt

SEQ ID NO: 5983175 - DNA, 25 bp, Homo sapien
attttcaattttggaaatgctgttc

SEQ ID NO: 5983176 - DNA, 25 bp, Homo sapien
gatcttgtgtcagttccgaatctgc

SEQ ID NO: 5983177 - DNA, 25 bp, Homo sapien
gatcaggttctgtctgagacataat

SEQ ID NO: 5983178 - DNA, 25 bp, Homo sapien
tttccagggaggtaattttgttgga

SEQ ID NO: 5983179 - DNA, 25 bp, Homo sapien
tgttctgcacgaagtataaattctc

SEQ ID NO: 5983180 - DNA, 25 bp, Homo sapien
atctttgttaactgaattcttatcc

SEQ ID NO: 5983181 - DNA, 25 bp, Homo sapien
ttatgctttcgatcaggttctgtct

SEQ ID NO: 5983182 - DNA, 25 bp, Homo sapien
gtcaactcttctagattttcaattt

SEQ ID NO: 5983183 - DNA, 25 bp, Homo sapien
agtgatttcaaagtggacagatttt

SEQ ID NO: 5983184 - DNA, 25 bp, Homo sapien
tccagataaatggtctccaagcgtg

SEQ ID NO: 5983185 - DNA, 25 bp, Homo sapien
atatgtcagttaaatttgacaggtg

SEQ ID NO: 5983186 - DNA, 25 bp, Homo sapien
ccagatcagtcaaattttctagatt

SEQ ID NO: 5983187 - DNA, 25 bp, Homo sapien
tatatatgtcgcatcaatcttctgt

SEQ ID NO: 5983188 - DNA, 25 bp, Homo sapien
aggattgatctatcttgttaaagga

SEQ ID NO: 5983189 - DNA, 25 bp, Homo sapien
taatttattagattggatggacaat

SEQ ID NO: 5983190 - DNA, 25 bp, Homo sapien
acctcaatcttgtgtctttcgtctt

SEQ ID NO: 5983191 - DNA, 25 bp, Homo sapien
tagatttttgatgtgcttgatcttg

SEQ ID NO: 5983192 - DNA, 25 bp, Homo sapien
taccacctaattctaagtttttcag

SEQ ID NO: 5983193 - DNA, 25 bp, Homo sapien
gatctatcttgttaaaggaggccca

SEQ ID NO: 5983194 - DNA, 25 bp, Homo sapien
attggtcaactcttctagattttca

SEQ ID NO: 5983195 - DNA, 25 bp, Homo sapien
tagtcagttttcttctatacgaagt

SEQ ID NO: 5983196 - DNA, 25 bp, Homo sapien
gatggaccaagtcaataacctctac

SEQ ID NO: 5983197 - DNA, 25 bp, Homo sapien
aatagaatgaaccttattaccacct

SEQ ID NO: 5983198 - DNA, 25 bp, Homo sapien
taatttggtgagcttattaacatta

SEQ ID NO: 5983199 - DNA, 25 bp, Homo sapien
gcctcttatatatgtcgcatcaatc

SEQ ID NO: 5983200 - DNA, 25 bp, Homo sapien
tggtcaactcttctagattttcaat

SEQ ID NO: 5983201 - DNA, 25 bp, Homo sapien
ccaagcgtgatagggcggacaggtt

SEQ ID NO: 5983202 - DNA, 25 bp, Homo sapien
cttctgtagggatggaggtaagttc

SEQ ID NO: 5983203 - DNA, 25 bp, Homo sapien
cgtctacaacctcaatcttgtgtct

SEQ ID NO: 5983204 - DNA, 25 bp, Homo sapien
ttttgttggaggtcacgtccaaagt

SEQ ID NO: 5983205 - DNA, 25 bp, Homo sapien
aattttgttggaggtcacgtccaaa

SEQ ID NO: 5983206 - DNA, 25 bp, Homo sapien
tagggcggacaggttttcacccaag

SEQ ID NO: 5983207 - DNA, 25 bp, Homo sapien
tccacttcgcttatgctttcgatca

SEQ ID NO: 5983208 - DNA, 25 bp, Homo sapien
ggaaatgctgttctgcacgaagtat

SEQ ID NO: 5983209 - DNA, 25 bp, Homo sapien
acaggttttcacccaagctctcaaa

SEQ ID NO: 5983210 - DNA, 25 bp, Homo sapien
ctcaatcttgtgtctttcgtctttt

SEQ ID NO: 5983211 - DNA, 25 bp, Homo sapien
aacctataaaggttcaaatcttcta

SEQ ID NO: 5983212 - DNA, 25 bp, Homo sapien
aggatgtaagttaataagtcttggt

SEQ ID NO: 5983213 - DNA, 25 bp, Homo sapien
gctgttctgcacgaagtataaattc

SEQ ID NO: 5983214 - DNA, 25 bp, Homo sapien
tcttgtgtcagttccgaatctgcag

SEQ ID NO: 5983215 - DNA, 25 bp, Homo sapien
ataacctctacatcatcaggcagat

SEQ ID NO: 5983216 - DNA, 25 bp, Homo sapien
accttcaatcttggtgatgaaatta

SEQ ID NO: 5983217 - DNA, 25 bp, Homo sapien
ttgtgtcagttccgaatctgcagtg

SEQ ID NO: 5983218 - DNA, 25 bp, Homo sapien
cgaaggaatcgggttcaatagaatg

SEQ ID NO: 5983219 - DNA, 25 bp, Homo sapien
atcgtctacaacctcaatcttgtgt

SEQ ID NO: 5983220 - DNA, 25 bp, Homo sapien
ttcgaaggaatcgggttcaatagaa

SEQ ID NO: 5983221 - DNA, 25 bp, Homo sapien
gaccaagtcaataacctctacatca

SEQ ID NO: 5983222 - DNA, 25 bp, Homo sapien
tttgatgtgcttgatcttgttaaac

SEQ ID NO: 5983223 - DNA, 25 bp, Homo sapien
aatttcttccaagtttgacagacct

SEQ ID NO: 5983224 - DNA, 25 bp, Homo sapien
aggttcaaatcttctaacgatttga

SEQ ID NO: 5983225 - DNA, 25 bp, Homo sapien
tctaagtttttcagtgatttcaaag

SEQ ID NO: 5983226 - DNA, 25 bp, Homo sapien
atacgaagtcttattttccagttga

SEQ ID NO: 5983227 - DNA, 25 bp, Homo sapien
cttcgcttatgctttcgatcaggtt

SEQ ID NO: 5983228 - DNA, 25 bp, Homo sapien
agttaataagtcttggtatggaatt

SEQ ID NO: 5983229 - DNA, 25 bp, Homo sapien
aacattagaggagatatgtttaatt

SEQ ID NO: 5983230 - DNA, 25 bp, Homo sapien
gtttgacagaccttcgaaggaatcg

SEQ ID NO: 5983231 - DNA, 25 bp, Homo sapien
ccaagctctcaaaggattgatctat

SEQ ID NO: 5983232 - DNA, 25 bp, Homo sapien
tacatcatcaggcagatcttgtgtc

SEQ ID NO: 5983233 - DNA, 25 bp, Homo sapien
atgctgttctgcacgaagtataaat

SEQ ID NO: 5983234 - DNA, 25 bp, Homo sapien
tcttccaagtttgacagaccttcga

SEQ ID NO: 5983235 - DNA, 25 bp, Homo sapien
gaatgaaccttattaccacctaatt

SEQ ID NO: 5983236 - DNA, 25 bp, Homo sapien
tgtctgagacataattgtttcaaat

SEQ ID NO: 5983237 - DNA, 25 bp, Homo sapien
gttctgtctgagacataattgtttc

SEQ ID NO: 5983238 - DNA, 25 bp, Homo sapien
tgatagcaatcacccagacaatatt

SEQ ID NO: 5983239 - DNA, 25 bp, Homo sapien
ttgatagctcaaacatgttggcttg

SEQ ID NO: 5983240 - DNA, 25 bp, Homo sapien
cgacttcatcggtaaatcttttggt

SEQ ID NO: 5983241 - DNA, 25 bp, Homo sapien
atctcgaagaaacagagtcagcaga

SEQ ID NO: 5983242 - DNA, 25 bp, Homo sapien
aggtgatgaggcagaacaataagaa

SEQ ID NO: 5983243 - DNA, 25 bp, Homo sapien
aataaaaactaccagtatgactgga

SEQ ID NO: 5983244 - DNA, 25 bp, Homo sapien
ccatttgatcaagagttcatcgaag

SEQ ID NO: 5983245 - DNA, 25 bp, Homo sapien
tagctcaaacatgttggcttgcact

SEQ ID NO: 5983246 - DNA, 25 bp, Homo sapien
gcaacacttataatgatgaaccact

SEQ ID NO: 5983247 - DNA, 25 bp, Homo sapien
actccgttccatgagatcactagaa

SEQ ID NO: 5983248 - DNA, 25 bp, Homo sapien
cgttccatgagatcactagaagacc

SEQ ID NO: 5983249 - DNA, 25 bp, Homo sapien
cgtgtccatctgcatactacctgag

SEQ ID NO: 5983250 - DNA, 25 bp, Homo sapien
aatatcttgtacggtgggtcaaagt

SEQ ID NO: 5983251 - DNA, 25 bp, Homo sapien
tatctagcaacacttataatgatga

SEQ ID NO: 5983252 - DNA, 25 bp, Homo sapien
gcgattttccctacgatccattcaa

SEQ ID NO: 5983253 - DNA, 25 bp, Homo sapien
ctacctgagacttcaacaaagatgt

SEQ ID NO: 5983254 - DNA, 25 bp, Homo sapien
cgagtacttggattcaaagggcggt

SEQ ID NO: 5983255 - DNA, 25 bp, Homo sapien
taacagcggctataatttatgtcat

SEQ ID NO: 5983256 - DNA, 25 bp, Homo sapien
agaacgcaatacgctttaatccctg

SEQ ID NO: 5983257 - DNA, 25 bp, Homo sapien
taatgatgaaccactaaacaagacc

SEQ ID NO: 5983258 - DNA, 25 bp, Homo sapien
gtcatttttggacaaattttgaaat

SEQ ID NO: 5983259 - DNA, 25 bp, Homo sapien
tgatctcaatgtcatcagctgcctg

SEQ ID NO: 5983260 - DNA, 25 bp, Homo sapien
ccatgagatcactagaagaccgttt

SEQ ID NO: 5983261 - DNA, 25 bp, Homo sapien
gagtcagcagatattgacatggaaa

SEQ ID NO: 5983262 - DNA, 25 bp, Homo sapien
ggaggactggaacaggccatcttgg

SEQ ID NO: 5983263 - DNA, 25 bp, Homo sapien
tctttgtgatagcaatcacccagac

SEQ ID NO: 5983264 - DNA, 25 bp, Homo sapien
aaatcatccattttgatgaattagg

SEQ ID NO: 5983265 - DNA, 25 bp, Homo sapien
aaatcaaagagaaaatgctacattg

SEQ ID NO: 5983266 - DNA, 25 bp, Homo sapien
gacaatattgatctcaatgtcatca

SEQ ID NO: 5983267 - DNA, 25 bp, Homo sapien
atccctgcggaggactggaacaggc

SEQ ID NO: 5983268 - DNA, 25 bp, Homo sapien
gaactttcgggggcactccgttcca

SEQ ID NO: 5983269 - DNA, 25 bp, Homo sapien
tatttcagagttgagccagatgtag

SEQ ID NO: 5983270 - DNA, 25 bp, Homo sapien
gagttcatcgaagccaccacagcca

SEQ ID NO: 5983271 - DNA, 25 bp, Homo sapien
ttgaactttttcagaagtgagaaat

SEQ ID NO: 5983272 - DNA, 25 bp, Homo sapien
aagaatatctcgaagaaacagagtc

SEQ ID NO: 5983273 - DNA, 25 bp, Homo sapien
ctttagacaaaagatattagatccg

SEQ ID NO: 5983274 - DNA, 25 bp, Homo sapien
atcgaagccaccacagccatggcta

SEQ ID NO: 5983275 - DNA, 25 bp, Homo sapien
atcttggatcaacgaaactctattt

SEQ ID NO: 5983276 - DNA, 25 bp, Homo sapien
aattttgaaattggcgatttgaact

SEQ ID NO: 5983277 - DNA, 25 bp, Homo sapien
gaagtttcatcgagatatgatttta

SEQ ID NO: 5983278 - DNA, 25 bp, Homo sapien
tactttttgttagtcttctattttg

SEQ ID NO: 5983279 - DNA, 25 bp, Homo sapien
cttaatgatgtcccatttgatcaag

SEQ ID NO: 5983280 - DNA, 25 bp, Homo sapien
ttagatccgtacgatttttatttca

SEQ ID NO: 5983281 - DNA, 25 bp, Homo sapien
ttcatcggtaaatcttttggtgtca

SEQ ID NO: 5983282 - DNA, 25 bp, Homo sapien
taatgcttgtgcgtaattgggaact

SEQ ID NO: 5983283 - DNA, 25 bp, Homo sapien
gaaatatgtgccgatttaattctgg

SEQ ID NO: 5983284 - DNA, 25 bp, Homo sapien
aagaaatatggctttgtgataacta

SEQ ID NO: 5983285 - DNA, 25 bp, Homo sapien
tggaaggacggcagcggtaaatact

SEQ ID NO: 5983286 - DNA, 25 bp, Homo sapien
ccctgcggaggactggaacaggcca

SEQ ID NO: 5983287 - DNA, 25 bp, Homo sapien
gctcaaacatgttggcttgcacttg

SEQ ID NO: 5983288 - DNA, 25 bp, Homo sapien
ttgcgattttccctacgatccattc

SEQ ID NO: 5983289 - DNA, 25 bp, Homo sapien
aagagttcatcgaagccaccacagc

SEQ ID NO: 5983290 - DNA, 25 bp, Homo sapien
gattttacaaggaggcgacatatga

SEQ ID NO: 5983291 - DNA, 25 bp, Homo sapien
cccagacaatattgatctcaatgtc

SEQ ID NO: 5983292 - DNA, 25 bp, Homo sapien
ttggtgtcatcgatagtaacagcgg

SEQ ID NO: 5983293 - DNA, 25 bp, Homo sapien
ttgttagtcttctattttgcttgat

SEQ ID NO: 5983294 - DNA, 25 bp, Homo sapien
ttgtacggtgggtcaaagtcatata

SEQ ID NO: 5983295 - DNA, 25 bp, Homo sapien
tttatttcagagttgagccagatgt

SEQ ID NO: 5983296 - DNA, 25 bp, Homo sapien
tcccatttgatcaagagttcatcga

SEQ ID NO: 5983297 - DNA, 25 bp, Homo sapien
ttcgacttcatcggtaaatcttttg

SEQ ID NO: 5983298 - DNA, 25 bp, Homo sapien
tagcaacacttataatgatgaacca

SEQ ID NO: 5983299 - DNA, 25 bp, Homo sapien
atgctacattgttaatgcttgtgcg

SEQ ID NO: 5983300 - DNA, 25 bp, Homo sapien
aaaaaagacgaaatcatccattttg

SEQ ID NO: 5983301 - DNA, 25 bp, Homo sapien
agatttttcgagtacttggattcaa

SEQ ID NO: 5983302 - DNA, 25 bp, Homo sapien
tttcatcgagatatgattttacaag

SEQ ID NO: 5983303 - DNA, 25 bp, Homo sapien
aattaggctataagcatatgccttt

SEQ ID NO: 5983304 - DNA, 25 bp, Homo sapien
ttatgtcatttttggacaaattttg

SEQ ID NO: 5983305 - DNA, 25 bp, Homo sapien
gaagctgtagaagaatatctcgaag

SEQ ID NO: 5983306 - DNA, 25 bp, Homo sapien
ttcttaatgatgtcccatttgatca

SEQ ID NO: 5983307 - DNA, 25 bp, Homo sapien
actttttcagaagtgagaaatacat

SEQ ID NO: 5983308 - DNA, 25 bp, Homo sapien
tataagcatatgccttttggcacgt

SEQ ID NO: 5983309 - DNA, 25 bp, Homo sapien
ttgcttgatagctcaaacatgttgg

SEQ ID NO: 5983310 - DNA, 25 bp, Homo sapien
tccattcaaggtgatgaggcagaac

SEQ ID NO: 5983311 - DNA, 25 bp, Homo sapien
gatgaattaggctataagcatatgc

SEQ ID NO: 5983312 - DNA, 25 bp, Homo sapien
gtatgaatacgaagatacaattccg

SEQ ID NO: 5983313 - DNA, 25 bp, Homo sapien
gctacattgttaatgcttgtgcgta

SEQ ID NO: 5983314 - DNA, 25 bp, Homo sapien
ttttggcacgtgtccatctgcatac

SEQ ID NO: 5983315 - DNA, 25 bp, Homo sapien
ttgaaattggcgatttgaacttttt

SEQ ID NO: 5983316 - DNA, 25 bp, Homo sapien
ggccatcttggatcaacgaaactct

SEQ ID NO: 5983317 - DNA, 25 bp, Homo sapien
aaaatatcttgtacggtgggtcaaa

SEQ ID NO: 5983318 - DNA, 25 bp, Homo sapien
ctagattcgtatttttttagaagat

SEQ ID NO: 5983319 - DNA, 25 bp, Homo sapien
caaattttgaaattggcgatttgaa

SEQ ID NO: 5983320 - DNA, 25 bp, Homo sapien
cagcagatattgacatggaaagcaa

SEQ ID NO: 5983321 - DNA, 25 bp, Homo sapien
gagaaaatgctacattgttaatgct

SEQ ID NO: 5983322 - DNA, 25 bp, Homo sapien
gaatatctcgaagaaacagagtcag

SEQ ID NO: 5983323 - DNA, 25 bp, Homo sapien
cattgttaatgcttgtgcgtaattg

SEQ ID NO: 5983324 - DNA, 25 bp, Homo sapien
aaatacttcctcaaacacgattcat

SEQ ID NO: 5983325 - DNA, 25 bp, Homo sapien
ttagacaaaagatattagatccgta

SEQ ID NO: 5983326 - DNA, 25 bp, Homo sapien
gggaagctgtagaagaatatctcga

SEQ ID NO: 5983327 - DNA, 25 bp, Homo sapien
gatcaagagttcatcgaagccacca

SEQ ID NO: 5983328 - DNA, 25 bp, Homo sapien
tgcaccagttcattcgattgctgcc

SEQ ID NO: 5983329 - DNA, 25 bp, Homo sapien
gactggaacaggccatcttggatca

SEQ ID NO: 5983330 - DNA, 25 bp, Homo sapien
tattagatccgtacgatttttattt

SEQ ID NO: 5983331 - DNA, 25 bp, Homo sapien
ataactatgtatgaatacgaagata

SEQ ID NO: 5983332 - DNA, 25 bp, Homo sapien
atagtaacagcggctataatttatg

SEQ ID NO: 5983333 - DNA, 25 bp, Homo sapien
tcactagaagaccgtttcaataaaa

SEQ ID NO: 5983334 - DNA, 25 bp, Homo sapien
catatagaaatatgtgccgatttaa

SEQ ID NO: 5983335 - DNA, 25 bp, Homo sapien
agtttcatcgagatatgattttaca

SEQ ID NO: 5983336 - DNA, 25 bp, Homo sapien
atgaatacgaagatacaattccgag

SEQ ID NO: 5983337 - DNA, 25 bp, Homo sapien
ggtgggtcaaagtcatatagaaata

SEQ ID NO: 5983338 - DNA, 25 bp, Homo sapien
ctttcgggttcgtatcaaatttcga

SEQ ID NO: 5983339 - DNA, 25 bp, Homo sapien
tgtcccatttgatcaagagttcatc

SEQ ID NO: 5983340 - DNA, 25 bp, Homo sapien
atttttcgagtacttggattcaaag

SEQ ID NO: 5983341 - DNA, 25 bp, Homo sapien
tctgcatactacctgagacttcaac

SEQ ID NO: 5983342 - DNA, 25 bp, Homo sapien
acctgagacttcaacaaagatgtct

SEQ ID NO: 5983343 - DNA, 25 bp, Homo sapien
agaacaataagaaatatggctttgt

SEQ ID NO: 5983344 - DNA, 25 bp, Homo sapien
ttttggtgtcatcgatagtaacagc

SEQ ID NO: 5983345 - DNA, 25 bp, Homo sapien
tttcgggggcactccgttccatgag

SEQ ID NO: 5983346 - DNA, 25 bp, Homo sapien
aattctggatttttctttagacaaa

SEQ ID NO: 5983347 - DNA, 25 bp, Homo sapien
cacttataatgatgaaccactaaac

SEQ ID NO: 5983348 - DNA, 25 bp, Homo sapien
acagctgagcctagattcgtatttt

SEQ ID NO: 5983349 - DNA, 25 bp, Homo sapien
cgtttcaataaaaactaccagtatg

SEQ ID NO: 5983350 - DNA, 25 bp, Homo sapien
gaccaagggaataaaaaatcaaaga

SEQ ID NO: 5983351 - DNA, 25 bp, Homo sapien
gggggcactccgttccatgagatca

SEQ ID NO: 5983352 - DNA, 25 bp, Homo sapien
agatattgacatggaaagcaacgct

SEQ ID NO: 5983353 - DNA, 25 bp, Homo sapien
tgaagctatctagcaacacttataa

SEQ ID NO: 5983354 - DNA, 25 bp, Homo sapien
acatggaaagcaacgctttcgggtt

SEQ ID NO: 5983355 - DNA, 25 bp, Homo sapien
taaaaactaccagtatgactggaca

SEQ ID NO: 5983356 - DNA, 25 bp, Homo sapien
acggtgggtcaaagtcatatagaaa

SEQ ID NO: 5983357 - DNA, 25 bp, Homo sapien
catcggtaaatcttttggtgtcatc

SEQ ID NO: 5983358 - DNA, 25 bp, Homo sapien
cagtatgactggacatttcttaatg

SEQ ID NO: 5983359 - DNA, 25 bp, Homo sapien
ctcacttcttttgaaaaaagacgaa

SEQ ID NO: 5983360 - DNA, 25 bp, Homo sapien
tagagtatttttgcgattttcccta

SEQ ID NO: 5983361 - DNA, 25 bp, Homo sapien
aaatttcgacttcatcggtaaatct

SEQ ID NO: 5983362 - DNA, 25 bp, Homo sapien
ttgtgcgtaattgggaactttcggg

SEQ ID NO: 5983363 - DNA, 25 bp, Homo sapien
caatattgatctcaatgtcatcagc

SEQ ID NO: 5983364 - DNA, 25 bp, Homo sapien
tggattcaaagggcggtttttacta

SEQ ID NO: 5983365 - DNA, 25 bp, Homo sapien
tcttgtacggtgggtcaaagtcata

SEQ ID NO: 5983366 - DNA, 25 bp, Homo sapien
catcagctgcctgagaagatggtgg

SEQ ID NO: 5983367 - DNA, 25 bp, Homo sapien
ttttcgagtacttggattcaaaggg

SEQ ID NO: 5983368 - DNA, 25 bp, Homo sapien
tttcagagttgagccagatgtagag

SEQ ID NO: 5983369 - DNA, 25 bp, Homo sapien
gtgatgaggcagaacaataagaaat

SEQ ID NO: 5983370 - DNA, 25 bp, Homo sapien
tatcttgtacggtgggtcaaagtca

SEQ ID NO: 5983371 - DNA, 25 bp, Homo sapien
taatccctgcggaggactggaacag

SEQ ID NO: 5983372 - DNA, 25 bp, Homo sapien
acaaggaggcgacatatgaatcaga

SEQ ID NO: 5983373 - DNA, 25 bp, Homo sapien
caatacgctttaatccctgcggagg

SEQ ID NO: 5983374 - DNA, 25 bp, Homo sapien
ctgcaaggtatttcttacacaggtt

SEQ ID NO: 5983375 - DNA, 25 bp, Homo sapien
tgataactatgtatgaatacgaaga

SEQ ID NO: 5983376 - DNA, 25 bp, Homo sapien
tttgtgataactatgtatgaatacg

SEQ ID NO: 5983377 - DNA, 25 bp, Homo sapien
agcaacgctttcgggttcgtatcaa

SEQ ID NO: 5983378 - DNA, 25 bp, Homo sapien
gttggcttgcacttgtaccatatca

SEQ ID NO: 5983379 - DNA, 25 bp, Homo sapien
ccgtacgatttttatttcagagttg

SEQ ID NO: 5983380 - DNA, 25 bp, Homo sapien
ttgcacttgtaccatatcagagaca

SEQ ID NO: 5983381 - DNA, 25 bp, Homo sapien
ctacgatccattcaaggtgatgagg

SEQ ID NO: 5983382 - DNA, 25 bp, Homo sapien
aagaaacagagtcagcagatattga

SEQ ID NO: 5983383 - DNA, 25 bp, Homo sapien
tcagctgcctgagaagatggtggaa

SEQ ID NO: 5983384 - DNA, 25 bp, Homo sapien
tggatcaacgaaactctatttgaag

SEQ ID NO: 5983385 - DNA, 25 bp, Homo sapien
attgatctcaatgtcatcagctgcc

SEQ ID NO: 5983386 - DNA, 25 bp, Homo sapien
atgcttgtgcgtaattgggaacttt

SEQ ID NO: 5983387 - DNA, 25 bp, Homo sapien
gcttgcacttgtaccatatcagaga

SEQ ID NO: 5983388 - DNA, 25 bp, Homo sapien
tatgtgccgatttaattctggattt

SEQ ID NO: 5983389 - DNA, 25 bp, Homo sapien
ggacatttcttaatgatgtcccatt

SEQ ID NO: 5983390 - DNA, 25 bp, Homo sapien
atcatccattttgatgaattaggct

SEQ ID NO: 5983391 - DNA, 25 bp, Homo sapien
gctttaatccctgcggaggactgga

SEQ ID NO: 5983392 - DNA, 25 bp, Homo sapien
cacccagacaatattgatctcaatg

SEQ ID NO: 5983393 - DNA, 25 bp, Homo sapien
aaaagatattagatccgtacgattt

SEQ ID NO: 5983394 - DNA, 25 bp, Homo sapien
ttagaagatctcgagaagtttcatc

SEQ ID NO: 5983395 - DNA, 25 bp, Homo sapien
gtcaaagtcatatagaaatatgtgc

SEQ ID NO: 5983396 - DNA, 25 bp, Homo sapien
tgtgataactatgtatgaatacgaa

SEQ ID NO: 5983397 - DNA, 25 bp, Homo sapien
tgcatactacctgagacttcaacaa

SEQ ID NO: 5983398 - DNA, 25 bp, Homo sapien
gcgacatatgaatcagacgctgaag

SEQ ID NO: 5983399 - DNA, 25 bp, Homo sapien
cggcagcggtaaatacttcctcaaa

SEQ ID NO: 5983400 - DNA, 25 bp, Homo sapien
taatttatgtcatttttggacaaat

SEQ ID NO: 5983401 - DNA, 25 bp, Homo sapien
ctgtagaagaatatctcgaagaaac

SEQ ID NO: 5983402 - DNA, 25 bp, Homo sapien
taatgatgtcccatttgatcaagag

SEQ ID NO: 5983403 - DNA, 25 bp, Homo sapien
accagtatgactggacatttcttaa

SEQ ID NO: 5983404 - DNA, 25 bp, Homo sapien
gagaaatacattagatttttcgagt

SEQ ID NO: 5983405 - DNA, 25 bp, Homo sapien
cacgtgtccatctgcatactacctg

SEQ ID NO: 5983406 - DNA, 25 bp, Homo sapien
aaatgctacattgttaatgcttgtg

SEQ ID NO: 5983407 - DNA, 25 bp, Homo sapien
ttttacaaggaggcgacatatgaat

SEQ ID NO: 5983408 - DNA, 25 bp, Homo sapien
agctgcctgagaagatggtggaagg

SEQ ID NO: 5983409 - DNA, 25 bp, Homo sapien
tgtgatagcaatcacccagacaata

SEQ ID NO: 5983410 - DNA, 25 bp, Homo sapien
aagatctcgagaagtttcatcgaga

SEQ ID NO: 5983411 - DNA, 25 bp, Homo sapien
tagtcttctattttgcttgatagct

SEQ ID NO: 5983412 - DNA, 25 bp, Homo sapien
atctgcaaggtatttcttacacagg

SEQ ID NO: 5983413 - DNA, 25 bp, Homo sapien
ggaaagcaacgctttcgggttcgta

SEQ ID NO: 5983414 - DNA, 25 bp, Homo sapien
gtcttctattttgcttgatagctca

SEQ ID NO: 5983415 - DNA, 25 bp, Homo sapien
caaagagaaaatgctacattgttaa

SEQ ID NO: 5983416 - DNA, 25 bp, Homo sapien
ttttgcgattttccctacgatccat

SEQ ID NO: 5983417 - DNA, 25 bp, Homo sapien
accatatcagagacagctgagccta

SEQ ID NO: 5983418 - DNA, 25 bp, Homo sapien
atttgatcaagagttcatcgaagcc

SEQ ID NO: 5983419 - DNA, 25 bp, Homo sapien
taagcatatgccttttggcacgtgt

SEQ ID NO: 5983420 - DNA, 25 bp, Homo sapien
aggcgacatatgaatcagacgctga

SEQ ID NO: 5983421 - DNA, 25 bp, Homo sapien
tatagaaatatgtgccgatttaatt

SEQ ID NO: 5983422 - DNA, 25 bp, Homo sapien
tttgaaaaaagacgaaatcatccat

SEQ ID NO: 5983423 - DNA, 25 bp, Homo sapien
caccagttcattcgattgctgcctc

SEQ ID NO: 5983424 - DNA, 25 bp, Homo sapien
ccatcttggatcaacgaaactctat

SEQ ID NO: 5983425 - DNA, 25 bp, Homo sapien
gagacttcaacaaagatgtctttgt

SEQ ID NO: 5983426 - DNA, 25 bp, Homo sapien
tgccgatttaattctggatttttct

SEQ ID NO: 5983427 - DNA, 25 bp, Homo sapien
atttcgacttcatcggtaaatcttt

SEQ ID NO: 5983428 - DNA, 25 bp, Homo sapien
tggaggaaaaaaatatcttgtacgg

SEQ ID NO: 5983429 - DNA, 25 bp, Homo sapien
ggctttacaattaatggaggaaaaa

SEQ ID NO: 5983430 - DNA, 25 bp, Homo sapien
aaaactaccagtatgactggacatt

SEQ ID NO: 5983431 - DNA, 25 bp, Homo sapien
aacgaaactctatttgaagaggctt

SEQ ID NO: 5983432 - DNA, 25 bp, Homo sapien
gcacttgtaccatatcagagacagc

SEQ ID NO: 5983433 - DNA, 25 bp, Homo sapien
cagacaatattgatctcaatgtcat

SEQ ID NO: 5983434 - DNA, 25 bp, Homo sapien
agcatatgccttttggcacgtgtcc

SEQ ID NO: 5983435 - DNA, 25 bp, Homo sapien
gtatttttgcgattttccctacgat

SEQ ID NO: 5983436 - DNA, 25 bp, Homo sapien
atggctagtggtagaacgcaatacg

SEQ ID NO: 5983437 - DNA, 25 bp, Homo sapien
gagccagatgtagagtatttttgcg

SEQ ID NO: 5983438 - DNA, 25 bp, Homo sapien
actttcgggggcactccgttccatg

SEQ ID NO: 5983439 - DNA, 25 bp, Homo sapien
aagtcatatagaaatatgtgccgat

SEQ ID NO: 5983440 - DNA, 25 bp, Homo sapien
aatacattagatttttcgagtactt

SEQ ID NO: 5983441 - DNA, 25 bp, Homo sapien
ttacaaggaggcgacatatgaatca

SEQ ID NO: 5983442 - DNA, 25 bp, Homo sapien
gatcactagaagaccgtttcaataa

SEQ ID NO: 5983443 - DNA, 25 bp, Homo sapien
tgaggcagaacaataagaaatatgg

SEQ ID NO: 5983444 - DNA, 25 bp, Homo sapien
ctcgaagaaacagagtcagcagata

SEQ ID NO: 5983445 - DNA, 25 bp, Homo sapien
accactaaacaagaccaagggaata

SEQ ID NO: 5983446 - DNA, 25 bp, Homo sapien
cggtaaatacttcctcaaacacgat

SEQ ID NO: 5983447 - DNA, 25 bp, Homo sapien
gaactttttcagaagtgagaaatac

SEQ ID NO: 5983448 - DNA, 25 bp, Homo sapien
tcaacaaagatgtctttgtgatagc

SEQ ID NO: 5983449 - DNA, 25 bp, Homo sapien
gagatcactagaagaccgtttcaat

SEQ ID NO: 5983450 - DNA, 25 bp, Homo sapien
ttctggatttttctttagacaaaag

SEQ ID NO: 5983451 - DNA, 25 bp, Homo sapien
agacgctgaagctatctagcaacac

SEQ ID NO: 5983452 - DNA, 25 bp, Homo sapien
ttcaaggtgatgaggcagaacaata

SEQ ID NO: 5983453 - DNA, 25 bp, Homo sapien
gatgcaccagttcattcgattgctg

SEQ ID NO: 5983454 - DNA, 25 bp, Homo sapien
tctagcaacacttataatgatgaac

SEQ ID NO: 5983455 - DNA, 25 bp, Homo sapien
ttggcacgtgtccatctgcatacta

SEQ ID NO: 5983456 - DNA, 25 bp, Homo sapien
gatcaacgaaactctatttgaagag

SEQ ID NO: 5983457 - DNA, 25 bp, Homo sapien
atgttggcttgcacttgtaccatat

SEQ ID NO: 5983458 - DNA, 25 bp, Homo sapien
attcgtatttttttagaagatctcg

SEQ ID NO: 5983459 - DNA, 25 bp, Homo sapien
aagccaccacagccatggctagtgg

SEQ ID NO: 5983460 - DNA, 25 bp, Homo sapien
cttggatcaacgaaactctatttga

SEQ ID NO: 5983461 - DNA, 25 bp, Homo sapien
tatgccttttggcacgtgtccatct

SEQ ID NO: 5983462 - DNA, 25 bp, Homo sapien
aattccgagcctatgggaagctgta

SEQ ID NO: 5983463 - DNA, 25 bp, Homo sapien
aaggtggggagatgcaccagttcat

SEQ ID NO: 5983464 - DNA, 25 bp, Homo sapien
agatggtggaaggacggcagcggta

SEQ ID NO: 5983465 - DNA, 25 bp, Homo sapien
atcgatagtaacagcggctataatt

SEQ ID NO: 5983466 - DNA, 25 bp, Homo sapien
atcaaagagaaaatgctacattgtt

SEQ ID NO: 5983467 - DNA, 25 bp, Homo sapien
caggccatcttggatcaacgaaact

SEQ ID NO: 5983468 - DNA, 25 bp, Homo sapien
ctggatttttctttagacaaaagat

SEQ ID NO: 5983469 - DNA, 25 bp, Homo sapien
tccattttgatgaattaggctataa

SEQ ID NO: 5983470 - DNA, 25 bp, Homo sapien
tcaaacatgttggcttgcacttgta

SEQ ID NO: 5983471 - DNA, 25 bp, Homo sapien
tgccttttggcacgtgtccatctgc

SEQ ID NO: 5983472 - DNA, 25 bp, Homo sapien
ttgttaatgcttgtgcgtaattggg

SEQ ID NO: 5983473 - DNA, 25 bp, Homo sapien
atgagatcactagaagaccgtttca

SEQ ID NO: 5983474 - DNA, 25 bp, Homo sapien
acttcatcggtaaatcttttggtgt

SEQ ID NO: 5983475 - DNA, 25 bp, Homo sapien
tcaacgaaactctatttgaagaggc

SEQ ID NO: 5983476 - DNA, 25 bp, Homo sapien
atattgatctcaatgtcatcagctg

SEQ ID NO: 5983477 - DNA, 25 bp, Homo sapien
tcatcgatagtaacagcggctataa

SEQ ID NO: 5983478 - DNA, 25 bp, Homo sapien
ggtgtcatcgatagtaacagcggct

SEQ ID NO: 5983479 - DNA, 25 bp, Homo sapien
gctttgtgataactatgtatgaata

SEQ ID NO: 5983480 - DNA, 25 bp, Homo sapien
ccctacgatccattcaaggtgatga

SEQ ID NO: 5983481 - DNA, 25 bp, Homo sapien
atattgacatggaaagcaacgcttt

SEQ ID NO: 5983482 - DNA, 25 bp, Homo sapien
gccaccacagccatggctagtggta

SEQ ID NO: 5983483 - DNA, 25 bp, Homo sapien
agaagtgagaaatacattagatttt

SEQ ID NO: 5983484 - DNA, 25 bp, Homo sapien
tcgggggcactccgttccatgagat

SEQ ID NO: 5983485 - DNA, 25 bp, Homo sapien
agctgtagaagaatatctcgaagaa

SEQ ID NO: 5983486 - DNA, 25 bp, Homo sapien
ccacagccatggctagtggtagaac

SEQ ID NO: 5983487 - DNA, 25 bp, Homo sapien
acgatttttatttcagagttgagcc

SEQ ID NO: 5983488 - DNA, 25 bp, Homo sapien
tttggacaaattttgaaattggcga

SEQ ID NO: 5983489 - DNA, 25 bp, Homo sapien
tattttgcttgatagctcaaacatg

SEQ ID NO: 5983490 - DNA, 25 bp, Homo sapien
agtaacagcggctataatttatgtc

SEQ ID NO: 5983491 - DNA, 25 bp, Homo sapien
tgtcatcgatagtaacagcggctat

SEQ ID NO: 5983492 - DNA, 25 bp, Homo sapien
tgcgtaattgggaactttcgggggc

SEQ ID NO: 5983493 - DNA, 25 bp, Homo sapien
gagaagatggtggaaggacggcagc

SEQ ID NO: 5983494 - DNA, 25 bp, Homo sapien
cgaagccaccacagccatggctagt

SEQ ID NO: 5983495 - DNA, 25 bp, Homo sapien
tactacctgagacttcaacaaagat

SEQ ID NO: 5983496 - DNA, 25 bp, Homo sapien
ttaattctggatttttctttagaca

SEQ ID NO: 5983497 - DNA, 25 bp, Homo sapien
ataagaaatatggctttgtgataac

SEQ ID NO: 5983498 - DNA, 25 bp, Homo sapien
atcgagatatgattttacaaggagg

SEQ ID NO: 5983499 - DNA, 25 bp, Homo sapien
atagcaatcacccagacaatattga

SEQ ID NO: 5983500 - DNA, 25 bp, Homo sapien
ctggaacaggccatcttggatcaac

SEQ ID NO: 5983501 - DNA, 25 bp, Homo sapien
cgtatcaaatttcgacttcatcggt

SEQ ID NO: 5983502 - DNA, 25 bp, Homo sapien
tcaaatttcgacttcatcggtaaat

SEQ ID NO: 5983503 - DNA, 25 bp, Homo sapien
cttataatgatgaaccactaaacaa

SEQ ID NO: 5983504 - DNA, 25 bp, Homo sapien
tcagagacagctgagcctagattcg

SEQ ID NO: 5983505 - DNA, 25 bp, Homo sapien
atggtggaaggacggcagcggtaaa

SEQ ID NO: 5983506 - DNA, 25 bp, Homo sapien
aaaaatcaaagagaaaatgctacat

SEQ ID NO: 5983507 - DNA, 25 bp, Homo sapien
catctgcatactacctgagacttca

SEQ ID NO: 5983508 - DNA, 25 bp, Homo sapien
gcactccgttccatgagatcactag

SEQ ID NO: 5983509 - DNA, 25 bp, Homo sapien
gatctcgagaagtttcatcgagata

SEQ ID NO: 5983510 - DNA, 25 bp, Homo sapien
aatcagacgctgaagctatctagca

SEQ ID NO: 5983511 - DNA, 25 bp, Homo sapien
gactggacatttcttaatgatgtcc

SEQ ID NO: 5983512 - DNA, 25 bp, Homo sapien
ctgcggaggactggaacaggccatc

SEQ ID NO: 5983513 - DNA, 25 bp, Homo sapien
aaggaggcgacatatgaatcagacg

SEQ ID NO: 5983514 - DNA, 25 bp, Homo sapien
atttgaactttttcagaagtgagaa

SEQ ID NO: 5983515 - DNA, 25 bp, Homo sapien
gcggaggactggaacaggccatctt

SEQ ID NO: 5983516 - DNA, 25 bp, Homo sapien
atttttgcgattttccctacgatcc

SEQ ID NO: 5983517 - DNA, 25 bp, Homo sapien
agacaaaagatattagatccgtacg

SEQ ID NO: 5983518 - DNA, 25 bp, Homo sapien
ttcgtatcaaatttcgacttcatcg

SEQ ID NO: 5983519 - DNA, 25 bp, Homo sapien
ccttttggcacgtgtccatctgcat

SEQ ID NO: 5983520 - DNA, 25 bp, Homo sapien
atatctcgaagaaacagagtcagca

SEQ ID NO: 5983521 - DNA, 25 bp, Homo sapien
tgggtcaaagtcatatagaaatatg

SEQ ID NO: 5983522 - DNA, 25 bp, Homo sapien
gctatctagcaacacttataatgat

SEQ ID NO: 5983523 - DNA, 25 bp, Homo sapien
gatagctcaaacatgttggcttgca

SEQ ID NO: 5983524 - DNA, 25 bp, Homo sapien
tgacatggaaagcaacgctttcggg

SEQ ID NO: 5983525 - DNA, 25 bp, Homo sapien
gtcagcagatattgacatggaaagc

SEQ ID NO: 5983526 - DNA, 25 bp, Homo sapien
gaagatacaattccgagcctatggg

SEQ ID NO: 5983527 - DNA, 25 bp, Homo sapien
tacattagatttttcgagtacttgg

SEQ ID NO: 5983528 - DNA, 25 bp, Homo sapien
aagaggctttacaattaatggagga

SEQ ID NO: 5983529 - DNA, 25 bp, Homo sapien
atacgctttaatccctgcggaggac

SEQ ID NO: 5983530 - DNA, 25 bp, Homo sapien
acgctttaatccctgcggaggactg

SEQ ID NO: 5983531 - DNA, 25 bp, Homo sapien
aacaggccatcttggatcaacgaaa

SEQ ID NO: 5983532 - DNA, 25 bp, Homo sapien
atgactggacatttcttaatgatgt

SEQ ID NO: 5983533 - DNA, 25 bp, Homo sapien
tcgagaagtttcatcgagatatgat

SEQ ID NO: 5983534 - DNA, 25 bp, Homo sapien
cgatagtaacagcggctataattta

SEQ ID NO: 5983535 - DNA, 25 bp, Homo sapien
cgggttcgtatcaaatttcgacttc

SEQ ID NO: 5983536 - DNA, 25 bp, Homo sapien
aactatgtatgaatacgaagataca

SEQ ID NO: 5983537 - DNA, 25 bp, Homo sapien
aaaaaatatcttgtacggtgggtca

SEQ ID NO: 5983538 - DNA, 25 bp, Homo sapien
gcagaacaataagaaatatggcttt

SEQ ID NO: 5983539 - DNA, 25 bp, Homo sapien
atttttttagaagatctcgagaagt

SEQ ID NO: 5983540 - DNA, 25 bp, Homo sapien
gagatgcaccagttcattcgattgc

SEQ ID NO: 5983541 - DNA, 25 bp, Homo sapien
aagatgtctttgtgatagcaatcac

SEQ ID NO: 5983542 - DNA, 25 bp, Homo sapien
tcttttggtgtcatcgatagtaaca

SEQ ID NO: 5983543 - DNA, 25 bp, Homo sapien
ttcgggttcgtatcaaatttcgact

SEQ ID NO: 5983544 - DNA, 25 bp, Homo sapien
gaaatatggctttgtgataactatg

SEQ ID NO: 5983545 - DNA, 25 bp, Homo sapien
acaaaagatattagatccgtacgat

SEQ ID NO: 5983546 - DNA, 25 bp, Homo sapien
tggggagatgcaccagttcattcga

SEQ ID NO: 5983547 - DNA, 25 bp, Homo sapien
cattcaaggtgatgaggcagaacaa

SEQ ID NO: 5983548 - DNA, 25 bp, Homo sapien
gttaatgcttgtgcgtaattgggaa

SEQ ID NO: 5983549 - DNA, 25 bp, Homo sapien
agattcgtatttttttagaagatct

SEQ ID NO: 5983550 - DNA, 25 bp, Homo sapien
ttggcgatttgaactttttcagaag

SEQ ID NO: 5983551 - DNA, 25 bp, Homo sapien
gtacgatttttatttcagagttgag

SEQ ID NO: 5983552 - DNA, 25 bp, Homo sapien
gggagatgcaccagttcattcgatt

SEQ ID NO: 5983553 - DNA, 25 bp, Homo sapien
cagatgtagagtatttttgcgattt

SEQ ID NO: 5983554 - DNA, 25 bp, Homo sapien
gctataatttatgtcatttttggac

SEQ ID NO: 5983555 - DNA, 25 bp, Homo sapien
cattcgattgctgcctcacttcttt

SEQ ID NO: 5983556 - DNA, 25 bp, Homo sapien
tttttatttcagagttgagccagat

SEQ ID NO: 5983557 - DNA, 25 bp, Homo sapien
atctcaatgtcatcagctgcctgag

SEQ ID NO: 5983558 - DNA, 25 bp, Homo sapien
catatgccttttggcacgtgtccat

SEQ ID NO: 5983559 - DNA, 25 bp, Homo sapien
agcggctataatttatgtcattttt

SEQ ID NO: 5983560 - DNA, 25 bp, Homo sapien
catactacctgagacttcaacaaag

SEQ ID NO: 5983561 - DNA, 25 bp, Homo sapien
tgctgcctcacttcttttgaaaaaa

SEQ ID NO: 5983562 - DNA, 25 bp, Homo sapien
caataagaaatatggctttgtgata

SEQ ID NO: 5983563 - DNA, 25 bp, Homo sapien
tctcgagaagtttcatcgagatatg

SEQ ID NO: 5983564 - DNA, 25 bp, Homo sapien
gatattagatccgtacgatttttat

SEQ ID NO: 5983565 - DNA, 25 bp, Homo sapien
taaatcttttggtgtcatcgatagt

SEQ ID NO: 5983566 - DNA, 25 bp, Homo sapien
ctatgggaagctgtagaagaatatc

SEQ ID NO: 5983567 - DNA, 25 bp, Homo sapien
ttcaaagggcggtttttactatgaa

SEQ ID NO: 5983568 - DNA, 25 bp, Homo sapien
caaagtcatatagaaatatgtgccg

SEQ ID NO: 5983569 - DNA, 25 bp, Homo sapien
gaatacgaagatacaattccgagcc

SEQ ID NO: 5983570 - DNA, 25 bp, Homo sapien
gtaccatatcagagacagctgagcc

SEQ ID NO: 5983571 - DNA, 25 bp, Homo sapien
aagagaaaatgctacattgttaatg

SEQ ID NO: 5983572 - DNA, 25 bp, Homo sapien
tttgaagaggctttacaattaatgg

SEQ ID NO: 5983573 - DNA, 25 bp, Homo sapien
cattagatttttcgagtacttggat

SEQ ID NO: 5983574 - DNA, 25 bp, Homo sapien
tcagacgctgaagctatctagcaac

SEQ ID NO: 5983575 - DNA, 25 bp, Homo sapien
tatcaaatttcgacttcatcggtaa

SEQ ID NO: 5983576 - DNA, 25 bp, Homo sapien
taattgggaactttcgggggcactc

SEQ ID NO: 5983577 - DNA, 25 bp, Homo sapien
tcatcgagatatgattttacaagga

SEQ ID NO: 5983578 - DNA, 25 bp, Homo sapien
gcttgatagctcaaacatgttggct

SEQ ID NO: 5983579 - DNA, 25 bp, Homo sapien
agttgagccagatgtagagtatttt

SEQ ID NO: 5983580 - DNA, 25 bp, Homo sapien
agttcattcgattgctgcctcactt

SEQ ID NO: 5983581 - DNA, 25 bp, Homo sapien
cgcaatacgctttaatccctgcgga

SEQ ID NO: 5983582 - DNA, 25 bp, Homo sapien
acgaagatacaattccgagcctatg

SEQ ID NO: 5983583 - DNA, 25 bp, Homo sapien
aatcttttggtgtcatcgatagtaa

SEQ ID NO: 5983584 - DNA, 25 bp, Homo sapien
tgaaccactaaacaagaccaaggga

SEQ ID NO: 5983585 - DNA, 25 bp, Homo sapien
ggcacgtgtccatctgcatactacc

SEQ ID NO: 5983586 - DNA, 25 bp, Homo sapien
cttcaacaaagatgtctttgtgata

SEQ ID NO: 5983587 - DNA, 25 bp, Homo sapien
tttcagaagtgagaaatacattaga

SEQ ID NO: 5983588 - DNA, 25 bp, Homo sapien
ccagttcattcgattgctgcctcac

SEQ ID NO: 5983589 - DNA, 25 bp, Homo sapien
tcagagttgagccagatgtagagta

SEQ ID NO: 5983590 - DNA, 25 bp, Homo sapien
gttcatcgaagccaccacagccatg

SEQ ID NO: 5983591 - DNA, 25 bp, Homo sapien
ttagatttttcgagtacttggattc

SEQ ID NO: 5983592 - DNA, 25 bp, Homo sapien
atcacccagacaatattgatctcaa

SEQ ID NO: 5983593 - DNA, 25 bp, Homo sapien
aaactctatttgaagaggctttaca

SEQ ID NO: 5983594 - DNA, 25 bp, Homo sapien
gatgtctttgtgatagcaatcaccc

SEQ ID NO: 5983595 - DNA, 25 bp, Homo sapien
cgatttgaactttttcagaagtgag

SEQ ID NO: 5983596 - DNA, 25 bp, Homo sapien
tgaattaggctataagcatatgcct

SEQ ID NO: 5983597 - DNA, 25 bp, Homo sapien
gtatttttttagaagatctcgagaa

SEQ ID NO: 5983598 - DNA, 25 bp, Homo sapien
gccagatgtagagtatttttgcgat

SEQ ID NO: 5983599 - DNA, 25 bp, Homo sapien
tttaatccctgcggaggactggaac

SEQ ID NO: 5983600 - DNA, 25 bp, Homo sapien
cattttgatgaattaggctataagc

SEQ ID NO: 5983601 - DNA, 25 bp, Homo sapien
ttccgagcctatgggaagctgtaga

SEQ ID NO: 5983602 - DNA, 25 bp, Homo sapien
tataatttatgtcatttttggacaa

SEQ ID NO: 5983603 - DNA, 25 bp, Homo sapien
aaacatgttggcttgcacttgtacc

SEQ ID NO: 5983604 - DNA, 25 bp, Homo sapien
gaagatggtggaaggacggcagcgg

SEQ ID NO: 5983605 - DNA, 25 bp, Homo sapien
tctatttgaagaggctttacaatta

SEQ ID NO: 5983606 - DNA, 25 bp, Homo sapien
gattttccctacgatccattcaagg

SEQ ID NO: 5983607 - DNA, 25 bp, Homo sapien
gcagcggtaaatacttcctcaaaca

SEQ ID NO: 5983608 - DNA, 25 bp, Homo sapien
atgtcatttttggacaaattttgaa

SEQ ID NO: 5983609 - DNA, 25 bp, Homo sapien
ttcgagtacttggattcaaagggcg

SEQ ID NO: 5983610 - DNA, 25 bp, Homo sapien
gaaacagagtcagcagatattgaca

SEQ ID NO: 5983611 - DNA, 25 bp, Homo sapien
catatcagagacagctgagcctaga

SEQ ID NO: 5983612 - DNA, 25 bp, Homo sapien
gatgtcccatttgatcaagagttca

SEQ ID NO: 5983613 - DNA, 25 bp, Homo sapien
gtcatcagctgcctgagaagatggt

SEQ ID NO: 5983614 - DNA, 25 bp, Homo sapien
tccatctgcatactacctgagactt

SEQ ID NO: 5983615 - DNA, 25 bp, Homo sapien
gatgtagagtatttttgcgattttc

SEQ ID NO: 5983616 - DNA, 25 bp, Homo sapien
agcggtaaatacttcctcaaacacg

SEQ ID NO: 5983617 - DNA, 25 bp, Homo sapien
ctatgtatgaatacgaagatacaat

SEQ ID NO: 5983618 - DNA, 25 bp, Homo sapien
gaggaaaaaaatatcttgtacggtg

SEQ ID NO: 5983619 - DNA, 25 bp, Homo sapien
aggacggcagcggtaaatacttcct

SEQ ID NO: 5983620 - DNA, 25 bp, Homo sapien
gaaaatgctacattgttaatgcttg

SEQ ID NO: 5983621 - DNA, 25 bp, Homo sapien
cgattgctgcctcacttcttttgaa

SEQ ID NO: 5983622 - DNA, 25 bp, Homo sapien
ggaacaggccatcttggatcaacga

SEQ ID NO: 5983623 - DNA, 25 bp, Homo sapien
tgtctttgtgatagcaatcacccag

SEQ ID NO: 5983624 - DNA, 25 bp, Homo sapien
gggcactccgttccatgagatcact

SEQ ID NO: 5983625 - DNA, 25 bp, Homo sapien
tggtagaacgcaatacgctttaatc

SEQ ID NO: 5983626 - DNA, 25 bp, Homo sapien
tataatgatgaaccactaaacaaga

SEQ ID NO: 5983627 - DNA, 25 bp, Homo sapien
gtgagaaatacattagatttttcga

SEQ ID NO: 5983628 - DNA, 25 bp, Homo sapien
ttgatcaagagttcatcgaagccac

SEQ ID NO: 5983629 - DNA, 25 bp, Homo sapien
ttcattcgattgctgcctcacttct

SEQ ID NO: 5983630 - DNA, 25 bp, Homo sapien
tatttgaagaggctttacaattaat

SEQ ID NO: 5983631 - DNA, 25 bp, Homo sapien
atacttcctcaaacacgattcatag

SEQ ID NO: 5983632 - DNA, 25 bp, Homo sapien
tcaataaaaactaccagtatgactg

SEQ ID NO: 5983633 - DNA, 25 bp, Homo sapien
ttccatgagatcactagaagaccgt

SEQ ID NO: 5983634 - DNA, 25 bp, Homo sapien
aacaaagatgtctttgtgatagcaa

SEQ ID NO: 5983635 - DNA, 25 bp, Homo sapien
acatttcttaatgatgtcccatttg

SEQ ID NO: 5983636 - DNA, 25 bp, Homo sapien
gacggcagcggtaaatacttcctca

SEQ ID NO: 5983637 - DNA, 25 bp, Homo sapien
gtatgactggacatttcttaatgat

SEQ ID NO: 5983638 - DNA, 25 bp, Homo sapien
ggatttttctttagacaaaagatat

SEQ ID NO: 5983639 - DNA, 25 bp, Homo sapien
atttaattctggatttttctttaga

SEQ ID NO: 5983640 - DNA, 25 bp, Homo sapien
ggttcgtatcaaatttcgacttcat

SEQ ID NO: 5983641 - DNA, 25 bp, Homo sapien
tggctttgtgataactatgtatgaa

SEQ ID NO: 5983642 - DNA, 25 bp, Homo sapien
ttgagccagatgtagagtatttttg

SEQ ID NO: 5983643 - DNA, 25 bp, Homo sapien
aaaagacgaaatcatccattttgat

SEQ ID NO: 5983644 - DNA, 25 bp, Homo sapien
gtcatatagaaatatgtgccgattt

SEQ ID NO: 5983645 - DNA, 25 bp, Homo sapien
tcatcgaagccaccacagccatggc

SEQ ID NO: 5983646 - DNA, 25 bp, Homo sapien
tagaagaccgtttcaataaaaacta

SEQ ID NO: 5983647 - DNA, 25 bp, Homo sapien
ggcgatttgaactttttcagaagtg

SEQ ID NO: 5983648 - DNA, 25 bp, Homo sapien
acgctgaagctatctagcaacactt

SEQ ID NO: 5983649 - DNA, 25 bp, Homo sapien
gaaattggcgatttgaactttttca

SEQ ID NO: 5983650 - DNA, 25 bp, Homo sapien
cgatttaattctggatttttcttta

SEQ ID NO: 5983651 - DNA, 25 bp, Homo sapien
acttgtaccatatcagagacagctg

SEQ ID NO: 5983652 - DNA, 25 bp, Homo sapien
ttgatgaattaggctataagcatat

SEQ ID NO: 5983653 - DNA, 25 bp, Homo sapien
cttttgaaaaaagacgaaatcatcc

SEQ ID NO: 5983654 - DNA, 25 bp, Homo sapien
ctgagcctagattcgtattttttta

SEQ ID NO: 5983655 - DNA, 25 bp, Homo sapien
catatgaatcagacgctgaagctat

SEQ ID NO: 5983656 - DNA, 25 bp, Homo sapien
ctaccagtatgactggacatttctt

SEQ ID NO: 5983657 - DNA, 25 bp, Homo sapien
atgatgaaccactaaacaagaccaa

SEQ ID NO: 5983658 - DNA, 25 bp, Homo sapien
aagtgagaaatacattagatttttc

SEQ ID NO: 5983659 - DNA, 25 bp, Homo sapien
cgaaatcatccattttgatgaatta

SEQ ID NO: 5983660 - DNA, 25 bp, Homo sapien
gtaaatacttcctcaaacacgattc

SEQ ID NO: 5983661 - DNA, 25 bp, Homo sapien
aaagcaacgctttcgggttcgtatc

SEQ ID NO: 5983662 - DNA, 25 bp, Homo sapien
tacattgttaatgcttgtgcgtaat

SEQ ID NO: 5983663 - DNA, 25 bp, Homo sapien
atgtcatcagctgcctgagaagatg

SEQ ID NO: 5983664 - DNA, 25 bp, Homo sapien
tcaagagttcatcgaagccaccaca

SEQ ID NO: 5983665 - DNA, 25 bp, Homo sapien
aatggaggaaaaaaatatcttgtac

SEQ ID NO: 5983666 - DNA, 25 bp, Homo sapien
aattggcgatttgaactttttcaga

SEQ ID NO: 5983667 - DNA, 25 bp, Homo sapien
ttttgatgaattaggctataagcat

SEQ ID NO: 5983668 - DNA, 25 bp, Homo sapien
agagacagctgagcctagattcgta

SEQ ID NO: 5983669 - DNA, 25 bp, Homo sapien
atgattttacaaggaggcgacatat

SEQ ID NO: 5983670 - DNA, 25 bp, Homo sapien
atgggaagctgtagaagaatatctc

SEQ ID NO: 5983671 - DNA, 25 bp, Homo sapien
gcaaggtatttcttacacaggttaa

SEQ ID NO: 5983672 - DNA, 25 bp, Homo sapien
tcgtatttttttagaagatctcgag

SEQ ID NO: 5983673 - DNA, 25 bp, Homo sapien
acgatccattcaaggtgatgaggca

SEQ ID NO: 5983674 - DNA, 25 bp, Homo sapien
cggctataatttatgtcatttttgg

SEQ ID NO: 5983675 - DNA, 25 bp, Homo sapien
atacaattccgagcctatgggaagc

SEQ ID NO: 5983676 - DNA, 25 bp, Homo sapien
aagatattagatccgtacgattttt

SEQ ID NO: 5983677 - DNA, 25 bp, Homo sapien
acatgttggcttgcacttgtaccat

SEQ ID NO: 5983678 - DNA, 25 bp, Homo sapien
cgaaactctatttgaagaggcttta

SEQ ID NO: 5983679 - DNA, 25 bp, Homo sapien
tttttggacaaattttgaaattggc

SEQ ID NO: 5983680 - DNA, 25 bp, Homo sapien
actctatttgaagaggctttacaat

SEQ ID NO: 5983681 - DNA, 25 bp, Homo sapien
aaatctgcaaggtatttcttacaca

SEQ ID NO: 5983682 - DNA, 25 bp, Homo sapien
cactaaacaagaccaagggaataaa

SEQ ID NO: 5983683 - DNA, 25 bp, Homo sapien
ttccctacgatccattcaaggtgat

SEQ ID NO: 5983684 - DNA, 25 bp, Homo sapien
gagaagtttcatcgagatatgattt

SEQ ID NO: 5983685 - DNA, 25 bp, Homo sapien
atacgaagatacaattccgagccta

SEQ ID NO: 5983686 - DNA, 25 bp, Homo sapien
atatgattttacaaggaggcgacat

SEQ ID NO: 5983687 - DNA, 25 bp, Homo sapien
acaagaccaagggaataaaaaatca

SEQ ID NO: 5983688 - DNA, 25 bp, Homo sapien
agctgagcctagattcgtatttttt

SEQ ID NO: 5983689 - DNA, 25 bp, Homo sapien
ggtggaaggacggcagcggtaaata

SEQ ID NO: 5983690 - DNA, 25 bp, Homo sapien
atttatgtcatttttggacaaattt

SEQ ID NO: 5983691 - DNA, 25 bp, Homo sapien
gtagaagaatatctcgaagaaacag

SEQ ID NO: 5983692 - DNA, 25 bp, Homo sapien
cagagtcagcagatattgacatgga

SEQ ID NO: 5983693 - DNA, 25 bp, Homo sapien
tttttcagaagtgagaaatacatta

SEQ ID NO: 5983694 - DNA, 25 bp, Homo sapien
aacacttataatgatgaaccactaa

SEQ ID NO: 5983695 - DNA, 25 bp, Homo sapien
ttcgattgctgcctcacttcttttg

SEQ ID NO: 5983696 - DNA, 25 bp, Homo sapien
gaaggacggcagcggtaaatacttc

SEQ ID NO: 5983697 - DNA, 25 bp, Homo sapien
ttttgaaattggcgatttgaacttt

SEQ ID NO: 5983698 - DNA, 25 bp, Homo sapien
agccatggctagtggtagaacgcaa

SEQ ID NO: 5983699 - DNA, 25 bp, Homo sapien
ttaggctataagcatatgccttttg

SEQ ID NO: 5983700 - DNA, 25 bp, Homo sapien
tctattttgcttgatagctcaaaca

SEQ ID NO: 5983701 - DNA, 25 bp, Homo sapien
gagtatttttgcgattttccctacg

SEQ ID NO: 5983702 - DNA, 25 bp, Homo sapien
aacaataagaaatatggctttgtga

SEQ ID NO: 5983703 - DNA, 25 bp, Homo sapien
gcctcacttcttttgaaaaaagacg

SEQ ID NO: 5983704 - DNA, 25 bp, Homo sapien
gacgaaatcatccattttgatgaat

SEQ ID NO: 5983705 - DNA, 25 bp, Homo sapien
caatgtcatcagctgcctgagaaga

SEQ ID NO: 5983706 - DNA, 25 bp, Homo sapien
attgacatggaaagcaacgctttcg

SEQ ID NO: 5983707 - DNA, 25 bp, Homo sapien
tggacaaattttgaaattggcgatt

SEQ ID NO: 5983708 - DNA, 25 bp, Homo sapien
aggactggaacaggccatcttggat

SEQ ID NO: 5983709 - DNA, 25 bp, Homo sapien
gcctagattcgtatttttttagaag

SEQ ID NO: 5983710 - DNA, 25 bp, Homo sapien
ctttttgttagtcttctattttgct

SEQ ID NO: 5983711 - DNA, 25 bp, Homo sapien
aatatggctttgtgataactatgta

SEQ ID NO: 5983712 - DNA, 25 bp, Homo sapien
ccgagcctatgggaagctgtagaag

SEQ ID NO: 5983713 - DNA, 25 bp, Homo sapien
atgcaaatctgcaaggtatttctta

SEQ ID NO: 5983714 - DNA, 25 bp, Homo sapien
atttcttaatgatgtcccatttgat

SEQ ID NO: 5983715 - DNA, 25 bp, Homo sapien
gatttttatttcagagttgagccag

SEQ ID NO: 5983716 - DNA, 25 bp, Homo sapien
caccacagccatggctagtggtaga

SEQ ID NO: 5983717 - DNA, 25 bp, Homo sapien
gcaaatctgcaaggtatttcttaca

SEQ ID NO: 5983718 - DNA, 25 bp, Homo sapien
ctggacatttcttaatgatgtccca

SEQ ID NO: 5983719 - DNA, 25 bp, Homo sapien
caaggtgatgaggcagaacaataag

SEQ ID NO: 5983720 - DNA, 25 bp, Homo sapien
ttttagaagatctcgagaagtttca

SEQ ID NO: 5983721 - DNA, 25 bp, Homo sapien
cgaagaaacagagtcagcagatatt

SEQ ID NO: 5983722 - DNA, 25 bp, Homo sapien
cgagatatgattttacaaggaggcg

SEQ ID NO: 5983723 - DNA, 25 bp, Homo sapien
agcaatcacccagacaatattgatc

SEQ ID NO: 5983724 - DNA, 25 bp, Homo sapien
aggctataagcatatgccttttggc

SEQ ID NO: 5983725 - DNA, 25 bp, Homo sapien
atccgtacgatttttatttcagagt

SEQ ID NO: 5983726 - DNA, 25 bp, Homo sapien
tggcttgcacttgtaccatatcaga

SEQ ID NO: 5983727 - DNA, 25 bp, Homo sapien
ccatggctagtggtagaacgcaata

SEQ ID NO: 5983728 - DNA, 25 bp, Homo sapien
ctgagaagatggtggaaggacggca

SEQ ID NO: 5983729 - DNA, 25 bp, Homo sapien
atgtatgaatacgaagatacaattc

SEQ ID NO: 5983730 - DNA, 25 bp, Homo sapien
gatgaggcagaacaataagaaatat

SEQ ID NO: 5983731 - DNA, 25 bp, Homo sapien
agatatgattttacaaggaggcgac

SEQ ID NO: 5983732 - DNA, 25 bp, Homo sapien
ctcaatgtcatcagctgcctgagaa

SEQ ID NO: 5983733 - DNA, 25 bp, Homo sapien
ctgcctgagaagatggtggaaggac

SEQ ID NO: 5983734 - DNA, 25 bp, Homo sapien
ggtggggagatgcaccagttcattc

SEQ ID NO: 5983735 - DNA, 25 bp, Homo sapien
tttcaataaaaactaccagtatgac

SEQ ID NO: 5983736 - DNA, 25 bp, Homo sapien
gacaaattttgaaattggcgatttg

SEQ ID NO: 5983737 - DNA, 25 bp, Homo sapien
aacagagtcagcagatattgacatg

SEQ ID NO: 5983738 - DNA, 25 bp, Homo sapien
tgtagagtatttttgcgattttccc

SEQ ID NO: 5983739 - DNA, 25 bp, Homo sapien
tagaaatatgtgccgatttaattct

SEQ ID NO: 5983740 - DNA, 25 bp, Homo sapien
gatgaaccactaaacaagaccaagg

SEQ ID NO: 5983741 - DNA, 25 bp, Homo sapien
gaaaggtggggagatgcaccagttc

SEQ ID NO: 5983742 - DNA, 25 bp, Homo sapien
aagacgaaatcatccattttgatga

SEQ ID NO: 5983743 - DNA, 25 bp, Homo sapien
aatatgtgccgatttaattctggat

SEQ ID NO: 5983744 - DNA, 25 bp, Homo sapien
acagccatggctagtggtagaacgc

SEQ ID NO: 5983745 - DNA, 25 bp, Homo sapien
caatcacccagacaatattgatctc

SEQ ID NO: 5983746 - DNA, 25 bp, Homo sapien
agtggtagaacgcaatacgctttaa

SEQ ID NO: 5983747 - DNA, 25 bp, Homo sapien
gctataagcatatgccttttggcac

SEQ ID NO: 5983748 - DNA, 25 bp, Homo sapien
attgctgcctcacttcttttgaaaa

SEQ ID NO: 5983749 - DNA, 25 bp, Homo sapien
aactaccagtatgactggacatttc

SEQ ID NO: 5983750 - DNA, 25 bp, Homo sapien
tatggctttgtgataactatgtatg

SEQ ID NO: 5983751 - DNA, 25 bp, Homo sapien
ctgagacttcaacaaagatgtcttt

SEQ ID NO: 5983752 - DNA, 25 bp, Homo sapien
cttctattttgcttgatagctcaaa

SEQ ID NO: 5983753 - DNA, 25 bp, Homo sapien
catccattttgatgaattaggctat

SEQ ID NO: 5983754 - DNA, 25 bp, Homo sapien
tcggtaaatcttttggtgtcatcga

SEQ ID NO: 5983755 - DNA, 25 bp, Homo sapien
aacgcaatacgctttaatccctgcg

SEQ ID NO: 5983756 - DNA, 25 bp, Homo sapien
gaggctttacaattaatggaggaaa

SEQ ID NO: 5983757 - DNA, 25 bp, Homo sapien
gattcaaagggcggtttttactatg

SEQ ID NO: 5983758 - DNA, 25 bp, Homo sapien
ggaggcgacatatgaatcagacgct

SEQ ID NO: 5983759 - DNA, 25 bp, Homo sapien
atgatgtcccatttgatcaagagtt

SEQ ID NO: 5983760 - DNA, 25 bp, Homo sapien
tgaagaggctttacaattaatggag

SEQ ID NO: 5983761 - DNA, 25 bp, Homo sapien
gtacggtgggtcaaagtcatataga

SEQ ID NO: 5983762 - DNA, 25 bp, Homo sapien
gagcctatgggaagctgtagaagaa

SEQ ID NO: 5983763 - DNA, 25 bp, Homo sapien
agaagaatatctcgaagaaacagag

SEQ ID NO: 5983764 - DNA, 25 bp, Homo sapien
agatacaattccgagcctatgggaa

SEQ ID NO: 5983765 - DNA, 25 bp, Homo sapien
ggctagtggtagaacgcaatacgct

SEQ ID NO: 5983766 - DNA, 25 bp, Homo sapien
caaagatgtctttgtgatagcaatc

SEQ ID NO: 5983767 - DNA, 25 bp, Homo sapien
caacgctttcgggttcgtatcaaat

SEQ ID NO: 5983768 - DNA, 25 bp, Homo sapien
aagctatctagcaacacttataatg

SEQ ID NO: 5983769 - DNA, 25 bp, Homo sapien
tgtccatctgcatactacctgagac

SEQ ID NO: 5983770 - DNA, 25 bp, Homo sapien
gctgaagctatctagcaacacttat

SEQ ID NO: 5983771 - DNA, 25 bp, Homo sapien
acagcggctataatttatgtcattt

SEQ ID NO: 5983772 - DNA, 25 bp, Homo sapien
agacagctgagcctagattcgtatt

SEQ ID NO: 5983773 - DNA, 25 bp, Homo sapien
ttttgcttgatagctcaaacatgtt

SEQ ID NO: 5983774 - DNA, 25 bp, Homo sapien
tatcagagacagctgagcctagatt

SEQ ID NO: 5983775 - DNA, 25 bp, Homo sapien
gttagtcttctattttgcttgatag

SEQ ID NO: 5983776 - DNA, 25 bp, Homo sapien
agaagatctcgagaagtttcatcga

SEQ ID NO: 5983777 - DNA, 25 bp, Homo sapien
gatccattcaaggtgatgaggcaga

SEQ ID NO: 5983778 - DNA, 25 bp, Homo sapien
tatgaatcagacgctgaagctatct

SEQ ID NO: 5983779 - DNA, 25 bp, Homo sapien
ttttgttagtcttctattttgcttg

SEQ ID NO: 5983780 - DNA, 25 bp, Homo sapien
cgctttcgggttcgtatcaaatttc

SEQ ID NO: 5983781 - DNA, 25 bp, Homo sapien
catttttggacaaattttgaaattg

SEQ ID NO: 5983782 - DNA, 25 bp, Homo sapien
ctagtggtagaacgcaatacgcttt

SEQ ID NO: 5983783 - DNA, 25 bp, Homo sapien
gacttcaacaaagatgtctttgtga

SEQ ID NO: 5983784 - DNA, 25 bp, Homo sapien
gcttgtgcgtaattgggaactttcg

SEQ ID NO: 5983785 - DNA, 25 bp, Homo sapien
gtagaacgcaatacgctttaatccc

SEQ ID NO: 5983786 - DNA, 25 bp, Homo sapien
gcctgagaagatggtggaaggacgg

SEQ ID NO: 5983787 - DNA, 25 bp, Homo sapien
acaattccgagcctatgggaagctg

SEQ ID NO: 5983788 - DNA, 25 bp, Homo sapien
agagttgagccagatgtagagtatt

SEQ ID NO: 5983789 - DNA, 25 bp, Homo sapien
ggtaaatcttttggtgtcatcgata

SEQ ID NO: 5983790 - DNA, 25 bp, Homo sapien
gcagatattgacatggaaagcaacg

SEQ ID NO: 5983791 - DNA, 25 bp, Homo sapien
gcctatgggaagctgtagaagaata

SEQ ID NO: 5983792 - DNA, 25 bp, Homo sapien
gaaatacattagatttttcgagtac

SEQ ID NO: 5983793 - DNA, 25 bp, Homo sapien
agatccgtacgatttttatttcaga

SEQ ID NO: 5983794 - DNA, 25 bp, Homo sapien
atggaaagcaacgctttcgggttcg

SEQ ID NO: 5983795 - DNA, 25 bp, Homo sapien
tgaatcagacgctgaagctatctag

SEQ ID NO: 5983796 - DNA, 25 bp, Homo sapien
tgaaaaaagacgaaatcatccattt

SEQ ID NO: 5983797 - DNA, 25 bp, Homo sapien
ctgcctcacttcttttgaaaaaaga

SEQ ID NO: 5983798 - DNA, 25 bp, Homo sapien
gagcctagattcgtatttttttaga

SEQ ID NO: 5983799 - DNA, 25 bp, Homo sapien
ttttccctacgatccattcaaggtg

SEQ ID NO: 5983800 - DNA, 25 bp, Homo sapien
tgtgccgatttaattctggattttt

SEQ ID NO: 5983801 - DNA, 25 bp, Homo sapien
gacatatgaatcagacgctgaagct

SEQ ID NO: 5983802 - DNA, 25 bp, Homo sapien
tcagaagtgagaaatacattagatt

SEQ ID NO: 5983803 - DNA, 25 bp, Homo sapien
ttgtaccatatcagagacagctgag

SEQ ID NO: 5983804 - DNA, 25 bp, Homo sapien
tccgttccatgagatcactagaaga

SEQ ID NO: 5983805 - DNA, 25 bp, Homo sapien
aggcagaacaataagaaatatggct

SEQ ID NO: 5983806 - DNA, 25 bp, Homo sapien
tttgtgatagcaatcacccagacaa

SEQ ID NO: 5983807 - DNA, 25 bp, Homo sapien
ttttttagaagatctcgagaagttt

SEQ ID NO: 5983808 - DNA, 25 bp, Homo sapien
gaaaaatctaatgtatttctcactt

SEQ ID NO: 5983809 - DNA, 25 bp, Homo sapien
agcattaacaatgtagcattttctc

SEQ ID NO: 5983810 - DNA, 25 bp, Homo sapien
agatggacacgtgccaaaaggcata

SEQ ID NO: 5983811 - DNA, 25 bp, Homo sapien
gaatccaagtactcgaaaaatctaa

SEQ ID NO: 5983812 - DNA, 25 bp, Homo sapien
agcttcagcgtctgattcatatgtc

SEQ ID NO: 5983813 - DNA, 25 bp, Homo sapien
ttataagtgttgctagatagcttca

SEQ ID NO: 5983814 - DNA, 25 bp, Homo sapien
caggcagctgatgacattgagatca

SEQ ID NO: 5983815 - DNA, 25 bp, Homo sapien
aaacttctcgagatcttctaaaaaa

SEQ ID NO: 5983816 - DNA, 25 bp, Homo sapien
caaaatttgtccaaaaatgacataa

SEQ ID NO: 5983817 - DNA, 25 bp, Homo sapien
ttcttctacagcttcccataggctc

SEQ ID NO: 5983818 - DNA, 25 bp, Homo sapien
agacatctttgttgaagtctcaggt

SEQ ID NO: 5983819 - DNA, 25 bp, Homo sapien
ttagtggttcatcattataagtgtt

SEQ ID NO: 5983820 - DNA, 25 bp, Homo sapien
atcggcacatatttctatatgactt

SEQ ID NO: 5983821 - DNA, 25 bp, Homo sapien
aatcgccaatttcaaaatttgtcca

SEQ ID NO: 5983822 - DNA, 25 bp, Homo sapien
atagcctaattcatcaaaatggatg

SEQ ID NO: 5983823 - DNA, 25 bp, Homo sapien
tgatccaagatggcctgttccagtc

SEQ ID NO: 5983824 - DNA, 25 bp, Homo sapien
caaaatggatgatttcgtctttttt

SEQ ID NO: 5983825 - DNA, 25 bp, Homo sapien
aaaaatgacataaattatagccgct

SEQ ID NO: 5983826 - DNA, 25 bp, Homo sapien
taatgtatttctcacttctgaaaaa

SEQ ID NO: 5983827 - DNA, 25 bp, Homo sapien
tgggacatcattaagaaatgtccag

SEQ ID NO: 5983828 - DNA, 25 bp, Homo sapien
cattaacaatgtagcattttctctt

SEQ ID NO: 5983829 - DNA, 25 bp, Homo sapien
caagcaaaatagaagactaacaaaa

SEQ ID NO: 5983830 - DNA, 25 bp, Homo sapien
tctgatatggtacaagtgcaagcca

SEQ ID NO: 5983831 - DNA, 25 bp, Homo sapien
gggattaaagcgtattgcgttctac

SEQ ID NO: 5983832 - DNA, 25 bp, Homo sapien
tattcatacatagttatcacaaagc

SEQ ID NO: 5983833 - DNA, 25 bp, Homo sapien
tttgacccaccgtacaagatatttt

SEQ ID NO: 5983834 - DNA, 25 bp, Homo sapien
agtgatctcatggaacggagtgccc

SEQ ID NO: 5983835 - DNA, 25 bp, Homo sapien
aaatcgcaaaaatactctacatctg

SEQ ID NO: 5983836 - DNA, 25 bp, Homo sapien
tacatagttatcacaaagccatatt

SEQ ID NO: 5983837 - DNA, 25 bp, Homo sapien
tgttactatcgatgacaccaaaaga

SEQ ID NO: 5983838 - DNA, 25 bp, Homo sapien
tacggatctaatatcttttgtctaa

SEQ ID NO: 5983839 - DNA, 25 bp, Homo sapien
acatctggctcaactctgaaataaa

SEQ ID NO: 5983840 - DNA, 25 bp, Homo sapien
tctctgatatggtacaagtgcaagc

SEQ ID NO: 5983841 - DNA, 25 bp, Homo sapien
atagcttcagcgtctgattcatatg

SEQ ID NO: 5983842 - DNA, 25 bp, Homo sapien
gtactcgaaaaatctaatgtatttc

SEQ ID NO: 5983843 - DNA, 25 bp, Homo sapien
aatgggacatcattaagaaatgtcc

SEQ ID NO: 5983844 - DNA, 25 bp, Homo sapien
caaaagaagtgaggcagcaatcgaa

SEQ ID NO: 5983845 - DNA, 25 bp, Homo sapien
tctgctgactctgtttcttcgagat

SEQ ID NO: 5983846 - DNA, 25 bp, Homo sapien
tgagctatcaagcaaaatagaagac

SEQ ID NO: 5983847 - DNA, 25 bp, Homo sapien
gaactggtgcatctccccacctttc

SEQ ID NO: 5983848 - DNA, 25 bp, Homo sapien
tcttttttcaaaagaagtgaggcag

SEQ ID NO: 5983849 - DNA, 25 bp, Homo sapien
ctcaggtagtatgcagatggacacg

SEQ ID NO: 5983850 - DNA, 25 bp, Homo sapien
atcaccttgaatggatcgtagggaa

SEQ ID NO: 5983851 - DNA, 25 bp, Homo sapien
gaaaatcgcaaaaatactctacatc

SEQ ID NO: 5983852 - DNA, 25 bp, Homo sapien
atttcaaaatttgtccaaaaatgac

SEQ ID NO: 5983853 - DNA, 25 bp, Homo sapien
taccactagccatggctgtggtggc

SEQ ID NO: 5983854 - DNA, 25 bp, Homo sapien
agttcaaatcgccaatttcaaaatt

SEQ ID NO: 5983855 - DNA, 25 bp, Homo sapien
ttggtcttgtttagtggttcatcat

SEQ ID NO: 5983856 - DNA, 25 bp, Homo sapien
ttgctatcacaaagacatctttgtt

SEQ ID NO: 5983857 - DNA, 25 bp, Homo sapien
ctgttccagtcctccgcagggatta

SEQ ID NO: 5983858 - DNA, 25 bp, Homo sapien
tctcgatgaaacttctcgagatctt

SEQ ID NO: 5983859 - DNA, 25 bp, Homo sapien
acatcattaagaaatgtccagtcat

SEQ ID NO: 5983860 - DNA, 25 bp, Homo sapien
atcgtgtttgaggaagtatttaccg

SEQ ID NO: 5983861 - DNA, 25 bp, Homo sapien
attgaaacggtcttctagtgatctc

SEQ ID NO: 5983862 - DNA, 25 bp, Homo sapien
ggtagtatgcagatggacacgtgcc

SEQ ID NO: 5983863 - DNA, 25 bp, Homo sapien
aatatctgctgactctgtttcttcg

SEQ ID NO: 5983864 - DNA, 25 bp, Homo sapien
catagttatcacaaagccatatttc

SEQ ID NO: 5983865 - DNA, 25 bp, Homo sapien
agtttcgttgatccaagatggcctg

SEQ ID NO: 5983866 - DNA, 25 bp, Homo sapien
tgaactcttgatcaaatgggacatc

SEQ ID NO: 5983867 - DNA, 25 bp, Homo sapien
ggctcaactctgaaataaaaatcgt

SEQ ID NO: 5983868 - DNA, 25 bp, Homo sapien
gacattgagatcaatattgtctggg

SEQ ID NO: 5983869 - DNA, 25 bp, Homo sapien
ggtcttgtttagtggttcatcatta

SEQ ID NO: 5983870 - DNA, 25 bp, Homo sapien
cccaattacgcacaagcattaacaa

SEQ ID NO: 5983871 - DNA, 25 bp, Homo sapien
atgaactggtgcatctccccacctt

SEQ ID NO: 5983872 - DNA, 25 bp, Homo sapien
cgtagggaaaatcgcaaaaatactc

SEQ ID NO: 5983873 - DNA, 25 bp, Homo sapien
ttgctttccatgtcaatatctgctg

SEQ ID NO: 5983874 - DNA, 25 bp, Homo sapien
cagcttcccataggctcggaattgt

SEQ ID NO: 5983875 - DNA, 25 bp, Homo sapien
tttgagctatcaagcaaaatagaag

SEQ ID NO: 5983876 - DNA, 25 bp, Homo sapien
cccgaaagcgttgctttccatgtca

SEQ ID NO: 5983877 - DNA, 25 bp, Homo sapien
atatggtacaagtgcaagccaacat

SEQ ID NO: 5983878 - DNA, 25 bp, Homo sapien
atgacattgagatcaatattgtctg

SEQ ID NO: 5983879 - DNA, 25 bp, Homo sapien
ctccattaattgtaaagcctcttca

SEQ ID NO: 5983880 - DNA, 25 bp, Homo sapien
atgtcgcctccttgtaaaatcatat

SEQ ID NO: 5983881 - DNA, 25 bp, Homo sapien
ctagatagcttcagcgtctgattca

SEQ ID NO: 5983882 - DNA, 25 bp, Homo sapien
aaagcgttgctttccatgtcaatat

SEQ ID NO: 5983883 - DNA, 25 bp, Homo sapien
tgattcatatgtcgcctccttgtaa

SEQ ID NO: 5983884 - DNA, 25 bp, Homo sapien
aggaagtatttaccgctgccgtcct

SEQ ID NO: 5983885 - DNA, 25 bp, Homo sapien
cgccctttgaatccaagtactcgaa

SEQ ID NO: 5983886 - DNA, 25 bp, Homo sapien
tagtttttattgaaacggtcttcta

SEQ ID NO: 5983887 - DNA, 25 bp, Homo sapien
agaaaaatccagaattaaatcggca

SEQ ID NO: 5983888 - DNA, 25 bp, Homo sapien
ttgcgttctaccactagccatggct

SEQ ID NO: 5983889 - DNA, 25 bp, Homo sapien
catactggtagtttttattgaaacg

SEQ ID NO: 5983890 - DNA, 25 bp, Homo sapien
atatttcttattgttctgcctcatc

SEQ ID NO: 5983891 - DNA, 25 bp, Homo sapien
tacagcttcccataggctcggaatt

SEQ ID NO: 5983892 - DNA, 25 bp, Homo sapien
tcatcaccttgaatggatcgtaggg

SEQ ID NO: 5983893 - DNA, 25 bp, Homo sapien
tgtcaatatctgctgactctgtttc

SEQ ID NO: 5983894 - DNA, 25 bp, Homo sapien
ttccaccatcttctcaggcagctga

SEQ ID NO: 5983895 - DNA, 25 bp, Homo sapien
aacatgtttgagctatcaagcaaaa

SEQ ID NO: 5983896 - DNA, 25 bp, Homo sapien
atatcttttgtctaaagaaaaatcc

SEQ ID NO: 5983897 - DNA, 25 bp, Homo sapien
ttctcgagatcttctaaaaaaatac

SEQ ID NO: 5983898 - DNA, 25 bp, Homo sapien
tcaatattgtctgggtgattgctat

SEQ ID NO: 5983899 - DNA, 25 bp, Homo sapien
gtccaaaaatgacataaattatagc

SEQ ID NO: 5983900 - DNA, 25 bp, Homo sapien
ttcttattgttctgcctcatcacct

SEQ ID NO: 5983901 - DNA, 25 bp, Homo sapien
gatggcctgttccagtcctccgcag

SEQ ID NO: 5983902 - DNA, 25 bp, Homo sapien
actagccatggctgtggtggcttcg

SEQ ID NO: 5983903 - DNA, 25 bp, Homo sapien
ttaagaaatgtccagtcatactggt

SEQ ID NO: 5983904 - DNA, 25 bp, Homo sapien
caaatgggacatcattaagaaatgt

SEQ ID NO: 5983905 - DNA, 25 bp, Homo sapien
tttttcctccattaattgtaaagcc

SEQ ID NO: 5983906 - DNA, 25 bp, Homo sapien
atggatcgtagggaaaatcgcaaaa

SEQ ID NO: 5983907 - DNA, 25 bp, Homo sapien
caagccaacatgtttgagctatcaa

SEQ ID NO: 5983908 - DNA, 25 bp, Homo sapien
agcgttgctttccatgtcaatatct

SEQ ID NO: 5983909 - DNA, 25 bp, Homo sapien
tattgtctgggtgattgctatcaca

SEQ ID NO: 5983910 - DNA, 25 bp, Homo sapien
ttactatcgatgacaccaaaagatt

SEQ ID NO: 5983911 - DNA, 25 bp, Homo sapien
tcatcattataagtgttgctagata

SEQ ID NO: 5983912 - DNA, 25 bp, Homo sapien
tgccgtccttccaccatcttctcag

SEQ ID NO: 5983913 - DNA, 25 bp, Homo sapien
atgcttatagcctaattcatcaaaa

SEQ ID NO: 5983914 - DNA, 25 bp, Homo sapien
gaggcagcaatcgaatgaactggtg

SEQ ID NO: 5983915 - DNA, 25 bp, Homo sapien
tgtctaaagaaaaatccagaattaa

SEQ ID NO: 5983916 - DNA, 25 bp, Homo sapien
acggtcttctagtgatctcatggaa

SEQ ID NO: 5983917 - DNA, 25 bp, Homo sapien
tgtaaagcctcttcaaatagagttt

SEQ ID NO: 5983918 - DNA, 25 bp, Homo sapien
cgtcttttttcaaaagaagtgaggc

SEQ ID NO: 5983919 - DNA, 25 bp, Homo sapien
ccagaattaaatcggcacatatttc

SEQ ID NO: 5983920 - DNA, 25 bp, Homo sapien
ttgttctgcctcatcaccttgaatg

SEQ ID NO: 5983921 - DNA, 25 bp, Homo sapien
ttcttcgagatattcttctacagct

SEQ ID NO: 5983922 - DNA, 25 bp, Homo sapien
cgcacaagcattaacaatgtagcat

SEQ ID NO: 5983923 - DNA, 25 bp, Homo sapien
gcttcccataggctcggaattgtat

SEQ ID NO: 5983924 - DNA, 25 bp, Homo sapien
aatgtccagtcatactggtagtttt

SEQ ID NO: 5983925 - DNA, 25 bp, Homo sapien
ttatagcctaattcatcaaaatgga

SEQ ID NO: 5983926 - DNA, 25 bp, Homo sapien
tgactttgacccaccgtacaagata

SEQ ID NO: 5983927 - DNA, 25 bp, Homo sapien
aaatccagaattaaatcggcacata

SEQ ID NO: 5983928 - DNA, 25 bp, Homo sapien
tggctgtggtggcttcgatgaactc

SEQ ID NO: 5983929 - DNA, 25 bp, Homo sapien
ggtcttctagtgatctcatggaacg

SEQ ID NO: 5983930 - DNA, 25 bp, Homo sapien
gatgacaccaaaagatttaccgatg

SEQ ID NO: 5983931 - DNA, 25 bp, Homo sapien
cggcacatatttctatatgactttg

SEQ ID NO: 5983932 - DNA, 25 bp, Homo sapien
catatttctatatgactttgaccca

SEQ ID NO: 5983933 - DNA, 25 bp, Homo sapien
tgtaaaatcatatctcgatgaaact

SEQ ID NO: 5983934 - DNA, 25 bp, Homo sapien
ttttattgaaacggtcttctagtga

SEQ ID NO: 5983935 - DNA, 25 bp, Homo sapien
tgtttgagctatcaagcaaaataga

SEQ ID NO: 5983936 - DNA, 25 bp, Homo sapien
atctcatggaacggagtgcccccga

SEQ ID NO: 5983937 - DNA, 25 bp, Homo sapien
aaatcgtacggatctaatatctttt

SEQ ID NO: 5983938 - DNA, 25 bp, Homo sapien
cggaattgtatcttcgtattcatac

SEQ ID NO: 5983939 - DNA, 25 bp, Homo sapien
tgaaacttctcgagatcttctaaaa

SEQ ID NO: 5983940 - DNA, 25 bp, Homo sapien
cgcagggattaaagcgtattgcgtt

SEQ ID NO: 5983941 - DNA, 25 bp, Homo sapien
cgcctccttgtaaaatcatatctcg

SEQ ID NO: 5983942 - DNA, 25 bp, Homo sapien
taaaatcatatctcgatgaaacttc

SEQ ID NO: 5983943 - DNA, 25 bp, Homo sapien
tgaaaaagttcaaatcgccaatttc

SEQ ID NO: 5983944 - DNA, 25 bp, Homo sapien
ttgttgaagtctcaggtagtatgca

SEQ ID NO: 5983945 - DNA, 25 bp, Homo sapien
atcaaatgggacatcattaagaaat

SEQ ID NO: 5983946 - DNA, 25 bp, Homo sapien
tctgcctcatcaccttgaatggatc

SEQ ID NO: 5983947 - DNA, 25 bp, Homo sapien
ttaccgatgaagtcgaaatttgata

SEQ ID NO: 5983948 - DNA, 25 bp, Homo sapien
gttccagtcctccgcagggattaaa

SEQ ID NO: 5983949 - DNA, 25 bp, Homo sapien
caaatcgccaatttcaaaatttgtc

SEQ ID NO: 5983950 - DNA, 25 bp, Homo sapien
ccgtccttccaccatcttctcaggc

SEQ ID NO: 5983951 - DNA, 25 bp, Homo sapien
taaattatagccgctgttactatcg

SEQ ID NO: 5983952 - DNA, 25 bp, Homo sapien
ctttgttgaagtctcaggtagtatg

SEQ ID NO: 5983953 - DNA, 25 bp, Homo sapien
aatactctacatctggctcaactct

SEQ ID NO: 5983954 - DNA, 25 bp, Homo sapien
ataaaaatcgtacggatctaatatc

SEQ ID NO: 5983955 - DNA, 25 bp, Homo sapien
ttgagatcaatattgtctgggtgat

SEQ ID NO: 5983956 - DNA, 25 bp, Homo sapien
cctaattcatcaaaatggatgattt

SEQ ID NO: 5983957 - DNA, 25 bp, Homo sapien
aaagaagtgaggcagcaatcgaatg

SEQ ID NO: 5983958 - DNA, 25 bp, Homo sapien
tattgttctgcctcatcaccttgaa

SEQ ID NO: 5983959 - DNA, 25 bp, Homo sapien
tcatatgtcgcctccttgtaaaatc

SEQ ID NO: 5983960 - DNA, 25 bp, Homo sapien
atggacacgtgccaaaaggcatatg

SEQ ID NO: 5983961 - DNA, 25 bp, Homo sapien
tgatcaaatgggacatcattaagaa

SEQ ID NO: 5983962 - DNA, 25 bp, Homo sapien
aacctgtgtaagaaataccttgcag

SEQ ID NO: 5983963 - DNA, 25 bp, Homo sapien
ctttgaatccaagtactcgaaaaat

SEQ ID NO: 5983964 - DNA, 25 bp, Homo sapien
cctccgcagggattaaagcgtattg

SEQ ID NO: 5983965 - DNA, 25 bp, Homo sapien
tgtccagtcatactggtagttttta

SEQ ID NO: 5983966 - DNA, 25 bp, Homo sapien
aagtgttgctagatagcttcagcgt

SEQ ID NO: 5983967 - DNA, 25 bp, Homo sapien
cctcatcaccttgaatggatcgtag

SEQ ID NO: 5983968 - DNA, 25 bp, Homo sapien
gaatgaactggtgcatctccccacc

SEQ ID NO: 5983969 - DNA, 25 bp, Homo sapien
gttctgcctcatcaccttgaatgga

SEQ ID NO: 5983970 - DNA, 25 bp, Homo sapien
cgaacccgaaagcgttgctttccat

SEQ ID NO: 5983971 - DNA, 25 bp, Homo sapien
tgacccaccgtacaagatatttttt

SEQ ID NO: 5983972 - DNA, 25 bp, Homo sapien
aggcatatgcttatagcctaattca

SEQ ID NO: 5983973 - DNA, 25 bp, Homo sapien
atcatatctcgatgaaacttctcga

SEQ ID NO: 5983974 - DNA, 25 bp, Homo sapien
cttgatcaaatgggacatcattaag

SEQ ID NO: 5983975 - DNA, 25 bp, Homo sapien
tattcccttggtcttgtttagtggt

SEQ ID NO: 5983976 - DNA, 25 bp, Homo sapien
ttcatacatagttatcacaaagcca

SEQ ID NO: 5983977 - DNA, 25 bp, Homo sapien
cgcaaaaatactctacatctggctc

SEQ ID NO: 5983978 - DNA, 25 bp, Homo sapien
ggcagctgatgacattgagatcaat

SEQ ID NO: 5983979 - DNA, 25 bp, Homo sapien
ccttccaccatcttctcaggcagct

SEQ ID NO: 5983980 - DNA, 25 bp, Homo sapien
caaaagatttaccgatgaagtcgaa

SEQ ID NO: 5983981 - DNA, 25 bp, Homo sapien
cgaaagcgttgctttccatgtcaat

SEQ ID NO: 5983982 - DNA, 25 bp, Homo sapien
agctatcaagcaaaatagaagacta

SEQ ID NO: 5983983 - DNA, 25 bp, Homo sapien
tctacagcttcccataggctcggaa

SEQ ID NO: 5983984 - DNA, 25 bp, Homo sapien
ttctcacttctgaaaaagttcaaat

SEQ ID NO: 5983985 - DNA, 25 bp, Homo sapien
atgaatcgtgtttgaggaagtattt

SEQ ID NO: 5983986 - DNA, 25 bp, Homo sapien
ataagtgttgctagatagcttcagc

SEQ ID NO: 5983987 - DNA, 25 bp, Homo sapien
tgcctcatcaccttgaatggatcgt

SEQ ID NO: 5983988 - DNA, 25 bp, Homo sapien
aaaaagttcaaatcgccaatttcaa

SEQ ID NO: 5983989 - DNA, 25 bp, Homo sapien
taggctcagctgtctctgatatggt

SEQ ID NO: 5983990 - DNA, 25 bp, Homo sapien
caaaaggcatatgcttatagcctaa

SEQ ID NO: 5983991 - DNA, 25 bp, Homo sapien
atttctcacttctgaaaaagttcaa

SEQ ID NO: 5983992 - DNA, 25 bp, Homo sapien
aaatagagtttcgttgatccaagat

SEQ ID NO: 5983993 - DNA, 25 bp, Homo sapien
aactcttgatcaaatgggacatcat

SEQ ID NO: 5983994 - DNA, 25 bp, Homo sapien
gctatcacaaagacatctttgttga

SEQ ID NO: 5983995 - DNA, 25 bp, Homo sapien
tcgccaatttcaaaatttgtccaaa

SEQ ID NO: 5983996 - DNA, 25 bp, Homo sapien
tacgcacaagcattaacaatgtagc

SEQ ID NO: 5983997 - DNA, 25 bp, Homo sapien
ttaacaatgtagcattttctctttg

SEQ ID NO: 5983998 - DNA, 25 bp, Homo sapien
ttgaatccaagtactcgaaaaatct

SEQ ID NO: 5983999 - DNA, 25 bp, Homo sapien
catggaacggagtgcccccgaaagt

SEQ ID NO: 5984000 - DNA, 25 bp, Homo sapien
catcttctcaggcagctgatgacat

SEQ ID NO: 5984001 - DNA, 25 bp, Homo sapien
gcctcttcaaatagagtttcgttga

SEQ ID NO: 5984002 - DNA, 25 bp, Homo sapien
acatctttgttgaagtctcaggtag

SEQ ID NO: 5984003 - DNA, 25 bp, Homo sapien
atcattaagaaatgtccagtcatac

SEQ ID NO: 5984004 - DNA, 25 bp, Homo sapien
tgacaccaaaagatttaccgatgaa

SEQ ID NO: 5984005 - DNA, 25 bp, Homo sapien
ttcccaattacgcacaagcattaac

SEQ ID NO: 5984006 - DNA, 25 bp, Homo sapien
aaagttcaaatcgccaatttcaaaa

SEQ ID NO: 5984007 - DNA, 25 bp, Homo sapien
atcaagcaaaatagaagactaacaa

SEQ ID NO: 5984008 - DNA, 25 bp, Homo sapien
tctaaagaaaaatccagaattaaat

SEQ ID NO: 5984009 - DNA, 25 bp, Homo sapien
tagtaaaaaccgccctttgaatcca

SEQ ID NO: 5984010 - DNA, 25 bp, Homo sapien
gtttagtggttcatcattataagtg

SEQ ID NO: 5984011 - DNA, 25 bp, Homo sapien
gtatgcagatggacacgtgccaaaa

SEQ ID NO: 5984012 - DNA, 25 bp, Homo sapien
attaattgtaaagcctcttcaaata

SEQ ID NO: 5984013 - DNA, 25 bp, Homo sapien
agagtttcgttgatccaagatggcc

SEQ ID NO: 5984014 - DNA, 25 bp, Homo sapien
tcacaaagacatctttgttgaagtc

SEQ ID NO: 5984015 - DNA, 25 bp, Homo sapien
gagatattcttctacagcttcccat

SEQ ID NO: 5984016 - DNA, 25 bp, Homo sapien
cgtacggatctaatatcttttgtct

SEQ ID NO: 5984017 - DNA, 25 bp, Homo sapien
attacgcacaagcattaacaatgta

SEQ ID NO: 5984018 - DNA, 25 bp, Homo sapien
cgatgaagtcgaaatttgatacgaa

SEQ ID NO: 5984019 - DNA, 25 bp, Homo sapien
gaagtatttaccgctgccgtccttc

SEQ ID NO: 5984020 - DNA, 25 bp, Homo sapien
ggatgatttcgtcttttttcaaaag

SEQ ID NO: 5984021 - DNA, 25 bp, Homo sapien
attcatatgtcgcctccttgtaaaa

SEQ ID NO: 5984022 - DNA, 25 bp, Homo sapien
gaatcgtgtttgaggaagtatttac

SEQ ID NO: 5984023 - DNA, 25 bp, Homo sapien
ttgtccaaaaatgacataaattata

SEQ ID NO: 5984024 - DNA, 25 bp, Homo sapien
aattaaatcggcacatatttctata

SEQ ID NO: 5984025 - DNA, 25 bp, Homo sapien
gttcatcattataagtgttgctaga

SEQ ID NO: 5984026 - DNA, 25 bp, Homo sapien
tgaaacggtcttctagtgatctcat

SEQ ID NO: 5984027 - DNA, 25 bp, Homo sapien
gaagtcgaaatttgatacgaacccg

SEQ ID NO: 5984028 - DNA, 25 bp, Homo sapien
acttctcgagatcttctaaaaaaat

SEQ ID NO: 5984029 - DNA, 25 bp, Homo sapien
gttgatccaagatggcctgttccag

SEQ ID NO: 5984030 - DNA, 25 bp, Homo sapien
gattaaagcgtattgcgttctacca

SEQ ID NO: 5984031 - DNA, 25 bp, Homo sapien
tctaccactagccatggctgtggtg

SEQ ID NO: 5984032 - DNA, 25 bp, Homo sapien
atttgatacgaacccgaaagcgttg

SEQ ID NO: 5984033 - DNA, 25 bp, Homo sapien
atgaagtcgaaatttgatacgaacc

SEQ ID NO: 5984034 - DNA, 25 bp, Homo sapien
cttttgtctaaagaaaaatccagaa

SEQ ID NO: 5984035 - DNA, 25 bp, Homo sapien
tctatatgactttgacccaccgtac

SEQ ID NO: 5984036 - DNA, 25 bp, Homo sapien
aacccgaaagcgttgctttccatgt

SEQ ID NO: 5984037 - DNA, 25 bp, Homo sapien
cattataagtgttgctagatagctt

SEQ ID NO: 5984038 - DNA, 25 bp, Homo sapien
tctgattcatatgtcgcctccttgt

SEQ ID NO: 5984039 - DNA, 25 bp, Homo sapien
taattgtaaagcctcttcaaataga

SEQ ID NO: 5984040 - DNA, 25 bp, Homo sapien
ctggctcaactctgaaataaaaatc

SEQ ID NO: 5984041 - DNA, 25 bp, Homo sapien
tgtttgaggaagtatttaccgctgc

SEQ ID NO: 5984042 - DNA, 25 bp, Homo sapien
caagcattaacaatgtagcattttc

SEQ ID NO: 5984043 - DNA, 25 bp, Homo sapien
atcaaaatggatgatttcgtctttt

SEQ ID NO: 5984044 - DNA, 25 bp, Homo sapien
tcttctagtgatctcatggaacgga

SEQ ID NO: 5984045 - DNA, 25 bp, Homo sapien
tggcctgttccagtcctccgcaggg

SEQ ID NO: 5984046 - DNA, 25 bp, Homo sapien
aatctaggctcagctgtctctgata

SEQ ID NO: 5984047 - DNA, 25 bp, Homo sapien
agcctaattcatcaaaatggatgat

SEQ ID NO: 5984048 - DNA, 25 bp, Homo sapien
catggctgtggtggcttcgatgaac

SEQ ID NO: 5984049 - DNA, 25 bp, Homo sapien
aaacggtcttctagtgatctcatgg

SEQ ID NO: 5984050 - DNA, 25 bp, Homo sapien
ggctcagctgtctctgatatggtac

SEQ ID NO: 5984051 - DNA, 25 bp, Homo sapien
tatgactttgacccaccgtacaaga

SEQ ID NO: 5984052 - DNA, 25 bp, Homo sapien
tcccttggtcttgtttagtggttca

SEQ ID NO: 5984053 - DNA, 25 bp, Homo sapien
aaatggatgatttcgtcttttttca

SEQ ID NO: 5984054 - DNA, 25 bp, Homo sapien
agccgctgttactatcgatgacacc

SEQ ID NO: 5984055 - DNA, 25 bp, Homo sapien
gctgccgtccttccaccatcttctc

SEQ ID NO: 5984056 - DNA, 25 bp, Homo sapien
agccatatttcttattgttctgcct

SEQ ID NO: 5984057 - DNA, 25 bp, Homo sapien
caatgtagcattttctctttgattt

SEQ ID NO: 5984058 - DNA, 25 bp, Homo sapien
ctagtgatctcatggaacggagtgc

SEQ ID NO: 5984059 - DNA, 25 bp, Homo sapien
ccaagatggcctgttccagtcctcc

SEQ ID NO: 5984060 - DNA, 25 bp, Homo sapien
actatcgatgacaccaaaagattta

SEQ ID NO: 5984061 - DNA, 25 bp, Homo sapien
cttgtaaaatcatatctcgatgaaa

SEQ ID NO: 5984062 - DNA, 25 bp, Homo sapien
tatcacaaagacatctttgttgaag

SEQ ID NO: 5984063 - DNA, 25 bp, Homo sapien
gttgaagtctcaggtagtatgcaga

SEQ ID NO: 5984064 - DNA, 25 bp, Homo sapien
tagtatgcagatggacacgtgccaa

SEQ ID NO: 5984065 - DNA, 25 bp, Homo sapien
atcattataagtgttgctagatagc

SEQ ID NO: 5984066 - DNA, 25 bp, Homo sapien
cattaagaaatgtccagtcatactg

SEQ ID NO: 5984067 - DNA, 25 bp, Homo sapien
aattatagccgctgttactatcgat

SEQ ID NO: 5984068 - DNA, 25 bp, Homo sapien
taggctcggaattgtatcttcgtat

SEQ ID NO: 5984069 - DNA, 25 bp, Homo sapien
cagtcctccgcagggattaaagcgt

SEQ ID NO: 5984070 - DNA, 25 bp, Homo sapien
tcgatgaactcttgatcaaatggga

SEQ ID NO: 5984071 - DNA, 25 bp, Homo sapien
cacttctgaaaaagttcaaatcgcc

SEQ ID NO: 5984072 - DNA, 25 bp, Homo sapien
cttcgagatattcttctacagcttc

SEQ ID NO: 5984073 - DNA, 25 bp, Homo sapien
ttcgtcttttttcaaaagaagtgag

SEQ ID NO: 5984074 - DNA, 25 bp, Homo sapien
aaagttcccaattacgcacaagcat

SEQ ID NO: 5984075 - DNA, 25 bp, Homo sapien
atgtatttctcacttctgaaaaagt

SEQ ID NO: 5984076 - DNA, 25 bp, Homo sapien
ttgtctgggtgattgctatcacaaa

SEQ ID NO: 5984077 - DNA, 25 bp, Homo sapien
aaaaatcgtacggatctaatatctt

SEQ ID NO: 5984078 - DNA, 25 bp, Homo sapien
gtacaagatatttttttcctccatt

SEQ ID NO: 5984079 - DNA, 25 bp, Homo sapien
taaaaaaatacgaatctaggctcag

SEQ ID NO: 5984080 - DNA, 25 bp, Homo sapien
cttctaaaaaaatacgaatctaggc

SEQ ID NO: 5984081 - DNA, 25 bp, Homo sapien
tcatcaaaatggatgatttcgtctt

SEQ ID NO: 5984082 - DNA, 25 bp, Homo sapien
tcgaaaaatctaatgtatttctcac

SEQ ID NO: 5984083 - DNA, 25 bp, Homo sapien
gcccccgaaagttcccaattacgca

SEQ ID NO: 5984084 - DNA, 25 bp, Homo sapien
cggatctaatatcttttgtctaaag

SEQ ID NO: 5984085 - DNA, 25 bp, Homo sapien
atccagaattaaatcggcacatatt

SEQ ID NO: 5984086 - DNA, 25 bp, Homo sapien
cgaatctaggctcagctgtctctga

SEQ ID NO: 5984087 - DNA, 25 bp, Homo sapien
agaattaaatcggcacatatttcta

SEQ ID NO: 5984088 - DNA, 25 bp, Homo sapien
taaagcctcttcaaatagagtttcg

SEQ ID NO: 5984089 - DNA, 25 bp, Homo sapien
ttcatagtaaaaaccgccctttgaa

SEQ ID NO: 5984090 - DNA, 25 bp, Homo sapien
gatgaactcttgatcaaatgggaca

SEQ ID NO: 5984091 - DNA, 25 bp, Homo sapien
ttcccataggctcggaattgtatct

SEQ ID NO: 5984092 - DNA, 25 bp, Homo sapien
atctggctcaactctgaaataaaaa

SEQ ID NO: 5984093 - DNA, 25 bp, Homo sapien
ccatatttcttattgttctgcctca

SEQ ID NO: 5984094 - DNA, 25 bp, Homo sapien
agcgtctgattcatatgtcgcctcc

SEQ ID NO: 5984095 - DNA, 25 bp, Homo sapien
tactctacatctggctcaactctga

SEQ ID NO: 5984096 - DNA, 25 bp, Homo sapien
gactctgtttcttcgagatattctt

SEQ ID NO: 5984097 - DNA, 25 bp, Homo sapien
gctgttactatcgatgacaccaaaa

SEQ ID NO: 5984098 - DNA, 25 bp, Homo sapien
ggtacaagtgcaagccaacatgttt

SEQ ID NO: 5984099 - DNA, 25 bp, Homo sapien
cgtgtttgaggaagtatttaccgct

SEQ ID NO: 5984100 - DNA, 25 bp, Homo sapien
cataggctcggaattgtatcttcgt

SEQ ID NO: 5984101 - DNA, 25 bp, Homo sapien
aagtactcgaaaaatctaatgtatt

SEQ ID NO: 5984102 - DNA, 25 bp, Homo sapien
ctctgtttcttcgagatattcttct

SEQ ID NO: 5984103 - DNA, 25 bp, Homo sapien
aaatttgtccaaaaatgacataaat

SEQ ID NO: 5984104 - DNA, 25 bp, Homo sapien
ttatagccgctgttactatcgatga

SEQ ID NO: 5984105 - DNA, 25 bp, Homo sapien
cgtattcatacatagttatcacaaa

SEQ ID NO: 5984106 - DNA, 25 bp, Homo sapien
gtttcttcgagatattcttctacag

SEQ ID NO: 5984107 - DNA, 25 bp, Homo sapien
gcctgttccagtcctccgcagggat

SEQ ID NO: 5984108 - DNA, 25 bp, Homo sapien
gtctcaggtagtatgcagatggaca

SEQ ID NO: 5984109 - DNA, 25 bp, Homo sapien
cataaattatagccgctgttactat

SEQ ID NO: 5984110 - DNA, 25 bp, Homo sapien
agatttaccgatgaagtcgaaattt

SEQ ID NO: 5984111 - DNA, 25 bp, Homo sapien
agtggttcatcattataagtgttgc

SEQ ID NO: 5984112 - DNA, 25 bp, Homo sapien
caactctgaaataaaaatcgtacgg

SEQ ID NO: 5984113 - DNA, 25 bp, Homo sapien
cattgagatcaatattgtctgggtg

SEQ ID NO: 5984114 - DNA, 25 bp, Homo sapien
tacgaatctaggctcagctgtctct

SEQ ID NO: 5984115 - DNA, 25 bp, Homo sapien
aaagcgtattgcgttctaccactag

SEQ ID NO: 5984116 - DNA, 25 bp, Homo sapien
ctcttgatcaaatgggacatcatta

SEQ ID NO: 5984117 - DNA, 25 bp, Homo sapien
taattcatcaaaatggatgatttcg

SEQ ID NO: 5984118 - DNA, 25 bp, Homo sapien
tgctgactctgtttcttcgagatat

SEQ ID NO: 5984119 - DNA, 25 bp, Homo sapien
agtgcaagccaacatgtttgagcta

SEQ ID NO: 5984120 - DNA, 25 bp, Homo sapien
tctaatgtatttctcacttctgaaa

SEQ ID NO: 5984121 - DNA, 25 bp, Homo sapien
caatttcaaaatttgtccaaaaatg

SEQ ID NO: 5984122 - DNA, 25 bp, Homo sapien
catgtttgagctatcaagcaaaata

SEQ ID NO: 5984123 - DNA, 25 bp, Homo sapien
catagtaaaaaccgccctttgaatc

SEQ ID NO: 5984124 - DNA, 25 bp, Homo sapien
cctccttgtaaaatcatatctcgat

SEQ ID NO: 5984125 - DNA, 25 bp, Homo sapien
ccttggtcttgtttagtggttcatc

SEQ ID NO: 5984126 - DNA, 25 bp, Homo sapien
ccgctgttactatcgatgacaccaa

SEQ ID NO: 5984127 - DNA, 25 bp, Homo sapien
tttcctccattaattgtaaagcctc

SEQ ID NO: 5984128 - DNA, 25 bp, Homo sapien
gccaaaaggcatatgcttatagcct

SEQ ID NO: 5984129 - DNA, 25 bp, Homo sapien
cccataggctcggaattgtatcttc

SEQ ID NO: 5984130 - DNA, 25 bp, Homo sapien
atcttctaaaaaaatacgaatctag

SEQ ID NO: 5984131 - DNA, 25 bp, Homo sapien
tgtgtaagaaataccttgcagattt

SEQ ID NO: 5984132 - DNA, 25 bp, Homo sapien
ctgtttcttcgagatattcttctac

SEQ ID NO: 5984133 - DNA, 25 bp, Homo sapien
ttgaatggatcgtagggaaaatcgc

SEQ ID NO: 5984134 - DNA, 25 bp, Homo sapien
gtatttctcacttctgaaaaagttc

SEQ ID NO: 5984135 - DNA, 25 bp, Homo sapien
aaagatttaccgatgaagtcgaaat

SEQ ID NO: 5984136 - DNA, 25 bp, Homo sapien
gacataaattatagccgctgttact

SEQ ID NO: 5984137 - DNA, 25 bp, Homo sapien
ggctcggaattgtatcttcgtattc

SEQ ID NO: 5984138 - DNA, 25 bp, Homo sapien
ttcaaaagaagtgaggcagcaatcg

SEQ ID NO: 5984139 - DNA, 25 bp, Homo sapien
tcgagatattcttctacagcttccc

SEQ ID NO: 5984140 - DNA, 25 bp, Homo sapien
gttctaccactagccatggctgtgg

SEQ ID NO: 5984141 - DNA, 25 bp, Homo sapien
tctttgattttttattcccttggtc

SEQ ID NO: 5984142 - DNA, 25 bp, Homo sapien
ccctttgaatccaagtactcgaaaa

SEQ ID NO: 5984143 - DNA, 25 bp, Homo sapien
cagctgatgacattgagatcaatat

SEQ ID NO: 5984144 - DNA, 25 bp, Homo sapien
cttattgttctgcctcatcaccttg

SEQ ID NO: 5984145 - DNA, 25 bp, Homo sapien
acgtgccaaaaggcatatgcttata

SEQ ID NO: 5984146 - DNA, 25 bp, Homo sapien
tgtctctgatatggtacaagtgcaa

SEQ ID NO: 5984147 - DNA, 25 bp, Homo sapien
agaagtgaggcagcaatcgaatgaa

SEQ ID NO: 5984148 - DNA, 25 bp, Homo sapien
ggcagcaatcgaatgaactggtgca

SEQ ID NO: 5984149 - DNA, 25 bp, Homo sapien
gtcatactggtagtttttattgaaa

SEQ ID NO: 5984150 - DNA, 25 bp, Homo sapien
agccaacatgtttgagctatcaagc

SEQ ID NO: 5984151 - DNA, 25 bp, Homo sapien
atgtagcattttctctttgattttt

SEQ ID NO: 5984152 - DNA, 25 bp, Homo sapien
ccaagtactcgaaaaatctaatgta

SEQ ID NO: 5984153 - DNA, 25 bp, Homo sapien
ttaacctgtgtaagaaataccttgc

SEQ ID NO: 5984154 - DNA, 25 bp, Homo sapien
aagcctcttcaaatagagtttcgtt

SEQ ID NO: 5984155 - DNA, 25 bp, Homo sapien
agatagcttcagcgtctgattcata

SEQ ID NO: 5984156 - DNA, 25 bp, Homo sapien
aaaggcatatgcttatagcctaatt

SEQ ID NO: 5984157 - DNA, 25 bp, Homo sapien
gaatggatcgtagggaaaatcgcaa

SEQ ID NO: 5984158 - DNA, 25 bp, Homo sapien
cagggattaaagcgtattgcgttct

SEQ ID NO: 5984159 - DNA, 25 bp, Homo sapien
gatgaaacttctcgagatcttctaa

SEQ ID NO: 5984160 - DNA, 25 bp, Homo sapien
atgacataaattatagccgctgtta

SEQ ID NO: 5984161 - DNA, 25 bp, Homo sapien
cagctgtctctgatatggtacaagt

SEQ ID NO: 5984162 - DNA, 25 bp, Homo sapien
gatattcttctacagcttcccatag

SEQ ID NO: 5984163 - DNA, 25 bp, Homo sapien
accgccctttgaatccaagtactcg

SEQ ID NO: 5984164 - DNA, 25 bp, Homo sapien
caagtgcaagccaacatgtttgagc

SEQ ID NO: 5984165 - DNA, 25 bp, Homo sapien
cgtctgattcatatgtcgcctcctt

SEQ ID NO: 5984166 - DNA, 25 bp, Homo sapien
tacaagtgcaagccaacatgtttga

SEQ ID NO: 5984167 - DNA, 25 bp, Homo sapien
catacatagttatcacaaagccata

SEQ ID NO: 5984168 - DNA, 25 bp, Homo sapien
atagccgctgttactatcgatgaca

SEQ ID NO: 5984169 - DNA, 25 bp, Homo sapien
ccattaattgtaaagcctcttcaaa

SEQ ID NO: 5984170 - DNA, 25 bp, Homo sapien
tgaagtctcaggtagtatgcagatg

SEQ ID NO: 5984171 - DNA, 25 bp, Homo sapien
ggacacgtgccaaaaggcatatgct

SEQ ID NO: 5984172 - DNA, 25 bp, Homo sapien
accgatgaagtcgaaatttgatacg

SEQ ID NO: 5984173 - DNA, 25 bp, Homo sapien
atccaagatggcctgttccagtcct

SEQ ID NO: 5984174 - DNA, 25 bp, Homo sapien
ccaccatcttctcaggcagctgatg

SEQ ID NO: 5984175 - DNA, 25 bp, Homo sapien
ttaaatcggcacatatttctatatg

SEQ ID NO: 5984176 - DNA, 25 bp, Homo sapien
atgcagatggacacgtgccaaaagg

SEQ ID NO: 5984177 - DNA, 25 bp, Homo sapien
ttttcaaaagaagtgaggcagcaat

SEQ ID NO: 5984178 - DNA, 25 bp, Homo sapien
caggtagtatgcagatggacacgtg

SEQ ID NO: 5984179 - DNA, 25 bp, Homo sapien
tttaccgctgccgtccttccaccat

SEQ ID NO: 5984180 - DNA, 25 bp, Homo sapien
ttattgaaacggtcttctagtgatc

SEQ ID NO: 5984181 - DNA, 25 bp, Homo sapien
ctcaactctgaaataaaaatcgtac

SEQ ID NO: 5984182 - DNA, 25 bp, Homo sapien
ccgtacaagatatttttttcctcca

SEQ ID NO: 5984183 - DNA, 25 bp, Homo sapien
gcatatgcttatagcctaattcatc

SEQ ID NO: 5984184 - DNA, 25 bp, Homo sapien
atagagtttcgttgatccaagatgg

SEQ ID NO: 5984185 - DNA, 25 bp, Homo sapien
tatttctatatgactttgacccacc

SEQ ID NO: 5984186 - DNA, 25 bp, Homo sapien
catgtcaatatctgctgactctgtt

SEQ ID NO: 5984187 - DNA, 25 bp, Homo sapien
cgttgctttccatgtcaatatctgc

SEQ ID NO: 5984188 - DNA, 25 bp, Homo sapien
atggtacaagtgcaagccaacatgt

SEQ ID NO: 5984189 - DNA, 25 bp, Homo sapien
ttcgtattcatacatagttatcaca

SEQ ID NO: 5984190 - DNA, 25 bp, Homo sapien
gccaatttcaaaatttgtccaaaaa

SEQ ID NO: 5984191 - DNA, 25 bp, Homo sapien
tagggaaaatcgcaaaaatactcta

SEQ ID NO: 5984192 - DNA, 25 bp, Homo sapien
agcaaaatagaagactaacaaaaag

SEQ ID NO: 5984193 - DNA, 25 bp, Homo sapien
gctttccatgtcaatatctgctgac

SEQ ID NO: 5984194 - DNA, 25 bp, Homo sapien
tcgttgatccaagatggcctgttcc

SEQ ID NO: 5984195 - DNA, 25 bp, Homo sapien
aatctaatgtatttctcacttctga

SEQ ID NO: 5984196 - DNA, 25 bp, Homo sapien
acacgtgccaaaaggcatatgctta

SEQ ID NO: 5984197 - DNA, 25 bp, Homo sapien
tctgaaataaaaatcgtacggatct

SEQ ID NO: 5984198 - DNA, 25 bp, Homo sapien
tcttcgtattcatacatagttatca

SEQ ID NO: 5984199 - DNA, 25 bp, Homo sapien
tccgcagggattaaagcgtattgcg

SEQ ID NO: 5984200 - DNA, 25 bp, Homo sapien
caccgtacaagatatttttttcctc

SEQ ID NO: 5984201 - DNA, 25 bp, Homo sapien
ctatcaagcaaaatagaagactaac

SEQ ID NO: 5984202 - DNA, 25 bp, Homo sapien
gaaatttgatacgaacccgaaagcg

SEQ ID NO: 5984203 - DNA, 25 bp, Homo sapien
ggacatcattaagaaatgtccagtc

SEQ ID NO: 5984204 - DNA, 25 bp, Homo sapien
aaagccatatttcttattgttctgc

SEQ ID NO: 5984205 - DNA, 25 bp, Homo sapien
cttcagcgtctgattcatatgtcgc

SEQ ID NO: 5984206 - DNA, 25 bp, Homo sapien
tatatgactttgacccaccgtacaa

SEQ ID NO: 5984207 - DNA, 25 bp, Homo sapien
tcgatgacaccaaaagatttaccga

SEQ ID NO: 5984208 - DNA, 25 bp, Homo sapien
ctcatggaacggagtgcccccgaaa

SEQ ID NO: 5984209 - DNA, 25 bp, Homo sapien
gcagatggacacgtgccaaaaggca

SEQ ID NO: 5984210 - DNA, 25 bp, Homo sapien
gttatcacaaagccatatttcttat

SEQ ID NO: 5984211 - DNA, 25 bp, Homo sapien
taaagaaaaatccagaattaaatcg

SEQ ID NO: 5984212 - DNA, 25 bp, Homo sapien
gtgattgctatcacaaagacatctt

SEQ ID NO: 5984213 - DNA, 25 bp, Homo sapien
atcttttgtctaaagaaaaatccag

SEQ ID NO: 5984214 - DNA, 25 bp, Homo sapien
gtccttccaccatcttctcaggcag

SEQ ID NO: 5984215 - DNA, 25 bp, Homo sapien
ttctcaggcagctgatgacattgag

SEQ ID NO: 5984216 - DNA, 25 bp, Homo sapien
ccgctgccgtccttccaccatcttc

SEQ ID NO: 5984217 - DNA, 25 bp, Homo sapien
tcttgtttagtggttcatcattata

SEQ ID NO: 5984218 - DNA, 25 bp, Homo sapien
tttctatatgactttgacccaccgt

SEQ ID NO: 5984219 - DNA, 25 bp, Homo sapien
tttattcccttggtcttgtttagtg

SEQ ID NO: 5984220 - DNA, 25 bp, Homo sapien
atttcttattgttctgcctcatcac

SEQ ID NO: 5984221 - DNA, 25 bp, Homo sapien
gaaatgtccagtcatactggtagtt

SEQ ID NO: 5984222 - DNA, 25 bp, Homo sapien
tttgaggaagtatttaccgctgccg

SEQ ID NO: 5984223 - DNA, 25 bp, Homo sapien
atttaccgatgaagtcgaaatttga

SEQ ID NO: 5984224 - DNA, 25 bp, Homo sapien
ccttgaatggatcgtagggaaaatc

SEQ ID NO: 5984225 - DNA, 25 bp, Homo sapien
tccttgtaaaatcatatctcgatga

SEQ ID NO: 5984226 - DNA, 25 bp, Homo sapien
ctcagctgtctctgatatggtacaa

SEQ ID NO: 5984227 - DNA, 25 bp, Homo sapien
tgatctcatggaacggagtgccccc

SEQ ID NO: 5984228 - DNA, 25 bp, Homo sapien
tgtatcttcgtattcatacatagtt

SEQ ID NO: 5984229 - DNA, 25 bp, Homo sapien
ttcaaaatttgtccaaaaatgacat

SEQ ID NO: 5984230 - DNA, 25 bp, Homo sapien
gtcgcctccttgtaaaatcatatct

SEQ ID NO: 5984231 - DNA, 25 bp, Homo sapien
ctctacatctggctcaactctgaaa

SEQ ID NO: 5984232 - DNA, 25 bp, Homo sapien
attgtaaagcctcttcaaatagagt

SEQ ID NO: 5984233 - DNA, 25 bp, Homo sapien
gctgtctctgatatggtacaagtgc

SEQ ID NO: 5984234 - DNA, 25 bp, Homo sapien
caattacgcacaagcattaacaatg

SEQ ID NO: 5984235 - DNA, 25 bp, Homo sapien
ttttttcaaaagaagtgaggcagca

SEQ ID NO: 5984236 - DNA, 25 bp, Homo sapien
atcgtagggaaaatcgcaaaaatac

SEQ ID NO: 5984237 - DNA, 25 bp, Homo sapien
tcacaaagccatatttcttattgtt

SEQ ID NO: 5984238 - DNA, 25 bp, Homo sapien
ctgactctgtttcttcgagatattc

SEQ ID NO: 5984239 - DNA, 25 bp, Homo sapien
tgctagatagcttcagcgtctgatt

SEQ ID NO: 5984240 - DNA, 25 bp, Homo sapien
tgattttttattcccttggtcttgt

SEQ ID NO: 5984241 - DNA, 25 bp, Homo sapien
ctcggaattgtatcttcgtattcat

SEQ ID NO: 5984242 - DNA, 25 bp, Homo sapien
atcgtacggatctaatatcttttgt

SEQ ID NO: 5984243 - DNA, 25 bp, Homo sapien
tttcgttgatccaagatggcctgtt

SEQ ID NO: 5984244 - DNA, 25 bp, Homo sapien
gggaaaatcgcaaaaatactctaca

SEQ ID NO: 5984245 - DNA, 25 bp, Homo sapien
ctcaggcagctgatgacattgagat

SEQ ID NO: 5984246 - DNA, 25 bp, Homo sapien
ctcacttctgaaaaagttcaaatcg

SEQ ID NO: 5984247 - DNA, 25 bp, Homo sapien
gctgtggtggcttcgatgaactctt

SEQ ID NO: 5984248 - DNA, 25 bp, Homo sapien
aaatcatatctcgatgaaacttctc

SEQ ID NO: 5984249 - DNA, 25 bp, Homo sapien
aaaaaatacgaatctaggctcagct

SEQ ID NO: 5984250 - DNA, 25 bp, Homo sapien
tcaatatctgctgactctgtttctt

SEQ ID NO: 5984251 - DNA, 25 bp, Homo sapien
tatcttcgtattcatacatagttat

SEQ ID NO: 5984252 - DNA, 25 bp, Homo sapien
tagccatggctgtggtggcttcgat

SEQ ID NO: 5984253 - DNA, 25 bp, Homo sapien
tatttaccgctgccgtccttccacc

SEQ ID NO: 5984254 - DNA, 25 bp, Homo sapien
gatcaatattgtctgggtgattgct

SEQ ID NO: 5984255 - DNA, 25 bp, Homo sapien
aatacgaatctaggctcagctgtct

SEQ ID NO: 5984256 - DNA, 25 bp, Homo sapien
tccagtcatactggtagtttttatt

SEQ ID NO: 5984257 - DNA, 25 bp, Homo sapien
aaataaaaatcgtacggatctaata

SEQ ID NO: 5984258 - DNA, 25 bp, Homo sapien
tctgaaaaagttcaaatcgccaatt

SEQ ID NO: 5984259 - DNA, 25 bp, Homo sapien
agatcttctaaaaaaatacgaatct

SEQ ID NO: 5984260 - DNA, 25 bp, Homo sapien
atatgcttatagcctaattcatcaa

SEQ ID NO: 5984261 - DNA, 25 bp, Homo sapien
tcgatgaaacttctcgagatcttct

SEQ ID NO: 5984262 - DNA, 25 bp, Homo sapien
gtggcttcgatgaactcttgatcaa

SEQ ID NO: 5984263 - DNA, 25 bp, Homo sapien
tgaggaagtatttaccgctgccgtc

SEQ ID NO: 5984264 - DNA, 25 bp, Homo sapien
ggcttcgatgaactcttgatcaaat

SEQ ID NO: 5984265 - DNA, 25 bp, Homo sapien
cacaagcattaacaatgtagcattt

SEQ ID NO: 5984266 - DNA, 25 bp, Homo sapien
aagtgaggcagcaatcgaatgaact

SEQ ID NO: 5984267 - DNA, 25 bp, Homo sapien
aaagacatctttgttgaagtctcag

SEQ ID NO: 5984268 - DNA, 25 bp, Homo sapien
aaaatctaatgtatttctcacttct

SEQ ID NO: 5984269 - DNA, 25 bp, Homo sapien
atccaagtactcgaaaaatctaatg

SEQ ID NO: 5984270 - DNA, 25 bp, Homo sapien
cgtattgcgttctaccactagccat

SEQ ID NO: 5984271 - DNA, 25 bp, Homo sapien
accatcttctcaggcagctgatgac

SEQ ID NO: 5984272 - DNA, 25 bp, Homo sapien
gcaatcgaatgaactggtgcatctc

SEQ ID NO: 5984273 - DNA, 25 bp, Homo sapien
acaaagccatatttcttattgttct

SEQ ID NO: 5984274 - DNA, 25 bp, Homo sapien
ccactagccatggctgtggtggctt

SEQ ID NO: 5984275 - DNA, 25 bp, Homo sapien
gtcctccgcagggattaaagcgtat

SEQ ID NO: 5984276 - DNA, 25 bp, Homo sapien
actcgaaaaatctaatgtatttctc

SEQ ID NO: 5984277 - DNA, 25 bp, Homo sapien
taagaaataccttgcagatttgcat

SEQ ID NO: 5984278 - DNA, 25 bp, Homo sapien
attcatcaaaatggatgatttcgtc

SEQ ID NO: 5984279 - DNA, 25 bp, Homo sapien
caaaaatactctacatctggctcaa

SEQ ID NO: 5984280 - DNA, 25 bp, Homo sapien
tatcacaaagccatatttcttattg

SEQ ID NO: 5984281 - DNA, 25 bp, Homo sapien
accaaaagatttaccgatgaagtcg

SEQ ID NO: 5984282 - DNA, 25 bp, Homo sapien
actctgaaataaaaatcgtacggat

SEQ ID NO: 5984283 - DNA, 25 bp, Homo sapien
gtgccaaaaggcatatgcttatagc

SEQ ID NO: 5984284 - DNA, 25 bp, Homo sapien
ctgggtgattgctatcacaaagaca

SEQ ID NO: 5984285 - DNA, 25 bp, Homo sapien
tcaaatagagtttcgttgatccaag

SEQ ID NO: 5984286 - DNA, 25 bp, Homo sapien
aaaatactctacatctggctcaact

SEQ ID NO: 5984287 - DNA, 25 bp, Homo sapien
cagcaatcgaatgaactggtgcatc

SEQ ID NO: 5984288 - DNA, 25 bp, Homo sapien
tagttatcacaaagccatatttctt

SEQ ID NO: 5984289 - DNA, 25 bp, Homo sapien
tttgtctaaagaaaaatccagaatt

SEQ ID NO: 5984290 - DNA, 25 bp, Homo sapien
tgatgacattgagatcaatattgtc

SEQ ID NO: 5984291 - DNA, 25 bp, Homo sapien
gatacgaacccgaaagcgttgcttt

SEQ ID NO: 5984292 - DNA, 25 bp, Homo sapien
tcgaatgaactggtgcatctcccca

SEQ ID NO: 5984293 - DNA, 25 bp, Homo sapien
gattgctatcacaaagacatctttg

SEQ ID NO: 5984294 - DNA, 25 bp, Homo sapien
ctacatctggctcaactctgaaata

SEQ ID NO: 5984295 - DNA, 25 bp, Homo sapien
tattgcgttctaccactagccatgg

SEQ ID NO: 5984296 - DNA, 25 bp, Homo sapien
tattcttctacagcttcccataggc

SEQ ID NO: 5984297 - DNA, 25 bp, Homo sapien
cttctgaaaaagttcaaatcgccaa

SEQ ID NO: 5984298 - DNA, 25 bp, Homo sapien
catatctcgatgaaacttctcgaga

SEQ ID NO: 5984299 - DNA, 25 bp, Homo sapien
tgtggtggcttcgatgaactcttga

SEQ ID NO: 5984300 - DNA, 25 bp, Homo sapien
gaattgtatcttcgtattcatacat

SEQ ID NO: 5984301 - DNA, 25 bp, Homo sapien
tgtaagaaataccttgcagatttgc

SEQ ID NO: 5984302 - DNA, 25 bp, Homo sapien
atctttgttgaagtctcaggtagta

SEQ ID NO: 5984303 - DNA, 25 bp, Homo sapien
ttaaagcgtattgcgttctaccact

SEQ ID NO: 5984304 - DNA, 25 bp, Homo sapien
atcgcaaaaatactctacatctggc

SEQ ID NO: 5984305 - DNA, 25 bp, Homo sapien
gtgttgctagatagcttcagcgtct

SEQ ID NO: 5984306 - DNA, 25 bp, Homo sapien
atggatgatttcgtcttttttcaaa

SEQ ID NO: 5984307 - DNA, 25 bp, Homo sapien
atttgtccaaaaatgacataaatta

SEQ ID NO: 5984308 - DNA, 25 bp, Homo sapien
cagtcatactggtagtttttattga

SEQ ID NO: 5984309 - DNA, 25 bp, Homo sapien
tgaaataaaaatcgtacggatctaa

SEQ ID NO: 5984310 - DNA, 25 bp, Homo sapien
caaaatagaagactaacaaaaagta

SEQ ID NO: 5984311 - DNA, 25 bp, Homo sapien
tgcaagccaacatgtttgagctatc

SEQ ID NO: 5984312 - DNA, 25 bp, Homo sapien
ctcgagatcttctaaaaaaatacga

SEQ ID NO: 5984313 - DNA, 25 bp, Homo sapien
cttctacagcttcccataggctcgg

SEQ ID NO: 5984314 - DNA, 25 bp, Homo sapien
aaatgacataaattatagccgctgt

SEQ ID NO: 5984315 - DNA, 25 bp, Homo sapien
tatctgctgactctgtttcttcgag

SEQ ID NO: 5984316 - DNA, 25 bp, Homo sapien
caccttgaatggatcgtagggaaaa

SEQ ID NO: 5984317 - DNA, 25 bp, Homo sapien
gcacatatttctatatgactttgac

SEQ ID NO: 5984318 - DNA, 25 bp, Homo sapien
gcttatagcctaattcatcaaaatg

SEQ ID NO: 5984319 - DNA, 25 bp, Homo sapien
cctgtgtaagaaataccttgcagat

SEQ ID NO: 5984320 - DNA, 25 bp, Homo sapien
tctaggctcagctgtctctgatatg

SEQ ID NO: 5984321 - DNA, 25 bp, Homo sapien
tatcgatgacaccaaaagatttacc

SEQ ID NO: 5984322 - DNA, 25 bp, Homo sapien
tttccatgtcaatatctgctgactc

SEQ ID NO: 5984323 - DNA, 25 bp, Homo sapien
ccaaaaatgacataaattatagccg

SEQ ID NO: 5984324 - DNA, 25 bp, Homo sapien
tggttcatcattataagtgttgcta

SEQ ID NO: 5984325 - DNA, 25 bp, Homo sapien
cgagatcttctaaaaaaatacgaat

SEQ ID NO: 5984326 - DNA, 25 bp, Homo sapien
tgatatggtacaagtgcaagccaac

SEQ ID NO: 5984327 - DNA, 25 bp, Homo sapien
ttgtttagtggttcatcattataag

SEQ ID NO: 5984328 - DNA, 25 bp, Homo sapien
gtgaggcagcaatcgaatgaactgg

SEQ ID NO: 5984329 - DNA, 25 bp, Homo sapien
acaccaaaagatttaccgatgaagt

SEQ ID NO: 5984330 - DNA, 25 bp, Homo sapien
ctcttcaaatagagtttcgttgatc

SEQ ID NO: 5984331 - DNA, 25 bp, Homo sapien
aaaaatccagaattaaatcggcaca

SEQ ID NO: 5984332 - DNA, 25 bp, Homo sapien
ctatgaatcgtgtttgaggaagtat

SEQ ID NO: 5984333 - DNA, 25 bp, Homo sapien
gttgctagatagcttcagcgtctga

SEQ ID NO: 5984334 - DNA, 25 bp, Homo sapien
agcgtattgcgttctaccactagcc

SEQ ID NO: 5984335 - DNA, 25 bp, Homo sapien
aaaatacgaatctaggctcagctgt

SEQ ID NO: 5984336 - DNA, 25 bp, Homo sapien
tccatgtcaatatctgctgactctg

SEQ ID NO: 5984337 - DNA, 25 bp, Homo sapien
tacgaacccgaaagcgttgctttcc

SEQ ID NO: 5984338 - DNA, 25 bp, Homo sapien
atatgtcgcctccttgtaaaatcat

SEQ ID NO: 5984339 - DNA, 25 bp, Homo sapien
gccatggctgtggtggcttcgatga

SEQ ID NO: 5984340 - DNA, 25 bp, Homo sapien
ttcaaatcgccaatttcaaaatttg

SEQ ID NO: 5984341 - DNA, 25 bp, Homo sapien
agtatttaccgctgccgtccttcca

SEQ ID NO: 5984342 - DNA, 25 bp, Homo sapien
agttcccaattacgcacaagcatta

SEQ ID NO: 5984343 - DNA, 25 bp, Homo sapien
cgaaagttcccaattacgcacaagc

SEQ ID NO: 5984344 - DNA, 25 bp, Homo sapien
taccgctgccgtccttccaccatct

SEQ ID NO: 5984345 - DNA, 25 bp, Homo sapien
tccagtcctccgcagggattaaagc

SEQ ID NO: 5984346 - DNA, 25 bp, Homo sapien
gcgttctaccactagccatggctgt

SEQ ID NO: 5984347 - DNA, 25 bp, Homo sapien
cccgaaagttcccaattacgcacaa

SEQ ID NO: 5984348 - DNA, 25 bp, Homo sapien
tggaacggagtgcccccgaaagttc

SEQ ID NO: 5984349 - DNA, 25 bp, Homo sapien
aacaatgtagcattttctctttgat

SEQ ID NO: 5984350 - DNA, 25 bp, Homo sapien
aagtctcaggtagtatgcagatgga

SEQ ID NO: 5984351 - DNA, 25 bp, Homo sapien
ggatcgtagggaaaatcgcaaaaat

SEQ ID NO: 5984352 - DNA, 25 bp, Homo sapien
gtctgggtgattgctatcacaaaga

SEQ ID NO: 5984353 - DNA, 25 bp, Homo sapien
tatctcgatgaaacttctcgagatc

SEQ ID NO: 5984354 - DNA, 25 bp, Homo sapien
gggtgattgctatcacaaagacatc

SEQ ID NO: 5984355 - DNA, 25 bp, Homo sapien
ttctagtgatctcatggaacggagt

SEQ ID NO: 5984356 - DNA, 25 bp, Homo sapien
actttgacccaccgtacaagatatt

SEQ ID NO: 5984357 - DNA, 25 bp, Homo sapien
tcagcgtctgattcatatgtcgcct

SEQ ID NO: 5984358 - DNA, 25 bp, Homo sapien
acaaagacatctttgttgaagtctc

SEQ ID NO: 5984359 - DNA, 25 bp, Homo sapien
attgtatcttcgtattcatacatag

SEQ ID NO: 5984360 - DNA, 25 bp, Homo sapien
cttcaaatagagtttcgttgatcca

SEQ ID NO: 5984361 - DNA, 25 bp, Homo sapien
gagtgcccccgaaagttcccaatta

SEQ ID NO: 5984362 - DNA, 25 bp, Homo sapien
tcttctcaggcagctgatgacattg

SEQ ID NO: 5984363 - DNA, 25 bp, Homo sapien
gagatcaatattgtctgggtgattg

SEQ ID NO: 5984364 - DNA, 25 bp, Homo sapien
tcgaaatttgatacgaacccgaaag

SEQ ID NO: 5984365 - DNA, 25 bp, Homo sapien
ttgatacgaacccgaaagcgttgct

SEQ ID NO: 5984366 - DNA, 25 bp, Homo sapien
aaatcggcacatatttctatatgac

SEQ ID NO: 5984367 - DNA, 25 bp, Homo sapien
aagaaatgtccagtcatactggtag

SEQ ID NO: 5984368 - DNA, 25 bp, Homo sapien
gctgatgacattgagatcaatattg

SEQ ID NO: 5984369 - DNA, 25 bp, Homo sapien
cttcgatgaactcttgatcaaatgg

SEQ ID NO: 5984370 - DNA, 25 bp, Homo sapien
tcctccattaattgtaaagcctctt

SEQ ID NO: 5984371 - DNA, 25 bp, Homo sapien
tggtggcttcgatgaactcttgatc

SEQ ID NO: 5984372 - DNA, 25 bp, Homo sapien
aagatggcctgttccagtcctccgc

SEQ ID NO: 5984373 - DNA, 25 bp, Homo sapien
agtcgaaatttgatacgaacccgaa

SEQ ID NO: 5984374 - DNA, 25 bp, Homo sapien
tctaaaaaaatacgaatctaggctc

SEQ ID NO: 5984375 - DNA, 25 bp, Homo sapien
ccaacatgtttgagctatcaagcaa

SEQ ID NO: 5984376 - DNA, 25 bp, Homo sapien
aatattgtctgggtgattgctatca

SEQ ID NO: 5984377 - DNA, 25 bp, Homo sapien
aatcgaatgaactggtgcatctccc

SEQ ID NO: 5984378 - DNA, 25 bp, Homo sapien
tcaatacctatcaaacaatcctgcc

SEQ ID NO: 5984379 - DNA, 25 bp, Homo sapien
gtttgacaagtcgattttcaaccat

SEQ ID NO: 5984380 - DNA, 25 bp, Homo sapien
tttcttatttgattctgttcacttt

SEQ ID NO: 5984381 - DNA, 25 bp, Homo sapien
acacaaggtttcttatttgattctg

SEQ ID NO: 5984382 - DNA, 25 bp, Homo sapien
aattctacgattttgcaggagactt

SEQ ID NO: 5984383 - DNA, 25 bp, Homo sapien
tatgtcttagacgacttgtacgcta

SEQ ID NO: 5984384 - DNA, 25 bp, Homo sapien
ttctacgattttgcaggagactttg

SEQ ID NO: 5984385 - DNA, 25 bp, Homo sapien
tcactatgggttattgttacgatct

SEQ ID NO: 5984386 - DNA, 25 bp, Homo sapien
acttattcacggctagtctcagcta

SEQ ID NO: 5984387 - DNA, 25 bp, Homo sapien
ctttacttattcacggctagtctca

SEQ ID NO: 5984388 - DNA, 25 bp, Homo sapien
tcaaggaggtcgaaggtgatgataa

SEQ ID NO: 5984389 - DNA, 25 bp, Homo sapien
aaccaaatggcaatggaaatcaagt

SEQ ID NO: 5984390 - DNA, 25 bp, Homo sapien
accgttccatggtttgttatggaat

SEQ ID NO: 5984391 - DNA, 25 bp, Homo sapien
cattacacaaggtttcttatttgat

SEQ ID NO: 5984392 - DNA, 25 bp, Homo sapien
ttgaacagtgggttcagcaattcta

SEQ ID NO: 5984393 - DNA, 25 bp, Homo sapien
ttgcatcgctattgcctcgttccag

SEQ ID NO: 5984394 - DNA, 25 bp, Homo sapien
agggtctaccgtgctctgcacaagc

SEQ ID NO: 5984395 - DNA, 25 bp, Homo sapien
caaccatcctcgttacttgaaaaac

SEQ ID NO: 5984396 - DNA, 25 bp, Homo sapien
tccaagaatgccgtcaaagaatgta

SEQ ID NO: 5984397 - DNA, 25 bp, Homo sapien
acctttcgcatctcattctttccat

SEQ ID NO: 5984398 - DNA, 25 bp, Homo sapien
atatgtcgacgacgtcttttgcatc

SEQ ID NO: 5984399 - DNA, 25 bp, Homo sapien
ggatttggtcttagaagtcgctgac

SEQ ID NO: 5984400 - DNA, 25 bp, Homo sapien
cttcactttcatctttttcactgat

SEQ ID NO: 5984401 - DNA, 25 bp, Homo sapien
atggcaatggaaatcaagttggcag

SEQ ID NO: 5984402 - DNA, 25 bp, Homo sapien
aggtgccattcctgtttgatatgtc

SEQ ID NO: 5984403 - DNA, 25 bp, Homo sapien
caactacggtcaattcaccactctg

SEQ ID NO: 5984404 - DNA, 25 bp, Homo sapien
atctatgaaaacgacccaaatacca

SEQ ID NO: 5984405 - DNA, 25 bp, Homo sapien
cagtcagtgctatcccatggatgtc

SEQ ID NO: 5984406 - DNA, 25 bp, Homo sapien
actttcatctttttcactgattgcg

SEQ ID NO: 5984407 - DNA, 25 bp, Homo sapien
caagtcgattttcaaccatcctcgt

SEQ ID NO: 5984408 - DNA, 25 bp, Homo sapien
ttgtgtttgacaagtcgattttcaa

SEQ ID NO: 5984409 - DNA, 25 bp, Homo sapien
ttgaacatttcatcaaggaggtcga

SEQ ID NO: 5984410 - DNA, 25 bp, Homo sapien
cgacgacgtcttttgcatcgctatt

SEQ ID NO: 5984411 - DNA, 25 bp, Homo sapien
attcacggctagtctcagctacgtg

SEQ ID NO: 5984412 - DNA, 25 bp, Homo sapien
cacaagcctcatcacaagtggctgg

SEQ ID NO: 5984413 - DNA, 25 bp, Homo sapien
cctatcaaacaatcctgccgtcaac

SEQ ID NO: 5984414 - DNA, 25 bp, Homo sapien
ctagggttgaacagtgggttcagca

SEQ ID NO: 5984415 - DNA, 25 bp, Homo sapien
aatcctgccgtcaacggtactgcct

SEQ ID NO: 5984416 - DNA, 25 bp, Homo sapien
ccagatgactcattgtttgatccta

SEQ ID NO: 5984417 - DNA, 25 bp, Homo sapien
tcgtaccacatctacccattgattc

SEQ ID NO: 5984418 - DNA, 25 bp, Homo sapien
caatggaaatcaagttggcagtcag

SEQ ID NO: 5984419 - DNA, 25 bp, Homo sapien
ctgttcacttttgttaacttttgga

SEQ ID NO: 5984420 - DNA, 25 bp, Homo sapien
attctttccatcctgtagacgggtt

SEQ ID NO: 5984421 - DNA, 25 bp, Homo sapien
tgatatgtcgacgacgtcttttgca

SEQ ID NO: 5984422 - DNA, 25 bp, Homo sapien
atattcctgtcaagtggcagaaatt

SEQ ID NO: 5984423 - DNA, 25 bp, Homo sapien
tgacggtcaatacctatcaaacaat

SEQ ID NO: 5984424 - DNA, 25 bp, Homo sapien
ttcaccatctatatttcaactacaa

SEQ ID NO: 5984425 - DNA, 25 bp, Homo sapien
gtcgatgttgaccgttccatggttt

SEQ ID NO: 5984426 - DNA, 25 bp, Homo sapien
cattatcgagtacttcactttcatc

SEQ ID NO: 5984427 - DNA, 25 bp, Homo sapien
gtgggacagactagggggttcttac

SEQ ID NO: 5984428 - DNA, 25 bp, Homo sapien
ttgaaaaaccaaatggcaatggaaa

SEQ ID NO: 5984429 - DNA, 25 bp, Homo sapien
ttgcggtgtgtatttagcgcacaga

SEQ ID NO: 5984430 - DNA, 25 bp, Homo sapien
tgtaaggaagctcattatcgagtac

SEQ ID NO: 5984431 - DNA, 25 bp, Homo sapien
ttaccgtagaccagatgactcattg

SEQ ID NO: 5984432 - DNA, 25 bp, Homo sapien
tggccaagggtctaccgtgctctgc

SEQ ID NO: 5984433 - DNA, 25 bp, Homo sapien
aggaagttgaacatttcatcaagga

SEQ ID NO: 5984434 - DNA, 25 bp, Homo sapien
acggttcaccatctatatttcaact

SEQ ID NO: 5984435 - DNA, 25 bp, Homo sapien
gctcaagttaaggaagttgaacatt

SEQ ID NO: 5984436 - DNA, 25 bp, Homo sapien
agatgctaaggagacctgggacgct

SEQ ID NO: 5984437 - DNA, 25 bp, Homo sapien
gtgccattcctgtttgatatgtcga

SEQ ID NO: 5984438 - DNA, 25 bp, Homo sapien
ctttcgcatctcattctttccatcc

SEQ ID NO: 5984439 - DNA, 25 bp, Homo sapien
ggtcttagaagtcgctgaccattat

SEQ ID NO: 5984440 - DNA, 25 bp, Homo sapien
ggtgatgataatgatagaatctatg

SEQ ID NO: 5984441 - DNA, 25 bp, Homo sapien
aggaagctcattatcgagtacttca

SEQ ID NO: 5984442 - DNA, 25 bp, Homo sapien
gcggtgtgtatttagcgcacagatg

SEQ ID NO: 5984443 - DNA, 25 bp, Homo sapien
taacttttggactgttatgattcat

SEQ ID NO: 5984444 - DNA, 25 bp, Homo sapien
atatttcaactacaactacggtcaa

SEQ ID NO: 5984445 - DNA, 25 bp, Homo sapien
ttgattctgccattacacaaggttt

SEQ ID NO: 5984446 - DNA, 25 bp, Homo sapien
tacccattgattctgccattacaca

SEQ ID NO: 5984447 - DNA, 25 bp, Homo sapien
tctcattctttccatcctgtagacg

SEQ ID NO: 5984448 - DNA, 25 bp, Homo sapien
gcattggccaagggtctaccgtgct

SEQ ID NO: 5984449 - DNA, 25 bp, Homo sapien
actgcctgccacacggttcaccatc

SEQ ID NO: 5984450 - DNA, 25 bp, Homo sapien
ggcagtcagtgctatcccatggatg

SEQ ID NO: 5984451 - DNA, 25 bp, Homo sapien
tcctgccgtcaacggtactgcctgc

SEQ ID NO: 5984452 - DNA, 25 bp, Homo sapien
tgcctgccacacggttcaccatcta

SEQ ID NO: 5984453 - DNA, 25 bp, Homo sapien
tcttagaagtcgctgaccattatgt

SEQ ID NO: 5984454 - DNA, 25 bp, Homo sapien
cgttggcagctaatattcctgtcaa

SEQ ID NO: 5984455 - DNA, 25 bp, Homo sapien
tgattatgaaaaccacggtgtaagg

SEQ ID NO: 5984456 - DNA, 25 bp, Homo sapien
tgccacacggttcaccatctatatt

SEQ ID NO: 5984457 - DNA, 25 bp, Homo sapien
acggctagtctcagctacgtgtttg

SEQ ID NO: 5984458 - DNA, 25 bp, Homo sapien
aaatcaagttggcagtcagtgctat

SEQ ID NO: 5984459 - DNA, 25 bp, Homo sapien
cttgagagaattcctctcactatgg

SEQ ID NO: 5984460 - DNA, 25 bp, Homo sapien
tggtctgcacacctttcgcatctca

SEQ ID NO: 5984461 - DNA, 25 bp, Homo sapien
ggctagtctcagctacgtgtttgtg

SEQ ID NO: 5984462 - DNA, 25 bp, Homo sapien
cggtactgcctgccacacggttcac

SEQ ID NO: 5984463 - DNA, 25 bp, Homo sapien
tgagagaattcctctcactatgggt

SEQ ID NO: 5984464 - DNA, 25 bp, Homo sapien
tgttatgattcatgacggtcaatac

SEQ ID NO: 5984465 - DNA, 25 bp, Homo sapien
cagactagggggttcttaccgtaga

SEQ ID NO: 5984466 - DNA, 25 bp, Homo sapien
ccacggtgtaaggaagctcattatc

SEQ ID NO: 5984467 - DNA, 25 bp, Homo sapien
gactcattgtttgatcctaagttaa

SEQ ID NO: 5984468 - DNA, 25 bp, Homo sapien
acgtgtttgtgtttgacaagtcgat

SEQ ID NO: 5984469 - DNA, 25 bp, Homo sapien
gagactttgaactccaagaatgccg

SEQ ID NO: 5984470 - DNA, 25 bp, Homo sapien
gggttcttaccgtagaccagatgac

SEQ ID NO: 5984471 - DNA, 25 bp, Homo sapien
ctttttcactgattgcggtgtgtat

SEQ ID NO: 5984472 - DNA, 25 bp, Homo sapien
gatagaatctatgaaaacgacccaa

SEQ ID NO: 5984473 - DNA, 25 bp, Homo sapien
ttcactgattgcggtgtgtatttag

SEQ ID NO: 5984474 - DNA, 25 bp, Homo sapien
tgtgtatttagcgcacagatggttg

SEQ ID NO: 5984475 - DNA, 25 bp, Homo sapien
ttctgcccgcttcgttggcagctaa

SEQ ID NO: 5984476 - DNA, 25 bp, Homo sapien
actccaagaatgccgtcaaagaatg

SEQ ID NO: 5984477 - DNA, 25 bp, Homo sapien
tcaccactctgtgggacagactagg

SEQ ID NO: 5984478 - DNA, 25 bp, Homo sapien
ctttgaactccaagaatgccgtcaa

SEQ ID NO: 5984479 - DNA, 25 bp, Homo sapien
aggtcgaaggtgatgataatgatag

SEQ ID NO: 5984480 - DNA, 25 bp, Homo sapien
ctgaccattatgtcttagacgactt

SEQ ID NO: 5984481 - DNA, 25 bp, Homo sapien
ctacgtgtttgtgtttgacaagtcg

SEQ ID NO: 5984482 - DNA, 25 bp, Homo sapien
gggcaggtgccattcctgtttgata

SEQ ID NO: 5984483 - DNA, 25 bp, Homo sapien
gcaggtgccattcctgtttgatatg

SEQ ID NO: 5984484 - DNA, 25 bp, Homo sapien
gaacagtgggttcagcaattctacg

SEQ ID NO: 5984485 - DNA, 25 bp, Homo sapien
cacaagtggctggtctgcacacctt

SEQ ID NO: 5984486 - DNA, 25 bp, Homo sapien
gttgaccgttccatggtttgttatg

SEQ ID NO: 5984487 - DNA, 25 bp, Homo sapien
agtctcagctacgtgtttgtgtttg

SEQ ID NO: 5984488 - DNA, 25 bp, Homo sapien
gacaagtcgattttcaaccatcctc

SEQ ID NO: 5984489 - DNA, 25 bp, Homo sapien
tcactttcatctttttcactgattg

SEQ ID NO: 5984490 - DNA, 25 bp, Homo sapien
atgtcgacgacgtcttttgcatcgc

SEQ ID NO: 5984491 - DNA, 25 bp, Homo sapien
tgctagggttgaacagtgggttcag

SEQ ID NO: 5984492 - DNA, 25 bp, Homo sapien
ttcctgtttgatatgtcgacgacgt

SEQ ID NO: 5984493 - DNA, 25 bp, Homo sapien
ctattgcctcgttccagcatcttga

SEQ ID NO: 5984494 - DNA, 25 bp, Homo sapien
ctcgttacttgaaaaaccaaatggc

SEQ ID NO: 5984495 - DNA, 25 bp, Homo sapien
gatctttggtttactactttactta

SEQ ID NO: 5984496 - DNA, 25 bp, Homo sapien
ttcctctcactatgggttattgtta

SEQ ID NO: 5984497 - DNA, 25 bp, Homo sapien
tttagcgcacagatggttgcattgg

SEQ ID NO: 5984498 - DNA, 25 bp, Homo sapien
tgtcttagacgacttgtacgctaaa

SEQ ID NO: 5984499 - DNA, 25 bp, Homo sapien
gaagctcattatcgagtacttcact

SEQ ID NO: 5984500 - DNA, 25 bp, Homo sapien
aaggtttcttatttgattctgttca

SEQ ID NO: 5984501 - DNA, 25 bp, Homo sapien
gctaatattcctgtcaagtggcaga

SEQ ID NO: 5984502 - DNA, 25 bp, Homo sapien
ttttgcatcgctattgcctcgttcc

SEQ ID NO: 5984503 - DNA, 25 bp, Homo sapien
catgacggtcaatacctatcaaaca

SEQ ID NO: 5984504 - DNA, 25 bp, Homo sapien
accgtagaccagatgactcattgtt

SEQ ID NO: 5984505 - DNA, 25 bp, Homo sapien
ggtgtgtatttagcgcacagatggt

SEQ ID NO: 5984506 - DNA, 25 bp, Homo sapien
gcccgcttcgttggcagctaatatt

SEQ ID NO: 5984507 - DNA, 25 bp, Homo sapien
atacatgaagattgattatgaaaac

SEQ ID NO: 5984508 - DNA, 25 bp, Homo sapien
ttgattctgttcacttttgttaact

SEQ ID NO: 5984509 - DNA, 25 bp, Homo sapien
actactttacttattcacggctagt

SEQ ID NO: 5984510 - DNA, 25 bp, Homo sapien
actatgggttattgttacgatcttt

SEQ ID NO: 5984511 - DNA, 25 bp, Homo sapien
tcttaccgtagaccagatgactcat

SEQ ID NO: 5984512 - DNA, 25 bp, Homo sapien
ttttgttaacttttggactgttatg

SEQ ID NO: 5984513 - DNA, 25 bp, Homo sapien
tgaccgttccatggtttgttatgga

SEQ ID NO: 5984514 - DNA, 25 bp, Homo sapien
ggcagctaatattcctgtcaagtgg

SEQ ID NO: 5984515 - DNA, 25 bp, Homo sapien
ttgatcctaagttaagagatgctaa

SEQ ID NO: 5984516 - DNA, 25 bp, Homo sapien
gaacggccattctaaactatacatg

SEQ ID NO: 5984517 - DNA, 25 bp, Homo sapien
attgcctcgttccagcatcttgaga

SEQ ID NO: 5984518 - DNA, 25 bp, Homo sapien
atcaagttggcagtcagtgctatcc

SEQ ID NO: 5984519 - DNA, 25 bp, Homo sapien
tttggtttactactttacttattca

SEQ ID NO: 5984520 - DNA, 25 bp, Homo sapien
ttacacaaggtttcttatttgattc

SEQ ID NO: 5984521 - DNA, 25 bp, Homo sapien
cacatctacccattgattctgccat

SEQ ID NO: 5984522 - DNA, 25 bp, Homo sapien
tcagctacgtgtttgtgtttgacaa

SEQ ID NO: 5984523 - DNA, 25 bp, Homo sapien
gcacagatggttgcattggccaagg

SEQ ID NO: 5984524 - DNA, 25 bp, Homo sapien
tcctcgttacttgaaaaaccaaatg

SEQ ID NO: 5984525 - DNA, 25 bp, Homo sapien
ttgttaacttttggactgttatgat

SEQ ID NO: 5984526 - DNA, 25 bp, Homo sapien
gctatcccatggatgtcgatgttga

SEQ ID NO: 5984527 - DNA, 25 bp, Homo sapien
tcctgtagacgggtttttgcaatcc

SEQ ID NO: 5984528 - DNA, 25 bp, Homo sapien
aattgaacggccattctaaactata

SEQ ID NO: 5984529 - DNA, 25 bp, Homo sapien
tagaccagatgactcattgtttgat

SEQ ID NO: 5984530 - DNA, 25 bp, Homo sapien
caagttggcagtcagtgctatccca

SEQ ID NO: 5984531 - DNA, 25 bp, Homo sapien
tttgttatggaattgaacggccatt

SEQ ID NO: 5984532 - DNA, 25 bp, Homo sapien
ctgcacacctttcgcatctcattct

SEQ ID NO: 5984533 - DNA, 25 bp, Homo sapien
aatgccgtcaaagaatgtagaaggt

SEQ ID NO: 5984534 - DNA, 25 bp, Homo sapien
cgacccaaataccaagaagaacaac

SEQ ID NO: 5984535 - DNA, 25 bp, Homo sapien
ctacgattttgcaggagactttgaa

SEQ ID NO: 5984536 - DNA, 25 bp, Homo sapien
tcaagttaaggaagttgaacatttc

SEQ ID NO: 5984537 - DNA, 25 bp, Homo sapien
gccattacacaaggtttcttatttg

SEQ ID NO: 5984538 - DNA, 25 bp, Homo sapien
ttttggactgttatgattcatgacg

SEQ ID NO: 5984539 - DNA, 25 bp, Homo sapien
tatgggttattgttacgatctttgg

SEQ ID NO: 5984540 - DNA, 25 bp, Homo sapien
cattcctgtttgatatgtcgacgac

SEQ ID NO: 5984541 - DNA, 25 bp, Homo sapien
acaaggtttcttatttgattctgtt

SEQ ID NO: 5984542 - DNA, 25 bp, Homo sapien
acgggtttttgcaatccatctcgta

SEQ ID NO: 5984543 - DNA, 25 bp, Homo sapien
agaattcctctcactatgggttatt

SEQ ID NO: 5984544 - DNA, 25 bp, Homo sapien
attatgtcttagacgacttgtacgc

SEQ ID NO: 5984545 - DNA, 25 bp, Homo sapien
aacggtactgcctgccacacggttc

SEQ ID NO: 5984546 - DNA, 25 bp, Homo sapien
ttgaactccaagaatgccgtcaaag

SEQ ID NO: 5984547 - DNA, 25 bp, Homo sapien
cctctcactatgggttattgttacg

SEQ ID NO: 5984548 - DNA, 25 bp, Homo sapien
agtgggttcagcaattctacgattt

SEQ ID NO: 5984549 - DNA, 25 bp, Homo sapien
agacgacttgtacgctaaagttctg

SEQ ID NO: 5984550 - DNA, 25 bp, Homo sapien
ctgtcaagtggcagaaattgctagg

SEQ ID NO: 5984551 - DNA, 25 bp, Homo sapien
gaatgtagaaggttctacgggcagg

SEQ ID NO: 5984552 - DNA, 25 bp, Homo sapien
cgctattgcctcgttccagcatctt

SEQ ID NO: 5984553 - DNA, 25 bp, Homo sapien
tacctatcaaacaatcctgccgtca

SEQ ID NO: 5984554 - DNA, 25 bp, Homo sapien
acgggcaggtgccattcctgtttga

SEQ ID NO: 5984555 - DNA, 25 bp, Homo sapien
atgattcatgacggtcaatacctat

SEQ ID NO: 5984556 - DNA, 25 bp, Homo sapien
ttgcaggagactttgaactccaaga

SEQ ID NO: 5984557 - DNA, 25 bp, Homo sapien
gcttcgttggcagctaatattcctg

SEQ ID NO: 5984558 - DNA, 25 bp, Homo sapien
gtagacgggtttttgcaatccatct

SEQ ID NO: 5984559 - DNA, 25 bp, Homo sapien
tcaaacaatcctgccgtcaacggta

SEQ ID NO: 5984560 - DNA, 25 bp, Homo sapien
atggttgcattggccaagggtctac

SEQ ID NO: 5984561 - DNA, 25 bp, Homo sapien
acacctttcgcatctcattctttcc

SEQ ID NO: 5984562 - DNA, 25 bp, Homo sapien
gacgtcttttgcatcgctattgcct

SEQ ID NO: 5984563 - DNA, 25 bp, Homo sapien
tccatcctgtagacgggtttttgca

SEQ ID NO: 5984564 - DNA, 25 bp, Homo sapien
aaattgctagggttgaacagtgggt

SEQ ID NO: 5984565 - DNA, 25 bp, Homo sapien
gtgtttgacaagtcgattttcaacc

SEQ ID NO: 5984566 - DNA, 25 bp, Homo sapien
caagtggcagaaattgctagggttg

SEQ ID NO: 5984567 - DNA, 25 bp, Homo sapien
tggtttactactttacttattcacg

SEQ ID NO: 5984568 - DNA, 25 bp, Homo sapien
tgttatggaattgaacggccattct

SEQ ID NO: 5984569 - DNA, 25 bp, Homo sapien
acagatggttgcattggccaagggt

SEQ ID NO: 5984570 - DNA, 25 bp, Homo sapien
agtacttcactttcatctttttcac

SEQ ID NO: 5984571 - DNA, 25 bp, Homo sapien
cgttccatggtttgttatggaattg

SEQ ID NO: 5984572 - DNA, 25 bp, Homo sapien
ttttgcaatccatctcgtaccacat

SEQ ID NO: 5984573 - DNA, 25 bp, Homo sapien
attctaaactatacatgaagattga

SEQ ID NO: 5984574 - DNA, 25 bp, Homo sapien
tcaacggtactgcctgccacacggt

SEQ ID NO: 5984575 - DNA, 25 bp, Homo sapien
tacaactacggtcaattcaccactc

SEQ ID NO: 5984576 - DNA, 25 bp, Homo sapien
cctgggacgctcaagttaaggaagt

SEQ ID NO: 5984577 - DNA, 25 bp, Homo sapien
tcttagacgacttgtacgctaaagt

SEQ ID NO: 5984578 - DNA, 25 bp, Homo sapien
tcattctttccatcctgtagacggg

SEQ ID NO: 5984579 - DNA, 25 bp, Homo sapien
tgccgtcaaagaatgtagaaggttc

SEQ ID NO: 5984580 - DNA, 25 bp, Homo sapien
aacgacccaaataccaagaagaaca

SEQ ID NO: 5984581 - DNA, 25 bp, Homo sapien
ttagaagtcgctgaccattatgtct

SEQ ID NO: 5984582 - DNA, 25 bp, Homo sapien
ggatgtcgatgttgaccgttccatg

SEQ ID NO: 5984583 - DNA, 25 bp, Homo sapien
agttggcagtcagtgctatcccatg

SEQ ID NO: 5984584 - DNA, 25 bp, Homo sapien
gccattcctgtttgatatgtcgacg

SEQ ID NO: 5984585 - DNA, 25 bp, Homo sapien
aattcctctcactatgggttattgt

SEQ ID NO: 5984586 - DNA, 25 bp, Homo sapien
tggctggtctgcacacctttcgcat

SEQ ID NO: 5984587 - DNA, 25 bp, Homo sapien
ttatcgagtacttcactttcatctt

SEQ ID NO: 5984588 - DNA, 25 bp, Homo sapien
ctgtagacgggtttttgcaatccat

SEQ ID NO: 5984589 - DNA, 25 bp, Homo sapien
aaggtgatgataatgatagaatcta

SEQ ID NO: 5984590 - DNA, 25 bp, Homo sapien
ggaaatcaagttggcagtcagtgct

SEQ ID NO: 5984591 - DNA, 25 bp, Homo sapien
ccaaatggcaatggaaatcaagttg

SEQ ID NO: 5984592 - DNA, 25 bp, Homo sapien
attgctagggttgaacagtgggttc

SEQ ID NO: 5984593 - DNA, 25 bp, Homo sapien
caccatctatatttcaactacaact

SEQ ID NO: 5984594 - DNA, 25 bp, Homo sapien
gaagattgattatgaaaaccacggt

SEQ ID NO: 5984595 - DNA, 25 bp, Homo sapien
ttacgatctttggtttactacttta

SEQ ID NO: 5984596 - DNA, 25 bp, Homo sapien
gcatcgctattgcctcgttccagca

SEQ ID NO: 5984597 - DNA, 25 bp, Homo sapien
ctatatttcaactacaactacggtc

SEQ ID NO: 5984598 - DNA, 25 bp, Homo sapien
gtactgcctgccacacggttcacca

SEQ ID NO: 5984599 - DNA, 25 bp, Homo sapien
ttcaactacaactacggtcaattca

SEQ ID NO: 5984600 - DNA, 25 bp, Homo sapien
catctacccattgattctgccatta

SEQ ID NO: 5984601 - DNA, 25 bp, Homo sapien
taatattcctgtcaagtggcagaaa

SEQ ID NO: 5984602 - DNA, 25 bp, Homo sapien
acacggttcaccatctatatttcaa

SEQ ID NO: 5984603 - DNA, 25 bp, Homo sapien
tactttacttattcacggctagtct

SEQ ID NO: 5984604 - DNA, 25 bp, Homo sapien
gtcagtgctatcccatggatgtcga

SEQ ID NO: 5984605 - DNA, 25 bp, Homo sapien
gattttgcaggagactttgaactcc

SEQ ID NO: 5984606 - DNA, 25 bp, Homo sapien
tcacggctagtctcagctacgtgtt

SEQ ID NO: 5984607 - DNA, 25 bp, Homo sapien
ttcagcaattctacgattttgcagg

SEQ ID NO: 5984608 - DNA, 25 bp, Homo sapien
ggtgtaaggaagctcattatcgagt

SEQ ID NO: 5984609 - DNA, 25 bp, Homo sapien
ctacgggcaggtgccattcctgttt

SEQ ID NO: 5984610 - DNA, 25 bp, Homo sapien
caagtggctggtctgcacacctttc

SEQ ID NO: 5984611 - DNA, 25 bp, Homo sapien
acttgaaaaaccaaatggcaatgga

SEQ ID NO: 5984612 - DNA, 25 bp, Homo sapien
atcacaagtggctggtctgcacacc

SEQ ID NO: 5984613 - DNA, 25 bp, Homo sapien
attatgaaaaccacggtgtaaggaa

SEQ ID NO: 5984614 - DNA, 25 bp, Homo sapien
attggccaagggtctaccgtgctct

SEQ ID NO: 5984615 - DNA, 25 bp, Homo sapien
ttctgttcacttttgttaacttttg

SEQ ID NO: 5984616 - DNA, 25 bp, Homo sapien
catcctgtagacgggtttttgcaat

SEQ ID NO: 5984617 - DNA, 25 bp, Homo sapien
gctaaggagacctgggacgctcaag

SEQ ID NO: 5984618 - DNA, 25 bp, Homo sapien
aaacaatcctgccgtcaacggtact

SEQ ID NO: 5984619 - DNA, 25 bp, Homo sapien
gttaagagatgctaaggagacctgg

SEQ ID NO: 5984620 - DNA, 25 bp, Homo sapien
atttcatcaaggaggtcgaaggtga

SEQ ID NO: 5984621 - DNA, 25 bp, Homo sapien
tatgaaaaccacggtgtaaggaagc

SEQ ID NO: 5984622 - DNA, 25 bp, Homo sapien
acaatcctgccgtcaacggtactgc

SEQ ID NO: 5984623 - DNA, 25 bp, Homo sapien
ggttcagcaattctacgattttgca

SEQ ID NO: 5984624 - DNA, 25 bp, Homo sapien
acagtgggttcagcaattctacgat

SEQ ID NO: 5984625 - DNA, 25 bp, Homo sapien
tttcatctttttcactgattgcggt

SEQ ID NO: 5984626 - DNA, 25 bp, Homo sapien
ccatggatgtcgatgttgaccgttc

SEQ ID NO: 5984627 - DNA, 25 bp, Homo sapien
gaactccaagaatgccgtcaaagaa

SEQ ID NO: 5984628 - DNA, 25 bp, Homo sapien
tatcaaacaatcctgccgtcaacgg

SEQ ID NO: 5984629 - DNA, 25 bp, Homo sapien
ggccattctaaactatacatgaaga

SEQ ID NO: 5984630 - DNA, 25 bp, Homo sapien
cctgccacacggttcaccatctata

SEQ ID NO: 5984631 - DNA, 25 bp, Homo sapien
gttaaggaagttgaacatttcatca

SEQ ID NO: 5984632 - DNA, 25 bp, Homo sapien
tctgcacaagcctcatcacaagtgg

SEQ ID NO: 5984633 - DNA, 25 bp, Homo sapien
ggtcaatacctatcaaacaatcctg

SEQ ID NO: 5984634 - DNA, 25 bp, Homo sapien
ggttattgttacgatctttggttta

SEQ ID NO: 5984635 - DNA, 25 bp, Homo sapien
tggcagaaattgctagggttgaaca

SEQ ID NO: 5984636 - DNA, 25 bp, Homo sapien
ccacacggttcaccatctatatttc

SEQ ID NO: 5984637 - DNA, 25 bp, Homo sapien
cagtgctatcccatggatgtcgatg

SEQ ID NO: 5984638 - DNA, 25 bp, Homo sapien
cgcatctcattctttccatcctgta

SEQ ID NO: 5984639 - DNA, 25 bp, Homo sapien
caattcaccactctgtgggacagac

SEQ ID NO: 5984640 - DNA, 25 bp, Homo sapien
gactttgaactccaagaatgccgtc

SEQ ID NO: 5984641 - DNA, 25 bp, Homo sapien
aagttaaggaagttgaacatttcat

SEQ ID NO: 5984642 - DNA, 25 bp, Homo sapien
ttcacttttgttaacttttggactg

SEQ ID NO: 5984643 - DNA, 25 bp, Homo sapien
cattgattctgccattacacaaggt

SEQ ID NO: 5984644 - DNA, 25 bp, Homo sapien
cgtcaacggtactgcctgccacacg

SEQ ID NO: 5984645 - DNA, 25 bp, Homo sapien
cagcaattctacgattttgcaggag

SEQ ID NO: 5984646 - DNA, 25 bp, Homo sapien
tacttcactttcatctttttcactg

SEQ ID NO: 5984647 - DNA, 25 bp, Homo sapien
ttgacaagtcgattttcaaccatcc

SEQ ID NO: 5984648 - DNA, 25 bp, Homo sapien
actacggtcaattcaccactctgtg

SEQ ID NO: 5984649 - DNA, 25 bp, Homo sapien
cctcatcacaagtggctggtctgca

SEQ ID NO: 5984650 - DNA, 25 bp, Homo sapien
gtaccacatctacccattgattctg

SEQ ID NO: 5984651 - DNA, 25 bp, Homo sapien
gcaggagactttgaactccaagaat

SEQ ID NO: 5984652 - DNA, 25 bp, Homo sapien
tctaccgtgctctgcacaagcctca

SEQ ID NO: 5984653 - DNA, 25 bp, Homo sapien
atgaagattgattatgaaaaccacg

SEQ ID NO: 5984654 - DNA, 25 bp, Homo sapien
cgtagaccagatgactcattgtttg

SEQ ID NO: 5984655 - DNA, 25 bp, Homo sapien
cgtcttttgcatcgctattgcctcg

SEQ ID NO: 5984656 - DNA, 25 bp, Homo sapien
cgctgaccattatgtcttagacgac

SEQ ID NO: 5984657 - DNA, 25 bp, Homo sapien
ggactgttatgattcatgacggtca

SEQ ID NO: 5984658 - DNA, 25 bp, Homo sapien
gccaagggtctaccgtgctctgcac

SEQ ID NO: 5984659 - DNA, 25 bp, Homo sapien
agaaattgctagggttgaacagtgg

SEQ ID NO: 5984660 - DNA, 25 bp, Homo sapien
tctaaactatacatgaagattgatt

SEQ ID NO: 5984661 - DNA, 25 bp, Homo sapien
ccgtgctctgcacaagcctcatcac

SEQ ID NO: 5984662 - DNA, 25 bp, Homo sapien
actacaactacggtcaattcaccac

SEQ ID NO: 5984663 - DNA, 25 bp, Homo sapien
gtgctatcccatggatgtcgatgtt

SEQ ID NO: 5984664 - DNA, 25 bp, Homo sapien
gattcatgacggtcaatacctatca

SEQ ID NO: 5984665 - DNA, 25 bp, Homo sapien
cgagtacttcactttcatctttttc

SEQ ID NO: 5984666 - DNA, 25 bp, Homo sapien
gcatcttgagagaattcctctcact

SEQ ID NO: 5984667 - DNA, 25 bp, Homo sapien
gtctgcacacctttcgcatctcatt

SEQ ID NO: 5984668 - DNA, 25 bp, Homo sapien
ttacttgaaaaaccaaatggcaatg

SEQ ID NO: 5984669 - DNA, 25 bp, Homo sapien
acggccattctaaactatacatgaa

SEQ ID NO: 5984670 - DNA, 25 bp, Homo sapien
cgaaggtgatgataatgatagaatc

SEQ ID NO: 5984671 - DNA, 25 bp, Homo sapien
agagaattcctctcactatgggtta

SEQ ID NO: 5984672 - DNA, 25 bp, Homo sapien
aaagttctgcccgcttcgttggcag

SEQ ID NO: 5984673 - DNA, 25 bp, Homo sapien
ttatttgattctgttcacttttgtt

SEQ ID NO: 5984674 - DNA, 25 bp, Homo sapien
tccatctcgtaccacatctacccat

SEQ ID NO: 5984675 - DNA, 25 bp, Homo sapien
aggagactttgaactccaagaatgc

SEQ ID NO: 5984676 - DNA, 25 bp, Homo sapien
caagggtctaccgtgctctgcacaa

SEQ ID NO: 5984677 - DNA, 25 bp, Homo sapien
gtgctctgcacaagcctcatcacaa

SEQ ID NO: 5984678 - DNA, 25 bp, Homo sapien
atcgagtacttcactttcatctttt

SEQ ID NO: 5984679 - DNA, 25 bp, Homo sapien
tatttagcgcacagatggttgcatt

SEQ ID NO: 5984680 - DNA, 25 bp, Homo sapien
gttcttaccgtagaccagatgactc

SEQ ID NO: 5984681 - DNA, 25 bp, Homo sapien
ttttcaaccatcctcgttacttgaa

SEQ ID NO: 5984682 - DNA, 25 bp, Homo sapien
agtcgattttcaaccatcctcgtta

SEQ ID NO: 5984683 - DNA, 25 bp, Homo sapien
ggacgctcaagttaaggaagttgaa

SEQ ID NO: 5984684 - DNA, 25 bp, Homo sapien
ctatgaaaacgacccaaataccaag

SEQ ID NO: 5984685 - DNA, 25 bp, Homo sapien
ttattcacggctagtctcagctacg

SEQ ID NO: 5984686 - DNA, 25 bp, Homo sapien
atcttgagagaattcctctcactat

SEQ ID NO: 5984687 - DNA, 25 bp, Homo sapien
tgttacgatctttggtttactactt

SEQ ID NO: 5984688 - DNA, 25 bp, Homo sapien
ccattatgtcttagacgacttgtac

SEQ ID NO: 5984689 - DNA, 25 bp, Homo sapien
gtcgacgacgtcttttgcatcgcta

SEQ ID NO: 5984690 - DNA, 25 bp, Homo sapien
ttagacgacttgtacgctaaagttc

SEQ ID NO: 5984691 - DNA, 25 bp, Homo sapien
tccagcatcttgagagaattcctct

SEQ ID NO: 5984692 - DNA, 25 bp, Homo sapien
acggtgtaaggaagctcattatcga

SEQ ID NO: 5984693 - DNA, 25 bp, Homo sapien
ccatctatatttcaactacaactac

SEQ ID NO: 5984694 - DNA, 25 bp, Homo sapien
atgtagaaggttctacgggcaggtg

SEQ ID NO: 5984695 - DNA, 25 bp, Homo sapien
ttcgcatctcattctttccatcctg

SEQ ID NO: 5984696 - DNA, 25 bp, Homo sapien
tcatcacaagtggctggtctgcaca

SEQ ID NO: 5984697 - DNA, 25 bp, Homo sapien
catctcgtaccacatctacccattg

SEQ ID NO: 5984698 - DNA, 25 bp, Homo sapien
tctgtgggacagactagggggttct

SEQ ID NO: 5984699 - DNA, 25 bp, Homo sapien
agacgggtttttgcaatccatctcg

SEQ ID NO: 5984700 - DNA, 25 bp, Homo sapien
tacggtcaattcaccactctgtggg

SEQ ID NO: 5984701 - DNA, 25 bp, Homo sapien
acgctcaagttaaggaagttgaaca

SEQ ID NO: 5984702 - DNA, 25 bp, Homo sapien
ttcaaccatcctcgttacttgaaaa

SEQ ID NO: 5984703 - DNA, 25 bp, Homo sapien
atgaaaacgacccaaataccaagaa

SEQ ID NO: 5984704 - DNA, 25 bp, Homo sapien
gaatctatgaaaacgacccaaatac

SEQ ID NO: 5984705 - DNA, 25 bp, Homo sapien
gggtttttgcaatccatctcgtacc

SEQ ID NO: 5984706 - DNA, 25 bp, Homo sapien
atgtcgatgttgaccgttccatggt

SEQ ID NO: 5984707 - DNA, 25 bp, Homo sapien
atgctaaggagacctgggacgctca

SEQ ID NO: 5984708 - DNA, 25 bp, Homo sapien
atggatgtcgatgttgaccgttcca

SEQ ID NO: 5984709 - DNA, 25 bp, Homo sapien
ttggactgttatgattcatgacggt

SEQ ID NO: 5984710 - DNA, 25 bp, Homo sapien
gaacatttcatcaaggaggtcgaag

SEQ ID NO: 5984711 - DNA, 25 bp, Homo sapien
ttggtcttagaagtcgctgaccatt

SEQ ID NO: 5984712 - DNA, 25 bp, Homo sapien
tctacccattgattctgccattaca

SEQ ID NO: 5984713 - DNA, 25 bp, Homo sapien
agctacgtgtttgtgtttgacaagt

SEQ ID NO: 5984714 - DNA, 25 bp, Homo sapien
ttatgattcatgacggtcaatacct

SEQ ID NO: 5984715 - DNA, 25 bp, Homo sapien
gctctgcacaagcctcatcacaagt

SEQ ID NO: 5984716 - DNA, 25 bp, Homo sapien
ggttgaacagtgggttcagcaattc

SEQ ID NO: 5984717 - DNA, 25 bp, Homo sapien
agtggctggtctgcacacctttcgc

SEQ ID NO: 5984718 - DNA, 25 bp, Homo sapien
cttgtacgctaaagttctgcccgct

SEQ ID NO: 5984719 - DNA, 25 bp, Homo sapien
aaggaggtcgaaggtgatgataatg

SEQ ID NO: 5984720 - DNA, 25 bp, Homo sapien
accatcctcgttacttgaaaaacca

SEQ ID NO: 5984721 - DNA, 25 bp, Homo sapien
gtttactactttacttattcacggc

SEQ ID NO: 5984722 - DNA, 25 bp, Homo sapien
gtcaagtggcagaaattgctagggt

SEQ ID NO: 5984723 - DNA, 25 bp, Homo sapien
tgtatttagcgcacagatggttgca

SEQ ID NO: 5984724 - DNA, 25 bp, Homo sapien
caagaatgccgtcaaagaatgtaga

SEQ ID NO: 5984725 - DNA, 25 bp, Homo sapien
atcgctattgcctcgttccagcatc

SEQ ID NO: 5984726 - DNA, 25 bp, Homo sapien
ggcaatggaaatcaagttggcagtc

SEQ ID NO: 5984727 - DNA, 25 bp, Homo sapien
gacttgtacgctaaagttctgcccg

SEQ ID NO: 5984728 - DNA, 25 bp, Homo sapien
gattctgccattacacaaggtttct

SEQ ID NO: 5984729 - DNA, 25 bp, Homo sapien
gcaattctacgattttgcaggagac

SEQ ID NO: 5984730 - DNA, 25 bp, Homo sapien
tgtacgctaaagttctgcccgcttc

SEQ ID NO: 5984731 - DNA, 25 bp, Homo sapien
tatcccatggatgtcgatgttgacc

SEQ ID NO: 5984732 - DNA, 25 bp, Homo sapien
gattttcaaccatcctcgttacttg

SEQ ID NO: 5984733 - DNA, 25 bp, Homo sapien
gggggttcttaccgtagaccagatg

SEQ ID NO: 5984734 - DNA, 25 bp, Homo sapien
cggtcaattcaccactctgtgggac

SEQ ID NO: 5984735 - DNA, 25 bp, Homo sapien
tcatctttttcactgattgcggtgt

SEQ ID NO: 5984736 - DNA, 25 bp, Homo sapien
agatgactcattgtttgatcctaag

SEQ ID NO: 5984737 - DNA, 25 bp, Homo sapien
gtttgatcctaagttaagagatgct

SEQ ID NO: 5984738 - DNA, 25 bp, Homo sapien
acgacgtcttttgcatcgctattgc

SEQ ID NO: 5984739 - DNA, 25 bp, Homo sapien
gttccagcatcttgagagaattcct

SEQ ID NO: 5984740 - DNA, 25 bp, Homo sapien
gtcaattcaccactctgtgggacag

SEQ ID NO: 5984741 - DNA, 25 bp, Homo sapien
atgactcattgtttgatcctaagtt

SEQ ID NO: 5984742 - DNA, 25 bp, Homo sapien
ggttgcattggccaagggtctaccg

SEQ ID NO: 5984743 - DNA, 25 bp, Homo sapien
ccatggtttgttatggaattgaacg

SEQ ID NO: 5984744 - DNA, 25 bp, Homo sapien
cactgattgcggtgtgtatttagcg

SEQ ID NO: 5984745 - DNA, 25 bp, Homo sapien
tgcctcgttccagcatcttgagaga

SEQ ID NO: 5984746 - DNA, 25 bp, Homo sapien
acttttggactgttatgattcatga

SEQ ID NO: 5984747 - DNA, 25 bp, Homo sapien
aaggttctacgggcaggtgccattc

SEQ ID NO: 5984748 - DNA, 25 bp, Homo sapien
ttgaacggccattctaaactataca

SEQ ID NO: 5984749 - DNA, 25 bp, Homo sapien
ctgcccgcttcgttggcagctaata

SEQ ID NO: 5984750 - DNA, 25 bp, Homo sapien
taccgtgctctgcacaagcctcatc

SEQ ID NO: 5984751 - DNA, 25 bp, Homo sapien
tgtttgatatgtcgacgacgtcttt

SEQ ID NO: 5984752 - DNA, 25 bp, Homo sapien
ctgattgcggtgtgtatttagcgca

SEQ ID NO: 5984753 - DNA, 25 bp, Homo sapien
tacgctaaagttctgcccgcttcgt

SEQ ID NO: 5984754 - DNA, 25 bp, Homo sapien
caagcctcatcacaagtggctggtc

SEQ ID NO: 5984755 - DNA, 25 bp, Homo sapien
gtttgtgtttgacaagtcgattttc

SEQ ID NO: 5984756 - DNA, 25 bp, Homo sapien
ctcattgtttgatcctaagttaaga

SEQ ID NO: 5984757 - DNA, 25 bp, Homo sapien
gatcctaagttaagagatgctaagg

SEQ ID NO: 5984758 - DNA, 25 bp, Homo sapien
ctgccattacacaaggtttcttatt

SEQ ID NO: 5984759 - DNA, 25 bp, Homo sapien
atgttgaccgttccatggtttgtta

SEQ ID NO: 5984760 - DNA, 25 bp, Homo sapien
gtagaaggttctacgggcaggtgcc

SEQ ID NO: 5984761 - DNA, 25 bp, Homo sapien
atctttttcactgattgcggtgtgt

SEQ ID NO: 5984762 - DNA, 25 bp, Homo sapien
tcgattttcaaccatcctcgttact

SEQ ID NO: 5984763 - DNA, 25 bp, Homo sapien
aatccatctcgtaccacatctaccc

SEQ ID NO: 5984764 - DNA, 25 bp, Homo sapien
cattgtttgatcctaagttaagaga

SEQ ID NO: 5984765 - DNA, 25 bp, Homo sapien
gacagactagggggttcttaccgta

SEQ ID NO: 5984766 - DNA, 25 bp, Homo sapien
ggttctacgggcaggtgccattcct

SEQ ID NO: 5984767 - DNA, 25 bp, Homo sapien
ccgtcaaagaatgtagaaggttcta

SEQ ID NO: 5984768 - DNA, 25 bp, Homo sapien
cagctaatattcctgtcaagtggca

SEQ ID NO: 5984769 - DNA, 25 bp, Homo sapien
ggaattgaacggccattctaaacta

SEQ ID NO: 5984770 - DNA, 25 bp, Homo sapien
atggaaatcaagttggcagtcagtg

SEQ ID NO: 5984771 - DNA, 25 bp, Homo sapien
gaagttgaacatttcatcaaggagg

SEQ ID NO: 5984772 - DNA, 25 bp, Homo sapien
ctgccgtcaacggtactgcctgcca

SEQ ID NO: 5984773 - DNA, 25 bp, Homo sapien
ttgtttgatcctaagttaagagatg

SEQ ID NO: 5984774 - DNA, 25 bp, Homo sapien
agaaggttctacgggcaggtgccat

SEQ ID NO: 5984775 - DNA, 25 bp, Homo sapien
catcctcgttacttgaaaaaccaaa

SEQ ID NO: 5984776 - DNA, 25 bp, Homo sapien
tctcactatgggttattgttacgat

SEQ ID NO: 5984777 - DNA, 25 bp, Homo sapien
gaaaaaccaaatggcaatggaaatc

SEQ ID NO: 5984778 - DNA, 25 bp, Homo sapien
tcttatttgattctgttcacttttg

SEQ ID NO: 5984779 - DNA, 25 bp, Homo sapien
taaactatacatgaagattgattat

SEQ ID NO: 5984780 - DNA, 25 bp, Homo sapien
cctgtttgatatgtcgacgacgtct

SEQ ID NO: 5984781 - DNA, 25 bp, Homo sapien
aaatggcaatggaaatcaagttggc

SEQ ID NO: 5984782 - DNA, 25 bp, Homo sapien
tgggttattgttacgatctttggtt

SEQ ID NO: 5984783 - DNA, 25 bp, Homo sapien
tcccatggatgtcgatgttgaccgt

SEQ ID NO: 5984784 - DNA, 25 bp, Homo sapien
ggtttcttatttgattctgttcact

SEQ ID NO: 5984785 - DNA, 25 bp, Homo sapien
agagatgctaaggagacctgggacg

SEQ ID NO: 5984786 - DNA, 25 bp, Homo sapien
caaagaatgtagaaggttctacggg

SEQ ID NO: 5984787 - DNA, 25 bp, Homo sapien
ggtttgttatggaattgaacggcca

SEQ ID NO: 5984788 - DNA, 25 bp, Homo sapien
ggttcaccatctatatttcaactac

SEQ ID NO: 5984789 - DNA, 25 bp, Homo sapien
ttctacgggcaggtgccattcctgt

SEQ ID NO: 5984790 - DNA, 25 bp, Homo sapien
aaaaccaaatggcaatggaaatcaa

SEQ ID NO: 5984791 - DNA, 25 bp, Homo sapien
gaaaacgacccaaataccaagaaga

SEQ ID NO: 5984792 - DNA, 25 bp, Homo sapien
ttcatcaaggaggtcgaaggtgatg

SEQ ID NO: 5984793 - DNA, 25 bp, Homo sapien
taaggaagttgaacatttcatcaag

SEQ ID NO: 5984794 - DNA, 25 bp, Homo sapien
ttgcaatccatctcgtaccacatct

SEQ ID NO: 5984795 - DNA, 25 bp, Homo sapien
ttggcagtcagtgctatcccatgga

SEQ ID NO: 5984796 - DNA, 25 bp, Homo sapien
ctagtctcagctacgtgtttgtgtt

SEQ ID NO: 5984797 - DNA, 25 bp, Homo sapien
attcctgtcaagtggcagaaattgc

SEQ ID NO: 5984798 - DNA, 25 bp, Homo sapien
atttgattctgttcacttttgttaa

SEQ ID NO: 5984799 - DNA, 25 bp, Homo sapien
cgttacttgaaaaaccaaatggcaa

SEQ ID NO: 5984800 - DNA, 25 bp, Homo sapien
aaccacggtgtaaggaagctcatta

SEQ ID NO: 5984801 - DNA, 25 bp, Homo sapien
gtcgaaggtgatgataatgatagaa

SEQ ID NO: 5984802 - DNA, 25 bp, Homo sapien
cctcgttccagcatcttgagagaat

SEQ ID NO: 5984803 - DNA, 25 bp, Homo sapien
tagaatctatgaaaacgacccaaat

SEQ ID NO: 5984804 - DNA, 25 bp, Homo sapien
ctcattatcgagtacttcactttca

SEQ ID NO: 5984805 - DNA, 25 bp, Homo sapien
attgattatgaaaaccacggtgtaa

SEQ ID NO: 5984806 - DNA, 25 bp, Homo sapien
cccattgattctgccattacacaag

SEQ ID NO: 5984807 - DNA, 25 bp, Homo sapien
gcgcacagatggttgcattggccaa

SEQ ID NO: 5984808 - DNA, 25 bp, Homo sapien
tagcgcacagatggttgcattggcc

SEQ ID NO: 5984809 - DNA, 25 bp, Homo sapien
catcaaggaggtcgaaggtgatgat

SEQ ID NO: 5984810 - DNA, 25 bp, Homo sapien
ttattgttacgatctttggtttact

SEQ ID NO: 5984811 - DNA, 25 bp, Homo sapien
ttcgttggcagctaatattcctgtc

SEQ ID NO: 5984812 - DNA, 25 bp, Homo sapien
ggtctaccgtgctctgcacaagcct

SEQ ID NO: 5984813 - DNA, 25 bp, Homo sapien
taagagatgctaaggagacctggga

SEQ ID NO: 5984814 - DNA, 25 bp, Homo sapien
acatgaagattgattatgaaaacca

SEQ ID NO: 5984815 - DNA, 25 bp, Homo sapien
tgggacgctcaagttaaggaagttg

SEQ ID NO: 5984816 - DNA, 25 bp, Homo sapien
tctcgtaccacatctacccattgat

SEQ ID NO: 5984817 - DNA, 25 bp, Homo sapien
atttggtcttagaagtcgctgacca

SEQ ID NO: 5984818 - DNA, 25 bp, Homo sapien
cagcatcttgagagaattcctctca

SEQ ID NO: 5984819 - DNA, 25 bp, Homo sapien
catctcattctttccatcctgtaga

SEQ ID NO: 5984820 - DNA, 25 bp, Homo sapien
gattctgttcacttttgttaacttt

SEQ ID NO: 5984821 - DNA, 25 bp, Homo sapien
ttctgccattacacaaggtttctta

SEQ ID NO: 5984822 - DNA, 25 bp, Homo sapien
gttaacttttggactgttatgattc

SEQ ID NO: 5984823 - DNA, 25 bp, Homo sapien
agatggttgcattggccaagggtct

SEQ ID NO: 5984824 - DNA, 25 bp, Homo sapien
gtcgctgaccattatgtcttagacg

SEQ ID NO: 5984825 - DNA, 25 bp, Homo sapien
ctaagttaagagatgctaaggagac

SEQ ID NO: 5984826 - DNA, 25 bp, Homo sapien
tcgttccagcatcttgagagaattc

SEQ ID NO: 5984827 - DNA, 25 bp, Homo sapien
aagtcgctgaccattatgtcttaga

SEQ ID NO: 5984828 - DNA, 25 bp, Homo sapien
ccgcttcgttggcagctaatattcc

SEQ ID NO: 5984829 - DNA, 25 bp, Homo sapien
agaatgccgtcaaagaatgtagaag

SEQ ID NO: 5984830 - DNA, 25 bp, Homo sapien
tcctaagttaagagatgctaaggag

SEQ ID NO: 5984831 - DNA, 25 bp, Homo sapien
gacctgggacgctcaagttaaggaa

SEQ ID NO: 5984832 - DNA, 25 bp, Homo sapien
ttcatgacggtcaatacctatcaaa

SEQ ID NO: 5984833 - DNA, 25 bp, Homo sapien
atctatatttcaactacaactacgg

SEQ ID NO: 5984834 - DNA, 25 bp, Homo sapien
gaccattatgtcttagacgacttgt

SEQ ID NO: 5984835 - DNA, 25 bp, Homo sapien
cgctaaagttctgcccgcttcgttg

SEQ ID NO: 5984836 - DNA, 25 bp, Homo sapien
taatgatagaatctatgaaaacgac

SEQ ID NO: 5984837 - DNA, 25 bp, Homo sapien
gtgtttgtgtttgacaagtcgattt

SEQ ID NO: 5984838 - DNA, 25 bp, Homo sapien
caactacaactacggtcaattcacc

SEQ ID NO: 5984839 - DNA, 25 bp, Homo sapien
gctggtctgcacacctttcgcatct

SEQ ID NO: 5984840 - DNA, 25 bp, Homo sapien
acgacttgtacgctaaagttctgcc

SEQ ID NO: 5984841 - DNA, 25 bp, Homo sapien
aggagacctgggacgctcaagttaa

SEQ ID NO: 5984842 - DNA, 25 bp, Homo sapien
tctcagctacgtgtttgtgtttgac

SEQ ID NO: 5984843 - DNA, 25 bp, Homo sapien
atttcaactacaactacggtcaatt

SEQ ID NO: 5984844 - DNA, 25 bp, Homo sapien
ttactactttacttattcacggcta

SEQ ID NO: 5984845 - DNA, 25 bp, Homo sapien
acgattttgcaggagactttgaact

SEQ ID NO: 5984846 - DNA, 25 bp, Homo sapien
agattgattatgaaaaccacggtgt

SEQ ID NO: 5984847 - DNA, 25 bp, Homo sapien
ttggcagctaatattcctgtcaagt

SEQ ID NO: 5984848 - DNA, 25 bp, Homo sapien
attcaccactctgtgggacagacta

SEQ ID NO: 5984849 - DNA, 25 bp, Homo sapien
gcaatccatctcgtaccacatctac

SEQ ID NO: 5984850 - DNA, 25 bp, Homo sapien
agcctcatcacaagtggctggtctg

SEQ ID NO: 5984851 - DNA, 25 bp, Homo sapien
taaggagacctgggacgctcaagtt

SEQ ID NO: 5984852 - DNA, 25 bp, Homo sapien
tgggttcagcaattctacgattttg

SEQ ID NO: 5984853 - DNA, 25 bp, Homo sapien
acggtcaatacctatcaaacaatcc

SEQ ID NO: 5984854 - DNA, 25 bp, Homo sapien
atgatagaatctatgaaaacgaccc

SEQ ID NO: 5984855 - DNA, 25 bp, Homo sapien
ggaggtcgaaggtgatgataatgat

SEQ ID NO: 5984856 - DNA, 25 bp, Homo sapien
taaggaagctcattatcgagtactt

SEQ ID NO: 5984857 - DNA, 25 bp, Homo sapien
tgaaaaccacggtgtaaggaagctc

SEQ ID NO: 5984858 - DNA, 25 bp, Homo sapien
agctcattatcgagtacttcacttt

SEQ ID NO: 5984859 - DNA, 25 bp, Homo sapien
attgttacgatctttggtttactac

SEQ ID NO: 5984860 - DNA, 25 bp, Homo sapien
ccattctaaactatacatgaagatt

SEQ ID NO: 5984861 - DNA, 25 bp, Homo sapien
agttctgcccgcttcgttggcagct

SEQ ID NO: 5984862 - DNA, 25 bp, Homo sapien
gagacctgggacgctcaagttaagg

SEQ ID NO: 5984863 - DNA, 25 bp, Homo sapien
ttttgcaggagactttgaactccaa

SEQ ID NO: 5984864 - DNA, 25 bp, Homo sapien
tttgatatgtcgacgacgtcttttg

SEQ ID NO: 5984865 - DNA, 25 bp, Homo sapien
ttgcattggccaagggtctaccgtg

SEQ ID NO: 5984866 - DNA, 25 bp, Homo sapien
agaagtcgctgaccattatgtctta

SEQ ID NO: 5984867 - DNA, 25 bp, Homo sapien
atggatttggtcttagaagtcgctg

SEQ ID NO: 5984868 - DNA, 25 bp, Homo sapien
agggttgaacagtgggttcagcaat

SEQ ID NO: 5984869 - DNA, 25 bp, Homo sapien
gcagaaattgctagggttgaacagt

SEQ ID NO: 5984870 - DNA, 25 bp, Homo sapien
atggtttgttatggaattgaacggc

SEQ ID NO: 5984871 - DNA, 25 bp, Homo sapien
aactatacatgaagattgattatga

SEQ ID NO: 5984872 - DNA, 25 bp, Homo sapien
gccgtcaacggtactgcctgccaca

SEQ ID NO: 5984873 - DNA, 25 bp, Homo sapien
tgcacaagcctcatcacaagtggct

SEQ ID NO: 5984874 - DNA, 25 bp, Homo sapien
acatttcatcaaggaggtcgaaggt

SEQ ID NO: 5984875 - DNA, 25 bp, Homo sapien
aaaaccacggtgtaaggaagctcat

SEQ ID NO: 5984876 - DNA, 25 bp, Homo sapien
accactctgtgggacagactagggg

SEQ ID NO: 5984877 - DNA, 25 bp, Homo sapien
gtttttgcaatccatctcgtaccac

SEQ ID NO: 5984878 - DNA, 25 bp, Homo sapien
cgatgttgaccgttccatggtttgt

SEQ ID NO: 5984879 - DNA, 25 bp, Homo sapien
acccaaataccaagaagaacaactg

SEQ ID NO: 5984880 - DNA, 25 bp, Homo sapien
ctaaagttctgcccgcttcgttggc

SEQ ID NO: 5984881 - DNA, 25 bp, Homo sapien
tagggggttcttaccgtagaccaga

SEQ ID NO: 5984882 - DNA, 25 bp, Homo sapien
aatacctatcaaacaatcctgccgt

SEQ ID NO: 5984883 - DNA, 25 bp, Homo sapien
agttgaacatttcatcaaggaggtc

SEQ ID NO: 5984884 - DNA, 25 bp, Homo sapien
tttccatcctgtagacgggtttttg

SEQ ID NO: 5984885 - DNA, 25 bp, Homo sapien
aagaatgtagaaggttctacgggca

SEQ ID NO: 5984886 - DNA, 25 bp, Homo sapien
gaccagatgactcattgtttgatcc

SEQ ID NO: 5984887 - DNA, 25 bp, Homo sapien
gattgcggtgtgtatttagcgcaca

SEQ ID NO: 5984888 - DNA, 25 bp, Homo sapien
tcttttgcatcgctattgcctcgtt

SEQ ID NO: 5984889 - DNA, 25 bp, Homo sapien
ttacttattcacggctagtctcagc

SEQ ID NO: 5984890 - DNA, 25 bp, Homo sapien
tcctgtcaagtggcagaaattgcta

SEQ ID NO: 5984891 - DNA, 25 bp, Homo sapien
gtcaaagaatgtagaaggttctacg

SEQ ID NO: 5984892 - DNA, 25 bp, Homo sapien
ttttcactgattgcggtgtgtattt

SEQ ID NO: 5984893 - DNA, 25 bp, Homo sapien
ctatacatgaagattgattatgaaa

SEQ ID NO: 5984894 - DNA, 25 bp, Homo sapien
tctttccatcctgtagacgggtttt

SEQ ID NO: 5984895 - DNA, 25 bp, Homo sapien
gcacacctttcgcatctcattcttt

SEQ ID NO: 5984896 - DNA, 25 bp, Homo sapien
ttatggaattgaacggccattctaa

SEQ ID NO: 5984897 - DNA, 25 bp, Homo sapien
atggaattgaacggccattctaaac

SEQ ID NO: 5984898 - DNA, 25 bp, Homo sapien
accacatctacccattgattctgcc

SEQ ID NO: 5984899 - DNA, 25 bp, Homo sapien
ttccatggtttgttatggaattgaa

SEQ ID NO: 5984900 - DNA, 25 bp, Homo sapien
aagttaagagatgctaaggagacct

SEQ ID NO: 5984901 - DNA, 25 bp, Homo sapien
actgttatgattcatgacggtcaat

SEQ ID NO: 5984902 - DNA, 25 bp, Homo sapien
agtggcagaaattgctagggttgaa

SEQ ID NO: 5984903 - DNA, 25 bp, Homo sapien
gcagagcacggtagacccttggcca

SEQ ID NO: 5984904 - DNA, 25 bp, Homo sapien
accttcgacctccttgatgaaatgt

SEQ ID NO: 5984905 - DNA, 25 bp, Homo sapien
gacctccttgatgaaatgttcaact

SEQ ID NO: 5984906 - DNA, 25 bp, Homo sapien
tagtctgtcccacagagtggtgaat

SEQ ID NO: 5984907 - DNA, 25 bp, Homo sapien
tttccattgccatttggtttttcaa

SEQ ID NO: 5984908 - DNA, 25 bp, Homo sapien
taccgttgacggcaggattgtttga

SEQ ID NO: 5984909 - DNA, 25 bp, Homo sapien
aagtagtaaaccaaagatcgtaaca

SEQ ID NO: 5984910 - DNA, 25 bp, Homo sapien
agaaccccctagtctgtcccacaga

SEQ ID NO: 5984911 - DNA, 25 bp, Homo sapien
gttgttcttcttggtatttgggtcg

SEQ ID NO: 5984912 - DNA, 25 bp, Homo sapien
ctgtcccacagagtggtgaattgac

SEQ ID NO: 5984913 - DNA, 25 bp, Homo sapien
gtcagcgacttctaagaccaaatcc

SEQ ID NO: 5984914 - DNA, 25 bp, Homo sapien
atgaatcataacagtccaaaagtta

SEQ ID NO: 5984915 - DNA, 25 bp, Homo sapien
ttggccaatgcaaccatctgtgcgc

SEQ ID NO: 5984916 - DNA, 25 bp, Homo sapien
aggtattgaccgtcatgaatcataa

SEQ ID NO: 5984917 - DNA, 25 bp, Homo sapien
tgttcttcttggtatttgggtcgtt

SEQ ID NO: 5984918 - DNA, 25 bp, Homo sapien
gaatcataacagtccaaaagttaac

SEQ ID NO: 5984919 - DNA, 25 bp, Homo sapien
acttgacaggaatattagctgccaa

SEQ ID NO: 5984920 - DNA, 25 bp, Homo sapien
tgcagaccagccacttgtgatgagg

SEQ ID NO: 5984921 - DNA, 25 bp, Homo sapien
gatgaggcttgtgcagagcacggta

SEQ ID NO: 5984922 - DNA, 25 bp, Homo sapien
aagatgaaagtgaagtactcgataa

SEQ ID NO: 5984923 - DNA, 25 bp, Homo sapien
catggaacggtcaacatcgacatcc

SEQ ID NO: 5984924 - DNA, 25 bp, Homo sapien
atgtggtacgagatggattgcaaaa

SEQ ID NO: 5984925 - DNA, 25 bp, Homo sapien
tgatgaaatgttcaacttccttaac

SEQ ID NO: 5984926 - DNA, 25 bp, Homo sapien
aggcttgtgcagagcacggtagacc

SEQ ID NO: 5984927 - DNA, 25 bp, Homo sapien
caatgagtcatctggtctacggtaa

SEQ ID NO: 5984928 - DNA, 25 bp, Homo sapien
tgtgcagaccagccacttgtgatga

SEQ ID NO: 5984929 - DNA, 25 bp, Homo sapien
cgagatggattgcaaaaacccgtct

SEQ ID NO: 5984930 - DNA, 25 bp, Homo sapien
atgaaatgttcaacttccttaactt

SEQ ID NO: 5984931 - DNA, 25 bp, Homo sapien
aacacaaacacgtagctgagactag

SEQ ID NO: 5984932 - DNA, 25 bp, Homo sapien
tcgacctccttgatgaaatgttcaa

SEQ ID NO: 5984933 - DNA, 25 bp, Homo sapien
atcattatcatcaccttcgacctcc

SEQ ID NO: 5984934 - DNA, 25 bp, Homo sapien
tgacggcaggattgtttgataggta

SEQ ID NO: 5984935 - DNA, 25 bp, Homo sapien
gaaaggtgtgcagaccagccacttg

SEQ ID NO: 5984936 - DNA, 25 bp, Homo sapien
tggaacggtcaacatcgacatccat

SEQ ID NO: 5984937 - DNA, 25 bp, Homo sapien
ttcaaagtctcctgcaaaatcgtag

SEQ ID NO: 5984938 - DNA, 25 bp, Homo sapien
cagtgaaaaagatgaaagtgaagta

SEQ ID NO: 5984939 - DNA, 25 bp, Homo sapien
tctacattctttgacggcattcttg

SEQ ID NO: 5984940 - DNA, 25 bp, Homo sapien
ggaatattagctgccaacgaagcgg

SEQ ID NO: 5984941 - DNA, 25 bp, Homo sapien
ctccttagcatctcttaacttagga

SEQ ID NO: 5984942 - DNA, 25 bp, Homo sapien
gtatttgggtcgttttcatagattc

SEQ ID NO: 5984943 - DNA, 25 bp, Homo sapien
gccgtgaataagtaaagtagtaaac

SEQ ID NO: 5984944 - DNA, 25 bp, Homo sapien
gcttgtgcagagcacggtagaccct

SEQ ID NO: 5984945 - DNA, 25 bp, Homo sapien
aatttctgccacttgacaggaatat

SEQ ID NO: 5984946 - DNA, 25 bp, Homo sapien
gtactcgataatgagcttccttaca

SEQ ID NO: 5984947 - DNA, 25 bp, Homo sapien
ctggaacgaggcaatagcgatgcaa

SEQ ID NO: 5984948 - DNA, 25 bp, Homo sapien
atggcacctgcccgtagaaccttct

SEQ ID NO: 5984949 - DNA, 25 bp, Homo sapien
actttagcgtacaagtcgtctaaga

SEQ ID NO: 5984950 - DNA, 25 bp, Homo sapien
aacacgtagctgagactagccgtga

SEQ ID NO: 5984951 - DNA, 25 bp, Homo sapien
caaaagtgaacagaatcaaataaga

SEQ ID NO: 5984952 - DNA, 25 bp, Homo sapien
tgtgtaatggcagaatcaatgggta

SEQ ID NO: 5984953 - DNA, 25 bp, Homo sapien
tgcaaaatcgtagaattgctgaacc

SEQ ID NO: 5984954 - DNA, 25 bp, Homo sapien
tgaggcttgtgcagagcacggtaga

SEQ ID NO: 5984955 - DNA, 25 bp, Homo sapien
tgtatagtttagaatggccgttcaa

SEQ ID NO: 5984956 - DNA, 25 bp, Homo sapien
acgtcgtcgacatatcaaacaggaa

SEQ ID NO: 5984957 - DNA, 25 bp, Homo sapien
tacggtaagaaccccctagtctgtc

SEQ ID NO: 5984958 - DNA, 25 bp, Homo sapien
accgtggttttcataatcaatcttc

SEQ ID NO: 5984959 - DNA, 25 bp, Homo sapien
cccgtagaaccttctacattctttg

SEQ ID NO: 5984960 - DNA, 25 bp, Homo sapien
cgtctacaggatggaaagaatgaga

SEQ ID NO: 5984961 - DNA, 25 bp, Homo sapien
aaagttaacaaaagtgaacagaatc

SEQ ID NO: 5984962 - DNA, 25 bp, Homo sapien
gataatgagcttccttacaccgtgg

SEQ ID NO: 5984963 - DNA, 25 bp, Homo sapien
tgcaaaagacgtcgtcgacatatca

SEQ ID NO: 5984964 - DNA, 25 bp, Homo sapien
tgtgcgctaaatacacaccgcaatc

SEQ ID NO: 5984965 - DNA, 25 bp, Homo sapien
taacgaggatggttgaaaatcgact

SEQ ID NO: 5984966 - DNA, 25 bp, Homo sapien
gtaagaaccccctagtctgtcccac

SEQ ID NO: 5984967 - DNA, 25 bp, Homo sapien
ttgtcaaacacaaacacgtagctga

SEQ ID NO: 5984968 - DNA, 25 bp, Homo sapien
tagcgatgcaaaagacgtcgtcgac

SEQ ID NO: 5984969 - DNA, 25 bp, Homo sapien
ggtacgagatggattgcaaaaaccc

SEQ ID NO: 5984970 - DNA, 25 bp, Homo sapien
tacattctttgacggcattcttgga

SEQ ID NO: 5984971 - DNA, 25 bp, Homo sapien
gacggcattcttggagttcaaagtc

SEQ ID NO: 5984972 - DNA, 25 bp, Homo sapien
aacttaggatcaaacaatgagtcat

SEQ ID NO: 5984973 - DNA, 25 bp, Homo sapien
ctaaatacacaccgcaatcagtgaa

SEQ ID NO: 5984974 - DNA, 25 bp, Homo sapien
atggttgaaaatcgacttgtcaaac

SEQ ID NO: 5984975 - DNA, 25 bp, Homo sapien
cttgagcgtcccaggtctccttagc

SEQ ID NO: 5984976 - DNA, 25 bp, Homo sapien
tcaaacaggaatggcacctgcccgt

SEQ ID NO: 5984977 - DNA, 25 bp, Homo sapien
tggccgttcaattccataacaaacc

SEQ ID NO: 5984978 - DNA, 25 bp, Homo sapien
gtcgtctaagacataatggtcagcg

SEQ ID NO: 5984979 - DNA, 25 bp, Homo sapien
atcagtgaaaaagatgaaagtgaag

SEQ ID NO: 5984980 - DNA, 25 bp, Homo sapien
taagacataatggtcagcgacttct

SEQ ID NO: 5984981 - DNA, 25 bp, Homo sapien
ccatagtgagaggaattctctcaag

SEQ ID NO: 5984982 - DNA, 25 bp, Homo sapien
gaattgctgaacccactgttcaacc

SEQ ID NO: 5984983 - DNA, 25 bp, Homo sapien
tagtttagaatggccgttcaattcc

SEQ ID NO: 5984984 - DNA, 25 bp, Homo sapien
atttgggtcgttttcatagattcta

SEQ ID NO: 5984985 - DNA, 25 bp, Homo sapien
cagagtggtgaattgaccgtagttg

SEQ ID NO: 5984986 - DNA, 25 bp, Homo sapien
atggattgcaaaaacccgtctacag

SEQ ID NO: 5984987 - DNA, 25 bp, Homo sapien
aatggtcagcgacttctaagaccaa

SEQ ID NO: 5984988 - DNA, 25 bp, Homo sapien
gatgaaagtgaagtactcgataatg

SEQ ID NO: 5984989 - DNA, 25 bp, Homo sapien
cgtagaaccttctacattctttgac

SEQ ID NO: 5984990 - DNA, 25 bp, Homo sapien
ttatcatcaccttcgacctccttga

SEQ ID NO: 5984991 - DNA, 25 bp, Homo sapien
taagaaaccttgtgtaatggcagaa

SEQ ID NO: 5984992 - DNA, 25 bp, Homo sapien
ttaacttaggatcaaacaatgagtc

SEQ ID NO: 5984993 - DNA, 25 bp, Homo sapien
ccagccacttgtgatgaggcttgtg

SEQ ID NO: 5984994 - DNA, 25 bp, Homo sapien
gagtggtgaattgaccgtagttgta

SEQ ID NO: 5984995 - DNA, 25 bp, Homo sapien
cagaactttagcgtacaagtcgtct

SEQ ID NO: 5984996 - DNA, 25 bp, Homo sapien
atcatcaccttcgacctccttgatg

SEQ ID NO: 5984997 - DNA, 25 bp, Homo sapien
attccataacaaaccatggaacggt

SEQ ID NO: 5984998 - DNA, 25 bp, Homo sapien
agcactgactgccaacttgatttcc

SEQ ID NO: 5984999 - DNA, 25 bp, Homo sapien
tgaataagtaaagtagtaaaccaaa

SEQ ID NO: 5985000 - DNA, 25 bp, Homo sapien
aatatagatggtgaaccgtgtggca

SEQ ID NO: 5985001 - DNA, 25 bp, Homo sapien
catatcaaacaggaatggcacctgc

SEQ ID NO: 5985002 - DNA, 25 bp, Homo sapien
cgcaatcagtgaaaaagatgaaagt

SEQ ID NO: 5985003 - DNA, 25 bp, Homo sapien
accgtcatgaatcataacagtccaa

SEQ ID NO: 5985004 - DNA, 25 bp, Homo sapien
cttcgacctccttgatgaaatgttc

SEQ ID NO: 5985005 - DNA, 25 bp, Homo sapien
ttgaccgtagttgtagttgaaatat

SEQ ID NO: 5985006 - DNA, 25 bp, Homo sapien
gaaaaagatgaaagtgaagtactcg

SEQ ID NO: 5985007 - DNA, 25 bp, Homo sapien
cagcgacttctaagaccaaatccat

SEQ ID NO: 5985008 - DNA, 25 bp, Homo sapien
atgagcttccttacaccgtggtttt

SEQ ID NO: 5985009 - DNA, 25 bp, Homo sapien
cacaaacacgtagctgagactagcc

SEQ ID NO: 5985010 - DNA, 25 bp, Homo sapien
ttaacaaaagtgaacagaatcaaat

SEQ ID NO: 5985011 - DNA, 25 bp, Homo sapien
gaatcaaataagaaaccttgtgtaa

SEQ ID NO: 5985012 - DNA, 25 bp, Homo sapien
ggcacctgcccgtagaaccttctac

SEQ ID NO: 5985013 - DNA, 25 bp, Homo sapien
agaaaccttgtgtaatggcagaatc

SEQ ID NO: 5985014 - DNA, 25 bp, Homo sapien
acgaggatggttgaaaatcgacttg

SEQ ID NO: 5985015 - DNA, 25 bp, Homo sapien
gaaaatcgacttgtcaaacacaaac

SEQ ID NO: 5985016 - DNA, 25 bp, Homo sapien
tcataatcaatcttcatgtatagtt

SEQ ID NO: 5985017 - DNA, 25 bp, Homo sapien
acaccgtggttttcataatcaatct

SEQ ID NO: 5985018 - DNA, 25 bp, Homo sapien
acaagtcgtctaagacataatggtc

SEQ ID NO: 5985019 - DNA, 25 bp, Homo sapien
cgtagaattgctgaacccactgttc

SEQ ID NO: 5985020 - DNA, 25 bp, Homo sapien
acttgtgatgaggcttgtgcagagc

SEQ ID NO: 5985021 - DNA, 25 bp, Homo sapien
aataacccatagtgagaggaattct

SEQ ID NO: 5985022 - DNA, 25 bp, Homo sapien
catccatgggatagcactgactgcc

SEQ ID NO: 5985023 - DNA, 25 bp, Homo sapien
tgtttgataggtattgaccgtcatg

SEQ ID NO: 5985024 - DNA, 25 bp, Homo sapien
ccacttgtgatgaggcttgtgcaga

SEQ ID NO: 5985025 - DNA, 25 bp, Homo sapien
aattgaccgtagttgtagttgaaat

SEQ ID NO: 5985026 - DNA, 25 bp, Homo sapien
gtggtacgagatggattgcaaaaac

SEQ ID NO: 5985027 - DNA, 25 bp, Homo sapien
ctgaacccactgttcaaccctagca

SEQ ID NO: 5985028 - DNA, 25 bp, Homo sapien
aaccaaagatcgtaacaataaccca

SEQ ID NO: 5985029 - DNA, 25 bp, Homo sapien
gaactttagcgtacaagtcgtctaa

SEQ ID NO: 5985030 - DNA, 25 bp, Homo sapien
atcgacttgtcaaacacaaacacgt

SEQ ID NO: 5985031 - DNA, 25 bp, Homo sapien
ggcagaactttagcgtacaagtcgt

SEQ ID NO: 5985032 - DNA, 25 bp, Homo sapien
ttgacaggaatattagctgccaacg

SEQ ID NO: 5985033 - DNA, 25 bp, Homo sapien
aacatcgacatccatgggatagcac

SEQ ID NO: 5985034 - DNA, 25 bp, Homo sapien
cccctagtctgtcccacagagtggt

SEQ ID NO: 5985035 - DNA, 25 bp, Homo sapien
taacaataacccatagtgagaggaa

SEQ ID NO: 5985036 - DNA, 25 bp, Homo sapien
gaacggtcaacatcgacatccatgg

SEQ ID NO: 5985037 - DNA, 25 bp, Homo sapien
gaaatatagatggtgaaccgtgtgg

SEQ ID NO: 5985038 - DNA, 25 bp, Homo sapien
ttcttggtatttgggtcgttttcat

SEQ ID NO: 5985039 - DNA, 25 bp, Homo sapien
aaagacgtcgtcgacatatcaaaca

SEQ ID NO: 5985040 - DNA, 25 bp, Homo sapien
ccaggtctccttagcatctcttaac

SEQ ID NO: 5985041 - DNA, 25 bp, Homo sapien
gtgaaccgtgtggcaggcagtaccg

SEQ ID NO: 5985042 - DNA, 25 bp, Homo sapien
tattagctgccaacgaagcgggcag

SEQ ID NO: 5985043 - DNA, 25 bp, Homo sapien
ggcagaatcaatgggtagatgtggt

SEQ ID NO: 5985044 - DNA, 25 bp, Homo sapien
tcaccttcgacctccttgatgaaat

SEQ ID NO: 5985045 - DNA, 25 bp, Homo sapien
cctagtctgtcccacagagtggtga

SEQ ID NO: 5985046 - DNA, 25 bp, Homo sapien
atggaaagaatgagatgcgaaaggt

SEQ ID NO: 5985047 - DNA, 25 bp, Homo sapien
gtattgaccgtcatgaatcataaca

SEQ ID NO: 5985048 - DNA, 25 bp, Homo sapien
ggtgtgcagaccagccacttgtgat

SEQ ID NO: 5985049 - DNA, 25 bp, Homo sapien
caacttccttaacttgagcgtccca

SEQ ID NO: 5985050 - DNA, 25 bp, Homo sapien
gaggatggttgaaaatcgacttgtc

SEQ ID NO: 5985051 - DNA, 25 bp, Homo sapien
agaatggccgttcaattccataaca

SEQ ID NO: 5985052 - DNA, 25 bp, Homo sapien
tcaatcttcatgtatagtttagaat

SEQ ID NO: 5985053 - DNA, 25 bp, Homo sapien
attcttggagttcaaagtctcctgc

SEQ ID NO: 5985054 - DNA, 25 bp, Homo sapien
gtagttgaaatatagatggtgaacc

SEQ ID NO: 5985055 - DNA, 25 bp, Homo sapien
cttggtatttgggtcgttttcatag

SEQ ID NO: 5985056 - DNA, 25 bp, Homo sapien
tagattctatcattatcatcacctt

SEQ ID NO: 5985057 - DNA, 25 bp, Homo sapien
gtcccacagagtggtgaattgaccg

SEQ ID NO: 5985058 - DNA, 25 bp, Homo sapien
tttggtttttcaagtaacgaggatg

SEQ ID NO: 5985059 - DNA, 25 bp, Homo sapien
cagttgttcttcttggtatttgggt

SEQ ID NO: 5985060 - DNA, 25 bp, Homo sapien
taggatcaaacaatgagtcatctgg

SEQ ID NO: 5985061 - DNA, 25 bp, Homo sapien
cagaccagccacttgtgatgaggct

SEQ ID NO: 5985062 - DNA, 25 bp, Homo sapien
cagaatcaatgggtagatgtggtac

SEQ ID NO: 5985063 - DNA, 25 bp, Homo sapien
actgttcaaccctagcaatttctgc

SEQ ID NO: 5985064 - DNA, 25 bp, Homo sapien
gattctatcattatcatcaccttcg

SEQ ID NO: 5985065 - DNA, 25 bp, Homo sapien
agtgaacagaatcaaataagaaacc

SEQ ID NO: 5985066 - DNA, 25 bp, Homo sapien
taaagtagtaaaccaaagatcgtaa

SEQ ID NO: 5985067 - DNA, 25 bp, Homo sapien
ttgaaaatcgacttgtcaaacacaa

SEQ ID NO: 5985068 - DNA, 25 bp, Homo sapien
accctagcaatttctgccacttgac

SEQ ID NO: 5985069 - DNA, 25 bp, Homo sapien
gacaggaatattagctgccaacgaa

SEQ ID NO: 5985070 - DNA, 25 bp, Homo sapien
tttcataatcaatcttcatgtatag

SEQ ID NO: 5985071 - DNA, 25 bp, Homo sapien
caaaaacccgtctacaggatggaaa

SEQ ID NO: 5985072 - DNA, 25 bp, Homo sapien
ttcaaccctagcaatttctgccact

SEQ ID NO: 5985073 - DNA, 25 bp, Homo sapien
gaccagccacttgtgatgaggcttg

SEQ ID NO: 5985074 - DNA, 25 bp, Homo sapien
gagtcatctggtctacggtaagaac

SEQ ID NO: 5985075 - DNA, 25 bp, Homo sapien
gaagcgggcagaactttagcgtaca

SEQ ID NO: 5985076 - DNA, 25 bp, Homo sapien
gagcttccttacaccgtggttttca

SEQ ID NO: 5985077 - DNA, 25 bp, Homo sapien
taatgagcttccttacaccgtggtt

SEQ ID NO: 5985078 - DNA, 25 bp, Homo sapien
tacgagatggattgcaaaaacccgt

SEQ ID NO: 5985079 - DNA, 25 bp, Homo sapien
agcatctcttaacttaggatcaaac

SEQ ID NO: 5985080 - DNA, 25 bp, Homo sapien
agcacggtagacccttggccaatgc

SEQ ID NO: 5985081 - DNA, 25 bp, Homo sapien
tatagtttagaatggccgttcaatt

SEQ ID NO: 5985082 - DNA, 25 bp, Homo sapien
taacccatagtgagaggaattctct

SEQ ID NO: 5985083 - DNA, 25 bp, Homo sapien
ggagttcaaagtctcctgcaaaatc

SEQ ID NO: 5985084 - DNA, 25 bp, Homo sapien
ttcaagtaacgaggatggttgaaaa

SEQ ID NO: 5985085 - DNA, 25 bp, Homo sapien
cagtccaaaagttaacaaaagtgaa

SEQ ID NO: 5985086 - DNA, 25 bp, Homo sapien
tgaacagaatcaaataagaaacctt

SEQ ID NO: 5985087 - DNA, 25 bp, Homo sapien
ctatcattatcatcaccttcgacct

SEQ ID NO: 5985088 - DNA, 25 bp, Homo sapien
catcaccttcgacctccttgatgaa

SEQ ID NO: 5985089 - DNA, 25 bp, Homo sapien
caacgaagcgggcagaactttagcg

SEQ ID NO: 5985090 - DNA, 25 bp, Homo sapien
ttgacggcattcttggagttcaaag

SEQ ID NO: 5985091 - DNA, 25 bp, Homo sapien
atggcagaatcaatgggtagatgtg

SEQ ID NO: 5985092 - DNA, 25 bp, Homo sapien
ccaaagatcgtaacaataacccata

SEQ ID NO: 5985093 - DNA, 25 bp, Homo sapien
cctagcaatttctgccacttgacag

SEQ ID NO: 5985094 - DNA, 25 bp, Homo sapien
gcagtaccgttgacggcaggattgt

SEQ ID NO: 5985095 - DNA, 25 bp, Homo sapien
tagctgagactagccgtgaataagt

SEQ ID NO: 5985096 - DNA, 25 bp, Homo sapien
cattatcatcaccttcgacctcctt

SEQ ID NO: 5985097 - DNA, 25 bp, Homo sapien
tcgacatccatgggatagcactgac

SEQ ID NO: 5985098 - DNA, 25 bp, Homo sapien
agttcaaagtctcctgcaaaatcgt

SEQ ID NO: 5985099 - DNA, 25 bp, Homo sapien
acacaccgcaatcagtgaaaaagat

SEQ ID NO: 5985100 - DNA, 25 bp, Homo sapien
aaggtgtgcagaccagccacttgtg

SEQ ID NO: 5985101 - DNA, 25 bp, Homo sapien
gccaacgaagcgggcagaactttag

SEQ ID NO: 5985102 - DNA, 25 bp, Homo sapien
ccgttgacggcaggattgtttgata

SEQ ID NO: 5985103 - DNA, 25 bp, Homo sapien
gccaacttgatttccattgccattt

SEQ ID NO: 5985104 - DNA, 25 bp, Homo sapien
attgcaaaaacccgtctacaggatg

SEQ ID NO: 5985105 - DNA, 25 bp, Homo sapien
aatagcgatgcaaaagacgtcgtcg

SEQ ID NO: 5985106 - DNA, 25 bp, Homo sapien
gaattctctcaagatgctggaacga

SEQ ID NO: 5985107 - DNA, 25 bp, Homo sapien
agtaaaccaaagatcgtaacaataa

SEQ ID NO: 5985108 - DNA, 25 bp, Homo sapien
gcgtacaagtcgtctaagacataat

SEQ ID NO: 5985109 - DNA, 25 bp, Homo sapien
aatgttcaacttccttaacttgagc

SEQ ID NO: 5985110 - DNA, 25 bp, Homo sapien
attctctcaagatgctggaacgagg

SEQ ID NO: 5985111 - DNA, 25 bp, Homo sapien
gcattcttggagttcaaagtctcct

SEQ ID NO: 5985112 - DNA, 25 bp, Homo sapien
cggtagacccttggccaatgcaacc

SEQ ID NO: 5985113 - DNA, 25 bp, Homo sapien
aggaatggcacctgcccgtagaacc

SEQ ID NO: 5985114 - DNA, 25 bp, Homo sapien
gcgaaaggtgtgcagaccagccact

SEQ ID NO: 5985115 - DNA, 25 bp, Homo sapien
tgccacttgacaggaatattagctg

SEQ ID NO: 5985116 - DNA, 25 bp, Homo sapien
acggtcaacatcgacatccatggga

SEQ ID NO: 5985117 - DNA, 25 bp, Homo sapien
ccttggccaatgcaaccatctgtgc

SEQ ID NO: 5985118 - DNA, 25 bp, Homo sapien
attgaccgtcatgaatcataacagt

SEQ ID NO: 5985119 - DNA, 25 bp, Homo sapien
tacaggatggaaagaatgagatgcg

SEQ ID NO: 5985120 - DNA, 25 bp, Homo sapien
gtgaaaaagatgaaagtgaagtact

SEQ ID NO: 5985121 - DNA, 25 bp, Homo sapien
aaagaatgagatgcgaaaggtgtgc

SEQ ID NO: 5985122 - DNA, 25 bp, Homo sapien
aacaatgagtcatctggtctacggt

SEQ ID NO: 5985123 - DNA, 25 bp, Homo sapien
aacagaatcaaataagaaaccttgt

SEQ ID NO: 5985124 - DNA, 25 bp, Homo sapien
aatcttcatgtatagtttagaatgg

SEQ ID NO: 5985125 - DNA, 25 bp, Homo sapien
caaccctagcaatttctgccacttg

SEQ ID NO: 5985126 - DNA, 25 bp, Homo sapien
catctcttaacttaggatcaaacaa

SEQ ID NO: 5985127 - DNA, 25 bp, Homo sapien
caaccatctgtgcgctaaatacaca

SEQ ID NO: 5985128 - DNA, 25 bp, Homo sapien
ttgtgcagagcacggtagacccttg

SEQ ID NO: 5985129 - DNA, 25 bp, Homo sapien
ttctttgacggcattcttggagttc

SEQ ID NO: 5985130 - DNA, 25 bp, Homo sapien
cataacagtccaaaagttaacaaaa

SEQ ID NO: 5985131 - DNA, 25 bp, Homo sapien
gacatccatgggatagcactgactg

SEQ ID NO: 5985132 - DNA, 25 bp, Homo sapien
aagtcgtctaagacataatggtcag

SEQ ID NO: 5985133 - DNA, 25 bp, Homo sapien
acaataacccatagtgagaggaatt

SEQ ID NO: 5985134 - DNA, 25 bp, Homo sapien
ttgaaatatagatggtgaaccgtgt

SEQ ID NO: 5985135 - DNA, 25 bp, Homo sapien
atcaaacaatgagtcatctggtcta

SEQ ID NO: 5985136 - DNA, 25 bp, Homo sapien
atgcgaaaggtgtgcagaccagcca

SEQ ID NO: 5985137 - DNA, 25 bp, Homo sapien
gccatttggtttttcaagtaacgag

SEQ ID NO: 5985138 - DNA, 25 bp, Homo sapien
caagtaacgaggatggttgaaaatc

SEQ ID NO: 5985139 - DNA, 25 bp, Homo sapien
aatcaatcttcatgtatagtttaga

SEQ ID NO: 5985140 - DNA, 25 bp, Homo sapien
actcgataatgagcttccttacacc

SEQ ID NO: 5985141 - DNA, 25 bp, Homo sapien
gaatcaatgggtagatgtggtacga

SEQ ID NO: 5985142 - DNA, 25 bp, Homo sapien
ggaacgaggcaatagcgatgcaaaa

SEQ ID NO: 5985143 - DNA, 25 bp, Homo sapien
atacacaccgcaatcagtgaaaaag

SEQ ID NO: 5985144 - DNA, 25 bp, Homo sapien
agatgcgaaaggtgtgcagaccagc

SEQ ID NO: 5985145 - DNA, 25 bp, Homo sapien
ggatcaaacaatgagtcatctggtc

SEQ ID NO: 5985146 - DNA, 25 bp, Homo sapien
ccgtagttgtagttgaaatatagat

SEQ ID NO: 5985147 - DNA, 25 bp, Homo sapien
cttgatgaaatgttcaacttcctta

SEQ ID NO: 5985148 - DNA, 25 bp, Homo sapien
agcgggcagaactttagcgtacaag

SEQ ID NO: 5985149 - DNA, 25 bp, Homo sapien
cgttcaattccataacaaaccatgg

SEQ ID NO: 5985150 - DNA, 25 bp, Homo sapien
catgtatagtttagaatggccgttc

SEQ ID NO: 5985151 - DNA, 25 bp, Homo sapien
tgagaggaattctctcaagatgctg

SEQ ID NO: 5985152 - DNA, 25 bp, Homo sapien
tgaaagtgaagtactcgataatgag

SEQ ID NO: 5985153 - DNA, 25 bp, Homo sapien
tagccgtgaataagtaaagtagtaa

SEQ ID NO: 5985154 - DNA, 25 bp, Homo sapien
aaaccatggaacggtcaacatcgac

SEQ ID NO: 5985155 - DNA, 25 bp, Homo sapien
gacatatcaaacaggaatggcacct

SEQ ID NO: 5985156 - DNA, 25 bp, Homo sapien
ggattgtttgataggtattgaccgt

SEQ ID NO: 5985157 - DNA, 25 bp, Homo sapien
caaaagacgtcgtcgacatatcaaa

SEQ ID NO: 5985158 - DNA, 25 bp, Homo sapien
aacttgagcgtcccaggtctcctta

SEQ ID NO: 5985159 - DNA, 25 bp, Homo sapien
ataatggtcagcgacttctaagacc

SEQ ID NO: 5985160 - DNA, 25 bp, Homo sapien
cgaggcaatagcgatgcaaaagacg

SEQ ID NO: 5985161 - DNA, 25 bp, Homo sapien
tgcaaccatctgtgcgctaaataca

SEQ ID NO: 5985162 - DNA, 25 bp, Homo sapien
gtctgtcccacagagtggtgaattg

SEQ ID NO: 5985163 - DNA, 25 bp, Homo sapien
atgagtcatctggtctacggtaaga

SEQ ID NO: 5985164 - DNA, 25 bp, Homo sapien
tgctgaacccactgttcaaccctag

SEQ ID NO: 5985165 - DNA, 25 bp, Homo sapien
gtagttgtagttgaaatatagatgg

SEQ ID NO: 5985166 - DNA, 25 bp, Homo sapien
aatgagatgcgaaaggtgtgcagac

SEQ ID NO: 5985167 - DNA, 25 bp, Homo sapien
atcgtaacaataacccatagtgaga

SEQ ID NO: 5985168 - DNA, 25 bp, Homo sapien
tctacaggatggaaagaatgagatg

SEQ ID NO: 5985169 - DNA, 25 bp, Homo sapien
acaccgcaatcagtgaaaaagatga

SEQ ID NO: 5985170 - DNA, 25 bp, Homo sapien
ggtgaattgaccgtagttgtagttg

SEQ ID NO: 5985171 - DNA, 25 bp, Homo sapien
ttgccatttggtttttcaagtaacg

SEQ ID NO: 5985172 - DNA, 25 bp, Homo sapien
aaatacacaccgcaatcagtgaaaa

SEQ ID NO: 5985173 - DNA, 25 bp, Homo sapien
accatctgtgcgctaaatacacacc

SEQ ID NO: 5985174 - DNA, 25 bp, Homo sapien
agagcacggtagacccttggccaat

SEQ ID NO: 5985175 - DNA, 25 bp, Homo sapien
caaacacaaacacgtagctgagact

SEQ ID NO: 5985176 - DNA, 25 bp, Homo sapien
cttaggatcaaacaatgagtcatct

SEQ ID NO: 5985177 - DNA, 25 bp, Homo sapien
cattctttgacggcattcttggagt

SEQ ID NO: 5985178 - DNA, 25 bp, Homo sapien
tctacggtaagaaccccctagtctg

SEQ ID NO: 5985179 - DNA, 25 bp, Homo sapien
cgtgtggcaggcagtaccgttgacg

SEQ ID NO: 5985180 - DNA, 25 bp, Homo sapien
ttagaatggccgttcaattccataa

SEQ ID NO: 5985181 - DNA, 25 bp, Homo sapien
aacccgtctacaggatggaaagaat

SEQ ID NO: 5985182 - DNA, 25 bp, Homo sapien
agtgagaggaattctctcaagatgc

SEQ ID NO: 5985183 - DNA, 25 bp, Homo sapien
agatggattgcaaaaacccgtctac

SEQ ID NO: 5985184 - DNA, 25 bp, Homo sapien
gcaatagcgatgcaaaagacgtcgt

SEQ ID NO: 5985185 - DNA, 25 bp, Homo sapien
atcgtagaattgctgaacccactgt

SEQ ID NO: 5985186 - DNA, 25 bp, Homo sapien
ttagcatctcttaacttaggatcaa

SEQ ID NO: 5985187 - DNA, 25 bp, Homo sapien
agacataatggtcagcgacttctaa

SEQ ID NO: 5985188 - DNA, 25 bp, Homo sapien
agtaccgttgacggcaggattgttt

SEQ ID NO: 5985189 - DNA, 25 bp, Homo sapien
tcttcatgtatagtttagaatggcc

SEQ ID NO: 5985190 - DNA, 25 bp, Homo sapien
ttgatttccattgccatttggtttt

SEQ ID NO: 5985191 - DNA, 25 bp, Homo sapien
caggattgtttgataggtattgacc

SEQ ID NO: 5985192 - DNA, 25 bp, Homo sapien
catcgacatccatgggatagcactg

SEQ ID NO: 5985193 - DNA, 25 bp, Homo sapien
acccttggccaatgcaaccatctgt

SEQ ID NO: 5985194 - DNA, 25 bp, Homo sapien
aaagatcgtaacaataacccatagt

SEQ ID NO: 5985195 - DNA, 25 bp, Homo sapien
cacctgcccgtagaaccttctacat

SEQ ID NO: 5985196 - DNA, 25 bp, Homo sapien
gatggtgaaccgtgtggcaggcagt

SEQ ID NO: 5985197 - DNA, 25 bp, Homo sapien
gcaatttctgccacttgacaggaat

SEQ ID NO: 5985198 - DNA, 25 bp, Homo sapien
cgtcccaggtctccttagcatctct

SEQ ID NO: 5985199 - DNA, 25 bp, Homo sapien
acgaagcgggcagaactttagcgta

SEQ ID NO: 5985200 - DNA, 25 bp, Homo sapien
ttcaattccataacaaaccatggaa

SEQ ID NO: 5985201 - DNA, 25 bp, Homo sapien
aagtactcgataatgagcttcctta

SEQ ID NO: 5985202 - DNA, 25 bp, Homo sapien
cagaatcaaataagaaaccttgtgt

SEQ ID NO: 5985203 - DNA, 25 bp, Homo sapien
ataggtattgaccgtcatgaatcat

SEQ ID NO: 5985204 - DNA, 25 bp, Homo sapien
tttagcgtacaagtcgtctaagaca

SEQ ID NO: 5985205 - DNA, 25 bp, Homo sapien
tctctcaagatgctggaacgaggca

SEQ ID NO: 5985206 - DNA, 25 bp, Homo sapien
ctgactgccaacttgatttccattg

SEQ ID NO: 5985207 - DNA, 25 bp, Homo sapien
ctcctgcaaaatcgtagaattgctg

SEQ ID NO: 5985208 - DNA, 25 bp, Homo sapien
ccttaacttgagcgtcccaggtctc

SEQ ID NO: 5985209 - DNA, 25 bp, Homo sapien
taacaaaccatggaacggtcaacat

SEQ ID NO: 5985210 - DNA, 25 bp, Homo sapien
ccacttgacaggaatattagctgcc

SEQ ID NO: 5985211 - DNA, 25 bp, Homo sapien
aagatgctggaacgaggcaatagcg

SEQ ID NO: 5985212 - DNA, 25 bp, Homo sapien
catctgtgcgctaaatacacaccgc

SEQ ID NO: 5985213 - DNA, 25 bp, Homo sapien
taatggcagaatcaatgggtagatg

SEQ ID NO: 5985214 - DNA, 25 bp, Homo sapien
tccttgatgaaatgttcaacttcct

SEQ ID NO: 5985215 - DNA, 25 bp, Homo sapien
acaggaatggcacctgcccgtagaa

SEQ ID NO: 5985216 - DNA, 25 bp, Homo sapien
aaatcgacttgtcaaacacaaacac

SEQ ID NO: 5985217 - DNA, 25 bp, Homo sapien
aaaagatgaaagtgaagtactcgat

SEQ ID NO: 5985218 - DNA, 25 bp, Homo sapien
taaaccaaagatcgtaacaataacc

SEQ ID NO: 5985219 - DNA, 25 bp, Homo sapien
caaaatcgtagaattgctgaaccca

SEQ ID NO: 5985220 - DNA, 25 bp, Homo sapien
aataagaaaccttgtgtaatggcag

SEQ ID NO: 5985221 - DNA, 25 bp, Homo sapien
ggccaatgcaaccatctgtgcgcta

SEQ ID NO: 5985222 - DNA, 25 bp, Homo sapien
aacaaaagtgaacagaatcaaataa

SEQ ID NO: 5985223 - DNA, 25 bp, Homo sapien
tccatgggatagcactgactgccaa

SEQ ID NO: 5985224 - DNA, 25 bp, Homo sapien
agatgtggtacgagatggattgcaa

SEQ ID NO: 5985225 - DNA, 25 bp, Homo sapien
acttgatttccattgccatttggtt

SEQ ID NO: 5985226 - DNA, 25 bp, Homo sapien
ggaaagaatgagatgcgaaaggtgt

SEQ ID NO: 5985227 - DNA, 25 bp, Homo sapien
ctgccaacttgatttccattgccat

SEQ ID NO: 5985228 - DNA, 25 bp, Homo sapien
agcgtcccaggtctccttagcatct

SEQ ID NO: 5985229 - DNA, 25 bp, Homo sapien
tctcaagatgctggaacgaggcaat

SEQ ID NO: 5985230 - DNA, 25 bp, Homo sapien
cacagagtggtgaattgaccgtagt

SEQ ID NO: 5985231 - DNA, 25 bp, Homo sapien
attgctgaacccactgttcaaccct

SEQ ID NO: 5985232 - DNA, 25 bp, Homo sapien
aggcaatagcgatgcaaaagacgtc

SEQ ID NO: 5985233 - DNA, 25 bp, Homo sapien
ttccttaacttgagcgtcccaggtc

SEQ ID NO: 5985234 - DNA, 25 bp, Homo sapien
gaatggcacctgcccgtagaacctt

SEQ ID NO: 5985235 - DNA, 25 bp, Homo sapien
ccaatgcaaccatctgtgcgctaaa

SEQ ID NO: 5985236 - DNA, 25 bp, Homo sapien
gttgacggcaggattgtttgatagg

SEQ ID NO: 5985237 - DNA, 25 bp, Homo sapien
gtcatctggtctacggtaagaaccc

SEQ ID NO: 5985238 - DNA, 25 bp, Homo sapien
tgtggcaggcagtaccgttgacggc

SEQ ID NO: 5985239 - DNA, 25 bp, Homo sapien
cgtagctgagactagccgtgaataa

SEQ ID NO: 5985240 - DNA, 25 bp, Homo sapien
tcttcttggtatttgggtcgttttc

SEQ ID NO: 5985241 - DNA, 25 bp, Homo sapien
acaaaccatggaacggtcaacatcg

SEQ ID NO: 5985242 - DNA, 25 bp, Homo sapien
cgctaaatacacaccgcaatcagtg

SEQ ID NO: 5985243 - DNA, 25 bp, Homo sapien
agacccttggccaatgcaaccatct

SEQ ID NO: 5985244 - DNA, 25 bp, Homo sapien
tgtaatggcagaatcaatgggtaga

SEQ ID NO: 5985245 - DNA, 25 bp, Homo sapien
gggtcgttttcatagattctatcat

SEQ ID NO: 5985246 - DNA, 25 bp, Homo sapien
tggttttcataatcaatcttcatgt

SEQ ID NO: 5985247 - DNA, 25 bp, Homo sapien
tgagatgcgaaaggtgtgcagacca

SEQ ID NO: 5985248 - DNA, 25 bp, Homo sapien
atagcactgactgccaacttgattt

SEQ ID NO: 5985249 - DNA, 25 bp, Homo sapien
tgaattgaccgtagttgtagttgaa

SEQ ID NO: 5985250 - DNA, 25 bp, Homo sapien
gcttccttacaccgtggttttcata

SEQ ID NO: 5985251 - DNA, 25 bp, Homo sapien
cgggcagaactttagcgtacaagtc

SEQ ID NO: 5985252 - DNA, 25 bp, Homo sapien
tggtcagcgacttctaagaccaaat

SEQ ID NO: 5985253 - DNA, 25 bp, Homo sapien
gggtagatgtggtacgagatggatt

SEQ ID NO: 5985254 - DNA, 25 bp, Homo sapien
atcaaataagaaaccttgtgtaatg

SEQ ID NO: 5985255 - DNA, 25 bp, Homo sapien
tatcaaacaggaatggcacctgccc

SEQ ID NO: 5985256 - DNA, 25 bp, Homo sapien
tagaattgctgaacccactgttcaa

SEQ ID NO: 5985257 - DNA, 25 bp, Homo sapien
cggcattcttggagttcaaagtctc

SEQ ID NO: 5985258 - DNA, 25 bp, Homo sapien
gtagatgtggtacgagatggattgc

SEQ ID NO: 5985259 - DNA, 25 bp, Homo sapien
aggaattctctcaagatgctggaac

SEQ ID NO: 5985260 - DNA, 25 bp, Homo sapien
agtgaagtactcgataatgagcttc

SEQ ID NO: 5985261 - DNA, 25 bp, Homo sapien
gaaatgttcaacttccttaacttga

SEQ ID NO: 5985262 - DNA, 25 bp, Homo sapien
accttctacattctttgacggcatt

SEQ ID NO: 5985263 - DNA, 25 bp, Homo sapien
tctcttaacttaggatcaaacaatg

SEQ ID NO: 5985264 - DNA, 25 bp, Homo sapien
tcatgaatcataacagtccaaaagt

SEQ ID NO: 5985265 - DNA, 25 bp, Homo sapien
gactgccaacttgatttccattgcc

SEQ ID NO: 5985266 - DNA, 25 bp, Homo sapien
tggtttttcaagtaacgaggatggt

SEQ ID NO: 5985267 - DNA, 25 bp, Homo sapien
aaacaggaatggcacctgcccgtag

SEQ ID NO: 5985268 - DNA, 25 bp, Homo sapien
tgggatagcactgactgccaacttg

SEQ ID NO: 5985269 - DNA, 25 bp, Homo sapien
gccgttcaattccataacaaaccat

SEQ ID NO: 5985270 - DNA, 25 bp, Homo sapien
acccatagtgagaggaattctctca

SEQ ID NO: 5985271 - DNA, 25 bp, Homo sapien
cataacaaaccatggaacggtcaac

SEQ ID NO: 5985272 - DNA, 25 bp, Homo sapien
gtcaaacacaaacacgtagctgaga

SEQ ID NO: 5985273 - DNA, 25 bp, Homo sapien
agatcgtaacaataacccatagtga

SEQ ID NO: 5985274 - DNA, 25 bp, Homo sapien
cgtctaagacataatggtcagcgac

SEQ ID NO: 5985275 - DNA, 25 bp, Homo sapien
tgaagtactcgataatgagcttcct

SEQ ID NO: 5985276 - DNA, 25 bp, Homo sapien
accgtgtggcaggcagtaccgttga

SEQ ID NO: 5985277 - DNA, 25 bp, Homo sapien
caaataagaaaccttgtgtaatggc

SEQ ID NO: 5985278 - DNA, 25 bp, Homo sapien
tctaagacataatggtcagcgactt

SEQ ID NO: 5985279 - DNA, 25 bp, Homo sapien
cgtgaataagtaaagtagtaaacca

SEQ ID NO: 5985280 - DNA, 25 bp, Homo sapien
tgcaaaaacccgtctacaggatgga

SEQ ID NO: 5985281 - DNA, 25 bp, Homo sapien
agctgccaacgaagcgggcagaact

SEQ ID NO: 5985282 - DNA, 25 bp, Homo sapien
tcccaggtctccttagcatctctta

SEQ ID NO: 5985283 - DNA, 25 bp, Homo sapien
tccaaaagttaacaaaagtgaacag

SEQ ID NO: 5985284 - DNA, 25 bp, Homo sapien
atagtgagaggaattctctcaagat

SEQ ID NO: 5985285 - DNA, 25 bp, Homo sapien
gcaggcagtaccgttgacggcagga

SEQ ID NO: 5985286 - DNA, 25 bp, Homo sapien
caaagtctcctgcaaaatcgtagaa

SEQ ID NO: 5985287 - DNA, 25 bp, Homo sapien
aatggccgttcaattccataacaaa

SEQ ID NO: 5985288 - DNA, 25 bp, Homo sapien
aaaccttgtgtaatggcagaatcaa

SEQ ID NO: 5985289 - DNA, 25 bp, Homo sapien
cacggtagacccttggccaatgcaa

SEQ ID NO: 5985290 - DNA, 25 bp, Homo sapien
atcaatgggtagatgtggtacgaga

SEQ ID NO: 5985291 - DNA, 25 bp, Homo sapien
gctgagactagccgtgaataagtaa

SEQ ID NO: 5985292 - DNA, 25 bp, Homo sapien
atgggtagatgtggtacgagatgga

SEQ ID NO: 5985293 - DNA, 25 bp, Homo sapien
tttctgccacttgacaggaatatta

SEQ ID NO: 5985294 - DNA, 25 bp, Homo sapien
aatgcaaccatctgtgcgctaaata

SEQ ID NO: 5985295 - DNA, 25 bp, Homo sapien
tctgtgcgctaaatacacaccgcaa

SEQ ID NO: 5985296 - DNA, 25 bp, Homo sapien
tccataacaaaccatggaacggtca

SEQ ID NO: 5985297 - DNA, 25 bp, Homo sapien
ggttgaaaatcgacttgtcaaacac

SEQ ID NO: 5985298 - DNA, 25 bp, Homo sapien
cgtcgacatatcaaacaggaatggc

SEQ ID NO: 5985299 - DNA, 25 bp, Homo sapien
tccattgccatttggtttttcaagt

SEQ ID NO: 5985300 - DNA, 25 bp, Homo sapien
ttacaccgtggttttcataatcaat

SEQ ID NO: 5985301 - DNA, 25 bp, Homo sapien
cctgcccgtagaaccttctacattc

SEQ ID NO: 5985302 - DNA, 25 bp, Homo sapien
gtacaagtcgtctaagacataatgg

SEQ ID NO: 5985303 - DNA, 25 bp, Homo sapien
ggtcaacatcgacatccatgggata

SEQ ID NO: 5985304 - DNA, 25 bp, Homo sapien
tatagatggtgaaccgtgtggcagg

SEQ ID NO: 5985305 - DNA, 25 bp, Homo sapien
gttttcataatcaatcttcatgtat

SEQ ID NO: 5985306 - DNA, 25 bp, Homo sapien
ataatcaatcttcatgtatagttta

SEQ ID NO: 5985307 - DNA, 25 bp, Homo sapien
aagtctcctgcaaaatcgtagaatt

SEQ ID NO: 5985308 - DNA, 25 bp, Homo sapien
agtaacgaggatggttgaaaatcga

SEQ ID NO: 5985309 - DNA, 25 bp, Homo sapien
cgtcatgaatcataacagtccaaaa

SEQ ID NO: 5985310 - DNA, 25 bp, Homo sapien
cgacttgtcaaacacaaacacgtag

SEQ ID NO: 5985311 - DNA, 25 bp, Homo sapien
tgagactagccgtgaataagtaaag

SEQ ID NO: 5985312 - DNA, 25 bp, Homo sapien
gatttccattgccatttggtttttc

SEQ ID NO: 5985313 - DNA, 25 bp, Homo sapien
aggtctccttagcatctcttaactt

SEQ ID NO: 5985314 - DNA, 25 bp, Homo sapien
cttctacattctttgacggcattct

SEQ ID NO: 5985315 - DNA, 25 bp, Homo sapien
acttgtcaaacacaaacacgtagct

SEQ ID NO: 5985316 - DNA, 25 bp, Homo sapien
gtttagaatggccgttcaattccat

SEQ ID NO: 5985317 - DNA, 25 bp, Homo sapien
caatcagtgaaaaagatgaaagtga

SEQ ID NO: 5985318 - DNA, 25 bp, Homo sapien
aaagtgaacagaatcaaataagaaa

SEQ ID NO: 5985319 - DNA, 25 bp, Homo sapien
aaaacccgtctacaggatggaaaga

SEQ ID NO: 5985320 - DNA, 25 bp, Homo sapien
ggattgcaaaaacccgtctacagga

SEQ ID NO: 5985321 - DNA, 25 bp, Homo sapien
ctgccaacgaagcgggcagaacttt

SEQ ID NO: 5985322 - DNA, 25 bp, Homo sapien
caattccataacaaaccatggaacg

SEQ ID NO: 5985323 - DNA, 25 bp, Homo sapien
tagaaccttctacattctttgacgg

SEQ ID NO: 5985324 - DNA, 25 bp, Homo sapien
cacgtagctgagactagccgtgaat

SEQ ID NO: 5985325 - DNA, 25 bp, Homo sapien
ttgtagttgaaatatagatggtgaa

SEQ ID NO: 5985326 - DNA, 25 bp, Homo sapien
ggatagcactgactgccaacttgat

SEQ ID NO: 5985327 - DNA, 25 bp, Homo sapien
accatggaacggtcaacatcgacat

SEQ ID NO: 5985328 - DNA, 25 bp, Homo sapien
tctgccacttgacaggaatattagc

SEQ ID NO: 5985329 - DNA, 25 bp, Homo sapien
tagcaatttctgccacttgacagga

SEQ ID NO: 5985330 - DNA, 25 bp, Homo sapien
ttagctgccaacgaagcgggcagaa

SEQ ID NO: 5985331 - DNA, 25 bp, Homo sapien
catctggtctacggtaagaaccccc

SEQ ID NO: 5985332 - DNA, 25 bp, Homo sapien
aatattagctgccaacgaagcgggc

SEQ ID NO: 5985333 - DNA, 25 bp, Homo sapien
tgcccgtagaaccttctacattctt

SEQ ID NO: 5985334 - DNA, 25 bp, Homo sapien
aacgaggcaatagcgatgcaaaaga

SEQ ID NO: 5985335 - DNA, 25 bp, Homo sapien
ttccttacaccgtggttttcataat

SEQ ID NO: 5985336 - DNA, 25 bp, Homo sapien
tgttcaaccctagcaatttctgcca

SEQ ID NO: 5985337 - DNA, 25 bp, Homo sapien
gtgatgaggcttgtgcagagcacgg

SEQ ID NO: 5985338 - DNA, 25 bp, Homo sapien
tgttcaacttccttaacttgagcgt

SEQ ID NO: 5985339 - DNA, 25 bp, Homo sapien
acggcaggattgtttgataggtatt

SEQ ID NO: 5985340 - DNA, 25 bp, Homo sapien
gcgatgcaaaagacgtcgtcgacat

SEQ ID NO: 5985341 - DNA, 25 bp, Homo sapien
gaaccttctacattctttgacggca

SEQ ID NO: 5985342 - DNA, 25 bp, Homo sapien
cactgactgccaacttgatttccat

SEQ ID NO: 5985343 - DNA, 25 bp, Homo sapien
agttgtagttgaaatatagatggtg

SEQ ID NO: 5985344 - DNA, 25 bp, Homo sapien
catgggatagcactgactgccaact

SEQ ID NO: 5985345 - DNA, 25 bp, Homo sapien
cttgtgtaatggcagaatcaatggg

SEQ ID NO: 5985346 - DNA, 25 bp, Homo sapien
agccacttgtgatgaggcttgtgca

SEQ ID NO: 5985347 - DNA, 25 bp, Homo sapien
aggcagtaccgttgacggcaggatt

SEQ ID NO: 5985348 - DNA, 25 bp, Homo sapien
ggatggaaagaatgagatgcgaaag

SEQ ID NO: 5985349 - DNA, 25 bp, Homo sapien
gatgctggaacgaggcaatagcgat

SEQ ID NO: 5985350 - DNA, 25 bp, Homo sapien
tttgataggtattgaccgtcatgaa

SEQ ID NO: 5985351 - DNA, 25 bp, Homo sapien
tagcgtacaagtcgtctaagacata

SEQ ID NO: 5985352 - DNA, 25 bp, Homo sapien
catagattctatcattatcatcacc

SEQ ID NO: 5985353 - DNA, 25 bp, Homo sapien
gtctccttagcatctcttaacttag

SEQ ID NO: 5985354 - DNA, 25 bp, Homo sapien
gtagtaaaccaaagatcgtaacaat

SEQ ID NO: 5985355 - DNA, 25 bp, Homo sapien
caacttgatttccattgccatttgg

SEQ ID NO: 5985356 - DNA, 25 bp, Homo sapien
ttttcaagtaacgaggatggttgaa

SEQ ID NO: 5985357 - DNA, 25 bp, Homo sapien
gtgcagagcacggtagacccttggc

SEQ ID NO: 5985358 - DNA, 25 bp, Homo sapien
tgcgctaaatacacaccgcaatcag

SEQ ID NO: 5985359 - DNA, 25 bp, Homo sapien
agaggaattctctcaagatgctgga

SEQ ID NO: 5985360 - DNA, 25 bp, Homo sapien
caatgggtagatgtggtacgagatg

SEQ ID NO: 5985361 - DNA, 25 bp, Homo sapien
gtttttcaagtaacgaggatggttg

SEQ ID NO: 5985362 - DNA, 25 bp, Homo sapien
caaaagttaacaaaagtgaacagaa

SEQ ID NO: 5985363 - DNA, 25 bp, Homo sapien
cccgtctacaggatggaaagaatga

SEQ ID NO: 5985364 - DNA, 25 bp, Homo sapien
taagtaaagtagtaaaccaaagatc

SEQ ID NO: 5985365 - DNA, 25 bp, Homo sapien
ccactgttcaaccctagcaatttct

SEQ ID NO: 5985366 - DNA, 25 bp, Homo sapien
tcttaacttaggatcaaacaatgag

SEQ ID NO: 5985367 - DNA, 25 bp, Homo sapien
cccacagagtggtgaattgaccgta

SEQ ID NO: 5985368 - DNA, 25 bp, Homo sapien
cgtaacaataacccatagtgagagg

SEQ ID NO: 5985369 - DNA, 25 bp, Homo sapien
ttcaacttccttaacttgagcgtcc

SEQ ID NO: 5985370 - DNA, 25 bp, Homo sapien
tcgacatatcaaacaggaatggcac

SEQ ID NO: 5985371 - DNA, 25 bp, Homo sapien
tgctggaacgaggcaatagcgatgc

SEQ ID NO: 5985372 - DNA, 25 bp, Homo sapien
attgtttgataggtattgaccgtca

SEQ ID NO: 5985373 - DNA, 25 bp, Homo sapien
agacgtcgtcgacatatcaaacagg

SEQ ID NO: 5985374 - DNA, 25 bp, Homo sapien
cgtggttttcataatcaatcttcat

SEQ ID NO: 5985375 - DNA, 25 bp, Homo sapien
ggatggttgaaaatcgacttgtcaa

SEQ ID NO: 5985376 - DNA, 25 bp, Homo sapien
tgaccgtcatgaatcataacagtcc

SEQ ID NO: 5985377 - DNA, 25 bp, Homo sapien
gaacccactgttcaaccctagcaat

SEQ ID NO: 5985378 - DNA, 25 bp, Homo sapien
agttaacaaaagtgaacagaatcaa

SEQ ID NO: 5985379 - DNA, 25 bp, Homo sapien
agttgaaatatagatggtgaaccgt

SEQ ID NO: 5985380 - DNA, 25 bp, Homo sapien
ttgtgatgaggcttgtgcagagcac

SEQ ID NO: 5985381 - DNA, 25 bp, Homo sapien
agaatgagatgcgaaaggtgtgcag

SEQ ID NO: 5985382 - DNA, 25 bp, Homo sapien
tcaagatgctggaacgaggcaatag

SEQ ID NO: 5985383 - DNA, 25 bp, Homo sapien
tcttggagttcaaagtctcctgcaa

SEQ ID NO: 5985384 - DNA, 25 bp, Homo sapien
ttcatgtatagtttagaatggccgt

SEQ ID NO: 5985385 - DNA, 25 bp, Homo sapien
tggtatttgggtcgttttcatagat

SEQ ID NO: 5985386 - DNA, 25 bp, Homo sapien
ttgggtcgttttcatagattctatc

SEQ ID NO: 5985387 - DNA, 25 bp, Homo sapien
catttggtttttcaagtaacgagga

SEQ ID NO: 5985388 - DNA, 25 bp, Homo sapien
aaatcgtagaattgctgaacccact

SEQ ID NO: 5985389 - DNA, 25 bp, Homo sapien
tcaacatcgacatccatgggatagc

SEQ ID NO: 5985390 - DNA, 25 bp, Homo sapien
ttctatcattatcatcaccttcgac

SEQ ID NO: 5985391 - DNA, 25 bp, Homo sapien
caaacacgtagctgagactagccgt

SEQ ID NO: 5985392 - DNA, 25 bp, Homo sapien
tcgataatgagcttccttacaccgt

SEQ ID NO: 5985393 - DNA, 25 bp, Homo sapien
acataatggtcagcgacttctaaga

SEQ ID NO: 5985394 - DNA, 25 bp, Homo sapien
gaccgtagttgtagttgaaatatag

SEQ ID NO: 5985395 - DNA, 25 bp, Homo sapien
ccttagcatctcttaacttaggatc

SEQ ID NO: 5985396 - DNA, 25 bp, Homo sapien
acccactgttcaaccctagcaattt

SEQ ID NO: 5985397 - DNA, 25 bp, Homo sapien
ttaacttgagcgtcccaggtctcct

SEQ ID NO: 5985398 - DNA, 25 bp, Homo sapien
agactagccgtgaataagtaaagta

SEQ ID NO: 5985399 - DNA, 25 bp, Homo sapien
accttgtgtaatggcagaatcaatg

SEQ ID NO: 5985400 - DNA, 25 bp, Homo sapien
ctttgacggcattcttggagttcaa

SEQ ID NO: 5985401 - DNA, 25 bp, Homo sapien
caggatggaaagaatgagatgcgaa

SEQ ID NO: 5985402 - DNA, 25 bp, Homo sapien
tgataggtattgaccgtcatgaatc

SEQ ID NO: 5985403 - DNA, 25 bp, Homo sapien
tggcaggcagtaccgttgacggcag

SEQ ID NO: 5985404 - DNA, 25 bp, Homo sapien
cattgccatttggtttttcaagtaa

SEQ ID NO: 5985405 - DNA, 25 bp, Homo sapien
ggcaggattgtttgataggtattga

SEQ ID NO: 5985406 - DNA, 25 bp, Homo sapien
caaacaatgagtcatctggtctacg

SEQ ID NO: 5985407 - DNA, 25 bp, Homo sapien
gatgcaaaagacgtcgtcgacatat

SEQ ID NO: 5985408 - DNA, 25 bp, Homo sapien
caggaatattagctgccaacgaagc

SEQ ID NO: 5985409 - DNA, 25 bp, Homo sapien
acttccttaacttgagcgtcccagg

SEQ ID NO: 5985410 - DNA, 25 bp, Homo sapien
accgcaatcagtgaaaaagatgaaa

SEQ ID NO: 5985411 - DNA, 25 bp, Homo sapien
gtctcctgcaaaatcgtagaattgc

SEQ ID NO: 5985412 - DNA, 25 bp, Homo sapien
ccttacaccgtggttttcataatca

SEQ ID NO: 5985413 - DNA, 25 bp, Homo sapien
actagccgtgaataagtaaagtagt

SEQ ID NO: 5985414 - DNA, 25 bp, Homo sapien
atcataacagtccaaaagttaacaa

SEQ ID NO: 5985415 - DNA, 25 bp, Homo sapien
gtcgtcgacatatcaaacaggaatg

SEQ ID NO: 5985416 - DNA, 25 bp, Homo sapien
aaagtgaagtactcgataatgagct

SEQ ID NO: 5985417 - DNA, 25 bp, Homo sapien
gtcgttttcatagattctatcatta

SEQ ID NO: 5985418 - DNA, 25 bp, Homo sapien
tctggtctacggtaagaacccccta

SEQ ID NO: 5985419 - DNA, 25 bp, Homo sapien
ttggagttcaaagtctcctgcaaaa

SEQ ID NO: 5985420 - DNA, 25 bp, Homo sapien
tgagcgtcccaggtctccttagcat

SEQ ID NO: 5985421 - DNA, 25 bp, Homo sapien
tggtgaaccgtgtggcaggcagtac

SEQ ID NO: 5985422 - DNA, 25 bp, Homo sapien
gaaccgtgtggcaggcagtaccgtt

SEQ ID NO: 5985423 - DNA, 25 bp, Homo sapien
cctccttgatgaaatgttcaacttc

SEQ ID NO: 5985424 - DNA, 25 bp, Homo sapien
cctgcaaaatcgtagaattgctgaa

SEQ ID NO: 5985425 - DNA, 25 bp, Homo sapien
gtggtgaattgaccgtagttgtagt

SEQ ID NO: 5985426 - DNA, 25 bp, Homo sapien
tagatggtgaaccgtgtggcaggca

SEQ ID NO: 5985427 - DNA, 25 bp, Homo sapien
gtagacccttggccaatgcaaccat

SEQ ID NO: 5985428 - DNA, 25 bp, Homo sapien
tactcatacgactactattacaata

SEQ ID NO: 5985429 - DNA, 25 bp, Homo sapien
tatcttcttcgctgcattgggtttc

SEQ ID NO: 5985430 - DNA, 25 bp, Homo sapien
tcactattttgatcacttatcattc

SEQ ID NO: 5985431 - DNA, 25 bp, Homo sapien
ctattcaatggttttctttgataaa

SEQ ID NO: 5985432 - DNA, 25 bp, Homo sapien
tcaatgaattatcaacacaaagatg

SEQ ID NO: 5985433 - DNA, 25 bp, Homo sapien
ccttctattcaatggttttctttga

SEQ ID NO: 5985434 - DNA, 25 bp, Homo sapien
catttggctccatcgccgttgagtt

SEQ ID NO: 5985435 - DNA, 25 bp, Homo sapien
aactttgacaagttcactcgtcact

SEQ ID NO: 5985436 - DNA, 25 bp, Homo sapien
cgggttggaaattgaatcatggtga

SEQ ID NO: 5985437 - DNA, 25 bp, Homo sapien
tacttattccgttaaattcaatgaa

SEQ ID NO: 5985438 - DNA, 25 bp, Homo sapien
ttcgggttggaaattgaatcatggt

SEQ ID NO: 5985439 - DNA, 25 bp, Homo sapien
gacggtaataacgtttctggcgata

SEQ ID NO: 5985440 - DNA, 25 bp, Homo sapien
ttcaatgaatcagcgacttcttggg

SEQ ID NO: 5985441 - DNA, 25 bp, Homo sapien
aaaactggcttattgatggattacc

SEQ ID NO: 5985442 - DNA, 25 bp, Homo sapien
acgaattgccttactttgccaacca

SEQ ID NO: 5985443 - DNA, 25 bp, Homo sapien
aaccaccgataaggatgtggaattg

SEQ ID NO: 5985444 - DNA, 25 bp, Homo sapien
agttcactcgtcactattttgatca

SEQ ID NO: 5985445 - DNA, 25 bp, Homo sapien
ttttcgttcgccaagtcaatcgcta

SEQ ID NO: 5985446 - DNA, 25 bp, Homo sapien
gacgatgattttcaagaagattcgg

SEQ ID NO: 5985447 - DNA, 25 bp, Homo sapien
tattctgctaataattattgcgttg

SEQ ID NO: 5985448 - DNA, 25 bp, Homo sapien
agcaagtactctgttttttatggtt

SEQ ID NO: 5985449 - DNA, 25 bp, Homo sapien
accacttacagggaaaatgacaaca

SEQ ID NO: 5985450 - DNA, 25 bp, Homo sapien
atcagcgacttcttgggccaccagg

SEQ ID NO: 5985451 - DNA, 25 bp, Homo sapien
ttacaagaaaaagagtgtgaatccc

SEQ ID NO: 5985452 - DNA, 25 bp, Homo sapien
caacacaaagatgaggacggtaata

SEQ ID NO: 5985453 - DNA, 25 bp, Homo sapien
atggcacacgtacagcttttgttgt

SEQ ID NO: 5985454 - DNA, 25 bp, Homo sapien
taaaacgttccagtccaggtacatg

SEQ ID NO: 5985455 - DNA, 25 bp, Homo sapien
agcctgaaaaagtcgaaaagcaacc

SEQ ID NO: 5985456 - DNA, 25 bp, Homo sapien
ttgcagtatcttcttcgctgcattg

SEQ ID NO: 5985457 - DNA, 25 bp, Homo sapien
cctcagtcatttcattactctgctg

SEQ ID NO: 5985458 - DNA, 25 bp, Homo sapien
gctggcttcaaccttggttttgtac

SEQ ID NO: 5985459 - DNA, 25 bp, Homo sapien
cgaatttataattcaccattccaat

SEQ ID NO: 5985460 - DNA, 25 bp, Homo sapien
tctttcctcctattaactttgacaa

SEQ ID NO: 5985461 - DNA, 25 bp, Homo sapien
ggtaacggggtcaattggctttatc

SEQ ID NO: 5985462 - DNA, 25 bp, Homo sapien
ttttggttggttcaggagttcaatt

SEQ ID NO: 5985463 - DNA, 25 bp, Homo sapien
ttgtgtcaacagtcaaagccttcta

SEQ ID NO: 5985464 - DNA, 25 bp, Homo sapien
ccaaccatttcgatattatgattga

SEQ ID NO: 5985465 - DNA, 25 bp, Homo sapien
taaatttggacgatgattttcaaga

SEQ ID NO: 5985466 - DNA, 25 bp, Homo sapien
tttggctccatcgccgttgagttgt

SEQ ID NO: 5985467 - DNA, 25 bp, Homo sapien
gaggcgccggttgtgctttgtatgt

SEQ ID NO: 5985468 - DNA, 25 bp, Homo sapien
tggaaggcaaacttgatattgactc

SEQ ID NO: 5985469 - DNA, 25 bp, Homo sapien
agtatgctctttgttagaaaaatct

SEQ ID NO: 5985470 - DNA, 25 bp, Homo sapien
attacaatagattccatttttgtca

SEQ ID NO: 5985471 - DNA, 25 bp, Homo sapien
atggtgaaaacttacgaattgcctt

SEQ ID NO: 5985472 - DNA, 25 bp, Homo sapien
ttgggtttcctatcacctagttcta

SEQ ID NO: 5985473 - DNA, 25 bp, Homo sapien
catacgactactattacaatagatt

SEQ ID NO: 5985474 - DNA, 25 bp, Homo sapien
tgatgctaaattcatcaataaattg

SEQ ID NO: 5985475 - DNA, 25 bp, Homo sapien
tcatttcattactctgctgtttggt

SEQ ID NO: 5985476 - DNA, 25 bp, Homo sapien
cataaaacgttccagtccaggtaca

SEQ ID NO: 5985477 - DNA, 25 bp, Homo sapien
actttgattgctggtatctttccat

SEQ ID NO: 5985478 - DNA, 25 bp, Homo sapien
ttattcaccaaatttaagttgggtg

SEQ ID NO: 5985479 - DNA, 25 bp, Homo sapien
ttgctcgttaatcatttaactccat

SEQ ID NO: 5985480 - DNA, 25 bp, Homo sapien
gttaaatttggacgatgattttcaa

SEQ ID NO: 5985481 - DNA, 25 bp, Homo sapien
cttatacatctatgggcatctacaa

SEQ ID NO: 5985482 - DNA, 25 bp, Homo sapien
tataccagctactttgattgctggt

SEQ ID NO: 5985483 - DNA, 25 bp, Homo sapien
gtgggatactcctcagtcatttcat

SEQ ID NO: 5985484 - DNA, 25 bp, Homo sapien
cataattggaggcgccggttgtgct

SEQ ID NO: 5985485 - DNA, 25 bp, Homo sapien
tgggccatactggaaggcaaacttg

SEQ ID NO: 5985486 - DNA, 25 bp, Homo sapien
aagtggcaatggagaggattcataa

SEQ ID NO: 5985487 - DNA, 25 bp, Homo sapien
tcctcctattaactttgacaagttc

SEQ ID NO: 5985488 - DNA, 25 bp, Homo sapien
ccggttgtgctttgtatgtgtttat

SEQ ID NO: 5985489 - DNA, 25 bp, Homo sapien
ctcctattaactttgacaagttcac

SEQ ID NO: 5985490 - DNA, 25 bp, Homo sapien
tggcttcaaccttggttttgtacag

SEQ ID NO: 5985491 - DNA, 25 bp, Homo sapien
agccttctatttaccaggtgtagcg

SEQ ID NO: 5985492 - DNA, 25 bp, Homo sapien
tttgtatgtgtttattcattctatt

SEQ ID NO: 5985493 - DNA, 25 bp, Homo sapien
atcattccttatgcctggagaactg

SEQ ID NO: 5985494 - DNA, 25 bp, Homo sapien
tggattaccggctgcaagagaggtt

SEQ ID NO: 5985495 - DNA, 25 bp, Homo sapien
atgatggcagaactaagactagttt

SEQ ID NO: 5985496 - DNA, 25 bp, Homo sapien
gacaagttcactcgtcactattttg

SEQ ID NO: 5985497 - DNA, 25 bp, Homo sapien
gtagttggtgttatcgtcgaaccgg

SEQ ID NO: 5985498 - DNA, 25 bp, Homo sapien
ggatgaacatccaaccaagacaaac

SEQ ID NO: 5985499 - DNA, 25 bp, Homo sapien
tgaattatcaacacaaagatgagga

SEQ ID NO: 5985500 - DNA, 25 bp, Homo sapien
ttctgctaataattattgcgttgaa

SEQ ID NO: 5985501 - DNA, 25 bp, Homo sapien
taccagcaagtactctgttttttat

SEQ ID NO: 5985502 - DNA, 25 bp, Homo sapien
taattggaggcgccggttgtgcttt

SEQ ID NO: 5985503 - DNA, 25 bp, Homo sapien
atatacacaagtttatggtttaata

SEQ ID NO: 5985504 - DNA, 25 bp, Homo sapien
gcactgaaaagtgatttcgcacgtt

SEQ ID NO: 5985505 - DNA, 25 bp, Homo sapien
cttagccactgttatgtttatctta

SEQ ID NO: 5985506 - DNA, 25 bp, Homo sapien
tgtacaggtaactcaaggaaccgac

SEQ ID NO: 5985507 - DNA, 25 bp, Homo sapien
aatatcacgatcgtggtgaaggtaa

SEQ ID NO: 5985508 - DNA, 25 bp, Homo sapien
tacaaaatggcacacgtacagcttt

SEQ ID NO: 5985509 - DNA, 25 bp, Homo sapien
aaatggcttcttccaaaactggctt

SEQ ID NO: 5985510 - DNA, 25 bp, Homo sapien
atcgaatttataattcaccattcca

SEQ ID NO: 5985511 - DNA, 25 bp, Homo sapien
agactataccagctactttgattgc

SEQ ID NO: 5985512 - DNA, 25 bp, Homo sapien
cgtaattccgggagatgatgctaaa

SEQ ID NO: 5985513 - DNA, 25 bp, Homo sapien
ttttcaagaagattcgggttggaaa

SEQ ID NO: 5985514 - DNA, 25 bp, Homo sapien
ttatcaacacaaagatgaggacggt

SEQ ID NO: 5985515 - DNA, 25 bp, Homo sapien
ttgcgcgcactgaaaagtgatttcg

SEQ ID NO: 5985516 - DNA, 25 bp, Homo sapien
tttttatggtgctggcttcaacctt

SEQ ID NO: 5985517 - DNA, 25 bp, Homo sapien
aaaaatggcttcttccaaaactggc

SEQ ID NO: 5985518 - DNA, 25 bp, Homo sapien
cattccttatgcctggagaactgga

SEQ ID NO: 5985519 - DNA, 25 bp, Homo sapien
tgctctttgttagaaaaatctactc

SEQ ID NO: 5985520 - DNA, 25 bp, Homo sapien
atctgttgttatccattcgctattg

SEQ ID NO: 5985521 - DNA, 25 bp, Homo sapien
tgcaagagaggtttatgatggcaga

SEQ ID NO: 5985522 - DNA, 25 bp, Homo sapien
cacacgtacagcttttgttgttgta

SEQ ID NO: 5985523 - DNA, 25 bp, Homo sapien
atatttggtgatcgaatttataatt

SEQ ID NO: 5985524 - DNA, 25 bp, Homo sapien
tcaccaaatttaagttgggtggatt

SEQ ID NO: 5985525 - DNA, 25 bp, Homo sapien
gttccagtccaggtacatgtgaaac

SEQ ID NO: 5985526 - DNA, 25 bp, Homo sapien
tcagtcatttcattactctgctgtt

SEQ ID NO: 5985527 - DNA, 25 bp, Homo sapien
ccaccgataaggatgtggaattgga

SEQ ID NO: 5985528 - DNA, 25 bp, Homo sapien
atgtggaattggaaacacgtaatga

SEQ ID NO: 5985529 - DNA, 25 bp, Homo sapien
aaaatctactcatccattaaagttg

SEQ ID NO: 5985530 - DNA, 25 bp, Homo sapien
ccagcaagtactctgttttttatgg

SEQ ID NO: 5985531 - DNA, 25 bp, Homo sapien
cgatgattttcaagaagattcgggt

SEQ ID NO: 5985532 - DNA, 25 bp, Homo sapien
taactatcgtgtagttggtgttatc

SEQ ID NO: 5985533 - DNA, 25 bp, Homo sapien
caaaatggcacacgtacagcttttg

SEQ ID NO: 5985534 - DNA, 25 bp, Homo sapien
atgaacatccaaccaagacaaacca

SEQ ID NO: 5985535 - DNA, 25 bp, Homo sapien
tctggcgataaagaaaatttcttgt

SEQ ID NO: 5985536 - DNA, 25 bp, Homo sapien
tgtgtaagaccgtaattccgggaga

SEQ ID NO: 5985537 - DNA, 25 bp, Homo sapien
atcgtaacatggtgaaaacttacga

SEQ ID NO: 5985538 - DNA, 25 bp, Homo sapien
gactattgtcttatacgtgggatac

SEQ ID NO: 5985539 - DNA, 25 bp, Homo sapien
atgcctggagaactggaagtggcaa

SEQ ID NO: 5985540 - DNA, 25 bp, Homo sapien
tttttcttaatgtttgttcattctt

SEQ ID NO: 5985541 - DNA, 25 bp, Homo sapien
cattgaggctactccaaaaggggca

SEQ ID NO: 5985542 - DNA, 25 bp, Homo sapien
tctggtgtcataccagcaagtactc

SEQ ID NO: 5985543 - DNA, 25 bp, Homo sapien
ccaaaactggcttattgatggatta

SEQ ID NO: 5985544 - DNA, 25 bp, Homo sapien
tattttacttattccgttaaattca

SEQ ID NO: 5985545 - DNA, 25 bp, Homo sapien
ggaaccgacattgaggctactccaa

SEQ ID NO: 5985546 - DNA, 25 bp, Homo sapien
gcagtatgctctttgttagaaaaat

SEQ ID NO: 5985547 - DNA, 25 bp, Homo sapien
ttaccggctgcaagagaggtttatg

SEQ ID NO: 5985548 - DNA, 25 bp, Homo sapien
cttcttgggccaccaggtgggacaa

SEQ ID NO: 5985549 - DNA, 25 bp, Homo sapien
atggcttcttccaaaactggcttat

SEQ ID NO: 5985550 - DNA, 25 bp, Homo sapien
tttacttattccgttaaattcaatg

SEQ ID NO: 5985551 - DNA, 25 bp, Homo sapien
catctacaaatttttcaatgggcca

SEQ ID NO: 5985552 - DNA, 25 bp, Homo sapien
ctcatacgactactattacaataga

SEQ ID NO: 5985553 - DNA, 25 bp, Homo sapien
gtgtagttggtgttatcgtcgaacc

SEQ ID NO: 5985554 - DNA, 25 bp, Homo sapien
aggtttatgatggcagaactaagac

SEQ ID NO: 5985555 - DNA, 25 bp, Homo sapien
gatccgttatatttggtgatcgaat

SEQ ID NO: 5985556 - DNA, 25 bp, Homo sapien
ggcttattgatggattaccggctgc

SEQ ID NO: 5985557 - DNA, 25 bp, Homo sapien
agttcaattatttttgatggtaact

SEQ ID NO: 5985558 - DNA, 25 bp, Homo sapien
aataaattgataaaaaatggcttct

SEQ ID NO: 5985559 - DNA, 25 bp, Homo sapien
taagaccgtaattccgggagatgat

SEQ ID NO: 5985560 - DNA, 25 bp, Homo sapien
gtgatttcgcacgttacaacgagtt

SEQ ID NO: 5985561 - DNA, 25 bp, Homo sapien
ttcaggagttcaattatttttgatg

SEQ ID NO: 5985562 - DNA, 25 bp, Homo sapien
tatgggcatctacaaatttttcaat

SEQ ID NO: 5985563 - DNA, 25 bp, Homo sapien
catttaactccatcaatgaattatc

SEQ ID NO: 5985564 - DNA, 25 bp, Homo sapien
tgtcttattgtcatctgttgttatc

SEQ ID NO: 5985565 - DNA, 25 bp, Homo sapien
ttatgcctggagaactggaagtggc

SEQ ID NO: 5985566 - DNA, 25 bp, Homo sapien
ggcttcttccaaaactggcttattg

SEQ ID NO: 5985567 - DNA, 25 bp, Homo sapien
ggttcattgattgccaggaaaagat

SEQ ID NO: 5985568 - DNA, 25 bp, Homo sapien
tggttttgtacaggtaactcaagga

SEQ ID NO: 5985569 - DNA, 25 bp, Homo sapien
ccttctatttaccaggtgtagcgcc

SEQ ID NO: 5985570 - DNA, 25 bp, Homo sapien
tggcgataaagaaaatttcttgtac

SEQ ID NO: 5985571 - DNA, 25 bp, Homo sapien
gaattgccttactttgccaaccatt

SEQ ID NO: 5985572 - DNA, 25 bp, Homo sapien
gtttttctatggtttttgttctcaa

SEQ ID NO: 5985573 - DNA, 25 bp, Homo sapien
tgtcagcctgaaaaagtcgaaaagc

SEQ ID NO: 5985574 - DNA, 25 bp, Homo sapien
aatttaagttgggtggattcacgac

SEQ ID NO: 5985575 - DNA, 25 bp, Homo sapien
cacgtatatgatccttctattcaat

SEQ ID NO: 5985576 - DNA, 25 bp, Homo sapien
tatgatccttctattcaatggtttt

SEQ ID NO: 5985577 - DNA, 25 bp, Homo sapien
aagacaaaccaaatcgcaagacaaa

SEQ ID NO: 5985578 - DNA, 25 bp, Homo sapien
acacaagtttatggtttaataagat

SEQ ID NO: 5985579 - DNA, 25 bp, Homo sapien
atgattttcaagaagattcgggttg

SEQ ID NO: 5985580 - DNA, 25 bp, Homo sapien
tcgaaaagcaacctgaatccttggg

SEQ ID NO: 5985581 - DNA, 25 bp, Homo sapien
aattgataaaaaatggcttcttcca

SEQ ID NO: 5985582 - DNA, 25 bp, Homo sapien
ttcctatcacctagttctagaggtt

SEQ ID NO: 5985583 - DNA, 25 bp, Homo sapien
ttttgatcacttatcattccttatg

SEQ ID NO: 5985584 - DNA, 25 bp, Homo sapien
caacatcccattgctcgttaatcat

SEQ ID NO: 5985585 - DNA, 25 bp, Homo sapien
ttctattcaatggttttctttgata

SEQ ID NO: 5985586 - DNA, 25 bp, Homo sapien
atggtgatgtttttcgttcgccaag

SEQ ID NO: 5985587 - DNA, 25 bp, Homo sapien
cctttcaattttggttggttcagga

SEQ ID NO: 5985588 - DNA, 25 bp, Homo sapien
acttatcattccttatgcctggaga

SEQ ID NO: 5985589 - DNA, 25 bp, Homo sapien
atgacaacatcccattgctcgttaa

SEQ ID NO: 5985590 - DNA, 25 bp, Homo sapien
tgctagacgaaggaaatgataatga

SEQ ID NO: 5985591 - DNA, 25 bp, Homo sapien
gtgtcataccagcaagtactctgtt

SEQ ID NO: 5985592 - DNA, 25 bp, Homo sapien
ccaaatcgcaagacaaatacccttc

SEQ ID NO: 5985593 - DNA, 25 bp, Homo sapien
gatggcagaactaagactagttttt

SEQ ID NO: 5985594 - DNA, 25 bp, Homo sapien
tctatgggcatctacaaatttttca

SEQ ID NO: 5985595 - DNA, 25 bp, Homo sapien
gggtttcctatcacctagttctaga

SEQ ID NO: 5985596 - DNA, 25 bp, Homo sapien
ctccacttctagttcctggtgctat

SEQ ID NO: 5985597 - DNA, 25 bp, Homo sapien
aatgtttgttcattcttctggtgtc

SEQ ID NO: 5985598 - DNA, 25 bp, Homo sapien
ttcttcgctgcattgggtttcctat

SEQ ID NO: 5985599 - DNA, 25 bp, Homo sapien
tctttgataaatttctccttagttg

SEQ ID NO: 5985600 - DNA, 25 bp, Homo sapien
ctggcttattgatggattaccggct

SEQ ID NO: 5985601 - DNA, 25 bp, Homo sapien
actttgccaaccatttcgatattat

SEQ ID NO: 5985602 - DNA, 25 bp, Homo sapien
ccaagtcaatcgctaaccctttcaa

SEQ ID NO: 5985603 - DNA, 25 bp, Homo sapien
acacaaagatgaggacggtaataac

SEQ ID NO: 5985604 - DNA, 25 bp, Homo sapien
acatccaaccaagacaaaccaaatc

SEQ ID NO: 5985605 - DNA, 25 bp, Homo sapien
cacttacagggaaaatgacaacatc

SEQ ID NO: 5985606 - DNA, 25 bp, Homo sapien
ctgtttggtaacggggtcaattggc

SEQ ID NO: 5985607 - DNA, 25 bp, Homo sapien
tgtaagaccgtaattccgggagatg

SEQ ID NO: 5985608 - DNA, 25 bp, Homo sapien
atcccattatcatttgctggttcat

SEQ ID NO: 5985609 - DNA, 25 bp, Homo sapien
tattgatggattaccggctgcaaga

SEQ ID NO: 5985610 - DNA, 25 bp, Homo sapien
atttcattactctgctgtttggtaa

SEQ ID NO: 5985611 - DNA, 25 bp, Homo sapien
ttgatggattaccggctgcaagaga

SEQ ID NO: 5985612 - DNA, 25 bp, Homo sapien
gattaccggctgcaagagaggttta

SEQ ID NO: 5985613 - DNA, 25 bp, Homo sapien
gagttaaatttggacgatgattttc

SEQ ID NO: 5985614 - DNA, 25 bp, Homo sapien
agaactggaagtggcaatggagagg

SEQ ID NO: 5985615 - DNA, 25 bp, Homo sapien
gcgacttcttgggccaccaggtggg

SEQ ID NO: 5985616 - DNA, 25 bp, Homo sapien
tcggctcttatacatctatgggcat

SEQ ID NO: 5985617 - DNA, 25 bp, Homo sapien
aattattgcgttgaactttttctta

SEQ ID NO: 5985618 - DNA, 25 bp, Homo sapien
caacgagttaaatttggacgatgat

SEQ ID NO: 5985619 - DNA, 25 bp, Homo sapien
actttttcttaatgtttgttcattc

SEQ ID NO: 5985620 - DNA, 25 bp, Homo sapien
tttataattcaccattccaattgaa

SEQ ID NO: 5985621 - DNA, 25 bp, Homo sapien
tggtgctggcttcaaccttggtttt

SEQ ID NO: 5985622 - DNA, 25 bp, Homo sapien
aaaagtgatttcgcacgttacaacg

SEQ ID NO: 5985623 - DNA, 25 bp, Homo sapien
tatgctctttgttagaaaaatctac

SEQ ID NO: 5985624 - DNA, 25 bp, Homo sapien
ggtgaaggtaactatcgtgtagttg

SEQ ID NO: 5985625 - DNA, 25 bp, Homo sapien
atttggtgatcgaatttataattca

SEQ ID NO: 5985626 - DNA, 25 bp, Homo sapien
accaggtgtagcgcctaccacttac

SEQ ID NO: 5985627 - DNA, 25 bp, Homo sapien
acgagttaaatttggacgatgattt

SEQ ID NO: 5985628 - DNA, 25 bp, Homo sapien
actggaaggcaaacttgatattgac

SEQ ID NO: 5985629 - DNA, 25 bp, Homo sapien
ccatttcgatattatgattgaatat

SEQ ID NO: 5985630 - DNA, 25 bp, Homo sapien
actattttgatcacttatcattcct

SEQ ID NO: 5985631 - DNA, 25 bp, Homo sapien
tcatggtgatgtttttcgttcgcca

SEQ ID NO: 5985632 - DNA, 25 bp, Homo sapien
gataaaaaatggcttcttccaaaac

SEQ ID NO: 5985633 - DNA, 25 bp, Homo sapien
aaccgacattgaggctactccaaaa

SEQ ID NO: 5985634 - DNA, 25 bp, Homo sapien
aatacccttccagccttggtattta

SEQ ID NO: 5985635 - DNA, 25 bp, Homo sapien
gatcacttatcattccttatgcctg

SEQ ID NO: 5985636 - DNA, 25 bp, Homo sapien
agaactaagactagtttttatggtg

SEQ ID NO: 5985637 - DNA, 25 bp, Homo sapien
aggttccttagccactgttatgttt

SEQ ID NO: 5985638 - DNA, 25 bp, Homo sapien
tgaggacggtaataacgtttctggc

SEQ ID NO: 5985639 - DNA, 25 bp, Homo sapien
ttatacgtgggatactcctcagtca

SEQ ID NO: 5985640 - DNA, 25 bp, Homo sapien
tcgctaaccctttcaattttggttg

SEQ ID NO: 5985641 - DNA, 25 bp, Homo sapien
taatgaagtttattttacttattcc

SEQ ID NO: 5985642 - DNA, 25 bp, Homo sapien
aaaagatgtcactgggatgaacatc

SEQ ID NO: 5985643 - DNA, 25 bp, Homo sapien
ttggaaattgaatcatggtgatgtt

SEQ ID NO: 5985644 - DNA, 25 bp, Homo sapien
cggctgcaagagaggtttatgatgg

SEQ ID NO: 5985645 - DNA, 25 bp, Homo sapien
tatgtgtttattcattctattttat

SEQ ID NO: 5985646 - DNA, 25 bp, Homo sapien
ttctagttcctggtgctattctgct

SEQ ID NO: 5985647 - DNA, 25 bp, Homo sapien
cgccggttgtgctttgtatgtgttt

SEQ ID NO: 5985648 - DNA, 25 bp, Homo sapien
aagtcaatcgctaaccctttcaatt

SEQ ID NO: 5985649 - DNA, 25 bp, Homo sapien
cattactctgctgtttggtaacggg

SEQ ID NO: 5985650 - DNA, 25 bp, Homo sapien
ttatcgtcgaaccggtttccataaa

SEQ ID NO: 5985651 - DNA, 25 bp, Homo sapien
ctttgttagaaaaatctactcatcc

SEQ ID NO: 5985652 - DNA, 25 bp, Homo sapien
acgttccagtccaggtacatgtgaa

SEQ ID NO: 5985653 - DNA, 25 bp, Homo sapien
agtcgaaaagcaacctgaatccttg

SEQ ID NO: 5985654 - DNA, 25 bp, Homo sapien
tgctggtatctttccatttggctcc

SEQ ID NO: 5985655 - DNA, 25 bp, Homo sapien
aaatggcacacgtacagcttttgtt

SEQ ID NO: 5985656 - DNA, 25 bp, Homo sapien
gacaaatatttacacgtatatgatc

SEQ ID NO: 5985657 - DNA, 25 bp, Homo sapien
attatttttgatggtaacttgcagt

SEQ ID NO: 5985658 - DNA, 25 bp, Homo sapien
tggtgtcataccagcaagtactctg

SEQ ID NO: 5985659 - DNA, 25 bp, Homo sapien
aaattgaatcatggtgatgtttttc

SEQ ID NO: 5985660 - DNA, 25 bp, Homo sapien
ggaaacacgtaatgatcgtaacatg

SEQ ID NO: 5985661 - DNA, 25 bp, Homo sapien
ttgtatttttttgtgtcaacagtca

SEQ ID NO: 5985662 - DNA, 25 bp, Homo sapien
tccagccttggtatttaaagactat

SEQ ID NO: 5985663 - DNA, 25 bp, Homo sapien
tttgttctcaatcccattatcattt

SEQ ID NO: 5985664 - DNA, 25 bp, Homo sapien
aattggctttatcagcagtatgctc

SEQ ID NO: 5985665 - DNA, 25 bp, Homo sapien
cctgaaaaagtcgaaaagcaacctg

SEQ ID NO: 5985666 - DNA, 25 bp, Homo sapien
cctattaactttgacaagttcactc

SEQ ID NO: 5985667 - DNA, 25 bp, Homo sapien
tgtagcgcctaccacttacagggaa

SEQ ID NO: 5985668 - DNA, 25 bp, Homo sapien
ctgaatccttgggatccgttatatt

SEQ ID NO: 5985669 - DNA, 25 bp, Homo sapien
ttatcatttgctggttcattgattg

SEQ ID NO: 5985670 - DNA, 25 bp, Homo sapien
agacgaaggaaatgataatgaagtt

SEQ ID NO: 5985671 - DNA, 25 bp, Homo sapien
ggtgtagcgcctaccacttacaggg

SEQ ID NO: 5985672 - DNA, 25 bp, Homo sapien
ggtgttatcgtcgaaccggtttcca

SEQ ID NO: 5985673 - DNA, 25 bp, Homo sapien
gaacatccaaccaagacaaaccaaa

SEQ ID NO: 5985674 - DNA, 25 bp, Homo sapien
ctattacaatagattccatttttgt

SEQ ID NO: 5985675 - DNA, 25 bp, Homo sapien
agttgttgtcttattgtcatctgtt

SEQ ID NO: 5985676 - DNA, 25 bp, Homo sapien
atggtaacttgcagtatcttcttcg

SEQ ID NO: 5985677 - DNA, 25 bp, Homo sapien
tgtttatcttatatgcattattcgg

SEQ ID NO: 5985678 - DNA, 25 bp, Homo sapien
gtgctggcttcaaccttggttttgt

SEQ ID NO: 5985679 - DNA, 25 bp, Homo sapien
tattttattcaccaaatttaagttg

SEQ ID NO: 5985680 - DNA, 25 bp, Homo sapien
gtggtgaaggtaactatcgtgtagt

SEQ ID NO: 5985681 - DNA, 25 bp, Homo sapien
tgccttactttgccaaccatttcga

SEQ ID NO: 5985682 - DNA, 25 bp, Homo sapien
ctatggtttttgttctcaatcccat

SEQ ID NO: 5985683 - DNA, 25 bp, Homo sapien
gtatttttttgtgtcaacagtcaaa

SEQ ID NO: 5985684 - DNA, 25 bp, Homo sapien
atccttgggatccgttatatttggt

SEQ ID NO: 5985685 - DNA, 25 bp, Homo sapien
gtcaatcgctaaccctttcaatttt

SEQ ID NO: 5985686 - DNA, 25 bp, Homo sapien
agaggttccttagccactgttatgt

SEQ ID NO: 5985687 - DNA, 25 bp, Homo sapien
acatggtgaaaacttacgaattgcc

SEQ ID NO: 5985688 - DNA, 25 bp, Homo sapien
taactcaaggaaccgacattgaggc

SEQ ID NO: 5985689 - DNA, 25 bp, Homo sapien
cttattccgttaaattcaatgaatc

SEQ ID NO: 5985690 - DNA, 25 bp, Homo sapien
acggggtcaattggctttatcagca

SEQ ID NO: 5985691 - DNA, 25 bp, Homo sapien
cattgggtttcctatcacctagttc

SEQ ID NO: 5985692 - DNA, 25 bp, Homo sapien
gcagaactaagactagtttttatgg

SEQ ID NO: 5985693 - DNA, 25 bp, Homo sapien
agaggattcataattggaggcgccg

SEQ ID NO: 5985694 - DNA, 25 bp, Homo sapien
gactccacttctagttcctggtgct

SEQ ID NO: 5985695 - DNA, 25 bp, Homo sapien
aatggttttctttgataaatttctc

SEQ ID NO: 5985696 - DNA, 25 bp, Homo sapien
ttatatttggtgatcgaatttataa

SEQ ID NO: 5985697 - DNA, 25 bp, Homo sapien
aggtgggacaaatatttacacgtat

SEQ ID NO: 5985698 - DNA, 25 bp, Homo sapien
ggtaacttgcagtatcttcttcgct

SEQ ID NO: 5985699 - DNA, 25 bp, Homo sapien
accgtaattccgggagatgatgcta

SEQ ID NO: 5985700 - DNA, 25 bp, Homo sapien
tttatcttatatgcattattcgggt

SEQ ID NO: 5985701 - DNA, 25 bp, Homo sapien
tcatatacacaagtttatggtttaa

SEQ ID NO: 5985702 - DNA, 25 bp, Homo sapien
ggtaactcaaggaaccgacattgag

SEQ ID NO: 5985703 - DNA, 25 bp, Homo sapien
atcccattgctcgttaatcatttaa

SEQ ID NO: 5985704 - DNA, 25 bp, Homo sapien
agtcaaagccttctatttaccaggt

SEQ ID NO: 5985705 - DNA, 25 bp, Homo sapien
gattcataattggaggcgccggttg

SEQ ID NO: 5985706 - DNA, 25 bp, Homo sapien
ccaattgaatatgttacaagaaaaa

SEQ ID NO: 5985707 - DNA, 25 bp, Homo sapien
ccacttctagttcctggtgctattc

SEQ ID NO: 5985708 - DNA, 25 bp, Homo sapien
gacaaaccaaatcgcaagacaaata

SEQ ID NO: 5985709 - DNA, 25 bp, Homo sapien
aattatcaacacaaagatgaggacg

SEQ ID NO: 5985710 - DNA, 25 bp, Homo sapien
taattccgggagatgatgctaaatt

SEQ ID NO: 5985711 - DNA, 25 bp, Homo sapien
ctcgtcactattttgatcacttatc

SEQ ID NO: 5985712 - DNA, 25 bp, Homo sapien
ttcattactctgctgtttggtaacg

SEQ ID NO: 5985713 - DNA, 25 bp, Homo sapien
catctatgggcatctacaaattttt

SEQ ID NO: 5985714 - DNA, 25 bp, Homo sapien
gatttcgcacgttacaacgagttaa

SEQ ID NO: 5985715 - DNA, 25 bp, Homo sapien
actatcgtgtagttggtgttatcgt

SEQ ID NO: 5985716 - DNA, 25 bp, Homo sapien
tgttcattcttctggtgtcatacca

SEQ ID NO: 5985717 - DNA, 25 bp, Homo sapien
ggtgatcgaatttataattcaccat

SEQ ID NO: 5985718 - DNA, 25 bp, Homo sapien
gaaacgactggcagcccattgatgc

SEQ ID NO: 5985719 - DNA, 25 bp, Homo sapien
gaaaccaccgataaggatgtggaat

SEQ ID NO: 5985720 - DNA, 25 bp, Homo sapien
tttaataagattttttacatgtttg

SEQ ID NO: 5985721 - DNA, 25 bp, Homo sapien
ccaggtgggacaaatatttacacgt

SEQ ID NO: 5985722 - DNA, 25 bp, Homo sapien
tattcgggtttgtcggctcttatac

SEQ ID NO: 5985723 - DNA, 25 bp, Homo sapien
gaactttttcttaatgtttgttcat

SEQ ID NO: 5985724 - DNA, 25 bp, Homo sapien
ggtaactatcgtgtagttggtgtta

SEQ ID NO: 5985725 - DNA, 25 bp, Homo sapien
ttgactccacttctagttcctggtg

SEQ ID NO: 5985726 - DNA, 25 bp, Homo sapien
atactggaaggcaaacttgatattg

SEQ ID NO: 5985727 - DNA, 25 bp, Homo sapien
tgcgttgaactttttcttaatgttt

SEQ ID NO: 5985728 - DNA, 25 bp, Homo sapien
ctggaagtggcaatggagaggattc

SEQ ID NO: 5985729 - DNA, 25 bp, Homo sapien
gggaaaatgacaacatcccattgct

SEQ ID NO: 5985730 - DNA, 25 bp, Homo sapien
atgctaaattcatcaataaattgat

SEQ ID NO: 5985731 - DNA, 25 bp, Homo sapien
ctggtatctttccatttggctccat

SEQ ID NO: 5985732 - DNA, 25 bp, Homo sapien
cacgtacagcttttgttgttgtatt

SEQ ID NO: 5985733 - DNA, 25 bp, Homo sapien
atgcattattcgggtttgtcggctc

SEQ ID NO: 5985734 - DNA, 25 bp, Homo sapien
caatcgctaaccctttcaattttgg

SEQ ID NO: 5985735 - DNA, 25 bp, Homo sapien
gggatccgttatatttggtgatcga

SEQ ID NO: 5985736 - DNA, 25 bp, Homo sapien
aataacgtttctggcgataaagaaa

SEQ ID NO: 5985737 - DNA, 25 bp, Homo sapien
tgtactcatacgactactattacaa

SEQ ID NO: 5985738 - DNA, 25 bp, Homo sapien
tctacaaatttttcaatgggccata

SEQ ID NO: 5985739 - DNA, 25 bp, Homo sapien
gattcgggttggaaattgaatcatg

SEQ ID NO: 5985740 - DNA, 25 bp, Homo sapien
atccctgtgtaagaccgtaattccg

SEQ ID NO: 5985741 - DNA, 25 bp, Homo sapien
gatcgtggtgaaggtaactatcgtg

SEQ ID NO: 5985742 - DNA, 25 bp, Homo sapien
tttcaattttggttggttcaggagt

SEQ ID NO: 5985743 - DNA, 25 bp, Homo sapien
atttaaagactataccagctacttt

SEQ ID NO: 5985744 - DNA, 25 bp, Homo sapien
attgtcatctgttgttatccattcg

SEQ ID NO: 5985745 - DNA, 25 bp, Homo sapien
tactattacaatagattccattttt

SEQ ID NO: 5985746 - DNA, 25 bp, Homo sapien
ggtttgtcggctcttatacatctat

SEQ ID NO: 5985747 - DNA, 25 bp, Homo sapien
ggttgtgctttgtatgtgtttattc

SEQ ID NO: 5985748 - DNA, 25 bp, Homo sapien
ttgagttgtatttcatatacacaag

SEQ ID NO: 5985749 - DNA, 25 bp, Homo sapien
tcaccattccaattgaatatgttac

SEQ ID NO: 5985750 - DNA, 25 bp, Homo sapien
attcgctattgcgcgcactgaaaag

SEQ ID NO: 5985751 - DNA, 25 bp, Homo sapien
cttctggtgtcataccagcaagtac

SEQ ID NO: 5985752 - DNA, 25 bp, Homo sapien
attcacgactattgtcttatacgtg

SEQ ID NO: 5985753 - DNA, 25 bp, Homo sapien
ggtatctttccatttggctccatcg

SEQ ID NO: 5985754 - DNA, 25 bp, Homo sapien
aaccaagacaaaccaaatcgcaaga

SEQ ID NO: 5985755 - DNA, 25 bp, Homo sapien
ggaaaagatgtcactgggatgaaca

SEQ ID NO: 5985756 - DNA, 25 bp, Homo sapien
ctttatcagcagtatgctctttgtt

SEQ ID NO: 5985757 - DNA, 25 bp, Homo sapien
aaatttctccttagttgttgtctta

SEQ ID NO: 5985758 - DNA, 25 bp, Homo sapien
accgataaggatgtggaattggaaa

SEQ ID NO: 5985759 - DNA, 25 bp, Homo sapien
cttacagggaaaatgacaacatccc

SEQ ID NO: 5985760 - DNA, 25 bp, Homo sapien
acatgtgaaacgactggcagcccat

SEQ ID NO: 5985761 - DNA, 25 bp, Homo sapien
gttaatcatttaactccatcaatga

SEQ ID NO: 5985762 - DNA, 25 bp, Homo sapien
agattccatttttgtcagcctgaaa

SEQ ID NO: 5985763 - DNA, 25 bp, Homo sapien
gttacaacgagttaaatttggacga

SEQ ID NO: 5985764 - DNA, 25 bp, Homo sapien
tatggtgctggcttcaaccttggtt

SEQ ID NO: 5985765 - DNA, 25 bp, Homo sapien
gaaaatgacaacatcccattgctcg

SEQ ID NO: 5985766 - DNA, 25 bp, Homo sapien
gtgaatccctgtgtaagaccgtaat

SEQ ID NO: 5985767 - DNA, 25 bp, Homo sapien
tgtttgttcattcttctggtgtcat

SEQ ID NO: 5985768 - DNA, 25 bp, Homo sapien
gcgataaagaaaatttcttgtactc

SEQ ID NO: 5985769 - DNA, 25 bp, Homo sapien
tgtcttatacgtgggatactcctca

SEQ ID NO: 5985770 - DNA, 25 bp, Homo sapien
ttggtaacggggtcaattggcttta

SEQ ID NO: 5985771 - DNA, 25 bp, Homo sapien
tcttatacgtgggatactcctcagt

SEQ ID NO: 5985772 - DNA, 25 bp, Homo sapien
tattgactccacttctagttcctgg

SEQ ID NO: 5985773 - DNA, 25 bp, Homo sapien
ttgataaaaaatggcttcttccaaa

SEQ ID NO: 5985774 - DNA, 25 bp, Homo sapien
ttaccaggtgtagcgcctaccactt

SEQ ID NO: 5985775 - DNA, 25 bp, Homo sapien
cagggaaaatgacaacatcccattg

SEQ ID NO: 5985776 - DNA, 25 bp, Homo sapien
agaggtttatgatggcagaactaag

SEQ ID NO: 5985777 - DNA, 25 bp, Homo sapien
ttcaagaagattcgggttggaaatt

SEQ ID NO: 5985778 - DNA, 25 bp, Homo sapien
attgcgttgaactttttcttaatgt

SEQ ID NO: 5985779 - DNA, 25 bp, Homo sapien
cattgctcgttaatcatttaactcc

SEQ ID NO: 5985780 - DNA, 25 bp, Homo sapien
gcgcctaccacttacagggaaaatg

SEQ ID NO: 5985781 - DNA, 25 bp, Homo sapien
atgtttttcgttcgccaagtcaatc

SEQ ID NO: 5985782 - DNA, 25 bp, Homo sapien
tttttcaatgggccatactggaagg

SEQ ID NO: 5985783 - DNA, 25 bp, Homo sapien
ttccaattgaatatgttacaagaaa

SEQ ID NO: 5985784 - DNA, 25 bp, Homo sapien
aaagactataccagctactttgatt

SEQ ID NO: 5985785 - DNA, 25 bp, Homo sapien
ccaggtacatgtgaaacgactggca

SEQ ID NO: 5985786 - DNA, 25 bp, Homo sapien
tgaaaacttacgaattgccttactt

SEQ ID NO: 5985787 - DNA, 25 bp, Homo sapien
gaaaaatctactcatccattaaagt

SEQ ID NO: 5985788 - DNA, 25 bp, Homo sapien
tttcctcctattaactttgacaagt

SEQ ID NO: 5985789 - DNA, 25 bp, Homo sapien
aaacttacgaattgccttactttgc

SEQ ID NO: 5985790 - DNA, 25 bp, Homo sapien
ggagaggattcataattggaggcgc

SEQ ID NO: 5985791 - DNA, 25 bp, Homo sapien
ggggcagaaaccaccgataaggatg

SEQ ID NO: 5985792 - DNA, 25 bp, Homo sapien
agttctagaggttccttagccactg

SEQ ID NO: 5985793 - DNA, 25 bp, Homo sapien
tgtatgtgtttattcattctatttt

SEQ ID NO: 5985794 - DNA, 25 bp, Homo sapien
aagactagtttttatggtgctggct

SEQ ID NO: 5985795 - DNA, 25 bp, Homo sapien
tatcgtgtagttggtgttatcgtcg

SEQ ID NO: 5985796 - DNA, 25 bp, Homo sapien
caatcccattatcatttgctggttc

SEQ ID NO: 5985797 - DNA, 25 bp, Homo sapien
caatggagaggattcataattggag

SEQ ID NO: 5985798 - DNA, 25 bp, Homo sapien
tccatcaatgaattatcaacacaaa

SEQ ID NO: 5985799 - DNA, 25 bp, Homo sapien
tttcaatgggccatactggaaggca

SEQ ID NO: 5985800 - DNA, 25 bp, Homo sapien
ttactctgctgtttggtaacggggt

SEQ ID NO: 5985801 - DNA, 25 bp, Homo sapien
aatttataattcaccattccaattg

SEQ ID NO: 5985802 - DNA, 25 bp, Homo sapien
ttggtgatcgaatttataattcacc

SEQ ID NO: 5985803 - DNA, 25 bp, Homo sapien
gtggcaatggagaggattcataatt

SEQ ID NO: 5985804 - DNA, 25 bp, Homo sapien
agaagattcgggttggaaattgaat

SEQ ID NO: 5985805 - DNA, 25 bp, Homo sapien
agaccgtaattccgggagatgatgc

SEQ ID NO: 5985806 - DNA, 25 bp, Homo sapien
acgtaatgatcgtaacatggtgaaa

SEQ ID NO: 5985807 - DNA, 25 bp, Homo sapien
atatgcattattcgggtttgtcggc

SEQ ID NO: 5985808 - DNA, 25 bp, Homo sapien
caagaagattcgggttggaaattga

SEQ ID NO: 5985809 - DNA, 25 bp, Homo sapien
cattatcatttgctggttcattgat

SEQ ID NO: 5985810 - DNA, 25 bp, Homo sapien
cgggtttgtcggctcttatacatct

SEQ ID NO: 5985811 - DNA, 25 bp, Homo sapien
ctcctcagtcatttcattactctgc

SEQ ID NO: 5985812 - DNA, 25 bp, Homo sapien
cggtaataacgtttctggcgataaa

SEQ ID NO: 5985813 - DNA, 25 bp, Homo sapien
attgaatcatggtgatgtttttcgt

SEQ ID NO: 5985814 - DNA, 25 bp, Homo sapien
ctatttaccaggtgtagcgcctacc

SEQ ID NO: 5985815 - DNA, 25 bp, Homo sapien
agagaggtttatgatggcagaacta

SEQ ID NO: 5985816 - DNA, 25 bp, Homo sapien
ggatgtggaattggaaacacgtaat

SEQ ID NO: 5985817 - DNA, 25 bp, Homo sapien
attgtcttatacgtgggatactcct

SEQ ID NO: 5985818 - DNA, 25 bp, Homo sapien
caagttcactcgtcactattttgat

SEQ ID NO: 5985819 - DNA, 25 bp, Homo sapien
cgccaagtcaatcgctaaccctttc

SEQ ID NO: 5985820 - DNA, 25 bp, Homo sapien
ttaatgtttgttcattcttctggtg

SEQ ID NO: 5985821 - DNA, 25 bp, Homo sapien
ttttgtgtcaacagtcaaagccttc

SEQ ID NO: 5985822 - DNA, 25 bp, Homo sapien
aaagcaacctgaatccttgggatcc

SEQ ID NO: 5985823 - DNA, 25 bp, Homo sapien
aaggtaactatcgtgtagttggtgt

SEQ ID NO: 5985824 - DNA, 25 bp, Homo sapien
ttctccttagttgttgtcttattgt

SEQ ID NO: 5985825 - DNA, 25 bp, Homo sapien
tttgtcggctcttatacatctatgg

SEQ ID NO: 5985826 - DNA, 25 bp, Homo sapien
tgtcggctcttatacatctatgggc

SEQ ID NO: 5985827 - DNA, 25 bp, Homo sapien
tcttaatgtttgttcattcttctgg

SEQ ID NO: 5985828 - DNA, 25 bp, Homo sapien
agatgatgctaaattcatcaataaa

SEQ ID NO: 5985829 - DNA, 25 bp, Homo sapien
attatgattgaatatcacgatcgtg

SEQ ID NO: 5985830 - DNA, 25 bp, Homo sapien
gtgggacaaatatttacacgtatat

SEQ ID NO: 5985831 - DNA, 25 bp, Homo sapien
gaatcagcgacttcttgggccacca

SEQ ID NO: 5985832 - DNA, 25 bp, Homo sapien
ctctttttctctttcctcctattaa

SEQ ID NO: 5985833 - DNA, 25 bp, Homo sapien
cttcttccaaaactggcttattgat

SEQ ID NO: 5985834 - DNA, 25 bp, Homo sapien
tgttctcaatcccattatcatttgc

SEQ ID NO: 5985835 - DNA, 25 bp, Homo sapien
ttgaactttttcttaatgtttgttc

SEQ ID NO: 5985836 - DNA, 25 bp, Homo sapien
ttgacaagttcactcgtcactattt

SEQ ID NO: 5985837 - DNA, 25 bp, Homo sapien
tgctgtttggtaacggggtcaattg

SEQ ID NO: 5985838 - DNA, 25 bp, Homo sapien
aaggaaccgacattgaggctactcc

SEQ ID NO: 5985839 - DNA, 25 bp, Homo sapien
gatattgactccacttctagttcct

SEQ ID NO: 5985840 - DNA, 25 bp, Homo sapien
ataaggatgtggaattggaaacacg

SEQ ID NO: 5985841 - DNA, 25 bp, Homo sapien
atttttttgtgtcaacagtcaaagc

SEQ ID NO: 5985842 - DNA, 25 bp, Homo sapien
ttactttgccaaccatttcgatatt

SEQ ID NO: 5985843 - DNA, 25 bp, Homo sapien
gggccaccaggtgggacaaatattt

SEQ ID NO: 5985844 - DNA, 25 bp, Homo sapien
cttgtactcatacgactactattac

SEQ ID NO: 5985845 - DNA, 25 bp, Homo sapien
tcaattttggttggttcaggagttc

SEQ ID NO: 5985846 - DNA, 25 bp, Homo sapien
gatgctagacgaaggaaatgataat

SEQ ID NO: 5985847 - DNA, 25 bp, Homo sapien
tttcttaatgtttgttcattcttct

SEQ ID NO: 5985848 - DNA, 25 bp, Homo sapien
taaagaaaatttcttgtactcatac

SEQ ID NO: 5985849 - DNA, 25 bp, Homo sapien
aatatttacacgtatatgatccttc

SEQ ID NO: 5985850 - DNA, 25 bp, Homo sapien
ctagaggttccttagccactgttat

SEQ ID NO: 5985851 - DNA, 25 bp, Homo sapien
tattttgatcacttatcattcctta

SEQ ID NO: 5985852 - DNA, 25 bp, Homo sapien
aaacttgatattgactccacttcta

SEQ ID NO: 5985853 - DNA, 25 bp, Homo sapien
cagtccaggtacatgtgaaacgact

SEQ ID NO: 5985854 - DNA, 25 bp, Homo sapien
tacacgtatatgatccttctattca

SEQ ID NO: 5985855 - DNA, 25 bp, Homo sapien
taacttgcagtatcttcttcgctgc

SEQ ID NO: 5985856 - DNA, 25 bp, Homo sapien
tactctgttttttatggtttttcta

SEQ ID NO: 5985857 - DNA, 25 bp, Homo sapien
ttgggtggattcacgactattgtct

SEQ ID NO: 5985858 - DNA, 25 bp, Homo sapien
ttctcaatcccattatcatttgctg

SEQ ID NO: 5985859 - DNA, 25 bp, Homo sapien
ccattcgctattgcgcgcactgaaa

SEQ ID NO: 5985860 - DNA, 25 bp, Homo sapien
ttgttgtcttattgtcatctgttgt

SEQ ID NO: 5985861 - DNA, 25 bp, Homo sapien
atccattcgctattgcgcgcactga

SEQ ID NO: 5985862 - DNA, 25 bp, Homo sapien
acttgatattgactccacttctagt

SEQ ID NO: 5985863 - DNA, 25 bp, Homo sapien
catttttgtcagcctgaaaaagtcg

SEQ ID NO: 5985864 - DNA, 25 bp, Homo sapien
tacccttccagccttggtatttaaa

SEQ ID NO: 5985865 - DNA, 25 bp, Homo sapien
tacgactactattacaatagattcc

SEQ ID NO: 5985866 - DNA, 25 bp, Homo sapien
tatcacgatcgtggtgaaggtaact

SEQ ID NO: 5985867 - DNA, 25 bp, Homo sapien
ggtttttgttctcaatcccattatc

SEQ ID NO: 5985868 - DNA, 25 bp, Homo sapien
ttcgggtttgtcggctcttatacat

SEQ ID NO: 5985869 - DNA, 25 bp, Homo sapien
atttctccttagttgttgtcttatt

SEQ ID NO: 5985870 - DNA, 25 bp, Homo sapien
aagaaaatttcttgtactcatacga

SEQ ID NO: 5985871 - DNA, 25 bp, Homo sapien
aatgatcgtaacatggtgaaaactt

SEQ ID NO: 5985872 - DNA, 25 bp, Homo sapien
cttattgatggattaccggctgcaa

SEQ ID NO: 5985873 - DNA, 25 bp, Homo sapien
ctaccacttacagggaaaatgacaa

SEQ ID NO: 5985874 - DNA, 25 bp, Homo sapien
ttcattgattgccaggaaaagatgt

SEQ ID NO: 5985875 - DNA, 25 bp, Homo sapien
cctgtgtaagaccgtaattccggga

SEQ ID NO: 5985876 - DNA, 25 bp, Homo sapien
gcagcccattgatgctagacgaagg

SEQ ID NO: 5985877 - DNA, 25 bp, Homo sapien
gctttgtatgtgtttattcattcta

SEQ ID NO: 5985878 - DNA, 25 bp, Homo sapien
taattcaccattccaattgaatatg

SEQ ID NO: 5985879 - DNA, 25 bp, Homo sapien
aaacacgtaatgatcgtaacatggt

SEQ ID NO: 5985880 - DNA, 25 bp, Homo sapien
cattccaattgaatatgttacaaga

SEQ ID NO: 5985881 - DNA, 25 bp, Homo sapien
ctcaatcccattatcatttgctggt

SEQ ID NO: 5985882 - DNA, 25 bp, Homo sapien
attggaggcgccggttgtgctttgt

SEQ ID NO: 5985883 - DNA, 25 bp, Homo sapien
tcaatggttttctttgataaatttc

SEQ ID NO: 5985884 - DNA, 25 bp, Homo sapien
atcatttgctggttcattgattgcc

SEQ ID NO: 5985885 - DNA, 25 bp, Homo sapien
ttttctatggtttttgttctcaatc

SEQ ID NO: 5985886 - DNA, 25 bp, Homo sapien
tcgcacgttacaacgagttaaattt

SEQ ID NO: 5985887 - DNA, 25 bp, Homo sapien
tggacgatgattttcaagaagattc

SEQ ID NO: 5985888 - DNA, 25 bp, Homo sapien
atccttctattcaatggttttcttt

SEQ ID NO: 5985889 - DNA, 25 bp, Homo sapien
ttatgatggcagaactaagactagt

SEQ ID NO: 5985890 - DNA, 25 bp, Homo sapien
ctggttcattgattgccaggaaaag

SEQ ID NO: 5985891 - DNA, 25 bp, Homo sapien
ggaattggaaacacgtaatgatcgt

SEQ ID NO: 5985892 - DNA, 25 bp, Homo sapien
attgccttactttgccaaccatttc

SEQ ID NO: 5985893 - DNA, 25 bp, Homo sapien
ggcatctacaaatttttcaatgggc

SEQ ID NO: 5985894 - DNA, 25 bp, Homo sapien
tgatcgaatttataattcaccattc

SEQ ID NO: 5985895 - DNA, 25 bp, Homo sapien
aaccatttcgatattatgattgaat

SEQ ID NO: 5985896 - DNA, 25 bp, Homo sapien
aagatgaggacggtaataacgtttc

SEQ ID NO: 5985897 - DNA, 25 bp, Homo sapien
ttatatgcattattcgggtttgtcg

SEQ ID NO: 5985898 - DNA, 25 bp, Homo sapien
ccaaccaagacaaaccaaatcgcaa

SEQ ID NO: 5985899 - DNA, 25 bp, Homo sapien
tcttcttcgctgcattgggtttcct

SEQ ID NO: 5985900 - DNA, 25 bp, Homo sapien
tgatccttctattcaatggttttct

SEQ ID NO: 5985901 - DNA, 25 bp, Homo sapien
tttctctttcctcctattaactttg

SEQ ID NO: 5985902 - DNA, 25 bp, Homo sapien
gggtggattcacgactattgtctta

SEQ ID NO: 5985903 - DNA, 25 bp, Homo sapien
ttcattcttctggtgtcataccagc

SEQ ID NO: 5985904 - DNA, 25 bp, Homo sapien
tatcacctagttctagaggttcctt

SEQ ID NO: 5985905 - DNA, 25 bp, Homo sapien
ttatccattcgctattgcgcgcact

SEQ ID NO: 5985906 - DNA, 25 bp, Homo sapien
ccgttaaattcaatgaatcagcgac

SEQ ID NO: 5985907 - DNA, 25 bp, Homo sapien
tttcgcacgttacaacgagttaaat

SEQ ID NO: 5985908 - DNA, 25 bp, Homo sapien
actccatcaatgaattatcaacaca

SEQ ID NO: 5985909 - DNA, 25 bp, Homo sapien
cgttgagttgtatttcatatacaca

SEQ ID NO: 5985910 - DNA, 25 bp, Homo sapien
gctattgcgcgcactgaaaagtgat

SEQ ID NO: 5985911 - DNA, 25 bp, Homo sapien
caattatttttgatggtaacttgca

SEQ ID NO: 5985912 - DNA, 25 bp, Homo sapien
cttccagccttggtatttaaagact

SEQ ID NO: 5985913 - DNA, 25 bp, Homo sapien
gaaaagcaacctgaatccttgggat

SEQ ID NO: 5985914 - DNA, 25 bp, Homo sapien
gacattgaggctactccaaaagggg

SEQ ID NO: 5985915 - DNA, 25 bp, Homo sapien
caccaggtgggacaaatatttacac

SEQ ID NO: 5985916 - DNA, 25 bp, Homo sapien
tttgtcagcctgaaaaagtcgaaaa

SEQ ID NO: 5985917 - DNA, 25 bp, Homo sapien
gccaggaaaagatgtcactgggatg

SEQ ID NO: 5985918 - DNA, 25 bp, Homo sapien
tcactgggatgaacatccaaccaag

SEQ ID NO: 5985919 - DNA, 25 bp, Homo sapien
tgggatgaacatccaaccaagacaa

SEQ ID NO: 5985920 - DNA, 25 bp, Homo sapien
cttggtatttaaagactataccagc

SEQ ID NO: 5985921 - DNA, 25 bp, Homo sapien
tcttattgtcatctgttgttatcca

SEQ ID NO: 5985922 - DNA, 25 bp, Homo sapien
ctccaaaaggggcagaaaccaccga

SEQ ID NO: 5985923 - DNA, 25 bp, Homo sapien
aaacgttccagtccaggtacatgtg

SEQ ID NO: 5985924 - DNA, 25 bp, Homo sapien
ttgttagaaaaatctactcatccat

SEQ ID NO: 5985925 - DNA, 25 bp, Homo sapien
actcaaggaaccgacattgaggcta

SEQ ID NO: 5985926 - DNA, 25 bp, Homo sapien
gtttatgatggcagaactaagacta

SEQ ID NO: 5985927 - DNA, 25 bp, Homo sapien
tttgattgctggtatctttccattt

SEQ ID NO: 5985928 - DNA, 25 bp, Homo sapien
atggagaggattcataattggaggc

SEQ ID NO: 5985929 - DNA, 25 bp, Homo sapien
gctaataattattgcgttgaacttt

SEQ ID NO: 5985930 - DNA, 25 bp, Homo sapien
tgctggttcattgattgccaggaaa

SEQ ID NO: 5985931 - DNA, 25 bp, Homo sapien
tgtatttcatatacacaagtttatg

SEQ ID NO: 5985932 - DNA, 25 bp, Homo sapien
cgactactattacaatagattccat

SEQ ID NO: 5985933 - DNA, 25 bp, Homo sapien
ttaaagactataccagctactttga

SEQ ID NO: 5985934 - DNA, 25 bp, Homo sapien
ggcaatggagaggattcataattgg

SEQ ID NO: 5985935 - DNA, 25 bp, Homo sapien
atacgtgggatactcctcagtcatt

SEQ ID NO: 5985936 - DNA, 25 bp, Homo sapien
aaaagagtgtgaatccctgtgtaag

SEQ ID NO: 5985937 - DNA, 25 bp, Homo sapien
tgattgctggtatctttccatttgg

SEQ ID NO: 5985938 - DNA, 25 bp, Homo sapien
aggcaaacttgatattgactccact

SEQ ID NO: 5985939 - DNA, 25 bp, Homo sapien
attcaccattccaattgaatatgtt

SEQ ID NO: 5985940 - DNA, 25 bp, Homo sapien
gcttcaaccttggttttgtacaggt

SEQ ID NO: 5985941 - DNA, 25 bp, Homo sapien
ttattgcgttgaactttttcttaat

SEQ ID NO: 5985942 - DNA, 25 bp, Homo sapien
ctattgtcttatacgtgggatactc

SEQ ID NO: 5985943 - DNA, 25 bp, Homo sapien
cagaaaccaccgataaggatgtgga

SEQ ID NO: 5985944 - DNA, 25 bp, Homo sapien
acgatcgtggtgaaggtaactatcg

SEQ ID NO: 5985945 - DNA, 25 bp, Homo sapien
caggtgtagcgcctaccacttacag

SEQ ID NO: 5985946 - DNA, 25 bp, Homo sapien
tattaactttgacaagttcactcgt

SEQ ID NO: 5985947 - DNA, 25 bp, Homo sapien
aactggcttattgatggattaccgg

SEQ ID NO: 5985948 - DNA, 25 bp, Homo sapien
tcacgactattgtcttatacgtggg

SEQ ID NO: 5985949 - DNA, 25 bp, Homo sapien
tttacacgtatatgatccttctatt

SEQ ID NO: 5985950 - DNA, 25 bp, Homo sapien
atggtttttgttctcaatcccatta

SEQ ID NO: 5985951 - DNA, 25 bp, Homo sapien
tccgggagatgatgctaaattcatc

SEQ ID NO: 5985952 - DNA, 25 bp, Homo sapien
tagaaaaatctactcatccattaaa

SEQ ID NO: 5985953 - DNA, 25 bp, Homo sapien
aagatgtcactgggatgaacatcca

SEQ ID NO: 5985954 - DNA, 25 bp, Homo sapien
ataaatttctccttagttgttgtct

SEQ ID NO: 5985955 - DNA, 25 bp, Homo sapien
tccataaaacgttccagtccaggta

SEQ ID NO: 5985956 - DNA, 25 bp, Homo sapien
ggtgaaaacttacgaattgccttac

SEQ ID NO: 5985957 - DNA, 25 bp, Homo sapien
gataatgaagtttattttacttatt

SEQ ID NO: 5985958 - DNA, 25 bp, Homo sapien
tttcctctttttctctttcctccta

SEQ ID NO: 5985959 - DNA, 25 bp, Homo sapien
aatctactcatccattaaagttgac

SEQ ID NO: 5985960 - DNA, 25 bp, Homo sapien
ctaagactagtttttatggtgctgg

SEQ ID NO: 5985961 - DNA, 25 bp, Homo sapien
gagttgtatttcatatacacaagtt

SEQ ID NO: 5985962 - DNA, 25 bp, Homo sapien
gccactgttatgtttatcttatatg

SEQ ID NO: 5985963 - DNA, 25 bp, Homo sapien
attgctggtatctttccatttggct

SEQ ID NO: 5985964 - DNA, 25 bp, Homo sapien
gcgcactgaaaagtgatttcgcacg

SEQ ID NO: 5985965 - DNA, 25 bp, Homo sapien
cttcgctgcattgggtttcctatca

SEQ ID NO: 5985966 - DNA, 25 bp, Homo sapien
acgtgggatactcctcagtcatttc

SEQ ID NO: 5985967 - DNA, 25 bp, Homo sapien
tcgttaatcatttaactccatcaat

SEQ ID NO: 5985968 - DNA, 25 bp, Homo sapien
ccagctactttgattgctggtatct

SEQ ID NO: 5985969 - DNA, 25 bp, Homo sapien
gttatgtttatcttatatgcattat

SEQ ID NO: 5985970 - DNA, 25 bp, Homo sapien
ctcttatacatctatgggcatctac

SEQ ID NO: 5985971 - DNA, 25 bp, Homo sapien
cgttcgccaagtcaatcgctaaccc

SEQ ID NO: 5985972 - DNA, 25 bp, Homo sapien
gtcaacagtcaaagccttctattta

SEQ ID NO: 5985973 - DNA, 25 bp, Homo sapien
tacaacgagttaaatttggacgatg

SEQ ID NO: 5985974 - DNA, 25 bp, Homo sapien
aactggaagtggcaatggagaggat

SEQ ID NO: 5985975 - DNA, 25 bp, Homo sapien
ccatactggaaggcaaacttgatat

SEQ ID NO: 5985976 - DNA, 25 bp, Homo sapien
ttcactcgtcactattttgatcact

SEQ ID NO: 5985977 - DNA, 25 bp, Homo sapien
attgaatatcacgatcgtggtgaag

SEQ ID NO: 5985978 - DNA, 25 bp, Homo sapien
tatttacacgtatatgatccttcta

SEQ ID NO: 5985979 - DNA, 25 bp, Homo sapien
taaattcaatgaatcagcgacttct

SEQ ID NO: 5985980 - DNA, 25 bp, Homo sapien
gtgaaacgactggcagcccattgat

SEQ ID NO: 5985981 - DNA, 25 bp, Homo sapien
tcgctgcattgggtttcctatcacc

SEQ ID NO: 5985982 - DNA, 25 bp, Homo sapien
ggctcttatacatctatgggcatct

SEQ ID NO: 5985983 - DNA, 25 bp, Homo sapien
tgatgtttttcgttcgccaagtcaa

SEQ ID NO: 5985984 - DNA, 25 bp, Homo sapien
ctggagaactggaagtggcaatgga

SEQ ID NO: 5985985 - DNA, 25 bp, Homo sapien
ttattgtcatctgttgttatccatt

SEQ ID NO: 5985986 - DNA, 25 bp, Homo sapien
catcgccgttgagttgtatttcata

SEQ ID NO: 5985987 - DNA, 25 bp, Homo sapien
ggctactccaaaaggggcagaaacc

SEQ ID NO: 5985988 - DNA, 25 bp, Homo sapien
tacatctatgggcatctacaaattt

SEQ ID NO: 5985989 - DNA, 25 bp, Homo sapien
cgtcactattttgatcacttatcat

SEQ ID NO: 5985990 - DNA, 25 bp, Homo sapien
catttgctggttcattgattgccag

SEQ ID NO: 5985991 - DNA, 25 bp, Homo sapien
aaggggcagaaaccaccgataagga

SEQ ID NO: 5985992 - DNA, 25 bp, Homo sapien
ttggtgttatcgtcgaaccggtttc

SEQ ID NO: 5985993 - DNA, 25 bp, Homo sapien
actgggatgaacatccaaccaagac

SEQ ID NO: 5985994 - DNA, 25 bp, Homo sapien
ttacatgtttggtttcctctttttc

SEQ ID NO: 5985995 - DNA, 25 bp, Homo sapien
agttcctggtgctattctgctaata

SEQ ID NO: 5985996 - DNA, 25 bp, Homo sapien
acgaaggaaatgataatgaagttta

SEQ ID NO: 5985997 - DNA, 25 bp, Homo sapien
gttagaaaaatctactcatccatta

SEQ ID NO: 5985998 - DNA, 25 bp, Homo sapien
tcgtgtagttggtgttatcgtcgaa

SEQ ID NO: 5985999 - DNA, 25 bp, Homo sapien
taaattgataaaaaatggcttcttc

SEQ ID NO: 5986000 - DNA, 25 bp, Homo sapien
actactattacaatagattccattt

SEQ ID NO: 5986001 - DNA, 25 bp, Homo sapien
tcaaggaaccgacattgaggctact

SEQ ID NO: 5986002 - DNA, 25 bp, Homo sapien
ttctatggtttttgttctcaatccc

SEQ ID NO: 5986003 - DNA, 25 bp, Homo sapien
gtatttaaagactataccagctact

SEQ ID NO: 5986004 - DNA, 25 bp, Homo sapien
acagtcaaagccttctatttaccag

SEQ ID NO: 5986005 - DNA, 25 bp, Homo sapien
actctgctgtttggtaacggggtca

SEQ ID NO: 5986006 - DNA, 25 bp, Homo sapien
cactcgtcactattttgatcactta

SEQ ID NO: 5986007 - DNA, 25 bp, Homo sapien
attcaccaaatttaagttgggtgga

SEQ ID NO: 5986008 - DNA, 25 bp, Homo sapien
ggcacacgtacagcttttgttgttg

SEQ ID NO: 5986009 - DNA, 25 bp, Homo sapien
taatcatttaactccatcaatgaat

SEQ ID NO: 5986010 - DNA, 25 bp, Homo sapien
tatggtttttctatggtttttgttc

SEQ ID NO: 5986011 - DNA, 25 bp, Homo sapien
gaatccttgggatccgttatatttg

SEQ ID NO: 5986012 - DNA, 25 bp, Homo sapien
gaaaaagagtgtgaatccctgtgta

SEQ ID NO: 5986013 - DNA, 25 bp, Homo sapien
aattggaaacacgtaatgatcgtaa

SEQ ID NO: 5986014 - DNA, 25 bp, Homo sapien
acttctagttcctggtgctattctg

SEQ ID NO: 5986015 - DNA, 25 bp, Homo sapien
tggtttcctctttttctctttcctc

SEQ ID NO: 5986016 - DNA, 25 bp, Homo sapien
tatggtttaataagattttttacat

SEQ ID NO: 5986017 - DNA, 25 bp, Homo sapien
gtttttcgttcgccaagtcaatcgc

SEQ ID NO: 5986018 - DNA, 25 bp, Homo sapien
tctgctgtttggtaacggggtcaat

SEQ ID NO: 5986019 - DNA, 25 bp, Homo sapien
ttggaaacacgtaatgatcgtaaca

SEQ ID NO: 5986020 - DNA, 25 bp, Homo sapien
acaaatacccttccagccttggtat

SEQ ID NO: 5986021 - DNA, 25 bp, Homo sapien
tggcagaactaagactagtttttat

SEQ ID NO: 5986022 - DNA, 25 bp, Homo sapien
gaaggcaaacttgatattgactcca

SEQ ID NO: 5986023 - DNA, 25 bp, Homo sapien
tcagcctgaaaaagtcgaaaagcaa

SEQ ID NO: 5986024 - DNA, 25 bp, Homo sapien
tccgttatatttggtgatcgaattt

SEQ ID NO: 5986025 - DNA, 25 bp, Homo sapien
ctactccaaaaggggcagaaaccac

SEQ ID NO: 5986026 - DNA, 25 bp, Homo sapien
caatagattccatttttgtcagcct

SEQ ID NO: 5986027 - DNA, 25 bp, Homo sapien
tttgatggtaacttgcagtatcttc

SEQ ID NO: 5986028 - DNA, 25 bp, Homo sapien
gtgctattctgctaataattattgc

SEQ ID NO: 5986029 - DNA, 25 bp, Homo sapien
accattccaattgaatatgttacaa

SEQ ID NO: 5986030 - DNA, 25 bp, Homo sapien
tttctggcgataaagaaaatttctt

SEQ ID NO: 5986031 - DNA, 25 bp, Homo sapien
gccttggtatttaaagactatacca

SEQ ID NO: 5986032 - DNA, 25 bp, Homo sapien
tacaatagattccatttttgtcagc

SEQ ID NO: 5986033 - DNA, 25 bp, Homo sapien
cattgattgccaggaaaagatgtca

SEQ ID NO: 5986034 - DNA, 25 bp, Homo sapien
accttggttttgtacaggtaactca

SEQ ID NO: 5986035 - DNA, 25 bp, Homo sapien
ggcgccggttgtgctttgtatgtgt

SEQ ID NO: 5986036 - DNA, 25 bp, Homo sapien
tgtcatctgttgttatccattcgct

SEQ ID NO: 5986037 - DNA, 25 bp, Homo sapien
atagattccatttttgtcagcctga

SEQ ID NO: 5986038 - DNA, 25 bp, Homo sapien
tttccataaaacgttccagtccagg

SEQ ID NO: 5986039 - DNA, 25 bp, Homo sapien
tgccaaccatttcgatattatgatt

SEQ ID NO: 5986040 - DNA, 25 bp, Homo sapien
tgggcatctacaaatttttcaatgg

SEQ ID NO: 5986041 - DNA, 25 bp, Homo sapien
acacgtaatgatcgtaacatggtga

SEQ ID NO: 5986042 - DNA, 25 bp, Homo sapien
tggctccatcgccgttgagttgtat

SEQ ID NO: 5986043 - DNA, 25 bp, Homo sapien
gattttttacatgtttggtttcctc

SEQ ID NO: 5986044 - DNA, 25 bp, Homo sapien
tttaagttgggtggattcacgacta

SEQ ID NO: 5986045 - DNA, 25 bp, Homo sapien
attccatttttgtcagcctgaaaaa

SEQ ID NO: 5986046 - DNA, 25 bp, Homo sapien
ttcttctggtgtcataccagcaagt

SEQ ID NO: 5986047 - DNA, 25 bp, Homo sapien
ttgggccaccaggtgggacaaatat

SEQ ID NO: 5986048 - DNA, 25 bp, Homo sapien
tttcatatacacaagtttatggttt

SEQ ID NO: 5986049 - DNA, 25 bp, Homo sapien
gtggattcacgactattgtcttata

SEQ ID NO: 5986050 - DNA, 25 bp, Homo sapien
ttccttatgcctggagaactggaag

SEQ ID NO: 5986051 - DNA, 25 bp, Homo sapien
agctactttgattgctggtatcttt

SEQ ID NO: 5986052 - DNA, 25 bp, Homo sapien
cagcttttgttgttgtatttttttg

SEQ ID NO: 5986053 - DNA, 25 bp, Homo sapien
ttatcagcagtatgctctttgttag

SEQ ID NO: 5986054 - DNA, 25 bp, Homo sapien
ctagttctagaggttccttagccac

SEQ ID NO: 5986055 - DNA, 25 bp, Homo sapien
tttccatttggctccatcgccgttg

SEQ ID NO: 5986056 - DNA, 25 bp, Homo sapien
cccattatcatttgctggttcattg

SEQ ID NO: 5986057 - DNA, 25 bp, Homo sapien
tttacaaaatggcacacgtacagct

SEQ ID NO: 5986058 - DNA, 25 bp, Homo sapien
ccttagttgttgtcttattgtcatc

SEQ ID NO: 5986059 - DNA, 25 bp, Homo sapien
attccgggagatgatgctaaattca

SEQ ID NO: 5986060 - DNA, 25 bp, Homo sapien
taaaaaatggcttcttccaaaactg

SEQ ID NO: 5986061 - DNA, 25 bp, Homo sapien
tggcagcccattgatgctagacgaa

SEQ ID NO: 5986062 - DNA, 25 bp, Homo sapien
gctattctgctaataattattgcgt

SEQ ID NO: 5986063 - DNA, 25 bp, Homo sapien
ttgaggctactccaaaaggggcaga

SEQ ID NO: 5986064 - DNA, 25 bp, Homo sapien
gaggctactccaaaaggggcagaaa

SEQ ID NO: 5986065 - DNA, 25 bp, Homo sapien
gctgcattgggtttcctatcaccta

SEQ ID NO: 5986066 - DNA, 25 bp, Homo sapien
tctctttcctcctattaactttgac

SEQ ID NO: 5986067 - DNA, 25 bp, Homo sapien
tggaggcgccggttgtgctttgtat

SEQ ID NO: 5986068 - DNA, 25 bp, Homo sapien
ataattattgcgttgaactttttct

SEQ ID NO: 5986069 - DNA, 25 bp, Homo sapien
tttttgtcagcctgaaaaagtcgaa

SEQ ID NO: 5986070 - DNA, 25 bp, Homo sapien
tccatttttgtcagcctgaaaaagt

SEQ ID NO: 5986071 - DNA, 25 bp, Homo sapien
ttcattctattttattcaccaaatt

SEQ ID NO: 5986072 - DNA, 25 bp, Homo sapien
ttgatcacttatcattccttatgcc

SEQ ID NO: 5986073 - DNA, 25 bp, Homo sapien
ggccatactggaaggcaaacttgat

SEQ ID NO: 5986074 - DNA, 25 bp, Homo sapien
taactccatcaatgaattatcaaca

SEQ ID NO: 5986075 - DNA, 25 bp, Homo sapien
ttatcattccttatgcctggagaac

SEQ ID NO: 5986076 - DNA, 25 bp, Homo sapien
ccgacattgaggctactccaaaagg

SEQ ID NO: 5986077 - DNA, 25 bp, Homo sapien
tcacctagttctagaggttccttag

SEQ ID NO: 5986078 - DNA, 25 bp, Homo sapien
tcaattggctttatcagcagtatgc

SEQ ID NO: 5986079 - DNA, 25 bp, Homo sapien
ttgattgccaggaaaagatgtcact

SEQ ID NO: 5986080 - DNA, 25 bp, Homo sapien
gattgccaggaaaagatgtcactgg

SEQ ID NO: 5986081 - DNA, 25 bp, Homo sapien
tgttacaagaaaaagagtgtgaatc

SEQ ID NO: 5986082 - DNA, 25 bp, Homo sapien
caggagttcaattatttttgatggt

SEQ ID NO: 5986083 - DNA, 25 bp, Homo sapien
ttcgccaagtcaatcgctaaccctt

SEQ ID NO: 5986084 - DNA, 25 bp, Homo sapien
gatggattaccggctgcaagagagg

SEQ ID NO: 5986085 - DNA, 25 bp, Homo sapien
gcagtatcttcttcgctgcattggg

SEQ ID NO: 5986086 - DNA, 25 bp, Homo sapien
gtacatgtgaaacgactggcagccc

SEQ ID NO: 5986087 - DNA, 25 bp, Homo sapien
cccattgatgctagacgaaggaaat

SEQ ID NO: 5986088 - DNA, 25 bp, Homo sapien
gttgttatccattcgctattgcgcg

SEQ ID NO: 5986089 - DNA, 25 bp, Homo sapien
gatgaggacggtaataacgtttctg

SEQ ID NO: 5986090 - DNA, 25 bp, Homo sapien
aagattcgggttggaaattgaatca

SEQ ID NO: 5986091 - DNA, 25 bp, Homo sapien
ttggctttatcagcagtatgctctt

SEQ ID NO: 5986092 - DNA, 25 bp, Homo sapien
tttgttcattcttctggtgtcatac

SEQ ID NO: 5986093 - DNA, 25 bp, Homo sapien
cagcgacttcttgggccaccaggtg

SEQ ID NO: 5986094 - DNA, 25 bp, Homo sapien
tattccgttaaattcaatgaatcag

SEQ ID NO: 5986095 - DNA, 25 bp, Homo sapien
ctgctaataattattgcgttgaact

SEQ ID NO: 5986096 - DNA, 25 bp, Homo sapien
ttagttgttgtcttattgtcatctg

SEQ ID NO: 5986097 - DNA, 25 bp, Homo sapien
gaatccctgtgtaagaccgtaattc

SEQ ID NO: 5986098 - DNA, 25 bp, Homo sapien
tttgccaaccatttcgatattatga

SEQ ID NO: 5986099 - DNA, 25 bp, Homo sapien
gagtgtgaatccctgtgtaagaccg

SEQ ID NO: 5986100 - DNA, 25 bp, Homo sapien
tttattcattctattttattcacca

SEQ ID NO: 5986101 - DNA, 25 bp, Homo sapien
tcgccgttgagttgtatttcatata

SEQ ID NO: 5986102 - DNA, 25 bp, Homo sapien
gtaatgatcgtaacatggtgaaaac

SEQ ID NO: 5986103 - DNA, 25 bp, Homo sapien
atcagcagtatgctctttgttagaa

SEQ ID NO: 5986104 - DNA, 25 bp, Homo sapien
cgtaacatggtgaaaacttacgaat

SEQ ID NO: 5986105 - DNA, 25 bp, Homo sapien
caagacaaatacccttccagccttg

SEQ ID NO: 5986106 - DNA, 25 bp, Homo sapien
ccttactttgccaaccatttcgata

SEQ ID NO: 5986107 - DNA, 25 bp, Homo sapien
atgtgaaacgactggcagcccattg

SEQ ID NO: 5986108 - DNA, 25 bp, Homo sapien
tcaaagccttctatttaccaggtgt

SEQ ID NO: 5986109 - DNA, 25 bp, Homo sapien
tgaatcatggtgatgtttttcgttc

SEQ ID NO: 5986110 - DNA, 25 bp, Homo sapien
tataattcaccattccaattgaata

SEQ ID NO: 5986111 - DNA, 25 bp, Homo sapien
tttaactccatcaatgaattatcaa

SEQ ID NO: 5986112 - DNA, 25 bp, Homo sapien
tatttcatatacacaagtttatggt

SEQ ID NO: 5986113 - DNA, 25 bp, Homo sapien
ttgtgctttgtatgtgtttattcat

SEQ ID NO: 5986114 - DNA, 25 bp, Homo sapien
gtaataacgtttctggcgataaaga

SEQ ID NO: 5986115 - DNA, 25 bp, Homo sapien
tcttatatgcattattcgggtttgt

SEQ ID NO: 5986116 - DNA, 25 bp, Homo sapien
ccaaaaggggcagaaaccaccgata

SEQ ID NO: 5986117 - DNA, 25 bp, Homo sapien
gatgtcactgggatgaacatccaac

SEQ ID NO: 5986118 - DNA, 25 bp, Homo sapien
gttccttagccactgttatgtttat

SEQ ID NO: 5986119 - DNA, 25 bp, Homo sapien
tgcattgggtttcctatcacctagt

SEQ ID NO: 5986120 - DNA, 25 bp, Homo sapien
gacttcttgggccaccaggtgggac

SEQ ID NO: 5986121 - DNA, 25 bp, Homo sapien
aagaaaaagagtgtgaatccctgtg

SEQ ID NO: 5986122 - DNA, 25 bp, Homo sapien
ggagatgatgctaaattcatcaata

SEQ ID NO: 5986123 - DNA, 25 bp, Homo sapien
ggtcaattggctttatcagcagtat

SEQ ID NO: 5986124 - DNA, 25 bp, Homo sapien
tcttccaaaactggcttattgatgg

SEQ ID NO: 5986125 - DNA, 25 bp, Homo sapien
taagattttttacatgtttggtttc

SEQ ID NO: 5986126 - DNA, 25 bp, Homo sapien
aggattcataattggaggcgccggt

SEQ ID NO: 5986127 - DNA, 25 bp, Homo sapien
acttgcagtatcttcttcgctgcat

SEQ ID NO: 5986128 - DNA, 25 bp, Homo sapien
aggacggtaataacgtttctggcga

SEQ ID NO: 5986129 - DNA, 25 bp, Homo sapien
aattttggttggttcaggagttcaa

SEQ ID NO: 5986130 - DNA, 25 bp, Homo sapien
ttcctggtgctattctgctaataat

SEQ ID NO: 5986131 - DNA, 25 bp, Homo sapien
gcaaacttgatattgactccacttc

SEQ ID NO: 5986132 - DNA, 25 bp, Homo sapien
tcaatgggccatactggaaggcaaa

SEQ ID NO: 5986133 - DNA, 25 bp, Homo sapien
aacgactggcagcccattgatgcta

SEQ ID NO: 5986134 - DNA, 25 bp, Homo sapien
tttgataaatttctccttagttgtt

SEQ ID NO: 5986135 - DNA, 25 bp, Homo sapien
agcaacctgaatccttgggatccgt

SEQ ID NO: 5986136 - DNA, 25 bp, Homo sapien
ttctattttattcaccaaatttaag

SEQ ID NO: 5986137 - DNA, 25 bp, Homo sapien
ggagttcaattatttttgatggtaa

SEQ ID NO: 5986138 - DNA, 25 bp, Homo sapien
tggtttttctatggtttttgttctc

SEQ ID NO: 5986139 - DNA, 25 bp, Homo sapien
ttcttgtactcatacgactactatt

SEQ ID NO: 5986140 - DNA, 25 bp, Homo sapien
gcacgttacaacgagttaaatttgg

SEQ ID NO: 5986141 - DNA, 25 bp, Homo sapien
ggaagtggcaatggagaggattcat

SEQ ID NO: 5986142 - DNA, 25 bp, Homo sapien
gactagtttttatggtgctggcttc

SEQ ID NO: 5986143 - DNA, 25 bp, Homo sapien
ctagttcctggtgctattctgctaa

SEQ ID NO: 5986144 - DNA, 25 bp, Homo sapien
tcatctgttgttatccattcgctat

SEQ ID NO: 5986145 - DNA, 25 bp, Homo sapien
aatcatggtgatgtttttcgttcgc

SEQ ID NO: 5986146 - DNA, 25 bp, Homo sapien
taacgtttctggcgataaagaaaat

SEQ ID NO: 5986147 - DNA, 25 bp, Homo sapien
cccattgctcgttaatcatttaact

SEQ ID NO: 5986148 - DNA, 25 bp, Homo sapien
cagcagtatgctctttgttagaaaa

SEQ ID NO: 5986149 - DNA, 25 bp, Homo sapien
gtggaattggaaacacgtaatgatc

SEQ ID NO: 5986150 - DNA, 25 bp, Homo sapien
ttccaaaactggcttattgatggat

SEQ ID NO: 5986151 - DNA, 25 bp, Homo sapien
caagagaggtttatgatggcagaac

SEQ ID NO: 5986152 - DNA, 25 bp, Homo sapien
ggcagaaaccaccgataaggatgtg

SEQ ID NO: 5986153 - DNA, 25 bp, Homo sapien
cattgatgctagacgaaggaaatga

SEQ ID NO: 5986154 - DNA, 25 bp, Homo sapien
gccgttgagttgtatttcatataca

SEQ ID NO: 5986155 - DNA, 25 bp, Homo sapien
ttttttgtgtcaacagtcaaagcct

SEQ ID NO: 5986156 - DNA, 25 bp, Homo sapien
actataccagctactttgattgctg

SEQ ID NO: 5986157 - DNA, 25 bp, Homo sapien
caggaaaagatgtcactgggatgaa

SEQ ID NO: 5986158 - DNA, 25 bp, Homo sapien
aactaagactagtttttatggtgct

SEQ ID NO: 5986159 - DNA, 25 bp, Homo sapien
tgtgtttattcattctattttattc

SEQ ID NO: 5986160 - DNA, 25 bp, Homo sapien
ctctgttttttatggtttttctatg

SEQ ID NO: 5986161 - DNA, 25 bp, Homo sapien
gggatactcctcagtcatttcatta

SEQ ID NO: 5986162 - DNA, 25 bp, Homo sapien
cctggtgctattctgctaataatta

SEQ ID NO: 5986163 - DNA, 25 bp, Homo sapien
tatatgatccttctattcaatggtt

SEQ ID NO: 5986164 - DNA, 25 bp, Homo sapien
ttcaaccttggttttgtacaggtaa

SEQ ID NO: 5986165 - DNA, 25 bp, Homo sapien
ggttcaggagttcaattatttttga

SEQ ID NO: 5986166 - DNA, 25 bp, Homo sapien
gctcgttaatcatttaactccatca

SEQ ID NO: 5986167 - DNA, 25 bp, Homo sapien
tgataaatttctccttagttgttgt

SEQ ID NO: 5986168 - DNA, 25 bp, Homo sapien
ggattcacgactattgtcttatacg

SEQ ID NO: 5986169 - DNA, 25 bp, Homo sapien
gataaagaaaatttcttgtactcat

SEQ ID NO: 5986170 - DNA, 25 bp, Homo sapien
ttgccaggaaaagatgtcactggga

SEQ ID NO: 5986171 - DNA, 25 bp, Homo sapien
cgtttctggcgataaagaaaatttc

SEQ ID NO: 5986172 - DNA, 25 bp, Homo sapien
taccagctactttgattgctggtat

SEQ ID NO: 5986173 - DNA, 25 bp, Homo sapien
tccatttggctccatcgccgttgag

SEQ ID NO: 5986174 - DNA, 25 bp, Homo sapien
tcctctttttctctttcctcctatt

SEQ ID NO: 5986175 - DNA, 25 bp, Homo sapien
gttgtcttattgtcatctgttgtta

SEQ ID NO: 5986176 - DNA, 25 bp, Homo sapien
ctgttgttatccattcgctattgcg

SEQ ID NO: 5986177 - DNA, 25 bp, Homo sapien
ggtttccataaaacgttccagtcca

SEQ ID NO: 5986178 - DNA, 25 bp, Homo sapien
caatgaatcagcgacttcttgggcc

SEQ ID NO: 5986179 - DNA, 25 bp, Homo sapien
acgactattgtcttatacgtgggat

SEQ ID NO: 5986180 - DNA, 25 bp, Homo sapien
ttacgaattgccttactttgccaac

SEQ ID NO: 5986181 - DNA, 25 bp, Homo sapien
gtcataccagcaagtactctgtttt

SEQ ID NO: 5986182 - DNA, 25 bp, Homo sapien
aatttggacgatgattttcaagaag

SEQ ID NO: 5986183 - DNA, 25 bp, Homo sapien
ggggtcaattggctttatcagcagt

SEQ ID NO: 5986184 - DNA, 25 bp, Homo sapien
atttcttgtactcatacgactacta

SEQ ID NO: 5986185 - DNA, 25 bp, Homo sapien
aaggatgtggaattggaaacacgta

SEQ ID NO: 5986186 - DNA, 25 bp, Homo sapien
tatacatctatgggcatctacaaat

SEQ ID NO: 5986187 - DNA, 25 bp, Homo sapien
caacctgaatccttgggatccgtta

SEQ ID NO: 5986188 - DNA, 25 bp, Homo sapien
gaaaatttcttgtactcatacgact

SEQ ID NO: 5986189 - DNA, 25 bp, Homo sapien
cgactggcagcccattgatgctaga

SEQ ID NO: 5986190 - DNA, 25 bp, Homo sapien
tgtttattcattctattttattcac

SEQ ID NO: 5986191 - DNA, 25 bp, Homo sapien
aaccaaatcgcaagacaaataccct

SEQ ID NO: 5986192 - DNA, 25 bp, Homo sapien
atccaaccaagacaaaccaaatcgc

SEQ ID NO: 5986193 - DNA, 25 bp, Homo sapien
ctagacgaaggaaatgataatgaag

SEQ ID NO: 5986194 - DNA, 25 bp, Homo sapien
cgataaggatgtggaattggaaaca

SEQ ID NO: 5986195 - DNA, 25 bp, Homo sapien
tacaggtaactcaaggaaccgacat

SEQ ID NO: 5986196 - DNA, 25 bp, Homo sapien
tctactcatccattaaagttgacta

SEQ ID NO: 5986197 - DNA, 25 bp, Homo sapien
agtcatttcattactctgctgtttg

SEQ ID NO: 5986198 - DNA, 25 bp, Homo sapien
acatgtttggtttcctctttttctc

SEQ ID NO: 5986199 - DNA, 25 bp, Homo sapien
gggacaaatatttacacgtatatga

SEQ ID NO: 5986200 - DNA, 25 bp, Homo sapien
gtgctttgtatgtgtttattcattc

SEQ ID NO: 5986201 - DNA, 25 bp, Homo sapien
ttgggatccgttatatttggtgatc

SEQ ID NO: 5986202 - DNA, 25 bp, Homo sapien
gtgtgaatccctgtgtaagaccgta

SEQ ID NO: 5986203 - DNA, 25 bp, Homo sapien
accaaatttaagttgggtggattca

SEQ ID NO: 5986204 - DNA, 25 bp, Homo sapien
acttacgaattgccttactttgcca

SEQ ID NO: 5986205 - DNA, 25 bp, Homo sapien
tgattgaatatcacgatcgtggtga

SEQ ID NO: 5986206 - DNA, 25 bp, Homo sapien
tgatggtaacttgcagtatcttctt

SEQ ID NO: 5986207 - DNA, 25 bp, Homo sapien
ttctatttaccaggtgtagcgccta

SEQ ID NO: 5986208 - DNA, 25 bp, Homo sapien
atgaatcagcgacttcttgggccac

SEQ ID NO: 5986209 - DNA, 25 bp, Homo sapien
gatactcctcagtcatttcattact

SEQ ID NO: 5986210 - DNA, 25 bp, Homo sapien
gcattattcgggtttgtcggctctt

SEQ ID NO: 5986211 - DNA, 25 bp, Homo sapien
atttaccaggtgtagcgcctaccac

SEQ ID NO: 5986212 - DNA, 25 bp, Homo sapien
atgatttacaaaatggcacacgtac

SEQ ID NO: 5986213 - DNA, 25 bp, Homo sapien
gacaacatcccattgctcgttaatc

SEQ ID NO: 5986214 - DNA, 25 bp, Homo sapien
tattcattctattttattcaccaaa

SEQ ID NO: 5986215 - DNA, 25 bp, Homo sapien
attattcgggtttgtcggctcttat

SEQ ID NO: 5986216 - DNA, 25 bp, Homo sapien
ttggttggttcaggagttcaattat

SEQ ID NO: 5986217 - DNA, 25 bp, Homo sapien
ggctttatcagcagtatgctctttg

SEQ ID NO: 5986218 - DNA, 25 bp, Homo sapien
gcgcgcactgaaaagtgatttcgca

SEQ ID NO: 5986219 - DNA, 25 bp, Homo sapien
gtttcctatcacctagttctagagg

SEQ ID NO: 5986220 - DNA, 25 bp, Homo sapien
cattcttctggtgtcataccagcaa

SEQ ID NO: 5986221 - DNA, 25 bp, Homo sapien
ttttgttgttgtatttttttgtgtc

SEQ ID NO: 5986222 - DNA, 25 bp, Homo sapien
ccttgggatccgttatatttggtga

SEQ ID NO: 5986223 - DNA, 25 bp, Homo sapien
acaaagatgaggacggtaataacgt

SEQ ID NO: 5986224 - DNA, 25 bp, Homo sapien
gcctggagaactggaagtggcaatg

SEQ ID NO: 5986225 - DNA, 25 bp, Homo sapien
ttggttcaggagttcaattattttt

SEQ ID NO: 5986226 - DNA, 25 bp, Homo sapien
gtccaggtacatgtgaaacgactgg

SEQ ID NO: 5986227 - DNA, 25 bp, Homo sapien
cattctattttattcaccaaattta

SEQ ID NO: 5986228 - DNA, 25 bp, Homo sapien
caaatttaagttgggtggattcacg

SEQ ID NO: 5986229 - DNA, 25 bp, Homo sapien
ttgttgttgtatttttttgtgtcaa

SEQ ID NO: 5986230 - DNA, 25 bp, Homo sapien
tacagcttttgttgttgtatttttt

SEQ ID NO: 5986231 - DNA, 25 bp, Homo sapien
atacacaagtttatggtttaataag

SEQ ID NO: 5986232 - DNA, 25 bp, Homo sapien
ggtgatgtttttcgttcgccaagtc

SEQ ID NO: 5986233 - DNA, 25 bp, Homo sapien
cgatattatgattgaatatcacgat

SEQ ID NO: 5986234 - DNA, 25 bp, Homo sapien
cactgttatgtttatcttatatgca

SEQ ID NO: 5986235 - DNA, 25 bp, Homo sapien
tattgcgcgcactgaaaagtgattt

SEQ ID NO: 5986236 - DNA, 25 bp, Homo sapien
tccttagccactgttatgtttatct

SEQ ID NO: 5986237 - DNA, 25 bp, Homo sapien
caaaccaaatcgcaagacaaatacc

SEQ ID NO: 5986238 - DNA, 25 bp, Homo sapien
acctgaatccttgggatccgttata

SEQ ID NO: 5986239 - DNA, 25 bp, Homo sapien
ttcataattggaggcgccggttgtg

SEQ ID NO: 5986240 - DNA, 25 bp, Homo sapien
taataagattttttacatgtttggt

SEQ ID NO: 5986241 - DNA, 25 bp, Homo sapien
ctagtttttatggtgctggcttcaa

SEQ ID NO: 5986242 - DNA, 25 bp, Homo sapien
accggctgcaagagaggtttatgat

SEQ ID NO: 5986243 - DNA, 25 bp, Homo sapien
gatttacaaaatggcacacgtacag

SEQ ID NO: 5986244 - DNA, 25 bp, Homo sapien
cccttccagccttggtatttaaaga

SEQ ID NO: 5986245 - DNA, 25 bp, Homo sapien
ccaagacaaaccaaatcgcaagaca

SEQ ID NO: 5986246 - DNA, 25 bp, Homo sapien
tttggacgatgattttcaagaagat

SEQ ID NO: 5986247 - DNA, 25 bp, Homo sapien
atcgcaagacaaatacccttccagc

SEQ ID NO: 5986248 - DNA, 25 bp, Homo sapien
actgaaaagtgatttcgcacgttac

SEQ ID NO: 5986249 - DNA, 25 bp, Homo sapien
tccagtccaggtacatgtgaaacga

SEQ ID NO: 5986250 - DNA, 25 bp, Homo sapien
gttttgtacaggtaactcaaggaac

SEQ ID NO: 5986251 - DNA, 25 bp, Homo sapien
atattatgattgaatatcacgatcg

SEQ ID NO: 5986252 - DNA, 25 bp, Homo sapien
aaatttcttgtactcatacgactac

SEQ ID NO: 5986253 - DNA, 25 bp, Homo sapien
tgaaggtaactatcgtgtagttggt

SEQ ID NO: 5986254 - DNA, 25 bp, Homo sapien
ttcgatattatgattgaatatcacg

SEQ ID NO: 5986255 - DNA, 25 bp, Homo sapien
ctccttagttgttgtcttattgtca

SEQ ID NO: 5986256 - DNA, 25 bp, Homo sapien
gattttcaagaagattcgggttgga

SEQ ID NO: 5986257 - DNA, 25 bp, Homo sapien
aatttttcaatgggccatactggaa

SEQ ID NO: 5986258 - DNA, 25 bp, Homo sapien
tagcgcctaccacttacagggaaaa

SEQ ID NO: 5986259 - DNA, 25 bp, Homo sapien
gctgcaagagaggtttatgatggca

SEQ ID NO: 5986260 - DNA, 25 bp, Homo sapien
tcttgggccaccaggtgggacaaat

SEQ ID NO: 5986261 - DNA, 25 bp, Homo sapien
agacaaatacccttccagccttggt

SEQ ID NO: 5986262 - DNA, 25 bp, Homo sapien
ggttggaaattgaatcatggtgatg

SEQ ID NO: 5986263 - DNA, 25 bp, Homo sapien
tggtatttaaagactataccagcta

SEQ ID NO: 5986264 - DNA, 25 bp, Homo sapien
ctactttgattgctggtatctttcc

SEQ ID NO: 5986265 - DNA, 25 bp, Homo sapien
taataattattgcgttgaacttttt

SEQ ID NO: 5986266 - DNA, 25 bp, Homo sapien
agtatcttcttcgctgcattgggtt

SEQ ID NO: 5986267 - DNA, 25 bp, Homo sapien
aagtgatttcgcacgttacaacgag

SEQ ID NO: 5986268 - DNA, 25 bp, Homo sapien
aagagtgtgaatccctgtgtaagac

SEQ ID NO: 5986269 - DNA, 25 bp, Homo sapien
aatgaattatcaacacaaagatgag

SEQ ID NO: 5986270 - DNA, 25 bp, Homo sapien
gttgtatttcatatacacaagttta

SEQ ID NO: 5986271 - DNA, 25 bp, Homo sapien
tactcctcagtcatttcattactct

SEQ ID NO: 5986272 - DNA, 25 bp, Homo sapien
tccatcgccgttgagttgtatttca

SEQ ID NO: 5986273 - DNA, 25 bp, Homo sapien
aaatcgcaagacaaatacccttcca

SEQ ID NO: 5986274 - DNA, 25 bp, Homo sapien
tttgtacaggtaactcaaggaaccg

SEQ ID NO: 5986275 - DNA, 25 bp, Homo sapien
tggtgctattctgctaataattatt

SEQ ID NO: 5986276 - DNA, 25 bp, Homo sapien
taagttgggtggattcacgactatt

SEQ ID NO: 5986277 - DNA, 25 bp, Homo sapien
tttttgttctcaatcccattatcat

SEQ ID NO: 5986278 - DNA, 25 bp, Homo sapien
ggttggttcaggagttcaattattt

SEQ ID NO: 5986279 - DNA, 25 bp, Homo sapien
agttgggtggattcacgactattgt

SEQ ID NO: 5986280 - DNA, 25 bp, Homo sapien
agtttttatggtgctggcttcaacc

SEQ ID NO: 5986281 - DNA, 25 bp, Homo sapien
aattcaatgaatcagcgacttcttg

SEQ ID NO: 5986282 - DNA, 25 bp, Homo sapien
tatgtttatcttatatgcattattc

SEQ ID NO: 5986283 - DNA, 25 bp, Homo sapien
cgttatatttggtgatcgaatttat

SEQ ID NO: 5986284 - DNA, 25 bp, Homo sapien
tatcttatatgcattattcgggttt

SEQ ID NO: 5986285 - DNA, 25 bp, Homo sapien
caacagtcaaagccttctatttacc

SEQ ID NO: 5986286 - DNA, 25 bp, Homo sapien
ctgttatgtttatcttatatgcatt

SEQ ID NO: 5986287 - DNA, 25 bp, Homo sapien
ctctttgttagaaaaatctactcat

SEQ ID NO: 5986288 - DNA, 25 bp, Homo sapien
tagccactgttatgtttatcttata

SEQ ID NO: 5986289 - DNA, 25 bp, Homo sapien
gccaccaggtgggacaaatatttac

SEQ ID NO: 5986290 - DNA, 25 bp, Homo sapien
attcaatggttttctttgataaatt

SEQ ID NO: 5986291 - DNA, 25 bp, Homo sapien
cttggttttgtacaggtaactcaag

SEQ ID NO: 5986292 - DNA, 25 bp, Homo sapien
taacggggtcaattggctttatcag

SEQ ID NO: 5986293 - DNA, 25 bp, Homo sapien
tctttccatttggctccatcgccgt

SEQ ID NO: 5986294 - DNA, 25 bp, Homo sapien
ggagaactggaagtggcaatggaga

SEQ ID NO: 5986295 - DNA, 25 bp, Homo sapien
tgaaaaagtcgaaaagcaacctgaa

SEQ ID NO: 5986296 - DNA, 25 bp, Homo sapien
gttgttgtatttttttgtgtcaaca

SEQ ID NO: 5986297 - DNA, 25 bp, Homo sapien
ttcaattatttttgatggtaacttg

SEQ ID NO: 5986298 - DNA, 25 bp, Homo sapien
aaagtcgaaaagcaacctgaatcct

SEQ ID NO: 5986299 - DNA, 25 bp, Homo sapien
tcgtggtgaaggtaactatcgtgta

SEQ ID NO: 5986300 - DNA, 25 bp, Homo sapien
tgttgtatttttttgtgtcaacagt

SEQ ID NO: 5986301 - DNA, 25 bp, Homo sapien
aaaaagtcgaaaagcaacctgaatc

SEQ ID NO: 5986302 - DNA, 25 bp, Homo sapien
tttatggtgctggcttcaaccttgg

SEQ ID NO: 5986303 - DNA, 25 bp, Homo sapien
acaagaaaaagagtgtgaatccctg

SEQ ID NO: 5986304 - DNA, 25 bp, Homo sapien
tgaaaagtgatttcgcacgttacaa

SEQ ID NO: 5986305 - DNA, 25 bp, Homo sapien
tacaaatttttcaatgggccatact

SEQ ID NO: 5986306 - DNA, 25 bp, Homo sapien
acatcccattgctcgttaatcattt

SEQ ID NO: 5986307 - DNA, 25 bp, Homo sapien
gcctaccacttacagggaaaatgac

SEQ ID NO: 5986308 - DNA, 25 bp, Homo sapien
ttgatgctagacgaaggaaatgata

SEQ ID NO: 5986309 - DNA, 25 bp, Homo sapien
tcacgatcgtggtgaaggtaactat

SEQ ID NO: 5986310 - DNA, 25 bp, Homo sapien
cgtatatgatccttctattcaatgg

SEQ ID NO: 5986311 - DNA, 25 bp, Homo sapien
actggcagcccattgatgctagacg

SEQ ID NO: 5986312 - DNA, 25 bp, Homo sapien
cgcaagacaaatacccttccagcct

SEQ ID NO: 5986313 - DNA, 25 bp, Homo sapien
gctccatcgccgttgagttgtattt

SEQ ID NO: 5986314 - DNA, 25 bp, Homo sapien
aggtacatgtgaaacgactggcagc

SEQ ID NO: 5986315 - DNA, 25 bp, Homo sapien
agcccattgatgctagacgaaggaa

SEQ ID NO: 5986316 - DNA, 25 bp, Homo sapien
gttaaattcaatgaatcagcgactt

SEQ ID NO: 5986317 - DNA, 25 bp, Homo sapien
taacatggtgaaaacttacgaattg

SEQ ID NO: 5986318 - DNA, 25 bp, Homo sapien
cgtacagcttttgttgttgtatttt

SEQ ID NO: 5986319 - DNA, 25 bp, Homo sapien
ccttatgcctggagaactggaagtg

SEQ ID NO: 5986320 - DNA, 25 bp, Homo sapien
caggtaactcaaggaaccgacattg

SEQ ID NO: 5986321 - DNA, 25 bp, Homo sapien
tcacttatcattccttatgcctgga

SEQ ID NO: 5986322 - DNA, 25 bp, Homo sapien
cagccttggtatttaaagactatac

SEQ ID NO: 5986323 - DNA, 25 bp, Homo sapien
caaatatttacacgtatatgatcct

SEQ ID NO: 5986324 - DNA, 25 bp, Homo sapien
ttaactttgacaagttcactcgtca

SEQ ID NO: 5986325 - DNA, 25 bp, Homo sapien
tatttttgatggtaacttgcagtat

SEQ ID NO: 5986326 - DNA, 25 bp, Homo sapien
gcttttgttgttgtatttttttgtg

SEQ ID NO: 5986327 - DNA, 25 bp, Homo sapien
cgggagatgatgctaaattcatcaa

SEQ ID NO: 5986328 - DNA, 25 bp, Homo sapien
tgaatatcacgatcgtggtgaaggt

SEQ ID NO: 5986329 - DNA, 25 bp, Homo sapien
tggttttctttgataaatttctcct

SEQ ID NO: 5986330 - DNA, 25 bp, Homo sapien
gtgtcaacagtcaaagccttctatt

SEQ ID NO: 5986331 - DNA, 25 bp, Homo sapien
tttttgatggtaacttgcagtatct

SEQ ID NO: 5986332 - DNA, 25 bp, Homo sapien
ttctagaggttccttagccactgtt

SEQ ID NO: 5986333 - DNA, 25 bp, Homo sapien
gttttctttgataaatttctcctta

SEQ ID NO: 5986334 - DNA, 25 bp, Homo sapien
tatgattgaatatcacgatcgtggt

SEQ ID NO: 5986335 - DNA, 25 bp, Homo sapien
aaagccttctatttaccaggtgtag

SEQ ID NO: 5986336 - DNA, 25 bp, Homo sapien
ggaaattgaatcatggtgatgtttt

SEQ ID NO: 5986337 - DNA, 25 bp, Homo sapien
caaatttttcaatgggccatactgg

SEQ ID NO: 5986338 - DNA, 25 bp, Homo sapien
tgtcactgggatgaacatccaacca

SEQ ID NO: 5986339 - DNA, 25 bp, Homo sapien
ctttgacaagttcactcgtcactat

SEQ ID NO: 5986340 - DNA, 25 bp, Homo sapien
atcaacacaaagatgaggacggtaa

SEQ ID NO: 5986341 - DNA, 25 bp, Homo sapien
aaatgacaacatcccattgctcgtt

SEQ ID NO: 5986342 - DNA, 25 bp, Homo sapien
tgttatccattcgctattgcgcgca

SEQ ID NO: 5986343 - DNA, 25 bp, Homo sapien
tacagggaaaatgacaacatcccat

SEQ ID NO: 5986344 - DNA, 25 bp, Homo sapien
ttcgttcgccaagtcaatcgctaac

SEQ ID NO: 5986345 - DNA, 25 bp, Homo sapien
tttgctggttcattgattgccagga

SEQ ID NO: 5986346 - DNA, 25 bp, Homo sapien
catcaatgaattatcaacacaaaga

SEQ ID NO: 5986347 - DNA, 25 bp, Homo sapien
tcgctattgcgcgcactgaaaagtg

SEQ ID NO: 5986348 - DNA, 25 bp, Homo sapien
aatgggccatactggaaggcaaact

SEQ ID NO: 5986349 - DNA, 25 bp, Homo sapien
atcatttaactccatcaatgaatta

SEQ ID NO: 5986350 - DNA, 25 bp, Homo sapien
tggtttaataagattttttacatgt

SEQ ID NO: 5986351 - DNA, 25 bp, Homo sapien
tgttatcgtcgaaccggtttccata

SEQ ID NO: 5986352 - DNA, 25 bp, Homo sapien
cctatcacctagttctagaggttcc

SEQ ID NO: 5986353 - DNA, 25 bp, Homo sapien
tatctttccatttggctccatcgcc

SEQ ID NO: 5986354 - DNA, 25 bp, Homo sapien
cataccagcaagtactctgtttttt

SEQ ID NO: 5986355 - DNA, 25 bp, Homo sapien
tttctttgataaatttctccttagt

SEQ ID NO: 5986356 - DNA, 25 bp, Homo sapien
tgatcgtaacatggtgaaaacttac

SEQ ID NO: 5986357 - DNA, 25 bp, Homo sapien
ttgatattgactccacttctagttc

SEQ ID NO: 5986358 - DNA, 25 bp, Homo sapien
acctagttctagaggttccttagcc

SEQ ID NO: 5986359 - DNA, 25 bp, Homo sapien
ttccgttaaattcaatgaatcagcg

SEQ ID NO: 5986360 - DNA, 25 bp, Homo sapien
gaagggtatttgtcttgcgatttgg

SEQ ID NO: 5986361 - DNA, 25 bp, Homo sapien
ttcaggttgcttttcgactttttca

SEQ ID NO: 5986362 - DNA, 25 bp, Homo sapien
caaacatgtaaaaaatcttattaaa

SEQ ID NO: 5986363 - DNA, 25 bp, Homo sapien
caactttaatggatgagtagatttt

SEQ ID NO: 5986364 - DNA, 25 bp, Homo sapien
aggaactagaagtggagtcaatatc

SEQ ID NO: 5986365 - DNA, 25 bp, Homo sapien
ataagccagttttggaagaagccat

SEQ ID NO: 5986366 - DNA, 25 bp, Homo sapien
catagaaaaaccataaaaaacagag

SEQ ID NO: 5986367 - DNA, 25 bp, Homo sapien
ttgtcccacctggtggcccaagaag

SEQ ID NO: 5986368 - DNA, 25 bp, Homo sapien
aacaaagagcatactgctgataaag

SEQ ID NO: 5986369 - DNA, 25 bp, Homo sapien
aggaaacccaatgcagcgaagaaga

SEQ ID NO: 5986370 - DNA, 25 bp, Homo sapien
gcaatcaaagtagctggtatagtct

SEQ ID NO: 5986371 - DNA, 25 bp, Homo sapien
cattgaatttaacggaataagtaaa

SEQ ID NO: 5986372 - DNA, 25 bp, Homo sapien
ctgattcattgaatttaacggaata

SEQ ID NO: 5986373 - DNA, 25 bp, Homo sapien
tttggtttgtcttggttggatgttc

SEQ ID NO: 5986374 - DNA, 25 bp, Homo sapien
atatttgtcccacctggtggcccaa

SEQ ID NO: 5986375 - DNA, 25 bp, Homo sapien
atcaatttattgatgaatttagcat

SEQ ID NO: 5986376 - DNA, 25 bp, Homo sapien
gataacaccaactacacgatagtta

SEQ ID NO: 5986377 - DNA, 25 bp, Homo sapien
ataatgcatataagataaacataac

SEQ ID NO: 5986378 - DNA, 25 bp, Homo sapien
gtatagtctttaaataccaaggctg

SEQ ID NO: 5986379 - DNA, 25 bp, Homo sapien
agataaacataacagtggctaagga

SEQ ID NO: 5986380 - DNA, 25 bp, Homo sapien
ttcaattggaatggtgaattataaa

SEQ ID NO: 5986381 - DNA, 25 bp, Homo sapien
gcagcgaagaagatactgcaagtta

SEQ ID NO: 5986382 - DNA, 25 bp, Homo sapien
taaataccaaggctggaagggtatt

SEQ ID NO: 5986383 - DNA, 25 bp, Homo sapien
tagtcaactttaatggatgagtaga

SEQ ID NO: 5986384 - DNA, 25 bp, Homo sapien
gagaaaaagaggaaaccaaacatgt

SEQ ID NO: 5986385 - DNA, 25 bp, Homo sapien
ataagagccgacaaacccgaataat

SEQ ID NO: 5986386 - DNA, 25 bp, Homo sapien
cgacaaacccgaataatgcatataa

SEQ ID NO: 5986387 - DNA, 25 bp, Homo sapien
atgggctgccagtcgtttcacatgt

SEQ ID NO: 5986388 - DNA, 25 bp, Homo sapien
tggttggatgttcatcccagtgaca

SEQ ID NO: 5986389 - DNA, 25 bp, Homo sapien
ttaacgagcaatgggatgttgtcat

SEQ ID NO: 5986390 - DNA, 25 bp, Homo sapien
cgttgtaacgtgcgaaatcactttt

SEQ ID NO: 5986391 - DNA, 25 bp, Homo sapien
ttaccatcaaaaataattgaactcc

SEQ ID NO: 5986392 - DNA, 25 bp, Homo sapien
atcaatgaaccagcaaatgataatg

SEQ ID NO: 5986393 - DNA, 25 bp, Homo sapien
cggtcttacacagggattcacactc

SEQ ID NO: 5986394 - DNA, 25 bp, Homo sapien
atagcgaatggataacaacagatga

SEQ ID NO: 5986395 - DNA, 25 bp, Homo sapien
tggaagaagccattttttatcaatt

SEQ ID NO: 5986396 - DNA, 25 bp, Homo sapien
tggaagggtatttgtcttgcgattt

SEQ ID NO: 5986397 - DNA, 25 bp, Homo sapien
gcttttcgactttttcaggctgaca

SEQ ID NO: 5986398 - DNA, 25 bp, Homo sapien
cacctggtggcccaagaagtcgctg

SEQ ID NO: 5986399 - DNA, 25 bp, Homo sapien
ataacagtggctaaggaacctctag

SEQ ID NO: 5986400 - DNA, 25 bp, Homo sapien
ccataaaaactagtcttagttctgc

SEQ ID NO: 5986401 - DNA, 25 bp, Homo sapien
attgaaaaatttgtagatgcccata

SEQ ID NO: 5986402 - DNA, 25 bp, Homo sapien
tcaaagaaaaccattgaatagaagg

SEQ ID NO: 5986403 - DNA, 25 bp, Homo sapien
attgatggagttaaatgattaacga

SEQ ID NO: 5986404 - DNA, 25 bp, Homo sapien
tctagaactaggtgataggaaaccc

SEQ ID NO: 5986405 - DNA, 25 bp, Homo sapien
atcaagtttgccttccagtatggcc

SEQ ID NO: 5986406 - DNA, 25 bp, Homo sapien
caatatcaagtttgccttccagtat

SEQ ID NO: 5986407 - DNA, 25 bp, Homo sapien
taaacttcattatcatttccttcgt

SEQ ID NO: 5986408 - DNA, 25 bp, Homo sapien
aaactagtcttagttctgccatcat

SEQ ID NO: 5986409 - DNA, 25 bp, Homo sapien
caagtttgccttccagtatggccca

SEQ ID NO: 5986410 - DNA, 25 bp, Homo sapien
atcttttcctggcaatcaatgaacc

SEQ ID NO: 5986411 - DNA, 25 bp, Homo sapien
cataaacctctcttgcagccggtaa

SEQ ID NO: 5986412 - DNA, 25 bp, Homo sapien
agcacaaccggcgcctccaattatg

SEQ ID NO: 5986413 - DNA, 25 bp, Homo sapien
atacaaagcacaaccggcgcctcca

SEQ ID NO: 5986414 - DNA, 25 bp, Homo sapien
taaggaatgataagtgatcaaaata

SEQ ID NO: 5986415 - DNA, 25 bp, Homo sapien
acaaaaccaaggttgaagccagcac

SEQ ID NO: 5986416 - DNA, 25 bp, Homo sapien
tggagtcaatatcaagtttgccttc

SEQ ID NO: 5986417 - DNA, 25 bp, Homo sapien
tcaccatgttacgatcattacgtgt

SEQ ID NO: 5986418 - DNA, 25 bp, Homo sapien
tgtatatgaaatacaactcaacggc

SEQ ID NO: 5986419 - DNA, 25 bp, Homo sapien
ttaccaaacagcagagtaatgaaat

SEQ ID NO: 5986420 - DNA, 25 bp, Homo sapien
tttggaagaagccattttttatcaa

SEQ ID NO: 5986421 - DNA, 25 bp, Homo sapien
cgtctagcatcaatgggctgccagt

SEQ ID NO: 5986422 - DNA, 25 bp, Homo sapien
aaaacatcaccatgattcaatttcc

SEQ ID NO: 5986423 - DNA, 25 bp, Homo sapien
cgatagttaccttcaccacgatcgt

SEQ ID NO: 5986424 - DNA, 25 bp, Homo sapien
tgaggagtatcccacgtataagaca

SEQ ID NO: 5986425 - DNA, 25 bp, Homo sapien
ccttccagtatggcccattgaaaaa

SEQ ID NO: 5986426 - DNA, 25 bp, Homo sapien
atatacgtgtaaatatttgtcccac

SEQ ID NO: 5986427 - DNA, 25 bp, Homo sapien
attcattgatggagttaaatgatta

SEQ ID NO: 5986428 - DNA, 25 bp, Homo sapien
tgcgaaatcacttttcagtgcgcgc

SEQ ID NO: 5986429 - DNA, 25 bp, Homo sapien
tgttcatcccagtgacatcttttcc

SEQ ID NO: 5986430 - DNA, 25 bp, Homo sapien
gctgacaaaaatggaatctattgta

SEQ ID NO: 5986431 - DNA, 25 bp, Homo sapien
atcttcttgaaaatcatcgtccaaa

SEQ ID NO: 5986432 - DNA, 25 bp, Homo sapien
ttatgaatcctctccattgccactt

SEQ ID NO: 5986433 - DNA, 25 bp, Homo sapien
tctgccatcataaacctctcttgca

SEQ ID NO: 5986434 - DNA, 25 bp, Homo sapien
atggaatctattgtaatagtagtcg

SEQ ID NO: 5986435 - DNA, 25 bp, Homo sapien
cagatgacaataagacaacaactaa

SEQ ID NO: 5986436 - DNA, 25 bp, Homo sapien
tcatttccttcgtctagcatcaatg

SEQ ID NO: 5986437 - DNA, 25 bp, Homo sapien
ttcgacgataacaccaactacacga

SEQ ID NO: 5986438 - DNA, 25 bp, Homo sapien
ctggtaaatagaaggctttgactgt

SEQ ID NO: 5986439 - DNA, 25 bp, Homo sapien
ataccagcaatcaaagtagctggta

SEQ ID NO: 5986440 - DNA, 25 bp, Homo sapien
attcgatcaccaaatataacggatc

SEQ ID NO: 5986441 - DNA, 25 bp, Homo sapien
cacgatagttaccttcaccacgatc

SEQ ID NO: 5986442 - DNA, 25 bp, Homo sapien
cttttcctggcaatcaatgaaccag

SEQ ID NO: 5986443 - DNA, 25 bp, Homo sapien
gttttcaccatgttacgatcattac

SEQ ID NO: 5986444 - DNA, 25 bp, Homo sapien
tggcccattgaaaaatttgtagatg

SEQ ID NO: 5986445 - DNA, 25 bp, Homo sapien
ctcatctttgtgttgataattcatt

SEQ ID NO: 5986446 - DNA, 25 bp, Homo sapien
gaggaaagagaaaaagaggaaacca

SEQ ID NO: 5986447 - DNA, 25 bp, Homo sapien
gacacaaaaaaatacaacaacaaaa

SEQ ID NO: 5986448 - DNA, 25 bp, Homo sapien
gaaatttatcaaagaaaaccattga

SEQ ID NO: 5986449 - DNA, 25 bp, Homo sapien
aatcataatatcgaaatggttggca

SEQ ID NO: 5986450 - DNA, 25 bp, Homo sapien
gaatcctctccattgccacttccag

SEQ ID NO: 5986451 - DNA, 25 bp, Homo sapien
gcgattgacttggcgaacgaaaaac

SEQ ID NO: 5986452 - DNA, 25 bp, Homo sapien
tgtgtatatgaaatacaactcaacg

SEQ ID NO: 5986453 - DNA, 25 bp, Homo sapien
caattccacatccttatcggtggtt

SEQ ID NO: 5986454 - DNA, 25 bp, Homo sapien
atgattaacgagcaatgggatgttg

SEQ ID NO: 5986455 - DNA, 25 bp, Homo sapien
aaacattaagaaaaagttcaacgca

SEQ ID NO: 5986456 - DNA, 25 bp, Homo sapien
tctcccggaattacggtcttacaca

SEQ ID NO: 5986457 - DNA, 25 bp, Homo sapien
ctcaatgtcggttccttgagttacc

SEQ ID NO: 5986458 - DNA, 25 bp, Homo sapien
gtcttagttctgccatcataaacct

SEQ ID NO: 5986459 - DNA, 25 bp, Homo sapien
gaaatggttggcaaagtaaggcaat

SEQ ID NO: 5986460 - DNA, 25 bp, Homo sapien
gagaacaaaaaccatagaaaaacca

SEQ ID NO: 5986461 - DNA, 25 bp, Homo sapien
gtataagagccgacaaacccgaata

SEQ ID NO: 5986462 - DNA, 25 bp, Homo sapien
tcttgaaaatcatcgtccaaattta

SEQ ID NO: 5986463 - DNA, 25 bp, Homo sapien
tagcctcaatgtcggttccttgagt

SEQ ID NO: 5986464 - DNA, 25 bp, Homo sapien
taatgggattgagaacaaaaaccat

SEQ ID NO: 5986465 - DNA, 25 bp, Homo sapien
tttttcttgtaacatattcaattgg

SEQ ID NO: 5986466 - DNA, 25 bp, Homo sapien
aaatcacttttcagtgcgcgcaata

SEQ ID NO: 5986467 - DNA, 25 bp, Homo sapien
agataccagcaatcaaagtagctgg

SEQ ID NO: 5986468 - DNA, 25 bp, Homo sapien
gaacaaaaaccatagaaaaaccata

SEQ ID NO: 5986469 - DNA, 25 bp, Homo sapien
ttaccgtcctcatctttgtgttgat

SEQ ID NO: 5986470 - DNA, 25 bp, Homo sapien
ccccttttggagtagcctcaatgtc

SEQ ID NO: 5986471 - DNA, 25 bp, Homo sapien
aaagctgtacgtgtgccattttgta

SEQ ID NO: 5986472 - DNA, 25 bp, Homo sapien
ggtaatccatcaataagccagtttt

SEQ ID NO: 5986473 - DNA, 25 bp, Homo sapien
attcaatcataatatcgaaatggtt

SEQ ID NO: 5986474 - DNA, 25 bp, Homo sapien
aaataattgaactcctgaaccaacc

SEQ ID NO: 5986475 - DNA, 25 bp, Homo sapien
aaagtagctggtatagtctttaaat

SEQ ID NO: 5986476 - DNA, 25 bp, Homo sapien
ctccaattatgaatcctctccattg

SEQ ID NO: 5986477 - DNA, 25 bp, Homo sapien
atattcaatcataatatcgaaatgg

SEQ ID NO: 5986478 - DNA, 25 bp, Homo sapien
aacttcattatcatttccttcgtct

SEQ ID NO: 5986479 - DNA, 25 bp, Homo sapien
attggaatggtgaattataaattcg

SEQ ID NO: 5986480 - DNA, 25 bp, Homo sapien
cagggattcacactctttttcttgt

SEQ ID NO: 5986481 - DNA, 25 bp, Homo sapien
gcctccaattatgaatcctctccat

SEQ ID NO: 5986482 - DNA, 25 bp, Homo sapien
tcctgaaccaaccaaaattgaaagg

SEQ ID NO: 5986483 - DNA, 25 bp, Homo sapien
ttgaaagggttagcgattgacttgg

SEQ ID NO: 5986484 - DNA, 25 bp, Homo sapien
tttaaataccaaggctggaagggta

SEQ ID NO: 5986485 - DNA, 25 bp, Homo sapien
aaatgattaacgagcaatgggatgt

SEQ ID NO: 5986486 - DNA, 25 bp, Homo sapien
tcctcatctttgtgttgataattca

SEQ ID NO: 5986487 - DNA, 25 bp, Homo sapien
gcgatttggtttgtcttggttggat

SEQ ID NO: 5986488 - DNA, 25 bp, Homo sapien
ttccctgtaagtggtaggcgctaca

SEQ ID NO: 5986489 - DNA, 25 bp, Homo sapien
tgattcaatttccaacccgaatctt

SEQ ID NO: 5986490 - DNA, 25 bp, Homo sapien
tcattgatggagttaaatgattaac

SEQ ID NO: 5986491 - DNA, 25 bp, Homo sapien
gctggaagggtatttgtcttgcgat

SEQ ID NO: 5986492 - DNA, 25 bp, Homo sapien
tggaaaccggttcgacgataacacc

SEQ ID NO: 5986493 - DNA, 25 bp, Homo sapien
aatttggtgaataaaatagaatgaa

SEQ ID NO: 5986494 - DNA, 25 bp, Homo sapien
ctcaacggcgatggagccaaatgga

SEQ ID NO: 5986495 - DNA, 25 bp, Homo sapien
acccgaataatgcatataagataaa

SEQ ID NO: 5986496 - DNA, 25 bp, Homo sapien
taagacaatagtcgtgaatccaccc

SEQ ID NO: 5986497 - DNA, 25 bp, Homo sapien
attcgtaagttttcaccatgttacg

SEQ ID NO: 5986498 - DNA, 25 bp, Homo sapien
agcaccaggaactagaagtggagtc

SEQ ID NO: 5986499 - DNA, 25 bp, Homo sapien
atggatgagtagatttttctaacaa

SEQ ID NO: 5986500 - DNA, 25 bp, Homo sapien
gaataatgcatataagataaacata

SEQ ID NO: 5986501 - DNA, 25 bp, Homo sapien
acggcgatggagccaaatggaaaga

SEQ ID NO: 5986502 - DNA, 25 bp, Homo sapien
gggttagcgattgacttggcgaacg

SEQ ID NO: 5986503 - DNA, 25 bp, Homo sapien
cttcttgaaaatcatcgtccaaatt

SEQ ID NO: 5986504 - DNA, 25 bp, Homo sapien
ttacgatcattacgtgtttccaatt

SEQ ID NO: 5986505 - DNA, 25 bp, Homo sapien
cgaagaagatactgcaagttaccat

SEQ ID NO: 5986506 - DNA, 25 bp, Homo sapien
cttggcgaacgaaaaacatcaccat

SEQ ID NO: 5986507 - DNA, 25 bp, Homo sapien
tttctgccccttttggagtagcctc

SEQ ID NO: 5986508 - DNA, 25 bp, Homo sapien
gaagaagccattttttatcaattta

SEQ ID NO: 5986509 - DNA, 25 bp, Homo sapien
gttggatgttcatcccagtgacatc

SEQ ID NO: 5986510 - DNA, 25 bp, Homo sapien
tggactggaacgttttatggaaacc

SEQ ID NO: 5986511 - DNA, 25 bp, Homo sapien
aacagagtacttgctggtatgacac

SEQ ID NO: 5986512 - DNA, 25 bp, Homo sapien
gccagaaacgttattaccgtcctca

SEQ ID NO: 5986513 - DNA, 25 bp, Homo sapien
ggtgaattataaattcgatcaccaa

SEQ ID NO: 5986514 - DNA, 25 bp, Homo sapien
atgcccatagatgtataagagccga

SEQ ID NO: 5986515 - DNA, 25 bp, Homo sapien
ccggtaatccatcaataagccagtt

SEQ ID NO: 5986516 - DNA, 25 bp, Homo sapien
taagaaaaagttcaacgcaataatt

SEQ ID NO: 5986517 - DNA, 25 bp, Homo sapien
gatcaccaaatataacggatcccaa

SEQ ID NO: 5986518 - DNA, 25 bp, Homo sapien
gcagccggtaatccatcaataagcc

SEQ ID NO: 5986519 - DNA, 25 bp, Homo sapien
ggtgataggaaacccaatgcagcga

SEQ ID NO: 5986520 - DNA, 25 bp, Homo sapien
ttcattgaatttaacggaataagta

SEQ ID NO: 5986521 - DNA, 25 bp, Homo sapien
aatagaaggctttgactgttgacac

SEQ ID NO: 5986522 - DNA, 25 bp, Homo sapien
agccagcaccataaaaactagtctt

SEQ ID NO: 5986523 - DNA, 25 bp, Homo sapien
taaatagaaggctttgactgttgac

SEQ ID NO: 5986524 - DNA, 25 bp, Homo sapien
gaaagggttagcgattgacttggcg

SEQ ID NO: 5986525 - DNA, 25 bp, Homo sapien
aaaaatttgtagatgcccatagatg

SEQ ID NO: 5986526 - DNA, 25 bp, Homo sapien
tcgccagaaacgttattaccgtcct

SEQ ID NO: 5986527 - DNA, 25 bp, Homo sapien
ggaacctctagaactaggtgatagg

SEQ ID NO: 5986528 - DNA, 25 bp, Homo sapien
cccaaggattcaggttgcttttcga

SEQ ID NO: 5986529 - DNA, 25 bp, Homo sapien
caatgggctgccagtcgtttcacat

SEQ ID NO: 5986530 - DNA, 25 bp, Homo sapien
tttgtcttgcgatttggtttgtctt

SEQ ID NO: 5986531 - DNA, 25 bp, Homo sapien
attacgtgtttccaattccacatcc

SEQ ID NO: 5986532 - DNA, 25 bp, Homo sapien
caaaaaaatacaacaacaaaagctg

SEQ ID NO: 5986533 - DNA, 25 bp, Homo sapien
attcaatttccaacccgaatcttct

SEQ ID NO: 5986534 - DNA, 25 bp, Homo sapien
gtcttggttggatgttcatcccagt

SEQ ID NO: 5986535 - DNA, 25 bp, Homo sapien
tataagacaatagtcgtgaatccac

SEQ ID NO: 5986536 - DNA, 25 bp, Homo sapien
tagaaggctttgactgttgacacaa

SEQ ID NO: 5986537 - DNA, 25 bp, Homo sapien
tcaatcataatatcgaaatggttgg

SEQ ID NO: 5986538 - DNA, 25 bp, Homo sapien
cgcgcaatagcgaatggataacaac

SEQ ID NO: 5986539 - DNA, 25 bp, Homo sapien
ataggaaacccaatgcagcgaagaa

SEQ ID NO: 5986540 - DNA, 25 bp, Homo sapien
aaaaaatacaacaacaaaagctgta

SEQ ID NO: 5986541 - DNA, 25 bp, Homo sapien
cttcaccacgatcgtgatattcaat

SEQ ID NO: 5986542 - DNA, 25 bp, Homo sapien
taattcattgatggagttaaatgat

SEQ ID NO: 5986543 - DNA, 25 bp, Homo sapien
aataagacaacaactaaggagaaat

SEQ ID NO: 5986544 - DNA, 25 bp, Homo sapien
aatttagcatcatctcccggaatta

SEQ ID NO: 5986545 - DNA, 25 bp, Homo sapien
caataagccagttttggaagaagcc

SEQ ID NO: 5986546 - DNA, 25 bp, Homo sapien
gttccttgagttacctgtacaaaac

SEQ ID NO: 5986547 - DNA, 25 bp, Homo sapien
atgagtacaagaaattttctttatc

SEQ ID NO: 5986548 - DNA, 25 bp, Homo sapien
caagaagtcgctgattcattgaatt

SEQ ID NO: 5986549 - DNA, 25 bp, Homo sapien
cccacgtataagacaatagtcgtga

SEQ ID NO: 5986550 - DNA, 25 bp, Homo sapien
tcataatatcgaaatggttggcaaa

SEQ ID NO: 5986551 - DNA, 25 bp, Homo sapien
taatggatgagtagatttttctaac

SEQ ID NO: 5986552 - DNA, 25 bp, Homo sapien
gaatcttcttgaaaatcatcgtcca

SEQ ID NO: 5986553 - DNA, 25 bp, Homo sapien
aaagataccagcaatcaaagtagct

SEQ ID NO: 5986554 - DNA, 25 bp, Homo sapien
gtcccacctggtggcccaagaagtc

SEQ ID NO: 5986555 - DNA, 25 bp, Homo sapien
atgacaccagaagaatgaacaaaca

SEQ ID NO: 5986556 - DNA, 25 bp, Homo sapien
tattgtaatagtagtcgtatgagta

SEQ ID NO: 5986557 - DNA, 25 bp, Homo sapien
aagaaattttctttatcgccagaaa

SEQ ID NO: 5986558 - DNA, 25 bp, Homo sapien
aaatggaatctattgtaatagtagt

SEQ ID NO: 5986559 - DNA, 25 bp, Homo sapien
aactcgttgtaacgtgcgaaatcac

SEQ ID NO: 5986560 - DNA, 25 bp, Homo sapien
gaacgaaaaacatcaccatgattca

SEQ ID NO: 5986561 - DNA, 25 bp, Homo sapien
gttttggaagaagccattttttatc

SEQ ID NO: 5986562 - DNA, 25 bp, Homo sapien
gcatcaatgggctgccagtcgtttc

SEQ ID NO: 5986563 - DNA, 25 bp, Homo sapien
gattcattgaatttaacggaataag

SEQ ID NO: 5986564 - DNA, 25 bp, Homo sapien
aagagcatactgctgataaagccaa

SEQ ID NO: 5986565 - DNA, 25 bp, Homo sapien
cacagggattcacactctttttctt

SEQ ID NO: 5986566 - DNA, 25 bp, Homo sapien
tcccggaattacggtcttacacagg

SEQ ID NO: 5986567 - DNA, 25 bp, Homo sapien
ttccttcgtctagcatcaatgggct

SEQ ID NO: 5986568 - DNA, 25 bp, Homo sapien
tagaagtggagtcaatatcaagttt

SEQ ID NO: 5986569 - DNA, 25 bp, Homo sapien
ctcgttgtaacgtgcgaaatcactt

SEQ ID NO: 5986570 - DNA, 25 bp, Homo sapien
cgacgataacaccaactacacgata

SEQ ID NO: 5986571 - DNA, 25 bp, Homo sapien
atacaactcaacggcgatggagcca

SEQ ID NO: 5986572 - DNA, 25 bp, Homo sapien
gattgacttggcgaacgaaaaacat

SEQ ID NO: 5986573 - DNA, 25 bp, Homo sapien
tcttgcagccggtaatccatcaata

SEQ ID NO: 5986574 - DNA, 25 bp, Homo sapien
gaaaatcatcgtccaaatttaactc

SEQ ID NO: 5986575 - DNA, 25 bp, Homo sapien
gtcggttccttgagttacctgtaca

SEQ ID NO: 5986576 - DNA, 25 bp, Homo sapien
ggcgctacacctggtaaatagaagg

SEQ ID NO: 5986577 - DNA, 25 bp, Homo sapien
gagtacaagaaattttctttatcgc

SEQ ID NO: 5986578 - DNA, 25 bp, Homo sapien
tgaattataaattcgatcaccaaat

SEQ ID NO: 5986579 - DNA, 25 bp, Homo sapien
ccagtgacatcttttcctggcaatc

SEQ ID NO: 5986580 - DNA, 25 bp, Homo sapien
aatcaaagtagctggtatagtcttt

SEQ ID NO: 5986581 - DNA, 25 bp, Homo sapien
aaatcatcgtccaaatttaactcgt

SEQ ID NO: 5986582 - DNA, 25 bp, Homo sapien
tcttgtaacatattcaattggaatg

SEQ ID NO: 5986583 - DNA, 25 bp, Homo sapien
gttattaccgtcctcatctttgtgt

SEQ ID NO: 5986584 - DNA, 25 bp, Homo sapien
atttttctaacaaagagcatactgc

SEQ ID NO: 5986585 - DNA, 25 bp, Homo sapien
agtcgtttcacatgtacctggactg

SEQ ID NO: 5986586 - DNA, 25 bp, Homo sapien
cagttctccaggcataaggaatgat

SEQ ID NO: 5986587 - DNA, 25 bp, Homo sapien
tcgtccaaatttaactcgttgtaac

SEQ ID NO: 5986588 - DNA, 25 bp, Homo sapien
gtcaactttaatggatgagtagatt

SEQ ID NO: 5986589 - DNA, 25 bp, Homo sapien
atgggatgttgtcattttccctgta

SEQ ID NO: 5986590 - DNA, 25 bp, Homo sapien
catataagataaacataacagtggc

SEQ ID NO: 5986591 - DNA, 25 bp, Homo sapien
tgatggagttaaatgattaacgagc

SEQ ID NO: 5986592 - DNA, 25 bp, Homo sapien
gaggaaaccaaacatgtaaaaaatc

SEQ ID NO: 5986593 - DNA, 25 bp, Homo sapien
acaccaactacacgatagttacctt

SEQ ID NO: 5986594 - DNA, 25 bp, Homo sapien
tccattgccacttccagttctccag

SEQ ID NO: 5986595 - DNA, 25 bp, Homo sapien
gaaattttctttatcgccagaaacg

SEQ ID NO: 5986596 - DNA, 25 bp, Homo sapien
cttgtgtatatgaaatacaactcaa

SEQ ID NO: 5986597 - DNA, 25 bp, Homo sapien
ctgtacgtgtgccattttgtaaatc

SEQ ID NO: 5986598 - DNA, 25 bp, Homo sapien
caggttgcttttcgactttttcagg

SEQ ID NO: 5986599 - DNA, 25 bp, Homo sapien
gaaatgactgaggagtatcccacgt

SEQ ID NO: 5986600 - DNA, 25 bp, Homo sapien
gaaggatcatatacgtgtaaatatt

SEQ ID NO: 5986601 - DNA, 25 bp, Homo sapien
actgctgataaagccaattgacccc

SEQ ID NO: 5986602 - DNA, 25 bp, Homo sapien
accttcaccacgatcgtgatattca

SEQ ID NO: 5986603 - DNA, 25 bp, Homo sapien
aagagccgacaaacccgaataatgc

SEQ ID NO: 5986604 - DNA, 25 bp, Homo sapien
cgtcctcatctttgtgttgataatt

SEQ ID NO: 5986605 - DNA, 25 bp, Homo sapien
gtacttgctggtatgacaccagaag

SEQ ID NO: 5986606 - DNA, 25 bp, Homo sapien
taggtgataggaaacccaatgcagc

SEQ ID NO: 5986607 - DNA, 25 bp, Homo sapien
tttaatggatgagtagatttttcta

SEQ ID NO: 5986608 - DNA, 25 bp, Homo sapien
atcaatgggctgccagtcgtttcac

SEQ ID NO: 5986609 - DNA, 25 bp, Homo sapien
cgtgaatccacccaacttaaatttg

SEQ ID NO: 5986610 - DNA, 25 bp, Homo sapien
cataaacttgtgtatatgaaataca

SEQ ID NO: 5986611 - DNA, 25 bp, Homo sapien
ggcataaggaatgataagtgatcaa

SEQ ID NO: 5986612 - DNA, 25 bp, Homo sapien
gtcaatatcaagtttgccttccagt

SEQ ID NO: 5986613 - DNA, 25 bp, Homo sapien
gcatcatctcccggaattacggtct

SEQ ID NO: 5986614 - DNA, 25 bp, Homo sapien
tacaacaacaaaagctgtacgtgtg

SEQ ID NO: 5986615 - DNA, 25 bp, Homo sapien
ttgcttttcgactttttcaggctga

SEQ ID NO: 5986616 - DNA, 25 bp, Homo sapien
agggtatttgtcttgcgatttggtt

SEQ ID NO: 5986617 - DNA, 25 bp, Homo sapien
gcaaatgataatgggattgagaaca

SEQ ID NO: 5986618 - DNA, 25 bp, Homo sapien
tgaatagaaggatcatatacgtgta

SEQ ID NO: 5986619 - DNA, 25 bp, Homo sapien
tccaacccgaatcttcttgaaaatc

SEQ ID NO: 5986620 - DNA, 25 bp, Homo sapien
acacctggtaaatagaaggctttga

SEQ ID NO: 5986621 - DNA, 25 bp, Homo sapien
accaaggctggaagggtatttgtct

SEQ ID NO: 5986622 - DNA, 25 bp, Homo sapien
tattgatgaatttagcatcatctcc

SEQ ID NO: 5986623 - DNA, 25 bp, Homo sapien
gaatagcaccaggaactagaagtgg

SEQ ID NO: 5986624 - DNA, 25 bp, Homo sapien
gattcaggttgcttttcgacttttt

SEQ ID NO: 5986625 - DNA, 25 bp, Homo sapien
caatagcgaatggataacaacagat

SEQ ID NO: 5986626 - DNA, 25 bp, Homo sapien
ctggcaatcaatgaaccagcaaatg

SEQ ID NO: 5986627 - DNA, 25 bp, Homo sapien
ttaactcgttgtaacgtgcgaaatc

SEQ ID NO: 5986628 - DNA, 25 bp, Homo sapien
ccaattatgaatcctctccattgcc

SEQ ID NO: 5986629 - DNA, 25 bp, Homo sapien
acgataacaccaactacacgatagt

SEQ ID NO: 5986630 - DNA, 25 bp, Homo sapien
cacgatcgtgatattcaatcataat

SEQ ID NO: 5986631 - DNA, 25 bp, Homo sapien
atactgctgataaagccaattgacc

SEQ ID NO: 5986632 - DNA, 25 bp, Homo sapien
aaaaatggaatctattgtaatagta

SEQ ID NO: 5986633 - DNA, 25 bp, Homo sapien
agccggtaatccatcaataagccag

SEQ ID NO: 5986634 - DNA, 25 bp, Homo sapien
aatgcatataagataaacataacag

SEQ ID NO: 5986635 - DNA, 25 bp, Homo sapien
taattattagcagaatagcaccagg

SEQ ID NO: 5986636 - DNA, 25 bp, Homo sapien
gaataaacacatacaaagcacaacc

SEQ ID NO: 5986637 - DNA, 25 bp, Homo sapien
acacatacaaagcacaaccggcgcc

SEQ ID NO: 5986638 - DNA, 25 bp, Homo sapien
ccagaagaatgaacaaacattaaga

SEQ ID NO: 5986639 - DNA, 25 bp, Homo sapien
cttcattatcatttccttcgtctag

SEQ ID NO: 5986640 - DNA, 25 bp, Homo sapien
caactaaggagaaatttatcaaaga

SEQ ID NO: 5986641 - DNA, 25 bp, Homo sapien
taacaccaactacacgatagttacc

SEQ ID NO: 5986642 - DNA, 25 bp, Homo sapien
aaacccgaataatgcatataagata

SEQ ID NO: 5986643 - DNA, 25 bp, Homo sapien
tgactgaggagtatcccacgtataa

SEQ ID NO: 5986644 - DNA, 25 bp, Homo sapien
tatcgccagaaacgttattaccgtc

SEQ ID NO: 5986645 - DNA, 25 bp, Homo sapien
tggtgaataaaatagaatgaataaa

SEQ ID NO: 5986646 - DNA, 25 bp, Homo sapien
tgcatataagataaacataacagtg

SEQ ID NO: 5986647 - DNA, 25 bp, Homo sapien
tttcaggctgacaaaaatggaatct

SEQ ID NO: 5986648 - DNA, 25 bp, Homo sapien
tagcatcatctcccggaattacggt

SEQ ID NO: 5986649 - DNA, 25 bp, Homo sapien
gcccatagatgtataagagccgaca

SEQ ID NO: 5986650 - DNA, 25 bp, Homo sapien
ccagtcgtttcacatgtacctggac

SEQ ID NO: 5986651 - DNA, 25 bp, Homo sapien
tagaaaaaccataaaaaacagagta

SEQ ID NO: 5986652 - DNA, 25 bp, Homo sapien
aattgaaagggttagcgattgactt

SEQ ID NO: 5986653 - DNA, 25 bp, Homo sapien
gcatactgctgataaagccaattga

SEQ ID NO: 5986654 - DNA, 25 bp, Homo sapien
gagtatcccacgtataagacaatag

SEQ ID NO: 5986655 - DNA, 25 bp, Homo sapien
aatttatcaaagaaaaccattgaat

SEQ ID NO: 5986656 - DNA, 25 bp, Homo sapien
cctctccattgccacttccagttct

SEQ ID NO: 5986657 - DNA, 25 bp, Homo sapien
caagttaccatcaaaaataattgaa

SEQ ID NO: 5986658 - DNA, 25 bp, Homo sapien
tatggaaaccggttcgacgataaca

SEQ ID NO: 5986659 - DNA, 25 bp, Homo sapien
cccgttaccaaacagcagagtaatg

SEQ ID NO: 5986660 - DNA, 25 bp, Homo sapien
atcccaaggattcaggttgcttttc

SEQ ID NO: 5986661 - DNA, 25 bp, Homo sapien
gacaccagaagaatgaacaaacatt

SEQ ID NO: 5986662 - DNA, 25 bp, Homo sapien
tccttatcggtggtttctgcccctt

SEQ ID NO: 5986663 - DNA, 25 bp, Homo sapien
ttgctggtatgacaccagaagaatg

SEQ ID NO: 5986664 - DNA, 25 bp, Homo sapien
aggagaaatttatcaaagaaaacca

SEQ ID NO: 5986665 - DNA, 25 bp, Homo sapien
aggagtatcccacgtataagacaat

SEQ ID NO: 5986666 - DNA, 25 bp, Homo sapien
acgtgtaaatatttgtcccacctgg

SEQ ID NO: 5986667 - DNA, 25 bp, Homo sapien
aaaaactagtcttagttctgccatc

SEQ ID NO: 5986668 - DNA, 25 bp, Homo sapien
cgagcaatgggatgttgtcattttc

SEQ ID NO: 5986669 - DNA, 25 bp, Homo sapien
tgccttccagtatggcccattgaaa

SEQ ID NO: 5986670 - DNA, 25 bp, Homo sapien
aaaatagaatgaataaacacataca

SEQ ID NO: 5986671 - DNA, 25 bp, Homo sapien
aaaattgaaagggttagcgattgac

SEQ ID NO: 5986672 - DNA, 25 bp, Homo sapien
ttgtcttggttggatgttcatccca

SEQ ID NO: 5986673 - DNA, 25 bp, Homo sapien
accgtcctcatctttgtgttgataa

SEQ ID NO: 5986674 - DNA, 25 bp, Homo sapien
atttaactcgttgtaacgtgcgaaa

SEQ ID NO: 5986675 - DNA, 25 bp, Homo sapien
agtgcgcgcaatagcgaatggataa

SEQ ID NO: 5986676 - DNA, 25 bp, Homo sapien
actagaagtggagtcaatatcaagt

SEQ ID NO: 5986677 - DNA, 25 bp, Homo sapien
atcttattaaaccataaacttgtgt

SEQ ID NO: 5986678 - DNA, 25 bp, Homo sapien
ggttcgacgataacaccaactacac

SEQ ID NO: 5986679 - DNA, 25 bp, Homo sapien
atttgtagatgcccatagatgtata

SEQ ID NO: 5986680 - DNA, 25 bp, Homo sapien
gtgaataaaatagaatgaataaaca

SEQ ID NO: 5986681 - DNA, 25 bp, Homo sapien
caaatataacggatcccaaggattc

SEQ ID NO: 5986682 - DNA, 25 bp, Homo sapien
ataaaaactagtcttagttctgcca

SEQ ID NO: 5986683 - DNA, 25 bp, Homo sapien
agcaatgggatgttgtcattttccc

SEQ ID NO: 5986684 - DNA, 25 bp, Homo sapien
agaagtcgctgattcattgaattta

SEQ ID NO: 5986685 - DNA, 25 bp, Homo sapien
ccttttggagtagcctcaatgtcgg

SEQ ID NO: 5986686 - DNA, 25 bp, Homo sapien
cgtgatattcaatcataatatcgaa

SEQ ID NO: 5986687 - DNA, 25 bp, Homo sapien
aacctctcttgcagccggtaatcca

SEQ ID NO: 5986688 - DNA, 25 bp, Homo sapien
caaagttaataggaggaaagagaaa

SEQ ID NO: 5986689 - DNA, 25 bp, Homo sapien
attacggtcttacacagggattcac

SEQ ID NO: 5986690 - DNA, 25 bp, Homo sapien
tttccaattccacatccttatcggt

SEQ ID NO: 5986691 - DNA, 25 bp, Homo sapien
actaggtgataggaaacccaatgca

SEQ ID NO: 5986692 - DNA, 25 bp, Homo sapien
ttgtcattttccctgtaagtggtag

SEQ ID NO: 5986693 - DNA, 25 bp, Homo sapien
gctttgactgttgacacaaaaaaat

SEQ ID NO: 5986694 - DNA, 25 bp, Homo sapien
acttgctggtatgacaccagaagaa

SEQ ID NO: 5986695 - DNA, 25 bp, Homo sapien
ccaaatggaaagataccagcaatca

SEQ ID NO: 5986696 - DNA, 25 bp, Homo sapien
atcctctccattgccacttccagtt

SEQ ID NO: 5986697 - DNA, 25 bp, Homo sapien
tgttgtcattttccctgtaagtggt

SEQ ID NO: 5986698 - DNA, 25 bp, Homo sapien
tttatggaaaccggttcgacgataa

SEQ ID NO: 5986699 - DNA, 25 bp, Homo sapien
gaagtggagtcaatatcaagtttgc

SEQ ID NO: 5986700 - DNA, 25 bp, Homo sapien
agtagcctcaatgtcggttccttga

SEQ ID NO: 5986701 - DNA, 25 bp, Homo sapien
acgcaataattattagcagaatagc

SEQ ID NO: 5986702 - DNA, 25 bp, Homo sapien
gtgtaaatatttgtcccacctggtg

SEQ ID NO: 5986703 - DNA, 25 bp, Homo sapien
agcagaatagcaccaggaactagaa

SEQ ID NO: 5986704 - DNA, 25 bp, Homo sapien
ttcaacgcaataattattagcagaa

SEQ ID NO: 5986705 - DNA, 25 bp, Homo sapien
gtacgtgtgccattttgtaaatcat

SEQ ID NO: 5986706 - DNA, 25 bp, Homo sapien
gaactaggtgataggaaacccaatg

SEQ ID NO: 5986707 - DNA, 25 bp, Homo sapien
ccttcgtctagcatcaatgggctgc

SEQ ID NO: 5986708 - DNA, 25 bp, Homo sapien
aaagttcaacgcaataattattagc

SEQ ID NO: 5986709 - DNA, 25 bp, Homo sapien
cacttttcagtgcgcgcaatagcga

SEQ ID NO: 5986710 - DNA, 25 bp, Homo sapien
cgtgtttccaattccacatccttat

SEQ ID NO: 5986711 - DNA, 25 bp, Homo sapien
tggatgttcatcccagtgacatctt

SEQ ID NO: 5986712 - DNA, 25 bp, Homo sapien
ttgccacttccagttctccaggcat

SEQ ID NO: 5986713 - DNA, 25 bp, Homo sapien
gcgaacgaaaaacatcaccatgatt

SEQ ID NO: 5986714 - DNA, 25 bp, Homo sapien
gattcacactctttttcttgtaaca

SEQ ID NO: 5986715 - DNA, 25 bp, Homo sapien
tccttgagttacctgtacaaaacca

SEQ ID NO: 5986716 - DNA, 25 bp, Homo sapien
cgtgcgaaatcacttttcagtgcgc

SEQ ID NO: 5986717 - DNA, 25 bp, Homo sapien
aagaatgaacaaacattaagaaaaa

SEQ ID NO: 5986718 - DNA, 25 bp, Homo sapien
actcctgaaccaaccaaaattgaaa

SEQ ID NO: 5986719 - DNA, 25 bp, Homo sapien
ggaataagtaaaataaacttcatta

SEQ ID NO: 5986720 - DNA, 25 bp, Homo sapien
agatgcccatagatgtataagagcc

SEQ ID NO: 5986721 - DNA, 25 bp, Homo sapien
ggagccaaatggaaagataccagca

SEQ ID NO: 5986722 - DNA, 25 bp, Homo sapien
acaacagatgacaataagacaacaa

SEQ ID NO: 5986723 - DNA, 25 bp, Homo sapien
gagcatactgctgataaagccaatt

SEQ ID NO: 5986724 - DNA, 25 bp, Homo sapien
gtagtcgtatgagtacaagaaattt

SEQ ID NO: 5986725 - DNA, 25 bp, Homo sapien
taacggatcccaaggattcaggttg

SEQ ID NO: 5986726 - DNA, 25 bp, Homo sapien
ttgcagccggtaatccatcaataag

SEQ ID NO: 5986727 - DNA, 25 bp, Homo sapien
tcgtatgagtacaagaaattttctt

SEQ ID NO: 5986728 - DNA, 25 bp, Homo sapien
atagcaccaggaactagaagtggag

SEQ ID NO: 5986729 - DNA, 25 bp, Homo sapien
tttatcgccagaaacgttattaccg

SEQ ID NO: 5986730 - DNA, 25 bp, Homo sapien
tcaaagtagctggtatagtctttaa

SEQ ID NO: 5986731 - DNA, 25 bp, Homo sapien
tataagataaacataacagtggcta

SEQ ID NO: 5986732 - DNA, 25 bp, Homo sapien
agtctttaaataccaaggctggaag

SEQ ID NO: 5986733 - DNA, 25 bp, Homo sapien
ttttccctgtaagtggtaggcgcta

SEQ ID NO: 5986734 - DNA, 25 bp, Homo sapien
caaaagctgtacgtgtgccattttg

SEQ ID NO: 5986735 - DNA, 25 bp, Homo sapien
aacaaaagctgtacgtgtgccattt

SEQ ID NO: 5986736 - DNA, 25 bp, Homo sapien
catgtacctggactggaacgtttta

SEQ ID NO: 5986737 - DNA, 25 bp, Homo sapien
gggatgttgtcattttccctgtaag

SEQ ID NO: 5986738 - DNA, 25 bp, Homo sapien
gttggcaaagtaaggcaattcgtaa

SEQ ID NO: 5986739 - DNA, 25 bp, Homo sapien
tgacaataagacaacaactaaggag

SEQ ID NO: 5986740 - DNA, 25 bp, Homo sapien
gtaacatattcaattggaatggtga

SEQ ID NO: 5986741 - DNA, 25 bp, Homo sapien
tagtcgtgaatccacccaacttaaa

SEQ ID NO: 5986742 - DNA, 25 bp, Homo sapien
gtttgtcttggttggatgttcatcc

SEQ ID NO: 5986743 - DNA, 25 bp, Homo sapien
tggttggcaaagtaaggcaattcgt

SEQ ID NO: 5986744 - DNA, 25 bp, Homo sapien
atttgtcccacctggtggcccaaga

SEQ ID NO: 5986745 - DNA, 25 bp, Homo sapien
cctctagaactaggtgataggaaac

SEQ ID NO: 5986746 - DNA, 25 bp, Homo sapien
tacggtcttacacagggattcacac

SEQ ID NO: 5986747 - DNA, 25 bp, Homo sapien
aatataacggatcccaaggattcag

SEQ ID NO: 5986748 - DNA, 25 bp, Homo sapien
actgcaagttaccatcaaaaataat

SEQ ID NO: 5986749 - DNA, 25 bp, Homo sapien
ggatcccaaggattcaggttgcttt

SEQ ID NO: 5986750 - DNA, 25 bp, Homo sapien
ttgaagccagcaccataaaaactag

SEQ ID NO: 5986751 - DNA, 25 bp, Homo sapien
ccgaataatgcatataagataaaca

SEQ ID NO: 5986752 - DNA, 25 bp, Homo sapien
agagtaatgaaatgactgaggagta

SEQ ID NO: 5986753 - DNA, 25 bp, Homo sapien
ttaataggaggaaagagaaaaagag

SEQ ID NO: 5986754 - DNA, 25 bp, Homo sapien
ggtaggcgctacacctggtaaatag

SEQ ID NO: 5986755 - DNA, 25 bp, Homo sapien
agatttttctaacaaagagcatact

SEQ ID NO: 5986756 - DNA, 25 bp, Homo sapien
caaacagcagagtaatgaaatgact

SEQ ID NO: 5986757 - DNA, 25 bp, Homo sapien
tcaccacgatcgtgatattcaatca

SEQ ID NO: 5986758 - DNA, 25 bp, Homo sapien
actgttgacacaaaaaaatacaaca

SEQ ID NO: 5986759 - DNA, 25 bp, Homo sapien
cagagtacttgctggtatgacacca

SEQ ID NO: 5986760 - DNA, 25 bp, Homo sapien
aacagcagagtaatgaaatgactga

SEQ ID NO: 5986761 - DNA, 25 bp, Homo sapien
tcaaaaataattgaactcctgaacc

SEQ ID NO: 5986762 - DNA, 25 bp, Homo sapien
agtatggcccattgaaaaatttgta

SEQ ID NO: 5986763 - DNA, 25 bp, Homo sapien
gttctgccatcataaacctctcttg

SEQ ID NO: 5986764 - DNA, 25 bp, Homo sapien
ttgtaacatattcaattggaatggt

SEQ ID NO: 5986765 - DNA, 25 bp, Homo sapien
tcttgcgatttggtttgtcttggtt

SEQ ID NO: 5986766 - DNA, 25 bp, Homo sapien
ggcaattcgtaagttttcaccatgt

SEQ ID NO: 5986767 - DNA, 25 bp, Homo sapien
ataccaaggctggaagggtatttgt

SEQ ID NO: 5986768 - DNA, 25 bp, Homo sapien
acgaaaaacatcaccatgattcaat

SEQ ID NO: 5986769 - DNA, 25 bp, Homo sapien
ccggttcgacgataacaccaactac

SEQ ID NO: 5986770 - DNA, 25 bp, Homo sapien
catcgtccaaatttaactcgttgta

SEQ ID NO: 5986771 - DNA, 25 bp, Homo sapien
gatgttcatcccagtgacatctttt

SEQ ID NO: 5986772 - DNA, 25 bp, Homo sapien
aatgactgaggagtatcccacgtat

SEQ ID NO: 5986773 - DNA, 25 bp, Homo sapien
tatatgaaatacaactcaacggcga

SEQ ID NO: 5986774 - DNA, 25 bp, Homo sapien
cagcagagtaatgaaatgactgagg

SEQ ID NO: 5986775 - DNA, 25 bp, Homo sapien
aacgtgcgaaatcacttttcagtgc

SEQ ID NO: 5986776 - DNA, 25 bp, Homo sapien
tttgtgttgataattcattgatgga

SEQ ID NO: 5986777 - DNA, 25 bp, Homo sapien
acgatcattacgtgtttccaattcc

SEQ ID NO: 5986778 - DNA, 25 bp, Homo sapien
taatgaaatgactgaggagtatccc

SEQ ID NO: 5986779 - DNA, 25 bp, Homo sapien
atggagttaaatgattaacgagcaa

SEQ ID NO: 5986780 - DNA, 25 bp, Homo sapien
actgaggagtatcccacgtataaga

SEQ ID NO: 5986781 - DNA, 25 bp, Homo sapien
aaatttaactcgttgtaacgtgcga

SEQ ID NO: 5986782 - DNA, 25 bp, Homo sapien
ggcaatcaatgaaccagcaaatgat

SEQ ID NO: 5986783 - DNA, 25 bp, Homo sapien
gtatgacaccagaagaatgaacaaa

SEQ ID NO: 5986784 - DNA, 25 bp, Homo sapien
gatcattacgtgtttccaattccac

SEQ ID NO: 5986785 - DNA, 25 bp, Homo sapien
cctggactggaacgttttatggaaa

SEQ ID NO: 5986786 - DNA, 25 bp, Homo sapien
tttttcaggctgacaaaaatggaat

SEQ ID NO: 5986787 - DNA, 25 bp, Homo sapien
cggaattacggtcttacacagggat

SEQ ID NO: 5986788 - DNA, 25 bp, Homo sapien
accaaacatgtaaaaaatcttatta

SEQ ID NO: 5986789 - DNA, 25 bp, Homo sapien
aaggttgaagccagcaccataaaaa

SEQ ID NO: 5986790 - DNA, 25 bp, Homo sapien
ataattgaactcctgaaccaaccaa

SEQ ID NO: 5986791 - DNA, 25 bp, Homo sapien
caccaggaactagaagtggagtcaa

SEQ ID NO: 5986792 - DNA, 25 bp, Homo sapien
caacccgaatcttcttgaaaatcat

SEQ ID NO: 5986793 - DNA, 25 bp, Homo sapien
accatgattcaatttccaacccgaa

SEQ ID NO: 5986794 - DNA, 25 bp, Homo sapien
agtgacgagtgaacttgtcaaagtt

SEQ ID NO: 5986795 - DNA, 25 bp, Homo sapien
atccatcaataagccagttttggaa

SEQ ID NO: 5986796 - DNA, 25 bp, Homo sapien
ctgataaagccaattgaccccgtta

SEQ ID NO: 5986797 - DNA, 25 bp, Homo sapien
tcaggctgacaaaaatggaatctat

SEQ ID NO: 5986798 - DNA, 25 bp, Homo sapien
tatcatttccttcgtctagcatcaa

SEQ ID NO: 5986799 - DNA, 25 bp, Homo sapien
gagtgaacttgtcaaagttaatagg

SEQ ID NO: 5986800 - DNA, 25 bp, Homo sapien
aaccattgaatagaaggatcatata

SEQ ID NO: 5986801 - DNA, 25 bp, Homo sapien
tctattgtaatagtagtcgtatgag

SEQ ID NO: 5986802 - DNA, 25 bp, Homo sapien
aagtcgctgattcattgaatttaac

SEQ ID NO: 5986803 - DNA, 25 bp, Homo sapien
aaacacatacaaagcacaaccggcg

SEQ ID NO: 5986804 - DNA, 25 bp, Homo sapien
tatcggtggtttctgccccttttgg

SEQ ID NO: 5986805 - DNA, 25 bp, Homo sapien
gctgccagtcgtttcacatgtacct

SEQ ID NO: 5986806 - DNA, 25 bp, Homo sapien
tgcgcgcaatagcgaatggataaca

SEQ ID NO: 5986807 - DNA, 25 bp, Homo sapien
tagaactaggtgataggaaacccaa

SEQ ID NO: 5986808 - DNA, 25 bp, Homo sapien
aaaaataattgaactcctgaaccaa

SEQ ID NO: 5986809 - DNA, 25 bp, Homo sapien
gataatgggattgagaacaaaaacc

SEQ ID NO: 5986810 - DNA, 25 bp, Homo sapien
gaaaccggttcgacgataacaccaa

SEQ ID NO: 5986811 - DNA, 25 bp, Homo sapien
ataaacataacagtggctaaggaac

SEQ ID NO: 5986812 - DNA, 25 bp, Homo sapien
atgataagtgatcaaaatagtgacg

SEQ ID NO: 5986813 - DNA, 25 bp, Homo sapien
aatagtcgtgaatccacccaactta

SEQ ID NO: 5986814 - DNA, 25 bp, Homo sapien
tcgtaagttttcaccatgttacgat

SEQ ID NO: 5986815 - DNA, 25 bp, Homo sapien
aattatgaatcctctccattgccac

SEQ ID NO: 5986816 - DNA, 25 bp, Homo sapien
aaaaagttcaacgcaataattatta

SEQ ID NO: 5986817 - DNA, 25 bp, Homo sapien
aagccagttttggaagaagccattt

SEQ ID NO: 5986818 - DNA, 25 bp, Homo sapien
agatgtataagagccgacaaacccg

SEQ ID NO: 5986819 - DNA, 25 bp, Homo sapien
cccaagaagtcgctgattcattgaa

SEQ ID NO: 5986820 - DNA, 25 bp, Homo sapien
ggaaagataccagcaatcaaagtag

SEQ ID NO: 5986821 - DNA, 25 bp, Homo sapien
aacatcaccatgattcaatttccaa

SEQ ID NO: 5986822 - DNA, 25 bp, Homo sapien
tgaaatacaactcaacggcgatgga

SEQ ID NO: 5986823 - DNA, 25 bp, Homo sapien
ccgaatcttcttgaaaatcatcgtc

SEQ ID NO: 5986824 - DNA, 25 bp, Homo sapien
ttccagtatggcccattgaaaaatt

SEQ ID NO: 5986825 - DNA, 25 bp, Homo sapien
agtttgccttccagtatggcccatt

SEQ ID NO: 5986826 - DNA, 25 bp, Homo sapien
cggcgcctccaattatgaatcctct

SEQ ID NO: 5986827 - DNA, 25 bp, Homo sapien
cacttccagttctccaggcataagg

SEQ ID NO: 5986828 - DNA, 25 bp, Homo sapien
tagttctgccatcataaacctctct

SEQ ID NO: 5986829 - DNA, 25 bp, Homo sapien
agaaaaccattgaatagaaggatca

SEQ ID NO: 5986830 - DNA, 25 bp, Homo sapien
gaaaaagaggaaaccaaacatgtaa

SEQ ID NO: 5986831 - DNA, 25 bp, Homo sapien
actacacgatagttaccttcaccac

SEQ ID NO: 5986832 - DNA, 25 bp, Homo sapien
tttcagtgcgcgcaatagcgaatgg

SEQ ID NO: 5986833 - DNA, 25 bp, Homo sapien
gaatgaacaaacattaagaaaaagt

SEQ ID NO: 5986834 - DNA, 25 bp, Homo sapien
cattttccctgtaagtggtaggcgc

SEQ ID NO: 5986835 - DNA, 25 bp, Homo sapien
aatttccaacccgaatcttcttgaa

SEQ ID NO: 5986836 - DNA, 25 bp, Homo sapien
tgtcttgcgatttggtttgtcttgg

SEQ ID NO: 5986837 - DNA, 25 bp, Homo sapien
tatcgaaatggttggcaaagtaagg

SEQ ID NO: 5986838 - DNA, 25 bp, Homo sapien
tctccaggcataaggaatgataagt

SEQ ID NO: 5986839 - DNA, 25 bp, Homo sapien
tcaccaaatataacggatcccaagg

SEQ ID NO: 5986840 - DNA, 25 bp, Homo sapien
aggaatgataagtgatcaaaatagt

SEQ ID NO: 5986841 - DNA, 25 bp, Homo sapien
gaaacccaatgcagcgaagaagata

SEQ ID NO: 5986842 - DNA, 25 bp, Homo sapien
cagcaaatgataatgggattgagaa

SEQ ID NO: 5986843 - DNA, 25 bp, Homo sapien
taagtgatcaaaatagtgacgagtg

SEQ ID NO: 5986844 - DNA, 25 bp, Homo sapien
tttctttatcgccagaaacgttatt

SEQ ID NO: 5986845 - DNA, 25 bp, Homo sapien
accatgttacgatcattacgtgttt

SEQ ID NO: 5986846 - DNA, 25 bp, Homo sapien
aatatcgaaatggttggcaaagtaa

SEQ ID NO: 5986847 - DNA, 25 bp, Homo sapien
actttaatggatgagtagatttttc

SEQ ID NO: 5986848 - DNA, 25 bp, Homo sapien
aataattattagcagaatagcacca

SEQ ID NO: 5986849 - DNA, 25 bp, Homo sapien
ttgcgatttggtttgtcttggttgg

SEQ ID NO: 5986850 - DNA, 25 bp, Homo sapien
aataggaggaaagagaaaaagagga

SEQ ID NO: 5986851 - DNA, 25 bp, Homo sapien
tttcaccatgttacgatcattacgt

SEQ ID NO: 5986852 - DNA, 25 bp, Homo sapien
tacacgatagttaccttcaccacga

SEQ ID NO: 5986853 - DNA, 25 bp, Homo sapien
cagaatagcaccaggaactagaagt

SEQ ID NO: 5986854 - DNA, 25 bp, Homo sapien
cacaaaaaaatacaacaacaaaagc

SEQ ID NO: 5986855 - DNA, 25 bp, Homo sapien
gcaataattattagcagaatagcac

SEQ ID NO: 5986856 - DNA, 25 bp, Homo sapien
ataaacacatacaaagcacaaccgg

SEQ ID NO: 5986857 - DNA, 25 bp, Homo sapien
ttttctaacaaagagcatactgctg

SEQ ID NO: 5986858 - DNA, 25 bp, Homo sapien
aagtaaggcaattcgtaagttttca

SEQ ID NO: 5986859 - DNA, 25 bp, Homo sapien
ggcgatggagccaaatggaaagata

SEQ ID NO: 5986860 - DNA, 25 bp, Homo sapien
tgaaaaatttgtagatgcccataga

SEQ ID NO: 5986861 - DNA, 25 bp, Homo sapien
atactgcaagttaccatcaaaaata

SEQ ID NO: 5986862 - DNA, 25 bp, Homo sapien
ggaatctattgtaatagtagtcgta

SEQ ID NO: 5986863 - DNA, 25 bp, Homo sapien
aaaccataaacttgtgtatatgaaa

SEQ ID NO: 5986864 - DNA, 25 bp, Homo sapien
acaatagtcgtgaatccacccaact

SEQ ID NO: 5986865 - DNA, 25 bp, Homo sapien
tctttatcgccagaaacgttattac

SEQ ID NO: 5986866 - DNA, 25 bp, Homo sapien
atcatctcccggaattacggtctta

SEQ ID NO: 5986867 - DNA, 25 bp, Homo sapien
aacatattcaattggaatggtgaat

SEQ ID NO: 5986868 - DNA, 25 bp, Homo sapien
ataaaaaacagagtacttgctggta

SEQ ID NO: 5986869 - DNA, 25 bp, Homo sapien
gtggtaggcgctacacctggtaaat

SEQ ID NO: 5986870 - DNA, 25 bp, Homo sapien
atagtgacgagtgaacttgtcaaag

SEQ ID NO: 5986871 - DNA, 25 bp, Homo sapien
ttaaatgattaacgagcaatgggat

SEQ ID NO: 5986872 - DNA, 25 bp, Homo sapien
accacgatcgtgatattcaatcata

SEQ ID NO: 5986873 - DNA, 25 bp, Homo sapien
aaatttgtagatgcccatagatgta

SEQ ID NO: 5986874 - DNA, 25 bp, Homo sapien
accagcaaatgataatgggattgag

SEQ ID NO: 5986875 - DNA, 25 bp, Homo sapien
tataacggatcccaaggattcaggt

SEQ ID NO: 5986876 - DNA, 25 bp, Homo sapien
aggattcaggttgcttttcgacttt

SEQ ID NO: 5986877 - DNA, 25 bp, Homo sapien
tattcaattggaatggtgaattata

SEQ ID NO: 5986878 - DNA, 25 bp, Homo sapien
aacaactaaggagaaatttatcaaa

SEQ ID NO: 5986879 - DNA, 25 bp, Homo sapien
aggctgacaaaaatggaatctattg

SEQ ID NO: 5986880 - DNA, 25 bp, Homo sapien
ggctaaggaacctctagaactaggt

SEQ ID NO: 5986881 - DNA, 25 bp, Homo sapien
agaagccattttttatcaatttatt

SEQ ID NO: 5986882 - DNA, 25 bp, Homo sapien
atgaacaaacattaagaaaaagttc

SEQ ID NO: 5986883 - DNA, 25 bp, Homo sapien
tccacccaacttaaatttggtgaat

SEQ ID NO: 5986884 - DNA, 25 bp, Homo sapien
tttattgatgaatttagcatcatct

SEQ ID NO: 5986885 - DNA, 25 bp, Homo sapien
aggatcatatacgtgtaaatatttg

SEQ ID NO: 5986886 - DNA, 25 bp, Homo sapien
cctggtggcccaagaagtcgctgat

SEQ ID NO: 5986887 - DNA, 25 bp, Homo sapien
tccaattccacatccttatcggtgg

SEQ ID NO: 5986888 - DNA, 25 bp, Homo sapien
ttcgactttttcaggctgacaaaaa

SEQ ID NO: 5986889 - DNA, 25 bp, Homo sapien
ttgaactcctgaaccaaccaaaatt

SEQ ID NO: 5986890 - DNA, 25 bp, Homo sapien
atcaataagccagttttggaagaag

SEQ ID NO: 5986891 - DNA, 25 bp, Homo sapien
gatgacaataagacaacaactaagg

SEQ ID NO: 5986892 - DNA, 25 bp, Homo sapien
caatgtcggttccttgagttacctg

SEQ ID NO: 5986893 - DNA, 25 bp, Homo sapien
tcgtttcacatgtacctggactgga

SEQ ID NO: 5986894 - DNA, 25 bp, Homo sapien
atgataatgggattgagaacaaaaa

SEQ ID NO: 5986895 - DNA, 25 bp, Homo sapien
acaaacccgaataatgcatataaga

SEQ ID NO: 5986896 - DNA, 25 bp, Homo sapien
catattcaattggaatggtgaatta

SEQ ID NO: 5986897 - DNA, 25 bp, Homo sapien
gggctgccagtcgtttcacatgtac

SEQ ID NO: 5986898 - DNA, 25 bp, Homo sapien
ttaccttcaccacgatcgtgatatt

SEQ ID NO: 5986899 - DNA, 25 bp, Homo sapien
tctgccccttttggagtagcctcaa

SEQ ID NO: 5986900 - DNA, 25 bp, Homo sapien
ataaattcgatcaccaaatataacg

SEQ ID NO: 5986901 - DNA, 25 bp, Homo sapien
aatagaatgaataaacacatacaaa

SEQ ID NO: 5986902 - DNA, 25 bp, Homo sapien
gaataaaatagaatgaataaacaca

SEQ ID NO: 5986903 - DNA, 25 bp, Homo sapien
acctggtaaatagaaggctttgact

SEQ ID NO: 5986904 - DNA, 25 bp, Homo sapien
atgaaccagcaaatgataatgggat

SEQ ID NO: 5986905 - DNA, 25 bp, Homo sapien
tccacatccttatcggtggtttctg

SEQ ID NO: 5986906 - DNA, 25 bp, Homo sapien
gcctcaatgtcggttccttgagtta

SEQ ID NO: 5986907 - DNA, 25 bp, Homo sapien
aagggttagcgattgacttggcgaa

SEQ ID NO: 5986908 - DNA, 25 bp, Homo sapien
atgaatcctctccattgccacttcc

SEQ ID NO: 5986909 - DNA, 25 bp, Homo sapien
tagcatcaatgggctgccagtcgtt

SEQ ID NO: 5986910 - DNA, 25 bp, Homo sapien
tgaatttagcatcatctcccggaat

SEQ ID NO: 5986911 - DNA, 25 bp, Homo sapien
tggtttgtcttggttggatgttcat

SEQ ID NO: 5986912 - DNA, 25 bp, Homo sapien
caactacacgatagttaccttcacc

SEQ ID NO: 5986913 - DNA, 25 bp, Homo sapien
taaacttgtgtatatgaaatacaac

SEQ ID NO: 5986914 - DNA, 25 bp, Homo sapien
gtaaatatttgtcccacctggtggc

SEQ ID NO: 5986915 - DNA, 25 bp, Homo sapien
ccaggaactagaagtggagtcaata

SEQ ID NO: 5986916 - DNA, 25 bp, Homo sapien
cacgtataagacaatagtcgtgaat

SEQ ID NO: 5986917 - DNA, 25 bp, Homo sapien
ttttcgactttttcaggctgacaaa

SEQ ID NO: 5986918 - DNA, 25 bp, Homo sapien
tcccagtgacatcttttcctggcaa

SEQ ID NO: 5986919 - DNA, 25 bp, Homo sapien
agttaaatgattaacgagcaatggg

SEQ ID NO: 5986920 - DNA, 25 bp, Homo sapien
gctggtatgacaccagaagaatgaa

SEQ ID NO: 5986921 - DNA, 25 bp, Homo sapien
gcccattgaaaaatttgtagatgcc

SEQ ID NO: 5986922 - DNA, 25 bp, Homo sapien
ttcacatgtacctggactggaacgt

SEQ ID NO: 5986923 - DNA, 25 bp, Homo sapien
accggcgcctccaattatgaatcct

SEQ ID NO: 5986924 - DNA, 25 bp, Homo sapien
acgttattaccgtcctcatctttgt

SEQ ID NO: 5986925 - DNA, 25 bp, Homo sapien
aaacataacagtggctaaggaacct

SEQ ID NO: 5986926 - DNA, 25 bp, Homo sapien
gccagttttggaagaagccattttt

SEQ ID NO: 5986927 - DNA, 25 bp, Homo sapien
tgtttccaattccacatccttatcg

SEQ ID NO: 5986928 - DNA, 25 bp, Homo sapien
aactcaacggcgatggagccaaatg

SEQ ID NO: 5986929 - DNA, 25 bp, Homo sapien
gtaaggcaattcgtaagttttcacc

SEQ ID NO: 5986930 - DNA, 25 bp, Homo sapien
ataaaatagaatgaataaacacata

SEQ ID NO: 5986931 - DNA, 25 bp, Homo sapien
cgctacacctggtaaatagaaggct

SEQ ID NO: 5986932 - DNA, 25 bp, Homo sapien
gaatgataagtgatcaaaatagtga

SEQ ID NO: 5986933 - DNA, 25 bp, Homo sapien
tcaccatgattcaatttccaacccg

SEQ ID NO: 5986934 - DNA, 25 bp, Homo sapien
gaactagaagtggagtcaatatcaa

SEQ ID NO: 5986935 - DNA, 25 bp, Homo sapien
cagcaatcaaagtagctggtatagt

SEQ ID NO: 5986936 - DNA, 25 bp, Homo sapien
tcattacgtgtttccaattccacat

SEQ ID NO: 5986937 - DNA, 25 bp, Homo sapien
cataaggaatgataagtgatcaaaa

SEQ ID NO: 5986938 - DNA, 25 bp, Homo sapien
ccaaaattgaaagggttagcgattg

SEQ ID NO: 5986939 - DNA, 25 bp, Homo sapien
aggctttgactgttgacacaaaaaa

SEQ ID NO: 5986940 - DNA, 25 bp, Homo sapien
catgttacgatcattacgtgtttcc

SEQ ID NO: 5986941 - DNA, 25 bp, Homo sapien
acaataagacaacaactaaggagaa

SEQ ID NO: 5986942 - DNA, 25 bp, Homo sapien
aatctattgtaatagtagtcgtatg

SEQ ID NO: 5986943 - DNA, 25 bp, Homo sapien
cttagttctgccatcataaacctct

SEQ ID NO: 5986944 - DNA, 25 bp, Homo sapien
tcaatttccaacccgaatcttcttg

SEQ ID NO: 5986945 - DNA, 25 bp, Homo sapien
cagaaacgttattaccgtcctcatc

SEQ ID NO: 5986946 - DNA, 25 bp, Homo sapien
gagtagatttttctaacaaagagca

SEQ ID NO: 5986947 - DNA, 25 bp, Homo sapien
ttctaacaaagagcatactgctgat

SEQ ID NO: 5986948 - DNA, 25 bp, Homo sapien
tgttgacacaaaaaaatacaacaac

SEQ ID NO: 5986949 - DNA, 25 bp, Homo sapien
tagctggtatagtctttaaatacca

SEQ ID NO: 5986950 - DNA, 25 bp, Homo sapien
agatactgcaagttaccatcaaaaa

SEQ ID NO: 5986951 - DNA, 25 bp, Homo sapien
ttgacttggcgaacgaaaaacatca

SEQ ID NO: 5986952 - DNA, 25 bp, Homo sapien
caccataaaaactagtcttagttct

SEQ ID NO: 5986953 - DNA, 25 bp, Homo sapien
atagatgtataagagccgacaaacc

SEQ ID NO: 5986954 - DNA, 25 bp, Homo sapien
tatggcccattgaaaaatttgtaga

SEQ ID NO: 5986955 - DNA, 25 bp, Homo sapien
cttgagttacctgtacaaaaccaag

SEQ ID NO: 5986956 - DNA, 25 bp, Homo sapien
cgtataagacaatagtcgtgaatcc

SEQ ID NO: 5986957 - DNA, 25 bp, Homo sapien
ttacctgtacaaaaccaaggttgaa

SEQ ID NO: 5986958 - DNA, 25 bp, Homo sapien
gcagagtaatgaaatgactgaggag

SEQ ID NO: 5986959 - DNA, 25 bp, Homo sapien
aagtggtaggcgctacacctggtaa

SEQ ID NO: 5986960 - DNA, 25 bp, Homo sapien
caaccaaaattgaaagggttagcga

SEQ ID NO: 5986961 - DNA, 25 bp, Homo sapien
tacctggactggaacgttttatgga

SEQ ID NO: 5986962 - DNA, 25 bp, Homo sapien
gaatgaataaacacatacaaagcac

SEQ ID NO: 5986963 - DNA, 25 bp, Homo sapien
aaccaaggttgaagccagcaccata

SEQ ID NO: 5986964 - DNA, 25 bp, Homo sapien
atttccttcgtctagcatcaatggg

SEQ ID NO: 5986965 - DNA, 25 bp, Homo sapien
ccatcataaacctctcttgcagccg

SEQ ID NO: 5986966 - DNA, 25 bp, Homo sapien
gattgagaacaaaaaccatagaaaa

SEQ ID NO: 5986967 - DNA, 25 bp, Homo sapien
ttgataattcattgatggagttaaa

SEQ ID NO: 5986968 - DNA, 25 bp, Homo sapien
acaacaaaagctgtacgtgtgccat

SEQ ID NO: 5986969 - DNA, 25 bp, Homo sapien
agtgatcaaaatagtgacgagtgaa

SEQ ID NO: 5986970 - DNA, 25 bp, Homo sapien
gcgcctccaattatgaatcctctcc

SEQ ID NO: 5986971 - DNA, 25 bp, Homo sapien
tttcttgtaacatattcaattggaa

SEQ ID NO: 5986972 - DNA, 25 bp, Homo sapien
tatttgtcttgcgatttggtttgtc

SEQ ID NO: 5986973 - DNA, 25 bp, Homo sapien
ccattgaaaaatttgtagatgccca

SEQ ID NO: 5986974 - DNA, 25 bp, Homo sapien
ttggagtagcctcaatgtcggttcc

SEQ ID NO: 5986975 - DNA, 25 bp, Homo sapien
caaggctggaagggtatttgtcttg

SEQ ID NO: 5986976 - DNA, 25 bp, Homo sapien
tggtatgacaccagaagaatgaaca

SEQ ID NO: 5986977 - DNA, 25 bp, Homo sapien
tatgaaatacaactcaacggcgatg

SEQ ID NO: 5986978 - DNA, 25 bp, Homo sapien
tgcaagttaccatcaaaaataattg

SEQ ID NO: 5986979 - DNA, 25 bp, Homo sapien
gataattcattgatggagttaaatg

SEQ ID NO: 5986980 - DNA, 25 bp, Homo sapien
ggagttaaatgattaacgagcaatg

SEQ ID NO: 5986981 - DNA, 25 bp, Homo sapien
ttcatcccagtgacatcttttcctg

SEQ ID NO: 5986982 - DNA, 25 bp, Homo sapien
cctctcttgcagccggtaatccatc

SEQ ID NO: 5986983 - DNA, 25 bp, Homo sapien
ttgtaatagtagtcgtatgagtaca

SEQ ID NO: 5986984 - DNA, 25 bp, Homo sapien
tgactgttgacacaaaaaaatacaa

SEQ ID NO: 5986985 - DNA, 25 bp, Homo sapien
tattagcagaatagcaccaggaact

SEQ ID NO: 5986986 - DNA, 25 bp, Homo sapien
cacatgtacctggactggaacgttt

SEQ ID NO: 5986987 - DNA, 25 bp, Homo sapien
caaagagcatactgctgataaagcc

SEQ ID NO: 5986988 - DNA, 25 bp, Homo sapien
ttgtagatgcccatagatgtataag

SEQ ID NO: 5986989 - DNA, 25 bp, Homo sapien
tcatatacgtgtaaatatttgtccc

SEQ ID NO: 5986990 - DNA, 25 bp, Homo sapien
atcataaacctctcttgcagccggt

SEQ ID NO: 5986991 - DNA, 25 bp, Homo sapien
tttgactgttgacacaaaaaaatac

SEQ ID NO: 5986992 - DNA, 25 bp, Homo sapien
gaagccagcaccataaaaactagtc

SEQ ID NO: 5986993 - DNA, 25 bp, Homo sapien
atcatcgtccaaatttaactcgttg

SEQ ID NO: 5986994 - DNA, 25 bp, Homo sapien
ccaaatttaactcgttgtaacgtgc

SEQ ID NO: 5986995 - DNA, 25 bp, Homo sapien
gccaattgaccccgttaccaaacag

SEQ ID NO: 5986996 - DNA, 25 bp, Homo sapien
accatcaaaaataattgaactcctg

SEQ ID NO: 5986997 - DNA, 25 bp, Homo sapien
aaaaccaaggttgaagccagcacca

SEQ ID NO: 5986998 - DNA, 25 bp, Homo sapien
acataacagtggctaaggaacctct

SEQ ID NO: 5986999 - DNA, 25 bp, Homo sapien
tgttgataattcattgatggagtta

SEQ ID NO: 5987000 - DNA, 25 bp, Homo sapien
gaacttgtcaaagttaataggagga

SEQ ID NO: 5987001 - DNA, 25 bp, Homo sapien
accaactacacgatagttaccttca

SEQ ID NO: 5987002 - DNA, 25 bp, Homo sapien
gtcttacacagggattcacactctt

SEQ ID NO: 5987003 - DNA, 25 bp, Homo sapien
gtagatgcccatagatgtataagag

SEQ ID NO: 5987004 - DNA, 25 bp, Homo sapien
ttcgtctagcatcaatgggctgcca

SEQ ID NO: 5987005 - DNA, 25 bp, Homo sapien
gatgttgtcattttccctgtaagtg

SEQ ID NO: 5987006 - DNA, 25 bp, Homo sapien
acaactcaacggcgatggagccaaa

SEQ ID NO: 5987007 - DNA, 25 bp, Homo sapien
agaaaaagttcaacgcaataattat

SEQ ID NO: 5987008 - DNA, 25 bp, Homo sapien
acaaaaatggaatctattgtaatag

SEQ ID NO: 5987009 - DNA, 25 bp, Homo sapien
actagtcttagttctgccatcataa

SEQ ID NO: 5987010 - DNA, 25 bp, Homo sapien
gtggcccaagaagtcgctgattcat

SEQ ID NO: 5987011 - DNA, 25 bp, Homo sapien
agtcgtatgagtacaagaaattttc

SEQ ID NO: 5987012 - DNA, 25 bp, Homo sapien
tttcctggcaatcaatgaaccagca

SEQ ID NO: 5987013 - DNA, 25 bp, Homo sapien
gctggtatagtctttaaataccaag

SEQ ID NO: 5987014 - DNA, 25 bp, Homo sapien
taaatttggtgaataaaatagaatg

SEQ ID NO: 5987015 - DNA, 25 bp, Homo sapien
tctcttgcagccggtaatccatcaa

SEQ ID NO: 5987016 - DNA, 25 bp, Homo sapien
gatcatatacgtgtaaatatttgtc

SEQ ID NO: 5987017 - DNA, 25 bp, Homo sapien
aaatggaaagataccagcaatcaaa

SEQ ID NO: 5987018 - DNA, 25 bp, Homo sapien
gaactcctgaaccaaccaaaattga

SEQ ID NO: 5987019 - DNA, 25 bp, Homo sapien
gttagcgattgacttggcgaacgaa

SEQ ID NO: 5987020 - DNA, 25 bp, Homo sapien
acttgtcaaagttaataggaggaaa

SEQ ID NO: 5987021 - DNA, 25 bp, Homo sapien
atatcaagtttgccttccagtatgg

SEQ ID NO: 5987022 - DNA, 25 bp, Homo sapien
taaagccaattgaccccgttaccaa

SEQ ID NO: 5987023 - DNA, 25 bp, Homo sapien
caatgaaccagcaaatgataatggg

SEQ ID NO: 5987024 - DNA, 25 bp, Homo sapien
aaggcaattcgtaagttttcaccat

SEQ ID NO: 5987025 - DNA, 25 bp, Homo sapien
tgccagtcgtttcacatgtacctgg

SEQ ID NO: 5987026 - DNA, 25 bp, Homo sapien
agtagctggtatagtctttaaatac

SEQ ID NO: 5987027 - DNA, 25 bp, Homo sapien
taatccatcaataagccagttttgg

SEQ ID NO: 5987028 - DNA, 25 bp, Homo sapien
accagcaatcaaagtagctggtata

SEQ ID NO: 5987029 - DNA, 25 bp, Homo sapien
gttctccaggcataaggaatgataa

SEQ ID NO: 5987030 - DNA, 25 bp, Homo sapien
aacgagcaatgggatgttgtcattt

SEQ ID NO: 5987031 - DNA, 25 bp, Homo sapien
cacatccttatcggtggtttctgcc

SEQ ID NO: 5987032 - DNA, 25 bp, Homo sapien
catcaccatgattcaatttccaacc

SEQ ID NO: 5987033 - DNA, 25 bp, Homo sapien
caaaatagtgacgagtgaacttgtc

SEQ ID NO: 5987034 - DNA, 25 bp, Homo sapien
tgccccttttggagtagcctcaatg

SEQ ID NO: 5987035 - DNA, 25 bp, Homo sapien
aaaaccattgaatagaaggatcata

SEQ ID NO: 5987036 - DNA, 25 bp, Homo sapien
attatcatttccttcgtctagcatc

SEQ ID NO: 5987037 - DNA, 25 bp, Homo sapien
atgtaaaaaatcttattaaaccata

SEQ ID NO: 5987038 - DNA, 25 bp, Homo sapien
gattaacgagcaatgggatgttgtc

SEQ ID NO: 5987039 - DNA, 25 bp, Homo sapien
tcgatcaccaaatataacggatccc

SEQ ID NO: 5987040 - DNA, 25 bp, Homo sapien
atgaataaacacatacaaagcacaa

SEQ ID NO: 5987041 - DNA, 25 bp, Homo sapien
attgaccccgttaccaaacagcaga

SEQ ID NO: 5987042 - DNA, 25 bp, Homo sapien
gagtcaatatcaagtttgccttcca

SEQ ID NO: 5987043 - DNA, 25 bp, Homo sapien
atagttaccttcaccacgatcgtga

SEQ ID NO: 5987044 - DNA, 25 bp, Homo sapien
cgaaatcacttttcagtgcgcgcaa

SEQ ID NO: 5987045 - DNA, 25 bp, Homo sapien
tccaggcataaggaatgataagtga

SEQ ID NO: 5987046 - DNA, 25 bp, Homo sapien
ctacacctggtaaatagaaggcttt

SEQ ID NO: 5987047 - DNA, 25 bp, Homo sapien
taggaggaaagagaaaaagaggaaa

SEQ ID NO: 5987048 - DNA, 25 bp, Homo sapien
caattcgtaagttttcaccatgtta

SEQ ID NO: 5987049 - DNA, 25 bp, Homo sapien
ccctgtaagtggtaggcgctacacc

SEQ ID NO: 5987050 - DNA, 25 bp, Homo sapien
ttagcagaatagcaccaggaactag

SEQ ID NO: 5987051 - DNA, 25 bp, Homo sapien
agtgacatcttttcctggcaatcaa

SEQ ID NO: 5987052 - DNA, 25 bp, Homo sapien
gtatcccacgtataagacaatagtc

SEQ ID NO: 5987053 - DNA, 25 bp, Homo sapien
aatacaacaacaaaagctgtacgtg

SEQ ID NO: 5987054 - DNA, 25 bp, Homo sapien
aacccaatgcagcgaagaagatact

SEQ ID NO: 5987055 - DNA, 25 bp, Homo sapien
tgagttacctgtacaaaaccaaggt

SEQ ID NO: 5987056 - DNA, 25 bp, Homo sapien
aattataaattcgatcaccaaatat

SEQ ID NO: 5987057 - DNA, 25 bp, Homo sapien
ttgtaacgtgcgaaatcacttttca

SEQ ID NO: 5987058 - DNA, 25 bp, Homo sapien
caattggaatggtgaattataaatt

SEQ ID NO: 5987059 - DNA, 25 bp, Homo sapien
aatagaaggatcatatacgtgtaaa

SEQ ID NO: 5987060 - DNA, 25 bp, Homo sapien
tttatcaaagaaaaccattgaatag

SEQ ID NO: 5987061 - DNA, 25 bp, Homo sapien
attccacatccttatcggtggtttc

SEQ ID NO: 5987062 - DNA, 25 bp, Homo sapien
tagcgattgacttggcgaacgaaaa

SEQ ID NO: 5987063 - DNA, 25 bp, Homo sapien
attaagaaaaagttcaacgcaataa

SEQ ID NO: 5987064 - DNA, 25 bp, Homo sapien
tacacagggattcacactctttttc

SEQ ID NO: 5987065 - DNA, 25 bp, Homo sapien
tggcaaagtaaggcaattcgtaagt

SEQ ID NO: 5987066 - DNA, 25 bp, Homo sapien
gacttggcgaacgaaaaacatcacc

SEQ ID NO: 5987067 - DNA, 25 bp, Homo sapien
ccaaggttgaagccagcaccataaa

SEQ ID NO: 5987068 - DNA, 25 bp, Homo sapien
ttgacacaaaaaaatacaacaacaa

SEQ ID NO: 5987069 - DNA, 25 bp, Homo sapien
acattaagaaaaagttcaacgcaat

SEQ ID NO: 5987070 - DNA, 25 bp, Homo sapien
acatacaaagcacaaccggcgcctc

SEQ ID NO: 5987071 - DNA, 25 bp, Homo sapien
tggtatagtctttaaataccaaggc

SEQ ID NO: 5987072 - DNA, 25 bp, Homo sapien
gtaacgtgcgaaatcacttttcagt

SEQ ID NO: 5987073 - DNA, 25 bp, Homo sapien
ggtttctgccccttttggagtagcc

SEQ ID NO: 5987074 - DNA, 25 bp, Homo sapien
cccacctggtggcccaagaagtcgc

SEQ ID NO: 5987075 - DNA, 25 bp, Homo sapien
aaaacagagtacttgctggtatgac

SEQ ID NO: 5987076 - DNA, 25 bp, Homo sapien
ataatatcgaaatggttggcaaagt

SEQ ID NO: 5987077 - DNA, 25 bp, Homo sapien
acatgtaaaaaatcttattaaacca

SEQ ID NO: 5987078 - DNA, 25 bp, Homo sapien
atggtgaattataaattcgatcacc

SEQ ID NO: 5987079 - DNA, 25 bp, Homo sapien
tccagttctccaggcataaggaatg

SEQ ID NO: 5987080 - DNA, 25 bp, Homo sapien
taagataaacataacagtggctaag

SEQ ID NO: 5987081 - DNA, 25 bp, Homo sapien
gccacttccagttctccaggcataa

SEQ ID NO: 5987082 - DNA, 25 bp, Homo sapien
atagtctttaaataccaaggctgga

SEQ ID NO: 5987083 - DNA, 25 bp, Homo sapien
acaaagcacaaccggcgcctccaat

SEQ ID NO: 5987084 - DNA, 25 bp, Homo sapien
gtacaaaaccaaggttgaagccagc

SEQ ID NO: 5987085 - DNA, 25 bp, Homo sapien
gagccgacaaacccgaataatgcat

SEQ ID NO: 5987086 - DNA, 25 bp, Homo sapien
agcgaagaagatactgcaagttacc

SEQ ID NO: 5987087 - DNA, 25 bp, Homo sapien
ctaaggaacctctagaactaggtga

SEQ ID NO: 5987088 - DNA, 25 bp, Homo sapien
atgtataagagccgacaaacccgaa

SEQ ID NO: 5987089 - DNA, 25 bp, Homo sapien
gatttggtttgtcttggttggatgt

SEQ ID NO: 5987090 - DNA, 25 bp, Homo sapien
gataacaacagatgacaataagaca

SEQ ID NO: 5987091 - DNA, 25 bp, Homo sapien
atggaaagataccagcaatcaaagt

SEQ ID NO: 5987092 - DNA, 25 bp, Homo sapien
aaaatacaacaacaaaagctgtacg

SEQ ID NO: 5987093 - DNA, 25 bp, Homo sapien
attttctttatcgccagaaacgtta

SEQ ID NO: 5987094 - DNA, 25 bp, Homo sapien
atcgtgatattcaatcataatatcg

SEQ ID NO: 5987095 - DNA, 25 bp, Homo sapien
caacaacaaaagctgtacgtgtgcc

SEQ ID NO: 5987096 - DNA, 25 bp, Homo sapien
gaaggctttgactgttgacacaaaa

SEQ ID NO: 5987097 - DNA, 25 bp, Homo sapien
gaaaccaaacatgtaaaaaatctta

SEQ ID NO: 5987098 - DNA, 25 bp, Homo sapien
tgtgttgataattcattgatggagt

SEQ ID NO: 5987099 - DNA, 25 bp, Homo sapien
tgaccccgttaccaaacagcagagt

SEQ ID NO: 5987100 - DNA, 25 bp, Homo sapien
caatttattgatgaatttagcatca

SEQ ID NO: 5987101 - DNA, 25 bp, Homo sapien
ccataaaaaacagagtacttgctgg

SEQ ID NO: 5987102 - DNA, 25 bp, Homo sapien
cttacacagggattcacactctttt

SEQ ID NO: 5987103 - DNA, 25 bp, Homo sapien
aggctggaagggtatttgtcttgcg

SEQ ID NO: 5987104 - DNA, 25 bp, Homo sapien
tctccattgccacttccagttctcc

SEQ ID NO: 5987105 - DNA, 25 bp, Homo sapien
agttcaacgcaataattattagcag

SEQ ID NO: 5987106 - DNA, 25 bp, Homo sapien
caatcaatgaaccagcaaatgataa

SEQ ID NO: 5987107 - DNA, 25 bp, Homo sapien
tcggtggtttctgccccttttggag

SEQ ID NO: 5987108 - DNA, 25 bp, Homo sapien
tgaatccacccaacttaaatttggt

SEQ ID NO: 5987109 - DNA, 25 bp, Homo sapien
aaggaacctctagaactaggtgata

SEQ ID NO: 5987110 - DNA, 25 bp, Homo sapien
ggagtagcctcaatgtcggttcctt

SEQ ID NO: 5987111 - DNA, 25 bp, Homo sapien
gagaaatttatcaaagaaaaccatt

SEQ ID NO: 5987112 - DNA, 25 bp, Homo sapien
taaggagaaatttatcaaagaaaac

SEQ ID NO: 5987113 - DNA, 25 bp, Homo sapien
agaagaatgaacaaacattaagaaa

SEQ ID NO: 5987114 - DNA, 25 bp, Homo sapien
cgttaccaaacagcagagtaatgaa

SEQ ID NO: 5987115 - DNA, 25 bp, Homo sapien
ttaaaccataaacttgtgtatatga

SEQ ID NO: 5987116 - DNA, 25 bp, Homo sapien
aaattcgatcaccaaatataacgga

SEQ ID NO: 5987117 - DNA, 25 bp, Homo sapien
tagaaggatcatatacgtgtaaata

SEQ ID NO: 5987118 - DNA, 25 bp, Homo sapien
gtcaaagttaataggaggaaagaga

SEQ ID NO: 5987119 - DNA, 25 bp, Homo sapien
gtggtttctgccccttttggagtag

SEQ ID NO: 5987120 - DNA, 25 bp, Homo sapien
caggcataaggaatgataagtgatc

SEQ ID NO: 5987121 - DNA, 25 bp, Homo sapien
ctgtaagtggtaggcgctacacctg

SEQ ID NO: 5987122 - DNA, 25 bp, Homo sapien
tttggtgaataaaatagaatgaata

SEQ ID NO: 5987123 - DNA, 25 bp, Homo sapien
catgattcaatttccaacccgaatc

SEQ ID NO: 5987124 - DNA, 25 bp, Homo sapien
cggttccttgagttacctgtacaaa

SEQ ID NO: 5987125 - DNA, 25 bp, Homo sapien
aatagtagtcgtatgagtacaagaa

SEQ ID NO: 5987126 - DNA, 25 bp, Homo sapien
gaacaaacattaagaaaaagttcaa

SEQ ID NO: 5987127 - DNA, 25 bp, Homo sapien
tttccaacccgaatcttcttgaaaa

SEQ ID NO: 5987128 - DNA, 25 bp, Homo sapien
cttccagttctccaggcataaggaa

SEQ ID NO: 5987129 - DNA, 25 bp, Homo sapien
gtggctaaggaacctctagaactag

SEQ ID NO: 5987130 - DNA, 25 bp, Homo sapien
tagaatgaataaacacatacaaagc

SEQ ID NO: 5987131 - DNA, 25 bp, Homo sapien
taagacaacaactaaggagaaattt

SEQ ID NO: 5987132 - DNA, 25 bp, Homo sapien
caacggcgatggagccaaatggaaa

SEQ ID NO: 5987133 - DNA, 25 bp, Homo sapien
aataagtaaaataaacttcattatc

SEQ ID NO: 5987134 - DNA, 25 bp, Homo sapien
aattgaactcctgaaccaaccaaaa

SEQ ID NO: 5987135 - DNA, 25 bp, Homo sapien
accataaacttgtgtatatgaaata

SEQ ID NO: 5987136 - DNA, 25 bp, Homo sapien
ggttgcttttcgactttttcaggct

SEQ ID NO: 5987137 - DNA, 25 bp, Homo sapien
acggatcccaaggattcaggttgct

SEQ ID NO: 5987138 - DNA, 25 bp, Homo sapien
cagtggctaaggaacctctagaact

SEQ ID NO: 5987139 - DNA, 25 bp, Homo sapien
caatgcagcgaagaagatactgcaa

SEQ ID NO: 5987140 - DNA, 25 bp, Homo sapien
taacaacagatgacaataagacaac

SEQ ID NO: 5987141 - DNA, 25 bp, Homo sapien
ttgatgaatttagcatcatctcccg

SEQ ID NO: 5987142 - DNA, 25 bp, Homo sapien
accaaatataacggatcccaaggat

SEQ ID NO: 5987143 - DNA, 25 bp, Homo sapien
tgataggaaacccaatgcagcgaag

SEQ ID NO: 5987144 - DNA, 25 bp, Homo sapien
cagttttggaagaagccatttttta

SEQ ID NO: 5987145 - DNA, 25 bp, Homo sapien
aacagatgacaataagacaacaact

SEQ ID NO: 5987146 - DNA, 25 bp, Homo sapien
tgatcaaaatagtgacgagtgaact

SEQ ID NO: 5987147 - DNA, 25 bp, Homo sapien
agccaaatggaaagataccagcaat

SEQ ID NO: 5987148 - DNA, 25 bp, Homo sapien
ttgtcaaagttaataggaggaaaga

SEQ ID NO: 5987149 - DNA, 25 bp, Homo sapien
gtttcacatgtacctggactggaac

SEQ ID NO: 5987150 - DNA, 25 bp, Homo sapien
caatgggatgttgtcattttccctg

SEQ ID NO: 5987151 - DNA, 25 bp, Homo sapien
ttgaaaatcatcgtccaaatttaac

SEQ ID NO: 5987152 - DNA, 25 bp, Homo sapien
gaaaaacatcaccatgattcaattt

SEQ ID NO: 5987153 - DNA, 25 bp, Homo sapien
tagtagtcgtatgagtacaagaaat

SEQ ID NO: 5987154 - DNA, 25 bp, Homo sapien
aatggataacaacagatgacaataa

SEQ ID NO: 5987155 - DNA, 25 bp, Homo sapien
ccatcaataagccagttttggaaga

SEQ ID NO: 5987156 - DNA, 25 bp, Homo sapien
gtgaacttgtcaaagttaataggag

SEQ ID NO: 5987157 - DNA, 25 bp, Homo sapien
cgactttttcaggctgacaaaaatg

SEQ ID NO: 5987158 - DNA, 25 bp, Homo sapien
tgacgagtgaacttgtcaaagttaa

SEQ ID NO: 5987159 - DNA, 25 bp, Homo sapien
tgacatcttttcctggcaatcaatg

SEQ ID NO: 5987160 - DNA, 25 bp, Homo sapien
cgaatggataacaacagatgacaat

SEQ ID NO: 5987161 - DNA, 25 bp, Homo sapien
tcgaaatggttggcaaagtaaggca

SEQ ID NO: 5987162 - DNA, 25 bp, Homo sapien
actttttcaggctgacaaaaatgga

SEQ ID NO: 5987163 - DNA, 25 bp, Homo sapien
agcaccataaaaactagtcttagtt

SEQ ID NO: 5987164 - DNA, 25 bp, Homo sapien
aaccataaaaaacagagtacttgct

SEQ ID NO: 5987165 - DNA, 25 bp, Homo sapien
tttgccttccagtatggcccattga

SEQ ID NO: 5987166 - DNA, 25 bp, Homo sapien
cttaaatttggtgaataaaatagaa

SEQ ID NO: 5987167 - DNA, 25 bp, Homo sapien
aacctctagaactaggtgataggaa

SEQ ID NO: 5987168 - DNA, 25 bp, Homo sapien
atgcagcgaagaagatactgcaagt

SEQ ID NO: 5987169 - DNA, 25 bp, Homo sapien
aaatagtgacgagtgaacttgtcaa

SEQ ID NO: 5987170 - DNA, 25 bp, Homo sapien
ggcccaagaagtcgctgattcattg

SEQ ID NO: 5987171 - DNA, 25 bp, Homo sapien
ggtatttgtcttgcgatttggtttg

SEQ ID NO: 5987172 - DNA, 25 bp, Homo sapien
cgcaatagcgaatggataacaacag

SEQ ID NO: 5987173 - DNA, 25 bp, Homo sapien
acatcttttcctggcaatcaatgaa

SEQ ID NO: 5987174 - DNA, 25 bp, Homo sapien
catctcccggaattacggtcttaca

SEQ ID NO: 5987175 - DNA, 25 bp, Homo sapien
atcccacgtataagacaatagtcgt

SEQ ID NO: 5987176 - DNA, 25 bp, Homo sapien
tgccatcataaacctctcttgcagc

SEQ ID NO: 5987177 - DNA, 25 bp, Homo sapien
tggcgaacgaaaaacatcaccatga

SEQ ID NO: 5987178 - DNA, 25 bp, Homo sapien
tagtcttagttctgccatcataaac

SEQ ID NO: 5987179 - DNA, 25 bp, Homo sapien
acaacaactaaggagaaatttatca

SEQ ID NO: 5987180 - DNA, 25 bp, Homo sapien
tatcaaagaaaaccattgaatagaa

SEQ ID NO: 5987181 - DNA, 25 bp, Homo sapien
acccgaatcttcttgaaaatcatcg

SEQ ID NO: 5987182 - DNA, 25 bp, Homo sapien
aaatacaactcaacggcgatggagc

SEQ ID NO: 5987183 - DNA, 25 bp, Homo sapien
atcacttttcagtgcgcgcaatagc

SEQ ID NO: 5987184 - DNA, 25 bp, Homo sapien
tctttgtgttgataattcattgatg

SEQ ID NO: 5987185 - DNA, 25 bp, Homo sapien
taggcgctacacctggtaaatagaa

SEQ ID NO: 5987186 - DNA, 25 bp, Homo sapien
gtacaagaaattttctttatcgcca

SEQ ID NO: 5987187 - DNA, 25 bp, Homo sapien
gtagatttttctaacaaagagcata

SEQ ID NO: 5987188 - DNA, 25 bp, Homo sapien
gaaccagcaaatgataatgggattg

SEQ ID NO: 5987189 - DNA, 25 bp, Homo sapien
caaggattcaggttgcttttcgact

SEQ ID NO: 5987190 - DNA, 25 bp, Homo sapien
ccatagatgtataagagccgacaaa

SEQ ID NO: 5987191 - DNA, 25 bp, Homo sapien
ttttggagtagcctcaatgtcggtt

SEQ ID NO: 5987192 - DNA, 25 bp, Homo sapien
atgtcggttccttgagttacctgta

SEQ ID NO: 5987193 - DNA, 25 bp, Homo sapien
aacttgtgtatatgaaatacaactc

SEQ ID NO: 5987194 - DNA, 25 bp, Homo sapien
aaagaaaaccattgaatagaaggat

SEQ ID NO: 5987195 - DNA, 25 bp, Homo sapien
agttaccttcaccacgatcgtgata

SEQ ID NO: 5987196 - DNA, 25 bp, Homo sapien
agctgtacgtgtgccattttgtaaa

SEQ ID NO: 5987197 - DNA, 25 bp, Homo sapien
caccagaagaatgaacaaacattaa

SEQ ID NO: 5987198 - DNA, 25 bp, Homo sapien
gaatggtgaattataaattcgatca

SEQ ID NO: 5987199 - DNA, 25 bp, Homo sapien
gtcattttccctgtaagtggtaggc

SEQ ID NO: 5987200 - DNA, 25 bp, Homo sapien
tggaatggtgaattataaattcgat

SEQ ID NO: 5987201 - DNA, 25 bp, Homo sapien
tttagcatcatctcccggaattacg

SEQ ID NO: 5987202 - DNA, 25 bp, Homo sapien
tggataacaacagatgacaataaga

SEQ ID NO: 5987203 - DNA, 25 bp, Homo sapien
acgagtgaacttgtcaaagttaata

SEQ ID NO: 5987204 - DNA, 25 bp, Homo sapien
aacagtggctaaggaacctctagaa

SEQ ID NO: 5987205 - DNA, 25 bp, Homo sapien
agacaacaactaaggagaaatttat

SEQ ID NO: 5987206 - DNA, 25 bp, Homo sapien
attgaatagaaggatcatatacgtg

SEQ ID NO: 5987207 - DNA, 25 bp, Homo sapien
aaagcacaaccggcgcctccaatta

SEQ ID NO: 5987208 - DNA, 25 bp, Homo sapien
accaaacagcagagtaatgaaatga

SEQ ID NO: 5987209 - DNA, 25 bp, Homo sapien
ggtaaatagaaggctttgactgttg

SEQ ID NO: 5987210 - DNA, 25 bp, Homo sapien
ctaacaaagagcatactgctgataa

SEQ ID NO: 5987211 - DNA, 25 bp, Homo sapien
catcccagtgacatcttttcctggc

SEQ ID NO: 5987212 - DNA, 25 bp, Homo sapien
aatggttggcaaagtaaggcaattc

SEQ ID NO: 5987213 - DNA, 25 bp, Homo sapien
gagtacttgctggtatgacaccaga

SEQ ID NO: 5987214 - DNA, 25 bp, Homo sapien
cccaatgcagcgaagaagatactgc

SEQ ID NO: 5987215 - DNA, 25 bp, Homo sapien
gtaatagtagtcgtatgagtacaag

SEQ ID NO: 5987216 - DNA, 25 bp, Homo sapien
tattaccgtcctcatctttgtgttg

SEQ ID NO: 5987217 - DNA, 25 bp, Homo sapien
ccagtatggcccattgaaaaatttg

SEQ ID NO: 5987218 - DNA, 25 bp, Homo sapien
taaacctctcttgcagccggtaatc

SEQ ID NO: 5987219 - DNA, 25 bp, Homo sapien
cacaaccggcgcctccaattatgaa

SEQ ID NO: 5987220 - DNA, 25 bp, Homo sapien
cattgccacttccagttctccaggc

SEQ ID NO: 5987221 - DNA, 25 bp, Homo sapien
caacgcaataattattagcagaata

SEQ ID NO: 5987222 - DNA, 25 bp, Homo sapien
tgacaaaaatggaatctattgtaat

SEQ ID NO: 5987223 - DNA, 25 bp, Homo sapien
gataagtgatcaaaatagtgacgag

SEQ ID NO: 5987224 - DNA, 25 bp, Homo sapien
gtaagtggtaggcgctacacctggt

SEQ ID NO: 5987225 - DNA, 25 bp, Homo sapien
agcgaatggataacaacagatgaca

SEQ ID NO: 5987226 - DNA, 25 bp, Homo sapien
cttttcagtgcgcgcaatagcgaat

SEQ ID NO: 5987227 - DNA, 25 bp, Homo sapien
gataaagccaattgaccccgttacc

SEQ ID NO: 5987228 - DNA, 25 bp, Homo sapien
tgtacctggactggaacgttttatg

SEQ ID NO: 5987229 - DNA, 25 bp, Homo sapien
atgggattgagaacaaaaaccatag

SEQ ID NO: 5987230 - DNA, 25 bp, Homo sapien
attattagcagaatagcaccaggaa

SEQ ID NO: 5987231 - DNA, 25 bp, Homo sapien
tacgtgtttccaattccacatcctt

SEQ ID NO: 5987232 - DNA, 25 bp, Homo sapien
gccgacaaacccgaataatgcatat

SEQ ID NO: 5987233 - DNA, 25 bp, Homo sapien
tctagcatcaatgggctgccagtcg

SEQ ID NO: 5987234 - DNA, 25 bp, Homo sapien
gaagatactgcaagttaccatcaaa

SEQ ID NO: 5987235 - DNA, 25 bp, Homo sapien
acctgtacaaaaccaaggttgaagc

SEQ ID NO: 5987236 - DNA, 25 bp, Homo sapien
ttataaattcgatcaccaaatataa

SEQ ID NO: 5987237 - DNA, 25 bp, Homo sapien
ttgagaacaaaaaccatagaaaaac

SEQ ID NO: 5987238 - DNA, 25 bp, Homo sapien
gatgaatttagcatcatctcccgga

SEQ ID NO: 5987239 - DNA, 25 bp, Homo sapien
tgttacgatcattacgtgtttccaa

SEQ ID NO: 5987240 - DNA, 25 bp, Homo sapien
caattgaccccgttaccaaacagca

SEQ ID NO: 5987241 - DNA, 25 bp, Homo sapien
cacccaacttaaatttggtgaataa

SEQ ID NO: 5987242 - DNA, 25 bp, Homo sapien
agtggagtcaatatcaagtttgcct

SEQ ID NO: 5987243 - DNA, 25 bp, Homo sapien
gggattgagaacaaaaaccatagaa

SEQ ID NO: 5987244 - DNA, 25 bp, Homo sapien
agacaatagtcgtgaatccacccaa

SEQ ID NO: 5987245 - DNA, 25 bp, Homo sapien
tcagtgcgcgcaatagcgaatggat

SEQ ID NO: 5987246 - DNA, 25 bp, Homo sapien
atgagtagatttttctaacaaagag

SEQ ID NO: 5987247 - DNA, 25 bp, Homo sapien
gtcgtgaatccacccaacttaaatt

SEQ ID NO: 5987248 - DNA, 25 bp, Homo sapien
cgatggagccaaatggaaagatacc

SEQ ID NO: 5987249 - DNA, 25 bp, Homo sapien
acaagaaattttctttatcgccaga

SEQ ID NO: 5987250 - DNA, 25 bp, Homo sapien
atcaaaatagtgacgagtgaacttg

SEQ ID NO: 5987251 - DNA, 25 bp, Homo sapien
atgaaatgactgaggagtatcccac

SEQ ID NO: 5987252 - DNA, 25 bp, Homo sapien
tcattatcatttccttcgtctagca

SEQ ID NO: 5987253 - DNA, 25 bp, Homo sapien
ccattgaatagaaggatcatatacg

SEQ ID NO: 5987254 - DNA, 25 bp, Homo sapien
atacgtgtaaatatttgtcccacct

SEQ ID NO: 5987255 - DNA, 25 bp, Homo sapien
agtaatgaaatgactgaggagtatc

SEQ ID NO: 5987256 - DNA, 25 bp, Homo sapien
gggattcacactctttttcttgtaa

SEQ ID NO: 5987257 - DNA, 25 bp, Homo sapien
gtcgctgattcattgaatttaacgg

SEQ ID NO: 5987258 - DNA, 25 bp, Homo sapien
agttaccatcaaaaataattgaact

SEQ ID NO: 5987259 - DNA, 25 bp, Homo sapien
tctttaaataccaaggctggaaggg

SEQ ID NO: 5987260 - DNA, 25 bp, Homo sapien
aaatgataatgggattgagaacaaa

SEQ ID NO: 5987261 - DNA, 25 bp, Homo sapien
cttggttggatgttcatcccagtga

SEQ ID NO: 5987262 - DNA, 25 bp, Homo sapien
cgctgattcattgaatttaacggaa

SEQ ID NO: 5987263 - DNA, 25 bp, Homo sapien
tggtggcccaagaagtcgctgattc

SEQ ID NO: 5987264 - DNA, 25 bp, Homo sapien
aaatatttgtcccacctggtggccc

SEQ ID NO: 5987265 - DNA, 25 bp, Homo sapien
ggatgagtagatttttctaacaaag

SEQ ID NO: 5987266 - DNA, 25 bp, Homo sapien
tcctggcaatcaatgaaccagcaaa

SEQ ID NO: 5987267 - DNA, 25 bp, Homo sapien
atggagccaaatggaaagataccag

SEQ ID NO: 5987268 - DNA, 25 bp, Homo sapien
ctgtacaaaaccaaggttgaagcca

SEQ ID NO: 5987269 - DNA, 25 bp, Homo sapien
tgaatttaacggaataagtaaaata

SEQ ID NO: 5987270 - DNA, 25 bp, Homo sapien
catctttgtgttgataattcattga

SEQ ID NO: 5987271 - DNA, 25 bp, Homo sapien
catcaaaaataattgaactcctgaa

SEQ ID NO: 5987272 - DNA, 25 bp, Homo sapien
ggttgaagccagcaccataaaaact

SEQ ID NO: 5987273 - DNA, 25 bp, Homo sapien
aatccacccaacttaaatttggtga

SEQ ID NO: 5987274 - DNA, 25 bp, Homo sapien
catccttatcggtggtttctgcccc

SEQ ID NO: 5987275 - DNA, 25 bp, Homo sapien
cttattaaaccataaacttgtgtat

SEQ ID NO: 5987276 - DNA, 25 bp, Homo sapien
gtaagttttcaccatgttacgatca

SEQ ID NO: 5987277 - DNA, 25 bp, Homo sapien
actaaggagaaatttatcaaagaaa

SEQ ID NO: 5987278 - DNA, 25 bp, Homo sapien
tgctgataaagccaattgaccccgt

SEQ ID NO: 5987279 - DNA, 25 bp, Homo sapien
aaaaaacagagtacttgctggtatg

SEQ ID NO: 5987280 - DNA, 25 bp, Homo sapien
gcaaagtaaggcaattcgtaagttt

SEQ ID NO: 5987281 - DNA, 25 bp, Homo sapien
aagttttcaccatgttacgatcatt

SEQ ID NO: 5987282 - DNA, 25 bp, Homo sapien
gaaacgttattaccgtcctcatctt

SEQ ID NO: 5987283 - DNA, 25 bp, Homo sapien
cgatcgtgatattcaatcataatat

SEQ ID NO: 5987284 - DNA, 25 bp, Homo sapien
caacttaaatttggtgaataaaata

SEQ ID NO: 5987285 - DNA, 25 bp, Homo sapien
tattaaaccataaacttgtgtatat

SEQ ID NO: 5987286 - DNA, 25 bp, Homo sapien
caaccggcgcctccaattatgaatc

SEQ ID NO: 5987287 - DNA, 25 bp, Homo sapien
gaattacggtcttacacagggattc

SEQ ID NO: 5987288 - DNA, 25 bp, Homo sapien
accccgttaccaaacagcagagtaa

SEQ ID NO: 5987289 - DNA, 25 bp, Homo sapien
aagaagatactgcaagttaccatca

SEQ ID NO: 5987290 - DNA, 25 bp, Homo sapien
gtatgagtacaagaaattttcttta

SEQ ID NO: 5987291 - DNA, 25 bp, Homo sapien
ccagcaccataaaaactagtcttag

SEQ ID NO: 5987292 - DNA, 25 bp, Homo sapien
atccgttcgacgtagagaagtttgt

SEQ ID NO: 5987293 - DNA, 25 bp, Homo sapien
gacactttcgttgctaagttaaaaa

SEQ ID NO: 5987294 - DNA, 25 bp, Homo sapien
ttaaaatttctgattactgctcgcg

SEQ ID NO: 5987295 - DNA, 25 bp, Homo sapien
acaactgttaatgcgatttatctct

SEQ ID NO: 5987296 - DNA, 25 bp, Homo sapien
ttttgtcaatggggggactatctcg

SEQ ID NO: 5987297 - DNA, 25 bp, Homo sapien
actggctgttttgagggatgaagta

SEQ ID NO: 5987298 - DNA, 25 bp, Homo sapien
agttaatcaaattaccgattatgtt

SEQ ID NO: 5987299 - DNA, 25 bp, Homo sapien
aagactgattaccgtcaagtagcca

SEQ ID NO: 5987300 - DNA, 25 bp, Homo sapien
gaagtagaagaagacactatgagca

SEQ ID NO: 5987301 - DNA, 25 bp, Homo sapien
gaaccatgttaatgaccttattgaa

SEQ ID NO: 5987302 - DNA, 25 bp, Homo sapien
ttgattcacgatcatgagattttat

SEQ ID NO: 5987303 - DNA, 25 bp, Homo sapien
aaaaaatagttcagggagctctagt

SEQ ID NO: 5987304 - DNA, 25 bp, Homo sapien
aaattgctattgatttgattcacga

SEQ ID NO: 5987305 - DNA, 25 bp, Homo sapien
acctcatcagaatagaaaaaatagt

SEQ ID NO: 5987306 - DNA, 25 bp, Homo sapien
tgttaatgaccttattgaacaaatc

SEQ ID NO: 5987307 - DNA, 25 bp, Homo sapien
tcaaggatcttatagatgagataaa

SEQ ID NO: 5987308 - DNA, 25 bp, Homo sapien
tgaacaaatcagagatttaggtaat

SEQ ID NO: 5987309 - DNA, 25 bp, Homo sapien
gctttctcctctatatccgttcgac

SEQ ID NO: 5987310 - DNA, 25 bp, Homo sapien
attcacttcagtacatccgaatgcg

SEQ ID NO: 5987311 - DNA, 25 bp, Homo sapien
tgttgcaggtttgtataagctttct

SEQ ID NO: 5987312 - DNA, 25 bp, Homo sapien
atgagtttgccaaaaaattagcaca

SEQ ID NO: 5987313 - DNA, 25 bp, Homo sapien
gtagtcccagactcagctgtttttg

SEQ ID NO: 5987314 - DNA, 25 bp, Homo sapien
ttgatgtgcatttggataaaaataa

SEQ ID NO: 5987315 - DNA, 25 bp, Homo sapien
tcagggtatcaaggatcttatagat

SEQ ID NO: 5987316 - DNA, 25 bp, Homo sapien
gacactatgagcacaactgtcacat

SEQ ID NO: 5987317 - DNA, 25 bp, Homo sapien
gtgggtaaggttattatcggcacta

SEQ ID NO: 5987318 - DNA, 25 bp, Homo sapien
tacaagcaaattgatgtgcatttgg

SEQ ID NO: 5987319 - DNA, 25 bp, Homo sapien
ctaagttaaaaagaagacaagtgca

SEQ ID NO: 5987320 - DNA, 25 bp, Homo sapien
accctagtagtcccagactcagctg

SEQ ID NO: 5987321 - DNA, 25 bp, Homo sapien
gtaattagaagaatactggctgttt

SEQ ID NO: 5987322 - DNA, 25 bp, Homo sapien
acagcacaacatagaaaccctagta

SEQ ID NO: 5987323 - DNA, 25 bp, Homo sapien
agatacagttaatcaaattaccgat

SEQ ID NO: 5987324 - DNA, 25 bp, Homo sapien
ttgcggtaacgtaattagaagaata

SEQ ID NO: 5987325 - DNA, 25 bp, Homo sapien
atttcctctatgtttaatttattac

SEQ ID NO: 5987326 - DNA, 25 bp, Homo sapien
ctttacaactgttaatgcgatttat

SEQ ID NO: 5987327 - DNA, 25 bp, Homo sapien
ttacctagaatggatccaagaaaaa

SEQ ID NO: 5987328 - DNA, 25 bp, Homo sapien
gaacatttacggttttagttacaga

SEQ ID NO: 5987329 - DNA, 25 bp, Homo sapien
cgcctgaaaatattgatatctacat

SEQ ID NO: 5987330 - DNA, 25 bp, Homo sapien
ttatgttccgcctgaaaatattgat

SEQ ID NO: 5987331 - DNA, 25 bp, Homo sapien
ctgtttttgctttaatgtcccgtgt

SEQ ID NO: 5987332 - DNA, 25 bp, Homo sapien
gctttaatgtcccgtgtgggtaagg

SEQ ID NO: 5987333 - DNA, 25 bp, Homo sapien
gttcgacgtagagaagtttgtcgaa

SEQ ID NO: 5987334 - DNA, 25 bp, Homo sapien
cagctcgttggaaccatgttaatga

SEQ ID NO: 5987335 - DNA, 25 bp, Homo sapien
agcaacctcatcagaatagaaaaaa

SEQ ID NO: 5987336 - DNA, 25 bp, Homo sapien
agtagaagaagacactatgagcaca

SEQ ID NO: 5987337 - DNA, 25 bp, Homo sapien
gaacccctgtatttgctgttgcagg

SEQ ID NO: 5987338 - DNA, 25 bp, Homo sapien
taaaaagaagacaagtgcaaggttc

SEQ ID NO: 5987339 - DNA, 25 bp, Homo sapien
tcagttgcggtaacgtaattagaag

SEQ ID NO: 5987340 - DNA, 25 bp, Homo sapien
ataagctttctcctctatatccgtt

SEQ ID NO: 5987341 - DNA, 25 bp, Homo sapien
aagaagacaagtgcaaggttcatac

SEQ ID NO: 5987342 - DNA, 25 bp, Homo sapien
tgttaccattgacactttcgttgct

SEQ ID NO: 5987343 - DNA, 25 bp, Homo sapien
gtataagctttctcctctatatccg

SEQ ID NO: 5987344 - DNA, 25 bp, Homo sapien
attactgctcgcgaacgtagtaata

SEQ ID NO: 5987345 - DNA, 25 bp, Homo sapien
ctattgatttgattcacgatcatga

SEQ ID NO: 5987346 - DNA, 25 bp, Homo sapien
ggttcatacgccatcgccttggaaa

SEQ ID NO: 5987347 - DNA, 25 bp, Homo sapien
caacatagaaaccctagtagtccca

SEQ ID NO: 5987348 - DNA, 25 bp, Homo sapien
aactcccacacctgattcaaaaacc

SEQ ID NO: 5987349 - DNA, 25 bp, Homo sapien
ttgtcaatggggggactatctcgtc

SEQ ID NO: 5987350 - DNA, 25 bp, Homo sapien
ttaatgtcccgtgtgggtaaggtta

SEQ ID NO: 5987351 - DNA, 25 bp, Homo sapien
atggggggactatctcgtcaaattc

SEQ ID NO: 5987352 - DNA, 25 bp, Homo sapien
acaagtgcaaggttcatacgccatc

SEQ ID NO: 5987353 - DNA, 25 bp, Homo sapien
ttcagtacatccgaatgcggcaaca

SEQ ID NO: 5987354 - DNA, 25 bp, Homo sapien
cagtacatccgaatgcggcaacatc

SEQ ID NO: 5987355 - DNA, 25 bp, Homo sapien
taatagtctagaaaaagctcatcct

SEQ ID NO: 5987356 - DNA, 25 bp, Homo sapien
atgcacatgagtttgccaaaaaatt

SEQ ID NO: 5987357 - DNA, 25 bp, Homo sapien
tatcggcactaaagccgtttttgtc

SEQ ID NO: 5987358 - DNA, 25 bp, Homo sapien
aactgttaatgcgatttatctctgc

SEQ ID NO: 5987359 - DNA, 25 bp, Homo sapien
taacgtaattagaagaatactggct

SEQ ID NO: 5987360 - DNA, 25 bp, Homo sapien
cactaaagccgtttttgtcaatggg

SEQ ID NO: 5987361 - DNA, 25 bp, Homo sapien
atttggtgggtcccaacgtatatta

SEQ ID NO: 5987362 - DNA, 25 bp, Homo sapien
ccgtttgtgaatgcgcccgagaatt

SEQ ID NO: 5987363 - DNA, 25 bp, Homo sapien
aactttacaactgttaatgcgattt

SEQ ID NO: 5987364 - DNA, 25 bp, Homo sapien
aaccaagactgattaccgtcaagta

SEQ ID NO: 5987365 - DNA, 25 bp, Homo sapien
gaatttggtgggtcccaacgtatat

SEQ ID NO: 5987366 - DNA, 25 bp, Homo sapien
attacagaaaccggagcaacctcat

SEQ ID NO: 5987367 - DNA, 25 bp, Homo sapien
taataacaccaagaatgcacatgag

SEQ ID NO: 5987368 - DNA, 25 bp, Homo sapien
caggtgtatcatccgtttgtgaatg

SEQ ID NO: 5987369 - DNA, 25 bp, Homo sapien
atcgtattgcgtgggataattacaa

SEQ ID NO: 5987370 - DNA, 25 bp, Homo sapien
gcaaggttcatacgccatcgccttg

SEQ ID NO: 5987371 - DNA, 25 bp, Homo sapien
cctctcaagcattcacttcagtaca

SEQ ID NO: 5987372 - DNA, 25 bp, Homo sapien
atgcgcccgagaatttagaacccct

SEQ ID NO: 5987373 - DNA, 25 bp, Homo sapien
ttgctgttgcaggtttgtataagct

SEQ ID NO: 5987374 - DNA, 25 bp, Homo sapien
agtttgtcgaatttggtgggtccca

SEQ ID NO: 5987375 - DNA, 25 bp, Homo sapien
actcagctgtttttgctttaatgtc

SEQ ID NO: 5987376 - DNA, 25 bp, Homo sapien
tcgttgctaagttaaaaagaagaca

SEQ ID NO: 5987377 - DNA, 25 bp, Homo sapien
gatgtgaatgttaccattgacactt

SEQ ID NO: 5987378 - DNA, 25 bp, Homo sapien
atgagcacaactgtcacatccacat

SEQ ID NO: 5987379 - DNA, 25 bp, Homo sapien
tcgaatttggtgggtcccaacgtat

SEQ ID NO: 5987380 - DNA, 25 bp, Homo sapien
ctgtatttgctgttgcaggtttgta

SEQ ID NO: 5987381 - DNA, 25 bp, Homo sapien
gggttcaatccaagttttatatatc

SEQ ID NO: 5987382 - DNA, 25 bp, Homo sapien
gtaaggttattatcggcactaaagc

SEQ ID NO: 5987383 - DNA, 25 bp, Homo sapien
gttcagggagctctagtatgaaaac

SEQ ID NO: 5987384 - DNA, 25 bp, Homo sapien
tcgcgaacgtagtaatagaacattt

SEQ ID NO: 5987385 - DNA, 25 bp, Homo sapien
cccacacctgattcaaaaaccgtat

SEQ ID NO: 5987386 - DNA, 25 bp, Homo sapien
ggtcccaacgtatattacctagaat

SEQ ID NO: 5987387 - DNA, 25 bp, Homo sapien
gatgtgcatttggataaaaataagg

SEQ ID NO: 5987388 - DNA, 25 bp, Homo sapien
cctaataacaccaagaatgcacatg

SEQ ID NO: 5987389 - DNA, 25 bp, Homo sapien
agattttattaactcccacacctga

SEQ ID NO: 5987390 - DNA, 25 bp, Homo sapien
catacgccatcgccttggaaacttt

SEQ ID NO: 5987391 - DNA, 25 bp, Homo sapien
atagaaaaaatagttcagggagctc

SEQ ID NO: 5987392 - DNA, 25 bp, Homo sapien
aattgatgtgcatttggataaaaat

SEQ ID NO: 5987393 - DNA, 25 bp, Homo sapien
taatgcgatttatctctgcagctcg

SEQ ID NO: 5987394 - DNA, 25 bp, Homo sapien
agggagctctagtatgaaaaccaag

SEQ ID NO: 5987395 - DNA, 25 bp, Homo sapien
aacgtatattacctagaatggatcc

SEQ ID NO: 5987396 - DNA, 25 bp, Homo sapien
agggtatcaaggatcttatagatga

SEQ ID NO: 5987397 - DNA, 25 bp, Homo sapien
cgagaatttagaacccctgtatttg

SEQ ID NO: 5987398 - DNA, 25 bp, Homo sapien
atcatgagattttattaactcccac

SEQ ID NO: 5987399 - DNA, 25 bp, Homo sapien
atttattacagaaaccggagcaacc

SEQ ID NO: 5987400 - DNA, 25 bp, Homo sapien
tgggtcccaacgtatattacctaga

SEQ ID NO: 5987401 - DNA, 25 bp, Homo sapien
tagaacccctgtatttgctgttgca

SEQ ID NO: 5987402 - DNA, 25 bp, Homo sapien
cgtcaagtagccattcagggtatca

SEQ ID NO: 5987403 - DNA, 25 bp, Homo sapien
gtttgtgaatgcgcccgagaattta

SEQ ID NO: 5987404 - DNA, 25 bp, Homo sapien
caacatctgatgtgaatgttaccat

SEQ ID NO: 5987405 - DNA, 25 bp, Homo sapien
tatgaaaaccaagactgattaccgt

SEQ ID NO: 5987406 - DNA, 25 bp, Homo sapien
gattatgttccgcctgaaaatattg

SEQ ID NO: 5987407 - DNA, 25 bp, Homo sapien
gacgtagagaagtttgtcgaatttg

SEQ ID NO: 5987408 - DNA, 25 bp, Homo sapien
ccggagcaacctcatcagaatagaa

SEQ ID NO: 5987409 - DNA, 25 bp, Homo sapien
gtttttgctttaatgtcccgtgtgg

SEQ ID NO: 5987410 - DNA, 25 bp, Homo sapien
tctagaaaaagctcatcctactgct

SEQ ID NO: 5987411 - DNA, 25 bp, Homo sapien
gatgaaggtattcagcaaattgcta

SEQ ID NO: 5987412 - DNA, 25 bp, Homo sapien
aaaacattgatgaaggtattcagca

SEQ ID NO: 5987413 - DNA, 25 bp, Homo sapien
gaaactttacaactgttaatgcgat

SEQ ID NO: 5987414 - DNA, 25 bp, Homo sapien
agaagacactatgagcacaactgtc

SEQ ID NO: 5987415 - DNA, 25 bp, Homo sapien
gccgtttttgtcaatggggggacta

SEQ ID NO: 5987416 - DNA, 25 bp, Homo sapien
attcagggtatcaaggatcttatag

SEQ ID NO: 5987417 - DNA, 25 bp, Homo sapien
tgaaggtattcagcaaattgctatt

SEQ ID NO: 5987418 - DNA, 25 bp, Homo sapien
atgaagtagaagaagacactatgag

SEQ ID NO: 5987419 - DNA, 25 bp, Homo sapien
ctctagtatgaaaaccaagactgat

SEQ ID NO: 5987420 - DNA, 25 bp, Homo sapien
ttgatatctacattacaaacgtcgg

SEQ ID NO: 5987421 - DNA, 25 bp, Homo sapien
tgttttgagggatgaagtagaagaa

SEQ ID NO: 5987422 - DNA, 25 bp, Homo sapien
acctagaatggatccaagaaaaaga

SEQ ID NO: 5987423 - DNA, 25 bp, Homo sapien
tcaaaaaccgtattaaaatttctga

SEQ ID NO: 5987424 - DNA, 25 bp, Homo sapien
gaatagaaaaaatagttcagggagc

SEQ ID NO: 5987425 - DNA, 25 bp, Homo sapien
gttaatgcgatttatctctgcagct

SEQ ID NO: 5987426 - DNA, 25 bp, Homo sapien
ttgtgaatgcgcccgagaatttaga

SEQ ID NO: 5987427 - DNA, 25 bp, Homo sapien
tcagctgtttttgctttaatgtccc

SEQ ID NO: 5987428 - DNA, 25 bp, Homo sapien
attacaagcaaattgatgtgcattt

SEQ ID NO: 5987429 - DNA, 25 bp, Homo sapien
aaaatagttcagggagctctagtat

SEQ ID NO: 5987430 - DNA, 25 bp, Homo sapien
tattaaaatttctgattactgctcg

SEQ ID NO: 5987431 - DNA, 25 bp, Homo sapien
taattacaagcaaattgatgtgcat

SEQ ID NO: 5987432 - DNA, 25 bp, Homo sapien
gcgatttatctctgcagctcgttgg

SEQ ID NO: 5987433 - DNA, 25 bp, Homo sapien
tctgattactgctcgcgaacgtagt

SEQ ID NO: 5987434 - DNA, 25 bp, Homo sapien
tcaaattaccgattatgttccgcct

SEQ ID NO: 5987435 - DNA, 25 bp, Homo sapien
aaaaccaagactgattaccgtcaag

SEQ ID NO: 5987436 - DNA, 25 bp, Homo sapien
cagagatttaggtaatagtctagaa

SEQ ID NO: 5987437 - DNA, 25 bp, Homo sapien
aagtgcaaggttcatacgccatcgc

SEQ ID NO: 5987438 - DNA, 25 bp, Homo sapien
tcgtcaaattcaggtgtatcatccg

SEQ ID NO: 5987439 - DNA, 25 bp, Homo sapien
gcacagcacaacatagaaaccctag

SEQ ID NO: 5987440 - DNA, 25 bp, Homo sapien
ttgcgtgggataattacaagcaaat

SEQ ID NO: 5987441 - DNA, 25 bp, Homo sapien
tcgttggaaccatgttaatgacctt

SEQ ID NO: 5987442 - DNA, 25 bp, Homo sapien
gtgtgggtaaggttattatcggcac

SEQ ID NO: 5987443 - DNA, 25 bp, Homo sapien
gtacatccgaatgcggcaacatctg

SEQ ID NO: 5987444 - DNA, 25 bp, Homo sapien
aagcattcacttcagtacatccgaa

SEQ ID NO: 5987445 - DNA, 25 bp, Homo sapien
aagacactatgagcacaactgtcac

SEQ ID NO: 5987446 - DNA, 25 bp, Homo sapien
tattgatatctacattacaaacgtc

SEQ ID NO: 5987447 - DNA, 25 bp, Homo sapien
gtcggtgggttcaatccaagtttta

SEQ ID NO: 5987448 - DNA, 25 bp, Homo sapien
gaatgcggcaacatctgatgtgaat

SEQ ID NO: 5987449 - DNA, 25 bp, Homo sapien
tttctgattactgctcgcgaacgta

SEQ ID NO: 5987450 - DNA, 25 bp, Homo sapien
ctatgagcacaactgtcacatccac

SEQ ID NO: 5987451 - DNA, 25 bp, Homo sapien
ttgacactttcgttgctaagttaaa

SEQ ID NO: 5987452 - DNA, 25 bp, Homo sapien
aaaccctagtagtcccagactcagc

SEQ ID NO: 5987453 - DNA, 25 bp, Homo sapien
gtttgccaaaaaattagcacagcac

SEQ ID NO: 5987454 - DNA, 25 bp, Homo sapien
acagttaatcaaattaccgattatg

SEQ ID NO: 5987455 - DNA, 25 bp, Homo sapien
gtgaatgcgcccgagaatttagaac

SEQ ID NO: 5987456 - DNA, 25 bp, Homo sapien
gtgggttcaatccaagttttatata

SEQ ID NO: 5987457 - DNA, 25 bp, Homo sapien
attaccgattatgttccgcctgaaa

SEQ ID NO: 5987458 - DNA, 25 bp, Homo sapien
tatcaaggatcttatagatgagata

SEQ ID NO: 5987459 - DNA, 25 bp, Homo sapien
gatttaggtaatagtctagaaaaag

SEQ ID NO: 5987460 - DNA, 25 bp, Homo sapien
tactgctcgcgaacgtagtaataga

SEQ ID NO: 5987461 - DNA, 25 bp, Homo sapien
attatcggcactaaagccgtttttg

SEQ ID NO: 5987462 - DNA, 25 bp, Homo sapien
catccgttgctgaacctttgatttc

SEQ ID NO: 5987463 - DNA, 25 bp, Homo sapien
gttaaaaagaagacaagtgcaaggt

SEQ ID NO: 5987464 - DNA, 25 bp, Homo sapien
gagcacaactgtcacatccacatcc

SEQ ID NO: 5987465 - DNA, 25 bp, Homo sapien
tcggcactaaagccgtttttgtcaa

SEQ ID NO: 5987466 - DNA, 25 bp, Homo sapien
ataacaccaagaatgcacatgagtt

SEQ ID NO: 5987467 - DNA, 25 bp, Homo sapien
caaattgatgtgcatttggataaaa

SEQ ID NO: 5987468 - DNA, 25 bp, Homo sapien
atccgaatgcggcaacatctgatgt

SEQ ID NO: 5987469 - DNA, 25 bp, Homo sapien
gaatactggctgttttgagggatga

SEQ ID NO: 5987470 - DNA, 25 bp, Homo sapien
tgctattgatttgattcacgatcat

SEQ ID NO: 5987471 - DNA, 25 bp, Homo sapien
tgtgaatgttaccattgacactttc

SEQ ID NO: 5987472 - DNA, 25 bp, Homo sapien
ttttgctttaatgtcccgtgtgggt

SEQ ID NO: 5987473 - DNA, 25 bp, Homo sapien
tagaacatttacggttttagttaca

SEQ ID NO: 5987474 - DNA, 25 bp, Homo sapien
ctagaatggatccaagaaaaagatt

SEQ ID NO: 5987475 - DNA, 25 bp, Homo sapien
aaggtattcagcaaattgctattga

SEQ ID NO: 5987476 - DNA, 25 bp, Homo sapien
gtcccgtgtgggtaaggttattatc

SEQ ID NO: 5987477 - DNA, 25 bp, Homo sapien
tatctctgcagctcgttggaaccat

SEQ ID NO: 5987478 - DNA, 25 bp, Homo sapien
ccgaatgcggcaacatctgatgtga

SEQ ID NO: 5987479 - DNA, 25 bp, Homo sapien
ttacaaacgtcggtgggttcaatcc

SEQ ID NO: 5987480 - DNA, 25 bp, Homo sapien
ttattatcggcactaaagccgtttt

SEQ ID NO: 5987481 - DNA, 25 bp, Homo sapien
ctatatccgttcgacgtagagaagt

SEQ ID NO: 5987482 - DNA, 25 bp, Homo sapien
gattcacgatcatgagattttatta

SEQ ID NO: 5987483 - DNA, 25 bp, Homo sapien
acgtaattagaagaatactggctgt

SEQ ID NO: 5987484 - DNA, 25 bp, Homo sapien
gctcgcgaacgtagtaatagaacat

SEQ ID NO: 5987485 - DNA, 25 bp, Homo sapien
gctgttttgagggatgaagtagaag

SEQ ID NO: 5987486 - DNA, 25 bp, Homo sapien
ggtaatagtctagaaaaagctcatc

SEQ ID NO: 5987487 - DNA, 25 bp, Homo sapien
acaaatcagagatttaggtaatagt

SEQ ID NO: 5987488 - DNA, 25 bp, Homo sapien
gtcaaattcaggtgtatcatccgtt

SEQ ID NO: 5987489 - DNA, 25 bp, Homo sapien
tttcgttgctaagttaaaaagaaga

SEQ ID NO: 5987490 - DNA, 25 bp, Homo sapien
tcccagactcagctgtttttgcttt

SEQ ID NO: 5987491 - DNA, 25 bp, Homo sapien
ggtgggtcccaacgtatattaccta

SEQ ID NO: 5987492 - DNA, 25 bp, Homo sapien
ggagcaacctcatcagaatagaaaa

SEQ ID NO: 5987493 - DNA, 25 bp, Homo sapien
aagctcatcctactgctttcagttg

SEQ ID NO: 5987494 - DNA, 25 bp, Homo sapien
ctgctcgcgaacgtagtaatagaac

SEQ ID NO: 5987495 - DNA, 25 bp, Homo sapien
tagaagaagacactatgagcacaac

SEQ ID NO: 5987496 - DNA, 25 bp, Homo sapien
ggggactatctcgtcaaattcaggt

SEQ ID NO: 5987497 - DNA, 25 bp, Homo sapien
tccaagttttatatatcgtattgcg

SEQ ID NO: 5987498 - DNA, 25 bp, Homo sapien
atttgctgttgcaggtttgtataag

SEQ ID NO: 5987499 - DNA, 25 bp, Homo sapien
aggtttgtataagctttctcctcta

SEQ ID NO: 5987500 - DNA, 25 bp, Homo sapien
ttaccattgacactttcgttgctaa

SEQ ID NO: 5987501 - DNA, 25 bp, Homo sapien
actatctcgtcaaattcaggtgtat

SEQ ID NO: 5987502 - DNA, 25 bp, Homo sapien
cacaacatagaaaccctagtagtcc

SEQ ID NO: 5987503 - DNA, 25 bp, Homo sapien
aaggttcatacgccatcgccttgga

SEQ ID NO: 5987504 - DNA, 25 bp, Homo sapien
gaatgcacatgagtttgccaaaaaa

SEQ ID NO: 5987505 - DNA, 25 bp, Homo sapien
aaatcagagatttaggtaatagtct

SEQ ID NO: 5987506 - DNA, 25 bp, Homo sapien
gcgcccgagaatttagaacccctgt

SEQ ID NO: 5987507 - DNA, 25 bp, Homo sapien
tgtcgaatttggtgggtcccaacgt

SEQ ID NO: 5987508 - DNA, 25 bp, Homo sapien
cacatccacatccgttgctgaacct

SEQ ID NO: 5987509 - DNA, 25 bp, Homo sapien
gaatgcgcccgagaatttagaaccc

SEQ ID NO: 5987510 - DNA, 25 bp, Homo sapien
cctagtagtcccagactcagctgtt

SEQ ID NO: 5987511 - DNA, 25 bp, Homo sapien
agaagaatactggctgttttgaggg

SEQ ID NO: 5987512 - DNA, 25 bp, Homo sapien
tcatccgtttgtgaatgcgcccgag

SEQ ID NO: 5987513 - DNA, 25 bp, Homo sapien
tgcatttggataaaaataaggcgtg

SEQ ID NO: 5987514 - DNA, 25 bp, Homo sapien
accattgacactttcgttgctaagt

SEQ ID NO: 5987515 - DNA, 25 bp, Homo sapien
cctttgatttcctctatgtttaatt

SEQ ID NO: 5987516 - DNA, 25 bp, Homo sapien
gttacagaggggttccctaataaca

SEQ ID NO: 5987517 - DNA, 25 bp, Homo sapien
aacaccaagaatgcacatgagtttg

SEQ ID NO: 5987518 - DNA, 25 bp, Homo sapien
gctttcagttgcggtaacgtaatta

SEQ ID NO: 5987519 - DNA, 25 bp, Homo sapien
cgatcatgagattttattaactccc

SEQ ID NO: 5987520 - DNA, 25 bp, Homo sapien
cacgatcatgagattttattaactc

SEQ ID NO: 5987521 - DNA, 25 bp, Homo sapien
ctcccacacctgattcaaaaaccgt

SEQ ID NO: 5987522 - DNA, 25 bp, Homo sapien
agccattcagggtatcaaggatctt

SEQ ID NO: 5987523 - DNA, 25 bp, Homo sapien
attgatttgattcacgatcatgaga

SEQ ID NO: 5987524 - DNA, 25 bp, Homo sapien
ggactatctcgtcaaattcaggtgt

SEQ ID NO: 5987525 - DNA, 25 bp, Homo sapien
aactgtcacatccacatccgttgct

SEQ ID NO: 5987526 - DNA, 25 bp, Homo sapien
tggaaccatgttaatgaccttattg

SEQ ID NO: 5987527 - DNA, 25 bp, Homo sapien
cattacaaacgtcggtgggttcaat

SEQ ID NO: 5987528 - DNA, 25 bp, Homo sapien
gggataattacaagcaaattgatgt

SEQ ID NO: 5987529 - DNA, 25 bp, Homo sapien
acatagaaaccctagtagtcccaga

SEQ ID NO: 5987530 - DNA, 25 bp, Homo sapien
atatcgtattgcgtgggataattac

SEQ ID NO: 5987531 - DNA, 25 bp, Homo sapien
cattgatgaaggtattcagcaaatt

SEQ ID NO: 5987532 - DNA, 25 bp, Homo sapien
tgaatgttaccattgacactttcgt

SEQ ID NO: 5987533 - DNA, 25 bp, Homo sapien
tcaagcattcacttcagtacatccg

SEQ ID NO: 5987534 - DNA, 25 bp, Homo sapien
aagaatgcacatgagtttgccaaaa

SEQ ID NO: 5987535 - DNA, 25 bp, Homo sapien
agcacaacatagaaaccctagtagt

SEQ ID NO: 5987536 - DNA, 25 bp, Homo sapien
ttcacgatcatgagattttattaac

SEQ ID NO: 5987537 - DNA, 25 bp, Homo sapien
ttgctgaacctttgatttcctctat

SEQ ID NO: 5987538 - DNA, 25 bp, Homo sapien
tacgccatcgccttggaaactttac

SEQ ID NO: 5987539 - DNA, 25 bp, Homo sapien
tccacatccgttgctgaacctttga

SEQ ID NO: 5987540 - DNA, 25 bp, Homo sapien
tttcagttgcggtaacgtaattaga

SEQ ID NO: 5987541 - DNA, 25 bp, Homo sapien
gtgcaaggttcatacgccatcgcct

SEQ ID NO: 5987542 - DNA, 25 bp, Homo sapien
caagcaaattgatgtgcatttggat

SEQ ID NO: 5987543 - DNA, 25 bp, Homo sapien
tatattacctagaatggatccaaga

SEQ ID NO: 5987544 - DNA, 25 bp, Homo sapien
tttgagggatgaagtagaagaagac

SEQ ID NO: 5987545 - DNA, 25 bp, Homo sapien
ttgcaggtttgtataagctttctcc

SEQ ID NO: 5987546 - DNA, 25 bp, Homo sapien
tattcagcaaattgctattgatttg

SEQ ID NO: 5987547 - DNA, 25 bp, Homo sapien
cgccttggaaactttacaactgtta

SEQ ID NO: 5987548 - DNA, 25 bp, Homo sapien
agaatttagaacccctgtatttgct

SEQ ID NO: 5987549 - DNA, 25 bp, Homo sapien
aaaaattagcacagcacaacataga

SEQ ID NO: 5987550 - DNA, 25 bp, Homo sapien
gtcctctcaagcattcacttcagta

SEQ ID NO: 5987551 - DNA, 25 bp, Homo sapien
gcggcaacatctgatgtgaatgtta

SEQ ID NO: 5987552 - DNA, 25 bp, Homo sapien
ataaaaaacattgatgaaggtattc

SEQ ID NO: 5987553 - DNA, 25 bp, Homo sapien
tgagggatgaagtagaagaagacac

SEQ ID NO: 5987554 - DNA, 25 bp, Homo sapien
agacaagtgcaaggttcatacgcca

SEQ ID NO: 5987555 - DNA, 25 bp, Homo sapien
ttttatatatcgtattgcgtgggat

SEQ ID NO: 5987556 - DNA, 25 bp, Homo sapien
cagaaaccggagcaacctcatcaga

SEQ ID NO: 5987557 - DNA, 25 bp, Homo sapien
tatcatccgtttgtgaatgcgcccg

SEQ ID NO: 5987558 - DNA, 25 bp, Homo sapien
tagcacagcacaacatagaaaccct

SEQ ID NO: 5987559 - DNA, 25 bp, Homo sapien
catccacatccgttgctgaaccttt

SEQ ID NO: 5987560 - DNA, 25 bp, Homo sapien
gttggaaccatgttaatgaccttat

SEQ ID NO: 5987561 - DNA, 25 bp, Homo sapien
ttacaactgttaatgcgatttatct

SEQ ID NO: 5987562 - DNA, 25 bp, Homo sapien
ctctatatccgttcgacgtagagaa

SEQ ID NO: 5987563 - DNA, 25 bp, Homo sapien
gagaagtttgtcgaatttggtgggt

SEQ ID NO: 5987564 - DNA, 25 bp, Homo sapien
tttgtcgaatttggtgggtcccaac

SEQ ID NO: 5987565 - DNA, 25 bp, Homo sapien
tttattaactcccacacctgattca

SEQ ID NO: 5987566 - DNA, 25 bp, Homo sapien
aatagttcagggagctctagtatga

SEQ ID NO: 5987567 - DNA, 25 bp, Homo sapien
acatgagtttgccaaaaaattagca

SEQ ID NO: 5987568 - DNA, 25 bp, Homo sapien
atccgtttgtgaatgcgcccgagaa

SEQ ID NO: 5987569 - DNA, 25 bp, Homo sapien
ctgattaccgtcaagtagccattca

SEQ ID NO: 5987570 - DNA, 25 bp, Homo sapien
gaaaaagctcatcctactgctttca

SEQ ID NO: 5987571 - DNA, 25 bp, Homo sapien
gatatctacattacaaacgtcggtg

SEQ ID NO: 5987572 - DNA, 25 bp, Homo sapien
agcaaattgatgtgcatttggataa

SEQ ID NO: 5987573 - DNA, 25 bp, Homo sapien
tcgacgtagagaagtttgtcgaatt

SEQ ID NO: 5987574 - DNA, 25 bp, Homo sapien
gtagccattcagggtatcaaggatc

SEQ ID NO: 5987575 - DNA, 25 bp, Homo sapien
gaagaagacactatgagcacaactg

SEQ ID NO: 5987576 - DNA, 25 bp, Homo sapien
tgaccttattgaacaaatcagagat

SEQ ID NO: 5987577 - DNA, 25 bp, Homo sapien
aatgaccttattgaacaaatcagag

SEQ ID NO: 5987578 - DNA, 25 bp, Homo sapien
accgtattaaaatttctgattactg

SEQ ID NO: 5987579 - DNA, 25 bp, Homo sapien
gatttatctctgcagctcgttggaa

SEQ ID NO: 5987580 - DNA, 25 bp, Homo sapien
cattgacactttcgttgctaagtta

SEQ ID NO: 5987581 - DNA, 25 bp, Homo sapien
caaaaaattagcacagcacaacata

SEQ ID NO: 5987582 - DNA, 25 bp, Homo sapien
tattaactcccacacctgattcaaa

SEQ ID NO: 5987583 - DNA, 25 bp, Homo sapien
tatgtttaatttattacagaaaccg

SEQ ID NO: 5987584 - DNA, 25 bp, Homo sapien
tcatcctactgctttcagttgcggt

SEQ ID NO: 5987585 - DNA, 25 bp, Homo sapien
cgtatattacctagaatggatccaa

SEQ ID NO: 5987586 - DNA, 25 bp, Homo sapien
gtgggataattacaagcaaattgat

SEQ ID NO: 5987587 - DNA, 25 bp, Homo sapien
ttgccaaaaaattagcacagcacaa

SEQ ID NO: 5987588 - DNA, 25 bp, Homo sapien
tgaacctttgatttcctctatgttt

SEQ ID NO: 5987589 - DNA, 25 bp, Homo sapien
gtcacatccacatccgttgctgaac

SEQ ID NO: 5987590 - DNA, 25 bp, Homo sapien
ctagtatgaaaaccaagactgatta

SEQ ID NO: 5987591 - DNA, 25 bp, Homo sapien
cgttgctgaacctttgatttcctct

SEQ ID NO: 5987592 - DNA, 25 bp, Homo sapien
atagaaaccctagtagtcccagact

SEQ ID NO: 5987593 - DNA, 25 bp, Homo sapien
atttgattcacgatcatgagatttt

SEQ ID NO: 5987594 - DNA, 25 bp, Homo sapien
tcagggagctctagtatgaaaacca

SEQ ID NO: 5987595 - DNA, 25 bp, Homo sapien
gactgattaccgtcaagtagccatt

SEQ ID NO: 5987596 - DNA, 25 bp, Homo sapien
tactgctttcagttgcggtaacgta

SEQ ID NO: 5987597 - DNA, 25 bp, Homo sapien
ggcaacatctgatgtgaatgttacc

SEQ ID NO: 5987598 - DNA, 25 bp, Homo sapien
tttaatttattacagaaaccggagc

SEQ ID NO: 5987599 - DNA, 25 bp, Homo sapien
ctgtcacatccacatccgttgctga

SEQ ID NO: 5987600 - DNA, 25 bp, Homo sapien
gctcgttggaaccatgttaatgacc

SEQ ID NO: 5987601 - DNA, 25 bp, Homo sapien
cactatgagcacaactgtcacatcc

SEQ ID NO: 5987602 - DNA, 25 bp, Homo sapien
aatattgatatctacattacaaacg

SEQ ID NO: 5987603 - DNA, 25 bp, Homo sapien
atgcgatttatctctgcagctcgtt

SEQ ID NO: 5987604 - DNA, 25 bp, Homo sapien
aatttctgattactgctcgcgaacg

SEQ ID NO: 5987605 - DNA, 25 bp, Homo sapien
cttggaaactttacaactgttaatg

SEQ ID NO: 5987606 - DNA, 25 bp, Homo sapien
agctgtttttgctttaatgtcccgt

SEQ ID NO: 5987607 - DNA, 25 bp, Homo sapien
tgtttaatttattacagaaaccgga

SEQ ID NO: 5987608 - DNA, 25 bp, Homo sapien
gctcatcctactgctttcagttgcg

SEQ ID NO: 5987609 - DNA, 25 bp, Homo sapien
tattgcgtgggataattacaagcaa

SEQ ID NO: 5987610 - DNA, 25 bp, Homo sapien
atgcggcaacatctgatgtgaatgt

SEQ ID NO: 5987611 - DNA, 25 bp, Homo sapien
aatttagaacccctgtatttgctgt

SEQ ID NO: 5987612 - DNA, 25 bp, Homo sapien
tctacattacaaacgtcggtgggtt

SEQ ID NO: 5987613 - DNA, 25 bp, Homo sapien
acttcagtacatccgaatgcggcaa

SEQ ID NO: 5987614 - DNA, 25 bp, Homo sapien
tccgcctgaaaatattgatatctac

SEQ ID NO: 5987615 - DNA, 25 bp, Homo sapien
ttaccgtcaagtagccattcagggt

SEQ ID NO: 5987616 - DNA, 25 bp, Homo sapien
tgtgcatttggataaaaataaggcg

SEQ ID NO: 5987617 - DNA, 25 bp, Homo sapien
gaagacaagtgcaaggttcatacgc

SEQ ID NO: 5987618 - DNA, 25 bp, Homo sapien
accttattgaacaaatcagagattt

SEQ ID NO: 5987619 - DNA, 25 bp, Homo sapien
tgagattttattaactcccacacct

SEQ ID NO: 5987620 - DNA, 25 bp, Homo sapien
tagtagtcccagactcagctgtttt

SEQ ID NO: 5987621 - DNA, 25 bp, Homo sapien
ctgatgtgaatgttaccattgacac

SEQ ID NO: 5987622 - DNA, 25 bp, Homo sapien
ccaacgtatattacctagaatggat

SEQ ID NO: 5987623 - DNA, 25 bp, Homo sapien
accatgttaatgaccttattgaaca

SEQ ID NO: 5987624 - DNA, 25 bp, Homo sapien
ccatcgccttggaaactttacaact

SEQ ID NO: 5987625 - DNA, 25 bp, Homo sapien
caacctcatcagaatagaaaaaata

SEQ ID NO: 5987626 - DNA, 25 bp, Homo sapien
ccgttcgacgtagagaagtttgtcg

SEQ ID NO: 5987627 - DNA, 25 bp, Homo sapien
attttattaactcccacacctgatt

SEQ ID NO: 5987628 - DNA, 25 bp, Homo sapien
aagctttctcctctatatccgttcg

SEQ ID NO: 5987629 - DNA, 25 bp, Homo sapien
tggaaactttacaactgttaatgcg

SEQ ID NO: 5987630 - DNA, 25 bp, Homo sapien
atctgatgtgaatgttaccattgac

SEQ ID NO: 5987631 - DNA, 25 bp, Homo sapien
agaaaccctagtagtcccagactca

SEQ ID NO: 5987632 - DNA, 25 bp, Homo sapien
tctctgcagctcgttggaaccatgt

SEQ ID NO: 5987633 - DNA, 25 bp, Homo sapien
ccgattatgttccgcctgaaaatat

SEQ ID NO: 5987634 - DNA, 25 bp, Homo sapien
atagtctagaaaaagctcatcctac

SEQ ID NO: 5987635 - DNA, 25 bp, Homo sapien
ggtatcaaggatcttatagatgaga

SEQ ID NO: 5987636 - DNA, 25 bp, Homo sapien
tgatttgattcacgatcatgagatt

SEQ ID NO: 5987637 - DNA, 25 bp, Homo sapien
ccaagactgattaccgtcaagtagc

SEQ ID NO: 5987638 - DNA, 25 bp, Homo sapien
aaaagctcatcctactgctttcagt

SEQ ID NO: 5987639 - DNA, 25 bp, Homo sapien
ttatatatcgtattgcgtgggataa

SEQ ID NO: 5987640 - DNA, 25 bp, Homo sapien
caagttttatatatcgtattgcgtg

SEQ ID NO: 5987641 - DNA, 25 bp, Homo sapien
gtatttgctgttgcaggtttgtata

SEQ ID NO: 5987642 - DNA, 25 bp, Homo sapien
ttgatgaaggtattcagcaaattgc

SEQ ID NO: 5987643 - DNA, 25 bp, Homo sapien
gctgttgcaggtttgtataagcttt

SEQ ID NO: 5987644 - DNA, 25 bp, Homo sapien
tctcaagcattcacttcagtacatc

SEQ ID NO: 5987645 - DNA, 25 bp, Homo sapien
cgtattaaaatttctgattactgct

SEQ ID NO: 5987646 - DNA, 25 bp, Homo sapien
taccgattatgttccgcctgaaaat

SEQ ID NO: 5987647 - DNA, 25 bp, Homo sapien
ccagactcagctgtttttgctttaa

SEQ ID NO: 5987648 - DNA, 25 bp, Homo sapien
agttgcggtaacgtaattagaagaa

SEQ ID NO: 5987649 - DNA, 25 bp, Homo sapien
tgcagctcgttggaaccatgttaat

SEQ ID NO: 5987650 - DNA, 25 bp, Homo sapien
acatccgaatgcggcaacatctgat

SEQ ID NO: 5987651 - DNA, 25 bp, Homo sapien
gaagtttgtcgaatttggtgggtcc

SEQ ID NO: 5987652 - DNA, 25 bp, Homo sapien
tacagaggggttccctaataacacc

SEQ ID NO: 5987653 - DNA, 25 bp, Homo sapien
agaaaaaatagttcagggagctcta

SEQ ID NO: 5987654 - DNA, 25 bp, Homo sapien
tctcgtcaaattcaggtgtatcatc

SEQ ID NO: 5987655 - DNA, 25 bp, Homo sapien
tgaaaatattgatatctacattaca

SEQ ID NO: 5987656 - DNA, 25 bp, Homo sapien
gctgaacctttgatttcctctatgt

SEQ ID NO: 5987657 - DNA, 25 bp, Homo sapien
gcaggtttgtataagctttctcctc

SEQ ID NO: 5987658 - DNA, 25 bp, Homo sapien
aagttaaaaagaagacaagtgcaag

SEQ ID NO: 5987659 - DNA, 25 bp, Homo sapien
tggatccaagaaaaagattagatac

SEQ ID NO: 5987660 - DNA, 25 bp, Homo sapien
tctcctctatatccgttcgacgtag

SEQ ID NO: 5987661 - DNA, 25 bp, Homo sapien
aaattaccgattatgttccgcctga

SEQ ID NO: 5987662 - DNA, 25 bp, Homo sapien
tgctaagttaaaaagaagacaagtg

SEQ ID NO: 5987663 - DNA, 25 bp, Homo sapien
tccctaataacaccaagaatgcaca

SEQ ID NO: 5987664 - DNA, 25 bp, Homo sapien
gttcaatccaagttttatatatcgt

SEQ ID NO: 5987665 - DNA, 25 bp, Homo sapien
ggttattatcggcactaaagccgtt

SEQ ID NO: 5987666 - DNA, 25 bp, Homo sapien
tcacttcagtacatccgaatgcggc

SEQ ID NO: 5987667 - DNA, 25 bp, Homo sapien
tggctgttttgagggatgaagtaga

SEQ ID NO: 5987668 - DNA, 25 bp, Homo sapien
agggatgaagtagaagaagacacta

SEQ ID NO: 5987669 - DNA, 25 bp, Homo sapien
caaattcaggtgtatcatccgtttg

SEQ ID NO: 5987670 - DNA, 25 bp, Homo sapien
ggagctctagtatgaaaaccaagac

SEQ ID NO: 5987671 - DNA, 25 bp, Homo sapien
tgtatcatccgtttgtgaatgcgcc

SEQ ID NO: 5987672 - DNA, 25 bp, Homo sapien
catgttaatgaccttattgaacaaa

SEQ ID NO: 5987673 - DNA, 25 bp, Homo sapien
taatttattacagaaaccggagcaa

SEQ ID NO: 5987674 - DNA, 25 bp, Homo sapien
ttagaagaatactggctgttttgag

SEQ ID NO: 5987675 - DNA, 25 bp, Homo sapien
atcctactgctttcagttgcggtaa

SEQ ID NO: 5987676 - DNA, 25 bp, Homo sapien
cacctgattcaaaaaccgtattaaa

SEQ ID NO: 5987677 - DNA, 25 bp, Homo sapien
tctgcagctcgttggaaccatgtta

SEQ ID NO: 5987678 - DNA, 25 bp, Homo sapien
aagaatactggctgttttgagggat

SEQ ID NO: 5987679 - DNA, 25 bp, Homo sapien
attgctattgatttgattcacgatc

SEQ ID NO: 5987680 - DNA, 25 bp, Homo sapien
ttagatacagttaatcaaattaccg

SEQ ID NO: 5987681 - DNA, 25 bp, Homo sapien
cagaggggttccctaataacaccaa

SEQ ID NO: 5987682 - DNA, 25 bp, Homo sapien
tagtaatagaacatttacggtttta

SEQ ID NO: 5987683 - DNA, 25 bp, Homo sapien
aattcaggtgtatcatccgtttgtg

SEQ ID NO: 5987684 - DNA, 25 bp, Homo sapien
tgatttcctctatgtttaatttatt

SEQ ID NO: 5987685 - DNA, 25 bp, Homo sapien
agactcagctgtttttgctttaatg

SEQ ID NO: 5987686 - DNA, 25 bp, Homo sapien
atgttccgcctgaaaatattgatat

SEQ ID NO: 5987687 - DNA, 25 bp, Homo sapien
tagaaaaagctcatcctactgcttt

SEQ ID NO: 5987688 - DNA, 25 bp, Homo sapien
agtctagaaaaagctcatcctactg

SEQ ID NO: 5987689 - DNA, 25 bp, Homo sapien
cgccatcgccttggaaactttacaa

SEQ ID NO: 5987690 - DNA, 25 bp, Homo sapien
tattacctagaatggatccaagaaa

SEQ ID NO: 5987691 - DNA, 25 bp, Homo sapien
tattgaacaaatcagagatttaggt

SEQ ID NO: 5987692 - DNA, 25 bp, Homo sapien
tacattacaaacgtcggtgggttca

SEQ ID NO: 5987693 - DNA, 25 bp, Homo sapien
aaaatattgatatctacattacaaa

SEQ ID NO: 5987694 - DNA, 25 bp, Homo sapien
atacagttaatcaaattaccgatta

SEQ ID NO: 5987695 - DNA, 25 bp, Homo sapien
tacagaaaccggagcaacctcatca

SEQ ID NO: 5987696 - DNA, 25 bp, Homo sapien
gcaaattgctattgatttgattcac

SEQ ID NO: 5987697 - DNA, 25 bp, Homo sapien
acaactgtcacatccacatccgttg

SEQ ID NO: 5987698 - DNA, 25 bp, Homo sapien
gggtaaggttattatcggcactaaa

SEQ ID NO: 5987699 - DNA, 25 bp, Homo sapien
tgattactgctcgcgaacgtagtaa

SEQ ID NO: 5987700 - DNA, 25 bp, Homo sapien
gtcaatggggggactatctcgtcaa

SEQ ID NO: 5987701 - DNA, 25 bp, Homo sapien
ttgctttaatgtcccgtgtgggtaa

SEQ ID NO: 5987702 - DNA, 25 bp, Homo sapien
cctctatgtttaatttattacagaa

SEQ ID NO: 5987703 - DNA, 25 bp, Homo sapien
atcgccttggaaactttacaactgt

SEQ ID NO: 5987704 - DNA, 25 bp, Homo sapien
accgtcaagtagccattcagggtat

SEQ ID NO: 5987705 - DNA, 25 bp, Homo sapien
aatccaagttttatatatcgtattg

SEQ ID NO: 5987706 - DNA, 25 bp, Homo sapien
agttttatatatcgtattgcgtggg

SEQ ID NO: 5987707 - DNA, 25 bp, Homo sapien
ggcactaaagccgtttttgtcaatg

SEQ ID NO: 5987708 - DNA, 25 bp, Homo sapien
ttggtgggtcccaacgtatattacc

SEQ ID NO: 5987709 - DNA, 25 bp, Homo sapien
ttgtataagctttctcctctatatc

SEQ ID NO: 5987710 - DNA, 25 bp, Homo sapien
tagttcagggagctctagtatgaaa

SEQ ID NO: 5987711 - DNA, 25 bp, Homo sapien
gcgtgggataattacaagcaaattg

SEQ ID NO: 5987712 - DNA, 25 bp, Homo sapien
ctgctttcagttgcggtaacgtaat

SEQ ID NO: 5987713 - DNA, 25 bp, Homo sapien
ttattacagaaaccggagcaacctc

SEQ ID NO: 5987714 - DNA, 25 bp, Homo sapien
ttagttacagaggggttccctaata

SEQ ID NO: 5987715 - DNA, 25 bp, Homo sapien
tctatgtttaatttattacagaaac

SEQ ID NO: 5987716 - DNA, 25 bp, Homo sapien
aagtagccattcagggtatcaagga

SEQ ID NO: 5987717 - DNA, 25 bp, Homo sapien
ccgtgtgggtaaggttattatcggc

SEQ ID NO: 5987718 - DNA, 25 bp, Homo sapien
gattaccgtcaagtagccattcagg

SEQ ID NO: 5987719 - DNA, 25 bp, Homo sapien
aaggttattatcggcactaaagccg

SEQ ID NO: 5987720 - DNA, 25 bp, Homo sapien
catgagattttattaactcccacac

SEQ ID NO: 5987721 - DNA, 25 bp, Homo sapien
ttaactcccacacctgattcaaaaa

SEQ ID NO: 5987722 - DNA, 25 bp, Homo sapien
taggtaatagtctagaaaaagctca

SEQ ID NO: 5987723 - DNA, 25 bp, Homo sapien
gcccgagaatttagaacccctgtat

SEQ ID NO: 5987724 - DNA, 25 bp, Homo sapien
ggatcttatagatgagataaaaaac

SEQ ID NO: 5987725 - DNA, 25 bp, Homo sapien
tcctctatatccgttcgacgtagag

SEQ ID NO: 5987726 - DNA, 25 bp, Homo sapien
gcattcacttcagtacatccgaatg

SEQ ID NO: 5987727 - DNA, 25 bp, Homo sapien
ttcaggtgtatcatccgtttgtgaa

SEQ ID NO: 5987728 - DNA, 25 bp, Homo sapien
atgtcccgtgtgggtaaggttatta

SEQ ID NO: 5987729 - DNA, 25 bp, Homo sapien
ctgttaatgcgatttatctctgcag

SEQ ID NO: 5987730 - DNA, 25 bp, Homo sapien
ggggggactatctcgtcaaattcag

SEQ ID NO: 5987731 - DNA, 25 bp, Homo sapien
aacattgatgaaggtattcagcaaa

SEQ ID NO: 5987732 - DNA, 25 bp, Homo sapien
aatcaaattaccgattatgttccgc

SEQ ID NO: 5987733 - DNA, 25 bp, Homo sapien
tgaaaaccaagactgattaccgtca

SEQ ID NO: 5987734 - DNA, 25 bp, Homo sapien
agtcccagactcagctgtttttgct

SEQ ID NO: 5987735 - DNA, 25 bp, Homo sapien
tatctacattacaaacgtcggtggg

SEQ ID NO: 5987736 - DNA, 25 bp, Homo sapien
tccaagaaaaagattagatacagtt

SEQ ID NO: 5987737 - DNA, 25 bp, Homo sapien
ggtgtatcatccgtttgtgaatgcg

SEQ ID NO: 5987738 - DNA, 25 bp, Homo sapien
cgtagagaagtttgtcgaatttggt

SEQ ID NO: 5987739 - DNA, 25 bp, Homo sapien
tttgatttcctctatgtttaattta

SEQ ID NO: 5987740 - DNA, 25 bp, Homo sapien
ccattcagggtatcaaggatcttat

SEQ ID NO: 5987741 - DNA, 25 bp, Homo sapien
tccgttgctgaacctttgatttcct

SEQ ID NO: 5987742 - DNA, 25 bp, Homo sapien
ccctgtatttgctgttgcaggtttg

SEQ ID NO: 5987743 - DNA, 25 bp, Homo sapien
tttaggtaatagtctagaaaaagct

SEQ ID NO: 5987744 - DNA, 25 bp, Homo sapien
gggttccctaataacaccaagaatg

SEQ ID NO: 5987745 - DNA, 25 bp, Homo sapien
aattagaagaatactggctgttttg

SEQ ID NO: 5987746 - DNA, 25 bp, Homo sapien
tttatctctgcagctcgttggaacc

SEQ ID NO: 5987747 - DNA, 25 bp, Homo sapien
aaaatttctgattactgctcgcgaa

SEQ ID NO: 5987748 - DNA, 25 bp, Homo sapien
gcgaacgtagtaatagaacatttac

SEQ ID NO: 5987749 - DNA, 25 bp, Homo sapien
cttattgaacaaatcagagatttag

SEQ ID NO: 5987750 - DNA, 25 bp, Homo sapien
aacctttgatttcctctatgtttaa

SEQ ID NO: 5987751 - DNA, 25 bp, Homo sapien
cggtgggttcaatccaagttttata

SEQ ID NO: 5987752 - DNA, 25 bp, Homo sapien
cactttcgttgctaagttaaaaaga

SEQ ID NO: 5987753 - DNA, 25 bp, Homo sapien
gagtttgccaaaaaattagcacagc

SEQ ID NO: 5987754 - DNA, 25 bp, Homo sapien
aaaaaacattgatgaaggtattcag

SEQ ID NO: 5987755 - DNA, 25 bp, Homo sapien
cacatccgttgctgaacctttgatt

SEQ ID NO: 5987756 - DNA, 25 bp, Homo sapien
ccaagaatgcacatgagtttgccaa

SEQ ID NO: 5987757 - DNA, 25 bp, Homo sapien
gcggtaacgtaattagaagaatact

SEQ ID NO: 5987758 - DNA, 25 bp, Homo sapien
gtttttgtcaatggggggactatct

SEQ ID NO: 5987759 - DNA, 25 bp, Homo sapien
gatccaagaaaaagattagatacag

SEQ ID NO: 5987760 - DNA, 25 bp, Homo sapien
acatctgatgtgaatgttaccattg

SEQ ID NO: 5987761 - DNA, 25 bp, Homo sapien
acccctgtatttgctgttgcaggtt

SEQ ID NO: 5987762 - DNA, 25 bp, Homo sapien
cagcaaattgctattgatttgattc

SEQ ID NO: 5987763 - DNA, 25 bp, Homo sapien
caatggggggactatctcgtcaaat

SEQ ID NO: 5987764 - DNA, 25 bp, Homo sapien
ttcagcaaattgctattgatttgat

SEQ ID NO: 5987765 - DNA, 25 bp, Homo sapien
ttaatcaaattaccgattatgttcc

SEQ ID NO: 5987766 - DNA, 25 bp, Homo sapien
atgtcctctcaagcattcacttcag

SEQ ID NO: 5987767 - DNA, 25 bp, Homo sapien
tcaatccaagttttatatatcgtat

SEQ ID NO: 5987768 - DNA, 25 bp, Homo sapien
ggatgaagtagaagaagacactatg

SEQ ID NO: 5987769 - DNA, 25 bp, Homo sapien
gaggggttccctaataacaccaaga

SEQ ID NO: 5987770 - DNA, 25 bp, Homo sapien
cctactgctttcagttgcggtaacg

SEQ ID NO: 5987771 - DNA, 25 bp, Homo sapien
cgtattgcgtgggataattacaagc

SEQ ID NO: 5987772 - DNA, 25 bp, Homo sapien
tttctcctctatatccgttcgacgt

SEQ ID NO: 5987773 - DNA, 25 bp, Homo sapien
tagagaagtttgtcgaatttggtgg

SEQ ID NO: 5987774 - DNA, 25 bp, Homo sapien
atactggctgttttgagggatgaag

SEQ ID NO: 5987775 - DNA, 25 bp, Homo sapien
gaaaccggagcaacctcatcagaat

SEQ ID NO: 5987776 - DNA, 25 bp, Homo sapien
aatggatccaagaaaaagattagat

SEQ ID NO: 5987777 - DNA, 25 bp, Homo sapien
ttcatacgccatcgccttggaaact

SEQ ID NO: 5987778 - DNA, 25 bp, Homo sapien
aaattagcacagcacaacatagaaa

SEQ ID NO: 5987779 - DNA, 25 bp, Homo sapien
aatgttaccattgacactttcgttg

SEQ ID NO: 5987780 - DNA, 25 bp, Homo sapien
attagcacagcacaacatagaaacc

SEQ ID NO: 5987781 - DNA, 25 bp, Homo sapien
gttccgcctgaaaatattgatatct

SEQ ID NO: 5987782 - DNA, 25 bp, Homo sapien
tcccaacgtatattacctagaatgg

SEQ ID NO: 5987783 - DNA, 25 bp, Homo sapien
gaacgtagtaatagaacatttacgg

SEQ ID NO: 5987784 - DNA, 25 bp, Homo sapien
ggtattcagcaaattgctattgatt

SEQ ID NO: 5987785 - DNA, 25 bp, Homo sapien
gagatttaggtaatagtctagaaaa

SEQ ID NO: 5987786 - DNA, 25 bp, Homo sapien
atatccgttcgacgtagagaagttt

SEQ ID NO: 5987787 - DNA, 25 bp, Homo sapien
acaaacgtcggtgggttcaatccaa

SEQ ID NO: 5987788 - DNA, 25 bp, Homo sapien
gccaaaaaattagcacagcacaaca

SEQ ID NO: 5987789 - DNA, 25 bp, Homo sapien
agaatggatccaagaaaaagattag

SEQ ID NO: 5987790 - DNA, 25 bp, Homo sapien
aaccggagcaacctcatcagaatag

SEQ ID NO: 5987791 - DNA, 25 bp, Homo sapien
atcagagatttaggtaatagtctag

SEQ ID NO: 5987792 - DNA, 25 bp, Homo sapien
aaaagaagacaagtgcaaggttcat

SEQ ID NO: 5987793 - DNA, 25 bp, Homo sapien
ggtaacgtaattagaagaatactgg

SEQ ID NO: 5987794 - DNA, 25 bp, Homo sapien
agtatgaaaaccaagactgattacc

SEQ ID NO: 5987795 - DNA, 25 bp, Homo sapien
atatatcgtattgcgtgggataatt

SEQ ID NO: 5987796 - DNA, 25 bp, Homo sapien
ttcctctatgtttaatttattacag

SEQ ID NO: 5987797 - DNA, 25 bp, Homo sapien
ttaatgaccttattgaacaaatcag

SEQ ID NO: 5987798 - DNA, 25 bp, Homo sapien
agctctagtatgaaaaccaagactg

SEQ ID NO: 5987799 - DNA, 25 bp, Homo sapien
gcacatgagtttgccaaaaaattag

SEQ ID NO: 5987800 - DNA, 25 bp, Homo sapien
gttccctaataacaccaagaatgca

SEQ ID NO: 5987801 - DNA, 25 bp, Homo sapien
cctgaaaatattgatatctacatta

SEQ ID NO: 5987802 - DNA, 25 bp, Homo sapien
tttagaacccctgtatttgctgttg

SEQ ID NO: 5987803 - DNA, 25 bp, Homo sapien
gtttgtataagctttctcctctata

SEQ ID NO: 5987804 - DNA, 25 bp, Homo sapien
tatctcgtcaaattcaggtgtatca

SEQ ID NO: 5987805 - DNA, 25 bp, Homo sapien
tcaagtagccattcagggtatcaag

SEQ ID NO: 5987806 - DNA, 25 bp, Homo sapien
gataattacaagcaaattgatgtgc

SEQ ID NO: 5987807 - DNA, 25 bp, Homo sapien
cacacctgattcaaaaaccgtatta

SEQ ID NO: 5987808 - DNA, 25 bp, Homo sapien
caccaagaatgcacatgagtttgcc

SEQ ID NO: 5987809 - DNA, 25 bp, Homo sapien
gattagatacagttaatcaaattac

SEQ ID NO: 5987810 - DNA, 25 bp, Homo sapien
gcacaactgtcacatccacatccgt

SEQ ID NO: 5987811 - DNA, 25 bp, Homo sapien
agcagtaggatgagctttttctaga

SEQ ID NO: 5987812 - DNA, 25 bp, Homo sapien
caatggtaacattcacatcagatgt

SEQ ID NO: 5987813 - DNA, 25 bp, Homo sapien
atcaatattttcaggcggaacataa

SEQ ID NO: 5987814 - DNA, 25 bp, Homo sapien
cggtttctgtaataaattaaacata

SEQ ID NO: 5987815 - DNA, 25 bp, Homo sapien
atacaggggttctaaattctcgggc

SEQ ID NO: 5987816 - DNA, 25 bp, Homo sapien
cccattgacaaaaacggctttagtg

SEQ ID NO: 5987817 - DNA, 25 bp, Homo sapien
gcttgtaattatcccacgcaatacg

SEQ ID NO: 5987818 - DNA, 25 bp, Homo sapien
gctgagtctgggactactagggttt

SEQ ID NO: 5987819 - DNA, 25 bp, Homo sapien
tccaaggcgatggcgtatgaacctt

SEQ ID NO: 5987820 - DNA, 25 bp, Homo sapien
cgttaccgcaactgaaagcagtagg

SEQ ID NO: 5987821 - DNA, 25 bp, Homo sapien
aacggatgatacacctgaatttgac

SEQ ID NO: 5987822 - DNA, 25 bp, Homo sapien
cattaacagttgtaaagtttccaag

SEQ ID NO: 5987823 - DNA, 25 bp, Homo sapien
ccgacgtttgtaatgtagatatcaa

SEQ ID NO: 5987824 - DNA, 25 bp, Homo sapien
tgagtctgggactactagggtttct

SEQ ID NO: 5987825 - DNA, 25 bp, Homo sapien
cattcggatgtactgaagtgaatgc

SEQ ID NO: 5987826 - DNA, 25 bp, Homo sapien
aaagcagtaggatgagctttttcta

SEQ ID NO: 5987827 - DNA, 25 bp, Homo sapien
aattcgacaaacttctctacgtcga

SEQ ID NO: 5987828 - DNA, 25 bp, Homo sapien
tcttggtgttattagggaacccctc

SEQ ID NO: 5987829 - DNA, 25 bp, Homo sapien
ggtaatatacgttgggacccaccaa

SEQ ID NO: 5987830 - DNA, 25 bp, Homo sapien
gtgtgggagttaataaaatctcatg

SEQ ID NO: 5987831 - DNA, 25 bp, Homo sapien
gtaaatgttctattactacgttcgc

SEQ ID NO: 5987832 - DNA, 25 bp, Homo sapien
actgaaagcagtaggatgagctttt

SEQ ID NO: 5987833 - DNA, 25 bp, Homo sapien
ttttctattctgatgaggttgctcc

SEQ ID NO: 5987834 - DNA, 25 bp, Homo sapien
agccagtattcttctaattacgtta

SEQ ID NO: 5987835 - DNA, 25 bp, Homo sapien
aaatgcacatcaatttgcttgtaat

SEQ ID NO: 5987836 - DNA, 25 bp, Homo sapien
aagtgtcaatggtaacattcacatc

SEQ ID NO: 5987837 - DNA, 25 bp, Homo sapien
atgtgacagttgtgctcatagtgtc

SEQ ID NO: 5987838 - DNA, 25 bp, Homo sapien
ggcaaactcatgtgcattcttggtg

SEQ ID NO: 5987839 - DNA, 25 bp, Homo sapien
tcattaacatggttccaacgagctg

SEQ ID NO: 5987840 - DNA, 25 bp, Homo sapien
taatatacgttgggacccaccaaat

SEQ ID NO: 5987841 - DNA, 25 bp, Homo sapien
ttcgcgagcagtaatcagaaatttt

SEQ ID NO: 5987842 - DNA, 25 bp, Homo sapien
gaatttgacgagatagtccccccat

SEQ ID NO: 5987843 - DNA, 25 bp, Homo sapien
atatcaatattttcaggcggaacat

SEQ ID NO: 5987844 - DNA, 25 bp, Homo sapien
cgagctgcagagataaatcgcatta

SEQ ID NO: 5987845 - DNA, 25 bp, Homo sapien
tttagtgccgataataaccttaccc

SEQ ID NO: 5987846 - DNA, 25 bp, Homo sapien
agcaaaaacagctgagtctgggact

SEQ ID NO: 5987847 - DNA, 25 bp, Homo sapien
tccttgataccctgaatggctactt

SEQ ID NO: 5987848 - DNA, 25 bp, Homo sapien
tgctgaataccttcatcaatgtttt

SEQ ID NO: 5987849 - DNA, 25 bp, Homo sapien
tcatccctcaaaacagccagtattc

SEQ ID NO: 5987850 - DNA, 25 bp, Homo sapien
aaaacagctgagtctgggactacta

SEQ ID NO: 5987851 - DNA, 25 bp, Homo sapien
attacgttaccgcaactgaaagcag

SEQ ID NO: 5987852 - DNA, 25 bp, Homo sapien
acttagcaacgaaagtgtcaatggt

SEQ ID NO: 5987853 - DNA, 25 bp, Homo sapien
acgggacattaaagcaaaaacagct

SEQ ID NO: 5987854 - DNA, 25 bp, Homo sapien
gtatgaaccttgcacttgtcttctt

SEQ ID NO: 5987855 - DNA, 25 bp, Homo sapien
atttgacgagatagtccccccattg

SEQ ID NO: 5987856 - DNA, 25 bp, Homo sapien
cattcttggtgttattagggaaccc

SEQ ID NO: 5987857 - DNA, 25 bp, Homo sapien
acaggggttctaaattctcgggcgc

SEQ ID NO: 5987858 - DNA, 25 bp, Homo sapien
ataaatcgcattaacagttgtaaag

SEQ ID NO: 5987859 - DNA, 25 bp, Homo sapien
caactgaaagcagtaggatgagctt

SEQ ID NO: 5987860 - DNA, 25 bp, Homo sapien
attgaacccaccgacgtttgtaatg

SEQ ID NO: 5987861 - DNA, 25 bp, Homo sapien
aattaaacatagaggaaatcaaagg

SEQ ID NO: 5987862 - DNA, 25 bp, Homo sapien
taatcggtaatttgattaactgtat

SEQ ID NO: 5987863 - DNA, 25 bp, Homo sapien
tcagcaacggatgtggatgtgacag

SEQ ID NO: 5987864 - DNA, 25 bp, Homo sapien
aaagtttccaaggcgatggcgtatg

SEQ ID NO: 5987865 - DNA, 25 bp, Homo sapien
tatataaaacttggattgaacccac

SEQ ID NO: 5987866 - DNA, 25 bp, Homo sapien
acgttgggacccaccaaattcgaca

SEQ ID NO: 5987867 - DNA, 25 bp, Homo sapien
tgcaacagcaaatacaggggttcta

SEQ ID NO: 5987868 - DNA, 25 bp, Homo sapien
cgtttgtaatgtagatatcaatatt

SEQ ID NO: 5987869 - DNA, 25 bp, Homo sapien
agggtttctatgttgtgctgtgcta

SEQ ID NO: 5987870 - DNA, 25 bp, Homo sapien
tattactacgttcgcgagcagtaat

SEQ ID NO: 5987871 - DNA, 25 bp, Homo sapien
ttccaacgagctgcagagataaatc

SEQ ID NO: 5987872 - DNA, 25 bp, Homo sapien
caacagcaaatacaggggttctaaa

SEQ ID NO: 5987873 - DNA, 25 bp, Homo sapien
attacctaaatctctgatttgttca

SEQ ID NO: 5987874 - DNA, 25 bp, Homo sapien
atgtggatgtgacagttgtgctcat

SEQ ID NO: 5987875 - DNA, 25 bp, Homo sapien
acctaaatctctgatttgttcaata

SEQ ID NO: 5987876 - DNA, 25 bp, Homo sapien
caatacgatatataaaacttggatt

SEQ ID NO: 5987877 - DNA, 25 bp, Homo sapien
tagagctccctgaactattttttct

SEQ ID NO: 5987878 - DNA, 25 bp, Homo sapien
atgcacatcaatttgcttgtaatta

SEQ ID NO: 5987879 - DNA, 25 bp, Homo sapien
gttaataaaatctcatgatcgtgaa

SEQ ID NO: 5987880 - DNA, 25 bp, Homo sapien
aacagctgagtctgggactactagg

SEQ ID NO: 5987881 - DNA, 25 bp, Homo sapien
aatcaggtgtgggagttaataaaat

SEQ ID NO: 5987882 - DNA, 25 bp, Homo sapien
aaatgttctattactacgttcgcga

SEQ ID NO: 5987883 - DNA, 25 bp, Homo sapien
ctgtatctaatctttttcttggatc

SEQ ID NO: 5987884 - DNA, 25 bp, Homo sapien
atggttccaacgagctgcagagata

SEQ ID NO: 5987885 - DNA, 25 bp, Homo sapien
aaagcaaaaacagctgagtctggga

SEQ ID NO: 5987886 - DNA, 25 bp, Homo sapien
tacgttcgcgagcagtaatcagaaa

SEQ ID NO: 5987887 - DNA, 25 bp, Homo sapien
ctttttctagactattacctaaatc

SEQ ID NO: 5987888 - DNA, 25 bp, Homo sapien
tttccaaggcgatggcgtatgaacc

SEQ ID NO: 5987889 - DNA, 25 bp, Homo sapien
cacaaacggatgatacacctgaatt

SEQ ID NO: 5987890 - DNA, 25 bp, Homo sapien
gctccggtttctgtaataaattaaa

SEQ ID NO: 5987891 - DNA, 25 bp, Homo sapien
actacgttcgcgagcagtaatcaga

SEQ ID NO: 5987892 - DNA, 25 bp, Homo sapien
ttcttctacttcatccctcaaaaca

SEQ ID NO: 5987893 - DNA, 25 bp, Homo sapien
gatgtactgaagtgaatgcttgaga

SEQ ID NO: 5987894 - DNA, 25 bp, Homo sapien
tcaaaggttcagcaacggatgtgga

SEQ ID NO: 5987895 - DNA, 25 bp, Homo sapien
caaaacagccagtattcttctaatt

SEQ ID NO: 5987896 - DNA, 25 bp, Homo sapien
ggatccattctaggtaatatacgtt

SEQ ID NO: 5987897 - DNA, 25 bp, Homo sapien
gttttttatctcatctataagatcc

SEQ ID NO: 5987898 - DNA, 25 bp, Homo sapien
cgcaatacgatatataaaacttgga

SEQ ID NO: 5987899 - DNA, 25 bp, Homo sapien
cccacgcaatacgatatataaaact

SEQ ID NO: 5987900 - DNA, 25 bp, Homo sapien
acaaacttctctacgtcgaacggat

SEQ ID NO: 5987901 - DNA, 25 bp, Homo sapien
ctaaatctctgatttgttcaataag

SEQ ID NO: 5987902 - DNA, 25 bp, Homo sapien
tcaatagcaatttgctgaatacctt

SEQ ID NO: 5987903 - DNA, 25 bp, Homo sapien
attttcaggcggaacataatcggta

SEQ ID NO: 5987904 - DNA, 25 bp, Homo sapien
aaggtcattaacatggttccaacga

SEQ ID NO: 5987905 - DNA, 25 bp, Homo sapien
ttgctccggtttctgtaataaatta

SEQ ID NO: 5987906 - DNA, 25 bp, Homo sapien
gatcgtgaatcaaatcaatagcaat

SEQ ID NO: 5987907 - DNA, 25 bp, Homo sapien
caatttgcttgtaattatcccacgc

SEQ ID NO: 5987908 - DNA, 25 bp, Homo sapien
gtatctaatctttttcttggatcca

SEQ ID NO: 5987909 - DNA, 25 bp, Homo sapien
cagtaatcagaaattttaatacggt

SEQ ID NO: 5987910 - DNA, 25 bp, Homo sapien
ttttatccaaatgcacatcaatttg

SEQ ID NO: 5987911 - DNA, 25 bp, Homo sapien
acgatatataaaacttggattgaac

SEQ ID NO: 5987912 - DNA, 25 bp, Homo sapien
gatgatacacctgaatttgacgaga

SEQ ID NO: 5987913 - DNA, 25 bp, Homo sapien
aacataatcggtaatttgattaact

SEQ ID NO: 5987914 - DNA, 25 bp, Homo sapien
gatggcgtatgaaccttgcacttgt

SEQ ID NO: 5987915 - DNA, 25 bp, Homo sapien
aaaggttcagcaacggatgtggatg

SEQ ID NO: 5987916 - DNA, 25 bp, Homo sapien
tcttctttttaacttagcaacgaaa

SEQ ID NO: 5987917 - DNA, 25 bp, Homo sapien
ggattgaacccaccgacgtttgtaa

SEQ ID NO: 5987918 - DNA, 25 bp, Homo sapien
tgaatggctacttgacggtaatcag

SEQ ID NO: 5987919 - DNA, 25 bp, Homo sapien
tttgttcaataaggtcattaacatg

SEQ ID NO: 5987920 - DNA, 25 bp, Homo sapien
tgtaatgtagatatcaatattttca

SEQ ID NO: 5987921 - DNA, 25 bp, Homo sapien
tcagaaattttaatacggtttttga

SEQ ID NO: 5987922 - DNA, 25 bp, Homo sapien
ctctacgtcgaacggatatagagga

SEQ ID NO: 5987923 - DNA, 25 bp, Homo sapien
caaatcaatagcaatttgctgaata

SEQ ID NO: 5987924 - DNA, 25 bp, Homo sapien
caaaaacggctttagtgccgataat

SEQ ID NO: 5987925 - DNA, 25 bp, Homo sapien
aggaaatcaaaggttcagcaacgga

SEQ ID NO: 5987926 - DNA, 25 bp, Homo sapien
gtggatgtgacagttgtgctcatag

SEQ ID NO: 5987927 - DNA, 25 bp, Homo sapien
atcaaatcaatagcaatttgctgaa

SEQ ID NO: 5987928 - DNA, 25 bp, Homo sapien
ttgacaaaaacggctttagtgccga

SEQ ID NO: 5987929 - DNA, 25 bp, Homo sapien
aatcaatagcaatttgctgaatacc

SEQ ID NO: 5987930 - DNA, 25 bp, Homo sapien
ttgcttgtaattatcccacgcaata

SEQ ID NO: 5987931 - DNA, 25 bp, Homo sapien
aaatcgcattaacagttgtaaagtt

SEQ ID NO: 5987932 - DNA, 25 bp, Homo sapien
taaaaccgtaaatgttctattacta

SEQ ID NO: 5987933 - DNA, 25 bp, Homo sapien
gccgataataaccttacccacacgg

SEQ ID NO: 5987934 - DNA, 25 bp, Homo sapien
ctaattttttggcaaactcatgtgc

SEQ ID NO: 5987935 - DNA, 25 bp, Homo sapien
acggatgtggatgtgacagttgtgc

SEQ ID NO: 5987936 - DNA, 25 bp, Homo sapien
aacggctttagtgccgataataacc

SEQ ID NO: 5987937 - DNA, 25 bp, Homo sapien
atacggtttttgaatcaggtgtggg

SEQ ID NO: 5987938 - DNA, 25 bp, Homo sapien
tgcacttgtcttctttttaacttag

SEQ ID NO: 5987939 - DNA, 25 bp, Homo sapien
ttcttctaattacgttaccgcaact

SEQ ID NO: 5987940 - DNA, 25 bp, Homo sapien
agactattacctaaatctctgattt

SEQ ID NO: 5987941 - DNA, 25 bp, Homo sapien
gtgggagttaataaaatctcatgat

SEQ ID NO: 5987942 - DNA, 25 bp, Homo sapien
ttctcgggcgcattcacaaacggat

SEQ ID NO: 5987943 - DNA, 25 bp, Homo sapien
cagtaggatgagctttttctagact

SEQ ID NO: 5987944 - DNA, 25 bp, Homo sapien
ttatttttatccaaatgcacatcaa

SEQ ID NO: 5987945 - DNA, 25 bp, Homo sapien
ttatcccacgcaatacgatatataa

SEQ ID NO: 5987946 - DNA, 25 bp, Homo sapien
tggttttcatactagagctccctga

SEQ ID NO: 5987947 - DNA, 25 bp, Homo sapien
tgggacccaccaaattcgacaaact

SEQ ID NO: 5987948 - DNA, 25 bp, Homo sapien
gatgttgccgcattcggatgtactg

SEQ ID NO: 5987949 - DNA, 25 bp, Homo sapien
ttgacgagatagtccccccattgac

SEQ ID NO: 5987950 - DNA, 25 bp, Homo sapien
cgagcagtaatcagaaattttaata

SEQ ID NO: 5987951 - DNA, 25 bp, Homo sapien
tgttcaataaggtcattaacatggt

SEQ ID NO: 5987952 - DNA, 25 bp, Homo sapien
atttttatccaaatgcacatcaatt

SEQ ID NO: 5987953 - DNA, 25 bp, Homo sapien
tctcatgatcgtgaatcaaatcaat

SEQ ID NO: 5987954 - DNA, 25 bp, Homo sapien
taaaacttggattgaacccaccgac

SEQ ID NO: 5987955 - DNA, 25 bp, Homo sapien
acttctctacgtcgaacggatatag

SEQ ID NO: 5987956 - DNA, 25 bp, Homo sapien
ttctgtaataaattaaacatagagg

SEQ ID NO: 5987957 - DNA, 25 bp, Homo sapien
cttgataccctgaatggctacttga

SEQ ID NO: 5987958 - DNA, 25 bp, Homo sapien
ttggattgaacccaccgacgtttgt

SEQ ID NO: 5987959 - DNA, 25 bp, Homo sapien
aacgagctgcagagataaatcgcat

SEQ ID NO: 5987960 - DNA, 25 bp, Homo sapien
tgggactactagggtttctatgttg

SEQ ID NO: 5987961 - DNA, 25 bp, Homo sapien
tttttgaatcaggtgtgggagttaa

SEQ ID NO: 5987962 - DNA, 25 bp, Homo sapien
aacggatatagaggagaaagcttat

SEQ ID NO: 5987963 - DNA, 25 bp, Homo sapien
aactcatgtgcattcttggtgttat

SEQ ID NO: 5987964 - DNA, 25 bp, Homo sapien
gtaggatgagctttttctagactat

SEQ ID NO: 5987965 - DNA, 25 bp, Homo sapien
gacagttgtgctcatagtgtcttct

SEQ ID NO: 5987966 - DNA, 25 bp, Homo sapien
ataaaatctcatgatcgtgaatcaa

SEQ ID NO: 5987967 - DNA, 25 bp, Homo sapien
aagatccttgataccctgaatggct

SEQ ID NO: 5987968 - DNA, 25 bp, Homo sapien
acacctgaatttgacgagatagtcc

SEQ ID NO: 5987969 - DNA, 25 bp, Homo sapien
atcagtcttggttttcatactagag

SEQ ID NO: 5987970 - DNA, 25 bp, Homo sapien
cgcgagcagtaatcagaaattttaa

SEQ ID NO: 5987971 - DNA, 25 bp, Homo sapien
aataaattaaacatagaggaaatca

SEQ ID NO: 5987972 - DNA, 25 bp, Homo sapien
atctctgatttgttcaataaggtca

SEQ ID NO: 5987973 - DNA, 25 bp, Homo sapien
aatagcaatttgctgaataccttca

SEQ ID NO: 5987974 - DNA, 25 bp, Homo sapien
aatctttttcttggatccattctag

SEQ ID NO: 5987975 - DNA, 25 bp, Homo sapien
cggatgatacacctgaatttgacga

SEQ ID NO: 5987976 - DNA, 25 bp, Homo sapien
gcgatggcgtatgaaccttgcactt

SEQ ID NO: 5987977 - DNA, 25 bp, Homo sapien
cttatacaaacctgcaacagcaaat

SEQ ID NO: 5987978 - DNA, 25 bp, Homo sapien
cattcacaaacggatgatacacctg

SEQ ID NO: 5987979 - DNA, 25 bp, Homo sapien
tctatgttgtgctgtgctaattttt

SEQ ID NO: 5987980 - DNA, 25 bp, Homo sapien
tgctcatagtgtcttcttctacttc

SEQ ID NO: 5987981 - DNA, 25 bp, Homo sapien
tttaacttagcaacgaaagtgtcaa

SEQ ID NO: 5987982 - DNA, 25 bp, Homo sapien
tgtactgaagtgaatgcttgagagg

SEQ ID NO: 5987983 - DNA, 25 bp, Homo sapien
catgtgcattcttggtgttattagg

SEQ ID NO: 5987984 - DNA, 25 bp, Homo sapien
tctaggtaatatacgttgggaccca

SEQ ID NO: 5987985 - DNA, 25 bp, Homo sapien
gtgtcttcttctacttcatccctca

SEQ ID NO: 5987986 - DNA, 25 bp, Homo sapien
cggctttagtgccgataataacctt

SEQ ID NO: 5987987 - DNA, 25 bp, Homo sapien
gtagatatcaatattttcaggcgga

SEQ ID NO: 5987988 - DNA, 25 bp, Homo sapien
tctgatgaggttgctccggtttctg

SEQ ID NO: 5987989 - DNA, 25 bp, Homo sapien
cttgcacttgtcttctttttaactt

SEQ ID NO: 5987990 - DNA, 25 bp, Homo sapien
atgttctattactacgttcgcgagc

SEQ ID NO: 5987991 - DNA, 25 bp, Homo sapien
atggtaacattcacatcagatgttg

SEQ ID NO: 5987992 - DNA, 25 bp, Homo sapien
ttttctagactattacctaaatctc

SEQ ID NO: 5987993 - DNA, 25 bp, Homo sapien
tattcttctaattacgttaccgcaa

SEQ ID NO: 5987994 - DNA, 25 bp, Homo sapien
attctaggtaatatacgttgggacc

SEQ ID NO: 5987995 - DNA, 25 bp, Homo sapien
agtctgggactactagggtttctat

SEQ ID NO: 5987996 - DNA, 25 bp, Homo sapien
tttttcttggatccattctaggtaa

SEQ ID NO: 5987997 - DNA, 25 bp, Homo sapien
gagctccctgaactattttttctat

SEQ ID NO: 5987998 - DNA, 25 bp, Homo sapien
ttacccacacgggacattaaagcaa

SEQ ID NO: 5987999 - DNA, 25 bp, Homo sapien
cgcaactgaaagcagtaggatgagc

SEQ ID NO: 5988000 - DNA, 25 bp, Homo sapien
tgttgtgctgtgctaattttttggc

SEQ ID NO: 5988001 - DNA, 25 bp, Homo sapien
gcaatttgctgaataccttcatcaa

SEQ ID NO: 5988002 - DNA, 25 bp, Homo sapien
tcaggtgtgggagttaataaaatct

SEQ ID NO: 5988003 - DNA, 25 bp, Homo sapien
caaacctgcaacagcaaatacaggg

SEQ ID NO: 5988004 - DNA, 25 bp, Homo sapien
atttgcttgtaattatcccacgcaa

SEQ ID NO: 5988005 - DNA, 25 bp, Homo sapien
aacccaccgacgtttgtaatgtaga

SEQ ID NO: 5988006 - DNA, 25 bp, Homo sapien
cagtcttggttttcatactagagct

SEQ ID NO: 5988007 - DNA, 25 bp, Homo sapien
acctgaatttgacgagatagtcccc

SEQ ID NO: 5988008 - DNA, 25 bp, Homo sapien
gagttaataaaatctcatgatcgtg

SEQ ID NO: 5988009 - DNA, 25 bp, Homo sapien
tgacggtaatcagtcttggttttca

SEQ ID NO: 5988010 - DNA, 25 bp, Homo sapien
acacgggacattaaagcaaaaacag

SEQ ID NO: 5988011 - DNA, 25 bp, Homo sapien
tagtgccgataataaccttacccac

SEQ ID NO: 5988012 - DNA, 25 bp, Homo sapien
gttgtgctcatagtgtcttcttcta

SEQ ID NO: 5988013 - DNA, 25 bp, Homo sapien
gatatataaaacttggattgaaccc

SEQ ID NO: 5988014 - DNA, 25 bp, Homo sapien
ggtcattaacatggttccaacgagc

SEQ ID NO: 5988015 - DNA, 25 bp, Homo sapien
tgaacccaccgacgtttgtaatgta

SEQ ID NO: 5988016 - DNA, 25 bp, Homo sapien
agtttccaaggcgatggcgtatgaa

SEQ ID NO: 5988017 - DNA, 25 bp, Homo sapien
cccaccgacgtttgtaatgtagata

SEQ ID NO: 5988018 - DNA, 25 bp, Homo sapien
ctcatagtgtcttcttctacttcat

SEQ ID NO: 5988019 - DNA, 25 bp, Homo sapien
atcagatgttgccgcattcggatgt

SEQ ID NO: 5988020 - DNA, 25 bp, Homo sapien
tctaattacgttaccgcaactgaaa

SEQ ID NO: 5988021 - DNA, 25 bp, Homo sapien
aatggctacttgacggtaatcagtc

SEQ ID NO: 5988022 - DNA, 25 bp, Homo sapien
tagcaatttgctgaataccttcatc

SEQ ID NO: 5988023 - DNA, 25 bp, Homo sapien
tgtgcattcttggtgttattaggga

SEQ ID NO: 5988024 - DNA, 25 bp, Homo sapien
accgcaactgaaagcagtaggatga

SEQ ID NO: 5988025 - DNA, 25 bp, Homo sapien
gataataaccttacccacacgggac

SEQ ID NO: 5988026 - DNA, 25 bp, Homo sapien
tgaatcaggtgtgggagttaataaa

SEQ ID NO: 5988027 - DNA, 25 bp, Homo sapien
ggacccaccaaattcgacaaacttc

SEQ ID NO: 5988028 - DNA, 25 bp, Homo sapien
tctgtaactaaaaccgtaaatgttc

SEQ ID NO: 5988029 - DNA, 25 bp, Homo sapien
gctccctgaactattttttctattc

SEQ ID NO: 5988030 - DNA, 25 bp, Homo sapien
gaggttgctccggtttctgtaataa

SEQ ID NO: 5988031 - DNA, 25 bp, Homo sapien
ccgtaaatgttctattactacgttc

SEQ ID NO: 5988032 - DNA, 25 bp, Homo sapien
gtcttggttttcatactagagctcc

SEQ ID NO: 5988033 - DNA, 25 bp, Homo sapien
gacgagatagtccccccattgacaa

SEQ ID NO: 5988034 - DNA, 25 bp, Homo sapien
gcacatcaatttgcttgtaattatc

SEQ ID NO: 5988035 - DNA, 25 bp, Homo sapien
tttaatacggtttttgaatcaggtg

SEQ ID NO: 5988036 - DNA, 25 bp, Homo sapien
tatgttgtgctgtgctaattttttg

SEQ ID NO: 5988037 - DNA, 25 bp, Homo sapien
taaattctcgggcgcattcacaaac

SEQ ID NO: 5988038 - DNA, 25 bp, Homo sapien
ttatccaaatgcacatcaatttgct

SEQ ID NO: 5988039 - DNA, 25 bp, Homo sapien
gtgctgtgctaattttttggcaaac

SEQ ID NO: 5988040 - DNA, 25 bp, Homo sapien
ggtaacattcacatcagatgttgcc

SEQ ID NO: 5988041 - DNA, 25 bp, Homo sapien
ggagaaagcttatacaaacctgcaa

SEQ ID NO: 5988042 - DNA, 25 bp, Homo sapien
tatacaaacctgcaacagcaaatac

SEQ ID NO: 5988043 - DNA, 25 bp, Homo sapien
acagcaaatacaggggttctaaatt

SEQ ID NO: 5988044 - DNA, 25 bp, Homo sapien
gaaagtgtcaatggtaacattcaca

SEQ ID NO: 5988045 - DNA, 25 bp, Homo sapien
atacgttgggacccaccaaattcga

SEQ ID NO: 5988046 - DNA, 25 bp, Homo sapien
ttggtgttattagggaacccctctg

SEQ ID NO: 5988047 - DNA, 25 bp, Homo sapien
ctgaagtgaatgcttgagaggacat

SEQ ID NO: 5988048 - DNA, 25 bp, Homo sapien
tctacttcatccctcaaaacagcca

SEQ ID NO: 5988049 - DNA, 25 bp, Homo sapien
acagccagtattcttctaattacgt

SEQ ID NO: 5988050 - DNA, 25 bp, Homo sapien
atcggtaatttgattaactgtatct

SEQ ID NO: 5988051 - DNA, 25 bp, Homo sapien
cttctaattacgttaccgcaactga

SEQ ID NO: 5988052 - DNA, 25 bp, Homo sapien
tctttttaacttagcaacgaaagtg

SEQ ID NO: 5988053 - DNA, 25 bp, Homo sapien
ataccctgaatggctacttgacggt

SEQ ID NO: 5988054 - DNA, 25 bp, Homo sapien
tactagggtttctatgttgtgctgt

SEQ ID NO: 5988055 - DNA, 25 bp, Homo sapien
taaattaaacatagaggaaatcaaa

SEQ ID NO: 5988056 - DNA, 25 bp, Homo sapien
ttcggatgtactgaagtgaatgctt

SEQ ID NO: 5988057 - DNA, 25 bp, Homo sapien
ctgatttgttcaataaggtcattaa

SEQ ID NO: 5988058 - DNA, 25 bp, Homo sapien
atctataagatccttgataccctga

SEQ ID NO: 5988059 - DNA, 25 bp, Homo sapien
cttgacggtaatcagtcttggtttt

SEQ ID NO: 5988060 - DNA, 25 bp, Homo sapien
cagttgtgctcatagtgtcttcttc

SEQ ID NO: 5988061 - DNA, 25 bp, Homo sapien
taacttagcaacgaaagtgtcaatg

SEQ ID NO: 5988062 - DNA, 25 bp, Homo sapien
gtaaagtttccaaggcgatggcgta

SEQ ID NO: 5988063 - DNA, 25 bp, Homo sapien
taataaaatctcatgatcgtgaatc

SEQ ID NO: 5988064 - DNA, 25 bp, Homo sapien
cgacaaacttctctacgtcgaacgg

SEQ ID NO: 5988065 - DNA, 25 bp, Homo sapien
ttactacgttcgcgagcagtaatca

SEQ ID NO: 5988066 - DNA, 25 bp, Homo sapien
agcaaatacaggggttctaaattct

SEQ ID NO: 5988067 - DNA, 25 bp, Homo sapien
cattaaagcaaaaacagctgagtct

SEQ ID NO: 5988068 - DNA, 25 bp, Homo sapien
caaacggatgatacacctgaatttg

SEQ ID NO: 5988069 - DNA, 25 bp, Homo sapien
tagaggagaaagcttatacaaacct

SEQ ID NO: 5988070 - DNA, 25 bp, Homo sapien
aacctgcaacagcaaatacaggggt

SEQ ID NO: 5988071 - DNA, 25 bp, Homo sapien
atcgcattaacagttgtaaagtttc

SEQ ID NO: 5988072 - DNA, 25 bp, Homo sapien
atgaaccttgcacttgtcttctttt

SEQ ID NO: 5988073 - DNA, 25 bp, Homo sapien
ggtttttgaatcaggtgtgggagtt

SEQ ID NO: 5988074 - DNA, 25 bp, Homo sapien
ttttttctattctgatgaggttgct

SEQ ID NO: 5988075 - DNA, 25 bp, Homo sapien
ttggatccattctaggtaatatacg

SEQ ID NO: 5988076 - DNA, 25 bp, Homo sapien
acggtttttgaatcaggtgtgggag

SEQ ID NO: 5988077 - DNA, 25 bp, Homo sapien
gatttgttcaataaggtcattaaca

SEQ ID NO: 5988078 - DNA, 25 bp, Homo sapien
gtgccgataataaccttacccacac

SEQ ID NO: 5988079 - DNA, 25 bp, Homo sapien
agatagtccccccattgacaaaaac

SEQ ID NO: 5988080 - DNA, 25 bp, Homo sapien
gctacttgacggtaatcagtcttgg

SEQ ID NO: 5988081 - DNA, 25 bp, Homo sapien
tttgctgaataccttcatcaatgtt

SEQ ID NO: 5988082 - DNA, 25 bp, Homo sapien
aactgtatctaatctttttcttgga

SEQ ID NO: 5988083 - DNA, 25 bp, Homo sapien
gatccttgataccctgaatggctac

SEQ ID NO: 5988084 - DNA, 25 bp, Homo sapien
tgctaattttttggcaaactcatgt

SEQ ID NO: 5988085 - DNA, 25 bp, Homo sapien
ggatgtgacagttgtgctcatagtg

SEQ ID NO: 5988086 - DNA, 25 bp, Homo sapien
taacattcacatcagatgttgccgc

SEQ ID NO: 5988087 - DNA, 25 bp, Homo sapien
gaggagaaagcttatacaaacctgc

SEQ ID NO: 5988088 - DNA, 25 bp, Homo sapien
gtgtcaatggtaacattcacatcag

SEQ ID NO: 5988089 - DNA, 25 bp, Homo sapien
acccaccaaattcgacaaacttctc

SEQ ID NO: 5988090 - DNA, 25 bp, Homo sapien
tggcgtatgaaccttgcacttgtct

SEQ ID NO: 5988091 - DNA, 25 bp, Homo sapien
accctgaatggctacttgacggtaa

SEQ ID NO: 5988092 - DNA, 25 bp, Homo sapien
ggtaatcagtcttggttttcatact

SEQ ID NO: 5988093 - DNA, 25 bp, Homo sapien
acagttgtaaagtttccaaggcgat

SEQ ID NO: 5988094 - DNA, 25 bp, Homo sapien
gggagttaataaaatctcatgatcg

SEQ ID NO: 5988095 - DNA, 25 bp, Homo sapien
tctgggactactagggtttctatgt

SEQ ID NO: 5988096 - DNA, 25 bp, Homo sapien
atatacgttgggacccaccaaattc

SEQ ID NO: 5988097 - DNA, 25 bp, Homo sapien
tctcatctataagatccttgatacc

SEQ ID NO: 5988098 - DNA, 25 bp, Homo sapien
atagaggaaatcaaaggttcagcaa

SEQ ID NO: 5988099 - DNA, 25 bp, Homo sapien
aaacagccagtattcttctaattac

SEQ ID NO: 5988100 - DNA, 25 bp, Homo sapien
tcatctataagatccttgataccct

SEQ ID NO: 5988101 - DNA, 25 bp, Homo sapien
gggacattaaagcaaaaacagctga

SEQ ID NO: 5988102 - DNA, 25 bp, Homo sapien
ttaaagcaaaaacagctgagtctgg

SEQ ID NO: 5988103 - DNA, 25 bp, Homo sapien
actagagctccctgaactatttttt

SEQ ID NO: 5988104 - DNA, 25 bp, Homo sapien
ttaaacatagaggaaatcaaaggtt

SEQ ID NO: 5988105 - DNA, 25 bp, Homo sapien
tgtcttctttttaacttagcaacga

SEQ ID NO: 5988106 - DNA, 25 bp, Homo sapien
ccaaatgcacatcaatttgcttgta

SEQ ID NO: 5988107 - DNA, 25 bp, Homo sapien
ctattctgatgaggttgctccggtt

SEQ ID NO: 5988108 - DNA, 25 bp, Homo sapien
ctctgatttgttcaataaggtcatt

SEQ ID NO: 5988109 - DNA, 25 bp, Homo sapien
ttttggcaaactcatgtgcattctt

SEQ ID NO: 5988110 - DNA, 25 bp, Homo sapien
gtaatttgattaactgtatctaatc

SEQ ID NO: 5988111 - DNA, 25 bp, Homo sapien
aggcgatggcgtatgaaccttgcac

SEQ ID NO: 5988112 - DNA, 25 bp, Homo sapien
cttctacttcatccctcaaaacagc

SEQ ID NO: 5988113 - DNA, 25 bp, Homo sapien
ctgtaataaattaaacatagaggaa

SEQ ID NO: 5988114 - DNA, 25 bp, Homo sapien
tagtgtcttcttctacttcatccct

SEQ ID NO: 5988115 - DNA, 25 bp, Homo sapien
ttgtgctgtgctaattttttggcaa

SEQ ID NO: 5988116 - DNA, 25 bp, Homo sapien
tttctatgttgtgctgtgctaattt

SEQ ID NO: 5988117 - DNA, 25 bp, Homo sapien
cggtaatttgattaactgtatctaa

SEQ ID NO: 5988118 - DNA, 25 bp, Homo sapien
ggcgcattcacaaacggatgataca

SEQ ID NO: 5988119 - DNA, 25 bp, Homo sapien
ggatgtggatgtgacagttgtgctc

SEQ ID NO: 5988120 - DNA, 25 bp, Homo sapien
atgaggttgctccggtttctgtaat

SEQ ID NO: 5988121 - DNA, 25 bp, Homo sapien
gttctaaattctcgggcgcattcac

SEQ ID NO: 5988122 - DNA, 25 bp, Homo sapien
ctgaataccttcatcaatgtttttt

SEQ ID NO: 5988123 - DNA, 25 bp, Homo sapien
acccacacgggacattaaagcaaaa

SEQ ID NO: 5988124 - DNA, 25 bp, Homo sapien
aaacttctctacgtcgaacggatat

SEQ ID NO: 5988125 - DNA, 25 bp, Homo sapien
cggatgtactgaagtgaatgcttga

SEQ ID NO: 5988126 - DNA, 25 bp, Homo sapien
aatctcatgatcgtgaatcaaatca

SEQ ID NO: 5988127 - DNA, 25 bp, Homo sapien
caaattcgacaaacttctctacgtc

SEQ ID NO: 5988128 - DNA, 25 bp, Homo sapien
tctttttcttggatccattctaggt

SEQ ID NO: 5988129 - DNA, 25 bp, Homo sapien
atacacctgaatttgacgagatagt

SEQ ID NO: 5988130 - DNA, 25 bp, Homo sapien
ttctctacgtcgaacggatatagag

SEQ ID NO: 5988131 - DNA, 25 bp, Homo sapien
tcttggatccattctaggtaatata

SEQ ID NO: 5988132 - DNA, 25 bp, Homo sapien
atcccacgcaatacgatatataaaa

SEQ ID NO: 5988133 - DNA, 25 bp, Homo sapien
agaggaaatcaaaggttcagcaacg

SEQ ID NO: 5988134 - DNA, 25 bp, Homo sapien
ccagtattcttctaattacgttacc

SEQ ID NO: 5988135 - DNA, 25 bp, Homo sapien
cttggttttcatactagagctccct

SEQ ID NO: 5988136 - DNA, 25 bp, Homo sapien
taacatggttccaacgagctgcaga

SEQ ID NO: 5988137 - DNA, 25 bp, Homo sapien
gctgtgctaattttttggcaaactc

SEQ ID NO: 5988138 - DNA, 25 bp, Homo sapien
actattacctaaatctctgatttgt

SEQ ID NO: 5988139 - DNA, 25 bp, Homo sapien
tttttaacttagcaacgaaagtgtc

SEQ ID NO: 5988140 - DNA, 25 bp, Homo sapien
aaagcttatacaaacctgcaacagc

SEQ ID NO: 5988141 - DNA, 25 bp, Homo sapien
ttctagactattacctaaatctctg

SEQ ID NO: 5988142 - DNA, 25 bp, Homo sapien
atccaaatgcacatcaatttgcttg

SEQ ID NO: 5988143 - DNA, 25 bp, Homo sapien
taatacggtttttgaatcaggtgtg

SEQ ID NO: 5988144 - DNA, 25 bp, Homo sapien
tttgtaatgtagatatcaatatttt

SEQ ID NO: 5988145 - DNA, 25 bp, Homo sapien
ttttttggcaaactcatgtgcattc

SEQ ID NO: 5988146 - DNA, 25 bp, Homo sapien
gtaattatcccacgcaatacgatat

SEQ ID NO: 5988147 - DNA, 25 bp, Homo sapien
gaatcaaatcaatagcaatttgctg

SEQ ID NO: 5988148 - DNA, 25 bp, Homo sapien
acatcagatgttgccgcattcggat

SEQ ID NO: 5988149 - DNA, 25 bp, Homo sapien
tacttgacggtaatcagtcttggtt

SEQ ID NO: 5988150 - DNA, 25 bp, Homo sapien
atgtagatatcaatattttcaggcg

SEQ ID NO: 5988151 - DNA, 25 bp, Homo sapien
atattttcaggcggaacataatcgg

SEQ ID NO: 5988152 - DNA, 25 bp, Homo sapien
agatatcaatattttcaggcggaac

SEQ ID NO: 5988153 - DNA, 25 bp, Homo sapien
gaaccttgcacttgtcttcttttta

SEQ ID NO: 5988154 - DNA, 25 bp, Homo sapien
aaacatagaggaaatcaaaggttca

SEQ ID NO: 5988155 - DNA, 25 bp, Homo sapien
caaactcatgtgcattcttggtgtt

SEQ ID NO: 5988156 - DNA, 25 bp, Homo sapien
aaaacggctttagtgccgataataa

SEQ ID NO: 5988157 - DNA, 25 bp, Homo sapien
tttgaatcaggtgtgggagttaata

SEQ ID NO: 5988158 - DNA, 25 bp, Homo sapien
caacgaaagtgtcaatggtaacatt

SEQ ID NO: 5988159 - DNA, 25 bp, Homo sapien
tgatgaggttgctccggtttctgta

SEQ ID NO: 5988160 - DNA, 25 bp, Homo sapien
cagatgttgccgcattcggatgtac

SEQ ID NO: 5988161 - DNA, 25 bp, Homo sapien
gacattaaagcaaaaacagctgagt

SEQ ID NO: 5988162 - DNA, 25 bp, Homo sapien
aggggttctaaattctcgggcgcat

SEQ ID NO: 5988163 - DNA, 25 bp, Homo sapien
tatctcatctataagatccttgata

SEQ ID NO: 5988164 - DNA, 25 bp, Homo sapien
catagtgtcttcttctacttcatcc

SEQ ID NO: 5988165 - DNA, 25 bp, Homo sapien
tcgtgaatcaaatcaatagcaattt

SEQ ID NO: 5988166 - DNA, 25 bp, Homo sapien
tgtaactaaaaccgtaaatgttcta

SEQ ID NO: 5988167 - DNA, 25 bp, Homo sapien
tgttgccgcattcggatgtactgaa

SEQ ID NO: 5988168 - DNA, 25 bp, Homo sapien
ctagactattacctaaatctctgat

SEQ ID NO: 5988169 - DNA, 25 bp, Homo sapien
actattttttctattctgatgaggt

SEQ ID NO: 5988170 - DNA, 25 bp, Homo sapien
ggtgttattagggaacccctctgta

SEQ ID NO: 5988171 - DNA, 25 bp, Homo sapien
gacgtttgtaatgtagatatcaata

SEQ ID NO: 5988172 - DNA, 25 bp, Homo sapien
acattcacatcagatgttgccgcat

SEQ ID NO: 5988173 - DNA, 25 bp, Homo sapien
agttgtaaagtttccaaggcgatgg

SEQ ID NO: 5988174 - DNA, 25 bp, Homo sapien
ccacacgggacattaaagcaaaaac

SEQ ID NO: 5988175 - DNA, 25 bp, Homo sapien
gaataccttcatcaatgttttttat

SEQ ID NO: 5988176 - DNA, 25 bp, Homo sapien
tataaaacttggattgaacccaccg

SEQ ID NO: 5988177 - DNA, 25 bp, Homo sapien
atgatcgtgaatcaaatcaatagca

SEQ ID NO: 5988178 - DNA, 25 bp, Homo sapien
aggtgtgggagttaataaaatctca

SEQ ID NO: 5988179 - DNA, 25 bp, Homo sapien
ttcaataaggtcattaacatggttc

SEQ ID NO: 5988180 - DNA, 25 bp, Homo sapien
accttgcacttgtcttctttttaac

SEQ ID NO: 5988181 - DNA, 25 bp, Homo sapien
cctgaatggctacttgacggtaatc

SEQ ID NO: 5988182 - DNA, 25 bp, Homo sapien
caatattttcaggcggaacataatc

SEQ ID NO: 5988183 - DNA, 25 bp, Homo sapien
atcaatttgcttgtaattatcccac

SEQ ID NO: 5988184 - DNA, 25 bp, Homo sapien
tgcattcttggtgttattagggaac

SEQ ID NO: 5988185 - DNA, 25 bp, Homo sapien
caacggatgtggatgtgacagttgt

SEQ ID NO: 5988186 - DNA, 25 bp, Homo sapien
attctgatgaggttgctccggtttc

SEQ ID NO: 5988187 - DNA, 25 bp, Homo sapien
ttggcaaactcatgtgcattcttgg

SEQ ID NO: 5988188 - DNA, 25 bp, Homo sapien
gctttagtgccgataataaccttac

SEQ ID NO: 5988189 - DNA, 25 bp, Homo sapien
cataatcggtaatttgattaactgt

SEQ ID NO: 5988190 - DNA, 25 bp, Homo sapien
attaacatggttccaacgagctgca

SEQ ID NO: 5988191 - DNA, 25 bp, Homo sapien
tattttttctattctgatgaggttg

SEQ ID NO: 5988192 - DNA, 25 bp, Homo sapien
tagtccccccattgacaaaaacggc

SEQ ID NO: 5988193 - DNA, 25 bp, Homo sapien
tgttattagggaacccctctgtaac

SEQ ID NO: 5988194 - DNA, 25 bp, Homo sapien
ggttgctccggtttctgtaataaat

SEQ ID NO: 5988195 - DNA, 25 bp, Homo sapien
acgaaagtgtcaatggtaacattca

SEQ ID NO: 5988196 - DNA, 25 bp, Homo sapien
agtattcttctaattacgttaccgc

SEQ ID NO: 5988197 - DNA, 25 bp, Homo sapien
cgaacggatatagaggagaaagctt

SEQ ID NO: 5988198 - DNA, 25 bp, Homo sapien
ggttccaacgagctgcagagataaa

SEQ ID NO: 5988199 - DNA, 25 bp, Homo sapien
cgttcgcgagcagtaatcagaaatt

SEQ ID NO: 5988200 - DNA, 25 bp, Homo sapien
tgataccctgaatggctacttgacg

SEQ ID NO: 5988201 - DNA, 25 bp, Homo sapien
aattatcccacgcaatacgatatat

SEQ ID NO: 5988202 - DNA, 25 bp, Homo sapien
tggctacttgacggtaatcagtctt

SEQ ID NO: 5988203 - DNA, 25 bp, Homo sapien
ctcgggcgcattcacaaacggatga

SEQ ID NO: 5988204 - DNA, 25 bp, Homo sapien
accaaattcgacaaacttctctacg

SEQ ID NO: 5988205 - DNA, 25 bp, Homo sapien
ccattctaggtaatatacgttggga

SEQ ID NO: 5988206 - DNA, 25 bp, Homo sapien
cgccttatttttatccaaatgcaca

SEQ ID NO: 5988207 - DNA, 25 bp, Homo sapien
ctgcagagataaatcgcattaacag

SEQ ID NO: 5988208 - DNA, 25 bp, Homo sapien
ctaatctttttcttggatccattct

SEQ ID NO: 5988209 - DNA, 25 bp, Homo sapien
tactgaagtgaatgcttgagaggac

SEQ ID NO: 5988210 - DNA, 25 bp, Homo sapien
tcacatcagatgttgccgcattcgg

SEQ ID NO: 5988211 - DNA, 25 bp, Homo sapien
agcttatacaaacctgcaacagcaa

SEQ ID NO: 5988212 - DNA, 25 bp, Homo sapien
ttgtaattatcccacgcaatacgat

SEQ ID NO: 5988213 - DNA, 25 bp, Homo sapien
tgatacacctgaatttgacgagata

SEQ ID NO: 5988214 - DNA, 25 bp, Homo sapien
tatagaggagaaagcttatacaaac

SEQ ID NO: 5988215 - DNA, 25 bp, Homo sapien
agaaagcttatacaaacctgcaaca

SEQ ID NO: 5988216 - DNA, 25 bp, Homo sapien
caaaaacagctgagtctgggactac

SEQ ID NO: 5988217 - DNA, 25 bp, Homo sapien
cacgccttatttttatccaaatgca

SEQ ID NO: 5988218 - DNA, 25 bp, Homo sapien
caaggcgatggcgtatgaaccttgc

SEQ ID NO: 5988219 - DNA, 25 bp, Homo sapien
aaatctctgatttgttcaataaggt

SEQ ID NO: 5988220 - DNA, 25 bp, Homo sapien
aggttcagcaacggatgtggatgtg

SEQ ID NO: 5988221 - DNA, 25 bp, Homo sapien
actactagggtttctatgttgtgct

SEQ ID NO: 5988222 - DNA, 25 bp, Homo sapien
tctaaattctcgggcgcattcacaa

SEQ ID NO: 5988223 - DNA, 25 bp, Homo sapien
agataaatcgcattaacagttgtaa

SEQ ID NO: 5988224 - DNA, 25 bp, Homo sapien
ttgccgcattcggatgtactgaagt

SEQ ID NO: 5988225 - DNA, 25 bp, Homo sapien
gttgggacccaccaaattcgacaaa

SEQ ID NO: 5988226 - DNA, 25 bp, Homo sapien
aggatgagctttttctagactatta

SEQ ID NO: 5988227 - DNA, 25 bp, Homo sapien
gaaatcaaaggttcagcaacggatg

SEQ ID NO: 5988228 - DNA, 25 bp, Homo sapien
gatatagaggagaaagcttatacaa

SEQ ID NO: 5988229 - DNA, 25 bp, Homo sapien
gcgtatgaaccttgcacttgtcttc

SEQ ID NO: 5988230 - DNA, 25 bp, Homo sapien
taacagttgtaaagtttccaaggcg

SEQ ID NO: 5988231 - DNA, 25 bp, Homo sapien
gtcaatggtaacattcacatcagat

SEQ ID NO: 5988232 - DNA, 25 bp, Homo sapien
cttcatccctcaaaacagccagtat

SEQ ID NO: 5988233 - DNA, 25 bp, Homo sapien
cgcattcggatgtactgaagtgaat

SEQ ID NO: 5988234 - DNA, 25 bp, Homo sapien
gcggaacataatcggtaatttgatt

SEQ ID NO: 5988235 - DNA, 25 bp, Homo sapien
aaaatctcatgatcgtgaatcaaat

SEQ ID NO: 5988236 - DNA, 25 bp, Homo sapien
tccggtttctgtaataaattaaaca

SEQ ID NO: 5988237 - DNA, 25 bp, Homo sapien
acggtaatcagtcttggttttcata

SEQ ID NO: 5988238 - DNA, 25 bp, Homo sapien
cgcattaacagttgtaaagtttcca

SEQ ID NO: 5988239 - DNA, 25 bp, Homo sapien
ttcacaaacggatgatacacctgaa

SEQ ID NO: 5988240 - DNA, 25 bp, Homo sapien
atctaatctttttcttggatccatt

SEQ ID NO: 5988241 - DNA, 25 bp, Homo sapien
agcaacggatgtggatgtgacagtt

SEQ ID NO: 5988242 - DNA, 25 bp, Homo sapien
tacttcatccctcaaaacagccagt

SEQ ID NO: 5988243 - DNA, 25 bp, Homo sapien
cggatatagaggagaaagcttatac

SEQ ID NO: 5988244 - DNA, 25 bp, Homo sapien
ctcaaaacagccagtattcttctaa

SEQ ID NO: 5988245 - DNA, 25 bp, Homo sapien
ttgtaaagtttccaaggcgatggcg

SEQ ID NO: 5988246 - DNA, 25 bp, Homo sapien
gttcagcaacggatgtggatgtgac

SEQ ID NO: 5988247 - DNA, 25 bp, Homo sapien
atccattctaggtaatatacgttgg

SEQ ID NO: 5988248 - DNA, 25 bp, Homo sapien
gtgaatcaaatcaatagcaatttgc

SEQ ID NO: 5988249 - DNA, 25 bp, Homo sapien
ttagcaacgaaagtgtcaatggtaa

SEQ ID NO: 5988250 - DNA, 25 bp, Homo sapien
ccaccaaattcgacaaacttctcta

SEQ ID NO: 5988251 - DNA, 25 bp, Homo sapien
aatttgctgaataccttcatcaatg

SEQ ID NO: 5988252 - DNA, 25 bp, Homo sapien
atccctcaaaacagccagtattctt

SEQ ID NO: 5988253 - DNA, 25 bp, Homo sapien
acatggttccaacgagctgcagaga

SEQ ID NO: 5988254 - DNA, 25 bp, Homo sapien
gtcgaacggatatagaggagaaagc

SEQ ID NO: 5988255 - DNA, 25 bp, Homo sapien
gacaaaaacggctttagtgccgata

SEQ ID NO: 5988256 - DNA, 25 bp, Homo sapien
agctgcagagataaatcgcattaac

SEQ ID NO: 5988257 - DNA, 25 bp, Homo sapien
tcatgatcgtgaatcaaatcaatag

SEQ ID NO: 5988258 - DNA, 25 bp, Homo sapien
acatcaatttgcttgtaattatccc

SEQ ID NO: 5988259 - DNA, 25 bp, Homo sapien
gatgagctttttctagactattacc

SEQ ID NO: 5988260 - DNA, 25 bp, Homo sapien
attcacatcagatgttgccgcattc

SEQ ID NO: 5988261 - DNA, 25 bp, Homo sapien
cacgcaatacgatatataaaacttg

SEQ ID NO: 5988262 - DNA, 25 bp, Homo sapien
taataaccttacccacacgggacat

SEQ ID NO: 5988263 - DNA, 25 bp, Homo sapien
agcagtaatcagaaattttaatacg

SEQ ID NO: 5988264 - DNA, 25 bp, Homo sapien
tgaaagcagtaggatgagctttttc

SEQ ID NO: 5988265 - DNA, 25 bp, Homo sapien
acatagaggaaatcaaaggttcagc

SEQ ID NO: 5988266 - DNA, 25 bp, Homo sapien
gtgacagttgtgctcatagtgtctt

SEQ ID NO: 5988267 - DNA, 25 bp, Homo sapien
gttttcatactagagctccctgaac

SEQ ID NO: 5988268 - DNA, 25 bp, Homo sapien
ggactactagggtttctatgttgtg

SEQ ID NO: 5988269 - DNA, 25 bp, Homo sapien
cgcattcacaaacggatgatacacc

SEQ ID NO: 5988270 - DNA, 25 bp, Homo sapien
agctttttctagactattacctaaa

SEQ ID NO: 5988271 - DNA, 25 bp, Homo sapien
ctgaatttgacgagatagtcccccc

SEQ ID NO: 5988272 - DNA, 25 bp, Homo sapien
ctataagatccttgataccctgaat

SEQ ID NO: 5988273 - DNA, 25 bp, Homo sapien
aattttttggcaaactcatgtgcat

SEQ ID NO: 5988274 - DNA, 25 bp, Homo sapien
tttcatactagagctccctgaacta

SEQ ID NO: 5988275 - DNA, 25 bp, Homo sapien
taattacgttaccgcaactgaaagc

SEQ ID NO: 5988276 - DNA, 25 bp, Homo sapien
gtaataaattaaacatagaggaaat

SEQ ID NO: 5988277 - DNA, 25 bp, Homo sapien
tttcaggcggaacataatcggtaat

SEQ ID NO: 5988278 - DNA, 25 bp, Homo sapien
tttatctcatctataagatccttga

SEQ ID NO: 5988279 - DNA, 25 bp, Homo sapien
caataaggtcattaacatggttcca

SEQ ID NO: 5988280 - DNA, 25 bp, Homo sapien
ttaccgcaactgaaagcagtaggat

SEQ ID NO: 5988281 - DNA, 25 bp, Homo sapien
cattgacaaaaacggctttagtgcc

SEQ ID NO: 5988282 - DNA, 25 bp, Homo sapien
tgagctttttctagactattaccta

SEQ ID NO: 5988283 - DNA, 25 bp, Homo sapien
taaccttacccacacgggacattaa

SEQ ID NO: 5988284 - DNA, 25 bp, Homo sapien
tcatactagagctccctgaactatt

SEQ ID NO: 5988285 - DNA, 25 bp, Homo sapien
cgggcgcattcacaaacggatgata

SEQ ID NO: 5988286 - DNA, 25 bp, Homo sapien
tctattactacgttcgcgagcagta

SEQ ID NO: 5988287 - DNA, 25 bp, Homo sapien
aatcaaaggttcagcaacggatgtg

SEQ ID NO: 5988288 - DNA, 25 bp, Homo sapien
caaatacaggggttctaaattctcg

SEQ ID NO: 5988289 - DNA, 25 bp, Homo sapien
tattagggaacccctctgtaactaa

SEQ ID NO: 5988290 - DNA, 25 bp, Homo sapien
ctacgtcgaacggatatagaggaga

SEQ ID NO: 5988291 - DNA, 25 bp, Homo sapien
ggaacataatcggtaatttgattaa

SEQ ID NO: 5988292 - DNA, 25 bp, Homo sapien
ataagatccttgataccctgaatgg

SEQ ID NO: 5988293 - DNA, 25 bp, Homo sapien
ctcatgtgcattcttggtgttatta

SEQ ID NO: 5988294 - DNA, 25 bp, Homo sapien
ttctattctgatgaggttgctccgg

SEQ ID NO: 5988295 - DNA, 25 bp, Homo sapien
gggttctaaattctcgggcgcattc

SEQ ID NO: 5988296 - DNA, 25 bp, Homo sapien
cacttgtcttctttttaacttagca

SEQ ID NO: 5988297 - DNA, 25 bp, Homo sapien
gtttctgtaataaattaaacataga

SEQ ID NO: 5988298 - DNA, 25 bp, Homo sapien
cctgcaacagcaaatacaggggttc

SEQ ID NO: 5988299 - DNA, 25 bp, Homo sapien
tacaaacctgcaacagcaaatacag

SEQ ID NO: 5988300 - DNA, 25 bp, Homo sapien
ccaacgagctgcagagataaatcgc

SEQ ID NO: 5988301 - DNA, 25 bp, Homo sapien
tttcttggatccattctaggtaata

SEQ ID NO: 5988302 - DNA, 25 bp, Homo sapien
aattctcgggcgcattcacaaacgg

SEQ ID NO: 5988303 - DNA, 25 bp, Homo sapien
cagctgagtctgggactactagggt

SEQ ID NO: 5988304 - DNA, 25 bp, Homo sapien
ccttatttttatccaaatgcacatc

SEQ ID NO: 5988305 - DNA, 25 bp, Homo sapien
taggtaatatacgttgggacccacc

SEQ ID NO: 5988306 - DNA, 25 bp, Homo sapien
caccgacgtttgtaatgtagatatc

SEQ ID NO: 5988307 - DNA, 25 bp, Homo sapien
ttcgacaaacttctctacgtcgaac

SEQ ID NO: 5988308 - DNA, 25 bp, Homo sapien
ggtttctatgttgtgctgtgctaat

SEQ ID NO: 5988309 - DNA, 25 bp, Homo sapien
gttctattactacgttcgcgagcag

SEQ ID NO: 5988310 - DNA, 25 bp, Homo sapien
cgagatagtccccccattgacaaaa

SEQ ID NO: 5988311 - DNA, 25 bp, Homo sapien
atacgatatataaaacttggattga

SEQ ID NO: 5988312 - DNA, 25 bp, Homo sapien
ccctcaaaacagccagtattcttct

SEQ ID NO: 5988313 - DNA, 25 bp, Homo sapien
agcaacgaaagtgtcaatggtaaca

SEQ ID NO: 5988314 - DNA, 25 bp, Homo sapien
taatgtagatatcaatattttcagg

SEQ ID NO: 5988315 - DNA, 25 bp, Homo sapien
ccttacccacacgggacattaaagc

SEQ ID NO: 5988316 - DNA, 25 bp, Homo sapien
gtcttcttctacttcatccctcaaa

SEQ ID NO: 5988317 - DNA, 25 bp, Homo sapien
aggcggaacataatcggtaatttga

SEQ ID NO: 5988318 - DNA, 25 bp, Homo sapien
tgtgctaattttttggcaaactcat

SEQ ID NO: 5988319 - DNA, 25 bp, Homo sapien
gcagagataaatcgcattaacagtt

SEQ ID NO: 5988320 - DNA, 25 bp, Homo sapien
atactagagctccctgaactatttt

SEQ ID NO: 5988321 - DNA, 25 bp, Homo sapien
acgtcgaacggatatagaggagaaa

SEQ ID NO: 5988322 - DNA, 25 bp, Homo sapien
tacgttaccgcaactgaaagcagta

SEQ ID NO: 5988323 - DNA, 25 bp, Homo sapien
tcaggcggaacataatcggtaattt

SEQ ID NO: 5988324 - DNA, 25 bp, Homo sapien
gccgcattcggatgtactgaagtga

SEQ ID NO: 5988325 - DNA, 25 bp, Homo sapien
taatcagtcttggttttcatactag

SEQ ID NO: 5988326 - DNA, 25 bp, Homo sapien
ataaggtcattaacatggttccaac

SEQ ID NO: 5988327 - DNA, 25 bp, Homo sapien
tgtgctcatagtgtcttcttctact

SEQ ID NO: 5988328 - DNA, 25 bp, Homo sapien
agagataaatcgcattaacagttgt

SEQ ID NO: 5988329 - DNA, 25 bp, Homo sapien
ctagggtttctatgttgtgctgtgc

SEQ ID NO: 5988330 - DNA, 25 bp, Homo sapien
gctaatattacttctgacaccacat

SEQ ID NO: 5988331 - DNA, 25 bp, Homo sapien
agctcgaccatattagattaatgct

SEQ ID NO: 5988332 - DNA, 25 bp, Homo sapien
tttgctctaatttcgggaacttaat

SEQ ID NO: 5988333 - DNA, 25 bp, Homo sapien
gattttgaggcaagatgaagagaat

SEQ ID NO: 5988334 - DNA, 25 bp, Homo sapien
gcacttattcgataatgtttggatt

SEQ ID NO: 5988335 - DNA, 25 bp, Homo sapien
atgttagtagaattgcgaagaggga

SEQ ID NO: 5988336 - DNA, 25 bp, Homo sapien
cctacaagtgaggagctaacttctc

SEQ ID NO: 5988337 - DNA, 25 bp, Homo sapien
cggcaaacttgccattaataaaagt

SEQ ID NO: 5988338 - DNA, 25 bp, Homo sapien
taatgggacttcacatggatggcat

SEQ ID NO: 5988339 - DNA, 25 bp, Homo sapien
aaagatgctcaatatgaagacgtta

SEQ ID NO: 5988340 - DNA, 25 bp, Homo sapien
cctggaatttgttgctgtcggcgac

SEQ ID NO: 5988341 - DNA, 25 bp, Homo sapien
ctagtggtagcactacaactggtac

SEQ ID NO: 5988342 - DNA, 25 bp, Homo sapien
aatggggatcatacgctggttgggc

SEQ ID NO: 5988343 - DNA, 25 bp, Homo sapien
aataaaagtgagctatgtctagcaa

SEQ ID NO: 5988344 - DNA, 25 bp, Homo sapien
tgggagacattgatttcctttattt

SEQ ID NO: 5988345 - DNA, 25 bp, Homo sapien
tgtcactgaagcacttattcgataa

SEQ ID NO: 5988346 - DNA, 25 bp, Homo sapien
agagaatgagatcctggaatttgtt

SEQ ID NO: 5988347 - DNA, 25 bp, Homo sapien
tttgtctaatgggacttcacatgga

SEQ ID NO: 5988348 - DNA, 25 bp, Homo sapien
aggcatccgtatcttggcccaggaa

SEQ ID NO: 5988349 - DNA, 25 bp, Homo sapien
atttcctttatttgctcgagtaata

SEQ ID NO: 5988350 - DNA, 25 bp, Homo sapien
atttgttgctgtcggcgactgtggc

SEQ ID NO: 5988351 - DNA, 25 bp, Homo sapien
aaatacaacgccttacctatctcaa

SEQ ID NO: 5988352 - DNA, 25 bp, Homo sapien
ctctaaagaaatcggagggactagt

SEQ ID NO: 5988353 - DNA, 25 bp, Homo sapien
gtccccgtagatgtccatgttagta

SEQ ID NO: 5988354 - DNA, 25 bp, Homo sapien
gttagtagaattgcgaagagggact

SEQ ID NO: 5988355 - DNA, 25 bp, Homo sapien
gataaagctgaagctaatattactt

SEQ ID NO: 5988356 - DNA, 25 bp, Homo sapien
tgataaaggaaacggaagcaattgt

SEQ ID NO: 5988357 - DNA, 25 bp, Homo sapien
cgcctaccattcgtttcctacaagt

SEQ ID NO: 5988358 - DNA, 25 bp, Homo sapien
atcctggaatttgttgctgtcggcg

SEQ ID NO: 5988359 - DNA, 25 bp, Homo sapien
caacctagagctcgaccatattaga

SEQ ID NO: 5988360 - DNA, 25 bp, Homo sapien
taatgaaatattttagattggacgt

SEQ ID NO: 5988361 - DNA, 25 bp, Homo sapien
atccgtatcttggcccaggaaccat

SEQ ID NO: 5988362 - DNA, 25 bp, Homo sapien
caagtgaggagctaacttctcgagc

SEQ ID NO: 5988363 - DNA, 25 bp, Homo sapien
tgagctatgtctagcaaatgtgcta

SEQ ID NO: 5988364 - DNA, 25 bp, Homo sapien
caacaatagatggggtcgcctacca

SEQ ID NO: 5988365 - DNA, 25 bp, Homo sapien
ggcccaaggtgtcctattctctaaa

SEQ ID NO: 5988366 - DNA, 25 bp, Homo sapien
taacttctcgagccactgaagccaa

SEQ ID NO: 5988367 - DNA, 25 bp, Homo sapien
ctttggatatagagctaagtatatt

SEQ ID NO: 5988368 - DNA, 25 bp, Homo sapien
atacaacgccttacctatctcaaga

SEQ ID NO: 5988369 - DNA, 25 bp, Homo sapien
accatgggagacattgatttccttt

SEQ ID NO: 5988370 - DNA, 25 bp, Homo sapien
gcgtgagctgggctttggatataga

SEQ ID NO: 5988371 - DNA, 25 bp, Homo sapien
ggatatagagctaagtatattatcg

SEQ ID NO: 5988372 - DNA, 25 bp, Homo sapien
gtcgcctaccattcgtttcctacaa

SEQ ID NO: 5988373 - DNA, 25 bp, Homo sapien
agatgctcaatatgaagacgttaga

SEQ ID NO: 5988374 - DNA, 25 bp, Homo sapien
aaaaatcaacctagagctcgaccat

SEQ ID NO: 5988375 - DNA, 25 bp, Homo sapien
tgaagccaagttgcgtgagctgggc

SEQ ID NO: 5988376 - DNA, 25 bp, Homo sapien
agcctttgctctaatttcgggaact

SEQ ID NO: 5988377 - DNA, 25 bp, Homo sapien
cccaaggtgtcctattctctaaaga

SEQ ID NO: 5988378 - DNA, 25 bp, Homo sapien
ccagcaagaaaagtattcagtagtg

SEQ ID NO: 5988379 - DNA, 25 bp, Homo sapien
gtcctattctctaaagaaatcggag

SEQ ID NO: 5988380 - DNA, 25 bp, Homo sapien
tacgagaatgtgcaatagcctttgc

SEQ ID NO: 5988381 - DNA, 25 bp, Homo sapien
atattacttctgacaccacatacct

SEQ ID NO: 5988382 - DNA, 25 bp, Homo sapien
caaggtgtcctattctctaaagaaa

SEQ ID NO: 5988383 - DNA, 25 bp, Homo sapien
gtttcctacaagtgaggagctaact

SEQ ID NO: 5988384 - DNA, 25 bp, Homo sapien
atgaaactgaaagttgaattgtctg

SEQ ID NO: 5988385 - DNA, 25 bp, Homo sapien
agcacctcatgtcctacaatggtgt

SEQ ID NO: 5988386 - DNA, 25 bp, Homo sapien
aactgaaagttgaattgtctgatct

SEQ ID NO: 5988387 - DNA, 25 bp, Homo sapien
actggtgaatgataaagctgaagct

SEQ ID NO: 5988388 - DNA, 25 bp, Homo sapien
ctagagctcgaccatattagattaa

SEQ ID NO: 5988389 - DNA, 25 bp, Homo sapien
tcaagaaaaaaaatcaacctagagc

SEQ ID NO: 5988390 - DNA, 25 bp, Homo sapien
acaccacataccttcaaagtatctg

SEQ ID NO: 5988391 - DNA, 25 bp, Homo sapien
acttgccattaataaaagtgagcta

SEQ ID NO: 5988392 - DNA, 25 bp, Homo sapien
caatagcctttgctctaatttcggg

SEQ ID NO: 5988393 - DNA, 25 bp, Homo sapien
ttctcgagccactgaagccaagttg

SEQ ID NO: 5988394 - DNA, 25 bp, Homo sapien
tttcgggaacttaatcacaacaata

SEQ ID NO: 5988395 - DNA, 25 bp, Homo sapien
aagacgttagagagcacctcatgtc

SEQ ID NO: 5988396 - DNA, 25 bp, Homo sapien
ttagagagcacctcatgtcctacaa

SEQ ID NO: 5988397 - DNA, 25 bp, Homo sapien
gacgttagagagcacctcatgtcct

SEQ ID NO: 5988398 - DNA, 25 bp, Homo sapien
agtggtagcactacaactggtacta

SEQ ID NO: 5988399 - DNA, 25 bp, Homo sapien
tacaatggtgtaggccccaaagttg

SEQ ID NO: 5988400 - DNA, 25 bp, Homo sapien
ttcaaagtatctgtaaagatgctca

SEQ ID NO: 5988401 - DNA, 25 bp, Homo sapien
ataaagcatttgcgaaactttctcc

SEQ ID NO: 5988402 - DNA, 25 bp, Homo sapien
catattagattaatgctttttaaaa

SEQ ID NO: 5988403 - DNA, 25 bp, Homo sapien
gcgaacaagaaccatctcaaagaat

SEQ ID NO: 5988404 - DNA, 25 bp, Homo sapien
atcaggacgccttaaaaactcatct

SEQ ID NO: 5988405 - DNA, 25 bp, Homo sapien
tggatttgggatgaaaagttaaacc

SEQ ID NO: 5988406 - DNA, 25 bp, Homo sapien
cagtacagcactacaatgaagatag

SEQ ID NO: 5988407 - DNA, 25 bp, Homo sapien
aaaaaaatcaacctagagctcgacc

SEQ ID NO: 5988408 - DNA, 25 bp, Homo sapien
tgcgaaactttctccacaaggcatc

SEQ ID NO: 5988409 - DNA, 25 bp, Homo sapien
atgtcttataaattcggcaaacttg

SEQ ID NO: 5988410 - DNA, 25 bp, Homo sapien
gccaagttgcgtgagctgggctttg

SEQ ID NO: 5988411 - DNA, 25 bp, Homo sapien
tatgataaaggaaacggaagcaatt

SEQ ID NO: 5988412 - DNA, 25 bp, Homo sapien
attcagtagtgattttgaggcaaga

SEQ ID NO: 5988413 - DNA, 25 bp, Homo sapien
gagctaacttctcgagccactgaag

SEQ ID NO: 5988414 - DNA, 25 bp, Homo sapien
cgttagagagcacctcatgtcctac

SEQ ID NO: 5988415 - DNA, 25 bp, Homo sapien
cgccttacctatctcaagaaaaaaa

SEQ ID NO: 5988416 - DNA, 25 bp, Homo sapien
aaagttgctgattgcgtttgtctaa

SEQ ID NO: 5988417 - DNA, 25 bp, Homo sapien
ctctaatttcgggaacttaatcaca

SEQ ID NO: 5988418 - DNA, 25 bp, Homo sapien
gctgaagctaatattacttctgaca

SEQ ID NO: 5988419 - DNA, 25 bp, Homo sapien
gttgggcccaaggtgtcctattctc

SEQ ID NO: 5988420 - DNA, 25 bp, Homo sapien
tacgaaacaaatgaaactgaaagtt

SEQ ID NO: 5988421 - DNA, 25 bp, Homo sapien
gctaacttctcgagccactgaagcc

SEQ ID NO: 5988422 - DNA, 25 bp, Homo sapien
atctgtaaagatgctcaatatgaag

SEQ ID NO: 5988423 - DNA, 25 bp, Homo sapien
ctgtggcaatcaggacgccttaaaa

SEQ ID NO: 5988424 - DNA, 25 bp, Homo sapien
agtgagctatgtctagcaaatgtgc

SEQ ID NO: 5988425 - DNA, 25 bp, Homo sapien
atctgcgaacaagaaccatctcaaa

SEQ ID NO: 5988426 - DNA, 25 bp, Homo sapien
ctatgtctagcaaatgtgctacagg

SEQ ID NO: 5988427 - DNA, 25 bp, Homo sapien
acttctcgagccactgaagccaagt

SEQ ID NO: 5988428 - DNA, 25 bp, Homo sapien
tggtagcactacaactggtactata

SEQ ID NO: 5988429 - DNA, 25 bp, Homo sapien
aatgtgcaatagcctttgctctaat

SEQ ID NO: 5988430 - DNA, 25 bp, Homo sapien
tggtgaatgataaagctgaagctaa

SEQ ID NO: 5988431 - DNA, 25 bp, Homo sapien
ttgtctgatcttcacatcaaagaag

SEQ ID NO: 5988432 - DNA, 25 bp, Homo sapien
aaatatctgcgaacaagaaccatct

SEQ ID NO: 5988433 - DNA, 25 bp, Homo sapien
attggacgtgtcactgaagcactta

SEQ ID NO: 5988434 - DNA, 25 bp, Homo sapien
ccactgaagccaagttgcgtgagct

SEQ ID NO: 5988435 - DNA, 25 bp, Homo sapien
taatattacttctgacaccacatac

SEQ ID NO: 5988436 - DNA, 25 bp, Homo sapien
tcacatggatggcatcgtccccgta

SEQ ID NO: 5988437 - DNA, 25 bp, Homo sapien
ggcaagatgaagagaatgagatcct

SEQ ID NO: 5988438 - DNA, 25 bp, Homo sapien
tggaatttgttgctgtcggcgactg

SEQ ID NO: 5988439 - DNA, 25 bp, Homo sapien
aaactcatctaatgaaatattttag

SEQ ID NO: 5988440 - DNA, 25 bp, Homo sapien
gccattaataaaagtgagctatgtc

SEQ ID NO: 5988441 - DNA, 25 bp, Homo sapien
attgcgtttgtctaatgggacttca

SEQ ID NO: 5988442 - DNA, 25 bp, Homo sapien
aagctaatattacttctgacaccac

SEQ ID NO: 5988443 - DNA, 25 bp, Homo sapien
ataaaggaaacggaagcaattgtta

SEQ ID NO: 5988444 - DNA, 25 bp, Homo sapien
aactggtactataaagaagagaaaa

SEQ ID NO: 5988445 - DNA, 25 bp, Homo sapien
caaggcatccgtatcttggcccagg

SEQ ID NO: 5988446 - DNA, 25 bp, Homo sapien
ttgctgattgcgtttgtctaatggg

SEQ ID NO: 5988447 - DNA, 25 bp, Homo sapien
agaaatcggagggactagtggtagc

SEQ ID NO: 5988448 - DNA, 25 bp, Homo sapien
ccaaagttgctgattgcgtttgtct

SEQ ID NO: 5988449 - DNA, 25 bp, Homo sapien
ttcctttatttgctcgagtaataat

SEQ ID NO: 5988450 - DNA, 25 bp, Homo sapien
cgagtaataataacatttcaagaat

SEQ ID NO: 5988451 - DNA, 25 bp, Homo sapien
gaacaagaaccatctcaaagaattg

SEQ ID NO: 5988452 - DNA, 25 bp, Homo sapien
cttacctatctcaagaaaaaaaatc

SEQ ID NO: 5988453 - DNA, 25 bp, Homo sapien
taccaaatatctgcgaacaagaacc

SEQ ID NO: 5988454 - DNA, 25 bp, Homo sapien
tgtgcaatagcctttgctctaattt

SEQ ID NO: 5988455 - DNA, 25 bp, Homo sapien
ttggatatagagctaagtatattat

SEQ ID NO: 5988456 - DNA, 25 bp, Homo sapien
tgaattgtctgatcttcacatcaaa

SEQ ID NO: 5988457 - DNA, 25 bp, Homo sapien
acaatagatggggtcgcctaccatt

SEQ ID NO: 5988458 - DNA, 25 bp, Homo sapien
cattaataaaagtgagctatgtcta

SEQ ID NO: 5988459 - DNA, 25 bp, Homo sapien
ggagacattgatttcctttatttgc

SEQ ID NO: 5988460 - DNA, 25 bp, Homo sapien
cacataccttcaaagtatctgtaaa

SEQ ID NO: 5988461 - DNA, 25 bp, Homo sapien
ttgcgaagagggactaccaaatatc

SEQ ID NO: 5988462 - DNA, 25 bp, Homo sapien
acttattcgataatgtttggattcc

SEQ ID NO: 5988463 - DNA, 25 bp, Homo sapien
cctttgctctaatttcgggaactta

SEQ ID NO: 5988464 - DNA, 25 bp, Homo sapien
acaacgccttacctatctcaagaaa

SEQ ID NO: 5988465 - DNA, 25 bp, Homo sapien
tatgaagacgttagagagcacctca

SEQ ID NO: 5988466 - DNA, 25 bp, Homo sapien
acggaagcaattgttacgaaacaaa

SEQ ID NO: 5988467 - DNA, 25 bp, Homo sapien
atcaacctagagctcgaccatatta

SEQ ID NO: 5988468 - DNA, 25 bp, Homo sapien
ccccgtagatgtccatgttagtaga

SEQ ID NO: 5988469 - DNA, 25 bp, Homo sapien
gactgtggcaatcaggacgccttaa

SEQ ID NO: 5988470 - DNA, 25 bp, Homo sapien
gtatattatcgaaaccgcgagaaaa

SEQ ID NO: 5988471 - DNA, 25 bp, Homo sapien
gcgactgtggcaatcaggacgcctt

SEQ ID NO: 5988472 - DNA, 25 bp, Homo sapien
cacaaggcatccgtatcttggccca

SEQ ID NO: 5988473 - DNA, 25 bp, Homo sapien
cctattctctaaagaaatcggaggg

SEQ ID NO: 5988474 - DNA, 25 bp, Homo sapien
gcatccgtatcttggcccaggaacc

SEQ ID NO: 5988475 - DNA, 25 bp, Homo sapien
ggactaccaaatatctgcgaacaag

SEQ ID NO: 5988476 - DNA, 25 bp, Homo sapien
ccattcgtttcctacaagtgaggag

SEQ ID NO: 5988477 - DNA, 25 bp, Homo sapien
aagaaccatctcaaagaattgagga

SEQ ID NO: 5988478 - DNA, 25 bp, Homo sapien
aatattttagattggacgtgtcact

SEQ ID NO: 5988479 - DNA, 25 bp, Homo sapien
gaaaagttaaaccagtacagcacta

SEQ ID NO: 5988480 - DNA, 25 bp, Homo sapien
gtcttataaattcggcaaacttgcc

SEQ ID NO: 5988481 - DNA, 25 bp, Homo sapien
tttcgatggatttgggatgaaaagt

SEQ ID NO: 5988482 - DNA, 25 bp, Homo sapien
ccgcgagaaaactggtgaatgataa

SEQ ID NO: 5988483 - DNA, 25 bp, Homo sapien
atctcaagaaaaaaaatcaacctag

SEQ ID NO: 5988484 - DNA, 25 bp, Homo sapien
aaatcggagggactagtggtagcac

SEQ ID NO: 5988485 - DNA, 25 bp, Homo sapien
gataatgtttggattccaagcgata

SEQ ID NO: 5988486 - DNA, 25 bp, Homo sapien
tagatggggtcgcctaccattcgtt

SEQ ID NO: 5988487 - DNA, 25 bp, Homo sapien
caaagaattgaggacaaaatacaac

SEQ ID NO: 5988488 - DNA, 25 bp, Homo sapien
cgaaactttctccacaaggcatccg

SEQ ID NO: 5988489 - DNA, 25 bp, Homo sapien
cctaccattcgtttcctacaagtga

SEQ ID NO: 5988490 - DNA, 25 bp, Homo sapien
tgaggacaaaatacaacgccttacc

SEQ ID NO: 5988491 - DNA, 25 bp, Homo sapien
tcgtttcctacaagtgaggagctaa

SEQ ID NO: 5988492 - DNA, 25 bp, Homo sapien
gtgtcctattctctaaagaaatcgg

SEQ ID NO: 5988493 - DNA, 25 bp, Homo sapien
tattttagattggacgtgtcactga

SEQ ID NO: 5988494 - DNA, 25 bp, Homo sapien
aaaatggggatcatacgctggttgg

SEQ ID NO: 5988495 - DNA, 25 bp, Homo sapien
aaggaaacggaagcaattgttacga

SEQ ID NO: 5988496 - DNA, 25 bp, Homo sapien
ggattccaagcgataaagcatttgc

SEQ ID NO: 5988497 - DNA, 25 bp, Homo sapien
tggcccaggaaccatgggagacatt

SEQ ID NO: 5988498 - DNA, 25 bp, Homo sapien
gaaaccgcgagaaaactggtgaatg

SEQ ID NO: 5988499 - DNA, 25 bp, Homo sapien
gtattcagtagtgattttgaggcaa

SEQ ID NO: 5988500 - DNA, 25 bp, Homo sapien
agctatgtctagcaaatgtgctaca

SEQ ID NO: 5988501 - DNA, 25 bp, Homo sapien
agcaaatgtgctacaggctggccaa

SEQ ID NO: 5988502 - DNA, 25 bp, Homo sapien
attacttctgacaccacataccttc

SEQ ID NO: 5988503 - DNA, 25 bp, Homo sapien
tctaatgggacttcacatggatggc

SEQ ID NO: 5988504 - DNA, 25 bp, Homo sapien
ctacaggctggccaatcctttcgat

SEQ ID NO: 5988505 - DNA, 25 bp, Homo sapien
tagtagaattgcgaagagggactac

SEQ ID NO: 5988506 - DNA, 25 bp, Homo sapien
atggtgtaggccccaaagttgctga

SEQ ID NO: 5988507 - DNA, 25 bp, Homo sapien
aattgcgaagagggactaccaaata

SEQ ID NO: 5988508 - DNA, 25 bp, Homo sapien
ggccccaaagttgctgattgcgttt

SEQ ID NO: 5988509 - DNA, 25 bp, Homo sapien
aagataggccagcaagaaaagtatt

SEQ ID NO: 5988510 - DNA, 25 bp, Homo sapien
cctacaatggtgtaggccccaaagt

SEQ ID NO: 5988511 - DNA, 25 bp, Homo sapien
accatctcaaagaattgaggacaaa

SEQ ID NO: 5988512 - DNA, 25 bp, Homo sapien
gatttgggatgaaaagttaaaccag

SEQ ID NO: 5988513 - DNA, 25 bp, Homo sapien
tggacgtgtcactgaagcacttatt

SEQ ID NO: 5988514 - DNA, 25 bp, Homo sapien
ccccaaagttgctgattgcgtttgt

SEQ ID NO: 5988515 - DNA, 25 bp, Homo sapien
atacgctggttgggcccaaggtgtc

SEQ ID NO: 5988516 - DNA, 25 bp, Homo sapien
aaagaaatcggagggactagtggta

SEQ ID NO: 5988517 - DNA, 25 bp, Homo sapien
ttctctaaagaaatcggagggacta

SEQ ID NO: 5988518 - DNA, 25 bp, Homo sapien
aaagcatttgcgaaactttctccac

SEQ ID NO: 5988519 - DNA, 25 bp, Homo sapien
aacgccttacctatctcaagaaaaa

SEQ ID NO: 5988520 - DNA, 25 bp, Homo sapien
tttctccacaaggcatccgtatctt

SEQ ID NO: 5988521 - DNA, 25 bp, Homo sapien
ctgaaagttgaattgtctgatcttc

SEQ ID NO: 5988522 - DNA, 25 bp, Homo sapien
ggtgtaggccccaaagttgctgatt

SEQ ID NO: 5988523 - DNA, 25 bp, Homo sapien
aagaattacgagaatgtgcaatagc

SEQ ID NO: 5988524 - DNA, 25 bp, Homo sapien
tatttgctcgagtaataataacatt

SEQ ID NO: 5988525 - DNA, 25 bp, Homo sapien
ctgtaaagatgctcaatatgaagac

SEQ ID NO: 5988526 - DNA, 25 bp, Homo sapien
actgaagccaagttgcgtgagctgg

SEQ ID NO: 5988527 - DNA, 25 bp, Homo sapien
agaatgagatcctggaatttgttgc

SEQ ID NO: 5988528 - DNA, 25 bp, Homo sapien
actgaagcacttattcgataatgtt

SEQ ID NO: 5988529 - DNA, 25 bp, Homo sapien
ccttcaaagtatctgtaaagatgct

SEQ ID NO: 5988530 - DNA, 25 bp, Homo sapien
gaatgataaagctgaagctaatatt

SEQ ID NO: 5988531 - DNA, 25 bp, Homo sapien
catttgcgaaactttctccacaagg

SEQ ID NO: 5988532 - DNA, 25 bp, Homo sapien
atagagctaagtatattatcgaaac

SEQ ID NO: 5988533 - DNA, 25 bp, Homo sapien
taatcacaacaatagatggggtcgc

SEQ ID NO: 5988534 - DNA, 25 bp, Homo sapien
aattgtctgatcttcacatcaaaga

SEQ ID NO: 5988535 - DNA, 25 bp, Homo sapien
ttgaggcaagatgaagagaatgaga

SEQ ID NO: 5988536 - DNA, 25 bp, Homo sapien
gatatgataaaggaaacggaagcaa

SEQ ID NO: 5988537 - DNA, 25 bp, Homo sapien
gctggccaatcctttcgatggattt

SEQ ID NO: 5988538 - DNA, 25 bp, Homo sapien
caagcgataaagcatttgcgaaact

SEQ ID NO: 5988539 - DNA, 25 bp, Homo sapien
ctacaactggtactataaagaagag

SEQ ID NO: 5988540 - DNA, 25 bp, Homo sapien
gtatcttggcccaggaaccatggga

SEQ ID NO: 5988541 - DNA, 25 bp, Homo sapien
aatgaagataggccagcaagaaaag

SEQ ID NO: 5988542 - DNA, 25 bp, Homo sapien
agttgcgtgagctgggctttggata

SEQ ID NO: 5988543 - DNA, 25 bp, Homo sapien
agcatttgcgaaactttctccacaa

SEQ ID NO: 5988544 - DNA, 25 bp, Homo sapien
agagctaagtatattatcgaaaccg

SEQ ID NO: 5988545 - DNA, 25 bp, Homo sapien
caatcctttcgatggatttgggatg

SEQ ID NO: 5988546 - DNA, 25 bp, Homo sapien
aggacaaaatacaacgccttaccta

SEQ ID NO: 5988547 - DNA, 25 bp, Homo sapien
gataggccagcaagaaaagtattca

SEQ ID NO: 5988548 - DNA, 25 bp, Homo sapien
agagctcgaccatattagattaatg

SEQ ID NO: 5988549 - DNA, 25 bp, Homo sapien
agggactaccaaatatctgcgaaca

SEQ ID NO: 5988550 - DNA, 25 bp, Homo sapien
aagccaagttgcgtgagctgggctt

SEQ ID NO: 5988551 - DNA, 25 bp, Homo sapien
agatgtccatgttagtagaattgcg

SEQ ID NO: 5988552 - DNA, 25 bp, Homo sapien
gctggttgggcccaaggtgtcctat

SEQ ID NO: 5988553 - DNA, 25 bp, Homo sapien
agtagtgattttgaggcaagatgaa

SEQ ID NO: 5988554 - DNA, 25 bp, Homo sapien
ccgtatcttggcccaggaaccatgg

SEQ ID NO: 5988555 - DNA, 25 bp, Homo sapien
accagtacagcactacaatgaagat

SEQ ID NO: 5988556 - DNA, 25 bp, Homo sapien
ccatgttagtagaattgcgaagagg

SEQ ID NO: 5988557 - DNA, 25 bp, Homo sapien
atatctgcgaacaagaaccatctca

SEQ ID NO: 5988558 - DNA, 25 bp, Homo sapien
aaaccagtacagcactacaatgaag

SEQ ID NO: 5988559 - DNA, 25 bp, Homo sapien
ttttgaggcaagatgaagagaatga

SEQ ID NO: 5988560 - DNA, 25 bp, Homo sapien
attgatttcctttatttgctcgagt

SEQ ID NO: 5988561 - DNA, 25 bp, Homo sapien
atatagagctaagtatattatcgaa

SEQ ID NO: 5988562 - DNA, 25 bp, Homo sapien
agcactacaactggtactataaaga

SEQ ID NO: 5988563 - DNA, 25 bp, Homo sapien
gaaaactggtgaatgataaagctga

SEQ ID NO: 5988564 - DNA, 25 bp, Homo sapien
gacgtgtcactgaagcacttattcg

SEQ ID NO: 5988565 - DNA, 25 bp, Homo sapien
atgctcaatatgaagacgttagaga

SEQ ID NO: 5988566 - DNA, 25 bp, Homo sapien
tctgacaccacataccttcaaagta

SEQ ID NO: 5988567 - DNA, 25 bp, Homo sapien
gtcggcgactgtggcaatcaggacg

SEQ ID NO: 5988568 - DNA, 25 bp, Homo sapien
tcgatggatttgggatgaaaagtta

SEQ ID NO: 5988569 - DNA, 25 bp, Homo sapien
atgtccatgttagtagaattgcgaa

SEQ ID NO: 5988570 - DNA, 25 bp, Homo sapien
tttgcgaaactttctccacaaggca

SEQ ID NO: 5988571 - DNA, 25 bp, Homo sapien
aaacttgccattaataaaagtgagc

SEQ ID NO: 5988572 - DNA, 25 bp, Homo sapien
ctatctcaagaaaaaaaatcaacct

SEQ ID NO: 5988573 - DNA, 25 bp, Homo sapien
cttataaattcggcaaacttgccat

SEQ ID NO: 5988574 - DNA, 25 bp, Homo sapien
gccaatcctttcgatggatttggga

SEQ ID NO: 5988575 - DNA, 25 bp, Homo sapien
tgctctaatttcgggaacttaatca

SEQ ID NO: 5988576 - DNA, 25 bp, Homo sapien
gggtcgcctaccattcgtttcctac

SEQ ID NO: 5988577 - DNA, 25 bp, Homo sapien
acattgatttcctttatttgctcga

SEQ ID NO: 5988578 - DNA, 25 bp, Homo sapien
tcatacgctggttgggcccaaggtg

SEQ ID NO: 5988579 - DNA, 25 bp, Homo sapien
gtcctacaatggtgtaggccccaaa

SEQ ID NO: 5988580 - DNA, 25 bp, Homo sapien
agaattgcgaagagggactaccaaa

SEQ ID NO: 5988581 - DNA, 25 bp, Homo sapien
aatgagatcctggaatttgttgctg

SEQ ID NO: 5988582 - DNA, 25 bp, Homo sapien
cgaaacaaatgaaactgaaagttga

SEQ ID NO: 5988583 - DNA, 25 bp, Homo sapien
ccaggaaccatgggagacattgatt

SEQ ID NO: 5988584 - DNA, 25 bp, Homo sapien
gaagagaatgagatcctggaatttg

SEQ ID NO: 5988585 - DNA, 25 bp, Homo sapien
aagaattgaggacaaaatacaacgc

SEQ ID NO: 5988586 - DNA, 25 bp, Homo sapien
catcgtccccgtagatgtccatgtt

SEQ ID NO: 5988587 - DNA, 25 bp, Homo sapien
agatcctggaatttgttgctgtcgg

SEQ ID NO: 5988588 - DNA, 25 bp, Homo sapien
tatcgaaaccgcgagaaaactggtg

SEQ ID NO: 5988589 - DNA, 25 bp, Homo sapien
tacaagtgaggagctaacttctcga

SEQ ID NO: 5988590 - DNA, 25 bp, Homo sapien
agagcacctcatgtcctacaatggt

SEQ ID NO: 5988591 - DNA, 25 bp, Homo sapien
agagagcacctcatgtcctacaatg

SEQ ID NO: 5988592 - DNA, 25 bp, Homo sapien
tgattgcgtttgtctaatgggactt

SEQ ID NO: 5988593 - DNA, 25 bp, Homo sapien
cgaccatattagattaatgcttttt

SEQ ID NO: 5988594 - DNA, 25 bp, Homo sapien
gggaacttaatcacaacaatagatg

SEQ ID NO: 5988595 - DNA, 25 bp, Homo sapien
ctgtcggcgactgtggcaatcagga

SEQ ID NO: 5988596 - DNA, 25 bp, Homo sapien
gctgggctttggatatagagctaag

SEQ ID NO: 5988597 - DNA, 25 bp, Homo sapien
aggaaccatgggagacattgatttc

SEQ ID NO: 5988598 - DNA, 25 bp, Homo sapien
atgaaatattttagattggacgtgt

SEQ ID NO: 5988599 - DNA, 25 bp, Homo sapien
gtgattttgaggcaagatgaagaga

SEQ ID NO: 5988600 - DNA, 25 bp, Homo sapien
tgaagacgttagagagcacctcatg

SEQ ID NO: 5988601 - DNA, 25 bp, Homo sapien
aagtatctgtaaagatgctcaatat

SEQ ID NO: 5988602 - DNA, 25 bp, Homo sapien
ttagattggacgtgtcactgaagca

SEQ ID NO: 5988603 - DNA, 25 bp, Homo sapien
aaacggaagcaattgttacgaaaca

SEQ ID NO: 5988604 - DNA, 25 bp, Homo sapien
cgagaatgtgcaatagcctttgctc

SEQ ID NO: 5988605 - DNA, 25 bp, Homo sapien
acgctggttgggcccaaggtgtcct

SEQ ID NO: 5988606 - DNA, 25 bp, Homo sapien
tgaggagctaacttctcgagccact

SEQ ID NO: 5988607 - DNA, 25 bp, Homo sapien
atggcatcgtccccgtagatgtcca

SEQ ID NO: 5988608 - DNA, 25 bp, Homo sapien
aaactttctccacaaggcatccgta

SEQ ID NO: 5988609 - DNA, 25 bp, Homo sapien
agttaaaccagtacagcactacaat

SEQ ID NO: 5988610 - DNA, 25 bp, Homo sapien
aagttgaattgtctgatcttcacat

SEQ ID NO: 5988611 - DNA, 25 bp, Homo sapien
gatcatacgctggttgggcccaagg

SEQ ID NO: 5988612 - DNA, 25 bp, Homo sapien
actaccaaatatctgcgaacaagaa

SEQ ID NO: 5988613 - DNA, 25 bp, Homo sapien
cttaatcacaacaatagatggggtc

SEQ ID NO: 5988614 - DNA, 25 bp, Homo sapien
caaagtatctgtaaagatgctcaat

SEQ ID NO: 5988615 - DNA, 25 bp, Homo sapien
ttcctacaagtgaggagctaacttc

SEQ ID NO: 5988616 - DNA, 25 bp, Homo sapien
tgtgctacaggctggccaatccttt

SEQ ID NO: 5988617 - DNA, 25 bp, Homo sapien
gcaattgttacgaaacaaatgaaac

SEQ ID NO: 5988618 - DNA, 25 bp, Homo sapien
caagaaaagtattcagtagtgattt

SEQ ID NO: 5988619 - DNA, 25 bp, Homo sapien
taccttcaaagtatctgtaaagatg

SEQ ID NO: 5988620 - DNA, 25 bp, Homo sapien
gagctgggctttggatatagagcta

SEQ ID NO: 5988621 - DNA, 25 bp, Homo sapien
atgaaaagttaaaccagtacagcac

SEQ ID NO: 5988622 - DNA, 25 bp, Homo sapien
gttacgaaacaaatgaaactgaaag

SEQ ID NO: 5988623 - DNA, 25 bp, Homo sapien
tgggctttggatatagagctaagta

SEQ ID NO: 5988624 - DNA, 25 bp, Homo sapien
tcgaaaccgcgagaaaactggtgaa

SEQ ID NO: 5988625 - DNA, 25 bp, Homo sapien
gtacagcactacaatgaagataggc

SEQ ID NO: 5988626 - DNA, 25 bp, Homo sapien
gtctagcaaatgtgctacaggctgg

SEQ ID NO: 5988627 - DNA, 25 bp, Homo sapien
tcgggaacttaatcacaacaataga

SEQ ID NO: 5988628 - DNA, 25 bp, Homo sapien
aaaaaatggggatcatacgctggtt

SEQ ID NO: 5988629 - DNA, 25 bp, Homo sapien
gcaaacttgccattaataaaagtga

SEQ ID NO: 5988630 - DNA, 25 bp, Homo sapien
atgtctagcaaatgtgctacaggct

SEQ ID NO: 5988631 - DNA, 25 bp, Homo sapien
gaaccatctcaaagaattgaggaca

SEQ ID NO: 5988632 - DNA, 25 bp, Homo sapien
ttggattccaagcgataaagcattt

SEQ ID NO: 5988633 - DNA, 25 bp, Homo sapien
tttatttgctcgagtaataataaca

SEQ ID NO: 5988634 - DNA, 25 bp, Homo sapien
gcgaagagggactaccaaatatctg

SEQ ID NO: 5988635 - DNA, 25 bp, Homo sapien
gaaccatgggagacattgatttcct

SEQ ID NO: 5988636 - DNA, 25 bp, Homo sapien
gaattacgagaatgtgcaatagcct

SEQ ID NO: 5988637 - DNA, 25 bp, Homo sapien
tcaagaattacgagaatgtgcaata

SEQ ID NO: 5988638 - DNA, 25 bp, Homo sapien
tgcgtttgtctaatgggacttcaca

SEQ ID NO: 5988639 - DNA, 25 bp, Homo sapien
gatggggtcgcctaccattcgtttc

SEQ ID NO: 5988640 - DNA, 25 bp, Homo sapien
accatattagattaatgctttttaa

SEQ ID NO: 5988641 - DNA, 25 bp, Homo sapien
tataaattcggcaaacttgccatta

SEQ ID NO: 5988642 - DNA, 25 bp, Homo sapien
ctgatcttcacatcaaagaagcaaa

SEQ ID NO: 5988643 - DNA, 25 bp, Homo sapien
aaactggtgaatgataaagctgaag

SEQ ID NO: 5988644 - DNA, 25 bp, Homo sapien
taaagctgaagctaatattacttct

SEQ ID NO: 5988645 - DNA, 25 bp, Homo sapien
agatgaagagaatgagatcctggaa

SEQ ID NO: 5988646 - DNA, 25 bp, Homo sapien
aaagtgagctatgtctagcaaatgt

SEQ ID NO: 5988647 - DNA, 25 bp, Homo sapien
atgtttggattccaagcgataaagc

SEQ ID NO: 5988648 - DNA, 25 bp, Homo sapien
tgggcccaaggtgtcctattctcta

SEQ ID NO: 5988649 - DNA, 25 bp, Homo sapien
taaaagtgagctatgtctagcaaat

SEQ ID NO: 5988650 - DNA, 25 bp, Homo sapien
tagtgattttgaggcaagatgaaga

SEQ ID NO: 5988651 - DNA, 25 bp, Homo sapien
tgacaccacataccttcaaagtatc

SEQ ID NO: 5988652 - DNA, 25 bp, Homo sapien
agacattgatttcctttatttgctc

SEQ ID NO: 5988653 - DNA, 25 bp, Homo sapien
caagatgaagagaatgagatcctgg

SEQ ID NO: 5988654 - DNA, 25 bp, Homo sapien
ccaaatatctgcgaacaagaaccat

SEQ ID NO: 5988655 - DNA, 25 bp, Homo sapien
tgggatgaaaagttaaaccagtaca

SEQ ID NO: 5988656 - DNA, 25 bp, Homo sapien
tcatgtcctacaatggtgtaggccc

SEQ ID NO: 5988657 - DNA, 25 bp, Homo sapien
cacaacaatagatggggtcgcctac

SEQ ID NO: 5988658 - DNA, 25 bp, Homo sapien
taggccagcaagaaaagtattcagt

SEQ ID NO: 5988659 - DNA, 25 bp, Homo sapien
taccattcgtttcctacaagtgagg

SEQ ID NO: 5988660 - DNA, 25 bp, Homo sapien
gaaactgaaagttgaattgtctgat

SEQ ID NO: 5988661 - DNA, 25 bp, Homo sapien
gagaaaactggtgaatgataaagct

SEQ ID NO: 5988662 - DNA, 25 bp, Homo sapien
aatatgaagacgttagagagcacct

SEQ ID NO: 5988663 - DNA, 25 bp, Homo sapien
cttcacatggatggcatcgtccccg

SEQ ID NO: 5988664 - DNA, 25 bp, Homo sapien
atgataaagctgaagctaatattac

SEQ ID NO: 5988665 - DNA, 25 bp, Homo sapien
taaattcggcaaacttgccattaat

SEQ ID NO: 5988666 - DNA, 25 bp, Homo sapien
aatgtgctacaggctggccaatcct

SEQ ID NO: 5988667 - DNA, 25 bp, Homo sapien
gaaagttgaattgtctgatcttcac

SEQ ID NO: 5988668 - DNA, 25 bp, Homo sapien
gcgagaaaactggtgaatgataaag

SEQ ID NO: 5988669 - DNA, 25 bp, Homo sapien
aatttcgggaacttaatcacaacaa

SEQ ID NO: 5988670 - DNA, 25 bp, Homo sapien
ttcacatcaaagaagcaaaaataga

SEQ ID NO: 5988671 - DNA, 25 bp, Homo sapien
gaacttaatcacaacaatagatggg

SEQ ID NO: 5988672 - DNA, 25 bp, Homo sapien
ggatggcatcgtccccgtagatgtc

SEQ ID NO: 5988673 - DNA, 25 bp, Homo sapien
gtagatgtccatgttagtagaattg

SEQ ID NO: 5988674 - DNA, 25 bp, Homo sapien
caagttgcgtgagctgggctttgga

SEQ ID NO: 5988675 - DNA, 25 bp, Homo sapien
tccacaaggcatccgtatcttggcc

SEQ ID NO: 5988676 - DNA, 25 bp, Homo sapien
ctagcaaatgtgctacaggctggcc

SEQ ID NO: 5988677 - DNA, 25 bp, Homo sapien
gatcttcacatcaaagaagcaaaaa

SEQ ID NO: 5988678 - DNA, 25 bp, Homo sapien
ggcaatcaggacgccttaaaaactc

SEQ ID NO: 5988679 - DNA, 25 bp, Homo sapien
ggatgaaaagttaaaccagtacagc

SEQ ID NO: 5988680 - DNA, 25 bp, Homo sapien
tttgctcgagtaataataacatttc

SEQ ID NO: 5988681 - DNA, 25 bp, Homo sapien
acaactggtactataaagaagagaa

SEQ ID NO: 5988682 - DNA, 25 bp, Homo sapien
actttctccacaaggcatccgtatc

SEQ ID NO: 5988683 - DNA, 25 bp, Homo sapien
cttctgacaccacataccttcaaag

SEQ ID NO: 5988684 - DNA, 25 bp, Homo sapien
catgggagacattgatttcctttat

SEQ ID NO: 5988685 - DNA, 25 bp, Homo sapien
gttgctgtcggcgactgtggcaatc

SEQ ID NO: 5988686 - DNA, 25 bp, Homo sapien
ttaataaaagtgagctatgtctagc

SEQ ID NO: 5988687 - DNA, 25 bp, Homo sapien
ccgtagatgtccatgttagtagaat

SEQ ID NO: 5988688 - DNA, 25 bp, Homo sapien
tgaagcacttattcgataatgtttg

SEQ ID NO: 5988689 - DNA, 25 bp, Homo sapien
atgtcctacaatggtgtaggcccca

SEQ ID NO: 5988690 - DNA, 25 bp, Homo sapien
agattggacgtgtcactgaagcact

SEQ ID NO: 5988691 - DNA, 25 bp, Homo sapien
tgctcgagtaataataacatttcaa

SEQ ID NO: 5988692 - DNA, 25 bp, Homo sapien
cttggcccaggaaccatgggagaca

SEQ ID NO: 5988693 - DNA, 25 bp, Homo sapien
aaagttaaaccagtacagcactaca

SEQ ID NO: 5988694 - DNA, 25 bp, Homo sapien
tctccacaaggcatccgtatcttgg

SEQ ID NO: 5988695 - DNA, 25 bp, Homo sapien
caaatgtgctacaggctggccaatc

SEQ ID NO: 5988696 - DNA, 25 bp, Homo sapien
gccttaaaaactcatctaatgaaat

SEQ ID NO: 5988697 - DNA, 25 bp, Homo sapien
gggatatgataaaggaaacggaagc

SEQ ID NO: 5988698 - DNA, 25 bp, Homo sapien
tcgtccccgtagatgtccatgttag

SEQ ID NO: 5988699 - DNA, 25 bp, Homo sapien
ataacatttcaagaattacgagaat

SEQ ID NO: 5988700 - DNA, 25 bp, Homo sapien
cgataaagcatttgcgaaactttct

SEQ ID NO: 5988701 - DNA, 25 bp, Homo sapien
ctcgaccatattagattaatgcttt

SEQ ID NO: 5988702 - DNA, 25 bp, Homo sapien
aaatgaaactgaaagttgaattgtc

SEQ ID NO: 5988703 - DNA, 25 bp, Homo sapien
ttgcgtgagctgggctttggatata

SEQ ID NO: 5988704 - DNA, 25 bp, Homo sapien
atggatggcatcgtccccgtagatg

SEQ ID NO: 5988705 - DNA, 25 bp, Homo sapien
ggaagcaattgttacgaaacaaatg

SEQ ID NO: 5988706 - DNA, 25 bp, Homo sapien
agaatgtgcaatagcctttgctcta

SEQ ID NO: 5988707 - DNA, 25 bp, Homo sapien
tcaatatgaagacgttagagagcac

SEQ ID NO: 5988708 - DNA, 25 bp, Homo sapien
aattcggcaaacttgccattaataa

SEQ ID NO: 5988709 - DNA, 25 bp, Homo sapien
atattatcgaaaccgcgagaaaact

SEQ ID NO: 5988710 - DNA, 25 bp, Homo sapien
tgctacaggctggccaatcctttcg

SEQ ID NO: 5988711 - DNA, 25 bp, Homo sapien
tgcaatagcctttgctctaatttcg

SEQ ID NO: 5988712 - DNA, 25 bp, Homo sapien
catttcaagaattacgagaatgtgc

SEQ ID NO: 5988713 - DNA, 25 bp, Homo sapien
attgaggacaaaatacaacgcctta

SEQ ID NO: 5988714 - DNA, 25 bp, Homo sapien
aacatttcaagaattacgagaatgt

SEQ ID NO: 5988715 - DNA, 25 bp, Homo sapien
ctgcgaacaagaaccatctcaaaga

SEQ ID NO: 5988716 - DNA, 25 bp, Homo sapien
tgtctaatgggacttcacatggatg

SEQ ID NO: 5988717 - DNA, 25 bp, Homo sapien
ggcatcgtccccgtagatgtccatg

SEQ ID NO: 5988718 - DNA, 25 bp, Homo sapien
cgtttgtctaatgggacttcacatg

SEQ ID NO: 5988719 - DNA, 25 bp, Homo sapien
aaatgggatatgataaaggaaacgg

SEQ ID NO: 5988720 - DNA, 25 bp, Homo sapien
gtctgatcttcacatcaaagaagca

SEQ ID NO: 5988721 - DNA, 25 bp, Homo sapien
atgggacttcacatggatggcatcg

SEQ ID NO: 5988722 - DNA, 25 bp, Homo sapien
attcgataatgtttggattccaagc

SEQ ID NO: 5988723 - DNA, 25 bp, Homo sapien
cggagggactagtggtagcactaca

SEQ ID NO: 5988724 - DNA, 25 bp, Homo sapien
attacgagaatgtgcaatagccttt

SEQ ID NO: 5988725 - DNA, 25 bp, Homo sapien
tcgataatgtttggattccaagcga

SEQ ID NO: 5988726 - DNA, 25 bp, Homo sapien
cgagccactgaagccaagttgcgtg

SEQ ID NO: 5988727 - DNA, 25 bp, Homo sapien
gaaatattttagattggacgtgtca

SEQ ID NO: 5988728 - DNA, 25 bp, Homo sapien
gggactagtggtagcactacaactg

SEQ ID NO: 5988729 - DNA, 25 bp, Homo sapien
tggggatcatacgctggttgggccc

SEQ ID NO: 5988730 - DNA, 25 bp, Homo sapien
aaatcaacctagagctcgaccatat

SEQ ID NO: 5988731 - DNA, 25 bp, Homo sapien
gaattgaggacaaaatacaacgcct

SEQ ID NO: 5988732 - DNA, 25 bp, Homo sapien
acatggatggcatcgtccccgtaga

SEQ ID NO: 5988733 - DNA, 25 bp, Homo sapien
gtaaagatgctcaatatgaagacgt

SEQ ID NO: 5988734 - DNA, 25 bp, Homo sapien
gtagaattgcgaagagggactacca

SEQ ID NO: 5988735 - DNA, 25 bp, Homo sapien
tgtaggccccaaagttgctgattgc

SEQ ID NO: 5988736 - DNA, 25 bp, Homo sapien
ttattcgataatgtttggattccaa

SEQ ID NO: 5988737 - DNA, 25 bp, Homo sapien
ctcgagccactgaagccaagttgcg

SEQ ID NO: 5988738 - DNA, 25 bp, Homo sapien
aagctgaagctaatattacttctga

SEQ ID NO: 5988739 - DNA, 25 bp, Homo sapien
cctttcgatggatttgggatgaaaa

SEQ ID NO: 5988740 - DNA, 25 bp, Homo sapien
agctaagtatattatcgaaaccgcg

SEQ ID NO: 5988741 - DNA, 25 bp, Homo sapien
tgctgtcggcgactgtggcaatcag

SEQ ID NO: 5988742 - DNA, 25 bp, Homo sapien
caatggtgtaggccccaaagttgct

SEQ ID NO: 5988743 - DNA, 25 bp, Homo sapien
cataccttcaaagtatctgtaaaga

SEQ ID NO: 5988744 - DNA, 25 bp, Homo sapien
aaccgcgagaaaactggtgaatgat

SEQ ID NO: 5988745 - DNA, 25 bp, Homo sapien
gacttcacatggatggcatcgtccc

SEQ ID NO: 5988746 - DNA, 25 bp, Homo sapien
gcccaggaaccatgggagacattga

SEQ ID NO: 5988747 - DNA, 25 bp, Homo sapien
tgatttcctttatttgctcgagtaa

SEQ ID NO: 5988748 - DNA, 25 bp, Homo sapien
aagaaaaaaaatcaacctagagctc

SEQ ID NO: 5988749 - DNA, 25 bp, Homo sapien
gctgattgcgtttgtctaatgggac

SEQ ID NO: 5988750 - DNA, 25 bp, Homo sapien
acagcactacaatgaagataggcca

SEQ ID NO: 5988751 - DNA, 25 bp, Homo sapien
aataataacatttcaagaattacga

SEQ ID NO: 5988752 - DNA, 25 bp, Homo sapien
tttcaagaattacgagaatgtgcaa

SEQ ID NO: 5988753 - DNA, 25 bp, Homo sapien
ttgccattaataaaagtgagctatg

SEQ ID NO: 5988754 - DNA, 25 bp, Homo sapien
acctagagctcgaccatattagatt

SEQ ID NO: 5988755 - DNA, 25 bp, Homo sapien
aggctggccaatcctttcgatggat

SEQ ID NO: 5988756 - DNA, 25 bp, Homo sapien
aatagatggggtcgcctaccattcg

SEQ ID NO: 5988757 - DNA, 25 bp, Homo sapien
tacttctgacaccacataccttcaa

SEQ ID NO: 5988758 - DNA, 25 bp, Homo sapien
ctacaatgaagataggccagcaaga

SEQ ID NO: 5988759 - DNA, 25 bp, Homo sapien
atagcctttgctctaatttcgggaa

SEQ ID NO: 5988760 - DNA, 25 bp, Homo sapien
ctaaagaaatcggagggactagtgg

SEQ ID NO: 5988761 - DNA, 25 bp, Homo sapien
taggccccaaagttgctgattgcgt

SEQ ID NO: 5988762 - DNA, 25 bp, Homo sapien
agcgataaagcatttgcgaaacttt

SEQ ID NO: 5988763 - DNA, 25 bp, Homo sapien
tattctctaaagaaatcggagggac

SEQ ID NO: 5988764 - DNA, 25 bp, Homo sapien
attatcgaaaccgcgagaaaactgg

SEQ ID NO: 5988765 - DNA, 25 bp, Homo sapien
tccaagcgataaagcatttgcgaaa

SEQ ID NO: 5988766 - DNA, 25 bp, Homo sapien
tgaagataggccagcaagaaaagta

SEQ ID NO: 5988767 - DNA, 25 bp, Homo sapien
agagggactaccaaatatctgcgaa

SEQ ID NO: 5988768 - DNA, 25 bp, Homo sapien
atgggatatgataaaggaaacggaa

SEQ ID NO: 5988769 - DNA, 25 bp, Homo sapien
aagcaattgttacgaaacaaatgaa

SEQ ID NO: 5988770 - DNA, 25 bp, Homo sapien
atcacaacaatagatggggtcgcct

SEQ ID NO: 5988771 - DNA, 25 bp, Homo sapien
agaaaagtattcagtagtgattttg

SEQ ID NO: 5988772 - DNA, 25 bp, Homo sapien
ggctttggatatagagctaagtata

SEQ ID NO: 5988773 - DNA, 25 bp, Homo sapien
agccactgaagccaagttgcgtgag

SEQ ID NO: 5988774 - DNA, 25 bp, Homo sapien
ctaagtatattatcgaaaccgcgag

SEQ ID NO: 5988775 - DNA, 25 bp, Homo sapien
ttaaaaaatggggatcatacgctgg

SEQ ID NO: 5988776 - DNA, 25 bp, Homo sapien
ctaatttcgggaacttaatcacaac

SEQ ID NO: 5988777 - DNA, 25 bp, Homo sapien
caatcaggacgccttaaaaactcat

SEQ ID NO: 5988778 - DNA, 25 bp, Homo sapien
attccaagcgataaagcatttgcga

SEQ ID NO: 5988779 - DNA, 25 bp, Homo sapien
gactagtggtagcactacaactggt

SEQ ID NO: 5988780 - DNA, 25 bp, Homo sapien
gctcaatatgaagacgttagagagc

SEQ ID NO: 5988781 - DNA, 25 bp, Homo sapien
aagcacttattcgataatgtttgga

SEQ ID NO: 5988782 - DNA, 25 bp, Homo sapien
taatgtttggattccaagcgataaa

SEQ ID NO: 5988783 - DNA, 25 bp, Homo sapien
tgaagctaatattacttctgacacc

SEQ ID NO: 5988784 - DNA, 25 bp, Homo sapien
gaggcaagatgaagagaatgagatc

SEQ ID NO: 5988785 - DNA, 25 bp, Homo sapien
gtgagctgggctttggatatagagc

SEQ ID NO: 5988786 - DNA, 25 bp, Homo sapien
gatggatttgggatgaaaagttaaa

SEQ ID NO: 5988787 - DNA, 25 bp, Homo sapien
ttgttacgaaacaaatgaaactgaa

SEQ ID NO: 5988788 - DNA, 25 bp, Homo sapien
ttgttgctgtcggcgactgtggcaa

SEQ ID NO: 5988789 - DNA, 25 bp, Homo sapien
tcactgaagcacttattcgataatg

SEQ ID NO: 5988790 - DNA, 25 bp, Homo sapien
tggggtcgcctaccattcgtttcct

SEQ ID NO: 5988791 - DNA, 25 bp, Homo sapien
atcctttcgatggatttgggatgaa

SEQ ID NO: 5988792 - DNA, 25 bp, Homo sapien
gggatcatacgctggttgggcccaa

SEQ ID NO: 5988793 - DNA, 25 bp, Homo sapien
gaagagggactaccaaatatctgcg

SEQ ID NO: 5988794 - DNA, 25 bp, Homo sapien
ttttagattggacgtgtcactgaag

SEQ ID NO: 5988795 - DNA, 25 bp, Homo sapien
cactacaatgaagataggccagcaa

SEQ ID NO: 5988796 - DNA, 25 bp, Homo sapien
ggacgccttaaaaactcatctaatg

SEQ ID NO: 5988797 - DNA, 25 bp, Homo sapien
caaaatacaacgccttacctatctc

SEQ ID NO: 5988798 - DNA, 25 bp, Homo sapien
atcttggcccaggaaccatgggaga

SEQ ID NO: 5988799 - DNA, 25 bp, Homo sapien
gtccatgttagtagaattgcgaaga

SEQ ID NO: 5988800 - DNA, 25 bp, Homo sapien
gacaaaatacaacgccttacctatc

SEQ ID NO: 5988801 - DNA, 25 bp, Homo sapien
ttcggcaaacttgccattaataaaa

SEQ ID NO: 5988802 - DNA, 25 bp, Homo sapien
ggccagcaagaaaagtattcagtag

SEQ ID NO: 5988803 - DNA, 25 bp, Homo sapien
gtagcactacaactggtactataaa

SEQ ID NO: 5988804 - DNA, 25 bp, Homo sapien
gtttggattccaagcgataaagcat

SEQ ID NO: 5988805 - DNA, 25 bp, Homo sapien
cggcgactgtggcaatcaggacgcc

SEQ ID NO: 5988806 - DNA, 25 bp, Homo sapien
tcagtagtgattttgaggcaagatg

SEQ ID NO: 5988807 - DNA, 25 bp, Homo sapien
aattgttacgaaacaaatgaaactg

SEQ ID NO: 5988808 - DNA, 25 bp, Homo sapien
ctcgagtaataataacatttcaaga

SEQ ID NO: 5988809 - DNA, 25 bp, Homo sapien
gtggcaatcaggacgccttaaaaac

SEQ ID NO: 5988810 - DNA, 25 bp, Homo sapien
cctcatgtcctacaatggtgtaggc

SEQ ID NO: 5988811 - DNA, 25 bp, Homo sapien
tggttgggcccaaggtgtcctattc

SEQ ID NO: 5988812 - DNA, 25 bp, Homo sapien
cctttatttgctcgagtaataataa

SEQ ID NO: 5988813 - DNA, 25 bp, Homo sapien
acaatgaagataggccagcaagaaa

SEQ ID NO: 5988814 - DNA, 25 bp, Homo sapien
tggccaatcctttcgatggatttgg

SEQ ID NO: 5988815 - DNA, 25 bp, Homo sapien
gtgaatgataaagctgaagctaata

SEQ ID NO: 5988816 - DNA, 25 bp, Homo sapien
cgtgtcactgaagcacttattcgat

SEQ ID NO: 5988817 - DNA, 25 bp, Homo sapien
gaatttgttgctgtcggcgactgtg

SEQ ID NO: 5988818 - DNA, 25 bp, Homo sapien
catctcaaagaattgaggacaaaat

SEQ ID NO: 5988819 - DNA, 25 bp, Homo sapien
aggtgtcctattctctaaagaaatc

SEQ ID NO: 5988820 - DNA, 25 bp, Homo sapien
tgagatcctggaatttgttgctgtc

SEQ ID NO: 5988821 - DNA, 25 bp, Homo sapien
caggacgccttaaaaactcatctaa

SEQ ID NO: 5988822 - DNA, 25 bp, Homo sapien
gtatctgtaaagatgctcaatatga

SEQ ID NO: 5988823 - DNA, 25 bp, Homo sapien
aagtatattatcgaaaccgcgagaa

SEQ ID NO: 5988824 - DNA, 25 bp, Homo sapien
agtgaggagctaacttctcgagcca

SEQ ID NO: 5988825 - DNA, 25 bp, Homo sapien
cactacaactggtactataaagaag

SEQ ID NO: 5988826 - DNA, 25 bp, Homo sapien
acaggctggccaatcctttcgatgg

SEQ ID NO: 5988827 - DNA, 25 bp, Homo sapien
gaaaaaaaatcaacctagagctcga

SEQ ID NO: 5988828 - DNA, 25 bp, Homo sapien
atgaagagaatgagatcctggaatt

SEQ ID NO: 5988829 - DNA, 25 bp, Homo sapien
attcgtttcctacaagtgaggagct

SEQ ID NO: 5988830 - DNA, 25 bp, Homo sapien
ggaaacggaagcaattgttacgaaa

SEQ ID NO: 5988831 - DNA, 25 bp, Homo sapien
cacctcatgtcctacaatggtgtag

SEQ ID NO: 5988832 - DNA, 25 bp, Homo sapien
tttgggatgaaaagttaaaccagta

SEQ ID NO: 5988833 - DNA, 25 bp, Homo sapien
agcactacaatgaagataggccagc

SEQ ID NO: 5988834 - DNA, 25 bp, Homo sapien
aggagctaacttctcgagccactga

SEQ ID NO: 5988835 - DNA, 25 bp, Homo sapien
ttaaaccagtacagcactacaatga

SEQ ID NO: 5988836 - DNA, 25 bp, Homo sapien
agcaagaaaagtattcagtagtgat

SEQ ID NO: 5988837 - DNA, 25 bp, Homo sapien
acaagaaccatctcaaagaattgag

SEQ ID NO: 5988838 - DNA, 25 bp, Homo sapien
agttgctgattgcgtttgtctaatg

SEQ ID NO: 5988839 - DNA, 25 bp, Homo sapien
gggacttcacatggatggcatcgtc

SEQ ID NO: 5988840 - DNA, 25 bp, Homo sapien
accacataccttcaaagtatctgta

SEQ ID NO: 5988841 - DNA, 25 bp, Homo sapien
aaaagtattcagtagtgattttgag

SEQ ID NO: 5988842 - DNA, 25 bp, Homo sapien
aagtattcagtagtgattttgaggc

SEQ ID NO: 5988843 - DNA, 25 bp, Homo sapien
taataacatttcaagaattacgaga

SEQ ID NO: 5988844 - DNA, 25 bp, Homo sapien
atcggagggactagtggtagcacta

SEQ ID NO: 5988845 - DNA, 25 bp, Homo sapien
gagggactagtggtagcactacaac

SEQ ID NO: 5988846 - DNA, 25 bp, Homo sapien
gttgaattgtctgatcttcacatca

SEQ ID NO: 5988847 - DNA, 25 bp, Homo sapien
gaaaatgggatatgataaaggaaac

SEQ ID NO: 5988848 - DNA, 25 bp, Homo sapien
acgccttaaaaactcatctaatgaa

SEQ ID NO: 5988849 - DNA, 25 bp, Homo sapien
gcacattctcgtaattcttgaaatg

SEQ ID NO: 5988850 - DNA, 25 bp, Homo sapien
acttggcttcagtggctcgagaagt

SEQ ID NO: 5988851 - DNA, 25 bp, Homo sapien
atttgctagacatagctcactttta

SEQ ID NO: 5988852 - DNA, 25 bp, Homo sapien
ttactcgagcaaataaaggaaatca

SEQ ID NO: 5988853 - DNA, 25 bp, Homo sapien
tcccaaatccatcgaaaggattggc

SEQ ID NO: 5988854 - DNA, 25 bp, Homo sapien
tccctcttcgcaattctactaacat

SEQ ID NO: 5988855 - DNA, 25 bp, Homo sapien
caacttggcttcagtggctcgagaa

SEQ ID NO: 5988856 - DNA, 25 bp, Homo sapien
tttcttgctggcctatcttcattgt

SEQ ID NO: 5988857 - DNA, 25 bp, Homo sapien
gattggccagcctgtagcacatttg

SEQ ID NO: 5988858 - DNA, 25 bp, Homo sapien
cgccgacagcaacaaattccaggat

SEQ ID NO: 5988859 - DNA, 25 bp, Homo sapien
ttcgataatatacttagctctatat

SEQ ID NO: 5988860 - DNA, 25 bp, Homo sapien
tgaatacttttcttgctggcctatc

SEQ ID NO: 5988861 - DNA, 25 bp, Homo sapien
gagaataggacaccttgggcccaac

SEQ ID NO: 5988862 - DNA, 25 bp, Homo sapien
gacagcaacaaattccaggatctca

SEQ ID NO: 5988863 - DNA, 25 bp, Homo sapien
attctttgagatggttcttgttcgc

SEQ ID NO: 5988864 - DNA, 25 bp, Homo sapien
attgtagtgctgtactggtttaact

SEQ ID NO: 5988865 - DNA, 25 bp, Homo sapien
acttgtaggaaacgaatggtaggcg

SEQ ID NO: 5988866 - DNA, 25 bp, Homo sapien
ccctccgatttctttagagaatagg

SEQ ID NO: 5988867 - DNA, 25 bp, Homo sapien
agcatctttacagatactttgaagg

SEQ ID NO: 5988868 - DNA, 25 bp, Homo sapien
agacaaacgcaatcagcaactttgg

SEQ ID NO: 5988869 - DNA, 25 bp, Homo sapien
catggacatctacggggacgatgcc

SEQ ID NO: 5988870 - DNA, 25 bp, Homo sapien
tcaactttcagtttcatttgtttcg

SEQ ID NO: 5988871 - DNA, 25 bp, Homo sapien
ttgtaggacatgaggtgctctctaa

SEQ ID NO: 5988872 - DNA, 25 bp, Homo sapien
aacatggacatctacggggacgatg

SEQ ID NO: 5988873 - DNA, 25 bp, Homo sapien
tcttgagataggtaaggcgttgtat

SEQ ID NO: 5988874 - DNA, 25 bp, Homo sapien
gccacagtcgccgacagcaacaaat

SEQ ID NO: 5988875 - DNA, 25 bp, Homo sapien
tcttcatcttgcctcaaaatcacta

SEQ ID NO: 5988876 - DNA, 25 bp, Homo sapien
taccactagtccctccgatttcttt

SEQ ID NO: 5988877 - DNA, 25 bp, Homo sapien
ttggaatccaaacattatcgaataa

SEQ ID NO: 5988878 - DNA, 25 bp, Homo sapien
aacattatcgaataagtgcttcagt

SEQ ID NO: 5988879 - DNA, 25 bp, Homo sapien
ctcaattctttgagatggttcttgt

SEQ ID NO: 5988880 - DNA, 25 bp, Homo sapien
tagtgctgtactggtttaacttttc

SEQ ID NO: 5988881 - DNA, 25 bp, Homo sapien
ctactgaatacttttcttgctggcc

SEQ ID NO: 5988882 - DNA, 25 bp, Homo sapien
tattgttgtgattaagttcccgaaa

SEQ ID NO: 5988883 - DNA, 25 bp, Homo sapien
atgagtttttaaggcgtcctgattg

SEQ ID NO: 5988884 - DNA, 25 bp, Homo sapien
cagcaacaaattccaggatctcatt

SEQ ID NO: 5988885 - DNA, 25 bp, Homo sapien
ttcttgttcgcagatatttggtagt

SEQ ID NO: 5988886 - DNA, 25 bp, Homo sapien
tctttgagatggttcttgttcgcag

SEQ ID NO: 5988887 - DNA, 25 bp, Homo sapien
gacatgaggtgctctctaacgtctt

SEQ ID NO: 5988888 - DNA, 25 bp, Homo sapien
tctttagagaataggacaccttggg

SEQ ID NO: 5988889 - DNA, 25 bp, Homo sapien
agctttatcattcaccagttttctc

SEQ ID NO: 5988890 - DNA, 25 bp, Homo sapien
aacgaatggtaggcgaccccatcta

SEQ ID NO: 5988891 - DNA, 25 bp, Homo sapien
cattatcgaataagtgcttcagtga

SEQ ID NO: 5988892 - DNA, 25 bp, Homo sapien
catcccaaatccatcgaaaggattg

SEQ ID NO: 5988893 - DNA, 25 bp, Homo sapien
aaagcattaatctaatatggtcgag

SEQ ID NO: 5988894 - DNA, 25 bp, Homo sapien
acgcaatcagcaactttggggccta

SEQ ID NO: 5988895 - DNA, 25 bp, Homo sapien
ttcagtttcatttgtttcgtaacaa

SEQ ID NO: 5988896 - DNA, 25 bp, Homo sapien
gatactttgaaggtatgtggtgtca

SEQ ID NO: 5988897 - DNA, 25 bp, Homo sapien
tgttcgcagatatttggtagtccct

SEQ ID NO: 5988898 - DNA, 25 bp, Homo sapien
cgcaattctactaacatggacatct

SEQ ID NO: 5988899 - DNA, 25 bp, Homo sapien
tcagcaactttggggcctacaccat

SEQ ID NO: 5988900 - DNA, 25 bp, Homo sapien
tggtaggcgaccccatctattgttg

SEQ ID NO: 5988901 - DNA, 25 bp, Homo sapien
tgtagcacatttgctagacatagct

SEQ ID NO: 5988902 - DNA, 25 bp, Homo sapien
gatctcattctcttcatcttgcctc

SEQ ID NO: 5988903 - DNA, 25 bp, Homo sapien
ttaaggcgtcctgattgccacagtc

SEQ ID NO: 5988904 - DNA, 25 bp, Homo sapien
ttttaaaaagcattaatctaatatg

SEQ ID NO: 5988905 - DNA, 25 bp, Homo sapien
tgttattattactcgagcaaataaa

SEQ ID NO: 5988906 - DNA, 25 bp, Homo sapien
ctcaaaatcactactgaatactttt

SEQ ID NO: 5988907 - DNA, 25 bp, Homo sapien
aatatacttagctctatatccaaag

SEQ ID NO: 5988908 - DNA, 25 bp, Homo sapien
cttctttatagtaccagttgtagtg

SEQ ID NO: 5988909 - DNA, 25 bp, Homo sapien
tgtagtgctaccactagtccctccg

SEQ ID NO: 5988910 - DNA, 25 bp, Homo sapien
aaatcactactgaatacttttcttg

SEQ ID NO: 5988911 - DNA, 25 bp, Homo sapien
gcctatcttcattgtagtgctgtac

SEQ ID NO: 5988912 - DNA, 25 bp, Homo sapien
attctcttcatcttgcctcaaaatc

SEQ ID NO: 5988913 - DNA, 25 bp, Homo sapien
atcgaaaggattggccagcctgtag

SEQ ID NO: 5988914 - DNA, 25 bp, Homo sapien
cattgtaggacatgaggtgctctct

SEQ ID NO: 5988915 - DNA, 25 bp, Homo sapien
cttcagctttatcattcaccagttt

SEQ ID NO: 5988916 - DNA, 25 bp, Homo sapien
ttagatgagtttttaaggcgtcctg

SEQ ID NO: 5988917 - DNA, 25 bp, Homo sapien
ttttaaggcgtcctgattgccacag

SEQ ID NO: 5988918 - DNA, 25 bp, Homo sapien
tagctcacttttattaatggcaagt

SEQ ID NO: 5988919 - DNA, 25 bp, Homo sapien
aaccagcgtatgatccccatttttt

SEQ ID NO: 5988920 - DNA, 25 bp, Homo sapien
agtgacacgtccaatctaaaatatt

SEQ ID NO: 5988921 - DNA, 25 bp, Homo sapien
acaattgcttccgtttcctttatca

SEQ ID NO: 5988922 - DNA, 25 bp, Homo sapien
caaacattatcgaataagtgcttca

SEQ ID NO: 5988923 - DNA, 25 bp, Homo sapien
cacgcaacttggcttcagtggctcg

SEQ ID NO: 5988924 - DNA, 25 bp, Homo sapien
tctactaacatggacatctacgggg

SEQ ID NO: 5988925 - DNA, 25 bp, Homo sapien
tttggtagtccctcttcgcaattct

SEQ ID NO: 5988926 - DNA, 25 bp, Homo sapien
tcagtgacacgtccaatctaaaata

SEQ ID NO: 5988927 - DNA, 25 bp, Homo sapien
gctttatcgcttggaatccaaacat

SEQ ID NO: 5988928 - DNA, 25 bp, Homo sapien
tagctctatatccaaagcccagctc

SEQ ID NO: 5988929 - DNA, 25 bp, Homo sapien
tcagtggctcgagaagttagctcct

SEQ ID NO: 5988930 - DNA, 25 bp, Homo sapien
ggtgtcagaagtaatattagcttca

SEQ ID NO: 5988931 - DNA, 25 bp, Homo sapien
agatgagtttttaaggcgtcctgat

SEQ ID NO: 5988932 - DNA, 25 bp, Homo sapien
ggcttcagtggctcgagaagttagc

SEQ ID NO: 5988933 - DNA, 25 bp, Homo sapien
tagtccctccgatttctttagagaa

SEQ ID NO: 5988934 - DNA, 25 bp, Homo sapien
tctaacgtcttcatattgagcatct

SEQ ID NO: 5988935 - DNA, 25 bp, Homo sapien
ttagacaaacgcaatcagcaacttt

SEQ ID NO: 5988936 - DNA, 25 bp, Homo sapien
ttttctcttctttatagtaccagtt

SEQ ID NO: 5988937 - DNA, 25 bp, Homo sapien
attgagcatctttacagatactttg

SEQ ID NO: 5988938 - DNA, 25 bp, Homo sapien
cttgttcgcagatatttggtagtcc

SEQ ID NO: 5988939 - DNA, 25 bp, Homo sapien
caactttggggcctacaccattgta

SEQ ID NO: 5988940 - DNA, 25 bp, Homo sapien
gcctcaaaatcactactgaatactt

SEQ ID NO: 5988941 - DNA, 25 bp, Homo sapien
tacttagctctatatccaaagccca

SEQ ID NO: 5988942 - DNA, 25 bp, Homo sapien
gtgctctctaacgtcttcatattga

SEQ ID NO: 5988943 - DNA, 25 bp, Homo sapien
gcgttgtattttgtcctcaattctt

SEQ ID NO: 5988944 - DNA, 25 bp, Homo sapien
tgtgattaagttcccgaaattagag

SEQ ID NO: 5988945 - DNA, 25 bp, Homo sapien
ggttcctgggccaagatacggatgc

SEQ ID NO: 5988946 - DNA, 25 bp, Homo sapien
ttttctcgcggtttcgataatatac

SEQ ID NO: 5988947 - DNA, 25 bp, Homo sapien
tctacggggacgatgccatccatgt

SEQ ID NO: 5988948 - DNA, 25 bp, Homo sapien
aatattagcttcagctttatcattc

SEQ ID NO: 5988949 - DNA, 25 bp, Homo sapien
ccttgtggagaaagtttcgcaaatg

SEQ ID NO: 5988950 - DNA, 25 bp, Homo sapien
actagtccctccgatttctttagag

SEQ ID NO: 5988951 - DNA, 25 bp, Homo sapien
atcttcattgtagtgctgtactggt

SEQ ID NO: 5988952 - DNA, 25 bp, Homo sapien
catttgtttcgtaacaattgcttcc

SEQ ID NO: 5988953 - DNA, 25 bp, Homo sapien
cttttcttgctggcctatcttcatt

SEQ ID NO: 5988954 - DNA, 25 bp, Homo sapien
ttcatcccaaatccatcgaaaggat

SEQ ID NO: 5988955 - DNA, 25 bp, Homo sapien
cctcacttgtaggaaacgaatggta

SEQ ID NO: 5988956 - DNA, 25 bp, Homo sapien
gcccagctcacgcaacttggcttca

SEQ ID NO: 5988957 - DNA, 25 bp, Homo sapien
gcccaaccagcgtatgatccccatt

SEQ ID NO: 5988958 - DNA, 25 bp, Homo sapien
tttttcttgagataggtaaggcgtt

SEQ ID NO: 5988959 - DNA, 25 bp, Homo sapien
gttgtagtgctaccactagtccctc

SEQ ID NO: 5988960 - DNA, 25 bp, Homo sapien
cgaaattagagcaaaggctattgca

SEQ ID NO: 5988961 - DNA, 25 bp, Homo sapien
aggctattgcacattctcgtaattc

SEQ ID NO: 5988962 - DNA, 25 bp, Homo sapien
gctctaggttgattttttttcttga

SEQ ID NO: 5988963 - DNA, 25 bp, Homo sapien
tccaaagcccagctcacgcaacttg

SEQ ID NO: 5988964 - DNA, 25 bp, Homo sapien
aggattggccagcctgtagcacatt

SEQ ID NO: 5988965 - DNA, 25 bp, Homo sapien
tttatcgcttggaatccaaacatta

SEQ ID NO: 5988966 - DNA, 25 bp, Homo sapien
agcctgtagcacatttgctagacat

SEQ ID NO: 5988967 - DNA, 25 bp, Homo sapien
gcacatttgctagacatagctcact

SEQ ID NO: 5988968 - DNA, 25 bp, Homo sapien
atttcattagatgagtttttaaggc

SEQ ID NO: 5988969 - DNA, 25 bp, Homo sapien
aatccaaacattatcgaataagtgc

SEQ ID NO: 5988970 - DNA, 25 bp, Homo sapien
tatacttagctctatatccaaagcc

SEQ ID NO: 5988971 - DNA, 25 bp, Homo sapien
agttttctcgcggtttcgataatat

SEQ ID NO: 5988972 - DNA, 25 bp, Homo sapien
tgccttgtggagaaagtttcgcaaa

SEQ ID NO: 5988973 - DNA, 25 bp, Homo sapien
gtagtccctcttcgcaattctacta

SEQ ID NO: 5988974 - DNA, 25 bp, Homo sapien
tctttgatgtgaagatcagacaatt

SEQ ID NO: 5988975 - DNA, 25 bp, Homo sapien
tgtgaagtcccattagacaaacgca

SEQ ID NO: 5988976 - DNA, 25 bp, Homo sapien
gagctctaggttgattttttttctt

SEQ ID NO: 5988977 - DNA, 25 bp, Homo sapien
tctaatatggtcgagctctaggttg

SEQ ID NO: 5988978 - DNA, 25 bp, Homo sapien
cggatgccttgtggagaaagtttcg

SEQ ID NO: 5988979 - DNA, 25 bp, Homo sapien
tggggcctacaccattgtaggacat

SEQ ID NO: 5988980 - DNA, 25 bp, Homo sapien
cagatatttggtagtccctcttcgc

SEQ ID NO: 5988981 - DNA, 25 bp, Homo sapien
tgtactggtttaacttttcatccca

SEQ ID NO: 5988982 - DNA, 25 bp, Homo sapien
tctcattctcttcatcttgcctcaa

SEQ ID NO: 5988983 - DNA, 25 bp, Homo sapien
atcagacaattcaactttcagtttc

SEQ ID NO: 5988984 - DNA, 25 bp, Homo sapien
tttggggcctacaccattgtaggac

SEQ ID NO: 5988985 - DNA, 25 bp, Homo sapien
aggtatgtggtgtcagaagtaatat

SEQ ID NO: 5988986 - DNA, 25 bp, Homo sapien
ccaagatacggatgccttgtggaga

SEQ ID NO: 5988987 - DNA, 25 bp, Homo sapien
cagatactttgaaggtatgtggtgt

SEQ ID NO: 5988988 - DNA, 25 bp, Homo sapien
ttcatttgtttcgtaacaattgctt

SEQ ID NO: 5988989 - DNA, 25 bp, Homo sapien
cagtcgccgacagcaacaaattcca

SEQ ID NO: 5988990 - DNA, 25 bp, Homo sapien
taaggcgttgtattttgtcctcaat

SEQ ID NO: 5988991 - DNA, 25 bp, Homo sapien
tcgagcaaataaaggaaatcaatgt

SEQ ID NO: 5988992 - DNA, 25 bp, Homo sapien
tctttatagtaccagttgtagtgct

SEQ ID NO: 5988993 - DNA, 25 bp, Homo sapien
cactactgaatacttttcttgctgg

SEQ ID NO: 5988994 - DNA, 25 bp, Homo sapien
ttggcttcagtggctcgagaagtta

SEQ ID NO: 5988995 - DNA, 25 bp, Homo sapien
caagtttgccgaatttataagacat

SEQ ID NO: 5988996 - DNA, 25 bp, Homo sapien
acgtcttcatattgagcatctttac

SEQ ID NO: 5988997 - DNA, 25 bp, Homo sapien
gacaccttgggcccaaccagcgtat

SEQ ID NO: 5988998 - DNA, 25 bp, Homo sapien
atgtggtgtcagaagtaatattagc

SEQ ID NO: 5988999 - DNA, 25 bp, Homo sapien
tgaggtgctctctaacgtcttcata

SEQ ID NO: 5989000 - DNA, 25 bp, Homo sapien
atggcaagtttgccgaatttataag

SEQ ID NO: 5989001 - DNA, 25 bp, Homo sapien
ccgacagcaacaaattccaggatct

SEQ ID NO: 5989002 - DNA, 25 bp, Homo sapien
attaatggcaagtttgccgaattta

SEQ ID NO: 5989003 - DNA, 25 bp, Homo sapien
catctttacagatactttgaaggta

SEQ ID NO: 5989004 - DNA, 25 bp, Homo sapien
tagagaataggacaccttgggccca

SEQ ID NO: 5989005 - DNA, 25 bp, Homo sapien
aataagtgcttcagtgacacgtcca

SEQ ID NO: 5989006 - DNA, 25 bp, Homo sapien
aattgcttccgtttcctttatcata

SEQ ID NO: 5989007 - DNA, 25 bp, Homo sapien
ctgattgccacagtcgccgacagca

SEQ ID NO: 5989008 - DNA, 25 bp, Homo sapien
tttacagatactttgaaggtatgtg

SEQ ID NO: 5989009 - DNA, 25 bp, Homo sapien
tattgcacattctcgtaattcttga

SEQ ID NO: 5989010 - DNA, 25 bp, Homo sapien
ttgcacattctcgtaattcttgaaa

SEQ ID NO: 5989011 - DNA, 25 bp, Homo sapien
cgaataagtgcttcagtgacacgtc

SEQ ID NO: 5989012 - DNA, 25 bp, Homo sapien
ggagaaagtttcgcaaatgctttat

SEQ ID NO: 5989013 - DNA, 25 bp, Homo sapien
tcttgctggcctatcttcattgtag

SEQ ID NO: 5989014 - DNA, 25 bp, Homo sapien
ggaatccaaacattatcgaataagt

SEQ ID NO: 5989015 - DNA, 25 bp, Homo sapien
gtttttaaggcgtcctgattgccac

SEQ ID NO: 5989016 - DNA, 25 bp, Homo sapien
ttcccgaaattagagcaaaggctat

SEQ ID NO: 5989017 - DNA, 25 bp, Homo sapien
gcaatcagcaactttggggcctaca

SEQ ID NO: 5989018 - DNA, 25 bp, Homo sapien
tttttttcttgagataggtaaggcg

SEQ ID NO: 5989019 - DNA, 25 bp, Homo sapien
gggacgatgccatccatgtgaagtc

SEQ ID NO: 5989020 - DNA, 25 bp, Homo sapien
ggtcgagctctaggttgattttttt

SEQ ID NO: 5989021 - DNA, 25 bp, Homo sapien
catagctcacttttattaatggcaa

SEQ ID NO: 5989022 - DNA, 25 bp, Homo sapien
gctcgagaagttagctcctcacttg

SEQ ID NO: 5989023 - DNA, 25 bp, Homo sapien
gctcacttttattaatggcaagttt

SEQ ID NO: 5989024 - DNA, 25 bp, Homo sapien
tttgatgtgaagatcagacaattca

SEQ ID NO: 5989025 - DNA, 25 bp, Homo sapien
aatgtctcccatggttcctgggcca

SEQ ID NO: 5989026 - DNA, 25 bp, Homo sapien
gtgaagatcagacaattcaactttc

SEQ ID NO: 5989027 - DNA, 25 bp, Homo sapien
gacatagctcacttttattaatggc

SEQ ID NO: 5989028 - DNA, 25 bp, Homo sapien
gcttccgtttcctttatcatatccc

SEQ ID NO: 5989029 - DNA, 25 bp, Homo sapien
tcttcgcaattctactaacatggac

SEQ ID NO: 5989030 - DNA, 25 bp, Homo sapien
tctctaacgtcttcatattgagcat

SEQ ID NO: 5989031 - DNA, 25 bp, Homo sapien
gcctacaccattgtaggacatgagg

SEQ ID NO: 5989032 - DNA, 25 bp, Homo sapien
caccttgggcccaaccagcgtatga

SEQ ID NO: 5989033 - DNA, 25 bp, Homo sapien
tgtcagaagtaatattagcttcagc

SEQ ID NO: 5989034 - DNA, 25 bp, Homo sapien
atgctttatcgcttggaatccaaac

SEQ ID NO: 5989035 - DNA, 25 bp, Homo sapien
tgattaagttcccgaaattagagca

SEQ ID NO: 5989036 - DNA, 25 bp, Homo sapien
ggcgtcctgattgccacagtcgccg

SEQ ID NO: 5989037 - DNA, 25 bp, Homo sapien
gtggtgtcagaagtaatattagctt

SEQ ID NO: 5989038 - DNA, 25 bp, Homo sapien
agctcctcacttgtaggaaacgaat

SEQ ID NO: 5989039 - DNA, 25 bp, Homo sapien
tgacacgtccaatctaaaatatttc

SEQ ID NO: 5989040 - DNA, 25 bp, Homo sapien
aggatctcattctcttcatcttgcc

SEQ ID NO: 5989041 - DNA, 25 bp, Homo sapien
catctattgttgtgattaagttccc

SEQ ID NO: 5989042 - DNA, 25 bp, Homo sapien
ctaaaatatttcattagatgagttt

SEQ ID NO: 5989043 - DNA, 25 bp, Homo sapien
gaccccatctattgttgtgattaag

SEQ ID NO: 5989044 - DNA, 25 bp, Homo sapien
ctttatcattcaccagttttctcgc

SEQ ID NO: 5989045 - DNA, 25 bp, Homo sapien
gggcctacaccattgtaggacatga

SEQ ID NO: 5989046 - DNA, 25 bp, Homo sapien
aaaaagcattaatctaatatggtcg

SEQ ID NO: 5989047 - DNA, 25 bp, Homo sapien
gatatttggtagtccctcttcgcaa

SEQ ID NO: 5989048 - DNA, 25 bp, Homo sapien
gcaaatgctttatcgcttggaatcc

SEQ ID NO: 5989049 - DNA, 25 bp, Homo sapien
agtgcttcagtgacacgtccaatct

SEQ ID NO: 5989050 - DNA, 25 bp, Homo sapien
aagatacggatgccttgtggagaaa

SEQ ID NO: 5989051 - DNA, 25 bp, Homo sapien
tagacatagctcacttttattaatg

SEQ ID NO: 5989052 - DNA, 25 bp, Homo sapien
caattctactaacatggacatctac

SEQ ID NO: 5989053 - DNA, 25 bp, Homo sapien
gctctatatccaaagcccagctcac

SEQ ID NO: 5989054 - DNA, 25 bp, Homo sapien
aaacgcaatcagcaactttggggcc

SEQ ID NO: 5989055 - DNA, 25 bp, Homo sapien
ttgccacagtcgccgacagcaacaa

SEQ ID NO: 5989056 - DNA, 25 bp, Homo sapien
aaaggaaatcaatgtctcccatggt

SEQ ID NO: 5989057 - DNA, 25 bp, Homo sapien
ttcctgggccaagatacggatgcct

SEQ ID NO: 5989058 - DNA, 25 bp, Homo sapien
tgatgtgaagatcagacaattcaac

SEQ ID NO: 5989059 - DNA, 25 bp, Homo sapien
tttcttgagataggtaaggcgttgt

SEQ ID NO: 5989060 - DNA, 25 bp, Homo sapien
aaatccatcgaaaggattggccagc

SEQ ID NO: 5989061 - DNA, 25 bp, Homo sapien
acatttgctagacatagctcacttt

SEQ ID NO: 5989062 - DNA, 25 bp, Homo sapien
agaagtaatattagcttcagcttta

SEQ ID NO: 5989063 - DNA, 25 bp, Homo sapien
ctcgcggtttcgataatatacttag

SEQ ID NO: 5989064 - DNA, 25 bp, Homo sapien
gctctctaacgtcttcatattgagc

SEQ ID NO: 5989065 - DNA, 25 bp, Homo sapien
cacagtcgccgacagcaacaaattc

SEQ ID NO: 5989066 - DNA, 25 bp, Homo sapien
ttcatcttgcctcaaaatcactact

SEQ ID NO: 5989067 - DNA, 25 bp, Homo sapien
agcattaatctaatatggtcgagct

SEQ ID NO: 5989068 - DNA, 25 bp, Homo sapien
atattgagcatctttacagatactt

SEQ ID NO: 5989069 - DNA, 25 bp, Homo sapien
ccagttttctcgcggtttcgataat

SEQ ID NO: 5989070 - DNA, 25 bp, Homo sapien
cttcatattgagcatctttacagat

SEQ ID NO: 5989071 - DNA, 25 bp, Homo sapien
tagtaccagttgtagtgctaccact

SEQ ID NO: 5989072 - DNA, 25 bp, Homo sapien
tattactcgagcaaataaaggaaat

SEQ ID NO: 5989073 - DNA, 25 bp, Homo sapien
gttgtgattaagttcccgaaattag

SEQ ID NO: 5989074 - DNA, 25 bp, Homo sapien
caaattccaggatctcattctcttc

SEQ ID NO: 5989075 - DNA, 25 bp, Homo sapien
cgcggtttcgataatatacttagct

SEQ ID NO: 5989076 - DNA, 25 bp, Homo sapien
gaagatcagacaattcaactttcag

SEQ ID NO: 5989077 - DNA, 25 bp, Homo sapien
ttagcttcagctttatcattcacca

SEQ ID NO: 5989078 - DNA, 25 bp, Homo sapien
cattagacaaacgcaatcagcaact

SEQ ID NO: 5989079 - DNA, 25 bp, Homo sapien
tattagcttcagctttatcattcac

SEQ ID NO: 5989080 - DNA, 25 bp, Homo sapien
aaagtttcgcaaatgctttatcgct

SEQ ID NO: 5989081 - DNA, 25 bp, Homo sapien
tggtagtccctcttcgcaattctac

SEQ ID NO: 5989082 - DNA, 25 bp, Homo sapien
aaaggctattgcacattctcgtaat

SEQ ID NO: 5989083 - DNA, 25 bp, Homo sapien
ccagcctgtagcacatttgctagac

SEQ ID NO: 5989084 - DNA, 25 bp, Homo sapien
attttgtcctcaattctttgagatg

SEQ ID NO: 5989085 - DNA, 25 bp, Homo sapien
gattgccacagtcgccgacagcaac

SEQ ID NO: 5989086 - DNA, 25 bp, Homo sapien
tcttgcctcaaaatcactactgaat

SEQ ID NO: 5989087 - DNA, 25 bp, Homo sapien
cagacaattcaactttcagtttcat

SEQ ID NO: 5989088 - DNA, 25 bp, Homo sapien
gaaatcaatgtctcccatggttcct

SEQ ID NO: 5989089 - DNA, 25 bp, Homo sapien
tcgtaacaattgcttccgtttcctt

SEQ ID NO: 5989090 - DNA, 25 bp, Homo sapien
aggacatgaggtgctctctaacgtc

SEQ ID NO: 5989091 - DNA, 25 bp, Homo sapien
tactggtttaacttttcatcccaaa

SEQ ID NO: 5989092 - DNA, 25 bp, Homo sapien
acttttcatcccaaatccatcgaaa

SEQ ID NO: 5989093 - DNA, 25 bp, Homo sapien
gcaaataaaggaaatcaatgtctcc

SEQ ID NO: 5989094 - DNA, 25 bp, Homo sapien
ttggccagcctgtagcacatttgct

SEQ ID NO: 5989095 - DNA, 25 bp, Homo sapien
agatcagacaattcaactttcagtt

SEQ ID NO: 5989096 - DNA, 25 bp, Homo sapien
ggccagcctgtagcacatttgctag

SEQ ID NO: 5989097 - DNA, 25 bp, Homo sapien
taacaattgcttccgtttcctttat

SEQ ID NO: 5989098 - DNA, 25 bp, Homo sapien
agtttcgcaaatgctttatcgcttg

SEQ ID NO: 5989099 - DNA, 25 bp, Homo sapien
atggttcctgggccaagatacggat

SEQ ID NO: 5989100 - DNA, 25 bp, Homo sapien
acaaacgcaatcagcaactttgggg

SEQ ID NO: 5989101 - DNA, 25 bp, Homo sapien
cctgtagcacatttgctagacatag

SEQ ID NO: 5989102 - DNA, 25 bp, Homo sapien
tgtttcgtaacaattgcttccgttt

SEQ ID NO: 5989103 - DNA, 25 bp, Homo sapien
ctcctcacttgtaggaaacgaatgg

SEQ ID NO: 5989104 - DNA, 25 bp, Homo sapien
ttgcctcaaaatcactactgaatac

SEQ ID NO: 5989105 - DNA, 25 bp, Homo sapien
gtaggaaacgaatggtaggcgaccc

SEQ ID NO: 5989106 - DNA, 25 bp, Homo sapien
gacaattcaactttcagtttcattt

SEQ ID NO: 5989107 - DNA, 25 bp, Homo sapien
cgcagatatttggtagtccctcttc

SEQ ID NO: 5989108 - DNA, 25 bp, Homo sapien
cattaatctaatatggtcgagctct

SEQ ID NO: 5989109 - DNA, 25 bp, Homo sapien
atggtcgagctctaggttgattttt

SEQ ID NO: 5989110 - DNA, 25 bp, Homo sapien
gtccctccgatttctttagagaata

SEQ ID NO: 5989111 - DNA, 25 bp, Homo sapien
taacttttcatcccaaatccatcga

SEQ ID NO: 5989112 - DNA, 25 bp, Homo sapien
aatctaatatggtcgagctctaggt

SEQ ID NO: 5989113 - DNA, 25 bp, Homo sapien
cgaaaggattggccagcctgtagca

SEQ ID NO: 5989114 - DNA, 25 bp, Homo sapien
ttaatctaatatggtcgagctctag

SEQ ID NO: 5989115 - DNA, 25 bp, Homo sapien
ctcttctttatagtaccagttgtag

SEQ ID NO: 5989116 - DNA, 25 bp, Homo sapien
tctcttcatcttgcctcaaaatcac

SEQ ID NO: 5989117 - DNA, 25 bp, Homo sapien
taatggcaagtttgccgaatttata

SEQ ID NO: 5989118 - DNA, 25 bp, Homo sapien
ttttcatcccaaatccatcgaaagg

SEQ ID NO: 5989119 - DNA, 25 bp, Homo sapien
aaggcgtcctgattgccacagtcgc

SEQ ID NO: 5989120 - DNA, 25 bp, Homo sapien
aggacaccttgggcccaaccagcgt

SEQ ID NO: 5989121 - DNA, 25 bp, Homo sapien
aactttcagtttcatttgtttcgta

SEQ ID NO: 5989122 - DNA, 25 bp, Homo sapien
atgccatccatgtgaagtcccatta

SEQ ID NO: 5989123 - DNA, 25 bp, Homo sapien
tgtctcccatggttcctgggccaag

SEQ ID NO: 5989124 - DNA, 25 bp, Homo sapien
aagtaatattagcttcagctttatc

SEQ ID NO: 5989125 - DNA, 25 bp, Homo sapien
tcatattgagcatctttacagatac

SEQ ID NO: 5989126 - DNA, 25 bp, Homo sapien
gctaccactagtccctccgatttct

SEQ ID NO: 5989127 - DNA, 25 bp, Homo sapien
tcttgaaatgttattattactcgag

SEQ ID NO: 5989128 - DNA, 25 bp, Homo sapien
aaatgctttatcgcttggaatccaa

SEQ ID NO: 5989129 - DNA, 25 bp, Homo sapien
attaagttcccgaaattagagcaaa

SEQ ID NO: 5989130 - DNA, 25 bp, Homo sapien
agaaagtttcgcaaatgctttatcg

SEQ ID NO: 5989131 - DNA, 25 bp, Homo sapien
aggaaatcaatgtctcccatggttc

SEQ ID NO: 5989132 - DNA, 25 bp, Homo sapien
tcgagctctaggttgattttttttc

SEQ ID NO: 5989133 - DNA, 25 bp, Homo sapien
tcacttgtaggaaacgaatggtagg

SEQ ID NO: 5989134 - DNA, 25 bp, Homo sapien
aggaaacgaatggtaggcgacccca

SEQ ID NO: 5989135 - DNA, 25 bp, Homo sapien
ttaaaaagcattaatctaatatggt

SEQ ID NO: 5989136 - DNA, 25 bp, Homo sapien
aatggtaggcgaccccatctattgt

SEQ ID NO: 5989137 - DNA, 25 bp, Homo sapien
ccaaccagcgtatgatccccatttt

SEQ ID NO: 5989138 - DNA, 25 bp, Homo sapien
actttggggcctacaccattgtagg

SEQ ID NO: 5989139 - DNA, 25 bp, Homo sapien
catgaggtgctctctaacgtcttca

SEQ ID NO: 5989140 - DNA, 25 bp, Homo sapien
ataatatacttagctctatatccaa

SEQ ID NO: 5989141 - DNA, 25 bp, Homo sapien
tttgagatggttcttgttcgcagat

SEQ ID NO: 5989142 - DNA, 25 bp, Homo sapien
ttgaaatgttattattactcgagca

SEQ ID NO: 5989143 - DNA, 25 bp, Homo sapien
aatacttttcttgctggcctatctt

SEQ ID NO: 5989144 - DNA, 25 bp, Homo sapien
gagcaaaggctattgcacattctcg

SEQ ID NO: 5989145 - DNA, 25 bp, Homo sapien
tttcgcaaatgctttatcgcttgga

SEQ ID NO: 5989146 - DNA, 25 bp, Homo sapien
ttcgcaattctactaacatggacat

SEQ ID NO: 5989147 - DNA, 25 bp, Homo sapien
catccatgtgaagtcccattagaca

SEQ ID NO: 5989148 - DNA, 25 bp, Homo sapien
cccgaaattagagcaaaggctattg

SEQ ID NO: 5989149 - DNA, 25 bp, Homo sapien
gattttttttcttgagataggtaag

SEQ ID NO: 5989150 - DNA, 25 bp, Homo sapien
ggcaagtttgccgaatttataagac

SEQ ID NO: 5989151 - DNA, 25 bp, Homo sapien
ggtaaggcgttgtattttgtcctca

SEQ ID NO: 5989152 - DNA, 25 bp, Homo sapien
cgaatggtaggcgaccccatctatt

SEQ ID NO: 5989153 - DNA, 25 bp, Homo sapien
acacgtccaatctaaaatatttcat

SEQ ID NO: 5989154 - DNA, 25 bp, Homo sapien
gttgtattttgtcctcaattctttg

SEQ ID NO: 5989155 - DNA, 25 bp, Homo sapien
ataaaggaaatcaatgtctcccatg

SEQ ID NO: 5989156 - DNA, 25 bp, Homo sapien
cgtcctgattgccacagtcgccgac

SEQ ID NO: 5989157 - DNA, 25 bp, Homo sapien
acaccattgtaggacatgaggtgct

SEQ ID NO: 5989158 - DNA, 25 bp, Homo sapien
taagtgcttcagtgacacgtccaat

SEQ ID NO: 5989159 - DNA, 25 bp, Homo sapien
ttccaggatctcattctcttcatct

SEQ ID NO: 5989160 - DNA, 25 bp, Homo sapien
agttagctcctcacttgtaggaaac

SEQ ID NO: 5989161 - DNA, 25 bp, Homo sapien
tcattctcttcatcttgcctcaaaa

SEQ ID NO: 5989162 - DNA, 25 bp, Homo sapien
gacatctacggggacgatgccatcc

SEQ ID NO: 5989163 - DNA, 25 bp, Homo sapien
agctcacgcaacttggcttcagtgg

SEQ ID NO: 5989164 - DNA, 25 bp, Homo sapien
tgagatggttcttgttcgcagatat

SEQ ID NO: 5989165 - DNA, 25 bp, Homo sapien
gtaggcgaccccatctattgttgtg

SEQ ID NO: 5989166 - DNA, 25 bp, Homo sapien
agtccctcttcgcaattctactaac

SEQ ID NO: 5989167 - DNA, 25 bp, Homo sapien
tcctcaattctttgagatggttctt

SEQ ID NO: 5989168 - DNA, 25 bp, Homo sapien
ctatcttcattgtagtgctgtactg

SEQ ID NO: 5989169 - DNA, 25 bp, Homo sapien
gaaacgaatggtaggcgaccccatc

SEQ ID NO: 5989170 - DNA, 25 bp, Homo sapien
gacgatgccatccatgtgaagtccc

SEQ ID NO: 5989171 - DNA, 25 bp, Homo sapien
tgaagtcccattagacaaacgcaat

SEQ ID NO: 5989172 - DNA, 25 bp, Homo sapien
attagagcaaaggctattgcacatt

SEQ ID NO: 5989173 - DNA, 25 bp, Homo sapien
ctacaccattgtaggacatgaggtg

SEQ ID NO: 5989174 - DNA, 25 bp, Homo sapien
caccagttttctcgcggtttcgata

SEQ ID NO: 5989175 - DNA, 25 bp, Homo sapien
ttgctagacatagctcacttttatt

SEQ ID NO: 5989176 - DNA, 25 bp, Homo sapien
tggcctatcttcattgtagtgctgt

SEQ ID NO: 5989177 - DNA, 25 bp, Homo sapien
gtttcctttatcatatcccattttc

SEQ ID NO: 5989178 - DNA, 25 bp, Homo sapien
tcccatggttcctgggccaagatac

SEQ ID NO: 5989179 - DNA, 25 bp, Homo sapien
tcgcttggaatccaaacattatcga

SEQ ID NO: 5989180 - DNA, 25 bp, Homo sapien
gctggcctatcttcattgtagtgct

SEQ ID NO: 5989181 - DNA, 25 bp, Homo sapien
tccaaacattatcgaataagtgctt

SEQ ID NO: 5989182 - DNA, 25 bp, Homo sapien
tttgcttctttgatgtgaagatcag

SEQ ID NO: 5989183 - DNA, 25 bp, Homo sapien
acattctcgtaattcttgaaatgtt

SEQ ID NO: 5989184 - DNA, 25 bp, Homo sapien
cagtttcatttgtttcgtaacaatt

SEQ ID NO: 5989185 - DNA, 25 bp, Homo sapien
ccactagtccctccgatttctttag

SEQ ID NO: 5989186 - DNA, 25 bp, Homo sapien
taggtaaggcgttgtattttgtcct

SEQ ID NO: 5989187 - DNA, 25 bp, Homo sapien
aagcccagctcacgcaacttggctt

SEQ ID NO: 5989188 - DNA, 25 bp, Homo sapien
tactttgaaggtatgtggtgtcaga

SEQ ID NO: 5989189 - DNA, 25 bp, Homo sapien
acgtccaatctaaaatatttcatta

SEQ ID NO: 5989190 - DNA, 25 bp, Homo sapien
ctaggttgattttttttcttgagat

SEQ ID NO: 5989191 - DNA, 25 bp, Homo sapien
ccttgggcccaaccagcgtatgatc

SEQ ID NO: 5989192 - DNA, 25 bp, Homo sapien
ttgtaggaaacgaatggtaggcgac

SEQ ID NO: 5989193 - DNA, 25 bp, Homo sapien
tgggccaagatacggatgccttgtg

SEQ ID NO: 5989194 - DNA, 25 bp, Homo sapien
tagagcaaaggctattgcacattct

SEQ ID NO: 5989195 - DNA, 25 bp, Homo sapien
tatagtaccagttgtagtgctacca

SEQ ID NO: 5989196 - DNA, 25 bp, Homo sapien
tctcccatggttcctgggccaagat

SEQ ID NO: 5989197 - DNA, 25 bp, Homo sapien
cttagctctatatccaaagcccagc

SEQ ID NO: 5989198 - DNA, 25 bp, Homo sapien
gtatgtggtgtcagaagtaatatta

SEQ ID NO: 5989199 - DNA, 25 bp, Homo sapien
tttgtcctcaattctttgagatggt

SEQ ID NO: 5989200 - DNA, 25 bp, Homo sapien
ctccgatttctttagagaataggac

SEQ ID NO: 5989201 - DNA, 25 bp, Homo sapien
aacaaattccaggatctcattctct

SEQ ID NO: 5989202 - DNA, 25 bp, Homo sapien
tctcgtaattcttgaaatgttatta

SEQ ID NO: 5989203 - DNA, 25 bp, Homo sapien
cggggacgatgccatccatgtgaag

SEQ ID NO: 5989204 - DNA, 25 bp, Homo sapien
aggtgctctctaacgtcttcatatt

SEQ ID NO: 5989205 - DNA, 25 bp, Homo sapien
atatggtcgagctctaggttgattt

SEQ ID NO: 5989206 - DNA, 25 bp, Homo sapien
cagttgtagtgctaccactagtccc

SEQ ID NO: 5989207 - DNA, 25 bp, Homo sapien
tcattgtagtgctgtactggtttaa

SEQ ID NO: 5989208 - DNA, 25 bp, Homo sapien
agttcccgaaattagagcaaaggct

SEQ ID NO: 5989209 - DNA, 25 bp, Homo sapien
gaaatgttattattactcgagcaaa

SEQ ID NO: 5989210 - DNA, 25 bp, Homo sapien
gcaaaggctattgcacattctcgta

SEQ ID NO: 5989211 - DNA, 25 bp, Homo sapien
ttgctggcctatcttcattgtagtg

SEQ ID NO: 5989212 - DNA, 25 bp, Homo sapien
gagataggtaaggcgttgtattttg

SEQ ID NO: 5989213 - DNA, 25 bp, Homo sapien
aggcgaccccatctattgttgtgat

SEQ ID NO: 5989214 - DNA, 25 bp, Homo sapien
tatttggtagtccctcttcgcaatt

SEQ ID NO: 5989215 - DNA, 25 bp, Homo sapien
ccatggttcctgggccaagatacgg

SEQ ID NO: 5989216 - DNA, 25 bp, Homo sapien
ttatcattcaccagttttctcgcgg

SEQ ID NO: 5989217 - DNA, 25 bp, Homo sapien
gtaccagttgtagtgctaccactag

SEQ ID NO: 5989218 - DNA, 25 bp, Homo sapien
ttgaaggtatgtggtgtcagaagta

SEQ ID NO: 5989219 - DNA, 25 bp, Homo sapien
atgtgaagatcagacaattcaactt

SEQ ID NO: 5989220 - DNA, 25 bp, Homo sapien
gcttggaatccaaacattatcgaat

SEQ ID NO: 5989221 - DNA, 25 bp, Homo sapien
actgaatacttttcttgctggccta

SEQ ID NO: 5989222 - DNA, 25 bp, Homo sapien
tttaacttttcatcccaaatccatc

SEQ ID NO: 5989223 - DNA, 25 bp, Homo sapien
aatgttattattactcgagcaaata

SEQ ID NO: 5989224 - DNA, 25 bp, Homo sapien
caaagcccagctcacgcaacttggc

SEQ ID NO: 5989225 - DNA, 25 bp, Homo sapien
gataggtaaggcgttgtattttgtc

SEQ ID NO: 5989226 - DNA, 25 bp, Homo sapien
tttagagaataggacaccttgggcc

SEQ ID NO: 5989227 - DNA, 25 bp, Homo sapien
actcgagcaaataaaggaaatcaat

SEQ ID NO: 5989228 - DNA, 25 bp, Homo sapien
catcttgcctcaaaatcactactga

SEQ ID NO: 5989229 - DNA, 25 bp, Homo sapien
tttctttagagaataggacaccttg

SEQ ID NO: 5989230 - DNA, 25 bp, Homo sapien
tcgtaattcttgaaatgttattatt

SEQ ID NO: 5989231 - DNA, 25 bp, Homo sapien
tactaacatggacatctacggggac

SEQ ID NO: 5989232 - DNA, 25 bp, Homo sapien
gtaatattagcttcagctttatcat

SEQ ID NO: 5989233 - DNA, 25 bp, Homo sapien
tatccaaagcccagctcacgcaact

SEQ ID NO: 5989234 - DNA, 25 bp, Homo sapien
tcgagaagttagctcctcacttgta

SEQ ID NO: 5989235 - DNA, 25 bp, Homo sapien
tgtagtgctgtactggtttaacttt

SEQ ID NO: 5989236 - DNA, 25 bp, Homo sapien
gatacggatgccttgtggagaaagt

SEQ ID NO: 5989237 - DNA, 25 bp, Homo sapien
gtcccattagacaaacgcaatcagc

SEQ ID NO: 5989238 - DNA, 25 bp, Homo sapien
cgatgccatccatgtgaagtcccat

SEQ ID NO: 5989239 - DNA, 25 bp, Homo sapien
ttattaatggcaagtttgccgaatt

SEQ ID NO: 5989240 - DNA, 25 bp, Homo sapien
ccagctcacgcaacttggcttcagt

SEQ ID NO: 5989241 - DNA, 25 bp, Homo sapien
tgagcatctttacagatactttgaa

SEQ ID NO: 5989242 - DNA, 25 bp, Homo sapien
accattgtaggacatgaggtgctct

SEQ ID NO: 5989243 - DNA, 25 bp, Homo sapien
agcttcagctttatcattcaccagt

SEQ ID NO: 5989244 - DNA, 25 bp, Homo sapien
catctacggggacgatgccatccat

SEQ ID NO: 5989245 - DNA, 25 bp, Homo sapien
accagttgtagtgctaccactagtc

SEQ ID NO: 5989246 - DNA, 25 bp, Homo sapien
attctactaacatggacatctacgg

SEQ ID NO: 5989247 - DNA, 25 bp, Homo sapien
atcgaataagtgcttcagtgacacg

SEQ ID NO: 5989248 - DNA, 25 bp, Homo sapien
tttcgtaacaattgcttccgtttcc

SEQ ID NO: 5989249 - DNA, 25 bp, Homo sapien
aaattagagcaaaggctattgcaca

SEQ ID NO: 5989250 - DNA, 25 bp, Homo sapien
gctattgcacattctcgtaattctt

SEQ ID NO: 5989251 - DNA, 25 bp, Homo sapien
gatttctttagagaataggacacct

SEQ ID NO: 5989252 - DNA, 25 bp, Homo sapien
aggttgattttttttcttgagatag

SEQ ID NO: 5989253 - DNA, 25 bp, Homo sapien
attcttgaaatgttattattactcg

SEQ ID NO: 5989254 - DNA, 25 bp, Homo sapien
ttctcttctttatagtaccagttgt

SEQ ID NO: 5989255 - DNA, 25 bp, Homo sapien
tctattgttgtgattaagttcccga

SEQ ID NO: 5989256 - DNA, 25 bp, Homo sapien
gagaagttagctcctcacttgtagg

SEQ ID NO: 5989257 - DNA, 25 bp, Homo sapien
ccagcgtatgatccccattttttaa

SEQ ID NO: 5989258 - DNA, 25 bp, Homo sapien
gaataggacaccttgggcccaacca

SEQ ID NO: 5989259 - DNA, 25 bp, Homo sapien
tatcgcttggaatccaaacattatc

SEQ ID NO: 5989260 - DNA, 25 bp, Homo sapien
aatcagcaactttggggcctacacc

SEQ ID NO: 5989261 - DNA, 25 bp, Homo sapien
caaaatcactactgaatacttttct

SEQ ID NO: 5989262 - DNA, 25 bp, Homo sapien
cccatctattgttgtgattaagttc

SEQ ID NO: 5989263 - DNA, 25 bp, Homo sapien
gagcaaataaaggaaatcaatgtct

SEQ ID NO: 5989264 - DNA, 25 bp, Homo sapien
gtttcatttgtttcgtaacaattgc

SEQ ID NO: 5989265 - DNA, 25 bp, Homo sapien
taacgtcttcatattgagcatcttt

SEQ ID NO: 5989266 - DNA, 25 bp, Homo sapien
tcagaagtaatattagcttcagctt

SEQ ID NO: 5989267 - DNA, 25 bp, Homo sapien
gcaacaaattccaggatctcattct

SEQ ID NO: 5989268 - DNA, 25 bp, Homo sapien
atcattcaccagttttctcgcggtt

SEQ ID NO: 5989269 - DNA, 25 bp, Homo sapien
gtcttcatattgagcatctttacag

SEQ ID NO: 5989270 - DNA, 25 bp, Homo sapien
ttgggcccaaccagcgtatgatccc

SEQ ID NO: 5989271 - DNA, 25 bp, Homo sapien
tggacatctacggggacgatgccat

SEQ ID NO: 5989272 - DNA, 25 bp, Homo sapien
agatggttcttgttcgcagatattt

SEQ ID NO: 5989273 - DNA, 25 bp, Homo sapien
ttagctcctcacttgtaggaaacga

SEQ ID NO: 5989274 - DNA, 25 bp, Homo sapien
ggtttaacttttcatcccaaatcca

SEQ ID NO: 5989275 - DNA, 25 bp, Homo sapien
tacttttcttgctggcctatcttca

SEQ ID NO: 5989276 - DNA, 25 bp, Homo sapien
tctttacagatactttgaaggtatg

SEQ ID NO: 5989277 - DNA, 25 bp, Homo sapien
tagtgctaccactagtccctccgat

SEQ ID NO: 5989278 - DNA, 25 bp, Homo sapien
cctcttcgcaattctactaacatgg

SEQ ID NO: 5989279 - DNA, 25 bp, Homo sapien
tgtcctcaattctttgagatggttc

SEQ ID NO: 5989280 - DNA, 25 bp, Homo sapien
ttgagataggtaaggcgttgtattt

SEQ ID NO: 5989281 - DNA, 25 bp, Homo sapien
aattccaggatctcattctcttcat

SEQ ID NO: 5989282 - DNA, 25 bp, Homo sapien
tcctgattgccacagtcgccgacag

SEQ ID NO: 5989283 - DNA, 25 bp, Homo sapien
ttcattagatgagtttttaaggcgt

SEQ ID NO: 5989284 - DNA, 25 bp, Homo sapien
tacggggacgatgccatccatgtga

SEQ ID NO: 5989285 - DNA, 25 bp, Homo sapien
gcgaccccatctattgttgtgatta

SEQ ID NO: 5989286 - DNA, 25 bp, Homo sapien
ccatcgaaaggattggccagcctgt

SEQ ID NO: 5989287 - DNA, 25 bp, Homo sapien
gtgctgtactggtttaacttttcat

SEQ ID NO: 5989288 - DNA, 25 bp, Homo sapien
ttccgtttcctttatcatatcccat

SEQ ID NO: 5989289 - DNA, 25 bp, Homo sapien
tacggatgccttgtggagaaagttt

SEQ ID NO: 5989290 - DNA, 25 bp, Homo sapien
atggttcttgttcgcagatatttgg

SEQ ID NO: 5989291 - DNA, 25 bp, Homo sapien
gggcccaaccagcgtatgatcccca

SEQ ID NO: 5989292 - DNA, 25 bp, Homo sapien
ataggacaccttgggcccaaccagc

SEQ ID NO: 5989293 - DNA, 25 bp, Homo sapien
aaataaaggaaatcaatgtctccca

SEQ ID NO: 5989294 - DNA, 25 bp, Homo sapien
ctttgaaggtatgtggtgtcagaag

SEQ ID NO: 5989295 - DNA, 25 bp, Homo sapien
gaaggtatgtggtgtcagaagtaat

SEQ ID NO: 5989296 - DNA, 25 bp, Homo sapien
tcaatgtctcccatggttcctgggc

SEQ ID NO: 5989297 - DNA, 25 bp, Homo sapien
gagtttttaaggcgtcctgattgcc

SEQ ID NO: 5989298 - DNA, 25 bp, Homo sapien
attattactcgagcaaataaaggaa

SEQ ID NO: 5989299 - DNA, 25 bp, Homo sapien
cttcagtgacacgtccaatctaaaa

SEQ ID NO: 5989300 - DNA, 25 bp, Homo sapien
ctggtttaacttttcatcccaaatc

SEQ ID NO: 5989301 - DNA, 25 bp, Homo sapien
cgcaacttggcttcagtggctcgag

SEQ ID NO: 5989302 - DNA, 25 bp, Homo sapien
cccattagacaaacgcaatcagcaa

SEQ ID NO: 5989303 - DNA, 25 bp, Homo sapien
aaaggattggccagcctgtagcaca

SEQ ID NO: 5989304 - DNA, 25 bp, Homo sapien
tatatccaaagcccagctcacgcaa

SEQ ID NO: 5989305 - DNA, 25 bp, Homo sapien
cttcattgtagtgctgtactggttt

SEQ ID NO: 5989306 - DNA, 25 bp, Homo sapien
gaagttagctcctcacttgtaggaa

SEQ ID NO: 5989307 - DNA, 25 bp, Homo sapien
ttgtggagaaagtttcgcaaatgct

SEQ ID NO: 5989308 - DNA, 25 bp, Homo sapien
cgataatatacttagctctatatcc

SEQ ID NO: 5989309 - DNA, 25 bp, Homo sapien
ccgtttcctttatcatatcccattt

SEQ ID NO: 5989310 - DNA, 25 bp, Homo sapien
cattcaccagttttctcgcggtttc

SEQ ID NO: 5989311 - DNA, 25 bp, Homo sapien
cctgggccaagatacggatgccttg

SEQ ID NO: 5989312 - DNA, 25 bp, Homo sapien
ccgatttctttagagaataggacac

SEQ ID NO: 5989313 - DNA, 25 bp, Homo sapien
gtgctaccactagtccctccgattt

SEQ ID NO: 5989314 - DNA, 25 bp, Homo sapien
taatatggtcgagctctaggttgat

SEQ ID NO: 5989315 - DNA, 25 bp, Homo sapien
cttctttgatgtgaagatcagacaa

SEQ ID NO: 5989316 - DNA, 25 bp, Homo sapien
cggtttcgataatatacttagctct

SEQ ID NO: 5989317 - DNA, 25 bp, Homo sapien
ggttcttgttcgcagatatttggta

SEQ ID NO: 5989318 - DNA, 25 bp, Homo sapien
cttcagtggctcgagaagttagctc

SEQ ID NO: 5989319 - DNA, 25 bp, Homo sapien
ttcaccagttttctcgcggtttcga

SEQ ID NO: 5989320 - DNA, 25 bp, Homo sapien
tttgtttcgtaacaattgcttccgt

SEQ ID NO: 5989321 - DNA, 25 bp, Homo sapien
acttttattaatggcaagtttgccg

SEQ ID NO: 5989322 - DNA, 25 bp, Homo sapien
tttttgcttctttgatgtgaagatc

SEQ ID NO: 5989323 - DNA, 25 bp, Homo sapien
tcgcaaatgctttatcgcttggaat

SEQ ID NO: 5989324 - DNA, 25 bp, Homo sapien
ttctcgcggtttcgataatatactt

SEQ ID NO: 5989325 - DNA, 25 bp, Homo sapien
agtggctcgagaagttagctcctca

SEQ ID NO: 5989326 - DNA, 25 bp, Homo sapien
gtggagaaagtttcgcaaatgcttt

SEQ ID NO: 5989327 - DNA, 25 bp, Homo sapien
ttgttgtgattaagttcccgaaatt

SEQ ID NO: 5989328 - DNA, 25 bp, Homo sapien
taagttcccgaaattagagcaaagg

SEQ ID NO: 5989329 - DNA, 25 bp, Homo sapien
aatcaatgtctcccatggttcctgg

SEQ ID NO: 5989330 - DNA, 25 bp, Homo sapien
atcactactgaatacttttcttgct

SEQ ID NO: 5989331 - DNA, 25 bp, Homo sapien
gatgccttgtggagaaagtttcgca

SEQ ID NO: 5989332 - DNA, 25 bp, Homo sapien
tctatttttgcttctttgatgtgaa

SEQ ID NO: 5989333 - DNA, 25 bp, Homo sapien
gtttcgataatatacttagctctat

SEQ ID NO: 5989334 - DNA, 25 bp, Homo sapien
ttatcgaataagtgcttcagtgaca

SEQ ID NO: 5989335 - DNA, 25 bp, Homo sapien
ttcgcagatatttggtagtccctct

SEQ ID NO: 5989336 - DNA, 25 bp, Homo sapien
tccatgtgaagtcccattagacaaa

SEQ ID NO: 5989337 - DNA, 25 bp, Homo sapien
tacagatactttgaaggtatgtggt

SEQ ID NO: 5989338 - DNA, 25 bp, Homo sapien
gtcgccgacagcaacaaattccagg

SEQ ID NO: 5989339 - DNA, 25 bp, Homo sapien
caattctttgagatggttcttgttc

SEQ ID NO: 5989340 - DNA, 25 bp, Homo sapien
ggccaagatacggatgccttgtgga

SEQ ID NO: 5989341 - DNA, 25 bp, Homo sapien
agcaactttggggcctacaccattg

SEQ ID NO: 5989342 - DNA, 25 bp, Homo sapien
catgtgaagtcccattagacaaacg

SEQ ID NO: 5989343 - DNA, 25 bp, Homo sapien
tggctcgagaagttagctcctcact

SEQ ID NO: 5989344 - DNA, 25 bp, Homo sapien
ccaaatccatcgaaaggattggcca

SEQ ID NO: 5989345 - DNA, 25 bp, Homo sapien
tgcttctttgatgtgaagatcagac

SEQ ID NO: 5989346 - DNA, 25 bp, Homo sapien
gccatccatgtgaagtcccattaga

SEQ ID NO: 5989347 - DNA, 25 bp, Homo sapien
tagcacatttgctagacatagctca

SEQ ID NO: 5989348 - DNA, 25 bp, Homo sapien
ttgcttccgtttcctttatcatatc

SEQ ID NO: 5989349 - DNA, 25 bp, Homo sapien
tcagctttatcattcaccagttttc

SEQ ID NO: 5989350 - DNA, 25 bp, Homo sapien
attctcgtaattcttgaaatgttat

SEQ ID NO: 5989351 - DNA, 25 bp, Homo sapien
ctttcagtttcatttgtttcgtaac

SEQ ID NO: 5989352 - DNA, 25 bp, Homo sapien
atccatcgaaaggattggccagcct

SEQ ID NO: 5989353 - DNA, 25 bp, Homo sapien
cattagatgagtttttaaggcgtcc

SEQ ID NO: 5989354 - DNA, 25 bp, Homo sapien
aggcgttgtattttgtcctcaattc

SEQ ID NO: 5989355 - DNA, 25 bp, Homo sapien
aagtcccattagacaaacgcaatca

SEQ ID NO: 5989356 - DNA, 25 bp, Homo sapien
ttattattactcgagcaaataaagg

SEQ ID NO: 5989357 - DNA, 25 bp, Homo sapien
tttatagtaccagttgtagtgctac

SEQ ID NO: 5989358 - DNA, 25 bp, Homo sapien
ttttattaatggcaagtttgccgaa

SEQ ID NO: 5989359 - DNA, 25 bp, Homo sapien
gctagacatagctcacttttattaa

SEQ ID NO: 5989360 - DNA, 25 bp, Homo sapien
tcacttttattaatggcaagtttgc

SEQ ID NO: 5989361 - DNA, 25 bp, Homo sapien
tgcttcagtgacacgtccaatctaa

SEQ ID NO: 5989362 - DNA, 25 bp, Homo sapien
ctaacatggacatctacggggacga

SEQ ID NO: 5989363 - DNA, 25 bp, Homo sapien
ctcacgcaacttggcttcagtggct

SEQ ID NO: 5989364 - DNA, 25 bp, Homo sapien
tctatatccaaagcccagctcacgc

SEQ ID NO: 5989365 - DNA, 25 bp, Homo sapien
ccaggatctcattctcttcatcttg

SEQ ID NO: 5989366 - DNA, 25 bp, Homo sapien
gtaggacatgaggtgctctctaacg

SEQ ID NO: 5989367 - DNA, 25 bp, Homo sapien
gctgtactggtttaacttttcatcc

SEQ ID NO: 5989368 - DNA, 25 bp, Homo sapien
cggatgatgatgaggaagcagcggg

SEQ ID NO: 5989369 - DNA, 25 bp, Homo sapien
aacgaatctgtttaacaaggatgta

SEQ ID NO: 5989370 - DNA, 25 bp, Homo sapien
agctccgattggaagatttcaagtt

SEQ ID NO: 5989371 - DNA, 25 bp, Homo sapien
gatttcaagtttgccctccgtaaag

SEQ ID NO: 5989372 - DNA, 25 bp, Homo sapien
aatcaacagattcgaaggcaacaaa

SEQ ID NO: 5989373 - DNA, 25 bp, Homo sapien
tactaataagttgattacggaagct

SEQ ID NO: 5989374 - DNA, 25 bp, Homo sapien
gaagcagcgggccgtaatagcgcta

SEQ ID NO: 5989375 - DNA, 25 bp, Homo sapien
gacagacaatcaaaattcattaaag

SEQ ID NO: 5989376 - DNA, 25 bp, Homo sapien
ctaggaagctgaaaaaaacgaatct

SEQ ID NO: 5989377 - DNA, 25 bp, Homo sapien
gaagctgaaaaaaacgaatctgttt

SEQ ID NO: 5989378 - DNA, 25 bp, Homo sapien
ctccgtaaagacccgataaagcttg

SEQ ID NO: 5989379 - DNA, 25 bp, Homo sapien
agaagcagttcaatgagacagacaa

SEQ ID NO: 5989380 - DNA, 25 bp, Homo sapien
acaatcaacagattcgaaggcaaca

SEQ ID NO: 5989381 - DNA, 25 bp, Homo sapien
agcagcgggccgtaatagcgctaaa

SEQ ID NO: 5989382 - DNA, 25 bp, Homo sapien
gtactaacgcattccatacagccca

SEQ ID NO: 5989383 - DNA, 25 bp, Homo sapien
ttcgaaggcaacaaagattaggaag

SEQ ID NO: 5989384 - DNA, 25 bp, Homo sapien
tggatgaattggtatctggatattt

SEQ ID NO: 5989385 - DNA, 25 bp, Homo sapien
ccagaattctcagcgcaataagctc

SEQ ID NO: 5989386 - DNA, 25 bp, Homo sapien
gatatttggtggatgtttgtactaa

SEQ ID NO: 5989387 - DNA, 25 bp, Homo sapien
tttggatgaattggtatctggatat

SEQ ID NO: 5989388 - DNA, 25 bp, Homo sapien
taatagcgctaaacaatcaacagat

SEQ ID NO: 5989389 - DNA, 25 bp, Homo sapien
ctgtgcagtgtttggatgaattggt

SEQ ID NO: 5989390 - DNA, 25 bp, Homo sapien
gcccagaattctcagcgcaataagc

SEQ ID NO: 5989391 - DNA, 25 bp, Homo sapien
aaaacgaatctgtttaacaaggatg

SEQ ID NO: 5989392 - DNA, 25 bp, Homo sapien
gggtgacgagatggaagaggatgag

SEQ ID NO: 5989393 - DNA, 25 bp, Homo sapien
cttgggagagcagaagaactgatag

SEQ ID NO: 5989394 - DNA, 25 bp, Homo sapien
gcattccatacagcccagaattctc

SEQ ID NO: 5989395 - DNA, 25 bp, Homo sapien
gtttgtactaacgcattccatacag

SEQ ID NO: 5989396 - DNA, 25 bp, Homo sapien
ctgaaaaaaacgaatctgtttaaca

SEQ ID NO: 5989397 - DNA, 25 bp, Homo sapien
cgaatctgtttaacaaggatgtaag

SEQ ID NO: 5989398 - DNA, 25 bp, Homo sapien
agaattctcagcgcaataagctccg

SEQ ID NO: 5989399 - DNA, 25 bp, Homo sapien
acggaagctaagaagcagttcaatg

SEQ ID NO: 5989400 - DNA, 25 bp, Homo sapien
gaagaactgatagctactaataagt

SEQ ID NO: 5989401 - DNA, 25 bp, Homo sapien
gccgcagccactacaagctactgtg

SEQ ID NO: 5989402 - DNA, 25 bp, Homo sapien
gctactgtgcagtgtttggatgaat

SEQ ID NO: 5989403 - DNA, 25 bp, Homo sapien
aacagattcgaaggcaacaaagatt

SEQ ID NO: 5989404 - DNA, 25 bp, Homo sapien
attccatacagcccagaattctcag

SEQ ID NO: 5989405 - DNA, 25 bp, Homo sapien
atgtgccgcagccactacaagctac

SEQ ID NO: 5989406 - DNA, 25 bp, Homo sapien
aagatttcaagtttgccctccgtaa

SEQ ID NO: 5989407 - DNA, 25 bp, Homo sapien
gatgatgatgaggaagcagcgggcc

SEQ ID NO: 5989408 - DNA, 25 bp, Homo sapien
gtttgccctccgtaaagacccgata

SEQ ID NO: 5989409 - DNA, 25 bp, Homo sapien
gattggaagatttcaagtttgccct

SEQ ID NO: 5989410 - DNA, 25 bp, Homo sapien
acaaggatgtaagttccttgcttta

SEQ ID NO: 5989411 - DNA, 25 bp, Homo sapien
cagagaagaggatgaagagggtgac

SEQ ID NO: 5989412 - DNA, 25 bp, Homo sapien
ggatgtaagttccttgctttacgct

SEQ ID NO: 5989413 - DNA, 25 bp, Homo sapien
ttggaagatttcaagtttgccctcc

SEQ ID NO: 5989414 - DNA, 25 bp, Homo sapien
ctacaagctactgtgcagtgtttgg

SEQ ID NO: 5989415 - DNA, 25 bp, Homo sapien
agaactgatagctactaataagttg

SEQ ID NO: 5989416 - DNA, 25 bp, Homo sapien
aactgatagctactaataagttgat

SEQ ID NO: 5989417 - DNA, 25 bp, Homo sapien
aagcaggggcctaaaaacctcaaga

SEQ ID NO: 5989418 - DNA, 25 bp, Homo sapien
cgtaatagcgctaaacaatcaacag

SEQ ID NO: 5989419 - DNA, 25 bp, Homo sapien
aataagctccgattggaagatttca

SEQ ID NO: 5989420 - DNA, 25 bp, Homo sapien
gatgaggaagcagcgggccgtaata

SEQ ID NO: 5989421 - DNA, 25 bp, Homo sapien
aggatgaagagggtgacgagatgga

SEQ ID NO: 5989422 - DNA, 25 bp, Homo sapien
tttaacaaggatgtaagttccttgc

SEQ ID NO: 5989423 - DNA, 25 bp, Homo sapien
gcagtgtttggatgaattggtatct

SEQ ID NO: 5989424 - DNA, 25 bp, Homo sapien
gcttacggcgatgtgccgcagccac

SEQ ID NO: 5989425 - DNA, 25 bp, Homo sapien
attaaagaggtacagagaagaggat

SEQ ID NO: 5989426 - DNA, 25 bp, Homo sapien
gcagttcaatgagacagacaatcaa

SEQ ID NO: 5989427 - DNA, 25 bp, Homo sapien
agaggatgaggatgagcagcaggtg

SEQ ID NO: 5989428 - DNA, 25 bp, Homo sapien
gacaatcaaaattcattaaagaggt

SEQ ID NO: 5989429 - DNA, 25 bp, Homo sapien
gatagctactaataagttgattacg

SEQ ID NO: 5989430 - DNA, 25 bp, Homo sapien
acgcttacggcgatgtgccgcagcc

SEQ ID NO: 5989431 - DNA, 25 bp, Homo sapien
ttacggaagctaagaagcagttcaa

SEQ ID NO: 5989432 - DNA, 25 bp, Homo sapien
tgatgatgaggaagcagcgggccgt

SEQ ID NO: 5989433 - DNA, 25 bp, Homo sapien
caatcaaaattcattaaagaggtac

SEQ ID NO: 5989434 - DNA, 25 bp, Homo sapien
gtgacgagatggaagaggatgagga

SEQ ID NO: 5989435 - DNA, 25 bp, Homo sapien
agagcagaagaactgatagctacta

SEQ ID NO: 5989436 - DNA, 25 bp, Homo sapien
agcgctaaacaatcaacagattcga

SEQ ID NO: 5989437 - DNA, 25 bp, Homo sapien
cactacaagctactgtgcagtgttt

SEQ ID NO: 5989438 - DNA, 25 bp, Homo sapien
aggaagcagcgggccgtaatagcgc

SEQ ID NO: 5989439 - DNA, 25 bp, Homo sapien
gatgagcagcaggtgacggatgatg

SEQ ID NO: 5989440 - DNA, 25 bp, Homo sapien
aagctactgtgcagtgtttggatga

SEQ ID NO: 5989441 - DNA, 25 bp, Homo sapien
gtggatgtttgtactaacgcattcc

SEQ ID NO: 5989442 - DNA, 25 bp, Homo sapien
tgtttggatgaattggtatctggat

SEQ ID NO: 5989443 - DNA, 25 bp, Homo sapien
tgggagagcagaagaactgatagct

SEQ ID NO: 5989444 - DNA, 25 bp, Homo sapien
aagaggtacagagaagaggatgaag

SEQ ID NO: 5989445 - DNA, 25 bp, Homo sapien
cagaagaactgatagctactaataa

SEQ ID NO: 5989446 - DNA, 25 bp, Homo sapien
cagattcgaaggcaacaaagattag

SEQ ID NO: 5989447 - DNA, 25 bp, Homo sapien
tatttggtggatgtttgtactaacg

SEQ ID NO: 5989448 - DNA, 25 bp, Homo sapien
agtgtttggatgaattggtatctgg

SEQ ID NO: 5989449 - DNA, 25 bp, Homo sapien
cgataaagcttgggagagcagaaga

SEQ ID NO: 5989450 - DNA, 25 bp, Homo sapien
ctccgattggaagatttcaagtttg

SEQ ID NO: 5989451 - DNA, 25 bp, Homo sapien
taagttgattacggaagctaagaag

SEQ ID NO: 5989452 - DNA, 25 bp, Homo sapien
gcgggccgtaatagcgctaaacaat

SEQ ID NO: 5989453 - DNA, 25 bp, Homo sapien
ggaagctaagaagcagttcaatgag

SEQ ID NO: 5989454 - DNA, 25 bp, Homo sapien
tgtttaacaaggatgtaagttcctt

SEQ ID NO: 5989455 - DNA, 25 bp, Homo sapien
aggatgagcagcaggtgacggatga

SEQ ID NO: 5989456 - DNA, 25 bp, Homo sapien
aggtgacggatgatgatgaggaagc

SEQ ID NO: 5989457 - DNA, 25 bp, Homo sapien
cttgctttacgcttacggcgatgtg

SEQ ID NO: 5989458 - DNA, 25 bp, Homo sapien
ctgatagctactaataagttgatta

SEQ ID NO: 5989459 - DNA, 25 bp, Homo sapien
agcttgggagagcagaagaactgat

SEQ ID NO: 5989460 - DNA, 25 bp, Homo sapien
tgagcagcaggtgacggatgatgat

SEQ ID NO: 5989461 - DNA, 25 bp, Homo sapien
aggaagctgaaaaaaacgaatctgt

SEQ ID NO: 5989462 - DNA, 25 bp, Homo sapien
ttctcagcgcaataagctccgattg

SEQ ID NO: 5989463 - DNA, 25 bp, Homo sapien
aattctcagcgcaataagctccgat

SEQ ID NO: 5989464 - DNA, 25 bp, Homo sapien
taacgcattccatacagcccagaat

SEQ ID NO: 5989465 - DNA, 25 bp, Homo sapien
caaaattcattaaagaggtacagag

SEQ ID NO: 5989466 - DNA, 25 bp, Homo sapien
tactgtgcagtgtttggatgaattg

SEQ ID NO: 5989467 - DNA, 25 bp, Homo sapien
gaagaggatgaagagggtgacgaga

SEQ ID NO: 5989468 - DNA, 25 bp, Homo sapien
atagcgctaaacaatcaacagattc

SEQ ID NO: 5989469 - DNA, 25 bp, Homo sapien
atcaaaattcattaaagaggtacag

SEQ ID NO: 5989470 - DNA, 25 bp, Homo sapien
ggatgtttgtactaacgcattccat

SEQ ID NO: 5989471 - DNA, 25 bp, Homo sapien
atgtttgtactaacgcattccatac

SEQ ID NO: 5989472 - DNA, 25 bp, Homo sapien
acgcattccatacagcccagaattc

SEQ ID NO: 5989473 - DNA, 25 bp, Homo sapien
agttcaatgagacagacaatcaaaa

SEQ ID NO: 5989474 - DNA, 25 bp, Homo sapien
taaagacccgataaagcttgggaga

SEQ ID NO: 5989475 - DNA, 25 bp, Homo sapien
cgcagccactacaagctactgtgca

SEQ ID NO: 5989476 - DNA, 25 bp, Homo sapien
cagcgggccgtaatagcgctaaaca

SEQ ID NO: 5989477 - DNA, 25 bp, Homo sapien
tgaagagggtgacgagatggaagag

SEQ ID NO: 5989478 - DNA, 25 bp, Homo sapien
taacaaggatgtaagttccttgctt

SEQ ID NO: 5989479 - DNA, 25 bp, Homo sapien
gccgtaatagcgctaaacaatcaac

SEQ ID NO: 5989480 - DNA, 25 bp, Homo sapien
attcattaaagaggtacagagaaga

SEQ ID NO: 5989481 - DNA, 25 bp, Homo sapien
tccttgctttacgcttacggcgatg

SEQ ID NO: 5989482 - DNA, 25 bp, Homo sapien
actaacgcattccatacagcccaga

SEQ ID NO: 5989483 - DNA, 25 bp, Homo sapien
ttacgcttacggcgatgtgccgcag

SEQ ID NO: 5989484 - DNA, 25 bp, Homo sapien
ggaagcaggggcctaaaaacctcaa

SEQ ID NO: 5989485 - DNA, 25 bp, Homo sapien
atgatgaggaagcagcgggccgtaa

SEQ ID NO: 5989486 - DNA, 25 bp, Homo sapien
gccactacaagctactgtgcagtgt

SEQ ID NO: 5989487 - DNA, 25 bp, Homo sapien
agttgattacggaagctaagaagca

SEQ ID NO: 5989488 - DNA, 25 bp, Homo sapien
gctactaataagttgattacggaag

SEQ ID NO: 5989489 - DNA, 25 bp, Homo sapien
taagaagcagttcaatgagacagac

SEQ ID NO: 5989490 - DNA, 25 bp, Homo sapien
cgtaaagacccgataaagcttggga

SEQ ID NO: 5989491 - DNA, 25 bp, Homo sapien
gagggtgacgagatggaagaggatg

SEQ ID NO: 5989492 - DNA, 25 bp, Homo sapien
aaattcattaaagaggtacagagaa

SEQ ID NO: 5989493 - DNA, 25 bp, Homo sapien
aagacccgataaagcttgggagagc

SEQ ID NO: 5989494 - DNA, 25 bp, Homo sapien
gagatggaagaggatgaggatgagc

SEQ ID NO: 5989495 - DNA, 25 bp, Homo sapien
taggaagcaggggcctaaaaacctc

SEQ ID NO: 5989496 - DNA, 25 bp, Homo sapien
gccctccgtaaagacccgataaagc

SEQ ID NO: 5989497 - DNA, 25 bp, Homo sapien
gcaggggcctaaaaacctcaagaaa

SEQ ID NO: 5989498 - DNA, 25 bp, Homo sapien
ttacggcgatgtgccgcagccacta

SEQ ID NO: 5989499 - DNA, 25 bp, Homo sapien
tagctactaataagttgattacgga

SEQ ID NO: 5989500 - DNA, 25 bp, Homo sapien
gatgaggatgagcagcaggtgacgg

SEQ ID NO: 5989501 - DNA, 25 bp, Homo sapien
taaagaggtacagagaagaggatga

SEQ ID NO: 5989502 - DNA, 25 bp, Homo sapien
gtaagttccttgctttacgcttacg

SEQ ID NO: 5989503 - DNA, 25 bp, Homo sapien
atgtaagttccttgctttacgctta

SEQ ID NO: 5989504 - DNA, 25 bp, Homo sapien
gagacagacaatcaaaattcattaa

SEQ ID NO: 5989505 - DNA, 25 bp, Homo sapien
tgaattggtatctggatatttggtg

SEQ ID NO: 5989506 - DNA, 25 bp, Homo sapien
agcagcaggtgacggatgatgatga

SEQ ID NO: 5989507 - DNA, 25 bp, Homo sapien
gagaagaggatgaagagggtgacga

SEQ ID NO: 5989508 - DNA, 25 bp, Homo sapien
ttgtactaacgcattccatacagcc

SEQ ID NO: 5989509 - DNA, 25 bp, Homo sapien
cagacaatcaaaattcattaaagag

SEQ ID NO: 5989510 - DNA, 25 bp, Homo sapien
cgaaggcaacaaagattaggaagca

SEQ ID NO: 5989511 - DNA, 25 bp, Homo sapien
gtgcagtgtttggatgaattggtat

SEQ ID NO: 5989512 - DNA, 25 bp, Homo sapien
aattggtatctggatatttggtgga

SEQ ID NO: 5989513 - DNA, 25 bp, Homo sapien
ttggtatctggatatttggtggatg

SEQ ID NO: 5989514 - DNA, 25 bp, Homo sapien
tggatatttggtggatgtttgtact

SEQ ID NO: 5989515 - DNA, 25 bp, Homo sapien
gattacggaagctaagaagcagttc

SEQ ID NO: 5989516 - DNA, 25 bp, Homo sapien
gacccgataaagcttgggagagcag

SEQ ID NO: 5989517 - DNA, 25 bp, Homo sapien
tttggtggatgtttgtactaacgca

SEQ ID NO: 5989518 - DNA, 25 bp, Homo sapien
gttccttgctttacgcttacggcga

SEQ ID NO: 5989519 - DNA, 25 bp, Homo sapien
ggagagcagaagaactgatagctac

SEQ ID NO: 5989520 - DNA, 25 bp, Homo sapien
aaagcttgggagagcagaagaactg

SEQ ID NO: 5989521 - DNA, 25 bp, Homo sapien
tttcaagtttgccctccgtaaagac

SEQ ID NO: 5989522 - DNA, 25 bp, Homo sapien
tacagcccagaattctcagcgcaat

SEQ ID NO: 5989523 - DNA, 25 bp, Homo sapien
gatggaagaggatgaggatgagcag

SEQ ID NO: 5989524 - DNA, 25 bp, Homo sapien
cagcaggtgacggatgatgatgagg

SEQ ID NO: 5989525 - DNA, 25 bp, Homo sapien
acggcgatgtgccgcagccactaca

SEQ ID NO: 5989526 - DNA, 25 bp, Homo sapien
tctggatatttggtggatgtttgta

SEQ ID NO: 5989527 - DNA, 25 bp, Homo sapien
tggaagaggatgaggatgagcagca

SEQ ID NO: 5989528 - DNA, 25 bp, Homo sapien
aaggatgtaagttccttgctttacg

SEQ ID NO: 5989529 - DNA, 25 bp, Homo sapien
acaagctactgtgcagtgtttggat

SEQ ID NO: 5989530 - DNA, 25 bp, Homo sapien
ataaagcttgggagagcagaagaac

SEQ ID NO: 5989531 - DNA, 25 bp, Homo sapien
gattcgaaggcaacaaagattagga

SEQ ID NO: 5989532 - DNA, 25 bp, Homo sapien
caatgagacagacaatcaaaattca

SEQ ID NO: 5989533 - DNA, 25 bp, Homo sapien
taagctccgattggaagatttcaag

SEQ ID NO: 5989534 - DNA, 25 bp, Homo sapien
tatctggatatttggtggatgtttg

SEQ ID NO: 5989535 - DNA, 25 bp, Homo sapien
gtgacggatgatgatgaggaagcag

SEQ ID NO: 5989536 - DNA, 25 bp, Homo sapien
catacagcccagaattctcagcgca

SEQ ID NO: 5989537 - DNA, 25 bp, Homo sapien
gcaggtgacggatgatgatgaggaa

SEQ ID NO: 5989538 - DNA, 25 bp, Homo sapien
aagcagttcaatgagacagacaatc

SEQ ID NO: 5989539 - DNA, 25 bp, Homo sapien
aaggcaacaaagattaggaagcagg

SEQ ID NO: 5989540 - DNA, 25 bp, Homo sapien
aacaaagattaggaagcaggggcct

SEQ ID NO: 5989541 - DNA, 25 bp, Homo sapien
atgtctaggaagctgaaaaaaacga

SEQ ID NO: 5989542 - DNA, 25 bp, Homo sapien
aatctgtttaacaaggatgtaagtt

SEQ ID NO: 5989543 - DNA, 25 bp, Homo sapien
aagttccttgctttacgcttacggc

SEQ ID NO: 5989544 - DNA, 25 bp, Homo sapien
ttgattacggaagctaagaagcagt

SEQ ID NO: 5989545 - DNA, 25 bp, Homo sapien
tccatacagcccagaattctcagcg

SEQ ID NO: 5989546 - DNA, 25 bp, Homo sapien
tcattaaagaggtacagagaagagg

SEQ ID NO: 5989547 - DNA, 25 bp, Homo sapien
tggtggatgtttgtactaacgcatt

SEQ ID NO: 5989548 - DNA, 25 bp, Homo sapien
aggatgaggatgagcagcaggtgac

SEQ ID NO: 5989549 - DNA, 25 bp, Homo sapien
tgctttacgcttacggcgatgtgcc

SEQ ID NO: 5989550 - DNA, 25 bp, Homo sapien
tctgtttaacaaggatgtaagttcc

SEQ ID NO: 5989551 - DNA, 25 bp, Homo sapien
agcagaagaactgatagctactaat

SEQ ID NO: 5989552 - DNA, 25 bp, Homo sapien
ggcgatgtgccgcagccactacaag

SEQ ID NO: 5989553 - DNA, 25 bp, Homo sapien
gggccgtaatagcgctaaacaatca

SEQ ID NO: 5989554 - DNA, 25 bp, Homo sapien
gacgagatggaagaggatgaggatg

SEQ ID NO: 5989555 - DNA, 25 bp, Homo sapien
gtctaggaagctgaaaaaaacgaat

SEQ ID NO: 5989556 - DNA, 25 bp, Homo sapien
cagcccagaattctcagcgcaataa

SEQ ID NO: 5989557 - DNA, 25 bp, Homo sapien
aataagttgattacggaagctaaga

SEQ ID NO: 5989558 - DNA, 25 bp, Homo sapien
cgatgtgccgcagccactacaagct

SEQ ID NO: 5989559 - DNA, 25 bp, Homo sapien
ctaataagttgattacggaagctaa

SEQ ID NO: 5989560 - DNA, 25 bp, Homo sapien
tgaggatgagcagcaggtgacggat

SEQ ID NO: 5989561 - DNA, 25 bp, Homo sapien
gctaagaagcagttcaatgagacag

SEQ ID NO: 5989562 - DNA, 25 bp, Homo sapien
gatgaattggtatctggatatttgg

SEQ ID NO: 5989563 - DNA, 25 bp, Homo sapien
cagcgcaataagctccgattggaag

SEQ ID NO: 5989564 - DNA, 25 bp, Homo sapien
tcaacagattcgaaggcaacaaaga

SEQ ID NO: 5989565 - DNA, 25 bp, Homo sapien
cgctaaacaatcaacagattcgaag

SEQ ID NO: 5989566 - DNA, 25 bp, Homo sapien
ttgccctccgtaaagacccgataaa

SEQ ID NO: 5989567 - DNA, 25 bp, Homo sapien
tcaagtttgccctccgtaaagaccc

SEQ ID NO: 5989568 - DNA, 25 bp, Homo sapien
cagccactacaagctactgtgcagt

SEQ ID NO: 5989569 - DNA, 25 bp, Homo sapien
cccgataaagcttgggagagcagaa

SEQ ID NO: 5989570 - DNA, 25 bp, Homo sapien
ttcaatgagacagacaatcaaaatt

SEQ ID NO: 5989571 - DNA, 25 bp, Homo sapien
agctgaaaaaaacgaatctgtttaa

SEQ ID NO: 5989572 - DNA, 25 bp, Homo sapien
aaacaatcaacagattcgaaggcaa

SEQ ID NO: 5989573 - DNA, 25 bp, Homo sapien
agaggatgaagagggtgacgagatg

SEQ ID NO: 5989574 - DNA, 25 bp, Homo sapien
ctcagcgcaataagctccgattgga

SEQ ID NO: 5989575 - DNA, 25 bp, Homo sapien
gatgaagagggtgacgagatggaag

SEQ ID NO: 5989576 - DNA, 25 bp, Homo sapien
tgaggaagcagcgggccgtaatagc

SEQ ID NO: 5989577 - DNA, 25 bp, Homo sapien
ccgattggaagatttcaagtttgcc

SEQ ID NO: 5989578 - DNA, 25 bp, Homo sapien
gcgcaataagctccgattggaagat

SEQ ID NO: 5989579 - DNA, 25 bp, Homo sapien
ctttacgcttacggcgatgtgccgc

SEQ ID NO: 5989580 - DNA, 25 bp, Homo sapien
gacggatgatgatgaggaagcagcg

SEQ ID NO: 5989581 - DNA, 25 bp, Homo sapien
atgagacagacaatcaaaattcatt

SEQ ID NO: 5989582 - DNA, 25 bp, Homo sapien
gaagaggatgaggatgagcagcagg

SEQ ID NO: 5989583 - DNA, 25 bp, Homo sapien
aagagggtgacgagatggaagagga

SEQ ID NO: 5989584 - DNA, 25 bp, Homo sapien
ctaaacaatcaacagattcgaaggc

SEQ ID NO: 5989585 - DNA, 25 bp, Homo sapien
ggaagatttcaagtttgccctccgt

SEQ ID NO: 5989586 - DNA, 25 bp, Homo sapien
gcaataagctccgattggaagattt

SEQ ID NO: 5989587 - DNA, 25 bp, Homo sapien
ggtatctggatatttggtggatgtt

SEQ ID NO: 5989588 - DNA, 25 bp, Homo sapien
gtgccgcagccactacaagctactg

SEQ ID NO: 5989589 - DNA, 25 bp, Homo sapien
aagctaagaagcagttcaatgagac

SEQ ID NO: 5989590 - DNA, 25 bp, Homo sapien
cgtaatcaacttattagtagctatc

SEQ ID NO: 5989591 - DNA, 25 bp, Homo sapien
cggagcttattgcgctgagaattct

SEQ ID NO: 5989592 - DNA, 25 bp, Homo sapien
cgtaaagcaaggaacttacatcctt

SEQ ID NO: 5989593 - DNA, 25 bp, Homo sapien
tatcgggtctttacggagggcaaac

SEQ ID NO: 5989594 - DNA, 25 bp, Homo sapien
atcggagcttattgcgctgagaatt

SEQ ID NO: 5989595 - DNA, 25 bp, Homo sapien
taaagcaaggaacttacatccttgt

SEQ ID NO: 5989596 - DNA, 25 bp, Homo sapien
agataccaattcatccaaacactgc

SEQ ID NO: 5989597 - DNA, 25 bp, Homo sapien
aatctttgttgccttcgaatctgtt

SEQ ID NO: 5989598 - DNA, 25 bp, Homo sapien
gtacctctttaatgaattttgattg

SEQ ID NO: 5989599 - DNA, 25 bp, Homo sapien
ttgaactgcttcttagcttccgtaa

SEQ ID NO: 5989600 - DNA, 25 bp, Homo sapien
tgcttcttagcttccgtaatcaact

SEQ ID NO: 5989601 - DNA, 25 bp, Homo sapien
tgcttcctaatctttgttgccttcg

SEQ ID NO: 5989602 - DNA, 25 bp, Homo sapien
tctcgtcaccctcttcatcctcttc

SEQ ID NO: 5989603 - DNA, 25 bp, Homo sapien
caacttattagtagctatcagttct

SEQ ID NO: 5989604 - DNA, 25 bp, Homo sapien
gaattctgggctgtatggaatgcgt

SEQ ID NO: 5989605 - DNA, 25 bp, Homo sapien
tgctgctcatcctcatcctcttcca

SEQ ID NO: 5989606 - DNA, 25 bp, Homo sapien
cttgtagtggctgcggcacatcgcc

SEQ ID NO: 5989607 - DNA, 25 bp, Homo sapien
tgaaatcttccaatcggagcttatt

SEQ ID NO: 5989608 - DNA, 25 bp, Homo sapien
aatgaattttgattgtctgtctcat

SEQ ID NO: 5989609 - DNA, 25 bp, Homo sapien
ctatcagttcttctgctctcccaag

SEQ ID NO: 5989610 - DNA, 25 bp, Homo sapien
aaggaacttacatccttgttaaaca

SEQ ID NO: 5989611 - DNA, 25 bp, Homo sapien
tacatccttgttaaacagattcgtt

SEQ ID NO: 5989612 - DNA, 25 bp, Homo sapien
cgctgcttcctcatcatcatccgtc

SEQ ID NO: 5989613 - DNA, 25 bp, Homo sapien
ctaatctttgttgccttcgaatctg

SEQ ID NO: 5989614 - DNA, 25 bp, Homo sapien
gcttcctcatcatcatccgtcacct

SEQ ID NO: 5989615 - DNA, 25 bp, Homo sapien
ggcacatcgccgtaagcgtaaagca

SEQ ID NO: 5989616 - DNA, 25 bp, Homo sapien
ttcctcatcatcatccgtcacctgc

SEQ ID NO: 5989617 - DNA, 25 bp, Homo sapien
ccagataccaattcatccaaacact

SEQ ID NO: 5989618 - DNA, 25 bp, Homo sapien
tttcttgaggtttttaggcccctgc

SEQ ID NO: 5989619 - DNA, 25 bp, Homo sapien
aatgcgttagtacaaacatccacca

SEQ ID NO: 5989620 - DNA, 25 bp, Homo sapien
gtggctgcggcacatcgccgtaagc

SEQ ID NO: 5989621 - DNA, 25 bp, Homo sapien
caaacatccaccaaatatccagata

SEQ ID NO: 5989622 - DNA, 25 bp, Homo sapien
tgggctgtatggaatgcgttagtac

SEQ ID NO: 5989623 - DNA, 25 bp, Homo sapien
ctcttccatctcgtcaccctcttca

SEQ ID NO: 5989624 - DNA, 25 bp, Homo sapien
aaatcttccaatcggagcttattgc

SEQ ID NO: 5989625 - DNA, 25 bp, Homo sapien
ggctgtatggaatgcgttagtacaa

SEQ ID NO: 5989626 - DNA, 25 bp, Homo sapien
ctgcttcctcatcatcatccgtcac

SEQ ID NO: 5989627 - DNA, 25 bp, Homo sapien
aattttgattgtctgtctcattgaa

SEQ ID NO: 5989628 - DNA, 25 bp, Homo sapien
ggctgcggcacatcgccgtaagcgt

SEQ ID NO: 5989629 - DNA, 25 bp, Homo sapien
atctgttgattgtttagcgctatta

SEQ ID NO: 5989630 - DNA, 25 bp, Homo sapien
cctcttctctgtacctctttaatga

SEQ ID NO: 5989631 - DNA, 25 bp, Homo sapien
ctgtctcattgaactgcttcttagc

SEQ ID NO: 5989632 - DNA, 25 bp, Homo sapien
cttcctaatctttgttgccttcgaa

SEQ ID NO: 5989633 - DNA, 25 bp, Homo sapien
atggaatgcgttagtacaaacatcc

SEQ ID NO: 5989634 - DNA, 25 bp, Homo sapien
cttccgtaatcaacttattagtagc

SEQ ID NO: 5989635 - DNA, 25 bp, Homo sapien
agattcgtttttttcagcttcctag

SEQ ID NO: 5989636 - DNA, 25 bp, Homo sapien
cctgctgctcatcctcatcctcttc

SEQ ID NO: 5989637 - DNA, 25 bp, Homo sapien
ctttacggagggcaaacttgaaatc

SEQ ID NO: 5989638 - DNA, 25 bp, Homo sapien
cagtagcttgtagtggctgcggcac

SEQ ID NO: 5989639 - DNA, 25 bp, Homo sapien
agctatcagttcttctgctctccca

SEQ ID NO: 5989640 - DNA, 25 bp, Homo sapien
gggtctttacggagggcaaacttga

SEQ ID NO: 5989641 - DNA, 25 bp, Homo sapien
gttcttctgctctcccaagctttat

SEQ ID NO: 5989642 - DNA, 25 bp, Homo sapien
cttccatctcgtcaccctcttcatc

SEQ ID NO: 5989643 - DNA, 25 bp, Homo sapien
cacctgctgctcatcctcatcctct

SEQ ID NO: 5989644 - DNA, 25 bp, Homo sapien
aagcaaggaacttacatccttgtta

SEQ ID NO: 5989645 - DNA, 25 bp, Homo sapien
acagattcgtttttttcagcttcct

SEQ ID NO: 5989646 - DNA, 25 bp, Homo sapien
taagcgtaaagcaaggaacttacat

SEQ ID NO: 5989647 - DNA, 25 bp, Homo sapien
tcatccaaacactgcacagtagctt

SEQ ID NO: 5989648 - DNA, 25 bp, Homo sapien
tcttctctgtacctctttaatgaat

SEQ ID NO: 5989649 - DNA, 25 bp, Homo sapien
cttccaatcggagcttattgcgctg

SEQ ID NO: 5989650 - DNA, 25 bp, Homo sapien
tccgtaatcaacttattagtagcta

SEQ ID NO: 5989651 - DNA, 25 bp, Homo sapien
aaacactgcacagtagcttgtagtg

SEQ ID NO: 5989652 - DNA, 25 bp, Homo sapien
tgttaaacagattcgtttttttcag

SEQ ID NO: 5989653 - DNA, 25 bp, Homo sapien
ccgtcacctgctgctcatcctcatc

SEQ ID NO: 5989654 - DNA, 25 bp, Homo sapien
ctttaatgaattttgattgtctgtc

SEQ ID NO: 5989655 - DNA, 25 bp, Homo sapien
ctctgtacctctttaatgaattttg

SEQ ID NO: 5989656 - DNA, 25 bp, Homo sapien
tcgtttttttcagcttcctagacat

SEQ ID NO: 5989657 - DNA, 25 bp, Homo sapien
attcgtttttttcagcttcctagac

SEQ ID NO: 5989658 - DNA, 25 bp, Homo sapien
catcctcatcctcttccatctcgtc

SEQ ID NO: 5989659 - DNA, 25 bp, Homo sapien
tgtagtggctgcggcacatcgccgt

SEQ ID NO: 5989660 - DNA, 25 bp, Homo sapien
tgaattttgattgtctgtctcattg

SEQ ID NO: 5989661 - DNA, 25 bp, Homo sapien
tcctcatcctcttccatctcgtcac

SEQ ID NO: 5989662 - DNA, 25 bp, Homo sapien
atccagataccaattcatccaaaca

SEQ ID NO: 5989663 - DNA, 25 bp, Homo sapien
tctttgttgccttcgaatctgttga

SEQ ID NO: 5989664 - DNA, 25 bp, Homo sapien
cctgcttcctaatctttgttgcctt

SEQ ID NO: 5989665 - DNA, 25 bp, Homo sapien
ctcatcctcttccatctcgtcaccc

SEQ ID NO: 5989666 - DNA, 25 bp, Homo sapien
tagcgctattacggcccgctgcttc

SEQ ID NO: 5989667 - DNA, 25 bp, Homo sapien
ttacggagggcaaacttgaaatctt

SEQ ID NO: 5989668 - DNA, 25 bp, Homo sapien
caagctttatcgggtctttacggag

SEQ ID NO: 5989669 - DNA, 25 bp, Homo sapien
gagcttattgcgctgagaattctgg

SEQ ID NO: 5989670 - DNA, 25 bp, Homo sapien
gctttatcgggtctttacggagggc

SEQ ID NO: 5989671 - DNA, 25 bp, Homo sapien
tgcgttagtacaaacatccaccaaa

SEQ ID NO: 5989672 - DNA, 25 bp, Homo sapien
atcctcttctctgtacctctttaat

SEQ ID NO: 5989673 - DNA, 25 bp, Homo sapien
actgcacagtagcttgtagtggctg

SEQ ID NO: 5989674 - DNA, 25 bp, Homo sapien
tcttagcttccgtaatcaacttatt

SEQ ID NO: 5989675 - DNA, 25 bp, Homo sapien
gagaattctgggctgtatggaatgc

SEQ ID NO: 5989676 - DNA, 25 bp, Homo sapien
acctctttaatgaattttgattgtc

SEQ ID NO: 5989677 - DNA, 25 bp, Homo sapien
tccaccaaatatccagataccaatt

SEQ ID NO: 5989678 - DNA, 25 bp, Homo sapien
catccttgttaaacagattcgtttt

SEQ ID NO: 5989679 - DNA, 25 bp, Homo sapien
agcttgtagtggctgcggcacatcg

SEQ ID NO: 5989680 - DNA, 25 bp, Homo sapien
ggaatgcgttagtacaaacatccac

SEQ ID NO: 5989681 - DNA, 25 bp, Homo sapien
ttgattgtctgtctcattgaactgc

SEQ ID NO: 5989682 - DNA, 25 bp, Homo sapien
ttttgattgtctgtctcattgaact

SEQ ID NO: 5989683 - DNA, 25 bp, Homo sapien
ttaaacagattcgtttttttcagct

SEQ ID NO: 5989684 - DNA, 25 bp, Homo sapien
tcttctgctctcccaagctttatcg

SEQ ID NO: 5989685 - DNA, 25 bp, Homo sapien
tgattgtttagcgctattacggccc

SEQ ID NO: 5989686 - DNA, 25 bp, Homo sapien
attctgggctgtatggaatgcgtta

SEQ ID NO: 5989687 - DNA, 25 bp, Homo sapien
actgcttcttagcttccgtaatcaa

SEQ ID NO: 5989688 - DNA, 25 bp, Homo sapien
cgtaagcgtaaagcaaggaacttac

SEQ ID NO: 5989689 - DNA, 25 bp, Homo sapien
cacagtagcttgtagtggctgcggc

SEQ ID NO: 5989690 - DNA, 25 bp, Homo sapien
tagtagctatcagttcttctgctct

SEQ ID NO: 5989691 - DNA, 25 bp, Homo sapien
aggcccctgcttcctaatctttgtt

SEQ ID NO: 5989692 - DNA, 25 bp, Homo sapien
tcgccgtaagcgtaaagcaaggaac

SEQ ID NO: 5989693 - DNA, 25 bp, Homo sapien
ttgaggtttttaggcccctgcttcc

SEQ ID NO: 5989694 - DNA, 25 bp, Homo sapien
gaatctgttgattgtttagcgctat

SEQ ID NO: 5989695 - DNA, 25 bp, Homo sapien
tttagcgctattacggcccgctgct

SEQ ID NO: 5989696 - DNA, 25 bp, Homo sapien
acactgcacagtagcttgtagtggc

SEQ ID NO: 5989697 - DNA, 25 bp, Homo sapien
ttacggcccgctgcttcctcatcat

SEQ ID NO: 5989698 - DNA, 25 bp, Homo sapien
caaacttgaaatcttccaatcggag

SEQ ID NO: 5989699 - DNA, 25 bp, Homo sapien
gctctcccaagctttatcgggtctt

SEQ ID NO: 5989700 - DNA, 25 bp, Homo sapien
cacatcgccgtaagcgtaaagcaag

SEQ ID NO: 5989701 - DNA, 25 bp, Homo sapien
ttaatgaattttgattgtctgtctc

SEQ ID NO: 5989702 - DNA, 25 bp, Homo sapien
aacatccaccaaatatccagatacc

SEQ ID NO: 5989703 - DNA, 25 bp, Homo sapien
tgttgccttcgaatctgttgattgt

SEQ ID NO: 5989704 - DNA, 25 bp, Homo sapien
gcgctattacggcccgctgcttcct

SEQ ID NO: 5989705 - DNA, 25 bp, Homo sapien
atccaaacactgcacagtagcttgt

SEQ ID NO: 5989706 - DNA, 25 bp, Homo sapien
cttcatcctcttctctgtacctctt

SEQ ID NO: 5989707 - DNA, 25 bp, Homo sapien
gtagcttgtagtggctgcggcacat

SEQ ID NO: 5989708 - DNA, 25 bp, Homo sapien
acggagggcaaacttgaaatcttcc

SEQ ID NO: 5989709 - DNA, 25 bp, Homo sapien
ttagtacaaacatccaccaaatatc

SEQ ID NO: 5989710 - DNA, 25 bp, Homo sapien
gtagctatcagttcttctgctctcc

SEQ ID NO: 5989711 - DNA, 25 bp, Homo sapien
ctgagaattctgggctgtatggaat

SEQ ID NO: 5989712 - DNA, 25 bp, Homo sapien
tcatcatcatccgtcacctgctgct

SEQ ID NO: 5989713 - DNA, 25 bp, Homo sapien
ttgccttcgaatctgttgattgttt

SEQ ID NO: 5989714 - DNA, 25 bp, Homo sapien
ctgctctcccaagctttatcgggtc

SEQ ID NO: 5989715 - DNA, 25 bp, Homo sapien
tgtttagcgctattacggcccgctg

SEQ ID NO: 5989716 - DNA, 25 bp, Homo sapien
gaactgcttcttagcttccgtaatc

SEQ ID NO: 5989717 - DNA, 25 bp, Homo sapien
catctcgtcaccctcttcatcctct

SEQ ID NO: 5989718 - DNA, 25 bp, Homo sapien
atcatcatccgtcacctgctgctca

SEQ ID NO: 5989719 - DNA, 25 bp, Homo sapien
atccgtcacctgctgctcatcctca

SEQ ID NO: 5989720 - DNA, 25 bp, Homo sapien
gcaaggaacttacatccttgttaaa

SEQ ID NO: 5989721 - DNA, 25 bp, Homo sapien
ccaaatatccagataccaattcatc

SEQ ID NO: 5989722 - DNA, 25 bp, Homo sapien
agggcaaacttgaaatcttccaatc

SEQ ID NO: 5989723 - DNA, 25 bp, Homo sapien
ctgttgattgtttagcgctattacg

SEQ ID NO: 5989724 - DNA, 25 bp, Homo sapien
catccaccaaatatccagataccaa

SEQ ID NO: 5989725 - DNA, 25 bp, Homo sapien
attgcgctgagaattctgggctgta

SEQ ID NO: 5989726 - DNA, 25 bp, Homo sapien
cttcttagcttccgtaatcaactta

SEQ ID NO: 5989727 - DNA, 25 bp, Homo sapien
ttagcttccgtaatcaacttattag

SEQ ID NO: 5989728 - DNA, 25 bp, Homo sapien
caattcatccaaacactgcacagta

SEQ ID NO: 5989729 - DNA, 25 bp, Homo sapien
tcgaatctgttgattgtttagcgct

SEQ ID NO: 5989730 - DNA, 25 bp, Homo sapien
acttattagtagctatcagttcttc

SEQ ID NO: 5989731 - DNA, 25 bp, Homo sapien
ataccaattcatccaaacactgcac

SEQ ID NO: 5989732 - DNA, 25 bp, Homo sapien
gcttattgcgctgagaattctgggc

SEQ ID NO: 5989733 - DNA, 25 bp, Homo sapien
aaatatccagataccaattcatcca

SEQ ID NO: 5989734 - DNA, 25 bp, Homo sapien
tcatccgtcacctgctgctcatcct

SEQ ID NO: 5989735 - DNA, 25 bp, Homo sapien
gtcacctgctgctcatcctcatcct

SEQ ID NO: 5989736 - DNA, 25 bp, Homo sapien
cgctgagaattctgggctgtatgga

SEQ ID NO: 5989737 - DNA, 25 bp, Homo sapien
aacttgaaatcttccaatcggagct

SEQ ID NO: 5989738 - DNA, 25 bp, Homo sapien
agcttccgtaatcaacttattagta

SEQ ID NO: 5989739 - DNA, 25 bp, Homo sapien
caatcggagcttattgcgctgagaa

SEQ ID NO: 5989740 - DNA, 25 bp, Homo sapien
catcctcttccatctcgtcaccctc

SEQ ID NO: 5989741 - DNA, 25 bp, Homo sapien
acggcccgctgcttcctcatcatca

SEQ ID NO: 5989742 - DNA, 25 bp, Homo sapien
cctcatcatcatccgtcacctgctg

SEQ ID NO: 5989743 - DNA, 25 bp, Homo sapien
ctcattgaactgcttcttagcttcc

SEQ ID NO: 5989744 - DNA, 25 bp, Homo sapien
ggcccgctgcttcctcatcatcatc

SEQ ID NO: 5989745 - DNA, 25 bp, Homo sapien
tgcgctgagaattctgggctgtatg

SEQ ID NO: 5989746 - DNA, 25 bp, Homo sapien
tagtggctgcggcacatcgccgtaa

SEQ ID NO: 5989747 - DNA, 25 bp, Homo sapien
ttgtctgtctcattgaactgcttct

SEQ ID NO: 5989748 - DNA, 25 bp, Homo sapien
attcatccaaacactgcacagtagc

SEQ ID NO: 5989749 - DNA, 25 bp, Homo sapien
ctctttaatgaattttgattgtctg

SEQ ID NO: 5989750 - DNA, 25 bp, Homo sapien
gttgattgtttagcgctattacggc

SEQ ID NO: 5989751 - DNA, 25 bp, Homo sapien
cccgctgcttcctcatcatcatccg

SEQ ID NO: 5989752 - DNA, 25 bp, Homo sapien
cttacatccttgttaaacagattcg

SEQ ID NO: 5989753 - DNA, 25 bp, Homo sapien
tgcacagtagcttgtagtggctgcg

SEQ ID NO: 5989754 - DNA, 25 bp, Homo sapien
gtctttacggagggcaaacttgaaa

SEQ ID NO: 5989755 - DNA, 25 bp, Homo sapien
caccaaatatccagataccaattca

SEQ ID NO: 5989756 - DNA, 25 bp, Homo sapien
ctgtatggaatgcgttagtacaaac

SEQ ID NO: 5989757 - DNA, 25 bp, Homo sapien
taatcaacttattagtagctatcag

SEQ ID NO: 5989758 - DNA, 25 bp, Homo sapien
gctcatcctcatcctcttccatctc

SEQ ID NO: 5989759 - DNA, 25 bp, Homo sapien
tcctaatctttgttgccttcgaatc

SEQ ID NO: 5989760 - DNA, 25 bp, Homo sapien
ttattagtagctatcagttcttctg

SEQ ID NO: 5989761 - DNA, 25 bp, Homo sapien
atcttccaatcggagcttattgcgc

SEQ ID NO: 5989762 - DNA, 25 bp, Homo sapien
ccaaacactgcacagtagcttgtag

SEQ ID NO: 5989763 - DNA, 25 bp, Homo sapien
cattgaactgcttcttagcttccgt

SEQ ID NO: 5989764 - DNA, 25 bp, Homo sapien
gcggcacatcgccgtaagcgtaaag

SEQ ID NO: 5989765 - DNA, 25 bp, Homo sapien
attagtagctatcagttcttctgct

SEQ ID NO: 5989766 - DNA, 25 bp, Homo sapien
tcttgaggtttttaggcccctgctt

SEQ ID NO: 5989767 - DNA, 25 bp, Homo sapien
attgtttagcgctattacggcccgc

SEQ ID NO: 5989768 - DNA, 25 bp, Homo sapien
aaacagattcgtttttttcagcttc

SEQ ID NO: 5989769 - DNA, 25 bp, Homo sapien
cttgaaatcttccaatcggagctta

SEQ ID NO: 5989770 - DNA, 25 bp, Homo sapien
tccaatcggagcttattgcgctgag

SEQ ID NO: 5989771 - DNA, 25 bp, Homo sapien
gccttcgaatctgttgattgtttag

SEQ ID NO: 5989772 - DNA, 25 bp, Homo sapien
tacaaacatccaccaaatatccaga

SEQ ID NO: 5989773 - DNA, 25 bp, Homo sapien
accaattcatccaaacactgcacag

SEQ ID NO: 5989774 - DNA, 25 bp, Homo sapien
tttgttgccttcgaatctgttgatt

SEQ ID NO: 5989775 - DNA, 25 bp, Homo sapien
atcagttcttctgctctcccaagct

SEQ ID NO: 5989776 - DNA, 25 bp, Homo sapien
ggaacttacatccttgttaaacaga

SEQ ID NO: 5989777 - DNA, 25 bp, Homo sapien
catcatccgtcacctgctgctcatc

SEQ ID NO: 5989778 - DNA, 25 bp, Homo sapien
gtcaccctcttcatcctcttctctg

SEQ ID NO: 5989779 - DNA, 25 bp, Homo sapien
gtatggaatgcgttagtacaaacat

SEQ ID NO: 5989780 - DNA, 25 bp, Homo sapien
gtctcattgaactgcttcttagctt

SEQ ID NO: 5989781 - DNA, 25 bp, Homo sapien
gattgtctgtctcattgaactgctt

SEQ ID NO: 5989782 - DNA, 25 bp, Homo sapien
atatccagataccaattcatccaaa

SEQ ID NO: 5989783 - DNA, 25 bp, Homo sapien
tcccaagctttatcgggtctttacg

SEQ ID NO: 5989784 - DNA, 25 bp, Homo sapien
gctattacggcccgctgcttcctca

SEQ ID NO: 5989785 - DNA, 25 bp, Homo sapien
catcgccgtaagcgtaaagcaagga

SEQ ID NO: 5989786 - DNA, 25 bp, Homo sapien
gtctgtctcattgaactgcttctta

SEQ ID NO: 5989787 - DNA, 25 bp, Homo sapien
agtacaaacatccaccaaatatcca

SEQ ID NO: 5989788 - DNA, 25 bp, Homo sapien
cttcgaatctgttgattgtttagcg

SEQ ID NO: 5989789 - DNA, 25 bp, Homo sapien
ctgcggcacatcgccgtaagcgtaa

SEQ ID NO: 5989790 - DNA, 25 bp, Homo sapien
tcatcctcttctctgtacctcttta

SEQ ID NO: 5989791 - DNA, 25 bp, Homo sapien
tattacggcccgctgcttcctcatc

SEQ ID NO: 5989792 - DNA, 25 bp, Homo sapien
aacttacatccttgttaaacagatt

SEQ ID NO: 5989793 - DNA, 25 bp, Homo sapien
tccatctcgtcaccctcttcatcct

SEQ ID NO: 5989794 - DNA, 25 bp, Homo sapien
cagttcttctgctctcccaagcttt

SEQ ID NO: 5989795 - DNA, 25 bp, Homo sapien
tctgggctgtatggaatgcgttagt

SEQ ID NO: 5989796 - DNA, 25 bp, Homo sapien
ttctctgtacctctttaatgaattt

SEQ ID NO: 5989797 - DNA, 25 bp, Homo sapien
atcaacttattagtagctatcagtt

SEQ ID NO: 5989798 - DNA, 25 bp, Homo sapien
tttatcgggtctttacggagggcaa

SEQ ID NO: 5989799 - DNA, 25 bp, Homo sapien
ttattgcgctgagaattctgggctg

SEQ ID NO: 5989800 - DNA, 25 bp, Homo sapien
ctgtacctctttaatgaattttgat

SEQ ID NO: 5989801 - DNA, 25 bp, Homo sapien
cgttagtacaaacatccaccaaata

SEQ ID NO: 5989802 - DNA, 25 bp, Homo sapien
gccgtaagcgtaaagcaaggaactt

SEQ ID NO: 5989803 - DNA, 25 bp, Homo sapien
tcgtcaccctcttcatcctcttctc

SEQ ID NO: 5989804 - DNA, 25 bp, Homo sapien
tcctcttccatctcgtcaccctctt

SEQ ID NO: 5989805 - DNA, 25 bp, Homo sapien
ctgctcatcctcatcctcttccatc

SEQ ID NO: 5989806 - DNA, 25 bp, Homo sapien
ggcaaacttgaaatcttccaatcgg

SEQ ID NO: 5989807 - DNA, 25 bp, Homo sapien
agcgtaaagcaaggaacttacatcc

SEQ ID NO: 5989808 - DNA, 25 bp, Homo sapien
ttctgctctcccaagctttatcggg

SEQ ID NO: 5989809 - DNA, 25 bp, Homo sapien
gaggtttttaggcccctgcttccta

SEQ ID NO: 5989810 - DNA, 25 bp, Homo sapien
tctcccaagctttatcgggtcttta

SEQ ID NO: 5989811 - DNA, 25 bp, Homo sapien
ggagggcaaacttgaaatcttccaa

SEQ ID NO: 5989812 - DNA, 25 bp, Homo sapien
gttctacgaacatcgttattcccac

SEQ ID NO: 5989813 - DNA, 25 bp, Homo sapien
agatggtccaagattactaaaagaa

SEQ ID NO: 5989814 - DNA, 25 bp, Homo sapien
ttaacgaaatgatgtccagacaaaa

SEQ ID NO: 5989815 - DNA, 25 bp, Homo sapien
aacctgtcttatacgtcggtgctgg

SEQ ID NO: 5989816 - DNA, 25 bp, Homo sapien
aaggttgccaacgacacaggaagac

SEQ ID NO: 5989817 - DNA, 25 bp, Homo sapien
agtgcgtctccattaccagcctcta

SEQ ID NO: 5989818 - DNA, 25 bp, Homo sapien
caaagccagaatctttggttattga

SEQ ID NO: 5989819 - DNA, 25 bp, Homo sapien
agatcagtagctctcgcgcagcgct

SEQ ID NO: 5989820 - DNA, 25 bp, Homo sapien
taactggtggtcaaatatttaacga

SEQ ID NO: 5989821 - DNA, 25 bp, Homo sapien
gcttggtatgcacggttgtgctact

SEQ ID NO: 5989822 - DNA, 25 bp, Homo sapien
ggtccaagattactaaaagaattaa

SEQ ID NO: 5989823 - DNA, 25 bp, Homo sapien
ggtatgcacggttgtgctactgcca

SEQ ID NO: 5989824 - DNA, 25 bp, Homo sapien
cactaaaccaattaaccagtcgcgc

SEQ ID NO: 5989825 - DNA, 25 bp, Homo sapien
ccagttaaggagaggtctgaatggt

SEQ ID NO: 5989826 - DNA, 25 bp, Homo sapien
taaaattaaaccacagacggttata

SEQ ID NO: 5989827 - DNA, 25 bp, Homo sapien
aacttggcaaagaaacctgtcttat

SEQ ID NO: 5989828 - DNA, 25 bp, Homo sapien
ctgaaccttcaaaattggctaagaa

SEQ ID NO: 5989829 - DNA, 25 bp, Homo sapien
ctaagaaactacgcgctgagcctga

SEQ ID NO: 5989830 - DNA, 25 bp, Homo sapien
ttaagaaatccaattccaacaaaaa

SEQ ID NO: 5989831 - DNA, 25 bp, Homo sapien
tgtcttggttacttctgggccaggt

SEQ ID NO: 5989832 - DNA, 25 bp, Homo sapien
agctctcgcgcagcgcttttatagt

SEQ ID NO: 5989833 - DNA, 25 bp, Homo sapien
aatctgggcaaaatgatgtcaaaga

SEQ ID NO: 5989834 - DNA, 25 bp, Homo sapien
tgttcaaactcaaatagcagtggaa

SEQ ID NO: 5989835 - DNA, 25 bp, Homo sapien
ttcatcacatcaggtggtttaggta

SEQ ID NO: 5989836 - DNA, 25 bp, Homo sapien
gaagcaagaggaattggacgctaag

SEQ ID NO: 5989837 - DNA, 25 bp, Homo sapien
caaaatgccgacttgataattgcag

SEQ ID NO: 5989838 - DNA, 25 bp, Homo sapien
aatccaattccaacaaaaacaactc

SEQ ID NO: 5989839 - DNA, 25 bp, Homo sapien
tcgtcttcccgttattacagtgcgt

SEQ ID NO: 5989840 - DNA, 25 bp, Homo sapien
taaccagtcgcgcacaagatgaatt

SEQ ID NO: 5989841 - DNA, 25 bp, Homo sapien
ccattagaacagcccgctgaacctt

SEQ ID NO: 5989842 - DNA, 25 bp, Homo sapien
gaaactacgcgctgagcctgacatg

SEQ ID NO: 5989843 - DNA, 25 bp, Homo sapien
atgcttggtatgcacggttgtgcta

SEQ ID NO: 5989844 - DNA, 25 bp, Homo sapien
agcccgctgaaccttcaaaattggc

SEQ ID NO: 5989845 - DNA, 25 bp, Homo sapien
acagggcaagtcccaactagtgcta

SEQ ID NO: 5989846 - DNA, 25 bp, Homo sapien
acctgtttacgatgccattcataac

SEQ ID NO: 5989847 - DNA, 25 bp, Homo sapien
caatccctgttctacgaacatcgtt

SEQ ID NO: 5989848 - DNA, 25 bp, Homo sapien
ctggtaaaccaggtgttgtcttggt

SEQ ID NO: 5989849 - DNA, 25 bp, Homo sapien
catcgttattcccacacacatcaat

SEQ ID NO: 5989850 - DNA, 25 bp, Homo sapien
tactcaatggcaatccctgttctac

SEQ ID NO: 5989851 - DNA, 25 bp, Homo sapien
atgttgatccattagaacagcccgc

SEQ ID NO: 5989852 - DNA, 25 bp, Homo sapien
gaaccttcaaaattggctaagaaac

SEQ ID NO: 5989853 - DNA, 25 bp, Homo sapien
aattgaaccctgatttcataaaact

SEQ ID NO: 5989854 - DNA, 25 bp, Homo sapien
cggtactgatgctttccaagaggct

SEQ ID NO: 5989855 - DNA, 25 bp, Homo sapien
accaattaaccagtcgcgcacaaga

SEQ ID NO: 5989856 - DNA, 25 bp, Homo sapien
tacgctaaaaaacttcgctattaag

SEQ ID NO: 5989857 - DNA, 25 bp, Homo sapien
cctttaacatgactctaacggaatt

SEQ ID NO: 5989858 - DNA, 25 bp, Homo sapien
tattcccacacacatcaattgaacc

SEQ ID NO: 5989859 - DNA, 25 bp, Homo sapien
tcccgttattacagtgcgtctccat

SEQ ID NO: 5989860 - DNA, 25 bp, Homo sapien
cgaacaaggtgccggtcacatggca

SEQ ID NO: 5989861 - DNA, 25 bp, Homo sapien
tcctacctgtttacgatgccattca

SEQ ID NO: 5989862 - DNA, 25 bp, Homo sapien
gtcactggtaatatttctaaattcg

SEQ ID NO: 5989863 - DNA, 25 bp, Homo sapien
gtagcggtctagacgagttcataaa

SEQ ID NO: 5989864 - DNA, 25 bp, Homo sapien
ttctgccgttcaagctggtactcca

SEQ ID NO: 5989865 - DNA, 25 bp, Homo sapien
catttcgaggttagtccaaaaaaca

SEQ ID NO: 5989866 - DNA, 25 bp, Homo sapien
ttgaacaatgaagagcaaggtatgg

SEQ ID NO: 5989867 - DNA, 25 bp, Homo sapien
tgtatttggttatccaggtggtgct

SEQ ID NO: 5989868 - DNA, 25 bp, Homo sapien
acttcgctattaagcgttgctttca

SEQ ID NO: 5989869 - DNA, 25 bp, Homo sapien
tccaggatctaaaattaaaccacag

SEQ ID NO: 5989870 - DNA, 25 bp, Homo sapien
agcctgacatggatacctctttcgt

SEQ ID NO: 5989871 - DNA, 25 bp, Homo sapien
aacgcactaaaccaattaaccagtc

SEQ ID NO: 5989872 - DNA, 25 bp, Homo sapien
agtcttggtcgatttaccaaaggat

SEQ ID NO: 5989873 - DNA, 25 bp, Homo sapien
caagtccgtggaagaattgccattg

SEQ ID NO: 5989874 - DNA, 25 bp, Homo sapien
ccagagcctgctccaagtttcaatg

SEQ ID NO: 5989875 - DNA, 25 bp, Homo sapien
ttacagggcaagtcccaactagtgc

SEQ ID NO: 5989876 - DNA, 25 bp, Homo sapien
taattgcagttggtgctagattcga

SEQ ID NO: 5989877 - DNA, 25 bp, Homo sapien
agaagttgaaagacaacagactgaa

SEQ ID NO: 5989878 - DNA, 25 bp, Homo sapien
aactcttccatcaaacgcactaaac

SEQ ID NO: 5989879 - DNA, 25 bp, Homo sapien
tggtagcggtctagacgagttcata

SEQ ID NO: 5989880 - DNA, 25 bp, Homo sapien
gccatgagatcagtagctctcgcgc

SEQ ID NO: 5989881 - DNA, 25 bp, Homo sapien
ttgatcaacttggcaaagaaacctg

SEQ ID NO: 5989882 - DNA, 25 bp, Homo sapien
gaggagactccaggatctaaaatta

SEQ ID NO: 5989883 - DNA, 25 bp, Homo sapien
caatggcagatgcctttgcagacgg

SEQ ID NO: 5989884 - DNA, 25 bp, Homo sapien
gttttgcttgaagtggaagttgata

SEQ ID NO: 5989885 - DNA, 25 bp, Homo sapien
attttaaaccatgcagatggtccaa

SEQ ID NO: 5989886 - DNA, 25 bp, Homo sapien
cacggttgtgctactgccaacctgg

SEQ ID NO: 5989887 - DNA, 25 bp, Homo sapien
cccacacacatcaattgaaccctga

SEQ ID NO: 5989888 - DNA, 25 bp, Homo sapien
tggaagaaggaatacccatacgctt

SEQ ID NO: 5989889 - DNA, 25 bp, Homo sapien
gacatggagaaatccacatactttc

SEQ ID NO: 5989890 - DNA, 25 bp, Homo sapien
aacggaattgagttctgccgttcaa

SEQ ID NO: 5989891 - DNA, 25 bp, Homo sapien
catcaattgaaccctgatttcataa

SEQ ID NO: 5989892 - DNA, 25 bp, Homo sapien
cctgatttcataaaactagcggagg

SEQ ID NO: 5989893 - DNA, 25 bp, Homo sapien
ggtaaaccaggtgttgtcttggtta

SEQ ID NO: 5989894 - DNA, 25 bp, Homo sapien
gccgagggtagaggtggtattattc

SEQ ID NO: 5989895 - DNA, 25 bp, Homo sapien
cacatcaattgaaccctgatttcat

SEQ ID NO: 5989896 - DNA, 25 bp, Homo sapien
ctattaagcgttgctttcaacatat

SEQ ID NO: 5989897 - DNA, 25 bp, Homo sapien
gtgaccgtgctcaaatacctgtcac

SEQ ID NO: 5989898 - DNA, 25 bp, Homo sapien
tcaagttgcaaagccagaatctttg

SEQ ID NO: 5989899 - DNA, 25 bp, Homo sapien
tccaaaatcattggatatgcttggt

SEQ ID NO: 5989900 - DNA, 25 bp, Homo sapien
aatggaagaaggaatacccatacgc

SEQ ID NO: 5989901 - DNA, 25 bp, Homo sapien
cataaaactagcggaggctatgggt

SEQ ID NO: 5989902 - DNA, 25 bp, Homo sapien
cccatacgcttatatggaggagact

SEQ ID NO: 5989903 - DNA, 25 bp, Homo sapien
ggtcgatttaccaaaggatgttaca

SEQ ID NO: 5989904 - DNA, 25 bp, Homo sapien
aggttgttcaaactcaaatagcagt

SEQ ID NO: 5989905 - DNA, 25 bp, Homo sapien
gtcggtttaactggtggtcaaatat

SEQ ID NO: 5989906 - DNA, 25 bp, Homo sapien
agcgttgctttcaacatatagcata

SEQ ID NO: 5989907 - DNA, 25 bp, Homo sapien
cggtctagacgagttcataaatttt

SEQ ID NO: 5989908 - DNA, 25 bp, Homo sapien
caaggttgttcaaactcaaatagca

SEQ ID NO: 5989909 - DNA, 25 bp, Homo sapien
ctccagtgaagattttgattttgaa

SEQ ID NO: 5989910 - DNA, 25 bp, Homo sapien
acatgactctaacggaattgagttc

SEQ ID NO: 5989911 - DNA, 25 bp, Homo sapien
ggtcaaatatttaacgaaatgatgt

SEQ ID NO: 5989912 - DNA, 25 bp, Homo sapien
tcaaagattttcccagttaaggaga

SEQ ID NO: 5989913 - DNA, 25 bp, Homo sapien
tgctccaagtttcaatgttgatcca

SEQ ID NO: 5989914 - DNA, 25 bp, Homo sapien
tctaaaattaaaccacagacggtta

SEQ ID NO: 5989915 - DNA, 25 bp, Homo sapien
cagactgaattacgtcataagcgta

SEQ ID NO: 5989916 - DNA, 25 bp, Homo sapien
ggatatgcttggtatgcacggttgt

SEQ ID NO: 5989917 - DNA, 25 bp, Homo sapien
tgggcaaaatgatgtcaaagatttt

SEQ ID NO: 5989918 - DNA, 25 bp, Homo sapien
gttggtgctagattcgacgaccgtg

SEQ ID NO: 5989919 - DNA, 25 bp, Homo sapien
gggaccagtcttggtcgatttacca

SEQ ID NO: 5989920 - DNA, 25 bp, Homo sapien
cggttgtgctactgccaacctggca

SEQ ID NO: 5989921 - DNA, 25 bp, Homo sapien
gatcagacaatctacgctaaaaaac

SEQ ID NO: 5989922 - DNA, 25 bp, Homo sapien
tccaatggttgtctttacagggcaa

SEQ ID NO: 5989923 - DNA, 25 bp, Homo sapien
gcaaagaaacctgtcttatacgtcg

SEQ ID NO: 5989924 - DNA, 25 bp, Homo sapien
atggtgacgcatcctttaacatgac

SEQ ID NO: 5989925 - DNA, 25 bp, Homo sapien
caattccaacaaaaacaactcttcc

SEQ ID NO: 5989926 - DNA, 25 bp, Homo sapien
gtcgttggtatttctagatcttgta

SEQ ID NO: 5989927 - DNA, 25 bp, Homo sapien
tcacatcaggtggtttaggtacgat

SEQ ID NO: 5989928 - DNA, 25 bp, Homo sapien
aagttgaaagaattcgtttctacca

SEQ ID NO: 5989929 - DNA, 25 bp, Homo sapien
cgcactaaaccaattaaccagtcgc

SEQ ID NO: 5989930 - DNA, 25 bp, Homo sapien
gattcgacgaccgtgtcactggtaa

SEQ ID NO: 5989931 - DNA, 25 bp, Homo sapien
ttctgggccaggtgccaccaatgtc

SEQ ID NO: 5989932 - DNA, 25 bp, Homo sapien
cgctgaaccttcaaaattggctaag

SEQ ID NO: 5989933 - DNA, 25 bp, Homo sapien
gactgaattacgtcataagcgtaca

SEQ ID NO: 5989934 - DNA, 25 bp, Homo sapien
ttcaacttcgttcttccaaaacacg

SEQ ID NO: 5989935 - DNA, 25 bp, Homo sapien
aaagcagcagatttgatcaacttgg

SEQ ID NO: 5989936 - DNA, 25 bp, Homo sapien
caacgacacaggaagacatgtcatt

SEQ ID NO: 5989937 - DNA, 25 bp, Homo sapien
actggacatggagaaatccacatac

SEQ ID NO: 5989938 - DNA, 25 bp, Homo sapien
acttcgttcttccaaaacacgaaca

SEQ ID NO: 5989939 - DNA, 25 bp, Homo sapien
ctacctgtttacgatgccattcata

SEQ ID NO: 5989940 - DNA, 25 bp, Homo sapien
tactccagtgaagattttgattttg

SEQ ID NO: 5989941 - DNA, 25 bp, Homo sapien
tcttggtcgatttaccaaaggatgt

SEQ ID NO: 5989942 - DNA, 25 bp, Homo sapien
gatcttgtacgaaatggaatgtcat

SEQ ID NO: 5989943 - DNA, 25 bp, Homo sapien
ggttattgacattgatggtgacgca

SEQ ID NO: 5989944 - DNA, 25 bp, Homo sapien
tgcctttgcagacgggattccaatg

SEQ ID NO: 5989945 - DNA, 25 bp, Homo sapien
tcccagttaaggagaggtctgaatg

SEQ ID NO: 5989946 - DNA, 25 bp, Homo sapien
gatcaacttggcaaagaaacctgtc

SEQ ID NO: 5989947 - DNA, 25 bp, Homo sapien
gagcaaggtatggttactcaatggc

SEQ ID NO: 5989948 - DNA, 25 bp, Homo sapien
tttcgaggttagtccaaaaaacata

SEQ ID NO: 5989949 - DNA, 25 bp, Homo sapien
ggttcattcgaccaagaagatccaa

SEQ ID NO: 5989950 - DNA, 25 bp, Homo sapien
acaatgaagagcaaggtatggttac

SEQ ID NO: 5989951 - DNA, 25 bp, Homo sapien
catggagaaatccacatactttcat

SEQ ID NO: 5989952 - DNA, 25 bp, Homo sapien
tttcgtcggtttaactggtggtcaa

SEQ ID NO: 5989953 - DNA, 25 bp, Homo sapien
ttggatatgcttggtatgcacggtt

SEQ ID NO: 5989954 - DNA, 25 bp, Homo sapien
ccgggaccagtcttggtcgatttac

SEQ ID NO: 5989955 - DNA, 25 bp, Homo sapien
gatgttacagcagctatcttaagaa

SEQ ID NO: 5989956 - DNA, 25 bp, Homo sapien
ggctacgccagagcttctggtaaac

SEQ ID NO: 5989957 - DNA, 25 bp, Homo sapien
tggcaaagaaacctgtcttatacgt

SEQ ID NO: 5989958 - DNA, 25 bp, Homo sapien
tgccaccaatgtcgttactccaatg

SEQ ID NO: 5989959 - DNA, 25 bp, Homo sapien
ttcgacgaccgtgtcactggtaata

SEQ ID NO: 5989960 - DNA, 25 bp, Homo sapien
gaacagcccgctgaaccttcaaaat

SEQ ID NO: 5989961 - DNA, 25 bp, Homo sapien
agcagcagatttgatcaacttggca

SEQ ID NO: 5989962 - DNA, 25 bp, Homo sapien
cacacatcaattgaaccctgatttc

SEQ ID NO: 5989963 - DNA, 25 bp, Homo sapien
agactccaggatctaaaattaaacc

SEQ ID NO: 5989964 - DNA, 25 bp, Homo sapien
tttcccagttaaggagaggtctgaa

SEQ ID NO: 5989965 - DNA, 25 bp, Homo sapien
ccagtcttggtcgatttaccaaagg

SEQ ID NO: 5989966 - DNA, 25 bp, Homo sapien
tagcataccgcaacacacctgccat

SEQ ID NO: 5989967 - DNA, 25 bp, Homo sapien
acacctgccatgagatcagtagctc

SEQ ID NO: 5989968 - DNA, 25 bp, Homo sapien
gcgtattaacgaggcttttgaaatt

SEQ ID NO: 5989969 - DNA, 25 bp, Homo sapien
catgtcattgttacaacgggtgtgg

SEQ ID NO: 5989970 - DNA, 25 bp, Homo sapien
gagaaatccacatactttcatcaca

SEQ ID NO: 5989971 - DNA, 25 bp, Homo sapien
ccaatctgggcaaaatgatgtcaaa

SEQ ID NO: 5989972 - DNA, 25 bp, Homo sapien
cattaccagcctctaaaaggccaga

SEQ ID NO: 5989973 - DNA, 25 bp, Homo sapien
catggtcaagtccgtggaagaattg

SEQ ID NO: 5989974 - DNA, 25 bp, Homo sapien
cgggtgtggggcaacatcaaatgtg

SEQ ID NO: 5989975 - DNA, 25 bp, Homo sapien
tggaagaattgccattgcgtattaa

SEQ ID NO: 5989976 - DNA, 25 bp, Homo sapien
ggatctaaaattaaaccacagacgg

SEQ ID NO: 5989977 - DNA, 25 bp, Homo sapien
tccgtggaagaattgccattgcgta

SEQ ID NO: 5989978 - DNA, 25 bp, Homo sapien
acgacacaggaagacatgtcattgt

SEQ ID NO: 5989979 - DNA, 25 bp, Homo sapien
cagacggttataaagaaactatcca

SEQ ID NO: 5989980 - DNA, 25 bp, Homo sapien
tccaacaaaaacaactcttccatca

SEQ ID NO: 5989981 - DNA, 25 bp, Homo sapien
gttgataaaaaagttcctgttttgc

SEQ ID NO: 5989982 - DNA, 25 bp, Homo sapien
tttgacccagaagttgaaagacaac

SEQ ID NO: 5989983 - DNA, 25 bp, Homo sapien
aaaaggccagagcctgctccaagtt

SEQ ID NO: 5989984 - DNA, 25 bp, Homo sapien
aacgaaatgatgtccagacaaaacg

SEQ ID NO: 5989985 - DNA, 25 bp, Homo sapien
atgcagatggtccaagattactaaa

SEQ ID NO: 5989986 - DNA, 25 bp, Homo sapien
gcgctgagcctgacatggatacctc

SEQ ID NO: 5989987 - DNA, 25 bp, Homo sapien
tttaggtacgatgggttacggtctc

SEQ ID NO: 5989988 - DNA, 25 bp, Homo sapien
aaagaattaagtgaccgtgctcaaa

SEQ ID NO: 5989989 - DNA, 25 bp, Homo sapien
taggttcattcgaccaagaagatcc

SEQ ID NO: 5989990 - DNA, 25 bp, Homo sapien
gtggcaggtggtagcggtctagacg

SEQ ID NO: 5989991 - DNA, 25 bp, Homo sapien
cgccatcggtgctcaagttgcaaag

SEQ ID NO: 5989992 - DNA, 25 bp, Homo sapien
gttgaaagacaacagactgaattac

SEQ ID NO: 5989993 - DNA, 25 bp, Homo sapien
gcagatggtccaagattactaaaag

SEQ ID NO: 5989994 - DNA, 25 bp, Homo sapien
taaacaaggttgttcaaactcaaat

SEQ ID NO: 5989995 - DNA, 25 bp, Homo sapien
ggtactccagtgaagattttgattt

SEQ ID NO: 5989996 - DNA, 25 bp, Homo sapien
gtttctaccaagggcccagttttgc

SEQ ID NO: 5989997 - DNA, 25 bp, Homo sapien
tagcggaggctatgggtttaaaagg

SEQ ID NO: 5989998 - DNA, 25 bp, Homo sapien
ttggtatgcacggttgtgctactgc

SEQ ID NO: 5989999 - DNA, 25 bp, Homo sapien
agcaagaggaattggacgctaagtt

SEQ ID NO: 5990000 - DNA, 25 bp, Homo sapien
aagattttgattttgaacaatgaag

SEQ ID NO: 5990001 - DNA, 25 bp, Homo sapien
gcaacatcaaatgtgggctgctcaa

SEQ ID NO: 5990002 - DNA, 25 bp, Homo sapien
tatttctagatcttgtacgaaatgg

SEQ ID NO: 5990003 - DNA, 25 bp, Homo sapien
aacagactgaattacgtcataagcg

SEQ ID NO: 5990004 - DNA, 25 bp, Homo sapien
ttacagtgcgtctccattaccagcc

SEQ ID NO: 5990005 - DNA, 25 bp, Homo sapien
aacatcgttattcccacacacatca

SEQ ID NO: 5990006 - DNA, 25 bp, Homo sapien
gccgacttgataattgcagttggtg

SEQ ID NO: 5990007 - DNA, 25 bp, Homo sapien
ttggtcgatttaccaaaggatgtta

SEQ ID NO: 5990008 - DNA, 25 bp, Homo sapien
tcttggttacttctgggccaggtgc

SEQ ID NO: 5990009 - DNA, 25 bp, Homo sapien
gaatgtcatggtcaagtccgtggaa

SEQ ID NO: 5990010 - DNA, 25 bp, Homo sapien
tccaggtggtgctatcctacctgtt

SEQ ID NO: 5990011 - DNA, 25 bp, Homo sapien
ggcaatccctgttctacgaacatcg

SEQ ID NO: 5990012 - DNA, 25 bp, Homo sapien
ttcccacacacatcaattgaaccct

SEQ ID NO: 5990013 - DNA, 25 bp, Homo sapien
cctgtcttatacgtcggtgctggta

SEQ ID NO: 5990014 - DNA, 25 bp, Homo sapien
gaatggtttgctcaaataaataaat

SEQ ID NO: 5990015 - DNA, 25 bp, Homo sapien
catcacatcaggtggtttaggtacg

SEQ ID NO: 5990016 - DNA, 25 bp, Homo sapien
actggtggtcaaatatttaacgaaa

SEQ ID NO: 5990017 - DNA, 25 bp, Homo sapien
atatgcttggtatgcacggttgtgc

SEQ ID NO: 5990018 - DNA, 25 bp, Homo sapien
agcggtctagacgagttcataaatt

SEQ ID NO: 5990019 - DNA, 25 bp, Homo sapien
gaggttagtccaaaaaacataaaca

SEQ ID NO: 5990020 - DNA, 25 bp, Homo sapien
tttgcttgaagtggaagttgataaa

SEQ ID NO: 5990021 - DNA, 25 bp, Homo sapien
caaactcaaatagcagtggaaggtg

SEQ ID NO: 5990022 - DNA, 25 bp, Homo sapien
agtggaaggtgatgctacgaccaat

SEQ ID NO: 5990023 - DNA, 25 bp, Homo sapien
attgacattgatggtgacgcatcct

SEQ ID NO: 5990024 - DNA, 25 bp, Homo sapien
atgaatttgtcatgcaaagtatcaa

SEQ ID NO: 5990025 - DNA, 25 bp, Homo sapien
gtgatgctacgaccaatctgggcaa

SEQ ID NO: 5990026 - DNA, 25 bp, Homo sapien
ttcaaactcaaatagcagtggaagg

SEQ ID NO: 5990027 - DNA, 25 bp, Homo sapien
ggtgtggggcaacatcaaatgtggg

SEQ ID NO: 5990028 - DNA, 25 bp, Homo sapien
tatggaggagactccaggatctaaa

SEQ ID NO: 5990029 - DNA, 25 bp, Homo sapien
tagaacagcccgctgaaccttcaaa

SEQ ID NO: 5990030 - DNA, 25 bp, Homo sapien
caacacacctgccatgagatcagta

SEQ ID NO: 5990031 - DNA, 25 bp, Homo sapien
ccgttattacagtgcgtctccatta

SEQ ID NO: 5990032 - DNA, 25 bp, Homo sapien
cttttgaaattgccacgagcggtag

SEQ ID NO: 5990033 - DNA, 25 bp, Homo sapien
cctgctccaagtttcaatgttgatc

SEQ ID NO: 5990034 - DNA, 25 bp, Homo sapien
ggaatacccatacgcttatatggag

SEQ ID NO: 5990035 - DNA, 25 bp, Homo sapien
attttgacccagaagttgaaagaca

SEQ ID NO: 5990036 - DNA, 25 bp, Homo sapien
aacctggcagtgcaaaatgccgact

SEQ ID NO: 5990037 - DNA, 25 bp, Homo sapien
tgctatcggtactgatgctttccaa

SEQ ID NO: 5990038 - DNA, 25 bp, Homo sapien
ggtggtgctatcctacctgtttacg

SEQ ID NO: 5990039 - DNA, 25 bp, Homo sapien
cgaacatcgttattcccacacacat

SEQ ID NO: 5990040 - DNA, 25 bp, Homo sapien
accgcaacacacctgccatgagatc

SEQ ID NO: 5990041 - DNA, 25 bp, Homo sapien
tgaagagcaaggtatggttactcaa

SEQ ID NO: 5990042 - DNA, 25 bp, Homo sapien
aaccatgcagatggtccaagattac

SEQ ID NO: 5990043 - DNA, 25 bp, Homo sapien
caaaatgatgtcaaagattttccca

SEQ ID NO: 5990044 - DNA, 25 bp, Homo sapien
aagaaactatccaaggttgccaacg

SEQ ID NO: 5990045 - DNA, 25 bp, Homo sapien
tgatgctttccaagaggctgacgtc

SEQ ID NO: 5990046 - DNA, 25 bp, Homo sapien
tcagacaatctacgctaaaaaactt

SEQ ID NO: 5990047 - DNA, 25 bp, Homo sapien
tacgtcataagcgtacaggcggtaa

SEQ ID NO: 5990048 - DNA, 25 bp, Homo sapien
gacatgtcattgttacaacgggtgt

SEQ ID NO: 5990049 - DNA, 25 bp, Homo sapien
tggttactcaatggcaatccctgtt

SEQ ID NO: 5990050 - DNA, 25 bp, Homo sapien
atccctgttctacgaacatcgttat

SEQ ID NO: 5990051 - DNA, 25 bp, Homo sapien
cggtgctcaagttgcaaagccagaa

SEQ ID NO: 5990052 - DNA, 25 bp, Homo sapien
attggacgctaagttgaaagaattc

SEQ ID NO: 5990053 - DNA, 25 bp, Homo sapien
tggacatggagaaatccacatactt

SEQ ID NO: 5990054 - DNA, 25 bp, Homo sapien
tttggttatccaggtggtgctatcc

SEQ ID NO: 5990055 - DNA, 25 bp, Homo sapien
gctcaaatacctgtcaccactactt

SEQ ID NO: 5990056 - DNA, 25 bp, Homo sapien
tgaaagacaacagactgaattacgt

SEQ ID NO: 5990057 - DNA, 25 bp, Homo sapien
atcaataaagcagcagatttgatca

SEQ ID NO: 5990058 - DNA, 25 bp, Homo sapien
aagccagaatctttggttattgaca

SEQ ID NO: 5990059 - DNA, 25 bp, Homo sapien
aacataaacaaggttgttcaaactc

SEQ ID NO: 5990060 - DNA, 25 bp, Homo sapien
agggcaagtcccaactagtgctatc

SEQ ID NO: 5990061 - DNA, 25 bp, Homo sapien
atcctttaacatgactctaacggaa

SEQ ID NO: 5990062 - DNA, 25 bp, Homo sapien
gggccaggtgccaccaatgtcgtta

SEQ ID NO: 5990063 - DNA, 25 bp, Homo sapien
atttcataaaactagcggaggctat

SEQ ID NO: 5990064 - DNA, 25 bp, Homo sapien
atttgatcaacttggcaaagaaacc

SEQ ID NO: 5990065 - DNA, 25 bp, Homo sapien
aggctgacgtcgttggtatttctag

SEQ ID NO: 5990066 - DNA, 25 bp, Homo sapien
tcaaatgtgggctgctcaacactgg

SEQ ID NO: 5990067 - DNA, 25 bp, Homo sapien
ttgtacgaaatggaatgtcatggtc

SEQ ID NO: 5990068 - DNA, 25 bp, Homo sapien
ccaagtttcaatgttgatccattag

SEQ ID NO: 5990069 - DNA, 25 bp, Homo sapien
gtattattcatttcgaggttagtcc

SEQ ID NO: 5990070 - DNA, 25 bp, Homo sapien
ctcaatggcaatccctgttctacga

SEQ ID NO: 5990071 - DNA, 25 bp, Homo sapien
ggttgtctttacagggcaagtccca

SEQ ID NO: 5990072 - DNA, 25 bp, Homo sapien
agctggtactccagtgaagattttg

SEQ ID NO: 5990073 - DNA, 25 bp, Homo sapien
gacgggattccaatggttgtcttta

SEQ ID NO: 5990074 - DNA, 25 bp, Homo sapien
gggctgctcaacactggacatggag

SEQ ID NO: 5990075 - DNA, 25 bp, Homo sapien
gtttcaatgttgatccattagaaca

SEQ ID NO: 5990076 - DNA, 25 bp, Homo sapien
tgataaaaaagttcctgttttgcca

SEQ ID NO: 5990077 - DNA, 25 bp, Homo sapien
taaattcaacttcgttcttccaaaa

SEQ ID NO: 5990078 - DNA, 25 bp, Homo sapien
gtctgaatggtttgctcaaataaat

SEQ ID NO: 5990079 - DNA, 25 bp, Homo sapien
aatacccatacgcttatatggagga

SEQ ID NO: 5990080 - DNA, 25 bp, Homo sapien
cgcgcacaagatgaatttgtcatgc

SEQ ID NO: 5990081 - DNA, 25 bp, Homo sapien
ttctaccaagggcccagttttgctt

SEQ ID NO: 5990082 - DNA, 25 bp, Homo sapien
aaacttcgctattaagcgttgcttt

SEQ ID NO: 5990083 - DNA, 25 bp, Homo sapien
tatcctacctgtttacgatgccatt

SEQ ID NO: 5990084 - DNA, 25 bp, Homo sapien
caagaggctgacgtcgttggtattt

SEQ ID NO: 5990085 - DNA, 25 bp, Homo sapien
aaatgatgtccagacaaaacgttga

SEQ ID NO: 5990086 - DNA, 25 bp, Homo sapien
cgaccaagaagatccaaaatcattg

SEQ ID NO: 5990087 - DNA, 25 bp, Homo sapien
gtgctcaagttgcaaagccagaatc

SEQ ID NO: 5990088 - DNA, 25 bp, Homo sapien
acgaccaatctgggcaaaatgatgt

SEQ ID NO: 5990089 - DNA, 25 bp, Homo sapien
attcataacagtgataaattcaact

SEQ ID NO: 5990090 - DNA, 25 bp, Homo sapien
caagaagatccaaaatcattggata

SEQ ID NO: 5990091 - DNA, 25 bp, Homo sapien
caatggttgtctttacagggcaagt

SEQ ID NO: 5990092 - DNA, 25 bp, Homo sapien
gaaactatccaaggttgccaacgac

SEQ ID NO: 5990093 - DNA, 25 bp, Homo sapien
ttacgatgccattcataacagtgat

SEQ ID NO: 5990094 - DNA, 25 bp, Homo sapien
cagcctctaaaaggccagagcctgc

SEQ ID NO: 5990095 - DNA, 25 bp, Homo sapien
ctagtgctatcggtactgatgcttt

SEQ ID NO: 5990096 - DNA, 25 bp, Homo sapien
gcttctggtaaaccaggtgttgtct

SEQ ID NO: 5990097 - DNA, 25 bp, Homo sapien
tttaccaaaggatgttacagcagct

SEQ ID NO: 5990098 - DNA, 25 bp, Homo sapien
catggcagaaggctacgccagagct

SEQ ID NO: 5990099 - DNA, 25 bp, Homo sapien
attaagcgttgctttcaacatatag

SEQ ID NO: 5990100 - DNA, 25 bp, Homo sapien
tagttcgtcttcccgttattacagt

SEQ ID NO: 5990101 - DNA, 25 bp, Homo sapien
agttctgccgttcaagctggtactc

SEQ ID NO: 5990102 - DNA, 25 bp, Homo sapien
accagcctctaaaaggccagagcct

SEQ ID NO: 5990103 - DNA, 25 bp, Homo sapien
atgatgtccagacaaaacgttgata

SEQ ID NO: 5990104 - DNA, 25 bp, Homo sapien
gctatcctacctgtttacgatgcca

SEQ ID NO: 5990105 - DNA, 25 bp, Homo sapien
actccaatggcagatgcctttgcag

SEQ ID NO: 5990106 - DNA, 25 bp, Homo sapien
atttctaaattcgctccagaagctc

SEQ ID NO: 5990107 - DNA, 25 bp, Homo sapien
accctgatttcataaaactagcgga

SEQ ID NO: 5990108 - DNA, 25 bp, Homo sapien
ggtgccaccaatgtcgttactccaa

SEQ ID NO: 5990109 - DNA, 25 bp, Homo sapien
actaaaagaattaagtgaccgtgct

SEQ ID NO: 5990110 - DNA, 25 bp, Homo sapien
gtgcagctgccgagggtagaggtgg

SEQ ID NO: 5990111 - DNA, 25 bp, Homo sapien
tgaaagaattcgtttctaccaaggg

SEQ ID NO: 5990112 - DNA, 25 bp, Homo sapien
ctgtttacgatgccattcataacag

SEQ ID NO: 5990113 - DNA, 25 bp, Homo sapien
aaaggatgttacagcagctatctta

SEQ ID NO: 5990114 - DNA, 25 bp, Homo sapien
caggtggtttaggtacgatgggtta

SEQ ID NO: 5990115 - DNA, 25 bp, Homo sapien
tcttatacgtcggtgctggtatttt

SEQ ID NO: 5990116 - DNA, 25 bp, Homo sapien
ggtttaagagtcaagaagcaagagg

SEQ ID NO: 5990117 - DNA, 25 bp, Homo sapien
gtcgttactccaatggcagatgcct

SEQ ID NO: 5990118 - DNA, 25 bp, Homo sapien
caagtcccaactagtgctatcggta

SEQ ID NO: 5990119 - DNA, 25 bp, Homo sapien
cagacgggattccaatggttgtctt

SEQ ID NO: 5990120 - DNA, 25 bp, Homo sapien
gtctagacgagttcataaattttga

SEQ ID NO: 5990121 - DNA, 25 bp, Homo sapien
ccagaagttgaaagacaacagactg

SEQ ID NO: 5990122 - DNA, 25 bp, Homo sapien
ttcattcgaccaagaagatccaaaa

SEQ ID NO: 5990123 - DNA, 25 bp, Homo sapien
gatacctctttcgtcggtttaactg

SEQ ID NO: 5990124 - DNA, 25 bp, Homo sapien
tggaaggtgatgctacgaccaatct

SEQ ID NO: 5990125 - DNA, 25 bp, Homo sapien
attgccacgagcggtagaccgggac

SEQ ID NO: 5990126 - DNA, 25 bp, Homo sapien
ctcgcgcagcgcttttatagttcgt

SEQ ID NO: 5990127 - DNA, 25 bp, Homo sapien
aagttcctgttttgccaatggtggc

SEQ ID NO: 5990128 - DNA, 25 bp, Homo sapien
atggtccaagattactaaaagaatt

SEQ ID NO: 5990129 - DNA, 25 bp, Homo sapien
aaatcattggatatgcttggtatgc

SEQ ID NO: 5990130 - DNA, 25 bp, Homo sapien
ggttacttctgggccaggtgccacc

SEQ ID NO: 5990131 - DNA, 25 bp, Homo sapien
aaaccaattaaccagtcgcgcacaa

SEQ ID NO: 5990132 - DNA, 25 bp, Homo sapien
gggcaacatcaaatgtgggctgctc

SEQ ID NO: 5990133 - DNA, 25 bp, Homo sapien
gtttacgatgccattcataacagtg

SEQ ID NO: 5990134 - DNA, 25 bp, Homo sapien
acgccagagcttctggtaaaccagg

SEQ ID NO: 5990135 - DNA, 25 bp, Homo sapien
ggtttgctcaaataaataaatggaa

SEQ ID NO: 5990136 - DNA, 25 bp, Homo sapien
attttcccagttaaggagaggtctg

SEQ ID NO: 5990137 - DNA, 25 bp, Homo sapien
tttgccaatggtggcaggtggtagc

SEQ ID NO: 5990138 - DNA, 25 bp, Homo sapien
tgcagacgggattccaatggttgtc

SEQ ID NO: 5990139 - DNA, 25 bp, Homo sapien
ttgccaacgacacaggaagacatgt

SEQ ID NO: 5990140 - DNA, 25 bp, Homo sapien
atggtttgctcaaataaataaatgg

SEQ ID NO: 5990141 - DNA, 25 bp, Homo sapien
caatggcaatccctgttctacgaac

SEQ ID NO: 5990142 - DNA, 25 bp, Homo sapien
ggcaaaatgatgtcaaagattttcc

SEQ ID NO: 5990143 - DNA, 25 bp, Homo sapien
cactactttacaaggtttaggttca

SEQ ID NO: 5990144 - DNA, 25 bp, Homo sapien
tggggcaacatcaaatgtgggctgc

SEQ ID NO: 5990145 - DNA, 25 bp, Homo sapien
taacgaggcttttgaaattgccacg

SEQ ID NO: 5990146 - DNA, 25 bp, Homo sapien
ccgtgctcaaatacctgtcaccact

SEQ ID NO: 5990147 - DNA, 25 bp, Homo sapien
ctaacggaattgagttctgccgttc

SEQ ID NO: 5990148 - DNA, 25 bp, Homo sapien
atcggtactgatgctttccaagagg

SEQ ID NO: 5990149 - DNA, 25 bp, Homo sapien
gttacggtctccctgccgccatcgg

SEQ ID NO: 5990150 - DNA, 25 bp, Homo sapien
aggaattggacgctaagttgaaaga

SEQ ID NO: 5990151 - DNA, 25 bp, Homo sapien
aaatgtgggctgctcaacactggac

SEQ ID NO: 5990152 - DNA, 25 bp, Homo sapien
agcagctatcttaagaaatccaatt

SEQ ID NO: 5990153 - DNA, 25 bp, Homo sapien
acgagttcataaattttgacccaga

SEQ ID NO: 5990154 - DNA, 25 bp, Homo sapien
caatgttgatccattagaacagccc

SEQ ID NO: 5990155 - DNA, 25 bp, Homo sapien
gacgctaagttgaaagaattcgttt

SEQ ID NO: 5990156 - DNA, 25 bp, Homo sapien
taaaccatgcagatggtccaagatt

SEQ ID NO: 5990157 - DNA, 25 bp, Homo sapien
tccaattccaacaaaaacaactctt

SEQ ID NO: 5990158 - DNA, 25 bp, Homo sapien
gtcgcgcacaagatgaatttgtcat

SEQ ID NO: 5990159 - DNA, 25 bp, Homo sapien
taccaaaggatgttacagcagctat

SEQ ID NO: 5990160 - DNA, 25 bp, Homo sapien
aatctacgctaaaaaacttcgctat

SEQ ID NO: 5990161 - DNA, 25 bp, Homo sapien
tgttacaacgggtgtggggcaacat

SEQ ID NO: 5990162 - DNA, 25 bp, Homo sapien
cgtggaagaattgccattgcgtatt

SEQ ID NO: 5990163 - DNA, 25 bp, Homo sapien
tttaggttcattcgaccaagaagat

SEQ ID NO: 5990164 - DNA, 25 bp, Homo sapien
gtgttgtcttggttacttctgggcc

SEQ ID NO: 5990165 - DNA, 25 bp, Homo sapien
ataaattttgacccagaagttgaaa

SEQ ID NO: 5990166 - DNA, 25 bp, Homo sapien
aagaaacctgtcttatacgtcggtg

SEQ ID NO: 5990167 - DNA, 25 bp, Homo sapien
cagcgcttttatagttcgtcttccc

SEQ ID NO: 5990168 - DNA, 25 bp, Homo sapien
aaggctacgccagagcttctggtaa

SEQ ID NO: 5990169 - DNA, 25 bp, Homo sapien
aaaaacttcgctattaagcgttgct

SEQ ID NO: 5990170 - DNA, 25 bp, Homo sapien
gtgggctgctcaacactggacatgg

SEQ ID NO: 5990171 - DNA, 25 bp, Homo sapien
gccagagcttctggtaaaccaggtg

SEQ ID NO: 5990172 - DNA, 25 bp, Homo sapien
ataccgcaacacacctgccatgaga

SEQ ID NO: 5990173 - DNA, 25 bp, Homo sapien
aatgaagagcaaggtatggttactc

SEQ ID NO: 5990174 - DNA, 25 bp, Homo sapien
atgctttccaagaggctgacgtcgt

SEQ ID NO: 5990175 - DNA, 25 bp, Homo sapien
cttcccgttattacagtgcgtctcc

SEQ ID NO: 5990176 - DNA, 25 bp, Homo sapien
aaaaggtttaagagtcaagaagcaa

SEQ ID NO: 5990177 - DNA, 25 bp, Homo sapien
aagttgaaagacaacagactgaatt

SEQ ID NO: 5990178 - DNA, 25 bp, Homo sapien
aaagacaacagactgaattacgtca

SEQ ID NO: 5990179 - DNA, 25 bp, Homo sapien
agattttcccagttaaggagaggtc

SEQ ID NO: 5990180 - DNA, 25 bp, Homo sapien
tacgcttatatggaggagactccag

SEQ ID NO: 5990181 - DNA, 25 bp, Homo sapien
cctggcagtgcaaaatgccgacttg

SEQ ID NO: 5990182 - DNA, 25 bp, Homo sapien
cggtgctggtattttaaaccatgca

SEQ ID NO: 5990183 - DNA, 25 bp, Homo sapien
ctaagttgaaagaattcgtttctac

SEQ ID NO: 5990184 - DNA, 25 bp, Homo sapien
cagctatcttaagaaatccaattcc

SEQ ID NO: 5990185 - DNA, 25 bp, Homo sapien
atgtcgttactccaatggcagatgc

SEQ ID NO: 5990186 - DNA, 25 bp, Homo sapien
tcaaacgcactaaaccaattaacca

SEQ ID NO: 5990187 - DNA, 25 bp, Homo sapien
tattcatttcgaggttagtccaaaa

SEQ ID NO: 5990188 - DNA, 25 bp, Homo sapien
gttattcccacacacatcaattgaa

SEQ ID NO: 5990189 - DNA, 25 bp, Homo sapien
tctacgaacatcgttattcccacac

SEQ ID NO: 5990190 - DNA, 25 bp, Homo sapien
ttgattttgaacaatgaagagcaag

SEQ ID NO: 5990191 - DNA, 25 bp, Homo sapien
ctttggttattgacattgatggtga

SEQ ID NO: 5990192 - DNA, 25 bp, Homo sapien
acaaggtttaggttcattcgaccaa

SEQ ID NO: 5990193 - DNA, 25 bp, Homo sapien
tcaaatacctgtcaccactacttta

SEQ ID NO: 5990194 - DNA, 25 bp, Homo sapien
ggattccaatggttgtctttacagg

SEQ ID NO: 5990195 - DNA, 25 bp, Homo sapien
ctcgtcgtgcagctgccgagggtag

SEQ ID NO: 5990196 - DNA, 25 bp, Homo sapien
ggtttaggttcattcgaccaagaag

SEQ ID NO: 5990197 - DNA, 25 bp, Homo sapien
tcctgttttgccaatggtggcaggt

SEQ ID NO: 5990198 - DNA, 25 bp, Homo sapien
aagaaactacgcgctgagcctgaca

SEQ ID NO: 5990199 - DNA, 25 bp, Homo sapien
gtcggtgctggtattttaaaccatg

SEQ ID NO: 5990200 - DNA, 25 bp, Homo sapien
attaaaccacagacggttataaaga

SEQ ID NO: 5990201 - DNA, 25 bp, Homo sapien
aggtgatgctacgaccaatctgggc

SEQ ID NO: 5990202 - DNA, 25 bp, Homo sapien
gtcttcccgttattacagtgcgtct

SEQ ID NO: 5990203 - DNA, 25 bp, Homo sapien
ccaaaggatgttacagcagctatct

SEQ ID NO: 5990204 - DNA, 25 bp, Homo sapien
accacagacggttataaagaaacta

SEQ ID NO: 5990205 - DNA, 25 bp, Homo sapien
agctgccgagggtagaggtggtatt

SEQ ID NO: 5990206 - DNA, 25 bp, Homo sapien
gttatccaggtggtgctatcctacc

SEQ ID NO: 5990207 - DNA, 25 bp, Homo sapien
cgcgcagcgcttttatagttcgtct

SEQ ID NO: 5990208 - DNA, 25 bp, Homo sapien
gaattgagttctgccgttcaagctg

SEQ ID NO: 5990209 - DNA, 25 bp, Homo sapien
cacaggaagacatgtcattgttaca

SEQ ID NO: 5990210 - DNA, 25 bp, Homo sapien
gatgtccagacaaaacgttgatact

SEQ ID NO: 5990211 - DNA, 25 bp, Homo sapien
ggtgacgcatcctttaacatgactc

SEQ ID NO: 5990212 - DNA, 25 bp, Homo sapien
aaacaactcttccatcaaacgcact

SEQ ID NO: 5990213 - DNA, 25 bp, Homo sapien
agcctgctccaagtttcaatgttga

SEQ ID NO: 5990214 - DNA, 25 bp, Homo sapien
tgacattgatggtgacgcatccttt

SEQ ID NO: 5990215 - DNA, 25 bp, Homo sapien
accaatgtcgttactccaatggcag

SEQ ID NO: 5990216 - DNA, 25 bp, Homo sapien
ggtggtagcggtctagacgagttca

SEQ ID NO: 5990217 - DNA, 25 bp, Homo sapien
tccaatggcagatgcctttgcagac

SEQ ID NO: 5990218 - DNA, 25 bp, Homo sapien
gtgctagattcgacgaccgtgtcac

SEQ ID NO: 5990219 - DNA, 25 bp, Homo sapien
tggtggcaggtggtagcggtctaga

SEQ ID NO: 5990220 - DNA, 25 bp, Homo sapien
cccagttttgcttgaagtggaagtt

SEQ ID NO: 5990221 - DNA, 25 bp, Homo sapien
ttggctaagaaactacgcgctgagc

SEQ ID NO: 5990222 - DNA, 25 bp, Homo sapien
tccacatactttcatcacatcaggt

SEQ ID NO: 5990223 - DNA, 25 bp, Homo sapien
gctttccaagaggctgacgtcgttg

SEQ ID NO: 5990224 - DNA, 25 bp, Homo sapien
ttcaagctggtactccagtgaagat

SEQ ID NO: 5990225 - DNA, 25 bp, Homo sapien
tgacgtcgttggtatttctagatct

SEQ ID NO: 5990226 - DNA, 25 bp, Homo sapien
cctttgcagacgggattccaatggt

SEQ ID NO: 5990227 - DNA, 25 bp, Homo sapien
ttaccagcctctaaaaggccagagc

SEQ ID NO: 5990228 - DNA, 25 bp, Homo sapien
taaatggaagaaggaatacccatac

SEQ ID NO: 5990229 - DNA, 25 bp, Homo sapien
tcgctccagaagctcgtcgtgcagc

SEQ ID NO: 5990230 - DNA, 25 bp, Homo sapien
aaaaacaactcttccatcaaacgca

SEQ ID NO: 5990231 - DNA, 25 bp, Homo sapien
acgatgccattcataacagtgataa

SEQ ID NO: 5990232 - DNA, 25 bp, Homo sapien
gggttacggtctccctgccgccatc

SEQ ID NO: 5990233 - DNA, 25 bp, Homo sapien
acaacagactgaattacgtcataag

SEQ ID NO: 5990234 - DNA, 25 bp, Homo sapien
cagcagatttgatcaacttggcaaa

SEQ ID NO: 5990235 - DNA, 25 bp, Homo sapien
gttcataaattttgacccagaagtt

SEQ ID NO: 5990236 - DNA, 25 bp, Homo sapien
ctaaaccaattaaccagtcgcgcac

SEQ ID NO: 5990237 - DNA, 25 bp, Homo sapien
ctaaattcgctccagaagctcgtcg

SEQ ID NO: 5990238 - DNA, 25 bp, Homo sapien
attgatggtgacgcatcctttaaca

SEQ ID NO: 5990239 - DNA, 25 bp, Homo sapien
aacacgaacaaggtgccggtcacat

SEQ ID NO: 5990240 - DNA, 25 bp, Homo sapien
ttcgctattaagcgttgctttcaac

SEQ ID NO: 5990241 - DNA, 25 bp, Homo sapien
ttttgaacaatgaagagcaaggtat

SEQ ID NO: 5990242 - DNA, 25 bp, Homo sapien
tggcagtgcaaaatgccgacttgat

SEQ ID NO: 5990243 - DNA, 25 bp, Homo sapien
tggtcaagtccgtggaagaattgcc

SEQ ID NO: 5990244 - DNA, 25 bp, Homo sapien
ggagactccaggatctaaaattaaa

SEQ ID NO: 5990245 - DNA, 25 bp, Homo sapien
ctcttccatcaaacgcactaaacca

SEQ ID NO: 5990246 - DNA, 25 bp, Homo sapien
aacatatagcataccgcaacacacc

SEQ ID NO: 5990247 - DNA, 25 bp, Homo sapien
gatgctacgaccaatctgggcaaaa

SEQ ID NO: 5990248 - DNA, 25 bp, Homo sapien
aaattttgacccagaagttgaaaga

SEQ ID NO: 5990249 - DNA, 25 bp, Homo sapien
gtggtcaaatatttaacgaaatgat

SEQ ID NO: 5990250 - DNA, 25 bp, Homo sapien
agatgaatttgtcatgcaaagtatc

SEQ ID NO: 5990251 - DNA, 25 bp, Homo sapien
tatccaggtggtgctatcctacctg

SEQ ID NO: 5990252 - DNA, 25 bp, Homo sapien
tggaatgtcatggtcaagtccgtgg

SEQ ID NO: 5990253 - DNA, 25 bp, Homo sapien
cttccatcaaacgcactaaaccaat

SEQ ID NO: 5990254 - DNA, 25 bp, Homo sapien
ggtttaactggtggtcaaatattta

SEQ ID NO: 5990255 - DNA, 25 bp, Homo sapien
ccaactagtgctatcggtactgatg

SEQ ID NO: 5990256 - DNA, 25 bp, Homo sapien
cggtcacatggcagaaggctacgcc

SEQ ID NO: 5990257 - DNA, 25 bp, Homo sapien
acaacgggtgtggggcaacatcaaa

SEQ ID NO: 5990258 - DNA, 25 bp, Homo sapien
ccaatggtggcaggtggtagcggtc

SEQ ID NO: 5990259 - DNA, 25 bp, Homo sapien
tctagatcttgtacgaaatggaatg

SEQ ID NO: 5990260 - DNA, 25 bp, Homo sapien
agagtcaagaagcaagaggaattgg

SEQ ID NO: 5990261 - DNA, 25 bp, Homo sapien
tgtgctactgccaacctggcagtgc

SEQ ID NO: 5990262 - DNA, 25 bp, Homo sapien
gactctaacggaattgagttctgcc

SEQ ID NO: 5990263 - DNA, 25 bp, Homo sapien
gattttgattttgaacaatgaagag

SEQ ID NO: 5990264 - DNA, 25 bp, Homo sapien
caacaaaaacaactcttccatcaaa

SEQ ID NO: 5990265 - DNA, 25 bp, Homo sapien
tatgcacggttgtgctactgccaac

SEQ ID NO: 5990266 - DNA, 25 bp, Homo sapien
caatgtcgttactccaatggcagat

SEQ ID NO: 5990267 - DNA, 25 bp, Homo sapien
gcagaaggctacgccagagcttctg

SEQ ID NO: 5990268 - DNA, 25 bp, Homo sapien
aactacgcgctgagcctgacatgga

SEQ ID NO: 5990269 - DNA, 25 bp, Homo sapien
tggtattttaaaccatgcagatggt

SEQ ID NO: 5990270 - DNA, 25 bp, Homo sapien
tccaagaggctgacgtcgttggtat

SEQ ID NO: 5990271 - DNA, 25 bp, Homo sapien
gtactgatgctttccaagaggctga

SEQ ID NO: 5990272 - DNA, 25 bp, Homo sapien
gaagaaggaatacccatacgcttat

SEQ ID NO: 5990273 - DNA, 25 bp, Homo sapien
atatttctaaattcgctccagaagc

SEQ ID NO: 5990274 - DNA, 25 bp, Homo sapien
aagtatcaataaagcagcagatttg

SEQ ID NO: 5990275 - DNA, 25 bp, Homo sapien
cagaatctttggttattgacattga

SEQ ID NO: 5990276 - DNA, 25 bp, Homo sapien
aatagcagtggaaggtgatgctacg

SEQ ID NO: 5990277 - DNA, 25 bp, Homo sapien
tcccaactagtgctatcggtactga

SEQ ID NO: 5990278 - DNA, 25 bp, Homo sapien
gattttgaacaatgaagagcaaggt

SEQ ID NO: 5990279 - DNA, 25 bp, Homo sapien
actccaggatctaaaattaaaccac

SEQ ID NO: 5990280 - DNA, 25 bp, Homo sapien
cagtgataaattcaacttcgttctt

SEQ ID NO: 5990281 - DNA, 25 bp, Homo sapien
cacagacggttataaagaaactatc

SEQ ID NO: 5990282 - DNA, 25 bp, Homo sapien
aagagcaaggtatggttactcaatg

SEQ ID NO: 5990283 - DNA, 25 bp, Homo sapien
attattcatttcgaggttagtccaa

SEQ ID NO: 5990284 - DNA, 25 bp, Homo sapien
gatgccattcataacagtgataaat

SEQ ID NO: 5990285 - DNA, 25 bp, Homo sapien
tatggttactcaatggcaatccctg

SEQ ID NO: 5990286 - DNA, 25 bp, Homo sapien
tcaacttggcaaagaaacctgtctt

SEQ ID NO: 5990287 - DNA, 25 bp, Homo sapien
taaaaaacttcgctattaagcgttg

SEQ ID NO: 5990288 - DNA, 25 bp, Homo sapien
tgccaatggtggcaggtggtagcgg

SEQ ID NO: 5990289 - DNA, 25 bp, Homo sapien
tgaaattgccacgagcggtagaccg

SEQ ID NO: 5990290 - DNA, 25 bp, Homo sapien
atccaaggttgccaacgacacagga

SEQ ID NO: 5990291 - DNA, 25 bp, Homo sapien
agttaaggagaggtctgaatggttt

SEQ ID NO: 5990292 - DNA, 25 bp, Homo sapien
catgcaaagtatcaataaagcagca

SEQ ID NO: 5990293 - DNA, 25 bp, Homo sapien
attagaacagcccgctgaaccttca

SEQ ID NO: 5990294 - DNA, 25 bp, Homo sapien
caaatagcagtggaaggtgatgcta

SEQ ID NO: 5990295 - DNA, 25 bp, Homo sapien
aagaagcaagaggaattggacgcta

SEQ ID NO: 5990296 - DNA, 25 bp, Homo sapien
gccggtcacatggcagaaggctacg

SEQ ID NO: 5990297 - DNA, 25 bp, Homo sapien
tggtgctatcctacctgtttacgat

SEQ ID NO: 5990298 - DNA, 25 bp, Homo sapien
aggtgccggtcacatggcagaaggc

SEQ ID NO: 5990299 - DNA, 25 bp, Homo sapien
ttgtcatgcaaagtatcaataaagc

SEQ ID NO: 5990300 - DNA, 25 bp, Homo sapien
caggtggtgctatcctacctgttta

SEQ ID NO: 5990301 - DNA, 25 bp, Homo sapien
ccagtgaagattttgattttgaaca

SEQ ID NO: 5990302 - DNA, 25 bp, Homo sapien
tttccaagaggctgacgtcgttggt

SEQ ID NO: 5990303 - DNA, 25 bp, Homo sapien
attacgtcataagcgtacaggcggt

SEQ ID NO: 5990304 - DNA, 25 bp, Homo sapien
cgcacaagatgaatttgtcatgcaa

SEQ ID NO: 5990305 - DNA, 25 bp, Homo sapien
caaaatcattggatatgcttggtat

SEQ ID NO: 5990306 - DNA, 25 bp, Homo sapien
ctgtcaccactactttacaaggttt

SEQ ID NO: 5990307 - DNA, 25 bp, Homo sapien
ctttcatcacatcaggtggtttagg

SEQ ID NO: 5990308 - DNA, 25 bp, Homo sapien
ctctaacggaattgagttctgccgt

SEQ ID NO: 5990309 - DNA, 25 bp, Homo sapien
gcagtggaaggtgatgctacgacca

SEQ ID NO: 5990310 - DNA, 25 bp, Homo sapien
atgtgggctgctcaacactggacat

SEQ ID NO: 5990311 - DNA, 25 bp, Homo sapien
gatgcctttgcagacgggattccaa

SEQ ID NO: 5990312 - DNA, 25 bp, Homo sapien
tggtattattcatttcgaggttagt

SEQ ID NO: 5990313 - DNA, 25 bp, Homo sapien
caagctggtactccagtgaagattt

SEQ ID NO: 5990314 - DNA, 25 bp, Homo sapien
acattgatggtgacgcatcctttaa

SEQ ID NO: 5990315 - DNA, 25 bp, Homo sapien
tcgtgcagctgccgagggtagaggt

SEQ ID NO: 5990316 - DNA, 25 bp, Homo sapien
tgacccagaagttgaaagacaacag

SEQ ID NO: 5990317 - DNA, 25 bp, Homo sapien
aaatacctgtcaccactactttaca

SEQ ID NO: 5990318 - DNA, 25 bp, Homo sapien
aacaaggtgccggtcacatggcaga

SEQ ID NO: 5990319 - DNA, 25 bp, Homo sapien
attgagttctgccgttcaagctggt

SEQ ID NO: 5990320 - DNA, 25 bp, Homo sapien
tagattcgacgaccgtgtcactggt

SEQ ID NO: 5990321 - DNA, 25 bp, Homo sapien
acctgtcaccactactttacaaggt

SEQ ID NO: 5990322 - DNA, 25 bp, Homo sapien
cggaattgagttctgccgttcaagc

SEQ ID NO: 5990323 - DNA, 25 bp, Homo sapien
ctgttctacgaacatcgttattccc

SEQ ID NO: 5990324 - DNA, 25 bp, Homo sapien
tgccattcataacagtgataaattc

SEQ ID NO: 5990325 - DNA, 25 bp, Homo sapien
gtgtcactggtaatatttctaaatt

SEQ ID NO: 5990326 - DNA, 25 bp, Homo sapien
aaactagcggaggctatgggtttaa

SEQ ID NO: 5990327 - DNA, 25 bp, Homo sapien
aagacatgtcattgttacaacgggt

SEQ ID NO: 5990328 - DNA, 25 bp, Homo sapien
gttataaagaaactatccaaggttg

SEQ ID NO: 5990329 - DNA, 25 bp, Homo sapien
cccgctgaaccttcaaaattggcta

SEQ ID NO: 5990330 - DNA, 25 bp, Homo sapien
agaaggctacgccagagcttctggt

SEQ ID NO: 5990331 - DNA, 25 bp, Homo sapien
gctgacgtcgttggtatttctagat

SEQ ID NO: 5990332 - DNA, 25 bp, Homo sapien
actgatgctttccaagaggctgacg

SEQ ID NO: 5990333 - DNA, 25 bp, Homo sapien
gctttcaacatatagcataccgcaa

SEQ ID NO: 5990334 - DNA, 25 bp, Homo sapien
aagttgcaaagccagaatctttggt

SEQ ID NO: 5990335 - DNA, 25 bp, Homo sapien
gaatttgtcatgcaaagtatcaata

SEQ ID NO: 5990336 - DNA, 25 bp, Homo sapien
ctagacgagttcataaattttgacc

SEQ ID NO: 5990337 - DNA, 25 bp, Homo sapien
attaaccagtcgcgcacaagatgaa

SEQ ID NO: 5990338 - DNA, 25 bp, Homo sapien
tggacgctaagttgaaagaattcgt

SEQ ID NO: 5990339 - DNA, 25 bp, Homo sapien
tgaagattttgattttgaacaatga

SEQ ID NO: 5990340 - DNA, 25 bp, Homo sapien
aaaacacgaacaaggtgccggtcac

SEQ ID NO: 5990341 - DNA, 25 bp, Homo sapien
aatggtggcaggtggtagcggtcta

SEQ ID NO: 5990342 - DNA, 25 bp, Homo sapien
ctaccaagggcccagttttgcttga

SEQ ID NO: 5990343 - DNA, 25 bp, Homo sapien
acagcagctatcttaagaaatccaa

SEQ ID NO: 5990344 - DNA, 25 bp, Homo sapien
taagcgttgctttcaacatatagca

SEQ ID NO: 5990345 - DNA, 25 bp, Homo sapien
gccaacgacacaggaagacatgtca

SEQ ID NO: 5990346 - DNA, 25 bp, Homo sapien
tcataaattttgacccagaagttga

SEQ ID NO: 5990347 - DNA, 25 bp, Homo sapien
ggctaagaaactacgcgctgagcct

SEQ ID NO: 5990348 - DNA, 25 bp, Homo sapien
ccctgccgccatcggtgctcaagtt

SEQ ID NO: 5990349 - DNA, 25 bp, Homo sapien
ccaacctggcagtgcaaaatgccga

SEQ ID NO: 5990350 - DNA, 25 bp, Homo sapien
ggcccagttttgcttgaagtggaag

SEQ ID NO: 5990351 - DNA, 25 bp, Homo sapien
ccaggtgttgtcttggttacttctg

SEQ ID NO: 5990352 - DNA, 25 bp, Homo sapien
ttattgacattgatggtgacgcatc

SEQ ID NO: 5990353 - DNA, 25 bp, Homo sapien
ttccaaaacacgaacaaggtgccgg

SEQ ID NO: 5990354 - DNA, 25 bp, Homo sapien
gcaaggtatggttactcaatggcaa

SEQ ID NO: 5990355 - DNA, 25 bp, Homo sapien
ctgaattacgtcataagcgtacagg

SEQ ID NO: 5990356 - DNA, 25 bp, Homo sapien
atctttggttattgacattgatggt

SEQ ID NO: 5990357 - DNA, 25 bp, Homo sapien
ttacttctgggccaggtgccaccaa

SEQ ID NO: 5990358 - DNA, 25 bp, Homo sapien
tagatcttgtacgaaatggaatgtc

SEQ ID NO: 5990359 - DNA, 25 bp, Homo sapien
tttaagagtcaagaagcaagaggaa

SEQ ID NO: 5990360 - DNA, 25 bp, Homo sapien
tattacagtgcgtctccattaccag

SEQ ID NO: 5990361 - DNA, 25 bp, Homo sapien
aaggtatggttactcaatggcaatc

SEQ ID NO: 5990362 - DNA, 25 bp, Homo sapien
ctgaatggtttgctcaaataaataa

SEQ ID NO: 5990363 - DNA, 25 bp, Homo sapien
ccctgttctacgaacatcgttattc

SEQ ID NO: 5990364 - DNA, 25 bp, Homo sapien
gtggaagttgataaaaaagttcctg

SEQ ID NO: 5990365 - DNA, 25 bp, Homo sapien
agacaacagactgaattacgtcata

SEQ ID NO: 5990366 - DNA, 25 bp, Homo sapien
tgagatcagtagctctcgcgcagcg

SEQ ID NO: 5990367 - DNA, 25 bp, Homo sapien
ccattcataacagtgataaattcaa

SEQ ID NO: 5990368 - DNA, 25 bp, Homo sapien
ctggtaatatttctaaattcgctcc

SEQ ID NO: 5990369 - DNA, 25 bp, Homo sapien
acgtcgttggtatttctagatcttg

SEQ ID NO: 5990370 - DNA, 25 bp, Homo sapien
tttctagatcttgtacgaaatggaa

SEQ ID NO: 5990371 - DNA, 25 bp, Homo sapien
ggcaagtcccaactagtgctatcgg

SEQ ID NO: 5990372 - DNA, 25 bp, Homo sapien
ttaaaaggtttaagagtcaagaagc

SEQ ID NO: 5990373 - DNA, 25 bp, Homo sapien
taaaccacagacggttataaagaaa

SEQ ID NO: 5990374 - DNA, 25 bp, Homo sapien
tcgaggttagtccaaaaaacataaa

SEQ ID NO: 5990375 - DNA, 25 bp, Homo sapien
taaaccaggtgttgtcttggttact

SEQ ID NO: 5990376 - DNA, 25 bp, Homo sapien
tttaaaccatgcagatggtccaaga

SEQ ID NO: 5990377 - DNA, 25 bp, Homo sapien
ccatgcagatggtccaagattacta

SEQ ID NO: 5990378 - DNA, 25 bp, Homo sapien
cttcaaaattggctaagaaactacg

SEQ ID NO: 5990379 - DNA, 25 bp, Homo sapien
tccatcaaacgcactaaaccaatta

SEQ ID NO: 5990380 - DNA, 25 bp, Homo sapien
cagatgcctttgcagacgggattcc

SEQ ID NO: 5990381 - DNA, 25 bp, Homo sapien
aacagtgataaattcaacttcgttc

SEQ ID NO: 5990382 - DNA, 25 bp, Homo sapien
ggtagaccgggaccagtcttggtcg

SEQ ID NO: 5990383 - DNA, 25 bp, Homo sapien
aaattgccacgagcggtagaccggg

SEQ ID NO: 5990384 - DNA, 25 bp, Homo sapien
ttgtctttacagggcaagtcccaac

SEQ ID NO: 5990385 - DNA, 25 bp, Homo sapien
gatccaaaatcattggatatgcttg

SEQ ID NO: 5990386 - DNA, 25 bp, Homo sapien
catcaaatgtgggctgctcaacact

SEQ ID NO: 5990387 - DNA, 25 bp, Homo sapien
gtagctctcgcgcagcgcttttata

SEQ ID NO: 5990388 - DNA, 25 bp, Homo sapien
aaatatttaacgaaatgatgtccag

SEQ ID NO: 5990389 - DNA, 25 bp, Homo sapien
atgatgtcaaagattttcccagtta

SEQ ID NO: 5990390 - DNA, 25 bp, Homo sapien
atacgtcggtgctggtattttaaac

SEQ ID NO: 5990391 - DNA, 25 bp, Homo sapien
aagatccaaaatcattggatatgct

SEQ ID NO: 5990392 - DNA, 25 bp, Homo sapien
gtcaagtccgtggaagaattgccat

SEQ ID NO: 5990393 - DNA, 25 bp, Homo sapien
acttctgggccaggtgccaccaatg

SEQ ID NO: 5990394 - DNA, 25 bp, Homo sapien
ggtatttctagatcttgtacgaaat

SEQ ID NO: 5990395 - DNA, 25 bp, Homo sapien
gttcttccaaaacacgaacaaggtg

SEQ ID NO: 5990396 - DNA, 25 bp, Homo sapien
ttggttacttctgggccaggtgcca

SEQ ID NO: 5990397 - DNA, 25 bp, Homo sapien
gagcggtagaccgggaccagtcttg

SEQ ID NO: 5990398 - DNA, 25 bp, Homo sapien
caagaggaattggacgctaagttga

SEQ ID NO: 5990399 - DNA, 25 bp, Homo sapien
gaattggacgctaagttgaaagaat

SEQ ID NO: 5990400 - DNA, 25 bp, Homo sapien
acgaggcttttgaaattgccacgag

SEQ ID NO: 5990401 - DNA, 25 bp, Homo sapien
ttgccattgcgtattaacgaggctt

SEQ ID NO: 5990402 - DNA, 25 bp, Homo sapien
atcagtagctctcgcgcagcgcttt

SEQ ID NO: 5990403 - DNA, 25 bp, Homo sapien
gataaattcaacttcgttcttccaa

SEQ ID NO: 5990404 - DNA, 25 bp, Homo sapien
atggatacctctttcgtcggtttaa

SEQ ID NO: 5990405 - DNA, 25 bp, Homo sapien
ttctaaattcgctccagaagctcgt

SEQ ID NO: 5990406 - DNA, 25 bp, Homo sapien
cgtctccattaccagcctctaaaag

SEQ ID NO: 5990407 - DNA, 25 bp, Homo sapien
tacgaacatcgttattcccacacac

SEQ ID NO: 5990408 - DNA, 25 bp, Homo sapien
ctgggccaggtgccaccaatgtcgt

SEQ ID NO: 5990409 - DNA, 25 bp, Homo sapien
tgacgcatcctttaacatgactcta

SEQ ID NO: 5990410 - DNA, 25 bp, Homo sapien
ataacagtgataaattcaacttcgt

SEQ ID NO: 5990411 - DNA, 25 bp, Homo sapien
tttaactggtggtcaaatatttaac

SEQ ID NO: 5990412 - DNA, 25 bp, Homo sapien
tgctacgaccaatctgggcaaaatg

SEQ ID NO: 5990413 - DNA, 25 bp, Homo sapien
gttcctgttttgccaatggtggcag

SEQ ID NO: 5990414 - DNA, 25 bp, Homo sapien
catgagatcagtagctctcgcgcag

SEQ ID NO: 5990415 - DNA, 25 bp, Homo sapien
tatttggttatccaggtggtgctat

SEQ ID NO: 5990416 - DNA, 25 bp, Homo sapien
ggttgccaacgacacaggaagacat

SEQ ID NO: 5990417 - DNA, 25 bp, Homo sapien
cattcgaccaagaagatccaaaatc

SEQ ID NO: 5990418 - DNA, 25 bp, Homo sapien
aggatgttacagcagctatcttaag

SEQ ID NO: 5990419 - DNA, 25 bp, Homo sapien
tggagaaatccacatactttcatca

SEQ ID NO: 5990420 - DNA, 25 bp, Homo sapien
atggcagatgcctttgcagacggga

SEQ ID NO: 5990421 - DNA, 25 bp, Homo sapien
gtctttacagggcaagtcccaacta

SEQ ID NO: 5990422 - DNA, 25 bp, Homo sapien
catatagcataccgcaacacacctg

SEQ ID NO: 5990423 - DNA, 25 bp, Homo sapien
gtctccctgccgccatcggtgctca

SEQ ID NO: 5990424 - DNA, 25 bp, Homo sapien
attgcagttggtgctagattcgacg

SEQ ID NO: 5990425 - DNA, 25 bp, Homo sapien
tgccaacctggcagtgcaaaatgcc

SEQ ID NO: 5990426 - DNA, 25 bp, Homo sapien
aaggtttaagagtcaagaagcaaga

SEQ ID NO: 5990427 - DNA, 25 bp, Homo sapien
gccgccatcggtgctcaagttgcaa

SEQ ID NO: 5990428 - DNA, 25 bp, Homo sapien
tactttcatcacatcaggtggttta

SEQ ID NO: 5990429 - DNA, 25 bp, Homo sapien
caaagtatcaataaagcagcagatt

SEQ ID NO: 5990430 - DNA, 25 bp, Homo sapien
gaatctttggttattgacattgatg

SEQ ID NO: 5990431 - DNA, 25 bp, Homo sapien
ttcatttcgaggttagtccaaaaaa

SEQ ID NO: 5990432 - DNA, 25 bp, Homo sapien
tgatttcataaaactagcggaggct

SEQ ID NO: 5990433 - DNA, 25 bp, Homo sapien
tgcgtctccattaccagcctctaaa

SEQ ID NO: 5990434 - DNA, 25 bp, Homo sapien
agacaatctacgctaaaaaacttcg

SEQ ID NO: 5990435 - DNA, 25 bp, Homo sapien
aactatccaaggttgccaacgacac

SEQ ID NO: 5990436 - DNA, 25 bp, Homo sapien
caacactggacatggagaaatccac

SEQ ID NO: 5990437 - DNA, 25 bp, Homo sapien
atcattggatatgcttggtatgcac

SEQ ID NO: 5990438 - DNA, 25 bp, Homo sapien
actgtatttggttatccaggtggtg

SEQ ID NO: 5990439 - DNA, 25 bp, Homo sapien
tttcaacatatagcataccgcaaca

SEQ ID NO: 5990440 - DNA, 25 bp, Homo sapien
gttgcaaagccagaatctttggtta

SEQ ID NO: 5990441 - DNA, 25 bp, Homo sapien
tcgttattcccacacacatcaattg

SEQ ID NO: 5990442 - DNA, 25 bp, Homo sapien
tgagcctgacatggatacctctttc

SEQ ID NO: 5990443 - DNA, 25 bp, Homo sapien
gaccagtcttggtcgatttaccaaa

SEQ ID NO: 5990444 - DNA, 25 bp, Homo sapien
cacgaacaaggtgccggtcacatgg

SEQ ID NO: 5990445 - DNA, 25 bp, Homo sapien
cattggatatgcttggtatgcacgg

SEQ ID NO: 5990446 - DNA, 25 bp, Homo sapien
tgtcattgttacaacgggtgtgggg

SEQ ID NO: 5990447 - DNA, 25 bp, Homo sapien
tgcaaagtatcaataaagcagcaga

SEQ ID NO: 5990448 - DNA, 25 bp, Homo sapien
aaggagaggtctgaatggtttgctc

SEQ ID NO: 5990449 - DNA, 25 bp, Homo sapien
cgctaagttgaaagaattcgtttct

SEQ ID NO: 5990450 - DNA, 25 bp, Homo sapien
cactggtaatatttctaaattcgct

SEQ ID NO: 5990451 - DNA, 25 bp, Homo sapien
cgagggtagaggtggtattattcat

SEQ ID NO: 5990452 - DNA, 25 bp, Homo sapien
gctgctcaacactggacatggagaa

SEQ ID NO: 5990453 - DNA, 25 bp, Homo sapien
aattcaacttcgttcttccaaaaca

SEQ ID NO: 5990454 - DNA, 25 bp, Homo sapien
catcaaacgcactaaaccaattaac

SEQ ID NO: 5990455 - DNA, 25 bp, Homo sapien
cctgacatggatacctctttcgtcg

SEQ ID NO: 5990456 - DNA, 25 bp, Homo sapien
tgtccagacaaaacgttgatactgt

SEQ ID NO: 5990457 - DNA, 25 bp, Homo sapien
acactggacatggagaaatccacat

SEQ ID NO: 5990458 - DNA, 25 bp, Homo sapien
gctgagcctgacatggatacctctt

SEQ ID NO: 5990459 - DNA, 25 bp, Homo sapien
aagaaatccaattccaacaaaaaca

SEQ ID NO: 5990460 - DNA, 25 bp, Homo sapien
ttaagtgaccgtgctcaaatacctg

SEQ ID NO: 5990461 - DNA, 25 bp, Homo sapien
ctactgccaacctggcagtgcaaaa

SEQ ID NO: 5990462 - DNA, 25 bp, Homo sapien
ggcttttgaaattgccacgagcggt

SEQ ID NO: 5990463 - DNA, 25 bp, Homo sapien
atgactctaacggaattgagttctg

SEQ ID NO: 5990464 - DNA, 25 bp, Homo sapien
tttaacatgactctaacggaattga

SEQ ID NO: 5990465 - DNA, 25 bp, Homo sapien
tcttccaaaacacgaacaaggtgcc

SEQ ID NO: 5990466 - DNA, 25 bp, Homo sapien
cgcaacacacctgccatgagatcag

SEQ ID NO: 5990467 - DNA, 25 bp, Homo sapien
gttgtcttggttacttctgggccag

SEQ ID NO: 5990468 - DNA, 25 bp, Homo sapien
tcataagcgtacaggcggtaagcac

SEQ ID NO: 5990469 - DNA, 25 bp, Homo sapien
ctgccatgagatcagtagctctcgc

SEQ ID NO: 5990470 - DNA, 25 bp, Homo sapien
ttcataaaactagcggaggctatgg

SEQ ID NO: 5990471 - DNA, 25 bp, Homo sapien
accaagaagatccaaaatcattgga

SEQ ID NO: 5990472 - DNA, 25 bp, Homo sapien
atggttgtctttacagggcaagtcc

SEQ ID NO: 5990473 - DNA, 25 bp, Homo sapien
ttctggtaaaccaggtgttgtcttg

SEQ ID NO: 5990474 - DNA, 25 bp, Homo sapien
accaagggcccagttttgcttgaag

SEQ ID NO: 5990475 - DNA, 25 bp, Homo sapien
cgctattaagcgttgctttcaacat

SEQ ID NO: 5990476 - DNA, 25 bp, Homo sapien
cggtctccctgccgccatcggtgct

SEQ ID NO: 5990477 - DNA, 25 bp, Homo sapien
tggaggagactccaggatctaaaat

SEQ ID NO: 5990478 - DNA, 25 bp, Homo sapien
agctcgtcgtgcagctgccgagggt

SEQ ID NO: 5990479 - DNA, 25 bp, Homo sapien
ggcaggtggtagcggtctagacgag

SEQ ID NO: 5990480 - DNA, 25 bp, Homo sapien
tttgcagacgggattccaatggttg

SEQ ID NO: 5990481 - DNA, 25 bp, Homo sapien
accttcaaaattggctaagaaacta

SEQ ID NO: 5990482 - DNA, 25 bp, Homo sapien
ctctcgcgcagcgcttttatagttc

SEQ ID NO: 5990483 - DNA, 25 bp, Homo sapien
tcaaaattggctaagaaactacgcg

SEQ ID NO: 5990484 - DNA, 25 bp, Homo sapien
aattaagtgaccgtgctcaaatacc

SEQ ID NO: 5990485 - DNA, 25 bp, Homo sapien
gaggcttttgaaattgccacgagcg

SEQ ID NO: 5990486 - DNA, 25 bp, Homo sapien
atcggtgctcaagttgcaaagccag

SEQ ID NO: 5990487 - DNA, 25 bp, Homo sapien
tgatactgtatttggttatccaggt

SEQ ID NO: 5990488 - DNA, 25 bp, Homo sapien
ctttacagggcaagtcccaactagt

SEQ ID NO: 5990489 - DNA, 25 bp, Homo sapien
tgttacagcagctatcttaagaaat

SEQ ID NO: 5990490 - DNA, 25 bp, Homo sapien
gatgtcaaagattttcccagttaag

SEQ ID NO: 5990491 - DNA, 25 bp, Homo sapien
gtatcaataaagcagcagatttgat

SEQ ID NO: 5990492 - DNA, 25 bp, Homo sapien
gttttgccaatggtggcaggtggta

SEQ ID NO: 5990493 - DNA, 25 bp, Homo sapien
gaagctcgtcgtgcagctgccgagg

SEQ ID NO: 5990494 - DNA, 25 bp, Homo sapien
ctgccgttcaagctggtactccagt

SEQ ID NO: 5990495 - DNA, 25 bp, Homo sapien
gaaacctgtcttatacgtcggtgct

SEQ ID NO: 5990496 - DNA, 25 bp, Homo sapien
ccaccaatgtcgttactccaatggc

SEQ ID NO: 5990497 - DNA, 25 bp, Homo sapien
gtcaccactactttacaaggtttag

SEQ ID NO: 5990498 - DNA, 25 bp, Homo sapien
ttgcgtattaacgaggcttttgaaa

SEQ ID NO: 5990499 - DNA, 25 bp, Homo sapien
tacggtctccctgccgccatcggtg

SEQ ID NO: 5990500 - DNA, 25 bp, Homo sapien
attaacgaggcttttgaaattgcca

SEQ ID NO: 5990501 - DNA, 25 bp, Homo sapien
caaggtgccggtcacatggcagaag

SEQ ID NO: 5990502 - DNA, 25 bp, Homo sapien
aggtctgaatggtttgctcaaataa

SEQ ID NO: 5990503 - DNA, 25 bp, Homo sapien
aattgccattgcgtattaacgaggc

SEQ ID NO: 5990504 - DNA, 25 bp, Homo sapien
cgttactccaatggcagatgccttt

SEQ ID NO: 5990505 - DNA, 25 bp, Homo sapien
attccaacaaaaacaactcttccat

SEQ ID NO: 5990506 - DNA, 25 bp, Homo sapien
atcaggtggtttaggtacgatgggt

SEQ ID NO: 5990507 - DNA, 25 bp, Homo sapien
cgtcataagcgtacaggcggtaagc

SEQ ID NO: 5990508 - DNA, 25 bp, Homo sapien
ggtaatatttctaaattcgctccag

SEQ ID NO: 5990509 - DNA, 25 bp, Homo sapien
cgacttgataattgcagttggtgct

SEQ ID NO: 5990510 - DNA, 25 bp, Homo sapien
gaccgtgctcaaatacctgtcacca

SEQ ID NO: 5990511 - DNA, 25 bp, Homo sapien
aaggccagagcctgctccaagtttc

SEQ ID NO: 5990512 - DNA, 25 bp, Homo sapien
aaggtttaggttcattcgaccaaga

SEQ ID NO: 5990513 - DNA, 25 bp, Homo sapien
agattactaaaagaattaagtgacc

SEQ ID NO: 5990514 - DNA, 25 bp, Homo sapien
ctccctgccgccatcggtgctcaag

SEQ ID NO: 5990515 - DNA, 25 bp, Homo sapien
acgcatcctttaacatgactctaac

SEQ ID NO: 5990516 - DNA, 25 bp, Homo sapien
agagcctgctccaagtttcaatgtt

SEQ ID NO: 5990517 - DNA, 25 bp, Homo sapien
gaaatggaatgtcatggtcaagtcc

SEQ ID NO: 5990518 - DNA, 25 bp, Homo sapien
cagtcgcgcacaagatgaatttgtc

SEQ ID NO: 5990519 - DNA, 25 bp, Homo sapien
gacaaaacgttgatactgtatttgg

SEQ ID NO: 5990520 - DNA, 25 bp, Homo sapien
ctatccaaggttgccaacgacacag

SEQ ID NO: 5990521 - DNA, 25 bp, Homo sapien
agggtagaggtggtattattcattt

SEQ ID NO: 5990522 - DNA, 25 bp, Homo sapien
ataaagcagcagatttgatcaactt

SEQ ID NO: 5990523 - DNA, 25 bp, Homo sapien
ctacgccagagcttctggtaaacca

SEQ ID NO: 5990524 - DNA, 25 bp, Homo sapien
ttcgaccaagaagatccaaaatcat

SEQ ID NO: 5990525 - DNA, 25 bp, Homo sapien
gacacaggaagacatgtcattgtta

SEQ ID NO: 5990526 - DNA, 25 bp, Homo sapien
tggcagaaggctacgccagagcttc

SEQ ID NO: 5990527 - DNA, 25 bp, Homo sapien
gagcttctggtaaaccaggtgttgt

SEQ ID NO: 5990528 - DNA, 25 bp, Homo sapien
gtattaacgaggcttttgaaattgc

SEQ ID NO: 5990529 - DNA, 25 bp, Homo sapien
agtcccaactagtgctatcggtact

SEQ ID NO: 5990530 - DNA, 25 bp, Homo sapien
gccaggtgccaccaatgtcgttact

SEQ ID NO: 5990531 - DNA, 25 bp, Homo sapien
cacatggcagaaggctacgccagag

SEQ ID NO: 5990532 - DNA, 25 bp, Homo sapien
ctcaacactggacatggagaaatcc

SEQ ID NO: 5990533 - DNA, 25 bp, Homo sapien
gaagaattgccattgcgtattaacg

SEQ ID NO: 5990534 - DNA, 25 bp, Homo sapien
atggcaatccctgttctacgaacat

SEQ ID NO: 5990535 - DNA, 25 bp, Homo sapien
gtgctatcctacctgtttacgatgc

SEQ ID NO: 5990536 - DNA, 25 bp, Homo sapien
tgcaaagccagaatctttggttatt

SEQ ID NO: 5990537 - DNA, 25 bp, Homo sapien
tatagttcgtcttcccgttattaca

SEQ ID NO: 5990538 - DNA, 25 bp, Homo sapien
accagtcgcgcacaagatgaatttg

SEQ ID NO: 5990539 - DNA, 25 bp, Homo sapien
agtgaagattttgattttgaacaat

SEQ ID NO: 5990540 - DNA, 25 bp, Homo sapien
taaaactagcggaggctatgggttt

SEQ ID NO: 5990541 - DNA, 25 bp, Homo sapien
ctttacaaggtttaggttcattcga

SEQ ID NO: 5990542 - DNA, 25 bp, Homo sapien
tccattaccagcctctaaaaggcca

SEQ ID NO: 5990543 - DNA, 25 bp, Homo sapien
cagaagctcgtcgtgcagctgccga

SEQ ID NO: 5990544 - DNA, 25 bp, Homo sapien
cgttggtatttctagatcttgtacg

SEQ ID NO: 5990545 - DNA, 25 bp, Homo sapien
atacctgtcaccactactttacaag

SEQ ID NO: 5990546 - DNA, 25 bp, Homo sapien
catacgcttatatggaggagactcc

SEQ ID NO: 5990547 - DNA, 25 bp, Homo sapien
gaaatccaattccaacaaaaacaac

SEQ ID NO: 5990548 - DNA, 25 bp, Homo sapien
gtgccggtcacatggcagaaggcta

SEQ ID NO: 5990549 - DNA, 25 bp, Homo sapien
tgcagttggtgctagattcgacgac

SEQ ID NO: 5990550 - DNA, 25 bp, Homo sapien
acgaaatggaatgtcatggtcaagt

SEQ ID NO: 5990551 - DNA, 25 bp, Homo sapien
ctctaaaaggccagagcctgctcca

SEQ ID NO: 5990552 - DNA, 25 bp, Homo sapien
gttcgtcttcccgttattacagtgc

SEQ ID NO: 5990553 - DNA, 25 bp, Homo sapien
aactagtgctatcggtactgatgct

SEQ ID NO: 5990554 - DNA, 25 bp, Homo sapien
attccaatggttgtctttacagggc

SEQ ID NO: 5990555 - DNA, 25 bp, Homo sapien
tgctcaacactggacatggagaaat

SEQ ID NO: 5990556 - DNA, 25 bp, Homo sapien
gtacgaaatggaatgtcatggtcaa

SEQ ID NO: 5990557 - DNA, 25 bp, Homo sapien
tcgtcggtttaactggtggtcaaat

SEQ ID NO: 5990558 - DNA, 25 bp, Homo sapien
agaggctgacgtcgttggtatttct

SEQ ID NO: 5990559 - DNA, 25 bp, Homo sapien
gaaggtgatgctacgaccaatctgg

SEQ ID NO: 5990560 - DNA, 25 bp, Homo sapien
cttatatggaggagactccaggatc

SEQ ID NO: 5990561 - DNA, 25 bp, Homo sapien
agtgctatcggtactgatgctttcc

SEQ ID NO: 5990562 - DNA, 25 bp, Homo sapien
tgatggtgacgcatcctttaacatg

SEQ ID NO: 5990563 - DNA, 25 bp, Homo sapien
tcataacagtgataaattcaacttc

SEQ ID NO: 5990564 - DNA, 25 bp, Homo sapien
ccgtgtcactggtaatatttctaaa

SEQ ID NO: 5990565 - DNA, 25 bp, Homo sapien
gttactcaatggcaatccctgttct

SEQ ID NO: 5990566 - DNA, 25 bp, Homo sapien
taggtacgatgggttacggtctccc

SEQ ID NO: 5990567 - DNA, 25 bp, Homo sapien
taagagtcaagaagcaagaggaatt

SEQ ID NO: 5990568 - DNA, 25 bp, Homo sapien
gccgttcaagctggtactccagtga

SEQ ID NO: 5990569 - DNA, 25 bp, Homo sapien
aataaatggaagaaggaatacccat

SEQ ID NO: 5990570 - DNA, 25 bp, Homo sapien
cagacaaaacgttgatactgtattt

SEQ ID NO: 5990571 - DNA, 25 bp, Homo sapien
caattaaccagtcgcgcacaagatg

SEQ ID NO: 5990572 - DNA, 25 bp, Homo sapien
gcatcctttaacatgactctaacgg

SEQ ID NO: 5990573 - DNA, 25 bp, Homo sapien
tatagcataccgcaacacacctgcc

SEQ ID NO: 5990574 - DNA, 25 bp, Homo sapien
tgcttgaagtggaagttgataaaaa

SEQ ID NO: 5990575 - DNA, 25 bp, Homo sapien
gatttaccaaaggatgttacagcag

SEQ ID NO: 5990576 - DNA, 25 bp, Homo sapien
taaagaaactatccaaggttgccaa

SEQ ID NO: 5990577 - DNA, 25 bp, Homo sapien
ctcaaatagcagtggaaggtgatgc

SEQ ID NO: 5990578 - DNA, 25 bp, Homo sapien
caagggcccagttttgcttgaagtg

SEQ ID NO: 5990579 - DNA, 25 bp, Homo sapien
actagcggaggctatgggtttaaaa

SEQ ID NO: 5990580 - DNA, 25 bp, Homo sapien
tcattgttacaacgggtgtggggca

SEQ ID NO: 5990581 - DNA, 25 bp, Homo sapien
ggtagaggtggtattattcatttcg

SEQ ID NO: 5990582 - DNA, 25 bp, Homo sapien
acgttgatactgtatttggttatcc

SEQ ID NO: 5990583 - DNA, 25 bp, Homo sapien
acccagaagttgaaagacaacagac

SEQ ID NO: 5990584 - DNA, 25 bp, Homo sapien
caaaaaacataaacaaggttgttca

SEQ ID NO: 5990585 - DNA, 25 bp, Homo sapien
acagtgcgtctccattaccagcctc

SEQ ID NO: 5990586 - DNA, 25 bp, Homo sapien
ttgctttcaacatatagcataccgc

SEQ ID NO: 5990587 - DNA, 25 bp, Homo sapien
aaattcgctccagaagctcgtcgtg

SEQ ID NO: 5990588 - DNA, 25 bp, Homo sapien
atgggttacggtctccctgccgcca

SEQ ID NO: 5990589 - DNA, 25 bp, Homo sapien
gtcacatggcagaaggctacgccag

SEQ ID NO: 5990590 - DNA, 25 bp, Homo sapien
ggtggtattattcatttcgaggtta

SEQ ID NO: 5990591 - DNA, 25 bp, Homo sapien
tccagaagctcgtcgtgcagctgcc

SEQ ID NO: 5990592 - DNA, 25 bp, Homo sapien
cgtcgtgcagctgccgagggtagag

SEQ ID NO: 5990593 - DNA, 25 bp, Homo sapien
tgtggggcaacatcaaatgtgggct

SEQ ID NO: 5990594 - DNA, 25 bp, Homo sapien
tctgggcaaaatgatgtcaaagatt

SEQ ID NO: 5990595 - DNA, 25 bp, Homo sapien
aagtttcaatgttgatccattagaa

SEQ ID NO: 5990596 - DNA, 25 bp, Homo sapien
atttaacgaaatgatgtccagacaa

SEQ ID NO: 5990597 - DNA, 25 bp, Homo sapien
aatggaatgtcatggtcaagtccgt

SEQ ID NO: 5990598 - DNA, 25 bp, Homo sapien
acacacctgccatgagatcagtagc

SEQ ID NO: 5990599 - DNA, 25 bp, Homo sapien
atatttaacgaaatgatgtccagac

SEQ ID NO: 5990600 - DNA, 25 bp, Homo sapien
atgatcagacaatctacgctaaaaa

SEQ ID NO: 5990601 - DNA, 25 bp, Homo sapien
gtgctcaaatacctgtcaccactac

SEQ ID NO: 5990602 - DNA, 25 bp, Homo sapien
atactgtatttggttatccaggtgg

SEQ ID NO: 5990603 - DNA, 25 bp, Homo sapien
ttgaaccctgatttcataaaactag

SEQ ID NO: 5990604 - DNA, 25 bp, Homo sapien
aaatgatgtcaaagattttcccagt

SEQ ID NO: 5990605 - DNA, 25 bp, Homo sapien
cacatactttcatcacatcaggtgg

SEQ ID NO: 5990606 - DNA, 25 bp, Homo sapien
acgcgctgagcctgacatggatacc

SEQ ID NO: 5990607 - DNA, 25 bp, Homo sapien
tactttacaaggtttaggttcattc

SEQ ID NO: 5990608 - DNA, 25 bp, Homo sapien
tatatggaggagactccaggatcta

SEQ ID NO: 5990609 - DNA, 25 bp, Homo sapien
acatcaggtggtttaggtacgatgg

SEQ ID NO: 5990610 - DNA, 25 bp, Homo sapien
atttgtcatgcaaagtatcaataaa

SEQ ID NO: 5990611 - DNA, 25 bp, Homo sapien
taaaagaattaagtgaccgtgctca

SEQ ID NO: 5990612 - DNA, 25 bp, Homo sapien
tacccatacgcttatatggaggaga

SEQ ID NO: 5990613 - DNA, 25 bp, Homo sapien
attcgctccagaagctcgtcgtgca

SEQ ID NO: 5990614 - DNA, 25 bp, Homo sapien
gtattttaaaccatgcagatggtcc

SEQ ID NO: 5990615 - DNA, 25 bp, Homo sapien
ggagaggtctgaatggtttgctcaa

SEQ ID NO: 5990616 - DNA, 25 bp, Homo sapien
tctccattaccagcctctaaaaggc

SEQ ID NO: 5990617 - DNA, 25 bp, Homo sapien
tatcttaagaaatccaattccaaca

SEQ ID NO: 5990618 - DNA, 25 bp, Homo sapien
agtcaagaagcaagaggaattggac

SEQ ID NO: 5990619 - DNA, 25 bp, Homo sapien
ggtatggttactcaatggcaatccc

SEQ ID NO: 5990620 - DNA, 25 bp, Homo sapien
tggtgctagattcgacgaccgtgtc

SEQ ID NO: 5990621 - DNA, 25 bp, Homo sapien
tcttaagaaatccaattccaacaaa

SEQ ID NO: 5990622 - DNA, 25 bp, Homo sapien
cattgcgtattaacgaggcttttga

SEQ ID NO: 5990623 - DNA, 25 bp, Homo sapien
gcttttatagttcgtcttcccgtta

SEQ ID NO: 5990624 - DNA, 25 bp, Homo sapien
ttactccaatggcagatgcctttgc

SEQ ID NO: 5990625 - DNA, 25 bp, Homo sapien
tctacgctaaaaaacttcgctatta

SEQ ID NO: 5990626 - DNA, 25 bp, Homo sapien
tagaccgggaccagtcttggtcgat

SEQ ID NO: 5990627 - DNA, 25 bp, Homo sapien
ttatacgtcggtgctggtattttaa

SEQ ID NO: 5990628 - DNA, 25 bp, Homo sapien
aactcaaatagcagtggaaggtgat

SEQ ID NO: 5990629 - DNA, 25 bp, Homo sapien
ctatcggtactgatgctttccaaga

SEQ ID NO: 5990630 - DNA, 25 bp, Homo sapien
tcaattgaaccctgatttcataaaa

SEQ ID NO: 5990631 - DNA, 25 bp, Homo sapien
cacacacatcaattgaaccctgatt

SEQ ID NO: 5990632 - DNA, 25 bp, Homo sapien
gataattgcagttggtgctagattc

SEQ ID NO: 5990633 - DNA, 25 bp, Homo sapien
tggtggtcaaatatttaacgaaatg

SEQ ID NO: 5990634 - DNA, 25 bp, Homo sapien
gacggttataaagaaactatccaag

SEQ ID NO: 5990635 - DNA, 25 bp, Homo sapien
aatccacatactttcatcacatcag

SEQ ID NO: 5990636 - DNA, 25 bp, Homo sapien
gttgaaagaattcgtttctaccaag

SEQ ID NO: 5990637 - DNA, 25 bp, Homo sapien
acgaccgtgtcactggtaatatttc

SEQ ID NO: 5990638 - DNA, 25 bp, Homo sapien
gcgcttttatagttcgtcttcccgt

SEQ ID NO: 5990639 - DNA, 25 bp, Homo sapien
gtgataaattcaacttcgttcttcc

SEQ ID NO: 5990640 - DNA, 25 bp, Homo sapien
cagtagctctcgcgcagcgctttta

SEQ ID NO: 5990641 - DNA, 25 bp, Homo sapien
gaccgtgtcactggtaatatttcta

SEQ ID NO: 5990642 - DNA, 25 bp, Homo sapien
gcagctgccgagggtagaggtggta

SEQ ID NO: 5990643 - DNA, 25 bp, Homo sapien
gcagatttgatcaacttggcaaaga

SEQ ID NO: 5990644 - DNA, 25 bp, Homo sapien
gttgttcaaactcaaatagcagtgg

SEQ ID NO: 5990645 - DNA, 25 bp, Homo sapien
tgcaaaatgccgacttgataattgc

SEQ ID NO: 5990646 - DNA, 25 bp, Homo sapien
aggtgttgtcttggttacttctggg

SEQ ID NO: 5990647 - DNA, 25 bp, Homo sapien
tgcacggttgtgctactgccaacct

SEQ ID NO: 5990648 - DNA, 25 bp, Homo sapien
aattggctaagaaactacgcgctga

SEQ ID NO: 5990649 - DNA, 25 bp, Homo sapien
ataagcgtacaggcggtaagcactg

SEQ ID NO: 5990650 - DNA, 25 bp, Homo sapien
aagtgaccgtgctcaaatacctgtc

SEQ ID NO: 5990651 - DNA, 25 bp, Homo sapien
atccattagaacagcccgctgaacc

SEQ ID NO: 5990652 - DNA, 25 bp, Homo sapien
tagcagtggaaggtgatgctacgac

SEQ ID NO: 5990653 - DNA, 25 bp, Homo sapien
taatatttctaaattcgctccagaa

SEQ ID NO: 5990654 - DNA, 25 bp, Homo sapien
cacaagatgaatttgtcatgcaaag

SEQ ID NO: 5990655 - DNA, 25 bp, Homo sapien
gtcatggtcaagtccgtggaagaat

SEQ ID NO: 5990656 - DNA, 25 bp, Homo sapien
cgttgctttcaacatatagcatacc

SEQ ID NO: 5990657 - DNA, 25 bp, Homo sapien
cttggcaaagaaacctgtcttatac

SEQ ID NO: 5990658 - DNA, 25 bp, Homo sapien
acgtcggtgctggtattttaaacca

SEQ ID NO: 5990659 - DNA, 25 bp, Homo sapien
cgctaaaaaacttcgctattaagcg

SEQ ID NO: 5990660 - DNA, 25 bp, Homo sapien
agaaggaatacccatacgcttatat

SEQ ID NO: 5990661 - DNA, 25 bp, Homo sapien
cgatgggttacggtctccctgccgc

SEQ ID NO: 5990662 - DNA, 25 bp, Homo sapien
agaattgccattgcgtattaacgag

SEQ ID NO: 5990663 - DNA, 25 bp, Homo sapien
ctccaagtttcaatgttgatccatt

SEQ ID NO: 5990664 - DNA, 25 bp, Homo sapien
tataaagaaactatccaaggttgcc

SEQ ID NO: 5990665 - DNA, 25 bp, Homo sapien
gaacaatgaagagcaaggtatggtt

SEQ ID NO: 5990666 - DNA, 25 bp, Homo sapien
cataaacaaggttgttcaaactcaa

SEQ ID NO: 5990667 - DNA, 25 bp, Homo sapien
cagagcttctggtaaaccaggtgtt

SEQ ID NO: 5990668 - DNA, 25 bp, Homo sapien
tgatccattagaacagcccgctgaa

SEQ ID NO: 5990669 - DNA, 25 bp, Homo sapien
gtcatgcaaagtatcaataaagcag

SEQ ID NO: 5990670 - DNA, 25 bp, Homo sapien
tcaagaagcaagaggaattggacgc

SEQ ID NO: 5990671 - DNA, 25 bp, Homo sapien
gctccagaagctcgtcgtgcagctg

SEQ ID NO: 5990672 - DNA, 25 bp, Homo sapien
aaatgccgacttgataattgcagtt

SEQ ID NO: 5990673 - DNA, 25 bp, Homo sapien
acagcccgctgaaccttcaaaattg

SEQ ID NO: 5990674 - DNA, 25 bp, Homo sapien
acaaaaacaactcttccatcaaacg

SEQ ID NO: 5990675 - DNA, 25 bp, Homo sapien
gaaatccacatactttcatcacatc

SEQ ID NO: 5990676 - DNA, 25 bp, Homo sapien
ggcagatgcctttgcagacgggatt

SEQ ID NO: 5990677 - DNA, 25 bp, Homo sapien
ttacagcagctatcttaagaaatcc

SEQ ID NO: 5990678 - DNA, 25 bp, Homo sapien
gctatcttaagaaatccaattccaa

SEQ ID NO: 5990679 - DNA, 25 bp, Homo sapien
cgacgaccgtgtcactggtaatatt

SEQ ID NO: 5990680 - DNA, 25 bp, Homo sapien
agaagatccaaaatcattggatatg

SEQ ID NO: 5990681 - DNA, 25 bp, Homo sapien
tccagacaaaacgttgatactgtat

SEQ ID NO: 5990682 - DNA, 25 bp, Homo sapien
gttgatactgtatttggttatccag

SEQ ID NO: 5990683 - DNA, 25 bp, Homo sapien
cagttggtgctagattcgacgaccg

SEQ ID NO: 5990684 - DNA, 25 bp, Homo sapien
ccaaaacacgaacaaggtgccggtc

SEQ ID NO: 5990685 - DNA, 25 bp, Homo sapien
gaccgggaccagtcttggtcgattt

SEQ ID NO: 5990686 - DNA, 25 bp, Homo sapien
cgttcaagctggtactccagtgaag

SEQ ID NO: 5990687 - DNA, 25 bp, Homo sapien
attgttacaacgggtgtggggcaac

SEQ ID NO: 5990688 - DNA, 25 bp, Homo sapien
tgtcttatacgtcggtgctggtatt

SEQ ID NO: 5990689 - DNA, 25 bp, Homo sapien
acaactcttccatcaaacgcactaa

SEQ ID NO: 5990690 - DNA, 25 bp, Homo sapien
atgccgacttgataattgcagttgg

SEQ ID NO: 5990691 - DNA, 25 bp, Homo sapien
agaggaattggacgctaagttgaaa

SEQ ID NO: 5990692 - DNA, 25 bp, Homo sapien
caggtggtagcggtctagacgagtt

SEQ ID NO: 5990693 - DNA, 25 bp, Homo sapien
gtgctggtattttaaaccatgcaga

SEQ ID NO: 5990694 - DNA, 25 bp, Homo sapien
caaaacgttgatactgtatttggtt

SEQ ID NO: 5990695 - DNA, 25 bp, Homo sapien
gaggtggtattattcatttcgaggt

SEQ ID NO: 5990696 - DNA, 25 bp, Homo sapien
gttattacagtgcgtctccattacc

SEQ ID NO: 5990697 - DNA, 25 bp, Homo sapien
ctgttttgccaatggtggcaggtgg

SEQ ID NO: 5990698 - DNA, 25 bp, Homo sapien
tcaacatatagcataccgcaacaca

SEQ ID NO: 5990699 - DNA, 25 bp, Homo sapien
ttaaggagaggtctgaatggtttgc

SEQ ID NO: 5990700 - DNA, 25 bp, Homo sapien
tggttatccaggtggtgctatccta

SEQ ID NO: 5990701 - DNA, 25 bp, Homo sapien
ctgccgagggtagaggtggtattat

SEQ ID NO: 5990702 - DNA, 25 bp, Homo sapien
ccacgagcggtagaccgggaccagt

SEQ ID NO: 5990703 - DNA, 25 bp, Homo sapien
aaccaggtgttgtcttggttacttc

SEQ ID NO: 5990704 - DNA, 25 bp, Homo sapien
cgcagcgcttttatagttcgtcttc

SEQ ID NO: 5990705 - DNA, 25 bp, Homo sapien
agacgagttcataaattttgaccca

SEQ ID NO: 5990706 - DNA, 25 bp, Homo sapien
agtccgtggaagaattgccattgcg

SEQ ID NO: 5990707 - DNA, 25 bp, Homo sapien
tcgatttaccaaaggatgttacagc

SEQ ID NO: 5990708 - DNA, 25 bp, Homo sapien
gttgatccattagaacagcccgctg

SEQ ID NO: 5990709 - DNA, 25 bp, Homo sapien
caataaagcagcagatttgatcaac

SEQ ID NO: 5990710 - DNA, 25 bp, Homo sapien
aacatcaaatgtgggctgctcaaca

SEQ ID NO: 5990711 - DNA, 25 bp, Homo sapien
acctgccatgagatcagtagctctc

SEQ ID NO: 5990712 - DNA, 25 bp, Homo sapien
agaattcgtttctaccaagggccca

SEQ ID NO: 5990713 - DNA, 25 bp, Homo sapien
ttcgttcttccaaaacacgaacaag

SEQ ID NO: 5990714 - DNA, 25 bp, Homo sapien
gagttcataaattttgacccagaag

SEQ ID NO: 5990715 - DNA, 25 bp, Homo sapien
caggaagacatgtcattgttacaac

SEQ ID NO: 5990716 - DNA, 25 bp, Homo sapien
gcggtagaccgggaccagtcttggt

SEQ ID NO: 5990717 - DNA, 25 bp, Homo sapien
ttggtatttctagatcttgtacgaa

SEQ ID NO: 5990718 - DNA, 25 bp, Homo sapien
cgggattccaatggttgtctttaca

SEQ ID NO: 5990719 - DNA, 25 bp, Homo sapien
aaaattggctaagaaactacgcgct

SEQ ID NO: 5990720 - DNA, 25 bp, Homo sapien
ggaagacatgtcattgttacaacgg

SEQ ID NO: 5990721 - DNA, 25 bp, Homo sapien
caggtgccaccaatgtcgttactcc

SEQ ID NO: 5990722 - DNA, 25 bp, Homo sapien
acgagcggtagaccgggaccagtct

SEQ ID NO: 5990723 - DNA, 25 bp, Homo sapien
acttgataattgcagttggtgctag

SEQ ID NO: 5990724 - DNA, 25 bp, Homo sapien
agaattaagtgaccgtgctcaaata

SEQ ID NO: 5990725 - DNA, 25 bp, Homo sapien
cgcttatatggaggagactccagga

SEQ ID NO: 5990726 - DNA, 25 bp, Homo sapien
ctgccgccatcggtgctcaagttgc

SEQ ID NO: 5990727 - DNA, 25 bp, Homo sapien
cgaaatgatgtccagacaaaacgtt

SEQ ID NO: 5990728 - DNA, 25 bp, Homo sapien
gccagaatctttggttattgacatt

SEQ ID NO: 5990729 - DNA, 25 bp, Homo sapien
ctaaaaggccagagcctgctccaag

SEQ ID NO: 5990730 - DNA, 25 bp, Homo sapien
caacttcgttcttccaaaacacgaa

SEQ ID NO: 5990731 - DNA, 25 bp, Homo sapien
gcctctaaaaggccagagcctgctc

SEQ ID NO: 5990732 - DNA, 25 bp, Homo sapien
gcagtgcaaaatgccgacttgataa

SEQ ID NO: 5990733 - DNA, 25 bp, Homo sapien
agggcccagttttgcttgaagtgga

SEQ ID NO: 5990734 - DNA, 25 bp, Homo sapien
ccatcggtgctcaagttgcaaagcc

SEQ ID NO: 5990735 - DNA, 25 bp, Homo sapien
aaacgttgatactgtatttggttat

SEQ ID NO: 5990736 - DNA, 25 bp, Homo sapien
ttcaatgttgatccattagaacagc

SEQ ID NO: 5990737 - DNA, 25 bp, Homo sapien
tttgaaattgccacgagcggtagac

SEQ ID NO: 5990738 - DNA, 25 bp, Homo sapien
tctttcgtcggtttaactggtggtc

SEQ ID NO: 5990739 - DNA, 25 bp, Homo sapien
tcaaatatttaacgaaatgatgtcc

SEQ ID NO: 5990740 - DNA, 25 bp, Homo sapien
ttgataattgcagttggtgctagat

SEQ ID NO: 5990741 - DNA, 25 bp, Homo sapien
gaaccctgatttcataaaactagcg

SEQ ID NO: 5990742 - DNA, 25 bp, Homo sapien
caagatgaatttgtcatgcaaagta

SEQ ID NO: 5990743 - DNA, 25 bp, Homo sapien
ctggtactccagtgaagattttgat

SEQ ID NO: 5990744 - DNA, 25 bp, Homo sapien
ttttgattttgaacaatgaagagca

SEQ ID NO: 5990745 - DNA, 25 bp, Homo sapien
gcataccgcaacacacctgccatga

SEQ ID NO: 5990746 - DNA, 25 bp, Homo sapien
tcttgtacgaaatggaatgtcatgg

SEQ ID NO: 5990747 - DNA, 25 bp, Homo sapien
gaccaatctgggcaaaatgatgtca

SEQ ID NO: 5990748 - DNA, 25 bp, Homo sapien
ctacgaccaatctgggcaaaatgat

SEQ ID NO: 5990749 - DNA, 25 bp, Homo sapien
ctacgcgctgagcctgacatggata

SEQ ID NO: 5990750 - DNA, 25 bp, Homo sapien
gctagattcgacgaccgtgtcactg

SEQ ID NO: 5990751 - DNA, 25 bp, Homo sapien
tgtcaaagattttcccagttaagga

SEQ ID NO: 5990752 - DNA, 25 bp, Homo sapien
gccattgcgtattaacgaggctttt

SEQ ID NO: 5990753 - DNA, 25 bp, Homo sapien
agatttgatcaacttggcaaagaaa

SEQ ID NO: 5990754 - DNA, 25 bp, Homo sapien
taaaaaagttcctgttttgccaatg

SEQ ID NO: 5990755 - DNA, 25 bp, Homo sapien
agaggtctgaatggtttgctcaaat

SEQ ID NO: 5990756 - DNA, 25 bp, Homo sapien
acaatctacgctaaaaaacttcgct

SEQ ID NO: 5990757 - DNA, 25 bp, Homo sapien
ttacaacgggtgtggggcaacatca

SEQ ID NO: 5990758 - DNA, 25 bp, Homo sapien
tgctactgccaacctggcagtgcaa

SEQ ID NO: 5990759 - DNA, 25 bp, Homo sapien
aaaagttcctgttttgccaatggtg

SEQ ID NO: 5990760 - DNA, 25 bp, Homo sapien
tttatagttcgtcttcccgttatta

SEQ ID NO: 5990761 - DNA, 25 bp, Homo sapien
caggatctaaaattaaaccacagac

SEQ ID NO: 5990762 - DNA, 25 bp, Homo sapien
actgccaacctggcagtgcaaaatg

SEQ ID NO: 5990763 - DNA, 25 bp, Homo sapien
gttgtgctactgccaacctggcagt

SEQ ID NO: 5990764 - DNA, 25 bp, Homo sapien
ttactaaaagaattaagtgaccgtg

SEQ ID NO: 5990765 - DNA, 25 bp, Homo sapien
tgacatggatacctctttcgtcggt

SEQ ID NO: 5990766 - DNA, 25 bp, Homo sapien
gaattacgtcataagcgtacaggcg

SEQ ID NO: 5990767 - DNA, 25 bp, Homo sapien
ggccagagcctgctccaagtttcaa

SEQ ID NO: 5990768 - DNA, 25 bp, Homo sapien
acatggatacctctttcgtcggttt

SEQ ID NO: 5990769 - DNA, 25 bp, Homo sapien
gctcaagttgcaaagccagaatctt

SEQ ID NO: 5990770 - DNA, 25 bp, Homo sapien
ttggttattgacattgatggtgacg

SEQ ID NO: 5990771 - DNA, 25 bp, Homo sapien
gctggtattttaaaccatgcagatg

SEQ ID NO: 5990772 - DNA, 25 bp, Homo sapien
catactttcatcacatcaggtggtt

SEQ ID NO: 5990773 - DNA, 25 bp, Homo sapien
tgagttctgccgttcaagctggtac

SEQ ID NO: 5990774 - DNA, 25 bp, Homo sapien
agtgcaaaatgccgacttgataatt

SEQ ID NO: 5990775 - DNA, 25 bp, Homo sapien
ccaaggttgccaacgacacaggaag

SEQ ID NO: 5990776 - DNA, 25 bp, Homo sapien
tgccacgagcggtagaccgggacca

SEQ ID NO: 5990777 - DNA, 25 bp, Homo sapien
ttacaaggtttaggttcattcgacc

SEQ ID NO: 5990778 - DNA, 25 bp, Homo sapien
taacatgactctaacggaattgagt

SEQ ID NO: 5990779 - DNA, 25 bp, Homo sapien
ggtacgatgggttacggtctccctg

SEQ ID NO: 5990780 - DNA, 25 bp, Homo sapien
tagaggtggtattattcatttcgag

SEQ ID NO: 5990781 - DNA, 25 bp, Homo sapien
tacgatgggttacggtctccctgcc

SEQ ID NO: 5990782 - DNA, 25 bp, Homo sapien
cagttttgcttgaagtggaagttga

SEQ ID NO: 5990783 - DNA, 25 bp, Homo sapien
aacaaggttgttcaaactcaaatag

SEQ ID NO: 5990784 - DNA, 25 bp, Homo sapien
aacgggtgtggggcaacatcaaatg

SEQ ID NO: 5990785 - DNA, 25 bp, Homo sapien
atgtcatggtcaagtccgtggaaga

SEQ ID NO: 5990786 - DNA, 25 bp, Homo sapien
aaggaatacccatacgcttatatgg

SEQ ID NO: 5990787 - DNA, 25 bp, Homo sapien
gacctctccttaactgggaaaatct

SEQ ID NO: 5990788 - DNA, 25 bp, Homo sapien
ctgatgtgatgaaagtatgtggatt

SEQ ID NO: 5990789 - DNA, 25 bp, Homo sapien
gcttaccgcctgtacgcttatgacg

SEQ ID NO: 5990790 - DNA, 25 bp, Homo sapien
aacacctggtttaccagaagctctg

SEQ ID NO: 5990791 - DNA, 25 bp, Homo sapien
cttggatagtttctttataaccgtc

SEQ ID NO: 5990792 - DNA, 25 bp, Homo sapien
gacaggtttctttgccaagttgatc

SEQ ID NO: 5990793 - DNA, 25 bp, Homo sapien
cctcttggaaagcatcagtaccgat

SEQ ID NO: 5990794 - DNA, 25 bp, Homo sapien
ctgtgtcgttggcaaccttggatag

SEQ ID NO: 5990795 - DNA, 25 bp, Homo sapien
cgttaatacgcaatggcaattcttc

SEQ ID NO: 5990796 - DNA, 25 bp, Homo sapien
ttggcaaccttggatagtttcttta

SEQ ID NO: 5990797 - DNA, 25 bp, Homo sapien
ttgagcaaaccattcagacctctcc

SEQ ID NO: 5990798 - DNA, 25 bp, Homo sapien
tttatgttttttggactaacctcga

SEQ ID NO: 5990799 - DNA, 25 bp, Homo sapien
tttggtaaatcgaccaagactggtc

SEQ ID NO: 5990800 - DNA, 25 bp, Homo sapien
aaccgtgcataccaagcatatccaa

SEQ ID NO: 5990801 - DNA, 25 bp, Homo sapien
atgttcgtagaacagggattgccat

SEQ ID NO: 5990802 - DNA, 25 bp, Homo sapien
gaaagaggtatccatgtcaggctca

SEQ ID NO: 5990803 - DNA, 25 bp, Homo sapien
tatgaatggcatcgtaaacaggtag

SEQ ID NO: 5990804 - DNA, 25 bp, Homo sapien
gaactcaattccgttagagtcatgt

SEQ ID NO: 5990805 - DNA, 25 bp, Homo sapien
tctttataaccgtctgtggtttaat

SEQ ID NO: 5990806 - DNA, 25 bp, Homo sapien
gatactttgcatgacaaattcatct

SEQ ID NO: 5990807 - DNA, 25 bp, Homo sapien
accattggaatcccgtctgcaaagg

SEQ ID NO: 5990808 - DNA, 25 bp, Homo sapien
acatcctttggtaaatcgaccaaga

SEQ ID NO: 5990809 - DNA, 25 bp, Homo sapien
caaccttggatagtttctttataac

SEQ ID NO: 5990810 - DNA, 25 bp, Homo sapien
cttagccaattttgaaggttcagcg

SEQ ID NO: 5990811 - DNA, 25 bp, Homo sapien
ccatttatttatttgagcaaaccat

SEQ ID NO: 5990812 - DNA, 25 bp, Homo sapien
atagcgaagttttttagcgtagatt

SEQ ID NO: 5990813 - DNA, 25 bp, Homo sapien
gttgatcaaatctgctgctttattg

SEQ ID NO: 5990814 - DNA, 25 bp, Homo sapien
ataagacaggtttctttgccaagtt

SEQ ID NO: 5990815 - DNA, 25 bp, Homo sapien
aaaagcctcgttaatacgcaatggc

SEQ ID NO: 5990816 - DNA, 25 bp, Homo sapien
ccatgtgaccggcaccttgttcgtg

SEQ ID NO: 5990817 - DNA, 25 bp, Homo sapien
aactcgtctagaccgctaccacctg

SEQ ID NO: 5990818 - DNA, 25 bp, Homo sapien
aaataccaacgacgtcagcctcttg

SEQ ID NO: 5990819 - DNA, 25 bp, Homo sapien
taaccgtctgtggtttaattttaga

SEQ ID NO: 5990820 - DNA, 25 bp, Homo sapien
agcaccacctggataaccaaataca

SEQ ID NO: 5990821 - DNA, 25 bp, Homo sapien
ggtcgaatgaacctaaaccttgtaa

SEQ ID NO: 5990822 - DNA, 25 bp, Homo sapien
tatttgagcacggtcacttaattct

SEQ ID NO: 5990823 - DNA, 25 bp, Homo sapien
tataaaagcgctgcgcgagagctac

SEQ ID NO: 5990824 - DNA, 25 bp, Homo sapien
tgcgtcaccatcaatgtcaataacc

SEQ ID NO: 5990825 - DNA, 25 bp, Homo sapien
gttaattggtttagtgcgtttgatg

SEQ ID NO: 5990826 - DNA, 25 bp, Homo sapien
tctgctgctttattgatactttgca

SEQ ID NO: 5990827 - DNA, 25 bp, Homo sapien
cgacgtataagacaggtttctttgc

SEQ ID NO: 5990828 - DNA, 25 bp, Homo sapien
acatgtcttcctgtgtcgttggcaa

SEQ ID NO: 5990829 - DNA, 25 bp, Homo sapien
ctccatgtccagtgttgagcagccc

SEQ ID NO: 5990830 - DNA, 25 bp, Homo sapien
ttggaatcccgtctgcaaaggcatc

SEQ ID NO: 5990831 - DNA, 25 bp, Homo sapien
acgtaattcagtctgttgtctttca

SEQ ID NO: 5990832 - DNA, 25 bp, Homo sapien
cagaactcaattccgttagagtcat

SEQ ID NO: 5990833 - DNA, 25 bp, Homo sapien
tttttatcaacttccacttcaagca

SEQ ID NO: 5990834 - DNA, 25 bp, Homo sapien
agtggtgacaggtatttgagcacgg

SEQ ID NO: 5990835 - DNA, 25 bp, Homo sapien
gcacaaccgtgcataccaagcatat

SEQ ID NO: 5990836 - DNA, 25 bp, Homo sapien
tggtcccggtctaccgctcgtggca

SEQ ID NO: 5990837 - DNA, 25 bp, Homo sapien
cgttttgtctggacatcatttcgtt

SEQ ID NO: 5990838 - DNA, 25 bp, Homo sapien
caattcttccacggacttgaccatg

SEQ ID NO: 5990839 - DNA, 25 bp, Homo sapien
accatcaatgtcaataaccaaagat

SEQ ID NO: 5990840 - DNA, 25 bp, Homo sapien
ttccgttagagtcatgttaaaggat

SEQ ID NO: 5990841 - DNA, 25 bp, Homo sapien
tagaaatattaccagtgacacggtc

SEQ ID NO: 5990842 - DNA, 25 bp, Homo sapien
gggaagacgaactataaaagcgctg

SEQ ID NO: 5990843 - DNA, 25 bp, Homo sapien
ttgcactgccaggttggcagtagca

SEQ ID NO: 5990844 - DNA, 25 bp, Homo sapien
gttcgtagaacagggattgccattg

SEQ ID NO: 5990845 - DNA, 25 bp, Homo sapien
aattggatttcttaagatagctgct

SEQ ID NO: 5990846 - DNA, 25 bp, Homo sapien
caacgacgtcagcctcttggaaagc

SEQ ID NO: 5990847 - DNA, 25 bp, Homo sapien
ccacctgccaccattggcaaaacag

SEQ ID NO: 5990848 - DNA, 25 bp, Homo sapien
ataccaagcatatccaatgattttg

SEQ ID NO: 5990849 - DNA, 25 bp, Homo sapien
cttatgacgtaattcagtctgttgt

SEQ ID NO: 5990850 - DNA, 25 bp, Homo sapien
tggatcaacattgaaacttggagca

SEQ ID NO: 5990851 - DNA, 25 bp, Homo sapien
tatgaactcgtctagaccgctacca

SEQ ID NO: 5990852 - DNA, 25 bp, Homo sapien
gtctgttgtctttcaacttctgggt

SEQ ID NO: 5990853 - DNA, 25 bp, Homo sapien
cttcctgtgtcgttggcaaccttgg

SEQ ID NO: 5990854 - DNA, 25 bp, Homo sapien
atgtcttcctgtgtcgttggcaacc

SEQ ID NO: 5990855 - DNA, 25 bp, Homo sapien
agttgaatttatcactgttatgaat

SEQ ID NO: 5990856 - DNA, 25 bp, Homo sapien
cttgtaaagtagtggtgacaggtat

SEQ ID NO: 5990857 - DNA, 25 bp, Homo sapien
ttcgtacaagatctagaaataccaa

SEQ ID NO: 5990858 - DNA, 25 bp, Homo sapien
atataagcgtatgggtattccttct

SEQ ID NO: 5990859 - DNA, 25 bp, Homo sapien
ccgatagcactagttgggacttgcc

SEQ ID NO: 5990860 - DNA, 25 bp, Homo sapien
gtgggaataacgatgttcgtagaac

SEQ ID NO: 5990861 - DNA, 25 bp, Homo sapien
atgtggatttctccatgtccagtgt

SEQ ID NO: 5990862 - DNA, 25 bp, Homo sapien
acgacattggtggcacctggcccag

SEQ ID NO: 5990863 - DNA, 25 bp, Homo sapien
ccgatggcggcagggagaccgtaac

SEQ ID NO: 5990864 - DNA, 25 bp, Homo sapien
tcaccatcaatgtcaataaccaaag

SEQ ID NO: 5990865 - DNA, 25 bp, Homo sapien
ttggactaacctcgaaatgaataat

SEQ ID NO: 5990866 - DNA, 25 bp, Homo sapien
cttgctcttcattgttcaaaatcaa

SEQ ID NO: 5990867 - DNA, 25 bp, Homo sapien
acgggaagacgaactataaaagcgc

SEQ ID NO: 5990868 - DNA, 25 bp, Homo sapien
acggacttgaccatgacattccatt

SEQ ID NO: 5990869 - DNA, 25 bp, Homo sapien
ttcatcttgtgcgcgactggttaat

SEQ ID NO: 5990870 - DNA, 25 bp, Homo sapien
tcgaatgaacctaaaccttgtaaag

SEQ ID NO: 5990871 - DNA, 25 bp, Homo sapien
ttatttgagcaaaccattcagacct

SEQ ID NO: 5990872 - DNA, 25 bp, Homo sapien
ttaaaccgacgaaagaggtatccat

SEQ ID NO: 5990873 - DNA, 25 bp, Homo sapien
aaacgaattctttcaacttagcgtc

SEQ ID NO: 5990874 - DNA, 25 bp, Homo sapien
atggaagagttgtttttgttggaat

SEQ ID NO: 5990875 - DNA, 25 bp, Homo sapien
caaattcatcttgtgcgcgactggt

SEQ ID NO: 5990876 - DNA, 25 bp, Homo sapien
atcgtaaacaggtaggatagcacca

SEQ ID NO: 5990877 - DNA, 25 bp, Homo sapien
cagttaaaccgacgaaagaggtatc

SEQ ID NO: 5990878 - DNA, 25 bp, Homo sapien
gagtaaccataccttgctcttcatt

SEQ ID NO: 5990879 - DNA, 25 bp, Homo sapien
tctagaccgctaccacctgccacca

SEQ ID NO: 5990880 - DNA, 25 bp, Homo sapien
ctgctttattgatactttgcatgac

SEQ ID NO: 5990881 - DNA, 25 bp, Homo sapien
gagtcatgttaaaggatgcgtcacc

SEQ ID NO: 5990882 - DNA, 25 bp, Homo sapien
tcttgtgcgcgactggttaattggt

SEQ ID NO: 5990883 - DNA, 25 bp, Homo sapien
tgtaacatcctttggtaaatcgacc

SEQ ID NO: 5990884 - DNA, 25 bp, Homo sapien
tattgatactttgcatgacaaattc

SEQ ID NO: 5990885 - DNA, 25 bp, Homo sapien
ttttatgaaatcagggttcaattga

SEQ ID NO: 5990886 - DNA, 25 bp, Homo sapien
tttcaaaagcctcgttaatacgcaa

SEQ ID NO: 5990887 - DNA, 25 bp, Homo sapien
gtctgtggtttaattttagatcctg

SEQ ID NO: 5990888 - DNA, 25 bp, Homo sapien
acctctaccctcggcagctgcacga

SEQ ID NO: 5990889 - DNA, 25 bp, Homo sapien
aaccaaatacagtatcaacgttttg

SEQ ID NO: 5990890 - DNA, 25 bp, Homo sapien
gcaaaacaggaacttttttatcaac

SEQ ID NO: 5990891 - DNA, 25 bp, Homo sapien
cgaagttttttagcgtagattgtct

SEQ ID NO: 5990892 - DNA, 25 bp, Homo sapien
accatctgcatggtttaaaatacca

SEQ ID NO: 5990893 - DNA, 25 bp, Homo sapien
agcccacatttgatgttgccccaca

SEQ ID NO: 5990894 - DNA, 25 bp, Homo sapien
ctggctttgcaacttgagcaccgat

SEQ ID NO: 5990895 - DNA, 25 bp, Homo sapien
gaaacttggagcaggctctggcctt

SEQ ID NO: 5990896 - DNA, 25 bp, Homo sapien
atttatcactgttatgaatggcatc

SEQ ID NO: 5990897 - DNA, 25 bp, Homo sapien
gagcaaaccattcagacctctcctt

SEQ ID NO: 5990898 - DNA, 25 bp, Homo sapien
ttgaccatgacattccatttcgtac

SEQ ID NO: 5990899 - DNA, 25 bp, Homo sapien
ccatcgtacctaaaccacctgatgt

SEQ ID NO: 5990900 - DNA, 25 bp, Homo sapien
ttttggatcttcttggtcgaatgaa

SEQ ID NO: 5990901 - DNA, 25 bp, Homo sapien
ctgcaattatcaagtcggcattttg

SEQ ID NO: 5990902 - DNA, 25 bp, Homo sapien
tcggcattttgcactgccaggttgg

SEQ ID NO: 5990903 - DNA, 25 bp, Homo sapien
aaatcaaaatcttcactggagtacc

SEQ ID NO: 5990904 - DNA, 25 bp, Homo sapien
gtcgtcgaatctagcaccaactgca

SEQ ID NO: 5990905 - DNA, 25 bp, Homo sapien
tgtcaataaccaaagattctggctt

SEQ ID NO: 5990906 - DNA, 25 bp, Homo sapien
aagtatgtggatttctccatgtcca

SEQ ID NO: 5990907 - DNA, 25 bp, Homo sapien
cggtcgtcgaatctagcaccaactg

SEQ ID NO: 5990908 - DNA, 25 bp, Homo sapien
acgacgtcagcctcttggaaagcat

SEQ ID NO: 5990909 - DNA, 25 bp, Homo sapien
gtggtttaattttagatcctggagt

SEQ ID NO: 5990910 - DNA, 25 bp, Homo sapien
gggattgccattgagtaaccatacc

SEQ ID NO: 5990911 - DNA, 25 bp, Homo sapien
ctcgtctagaccgctaccacctgcc

SEQ ID NO: 5990912 - DNA, 25 bp, Homo sapien
atgttgaaagcaacgcttaatagcg

SEQ ID NO: 5990913 - DNA, 25 bp, Homo sapien
aataaccaaagattctggctttgca

SEQ ID NO: 5990914 - DNA, 25 bp, Homo sapien
acccatagcctccgctagttttatg

SEQ ID NO: 5990915 - DNA, 25 bp, Homo sapien
acacccgttgtaacaatgacatgtc

SEQ ID NO: 5990916 - DNA, 25 bp, Homo sapien
ccaactgcaattatcaagtcggcat

SEQ ID NO: 5990917 - DNA, 25 bp, Homo sapien
actgtaataacgggaagacgaacta

SEQ ID NO: 5990918 - DNA, 25 bp, Homo sapien
atcaaatctgctgctttattgatac

SEQ ID NO: 5990919 - DNA, 25 bp, Homo sapien
cacgacgagcttctggagcgaattt

SEQ ID NO: 5990920 - DNA, 25 bp, Homo sapien
cttaatagcgaagttttttagcgta

SEQ ID NO: 5990921 - DNA, 25 bp, Homo sapien
catttgatgttgccccacacccgtt

SEQ ID NO: 5990922 - DNA, 25 bp, Homo sapien
atcaagtcggcattttgcactgcca

SEQ ID NO: 5990923 - DNA, 25 bp, Homo sapien
tgaacctaaaccttgtaaagtagtg

SEQ ID NO: 5990924 - DNA, 25 bp, Homo sapien
acctggcccagaagtaaccaagaca

SEQ ID NO: 5990925 - DNA, 25 bp, Homo sapien
gacattggtggcacctggcccagaa

SEQ ID NO: 5990926 - DNA, 25 bp, Homo sapien
cattgaaacttggagcaggctctgg

SEQ ID NO: 5990927 - DNA, 25 bp, Homo sapien
tcttgcttcttgactcttaaacctt

SEQ ID NO: 5990928 - DNA, 25 bp, Homo sapien
gtaatcttggaccatctgcatggtt

SEQ ID NO: 5990929 - DNA, 25 bp, Homo sapien
gtccagtgttgagcagcccacattt

SEQ ID NO: 5990930 - DNA, 25 bp, Homo sapien
aacttagcgtccaattcctcttgct

SEQ ID NO: 5990931 - DNA, 25 bp, Homo sapien
tatccaatgattttggatcttcttg

SEQ ID NO: 5990932 - DNA, 25 bp, Homo sapien
ataccaacgacgtcagcctcttgga

SEQ ID NO: 5990933 - DNA, 25 bp, Homo sapien
agacgcactgtaataacgggaagac

SEQ ID NO: 5990934 - DNA, 25 bp, Homo sapien
agtgcgtttgatggaagagttgttt

SEQ ID NO: 5990935 - DNA, 25 bp, Homo sapien
gaagacgaactataaaagcgctgcg

SEQ ID NO: 5990936 - DNA, 25 bp, Homo sapien
gagaccgtaacccatcgtacctaaa

SEQ ID NO: 5990937 - DNA, 25 bp, Homo sapien
accgcctgtacgcttatgacgtaat

SEQ ID NO: 5990938 - DNA, 25 bp, Homo sapien
ttggaagaacgaagttgaatttatc

SEQ ID NO: 5990939 - DNA, 25 bp, Homo sapien
catgtcaggctcagcgcgtagtttc

SEQ ID NO: 5990940 - DNA, 25 bp, Homo sapien
cgtctagaccgctaccacctgccac

SEQ ID NO: 5990941 - DNA, 25 bp, Homo sapien
tcattgttcaaaatcaaaatcttca

SEQ ID NO: 5990942 - DNA, 25 bp, Homo sapien
tggcacctggcccagaagtaaccaa

SEQ ID NO: 5990943 - DNA, 25 bp, Homo sapien
tgctcttcattgttcaaaatcaaaa

SEQ ID NO: 5990944 - DNA, 25 bp, Homo sapien
tcatggcaggtgtgttgcggtatgc

SEQ ID NO: 5990945 - DNA, 25 bp, Homo sapien
tgtgttgcggtatgctatatgttga

SEQ ID NO: 5990946 - DNA, 25 bp, Homo sapien
ggaaagcatcagtaccgatagcact

SEQ ID NO: 5990947 - DNA, 25 bp, Homo sapien
cctttggtaaatcgaccaagactgg

SEQ ID NO: 5990948 - DNA, 25 bp, Homo sapien
ggcaggtgtgttgcggtatgctata

SEQ ID NO: 5990949 - DNA, 25 bp, Homo sapien
gtagtggtgacaggtatttgagcac

SEQ ID NO: 5990950 - DNA, 25 bp, Homo sapien
tatgttttttggactaacctcgaaa

SEQ ID NO: 5990951 - DNA, 25 bp, Homo sapien
aacaggtaggatagcaccacctgga

SEQ ID NO: 5990952 - DNA, 25 bp, Homo sapien
gtaattcagtctgttgtctttcaac

SEQ ID NO: 5990953 - DNA, 25 bp, Homo sapien
accagaagctctggcgtagccttct

SEQ ID NO: 5990954 - DNA, 25 bp, Homo sapien
ggtttctttgccaagttgatcaaat

SEQ ID NO: 5990955 - DNA, 25 bp, Homo sapien
tgtaaagacaaccattggaatcccg

SEQ ID NO: 5990956 - DNA, 25 bp, Homo sapien
tcctgtgtcgttggcaaccttggat

SEQ ID NO: 5990957 - DNA, 25 bp, Homo sapien
tagaccgctaccacctgccaccatt

SEQ ID NO: 5990958 - DNA, 25 bp, Homo sapien
gtagaacagggattgccattgagta

SEQ ID NO: 5990959 - DNA, 25 bp, Homo sapien
gaatgaacctaaaccttgtaaagta

SEQ ID NO: 5990960 - DNA, 25 bp, Homo sapien
cttggtagaaacgaattctttcaac

SEQ ID NO: 5990961 - DNA, 25 bp, Homo sapien
cggtctaccgctcgtggcaatttca

SEQ ID NO: 5990962 - DNA, 25 bp, Homo sapien
catcttgtgcgcgactggttaattg

SEQ ID NO: 5990963 - DNA, 25 bp, Homo sapien
ggcaattcttccacggacttgacca

SEQ ID NO: 5990964 - DNA, 25 bp, Homo sapien
cctgtacgcttatgacgtaattcag

SEQ ID NO: 5990965 - DNA, 25 bp, Homo sapien
caccttgttcgtgttttggaagaac

SEQ ID NO: 5990966 - DNA, 25 bp, Homo sapien
accttgtaaagtagtggtgacaggt

SEQ ID NO: 5990967 - DNA, 25 bp, Homo sapien
ggcagaactcaattccgttagagtc

SEQ ID NO: 5990968 - DNA, 25 bp, Homo sapien
cctccgctagttttatgaaatcagg

SEQ ID NO: 5990969 - DNA, 25 bp, Homo sapien
tgtacgcttatgacgtaattcagtc

SEQ ID NO: 5990970 - DNA, 25 bp, Homo sapien
ctcgttaatacgcaatggcaattct

SEQ ID NO: 5990971 - DNA, 25 bp, Homo sapien
ctggataaccaaatacagtatcaac

SEQ ID NO: 5990972 - DNA, 25 bp, Homo sapien
gcgactggttaattggtttagtgcg

SEQ ID NO: 5990973 - DNA, 25 bp, Homo sapien
aacattgaaacttggagcaggctct

SEQ ID NO: 5990974 - DNA, 25 bp, Homo sapien
agcgcgtagtttcttagccaatttt

SEQ ID NO: 5990975 - DNA, 25 bp, Homo sapien
cctggtttaccagaagctctggcgt

SEQ ID NO: 5990976 - DNA, 25 bp, Homo sapien
cgcgtagtttcttagccaattttga

SEQ ID NO: 5990977 - DNA, 25 bp, Homo sapien
gagttgtttttgttggaattggatt

SEQ ID NO: 5990978 - DNA, 25 bp, Homo sapien
gcaaaggcatctgccattggagtaa

SEQ ID NO: 5990979 - DNA, 25 bp, Homo sapien
ccgtctgtggtttaattttagatcc

SEQ ID NO: 5990980 - DNA, 25 bp, Homo sapien
attgatgtgtgtgggaataacgatg

SEQ ID NO: 5990981 - DNA, 25 bp, Homo sapien
ggataaccaaatacagtatcaacgt

SEQ ID NO: 5990982 - DNA, 25 bp, Homo sapien
ccacctggataaccaaatacagtat

SEQ ID NO: 5990983 - DNA, 25 bp, Homo sapien
gtgcgcgactggttaattggtttag

SEQ ID NO: 5990984 - DNA, 25 bp, Homo sapien
cgaatttagaaatattaccagtgac

SEQ ID NO: 5990985 - DNA, 25 bp, Homo sapien
gaataataccacctctaccctcggc

SEQ ID NO: 5990986 - DNA, 25 bp, Homo sapien
gttgtaacaatgacatgtcttcctg

SEQ ID NO: 5990987 - DNA, 25 bp, Homo sapien
aataccagcaccgacgtataagaca

SEQ ID NO: 5990988 - DNA, 25 bp, Homo sapien
actgccaggttggcagtagcacaac

SEQ ID NO: 5990989 - DNA, 25 bp, Homo sapien
cagacctctccttaactgggaaaat

SEQ ID NO: 5990990 - DNA, 25 bp, Homo sapien
agtaacgacattggtggcacctggc

SEQ ID NO: 5990991 - DNA, 25 bp, Homo sapien
ctgcaaaggcatctgccattggagt

SEQ ID NO: 5990992 - DNA, 25 bp, Homo sapien
ggatttctccatgtccagtgttgag

SEQ ID NO: 5990993 - DNA, 25 bp, Homo sapien
actcaattccgttagagtcatgtta

SEQ ID NO: 5990994 - DNA, 25 bp, Homo sapien
tgatgttgccccacacccgttgtaa

SEQ ID NO: 5990995 - DNA, 25 bp, Homo sapien
tggcaatttcaaaagcctcgttaat

SEQ ID NO: 5990996 - DNA, 25 bp, Homo sapien
tttatcaacttccacttcaagcaaa

SEQ ID NO: 5990997 - DNA, 25 bp, Homo sapien
tgttgagcagcccacatttgatgtt

SEQ ID NO: 5990998 - DNA, 25 bp, Homo sapien
ttgaaacttggagcaggctctggcc

SEQ ID NO: 5990999 - DNA, 25 bp, Homo sapien
caccaactgcaattatcaagtcggc

SEQ ID NO: 5991000 - DNA, 25 bp, Homo sapien
catgttaaaggatgcgtcaccatca

SEQ ID NO: 5991001 - DNA, 25 bp, Homo sapien
acatcattttgcccagattggtcgt

SEQ ID NO: 5991002 - DNA, 25 bp, Homo sapien
cattggcaaaacaggaactttttta

SEQ ID NO: 5991003 - DNA, 25 bp, Homo sapien
caccttccactgctatttgagtttg

SEQ ID NO: 5991004 - DNA, 25 bp, Homo sapien
cgtagcatcaccttccactgctatt

SEQ ID NO: 5991005 - DNA, 25 bp, Homo sapien
tcctccatataagcgtatgggtatt

SEQ ID NO: 5991006 - DNA, 25 bp, Homo sapien
gtctaccgctcgtggcaatttcaaa

SEQ ID NO: 5991007 - DNA, 25 bp, Homo sapien
gcatctgccattggagtaacgacat

SEQ ID NO: 5991008 - DNA, 25 bp, Homo sapien
taatagcgaagttttttagcgtaga

SEQ ID NO: 5991009 - DNA, 25 bp, Homo sapien
tgccaggttggcagtagcacaaccg

SEQ ID NO: 5991010 - DNA, 25 bp, Homo sapien
ttttgcccagattggtcgtagcatc

SEQ ID NO: 5991011 - DNA, 25 bp, Homo sapien
tagcactagttgggacttgccctgt

SEQ ID NO: 5991012 - DNA, 25 bp, Homo sapien
acgaagttgaatttatcactgttat

SEQ ID NO: 5991013 - DNA, 25 bp, Homo sapien
tcaacgttttgtctggacatcattt

SEQ ID NO: 5991014 - DNA, 25 bp, Homo sapien
aatttatgaactcgtctagaccgct

SEQ ID NO: 5991015 - DNA, 25 bp, Homo sapien
gcctcgttaatacgcaatggcaatt

SEQ ID NO: 5991016 - DNA, 25 bp, Homo sapien
acctggataaccaaatacagtatca

SEQ ID NO: 5991017 - DNA, 25 bp, Homo sapien
aagacaggtttctttgccaagttga

SEQ ID NO: 5991018 - DNA, 25 bp, Homo sapien
gatcaacattgaaacttggagcagg

SEQ ID NO: 5991019 - DNA, 25 bp, Homo sapien
atagcaccacctggataaccaaata

SEQ ID NO: 5991020 - DNA, 25 bp, Homo sapien
agctgctgtaacatcctttggtaaa

SEQ ID NO: 5991021 - DNA, 25 bp, Homo sapien
cgcttatgacgtaattcagtctgtt

SEQ ID NO: 5991022 - DNA, 25 bp, Homo sapien
tcagggttcaattgatgtgtgtggg

SEQ ID NO: 5991023 - DNA, 25 bp, Homo sapien
cacctggtttaccagaagctctggc

SEQ ID NO: 5991024 - DNA, 25 bp, Homo sapien
tagtttctttataaccgtctgtggt

SEQ ID NO: 5991025 - DNA, 25 bp, Homo sapien
ttctaatggatcaacattgaaactt

SEQ ID NO: 5991026 - DNA, 25 bp, Homo sapien
aaacccatagcctccgctagtttta

SEQ ID NO: 5991027 - DNA, 25 bp, Homo sapien
gtccaattcctcttgcttcttgact

SEQ ID NO: 5991028 - DNA, 25 bp, Homo sapien
aaaataccagcaccgacgtataaga

SEQ ID NO: 5991029 - DNA, 25 bp, Homo sapien
tgtgatgaaagtatgtggatttctc

SEQ ID NO: 5991030 - DNA, 25 bp, Homo sapien
taacgacattggtggcacctggccc

SEQ ID NO: 5991031 - DNA, 25 bp, Homo sapien
cattggtggcacctggcccagaagt

SEQ ID NO: 5991032 - DNA, 25 bp, Homo sapien
cttaagatagctgctgtaacatcct

SEQ ID NO: 5991033 - DNA, 25 bp, Homo sapien
acttgccctgtaaagacaaccattg

SEQ ID NO: 5991034 - DNA, 25 bp, Homo sapien
gcaatttcaaaagcctcgttaatac

SEQ ID NO: 5991035 - DNA, 25 bp, Homo sapien
gcagcccacatttgatgttgcccca

SEQ ID NO: 5991036 - DNA, 25 bp, Homo sapien
ttgaccaccagttaaaccgacgaaa

SEQ ID NO: 5991037 - DNA, 25 bp, Homo sapien
gcatcgtaaacaggtaggatagcac

SEQ ID NO: 5991038 - DNA, 25 bp, Homo sapien
tgttttggaagaacgaagttgaatt

SEQ ID NO: 5991039 - DNA, 25 bp, Homo sapien
gcactagttgggacttgccctgtaa

SEQ ID NO: 5991040 - DNA, 25 bp, Homo sapien
gttagagtcatgttaaaggatgcgt

SEQ ID NO: 5991041 - DNA, 25 bp, Homo sapien
ttcagtctgttgtctttcaacttct

SEQ ID NO: 5991042 - DNA, 25 bp, Homo sapien
caggtatttgagcacggtcacttaa

SEQ ID NO: 5991043 - DNA, 25 bp, Homo sapien
ccgtctgcaaaggcatctgccattg

SEQ ID NO: 5991044 - DNA, 25 bp, Homo sapien
agacaacacctggtttaccagaagc

SEQ ID NO: 5991045 - DNA, 25 bp, Homo sapien
acgaaagaggtatccatgtcaggct

SEQ ID NO: 5991046 - DNA, 25 bp, Homo sapien
gttttttagcgtagattgtctgatc

SEQ ID NO: 5991047 - DNA, 25 bp, Homo sapien
tgctgctttattgatactttgcatg

SEQ ID NO: 5991048 - DNA, 25 bp, Homo sapien
gctactgatctcatggcaggtgtgt

SEQ ID NO: 5991049 - DNA, 25 bp, Homo sapien
ggtcaaaatttatgaactcgtctag

SEQ ID NO: 5991050 - DNA, 25 bp, Homo sapien
acgaactataaaagcgctgcgcgag

SEQ ID NO: 5991051 - DNA, 25 bp, Homo sapien
gccctgtaaagacaaccattggaat

SEQ ID NO: 5991052 - DNA, 25 bp, Homo sapien
taaacaggtaggatagcaccacctg

SEQ ID NO: 5991053 - DNA, 25 bp, Homo sapien
tgatcaaatctgctgctttattgat

SEQ ID NO: 5991054 - DNA, 25 bp, Homo sapien
accaagacaacacctggtttaccag

SEQ ID NO: 5991055 - DNA, 25 bp, Homo sapien
gaaatcagggttcaattgatgtgtg

SEQ ID NO: 5991056 - DNA, 25 bp, Homo sapien
ggtaatggagacgcactgtaataac

SEQ ID NO: 5991057 - DNA, 25 bp, Homo sapien
atggagacgcactgtaataacggga

SEQ ID NO: 5991058 - DNA, 25 bp, Homo sapien
agtctcctccatataagcgtatggg

SEQ ID NO: 5991059 - DNA, 25 bp, Homo sapien
cacttcaagcaaaactgggcccttg

SEQ ID NO: 5991060 - DNA, 25 bp, Homo sapien
tgagcaccgatggcggcagggagac

SEQ ID NO: 5991061 - DNA, 25 bp, Homo sapien
gtaaatcgaccaagactggtcccgg

SEQ ID NO: 5991062 - DNA, 25 bp, Homo sapien
ctatatgttgaaagcaacgcttaat

SEQ ID NO: 5991063 - DNA, 25 bp, Homo sapien
tgcgtttgatggaagagttgttttt

SEQ ID NO: 5991064 - DNA, 25 bp, Homo sapien
gtttcttagccaattttgaaggttc

SEQ ID NO: 5991065 - DNA, 25 bp, Homo sapien
atgaaagtatgtggatttctccatg

SEQ ID NO: 5991066 - DNA, 25 bp, Homo sapien
ctgctgtaacatcctttggtaaatc

SEQ ID NO: 5991067 - DNA, 25 bp, Homo sapien
actgctatttgagtttgaacaacct

SEQ ID NO: 5991068 - DNA, 25 bp, Homo sapien
agactggtcccggtctaccgctcgt

SEQ ID NO: 5991069 - DNA, 25 bp, Homo sapien
agcctccgctagttttatgaaatca

SEQ ID NO: 5991070 - DNA, 25 bp, Homo sapien
ttgagtaaccataccttgctcttca

SEQ ID NO: 5991071 - DNA, 25 bp, Homo sapien
gagtaccagcttgaacggcagaact

SEQ ID NO: 5991072 - DNA, 25 bp, Homo sapien
gacattccatttcgtacaagatcta

SEQ ID NO: 5991073 - DNA, 25 bp, Homo sapien
tttgttggaattggatttcttaaga

SEQ ID NO: 5991074 - DNA, 25 bp, Homo sapien
aatggcatcgtaaacaggtaggata

SEQ ID NO: 5991075 - DNA, 25 bp, Homo sapien
caagcatatccaatgattttggatc

SEQ ID NO: 5991076 - DNA, 25 bp, Homo sapien
aggctctggccttttagaggctggt

SEQ ID NO: 5991077 - DNA, 25 bp, Homo sapien
tggagtaccagcttgaacggcagaa

SEQ ID NO: 5991078 - DNA, 25 bp, Homo sapien
cgacgagcttctggagcgaatttag

SEQ ID NO: 5991079 - DNA, 25 bp, Homo sapien
actggtcccggtctaccgctcgtgg

SEQ ID NO: 5991080 - DNA, 25 bp, Homo sapien
ggcaaccttggatagtttctttata

SEQ ID NO: 5991081 - DNA, 25 bp, Homo sapien
aaaatttatgaactcgtctagaccg

SEQ ID NO: 5991082 - DNA, 25 bp, Homo sapien
aaccacctgatgtgatgaaagtatg

SEQ ID NO: 5991083 - DNA, 25 bp, Homo sapien
gccttctgccatgtgaccggcacct

SEQ ID NO: 5991084 - DNA, 25 bp, Homo sapien
aatcagggttcaattgatgtgtgtg

SEQ ID NO: 5991085 - DNA, 25 bp, Homo sapien
gaggctggtaatggagacgcactgt

SEQ ID NO: 5991086 - DNA, 25 bp, Homo sapien
ttcctcttgcttcttgactcttaaa

SEQ ID NO: 5991087 - DNA, 25 bp, Homo sapien
gttgtttttgttggaattggatttc

SEQ ID NO: 5991088 - DNA, 25 bp, Homo sapien
atggcaattcttccacggacttgac

SEQ ID NO: 5991089 - DNA, 25 bp, Homo sapien
gacacggtcgtcgaatctagcacca

SEQ ID NO: 5991090 - DNA, 25 bp, Homo sapien
ctttgcaacttgagcaccgatggcg

SEQ ID NO: 5991091 - DNA, 25 bp, Homo sapien
ttgtgcgcgactggttaattggttt

SEQ ID NO: 5991092 - DNA, 25 bp, Homo sapien
aaatgaataataccacctctaccct

SEQ ID NO: 5991093 - DNA, 25 bp, Homo sapien
gaaagtatgtggatttctccatgtc

SEQ ID NO: 5991094 - DNA, 25 bp, Homo sapien
gttgaaagcaacgcttaatagcgaa

SEQ ID NO: 5991095 - DNA, 25 bp, Homo sapien
gcttcttgactcttaaaccttttaa

SEQ ID NO: 5991096 - DNA, 25 bp, Homo sapien
ttatttatttgagcaaaccattcag

SEQ ID NO: 5991097 - DNA, 25 bp, Homo sapien
aagcgtatgggtattccttcttcca

SEQ ID NO: 5991098 - DNA, 25 bp, Homo sapien
tatcaacgttttgtctggacatcat

SEQ ID NO: 5991099 - DNA, 25 bp, Homo sapien
taacccatcgtacctaaaccacctg

SEQ ID NO: 5991100 - DNA, 25 bp, Homo sapien
taacatcctttggtaaatcgaccaa

SEQ ID NO: 5991101 - DNA, 25 bp, Homo sapien
aagcaaaactgggcccttggtagaa

SEQ ID NO: 5991102 - DNA, 25 bp, Homo sapien
gagcttctggagcgaatttagaaat

SEQ ID NO: 5991103 - DNA, 25 bp, Homo sapien
gtgtgtgggaataacgatgttcgta

SEQ ID NO: 5991104 - DNA, 25 bp, Homo sapien
caagtcggcattttgcactgccagg

SEQ ID NO: 5991105 - DNA, 25 bp, Homo sapien
cagaagctctggcgtagccttctgc

SEQ ID NO: 5991106 - DNA, 25 bp, Homo sapien
taaagtagtggtgacaggtatttga

SEQ ID NO: 5991107 - DNA, 25 bp, Homo sapien
atcgtacctaaaccacctgatgtga

SEQ ID NO: 5991108 - DNA, 25 bp, Homo sapien
cacggtcgtcgaatctagcaccaac

SEQ ID NO: 5991109 - DNA, 25 bp, Homo sapien
ctatttgagtttgaacaaccttgtt

SEQ ID NO: 5991110 - DNA, 25 bp, Homo sapien
acaatgacatgtcttcctgtgtcgt

SEQ ID NO: 5991111 - DNA, 25 bp, Homo sapien
aatctttgacatcattttgcccaga

SEQ ID NO: 5991112 - DNA, 25 bp, Homo sapien
gatagtttctttataaccgtctgtg

SEQ ID NO: 5991113 - DNA, 25 bp, Homo sapien
caaaatcaaaatcttcactggagta

SEQ ID NO: 5991114 - DNA, 25 bp, Homo sapien
atgacaaattcatcttgtgcgcgac

SEQ ID NO: 5991115 - DNA, 25 bp, Homo sapien
gtagaaacgaattctttcaacttag

SEQ ID NO: 5991116 - DNA, 25 bp, Homo sapien
ccacctctaccctcggcagctgcac

SEQ ID NO: 5991117 - DNA, 25 bp, Homo sapien
aagaacgaagttgaatttatcactg

SEQ ID NO: 5991118 - DNA, 25 bp, Homo sapien
ctgccattggagtaacgacattggt

SEQ ID NO: 5991119 - DNA, 25 bp, Homo sapien
atcgaccaagactggtcccggtcta

SEQ ID NO: 5991120 - DNA, 25 bp, Homo sapien
tgccatgtgaccggcaccttgttcg

SEQ ID NO: 5991121 - DNA, 25 bp, Homo sapien
gagcaggctctggccttttagaggc

SEQ ID NO: 5991122 - DNA, 25 bp, Homo sapien
actataaaagcgctgcgcgagagct

SEQ ID NO: 5991123 - DNA, 25 bp, Homo sapien
ccagcaccgacgtataagacaggtt

SEQ ID NO: 5991124 - DNA, 25 bp, Homo sapien
gaactataaaagcgctgcgcgagag

SEQ ID NO: 5991125 - DNA, 25 bp, Homo sapien
gtcatgttaaaggatgcgtcaccat

SEQ ID NO: 5991126 - DNA, 25 bp, Homo sapien
gcttgaacggcagaactcaattccg

SEQ ID NO: 5991127 - DNA, 25 bp, Homo sapien
taattggtttagtgcgtttgatgga

SEQ ID NO: 5991128 - DNA, 25 bp, Homo sapien
gtgtcgttggcaaccttggatagtt

SEQ ID NO: 5991129 - DNA, 25 bp, Homo sapien
agcgctgcgcgagagctactgatct

SEQ ID NO: 5991130 - DNA, 25 bp, Homo sapien
agtatcaacgttttgtctggacatc

SEQ ID NO: 5991131 - DNA, 25 bp, Homo sapien
tgttggaattggatttcttaagata

SEQ ID NO: 5991132 - DNA, 25 bp, Homo sapien
gccttttagaggctggtaatggaga

SEQ ID NO: 5991133 - DNA, 25 bp, Homo sapien
ttatcactgttatgaatggcatcgt

SEQ ID NO: 5991134 - DNA, 25 bp, Homo sapien
gacaaccattggaatcccgtctgca

SEQ ID NO: 5991135 - DNA, 25 bp, Homo sapien
atgggtattccttcttccatttatt

SEQ ID NO: 5991136 - DNA, 25 bp, Homo sapien
gatgtgatgaaagtatgtggatttc

SEQ ID NO: 5991137 - DNA, 25 bp, Homo sapien
ttgcaacttgagcaccgatggcggc

SEQ ID NO: 5991138 - DNA, 25 bp, Homo sapien
atcactgttatgaatggcatcgtaa

SEQ ID NO: 5991139 - DNA, 25 bp, Homo sapien
tttattgatactttgcatgacaaat

SEQ ID NO: 5991140 - DNA, 25 bp, Homo sapien
cgtagtttcttagccaattttgaag

SEQ ID NO: 5991141 - DNA, 25 bp, Homo sapien
ccaattcctcttgcttcttgactct

SEQ ID NO: 5991142 - DNA, 25 bp, Homo sapien
tgggacttgccctgtaaagacaacc

SEQ ID NO: 5991143 - DNA, 25 bp, Homo sapien
cgtgttttggaagaacgaagttgaa

SEQ ID NO: 5991144 - DNA, 25 bp, Homo sapien
atctgccattggagtaacgacattg

SEQ ID NO: 5991145 - DNA, 25 bp, Homo sapien
ggcaccttgttcgtgttttggaaga

SEQ ID NO: 5991146 - DNA, 25 bp, Homo sapien
ctggtaatggagacgcactgtaata

SEQ ID NO: 5991147 - DNA, 25 bp, Homo sapien
cactgttatgaatggcatcgtaaac

SEQ ID NO: 5991148 - DNA, 25 bp, Homo sapien
tgggaaaatctttgacatcattttg

SEQ ID NO: 5991149 - DNA, 25 bp, Homo sapien
taactgggaaaatctttgacatcat

SEQ ID NO: 5991150 - DNA, 25 bp, Homo sapien
attcttccacggacttgaccatgac

SEQ ID NO: 5991151 - DNA, 25 bp, Homo sapien
ggcgtagccttctgccatgtgaccg

SEQ ID NO: 5991152 - DNA, 25 bp, Homo sapien
tgcatggtttaaaataccagcaccg

SEQ ID NO: 5991153 - DNA, 25 bp, Homo sapien
ttatcaagtcggcattttgcactgc

SEQ ID NO: 5991154 - DNA, 25 bp, Homo sapien
caacgcttaatagcgaagtttttta

SEQ ID NO: 5991155 - DNA, 25 bp, Homo sapien
aatattaccagtgacacggtcgtcg

SEQ ID NO: 5991156 - DNA, 25 bp, Homo sapien
gcgcgactggttaattggtttagtg

SEQ ID NO: 5991157 - DNA, 25 bp, Homo sapien
cttctgggtcaaaatttatgaactc

SEQ ID NO: 5991158 - DNA, 25 bp, Homo sapien
caagactggtcccggtctaccgctc

SEQ ID NO: 5991159 - DNA, 25 bp, Homo sapien
atgattttggatcttcttggtcgaa

SEQ ID NO: 5991160 - DNA, 25 bp, Homo sapien
ccttccactgctatttgagtttgaa

SEQ ID NO: 5991161 - DNA, 25 bp, Homo sapien
acttgaccatgacattccatttcgt

SEQ ID NO: 5991162 - DNA, 25 bp, Homo sapien
gcttctggagcgaatttagaaatat

SEQ ID NO: 5991163 - DNA, 25 bp, Homo sapien
ccatttcgtacaagatctagaaata

SEQ ID NO: 5991164 - DNA, 25 bp, Homo sapien
tcagcgcgtagtttcttagccaatt

SEQ ID NO: 5991165 - DNA, 25 bp, Homo sapien
tgaactcgtctagaccgctaccacc

SEQ ID NO: 5991166 - DNA, 25 bp, Homo sapien
tgaaggttcagcgggctgttctaat

SEQ ID NO: 5991167 - DNA, 25 bp, Homo sapien
ctcttcattgttcaaaatcaaaatc

SEQ ID NO: 5991168 - DNA, 25 bp, Homo sapien
tcaggctcagcgcgtagtttcttag

SEQ ID NO: 5991169 - DNA, 25 bp, Homo sapien
gttgccccacacccgttgtaacaat

SEQ ID NO: 5991170 - DNA, 25 bp, Homo sapien
attggtcgtagcatcaccttccact

SEQ ID NO: 5991171 - DNA, 25 bp, Homo sapien
ttccatttcgtacaagatctagaaa

SEQ ID NO: 5991172 - DNA, 25 bp, Homo sapien
gcacctggcccagaagtaaccaaga

SEQ ID NO: 5991173 - DNA, 25 bp, Homo sapien
tgttaaaggatgcgtcaccatcaat

SEQ ID NO: 5991174 - DNA, 25 bp, Homo sapien
gaagtaaccaagacaacacctggtt

SEQ ID NO: 5991175 - DNA, 25 bp, Homo sapien
agtagcacaaccgtgcataccaagc

SEQ ID NO: 5991176 - DNA, 25 bp, Homo sapien
cagggattgccattgagtaaccata

SEQ ID NO: 5991177 - DNA, 25 bp, Homo sapien
ttggaattggatttcttaagatagc

SEQ ID NO: 5991178 - DNA, 25 bp, Homo sapien
aaaccattcagacctctccttaact

SEQ ID NO: 5991179 - DNA, 25 bp, Homo sapien
ctggacatcatttcgttaaatattt

SEQ ID NO: 5991180 - DNA, 25 bp, Homo sapien
acgcactgtaataacgggaagacga

SEQ ID NO: 5991181 - DNA, 25 bp, Homo sapien
ccacctgatgtgatgaaagtatgtg

SEQ ID NO: 5991182 - DNA, 25 bp, Homo sapien
aaaggcatctgccattggagtaacg

SEQ ID NO: 5991183 - DNA, 25 bp, Homo sapien
agtaccgatagcactagttgggact

SEQ ID NO: 5991184 - DNA, 25 bp, Homo sapien
cgtacctaaaccacctgatgtgatg

SEQ ID NO: 5991185 - DNA, 25 bp, Homo sapien
tggtgacaggtatttgagcacggtc

SEQ ID NO: 5991186 - DNA, 25 bp, Homo sapien
tagttgggacttgccctgtaaagac

SEQ ID NO: 5991187 - DNA, 25 bp, Homo sapien
gcactgccaggttggcagtagcaca

SEQ ID NO: 5991188 - DNA, 25 bp, Homo sapien
cgtttgatggaagagttgtttttgt

SEQ ID NO: 5991189 - DNA, 25 bp, Homo sapien
tagccaattttgaaggttcagcggg

SEQ ID NO: 5991190 - DNA, 25 bp, Homo sapien
tagcatcaccttccactgctatttg

SEQ ID NO: 5991191 - DNA, 25 bp, Homo sapien
ggctttgcaacttgagcaccgatgg

SEQ ID NO: 5991192 - DNA, 25 bp, Homo sapien
ataagcgtatgggtattccttcttc

SEQ ID NO: 5991193 - DNA, 25 bp, Homo sapien
ctgcgcgagagctactgatctcatg

SEQ ID NO: 5991194 - DNA, 25 bp, Homo sapien
gcaaaactgggcccttggtagaaac

SEQ ID NO: 5991195 - DNA, 25 bp, Homo sapien
gagagctactgatctcatggcaggt

SEQ ID NO: 5991196 - DNA, 25 bp, Homo sapien
caggtaggatagcaccacctggata

SEQ ID NO: 5991197 - DNA, 25 bp, Homo sapien
aagtagtggtgacaggtatttgagc

SEQ ID NO: 5991198 - DNA, 25 bp, Homo sapien
ccactgctatttgagtttgaacaac

SEQ ID NO: 5991199 - DNA, 25 bp, Homo sapien
caggtgtgttgcggtatgctatatg

SEQ ID NO: 5991200 - DNA, 25 bp, Homo sapien
ctagcaccaactgcaattatcaagt

SEQ ID NO: 5991201 - DNA, 25 bp, Homo sapien
tgtcaggctcagcgcgtagtttctt

SEQ ID NO: 5991202 - DNA, 25 bp, Homo sapien
gtcgtagcatcaccttccactgcta

SEQ ID NO: 5991203 - DNA, 25 bp, Homo sapien
tggtttaaaataccagcaccgacgt

SEQ ID NO: 5991204 - DNA, 25 bp, Homo sapien
gcggcagggagaccgtaacccatcg

SEQ ID NO: 5991205 - DNA, 25 bp, Homo sapien
ttccacggacttgaccatgacattc

SEQ ID NO: 5991206 - DNA, 25 bp, Homo sapien
tcaatgtcaataaccaaagattctg

SEQ ID NO: 5991207 - DNA, 25 bp, Homo sapien
atgtccagtgttgagcagcccacat

SEQ ID NO: 5991208 - DNA, 25 bp, Homo sapien
atgtgtgtgggaataacgatgttcg

SEQ ID NO: 5991209 - DNA, 25 bp, Homo sapien
tgcacgacgagcttctggagcgaat

SEQ ID NO: 5991210 - DNA, 25 bp, Homo sapien
ctccatataagcgtatgggtattcc

SEQ ID NO: 5991211 - DNA, 25 bp, Homo sapien
ttgcttcttgactcttaaacctttt

SEQ ID NO: 5991212 - DNA, 25 bp, Homo sapien
tgggcccttggtagaaacgaattct

SEQ ID NO: 5991213 - DNA, 25 bp, Homo sapien
gattgccattgagtaaccatacctt

SEQ ID NO: 5991214 - DNA, 25 bp, Homo sapien
cgctagttttatgaaatcagggttc

SEQ ID NO: 5991215 - DNA, 25 bp, Homo sapien
taaagacaaccattggaatcccgtc

SEQ ID NO: 5991216 - DNA, 25 bp, Homo sapien
ttctggagcgaatttagaaatatta

SEQ ID NO: 5991217 - DNA, 25 bp, Homo sapien
catctgcatggtttaaaataccagc

SEQ ID NO: 5991218 - DNA, 25 bp, Homo sapien
acaacacctggtttaccagaagctc

SEQ ID NO: 5991219 - DNA, 25 bp, Homo sapien
aattatcaagtcggcattttgcact

SEQ ID NO: 5991220 - DNA, 25 bp, Homo sapien
gcaaaccattcagacctctccttaa

SEQ ID NO: 5991221 - DNA, 25 bp, Homo sapien
ctgtggtttaattttagatcctgga

SEQ ID NO: 5991222 - DNA, 25 bp, Homo sapien
gattctggctttgcaacttgagcac

SEQ ID NO: 5991223 - DNA, 25 bp, Homo sapien
gggaataacgatgttcgtagaacag

SEQ ID NO: 5991224 - DNA, 25 bp, Homo sapien
tttagtaatcttggaccatctgcat

SEQ ID NO: 5991225 - DNA, 25 bp, Homo sapien
ttttttggactaacctcgaaatgaa

SEQ ID NO: 5991226 - DNA, 25 bp, Homo sapien
cccacatttgatgttgccccacacc

SEQ ID NO: 5991227 - DNA, 25 bp, Homo sapien
gtgacacggtcgtcgaatctagcac

SEQ ID NO: 5991228 - DNA, 25 bp, Homo sapien
accaaagattctggctttgcaactt

SEQ ID NO: 5991229 - DNA, 25 bp, Homo sapien
ggctggtaatggagacgcactgtaa

SEQ ID NO: 5991230 - DNA, 25 bp, Homo sapien
agtgttgagcagcccacatttgatg

SEQ ID NO: 5991231 - DNA, 25 bp, Homo sapien
taacgggaagacgaactataaaagc

SEQ ID NO: 5991232 - DNA, 25 bp, Homo sapien
cgtagccttctgccatgtgaccggc

SEQ ID NO: 5991233 - DNA, 25 bp, Homo sapien
ctaccgctcgtggcaatttcaaaag

SEQ ID NO: 5991234 - DNA, 25 bp, Homo sapien
aagttttttagcgtagattgtctga

SEQ ID NO: 5991235 - DNA, 25 bp, Homo sapien
aagattctggctttgcaacttgagc

SEQ ID NO: 5991236 - DNA, 25 bp, Homo sapien
agcaccgatggcggcagggagaccg

SEQ ID NO: 5991237 - DNA, 25 bp, Homo sapien
taccagcaccgacgtataagacagg

SEQ ID NO: 5991238 - DNA, 25 bp, Homo sapien
aacgttttgtctggacatcatttcg

SEQ ID NO: 5991239 - DNA, 25 bp, Homo sapien
aggttggcagtagcacaaccgtgca

SEQ ID NO: 5991240 - DNA, 25 bp, Homo sapien
atctagcaccaactgcaattatcaa

SEQ ID NO: 5991241 - DNA, 25 bp, Homo sapien
agttttatgaaatcagggttcaatt

SEQ ID NO: 5991242 - DNA, 25 bp, Homo sapien
tggcggcagggagaccgtaacccat

SEQ ID NO: 5991243 - DNA, 25 bp, Homo sapien
acaaccgtgcataccaagcatatcc

SEQ ID NO: 5991244 - DNA, 25 bp, Homo sapien
gtttagtgcgtttgatggaagagtt

SEQ ID NO: 5991245 - DNA, 25 bp, Homo sapien
tataaccgtctgtggtttaatttta

SEQ ID NO: 5991246 - DNA, 25 bp, Homo sapien
ggtgtgttgcggtatgctatatgtt

SEQ ID NO: 5991247 - DNA, 25 bp, Homo sapien
aaggttcagcgggctgttctaatgg

SEQ ID NO: 5991248 - DNA, 25 bp, Homo sapien
gctcagcgcgtagtttcttagccaa

SEQ ID NO: 5991249 - DNA, 25 bp, Homo sapien
accttgctcttcattgttcaaaatc

SEQ ID NO: 5991250 - DNA, 25 bp, Homo sapien
aattcttttagtaatcttggaccat

SEQ ID NO: 5991251 - DNA, 25 bp, Homo sapien
tcgttaaatatttgaccaccagtta

SEQ ID NO: 5991252 - DNA, 25 bp, Homo sapien
ctttgcatgacaaattcatcttgtg

SEQ ID NO: 5991253 - DNA, 25 bp, Homo sapien
aggcatctgccattggagtaacgac

SEQ ID NO: 5991254 - DNA, 25 bp, Homo sapien
gtctggacatcatttcgttaaatat

SEQ ID NO: 5991255 - DNA, 25 bp, Homo sapien
ccacggacttgaccatgacattcca

SEQ ID NO: 5991256 - DNA, 25 bp, Homo sapien
ttagtgcgtttgatggaagagttgt

SEQ ID NO: 5991257 - DNA, 25 bp, Homo sapien
tgtaacaatgacatgtcttcctgtg

SEQ ID NO: 5991258 - DNA, 25 bp, Homo sapien
caccgacgtataagacaggtttctt

SEQ ID NO: 5991259 - DNA, 25 bp, Homo sapien
ataacgatgttcgtagaacagggat

SEQ ID NO: 5991260 - DNA, 25 bp, Homo sapien
atatgttgaaagcaacgcttaatag

SEQ ID NO: 5991261 - DNA, 25 bp, Homo sapien
tttagaaatattaccagtgacacgg

SEQ ID NO: 5991262 - DNA, 25 bp, Homo sapien
ggatcttcttggtcgaatgaaccta

SEQ ID NO: 5991263 - DNA, 25 bp, Homo sapien
tgacatcattttgcccagattggtc

SEQ ID NO: 5991264 - DNA, 25 bp, Homo sapien
tttctttgccaagttgatcaaatct

SEQ ID NO: 5991265 - DNA, 25 bp, Homo sapien
gctttattgatactttgcatgacaa

SEQ ID NO: 5991266 - DNA, 25 bp, Homo sapien
ctgatctcatggcaggtgtgttgcg

SEQ ID NO: 5991267 - DNA, 25 bp, Homo sapien
gacgtcagcctcttggaaagcatca

SEQ ID NO: 5991268 - DNA, 25 bp, Homo sapien
ttttgcactgccaggttggcagtag

SEQ ID NO: 5991269 - DNA, 25 bp, Homo sapien
gccaccattggcaaaacaggaactt

SEQ ID NO: 5991270 - DNA, 25 bp, Homo sapien
agtaaccaagacaacacctggttta

SEQ ID NO: 5991271 - DNA, 25 bp, Homo sapien
ttccatttatttatttgagcaaacc

SEQ ID NO: 5991272 - DNA, 25 bp, Homo sapien
ttggatcttcttggtcgaatgaacc

SEQ ID NO: 5991273 - DNA, 25 bp, Homo sapien
caagacaacacctggtttaccagaa

SEQ ID NO: 5991274 - DNA, 25 bp, Homo sapien
ttgccctgtaaagacaaccattgga

SEQ ID NO: 5991275 - DNA, 25 bp, Homo sapien
catttcgttaaatatttgaccacca

SEQ ID NO: 5991276 - DNA, 25 bp, Homo sapien
ggacttgccctgtaaagacaaccat

SEQ ID NO: 5991277 - DNA, 25 bp, Homo sapien
ttgaatttatcactgttatgaatgg

SEQ ID NO: 5991278 - DNA, 25 bp, Homo sapien
gcagtagcacaaccgtgcataccaa

SEQ ID NO: 5991279 - DNA, 25 bp, Homo sapien
ctctaccctcggcagctgcacgacg

SEQ ID NO: 5991280 - DNA, 25 bp, Homo sapien
tttgagcacggtcacttaattcttt

SEQ ID NO: 5991281 - DNA, 25 bp, Homo sapien
gcatgacaaattcatcttgtgcgcg

SEQ ID NO: 5991282 - DNA, 25 bp, Homo sapien
tgggtcaaaatttatgaactcgtct

SEQ ID NO: 5991283 - DNA, 25 bp, Homo sapien
ttggatttcttaagatagctgctgt

SEQ ID NO: 5991284 - DNA, 25 bp, Homo sapien
atctagaaataccaacgacgtcagc

SEQ ID NO: 5991285 - DNA, 25 bp, Homo sapien
atttcttaagatagctgctgtaaca

SEQ ID NO: 5991286 - DNA, 25 bp, Homo sapien
tggtttagtgcgtttgatggaagag

SEQ ID NO: 5991287 - DNA, 25 bp, Homo sapien
agaacagggattgccattgagtaac

SEQ ID NO: 5991288 - DNA, 25 bp, Homo sapien
tagagtcatgttaaaggatgcgtca

SEQ ID NO: 5991289 - DNA, 25 bp, Homo sapien
ttcgtgttttggaagaacgaagttg

SEQ ID NO: 5991290 - DNA, 25 bp, Homo sapien
gcgcgagagctactgatctcatggc

SEQ ID NO: 5991291 - DNA, 25 bp, Homo sapien
tcaacttccacttcaagcaaaactg

SEQ ID NO: 5991292 - DNA, 25 bp, Homo sapien
cattgagtaaccataccttgctctt

SEQ ID NO: 5991293 - DNA, 25 bp, Homo sapien
ggcccagaagtaaccaagacaacac

SEQ ID NO: 5991294 - DNA, 25 bp, Homo sapien
cagggagaccgtaacccatcgtacc

SEQ ID NO: 5991295 - DNA, 25 bp, Homo sapien
cgctgcgcgagagctactgatctca

SEQ ID NO: 5991296 - DNA, 25 bp, Homo sapien
ctcgtggcaatttcaaaagcctcgt

SEQ ID NO: 5991297 - DNA, 25 bp, Homo sapien
taaccaagacaacacctggtttacc

SEQ ID NO: 5991298 - DNA, 25 bp, Homo sapien
agctctggcgtagccttctgccatg

SEQ ID NO: 5991299 - DNA, 25 bp, Homo sapien
ccatataagcgtatgggtattcctt

SEQ ID NO: 5991300 - DNA, 25 bp, Homo sapien
ggcagggagaccgtaacccatcgta

SEQ ID NO: 5991301 - DNA, 25 bp, Homo sapien
tgtctttcaacttctgggtcaaaat

SEQ ID NO: 5991302 - DNA, 25 bp, Homo sapien
aacttccacttcaagcaaaactggg

SEQ ID NO: 5991303 - DNA, 25 bp, Homo sapien
tagatcctggagtctcctccatata

SEQ ID NO: 5991304 - DNA, 25 bp, Homo sapien
atgaataataccacctctaccctcg

SEQ ID NO: 5991305 - DNA, 25 bp, Homo sapien
gctgttctaatggatcaacattgaa

SEQ ID NO: 5991306 - DNA, 25 bp, Homo sapien
ccaagttgatcaaatctgctgcttt

SEQ ID NO: 5991307 - DNA, 25 bp, Homo sapien
agcaccaactgcaattatcaagtcg

SEQ ID NO: 5991308 - DNA, 25 bp, Homo sapien
ccaaatacagtatcaacgttttgtc

SEQ ID NO: 5991309 - DNA, 25 bp, Homo sapien
tctcctccatataagcgtatgggta

SEQ ID NO: 5991310 - DNA, 25 bp, Homo sapien
attctttcaacttagcgtccaattc

SEQ ID NO: 5991311 - DNA, 25 bp, Homo sapien
ttaaacccatagcctccgctagttt

SEQ ID NO: 5991312 - DNA, 25 bp, Homo sapien
atgttgccccacacccgttgtaaca

SEQ ID NO: 5991313 - DNA, 25 bp, Homo sapien
cttgttcgtgttttggaagaacgaa

SEQ ID NO: 5991314 - DNA, 25 bp, Homo sapien
aatgacatgtcttcctgtgtcgttg

SEQ ID NO: 5991315 - DNA, 25 bp, Homo sapien
cagtgacacggtcgtcgaatctagc

SEQ ID NO: 5991316 - DNA, 25 bp, Homo sapien
ggatttcttaagatagctgctgtaa

SEQ ID NO: 5991317 - DNA, 25 bp, Homo sapien
tagccttctgccatgtgaccggcac

SEQ ID NO: 5991318 - DNA, 25 bp, Homo sapien
aagttgatcaaatctgctgctttat

SEQ ID NO: 5991319 - DNA, 25 bp, Homo sapien
gagtttgaacaaccttgtttatgtt

SEQ ID NO: 5991320 - DNA, 25 bp, Homo sapien
aatttagaaatattaccagtgacac

SEQ ID NO: 5991321 - DNA, 25 bp, Homo sapien
acagtatcaacgttttgtctggaca

SEQ ID NO: 5991322 - DNA, 25 bp, Homo sapien
aatcccgtctgcaaaggcatctgcc

SEQ ID NO: 5991323 - DNA, 25 bp, Homo sapien
gtaccagcttgaacggcagaactca

SEQ ID NO: 5991324 - DNA, 25 bp, Homo sapien
cttttagtaatcttggaccatctgc

SEQ ID NO: 5991325 - DNA, 25 bp, Homo sapien
gtgaccggcaccttgttcgtgtttt

SEQ ID NO: 5991326 - DNA, 25 bp, Homo sapien
actagttgggacttgccctgtaaag

SEQ ID NO: 5991327 - DNA, 25 bp, Homo sapien
ccataccttgctcttcattgttcaa

SEQ ID NO: 5991328 - DNA, 25 bp, Homo sapien
ctgttatgaatggcatcgtaaacag

SEQ ID NO: 5991329 - DNA, 25 bp, Homo sapien
acctcgaaatgaataataccacctc

SEQ ID NO: 5991330 - DNA, 25 bp, Homo sapien
tgatgaaagtatgtggatttctcca

SEQ ID NO: 5991331 - DNA, 25 bp, Homo sapien
tttatgaactcgtctagaccgctac

SEQ ID NO: 5991332 - DNA, 25 bp, Homo sapien
tacgcaatggcaattcttccacgga

SEQ ID NO: 5991333 - DNA, 25 bp, Homo sapien
agatctagaaataccaacgacgtca

SEQ ID NO: 5991334 - DNA, 25 bp, Homo sapien
tcttggtcgaatgaacctaaacctt

SEQ ID NO: 5991335 - DNA, 25 bp, Homo sapien
ctctggcgtagccttctgccatgtg

SEQ ID NO: 5991336 - DNA, 25 bp, Homo sapien
cgtcgaatctagcaccaactgcaat

SEQ ID NO: 5991337 - DNA, 25 bp, Homo sapien
atcttcactggagtaccagcttgaa

SEQ ID NO: 5991338 - DNA, 25 bp, Homo sapien
cagaagtaaccaagacaacacctgg

SEQ ID NO: 5991339 - DNA, 25 bp, Homo sapien
ttggaccatctgcatggtttaaaat

SEQ ID NO: 5991340 - DNA, 25 bp, Homo sapien
ggacttgaccatgacattccatttc

SEQ ID NO: 5991341 - DNA, 25 bp, Homo sapien
catcaatgtcaataaccaaagattc

SEQ ID NO: 5991342 - DNA, 25 bp, Homo sapien
caaatctgctgctttattgatactt

SEQ ID NO: 5991343 - DNA, 25 bp, Homo sapien
tgctatatgttgaaagcaacgctta

SEQ ID NO: 5991344 - DNA, 25 bp, Homo sapien
cttcttggtcgaatgaacctaaacc

SEQ ID NO: 5991345 - DNA, 25 bp, Homo sapien
cattggagtaacgacattggtggca

SEQ ID NO: 5991346 - DNA, 25 bp, Homo sapien
gaccaccagttaaaccgacgaaaga

SEQ ID NO: 5991347 - DNA, 25 bp, Homo sapien
agcgaagttttttagcgtagattgt

SEQ ID NO: 5991348 - DNA, 25 bp, Homo sapien
tctttgacatcattttgcccagatt

SEQ ID NO: 5991349 - DNA, 25 bp, Homo sapien
agggttcaattgatgtgtgtgggaa

SEQ ID NO: 5991350 - DNA, 25 bp, Homo sapien
gaccgctaccacctgccaccattgg

SEQ ID NO: 5991351 - DNA, 25 bp, Homo sapien
accattcagacctctccttaactgg

SEQ ID NO: 5991352 - DNA, 25 bp, Homo sapien
tggcatcgtaaacaggtaggatagc

SEQ ID NO: 5991353 - DNA, 25 bp, Homo sapien
aatacgcaatggcaattcttccacg

SEQ ID NO: 5991354 - DNA, 25 bp, Homo sapien
atttgagcaaaccattcagacctct

SEQ ID NO: 5991355 - DNA, 25 bp, Homo sapien
catcagtaccgatagcactagttgg

SEQ ID NO: 5991356 - DNA, 25 bp, Homo sapien
attggtttagtgcgtttgatggaag

SEQ ID NO: 5991357 - DNA, 25 bp, Homo sapien
agcaacgcttaatagcgaagttttt

SEQ ID NO: 5991358 - DNA, 25 bp, Homo sapien
catatccaatgattttggatcttct

SEQ ID NO: 5991359 - DNA, 25 bp, Homo sapien
tatgctatatgttgaaagcaacgct

SEQ ID NO: 5991360 - DNA, 25 bp, Homo sapien
gatagcactagttgggacttgccct

SEQ ID NO: 5991361 - DNA, 25 bp, Homo sapien
cgtggcaatttcaaaagcctcgtta

SEQ ID NO: 5991362 - DNA, 25 bp, Homo sapien
tcgtagaacagggattgccattgag

SEQ ID NO: 5991363 - DNA, 25 bp, Homo sapien
ctagaaataccaacgacgtcagcct

SEQ ID NO: 5991364 - DNA, 25 bp, Homo sapien
agcacggtcacttaattcttttagt

SEQ ID NO: 5991365 - DNA, 25 bp, Homo sapien
accagtgacacggtcgtcgaatcta

SEQ ID NO: 5991366 - DNA, 25 bp, Homo sapien
attttgaaggttcagcgggctgttc

SEQ ID NO: 5991367 - DNA, 25 bp, Homo sapien
tagtaatcttggaccatctgcatgg

SEQ ID NO: 5991368 - DNA, 25 bp, Homo sapien
aatgtcaataaccaaagattctggc

SEQ ID NO: 5991369 - DNA, 25 bp, Homo sapien
gacaggtatttgagcacggtcactt

SEQ ID NO: 5991370 - DNA, 25 bp, Homo sapien
cccggtctaccgctcgtggcaattt

SEQ ID NO: 5991371 - DNA, 25 bp, Homo sapien
ggagcgaatttagaaatattaccag

SEQ ID NO: 5991372 - DNA, 25 bp, Homo sapien
tcaaaagcctcgttaatacgcaatg

SEQ ID NO: 5991373 - DNA, 25 bp, Homo sapien
ttgcccagattggtcgtagcatcac

SEQ ID NO: 5991374 - DNA, 25 bp, Homo sapien
tcttggaaagcatcagtaccgatag

SEQ ID NO: 5991375 - DNA, 25 bp, Homo sapien
aattcctcttgcttcttgactctta

SEQ ID NO: 5991376 - DNA, 25 bp, Homo sapien
gttaaatatttgaccaccagttaaa

SEQ ID NO: 5991377 - DNA, 25 bp, Homo sapien
cagtgcttaccgcctgtacgcttat

SEQ ID NO: 5991378 - DNA, 25 bp, Homo sapien
tactttgcatgacaaattcatcttg

SEQ ID NO: 5991379 - DNA, 25 bp, Homo sapien
gtcttcctgtgtcgttggcaacctt

SEQ ID NO: 5991380 - DNA, 25 bp, Homo sapien
ggcagctgcacgacgagcttctgga

SEQ ID NO: 5991381 - DNA, 25 bp, Homo sapien
gggctgttctaatggatcaacattg

SEQ ID NO: 5991382 - DNA, 25 bp, Homo sapien
tcaacttagcgtccaattcctcttg

SEQ ID NO: 5991383 - DNA, 25 bp, Homo sapien
ccttttaaacccatagcctccgcta

SEQ ID NO: 5991384 - DNA, 25 bp, Homo sapien
tagtttcttagccaattttgaaggt

SEQ ID NO: 5991385 - DNA, 25 bp, Homo sapien
tgctatttgagtttgaacaaccttg

SEQ ID NO: 5991386 - DNA, 25 bp, Homo sapien
ccatgtccagtgttgagcagcccac

SEQ ID NO: 5991387 - DNA, 25 bp, Homo sapien
taccacctgccaccattggcaaaac

SEQ ID NO: 5991388 - DNA, 25 bp, Homo sapien
atttatttatttgagcaaaccattc

SEQ ID NO: 5991389 - DNA, 25 bp, Homo sapien
tggttaattggtttagtgcgtttga

SEQ ID NO: 5991390 - DNA, 25 bp, Homo sapien
tacaagatctagaaataccaacgac

SEQ ID NO: 5991391 - DNA, 25 bp, Homo sapien
aatcttggaccatctgcatggttta

SEQ ID NO: 5991392 - DNA, 25 bp, Homo sapien
gagctactgatctcatggcaggtgt

SEQ ID NO: 5991393 - DNA, 25 bp, Homo sapien
gccattggagtaacgacattggtgg

SEQ ID NO: 5991394 - DNA, 25 bp, Homo sapien
agcaccgacgtataagacaggtttc

SEQ ID NO: 5991395 - DNA, 25 bp, Homo sapien
cattggaatcccgtctgcaaaggca

SEQ ID NO: 5991396 - DNA, 25 bp, Homo sapien
aggatgcgtcaccatcaatgtcaat

SEQ ID NO: 5991397 - DNA, 25 bp, Homo sapien
cttcattgttcaaaatcaaaatctt

SEQ ID NO: 5991398 - DNA, 25 bp, Homo sapien
agcatatccaatgattttggatctt

SEQ ID NO: 5991399 - DNA, 25 bp, Homo sapien
gaatctagcaccaactgcaattatc

SEQ ID NO: 5991400 - DNA, 25 bp, Homo sapien
caaaatcttcactggagtaccagct

SEQ ID NO: 5991401 - DNA, 25 bp, Homo sapien
ctcgaaatgaataataccacctcta

SEQ ID NO: 5991402 - DNA, 25 bp, Homo sapien
aaagcaacgcttaatagcgaagttt

SEQ ID NO: 5991403 - DNA, 25 bp, Homo sapien
tttgatgttgccccacacccgttgt

SEQ ID NO: 5991404 - DNA, 25 bp, Homo sapien
tattaccagtgacacggtcgtcgaa

SEQ ID NO: 5991405 - DNA, 25 bp, Homo sapien
caaagattctggctttgcaacttga

SEQ ID NO: 5991406 - DNA, 25 bp, Homo sapien
taataacgggaagacgaactataaa

SEQ ID NO: 5991407 - DNA, 25 bp, Homo sapien
actggagtaccagcttgaacggcag

SEQ ID NO: 5991408 - DNA, 25 bp, Homo sapien
gaggtatccatgtcaggctcagcgc

SEQ ID NO: 5991409 - DNA, 25 bp, Homo sapien
ttttgtctggacatcatttcgttaa

SEQ ID NO: 5991410 - DNA, 25 bp, Homo sapien
cctaaaccacctgatgtgatgaaag

SEQ ID NO: 5991411 - DNA, 25 bp, Homo sapien
tcagcctcttggaaagcatcagtac

SEQ ID NO: 5991412 - DNA, 25 bp, Homo sapien
gggagaccgtaacccatcgtaccta

SEQ ID NO: 5991413 - DNA, 25 bp, Homo sapien
agatagctgctgtaacatcctttgg

SEQ ID NO: 5991414 - DNA, 25 bp, Homo sapien
cttcactggagtaccagcttgaacg

SEQ ID NO: 5991415 - DNA, 25 bp, Homo sapien
aaatacagtatcaacgttttgtctg

SEQ ID NO: 5991416 - DNA, 25 bp, Homo sapien
ctggcgtagccttctgccatgtgac

SEQ ID NO: 5991417 - DNA, 25 bp, Homo sapien
tgatggaagagttgtttttgttgga

SEQ ID NO: 5991418 - DNA, 25 bp, Homo sapien
gaaatattaccagtgacacggtcgt

SEQ ID NO: 5991419 - DNA, 25 bp, Homo sapien
gcgtccaattcctcttgcttcttga

SEQ ID NO: 5991420 - DNA, 25 bp, Homo sapien
cgcaatggcaattcttccacggact

SEQ ID NO: 5991421 - DNA, 25 bp, Homo sapien
atttatttgagcaaaccattcagac

SEQ ID NO: 5991422 - DNA, 25 bp, Homo sapien
acctgatgtgatgaaagtatgtgga

SEQ ID NO: 5991423 - DNA, 25 bp, Homo sapien
gcgagagctactgatctcatggcag

SEQ ID NO: 5991424 - DNA, 25 bp, Homo sapien
ttggagtaacgacattggtggcacc

SEQ ID NO: 5991425 - DNA, 25 bp, Homo sapien
actgggaaaatctttgacatcattt

SEQ ID NO: 5991426 - DNA, 25 bp, Homo sapien
ttcttaagatagctgctgtaacatc

SEQ ID NO: 5991427 - DNA, 25 bp, Homo sapien
tacgcttatgacgtaattcagtctg

SEQ ID NO: 5991428 - DNA, 25 bp, Homo sapien
ttgcatgacaaattcatcttgtgcg

SEQ ID NO: 5991429 - DNA, 25 bp, Homo sapien
ttgtctggacatcatttcgttaaat

SEQ ID NO: 5991430 - DNA, 25 bp, Homo sapien
ccgttgtaacaatgacatgtcttcc

SEQ ID NO: 5991431 - DNA, 25 bp, Homo sapien
ggatagcaccacctggataaccaaa

SEQ ID NO: 5991432 - DNA, 25 bp, Homo sapien
agtcggcattttgcactgccaggtt

SEQ ID NO: 5991433 - DNA, 25 bp, Homo sapien
caatggcaattcttccacggacttg

SEQ ID NO: 5991434 - DNA, 25 bp, Homo sapien
tcctggagtctcctccatataagcg

SEQ ID NO: 5991435 - DNA, 25 bp, Homo sapien
gtttaccagaagctctggcgtagcc

SEQ ID NO: 5991436 - DNA, 25 bp, Homo sapien
gctctggccttttagaggctggtaa

SEQ ID NO: 5991437 - DNA, 25 bp, Homo sapien
cgaaatgaataataccacctctacc

SEQ ID NO: 5991438 - DNA, 25 bp, Homo sapien
tcttggaccatctgcatggtttaaa

SEQ ID NO: 5991439 - DNA, 25 bp, Homo sapien
tccgctagttttatgaaatcagggt

SEQ ID NO: 5991440 - DNA, 25 bp, Homo sapien
aagagttgtttttgttggaattgga

SEQ ID NO: 5991441 - DNA, 25 bp, Homo sapien
gtgtgggaataacgatgttcgtaga

SEQ ID NO: 5991442 - DNA, 25 bp, Homo sapien
tggcagtagcacaaccgtgcatacc

SEQ ID NO: 5991443 - DNA, 25 bp, Homo sapien
gacaaattcatcttgtgcgcgactg

SEQ ID NO: 5991444 - DNA, 25 bp, Homo sapien
gcccagattggtcgtagcatcacct

SEQ ID NO: 5991445 - DNA, 25 bp, Homo sapien
cttagcgtccaattcctcttgcttc

SEQ ID NO: 5991446 - DNA, 25 bp, Homo sapien
gtcgttggcaaccttggatagtttc

SEQ ID NO: 5991447 - DNA, 25 bp, Homo sapien
gtggatttctccatgtccagtgttg

SEQ ID NO: 5991448 - DNA, 25 bp, Homo sapien
ttttaaacccatagcctccgctagt

SEQ ID NO: 5991449 - DNA, 25 bp, Homo sapien
taagatagctgctgtaacatccttt

SEQ ID NO: 5991450 - DNA, 25 bp, Homo sapien
tcccgtctgcaaaggcatctgccat

SEQ ID NO: 5991451 - DNA, 25 bp, Homo sapien
gtatgtggatttctccatgtccagt

SEQ ID NO: 5991452 - DNA, 25 bp, Homo sapien
ccagattggtcgtagcatcaccttc

SEQ ID NO: 5991453 - DNA, 25 bp, Homo sapien
aactgcaattatcaagtcggcattt

SEQ ID NO: 5991454 - DNA, 25 bp, Homo sapien
taaccaaagattctggctttgcaac

SEQ ID NO: 5991455 - DNA, 25 bp, Homo sapien
ggacatcatttcgttaaatatttga

SEQ ID NO: 5991456 - DNA, 25 bp, Homo sapien
aataccacctctaccctcggcagct

SEQ ID NO: 5991457 - DNA, 25 bp, Homo sapien
accaacgacgtcagcctcttggaaa

SEQ ID NO: 5991458 - DNA, 25 bp, Homo sapien
tccatgtcaggctcagcgcgtagtt

SEQ ID NO: 5991459 - DNA, 25 bp, Homo sapien
ttaaaggatgcgtcaccatcaatgt

SEQ ID NO: 5991460 - DNA, 25 bp, Homo sapien
ctaaaccttgtaaagtagtggtgac

SEQ ID NO: 5991461 - DNA, 25 bp, Homo sapien
tgttttttggactaacctcgaaatg

SEQ ID NO: 5991462 - DNA, 25 bp, Homo sapien
atcatttcgttaaatatttgaccac

SEQ ID NO: 5991463 - DNA, 25 bp, Homo sapien
caggaacttttttatcaacttccac

SEQ ID NO: 5991464 - DNA, 25 bp, Homo sapien
gttgtctttcaacttctgggtcaaa

SEQ ID NO: 5991465 - DNA, 25 bp, Homo sapien
ccacacccgttgtaacaatgacatg

SEQ ID NO: 5991466 - DNA, 25 bp, Homo sapien
gcggtatgctatatgttgaaagcaa

SEQ ID NO: 5991467 - DNA, 25 bp, Homo sapien
atatttgaccaccagttaaaccgac

SEQ ID NO: 5991468 - DNA, 25 bp, Homo sapien
ggtcacttaattcttttagtaatct

SEQ ID NO: 5991469 - DNA, 25 bp, Homo sapien
ccaggttggcagtagcacaaccgtg

SEQ ID NO: 5991470 - DNA, 25 bp, Homo sapien
caaccattggaatcccgtctgcaaa

SEQ ID NO: 5991471 - DNA, 25 bp, Homo sapien
tgtttttgttggaattggatttctt

SEQ ID NO: 5991472 - DNA, 25 bp, Homo sapien
cgcttaatagcgaagttttttagcg

SEQ ID NO: 5991473 - DNA, 25 bp, Homo sapien
aaagcatcagtaccgatagcactag

SEQ ID NO: 5991474 - DNA, 25 bp, Homo sapien
tagcgtccaattcctcttgcttctt

SEQ ID NO: 5991475 - DNA, 25 bp, Homo sapien
ccggcaccttgttcgtgttttggaa

SEQ ID NO: 5991476 - DNA, 25 bp, Homo sapien
tttctttataaccgtctgtggttta

SEQ ID NO: 5991477 - DNA, 25 bp, Homo sapien
ttgagcagcccacatttgatgttgc

SEQ ID NO: 5991478 - DNA, 25 bp, Homo sapien
cttgagcaccgatggcggcagggag

SEQ ID NO: 5991479 - DNA, 25 bp, Homo sapien
tttgaaggttcagcgggctgttcta

SEQ ID NO: 5991480 - DNA, 25 bp, Homo sapien
gaacggcagaactcaattccgttag

SEQ ID NO: 5991481 - DNA, 25 bp, Homo sapien
acccatcgtacctaaaccacctgat

SEQ ID NO: 5991482 - DNA, 25 bp, Homo sapien
gatcctggagtctcctccatataag

SEQ ID NO: 5991483 - DNA, 25 bp, Homo sapien
cattccatttcgtacaagatctaga

SEQ ID NO: 5991484 - DNA, 25 bp, Homo sapien
gttggcagtagcacaaccgtgcata

SEQ ID NO: 5991485 - DNA, 25 bp, Homo sapien
cctcttgcttcttgactcttaaacc

SEQ ID NO: 5991486 - DNA, 25 bp, Homo sapien
ttaattcttttagtaatcttggacc

SEQ ID NO: 5991487 - DNA, 25 bp, Homo sapien
tgaatggcatcgtaaacaggtagga

SEQ ID NO: 5991488 - DNA, 25 bp, Homo sapien
tctgcatggtttaaaataccagcac

SEQ ID NO: 5991489 - DNA, 25 bp, Homo sapien
ctggagtctcctccatataagcgta

SEQ ID NO: 5991490 - DNA, 25 bp, Homo sapien
ggttcaattgatgtgtgtgggaata

SEQ ID NO: 5991491 - DNA, 25 bp, Homo sapien
acatcatttcgttaaatatttgacc

SEQ ID NO: 5991492 - DNA, 25 bp, Homo sapien
tgtaaagtagtggtgacaggtattt

SEQ ID NO: 5991493 - DNA, 25 bp, Homo sapien
aaagcgctgcgcgagagctactgat

SEQ ID NO: 5991494 - DNA, 25 bp, Homo sapien
ttggtcgaatgaacctaaaccttgt

SEQ ID NO: 5991495 - DNA, 25 bp, Homo sapien
cattttgcccagattggtcgtagca

SEQ ID NO: 5991496 - DNA, 25 bp, Homo sapien
tggtttaccagaagctctggcgtag

SEQ ID NO: 5991497 - DNA, 25 bp, Homo sapien
ggaccatctgcatggtttaaaatac

SEQ ID NO: 5991498 - DNA, 25 bp, Homo sapien
tggtaaatcgaccaagactggtccc

SEQ ID NO: 5991499 - DNA, 25 bp, Homo sapien
gcataccaagcatatccaatgattt

SEQ ID NO: 5991500 - DNA, 25 bp, Homo sapien
tgccccacacccgttgtaacaatga

SEQ ID NO: 5991501 - DNA, 25 bp, Homo sapien
ggagtctcctccatataagcgtatg

SEQ ID NO: 5991502 - DNA, 25 bp, Homo sapien
gaacgaagttgaatttatcactgtt

SEQ ID NO: 5991503 - DNA, 25 bp, Homo sapien
taatggagacgcactgtaataacgg

SEQ ID NO: 5991504 - DNA, 25 bp, Homo sapien
cttccacttcaagcaaaactgggcc

SEQ ID NO: 5991505 - DNA, 25 bp, Homo sapien
agaaacgaattctttcaacttagcg

SEQ ID NO: 5991506 - DNA, 25 bp, Homo sapien
tacctaaaccacctgatgtgatgaa

SEQ ID NO: 5991507 - DNA, 25 bp, Homo sapien
tttcaacttctgggtcaaaatttat

SEQ ID NO: 5991508 - DNA, 25 bp, Homo sapien
tctccttaactgggaaaatctttga

SEQ ID NO: 5991509 - DNA, 25 bp, Homo sapien
ctgttgtctttcaacttctgggtca

SEQ ID NO: 5991510 - DNA, 25 bp, Homo sapien
tcggcagctgcacgacgagcttctg

SEQ ID NO: 5991511 - DNA, 25 bp, Homo sapien
cttcaagcaaaactgggcccttggt

SEQ ID NO: 5991512 - DNA, 25 bp, Homo sapien
taacctcgaaatgaataataccacc

SEQ ID NO: 5991513 - DNA, 25 bp, Homo sapien
tgccaagttgatcaaatctgctgct

SEQ ID NO: 5991514 - DNA, 25 bp, Homo sapien
agcctcttggaaagcatcagtaccg

SEQ ID NO: 5991515 - DNA, 25 bp, Homo sapien
acgtataagacaggtttctttgcca

SEQ ID NO: 5991516 - DNA, 25 bp, Homo sapien
cttttagaggctggtaatggagacg

SEQ ID NO: 5991517 - DNA, 25 bp, Homo sapien
tcgaatctagcaccaactgcaatta

SEQ ID NO: 5991518 - DNA, 25 bp, Homo sapien
tgaaagcaacgcttaatagcgaagt

SEQ ID NO: 5991519 - DNA, 25 bp, Homo sapien
accaagactggtcccggtctaccgc

SEQ ID NO: 5991520 - DNA, 25 bp, Homo sapien
ataaccaaatacagtatcaacgttt

SEQ ID NO: 5991521 - DNA, 25 bp, Homo sapien
tttaattttagatcctggagtctcc

SEQ ID NO: 5991522 - DNA, 25 bp, Homo sapien
gtaaccataccttgctcttcattgt

SEQ ID NO: 5991523 - DNA, 25 bp, Homo sapien
gttatgaatggcatcgtaaacaggt

SEQ ID NO: 5991524 - DNA, 25 bp, Homo sapien
atagctgctgtaacatcctttggta

SEQ ID NO: 5991525 - DNA, 25 bp, Homo sapien
cgtcagcctcttggaaagcatcagt

SEQ ID NO: 5991526 - DNA, 25 bp, Homo sapien
tccaatgattttggatcttcttggt

SEQ ID NO: 5991527 - DNA, 25 bp, Homo sapien
cgctcgtggcaatttcaaaagcctc

SEQ ID NO: 5991528 - DNA, 25 bp, Homo sapien
gatggcggcagggagaccgtaaccc

SEQ ID NO: 5991529 - DNA, 25 bp, Homo sapien
ccgctaccacctgccaccattggca

SEQ ID NO: 5991530 - DNA, 25 bp, Homo sapien
acccgttgtaacaatgacatgtctt

SEQ ID NO: 5991531 - DNA, 25 bp, Homo sapien
ttcttttagtaatcttggaccatct

SEQ ID NO: 5991532 - DNA, 25 bp, Homo sapien
atcaaaatcttcactggagtaccag

SEQ ID NO: 5991533 - DNA, 25 bp, Homo sapien
gaagttgaatttatcactgttatga

SEQ ID NO: 5991534 - DNA, 25 bp, Homo sapien
tgaacaaccttgtttatgttttttg

SEQ ID NO: 5991535 - DNA, 25 bp, Homo sapien
gcgggctgttctaatggatcaacat

SEQ ID NO: 5991536 - DNA, 25 bp, Homo sapien
cgaccaagactggtcccggtctacc

SEQ ID NO: 5991537 - DNA, 25 bp, Homo sapien
ttctggctttgcaacttgagcaccg

SEQ ID NO: 5991538 - DNA, 25 bp, Homo sapien
tctggccttttagaggctggtaatg

SEQ ID NO: 5991539 - DNA, 25 bp, Homo sapien
gcaacttgagcaccgatggcggcag

SEQ ID NO: 5991540 - DNA, 25 bp, Homo sapien
ccgtgcataccaagcatatccaatg

SEQ ID NO: 5991541 - DNA, 25 bp, Homo sapien
cattcagacctctccttaactggga

SEQ ID NO: 5991542 - DNA, 25 bp, Homo sapien
tcaacttctgggtcaaaatttatga

SEQ ID NO: 5991543 - DNA, 25 bp, Homo sapien
tttcaacttagcgtccaattcctct

SEQ ID NO: 5991544 - DNA, 25 bp, Homo sapien
cttggagcaggctctggccttttag

SEQ ID NO: 5991545 - DNA, 25 bp, Homo sapien
ttatgaaatcagggttcaattgatg

SEQ ID NO: 5991546 - DNA, 25 bp, Homo sapien
taaaagcgctgcgcgagagctactg

SEQ ID NO: 5991547 - DNA, 25 bp, Homo sapien
cttaactgggaaaatctttgacatc

SEQ ID NO: 5991548 - DNA, 25 bp, Homo sapien
cgacgaaagaggtatccatgtcagg

SEQ ID NO: 5991549 - DNA, 25 bp, Homo sapien
gccattgagtaaccataccttgctc

SEQ ID NO: 5991550 - DNA, 25 bp, Homo sapien
aagacaaccattggaatcccgtctg

SEQ ID NO: 5991551 - DNA, 25 bp, Homo sapien
ggtatgctatatgttgaaagcaacg

SEQ ID NO: 5991552 - DNA, 25 bp, Homo sapien
tctgggtcaaaatttatgaactcgt

SEQ ID NO: 5991553 - DNA, 25 bp, Homo sapien
gaccggcaccttgttcgtgttttgg

SEQ ID NO: 5991554 - DNA, 25 bp, Homo sapien
tgttctaatggatcaacattgaaac

SEQ ID NO: 5991555 - DNA, 25 bp, Homo sapien
ggagacgcactgtaataacgggaag

SEQ ID NO: 5991556 - DNA, 25 bp, Homo sapien
gaatttatcactgttatgaatggca

SEQ ID NO: 5991557 - DNA, 25 bp, Homo sapien
taaaccacctgatgtgatgaaagta

SEQ ID NO: 5991558 - DNA, 25 bp, Homo sapien
taacaatgacatgtcttcctgtgtc

SEQ ID NO: 5991559 - DNA, 25 bp, Homo sapien
aatttcaaaagcctcgttaatacgc

SEQ ID NO: 5991560 - DNA, 25 bp, Homo sapien
tttgacatcattttgcccagattgg

SEQ ID NO: 5991561 - DNA, 25 bp, Homo sapien
cgtcaccatcaatgtcaataaccaa

SEQ ID NO: 5991562 - DNA, 25 bp, Homo sapien
gtataagacaggtttctttgccaag

SEQ ID NO: 5991563 - DNA, 25 bp, Homo sapien
atcttcttggtcgaatgaacctaaa

SEQ ID NO: 5991564 - DNA, 25 bp, Homo sapien
tttagatcctggagtctcctccata

SEQ ID NO: 5991565 - DNA, 25 bp, Homo sapien
tcttccacggacttgaccatgacat

SEQ ID NO: 5991566 - DNA, 25 bp, Homo sapien
caagatctagaaataccaacgacgt

SEQ ID NO: 5991567 - DNA, 25 bp, Homo sapien
agaaataccaacgacgtcagcctct

SEQ ID NO: 5991568 - DNA, 25 bp, Homo sapien
atttcgtacaagatctagaaatacc

SEQ ID NO: 5991569 - DNA, 25 bp, Homo sapien
ggaattggatttcttaagatagctg

SEQ ID NO: 5991570 - DNA, 25 bp, Homo sapien
atggcaggtgtgttgcggtatgcta

SEQ ID NO: 5991571 - DNA, 25 bp, Homo sapien
tttagaggctggtaatggagacgca

SEQ ID NO: 5991572 - DNA, 25 bp, Homo sapien
tttgccaagttgatcaaatctgctg

SEQ ID NO: 5991573 - DNA, 25 bp, Homo sapien
cagctgcacgacgagcttctggagc

SEQ ID NO: 5991574 - DNA, 25 bp, Homo sapien
catggtttaaaataccagcaccgac

SEQ ID NO: 5991575 - DNA, 25 bp, Homo sapien
tgtaataacgggaagacgaactata

SEQ ID NO: 5991576 - DNA, 25 bp, Homo sapien
cagcgggctgttctaatggatcaac

SEQ ID NO: 5991577 - DNA, 25 bp, Homo sapien
gatgcgtcaccatcaatgtcaataa

SEQ ID NO: 5991578 - DNA, 25 bp, Homo sapien
ttaccagaagctctggcgtagcctt

SEQ ID NO: 5991579 - DNA, 25 bp, Homo sapien
taaatatttgaccaccagttaaacc

SEQ ID NO: 5991580 - DNA, 25 bp, Homo sapien
gcatcaccttccactgctatttgag

SEQ ID NO: 5991581 - DNA, 25 bp, Homo sapien
tgacatgtcttcctgtgtcgttggc

SEQ ID NO: 5991582 - DNA, 25 bp, Homo sapien
tttcgttaaatatttgaccaccagt

SEQ ID NO: 5991583 - DNA, 25 bp, Homo sapien
gtcccggtctaccgctcgtggcaat

SEQ ID NO: 5991584 - DNA, 25 bp, Homo sapien
tcaacattgaaacttggagcaggct

SEQ ID NO: 5991585 - DNA, 25 bp, Homo sapien
caatgattttggatcttcttggtcg

SEQ ID NO: 5991586 - DNA, 25 bp, Homo sapien
cacggtcacttaattcttttagtaa

SEQ ID NO: 5991587 - DNA, 25 bp, Homo sapien
gcaattatcaagtcggcattttgca

SEQ ID NO: 5991588 - DNA, 25 bp, Homo sapien
aagcctcgttaatacgcaatggcaa

SEQ ID NO: 5991589 - DNA, 25 bp, Homo sapien
atttgagtttgaacaaccttgttta

SEQ ID NO: 5991590 - DNA, 25 bp, Homo sapien
gattttggatcttcttggtcgaatg

SEQ ID NO: 5991591 - DNA, 25 bp, Homo sapien
cgtaaacaggtaggatagcaccacc

SEQ ID NO: 5991592 - DNA, 25 bp, Homo sapien
taccacctctaccctcggcagctgc

SEQ ID NO: 5991593 - DNA, 25 bp, Homo sapien
ataataccacctctaccctcggcag

SEQ ID NO: 5991594 - DNA, 25 bp, Homo sapien
ttcagcgggctgttctaatggatca

SEQ ID NO: 5991595 - DNA, 25 bp, Homo sapien
gagcagcccacatttgatgttgccc

SEQ ID NO: 5991596 - DNA, 25 bp, Homo sapien
gaataacgatgttcgtagaacaggg

SEQ ID NO: 5991597 - DNA, 25 bp, Homo sapien
aattcagtctgttgtctttcaactt

SEQ ID NO: 5991598 - DNA, 25 bp, Homo sapien
accgacgaaagaggtatccatgtca

SEQ ID NO: 5991599 - DNA, 25 bp, Homo sapien
tcaataaccaaagattctggctttg

SEQ ID NO: 5991600 - DNA, 25 bp, Homo sapien
tggatagtttctttataaccgtctg

SEQ ID NO: 5991601 - DNA, 25 bp, Homo sapien
ttgagtttgaacaaccttgtttatg

SEQ ID NO: 5991602 - DNA, 25 bp, Homo sapien
caccgatggcggcagggagaccgta

SEQ ID NO: 5991603 - DNA, 25 bp, Homo sapien
tggagcaggctctggccttttagag

SEQ ID NO: 5991604 - DNA, 25 bp, Homo sapien
tctcatggcaggtgtgttgcggtat

SEQ ID NO: 5991605 - DNA, 25 bp, Homo sapien
acggcagaactcaattccgttagag

SEQ ID NO: 5991606 - DNA, 25 bp, Homo sapien
aattcatcttgtgcgcgactggtta

SEQ ID NO: 5991607 - DNA, 25 bp, Homo sapien
gccaattttgaaggttcagcgggct

SEQ ID NO: 5991608 - DNA, 25 bp, Homo sapien
gcgtatgggtattccttcttccatt

SEQ ID NO: 5991609 - DNA, 25 bp, Homo sapien
ccgttagagtcatgttaaaggatgc

SEQ ID NO: 5991610 - DNA, 25 bp, Homo sapien
agacgaactataaaagcgctgcgcg

SEQ ID NO: 5991611 - DNA, 25 bp, Homo sapien
atgaaatcagggttcaattgatgtg

SEQ ID NO: 5991612 - DNA, 25 bp, Homo sapien
gctgcacgacgagcttctggagcga

SEQ ID NO: 5991613 - DNA, 25 bp, Homo sapien
tttttagcgtagattgtctgatcat

SEQ ID NO: 5991614 - DNA, 25 bp, Homo sapien
tgttcgtgttttggaagaacgaagt

SEQ ID NO: 5991615 - DNA, 25 bp, Homo sapien
tctttcaacttctgggtcaaaattt

SEQ ID NO: 5991616 - DNA, 25 bp, Homo sapien
ctgccaccattggcaaaacaggaac

SEQ ID NO: 5991617 - DNA, 25 bp, Homo sapien
ttcagacctctccttaactgggaaa

SEQ ID NO: 5991618 - DNA, 25 bp, Homo sapien
ggtatccatgtcaggctcagcgcgt

SEQ ID NO: 5991619 - DNA, 25 bp, Homo sapien
tcaattccgttagagtcatgttaaa

SEQ ID NO: 5991620 - DNA, 25 bp, Homo sapien
cccttggtagaaacgaattctttca

SEQ ID NO: 5991621 - DNA, 25 bp, Homo sapien
tatcaacttccacttcaagcaaaac

SEQ ID NO: 5991622 - DNA, 25 bp, Homo sapien
taccgatagcactagttgggacttg

SEQ ID NO: 5991623 - DNA, 25 bp, Homo sapien
gctgtaacatcctttggtaaatcga

SEQ ID NO: 5991624 - DNA, 25 bp, Homo sapien
tggcaaaacaggaacttttttatca

SEQ ID NO: 5991625 - DNA, 25 bp, Homo sapien
tggccttttagaggctggtaatgga

SEQ ID NO: 5991626 - DNA, 25 bp, Homo sapien
ttggtggcacctggcccagaagtaa

SEQ ID NO: 5991627 - DNA, 25 bp, Homo sapien
tggtagaaacgaattctttcaactt

SEQ ID NO: 5991628 - DNA, 25 bp, Homo sapien
tatgacgtaattcagtctgttgtct

SEQ ID NO: 5991629 - DNA, 25 bp, Homo sapien
ataccttgctcttcattgttcaaaa

SEQ ID NO: 5991630 - DNA, 25 bp, Homo sapien
acctgccaccattggcaaaacagga

SEQ ID NO: 5991631 - DNA, 25 bp, Homo sapien
ggtggcacctggcccagaagtaacc

SEQ ID NO: 5991632 - DNA, 25 bp, Homo sapien
ggaagaacgaagttgaatttatcac

SEQ ID NO: 5991633 - DNA, 25 bp, Homo sapien
cgatgttcgtagaacagggattgcc

SEQ ID NO: 5991634 - DNA, 25 bp, Homo sapien
accctcggcagctgcacgacgagct

SEQ ID NO: 5991635 - DNA, 25 bp, Homo sapien
cattttgcactgccaggttggcagt

SEQ ID NO: 5991636 - DNA, 25 bp, Homo sapien
atttgaccaccagttaaaccgacga

SEQ ID NO: 5991637 - DNA, 25 bp, Homo sapien
ggaaaatctttgacatcattttgcc

SEQ ID NO: 5991638 - DNA, 25 bp, Homo sapien
caccattggcaaaacaggaactttt

SEQ ID NO: 5991639 - DNA, 25 bp, Homo sapien
aacagggattgccattgagtaacca

SEQ ID NO: 5991640 - DNA, 25 bp, Homo sapien
ctaatggatcaacattgaaacttgg

SEQ ID NO: 5991641 - DNA, 25 bp, Homo sapien
ccatagcctccgctagttttatgaa

SEQ ID NO: 5991642 - DNA, 25 bp, Homo sapien
tccacttcaagcaaaactgggccct

SEQ ID NO: 5991643 - DNA, 25 bp, Homo sapien
tcaagcaaaactgggcccttggtag

SEQ ID NO: 5991644 - DNA, 25 bp, Homo sapien
tctttcaacttagcgtccaattcct

SEQ ID NO: 5991645 - DNA, 25 bp, Homo sapien
acgaattctttcaacttagcgtcca

SEQ ID NO: 5991646 - DNA, 25 bp, Homo sapien
tcactggagtaccagcttgaacggc

SEQ ID NO: 5991647 - DNA, 25 bp, Homo sapien
taattttagatcctggagtctcctc

SEQ ID NO: 5991648 - DNA, 25 bp, Homo sapien
cctcggcagctgcacgacgagcttc

SEQ ID NO: 5991649 - DNA, 25 bp, Homo sapien
caattgatgtgtgtgggaataacga

SEQ ID NO: 5991650 - DNA, 25 bp, Homo sapien
cacatttgatgttgccccacacccg

SEQ ID NO: 5991651 - DNA, 25 bp, Homo sapien
tccttaactgggaaaatctttgaca

SEQ ID NO: 5991652 - DNA, 25 bp, Homo sapien
taggatagcaccacctggataacca

SEQ ID NO: 5991653 - DNA, 25 bp, Homo sapien
ccatgacattccatttcgtacaaga

SEQ ID NO: 5991654 - DNA, 25 bp, Homo sapien
cgttggcaaccttggatagtttctt

SEQ ID NO: 5991655 - DNA, 25 bp, Homo sapien
gctaccacctgccaccattggcaaa

SEQ ID NO: 5991656 - DNA, 25 bp, Homo sapien
actaacctcgaaatgaataatacca

SEQ ID NO: 5991657 - DNA, 25 bp, Homo sapien
aaaggatgcgtcaccatcaatgtca

SEQ ID NO: 5991658 - DNA, 25 bp, Homo sapien
tatccatgtcaggctcagcgcgtag

SEQ ID NO: 5991659 - DNA, 25 bp, Homo sapien
caggtttctttgccaagttgatcaa

SEQ ID NO: 5991660 - DNA, 25 bp, Homo sapien
agcgaatttagaaatattaccagtg

SEQ ID NO: 5991661 - DNA, 25 bp, Homo sapien
caattttgaaggttcagcgggctgt

SEQ ID NO: 5991662 - DNA, 25 bp, Homo sapien
atgacattccatttcgtacaagatc

SEQ ID NO: 5991663 - DNA, 25 bp, Homo sapien
aaatcgaccaagactggtcccggtc

SEQ ID NO: 5991664 - DNA, 25 bp, Homo sapien
gtctgcaaaggcatctgccattgga

SEQ ID NO: 5991665 - DNA, 25 bp, Homo sapien
ttaaaataccagcaccgacgtataa

SEQ ID NO: 5991666 - DNA, 25 bp, Homo sapien
atacagtatcaacgttttgtctgga

SEQ ID NO: 5991667 - DNA, 25 bp, Homo sapien
cagtctgttgtctttcaacttctgg

SEQ ID NO: 5991668 - DNA, 25 bp, Homo sapien
aacgatgttcgtagaacagggattg

SEQ ID NO: 5991669 - DNA, 25 bp, Homo sapien
atttctccatgtccagtgttgagca

SEQ ID NO: 5991670 - DNA, 25 bp, Homo sapien
ttcaattgatgtgtgtgggaataac

SEQ ID NO: 5991671 - DNA, 25 bp, Homo sapien
tagcacaaccgtgcataccaagcat

SEQ ID NO: 5991672 - DNA, 25 bp, Homo sapien
ggaatcccgtctgcaaaggcatctg

SEQ ID NO: 5991673 - DNA, 25 bp, Homo sapien
gactggttaattggtttagtgcgtt

SEQ ID NO: 5991674 - DNA, 25 bp, Homo sapien
ttgatactttgcatgacaaattcat

SEQ ID NO: 5991675 - DNA, 25 bp, Homo sapien
atcattttgcccagattggtcgtag

SEQ ID NO: 5991676 - DNA, 25 bp, Homo sapien
tactgatctcatggcaggtgtgttg

SEQ ID NO: 5991677 - DNA, 25 bp, Homo sapien
tctttgccaagttgatcaaatctgc

SEQ ID NO: 5991678 - DNA, 25 bp, Homo sapien
aaaccttgtaaagtagtggtgacag

SEQ ID NO: 5991679 - DNA, 25 bp, Homo sapien
tagaggctggtaatggagacgcact

SEQ ID NO: 5991680 - DNA, 25 bp, Homo sapien
atcaccttccactgctatttgagtt

SEQ ID NO: 5991681 - DNA, 25 bp, Homo sapien
tgttgcggtatgctatatgttgaaa

SEQ ID NO: 5991682 - DNA, 25 bp, Homo sapien
aaaatctttgacatcattttgccca

SEQ ID NO: 5991683 - DNA, 25 bp, Homo sapien
tttgatggaagagttgtttttgttg

SEQ ID NO: 5991684 - DNA, 25 bp, Homo sapien
ttgaacggcagaactcaattccgtt

SEQ ID NO: 5991685 - DNA, 25 bp, Homo sapien
ctaccctcggcagctgcacgacgag

SEQ ID NO: 5991686 - DNA, 25 bp, Homo sapien
cctgtaaagacaaccattggaatcc

SEQ ID NO: 5991687 - DNA, 25 bp, Homo sapien
tcagtaccgatagcactagttggga

SEQ ID NO: 5991688 - DNA, 25 bp, Homo sapien
aatggatcaacattgaaacttggag

SEQ ID NO: 5991689 - DNA, 25 bp, Homo sapien
attgttcaaaatcaaaatcttcact

SEQ ID NO: 5991690 - DNA, 25 bp, Homo sapien
gcactgtaataacgggaagacgaac

SEQ ID NO: 5991691 - DNA, 25 bp, Homo sapien
ctggagcgaatttagaaatattacc

SEQ ID NO: 5991692 - DNA, 25 bp, Homo sapien
ctggcccagaagtaaccaagacaac

SEQ ID NO: 5991693 - DNA, 25 bp, Homo sapien
ggcattttgcactgccaggttggca

SEQ ID NO: 5991694 - DNA, 25 bp, Homo sapien
gtatgggtattccttcttccattta

SEQ ID NO: 5991695 - DNA, 25 bp, Homo sapien
ggtaggatagcaccacctggataac

SEQ ID NO: 5991696 - DNA, 25 bp, Homo sapien
tcaaaatttatgaactcgtctagac

SEQ ID NO: 5991697 - DNA, 25 bp, Homo sapien
gcaggctctggccttttagaggctg

SEQ ID NO: 5991698 - DNA, 25 bp, Homo sapien
atagcctccgctagttttatgaaat

SEQ ID NO: 5991699 - DNA, 25 bp, Homo sapien
ggactaacctcgaaatgaataatac

SEQ ID NO: 5991700 - DNA, 25 bp, Homo sapien
cttctgccatgtgaccggcaccttg

SEQ ID NO: 5991701 - DNA, 25 bp, Homo sapien
tgtttatgttttttggactaacctc

SEQ ID NO: 5991702 - DNA, 25 bp, Homo sapien
gaccatgacattccatttcgtacaa

SEQ ID NO: 5991703 - DNA, 25 bp, Homo sapien
tttttgttggaattggatttcttaa

SEQ ID NO: 5991704 - DNA, 25 bp, Homo sapien
ttaccgcctgtacgcttatgacgta

SEQ ID NO: 5991705 - DNA, 25 bp, Homo sapien
cgcctgtacgcttatgacgtaattc

SEQ ID NO: 5991706 - DNA, 25 bp, Homo sapien
ttgccattgagtaaccataccttgc

SEQ ID NO: 5991707 - DNA, 25 bp, Homo sapien
gttgggacttgccctgtaaagacaa

SEQ ID NO: 5991708 - DNA, 25 bp, Homo sapien
tggtcgtagcatcaccttccactgc

SEQ ID NO: 5991709 - DNA, 25 bp, Homo sapien
aggctcagcgcgtagtttcttagcc

SEQ ID NO: 5991710 - DNA, 25 bp, Homo sapien
gtgcataccaagcatatccaatgat

SEQ ID NO: 5991711 - DNA, 25 bp, Homo sapien
ggtatttgagcacggtcacttaatt

SEQ ID NO: 5991712 - DNA, 25 bp, Homo sapien
caccacctggataaccaaatacagt

SEQ ID NO: 5991713 - DNA, 25 bp, Homo sapien
ttccactgctatttgagtttgaaca

SEQ ID NO: 5991714 - DNA, 25 bp, Homo sapien
ggtttaattttagatcctggagtct

SEQ ID NO: 5991715 - DNA, 25 bp, Homo sapien
ttctccatgtccagtgttgagcagc

SEQ ID NO: 5991716 - DNA, 25 bp, Homo sapien
aatctgctgctttattgatactttg

SEQ ID NO: 5991717 - DNA, 25 bp, Homo sapien
ccagtgttgagcagcccacatttga

SEQ ID NO: 5991718 - DNA, 25 bp, Homo sapien
gatctcatggcaggtgtgttgcggt

SEQ ID NO: 5991719 - DNA, 25 bp, Homo sapien
tgatgtgtgtgggaataacgatgtt

SEQ ID NO: 5991720 - DNA, 25 bp, Homo sapien
atcctttggtaaatcgaccaagact

SEQ ID NO: 5991721 - DNA, 25 bp, Homo sapien
tgacgtaattcagtctgttgtcttt

SEQ ID NO: 5991722 - DNA, 25 bp, Homo sapien
gtgcttaccgcctgtacgcttatga

SEQ ID NO: 5991723 - DNA, 25 bp, Homo sapien
ttttggactaacctcgaaatgaata

SEQ ID NO: 5991724 - DNA, 25 bp, Homo sapien
gtttaaaataccagcaccgacgtat

SEQ ID NO: 5991725 - DNA, 25 bp, Homo sapien
agcatcagtaccgatagcactagtt

SEQ ID NO: 5991726 - DNA, 25 bp, Homo sapien
gtgacaggtatttgagcacggtcac

SEQ ID NO: 5991727 - DNA, 25 bp, Homo sapien
cccagaagtaaccaagacaacacct

SEQ ID NO: 5991728 - DNA, 25 bp, Homo sapien
aacttctgggtcaaaatttatgaac

SEQ ID NO: 5991729 - DNA, 25 bp, Homo sapien
cagcttgaacggcagaactcaattc

SEQ ID NO: 5991730 - DNA, 25 bp, Homo sapien
aacttggagcaggctctggcctttt

SEQ ID NO: 5991731 - DNA, 25 bp, Homo sapien
aaatcttcactggagtaccagcttg

SEQ ID NO: 5991732 - DNA, 25 bp, Homo sapien
aattccgttagagtcatgttaaagg

SEQ ID NO: 5991733 - DNA, 25 bp, Homo sapien
acgagcttctggagcgaatttagaa

SEQ ID NO: 5991734 - DNA, 25 bp, Homo sapien
agattggtcgtagcatcaccttcca

SEQ ID NO: 5991735 - DNA, 25 bp, Homo sapien
atgtgaccggcaccttgttcgtgtt

SEQ ID NO: 5991736 - DNA, 25 bp, Homo sapien
ggaagagttgtttttgttggaattg

SEQ ID NO: 5991737 - DNA, 25 bp, Homo sapien
ttttggaagaacgaagttgaattta

SEQ ID NO: 5991738 - DNA, 25 bp, Homo sapien
ggttcagcgggctgttctaatggat

SEQ ID NO: 5991739 - DNA, 25 bp, Homo sapien
tgttcaaaatcaaaatcttcactgg

SEQ ID NO: 5991740 - DNA, 25 bp, Homo sapien
gaattctttcaacttagcgtccaat

SEQ ID NO: 5991741 - DNA, 25 bp, Homo sapien
ttcaaaatcaaaatcttcactggag

SEQ ID NO: 5991742 - DNA, 25 bp, Homo sapien
tgagcacggtcacttaattctttta

SEQ ID NO: 5991743 - DNA, 25 bp, Homo sapien
ttaatacgcaatggcaattcttcca

SEQ ID NO: 5991744 - DNA, 25 bp, Homo sapien
cgtacaagatctagaaataccaacg

SEQ ID NO: 5991745 - DNA, 25 bp, Homo sapien
aagaggtatccatgtcaggctcagc

SEQ ID NO: 5991746 - DNA, 25 bp, Homo sapien
accaagcatatccaatgattttgga

SEQ ID NO: 5991747 - DNA, 25 bp, Homo sapien
aaccataccttgctcttcattgttc

SEQ ID NO: 5991748 - DNA, 25 bp, Homo sapien
ttcttagccaattttgaaggttcag

SEQ ID NO: 5991749 - DNA, 25 bp, Homo sapien
accgctcgtggcaatttcaaaagcc

SEQ ID NO: 5991750 - DNA, 25 bp, Homo sapien
accagcttgaacggcagaactcaat

SEQ ID NO: 5991751 - DNA, 25 bp, Homo sapien
ttgcggtatgctatatgttgaaagc

SEQ ID NO: 5991752 - DNA, 25 bp, Homo sapien
ctagttttatgaaatcagggttcaa

SEQ ID NO: 5991753 - DNA, 25 bp, Homo sapien
gaagctctggcgtagccttctgcca

SEQ ID NO: 5991754 - DNA, 25 bp, Homo sapien
ttaccagtgacacggtcgtcgaatc

SEQ ID NO: 5991755 - DNA, 25 bp, Homo sapien
ggagtaacgacattggtggcacctg

SEQ ID NO: 5991756 - DNA, 25 bp, Homo sapien
aacttgagcaccgatggcggcaggg

SEQ ID NO: 5991757 - DNA, 25 bp, Homo sapien
ccccacacccgttgtaacaatgaca

SEQ ID NO: 5991758 - DNA, 25 bp, Homo sapien
attttagatcctggagtctcctcca

SEQ ID NO: 5991759 - DNA, 25 bp, Homo sapien
tctgccatgtgaccggcaccttgtt

SEQ ID NO: 5991760 - DNA, 25 bp, Homo sapien
ttggaaagcatcagtaccgatagca

SEQ ID NO: 5991761 - DNA, 25 bp, Homo sapien
aaaccgacgaaagaggtatccatgt

SEQ ID NO: 5991762 - DNA, 25 bp, Homo sapien
actgaacgaaaggaacataagacag

SEQ ID NO: 5991763 - DNA, 25 bp, Homo sapien
tttcactaagctatatctggacaat

SEQ ID NO: 5991764 - DNA, 25 bp, Homo sapien
gcgactacccagaagctaaaaggaa

SEQ ID NO: 5991765 - DNA, 25 bp, Homo sapien
ttgtaggacatgttgcaagttgtcc

SEQ ID NO: 5991766 - DNA, 25 bp, Homo sapien
tgaagcacttgaactgtattgggga

SEQ ID NO: 5991767 - DNA, 25 bp, Homo sapien
ctggatcaacaaagccgatgggatt

SEQ ID NO: 5991768 - DNA, 25 bp, Homo sapien
ggcaagaataagccctcagcaaaaa

SEQ ID NO: 5991769 - DNA, 25 bp, Homo sapien
caatgtctttgtcttttcactaagc

SEQ ID NO: 5991770 - DNA, 25 bp, Homo sapien
ccccatatcaacgacgtggattagg

SEQ ID NO: 5991771 - DNA, 25 bp, Homo sapien
cagcgactacccagaagctaaaagg

SEQ ID NO: 5991772 - DNA, 25 bp, Homo sapien
tactgcttcaaatacacggatgatc

SEQ ID NO: 5991773 - DNA, 25 bp, Homo sapien
gtagatcattatgaattttacatag

SEQ ID NO: 5991774 - DNA, 25 bp, Homo sapien
cggtttgtaggacatgttgcaagtt

SEQ ID NO: 5991775 - DNA, 25 bp, Homo sapien
tttctaacagccaatactggctaga

SEQ ID NO: 5991776 - DNA, 25 bp, Homo sapien
ctgttggcaccttattgaaggtgac

SEQ ID NO: 5991777 - DNA, 25 bp, Homo sapien
ctacatggaacaaaacggaattggt

SEQ ID NO: 5991778 - DNA, 25 bp, Homo sapien
aaaatacaagagtcctgaatataca

SEQ ID NO: 5991779 - DNA, 25 bp, Homo sapien
caatgatgttattttgaccttgaag

SEQ ID NO: 5991780 - DNA, 25 bp, Homo sapien
aatactggctagacactcttttcgt

SEQ ID NO: 5991781 - DNA, 25 bp, Homo sapien
atcgtgactggaatgagagtcaatg

SEQ ID NO: 5991782 - DNA, 25 bp, Homo sapien
gaatgagagtcaatgatgttatttt

SEQ ID NO: 5991783 - DNA, 25 bp, Homo sapien
tccatgtatttcaaagtagatcatt

SEQ ID NO: 5991784 - DNA, 25 bp, Homo sapien
aggaacataagacagattcagtttg

SEQ ID NO: 5991785 - DNA, 25 bp, Homo sapien
aagtatcaactcttttgccaatgtc

SEQ ID NO: 5991786 - DNA, 25 bp, Homo sapien
ccgatgggattcttttcgaaagatt

SEQ ID NO: 5991787 - DNA, 25 bp, Homo sapien
aagtagatcattatgaattttacat

SEQ ID NO: 5991788 - DNA, 25 bp, Homo sapien
ttatcgagttttcatacaaactatc

SEQ ID NO: 5991789 - DNA, 25 bp, Homo sapien
ttaagtcaatcactcacagcgacta

SEQ ID NO: 5991790 - DNA, 25 bp, Homo sapien
tatcagggccagaagtaccgttatc

SEQ ID NO: 5991791 - DNA, 25 bp, Homo sapien
atgctatatggaatactgaacgaaa

SEQ ID NO: 5991792 - DNA, 25 bp, Homo sapien
atttcgatcctgaaacaaaaaggct

SEQ ID NO: 5991793 - DNA, 25 bp, Homo sapien
ttaaaagatgaatatttgctgatag

SEQ ID NO: 5991794 - DNA, 25 bp, Homo sapien
cttattgaaggtgacctcgcccatt

SEQ ID NO: 5991795 - DNA, 25 bp, Homo sapien
aaaattctctacttggtatgggagc

SEQ ID NO: 5991796 - DNA, 25 bp, Homo sapien
ggacaataaatccatgtatttcaaa

SEQ ID NO: 5991797 - DNA, 25 bp, Homo sapien
accttattgaaggtgacctcgccca

SEQ ID NO: 5991798 - DNA, 25 bp, Homo sapien
aattctctacttggtatgggagcgc

SEQ ID NO: 5991799 - DNA, 25 bp, Homo sapien
cctcgcccattatgataaagtgacc

SEQ ID NO: 5991800 - DNA, 25 bp, Homo sapien
gtttgtaggacatgttgcaagttgt

SEQ ID NO: 5991801 - DNA, 25 bp, Homo sapien
ctacccagaagctaaaaggaaagaa

SEQ ID NO: 5991802 - DNA, 25 bp, Homo sapien
tacaaactatcccaattagaaggtg

SEQ ID NO: 5991803 - DNA, 25 bp, Homo sapien
tgaaacaaaaaggctagggtgctcc

SEQ ID NO: 5991804 - DNA, 25 bp, Homo sapien
catttcaatatcgtgttccaggcaa

SEQ ID NO: 5991805 - DNA, 25 bp, Homo sapien
atgtctttgtcttttcactaagcta

SEQ ID NO: 5991806 - DNA, 25 bp, Homo sapien
gccaatgtctttgtcttttcactaa

SEQ ID NO: 5991807 - DNA, 25 bp, Homo sapien
taggccttttacttatcgagttttc

SEQ ID NO: 5991808 - DNA, 25 bp, Homo sapien
agttttcatacaaactatcccaatt

SEQ ID NO: 5991809 - DNA, 25 bp, Homo sapien
gtaggacatgttgcaagttgtccat

SEQ ID NO: 5991810 - DNA, 25 bp, Homo sapien
tattgaaggtgacctcgcccattat

SEQ ID NO: 5991811 - DNA, 25 bp, Homo sapien
gtggattaggccttttacttatcga

SEQ ID NO: 5991812 - DNA, 25 bp, Homo sapien
tcactaagctatatctggacaataa

SEQ ID NO: 5991813 - DNA, 25 bp, Homo sapien
tcgcccattatgataaagtgaccct

SEQ ID NO: 5991814 - DNA, 25 bp, Homo sapien
tgactggaatgagagtcaatgatgt

SEQ ID NO: 5991815 - DNA, 25 bp, Homo sapien
atcagacgcggtttgtaggacatgt

SEQ ID NO: 5991816 - DNA, 25 bp, Homo sapien
gcttcaaatacacggatgatcagac

SEQ ID NO: 5991817 - DNA, 25 bp, Homo sapien
tgtttctaacagccaatactggcta

SEQ ID NO: 5991818 - DNA, 25 bp, Homo sapien
aaactcaaaaagagatgctatatgg

SEQ ID NO: 5991819 - DNA, 25 bp, Homo sapien
aacgaaaggaacataagacagattc

SEQ ID NO: 5991820 - DNA, 25 bp, Homo sapien
gggtgctccgagaccaagggtcagc

SEQ ID NO: 5991821 - DNA, 25 bp, Homo sapien
aactatcccaattagaaggtgtaat

SEQ ID NO: 5991822 - DNA, 25 bp, Homo sapien
cggaattggttcaaattaaaagatg

SEQ ID NO: 5991823 - DNA, 25 bp, Homo sapien
agccgatgggattcttttcgaaaga

SEQ ID NO: 5991824 - DNA, 25 bp, Homo sapien
ccaagtatcaactcttttgccaatg

SEQ ID NO: 5991825 - DNA, 25 bp, Homo sapien
aaaaaggctagggtgctccgagacc

SEQ ID NO: 5991826 - DNA, 25 bp, Homo sapien
ggatcaacaaagccgatgggattct

SEQ ID NO: 5991827 - DNA, 25 bp, Homo sapien
aagacagattcagtttggactgaat

SEQ ID NO: 5991828 - DNA, 25 bp, Homo sapien
gtgtaatatcagggccagaagtacc

SEQ ID NO: 5991829 - DNA, 25 bp, Homo sapien
tatcaccttttggactaatcgggta

SEQ ID NO: 5991830 - DNA, 25 bp, Homo sapien
cctctgtttctaacagccaatactg

SEQ ID NO: 5991831 - DNA, 25 bp, Homo sapien
gtggaaaaggcaagaataagccctc

SEQ ID NO: 5991832 - DNA, 25 bp, Homo sapien
tagggtgctccgagaccaagggtca

SEQ ID NO: 5991833 - DNA, 25 bp, Homo sapien
tatggaatactgaacgaaaggaaca

SEQ ID NO: 5991834 - DNA, 25 bp, Homo sapien
aatttacttgcagtcattgaatagc

SEQ ID NO: 5991835 - DNA, 25 bp, Homo sapien
aatccatgtatttcaaagtagatca

SEQ ID NO: 5991836 - DNA, 25 bp, Homo sapien
agagtcctgaatatacaataagaag

SEQ ID NO: 5991837 - DNA, 25 bp, Homo sapien
cgccgtttatttcgatcctgaaaca

SEQ ID NO: 5991838 - DNA, 25 bp, Homo sapien
caaagtagatcattatgaattttac

SEQ ID NO: 5991839 - DNA, 25 bp, Homo sapien
taagccctcagcaaaaattaaaaaa

SEQ ID NO: 5991840 - DNA, 25 bp, Homo sapien
tcccccatatcaacgacgtggatta

SEQ ID NO: 5991841 - DNA, 25 bp, Homo sapien
ctagacactcttttcgtttgtgaat

SEQ ID NO: 5991842 - DNA, 25 bp, Homo sapien
ctctacttggtatgggagcgccgtt

SEQ ID NO: 5991843 - DNA, 25 bp, Homo sapien
gaaggtgacctcgcccattatgata

SEQ ID NO: 5991844 - DNA, 25 bp, Homo sapien
ccagaagctaaaaggaaagaagaat

SEQ ID NO: 5991845 - DNA, 25 bp, Homo sapien
aggtgacctcgcccattatgataaa

SEQ ID NO: 5991846 - DNA, 25 bp, Homo sapien
gaaagaagaatggtggaaaaggcaa

SEQ ID NO: 5991847 - DNA, 25 bp, Homo sapien
ttcgaaagatttagtgtcatatcag

SEQ ID NO: 5991848 - DNA, 25 bp, Homo sapien
caacaaagccgatgggattcttttc

SEQ ID NO: 5991849 - DNA, 25 bp, Homo sapien
tcgtgttccaggcaaaataaaatac

SEQ ID NO: 5991850 - DNA, 25 bp, Homo sapien
caagagtcctgaatatacaataaga

SEQ ID NO: 5991851 - DNA, 25 bp, Homo sapien
taccgttatcaccttttggactaat

SEQ ID NO: 5991852 - DNA, 25 bp, Homo sapien
aaaataatctagcgtgcatcttgat

SEQ ID NO: 5991853 - DNA, 25 bp, Homo sapien
tgaccttgaagcacttgaactgtat

SEQ ID NO: 5991854 - DNA, 25 bp, Homo sapien
cactcacagcgactacccagaagct

SEQ ID NO: 5991855 - DNA, 25 bp, Homo sapien
cacggatgatcagacgcggtttgta

SEQ ID NO: 5991856 - DNA, 25 bp, Homo sapien
tgcatcttgatatttcccccatatc

SEQ ID NO: 5991857 - DNA, 25 bp, Homo sapien
ccatatcaacgacgtggattaggcc

SEQ ID NO: 5991858 - DNA, 25 bp, Homo sapien
aaggcaagaataagccctcagcaaa

SEQ ID NO: 5991859 - DNA, 25 bp, Homo sapien
ctctgttggcaccttattgaaggtg

SEQ ID NO: 5991860 - DNA, 25 bp, Homo sapien
catacaaactatcccaattagaagg

SEQ ID NO: 5991861 - DNA, 25 bp, Homo sapien
cgcggtttgtaggacatgttgcaag

SEQ ID NO: 5991862 - DNA, 25 bp, Homo sapien
ctacttggtatgggagcgccgttta

SEQ ID NO: 5991863 - DNA, 25 bp, Homo sapien
aatatcgtgttccaggcaaaataaa

SEQ ID NO: 5991864 - DNA, 25 bp, Homo sapien
ggtacttgaaatattggtcacagat

SEQ ID NO: 5991865 - DNA, 25 bp, Homo sapien
tgatcagacgcggtttgtaggacat

SEQ ID NO: 5991866 - DNA, 25 bp, Homo sapien
atctggacaataaatccatgtattt

SEQ ID NO: 5991867 - DNA, 25 bp, Homo sapien
tatgataaagtgaccctggaggatc

SEQ ID NO: 5991868 - DNA, 25 bp, Homo sapien
accaaatttacttgcagtcattgaa

SEQ ID NO: 5991869 - DNA, 25 bp, Homo sapien
tgataaagtgaccctggaggatctt

SEQ ID NO: 5991870 - DNA, 25 bp, Homo sapien
tgtcatatcagcaaaataatctagc

SEQ ID NO: 5991871 - DNA, 25 bp, Homo sapien
agggccagaagtaccgttatcacct

SEQ ID NO: 5991872 - DNA, 25 bp, Homo sapien
acaaaaaggctagggtgctccgaga

SEQ ID NO: 5991873 - DNA, 25 bp, Homo sapien
catagtttatgaaactggatcaaca

SEQ ID NO: 5991874 - DNA, 25 bp, Homo sapien
aaaaaattctctacttggtatggga

SEQ ID NO: 5991875 - DNA, 25 bp, Homo sapien
ccttttggactaatcgggtacttga

SEQ ID NO: 5991876 - DNA, 25 bp, Homo sapien
aaataaaatacaagagtcctgaata

SEQ ID NO: 5991877 - DNA, 25 bp, Homo sapien
ttcctctgtttctaacagccaatac

SEQ ID NO: 5991878 - DNA, 25 bp, Homo sapien
cgaaagatttagtgtcatatcagca

SEQ ID NO: 5991879 - DNA, 25 bp, Homo sapien
atatctggacaataaatccatgtat

SEQ ID NO: 5991880 - DNA, 25 bp, Homo sapien
ctttccatcgtgactggaatgagag

SEQ ID NO: 5991881 - DNA, 25 bp, Homo sapien
aatatcagggccagaagtaccgtta

SEQ ID NO: 5991882 - DNA, 25 bp, Homo sapien
tcttttcgtttgtgaatactgcttc

SEQ ID NO: 5991883 - DNA, 25 bp, Homo sapien
aagcacttgaactgtattggggaga

SEQ ID NO: 5991884 - DNA, 25 bp, Homo sapien
ggtcagctttcctctgtttctaaca

SEQ ID NO: 5991885 - DNA, 25 bp, Homo sapien
tggaatactgaacgaaaggaacata

SEQ ID NO: 5991886 - DNA, 25 bp, Homo sapien
ttgaatagctggttgaaactacatg

SEQ ID NO: 5991887 - DNA, 25 bp, Homo sapien
tatcgtgttccaggcaaaataaaat

SEQ ID NO: 5991888 - DNA, 25 bp, Homo sapien
acagccaatactggctagacactct

SEQ ID NO: 5991889 - DNA, 25 bp, Homo sapien
cgtttgtgaatactgcttcaaatac

SEQ ID NO: 5991890 - DNA, 25 bp, Homo sapien
ctcacagcgactacccagaagctaa

SEQ ID NO: 5991891 - DNA, 25 bp, Homo sapien
agtcctgaatatacaataagaagag

SEQ ID NO: 5991892 - DNA, 25 bp, Homo sapien
gtcattgaatagctggttgaaacta

SEQ ID NO: 5991893 - DNA, 25 bp, Homo sapien
ggattcttttcgaaagatttagtgt

SEQ ID NO: 5991894 - DNA, 25 bp, Homo sapien
aggacatgttgcaagttgtccattt

SEQ ID NO: 5991895 - DNA, 25 bp, Homo sapien
accttgaagcacttgaactgtattg

SEQ ID NO: 5991896 - DNA, 25 bp, Homo sapien
tgaaatattggtcacagatactctg

SEQ ID NO: 5991897 - DNA, 25 bp, Homo sapien
ccgttatcaccttttggactaatcg

SEQ ID NO: 5991898 - DNA, 25 bp, Homo sapien
tcatatcagcaaaataatctagcgt

SEQ ID NO: 5991899 - DNA, 25 bp, Homo sapien
cacagcgactacccagaagctaaaa

SEQ ID NO: 5991900 - DNA, 25 bp, Homo sapien
cttgaaatattggtcacagatactc

SEQ ID NO: 5991901 - DNA, 25 bp, Homo sapien
agggtcagctttcctctgtttctaa

SEQ ID NO: 5991902 - DNA, 25 bp, Homo sapien
gttgtccatttcaatatcgtgttcc

SEQ ID NO: 5991903 - DNA, 25 bp, Homo sapien
gttatcaccttttggactaatcggg

SEQ ID NO: 5991904 - DNA, 25 bp, Homo sapien
aactacatggaacaaaacggaattg

SEQ ID NO: 5991905 - DNA, 25 bp, Homo sapien
cctggaggatctttccatcgtgact

SEQ ID NO: 5991906 - DNA, 25 bp, Homo sapien
aaagccgatgggattcttttcgaaa

SEQ ID NO: 5991907 - DNA, 25 bp, Homo sapien
gaacataagacagattcagtttgga

SEQ ID NO: 5991908 - DNA, 25 bp, Homo sapien
tacacggatgatcagacgcggtttg

SEQ ID NO: 5991909 - DNA, 25 bp, Homo sapien
gacagattcagtttggactgaataa

SEQ ID NO: 5991910 - DNA, 25 bp, Homo sapien
tgaacgaaaggaacataagacagat

SEQ ID NO: 5991911 - DNA, 25 bp, Homo sapien
caaaataaaatacaagagtcctgaa

SEQ ID NO: 5991912 - DNA, 25 bp, Homo sapien
gatgttattttgaccttgaagcact

SEQ ID NO: 5991913 - DNA, 25 bp, Homo sapien
ttgccaatgtctttgtcttttcact

SEQ ID NO: 5991914 - DNA, 25 bp, Homo sapien
aaacaaaaaggctagggtgctccga

SEQ ID NO: 5991915 - DNA, 25 bp, Homo sapien
cttttcactaagctatatctggaca

SEQ ID NO: 5991916 - DNA, 25 bp, Homo sapien
ataaaaaattctctacttggtatgg

SEQ ID NO: 5991917 - DNA, 25 bp, Homo sapien
ttcatacaaactatcccaattagaa

SEQ ID NO: 5991918 - DNA, 25 bp, Homo sapien
ccaatactggctagacactcttttc

SEQ ID NO: 5991919 - DNA, 25 bp, Homo sapien
catgtatttcaaagtagatcattat

SEQ ID NO: 5991920 - DNA, 25 bp, Homo sapien
agatcattatgaattttacatagtt

SEQ ID NO: 5991921 - DNA, 25 bp, Homo sapien
aagtcaatcactcacagcgactacc

SEQ ID NO: 5991922 - DNA, 25 bp, Homo sapien
ctggacaataaatccatgtatttca

SEQ ID NO: 5991923 - DNA, 25 bp, Homo sapien
aaagtgaccctggaggatctttcca

SEQ ID NO: 5991924 - DNA, 25 bp, Homo sapien
taagctatatctggacaataaatcc

SEQ ID NO: 5991925 - DNA, 25 bp, Homo sapien
ttgcaagttgtccatttcaatatcg

SEQ ID NO: 5991926 - DNA, 25 bp, Homo sapien
tcaaaaagagatgctatatggaata

SEQ ID NO: 5991927 - DNA, 25 bp, Homo sapien
tacatagtttatgaaactggatcaa

SEQ ID NO: 5991928 - DNA, 25 bp, Homo sapien
ggctagacactcttttcgtttgtga

SEQ ID NO: 5991929 - DNA, 25 bp, Homo sapien
ggggagaataaccaaatttacttgc

SEQ ID NO: 5991930 - DNA, 25 bp, Homo sapien
ttttggactaatcgggtacttgaaa

SEQ ID NO: 5991931 - DNA, 25 bp, Homo sapien
cagtcattgaatagctggttgaaac

SEQ ID NO: 5991932 - DNA, 25 bp, Homo sapien
ggagaataaccaaatttacttgcag

SEQ ID NO: 5991933 - DNA, 25 bp, Homo sapien
atcccaattagaaggtgtaatatca

SEQ ID NO: 5991934 - DNA, 25 bp, Homo sapien
aaaaagagatgctatatggaatact

SEQ ID NO: 5991935 - DNA, 25 bp, Homo sapien
aataagaagagtaaaaggatccaag

SEQ ID NO: 5991936 - DNA, 25 bp, Homo sapien
ttcaaatacacggatgatcagacgc

SEQ ID NO: 5991937 - DNA, 25 bp, Homo sapien
cttgaagcacttgaactgtattggg

SEQ ID NO: 5991938 - DNA, 25 bp, Homo sapien
gtaatatcagggccagaagtaccgt

SEQ ID NO: 5991939 - DNA, 25 bp, Homo sapien
gtcttttcactaagctatatctgga

SEQ ID NO: 5991940 - DNA, 25 bp, Homo sapien
gatgaatatttgctgatagatgact

SEQ ID NO: 5991941 - DNA, 25 bp, Homo sapien
aagttgtccatttcaatatcgtgtt

SEQ ID NO: 5991942 - DNA, 25 bp, Homo sapien
ggatccaagtatcaactcttttgcc

SEQ ID NO: 5991943 - DNA, 25 bp, Homo sapien
ctggctagacactcttttcgtttgt

SEQ ID NO: 5991944 - DNA, 25 bp, Homo sapien
taagaagagtaaaaggatccaagta

SEQ ID NO: 5991945 - DNA, 25 bp, Homo sapien
tactggctagacactcttttcgttt

SEQ ID NO: 5991946 - DNA, 25 bp, Homo sapien
actaagctatatctggacaataaat

SEQ ID NO: 5991947 - DNA, 25 bp, Homo sapien
ctatatctggacaataaatccatgt

SEQ ID NO: 5991948 - DNA, 25 bp, Homo sapien
attggtcacagatactctgttggca

SEQ ID NO: 5991949 - DNA, 25 bp, Homo sapien
atctttccatcgtgactggaatgag

SEQ ID NO: 5991950 - DNA, 25 bp, Homo sapien
ttcgatcctgaaacaaaaaggctag

SEQ ID NO: 5991951 - DNA, 25 bp, Homo sapien
aataaccaaatttacttgcagtcat

SEQ ID NO: 5991952 - DNA, 25 bp, Homo sapien
gagagtcaatgatgttattttgacc

SEQ ID NO: 5991953 - DNA, 25 bp, Homo sapien
agcgccgtttatttcgatcctgaaa

SEQ ID NO: 5991954 - DNA, 25 bp, Homo sapien
tgttattttgaccttgaagcacttg

SEQ ID NO: 5991955 - DNA, 25 bp, Homo sapien
aatactgcttcaaatacacggatga

SEQ ID NO: 5991956 - DNA, 25 bp, Homo sapien
aagagtaaaaggatccaagtatcaa

SEQ ID NO: 5991957 - DNA, 25 bp, Homo sapien
atatcaacgacgtggattaggcctt

SEQ ID NO: 5991958 - DNA, 25 bp, Homo sapien
aaggatccaagtatcaactcttttg

SEQ ID NO: 5991959 - DNA, 25 bp, Homo sapien
tgtatttcaaagtagatcattatga

SEQ ID NO: 5991960 - DNA, 25 bp, Homo sapien
ctttaagtcaatcactcacagcgac

SEQ ID NO: 5991961 - DNA, 25 bp, Homo sapien
tgtgaatactgcttcaaatacacgg

SEQ ID NO: 5991962 - DNA, 25 bp, Homo sapien
atcgagttttcatacaaactatccc

SEQ ID NO: 5991963 - DNA, 25 bp, Homo sapien
cttgcagtcattgaatagctggttg

SEQ ID NO: 5991964 - DNA, 25 bp, Homo sapien
tagaaggtgtaatatcagggccaga

SEQ ID NO: 5991965 - DNA, 25 bp, Homo sapien
atcaactcttttgccaatgtctttg

SEQ ID NO: 5991966 - DNA, 25 bp, Homo sapien
aataatctagcgtgcatcttgatat

SEQ ID NO: 5991967 - DNA, 25 bp, Homo sapien
actggaatgagagtcaatgatgtta

SEQ ID NO: 5991968 - DNA, 25 bp, Homo sapien
gaaactggatcaacaaagccgatgg

SEQ ID NO: 5991969 - DNA, 25 bp, Homo sapien
aagatgaatatttgctgatagatga

SEQ ID NO: 5991970 - DNA, 25 bp, Homo sapien
aataagccctcagcaaaaattaaaa

SEQ ID NO: 5991971 - DNA, 25 bp, Homo sapien
gaatactgaacgaaaggaacataag

SEQ ID NO: 5991972 - DNA, 25 bp, Homo sapien
ggcaaaataaaatacaagagtcctg

SEQ ID NO: 5991973 - DNA, 25 bp, Homo sapien
attatgataaagtgaccctggagga

SEQ ID NO: 5991974 - DNA, 25 bp, Homo sapien
gagtaaaaggatccaagtatcaact

SEQ ID NO: 5991975 - DNA, 25 bp, Homo sapien
aggctagggtgctccgagaccaagg

SEQ ID NO: 5991976 - DNA, 25 bp, Homo sapien
ttgaaactacatggaacaaaacgga

SEQ ID NO: 5991977 - DNA, 25 bp, Homo sapien
gactgaataaaaaattctctacttg

SEQ ID NO: 5991978 - DNA, 25 bp, Homo sapien
tgggagcgccgtttatttcgatcct

SEQ ID NO: 5991979 - DNA, 25 bp, Homo sapien
acttggtatgggagcgccgtttatt

SEQ ID NO: 5991980 - DNA, 25 bp, Homo sapien
agctttcctctgtttctaacagcca

SEQ ID NO: 5991981 - DNA, 25 bp, Homo sapien
gaggatctttccatcgtgactggaa

SEQ ID NO: 5991982 - DNA, 25 bp, Homo sapien
tggcaccttattgaaggtgacctcg

SEQ ID NO: 5991983 - DNA, 25 bp, Homo sapien
agctatatctggacaataaatccat

SEQ ID NO: 5991984 - DNA, 25 bp, Homo sapien
aaagagatgctatatggaatactga

SEQ ID NO: 5991985 - DNA, 25 bp, Homo sapien
attagaaggtgtaatatcagggcca

SEQ ID NO: 5991986 - DNA, 25 bp, Homo sapien
cagcaaaataatctagcgtgcatct

SEQ ID NO: 5991987 - DNA, 25 bp, Homo sapien
atcagcaaaataatctagcgtgcat

SEQ ID NO: 5991988 - DNA, 25 bp, Homo sapien
ttgtcttttcactaagctatatctg

SEQ ID NO: 5991989 - DNA, 25 bp, Homo sapien
tcagggccagaagtaccgttatcac

SEQ ID NO: 5991990 - DNA, 25 bp, Homo sapien
aaatattggtcacagatactctgtt

SEQ ID NO: 5991991 - DNA, 25 bp, Homo sapien
atcctgaaacaaaaaggctagggtg

SEQ ID NO: 5991992 - DNA, 25 bp, Homo sapien
gtcaatgatgttattttgaccttga

SEQ ID NO: 5991993 - DNA, 25 bp, Homo sapien
atggcaagatctttaagtcaatcac

SEQ ID NO: 5991994 - DNA, 25 bp, Homo sapien
agctggttgaaactacatggaacaa

SEQ ID NO: 5991995 - DNA, 25 bp, Homo sapien
agagatgctatatggaatactgaac

SEQ ID NO: 5991996 - DNA, 25 bp, Homo sapien
agtaccgttatcaccttttggacta

SEQ ID NO: 5991997 - DNA, 25 bp, Homo sapien
caaactatcccaattagaaggtgta

SEQ ID NO: 5991998 - DNA, 25 bp, Homo sapien
tatatggaatactgaacgaaaggaa

SEQ ID NO: 5991999 - DNA, 25 bp, Homo sapien
ataagacagattcagtttggactga

SEQ ID NO: 5992000 - DNA, 25 bp, Homo sapien
atatcagcaaaataatctagcgtgc

SEQ ID NO: 5992001 - DNA, 25 bp, Homo sapien
tccaggcaaaataaaatacaagagt

SEQ ID NO: 5992002 - DNA, 25 bp, Homo sapien
gactacccagaagctaaaaggaaag

SEQ ID NO: 5992003 - DNA, 25 bp, Homo sapien
attttacatagtttatgaaactgga

SEQ ID NO: 5992004 - DNA, 25 bp, Homo sapien
catcttgatatttcccccatatcaa

SEQ ID NO: 5992005 - DNA, 25 bp, Homo sapien
agatgctatatggaatactgaacga

SEQ ID NO: 5992006 - DNA, 25 bp, Homo sapien
ctttgtcttttcactaagctatatc

SEQ ID NO: 5992007 - DNA, 25 bp, Homo sapien
cggatgatcagacgcggtttgtagg

SEQ ID NO: 5992008 - DNA, 25 bp, Homo sapien
taatcgggtacttgaaatattggtc

SEQ ID NO: 5992009 - DNA, 25 bp, Homo sapien
cgtgactggaatgagagtcaatgat

SEQ ID NO: 5992010 - DNA, 25 bp, Homo sapien
atattggtcacagatactctgttgg

SEQ ID NO: 5992011 - DNA, 25 bp, Homo sapien
tgttgcaagttgtccatttcaatat

SEQ ID NO: 5992012 - DNA, 25 bp, Homo sapien
tcttgatatttcccccatatcaacg

SEQ ID NO: 5992013 - DNA, 25 bp, Homo sapien
caaatttacttgcagtcattgaata

SEQ ID NO: 5992014 - DNA, 25 bp, Homo sapien
ttcgtttgtgaatactgcttcaaat

SEQ ID NO: 5992015 - DNA, 25 bp, Homo sapien
agaagagtaaaaggatccaagtatc

SEQ ID NO: 5992016 - DNA, 25 bp, Homo sapien
ttgatatttcccccatatcaacgac

SEQ ID NO: 5992017 - DNA, 25 bp, Homo sapien
cgatcctgaaacaaaaaggctaggg

SEQ ID NO: 5992018 - DNA, 25 bp, Homo sapien
tagtttatgaaactggatcaacaaa

SEQ ID NO: 5992019 - DNA, 25 bp, Homo sapien
tcaccttttggactaatcgggtact

SEQ ID NO: 5992020 - DNA, 25 bp, Homo sapien
tcttttgccaatgtctttgtctttt

SEQ ID NO: 5992021 - DNA, 25 bp, Homo sapien
gacatgttgcaagttgtccatttca

SEQ ID NO: 5992022 - DNA, 25 bp, Homo sapien
cagacgcggtttgtaggacatgttg

SEQ ID NO: 5992023 - DNA, 25 bp, Homo sapien
tctaacagccaatactggctagaca

SEQ ID NO: 5992024 - DNA, 25 bp, Homo sapien
tccgagaccaagggtcagctttcct

SEQ ID NO: 5992025 - DNA, 25 bp, Homo sapien
agaatggtggaaaaggcaagaataa

SEQ ID NO: 5992026 - DNA, 25 bp, Homo sapien
ttttacttatcgagttttcatacaa

SEQ ID NO: 5992027 - DNA, 25 bp, Homo sapien
gtaaaaggatccaagtatcaactct

SEQ ID NO: 5992028 - DNA, 25 bp, Homo sapien
gaattttacatagtttatgaaactg

SEQ ID NO: 5992029 - DNA, 25 bp, Homo sapien
ttattttgaccttgaagcacttgaa

SEQ ID NO: 5992030 - DNA, 25 bp, Homo sapien
agacactcttttcgtttgtgaatac

SEQ ID NO: 5992031 - DNA, 25 bp, Homo sapien
cgggtacttgaaatattggtcacag

SEQ ID NO: 5992032 - DNA, 25 bp, Homo sapien
gtcaatcactcacagcgactaccca

SEQ ID NO: 5992033 - DNA, 25 bp, Homo sapien
ctagcgtgcatcttgatatttcccc

SEQ ID NO: 5992034 - DNA, 25 bp, Homo sapien
gatatttcccccatatcaacgacgt

SEQ ID NO: 5992035 - DNA, 25 bp, Homo sapien
ttccatcgtgactggaatgagagtc

SEQ ID NO: 5992036 - DNA, 25 bp, Homo sapien
tcttttcgaaagatttagtgtcata

SEQ ID NO: 5992037 - DNA, 25 bp, Homo sapien
aatacaagagtcctgaatatacaat

SEQ ID NO: 5992038 - DNA, 25 bp, Homo sapien
agtgaccctggaggatctttccatc

SEQ ID NO: 5992039 - DNA, 25 bp, Homo sapien
caggcaaaataaaatacaagagtcc

SEQ ID NO: 5992040 - DNA, 25 bp, Homo sapien
ggatctttccatcgtgactggaatg

SEQ ID NO: 5992041 - DNA, 25 bp, Homo sapien
agaataagccctcagcaaaaattaa

SEQ ID NO: 5992042 - DNA, 25 bp, Homo sapien
caattagaaggtgtaatatcagggc

SEQ ID NO: 5992043 - DNA, 25 bp, Homo sapien
ttttcgaaagatttagtgtcatatc

SEQ ID NO: 5992044 - DNA, 25 bp, Homo sapien
ttgaaggtgacctcgcccattatga

SEQ ID NO: 5992045 - DNA, 25 bp, Homo sapien
tacaagagtcctgaatatacaataa

SEQ ID NO: 5992046 - DNA, 25 bp, Homo sapien
atctagcgtgcatcttgatatttcc

SEQ ID NO: 5992047 - DNA, 25 bp, Homo sapien
tttacttgcagtcattgaatagctg

SEQ ID NO: 5992048 - DNA, 25 bp, Homo sapien
tatttcccccatatcaacgacgtgg

SEQ ID NO: 5992049 - DNA, 25 bp, Homo sapien
tggtcacagatactctgttggcacc

SEQ ID NO: 5992050 - DNA, 25 bp, Homo sapien
acataagacagattcagtttggact

SEQ ID NO: 5992051 - DNA, 25 bp, Homo sapien
atcgggtacttgaaatattggtcac

SEQ ID NO: 5992052 - DNA, 25 bp, Homo sapien
atcaacaaagccgatgggattcttt

SEQ ID NO: 5992053 - DNA, 25 bp, Homo sapien
ctatcccaattagaaggtgtaatat

SEQ ID NO: 5992054 - DNA, 25 bp, Homo sapien
gtcacagatactctgttggcacctt

SEQ ID NO: 5992055 - DNA, 25 bp, Homo sapien
ccatcgtgactggaatgagagtcaa

SEQ ID NO: 5992056 - DNA, 25 bp, Homo sapien
cgacgtggattaggccttttactta

SEQ ID NO: 5992057 - DNA, 25 bp, Homo sapien
tgaatatttgctgatagatgactag

SEQ ID NO: 5992058 - DNA, 25 bp, Homo sapien
tacttgaaatattggtcacagatac

SEQ ID NO: 5992059 - DNA, 25 bp, Homo sapien
ctggttgaaactacatggaacaaaa

SEQ ID NO: 5992060 - DNA, 25 bp, Homo sapien
atcaacgacgtggattaggcctttt

SEQ ID NO: 5992061 - DNA, 25 bp, Homo sapien
agaccaagggtcagctttcctctgt

SEQ ID NO: 5992062 - DNA, 25 bp, Homo sapien
ccagaagtaccgttatcaccttttg

SEQ ID NO: 5992063 - DNA, 25 bp, Homo sapien
tgcagtcattgaatagctggttgaa

SEQ ID NO: 5992064 - DNA, 25 bp, Homo sapien
acaaagccgatgggattcttttcga

SEQ ID NO: 5992065 - DNA, 25 bp, Homo sapien
ataaaatacaagagtcctgaatata

SEQ ID NO: 5992066 - DNA, 25 bp, Homo sapien
aaagatttagtgtcatatcagcaaa

SEQ ID NO: 5992067 - DNA, 25 bp, Homo sapien
tactctgttggcaccttattgaagg

SEQ ID NO: 5992068 - DNA, 25 bp, Homo sapien
aactggatcaacaaagccgatggga

SEQ ID NO: 5992069 - DNA, 25 bp, Homo sapien
ccgtttatttcgatcctgaaacaaa

SEQ ID NO: 5992070 - DNA, 25 bp, Homo sapien
agaataaccaaatttacttgcagtc

SEQ ID NO: 5992071 - DNA, 25 bp, Homo sapien
gcaaaataatctagcgtgcatcttg

SEQ ID NO: 5992072 - DNA, 25 bp, Homo sapien
cacagatactctgttggcaccttat

SEQ ID NO: 5992073 - DNA, 25 bp, Homo sapien
caagatctttaagtcaatcactcac

SEQ ID NO: 5992074 - DNA, 25 bp, Homo sapien
gcacttgaactgtattggggagaat

SEQ ID NO: 5992075 - DNA, 25 bp, Homo sapien
gaatagctggttgaaactacatgga

SEQ ID NO: 5992076 - DNA, 25 bp, Homo sapien
gcaccttattgaaggtgacctcgcc

SEQ ID NO: 5992077 - DNA, 25 bp, Homo sapien
gtatcaactcttttgccaatgtctt

SEQ ID NO: 5992078 - DNA, 25 bp, Homo sapien
gtctttgtcttttcactaagctata

SEQ ID NO: 5992079 - DNA, 25 bp, Homo sapien
aaaggctagggtgctccgagaccaa

SEQ ID NO: 5992080 - DNA, 25 bp, Homo sapien
ttacttatcgagttttcatacaaac

SEQ ID NO: 5992081 - DNA, 25 bp, Homo sapien
atttagtgtcatatcagcaaaataa

SEQ ID NO: 5992082 - DNA, 25 bp, Homo sapien
cgtgcatcttgatatttcccccata

SEQ ID NO: 5992083 - DNA, 25 bp, Homo sapien
tctgtttctaacagccaatactggc

SEQ ID NO: 5992084 - DNA, 25 bp, Homo sapien
gaaggtgtaatatcagggccagaag

SEQ ID NO: 5992085 - DNA, 25 bp, Homo sapien
ttttgccaatgtctttgtcttttca

SEQ ID NO: 5992086 - DNA, 25 bp, Homo sapien
atgaaactggatcaacaaagccgat

SEQ ID NO: 5992087 - DNA, 25 bp, Homo sapien
attttgaccttgaagcacttgaact

SEQ ID NO: 5992088 - DNA, 25 bp, Homo sapien
gacctcgcccattatgataaagtga

SEQ ID NO: 5992089 - DNA, 25 bp, Homo sapien
ggactaatcgggtacttgaaatatt

SEQ ID NO: 5992090 - DNA, 25 bp, Homo sapien
gcaagttgtccatttcaatatcgtg

SEQ ID NO: 5992091 - DNA, 25 bp, Homo sapien
taacagccaatactggctagacact

SEQ ID NO: 5992092 - DNA, 25 bp, Homo sapien
atactgaacgaaaggaacataagac

SEQ ID NO: 5992093 - DNA, 25 bp, Homo sapien
ctgaataaaaaattctctacttggt

SEQ ID NO: 5992094 - DNA, 25 bp, Homo sapien
aaaaactcaaaaagagatgctatat

SEQ ID NO: 5992095 - DNA, 25 bp, Homo sapien
tggactgaataaaaaattctctact

SEQ ID NO: 5992096 - DNA, 25 bp, Homo sapien
tgtccatttcaatatcgtgttccag

SEQ ID NO: 5992097 - DNA, 25 bp, Homo sapien
atgagagtcaatgatgttattttga

SEQ ID NO: 5992098 - DNA, 25 bp, Homo sapien
ccattatgataaagtgaccctggag

SEQ ID NO: 5992099 - DNA, 25 bp, Homo sapien
tcagtttggactgaataaaaaattc

SEQ ID NO: 5992100 - DNA, 25 bp, Homo sapien
ctgcttcaaatacacggatgatcag

SEQ ID NO: 5992101 - DNA, 25 bp, Homo sapien
agcgtgcatcttgatatttccccca

SEQ ID NO: 5992102 - DNA, 25 bp, Homo sapien
taatctagcgtgcatcttgatattt

SEQ ID NO: 5992103 - DNA, 25 bp, Homo sapien
ataaagtgaccctggaggatctttc

SEQ ID NO: 5992104 - DNA, 25 bp, Homo sapien
agccaatactggctagacactcttt

SEQ ID NO: 5992105 - DNA, 25 bp, Homo sapien
tccatttcaatatcgtgttccaggc

SEQ ID NO: 5992106 - DNA, 25 bp, Homo sapien
caacgacgtggattaggccttttac

SEQ ID NO: 5992107 - DNA, 25 bp, Homo sapien
ttatttcgatcctgaaacaaaaagg

SEQ ID NO: 5992108 - DNA, 25 bp, Homo sapien
atgatgttattttgaccttgaagca

SEQ ID NO: 5992109 - DNA, 25 bp, Homo sapien
gaagaatggtggaaaaggcaagaat

SEQ ID NO: 5992110 - DNA, 25 bp, Homo sapien
agaagtaccgttatcaccttttgga

SEQ ID NO: 5992111 - DNA, 25 bp, Homo sapien
cctgaaacaaaaaggctagggtgct

SEQ ID NO: 5992112 - DNA, 25 bp, Homo sapien
ggtatgggagcgccgtttatttcga

SEQ ID NO: 5992113 - DNA, 25 bp, Homo sapien
cccaattagaaggtgtaatatcagg

SEQ ID NO: 5992114 - DNA, 25 bp, Homo sapien
taaccaaatttacttgcagtcattg

SEQ ID NO: 5992115 - DNA, 25 bp, Homo sapien
ccttttacttatcgagttttcatac

SEQ ID NO: 5992116 - DNA, 25 bp, Homo sapien
gacgcggtttgtaggacatgttgca

SEQ ID NO: 5992117 - DNA, 25 bp, Homo sapien
tcaatatcgtgttccaggcaaaata

SEQ ID NO: 5992118 - DNA, 25 bp, Homo sapien
agtgtcatatcagcaaaataatcta

SEQ ID NO: 5992119 - DNA, 25 bp, Homo sapien
actaatcgggtacttgaaatattgg

SEQ ID NO: 5992120 - DNA, 25 bp, Homo sapien
tacttgcagtcattgaatagctggt

SEQ ID NO: 5992121 - DNA, 25 bp, Homo sapien
gctatatggaatactgaacgaaagg

SEQ ID NO: 5992122 - DNA, 25 bp, Homo sapien
ggcaagatctttaagtcaatcactc

SEQ ID NO: 5992123 - DNA, 25 bp, Homo sapien
cgagaccaagggtcagctttcctct

SEQ ID NO: 5992124 - DNA, 25 bp, Homo sapien
taaatccatgtatttcaaagtagat

SEQ ID NO: 5992125 - DNA, 25 bp, Homo sapien
gctccgagaccaagggtcagctttc

SEQ ID NO: 5992126 - DNA, 25 bp, Homo sapien
acgtggattaggccttttacttatc

SEQ ID NO: 5992127 - DNA, 25 bp, Homo sapien
aatggtggaaaaggcaagaataagc

SEQ ID NO: 5992128 - DNA, 25 bp, Homo sapien
catgttgcaagttgtccatttcaat

SEQ ID NO: 5992129 - DNA, 25 bp, Homo sapien
tttcccccatatcaacgacgtggat

SEQ ID NO: 5992130 - DNA, 25 bp, Homo sapien
attcttttcgaaagatttagtgtca

SEQ ID NO: 5992131 - DNA, 25 bp, Homo sapien
tggaggatctttccatcgtgactgg

SEQ ID NO: 5992132 - DNA, 25 bp, Homo sapien
aaaaggatccaagtatcaactcttt

SEQ ID NO: 5992133 - DNA, 25 bp, Homo sapien
aagaagaatggtggaaaaggcaaga

SEQ ID NO: 5992134 - DNA, 25 bp, Homo sapien
gtttatgaaactggatcaacaaagc

SEQ ID NO: 5992135 - DNA, 25 bp, Homo sapien
atcactcacagcgactacccagaag

SEQ ID NO: 5992136 - DNA, 25 bp, Homo sapien
aaaaggcaagaataagccctcagca

SEQ ID NO: 5992137 - DNA, 25 bp, Homo sapien
atagctggttgaaactacatggaac

SEQ ID NO: 5992138 - DNA, 25 bp, Homo sapien
caactcttttgccaatgtctttgtc

SEQ ID NO: 5992139 - DNA, 25 bp, Homo sapien
gatactctgttggcaccttattgaa

SEQ ID NO: 5992140 - DNA, 25 bp, Homo sapien
ttttcatacaaactatcccaattag

SEQ ID NO: 5992141 - DNA, 25 bp, Homo sapien
tatgggagcgccgtttatttcgatc

SEQ ID NO: 5992142 - DNA, 25 bp, Homo sapien
acactcttttcgtttgtgaatactg

SEQ ID NO: 5992143 - DNA, 25 bp, Homo sapien
ttctctacttggtatgggagcgccg

SEQ ID NO: 5992144 - DNA, 25 bp, Homo sapien
ttttcgtttgtgaatactgcttcaa

SEQ ID NO: 5992145 - DNA, 25 bp, Homo sapien
cgaaaggaacataagacagattcag

SEQ ID NO: 5992146 - DNA, 25 bp, Homo sapien
gttggcaccttattgaaggtgacct

SEQ ID NO: 5992147 - DNA, 25 bp, Homo sapien
tcctgaatatacaataagaagagta

SEQ ID NO: 5992148 - DNA, 25 bp, Homo sapien
ggaaaaggcaagaataagccctcag

SEQ ID NO: 5992149 - DNA, 25 bp, Homo sapien
ttggtatgggagcgccgtttatttc

SEQ ID NO: 5992150 - DNA, 25 bp, Homo sapien
actcaaaaagagatgctatatggaa

SEQ ID NO: 5992151 - DNA, 25 bp, Homo sapien
agatctttaagtcaatcactcacag

SEQ ID NO: 5992152 - DNA, 25 bp, Homo sapien
ggccttttacttatcgagttttcat

SEQ ID NO: 5992153 - DNA, 25 bp, Homo sapien
tgaatactgcttcaaatacacggat

SEQ ID NO: 5992154 - DNA, 25 bp, Homo sapien
tttacatagtttatgaaactggatc

SEQ ID NO: 5992155 - DNA, 25 bp, Homo sapien
atggaacaaaacggaattggttcaa

SEQ ID NO: 5992156 - DNA, 25 bp, Homo sapien
tttggactgaataaaaaattctcta

SEQ ID NO: 5992157 - DNA, 25 bp, Homo sapien
tgaccctggaggatctttccatcgt

SEQ ID NO: 5992158 - DNA, 25 bp, Homo sapien
acaataaatccatgtatttcaaagt

SEQ ID NO: 5992159 - DNA, 25 bp, Homo sapien
tggtggaaaaggcaagaataagccc

SEQ ID NO: 5992160 - DNA, 25 bp, Homo sapien
atctttaagtcaatcactcacagcg

SEQ ID NO: 5992161 - DNA, 25 bp, Homo sapien
cagattcagtttggactgaataaaa

SEQ ID NO: 5992162 - DNA, 25 bp, Homo sapien
tggaatgagagtcaatgatgttatt

SEQ ID NO: 5992163 - DNA, 25 bp, Homo sapien
gagtcaatgatgttattttgacctt

SEQ ID NO: 5992164 - DNA, 25 bp, Homo sapien
aattaaaagatgaatatttgctgat

SEQ ID NO: 5992165 - DNA, 25 bp, Homo sapien
gaaactacatggaacaaaacggaat

SEQ ID NO: 5992166 - DNA, 25 bp, Homo sapien
atgaattttacatagtttatgaaac

SEQ ID NO: 5992167 - DNA, 25 bp, Homo sapien
gtgttccaggcaaaataaaatacaa

SEQ ID NO: 5992168 - DNA, 25 bp, Homo sapien
ttatgaaactggatcaacaaagccg

SEQ ID NO: 5992169 - DNA, 25 bp, Homo sapien
tttcaatatcgtgttccaggcaaaa

SEQ ID NO: 5992170 - DNA, 25 bp, Homo sapien
agtttggactgaataaaaaattctc

SEQ ID NO: 5992171 - DNA, 25 bp, Homo sapien
ctttcctctgtttctaacagccaat

SEQ ID NO: 5992172 - DNA, 25 bp, Homo sapien
aataaatccatgtatttcaaagtag

SEQ ID NO: 5992173 - DNA, 25 bp, Homo sapien
ggttgaaactacatggaacaaaacg

SEQ ID NO: 5992174 - DNA, 25 bp, Homo sapien
cgagttttcatacaaactatcccaa

SEQ ID NO: 5992175 - DNA, 25 bp, Homo sapien
tgggattcttttcgaaagatttagt

SEQ ID NO: 5992176 - DNA, 25 bp, Homo sapien
ttggactaatcgggtacttgaaata

SEQ ID NO: 5992177 - DNA, 25 bp, Homo sapien
caagggtcagctttcctctgtttct

SEQ ID NO: 5992178 - DNA, 25 bp, Homo sapien
atccaagtatcaactcttttgccaa

SEQ ID NO: 5992179 - DNA, 25 bp, Homo sapien
ggattaggccttttacttatcgagt

SEQ ID NO: 5992180 - DNA, 25 bp, Homo sapien
gtttatttcgatcctgaaacaaaaa

SEQ ID NO: 5992181 - DNA, 25 bp, Homo sapien
acccagaagctaaaaggaaagaaga

SEQ ID NO: 5992182 - DNA, 25 bp, Homo sapien
aaaagatgaatatttgctgatagat

SEQ ID NO: 5992183 - DNA, 25 bp, Homo sapien
actcttttgccaatgtctttgtctt

SEQ ID NO: 5992184 - DNA, 25 bp, Homo sapien
agatttagtgtcatatcagcaaaat

SEQ ID NO: 5992185 - DNA, 25 bp, Homo sapien
aggtgtaatatcagggccagaagta

SEQ ID NO: 5992186 - DNA, 25 bp, Homo sapien
ggccagaagtaccgttatcaccttt

SEQ ID NO: 5992187 - DNA, 25 bp, Homo sapien
actcttttcgtttgtgaatactgct

SEQ ID NO: 5992188 - DNA, 25 bp, Homo sapien
caatcactcacagcgactacccaga

SEQ ID NO: 5992189 - DNA, 25 bp, Homo sapien
aaaggaacataagacagattcagtt

SEQ ID NO: 5992190 - DNA, 25 bp, Homo sapien
gatgatcagacgcggtttgtaggac

SEQ ID NO: 5992191 - DNA, 25 bp, Homo sapien
gatgggattcttttcgaaagattta

SEQ ID NO: 5992192 - DNA, 25 bp, Homo sapien
cattgaatagctggttgaaactaca

SEQ ID NO: 5992193 - DNA, 25 bp, Homo sapien
tttgtgaatactgcttcaaatacac

SEQ ID NO: 5992194 - DNA, 25 bp, Homo sapien
cagatactctgttggcaccttattg

SEQ ID NO: 5992195 - DNA, 25 bp, Homo sapien
gttccaggcaaaataaaatacaaga

SEQ ID NO: 5992196 - DNA, 25 bp, Homo sapien
accaagggtcagctttcctctgttt

SEQ ID NO: 5992197 - DNA, 25 bp, Homo sapien
acaataagaagagtaaaaggatcca

SEQ ID NO: 5992198 - DNA, 25 bp, Homo sapien
gtgacctcgcccattatgataaagt

SEQ ID NO: 5992199 - DNA, 25 bp, Homo sapien
gcccattatgataaagtgaccctgg

SEQ ID NO: 5992200 - DNA, 25 bp, Homo sapien
acttatcgagttttcatacaaacta

SEQ ID NO: 5992201 - DNA, 25 bp, Homo sapien
ggagcgccgtttatttcgatcctga

SEQ ID NO: 5992202 - DNA, 25 bp, Homo sapien
acatggaacaaaacggaattggttc

SEQ ID NO: 5992203 - DNA, 25 bp, Homo sapien
tcagctttcctctgtttctaacagc

SEQ ID NO: 5992204 - DNA, 25 bp, Homo sapien
gaataaaaaattctctacttggtat

SEQ ID NO: 5992205 - DNA, 25 bp, Homo sapien
aatacacggatgatcagacgcggtt

SEQ ID NO: 5992206 - DNA, 25 bp, Homo sapien
gctagggtgctccgagaccaagggt

SEQ ID NO: 5992207 - DNA, 25 bp, Homo sapien
accctggaggatctttccatcgtga

SEQ ID NO: 5992208 - DNA, 25 bp, Homo sapien
tttgaccttgaagcacttgaactgt

SEQ ID NO: 5992209 - DNA, 25 bp, Homo sapien
gtgctccgagaccaagggtcagctt

SEQ ID NO: 5992210 - DNA, 25 bp, Homo sapien
caagaataagccctcagcaaaaatt

SEQ ID NO: 5992211 - DNA, 25 bp, Homo sapien
caaatacacggatgatcagacgcgg

SEQ ID NO: 5992212 - DNA, 25 bp, Homo sapien
ttagtgtcatatcagcaaaataatc

SEQ ID NO: 5992213 - DNA, 25 bp, Homo sapien
agggtcactttatcataatgggcga

SEQ ID NO: 5992214 - DNA, 25 bp, Homo sapien
gatcgaaataaacggcgctcccata

SEQ ID NO: 5992215 - DNA, 25 bp, Homo sapien
cagagtatctgtgaccaatatttca

SEQ ID NO: 5992216 - DNA, 25 bp, Homo sapien
tcactttatcataatgggcgaggtc

SEQ ID NO: 5992217 - DNA, 25 bp, Homo sapien
tccatgtagtttcaaccagctattc

SEQ ID NO: 5992218 - DNA, 25 bp, Homo sapien
caccttcaataaggtgccaacagag

SEQ ID NO: 5992219 - DNA, 25 bp, Homo sapien
gaaaagagtgtctagccagtattgg

SEQ ID NO: 5992220 - DNA, 25 bp, Homo sapien
tgacccttggtctcggagcacccta

SEQ ID NO: 5992221 - DNA, 25 bp, Homo sapien
ttagtgaaaagacaaagacattggc

SEQ ID NO: 5992222 - DNA, 25 bp, Homo sapien
agtagagaattttttattcagtcca

SEQ ID NO: 5992223 - DNA, 25 bp, Homo sapien
ccataccaagtagagaattttttat

SEQ ID NO: 5992224 - DNA, 25 bp, Homo sapien
ttagcttctgggtagtcgctgtgag

SEQ ID NO: 5992225 - DNA, 25 bp, Homo sapien
caaactgaatctgtcttatgttcct

SEQ ID NO: 5992226 - DNA, 25 bp, Homo sapien
ttccttttagcttctgggtagtcgc

SEQ ID NO: 5992227 - DNA, 25 bp, Homo sapien
gtttgtatgaaaactcgataagtaa

SEQ ID NO: 5992228 - DNA, 25 bp, Homo sapien
taacggtacttctggccctgatatt

SEQ ID NO: 5992229 - DNA, 25 bp, Homo sapien
caataaggtgccaacagagtatctg

SEQ ID NO: 5992230 - DNA, 25 bp, Homo sapien
gatatgacactaaatctttcgaaaa

SEQ ID NO: 5992231 - DNA, 25 bp, Homo sapien
gctttgttgatccagtttcataaac

SEQ ID NO: 5992232 - DNA, 25 bp, Homo sapien
ttggcaaaagagttgatacttggat

SEQ ID NO: 5992233 - DNA, 25 bp, Homo sapien
atctactttgaaatacatggattta

SEQ ID NO: 5992234 - DNA, 25 bp, Homo sapien
tcgataagtaaaaggcctaatccac

SEQ ID NO: 5992235 - DNA, 25 bp, Homo sapien
gataacggtacttctggccctgata

SEQ ID NO: 5992236 - DNA, 25 bp, Homo sapien
ttgatatgggggaaatatcaagatg

SEQ ID NO: 5992237 - DNA, 25 bp, Homo sapien
aaaataacatcattgactctcattc

SEQ ID NO: 5992238 - DNA, 25 bp, Homo sapien
tcaaggtcaaaataacatcattgac

SEQ ID NO: 5992239 - DNA, 25 bp, Homo sapien
ttgtattttattttgcctggaacac

SEQ ID NO: 5992240 - DNA, 25 bp, Homo sapien
ttccatatagcatctctttttgagt

SEQ ID NO: 5992241 - DNA, 25 bp, Homo sapien
atacagttcaagtgcttcaaggtca

SEQ ID NO: 5992242 - DNA, 25 bp, Homo sapien
tcgttcagtattccatatagcatct

SEQ ID NO: 5992243 - DNA, 25 bp, Homo sapien
tagtttgtatgaaaactcgataagt

SEQ ID NO: 5992244 - DNA, 25 bp, Homo sapien
tgaaatggacaacttgcaacatgtc

SEQ ID NO: 5992245 - DNA, 25 bp, Homo sapien
accagctattcaatgactgcaagta

SEQ ID NO: 5992246 - DNA, 25 bp, Homo sapien
tgttcctttcgttcagtattccata

SEQ ID NO: 5992247 - DNA, 25 bp, Homo sapien
agtattccatatagcatctcttttt

SEQ ID NO: 5992248 - DNA, 25 bp, Homo sapien
ggactcttgtattttattttgcctg

SEQ ID NO: 5992249 - DNA, 25 bp, Homo sapien
gcaagtaaatttggttattctcccc

SEQ ID NO: 5992250 - DNA, 25 bp, Homo sapien
tgctgagggcttattcttgcctttt

SEQ ID NO: 5992251 - DNA, 25 bp, Homo sapien
gtgaccaatatttcaagtacccgat

SEQ ID NO: 5992252 - DNA, 25 bp, Homo sapien
accaagtagagaattttttattcag

SEQ ID NO: 5992253 - DNA, 25 bp, Homo sapien
ctgaatctgtcttatgttcctttcg

SEQ ID NO: 5992254 - DNA, 25 bp, Homo sapien
gagggcttattcttgccttttccac

SEQ ID NO: 5992255 - DNA, 25 bp, Homo sapien
cttcttattgtatattcaggactct

SEQ ID NO: 5992256 - DNA, 25 bp, Homo sapien
tcagtattccatatagcatctcttt

SEQ ID NO: 5992257 - DNA, 25 bp, Homo sapien
acatcattgactctcattccagtca

SEQ ID NO: 5992258 - DNA, 25 bp, Homo sapien
ggatttattgtccagatatagctta

SEQ ID NO: 5992259 - DNA, 25 bp, Homo sapien
gctattcaatgactgcaagtaaatt

SEQ ID NO: 5992260 - DNA, 25 bp, Homo sapien
gctgacccttggtctcggagcaccc

SEQ ID NO: 5992261 - DNA, 25 bp, Homo sapien
tcaggatcgaaataaacggcgctcc

SEQ ID NO: 5992262 - DNA, 25 bp, Homo sapien
atgaaaactcgataagtaaaaggcc

SEQ ID NO: 5992263 - DNA, 25 bp, Homo sapien
actcttgtattttattttgcctgga

SEQ ID NO: 5992264 - DNA, 25 bp, Homo sapien
cgttgatatgggggaaatatcaaga

SEQ ID NO: 5992265 - DNA, 25 bp, Homo sapien
ccaatatttcaagtacccgattagt

SEQ ID NO: 5992266 - DNA, 25 bp, Homo sapien
caacatgtcctacaaaccgcgtctg

SEQ ID NO: 5992267 - DNA, 25 bp, Homo sapien
ctctcattccagtcacgatggaaag

SEQ ID NO: 5992268 - DNA, 25 bp, Homo sapien
aagacattggcaaaagagttgatac

SEQ ID NO: 5992269 - DNA, 25 bp, Homo sapien
tgggtagtcgctgtgagtgattgac

SEQ ID NO: 5992270 - DNA, 25 bp, Homo sapien
gtattttattttgcctggaacacga

SEQ ID NO: 5992271 - DNA, 25 bp, Homo sapien
ttttattcagtccaaactgaatctg

SEQ ID NO: 5992272 - DNA, 25 bp, Homo sapien
tgatattacaccttctaattgggat

SEQ ID NO: 5992273 - DNA, 25 bp, Homo sapien
catcttttaatttgaaccaattccg

SEQ ID NO: 5992274 - DNA, 25 bp, Homo sapien
gtatctgtgaccaatatttcaagta

SEQ ID NO: 5992275 - DNA, 25 bp, Homo sapien
ttctaattgggatagtttgtatgaa

SEQ ID NO: 5992276 - DNA, 25 bp, Homo sapien
gacaaagacattggcaaaagagttg

SEQ ID NO: 5992277 - DNA, 25 bp, Homo sapien
gtaaaaggcctaatccacgtcgttg

SEQ ID NO: 5992278 - DNA, 25 bp, Homo sapien
ccagtcacgatggaaagatcctcca

SEQ ID NO: 5992279 - DNA, 25 bp, Homo sapien
aaaaggcctaatccacgtcgttgat

SEQ ID NO: 5992280 - DNA, 25 bp, Homo sapien
ttcaagtgcttcaaggtcaaaataa

SEQ ID NO: 5992281 - DNA, 25 bp, Homo sapien
gtattcacaaacgaaaagagtgtct

SEQ ID NO: 5992282 - DNA, 25 bp, Homo sapien
cggctttgttgatccagtttcataa

SEQ ID NO: 5992283 - DNA, 25 bp, Homo sapien
tatcataatgggcgaggtcaccttc

SEQ ID NO: 5992284 - DNA, 25 bp, Homo sapien
cctgatattacaccttctaattggg

SEQ ID NO: 5992285 - DNA, 25 bp, Homo sapien
cagctattcaatgactgcaagtaaa

SEQ ID NO: 5992286 - DNA, 25 bp, Homo sapien
tatattcaggactcttgtattttat

SEQ ID NO: 5992287 - DNA, 25 bp, Homo sapien
aatatttcaagtacccgattagtcc

SEQ ID NO: 5992288 - DNA, 25 bp, Homo sapien
tccagtttcataaactatgtaaaat

SEQ ID NO: 5992289 - DNA, 25 bp, Homo sapien
gactctcattccagtcacgatggaa

SEQ ID NO: 5992290 - DNA, 25 bp, Homo sapien
tcccataccaagtagagaatttttt

SEQ ID NO: 5992291 - DNA, 25 bp, Homo sapien
ttagaaacagaggaaagctgaccct

SEQ ID NO: 5992292 - DNA, 25 bp, Homo sapien
gggatagtttgtatgaaaactcgat

SEQ ID NO: 5992293 - DNA, 25 bp, Homo sapien
cttcaaggtcaaaataacatcattg

SEQ ID NO: 5992294 - DNA, 25 bp, Homo sapien
cttctggccctgatattacaccttc

SEQ ID NO: 5992295 - DNA, 25 bp, Homo sapien
aacagagtatctgtgaccaatattt

SEQ ID NO: 5992296 - DNA, 25 bp, Homo sapien
tgtttcaggatcgaaataaacggcg

SEQ ID NO: 5992297 - DNA, 25 bp, Homo sapien
aggaaagctgacccttggtctcgga

SEQ ID NO: 5992298 - DNA, 25 bp, Homo sapien
aaccgcgtctgatcatccgtgtatt

SEQ ID NO: 5992299 - DNA, 25 bp, Homo sapien
acaaacgaaaagagtgtctagccag

SEQ ID NO: 5992300 - DNA, 25 bp, Homo sapien
tatagcttagtgaaaagacaaagac

SEQ ID NO: 5992301 - DNA, 25 bp, Homo sapien
ccgcgtctgatcatccgtgtatttg

SEQ ID NO: 5992302 - DNA, 25 bp, Homo sapien
gtcgctgtgagtgattgacttaaag

SEQ ID NO: 5992303 - DNA, 25 bp, Homo sapien
aagctgacccttggtctcggagcac

SEQ ID NO: 5992304 - DNA, 25 bp, Homo sapien
atgtcctacaaaccgcgtctgatca

SEQ ID NO: 5992305 - DNA, 25 bp, Homo sapien
ttgatacttggatccttttactctt

SEQ ID NO: 5992306 - DNA, 25 bp, Homo sapien
cacgatattgaaatggacaacttgc

SEQ ID NO: 5992307 - DNA, 25 bp, Homo sapien
cttggatccttttactcttcttatt

SEQ ID NO: 5992308 - DNA, 25 bp, Homo sapien
tgcttcaaggtcaaaataacatcat

SEQ ID NO: 5992309 - DNA, 25 bp, Homo sapien
tattcaatgactgcaagtaaatttg

SEQ ID NO: 5992310 - DNA, 25 bp, Homo sapien
ttgatccagtttcataaactatgta

SEQ ID NO: 5992311 - DNA, 25 bp, Homo sapien
tatgacactaaatctttcgaaaaga

SEQ ID NO: 5992312 - DNA, 25 bp, Homo sapien
tccaaactgaatctgtcttatgttc

SEQ ID NO: 5992313 - DNA, 25 bp, Homo sapien
acagttcaagtgcttcaaggtcaaa

SEQ ID NO: 5992314 - DNA, 25 bp, Homo sapien
ccttttagcttctgggtagtcgctg

SEQ ID NO: 5992315 - DNA, 25 bp, Homo sapien
tacaccttctaattgggatagtttg

SEQ ID NO: 5992316 - DNA, 25 bp, Homo sapien
agttcaagtgcttcaaggtcaaaat

SEQ ID NO: 5992317 - DNA, 25 bp, Homo sapien
ggtagtcgctgtgagtgattgactt

SEQ ID NO: 5992318 - DNA, 25 bp, Homo sapien
cttatgttcctttcgttcagtattc

SEQ ID NO: 5992319 - DNA, 25 bp, Homo sapien
attcacaaacgaaaagagtgtctag

SEQ ID NO: 5992320 - DNA, 25 bp, Homo sapien
ttcctttcgttcagtattccatata

SEQ ID NO: 5992321 - DNA, 25 bp, Homo sapien
atattacaccttctaattgggatag

SEQ ID NO: 5992322 - DNA, 25 bp, Homo sapien
gtttcaaccagctattcaatgactg

SEQ ID NO: 5992323 - DNA, 25 bp, Homo sapien
taatccacgtcgttgatatggggga

SEQ ID NO: 5992324 - DNA, 25 bp, Homo sapien
gcgctcccataccaagtagagaatt

SEQ ID NO: 5992325 - DNA, 25 bp, Homo sapien
tctgggtagtcgctgtgagtgattg

SEQ ID NO: 5992326 - DNA, 25 bp, Homo sapien
ctgtgaccaatatttcaagtacccg

SEQ ID NO: 5992327 - DNA, 25 bp, Homo sapien
ggtctcggagcaccctagccttttt

SEQ ID NO: 5992328 - DNA, 25 bp, Homo sapien
atatcaagatgcacgctagattatt

SEQ ID NO: 5992329 - DNA, 25 bp, Homo sapien
acatggatttattgtccagatatag

SEQ ID NO: 5992330 - DNA, 25 bp, Homo sapien
tcccatcggctttgttgatccagtt

SEQ ID NO: 5992331 - DNA, 25 bp, Homo sapien
tttattttgcctggaacacgatatt

SEQ ID NO: 5992332 - DNA, 25 bp, Homo sapien
taaatctttcgaaaagaatcccatc

SEQ ID NO: 5992333 - DNA, 25 bp, Homo sapien
gccagtattggctgttagaaacaga

SEQ ID NO: 5992334 - DNA, 25 bp, Homo sapien
gaattttttattcagtccaaactga

SEQ ID NO: 5992335 - DNA, 25 bp, Homo sapien
ccttctaattgggatagtttgtatg

SEQ ID NO: 5992336 - DNA, 25 bp, Homo sapien
atctgtcttatgttcctttcgttca

SEQ ID NO: 5992337 - DNA, 25 bp, Homo sapien
caccttctaattgggatagtttgta

SEQ ID NO: 5992338 - DNA, 25 bp, Homo sapien
attcagtccaaactgaatctgtctt

SEQ ID NO: 5992339 - DNA, 25 bp, Homo sapien
agagttgatacttggatccttttac

SEQ ID NO: 5992340 - DNA, 25 bp, Homo sapien
gctcccataccaagtagagaatttt

SEQ ID NO: 5992341 - DNA, 25 bp, Homo sapien
tctggccctgatattacaccttcta

SEQ ID NO: 5992342 - DNA, 25 bp, Homo sapien
tatgggggaaatatcaagatgcacg

SEQ ID NO: 5992343 - DNA, 25 bp, Homo sapien
ctatcagcaaatattcatcttttaa

SEQ ID NO: 5992344 - DNA, 25 bp, Homo sapien
tctcggagcaccctagcctttttgt

SEQ ID NO: 5992345 - DNA, 25 bp, Homo sapien
aaaggtgataacggtacttctggcc

SEQ ID NO: 5992346 - DNA, 25 bp, Homo sapien
ttcaaccagctattcaatgactgca

SEQ ID NO: 5992347 - DNA, 25 bp, Homo sapien
acatgtcctacaaaccgcgtctgat

SEQ ID NO: 5992348 - DNA, 25 bp, Homo sapien
tcttattgtatattcaggactcttg

SEQ ID NO: 5992349 - DNA, 25 bp, Homo sapien
gatatagcttagtgaaaagacaaag

SEQ ID NO: 5992350 - DNA, 25 bp, Homo sapien
aatctttcgaaaagaatcccatcgg

SEQ ID NO: 5992351 - DNA, 25 bp, Homo sapien
tgatctactttgaaatacatggatt

SEQ ID NO: 5992352 - DNA, 25 bp, Homo sapien
aggtcaccttcaataaggtgccaac

SEQ ID NO: 5992353 - DNA, 25 bp, Homo sapien
tagtttcaaccagctattcaatgac

SEQ ID NO: 5992354 - DNA, 25 bp, Homo sapien
atcggctttgttgatccagtttcat

SEQ ID NO: 5992355 - DNA, 25 bp, Homo sapien
gtatttgaagcagtattcacaaacg

SEQ ID NO: 5992356 - DNA, 25 bp, Homo sapien
tcatctatcagcaaatattcatctt

SEQ ID NO: 5992357 - DNA, 25 bp, Homo sapien
agcctttttgtttcaggatcgaaat

SEQ ID NO: 5992358 - DNA, 25 bp, Homo sapien
agaatcccatcggctttgttgatcc

SEQ ID NO: 5992359 - DNA, 25 bp, Homo sapien
tcggagcaccctagcctttttgttt

SEQ ID NO: 5992360 - DNA, 25 bp, Homo sapien
cagatatagcttagtgaaaagacaa

SEQ ID NO: 5992361 - DNA, 25 bp, Homo sapien
gttccatgtagtttcaaccagctat

SEQ ID NO: 5992362 - DNA, 25 bp, Homo sapien
ttttagcttctgggtagtcgctgtg

SEQ ID NO: 5992363 - DNA, 25 bp, Homo sapien
tgttgatccagtttcataaactatg

SEQ ID NO: 5992364 - DNA, 25 bp, Homo sapien
ttttgttccatgtagtttcaaccag

SEQ ID NO: 5992365 - DNA, 25 bp, Homo sapien
atgtaaaattcataatgatctactt

SEQ ID NO: 5992366 - DNA, 25 bp, Homo sapien
tattccatatagcatctctttttga

SEQ ID NO: 5992367 - DNA, 25 bp, Homo sapien
gtcctacaaaccgcgtctgatcatc

SEQ ID NO: 5992368 - DNA, 25 bp, Homo sapien
gctgttagaaacagaggaaagctga

SEQ ID NO: 5992369 - DNA, 25 bp, Homo sapien
gaaagatcctccagggtcactttat

SEQ ID NO: 5992370 - DNA, 25 bp, Homo sapien
gatacttggatccttttactcttct

SEQ ID NO: 5992371 - DNA, 25 bp, Homo sapien
ttattgtatattcaggactcttgta

SEQ ID NO: 5992372 - DNA, 25 bp, Homo sapien
aaggtgccaacagagtatctgtgac

SEQ ID NO: 5992373 - DNA, 25 bp, Homo sapien
cctacaaaccgcgtctgatcatccg

SEQ ID NO: 5992374 - DNA, 25 bp, Homo sapien
attccgttttgttccatgtagtttc

SEQ ID NO: 5992375 - DNA, 25 bp, Homo sapien
atacatggatttattgtccagatat

SEQ ID NO: 5992376 - DNA, 25 bp, Homo sapien
atggatttattgtccagatatagct

SEQ ID NO: 5992377 - DNA, 25 bp, Homo sapien
ttaatttttgctgagggcttattct

SEQ ID NO: 5992378 - DNA, 25 bp, Homo sapien
ctgtcttatgttcctttcgttcagt

SEQ ID NO: 5992379 - DNA, 25 bp, Homo sapien
atatagcatctctttttgagttttt

SEQ ID NO: 5992380 - DNA, 25 bp, Homo sapien
ggtcaaaataacatcattgactctc

SEQ ID NO: 5992381 - DNA, 25 bp, Homo sapien
ggcaaaagagttgatacttggatcc

SEQ ID NO: 5992382 - DNA, 25 bp, Homo sapien
aagacaaagacattggcaaaagagt

SEQ ID NO: 5992383 - DNA, 25 bp, Homo sapien
cgctgtgagtgattgacttaaagat

SEQ ID NO: 5992384 - DNA, 25 bp, Homo sapien
gtcgttgatatgggggaaatatcaa

SEQ ID NO: 5992385 - DNA, 25 bp, Homo sapien
tagtcgctgtgagtgattgacttaa

SEQ ID NO: 5992386 - DNA, 25 bp, Homo sapien
gatatgggggaaatatcaagatgca

SEQ ID NO: 5992387 - DNA, 25 bp, Homo sapien
agtacccgattagtccaaaaggtga

SEQ ID NO: 5992388 - DNA, 25 bp, Homo sapien
acaacttgcaacatgtcctacaaac

SEQ ID NO: 5992389 - DNA, 25 bp, Homo sapien
ggtgccaacagagtatctgtgacca

SEQ ID NO: 5992390 - DNA, 25 bp, Homo sapien
ccgtgtatttgaagcagtattcaca

SEQ ID NO: 5992391 - DNA, 25 bp, Homo sapien
gaaaactcgataagtaaaaggccta

SEQ ID NO: 5992392 - DNA, 25 bp, Homo sapien
caaaccgcgtctgatcatccgtgta

SEQ ID NO: 5992393 - DNA, 25 bp, Homo sapien
accaattccgttttgttccatgtag

SEQ ID NO: 5992394 - DNA, 25 bp, Homo sapien
ccttggtctcggagcaccctagcct

SEQ ID NO: 5992395 - DNA, 25 bp, Homo sapien
tggctgttagaaacagaggaaagct

SEQ ID NO: 5992396 - DNA, 25 bp, Homo sapien
tcacgatggaaagatcctccagggt

SEQ ID NO: 5992397 - DNA, 25 bp, Homo sapien
caattccgttttgttccatgtagtt

SEQ ID NO: 5992398 - DNA, 25 bp, Homo sapien
gcttattcttgccttttccaccatt

SEQ ID NO: 5992399 - DNA, 25 bp, Homo sapien
ttctttccttttagcttctgggtag

SEQ ID NO: 5992400 - DNA, 25 bp, Homo sapien
tcttgccttttccaccattcttctt

SEQ ID NO: 5992401 - DNA, 25 bp, Homo sapien
acgctagattattttgctgatatga

SEQ ID NO: 5992402 - DNA, 25 bp, Homo sapien
tttatcataatgggcgaggtcacct

SEQ ID NO: 5992403 - DNA, 25 bp, Homo sapien
gagaattttttattcagtccaaact

SEQ ID NO: 5992404 - DNA, 25 bp, Homo sapien
agtgaaaagacaaagacattggcaa

SEQ ID NO: 5992405 - DNA, 25 bp, Homo sapien
gtcttatgttcctttcgttcagtat

SEQ ID NO: 5992406 - DNA, 25 bp, Homo sapien
caaaaggtgataacggtacttctgg

SEQ ID NO: 5992407 - DNA, 25 bp, Homo sapien
cttctgggtagtcgctgtgagtgat

SEQ ID NO: 5992408 - DNA, 25 bp, Homo sapien
aatttttgctgagggcttattcttg

SEQ ID NO: 5992409 - DNA, 25 bp, Homo sapien
gaccaatatttcaagtacccgatta

SEQ ID NO: 5992410 - DNA, 25 bp, Homo sapien
caagtgcttcaaggtcaaaataaca

SEQ ID NO: 5992411 - DNA, 25 bp, Homo sapien
gcgtctgatcatccgtgtatttgaa

SEQ ID NO: 5992412 - DNA, 25 bp, Homo sapien
ccagggtcactttatcataatgggc

SEQ ID NO: 5992413 - DNA, 25 bp, Homo sapien
ttcaatgactgcaagtaaatttggt

SEQ ID NO: 5992414 - DNA, 25 bp, Homo sapien
aaaagacaaagacattggcaaaaga

SEQ ID NO: 5992415 - DNA, 25 bp, Homo sapien
tcacaaacgaaaagagtgtctagcc

SEQ ID NO: 5992416 - DNA, 25 bp, Homo sapien
atccgtgtatttgaagcagtattca

SEQ ID NO: 5992417 - DNA, 25 bp, Homo sapien
ttgttccatgtagtttcaaccagct

SEQ ID NO: 5992418 - DNA, 25 bp, Homo sapien
aactatgtaaaattcataatgatct

SEQ ID NO: 5992419 - DNA, 25 bp, Homo sapien
tttttgctgagggcttattcttgcc

SEQ ID NO: 5992420 - DNA, 25 bp, Homo sapien
ctcttcttattgtatattcaggact

SEQ ID NO: 5992421 - DNA, 25 bp, Homo sapien
aaacgaaaagagtgtctagccagta

SEQ ID NO: 5992422 - DNA, 25 bp, Homo sapien
gtgattgacttaaagatcttgccat

SEQ ID NO: 5992423 - DNA, 25 bp, Homo sapien
tttcgaaaagaatcccatcggcttt

SEQ ID NO: 5992424 - DNA, 25 bp, Homo sapien
ttgccttttccaccattcttctttc

SEQ ID NO: 5992425 - DNA, 25 bp, Homo sapien
caaccagctattcaatgactgcaag

SEQ ID NO: 5992426 - DNA, 25 bp, Homo sapien
agtcatctatcagcaaatattcatc

SEQ ID NO: 5992427 - DNA, 25 bp, Homo sapien
ctttccttttagcttctgggtagtc

SEQ ID NO: 5992428 - DNA, 25 bp, Homo sapien
cctttcgttcagtattccatatagc

SEQ ID NO: 5992429 - DNA, 25 bp, Homo sapien
ggcctaatccacgtcgttgatatgg

SEQ ID NO: 5992430 - DNA, 25 bp, Homo sapien
tacttctggccctgatattacacct

SEQ ID NO: 5992431 - DNA, 25 bp, Homo sapien
gtgagtgattgacttaaagatcttg

SEQ ID NO: 5992432 - DNA, 25 bp, Homo sapien
tgtagtttcaaccagctattcaatg

SEQ ID NO: 5992433 - DNA, 25 bp, Homo sapien
atcagcaaatattcatcttttaatt

SEQ ID NO: 5992434 - DNA, 25 bp, Homo sapien
cctttttgtttcaggatcgaaataa

SEQ ID NO: 5992435 - DNA, 25 bp, Homo sapien
aaacagaggaaagctgacccttggt

SEQ ID NO: 5992436 - DNA, 25 bp, Homo sapien
ccatcggctttgttgatccagtttc

SEQ ID NO: 5992437 - DNA, 25 bp, Homo sapien
gtctgatcatccgtgtatttgaagc

SEQ ID NO: 5992438 - DNA, 25 bp, Homo sapien
taaacggcgctcccataccaagtag

SEQ ID NO: 5992439 - DNA, 25 bp, Homo sapien
agaaacagaggaaagctgacccttg

SEQ ID NO: 5992440 - DNA, 25 bp, Homo sapien
agaggaaagctgacccttggtctcg

SEQ ID NO: 5992441 - DNA, 25 bp, Homo sapien
ctgtgagtgattgacttaaagatct

SEQ ID NO: 5992442 - DNA, 25 bp, Homo sapien
tttgctgagggcttattcttgcctt

SEQ ID NO: 5992443 - DNA, 25 bp, Homo sapien
aaggcctaatccacgtcgttgatat

SEQ ID NO: 5992444 - DNA, 25 bp, Homo sapien
ccctagcctttttgtttcaggatcg

SEQ ID NO: 5992445 - DNA, 25 bp, Homo sapien
ttttgcctggaacacgatattgaaa

SEQ ID NO: 5992446 - DNA, 25 bp, Homo sapien
cattccagtcacgatggaaagatcc

SEQ ID NO: 5992447 - DNA, 25 bp, Homo sapien
tagagaattttttattcagtccaaa

SEQ ID NO: 5992448 - DNA, 25 bp, Homo sapien
tcttctttccttttagcttctgggt

SEQ ID NO: 5992449 - DNA, 25 bp, Homo sapien
attcttgccttttccaccattcttc

SEQ ID NO: 5992450 - DNA, 25 bp, Homo sapien
tagtccaaaaggtgataacggtact

SEQ ID NO: 5992451 - DNA, 25 bp, Homo sapien
aattgggatagtttgtatgaaaact

SEQ ID NO: 5992452 - DNA, 25 bp, Homo sapien
acgatggaaagatcctccagggtca

SEQ ID NO: 5992453 - DNA, 25 bp, Homo sapien
agttgatacttggatccttttactc

SEQ ID NO: 5992454 - DNA, 25 bp, Homo sapien
gggcttattcttgccttttccacca

SEQ ID NO: 5992455 - DNA, 25 bp, Homo sapien
tacccgattagtccaaaaggtgata

SEQ ID NO: 5992456 - DNA, 25 bp, Homo sapien
gaaagctgacccttggtctcggagc

SEQ ID NO: 5992457 - DNA, 25 bp, Homo sapien
ccttcaataaggtgccaacagagta

SEQ ID NO: 5992458 - DNA, 25 bp, Homo sapien
attagtccaaaaggtgataacggta

SEQ ID NO: 5992459 - DNA, 25 bp, Homo sapien
tctttcgaaaagaatcccatcggct

SEQ ID NO: 5992460 - DNA, 25 bp, Homo sapien
aagatcctccagggtcactttatca

SEQ ID NO: 5992461 - DNA, 25 bp, Homo sapien
cagtattggctgttagaaacagagg

SEQ ID NO: 5992462 - DNA, 25 bp, Homo sapien
attgtccagatatagcttagtgaaa

SEQ ID NO: 5992463 - DNA, 25 bp, Homo sapien
agcaccctagcctttttgtttcagg

SEQ ID NO: 5992464 - DNA, 25 bp, Homo sapien
tcataatgatctactttgaaataca

SEQ ID NO: 5992465 - DNA, 25 bp, Homo sapien
tcgaaaagaatcccatcggctttgt

SEQ ID NO: 5992466 - DNA, 25 bp, Homo sapien
tcaagtacccgattagtccaaaagg

SEQ ID NO: 5992467 - DNA, 25 bp, Homo sapien
ttgggatagtttgtatgaaaactcg

SEQ ID NO: 5992468 - DNA, 25 bp, Homo sapien
caaaagagttgatacttggatcctt

SEQ ID NO: 5992469 - DNA, 25 bp, Homo sapien
gactgcaagtaaatttggttattct

SEQ ID NO: 5992470 - DNA, 25 bp, Homo sapien
tctagccagtattggctgttagaaa

SEQ ID NO: 5992471 - DNA, 25 bp, Homo sapien
agtccaaactgaatctgtcttatgt

SEQ ID NO: 5992472 - DNA, 25 bp, Homo sapien
acgaaaagagtgtctagccagtatt

SEQ ID NO: 5992473 - DNA, 25 bp, Homo sapien
ataatgggcgaggtcaccttcaata

SEQ ID NO: 5992474 - DNA, 25 bp, Homo sapien
agatgcacgctagattattttgctg

SEQ ID NO: 5992475 - DNA, 25 bp, Homo sapien
tccccaatacagttcaagtgcttca

SEQ ID NO: 5992476 - DNA, 25 bp, Homo sapien
ctactttgaaatacatggatttatt

SEQ ID NO: 5992477 - DNA, 25 bp, Homo sapien
gataagtaaaaggcctaatccacgt

SEQ ID NO: 5992478 - DNA, 25 bp, Homo sapien
ccacgtcgttgatatgggggaaata

SEQ ID NO: 5992479 - DNA, 25 bp, Homo sapien
gaaaagaatcccatcggctttgttg

SEQ ID NO: 5992480 - DNA, 25 bp, Homo sapien
cattgactctcattccagtcacgat

SEQ ID NO: 5992481 - DNA, 25 bp, Homo sapien
aacggcgctcccataccaagtagag

SEQ ID NO: 5992482 - DNA, 25 bp, Homo sapien
attctccccaatacagttcaagtgc

SEQ ID NO: 5992483 - DNA, 25 bp, Homo sapien
actcgataagtaaaaggcctaatcc

SEQ ID NO: 5992484 - DNA, 25 bp, Homo sapien
tcctccagggtcactttatcataat

SEQ ID NO: 5992485 - DNA, 25 bp, Homo sapien
agtgcttcaaggtcaaaataacatc

SEQ ID NO: 5992486 - DNA, 25 bp, Homo sapien
tgtatattcaggactcttgtatttt

SEQ ID NO: 5992487 - DNA, 25 bp, Homo sapien
ccaacagagtatctgtgaccaatat

SEQ ID NO: 5992488 - DNA, 25 bp, Homo sapien
ttggtctcggagcaccctagccttt

SEQ ID NO: 5992489 - DNA, 25 bp, Homo sapien
atattgaaatggacaacttgcaaca

SEQ ID NO: 5992490 - DNA, 25 bp, Homo sapien
gcctggaacacgatattgaaatgga

SEQ ID NO: 5992491 - DNA, 25 bp, Homo sapien
ttattgtccagatatagcttagtga

SEQ ID NO: 5992492 - DNA, 25 bp, Homo sapien
tacttggatccttttactcttctta

SEQ ID NO: 5992493 - DNA, 25 bp, Homo sapien
tcatccgtgtatttgaagcagtatt

SEQ ID NO: 5992494 - DNA, 25 bp, Homo sapien
gagtgattgacttaaagatcttgcc

SEQ ID NO: 5992495 - DNA, 25 bp, Homo sapien
ctgcaagtaaatttggttattctcc

SEQ ID NO: 5992496 - DNA, 25 bp, Homo sapien
tgcaacatgtcctacaaaccgcgtc

SEQ ID NO: 5992497 - DNA, 25 bp, Homo sapien
ggaacacgatattgaaatggacaac

SEQ ID NO: 5992498 - DNA, 25 bp, Homo sapien
tattcaggactcttgtattttattt

SEQ ID NO: 5992499 - DNA, 25 bp, Homo sapien
taagtaaaaggcctaatccacgtcg

SEQ ID NO: 5992500 - DNA, 25 bp, Homo sapien
aaagagtgtctagccagtattggct

SEQ ID NO: 5992501 - DNA, 25 bp, Homo sapien
ggacaacttgcaacatgtcctacaa

SEQ ID NO: 5992502 - DNA, 25 bp, Homo sapien
caatgactgcaagtaaatttggtta

SEQ ID NO: 5992503 - DNA, 25 bp, Homo sapien
attggctgttagaaacagaggaaag

SEQ ID NO: 5992504 - DNA, 25 bp, Homo sapien
tcaaaataacatcattgactctcat

SEQ ID NO: 5992505 - DNA, 25 bp, Homo sapien
tatgttcctttcgttcagtattcca

SEQ ID NO: 5992506 - DNA, 25 bp, Homo sapien
atctgtgaccaatatttcaagtacc

SEQ ID NO: 5992507 - DNA, 25 bp, Homo sapien
attttgctgatatgacactaaatct

SEQ ID NO: 5992508 - DNA, 25 bp, Homo sapien
tccgttttgttccatgtagtttcaa

SEQ ID NO: 5992509 - DNA, 25 bp, Homo sapien
agcagtattcacaaacgaaaagagt

SEQ ID NO: 5992510 - DNA, 25 bp, Homo sapien
tttgtttcaggatcgaaataaacgg

SEQ ID NO: 5992511 - DNA, 25 bp, Homo sapien
aacacgatattgaaatggacaactt

SEQ ID NO: 5992512 - DNA, 25 bp, Homo sapien
ctccagggtcactttatcataatgg

SEQ ID NO: 5992513 - DNA, 25 bp, Homo sapien
tggccctgatattacaccttctaat

SEQ ID NO: 5992514 - DNA, 25 bp, Homo sapien
gtttcataaactatgtaaaattcat

SEQ ID NO: 5992515 - DNA, 25 bp, Homo sapien
actttgaaatacatggatttattgt

SEQ ID NO: 5992516 - DNA, 25 bp, Homo sapien
catgtagtttcaaccagctattcaa

SEQ ID NO: 5992517 - DNA, 25 bp, Homo sapien
gtgtatttgaagcagtattcacaaa

SEQ ID NO: 5992518 - DNA, 25 bp, Homo sapien
tgttagaaacagaggaaagctgacc

SEQ ID NO: 5992519 - DNA, 25 bp, Homo sapien
cgaggtcaccttcaataaggtgcca

SEQ ID NO: 5992520 - DNA, 25 bp, Homo sapien
ttttaatttttgctgagggcttatt

SEQ ID NO: 5992521 - DNA, 25 bp, Homo sapien
cagtattcacaaacgaaaagagtgt

SEQ ID NO: 5992522 - DNA, 25 bp, Homo sapien
tcttgtattttattttgcctggaac

SEQ ID NO: 5992523 - DNA, 25 bp, Homo sapien
tactcttcttattgtatattcagga

SEQ ID NO: 5992524 - DNA, 25 bp, Homo sapien
gatcctccagggtcactttatcata

SEQ ID NO: 5992525 - DNA, 25 bp, Homo sapien
gagtatctgtgaccaatatttcaag

SEQ ID NO: 5992526 - DNA, 25 bp, Homo sapien
cccgattagtccaaaaggtgataac

SEQ ID NO: 5992527 - DNA, 25 bp, Homo sapien
gatccagtttcataaactatgtaaa

SEQ ID NO: 5992528 - DNA, 25 bp, Homo sapien
gtatgaaaactcgataagtaaaagg

SEQ ID NO: 5992529 - DNA, 25 bp, Homo sapien
tccaaaaggtgataacggtacttct

SEQ ID NO: 5992530 - DNA, 25 bp, Homo sapien
tgccaacagagtatctgtgaccaat

SEQ ID NO: 5992531 - DNA, 25 bp, Homo sapien
tgggggaaatatcaagatgcacgct

SEQ ID NO: 5992532 - DNA, 25 bp, Homo sapien
cggcgctcccataccaagtagagaa

SEQ ID NO: 5992533 - DNA, 25 bp, Homo sapien
aaatatcaagatgcacgctagatta

SEQ ID NO: 5992534 - DNA, 25 bp, Homo sapien
ctagtcatctatcagcaaatattca

SEQ ID NO: 5992535 - DNA, 25 bp, Homo sapien
cagtttcataaactatgtaaaattc

SEQ ID NO: 5992536 - DNA, 25 bp, Homo sapien
ttccagtcacgatggaaagatcctc

SEQ ID NO: 5992537 - DNA, 25 bp, Homo sapien
acagaggaaagctgacccttggtct

SEQ ID NO: 5992538 - DNA, 25 bp, Homo sapien
ggaaatatcaagatgcacgctagat

SEQ ID NO: 5992539 - DNA, 25 bp, Homo sapien
ggagcaccctagcctttttgtttca

SEQ ID NO: 5992540 - DNA, 25 bp, Homo sapien
attgtatattcaggactcttgtatt

SEQ ID NO: 5992541 - DNA, 25 bp, Homo sapien
cgattagtccaaaaggtgataacgg

SEQ ID NO: 5992542 - DNA, 25 bp, Homo sapien
gaatctgtcttatgttcctttcgtt

SEQ ID NO: 5992543 - DNA, 25 bp, Homo sapien
aatgggcgaggtcaccttcaataag

SEQ ID NO: 5992544 - DNA, 25 bp, Homo sapien
ataaggtgccaacagagtatctgtg

SEQ ID NO: 5992545 - DNA, 25 bp, Homo sapien
tattttgcctggaacacgatattga

SEQ ID NO: 5992546 - DNA, 25 bp, Homo sapien
gatagtttgtatgaaaactcgataa

SEQ ID NO: 5992547 - DNA, 25 bp, Homo sapien
caatacagttcaagtgcttcaaggt

SEQ ID NO: 5992548 - DNA, 25 bp, Homo sapien
tagccagtattggctgttagaaaca

SEQ ID NO: 5992549 - DNA, 25 bp, Homo sapien
caggactcttgtattttattttgcc

SEQ ID NO: 5992550 - DNA, 25 bp, Homo sapien
agtcacgatggaaagatcctccagg

SEQ ID NO: 5992551 - DNA, 25 bp, Homo sapien
gttcagtattccatatagcatctct

SEQ ID NO: 5992552 - DNA, 25 bp, Homo sapien
gaagcagtattcacaaacgaaaaga

SEQ ID NO: 5992553 - DNA, 25 bp, Homo sapien
acggtacttctggccctgatattac

SEQ ID NO: 5992554 - DNA, 25 bp, Homo sapien
aggtgataacggtacttctggccct

SEQ ID NO: 5992555 - DNA, 25 bp, Homo sapien
ctgatatgacactaaatctttcgaa

SEQ ID NO: 5992556 - DNA, 25 bp, Homo sapien
ctatgtaaaattcataatgatctac

SEQ ID NO: 5992557 - DNA, 25 bp, Homo sapien
ttattcttgccttttccaccattct

SEQ ID NO: 5992558 - DNA, 25 bp, Homo sapien
gatcatccgtgtatttgaagcagta

SEQ ID NO: 5992559 - DNA, 25 bp, Homo sapien
atctatcagcaaatattcatctttt

SEQ ID NO: 5992560 - DNA, 25 bp, Homo sapien
acccttggtctcggagcaccctagc

SEQ ID NO: 5992561 - DNA, 25 bp, Homo sapien
agcttctgggtagtcgctgtgagtg

SEQ ID NO: 5992562 - DNA, 25 bp, Homo sapien
cccaatacagttcaagtgcttcaag

SEQ ID NO: 5992563 - DNA, 25 bp, Homo sapien
tacaaaccgcgtctgatcatccgtg

SEQ ID NO: 5992564 - DNA, 25 bp, Homo sapien
aataaacggcgctcccataccaagt

SEQ ID NO: 5992565 - DNA, 25 bp, Homo sapien
attacaccttctaattgggatagtt

SEQ ID NO: 5992566 - DNA, 25 bp, Homo sapien
aaagagttgatacttggatcctttt

SEQ ID NO: 5992567 - DNA, 25 bp, Homo sapien
gaaccaattccgttttgttccatgt

SEQ ID NO: 5992568 - DNA, 25 bp, Homo sapien
ctaattgggatagtttgtatgaaaa

SEQ ID NO: 5992569 - DNA, 25 bp, Homo sapien
ttgaagcagtattcacaaacgaaaa

SEQ ID NO: 5992570 - DNA, 25 bp, Homo sapien
atggacaacttgcaacatgtcctac

SEQ ID NO: 5992571 - DNA, 25 bp, Homo sapien
caccctagcctttttgtttcaggat

SEQ ID NO: 5992572 - DNA, 25 bp, Homo sapien
tttcaagtacccgattagtccaaaa

SEQ ID NO: 5992573 - DNA, 25 bp, Homo sapien
tctccccaatacagttcaagtgctt

SEQ ID NO: 5992574 - DNA, 25 bp, Homo sapien
ggggaaatatcaagatgcacgctag

SEQ ID NO: 5992575 - DNA, 25 bp, Homo sapien
tcgaaataaacggcgctcccatacc

SEQ ID NO: 5992576 - DNA, 25 bp, Homo sapien
gaaataaacggcgctcccataccaa

SEQ ID NO: 5992577 - DNA, 25 bp, Homo sapien
aatcccatcggctttgttgatccag

SEQ ID NO: 5992578 - DNA, 25 bp, Homo sapien
attcttctttccttttagcttctgg

SEQ ID NO: 5992579 - DNA, 25 bp, Homo sapien
ctgagggcttattcttgccttttcc

SEQ ID NO: 5992580 - DNA, 25 bp, Homo sapien
aggatcgaaataaacggcgctccca

SEQ ID NO: 5992581 - DNA, 25 bp, Homo sapien
tgctgatatgacactaaatctttcg

SEQ ID NO: 5992582 - DNA, 25 bp, Homo sapien
cctaatccacgtcgttgatatgggg

SEQ ID NO: 5992583 - DNA, 25 bp, Homo sapien
ctggaacacgatattgaaatggaca

SEQ ID NO: 5992584 - DNA, 25 bp, Homo sapien
acgtcgttgatatgggggaaatatc

SEQ ID NO: 5992585 - DNA, 25 bp, Homo sapien
tcataatgggcgaggtcaccttcaa

SEQ ID NO: 5992586 - DNA, 25 bp, Homo sapien
atcaagatgcacgctagattatttt

SEQ ID NO: 5992587 - DNA, 25 bp, Homo sapien
ttttttaatttttgctgagggctta

SEQ ID NO: 5992588 - DNA, 25 bp, Homo sapien
gccctgatattacaccttctaattg

SEQ ID NO: 5992589 - DNA, 25 bp, Homo sapien
actaaatctttcgaaaagaatccca

SEQ ID NO: 5992590 - DNA, 25 bp, Homo sapien
ctgatcatccgtgtatttgaagcag

SEQ ID NO: 5992591 - DNA, 25 bp, Homo sapien
attgaaatggacaacttgcaacatg

SEQ ID NO: 5992592 - DNA, 25 bp, Homo sapien
atgactgcaagtaaatttggttatt

SEQ ID NO: 5992593 - DNA, 25 bp, Homo sapien
atgcacgctagattattttgctgat

SEQ ID NO: 5992594 - DNA, 25 bp, Homo sapien
tgtccagatatagcttagtgaaaag

SEQ ID NO: 5992595 - DNA, 25 bp, Homo sapien
ttgaaccaattccgttttgttccat

SEQ ID NO: 5992596 - DNA, 25 bp, Homo sapien
ttattttgctgatatgacactaaat

SEQ ID NO: 5992597 - DNA, 25 bp, Homo sapien
tagattattttgctgatatgacact

SEQ ID NO: 5992598 - DNA, 25 bp, Homo sapien
caagatgcacgctagattattttgc

SEQ ID NO: 5992599 - DNA, 25 bp, Homo sapien
atttattgtccagatatagcttagt

SEQ ID NO: 5992600 - DNA, 25 bp, Homo sapien
aaagaatcccatcggctttgttgat

SEQ ID NO: 5992601 - DNA, 25 bp, Homo sapien
aataacatcattgactctcattcca

SEQ ID NO: 5992602 - DNA, 25 bp, Homo sapien
ttattcagtccaaactgaatctgtc

SEQ ID NO: 5992603 - DNA, 25 bp, Homo sapien
ataatgatctactttgaaatacatg

SEQ ID NO: 5992604 - DNA, 25 bp, Homo sapien
ttgtatgaaaactcgataagtaaaa

SEQ ID NO: 5992605 - DNA, 25 bp, Homo sapien
gcacgctagattattttgctgatat

SEQ ID NO: 5992606 - DNA, 25 bp, Homo sapien
tagcttagtgaaaagacaaagacat

SEQ ID NO: 5992607 - DNA, 25 bp, Homo sapien
atcattgactctcattccagtcacg

SEQ ID NO: 5992608 - DNA, 25 bp, Homo sapien
aacttgcaacatgtcctacaaaccg

SEQ ID NO: 5992609 - DNA, 25 bp, Homo sapien
acactaaatctttcgaaaagaatcc

SEQ ID NO: 5992610 - DNA, 25 bp, Homo sapien
aaggtcaaaataacatcattgactc

SEQ ID NO: 5992611 - DNA, 25 bp, Homo sapien
caagtagagaattttttattcagtc

SEQ ID NO: 5992612 - DNA, 25 bp, Homo sapien
tggaaagatcctccagggtcacttt

SEQ ID NO: 5992613 - DNA, 25 bp, Homo sapien
attttattttgcctggaacacgata

SEQ ID NO: 5992614 - DNA, 25 bp, Homo sapien
tgaaatacatggatttattgtccag

SEQ ID NO: 5992615 - DNA, 25 bp, Homo sapien
cgatattgaaatggacaacttgcaa

SEQ ID NO: 5992616 - DNA, 25 bp, Homo sapien
aactgaatctgtcttatgttccttt

SEQ ID NO: 5992617 - DNA, 25 bp, Homo sapien
tttcaggatcgaaataaacggcgct

SEQ ID NO: 5992618 - DNA, 25 bp, Homo sapien
aatgatctactttgaaatacatgga

SEQ ID NO: 5992619 - DNA, 25 bp, Homo sapien
gtgataacggtacttctggccctga

SEQ ID NO: 5992620 - DNA, 25 bp, Homo sapien
tgtctagccagtattggctgttaga

SEQ ID NO: 5992621 - DNA, 25 bp, Homo sapien
ttcaataaggtgccaacagagtatc

SEQ ID NO: 5992622 - DNA, 25 bp, Homo sapien
ttgcctggaacacgatattgaaatg

SEQ ID NO: 5992623 - DNA, 25 bp, Homo sapien
gtattggctgttagaaacagaggaa

SEQ ID NO: 5992624 - DNA, 25 bp, Homo sapien
gctagattattttgctgatatgaca

SEQ ID NO: 5992625 - DNA, 25 bp, Homo sapien
ccatatagcatctctttttgagttt

SEQ ID NO: 5992626 - DNA, 25 bp, Homo sapien
tttgttgatccagtttcataaacta

SEQ ID NO: 5992627 - DNA, 25 bp, Homo sapien
ataccaagtagagaattttttattc

SEQ ID NO: 5992628 - DNA, 25 bp, Homo sapien
ttcaggactcttgtattttattttg

SEQ ID NO: 5992629 - DNA, 25 bp, Homo sapien
taacatcattgactctcattccagt

SEQ ID NO: 5992630 - DNA, 25 bp, Homo sapien
tccagatatagcttagtgaaaagac

SEQ ID NO: 5992631 - DNA, 25 bp, Homo sapien
atccacgtcgttgatatgggggaaa

SEQ ID NO: 5992632 - DNA, 25 bp, Homo sapien
cattggcaaaagagttgatacttgg

SEQ ID NO: 5992633 - DNA, 25 bp, Homo sapien
gatggaaagatcctccagggtcact

SEQ ID NO: 5992634 - DNA, 25 bp, Homo sapien
aaatggacaacttgcaacatgtcct

SEQ ID NO: 5992635 - DNA, 25 bp, Homo sapien
gcttagtgaaaagacaaagacattg

SEQ ID NO: 5992636 - DNA, 25 bp, Homo sapien
tttcgttcagtattccatatagcat

SEQ ID NO: 5992637 - DNA, 25 bp, Homo sapien
cgttttgttccatgtagtttcaacc

SEQ ID NO: 5992638 - DNA, 25 bp, Homo sapien
tttgaaatacatggatttattgtcc

SEQ ID NO: 5992639 - DNA, 25 bp, Homo sapien
gtaaaattcataatgatctactttg

SEQ ID NO: 5992640 - DNA, 25 bp, Homo sapien
tgaaaagacaaagacattggcaaaa

SEQ ID NO: 5992641 - DNA, 25 bp, Homo sapien
ggtacttctggccctgatattacac

SEQ ID NO: 5992642 - DNA, 25 bp, Homo sapien
tggatccttttactcttcttattgt

SEQ ID NO: 5992643 - DNA, 25 bp, Homo sapien
gtcaccttcaataaggtgccaacag

SEQ ID NO: 5992644 - DNA, 25 bp, Homo sapien
tgacactaaatctttcgaaaagaat

SEQ ID NO: 5992645 - DNA, 25 bp, Homo sapien
tcagtccaaactgaatctgtcttat

SEQ ID NO: 5992646 - DNA, 25 bp, Homo sapien
ctagcctttttgtttcaggatcgaa

SEQ ID NO: 5992647 - DNA, 25 bp, Homo sapien
caaagacattggcaaaagagttgat

SEQ ID NO: 5992648 - DNA, 25 bp, Homo sapien
ggcgaggtcaccttcaataaggtgc

SEQ ID NO: 5992649 - DNA, 25 bp, Homo sapien
tttttgtttcaggatcgaaataaac

SEQ ID NO: 5992650 - DNA, 25 bp, Homo sapien
aaatacatggatttattgtccagat

SEQ ID NO: 5992651 - DNA, 25 bp, Homo sapien
gattattttgctgatatgacactaa

SEQ ID NO: 5992652 - DNA, 25 bp, Homo sapien
tgggcgaggtcaccttcaataaggt

SEQ ID NO: 5992653 - DNA, 25 bp, Homo sapien
agagtgtctagccagtattggctgt

SEQ ID NO: 5992654 - DNA, 25 bp, Homo sapien
cttgcaacatgtcctacaaaccgcg

SEQ ID NO: 5992655 - DNA, 25 bp, Homo sapien
ctcattccagtcacgatggaaagat

SEQ ID NO: 5992656 - DNA, 25 bp, Homo sapien
agtgtctagccagtattggctgtta

SEQ ID NO: 5992657 - DNA, 25 bp, Homo sapien
ggtcactttatcataatgggcgagg

SEQ ID NO: 5992658 - DNA, 25 bp, Homo sapien
atttgaagcagtattcacaaacgaa

SEQ ID NO: 5992659 - DNA, 25 bp, Homo sapien
tttgctgatatgacactaaatcttt

SEQ ID NO: 5992660 - DNA, 25 bp, Homo sapien
actttatcataatgggcgaggtcac

SEQ ID NO: 5992661 - DNA, 25 bp, Homo sapien
ttgactctcattccagtcacgatgg

SEQ ID NO: 5992662 - DNA, 25 bp, Homo sapien
tatttcaagtacccgattagtccaa

SEQ ID NO: 5992663 - DNA, 25 bp, Homo sapien
gacattggcaaaagagttgatactt

SEQ ID NO: 5992664 - DNA, 25 bp, Homo sapien
tcatttcaagaacgataccaagatt

SEQ ID NO: 5992665 - DNA, 25 bp, Homo sapien
acaatttgaaactgctggtaatcaa

SEQ ID NO: 5992666 - DNA, 25 bp, Homo sapien
attccaatggtaaggttgcatgttt

SEQ ID NO: 5992667 - DNA, 25 bp, Homo sapien
gccaaccaacaatgtgtcagttaga

SEQ ID NO: 5992668 - DNA, 25 bp, Homo sapien
agatatcagatggccaaccaacaat

SEQ ID NO: 5992669 - DNA, 25 bp, Homo sapien
ctgtcgagggttctaccactattgg

SEQ ID NO: 5992670 - DNA, 25 bp, Homo sapien
gtagcacaaaatgtcgaggcaggta

SEQ ID NO: 5992671 - DNA, 25 bp, Homo sapien
agacaatctgtatatcgtggtacat

SEQ ID NO: 5992672 - DNA, 25 bp, Homo sapien
ttgactgcgaagcaatccaagggga

SEQ ID NO: 5992673 - DNA, 25 bp, Homo sapien
cgctatggagaaaagtagcacaaaa

SEQ ID NO: 5992674 - DNA, 25 bp, Homo sapien
ttagattccaatggtaaggttgcat

SEQ ID NO: 5992675 - DNA, 25 bp, Homo sapien
cggtctacaatttgaaactgctggt

SEQ ID NO: 5992676 - DNA, 25 bp, Homo sapien
atcccggccctttctcctttgactg

SEQ ID NO: 5992677 - DNA, 25 bp, Homo sapien
ctatcccggccctttctcctttgac

SEQ ID NO: 5992678 - DNA, 25 bp, Homo sapien
cgttttattttgcggtgaaatcgat

SEQ ID NO: 5992679 - DNA, 25 bp, Homo sapien
cacaaaatgtcgaggcaggtatcga

SEQ ID NO: 5992680 - DNA, 25 bp, Homo sapien
atgtctccaagaagcaagattggat

SEQ ID NO: 5992681 - DNA, 25 bp, Homo sapien
gtctacaatttgaaactgctggtaa

SEQ ID NO: 5992682 - DNA, 25 bp, Homo sapien
cgcattgtttgccaacgataaccta

SEQ ID NO: 5992683 - DNA, 25 bp, Homo sapien
aatttgaaactgctggtaatcaaga

SEQ ID NO: 5992684 - DNA, 25 bp, Homo sapien
gtttgccaacgataacctatttgct

SEQ ID NO: 5992685 - DNA, 25 bp, Homo sapien
gaatacagacaatctgtatatcgtg

SEQ ID NO: 5992686 - DNA, 25 bp, Homo sapien
cgtggaaaacctgaataaggaagtc

SEQ ID NO: 5992687 - DNA, 25 bp, Homo sapien
ggttgggataagaaaaacatttcta

SEQ ID NO: 5992688 - DNA, 25 bp, Homo sapien
tggtattcaacctactgtcgagggt

SEQ ID NO: 5992689 - DNA, 25 bp, Homo sapien
acaatgtgtcagttagaacaagact

SEQ ID NO: 5992690 - DNA, 25 bp, Homo sapien
tacattagattccaatggtaaggtt

SEQ ID NO: 5992691 - DNA, 25 bp, Homo sapien
tctcagtattttttcaccgggctaa

SEQ ID NO: 5992692 - DNA, 25 bp, Homo sapien
gactcgttatgtctccaagaagcaa

SEQ ID NO: 5992693 - DNA, 25 bp, Homo sapien
gatgctggtgtttcatacttgactc

SEQ ID NO: 5992694 - DNA, 25 bp, Homo sapien
tgttgcatcttttctacaaagtgtt

SEQ ID NO: 5992695 - DNA, 25 bp, Homo sapien
cctgaataaggaagtctcccgtgac

SEQ ID NO: 5992696 - DNA, 25 bp, Homo sapien
ctgtttccggtagattaaactatgg

SEQ ID NO: 5992697 - DNA, 25 bp, Homo sapien
ttgcattctcacagacaatctttgg

SEQ ID NO: 5992698 - DNA, 25 bp, Homo sapien
caacaatgtgtcagttagaacaaga

SEQ ID NO: 5992699 - DNA, 25 bp, Homo sapien
tattactgatccattgatgggcact

SEQ ID NO: 5992700 - DNA, 25 bp, Homo sapien
acagacaatctttggagctggtcaa

SEQ ID NO: 5992701 - DNA, 25 bp, Homo sapien
aagtgttactcctcaattagcttta

SEQ ID NO: 5992702 - DNA, 25 bp, Homo sapien
tctaaggtcaacctacagatatcag

SEQ ID NO: 5992703 - DNA, 25 bp, Homo sapien
tgctggtgtttcatacttgactcgt

SEQ ID NO: 5992704 - DNA, 25 bp, Homo sapien
agcgctccaggtgatgctggtgttt

SEQ ID NO: 5992705 - DNA, 25 bp, Homo sapien
tattttttcaccgggctaagagctg

SEQ ID NO: 5992706 - DNA, 25 bp, Homo sapien
cagaggcctctcaaattcccactat

SEQ ID NO: 5992707 - DNA, 25 bp, Homo sapien
atgaatacagacaatctgtatatcg

SEQ ID NO: 5992708 - DNA, 25 bp, Homo sapien
caacgataacctatttgctcaaggt

SEQ ID NO: 5992709 - DNA, 25 bp, Homo sapien
gtattcaacctactgtcgagggttc

SEQ ID NO: 5992710 - DNA, 25 bp, Homo sapien
tgtctcagtattttttcaccgggct

SEQ ID NO: 5992711 - DNA, 25 bp, Homo sapien
taacccattgcaagctcttcctcaa

SEQ ID NO: 5992712 - DNA, 25 bp, Homo sapien
agcattgcctaagtacgcattctcc

SEQ ID NO: 5992713 - DNA, 25 bp, Homo sapien
actttctctataggttcccaagcat

SEQ ID NO: 5992714 - DNA, 25 bp, Homo sapien
ttgcctaagtacgcattctccgcat

SEQ ID NO: 5992715 - DNA, 25 bp, Homo sapien
gttctgccaactctgtccgttttat

SEQ ID NO: 5992716 - DNA, 25 bp, Homo sapien
tcctgcttttcaaacctcacacact

SEQ ID NO: 5992717 - DNA, 25 bp, Homo sapien
gtgttactcctcaattagctttagg

SEQ ID NO: 5992718 - DNA, 25 bp, Homo sapien
tttctaaggtcaacctacagatatc

SEQ ID NO: 5992719 - DNA, 25 bp, Homo sapien
actgatccattgatgggcactccaa

SEQ ID NO: 5992720 - DNA, 25 bp, Homo sapien
tttatactccagaactgacggtagc

SEQ ID NO: 5992721 - DNA, 25 bp, Homo sapien
tctgccaactctgtccgttttattt

SEQ ID NO: 5992722 - DNA, 25 bp, Homo sapien
gtctccaagaagcaagattggattt

SEQ ID NO: 5992723 - DNA, 25 bp, Homo sapien
aacaaggtttagacgcagatggtaa

SEQ ID NO: 5992724 - DNA, 25 bp, Homo sapien
ggtaaggttgcatgttttctagaaa

SEQ ID NO: 5992725 - DNA, 25 bp, Homo sapien
gtacaaacaattgcattctcacaga

SEQ ID NO: 5992726 - DNA, 25 bp, Homo sapien
ggttcctattactgatccattgatg

SEQ ID NO: 5992727 - DNA, 25 bp, Homo sapien
atgtcgaggcaggtatcgaaactac

SEQ ID NO: 5992728 - DNA, 25 bp, Homo sapien
ccaaggggaatttcttctcctcaaa

SEQ ID NO: 5992729 - DNA, 25 bp, Homo sapien
tccaattggtattcaacctactgtc

SEQ ID NO: 5992730 - DNA, 25 bp, Homo sapien
ttgctgttgcatcttttctacaaag

SEQ ID NO: 5992731 - DNA, 25 bp, Homo sapien
accaacaatgtgtcagttagaacaa

SEQ ID NO: 5992732 - DNA, 25 bp, Homo sapien
tactaatgttacaacaaggtttaga

SEQ ID NO: 5992733 - DNA, 25 bp, Homo sapien
attttccatgaatcctgcttttcaa

SEQ ID NO: 5992734 - DNA, 25 bp, Homo sapien
tgcggtctacaatttgaaactgctg

SEQ ID NO: 5992735 - DNA, 25 bp, Homo sapien
acttgactcgttatgtctccaagaa

SEQ ID NO: 5992736 - DNA, 25 bp, Homo sapien
catttctaaggtcaacctacagata

SEQ ID NO: 5992737 - DNA, 25 bp, Homo sapien
agaacaagactatcaggcttccgat

SEQ ID NO: 5992738 - DNA, 25 bp, Homo sapien
atggttgggataagaaaaacatttc

SEQ ID NO: 5992739 - DNA, 25 bp, Homo sapien
tgtgtcagttagaacaagactatca

SEQ ID NO: 5992740 - DNA, 25 bp, Homo sapien
gcttttcaaacctcacacactttct

SEQ ID NO: 5992741 - DNA, 25 bp, Homo sapien
atacagacaatctgtatatcgtggt

SEQ ID NO: 5992742 - DNA, 25 bp, Homo sapien
tctagctttgttgtggatacgtaca

SEQ ID NO: 5992743 - DNA, 25 bp, Homo sapien
aatttcttctcctcaaacccaatat

SEQ ID NO: 5992744 - DNA, 25 bp, Homo sapien
ctatttgctcaaggtaatatcgaca

SEQ ID NO: 5992745 - DNA, 25 bp, Homo sapien
tctgtccgttttattttgcggtgaa

SEQ ID NO: 5992746 - DNA, 25 bp, Homo sapien
atggtaaggttgcatgttttctaga

SEQ ID NO: 5992747 - DNA, 25 bp, Homo sapien
ttacaacaaggtttagacgcagatg

SEQ ID NO: 5992748 - DNA, 25 bp, Homo sapien
ggttctaccactattggtgctaagt

SEQ ID NO: 5992749 - DNA, 25 bp, Homo sapien
tccatgaatcctgcttttcaaacct

SEQ ID NO: 5992750 - DNA, 25 bp, Homo sapien
ggccaattgcaagccaacggtgctt

SEQ ID NO: 5992751 - DNA, 25 bp, Homo sapien
attggattttttcgggccaattgca

SEQ ID NO: 5992752 - DNA, 25 bp, Homo sapien
cgaaactacattacaagctggtatg

SEQ ID NO: 5992753 - DNA, 25 bp, Homo sapien
tactccagaactgacggtagcgctc

SEQ ID NO: 5992754 - DNA, 25 bp, Homo sapien
gaaaacctgaataaggaagtctccc

SEQ ID NO: 5992755 - DNA, 25 bp, Homo sapien
cctttctcctttgactgcgaagcaa

SEQ ID NO: 5992756 - DNA, 25 bp, Homo sapien
aatctttggagctggtcaatcccgg

SEQ ID NO: 5992757 - DNA, 25 bp, Homo sapien
tgatgggcactccaattggtattca

SEQ ID NO: 5992758 - DNA, 25 bp, Homo sapien
agggcgaattcacaggtgttgctgt

SEQ ID NO: 5992759 - DNA, 25 bp, Homo sapien
agcagaggcctctcaaattcccact

SEQ ID NO: 5992760 - DNA, 25 bp, Homo sapien
agaaagaaaagttctgccaactctg

SEQ ID NO: 5992761 - DNA, 25 bp, Homo sapien
aatatctagctttgttgtggatacg

SEQ ID NO: 5992762 - DNA, 25 bp, Homo sapien
caaagtgttactcctcaattagctt

SEQ ID NO: 5992763 - DNA, 25 bp, Homo sapien
ttcctattactgatccattgatggg

SEQ ID NO: 5992764 - DNA, 25 bp, Homo sapien
accaagattggttgcggtctacaat

SEQ ID NO: 5992765 - DNA, 25 bp, Homo sapien
gttgcatgttttctagaaagaaaag

SEQ ID NO: 5992766 - DNA, 25 bp, Homo sapien
tgaataaggcattttccatgaatcc

SEQ ID NO: 5992767 - DNA, 25 bp, Homo sapien
ggtgttgctgttgcatcttttctac

SEQ ID NO: 5992768 - DNA, 25 bp, Homo sapien
acgcattctccgcattgtttgccaa

SEQ ID NO: 5992769 - DNA, 25 bp, Homo sapien
atatcgacaacgatttatctgtttc

SEQ ID NO: 5992770 - DNA, 25 bp, Homo sapien
aatcgatcatttcaagaacgatacc

SEQ ID NO: 5992771 - DNA, 25 bp, Homo sapien
tttttgtctcagtattttttcaccg

SEQ ID NO: 5992772 - DNA, 25 bp, Homo sapien
aaacccaatatctagctttgttgtg

SEQ ID NO: 5992773 - DNA, 25 bp, Homo sapien
aattcacaggtgttgctgttgcatc

SEQ ID NO: 5992774 - DNA, 25 bp, Homo sapien
aaaagttctgccaactctgtccgtt

SEQ ID NO: 5992775 - DNA, 25 bp, Homo sapien
gccctttctcctttgactgcgaagc

SEQ ID NO: 5992776 - DNA, 25 bp, Homo sapien
ggtacattagattccaatggtaagg

SEQ ID NO: 5992777 - DNA, 25 bp, Homo sapien
actccaattggtattcaacctactg

SEQ ID NO: 5992778 - DNA, 25 bp, Homo sapien
tttcttctcctcaaacccaatatct

SEQ ID NO: 5992779 - DNA, 25 bp, Homo sapien
taaggaagtctcccgtgacgtgttt

SEQ ID NO: 5992780 - DNA, 25 bp, Homo sapien
acgtacaaacaattgcattctcaca

SEQ ID NO: 5992781 - DNA, 25 bp, Homo sapien
aacgataccaagattggttgcggtc

SEQ ID NO: 5992782 - DNA, 25 bp, Homo sapien
gtatggttcctattactgatccatt

SEQ ID NO: 5992783 - DNA, 25 bp, Homo sapien
tccaatggtaaggttgcatgttttc

SEQ ID NO: 5992784 - DNA, 25 bp, Homo sapien
attgatgggcactccaattggtatt

SEQ ID NO: 5992785 - DNA, 25 bp, Homo sapien
cgagggttctaccactattggtgct

SEQ ID NO: 5992786 - DNA, 25 bp, Homo sapien
ctaccactattggtgctaagtatga

SEQ ID NO: 5992787 - DNA, 25 bp, Homo sapien
ggtaatcaagaattactaatgttac

SEQ ID NO: 5992788 - DNA, 25 bp, Homo sapien
aacctcacacactttctctataggt

SEQ ID NO: 5992789 - DNA, 25 bp, Homo sapien
cgctccaggtgatgctggtgtttca

SEQ ID NO: 5992790 - DNA, 25 bp, Homo sapien
cggtagcgctccaggtgatgctggt

SEQ ID NO: 5992791 - DNA, 25 bp, Homo sapien
acacactttctctataggttcccaa

SEQ ID NO: 5992792 - DNA, 25 bp, Homo sapien
tgttgctgttgcatcttttctacaa

SEQ ID NO: 5992793 - DNA, 25 bp, Homo sapien
agaaaagtagcacaaaatgtcgagg

SEQ ID NO: 5992794 - DNA, 25 bp, Homo sapien
ttattttgcggtgaaatcgatcatt

SEQ ID NO: 5992795 - DNA, 25 bp, Homo sapien
tcccactatcccggccctttctcct

SEQ ID NO: 5992796 - DNA, 25 bp, Homo sapien
ggaagtctcccgtgacgtgtttttg

SEQ ID NO: 5992797 - DNA, 25 bp, Homo sapien
gaagcaatccaaggggaatttcttc

SEQ ID NO: 5992798 - DNA, 25 bp, Homo sapien
gctaagagctgatttgaataaggca

SEQ ID NO: 5992799 - DNA, 25 bp, Homo sapien
aagctggtatggttcctattactga

SEQ ID NO: 5992800 - DNA, 25 bp, Homo sapien
gcattctcacagacaatctttggag

SEQ ID NO: 5992801 - DNA, 25 bp, Homo sapien
tcaacctactgtcgagggttctacc

SEQ ID NO: 5992802 - DNA, 25 bp, Homo sapien
tccggtagattaaactatggttggg

SEQ ID NO: 5992803 - DNA, 25 bp, Homo sapien
tcgatcatttcaagaacgataccaa

SEQ ID NO: 5992804 - DNA, 25 bp, Homo sapien
agtattttttcaccgggctaagagc

SEQ ID NO: 5992805 - DNA, 25 bp, Homo sapien
ttttttcaccgggctaagagctgat

SEQ ID NO: 5992806 - DNA, 25 bp, Homo sapien
ggcctctcaaattcccactatcccg

SEQ ID NO: 5992807 - DNA, 25 bp, Homo sapien
aggtatcgaaactacattacaagct

SEQ ID NO: 5992808 - DNA, 25 bp, Homo sapien
aaatgtcgaggcaggtatcgaaact

SEQ ID NO: 5992809 - DNA, 25 bp, Homo sapien
aggcaggtatcgaaactacattaca

SEQ ID NO: 5992810 - DNA, 25 bp, Homo sapien
aaggtaatatcgacaacgatttatc

SEQ ID NO: 5992811 - DNA, 25 bp, Homo sapien
tcaaggtaatatcgacaacgattta

SEQ ID NO: 5992812 - DNA, 25 bp, Homo sapien
agagctgatttgaataaggcatttt

SEQ ID NO: 5992813 - DNA, 25 bp, Homo sapien
gggcactccaattggtattcaacct

SEQ ID NO: 5992814 - DNA, 25 bp, Homo sapien
agattggattttttcgggccaattg

SEQ ID NO: 5992815 - DNA, 25 bp, Homo sapien
ctctgagaagggcgaattcacaggt

SEQ ID NO: 5992816 - DNA, 25 bp, Homo sapien
agctgatttgaataaggcattttcc

SEQ ID NO: 5992817 - DNA, 25 bp, Homo sapien
gcaagccaacggtgctttaattgca

SEQ ID NO: 5992818 - DNA, 25 bp, Homo sapien
ggaatttcttctcctcaaacccaat

SEQ ID NO: 5992819 - DNA, 25 bp, Homo sapien
ccagaactgacggtagcgctccagg

SEQ ID NO: 5992820 - DNA, 25 bp, Homo sapien
tttctcctttgactgcgaagcaatc

SEQ ID NO: 5992821 - DNA, 25 bp, Homo sapien
tttctacaaagtgttactcctcaat

SEQ ID NO: 5992822 - DNA, 25 bp, Homo sapien
tctcacagacaatctttggagctgg

SEQ ID NO: 5992823 - DNA, 25 bp, Homo sapien
agattaaactatggttgggataaga

SEQ ID NO: 5992824 - DNA, 25 bp, Homo sapien
agactatcaggcttccgatttttct

SEQ ID NO: 5992825 - DNA, 25 bp, Homo sapien
attctccgcattgtttgccaacgat

SEQ ID NO: 5992826 - DNA, 25 bp, Homo sapien
tgctggtaatcaagaattactaatg

SEQ ID NO: 5992827 - DNA, 25 bp, Homo sapien
aattgcattctcacagacaatcttt

SEQ ID NO: 5992828 - DNA, 25 bp, Homo sapien
tttccggtagattaaactatggttg

SEQ ID NO: 5992829 - DNA, 25 bp, Homo sapien
caaaatgtcgaggcaggtatcgaaa

SEQ ID NO: 5992830 - DNA, 25 bp, Homo sapien
ccattgatgggcactccaattggta

SEQ ID NO: 5992831 - DNA, 25 bp, Homo sapien
ttaggtttagaaactttatactcca

SEQ ID NO: 5992832 - DNA, 25 bp, Homo sapien
atttatctgtttccggtagattaaa

SEQ ID NO: 5992833 - DNA, 25 bp, Homo sapien
caactccattagcagaggcctctca

SEQ ID NO: 5992834 - DNA, 25 bp, Homo sapien
atggttcctattactgatccattga

SEQ ID NO: 5992835 - DNA, 25 bp, Homo sapien
tgccaactctgtccgttttattttg

SEQ ID NO: 5992836 - DNA, 25 bp, Homo sapien
tgttacaacaaggtttagacgcaga

SEQ ID NO: 5992837 - DNA, 25 bp, Homo sapien
ctaagtacgcattctccgcattgtt

SEQ ID NO: 5992838 - DNA, 25 bp, Homo sapien
gctttgttgtggatacgtacaaaca

SEQ ID NO: 5992839 - DNA, 25 bp, Homo sapien
agcacaaaatgtcgaggcaggtatc

SEQ ID NO: 5992840 - DNA, 25 bp, Homo sapien
tcacacactttctctataggttccc

SEQ ID NO: 5992841 - DNA, 25 bp, Homo sapien
ttaattgcatcgctatggagaaaag

SEQ ID NO: 5992842 - DNA, 25 bp, Homo sapien
taaagacattgaacccttcgttctc

SEQ ID NO: 5992843 - DNA, 25 bp, Homo sapien
tttgaaactgctggtaatcaagaat

SEQ ID NO: 5992844 - DNA, 25 bp, Homo sapien
attggtgctaagtatgaatacagac

SEQ ID NO: 5992845 - DNA, 25 bp, Homo sapien
tttgaataaggcattttccatgaat

SEQ ID NO: 5992846 - DNA, 25 bp, Homo sapien
acgataacctatttgctcaaggtaa

SEQ ID NO: 5992847 - DNA, 25 bp, Homo sapien
ttactgatccattgatgggcactcc

SEQ ID NO: 5992848 - DNA, 25 bp, Homo sapien
ctccagaactgacggtagcgctcca

SEQ ID NO: 5992849 - DNA, 25 bp, Homo sapien
aatcctgcttttcaaacctcacaca

SEQ ID NO: 5992850 - DNA, 25 bp, Homo sapien
tactgtcgagggttctaccactatt

SEQ ID NO: 5992851 - DNA, 25 bp, Homo sapien
gctggtcaatcccggtaccgtggaa

SEQ ID NO: 5992852 - DNA, 25 bp, Homo sapien
ccgggctaagagctgatttgaataa

SEQ ID NO: 5992853 - DNA, 25 bp, Homo sapien
tagctttaggtttagaaactttata

SEQ ID NO: 5992854 - DNA, 25 bp, Homo sapien
tccgttttattttgcggtgaaatcg

SEQ ID NO: 5992855 - DNA, 25 bp, Homo sapien
aacgatttatctgtttccggtagat

SEQ ID NO: 5992856 - DNA, 25 bp, Homo sapien
cccggccctttctcctttgactgcg

SEQ ID NO: 5992857 - DNA, 25 bp, Homo sapien
ctatggttgggataagaaaaacatt

SEQ ID NO: 5992858 - DNA, 25 bp, Homo sapien
atacgtacaaacaattgcattctca

SEQ ID NO: 5992859 - DNA, 25 bp, Homo sapien
cccaagcattgcctaagtacgcatt

SEQ ID NO: 5992860 - DNA, 25 bp, Homo sapien
ctgcgaagcaatccaaggggaattt

SEQ ID NO: 5992861 - DNA, 25 bp, Homo sapien
ctccaggtgatgctggtgtttcata

SEQ ID NO: 5992862 - DNA, 25 bp, Homo sapien
attggtattcaacctactgtcgagg

SEQ ID NO: 5992863 - DNA, 25 bp, Homo sapien
gtatcgaaactacattacaagctgg

SEQ ID NO: 5992864 - DNA, 25 bp, Homo sapien
atcgctatggagaaaagtagcacaa

SEQ ID NO: 5992865 - DNA, 25 bp, Homo sapien
caagattggattttttcgggccaat

SEQ ID NO: 5992866 - DNA, 25 bp, Homo sapien
ggttcccaagcattgcctaagtacg

SEQ ID NO: 5992867 - DNA, 25 bp, Homo sapien
tgctttaattgcatcgctatggaga

SEQ ID NO: 5992868 - DNA, 25 bp, Homo sapien
gatttgaataaggcattttccatga

SEQ ID NO: 5992869 - DNA, 25 bp, Homo sapien
aacctgaataaggaagtctcccgtg

SEQ ID NO: 5992870 - DNA, 25 bp, Homo sapien
aactgacggtagcgctccaggtgat

SEQ ID NO: 5992871 - DNA, 25 bp, Homo sapien
tgttttctagaaagaaaagttctgc

SEQ ID NO: 5992872 - DNA, 25 bp, Homo sapien
aggtttagaaactttatactccaga

SEQ ID NO: 5992873 - DNA, 25 bp, Homo sapien
caaacctcacacactttctctatag

SEQ ID NO: 5992874 - DNA, 25 bp, Homo sapien
tttcatacttgactcgttatgtctc

SEQ ID NO: 5992875 - DNA, 25 bp, Homo sapien
ttcacaggtgttgctgttgcatctt

SEQ ID NO: 5992876 - DNA, 25 bp, Homo sapien
aagttctgccaactctgtccgtttt

SEQ ID NO: 5992877 - DNA, 25 bp, Homo sapien
cgaggcaggtatcgaaactacatta

SEQ ID NO: 5992878 - DNA, 25 bp, Homo sapien
aagtagcacaaaatgtcgaggcagg

SEQ ID NO: 5992879 - DNA, 25 bp, Homo sapien
gttgcggtctacaatttgaaactgc

SEQ ID NO: 5992880 - DNA, 25 bp, Homo sapien
aatgtgtcagttagaacaagactat

SEQ ID NO: 5992881 - DNA, 25 bp, Homo sapien
tcatacttgactcgttatgtctcca

SEQ ID NO: 5992882 - DNA, 25 bp, Homo sapien
tccattagcagaggcctctcaaatt

SEQ ID NO: 5992883 - DNA, 25 bp, Homo sapien
agaacgataccaagattggttgcgg

SEQ ID NO: 5992884 - DNA, 25 bp, Homo sapien
atccattgatgggcactccaattgg

SEQ ID NO: 5992885 - DNA, 25 bp, Homo sapien
cgacaacgatttatctgtttccggt

SEQ ID NO: 5992886 - DNA, 25 bp, Homo sapien
tcgtggtacattagattccaatggt

SEQ ID NO: 5992887 - DNA, 25 bp, Homo sapien
cctcacacactttctctataggttc

SEQ ID NO: 5992888 - DNA, 25 bp, Homo sapien
ataagaaaaacatttctaaggtcaa

SEQ ID NO: 5992889 - DNA, 25 bp, Homo sapien
gaaatcgatcatttcaagaacgata

SEQ ID NO: 5992890 - DNA, 25 bp, Homo sapien
ggtaacccattgcaagctcttcctc

SEQ ID NO: 5992891 - DNA, 25 bp, Homo sapien
tttccatgaatcctgcttttcaaac

SEQ ID NO: 5992892 - DNA, 25 bp, Homo sapien
agcaagattggattttttcgggcca

SEQ ID NO: 5992893 - DNA, 25 bp, Homo sapien
tgcggtgaaatcgatcatttcaaga

SEQ ID NO: 5992894 - DNA, 25 bp, Homo sapien
gcgaagcaatccaaggggaatttct

SEQ ID NO: 5992895 - DNA, 25 bp, Homo sapien
acactttctctataggttcccaagc

SEQ ID NO: 5992896 - DNA, 25 bp, Homo sapien
taaggcattttccatgaatcctgct

SEQ ID NO: 5992897 - DNA, 25 bp, Homo sapien
tttgcggtgaaatcgatcatttcaa

SEQ ID NO: 5992898 - DNA, 25 bp, Homo sapien
aagtctcccgtgacgtgtttttgtc

SEQ ID NO: 5992899 - DNA, 25 bp, Homo sapien
cgtgacgtgtttttgtctcagtatt

SEQ ID NO: 5992900 - DNA, 25 bp, Homo sapien
taagtatgaatacagacaatctgta

SEQ ID NO: 5992901 - DNA, 25 bp, Homo sapien
ccttcgttctctgagaagggcgaat

SEQ ID NO: 5992902 - DNA, 25 bp, Homo sapien
gcttccgatttttctgtgaacgtaa

SEQ ID NO: 5992903 - DNA, 25 bp, Homo sapien
gcattttccatgaatcctgcttttc

SEQ ID NO: 5992904 - DNA, 25 bp, Homo sapien
ttcaaacctcacacactttctctat

SEQ ID NO: 5992905 - DNA, 25 bp, Homo sapien
acaaacaattgcattctcacagaca

SEQ ID NO: 5992906 - DNA, 25 bp, Homo sapien
gccaacggtgctttaattgcatcgc

SEQ ID NO: 5992907 - DNA, 25 bp, Homo sapien
gcatcgctatggagaaaagtagcac

SEQ ID NO: 5992908 - DNA, 25 bp, Homo sapien
tctgtgaacgtaaagacattgaacc

SEQ ID NO: 5992909 - DNA, 25 bp, Homo sapien
ttctaccactattggtgctaagtat

SEQ ID NO: 5992910 - DNA, 25 bp, Homo sapien
aatgttacaacaaggtttagacgca

SEQ ID NO: 5992911 - DNA, 25 bp, Homo sapien
gtgaaatcgatcatttcaagaacga

SEQ ID NO: 5992912 - DNA, 25 bp, Homo sapien
atgtctgcaccaactccattagcag

SEQ ID NO: 5992913 - DNA, 25 bp, Homo sapien
gtaccgtggaaaacctgaataagga

SEQ ID NO: 5992914 - DNA, 25 bp, Homo sapien
tgtccgttttattttgcggtgaaat

SEQ ID NO: 5992915 - DNA, 25 bp, Homo sapien
tgtttcatacttgactcgttatgtc

SEQ ID NO: 5992916 - DNA, 25 bp, Homo sapien
ggataagaaaaacatttctaaggtc

SEQ ID NO: 5992917 - DNA, 25 bp, Homo sapien
tttgttgtggatacgtacaaacaat

SEQ ID NO: 5992918 - DNA, 25 bp, Homo sapien
ctgcttttcaaacctcacacacttt

SEQ ID NO: 5992919 - DNA, 25 bp, Homo sapien
ctaatgttacaacaaggtttagacg

SEQ ID NO: 5992920 - DNA, 25 bp, Homo sapien
cattacaagctggtatggttcctat

SEQ ID NO: 5992921 - DNA, 25 bp, Homo sapien
atcgaaactacattacaagctggta

SEQ ID NO: 5992922 - DNA, 25 bp, Homo sapien
ctgagaagggcgaattcacaggtgt

SEQ ID NO: 5992923 - DNA, 25 bp, Homo sapien
gctggtatggttcctattactgatc

SEQ ID NO: 5992924 - DNA, 25 bp, Homo sapien
tcttctcctcaaacccaatatctag

SEQ ID NO: 5992925 - DNA, 25 bp, Homo sapien
agacgcagatggtaacccattgcaa

SEQ ID NO: 5992926 - DNA, 25 bp, Homo sapien
tgaacgtaaagacattgaacccttc

SEQ ID NO: 5992927 - DNA, 25 bp, Homo sapien
gatcatttcaagaacgataccaaga

SEQ ID NO: 5992928 - DNA, 25 bp, Homo sapien
aactatggttgggataagaaaaaca

SEQ ID NO: 5992929 - DNA, 25 bp, Homo sapien
tcagttagaacaagactatcaggct

SEQ ID NO: 5992930 - DNA, 25 bp, Homo sapien
tggtcaatcccggtaccgtggaaaa

SEQ ID NO: 5992931 - DNA, 25 bp, Homo sapien
gcatgttttctagaaagaaaagttc

SEQ ID NO: 5992932 - DNA, 25 bp, Homo sapien
cctcaaacccaatatctagctttgt

SEQ ID NO: 5992933 - DNA, 25 bp, Homo sapien
ctgatttgaataaggcattttccat

SEQ ID NO: 5992934 - DNA, 25 bp, Homo sapien
tctctataggttcccaagcattgcc

SEQ ID NO: 5992935 - DNA, 25 bp, Homo sapien
caagattggttgcggtctacaattt

SEQ ID NO: 5992936 - DNA, 25 bp, Homo sapien
aacctactgtcgagggttctaccac

SEQ ID NO: 5992937 - DNA, 25 bp, Homo sapien
acaatctttggagctggtcaatccc

SEQ ID NO: 5992938 - DNA, 25 bp, Homo sapien
gcaccaactccattagcagaggcct

SEQ ID NO: 5992939 - DNA, 25 bp, Homo sapien
gcactccaattggtattcaacctac

SEQ ID NO: 5992940 - DNA, 25 bp, Homo sapien
ttagacgcagatggtaacccattgc

SEQ ID NO: 5992941 - DNA, 25 bp, Homo sapien
gctgttgcatcttttctacaaagtg

SEQ ID NO: 5992942 - DNA, 25 bp, Homo sapien
tgttgtggatacgtacaaacaattg

SEQ ID NO: 5992943 - DNA, 25 bp, Homo sapien
actgctggtaatcaagaattactaa

SEQ ID NO: 5992944 - DNA, 25 bp, Homo sapien
gcctaagtacgcattctccgcattg

SEQ ID NO: 5992945 - DNA, 25 bp, Homo sapien
tggccaaccaacaatgtgtcagtta

SEQ ID NO: 5992946 - DNA, 25 bp, Homo sapien
agattggttgcggtctacaatttga

SEQ ID NO: 5992947 - DNA, 25 bp, Homo sapien
aacatttctaaggtcaacctacaga

SEQ ID NO: 5992948 - DNA, 25 bp, Homo sapien
gaaaaacatttctaaggtcaaccta

SEQ ID NO: 5992949 - DNA, 25 bp, Homo sapien
cgtaaagacattgaacccttcgttc

SEQ ID NO: 5992950 - DNA, 25 bp, Homo sapien
tatatcgtggtacattagattccaa

SEQ ID NO: 5992951 - DNA, 25 bp, Homo sapien
tttctgtgaacgtaaagacattgaa

SEQ ID NO: 5992952 - DNA, 25 bp, Homo sapien
gagaagggcgaattcacaggtgttg

SEQ ID NO: 5992953 - DNA, 25 bp, Homo sapien
atcaagaattactaatgttacaaca

SEQ ID NO: 5992954 - DNA, 25 bp, Homo sapien
ctttaattgcatcgctatggagaaa

SEQ ID NO: 5992955 - DNA, 25 bp, Homo sapien
cgtgtttttgtctcagtattttttc

SEQ ID NO: 5992956 - DNA, 25 bp, Homo sapien
caagactatcaggcttccgattttt

SEQ ID NO: 5992957 - DNA, 25 bp, Homo sapien
tatcgtggtacattagattccaatg

SEQ ID NO: 5992958 - DNA, 25 bp, Homo sapien
ccaattgcaagccaacggtgcttta

SEQ ID NO: 5992959 - DNA, 25 bp, Homo sapien
ataccaagattggttgcggtctaca

SEQ ID NO: 5992960 - DNA, 25 bp, Homo sapien
gtttagacgcagatggtaacccatt

SEQ ID NO: 5992961 - DNA, 25 bp, Homo sapien
gaagcaagattggattttttcgggc

SEQ ID NO: 5992962 - DNA, 25 bp, Homo sapien
ctgacggtagcgctccaggtgatgc

SEQ ID NO: 5992963 - DNA, 25 bp, Homo sapien
attcccactatcccggccctttctc

SEQ ID NO: 5992964 - DNA, 25 bp, Homo sapien
acagacaatctgtatatcgtggtac

SEQ ID NO: 5992965 - DNA, 25 bp, Homo sapien
ttttttcgggccaattgcaagccaa

SEQ ID NO: 5992966 - DNA, 25 bp, Homo sapien
ccaggtgatgctggtgtttcatact

SEQ ID NO: 5992967 - DNA, 25 bp, Homo sapien
gtcgaggcaggtatcgaaactacat

SEQ ID NO: 5992968 - DNA, 25 bp, Homo sapien
aggcattttccatgaatcctgcttt

SEQ ID NO: 5992969 - DNA, 25 bp, Homo sapien
ttttcgggccaattgcaagccaacg

SEQ ID NO: 5992970 - DNA, 25 bp, Homo sapien
taaggttgcatgttttctagaaaga

SEQ ID NO: 5992971 - DNA, 25 bp, Homo sapien
ccgatttttctgtgaacgtaaagac

SEQ ID NO: 5992972 - DNA, 25 bp, Homo sapien
ggtgtttcatacttgactcgttatg

SEQ ID NO: 5992973 - DNA, 25 bp, Homo sapien
ttcgggccaattgcaagccaacggt

SEQ ID NO: 5992974 - DNA, 25 bp, Homo sapien
tacattacaagctggtatggttcct

SEQ ID NO: 5992975 - DNA, 25 bp, Homo sapien
cactattggtgctaagtatgaatac

SEQ ID NO: 5992976 - DNA, 25 bp, Homo sapien
cgttctctgagaagggcgaattcac

SEQ ID NO: 5992977 - DNA, 25 bp, Homo sapien
ctcctcaaacccaatatctagcttt

SEQ ID NO: 5992978 - DNA, 25 bp, Homo sapien
ctcgttatgtctccaagaagcaaga

SEQ ID NO: 5992979 - DNA, 25 bp, Homo sapien
gcagatggtaacccattgcaagctc

SEQ ID NO: 5992980 - DNA, 25 bp, Homo sapien
caacggtgctttaattgcatcgcta

SEQ ID NO: 5992981 - DNA, 25 bp, Homo sapien
aagtacgcattctccgcattgtttg

SEQ ID NO: 5992982 - DNA, 25 bp, Homo sapien
cctctcaaattcccactatcccggc

SEQ ID NO: 5992983 - DNA, 25 bp, Homo sapien
gccaacgataacctatttgctcaag

SEQ ID NO: 5992984 - DNA, 25 bp, Homo sapien
ccaatatctagctttgttgtggata

SEQ ID NO: 5992985 - DNA, 25 bp, Homo sapien
gtgatgctggtgtttcatacttgac

SEQ ID NO: 5992986 - DNA, 25 bp, Homo sapien
tccgcattgtttgccaacgataacc

SEQ ID NO: 5992987 - DNA, 25 bp, Homo sapien
caagcattgcctaagtacgcattct

SEQ ID NO: 5992988 - DNA, 25 bp, Homo sapien
ttagcagaggcctctcaaattccca

SEQ ID NO: 5992989 - DNA, 25 bp, Homo sapien
aattgcaagccaacggtgctttaat

SEQ ID NO: 5992990 - DNA, 25 bp, Homo sapien
actttatactccagaactgacggta

SEQ ID NO: 5992991 - DNA, 25 bp, Homo sapien
agaactgacggtagcgctccaggtg

SEQ ID NO: 5992992 - DNA, 25 bp, Homo sapien
ctggtgtttcatacttgactcgtta

SEQ ID NO: 5992993 - DNA, 25 bp, Homo sapien
ggtaatatcgacaacgatttatctg

SEQ ID NO: 5992994 - DNA, 25 bp, Homo sapien
acagatatcagatggccaaccaaca

SEQ ID NO: 5992995 - DNA, 25 bp, Homo sapien
tactcctcaattagctttaggttta

SEQ ID NO: 5992996 - DNA, 25 bp, Homo sapien
tttttctgtgaacgtaaagacattg

SEQ ID NO: 5992997 - DNA, 25 bp, Homo sapien
accactattggtgctaagtatgaat

SEQ ID NO: 5992998 - DNA, 25 bp, Homo sapien
ccaactctgtccgttttattttgcg

SEQ ID NO: 5992999 - DNA, 25 bp, Homo sapien
caatggtaaggttgcatgttttcta

SEQ ID NO: 5993000 - DNA, 25 bp, Homo sapien
ttttctagaaagaaaagttctgcca

SEQ ID NO: 5993001 - DNA, 25 bp, Homo sapien
atcgacaacgatttatctgtttccg

SEQ ID NO: 5993002 - DNA, 25 bp, Homo sapien
atacttgactcgttatgtctccaag

SEQ ID NO: 5993003 - DNA, 25 bp, Homo sapien
ttcaccgggctaagagctgatttga

SEQ ID NO: 5993004 - DNA, 25 bp, Homo sapien
aggcttccgatttttctgtgaacgt

SEQ ID NO: 5993005 - DNA, 25 bp, Homo sapien
aagaagcaagattggattttttcgg

SEQ ID NO: 5993006 - DNA, 25 bp, Homo sapien
actctgtccgttttattttgcggtg

SEQ ID NO: 5993007 - DNA, 25 bp, Homo sapien
aacaagactatcaggcttccgattt

SEQ ID NO: 5993008 - DNA, 25 bp, Homo sapien
tgaatcctgcttttcaaacctcaca

SEQ ID NO: 5993009 - DNA, 25 bp, Homo sapien
gactgcgaagcaatccaaggggaat

SEQ ID NO: 5993010 - DNA, 25 bp, Homo sapien
gggctaagagctgatttgaataagg

SEQ ID NO: 5993011 - DNA, 25 bp, Homo sapien
actacattacaagctggtatggttc

SEQ ID NO: 5993012 - DNA, 25 bp, Homo sapien
cgataccaagattggttgcggtcta

SEQ ID NO: 5993013 - DNA, 25 bp, Homo sapien
catgaatcctgcttttcaaacctca

SEQ ID NO: 5993014 - DNA, 25 bp, Homo sapien
ggatacgtacaaacaattgcattct

SEQ ID NO: 5993015 - DNA, 25 bp, Homo sapien
taacctatttgctcaaggtaatatc

SEQ ID NO: 5993016 - DNA, 25 bp, Homo sapien
ttatgtctccaagaagcaagattgg

SEQ ID NO: 5993017 - DNA, 25 bp, Homo sapien
gagctggtcaatcccggtaccgtgg

SEQ ID NO: 5993018 - DNA, 25 bp, Homo sapien
agaaactttatactccagaactgac

SEQ ID NO: 5993019 - DNA, 25 bp, Homo sapien
tcaaattcccactatcccggccctt

SEQ ID NO: 5993020 - DNA, 25 bp, Homo sapien
atggtaacccattgcaagctcttcc

SEQ ID NO: 5993021 - DNA, 25 bp, Homo sapien
gtcaacctacagatatcagatggcc

SEQ ID NO: 5993022 - DNA, 25 bp, Homo sapien
aagccaacggtgctttaattgcatc

SEQ ID NO: 5993023 - DNA, 25 bp, Homo sapien
atcagatggccaaccaacaatgtgt

SEQ ID NO: 5993024 - DNA, 25 bp, Homo sapien
caatccaaggggaatttcttctcct

SEQ ID NO: 5993025 - DNA, 25 bp, Homo sapien
gctcaaggtaatatcgacaacgatt

SEQ ID NO: 5993026 - DNA, 25 bp, Homo sapien
cactatcccggccctttctcctttg

SEQ ID NO: 5993027 - DNA, 25 bp, Homo sapien
cggtgaaatcgatcatttcaagaac

SEQ ID NO: 5993028 - DNA, 25 bp, Homo sapien
aaagaaaagttctgccaactctgtc

SEQ ID NO: 5993029 - DNA, 25 bp, Homo sapien
gacattgaacccttcgttctctgag

SEQ ID NO: 5993030 - DNA, 25 bp, Homo sapien
tgatccattgatgggcactccaatt

SEQ ID NO: 5993031 - DNA, 25 bp, Homo sapien
gaagggcgaattcacaggtgttgct

SEQ ID NO: 5993032 - DNA, 25 bp, Homo sapien
tgtcagttagaacaagactatcagg

SEQ ID NO: 5993033 - DNA, 25 bp, Homo sapien
gtcgagggttctaccactattggtg

SEQ ID NO: 5993034 - DNA, 25 bp, Homo sapien
caacctacagatatcagatggccaa

SEQ ID NO: 5993035 - DNA, 25 bp, Homo sapien
tggaaaacctgaataaggaagtctc

SEQ ID NO: 5993036 - DNA, 25 bp, Homo sapien
gtttagaaactttatactccagaac

SEQ ID NO: 5993037 - DNA, 25 bp, Homo sapien
acccattgcaagctcttcctcaatt

SEQ ID NO: 5993038 - DNA, 25 bp, Homo sapien
ttccgatttttctgtgaacgtaaag

SEQ ID NO: 5993039 - DNA, 25 bp, Homo sapien
aggtcaacctacagatatcagatgg

SEQ ID NO: 5993040 - DNA, 25 bp, Homo sapien
taaactatggttgggataagaaaaa

SEQ ID NO: 5993041 - DNA, 25 bp, Homo sapien
atttgctcaaggtaatatcgacaac

SEQ ID NO: 5993042 - DNA, 25 bp, Homo sapien
ttcaagaacgataccaagattggtt

SEQ ID NO: 5993043 - DNA, 25 bp, Homo sapien
tggttgcggtctacaatttgaaact

SEQ ID NO: 5993044 - DNA, 25 bp, Homo sapien
aaacaattgcattctcacagacaat

SEQ ID NO: 5993045 - DNA, 25 bp, Homo sapien
attcaacctactgtcgagggttcta

SEQ ID NO: 5993046 - DNA, 25 bp, Homo sapien
cgatttatctgtttccggtagatta

SEQ ID NO: 5993047 - DNA, 25 bp, Homo sapien
tctcaaattcccactatcccggccc

SEQ ID NO: 5993048 - DNA, 25 bp, Homo sapien
ctattggtgctaagtatgaatacag

SEQ ID NO: 5993049 - DNA, 25 bp, Homo sapien
ctttgactgcgaagcaatccaaggg

SEQ ID NO: 5993050 - DNA, 25 bp, Homo sapien
atctgtttccggtagattaaactat

SEQ ID NO: 5993051 - DNA, 25 bp, Homo sapien
tcacagacaatctttggagctggtc

SEQ ID NO: 5993052 - DNA, 25 bp, Homo sapien
tttctctataggttcccaagcattg

SEQ ID NO: 5993053 - DNA, 25 bp, Homo sapien
agatggtaacccattgcaagctctt

SEQ ID NO: 5993054 - DNA, 25 bp, Homo sapien
agcaatccaaggggaatttcttctc

SEQ ID NO: 5993055 - DNA, 25 bp, Homo sapien
tgtatatcgtggtacattagattcc

SEQ ID NO: 5993056 - DNA, 25 bp, Homo sapien
ctacagatatcagatggccaaccaa

SEQ ID NO: 5993057 - DNA, 25 bp, Homo sapien
ctcccgtgacgtgtttttgtctcag

SEQ ID NO: 5993058 - DNA, 25 bp, Homo sapien
ttctagaaagaaaagttctgccaac

SEQ ID NO: 5993059 - DNA, 25 bp, Homo sapien
ttgctcaaggtaatatcgacaacga

SEQ ID NO: 5993060 - DNA, 25 bp, Homo sapien
acaagctggtatggttcctattact

SEQ ID NO: 5993061 - DNA, 25 bp, Homo sapien
atggagaaaagtagcacaaaatgtc

SEQ ID NO: 5993062 - DNA, 25 bp, Homo sapien
ttgccaacgataacctatttgctca

SEQ ID NO: 5993063 - DNA, 25 bp, Homo sapien
ttttcaaacctcacacactttctct

SEQ ID NO: 5993064 - DNA, 25 bp, Homo sapien
ttgcatcttttctacaaagtgttac

SEQ ID NO: 5993065 - DNA, 25 bp, Homo sapien
aaactacattacaagctggtatggt

SEQ ID NO: 5993066 - DNA, 25 bp, Homo sapien
tgtgaacgtaaagacattgaaccct

SEQ ID NO: 5993067 - DNA, 25 bp, Homo sapien
ctggtaatcaagaattactaatgtt

SEQ ID NO: 5993068 - DNA, 25 bp, Homo sapien
gtacgcattctccgcattgtttgcc

SEQ ID NO: 5993069 - DNA, 25 bp, Homo sapien
caccgggctaagagctgatttgaat

SEQ ID NO: 5993070 - DNA, 25 bp, Homo sapien
gcaggtatcgaaactacattacaag

SEQ ID NO: 5993071 - DNA, 25 bp, Homo sapien
ttgtttgccaacgataacctatttg

SEQ ID NO: 5993072 - DNA, 25 bp, Homo sapien
agggttctaccactattggtgctaa

SEQ ID NO: 5993073 - DNA, 25 bp, Homo sapien
ttctcctcaaacccaatatctagct

SEQ ID NO: 5993074 - DNA, 25 bp, Homo sapien
attgcaagctcttcctcaattgtga

SEQ ID NO: 5993075 - DNA, 25 bp, Homo sapien
ttgtggatacgtacaaacaattgca

SEQ ID NO: 5993076 - DNA, 25 bp, Homo sapien
aaaagtagcacaaaatgtcgaggca

SEQ ID NO: 5993077 - DNA, 25 bp, Homo sapien
cggccctttctcctttgactgcgaa

SEQ ID NO: 5993078 - DNA, 25 bp, Homo sapien
acggtgctttaattgcatcgctatg

SEQ ID NO: 5993079 - DNA, 25 bp, Homo sapien
tagctttgttgtggatacgtacaaa

SEQ ID NO: 5993080 - DNA, 25 bp, Homo sapien
tatcaggcttccgatttttctgtga

SEQ ID NO: 5993081 - DNA, 25 bp, Homo sapien
aataaggaagtctcccgtgacgtgt

SEQ ID NO: 5993082 - DNA, 25 bp, Homo sapien
tggtatggttcctattactgatcca

SEQ ID NO: 5993083 - DNA, 25 bp, Homo sapien
gataacctatttgctcaaggtaata

SEQ ID NO: 5993084 - DNA, 25 bp, Homo sapien
cctactgtcgagggttctaccacta

SEQ ID NO: 5993085 - DNA, 25 bp, Homo sapien
tataggttcccaagcattgcctaag

SEQ ID NO: 5993086 - DNA, 25 bp, Homo sapien
aataaggcattttccatgaatcctg

SEQ ID NO: 5993087 - DNA, 25 bp, Homo sapien
tgaaactgctggtaatcaagaatta

SEQ ID NO: 5993088 - DNA, 25 bp, Homo sapien
ttctctgagaagggcgaattcacag

SEQ ID NO: 5993089 - DNA, 25 bp, Homo sapien
tctcctttgactgcgaagcaatcca

SEQ ID NO: 5993090 - DNA, 25 bp, Homo sapien
caaccaacaatgtgtcagttagaac

SEQ ID NO: 5993091 - DNA, 25 bp, Homo sapien
aatctgtatatcgtggtacattaga

SEQ ID NO: 5993092 - DNA, 25 bp, Homo sapien
aaaacatttctaaggtcaacctaca

SEQ ID NO: 5993093 - DNA, 25 bp, Homo sapien
ctatggagaaaagtagcacaaaatg

SEQ ID NO: 5993094 - DNA, 25 bp, Homo sapien
gttactcctcaattagctttaggtt

SEQ ID NO: 5993095 - DNA, 25 bp, Homo sapien
tctttggagctggtcaatcccggta

SEQ ID NO: 5993096 - DNA, 25 bp, Homo sapien
acaatctgtatatcgtggtacatta

SEQ ID NO: 5993097 - DNA, 25 bp, Homo sapien
ttgaacccttcgttctctgagaagg

SEQ ID NO: 5993098 - DNA, 25 bp, Homo sapien
attaaactatggttgggataagaaa

SEQ ID NO: 5993099 - DNA, 25 bp, Homo sapien
ggagaaaagtagcacaaaatgtcga

SEQ ID NO: 5993100 - DNA, 25 bp, Homo sapien
cattagcagaggcctctcaaattcc

SEQ ID NO: 5993101 - DNA, 25 bp, Homo sapien
cattgtttgccaacgataacctatt

SEQ ID NO: 5993102 - DNA, 25 bp, Homo sapien
tctgtatatcgtggtacattagatt

SEQ ID NO: 5993103 - DNA, 25 bp, Homo sapien
tctacaaagtgttactcctcaatta

SEQ ID NO: 5993104 - DNA, 25 bp, Homo sapien
agaattactaatgttacaacaaggt

SEQ ID NO: 5993105 - DNA, 25 bp, Homo sapien
tgaataaggaagtctcccgtgacgt

SEQ ID NO: 5993106 - DNA, 25 bp, Homo sapien
ccaagaagcaagattggattttttc

SEQ ID NO: 5993107 - DNA, 25 bp, Homo sapien
agattccaatggtaaggttgcatgt

SEQ ID NO: 5993108 - DNA, 25 bp, Homo sapien
ttgcaagccaacggtgctttaattg

SEQ ID NO: 5993109 - DNA, 25 bp, Homo sapien
gtctgcaccaactccattagcagag

SEQ ID NO: 5993110 - DNA, 25 bp, Homo sapien
caagaattactaatgttacaacaag

SEQ ID NO: 5993111 - DNA, 25 bp, Homo sapien
acctacagatatcagatggccaacc

SEQ ID NO: 5993112 - DNA, 25 bp, Homo sapien
actatcaggcttccgatttttctgt

SEQ ID NO: 5993113 - DNA, 25 bp, Homo sapien
gtgctaagtatgaatacagacaatc

SEQ ID NO: 5993114 - DNA, 25 bp, Homo sapien
aggtgatgctggtgtttcatacttg

SEQ ID NO: 5993115 - DNA, 25 bp, Homo sapien
ttttattttgcggtgaaatcgatca

SEQ ID NO: 5993116 - DNA, 25 bp, Homo sapien
ttcccaagcattgcctaagtacgca

SEQ ID NO: 5993117 - DNA, 25 bp, Homo sapien
cggtagattaaactatggttgggat

SEQ ID NO: 5993118 - DNA, 25 bp, Homo sapien
gcatcttttctacaaagtgttactc

SEQ ID NO: 5993119 - DNA, 25 bp, Homo sapien
gtggtacattagattccaatggtaa

SEQ ID NO: 5993120 - DNA, 25 bp, Homo sapien
gattttttcgggccaattgcaagcc

SEQ ID NO: 5993121 - DNA, 25 bp, Homo sapien
attttgcggtgaaatcgatcatttc

SEQ ID NO: 5993122 - DNA, 25 bp, Homo sapien
atccaaggggaatttcttctcctca

SEQ ID NO: 5993123 - DNA, 25 bp, Homo sapien
gctaagtatgaatacagacaatctg

SEQ ID NO: 5993124 - DNA, 25 bp, Homo sapien
aaactgctggtaatcaagaattact

SEQ ID NO: 5993125 - DNA, 25 bp, Homo sapien
atatcagatggccaaccaacaatgt

SEQ ID NO: 5993126 - DNA, 25 bp, Homo sapien
ctacaatttgaaactgctggtaatc

SEQ ID NO: 5993127 - DNA, 25 bp, Homo sapien
ggggaatttcttctcctcaaaccca

SEQ ID NO: 5993128 - DNA, 25 bp, Homo sapien
taggttcccaagcattgcctaagta

SEQ ID NO: 5993129 - DNA, 25 bp, Homo sapien
gaggcctctcaaattcccactatcc

SEQ ID NO: 5993130 - DNA, 25 bp, Homo sapien
tcaaacccaatatctagctttgttg

SEQ ID NO: 5993131 - DNA, 25 bp, Homo sapien
ctcctcaattagctttaggtttaga

SEQ ID NO: 5993132 - DNA, 25 bp, Homo sapien
accaactccattagcagaggcctct

SEQ ID NO: 5993133 - DNA, 25 bp, Homo sapien
aggttgcatgttttctagaaagaaa

SEQ ID NO: 5993134 - DNA, 25 bp, Homo sapien
acgcagatggtaacccattgcaagc

SEQ ID NO: 5993135 - DNA, 25 bp, Homo sapien
aaactttatactccagaactgacgg

SEQ ID NO: 5993136 - DNA, 25 bp, Homo sapien
agttagaacaagactatcaggcttc

SEQ ID NO: 5993137 - DNA, 25 bp, Homo sapien
gtatgaatacagacaatctgtatat

SEQ ID NO: 5993138 - DNA, 25 bp, Homo sapien
taaggtcaacctacagatatcagat

SEQ ID NO: 5993139 - DNA, 25 bp, Homo sapien
ttttcaccgggctaagagctgattt

SEQ ID NO: 5993140 - DNA, 25 bp, Homo sapien
tgacgtgtttttgtctcagtatttt

SEQ ID NO: 5993141 - DNA, 25 bp, Homo sapien
aattgcatcgctatggagaaaagta

SEQ ID NO: 5993142 - DNA, 25 bp, Homo sapien
tttgtctcagtattttttcaccggg

SEQ ID NO: 5993143 - DNA, 25 bp, Homo sapien
ctccaagaagcaagattggattttt

SEQ ID NO: 5993144 - DNA, 25 bp, Homo sapien
ctagaaagaaaagttctgccaactc

SEQ ID NO: 5993145 - DNA, 25 bp, Homo sapien
tatactccagaactgacggtagcgc

SEQ ID NO: 5993146 - DNA, 25 bp, Homo sapien
tctataggttcccaagcattgccta

SEQ ID NO: 5993147 - DNA, 25 bp, Homo sapien
atttcaagaacgataccaagattgg

SEQ ID NO: 5993148 - DNA, 25 bp, Homo sapien
cccgtgacgtgtttttgtctcagta

SEQ ID NO: 5993149 - DNA, 25 bp, Homo sapien
tggtgctaagtatgaatacagacaa

SEQ ID NO: 5993150 - DNA, 25 bp, Homo sapien
attggttgcggtctacaatttgaaa

SEQ ID NO: 5993151 - DNA, 25 bp, Homo sapien
tggattttttcgggccaattgcaag

SEQ ID NO: 5993152 - DNA, 25 bp, Homo sapien
cctcaattagctttaggtttagaaa

SEQ ID NO: 5993153 - DNA, 25 bp, Homo sapien
acctatttgctcaaggtaatatcga

SEQ ID NO: 5993154 - DNA, 25 bp, Homo sapien
gtggatacgtacaaacaattgcatt

SEQ ID NO: 5993155 - DNA, 25 bp, Homo sapien
attactaatgttacaacaaggttta

SEQ ID NO: 5993156 - DNA, 25 bp, Homo sapien
acaattgcattctcacagacaatct

SEQ ID NO: 5993157 - DNA, 25 bp, Homo sapien
cctattactgatccattgatgggca

SEQ ID NO: 5993158 - DNA, 25 bp, Homo sapien
caaggtttagacgcagatggtaacc

SEQ ID NO: 5993159 - DNA, 25 bp, Homo sapien
aagacattgaacccttcgttctctg

SEQ ID NO: 5993160 - DNA, 25 bp, Homo sapien
cagatggccaaccaacaatgtgtca

SEQ ID NO: 5993161 - DNA, 25 bp, Homo sapien
tacaaagtgttactcctcaattagc

SEQ ID NO: 5993162 - DNA, 25 bp, Homo sapien
taagagctgatttgaataaggcatt

SEQ ID NO: 5993163 - DNA, 25 bp, Homo sapien
ttagaacaagactatcaggcttccg

SEQ ID NO: 5993164 - DNA, 25 bp, Homo sapien
tggagctggtcaatcccggtaccgt

SEQ ID NO: 5993165 - DNA, 25 bp, Homo sapien
cgggccaattgcaagccaacggtgc

SEQ ID NO: 5993166 - DNA, 25 bp, Homo sapien
tcctttgactgcgaagcaatccaag

SEQ ID NO: 5993167 - DNA, 25 bp, Homo sapien
cattgcctaagtacgcattctccgc

SEQ ID NO: 5993168 - DNA, 25 bp, Homo sapien
acccttcgttctctgagaagggcga

SEQ ID NO: 5993169 - DNA, 25 bp, Homo sapien
ttcgttctctgagaagggcgaattc

SEQ ID NO: 5993170 - DNA, 25 bp, Homo sapien
ccattgcaagctcttcctcaattgt

SEQ ID NO: 5993171 - DNA, 25 bp, Homo sapien
ttagaaactttatactccagaactg

SEQ ID NO: 5993172 - DNA, 25 bp, Homo sapien
atgggcactccaattggtattcaac

SEQ ID NO: 5993173 - DNA, 25 bp, Homo sapien
agaaaagttctgccaactctgtccg

SEQ ID NO: 5993174 - DNA, 25 bp, Homo sapien
gatggccaaccaacaatgtgtcagt

SEQ ID NO: 5993175 - DNA, 25 bp, Homo sapien
tcaggcttccgatttttctgtgaac

SEQ ID NO: 5993176 - DNA, 25 bp, Homo sapien
tatctagctttgttgtggatacgta

SEQ ID NO: 5993177 - DNA, 25 bp, Homo sapien
acaacaaggtttagacgcagatggt

SEQ ID NO: 5993178 - DNA, 25 bp, Homo sapien
cattagattccaatggtaaggttgc

SEQ ID NO: 5993179 - DNA, 25 bp, Homo sapien
caattggtattcaacctactgtcga

SEQ ID NO: 5993180 - DNA, 25 bp, Homo sapien
agacaatctttggagctggtcaatc

SEQ ID NO: 5993181 - DNA, 25 bp, Homo sapien
gcattctccgcattgtttgccaacg

SEQ ID NO: 5993182 - DNA, 25 bp, Homo sapien
gtagcgctccaggtgatgctggtgt

SEQ ID NO: 5993183 - DNA, 25 bp, Homo sapien
cgaattcacaggtgttgctgttgca

SEQ ID NO: 5993184 - DNA, 25 bp, Homo sapien
actccattagcagaggcctctcaaa

SEQ ID NO: 5993185 - DNA, 25 bp, Homo sapien
ttatctgtttccggtagattaaact

SEQ ID NO: 5993186 - DNA, 25 bp, Homo sapien
cgttatgtctccaagaagcaagatt

SEQ ID NO: 5993187 - DNA, 25 bp, Homo sapien
gtagattaaactatggttgggataa

SEQ ID NO: 5993188 - DNA, 25 bp, Homo sapien
cttttctacaaagtgttactcctca

SEQ ID NO: 5993189 - DNA, 25 bp, Homo sapien
gatttttctgtgaacgtaaagacat

SEQ ID NO: 5993190 - DNA, 25 bp, Homo sapien
tgtttttgtctcagtattttttcac

SEQ ID NO: 5993191 - DNA, 25 bp, Homo sapien
cacaggtgttgctgttgcatctttt

SEQ ID NO: 5993192 - DNA, 25 bp, Homo sapien
caggtgttgctgttgcatcttttct

SEQ ID NO: 5993193 - DNA, 25 bp, Homo sapien
aggtttagacgcagatggtaaccca

SEQ ID NO: 5993194 - DNA, 25 bp, Homo sapien
tcagtattttttcaccgggctaaga

SEQ ID NO: 5993195 - DNA, 25 bp, Homo sapien
ctgcaccaactccattagcagaggc

SEQ ID NO: 5993196 - DNA, 25 bp, Homo sapien
ttacaagctggtatggttcctatta

SEQ ID NO: 5993197 - DNA, 25 bp, Homo sapien
caagaacgataccaagattggttgc

SEQ ID NO: 5993198 - DNA, 25 bp, Homo sapien
ggtgctttaattgcatcgctatgga

SEQ ID NO: 5993199 - DNA, 25 bp, Homo sapien
ttgcatcgctatggagaaaagtagc

SEQ ID NO: 5993200 - DNA, 25 bp, Homo sapien
gtctcccgtgacgtgtttttgtctc

SEQ ID NO: 5993201 - DNA, 25 bp, Homo sapien
attctcacagacaatctttggagct

SEQ ID NO: 5993202 - DNA, 25 bp, Homo sapien
tcaattagctttaggtttagaaact

SEQ ID NO: 5993203 - DNA, 25 bp, Homo sapien
gaacccttcgttctctgagaagggc

SEQ ID NO: 5993204 - DNA, 25 bp, Homo sapien
taatcaagaattactaatgttacaa

SEQ ID NO: 5993205 - DNA, 25 bp, Homo sapien
ttgactcgttatgtctccaagaagc

SEQ ID NO: 5993206 - DNA, 25 bp, Homo sapien
acaacgatttatctgtttccggtag

SEQ ID NO: 5993207 - DNA, 25 bp, Homo sapien
tttggagctggtcaatcccggtacc

SEQ ID NO: 5993208 - DNA, 25 bp, Homo sapien
atcttttctacaaagtgttactcct

SEQ ID NO: 5993209 - DNA, 25 bp, Homo sapien
acccaatatctagctttgttgtgga

SEQ ID NO: 5993210 - DNA, 25 bp, Homo sapien
ggcgaattcacaggtgttgctgttg

SEQ ID NO: 5993211 - DNA, 25 bp, Homo sapien
tctccgcattgtttgccaacgataa

SEQ ID NO: 5993212 - DNA, 25 bp, Homo sapien
cattgaacccttcgttctctgagaa

SEQ ID NO: 5993213 - DNA, 25 bp, Homo sapien
gacggtagcgctccaggtgatgctg

SEQ ID NO: 5993214 - DNA, 25 bp, Homo sapien
taatatcgacaacgatttatctgtt

SEQ ID NO: 5993215 - DNA, 25 bp, Homo sapien
tccttattcaggttttccacggtac

SEQ ID NO: 5993216 - DNA, 25 bp, Homo sapien
tcatacttagcaccaatagtggtag

SEQ ID NO: 5993217 - DNA, 25 bp, Homo sapien
accgttggcttgcaattggcccgaa

SEQ ID NO: 5993218 - DNA, 25 bp, Homo sapien
ctccaaagattgtctgtgagaatgc

SEQ ID NO: 5993219 - DNA, 25 bp, Homo sapien
ctagatattgggtttgaggagaaga

SEQ ID NO: 5993220 - DNA, 25 bp, Homo sapien
ttaccttgagcaaataggttatcgt

SEQ ID NO: 5993221 - DNA, 25 bp, Homo sapien
accataccagcttgtaatgtagttt

SEQ ID NO: 5993222 - DNA, 25 bp, Homo sapien
aaaagatgcaacagcaacacctgtg

SEQ ID NO: 5993223 - DNA, 25 bp, Homo sapien
aacctaaagctaattgaggagtaac

SEQ ID NO: 5993224 - DNA, 25 bp, Homo sapien
caacacctgtgaattcgcccttctc

SEQ ID NO: 5993225 - DNA, 25 bp, Homo sapien
acatgcaaccttaccattggaatct

SEQ ID NO: 5993226 - DNA, 25 bp, Homo sapien
tgcaattaaagcaccgttggcttgc

SEQ ID NO: 5993227 - DNA, 25 bp, Homo sapien
gacagtaggttgaataccaattgga

SEQ ID NO: 5993228 - DNA, 25 bp, Homo sapien
tgaaacaccagcatcacctggagcg

SEQ ID NO: 5993229 - DNA, 25 bp, Homo sapien
acattgttggttggccatctgatat

SEQ ID NO: 5993230 - DNA, 25 bp, Homo sapien
atcggaagcctgatagtcttgttct

SEQ ID NO: 5993231 - DNA, 25 bp, Homo sapien
cattggaatctaatgtaccacgata

SEQ ID NO: 5993232 - DNA, 25 bp, Homo sapien
caaaaacacgtcacgggagacttcc

SEQ ID NO: 5993233 - DNA, 25 bp, Homo sapien
tgtctgtgagaatgcaattgtttgt

SEQ ID NO: 5993234 - DNA, 25 bp, Homo sapien
ttgttctaactgacacattgttggt

SEQ ID NO: 5993235 - DNA, 25 bp, Homo sapien
ccgaaaaaatccaatcttgcttctt

SEQ ID NO: 5993236 - DNA, 25 bp, Homo sapien
acgagtcaagtatgaaacaccagca

SEQ ID NO: 5993237 - DNA, 25 bp, Homo sapien
ttgattaccagcagtttcaaattgt

SEQ ID NO: 5993238 - DNA, 25 bp, Homo sapien
gaccttagaaatgtttttcttatcc

SEQ ID NO: 5993239 - DNA, 25 bp, Homo sapien
atcagctcttagcccggtgaaaaaa

SEQ ID NO: 5993240 - DNA, 25 bp, Homo sapien
tgaggagaagaaattccccttggat

SEQ ID NO: 5993241 - DNA, 25 bp, Homo sapien
caggattcatggaaaatgccttatt

SEQ ID NO: 5993242 - DNA, 25 bp, Homo sapien
cggtgaaaaaatactgagacaaaaa

SEQ ID NO: 5993243 - DNA, 25 bp, Homo sapien
ctctgctaatggagttggtgcagac

SEQ ID NO: 5993244 - DNA, 25 bp, Homo sapien
tatcgttcttgaaatgatcgatttc

SEQ ID NO: 5993245 - DNA, 25 bp, Homo sapien
gaaatgtttttcttatcccaaccat

SEQ ID NO: 5993246 - DNA, 25 bp, Homo sapien
agtatgaaacaccagcatcacctgg

SEQ ID NO: 5993247 - DNA, 25 bp, Homo sapien
cttgcaattggcccgaaaaaatcca

SEQ ID NO: 5993248 - DNA, 25 bp, Homo sapien
ccaattggagtgcccatcaatggat

SEQ ID NO: 5993249 - DNA, 25 bp, Homo sapien
accctcgacagtaggttgaatacca

SEQ ID NO: 5993250 - DNA, 25 bp, Homo sapien
gagaagaaattccccttggattgct

SEQ ID NO: 5993251 - DNA, 25 bp, Homo sapien
tgcgtctaaaccttgttgtaacatt

SEQ ID NO: 5993252 - DNA, 25 bp, Homo sapien
attggcccgaaaaaatccaatcttg

SEQ ID NO: 5993253 - DNA, 25 bp, Homo sapien
acagcaacacctgtgaattcgccct

SEQ ID NO: 5993254 - DNA, 25 bp, Homo sapien
cgttggcaaacaatgcggagaatgc

SEQ ID NO: 5993255 - DNA, 25 bp, Homo sapien
aaataaaacggacagagttggcaga

SEQ ID NO: 5993256 - DNA, 25 bp, Homo sapien
ggcaaacaatgcggagaatgcgtac

SEQ ID NO: 5993257 - DNA, 25 bp, Homo sapien
tttttcttatcccaaccatagttta

SEQ ID NO: 5993258 - DNA, 25 bp, Homo sapien
caacaaagctagatattgggtttga

SEQ ID NO: 5993259 - DNA, 25 bp, Homo sapien
tgttggttggccatctgatatctgt

SEQ ID NO: 5993260 - DNA, 25 bp, Homo sapien
taaatcgttgtcgatattaccttga

SEQ ID NO: 5993261 - DNA, 25 bp, Homo sapien
caatgtctttacgttcacagaaaaa

SEQ ID NO: 5993262 - DNA, 25 bp, Homo sapien
tagaaaacatgcaaccttaccattg

SEQ ID NO: 5993263 - DNA, 25 bp, Homo sapien
gcccgaaaaaatccaatcttgcttc

SEQ ID NO: 5993264 - DNA, 25 bp, Homo sapien
ctgatatctgtaggttgaccttaga

SEQ ID NO: 5993265 - DNA, 25 bp, Homo sapien
agaaaagatgcaacagcaacacctg

SEQ ID NO: 5993266 - DNA, 25 bp, Homo sapien
gagcttgcaatgggttaccatctgc

SEQ ID NO: 5993267 - DNA, 25 bp, Homo sapien
ggagtgcccatcaatggatcagtaa

SEQ ID NO: 5993268 - DNA, 25 bp, Homo sapien
gattgaccagctccaaagattgtct

SEQ ID NO: 5993269 - DNA, 25 bp, Homo sapien
gaaccataccagcttgtaatgtagt

SEQ ID NO: 5993270 - DNA, 25 bp, Homo sapien
ttgaccttagaaatgtttttcttat

SEQ ID NO: 5993271 - DNA, 25 bp, Homo sapien
tgagaggcctctgctaatggagttg

SEQ ID NO: 5993272 - DNA, 25 bp, Homo sapien
gttcttgaaatgatcgatttcaccg

SEQ ID NO: 5993273 - DNA, 25 bp, Homo sapien
cctggagcgctaccgtcagttctgg

SEQ ID NO: 5993274 - DNA, 25 bp, Homo sapien
aaagtgtgtgaggtttgaaaagcag

SEQ ID NO: 5993275 - DNA, 25 bp, Homo sapien
tcacagaaaaatcggaagcctgata

SEQ ID NO: 5993276 - DNA, 25 bp, Homo sapien
gggagacttccttattcaggttttc

SEQ ID NO: 5993277 - DNA, 25 bp, Homo sapien
tcttgttctaactgacacattgttg

SEQ ID NO: 5993278 - DNA, 25 bp, Homo sapien
ggcttgcaattggcccgaaaaaatc

SEQ ID NO: 5993279 - DNA, 25 bp, Homo sapien
tttcttatcccaaccatagtttaat

SEQ ID NO: 5993280 - DNA, 25 bp, Homo sapien
attcttgattaccagcagtttcaaa

SEQ ID NO: 5993281 - DNA, 25 bp, Homo sapien
atatacagattgtctgtattcatac

SEQ ID NO: 5993282 - DNA, 25 bp, Homo sapien
aagctaattgaggagtaacactttg

SEQ ID NO: 5993283 - DNA, 25 bp, Homo sapien
agcaggattcatggaaaatgcctta

SEQ ID NO: 5993284 - DNA, 25 bp, Homo sapien
agattgtctgtgagaatgcaattgt

SEQ ID NO: 5993285 - DNA, 25 bp, Homo sapien
agcttgtaatgtagtttcgatacct

SEQ ID NO: 5993286 - DNA, 25 bp, Homo sapien
ccttaccattggaatctaatgtacc

SEQ ID NO: 5993287 - DNA, 25 bp, Homo sapien
ttaccagcagtttcaaattgtagac

SEQ ID NO: 5993288 - DNA, 25 bp, Homo sapien
cgttggcttgcaattggcccgaaaa

SEQ ID NO: 5993289 - DNA, 25 bp, Homo sapien
tggcagaacttttctttctagaaaa

SEQ ID NO: 5993290 - DNA, 25 bp, Homo sapien
ttacgttcacagaaaaatcggaagc

SEQ ID NO: 5993291 - DNA, 25 bp, Homo sapien
tgcaattggcccgaaaaaatccaat

SEQ ID NO: 5993292 - DNA, 25 bp, Homo sapien
attcaaatcagctcttagcccggtg

SEQ ID NO: 5993293 - DNA, 25 bp, Homo sapien
gggccgggatagtgggaatttgaga

SEQ ID NO: 5993294 - DNA, 25 bp, Homo sapien
tacctgcctcgacattttgtgctac

SEQ ID NO: 5993295 - DNA, 25 bp, Homo sapien
attgtctgtgagaatgcaattgttt

SEQ ID NO: 5993296 - DNA, 25 bp, Homo sapien
gagacaaaaacacgtcacgggagac

SEQ ID NO: 5993297 - DNA, 25 bp, Homo sapien
gctacttttctccatagcgatgcaa

SEQ ID NO: 5993298 - DNA, 25 bp, Homo sapien
tacagattgtctgtattcatactta

SEQ ID NO: 5993299 - DNA, 25 bp, Homo sapien
tagaaatgtttttcttatcccaacc

SEQ ID NO: 5993300 - DNA, 25 bp, Homo sapien
ttccacggtaccgggattgaccagc

SEQ ID NO: 5993301 - DNA, 25 bp, Homo sapien
acgtcacgggagacttccttattca

SEQ ID NO: 5993302 - DNA, 25 bp, Homo sapien
taatctaccggaaacagataaatcg

SEQ ID NO: 5993303 - DNA, 25 bp, Homo sapien
ctgctaatggagttggtgcagacat

SEQ ID NO: 5993304 - DNA, 25 bp, Homo sapien
aatgccttattcaaatcagctctta

SEQ ID NO: 5993305 - DNA, 25 bp, Homo sapien
cagtcaaaggagaaagggccgggat

SEQ ID NO: 5993306 - DNA, 25 bp, Homo sapien
taactgacacattgttggttggcca

SEQ ID NO: 5993307 - DNA, 25 bp, Homo sapien
agtaataggaaccataccagcttgt

SEQ ID NO: 5993308 - DNA, 25 bp, Homo sapien
caatgcggagaatgcgtacttaggc

SEQ ID NO: 5993309 - DNA, 25 bp, Homo sapien
acacctgtgaattcgcccttctcag

SEQ ID NO: 5993310 - DNA, 25 bp, Homo sapien
aaagcaggattcatggaaaatgcct

SEQ ID NO: 5993311 - DNA, 25 bp, Homo sapien
tttctccatagcgatgcaattaaag

SEQ ID NO: 5993312 - DNA, 25 bp, Homo sapien
gtagtttcgatacctgcctcgacat

SEQ ID NO: 5993313 - DNA, 25 bp, Homo sapien
agcaacacctgtgaattcgcccttc

SEQ ID NO: 5993314 - DNA, 25 bp, Homo sapien
gtaccacgatatacagattgtctgt

SEQ ID NO: 5993315 - DNA, 25 bp, Homo sapien
tcaaatcagctcttagcccggtgaa

SEQ ID NO: 5993316 - DNA, 25 bp, Homo sapien
gctcttagcccggtgaaaaaatact

SEQ ID NO: 5993317 - DNA, 25 bp, Homo sapien
tgagaatgcaattgtttgtacgtat

SEQ ID NO: 5993318 - DNA, 25 bp, Homo sapien
attgtagaccgcaaccaatcttggt

SEQ ID NO: 5993319 - DNA, 25 bp, Homo sapien
ttaccatctgcgtctaaaccttgtt

SEQ ID NO: 5993320 - DNA, 25 bp, Homo sapien
tgtcgatattaccttgagcaaatag

SEQ ID NO: 5993321 - DNA, 25 bp, Homo sapien
gagtaacactttgtagaaaagatgc

SEQ ID NO: 5993322 - DNA, 25 bp, Homo sapien
aaaatgccttattcaaatcagctct

SEQ ID NO: 5993323 - DNA, 25 bp, Homo sapien
ttcaccgcaaaataaaacggacaga

SEQ ID NO: 5993324 - DNA, 25 bp, Homo sapien
tacgtatccacaacaaagctagata

SEQ ID NO: 5993325 - DNA, 25 bp, Homo sapien
tggattgcttcgcagtcaaaggaga

SEQ ID NO: 5993326 - DNA, 25 bp, Homo sapien
agcaaataggttatcgttggcaaac

SEQ ID NO: 5993327 - DNA, 25 bp, Homo sapien
tctaactgacacattgttggttggc

SEQ ID NO: 5993328 - DNA, 25 bp, Homo sapien
gttcacagaaaaatcggaagcctga

SEQ ID NO: 5993329 - DNA, 25 bp, Homo sapien
tgaataccaattggagtgcccatca

SEQ ID NO: 5993330 - DNA, 25 bp, Homo sapien
ggaaaatgccttattcaaatcagct

SEQ ID NO: 5993331 - DNA, 25 bp, Homo sapien
tctgtaggttgaccttagaaatgtt

SEQ ID NO: 5993332 - DNA, 25 bp, Homo sapien
agaaagtgtgtgaggtttgaaaagc

SEQ ID NO: 5993333 - DNA, 25 bp, Homo sapien
gaaaagcaggattcatggaaaatgc

SEQ ID NO: 5993334 - DNA, 25 bp, Homo sapien
ccatctgatatctgtaggttgacct

SEQ ID NO: 5993335 - DNA, 25 bp, Homo sapien
atgcggagaatgcgtacttaggcaa

SEQ ID NO: 5993336 - DNA, 25 bp, Homo sapien
aacaatgcggagaatgcgtacttag

SEQ ID NO: 5993337 - DNA, 25 bp, Homo sapien
gcctctgctaatggagttggtgcag

SEQ ID NO: 5993338 - DNA, 25 bp, Homo sapien
aaccaatcttggtatcgttcttgaa

SEQ ID NO: 5993339 - DNA, 25 bp, Homo sapien
cacaacaaagctagatattgggttt

SEQ ID NO: 5993340 - DNA, 25 bp, Homo sapien
aacactttgtagaaaagatgcaaca

SEQ ID NO: 5993341 - DNA, 25 bp, Homo sapien
agctagatattgggtttgaggagaa

SEQ ID NO: 5993342 - DNA, 25 bp, Homo sapien
aaaacggacagagttggcagaactt

SEQ ID NO: 5993343 - DNA, 25 bp, Homo sapien
caattgtttgtacgtatccacaaca

SEQ ID NO: 5993344 - DNA, 25 bp, Homo sapien
tgacacattgttggttggccatctg

SEQ ID NO: 5993345 - DNA, 25 bp, Homo sapien
tgatagtcttgttctaactgacaca

SEQ ID NO: 5993346 - DNA, 25 bp, Homo sapien
atgtctttacgttcacagaaaaatc

SEQ ID NO: 5993347 - DNA, 25 bp, Homo sapien
gcaccgttggcttgcaattggcccg

SEQ ID NO: 5993348 - DNA, 25 bp, Homo sapien
tctagaaaacatgcaaccttaccat

SEQ ID NO: 5993349 - DNA, 25 bp, Homo sapien
tagcgatgcaattaaagcaccgttg

SEQ ID NO: 5993350 - DNA, 25 bp, Homo sapien
cggacagagttggcagaacttttct

SEQ ID NO: 5993351 - DNA, 25 bp, Homo sapien
atagtgggaatttgagaggcctctg

SEQ ID NO: 5993352 - DNA, 25 bp, Homo sapien
acggtaccgggattgaccagctcca

SEQ ID NO: 5993353 - DNA, 25 bp, Homo sapien
agaggcctctgctaatggagttggt

SEQ ID NO: 5993354 - DNA, 25 bp, Homo sapien
gaagggttcaatgtctttacgttca

SEQ ID NO: 5993355 - DNA, 25 bp, Homo sapien
gatcagtaataggaaccataccagc

SEQ ID NO: 5993356 - DNA, 25 bp, Homo sapien
gtctgtattcatacttagcaccaat

SEQ ID NO: 5993357 - DNA, 25 bp, Homo sapien
ttgtctgtattcatacttagcacca

SEQ ID NO: 5993358 - DNA, 25 bp, Homo sapien
tacttttctccatagcgatgcaatt

SEQ ID NO: 5993359 - DNA, 25 bp, Homo sapien
gtgctacttttctccatagcgatgc

SEQ ID NO: 5993360 - DNA, 25 bp, Homo sapien
aggagaagaaattccccttggattg

SEQ ID NO: 5993361 - DNA, 25 bp, Homo sapien
ttattcaaatcagctcttagcccgg

SEQ ID NO: 5993362 - DNA, 25 bp, Homo sapien
accagcagtttcaaattgtagaccg

SEQ ID NO: 5993363 - DNA, 25 bp, Homo sapien
cctcgacattttgtgctacttttct

SEQ ID NO: 5993364 - DNA, 25 bp, Homo sapien
tgcctcgacattttgtgctactttt

SEQ ID NO: 5993365 - DNA, 25 bp, Homo sapien
ggccatctgatatctgtaggttgac

SEQ ID NO: 5993366 - DNA, 25 bp, Homo sapien
atagagaaagtgtgtgaggtttgaa

SEQ ID NO: 5993367 - DNA, 25 bp, Homo sapien
tttgagaggcctctgctaatggagt

SEQ ID NO: 5993368 - DNA, 25 bp, Homo sapien
taattgaggagtaacactttgtaga

SEQ ID NO: 5993369 - DNA, 25 bp, Homo sapien
aggagaaagggccgggatagtggga

SEQ ID NO: 5993370 - DNA, 25 bp, Homo sapien
gaaatgatcgatttcaccgcaaaat

SEQ ID NO: 5993371 - DNA, 25 bp, Homo sapien
ggaatttgagaggcctctgctaatg

SEQ ID NO: 5993372 - DNA, 25 bp, Homo sapien
gcttcttggagacataacgagtcaa

SEQ ID NO: 5993373 - DNA, 25 bp, Homo sapien
taggcaatgcttgggaacctataga

SEQ ID NO: 5993374 - DNA, 25 bp, Homo sapien
gagaaagggccgggatagtgggaat

SEQ ID NO: 5993375 - DNA, 25 bp, Homo sapien
gtcagttctggagtataaagtttct

SEQ ID NO: 5993376 - DNA, 25 bp, Homo sapien
ttagcaccaatagtggtagaaccct

SEQ ID NO: 5993377 - DNA, 25 bp, Homo sapien
tagaccgcaaccaatcttggtatcg

SEQ ID NO: 5993378 - DNA, 25 bp, Homo sapien
attgtttgtacgtatccacaacaaa

SEQ ID NO: 5993379 - DNA, 25 bp, Homo sapien
aaagattgtctgtgagaatgcaatt

SEQ ID NO: 5993380 - DNA, 25 bp, Homo sapien
cagttctggagtataaagtttctaa

SEQ ID NO: 5993381 - DNA, 25 bp, Homo sapien
cccttggattgcttcgcagtcaaag

SEQ ID NO: 5993382 - DNA, 25 bp, Homo sapien
tcaatggatcagtaataggaaccat

SEQ ID NO: 5993383 - DNA, 25 bp, Homo sapien
atgtaccacgatatacagattgtct

SEQ ID NO: 5993384 - DNA, 25 bp, Homo sapien
gtttgaaaagcaggattcatggaaa

SEQ ID NO: 5993385 - DNA, 25 bp, Homo sapien
tttctaaacctaaagctaattgagg

SEQ ID NO: 5993386 - DNA, 25 bp, Homo sapien
aatttgagaggcctctgctaatgga

SEQ ID NO: 5993387 - DNA, 25 bp, Homo sapien
agtcttgttctaactgacacattgt

SEQ ID NO: 5993388 - DNA, 25 bp, Homo sapien
tctggagtataaagtttctaaacct

SEQ ID NO: 5993389 - DNA, 25 bp, Homo sapien
ttgaaatgatcgatttcaccgcaaa

SEQ ID NO: 5993390 - DNA, 25 bp, Homo sapien
aagagcttgcaatgggttaccatct

SEQ ID NO: 5993391 - DNA, 25 bp, Homo sapien
acacattgttggttggccatctgat

SEQ ID NO: 5993392 - DNA, 25 bp, Homo sapien
attaaagcaccgttggcttgcaatt

SEQ ID NO: 5993393 - DNA, 25 bp, Homo sapien
ggaagagcttgcaatgggttaccat

SEQ ID NO: 5993394 - DNA, 25 bp, Homo sapien
ccttctcagagaacgaagggttcaa

SEQ ID NO: 5993395 - DNA, 25 bp, Homo sapien
atccaatcttgcttcttggagacat

SEQ ID NO: 5993396 - DNA, 25 bp, Homo sapien
tgggttaccatctgcgtctaaacct

SEQ ID NO: 5993397 - DNA, 25 bp, Homo sapien
tagtggtagaaccctcgacagtagg

SEQ ID NO: 5993398 - DNA, 25 bp, Homo sapien
cttgagcaaataggttatcgttggc

SEQ ID NO: 5993399 - DNA, 25 bp, Homo sapien
ttgggaacctatagagaaagtgtgt

SEQ ID NO: 5993400 - DNA, 25 bp, Homo sapien
atctgatatctgtaggttgacctta

SEQ ID NO: 5993401 - DNA, 25 bp, Homo sapien
agcccggtgaaaaaatactgagaca

SEQ ID NO: 5993402 - DNA, 25 bp, Homo sapien
cggaagcctgatagtcttgttctaa

SEQ ID NO: 5993403 - DNA, 25 bp, Homo sapien
cagcatcacctggagcgctaccgtc

SEQ ID NO: 5993404 - DNA, 25 bp, Homo sapien
tccccttggattgcttcgcagtcaa

SEQ ID NO: 5993405 - DNA, 25 bp, Homo sapien
ataggaaccataccagcttgtaatg

SEQ ID NO: 5993406 - DNA, 25 bp, Homo sapien
gaaacagataaatcgttgtcgatat

SEQ ID NO: 5993407 - DNA, 25 bp, Homo sapien
ggtaccgggattgaccagctccaaa

SEQ ID NO: 5993408 - DNA, 25 bp, Homo sapien
tatgaaacaccagcatcacctggag

SEQ ID NO: 5993409 - DNA, 25 bp, Homo sapien
aagggccgggatagtgggaatttga

SEQ ID NO: 5993410 - DNA, 25 bp, Homo sapien
tcgatacctgcctcgacattttgtg

SEQ ID NO: 5993411 - DNA, 25 bp, Homo sapien
atcgatttcaccgcaaaataaaacg

SEQ ID NO: 5993412 - DNA, 25 bp, Homo sapien
ttggcaaacaatgcggagaatgcgt

SEQ ID NO: 5993413 - DNA, 25 bp, Homo sapien
gattgtctgtattcatacttagcac

SEQ ID NO: 5993414 - DNA, 25 bp, Homo sapien
agtgtgtgaggtttgaaaagcagga

SEQ ID NO: 5993415 - DNA, 25 bp, Homo sapien
gacataacgagtcaagtatgaaaca

SEQ ID NO: 5993416 - DNA, 25 bp, Homo sapien
caccaatagtggtagaaccctcgac

SEQ ID NO: 5993417 - DNA, 25 bp, Homo sapien
cactttgtagaaaagatgcaacagc

SEQ ID NO: 5993418 - DNA, 25 bp, Homo sapien
ccgcaaccaatcttggtatcgttct

SEQ ID NO: 5993419 - DNA, 25 bp, Homo sapien
aatcttgcttcttggagacataacg

SEQ ID NO: 5993420 - DNA, 25 bp, Homo sapien
tgtgagaatgcaattgtttgtacgt

SEQ ID NO: 5993421 - DNA, 25 bp, Homo sapien
cgtacttaggcaatgcttgggaacc

SEQ ID NO: 5993422 - DNA, 25 bp, Homo sapien
ccaaagattgtctgtgagaatgcaa

SEQ ID NO: 5993423 - DNA, 25 bp, Homo sapien
attccccttggattgcttcgcagtc

SEQ ID NO: 5993424 - DNA, 25 bp, Homo sapien
aggttgaataccaattggagtgccc

SEQ ID NO: 5993425 - DNA, 25 bp, Homo sapien
atattgggtttgaggagaagaaatt

SEQ ID NO: 5993426 - DNA, 25 bp, Homo sapien
catagcgatgcaattaaagcaccgt

SEQ ID NO: 5993427 - DNA, 25 bp, Homo sapien
acgttcacagaaaaatcggaagcct

SEQ ID NO: 5993428 - DNA, 25 bp, Homo sapien
tcaaattgtagaccgcaaccaatct

SEQ ID NO: 5993429 - DNA, 25 bp, Homo sapien
ttcaatgtctttacgttcacagaaa

SEQ ID NO: 5993430 - DNA, 25 bp, Homo sapien
taatgtagtttcgatacctgcctcg

SEQ ID NO: 5993431 - DNA, 25 bp, Homo sapien
tataaagtttctaaacctaaagcta

SEQ ID NO: 5993432 - DNA, 25 bp, Homo sapien
agcaccaatagtggtagaaccctcg

SEQ ID NO: 5993433 - DNA, 25 bp, Homo sapien
aaaatactgagacaaaaacacgtca

SEQ ID NO: 5993434 - DNA, 25 bp, Homo sapien
acctatagagaaagtgtgtgaggtt

SEQ ID NO: 5993435 - DNA, 25 bp, Homo sapien
gagacataacgagtcaagtatgaaa

SEQ ID NO: 5993436 - DNA, 25 bp, Homo sapien
aaaaatccaatcttgcttcttggag

SEQ ID NO: 5993437 - DNA, 25 bp, Homo sapien
ttggaatctaatgtaccacgatata

SEQ ID NO: 5993438 - DNA, 25 bp, Homo sapien
aaattgtagaccgcaaccaatcttg

SEQ ID NO: 5993439 - DNA, 25 bp, Homo sapien
ttgtagaaaagatgcaacagcaaca

SEQ ID NO: 5993440 - DNA, 25 bp, Homo sapien
cagagttggcagaacttttctttct

SEQ ID NO: 5993441 - DNA, 25 bp, Homo sapien
cgtatccacaacaaagctagatatt

SEQ ID NO: 5993442 - DNA, 25 bp, Homo sapien
gattgcttcgcagtcaaaggagaaa

SEQ ID NO: 5993443 - DNA, 25 bp, Homo sapien
tctgtgagaatgcaattgtttgtac

SEQ ID NO: 5993444 - DNA, 25 bp, Homo sapien
ccaatagtggtagaaccctcgacag

SEQ ID NO: 5993445 - DNA, 25 bp, Homo sapien
taggttgaccttagaaatgtttttc

SEQ ID NO: 5993446 - DNA, 25 bp, Homo sapien
tgtaggttgaccttagaaatgtttt

SEQ ID NO: 5993447 - DNA, 25 bp, Homo sapien
gtagaaaagatgcaacagcaacacc

SEQ ID NO: 5993448 - DNA, 25 bp, Homo sapien
aggtttgaaaagcaggattcatgga

SEQ ID NO: 5993449 - DNA, 25 bp, Homo sapien
taaaccttgttgtaacattagtaat

SEQ ID NO: 5993450 - DNA, 25 bp, Homo sapien
aattggagtgcccatcaatggatca

SEQ ID NO: 5993451 - DNA, 25 bp, Homo sapien
taaagcaccgttggcttgcaattgg

SEQ ID NO: 5993452 - DNA, 25 bp, Homo sapien
aatctaatgtaccacgatatacaga

SEQ ID NO: 5993453 - DNA, 25 bp, Homo sapien
acagaaaaatcggaagcctgatagt

SEQ ID NO: 5993454 - DNA, 25 bp, Homo sapien
ccaatcttggtatcgttcttgaaat

SEQ ID NO: 5993455 - DNA, 25 bp, Homo sapien
ccgtcagttctggagtataaagttt

SEQ ID NO: 5993456 - DNA, 25 bp, Homo sapien
ttttgtgctacttttctccatagcg

SEQ ID NO: 5993457 - DNA, 25 bp, Homo sapien
aggcctctgctaatggagttggtgc

SEQ ID NO: 5993458 - DNA, 25 bp, Homo sapien
agtttcaaattgtagaccgcaacca

SEQ ID NO: 5993459 - DNA, 25 bp, Homo sapien
cagattgtctgtattcatacttagc

SEQ ID NO: 5993460 - DNA, 25 bp, Homo sapien
accatctgcgtctaaaccttgttgt

SEQ ID NO: 5993461 - DNA, 25 bp, Homo sapien
aacggacagagttggcagaactttt

SEQ ID NO: 5993462 - DNA, 25 bp, Homo sapien
actgacacattgttggttggccatc

SEQ ID NO: 5993463 - DNA, 25 bp, Homo sapien
aatggatcagtaataggaaccatac

SEQ ID NO: 5993464 - DNA, 25 bp, Homo sapien
agaatgcgtacttaggcaatgcttg

SEQ ID NO: 5993465 - DNA, 25 bp, Homo sapien
ttggcttgcaattggcccgaaaaaa

SEQ ID NO: 5993466 - DNA, 25 bp, Homo sapien
gagcgctaccgtcagttctggagta

SEQ ID NO: 5993467 - DNA, 25 bp, Homo sapien
gacaaaaacacgtcacgggagactt

SEQ ID NO: 5993468 - DNA, 25 bp, Homo sapien
cgcagtcaaaggagaaagggccggg

SEQ ID NO: 5993469 - DNA, 25 bp, Homo sapien
gcccttctcagagaacgaagggttc

SEQ ID NO: 5993470 - DNA, 25 bp, Homo sapien
ctgtattcatacttagcaccaatag

SEQ ID NO: 5993471 - DNA, 25 bp, Homo sapien
ggagaatgcgtacttaggcaatgct

SEQ ID NO: 5993472 - DNA, 25 bp, Homo sapien
ttaccattggaatctaatgtaccac

SEQ ID NO: 5993473 - DNA, 25 bp, Homo sapien
cgtctaaaccttgttgtaacattag

SEQ ID NO: 5993474 - DNA, 25 bp, Homo sapien
tgcgtacttaggcaatgcttgggaa

SEQ ID NO: 5993475 - DNA, 25 bp, Homo sapien
taggttatcgttggcaaacaatgcg

SEQ ID NO: 5993476 - DNA, 25 bp, Homo sapien
ttctcagagaacgaagggttcaatg

SEQ ID NO: 5993477 - DNA, 25 bp, Homo sapien
tcgttgtcgatattaccttgagcaa

SEQ ID NO: 5993478 - DNA, 25 bp, Homo sapien
cttggattgcttcgcagtcaaagga

SEQ ID NO: 5993479 - DNA, 25 bp, Homo sapien
cacctggagcgctaccgtcagttct

SEQ ID NO: 5993480 - DNA, 25 bp, Homo sapien
acaattgaggaagagcttgcaatgg

SEQ ID NO: 5993481 - DNA, 25 bp, Homo sapien
ttatcgttggcaaacaatgcggaga

SEQ ID NO: 5993482 - DNA, 25 bp, Homo sapien
cctaaagctaattgaggagtaacac

SEQ ID NO: 5993483 - DNA, 25 bp, Homo sapien
atcacctggagcgctaccgtcagtt

SEQ ID NO: 5993484 - DNA, 25 bp, Homo sapien
cacgatatacagattgtctgtattc

SEQ ID NO: 5993485 - DNA, 25 bp, Homo sapien
caccgcaaaataaaacggacagagt

SEQ ID NO: 5993486 - DNA, 25 bp, Homo sapien
ctgtgaattcgcccttctcagagaa

SEQ ID NO: 5993487 - DNA, 25 bp, Homo sapien
tctaaacctaaagctaattgaggag

SEQ ID NO: 5993488 - DNA, 25 bp, Homo sapien
tcttgcttcttggagacataacgag

SEQ ID NO: 5993489 - DNA, 25 bp, Homo sapien
ttagtaattcttgattaccagcagt

SEQ ID NO: 5993490 - DNA, 25 bp, Homo sapien
tatccacaacaaagctagatattgg

SEQ ID NO: 5993491 - DNA, 25 bp, Homo sapien
taccaattggagtgcccatcaatgg

SEQ ID NO: 5993492 - DNA, 25 bp, Homo sapien
ataaaacggacagagttggcagaac

SEQ ID NO: 5993493 - DNA, 25 bp, Homo sapien
cagctcttagcccggtgaaaaaata

SEQ ID NO: 5993494 - DNA, 25 bp, Homo sapien
aagatgcaacagcaacacctgtgaa

SEQ ID NO: 5993495 - DNA, 25 bp, Homo sapien
tttgaggagaagaaattccccttgg

SEQ ID NO: 5993496 - DNA, 25 bp, Homo sapien
aaagctagatattgggtttgaggag

SEQ ID NO: 5993497 - DNA, 25 bp, Homo sapien
tcgcccttctcagagaacgaagggt

SEQ ID NO: 5993498 - DNA, 25 bp, Homo sapien
cggaaacagataaatcgttgtcgat

SEQ ID NO: 5993499 - DNA, 25 bp, Homo sapien
gggaacctatagagaaagtgtgtga

SEQ ID NO: 5993500 - DNA, 25 bp, Homo sapien
ttgcaatgggttaccatctgcgtct

SEQ ID NO: 5993501 - DNA, 25 bp, Homo sapien
ttgaccagctccaaagattgtctgt

SEQ ID NO: 5993502 - DNA, 25 bp, Homo sapien
tttcaaattgtagaccgcaaccaat

SEQ ID NO: 5993503 - DNA, 25 bp, Homo sapien
attgggtttgaggagaagaaattcc

SEQ ID NO: 5993504 - DNA, 25 bp, Homo sapien
aatcgttgtcgatattaccttgagc

SEQ ID NO: 5993505 - DNA, 25 bp, Homo sapien
gcagaacttttctttctagaaaaca

SEQ ID NO: 5993506 - DNA, 25 bp, Homo sapien
tgtagaccgcaaccaatcttggtat

SEQ ID NO: 5993507 - DNA, 25 bp, Homo sapien
tactgagacaaaaacacgtcacggg

SEQ ID NO: 5993508 - DNA, 25 bp, Homo sapien
tgcccatcaatggatcagtaatagg

SEQ ID NO: 5993509 - DNA, 25 bp, Homo sapien
tcttgattaccagcagtttcaaatt

SEQ ID NO: 5993510 - DNA, 25 bp, Homo sapien
accattggaatctaatgtaccacga

SEQ ID NO: 5993511 - DNA, 25 bp, Homo sapien
ccagctccaaagattgtctgtgaga

SEQ ID NO: 5993512 - DNA, 25 bp, Homo sapien
agaaattccccttggattgcttcgc

SEQ ID NO: 5993513 - DNA, 25 bp, Homo sapien
attcatggaaaatgccttattcaaa

SEQ ID NO: 5993514 - DNA, 25 bp, Homo sapien
gggattgaccagctccaaagattgt

SEQ ID NO: 5993515 - DNA, 25 bp, Homo sapien
ccagcttgtaatgtagtttcgatac

SEQ ID NO: 5993516 - DNA, 25 bp, Homo sapien
ccgggattgaccagctccaaagatt

SEQ ID NO: 5993517 - DNA, 25 bp, Homo sapien
ggtatcgttcttgaaatgatcgatt

SEQ ID NO: 5993518 - DNA, 25 bp, Homo sapien
ttggagtgcccatcaatggatcagt

SEQ ID NO: 5993519 - DNA, 25 bp, Homo sapien
accggaaacagataaatcgttgtcg

SEQ ID NO: 5993520 - DNA, 25 bp, Homo sapien
tgggaatttgagaggcctctgctaa

SEQ ID NO: 5993521 - DNA, 25 bp, Homo sapien
attcatacttagcaccaatagtggt

SEQ ID NO: 5993522 - DNA, 25 bp, Homo sapien
taatgtaccacgatatacagattgt

SEQ ID NO: 5993523 - DNA, 25 bp, Homo sapien
atctaccggaaacagataaatcgtt

SEQ ID NO: 5993524 - DNA, 25 bp, Homo sapien
gagacttccttattcaggttttcca

SEQ ID NO: 5993525 - DNA, 25 bp, Homo sapien
catcaatggatcagtaataggaacc

SEQ ID NO: 5993526 - DNA, 25 bp, Homo sapien
cttgttgtaacattagtaattcttg

SEQ ID NO: 5993527 - DNA, 25 bp, Homo sapien
atgcttgggaacctatagagaaagt

SEQ ID NO: 5993528 - DNA, 25 bp, Homo sapien
gaagaaattccccttggattgcttc

SEQ ID NO: 5993529 - DNA, 25 bp, Homo sapien
atcgttggcaaacaatgcggagaat

SEQ ID NO: 5993530 - DNA, 25 bp, Homo sapien
atagtcttgttctaactgacacatt

SEQ ID NO: 5993531 - DNA, 25 bp, Homo sapien
caacagcaacacctgtgaattcgcc

SEQ ID NO: 5993532 - DNA, 25 bp, Homo sapien
tcgacattttgtgctacttttctcc

SEQ ID NO: 5993533 - DNA, 25 bp, Homo sapien
ctaccggaaacagataaatcgttgt

SEQ ID NO: 5993534 - DNA, 25 bp, Homo sapien
gatattaccttgagcaaataggtta

SEQ ID NO: 5993535 - DNA, 25 bp, Homo sapien
atcccaaccatagtttaatctaccg

SEQ ID NO: 5993536 - DNA, 25 bp, Homo sapien
aataccaattggagtgcccatcaat

SEQ ID NO: 5993537 - DNA, 25 bp, Homo sapien
tgcaacagcaacacctgtgaattcg

SEQ ID NO: 5993538 - DNA, 25 bp, Homo sapien
acttagcaccaatagtggtagaacc

SEQ ID NO: 5993539 - DNA, 25 bp, Homo sapien
cataacgagtcaagtatgaaacacc

SEQ ID NO: 5993540 - DNA, 25 bp, Homo sapien
taacgagtcaagtatgaaacaccag

SEQ ID NO: 5993541 - DNA, 25 bp, Homo sapien
ttgaaaagcaggattcatggaaaat

SEQ ID NO: 5993542 - DNA, 25 bp, Homo sapien
aattgaggaagagcttgcaatgggt

SEQ ID NO: 5993543 - DNA, 25 bp, Homo sapien
caaaataaaacggacagagttggca

SEQ ID NO: 5993544 - DNA, 25 bp, Homo sapien
tgggtttgaggagaagaaattcccc

SEQ ID NO: 5993545 - DNA, 25 bp, Homo sapien
tggagacataacgagtcaagtatga

SEQ ID NO: 5993546 - DNA, 25 bp, Homo sapien
agtgcccatcaatggatcagtaata

SEQ ID NO: 5993547 - DNA, 25 bp, Homo sapien
gcaatgggttaccatctgcgtctaa

SEQ ID NO: 5993548 - DNA, 25 bp, Homo sapien
atggaaaatgccttattcaaatcag

SEQ ID NO: 5993549 - DNA, 25 bp, Homo sapien
gacagagttggcagaacttttcttt

SEQ ID NO: 5993550 - DNA, 25 bp, Homo sapien
gaacctatagagaaagtgtgtgagg

SEQ ID NO: 5993551 - DNA, 25 bp, Homo sapien
ttatcccaaccatagtttaatctac

SEQ ID NO: 5993552 - DNA, 25 bp, Homo sapien
cattttgtgctacttttctccatag

SEQ ID NO: 5993553 - DNA, 25 bp, Homo sapien
gcggagaatgcgtacttaggcaatg

SEQ ID NO: 5993554 - DNA, 25 bp, Homo sapien
acaccagcatcacctggagcgctac

SEQ ID NO: 5993555 - DNA, 25 bp, Homo sapien
aagcaccgttggcttgcaattggcc

SEQ ID NO: 5993556 - DNA, 25 bp, Homo sapien
ctgagacaaaaacacgtcacgggag

SEQ ID NO: 5993557 - DNA, 25 bp, Homo sapien
tgtacgtatccacaacaaagctaga

SEQ ID NO: 5993558 - DNA, 25 bp, Homo sapien
cttggagacataacgagtcaagtat

SEQ ID NO: 5993559 - DNA, 25 bp, Homo sapien
gttgaataccaattggagtgcccat

SEQ ID NO: 5993560 - DNA, 25 bp, Homo sapien
atttcaccgcaaaataaaacggaca

SEQ ID NO: 5993561 - DNA, 25 bp, Homo sapien
gatgcaattaaagcaccgttggctt

SEQ ID NO: 5993562 - DNA, 25 bp, Homo sapien
cctgcctcgacattttgtgctactt

SEQ ID NO: 5993563 - DNA, 25 bp, Homo sapien
accacgatatacagattgtctgtat

SEQ ID NO: 5993564 - DNA, 25 bp, Homo sapien
cccatcaatggatcagtaataggaa

SEQ ID NO: 5993565 - DNA, 25 bp, Homo sapien
cagtaggttgaataccaattggagt

SEQ ID NO: 5993566 - DNA, 25 bp, Homo sapien
taattcttgattaccagcagtttca

SEQ ID NO: 5993567 - DNA, 25 bp, Homo sapien
gctaattgaggagtaacactttgta

SEQ ID NO: 5993568 - DNA, 25 bp, Homo sapien
tgtgtgaggtttgaaaagcaggatt

SEQ ID NO: 5993569 - DNA, 25 bp, Homo sapien
gaggaagagcttgcaatgggttacc

SEQ ID NO: 5993570 - DNA, 25 bp, Homo sapien
tgcaattgtttgtacgtatccacaa

SEQ ID NO: 5993571 - DNA, 25 bp, Homo sapien
gtcaagtatgaaacaccagcatcac

SEQ ID NO: 5993572 - DNA, 25 bp, Homo sapien
tcgatattaccttgagcaaataggt

SEQ ID NO: 5993573 - DNA, 25 bp, Homo sapien
gataaatcgttgtcgatattacctt

SEQ ID NO: 5993574 - DNA, 25 bp, Homo sapien
cttttctccatagcgatgcaattaa

SEQ ID NO: 5993575 - DNA, 25 bp, Homo sapien
gtcaaaggagaaagggccgggatag

SEQ ID NO: 5993576 - DNA, 25 bp, Homo sapien
tctttctagaaaacatgcaacctta

SEQ ID NO: 5993577 - DNA, 25 bp, Homo sapien
accttgagcaaataggttatcgttg

SEQ ID NO: 5993578 - DNA, 25 bp, Homo sapien
aggagtaacactttgtagaaaagat

SEQ ID NO: 5993579 - DNA, 25 bp, Homo sapien
tcacaattgaggaagagcttgcaat

SEQ ID NO: 5993580 - DNA, 25 bp, Homo sapien
gtattcatacttagcaccaatagtg

SEQ ID NO: 5993581 - DNA, 25 bp, Homo sapien
cacgggagacttccttattcaggtt

SEQ ID NO: 5993582 - DNA, 25 bp, Homo sapien
gaccgcaaccaatcttggtatcgtt

SEQ ID NO: 5993583 - DNA, 25 bp, Homo sapien
tgtttttcttatcccaaccatagtt

SEQ ID NO: 5993584 - DNA, 25 bp, Homo sapien
tcttagcccggtgaaaaaatactga

SEQ ID NO: 5993585 - DNA, 25 bp, Homo sapien
cagcagtttcaaattgtagaccgca

SEQ ID NO: 5993586 - DNA, 25 bp, Homo sapien
tacttaggcaatgcttgggaaccta

SEQ ID NO: 5993587 - DNA, 25 bp, Homo sapien
gatatctgtaggttgaccttagaaa

SEQ ID NO: 5993588 - DNA, 25 bp, Homo sapien
tggcccgaaaaaatccaatcttgct

SEQ ID NO: 5993589 - DNA, 25 bp, Homo sapien
gaaccctcgacagtaggttgaatac

SEQ ID NO: 5993590 - DNA, 25 bp, Homo sapien
gttggcagaacttttctttctagaa

SEQ ID NO: 5993591 - DNA, 25 bp, Homo sapien
ggttaccatctgcgtctaaaccttg

SEQ ID NO: 5993592 - DNA, 25 bp, Homo sapien
gattaccagcagtttcaaattgtag

SEQ ID NO: 5993593 - DNA, 25 bp, Homo sapien
cgatatacagattgtctgtattcat

SEQ ID NO: 5993594 - DNA, 25 bp, Homo sapien
aaatcagctcttagcccggtgaaaa

SEQ ID NO: 5993595 - DNA, 25 bp, Homo sapien
tctccatagcgatgcaattaaagca

SEQ ID NO: 5993596 - DNA, 25 bp, Homo sapien
agaatgcaattgtttgtacgtatcc

SEQ ID NO: 5993597 - DNA, 25 bp, Homo sapien
caatgcttgggaacctatagagaaa

SEQ ID NO: 5993598 - DNA, 25 bp, Homo sapien
tcgacagtaggttgaataccaattg

SEQ ID NO: 5993599 - DNA, 25 bp, Homo sapien
tcttatcccaaccatagtttaatct

SEQ ID NO: 5993600 - DNA, 25 bp, Homo sapien
ttgaggaagagcttgcaatgggtta

SEQ ID NO: 5993601 - DNA, 25 bp, Homo sapien
tttgtacgtatccacaacaaagcta

SEQ ID NO: 5993602 - DNA, 25 bp, Homo sapien
ccaatcttgcttcttggagacataa

SEQ ID NO: 5993603 - DNA, 25 bp, Homo sapien
tgttgtaacattagtaattcttgat

SEQ ID NO: 5993604 - DNA, 25 bp, Homo sapien
ttgtaacattagtaattcttgatta

SEQ ID NO: 5993605 - DNA, 25 bp, Homo sapien
taccgggattgaccagctccaaaga

SEQ ID NO: 5993606 - DNA, 25 bp, Homo sapien
attgttggttggccatctgatatct

SEQ ID NO: 5993607 - DNA, 25 bp, Homo sapien
cagagaacgaagggttcaatgtctt

SEQ ID NO: 5993608 - DNA, 25 bp, Homo sapien
caaataggttatcgttggcaaacaa

SEQ ID NO: 5993609 - DNA, 25 bp, Homo sapien
gcttgcaatgggttaccatctgcgt

SEQ ID NO: 5993610 - DNA, 25 bp, Homo sapien
gctaccgtcagttctggagtataaa

SEQ ID NO: 5993611 - DNA, 25 bp, Homo sapien
gaacttttctttctagaaaacatgc

SEQ ID NO: 5993612 - DNA, 25 bp, Homo sapien
caaacaatgcggagaatgcgtactt

SEQ ID NO: 5993613 - DNA, 25 bp, Homo sapien
gttctaactgacacattgttggttg

SEQ ID NO: 5993614 - DNA, 25 bp, Homo sapien
aaaaatcggaagcctgatagtcttg

SEQ ID NO: 5993615 - DNA, 25 bp, Homo sapien
gcatcacctggagcgctaccgtcag

SEQ ID NO: 5993616 - DNA, 25 bp, Homo sapien
taccagcttgtaatgtagtttcgat

SEQ ID NO: 5993617 - DNA, 25 bp, Homo sapien
ggatagtgggaatttgagaggcctc

SEQ ID NO: 5993618 - DNA, 25 bp, Homo sapien
agctccaaagattgtctgtgagaat

SEQ ID NO: 5993619 - DNA, 25 bp, Homo sapien
ggttggccatctgatatctgtaggt

SEQ ID NO: 5993620 - DNA, 25 bp, Homo sapien
ggttcaatgtctttacgttcacaga

SEQ ID NO: 5993621 - DNA, 25 bp, Homo sapien
aatactgagacaaaaacacgtcacg

SEQ ID NO: 5993622 - DNA, 25 bp, Homo sapien
gaagcctgatagtcttgttctaact

SEQ ID NO: 5993623 - DNA, 25 bp, Homo sapien
agggttcaatgtctttacgttcaca

SEQ ID NO: 5993624 - DNA, 25 bp, Homo sapien
tatctgtaggttgaccttagaaatg

SEQ ID NO: 5993625 - DNA, 25 bp, Homo sapien
cttttctttctagaaaacatgcaac

SEQ ID NO: 5993626 - DNA, 25 bp, Homo sapien
atagtttaatctaccggaaacagat

SEQ ID NO: 5993627 - DNA, 25 bp, Homo sapien
cgcaaaataaaacggacagagttgg

SEQ ID NO: 5993628 - DNA, 25 bp, Homo sapien
gcgctaccgtcagttctggagtata

SEQ ID NO: 5993629 - DNA, 25 bp, Homo sapien
cccggtgaaaaaatactgagacaaa

SEQ ID NO: 5993630 - DNA, 25 bp, Homo sapien
gaccagctccaaagattgtctgtga

SEQ ID NO: 5993631 - DNA, 25 bp, Homo sapien
accttgttgtaacattagtaattct

SEQ ID NO: 5993632 - DNA, 25 bp, Homo sapien
aacattagtaattcttgattaccag

SEQ ID NO: 5993633 - DNA, 25 bp, Homo sapien
tctaaaccttgttgtaacattagta

SEQ ID NO: 5993634 - DNA, 25 bp, Homo sapien
gagaacgaagggttcaatgtcttta

SEQ ID NO: 5993635 - DNA, 25 bp, Homo sapien
gcaaccttaccattggaatctaatg

SEQ ID NO: 5993636 - DNA, 25 bp, Homo sapien
acctgtgaattcgcccttctcagag

SEQ ID NO: 5993637 - DNA, 25 bp, Homo sapien
tttctagaaaacatgcaaccttacc

SEQ ID NO: 5993638 - DNA, 25 bp, Homo sapien
gaaaaaatccaatcttgcttcttgg

SEQ ID NO: 5993639 - DNA, 25 bp, Homo sapien
gatacctgcctcgacattttgtgct

SEQ ID NO: 5993640 - DNA, 25 bp, Homo sapien
tagaaccctcgacagtaggttgaat

SEQ ID NO: 5993641 - DNA, 25 bp, Homo sapien
aatcttggtatcgttcttgaaatga

SEQ ID NO: 5993642 - DNA, 25 bp, Homo sapien
cgatttcaccgcaaaataaaacgga

SEQ ID NO: 5993643 - DNA, 25 bp, Homo sapien
agatattgggtttgaggagaagaaa

SEQ ID NO: 5993644 - DNA, 25 bp, Homo sapien
ccatagtttaatctaccggaaacag

SEQ ID NO: 5993645 - DNA, 25 bp, Homo sapien
aatgggttaccatctgcgtctaaac

SEQ ID NO: 5993646 - DNA, 25 bp, Homo sapien
tggagcgctaccgtcagttctggag

SEQ ID NO: 5993647 - DNA, 25 bp, Homo sapien
ggttatcgttggcaaacaatgcgga

SEQ ID NO: 5993648 - DNA, 25 bp, Homo sapien
caattaaagcaccgttggcttgcaa

SEQ ID NO: 5993649 - DNA, 25 bp, Homo sapien
gcttcgcagtcaaaggagaaagggc

SEQ ID NO: 5993650 - DNA, 25 bp, Homo sapien
acaaagctagatattgggtttgagg

SEQ ID NO: 5993651 - DNA, 25 bp, Homo sapien
gttgtcgatattaccttgagcaaat

SEQ ID NO: 5993652 - DNA, 25 bp, Homo sapien
tcatggaaaatgccttattcaaatc

SEQ ID NO: 5993653 - DNA, 25 bp, Homo sapien
tattaccttgagcaaataggttatc

SEQ ID NO: 5993654 - DNA, 25 bp, Homo sapien
gaattcgcccttctcagagaacgaa

SEQ ID NO: 5993655 - DNA, 25 bp, Homo sapien
ctttacgttcacagaaaaatcggaa

SEQ ID NO: 5993656 - DNA, 25 bp, Homo sapien
cctcgacagtaggttgaataccaat

SEQ ID NO: 5993657 - DNA, 25 bp, Homo sapien
attcgcccttctcagagaacgaagg

SEQ ID NO: 5993658 - DNA, 25 bp, Homo sapien
ttcttggagacataacgagtcaagt

SEQ ID NO: 5993659 - DNA, 25 bp, Homo sapien
agcctgatagtcttgttctaactga

SEQ ID NO: 5993660 - DNA, 25 bp, Homo sapien
ctatagagaaagtgtgtgaggtttg

SEQ ID NO: 5993661 - DNA, 25 bp, Homo sapien
catctgcgtctaaaccttgttgtaa

SEQ ID NO: 5993662 - DNA, 25 bp, Homo sapien
gtgaaaaaatactgagacaaaaaca

SEQ ID NO: 5993663 - DNA, 25 bp, Homo sapien
ctcagagaacgaagggttcaatgtc

SEQ ID NO: 5993664 - DNA, 25 bp, Homo sapien
tgtttgtacgtatccacaacaaagc

SEQ ID NO: 5993665 - DNA, 25 bp, Homo sapien
agtttcgatacctgcctcgacattt

SEQ ID NO: 5993666 - DNA, 25 bp, Homo sapien
ttgcttcgcagtcaaaggagaaagg

SEQ ID NO: 5993667 - DNA, 25 bp, Homo sapien
tcagtaataggaaccataccagctt

SEQ ID NO: 5993668 - DNA, 25 bp, Homo sapien
cataccagcttgtaatgtagtttcg

SEQ ID NO: 5993669 - DNA, 25 bp, Homo sapien
gtaggttgaataccaattggagtgc

SEQ ID NO: 5993670 - DNA, 25 bp, Homo sapien
tttcgatacctgcctcgacattttg

SEQ ID NO: 5993671 - DNA, 25 bp, Homo sapien
agtttctaaacctaaagctaattga

SEQ ID NO: 5993672 - DNA, 25 bp, Homo sapien
tgaggtttgaaaagcaggattcatg

SEQ ID NO: 5993673 - DNA, 25 bp, Homo sapien
gccgggatagtgggaatttgagagg

SEQ ID NO: 5993674 - DNA, 25 bp, Homo sapien
taaagctaattgaggagtaacactt

SEQ ID NO: 5993675 - DNA, 25 bp, Homo sapien
aatgatcgatttcaccgcaaaataa

SEQ ID NO: 5993676 - DNA, 25 bp, Homo sapien
ccacggtaccgggattgaccagctc

SEQ ID NO: 5993677 - DNA, 25 bp, Homo sapien
aaacatgcaaccttaccattggaat

SEQ ID NO: 5993678 - DNA, 25 bp, Homo sapien
gagtcaagtatgaaacaccagcatc

SEQ ID NO: 5993679 - DNA, 25 bp, Homo sapien
acacgtcacgggagacttccttatt

SEQ ID NO: 5993680 - DNA, 25 bp, Homo sapien
tgtgaggtttgaaaagcaggattca

SEQ ID NO: 5993681 - DNA, 25 bp, Homo sapien
tgagcaaataggttatcgttggcaa

SEQ ID NO: 5993682 - DNA, 25 bp, Homo sapien
gcttgggaacctatagagaaagtgt

SEQ ID NO: 5993683 - DNA, 25 bp, Homo sapien
tgatcgatttcaccgcaaaataaaa

SEQ ID NO: 5993684 - DNA, 25 bp, Homo sapien
cctgatagtcttgttctaactgaca

SEQ ID NO: 5993685 - DNA, 25 bp, Homo sapien
gtggtagaaccctcgacagtaggtt

SEQ ID NO: 5993686 - DNA, 25 bp, Homo sapien
atacttagcaccaatagtggtagaa

SEQ ID NO: 5993687 - DNA, 25 bp, Homo sapien
tcttgaaatgatcgatttcaccgca

SEQ ID NO: 5993688 - DNA, 25 bp, Homo sapien
aaatcggaagcctgatagtcttgtt

SEQ ID NO: 5993689 - DNA, 25 bp, Homo sapien
aaatccaatcttgcttcttggagac

SEQ ID NO: 5993690 - DNA, 25 bp, Homo sapien
tctaatgtaccacgatatacagatt

SEQ ID NO: 5993691 - DNA, 25 bp, Homo sapien
cgggatagtgggaatttgagaggcc

SEQ ID NO: 5993692 - DNA, 25 bp, Homo sapien
gttctggagtataaagtttctaaac

SEQ ID NO: 5993693 - DNA, 25 bp, Homo sapien
tttctttctagaaaacatgcaacct

SEQ ID NO: 5993694 - DNA, 25 bp, Homo sapien
aaattccccttggattgcttcgcag

SEQ ID NO: 5993695 - DNA, 25 bp, Homo sapien
gacattttgtgctacttttctccat

SEQ ID NO: 5993696 - DNA, 25 bp, Homo sapien
tttaatctaccggaaacagataaat

SEQ ID NO: 5993697 - DNA, 25 bp, Homo sapien
aataggttatcgttggcaaacaatg

SEQ ID NO: 5993698 - DNA, 25 bp, Homo sapien
gagttggcagaacttttctttctag

SEQ ID NO: 5993699 - DNA, 25 bp, Homo sapien
aaacacgtcacgggagacttcctta

SEQ ID NO: 5993700 - DNA, 25 bp, Homo sapien
ggtagaaccctcgacagtaggttga

SEQ ID NO: 5993701 - DNA, 25 bp, Homo sapien
ggattcatggaaaatgccttattca

SEQ ID NO: 5993702 - DNA, 25 bp, Homo sapien
taataggaaccataccagcttgtaa

SEQ ID NO: 5993703 - DNA, 25 bp, Homo sapien
atgcaaccttaccattggaatctaa

SEQ ID NO: 5993704 - DNA, 25 bp, Homo sapien
taccgtcagttctggagtataaagt

SEQ ID NO: 5993705 - DNA, 25 bp, Homo sapien
agaaaaatcggaagcctgatagtct

SEQ ID NO: 5993706 - DNA, 25 bp, Homo sapien
aaacaccagcatcacctggagcgct

SEQ ID NO: 5993707 - DNA, 25 bp, Homo sapien
aatgtttttcttatcccaaccatag

SEQ ID NO: 5993708 - DNA, 25 bp, Homo sapien
ggaatctaatgtaccacgatataca

SEQ ID NO: 5993709 - DNA, 25 bp, Homo sapien
atgtagtttcgatacctgcctcgac

SEQ ID NO: 5993710 - DNA, 25 bp, Homo sapien
ttcgcagtcaaaggagaaagggccg

SEQ ID NO: 5993711 - DNA, 25 bp, Homo sapien
aacagataaatcgttgtcgatatta

SEQ ID NO: 5993712 - DNA, 25 bp, Homo sapien
tggagtataaagtttctaaacctaa

SEQ ID NO: 5993713 - DNA, 25 bp, Homo sapien
tcgttcttgaaatgatcgatttcac

SEQ ID NO: 5993714 - DNA, 25 bp, Homo sapien
ccttattcaaatcagctcttagccc

SEQ ID NO: 5993715 - DNA, 25 bp, Homo sapien
accagcatcacctggagcgctaccg

SEQ ID NO: 5993716 - DNA, 25 bp, Homo sapien
gtcacgggagacttccttattcagg

SEQ ID NO: 5993717 - DNA, 25 bp, Homo sapien
gaaaacatgcaaccttaccattgga

SEQ ID NO: 5993718 - DNA, 25 bp, Homo sapien
taaacctaaagctaattgaggagta

SEQ ID NO: 5993719 - DNA, 25 bp, Homo sapien
gatgcaacagcaacacctgtgaatt

SEQ ID NO: 5993720 - DNA, 25 bp, Homo sapien
tgtaatgtagtttcgatacctgcct

SEQ ID NO: 5993721 - DNA, 25 bp, Homo sapien
aggaaccataccagcttgtaatgta

SEQ ID NO: 5993722 - DNA, 25 bp, Homo sapien
ttggtatcgttcttgaaatgatcga

SEQ ID NO: 5993723 - DNA, 25 bp, Homo sapien
agtttaatctaccggaaacagataa

SEQ ID NO: 5993724 - DNA, 25 bp, Homo sapien
ttgtgctacttttctccatagcgat

SEQ ID NO: 5993725 - DNA, 25 bp, Homo sapien
gcgatgcaattaaagcaccgttggc

SEQ ID NO: 5993726 - DNA, 25 bp, Homo sapien
gcagtttcaaattgtagaccgcaac

SEQ ID NO: 5993727 - DNA, 25 bp, Homo sapien
tctgcgtctaaaccttgttgtaaca

SEQ ID NO: 5993728 - DNA, 25 bp, Homo sapien
caaaggagaaagggccgggatagtg

SEQ ID NO: 5993729 - DNA, 25 bp, Homo sapien
ttagcccggtgaaaaaatactgaga

SEQ ID NO: 5993730 - DNA, 25 bp, Homo sapien
tggatcagtaataggaaccatacca

SEQ ID NO: 5993731 - DNA, 25 bp, Homo sapien
gacttccttattcaggttttccacg

SEQ ID NO: 5993732 - DNA, 25 bp, Homo sapien
tccatagcgatgcaattaaagcacc

SEQ ID NO: 5993733 - DNA, 25 bp, Homo sapien
ggcaatgcttgggaacctatagaga

SEQ ID NO: 5993734 - DNA, 25 bp, Homo sapien
aatgcgtacttaggcaatgcttggg

SEQ ID NO: 5993735 - DNA, 25 bp, Homo sapien
tccacaacaaagctagatattgggt

SEQ ID NO: 5993736 - DNA, 25 bp, Homo sapien
caattggcccgaaaaaatccaatct

SEQ ID NO: 5993737 - DNA, 25 bp, Homo sapien
gtctttacgttcacagaaaaatcgg

SEQ ID NO: 5993738 - DNA, 25 bp, Homo sapien
agagaaagtgtgtgaggtttgaaaa

SEQ ID NO: 5993739 - DNA, 25 bp, Homo sapien
cttaggcaatgcttgggaacctata

SEQ ID NO: 5993740 - DNA, 25 bp, Homo sapien
tgccttattcaaatcagctcttagc

SEQ ID NO: 5993741 - DNA, 25 bp, Homo sapien
gaaaaaatactgagacaaaaacacg

SEQ ID NO: 5993742 - DNA, 25 bp, Homo sapien
caagtatgaaacaccagcatcacct

SEQ ID NO: 5993743 - DNA, 25 bp, Homo sapien
cagataaatcgttgtcgatattacc

SEQ ID NO: 5993744 - DNA, 25 bp, Homo sapien
aatagtggtagaaccctcgacagta

SEQ ID NO: 5993745 - DNA, 25 bp, Homo sapien
cttgtaatgtagtttcgatacctgc

SEQ ID NO: 5993746 - DNA, 25 bp, Homo sapien
ttgcttcttggagacataacgagtc

SEQ ID NO: 5993747 - DNA, 25 bp, Homo sapien
tgaggagtaacactttgtagaaaag

SEQ ID NO: 5993748 - DNA, 25 bp, Homo sapien
ctttgtagaaaagatgcaacagcaa

SEQ ID NO: 5993749 - DNA, 25 bp, Homo sapien
gtaacattagtaattcttgattacc

SEQ ID NO: 5993750 - DNA, 25 bp, Homo sapien
cattagtaattcttgattaccagca

SEQ ID NO: 5993751 - DNA, 25 bp, Homo sapien
ttggttggccatctgatatctgtag

SEQ ID NO: 5993752 - DNA, 25 bp, Homo sapien
attgaggagtaacactttgtagaaa

SEQ ID NO: 5993753 - DNA, 25 bp, Homo sapien
aaccttaccattggaatctaatgta

SEQ ID NO: 5993754 - DNA, 25 bp, Homo sapien
agtgggaatttgagaggcctctgct

SEQ ID NO: 5993755 - DNA, 25 bp, Homo sapien
tcttggtatcgttcttgaaatgatc

SEQ ID NO: 5993756 - DNA, 25 bp, Homo sapien
gaacgaagggttcaatgtctttacg

SEQ ID NO: 5993757 - DNA, 25 bp, Homo sapien
aatgcaattgtttgtacgtatccac

SEQ ID NO: 5993758 - DNA, 25 bp, Homo sapien
agtaattcttgattaccagcagttt

SEQ ID NO: 5993759 - DNA, 25 bp, Homo sapien
caaccatagtttaatctaccggaaa

SEQ ID NO: 5993760 - DNA, 25 bp, Homo sapien
cccaaccatagtttaatctaccgga

SEQ ID NO: 5993761 - DNA, 25 bp, Homo sapien
gtaacactttgtagaaaagatgcaa

SEQ ID NO: 5993762 - DNA, 25 bp, Homo sapien
ttggccatctgatatctgtaggttg

SEQ ID NO: 5993763 - DNA, 25 bp, Homo sapien
gcaaccaatcttggtatcgttcttg

SEQ ID NO: 5993764 - DNA, 25 bp, Homo sapien
ttttccacggtaccgggattgacca

SEQ ID NO: 5993765 - DNA, 25 bp, Homo sapien
gtgaattcgcccttctcagagaacg

SEQ ID NO: 5993766 - DNA, 25 bp, Homo sapien
tgagaatgagatctctgattacgag

SEQ ID NO: 5993767 - DNA, 25 bp, Homo sapien
ggctttaatgcacgcctctgatatg

SEQ ID NO: 5993768 - DNA, 25 bp, Homo sapien
aaatagggctttaatgcacgcctct

SEQ ID NO: 5993769 - DNA, 25 bp, Homo sapien
ggcgaatcagatagacgacgagccc

SEQ ID NO: 5993770 - DNA, 25 bp, Homo sapien
gaaaattcagactgcccaaacaaat

SEQ ID NO: 5993771 - DNA, 25 bp, Homo sapien
taacgatatcccagaaaagtataaa

SEQ ID NO: 5993772 - DNA, 25 bp, Homo sapien
atctgagcttaccactacaaccgct

SEQ ID NO: 5993773 - DNA, 25 bp, Homo sapien
atgtaactctagatgtggatgaatt

SEQ ID NO: 5993774 - DNA, 25 bp, Homo sapien
ggatctgagcttaccactacaaccg

SEQ ID NO: 5993775 - DNA, 25 bp, Homo sapien
gagctattaagtaaaacaagagaag

SEQ ID NO: 5993776 - DNA, 25 bp, Homo sapien
aagttattgaaggataaacggttga

SEQ ID NO: 5993777 - DNA, 25 bp, Homo sapien
gcctaatcccaatacaattattgac

SEQ ID NO: 5993778 - DNA, 25 bp, Homo sapien
gaacattttttcaggtaaagggcta

SEQ ID NO: 5993779 - DNA, 25 bp, Homo sapien
tttttcaggtaaagggctacttaga

SEQ ID NO: 5993780 - DNA, 25 bp, Homo sapien
gatcttgacgaagaaagtcaaattg

SEQ ID NO: 5993781 - DNA, 25 bp, Homo sapien
tctctctaagtctgccttggaccat

SEQ ID NO: 5993782 - DNA, 25 bp, Homo sapien
aagcattctaataatataagggcga

SEQ ID NO: 5993783 - DNA, 25 bp, Homo sapien
aaaggagctattaagtaaaacaaga

SEQ ID NO: 5993784 - DNA, 25 bp, Homo sapien
aacaaattctaaaaaagtatcacca

SEQ ID NO: 5993785 - DNA, 25 bp, Homo sapien
gtgaaatgaacgaggatatgacgga

SEQ ID NO: 5993786 - DNA, 25 bp, Homo sapien
taaaacaagagaagatttcatacct

SEQ ID NO: 5993787 - DNA, 25 bp, Homo sapien
tttgtgaagacccaaattaaggata

SEQ ID NO: 5993788 - DNA, 25 bp, Homo sapien
acgaagaaagtcaaattgaaactca

SEQ ID NO: 5993789 - DNA, 25 bp, Homo sapien
aagagacggaagatgctctaaacaa

SEQ ID NO: 5993790 - DNA, 25 bp, Homo sapien
cgaattaaatacacatatcatgact

SEQ ID NO: 5993791 - DNA, 25 bp, Homo sapien
acacatatcatgacttggtttcaag

SEQ ID NO: 5993792 - DNA, 25 bp, Homo sapien
caaattctaaaaaagtatcaccagc

SEQ ID NO: 5993793 - DNA, 25 bp, Homo sapien
accagccaaaaaagaccagttcata

SEQ ID NO: 5993794 - DNA, 25 bp, Homo sapien
gaaatcattagagctatataacgat

SEQ ID NO: 5993795 - DNA, 25 bp, Homo sapien
aaatccaagctacaacgcttaaatc

SEQ ID NO: 5993796 - DNA, 25 bp, Homo sapien
ggttgcatgataaaatagccaaaga

SEQ ID NO: 5993797 - DNA, 25 bp, Homo sapien
ttgagctggatgctcaatggcaaaa

SEQ ID NO: 5993798 - DNA, 25 bp, Homo sapien
actttgaaatctgcaaatgaattat

SEQ ID NO: 5993799 - DNA, 25 bp, Homo sapien
tgtgaagacccaaattaaggataac

SEQ ID NO: 5993800 - DNA, 25 bp, Homo sapien
tcattagagctatataacgatatcc

SEQ ID NO: 5993801 - DNA, 25 bp, Homo sapien
tgtatgaagatataccggaaggtat

SEQ ID NO: 5993802 - DNA, 25 bp, Homo sapien
gtgatcttgacgaagaaagtcaaat

SEQ ID NO: 5993803 - DNA, 25 bp, Homo sapien
atgataaaatagccaaagagaacga

SEQ ID NO: 5993804 - DNA, 25 bp, Homo sapien
atacacatatcatgacttggtttca

SEQ ID NO: 5993805 - DNA, 25 bp, Homo sapien
gatatgacggatatctacatgaaat

SEQ ID NO: 5993806 - DNA, 25 bp, Homo sapien
agaaagtcaaattgaaactcagatc

SEQ ID NO: 5993807 - DNA, 25 bp, Homo sapien
agatgtggatgaattgaacattcca

SEQ ID NO: 5993808 - DNA, 25 bp, Homo sapien
gcaaatgtaagcgtacagccggggg

SEQ ID NO: 5993809 - DNA, 25 bp, Homo sapien
atggcaaaaatttctctctaagtct

SEQ ID NO: 5993810 - DNA, 25 bp, Homo sapien
cactcgcacagagtcgacctttcgt

SEQ ID NO: 5993811 - DNA, 25 bp, Homo sapien
ccgctgataaagagactttgaaatc

SEQ ID NO: 5993812 - DNA, 25 bp, Homo sapien
tttcaggtaaagggctacttagagg

SEQ ID NO: 5993813 - DNA, 25 bp, Homo sapien
attctaataatataagggcgaatca

SEQ ID NO: 5993814 - DNA, 25 bp, Homo sapien
tacaacgcttaaatcgtgaagagac

SEQ ID NO: 5993815 - DNA, 25 bp, Homo sapien
tatgacggatatctacatgaaatca

SEQ ID NO: 5993816 - DNA, 25 bp, Homo sapien
tctaagtctgccttggaccatgatg

SEQ ID NO: 5993817 - DNA, 25 bp, Homo sapien
ttaaactggacagcttattcgaagg

SEQ ID NO: 5993818 - DNA, 25 bp, Homo sapien
cgactgcctcatagaactgcctaat

SEQ ID NO: 5993819 - DNA, 25 bp, Homo sapien
aattcgatgtaaggcaagataagca

SEQ ID NO: 5993820 - DNA, 25 bp, Homo sapien
taaaaagagaaaattcagactgccc

SEQ ID NO: 5993821 - DNA, 25 bp, Homo sapien
gctcctatcgaagatattatacgag

SEQ ID NO: 5993822 - DNA, 25 bp, Homo sapien
ccagttcatacttaaaggagctatt

SEQ ID NO: 5993823 - DNA, 25 bp, Homo sapien
tacctgtggaaaagttattgaagga

SEQ ID NO: 5993824 - DNA, 25 bp, Homo sapien
cgtacctcttgaaaagactattgta

SEQ ID NO: 5993825 - DNA, 25 bp, Homo sapien
tgaaactcagatcgatgctcctatc

SEQ ID NO: 5993826 - DNA, 25 bp, Homo sapien
aaggataactggacgagctggccta

SEQ ID NO: 5993827 - DNA, 25 bp, Homo sapien
tgcctcatagaactgcctaatggga

SEQ ID NO: 5993828 - DNA, 25 bp, Homo sapien
aaccgctgataaagagactttgaaa

SEQ ID NO: 5993829 - DNA, 25 bp, Homo sapien
aaagtatcaccagccaaaaaagacc

SEQ ID NO: 5993830 - DNA, 25 bp, Homo sapien
tgacggatatctacatgaaatcatt

SEQ ID NO: 5993831 - DNA, 25 bp, Homo sapien
aaactcagatcgatgctcctatcga

SEQ ID NO: 5993832 - DNA, 25 bp, Homo sapien
gagaagatttcatacctgtggaaaa

SEQ ID NO: 5993833 - DNA, 25 bp, Homo sapien
atcgaagatattatacgaggatctg

SEQ ID NO: 5993834 - DNA, 25 bp, Homo sapien
tctaaacaaaagaacattttttcag

SEQ ID NO: 5993835 - DNA, 25 bp, Homo sapien
ggccaatcgacgaattaaatacaca

SEQ ID NO: 5993836 - DNA, 25 bp, Homo sapien
attcagactgcccaaacaaattcta

SEQ ID NO: 5993837 - DNA, 25 bp, Homo sapien
ggacaaatccaagctacaacgctta

SEQ ID NO: 5993838 - DNA, 25 bp, Homo sapien
gtaaagggctacttagaggatgaga

SEQ ID NO: 5993839 - DNA, 25 bp, Homo sapien
gagctggcctaatcccaatacaatt

SEQ ID NO: 5993840 - DNA, 25 bp, Homo sapien
ctctagaacactcgcacagagtcga

SEQ ID NO: 5993841 - DNA, 25 bp, Homo sapien
aaacgaaatatcccggaatatctta

SEQ ID NO: 5993842 - DNA, 25 bp, Homo sapien
aaaagaccagttcatacttaaagga

SEQ ID NO: 5993843 - DNA, 25 bp, Homo sapien
cctctgatatgatgagggttgagct

SEQ ID NO: 5993844 - DNA, 25 bp, Homo sapien
aaaaagtatcaccagccaaaaaaga

SEQ ID NO: 5993845 - DNA, 25 bp, Homo sapien
ccctagtgtagacaaattgtatgaa

SEQ ID NO: 5993846 - DNA, 25 bp, Homo sapien
atcaaaggacaaatccaagctacaa

SEQ ID NO: 5993847 - DNA, 25 bp, Homo sapien
taataatataagggcgaatcagata

SEQ ID NO: 5993848 - DNA, 25 bp, Homo sapien
cctgtggaaaagttattgaaggata

SEQ ID NO: 5993849 - DNA, 25 bp, Homo sapien
cctcttgaaaagactattgtataag

SEQ ID NO: 5993850 - DNA, 25 bp, Homo sapien
tgaaatctgcaaatgaattattaga

SEQ ID NO: 5993851 - DNA, 25 bp, Homo sapien
tgacttggtttcaagaggttgtgaa

SEQ ID NO: 5993852 - DNA, 25 bp, Homo sapien
aggatatgacggatatctacatgaa

SEQ ID NO: 5993853 - DNA, 25 bp, Homo sapien
atttatactctgcgtacctcttgaa

SEQ ID NO: 5993854 - DNA, 25 bp, Homo sapien
acgcttaaatcgtgaagagacggaa

SEQ ID NO: 5993855 - DNA, 25 bp, Homo sapien
gtaaggcaagataagcattctaata

SEQ ID NO: 5993856 - DNA, 25 bp, Homo sapien
ttcgatgtaaggcaagataagcatt

SEQ ID NO: 5993857 - DNA, 25 bp, Homo sapien
ttaaatcgtgaagagacggaagatg

SEQ ID NO: 5993858 - DNA, 25 bp, Homo sapien
aattattagattctctagaacactc

SEQ ID NO: 5993859 - DNA, 25 bp, Homo sapien
cggttgacatcaaaggacaaatcca

SEQ ID NO: 5993860 - DNA, 25 bp, Homo sapien
agaacactcgcacagagtcgacctt

SEQ ID NO: 5993861 - DNA, 25 bp, Homo sapien
aatctgcaaatgaattattagattc

SEQ ID NO: 5993862 - DNA, 25 bp, Homo sapien
atgaattgaacattccaaacgaaat

SEQ ID NO: 5993863 - DNA, 25 bp, Homo sapien
cattccaaacgaaatatcccggaat

SEQ ID NO: 5993864 - DNA, 25 bp, Homo sapien
aaatacacatatcatgacttggttt

SEQ ID NO: 5993865 - DNA, 25 bp, Homo sapien
gttattgaaggataaacggttgaca

SEQ ID NO: 5993866 - DNA, 25 bp, Homo sapien
accactacaaccgctgataaagaga

SEQ ID NO: 5993867 - DNA, 25 bp, Homo sapien
gaccctagtgtagacaaattgtatg

SEQ ID NO: 5993868 - DNA, 25 bp, Homo sapien
gatctcaaatagggctttaatgcac

SEQ ID NO: 5993869 - DNA, 25 bp, Homo sapien
agtgtagacaaattgtatgaagata

SEQ ID NO: 5993870 - DNA, 25 bp, Homo sapien
gacggaagatgctctaaacaaaaga

SEQ ID NO: 5993871 - DNA, 25 bp, Homo sapien
atgtaaggcaagataagcattctaa

SEQ ID NO: 5993872 - DNA, 25 bp, Homo sapien
aatcgacgaattaaatacacatatc

SEQ ID NO: 5993873 - DNA, 25 bp, Homo sapien
aagacccaaattaaggataactgga

SEQ ID NO: 5993874 - DNA, 25 bp, Homo sapien
attattgaccctagtgtagacaaat

SEQ ID NO: 5993875 - DNA, 25 bp, Homo sapien
tatgaagatataccggaaggtattg

SEQ ID NO: 5993876 - DNA, 25 bp, Homo sapien
gtggaaaagttattgaaggataaac

SEQ ID NO: 5993877 - DNA, 25 bp, Homo sapien
cgatgctcctatcgaagatattata

SEQ ID NO: 5993878 - DNA, 25 bp, Homo sapien
ccaagctacaacgcttaaatcgtga

SEQ ID NO: 5993879 - DNA, 25 bp, Homo sapien
aatgaattattagattctctagaac

SEQ ID NO: 5993880 - DNA, 25 bp, Homo sapien
gataaaatagccaaagagaacgaat

SEQ ID NO: 5993881 - DNA, 25 bp, Homo sapien
cccaaattaaggataactggacgag

SEQ ID NO: 5993882 - DNA, 25 bp, Homo sapien
agccaaagagaacgaattcgatgta

SEQ ID NO: 5993883 - DNA, 25 bp, Homo sapien
gatgagaatgagatctctgattacg

SEQ ID NO: 5993884 - DNA, 25 bp, Homo sapien
gtggatgaattgaacattccaaacg

SEQ ID NO: 5993885 - DNA, 25 bp, Homo sapien
ctaatcccaatacaattattgaccc

SEQ ID NO: 5993886 - DNA, 25 bp, Homo sapien
caaattaaggataactggacgagct

SEQ ID NO: 5993887 - DNA, 25 bp, Homo sapien
aggtaaagggctacttagaggatga

SEQ ID NO: 5993888 - DNA, 25 bp, Homo sapien
tgcgtacctcttgaaaagactattg

SEQ ID NO: 5993889 - DNA, 25 bp, Homo sapien
aaagggctacttagaggatgagaat

SEQ ID NO: 5993890 - DNA, 25 bp, Homo sapien
attcgaagggttgcatgataaaata

SEQ ID NO: 5993891 - DNA, 25 bp, Homo sapien
tcaccagccaaaaaagaccagttca

SEQ ID NO: 5993892 - DNA, 25 bp, Homo sapien
ttgcaaatgtaagcgtacagccggg

SEQ ID NO: 5993893 - DNA, 25 bp, Homo sapien
agatctctgattacgagttggacga

SEQ ID NO: 5993894 - DNA, 25 bp, Homo sapien
aaggcaagataagcattctaataat

SEQ ID NO: 5993895 - DNA, 25 bp, Homo sapien
agcccatgcaggccaatcgacgaat

SEQ ID NO: 5993896 - DNA, 25 bp, Homo sapien
agtttgtgaagacccaaattaagga

SEQ ID NO: 5993897 - DNA, 25 bp, Homo sapien
aaaagagaaaattcagactgcccaa

SEQ ID NO: 5993898 - DNA, 25 bp, Homo sapien
ggcaaaaatttctctctaagtctgc

SEQ ID NO: 5993899 - DNA, 25 bp, Homo sapien
gattctctagaacactcgcacagag

SEQ ID NO: 5993900 - DNA, 25 bp, Homo sapien
acttggtttcaagaggttgtgaaat

SEQ ID NO: 5993901 - DNA, 25 bp, Homo sapien
agactattgtataaggcaaatgaaa

SEQ ID NO: 5993902 - DNA, 25 bp, Homo sapien
ggctacttagaggatgagaatgaga

SEQ ID NO: 5993903 - DNA, 25 bp, Homo sapien
agataagcattctaataatataagg

SEQ ID NO: 5993904 - DNA, 25 bp, Homo sapien
agaacgaattcgatgtaaggcaaga

SEQ ID NO: 5993905 - DNA, 25 bp, Homo sapien
ctctagatgtggatgaattgaacat

SEQ ID NO: 5993906 - DNA, 25 bp, Homo sapien
aactctagatgtggatgaattgaac

SEQ ID NO: 5993907 - DNA, 25 bp, Homo sapien
gaagatttcatacctgtggaaaagt

SEQ ID NO: 5993908 - DNA, 25 bp, Homo sapien
cagccaaaaaagaccagttcatact

SEQ ID NO: 5993909 - DNA, 25 bp, Homo sapien
aaagactattgtataaggcaaatga

SEQ ID NO: 5993910 - DNA, 25 bp, Homo sapien
tctgcaaatgaattattagattctc

SEQ ID NO: 5993911 - DNA, 25 bp, Homo sapien
ggataactggacgagctggcctaat

SEQ ID NO: 5993912 - DNA, 25 bp, Homo sapien
tcaggtaaagggctacttagaggat

SEQ ID NO: 5993913 - DNA, 25 bp, Homo sapien
gcatttatactctgcgtacctcttg

SEQ ID NO: 5993914 - DNA, 25 bp, Homo sapien
aacgaattcgatgtaaggcaagata

SEQ ID NO: 5993915 - DNA, 25 bp, Homo sapien
tatcccggaatatcttagttaaact

SEQ ID NO: 5993916 - DNA, 25 bp, Homo sapien
acgagctggcctaatcccaatacaa

SEQ ID NO: 5993917 - DNA, 25 bp, Homo sapien
gagtgatcttgacgaagaaagtcaa

SEQ ID NO: 5993918 - DNA, 25 bp, Homo sapien
agtatcaccagccaaaaaagaccag

SEQ ID NO: 5993919 - DNA, 25 bp, Homo sapien
actgcctcatagaactgcctaatgg

SEQ ID NO: 5993920 - DNA, 25 bp, Homo sapien
actggacagcttattcgaagggttg

SEQ ID NO: 5993921 - DNA, 25 bp, Homo sapien
caaaaaagaccagttcatacttaaa

SEQ ID NO: 5993922 - DNA, 25 bp, Homo sapien
gtaaaccagtttgtgaagacccaaa

SEQ ID NO: 5993923 - DNA, 25 bp, Homo sapien
aagagaaaattcagactgcccaaac

SEQ ID NO: 5993924 - DNA, 25 bp, Homo sapien
gcttattcgaagggttgcatgataa

SEQ ID NO: 5993925 - DNA, 25 bp, Homo sapien
actcagatcgatgctcctatcgaag

SEQ ID NO: 5993926 - DNA, 25 bp, Homo sapien
tacaattattgaccctagtgtagac

SEQ ID NO: 5993927 - DNA, 25 bp, Homo sapien
atcatgacttggtttcaagaggttg

SEQ ID NO: 5993928 - DNA, 25 bp, Homo sapien
attagattctctagaacactcgcac

SEQ ID NO: 5993929 - DNA, 25 bp, Homo sapien
ttatacgaggatctgagcttaccac

SEQ ID NO: 5993930 - DNA, 25 bp, Homo sapien
taagtctgccttggaccatgatgta

SEQ ID NO: 5993931 - DNA, 25 bp, Homo sapien
ctttcgttgcatttatactctgcgt

SEQ ID NO: 5993932 - DNA, 25 bp, Homo sapien
atgaaatcattagagctatataacg

SEQ ID NO: 5993933 - DNA, 25 bp, Homo sapien
cgttgcatttatactctgcgtacct

SEQ ID NO: 5993934 - DNA, 25 bp, Homo sapien
gacgactgcctcatagaactgccta

SEQ ID NO: 5993935 - DNA, 25 bp, Homo sapien
gaggatctgagcttaccactacaac

SEQ ID NO: 5993936 - DNA, 25 bp, Homo sapien
aacactcgcacagagtcgacctttc

SEQ ID NO: 5993937 - DNA, 25 bp, Homo sapien
tgatatgatgagggttgagctggat

SEQ ID NO: 5993938 - DNA, 25 bp, Homo sapien
atgctcctatcgaagatattatacg

SEQ ID NO: 5993939 - DNA, 25 bp, Homo sapien
caatggcaaaaatttctctctaagt

SEQ ID NO: 5993940 - DNA, 25 bp, Homo sapien
acgatatcccagaaaagtataaaaa

SEQ ID NO: 5993941 - DNA, 25 bp, Homo sapien
ttgaaggataaacggttgacatcaa

SEQ ID NO: 5993942 - DNA, 25 bp, Homo sapien
agagaacgaattcgatgtaaggcaa

SEQ ID NO: 5993943 - DNA, 25 bp, Homo sapien
atagacgacgagcccatgcaggcca

SEQ ID NO: 5993944 - DNA, 25 bp, Homo sapien
ttgaccctagtgtagacaaattgta

SEQ ID NO: 5993945 - DNA, 25 bp, Homo sapien
cgcctctgatatgatgagggttgag

SEQ ID NO: 5993946 - DNA, 25 bp, Homo sapien
catgacttggtttcaagaggttgtg

SEQ ID NO: 5993947 - DNA, 25 bp, Homo sapien
tgcaggccaatcgacgaattaaata

SEQ ID NO: 5993948 - DNA, 25 bp, Homo sapien
tgatgtaactctagatgtggatgaa

SEQ ID NO: 5993949 - DNA, 25 bp, Homo sapien
aaactggacagcttattcgaagggt

SEQ ID NO: 5993950 - DNA, 25 bp, Homo sapien
tataccggaaggtattgcaaatgta

SEQ ID NO: 5993951 - DNA, 25 bp, Homo sapien
gagctggatgctcaatggcaaaaat

SEQ ID NO: 5993952 - DNA, 25 bp, Homo sapien
gaattgaacattccaaacgaaatat

SEQ ID NO: 5993953 - DNA, 25 bp, Homo sapien
gatataccggaaggtattgcaaatg

SEQ ID NO: 5993954 - DNA, 25 bp, Homo sapien
agaactgcctaatgggaacatatga

SEQ ID NO: 5993955 - DNA, 25 bp, Homo sapien
ggttgtgaaatgaacgaggatatga

SEQ ID NO: 5993956 - DNA, 25 bp, Homo sapien
gtaagcgtacagccgggggagatct

SEQ ID NO: 5993957 - DNA, 25 bp, Homo sapien
aattctaaaaaagtatcaccagcca

SEQ ID NO: 5993958 - DNA, 25 bp, Homo sapien
atagggctttaatgcacgcctctga

SEQ ID NO: 5993959 - DNA, 25 bp, Homo sapien
acaagagaagatttcatacctgtgg

SEQ ID NO: 5993960 - DNA, 25 bp, Homo sapien
tgacatcaaaggacaaatccaagct

SEQ ID NO: 5993961 - DNA, 25 bp, Homo sapien
tttttatgaagtaaaccagtttgtg

SEQ ID NO: 5993962 - DNA, 25 bp, Homo sapien
aattaaggataactggacgagctgg

SEQ ID NO: 5993963 - DNA, 25 bp, Homo sapien
gccaaaaaagaccagttcatactta

SEQ ID NO: 5993964 - DNA, 25 bp, Homo sapien
gatatcccagaaaagtataaaaaga

SEQ ID NO: 5993965 - DNA, 25 bp, Homo sapien
tctaataatataagggcgaatcaga

SEQ ID NO: 5993966 - DNA, 25 bp, Homo sapien
catacctgtggaaaagttattgaag

SEQ ID NO: 5993967 - DNA, 25 bp, Homo sapien
tctcaaatagggctttaatgcacgc

SEQ ID NO: 5993968 - DNA, 25 bp, Homo sapien
acaaattgtatgaagatataccgga

SEQ ID NO: 5993969 - DNA, 25 bp, Homo sapien
atgatgagggttgagctggatgctc

SEQ ID NO: 5993970 - DNA, 25 bp, Homo sapien
gagatctcaaatagggctttaatgc

SEQ ID NO: 5993971 - DNA, 25 bp, Homo sapien
ctagatgtggatgaattgaacattc

SEQ ID NO: 5993972 - DNA, 25 bp, Homo sapien
ccgggggagatctcaaatagggctt

SEQ ID NO: 5993973 - DNA, 25 bp, Homo sapien
tgctcaatggcaaaaatttctctct

SEQ ID NO: 5993974 - DNA, 25 bp, Homo sapien
aatcccaatacaattattgacccta

SEQ ID NO: 5993975 - DNA, 25 bp, Homo sapien
agacaaattgtatgaagatataccg

SEQ ID NO: 5993976 - DNA, 25 bp, Homo sapien
aaggtattgcaaatgtaagcgtaca

SEQ ID NO: 5993977 - DNA, 25 bp, Homo sapien
acaaccgctgataaagagactttga

SEQ ID NO: 5993978 - DNA, 25 bp, Homo sapien
atagccaaagagaacgaattcgatg

SEQ ID NO: 5993979 - DNA, 25 bp, Homo sapien
tggatgctcaatggcaaaaatttct

SEQ ID NO: 5993980 - DNA, 25 bp, Homo sapien
gggagatctcaaatagggctttaat

SEQ ID NO: 5993981 - DNA, 25 bp, Homo sapien
tatataacgatatcccagaaaagta

SEQ ID NO: 5993982 - DNA, 25 bp, Homo sapien
ttgcatgataaaatagccaaagaga

SEQ ID NO: 5993983 - DNA, 25 bp, Homo sapien
tataacgatatcccagaaaagtata

SEQ ID NO: 5993984 - DNA, 25 bp, Homo sapien
atactctgcgtacctcttgaaaaga

SEQ ID NO: 5993985 - DNA, 25 bp, Homo sapien
ttgcatttatactctgcgtacctct

SEQ ID NO: 5993986 - DNA, 25 bp, Homo sapien
tcgacgaattaaatacacatatcat

SEQ ID NO: 5993987 - DNA, 25 bp, Homo sapien
agatttcatacctgtggaaaagtta

SEQ ID NO: 5993988 - DNA, 25 bp, Homo sapien
gggggagatctcaaatagggcttta

SEQ ID NO: 5993989 - DNA, 25 bp, Homo sapien
ggtttcaagaggttgtgaaatgaac

SEQ ID NO: 5993990 - DNA, 25 bp, Homo sapien
cacgcctctgatatgatgagggttg

SEQ ID NO: 5993991 - DNA, 25 bp, Homo sapien
ttgaaaagactattgtataaggcaa

SEQ ID NO: 5993992 - DNA, 25 bp, Homo sapien
caaaaatttctctctaagtctgcct

SEQ ID NO: 5993993 - DNA, 25 bp, Homo sapien
tctgcgtacctcttgaaaagactat

SEQ ID NO: 5993994 - DNA, 25 bp, Homo sapien
atcgatgctcctatcgaagatatta

SEQ ID NO: 5993995 - DNA, 25 bp, Homo sapien
caaaggacaaatccaagctacaacg

SEQ ID NO: 5993996 - DNA, 25 bp, Homo sapien
gacgagcccatgcaggccaatcgac

SEQ ID NO: 5993997 - DNA, 25 bp, Homo sapien
ataatataagggcgaatcagataga

SEQ ID NO: 5993998 - DNA, 25 bp, Homo sapien
ctttaatgcacgcctctgatatgat

SEQ ID NO: 5993999 - DNA, 25 bp, Homo sapien
aagaggttgtgaaatgaacgaggat

SEQ ID NO: 5994000 - DNA, 25 bp, Homo sapien
agtaaaacaagagaagatttcatac

SEQ ID NO: 5994001 - DNA, 25 bp, Homo sapien
ctacaaccgctgataaagagacttt

SEQ ID NO: 5994002 - DNA, 25 bp, Homo sapien
aatcagatagacgacgagcccatgc

SEQ ID NO: 5994003 - DNA, 25 bp, Homo sapien
catgatgtaactctagatgtggatg

SEQ ID NO: 5994004 - DNA, 25 bp, Homo sapien
tattatacgaggatctgagcttacc

SEQ ID NO: 5994005 - DNA, 25 bp, Homo sapien
ataagcattctaataatataagggc

SEQ ID NO: 5994006 - DNA, 25 bp, Homo sapien
ggttgagctggatgctcaatggcaa

SEQ ID NO: 5994007 - DNA, 25 bp, Homo sapien
cgcacagagtcgacctttcgttgca

SEQ ID NO: 5994008 - DNA, 25 bp, Homo sapien
gttggacgactgcctcatagaactg

SEQ ID NO: 5994009 - DNA, 25 bp, Homo sapien
tatgaagtaaaccagtttgtgaaga

SEQ ID NO: 5994010 - DNA, 25 bp, Homo sapien
gctacaacgcttaaatcgtgaagag

SEQ ID NO: 5994011 - DNA, 25 bp, Homo sapien
acgagttggacgactgcctcataga

SEQ ID NO: 5994012 - DNA, 25 bp, Homo sapien
agggttgcatgataaaatagccaaa

SEQ ID NO: 5994013 - DNA, 25 bp, Homo sapien
ggcaagataagcattctaataatat

SEQ ID NO: 5994014 - DNA, 25 bp, Homo sapien
aaatgtaagcgtacagccgggggag

SEQ ID NO: 5994015 - DNA, 25 bp, Homo sapien
attagagctatataacgatatccca

SEQ ID NO: 5994016 - DNA, 25 bp, Homo sapien
acggatatctacatgaaatcattag

SEQ ID NO: 5994017 - DNA, 25 bp, Homo sapien
ctgagcttaccactacaaccgctga

SEQ ID NO: 5994018 - DNA, 25 bp, Homo sapien
ccaatacaattattgaccctagtgt

SEQ ID NO: 5994019 - DNA, 25 bp, Homo sapien
aggataaacggttgacatcaaagga

SEQ ID NO: 5994020 - DNA, 25 bp, Homo sapien
aggatgagaatgagatctctgatta

SEQ ID NO: 5994021 - DNA, 25 bp, Homo sapien
gctggatgctcaatggcaaaaattt

SEQ ID NO: 5994022 - DNA, 25 bp, Homo sapien
tgcccaaacaaattctaaaaaagta

SEQ ID NO: 5994023 - DNA, 25 bp, Homo sapien
cagagtcgacctttcgttgcattta

SEQ ID NO: 5994024 - DNA, 25 bp, Homo sapien
aacgaggatatgacggatatctaca

SEQ ID NO: 5994025 - DNA, 25 bp, Homo sapien
tgcacgcctctgatatgatgagggt

SEQ ID NO: 5994026 - DNA, 25 bp, Homo sapien
tgaacattccaaacgaaatatcccg

SEQ ID NO: 5994027 - DNA, 25 bp, Homo sapien
ggaatatcttagttaaactggacag

SEQ ID NO: 5994028 - DNA, 25 bp, Homo sapien
aaggacaaatccaagctacaacgct

SEQ ID NO: 5994029 - DNA, 25 bp, Homo sapien
acatatcatgacttggtttcaagag

SEQ ID NO: 5994030 - DNA, 25 bp, Homo sapien
tctgccttggaccatgatgtaactc

SEQ ID NO: 5994031 - DNA, 25 bp, Homo sapien
tcagatagacgacgagcccatgcag

SEQ ID NO: 5994032 - DNA, 25 bp, Homo sapien
ctacttagaggatgagaatgagatc

SEQ ID NO: 5994033 - DNA, 25 bp, Homo sapien
tattgcaaatgtaagcgtacagccg

SEQ ID NO: 5994034 - DNA, 25 bp, Homo sapien
cactacaaccgctgataaagagact

SEQ ID NO: 5994035 - DNA, 25 bp, Homo sapien
attgtatgaagatataccggaaggt

SEQ ID NO: 5994036 - DNA, 25 bp, Homo sapien
gcgtacagccgggggagatctcaaa

SEQ ID NO: 5994037 - DNA, 25 bp, Homo sapien
tgataaagagactttgaaatctgca

SEQ ID NO: 5994038 - DNA, 25 bp, Homo sapien
ttcatacctgtggaaaagttattga

SEQ ID NO: 5994039 - DNA, 25 bp, Homo sapien
gaaggataaacggttgacatcaaag

SEQ ID NO: 5994040 - DNA, 25 bp, Homo sapien
gctgataaagagactttgaaatctg

SEQ ID NO: 5994041 - DNA, 25 bp, Homo sapien
aatacaattattgaccctagtgtag

SEQ ID NO: 5994042 - DNA, 25 bp, Homo sapien
ttagttaaactggacagcttattcg

SEQ ID NO: 5994043 - DNA, 25 bp, Homo sapien
acatgaaatcattagagctatataa

SEQ ID NO: 5994044 - DNA, 25 bp, Homo sapien
tgccttggaccatgatgtaactcta

SEQ ID NO: 5994045 - DNA, 25 bp, Homo sapien
ctcaatggcaaaaatttctctctaa

SEQ ID NO: 5994046 - DNA, 25 bp, Homo sapien
agatagacgacgagcccatgcaggc

SEQ ID NO: 5994047 - DNA, 25 bp, Homo sapien
tggcctaatcccaatacaattattg

SEQ ID NO: 5994048 - DNA, 25 bp, Homo sapien
ctatcgaagatattatacgaggatc

SEQ ID NO: 5994049 - DNA, 25 bp, Homo sapien
gcattctaataatataagggcgaat

SEQ ID NO: 5994050 - DNA, 25 bp, Homo sapien
ccggaatatcttagttaaactggac

SEQ ID NO: 5994051 - DNA, 25 bp, Homo sapien
caaatgaattattagattctctaga

SEQ ID NO: 5994052 - DNA, 25 bp, Homo sapien
atcgtgaagagacggaagatgctct

SEQ ID NO: 5994053 - DNA, 25 bp, Homo sapien
tttcaagaggttgtgaaatgaacga

SEQ ID NO: 5994054 - DNA, 25 bp, Homo sapien
ctagaacactcgcacagagtcgacc

SEQ ID NO: 5994055 - DNA, 25 bp, Homo sapien
gaggttgtgaaatgaacgaggatat

SEQ ID NO: 5994056 - DNA, 25 bp, Homo sapien
gttgacatcaaaggacaaatccaag

SEQ ID NO: 5994057 - DNA, 25 bp, Homo sapien
ggaccatgatgtaactctagatgtg

SEQ ID NO: 5994058 - DNA, 25 bp, Homo sapien
gacagcttattcgaagggttgcatg

SEQ ID NO: 5994059 - DNA, 25 bp, Homo sapien
agggttgagctggatgctcaatggc

SEQ ID NO: 5994060 - DNA, 25 bp, Homo sapien
ccagtttgtgaagacccaaattaag

SEQ ID NO: 5994061 - DNA, 25 bp, Homo sapien
gagctatataacgatatcccagaaa

SEQ ID NO: 5994062 - DNA, 25 bp, Homo sapien
tcttgaaaagactattgtataaggc

SEQ ID NO: 5994063 - DNA, 25 bp, Homo sapien
ccaatcgacgaattaaatacacata

SEQ ID NO: 5994064 - DNA, 25 bp, Homo sapien
atatctacatgaaatcattagagct

SEQ ID NO: 5994065 - DNA, 25 bp, Homo sapien
cccatgcaggccaatcgacgaatta

SEQ ID NO: 5994066 - DNA, 25 bp, Homo sapien
atttcatacctgtggaaaagttatt

SEQ ID NO: 5994067 - DNA, 25 bp, Homo sapien
atatgatgagggttgagctggatgc

SEQ ID NO: 5994068 - DNA, 25 bp, Homo sapien
aaacaagagaagatttcatacctgt

SEQ ID NO: 5994069 - DNA, 25 bp, Homo sapien
tattgaaggataaacggttgacatc

SEQ ID NO: 5994070 - DNA, 25 bp, Homo sapien
atctctgattacgagttggacgact

SEQ ID NO: 5994071 - DNA, 25 bp, Homo sapien
ctggacgagctggcctaatcccaat

SEQ ID NO: 5994072 - DNA, 25 bp, Homo sapien
gcatgataaaatagccaaagagaac

SEQ ID NO: 5994073 - DNA, 25 bp, Homo sapien
aaaatttctctctaagtctgccttg

SEQ ID NO: 5994074 - DNA, 25 bp, Homo sapien
gaagggttgcatgataaaatagcca

SEQ ID NO: 5994075 - DNA, 25 bp, Homo sapien
agttcatacttaaaggagctattaa

SEQ ID NO: 5994076 - DNA, 25 bp, Homo sapien
ttacgagttggacgactgcctcata

SEQ ID NO: 5994077 - DNA, 25 bp, Homo sapien
tcaaattgaaactcagatcgatgct

SEQ ID NO: 5994078 - DNA, 25 bp, Homo sapien
aaagagactttgaaatctgcaaatg

SEQ ID NO: 5994079 - DNA, 25 bp, Homo sapien
ctagtgtagacaaattgtatgaaga

SEQ ID NO: 5994080 - DNA, 25 bp, Homo sapien
ttggaccatgatgtaactctagatg

SEQ ID NO: 5994081 - DNA, 25 bp, Homo sapien
tgagatctctgattacgagttggac

SEQ ID NO: 5994082 - DNA, 25 bp, Homo sapien
gagcttaccactacaaccgctgata

SEQ ID NO: 5994083 - DNA, 25 bp, Homo sapien
attgaaactcagatcgatgctccta

SEQ ID NO: 5994084 - DNA, 25 bp, Homo sapien
agaggatgagaatgagatctctgat

SEQ ID NO: 5994085 - DNA, 25 bp, Homo sapien
tgaagacccaaattaaggataactg

SEQ ID NO: 5994086 - DNA, 25 bp, Homo sapien
acagccgggggagatctcaaatagg

SEQ ID NO: 5994087 - DNA, 25 bp, Homo sapien
gattacgagttggacgactgcctca

SEQ ID NO: 5994088 - DNA, 25 bp, Homo sapien
catttttatgaagtaaaccagtttg

SEQ ID NO: 5994089 - DNA, 25 bp, Homo sapien
tgaacgaggatatgacggatatcta

SEQ ID NO: 5994090 - DNA, 25 bp, Homo sapien
tataaaaagagaaaattcagactgc

SEQ ID NO: 5994091 - DNA, 25 bp, Homo sapien
aaatcgtgaagagacggaagatgct

SEQ ID NO: 5994092 - DNA, 25 bp, Homo sapien
agggcgaatcagatagacgacgagc

SEQ ID NO: 5994093 - DNA, 25 bp, Homo sapien
gagttggacgactgcctcatagaac

SEQ ID NO: 5994094 - DNA, 25 bp, Homo sapien
cgaatcagatagacgacgagcccat

SEQ ID NO: 5994095 - DNA, 25 bp, Homo sapien
atctacatgaaatcattagagctat

SEQ ID NO: 5994096 - DNA, 25 bp, Homo sapien
cggaagatgctctaaacaaaagaac

SEQ ID NO: 5994097 - DNA, 25 bp, Homo sapien
ggacgagctggcctaatcccaatac

SEQ ID NO: 5994098 - DNA, 25 bp, Homo sapien
tgaagagacggaagatgctctaaac

SEQ ID NO: 5994099 - DNA, 25 bp, Homo sapien
atccaagctacaacgcttaaatcgt

SEQ ID NO: 5994100 - DNA, 25 bp, Homo sapien
ggatgaattgaacattccaaacgaa

SEQ ID NO: 5994101 - DNA, 25 bp, Homo sapien
gtacagccgggggagatctcaaata

SEQ ID NO: 5994102 - DNA, 25 bp, Homo sapien
agggctttaatgcacgcctctgata

SEQ ID NO: 5994103 - DNA, 25 bp, Homo sapien
atacgaggatctgagcttaccacta

SEQ ID NO: 5994104 - DNA, 25 bp, Homo sapien
gaccagttcatacttaaaggagcta

SEQ ID NO: 5994105 - DNA, 25 bp, Homo sapien
gataaacggttgacatcaaaggaca

SEQ ID NO: 5994106 - DNA, 25 bp, Homo sapien
gaaaagactattgtataaggcaaat

SEQ ID NO: 5994107 - DNA, 25 bp, Homo sapien
tgacgaagaaagtcaaattgaaact

SEQ ID NO: 5994108 - DNA, 25 bp, Homo sapien
ctaaaaaagtatcaccagccaaaaa

SEQ ID NO: 5994109 - DNA, 25 bp, Homo sapien
aagctacaacgcttaaatcgtgaag

SEQ ID NO: 5994110 - DNA, 25 bp, Homo sapien
aagaccagttcatacttaaaggagc

SEQ ID NO: 5994111 - DNA, 25 bp, Homo sapien
cgacctttcgttgcatttatactct

SEQ ID NO: 5994112 - DNA, 25 bp, Homo sapien
agccgggggagatctcaaatagggc

SEQ ID NO: 5994113 - DNA, 25 bp, Homo sapien
tcatagaactgcctaatgggaacat

SEQ ID NO: 5994114 - DNA, 25 bp, Homo sapien
aaattcagactgcccaaacaaattc

SEQ ID NO: 5994115 - DNA, 25 bp, Homo sapien
actctgcgtacctcttgaaaagact

SEQ ID NO: 5994116 - DNA, 25 bp, Homo sapien
ctgattacgagttggacgactgcct

SEQ ID NO: 5994117 - DNA, 25 bp, Homo sapien
aatatcccggaatatcttagttaaa

SEQ ID NO: 5994118 - DNA, 25 bp, Homo sapien
ttattcgaagggttgcatgataaaa

SEQ ID NO: 5994119 - DNA, 25 bp, Homo sapien
tcttagttaaactggacagcttatt

SEQ ID NO: 5994120 - DNA, 25 bp, Homo sapien
acatcaaaggacaaatccaagctac

SEQ ID NO: 5994121 - DNA, 25 bp, Homo sapien
ctacatgaaatcattagagctatat

SEQ ID NO: 5994122 - DNA, 25 bp, Homo sapien
ttgtgaaatgaacgaggatatgacg

SEQ ID NO: 5994123 - DNA, 25 bp, Homo sapien
ctcgcacagagtcgacctttcgttg

SEQ ID NO: 5994124 - DNA, 25 bp, Homo sapien
ataactggacgagctggcctaatcc

SEQ ID NO: 5994125 - DNA, 25 bp, Homo sapien
ccggaaggtattgcaaatgtaagcg

SEQ ID NO: 5994126 - DNA, 25 bp, Homo sapien
ccaaagagaacgaattcgatgtaag

SEQ ID NO: 5994127 - DNA, 25 bp, Homo sapien
gatattatacgaggatctgagctta

SEQ ID NO: 5994128 - DNA, 25 bp, Homo sapien
ggaaggtattgcaaatgtaagcgta

SEQ ID NO: 5994129 - DNA, 25 bp, Homo sapien
tgaagtaaaccagtttgtgaagacc

SEQ ID NO: 5994130 - DNA, 25 bp, Homo sapien
ggtattgcaaatgtaagcgtacagc

SEQ ID NO: 5994131 - DNA, 25 bp, Homo sapien
tcaaatagggctttaatgcacgcct

SEQ ID NO: 5994132 - DNA, 25 bp, Homo sapien
aaattgtatgaagatataccggaag

SEQ ID NO: 5994133 - DNA, 25 bp, Homo sapien
ctctgattacgagttggacgactgc

SEQ ID NO: 5994134 - DNA, 25 bp, Homo sapien
tcagatcgatgctcctatcgaagat

SEQ ID NO: 5994135 - DNA, 25 bp, Homo sapien
tgcaaatgaattattagattctcta

SEQ ID NO: 5994136 - DNA, 25 bp, Homo sapien
tattgaccctagtgtagacaaattg

SEQ ID NO: 5994137 - DNA, 25 bp, Homo sapien
gagaaaattcagactgcccaaacaa

SEQ ID NO: 5994138 - DNA, 25 bp, Homo sapien
tatcccagaaaagtataaaaagaga

SEQ ID NO: 5994139 - DNA, 25 bp, Homo sapien
gcttaccactacaaccgctgataaa

SEQ ID NO: 5994140 - DNA, 25 bp, Homo sapien
ttcatacttaaaggagctattaagt

SEQ ID NO: 5994141 - DNA, 25 bp, Homo sapien
ttattagattctctagaacactcgc

SEQ ID NO: 5994142 - DNA, 25 bp, Homo sapien
aggagctattaagtaaaacaagaga

SEQ ID NO: 5994143 - DNA, 25 bp, Homo sapien
agtctgccttggaccatgatgtaac

SEQ ID NO: 5994144 - DNA, 25 bp, Homo sapien
atgagtgatcttgacgaagaaagtc

SEQ ID NO: 5994145 - DNA, 25 bp, Homo sapien
cgatgtaaggcaagataagcattct

SEQ ID NO: 5994146 - DNA, 25 bp, Homo sapien
tagattctctagaacactcgcacag

SEQ ID NO: 5994147 - DNA, 25 bp, Homo sapien
accatgatgtaactctagatgtgga

SEQ ID NO: 5994148 - DNA, 25 bp, Homo sapien
tagagctatataacgatatcccaga

SEQ ID NO: 5994149 - DNA, 25 bp, Homo sapien
agacgacgagcccatgcaggccaat

SEQ ID NO: 5994150 - DNA, 25 bp, Homo sapien
atgtggatgaattgaacattccaaa

SEQ ID NO: 5994151 - DNA, 25 bp, Homo sapien
tgaattattagattctctagaacac

SEQ ID NO: 5994152 - DNA, 25 bp, Homo sapien
gtaactctagatgtggatgaattga

SEQ ID NO: 5994153 - DNA, 25 bp, Homo sapien
caattattgaccctagtgtagacaa

SEQ ID NO: 5994154 - DNA, 25 bp, Homo sapien
aaatagccaaagagaacgaattcga

SEQ ID NO: 5994155 - DNA, 25 bp, Homo sapien
ttggtttcaagaggttgtgaaatga

SEQ ID NO: 5994156 - DNA, 25 bp, Homo sapien
ccttggaccatgatgtaactctaga

SEQ ID NO: 5994157 - DNA, 25 bp, Homo sapien
aacggttgacatcaaaggacaaatc

SEQ ID NO: 5994158 - DNA, 25 bp, Homo sapien
aacattccaaacgaaatatcccgga

SEQ ID NO: 5994159 - DNA, 25 bp, Homo sapien
acaaatccaagctacaacgcttaaa

SEQ ID NO: 5994160 - DNA, 25 bp, Homo sapien
taagtaaaacaagagaagatttcat

SEQ ID NO: 5994161 - DNA, 25 bp, Homo sapien
ttaaatacacatatcatgacttggt

SEQ ID NO: 5994162 - DNA, 25 bp, Homo sapien
tttctctctaagtctgccttggacc

SEQ ID NO: 5994163 - DNA, 25 bp, Homo sapien
gatgagggttgagctggatgctcaa

SEQ ID NO: 5994164 - DNA, 25 bp, Homo sapien
ttaaaggagctattaagtaaaacaa

SEQ ID NO: 5994165 - DNA, 25 bp, Homo sapien
taaaatagccaaagagaacgaattc

SEQ ID NO: 5994166 - DNA, 25 bp, Homo sapien
agtcaaattgaaactcagatcgatg

SEQ ID NO: 5994167 - DNA, 25 bp, Homo sapien
ttagaggatgagaatgagatctctg

SEQ ID NO: 5994168 - DNA, 25 bp, Homo sapien
gagtcgacctttcgttgcatttata

SEQ ID NO: 5994169 - DNA, 25 bp, Homo sapien
ttctctagaacactcgcacagagtc

SEQ ID NO: 5994170 - DNA, 25 bp, Homo sapien
acgacgagcccatgcaggccaatcg

SEQ ID NO: 5994171 - DNA, 25 bp, Homo sapien
atatcatgacttggtttcaagaggt

SEQ ID NO: 5994172 - DNA, 25 bp, Homo sapien
tcctatcgaagatattatacgagga

SEQ ID NO: 5994173 - DNA, 25 bp, Homo sapien
aatgaacgaggatatgacggatatc

SEQ ID NO: 5994174 - DNA, 25 bp, Homo sapien
tctgatatgatgagggttgagctgg

SEQ ID NO: 5994175 - DNA, 25 bp, Homo sapien
caacgcttaaatcgtgaagagacgg

SEQ ID NO: 5994176 - DNA, 25 bp, Homo sapien
atagaactgcctaatgggaacatat

SEQ ID NO: 5994177 - DNA, 25 bp, Homo sapien
tgaagatataccggaaggtattgca

SEQ ID NO: 5994178 - DNA, 25 bp, Homo sapien
aatttctctctaagtctgccttgga

SEQ ID NO: 5994179 - DNA, 25 bp, Homo sapien
tggacagcttattcgaagggttgca

SEQ ID NO: 5994180 - DNA, 25 bp, Homo sapien
aattaaatacacatatcatgacttg

SEQ ID NO: 5994181 - DNA, 25 bp, Homo sapien
gtcgacctttcgttgcatttatact

SEQ ID NO: 5994182 - DNA, 25 bp, Homo sapien
gaagatgctctaaacaaaagaacat

SEQ ID NO: 5994183 - DNA, 25 bp, Homo sapien
tcccaatacaattattgaccctagt

SEQ ID NO: 5994184 - DNA, 25 bp, Homo sapien
tataagggcgaatcagatagacgac

SEQ ID NO: 5994185 - DNA, 25 bp, Homo sapien
tatcaccagccaaaaaagaccagtt

SEQ ID NO: 5994186 - DNA, 25 bp, Homo sapien
gaaatatcccggaatatcttagtta

SEQ ID NO: 5994187 - DNA, 25 bp, Homo sapien
cagcttattcgaagggttgcatgat

SEQ ID NO: 5994188 - DNA, 25 bp, Homo sapien
aactggacgagctggcctaatccca

SEQ ID NO: 5994189 - DNA, 25 bp, Homo sapien
cgaggatatgacggatatctacatg

SEQ ID NO: 5994190 - DNA, 25 bp, Homo sapien
ataaagagactttgaaatctgcaaa

SEQ ID NO: 5994191 - DNA, 25 bp, Homo sapien
tttgaaatctgcaaatgaattatta

SEQ ID NO: 5994192 - DNA, 25 bp, Homo sapien
gtagacaaattgtatgaagatatac

SEQ ID NO: 5994193 - DNA, 25 bp, Homo sapien
gctggcctaatcccaatacaattat

SEQ ID NO: 5994194 - DNA, 25 bp, Homo sapien
cacagagtcgacctttcgttgcatt

SEQ ID NO: 5994195 - DNA, 25 bp, Homo sapien
ttaaggataactggacgagctggcc

SEQ ID NO: 5994196 - DNA, 25 bp, Homo sapien
attgaacattccaaacgaaatatcc

SEQ ID NO: 5994197 - DNA, 25 bp, Homo sapien
agatcgatgctcctatcgaagatat

SEQ ID NO: 5994198 - DNA, 25 bp, Homo sapien
tgagggttgagctggatgctcaatg

SEQ ID NO: 5994199 - DNA, 25 bp, Homo sapien
tcgaagggttgcatgataaaatagc

SEQ ID NO: 5994200 - DNA, 25 bp, Homo sapien
acgaaatatcccggaatatcttagt

SEQ ID NO: 5994201 - DNA, 25 bp, Homo sapien
gacgaattaaatacacatatcatga

SEQ ID NO: 5994202 - DNA, 25 bp, Homo sapien
gatgctcaatggcaaaaatttctct

SEQ ID NO: 5994203 - DNA, 25 bp, Homo sapien
ttatactctgcgtacctcttgaaaa

SEQ ID NO: 5994204 - DNA, 25 bp, Homo sapien
agagactttgaaatctgcaaatgaa

SEQ ID NO: 5994205 - DNA, 25 bp, Homo sapien
taaacggttgacatcaaaggacaaa

SEQ ID NO: 5994206 - DNA, 25 bp, Homo sapien
acctttcgttgcatttatactctgc

SEQ ID NO: 5994207 - DNA, 25 bp, Homo sapien
gagacggaagatgctctaaacaaaa

SEQ ID NO: 5994208 - DNA, 25 bp, Homo sapien
ggatatctacatgaaatcattagag

SEQ ID NO: 5994209 - DNA, 25 bp, Homo sapien
aagtaaaccagtttgtgaagaccca

SEQ ID NO: 5994210 - DNA, 25 bp, Homo sapien
tatcttagttaaactggacagctta

SEQ ID NO: 5994211 - DNA, 25 bp, Homo sapien
ttaccactacaaccgctgataaaga

SEQ ID NO: 5994212 - DNA, 25 bp, Homo sapien
aagatataccggaaggtattgcaaa

SEQ ID NO: 5994213 - DNA, 25 bp, Homo sapien
aaccagtttgtgaagacccaaatta

SEQ ID NO: 5994214 - DNA, 25 bp, Homo sapien
gacccaaattaaggataactggacg

SEQ ID NO: 5994215 - DNA, 25 bp, Homo sapien
gaaatgaacgaggatatgacggata

SEQ ID NO: 5994216 - DNA, 25 bp, Homo sapien
cgtgaagagacggaagatgctctaa

SEQ ID NO: 5994217 - DNA, 25 bp, Homo sapien
tcccggaatatcttagttaaactgg

SEQ ID NO: 5994218 - DNA, 25 bp, Homo sapien
cgagcccatgcaggccaatcgacga

SEQ ID NO: 5994219 - DNA, 25 bp, Homo sapien
aatgcacgcctctgatatgatgagg

SEQ ID NO: 5994220 - DNA, 25 bp, Homo sapien
ccaaacgaaatatcccggaatatct

SEQ ID NO: 5994221 - DNA, 25 bp, Homo sapien
aaagagaacgaattcgatgtaaggc

SEQ ID NO: 5994222 - DNA, 25 bp, Homo sapien
aaagtcaaattgaaactcagatcga

SEQ ID NO: 5994223 - DNA, 25 bp, Homo sapien
agaatgagatctctgattacgagtt

SEQ ID NO: 5994224 - DNA, 25 bp, Homo sapien
gctctaaacaaaagaacattttttc

SEQ ID NO: 5994225 - DNA, 25 bp, Homo sapien
aatgagatctctgattacgagttgg

SEQ ID NO: 5994226 - DNA, 25 bp, Homo sapien
gaagaaagtcaaattgaaactcaga

SEQ ID NO: 5994227 - DNA, 25 bp, Homo sapien
ttccaaacgaaatatcccggaatat

SEQ ID NO: 5994228 - DNA, 25 bp, Homo sapien
agactgcccaaacaaattctaaaaa

SEQ ID NO: 5994229 - DNA, 25 bp, Homo sapien
taagggcgaatcagatagacgacga

SEQ ID NO: 5994230 - DNA, 25 bp, Homo sapien
agactttgaaatctgcaaatgaatt

SEQ ID NO: 5994231 - DNA, 25 bp, Homo sapien
atgtaagcgtacagccgggggagat

SEQ ID NO: 5994232 - DNA, 25 bp, Homo sapien
agttaaactggacagcttattcgaa

SEQ ID NO: 5994233 - DNA, 25 bp, Homo sapien
agggctacttagaggatgagaatga

SEQ ID NO: 5994234 - DNA, 25 bp, Homo sapien
catgcaggccaatcgacgaattaaa

SEQ ID NO: 5994235 - DNA, 25 bp, Homo sapien
agatgctctaaacaaaagaacattt

SEQ ID NO: 5994236 - DNA, 25 bp, Homo sapien
tacctcttgaaaagactattgtata

SEQ ID NO: 5994237 - DNA, 25 bp, Homo sapien
caggccaatcgacgaattaaataca

SEQ ID NO: 5994238 - DNA, 25 bp, Homo sapien
aatcattagagctatataacgatat

SEQ ID NO: 5994239 - DNA, 25 bp, Homo sapien
taccggaaggtattgcaaatgtaag

SEQ ID NO: 5994240 - DNA, 25 bp, Homo sapien
gcttaaatcgtgaagagacggaaga

SEQ ID NO: 5994241 - DNA, 25 bp, Homo sapien
tctctaagtctgccttggaccatga

SEQ ID NO: 5994242 - DNA, 25 bp, Homo sapien
cgaattcgatgtaaggcaagataag

SEQ ID NO: 5994243 - DNA, 25 bp, Homo sapien
aagcgtacagccgggggagatctca

SEQ ID NO: 5994244 - DNA, 25 bp, Homo sapien
aaattgaaactcagatcgatgctcc

SEQ ID NO: 5994245 - DNA, 25 bp, Homo sapien
tcagactgcccaaacaaattctaaa

SEQ ID NO: 5994246 - DNA, 25 bp, Homo sapien
aatataagggcgaatcagatagacg

SEQ ID NO: 5994247 - DNA, 25 bp, Homo sapien
atgctctaaacaaaagaacattttt

SEQ ID NO: 5994248 - DNA, 25 bp, Homo sapien
acttagaggatgagaatgagatctc

SEQ ID NO: 5994249 - DNA, 25 bp, Homo sapien
cctcatagaactgcctaatgggaac

SEQ ID NO: 5994250 - DNA, 25 bp, Homo sapien
gctatataacgatatcccagaaaag

SEQ ID NO: 5994251 - DNA, 25 bp, Homo sapien
ttctaaaaaagtatcaccagccaaa

SEQ ID NO: 5994252 - DNA, 25 bp, Homo sapien
aagatattatacgaggatctgagct

SEQ ID NO: 5994253 - DNA, 25 bp, Homo sapien
tggacgactgcctcatagaactgcc

SEQ ID NO: 5994254 - DNA, 25 bp, Homo sapien
tttatgaagtaaaccagtttgtgaa

SEQ ID NO: 5994255 - DNA, 25 bp, Homo sapien
aatatcttagttaaactggacagct

SEQ ID NO: 5994256 - DNA, 25 bp, Homo sapien
caagataagcattctaataatataa

SEQ ID NO: 5994257 - DNA, 25 bp, Homo sapien
aagagaagatttcatacctgtggaa

SEQ ID NO: 5994258 - DNA, 25 bp, Homo sapien
cgaagatattatacgaggatctgag

SEQ ID NO: 5994259 - DNA, 25 bp, Homo sapien
acgaggatctgagcttaccactaca

SEQ ID NO: 5994260 - DNA, 25 bp, Homo sapien
ttcgttgcatttatactctgcgtac

SEQ ID NO: 5994261 - DNA, 25 bp, Homo sapien
ttaatgcacgcctctgatatgatga

SEQ ID NO: 5994262 - DNA, 25 bp, Homo sapien
tcaagaggttgtgaaatgaacgagg

SEQ ID NO: 5994263 - DNA, 25 bp, Homo sapien
ttatatagctctaatgatttcatgt

SEQ ID NO: 5994264 - DNA, 25 bp, Homo sapien
tagagttacatcatggtccaaggca

SEQ ID NO: 5994265 - DNA, 25 bp, Homo sapien
tcatcctctaagtagccctttacct

SEQ ID NO: 5994266 - DNA, 25 bp, Homo sapien
tgtagtggtaagctcagatcctcgt

SEQ ID NO: 5994267 - DNA, 25 bp, Homo sapien
atttgtttgggcagtctgaattttc

SEQ ID NO: 5994268 - DNA, 25 bp, Homo sapien
ttgtagcttggatttgtcctttgat

SEQ ID NO: 5994269 - DNA, 25 bp, Homo sapien
tcttccgtctcttcacgatttaagc

SEQ ID NO: 5994270 - DNA, 25 bp, Homo sapien
tgcaataccttccggtatatcttca

SEQ ID NO: 5994271 - DNA, 25 bp, Homo sapien
gaaaggtcgactctgtgcgagtgtt

SEQ ID NO: 5994272 - DNA, 25 bp, Homo sapien
ttgggcagtctgaattttctctttt

SEQ ID NO: 5994273 - DNA, 25 bp, Homo sapien
atcctctaagtagccctttacctga

SEQ ID NO: 5994274 - DNA, 25 bp, Homo sapien
aaatgttcttttgtttagagcatct

SEQ ID NO: 5994275 - DNA, 25 bp, Homo sapien
cagatttcaaagtctctttatcagc

SEQ ID NO: 5994276 - DNA, 25 bp, Homo sapien
ctcagatcctcgtataatatcttcg

SEQ ID NO: 5994277 - DNA, 25 bp, Homo sapien
cttcacgatttaagcgttgtagctt

SEQ ID NO: 5994278 - DNA, 25 bp, Homo sapien
tctaagtagccctttacctgaaaaa

SEQ ID NO: 5994279 - DNA, 25 bp, Homo sapien
cgtaatcagagatctcattctcatc

SEQ ID NO: 5994280 - DNA, 25 bp, Homo sapien
tatacttttctgggatatcgttata

SEQ ID NO: 5994281 - DNA, 25 bp, Homo sapien
cttggatttgtcctttgatgtcaac

SEQ ID NO: 5994282 - DNA, 25 bp, Homo sapien
ttagagcatcttccgtctcttcacg

SEQ ID NO: 5994283 - DNA, 25 bp, Homo sapien
atattccgggatatttcgtttggaa

SEQ ID NO: 5994284 - DNA, 25 bp, Homo sapien
aaaccaagtcatgatatgtgtattt

SEQ ID NO: 5994285 - DNA, 25 bp, Homo sapien
gatgtcaaccgtttatccttcaata

SEQ ID NO: 5994286 - DNA, 25 bp, Homo sapien
atcatgcaacccttcgaataagctg

SEQ ID NO: 5994287 - DNA, 25 bp, Homo sapien
agcatcgatctgagtttcaatttga

SEQ ID NO: 5994288 - DNA, 25 bp, Homo sapien
atcagagatctcattctcatcctct

SEQ ID NO: 5994289 - DNA, 25 bp, Homo sapien
tttgcaataccttccggtatatctt

SEQ ID NO: 5994290 - DNA, 25 bp, Homo sapien
ctttgatgtcaaccgtttatccttc

SEQ ID NO: 5994291 - DNA, 25 bp, Homo sapien
atatttcgtttggaatgttcaattc

SEQ ID NO: 5994292 - DNA, 25 bp, Homo sapien
acttttccacaggtatgaaatcttc

SEQ ID NO: 5994293 - DNA, 25 bp, Homo sapien
agaggcgtgcattaaagccctattt

SEQ ID NO: 5994294 - DNA, 25 bp, Homo sapien
gttcccattaggcagttctatgagg

SEQ ID NO: 5994295 - DNA, 25 bp, Homo sapien
ttgtattgggattaggccagctcgt

SEQ ID NO: 5994296 - DNA, 25 bp, Homo sapien
tttttagaatttgtttgggcagtct

SEQ ID NO: 5994297 - DNA, 25 bp, Homo sapien
aataagctgtccagtttaactaaga

SEQ ID NO: 5994298 - DNA, 25 bp, Homo sapien
ggcagttctatgaggcagtcgtcca

SEQ ID NO: 5994299 - DNA, 25 bp, Homo sapien
cgaataagctgtccagtttaactaa

SEQ ID NO: 5994300 - DNA, 25 bp, Homo sapien
tgtgtatttaattcgtcgattggcc

SEQ ID NO: 5994301 - DNA, 25 bp, Homo sapien
gccttatacaatagtcttttcaaga

SEQ ID NO: 5994302 - DNA, 25 bp, Homo sapien
aatgcttatcttgccttacatcgaa

SEQ ID NO: 5994303 - DNA, 25 bp, Homo sapien
tgtcctttgatgtcaaccgtttatc

SEQ ID NO: 5994304 - DNA, 25 bp, Homo sapien
attctcatcctctaagtagcccttt

SEQ ID NO: 5994305 - DNA, 25 bp, Homo sapien
gtatgaaatcttctcttgttttact

SEQ ID NO: 5994306 - DNA, 25 bp, Homo sapien
tttatcagcggttgtagtggtaagc

SEQ ID NO: 5994307 - DNA, 25 bp, Homo sapien
catcttccgtctcttcacgatttaa

SEQ ID NO: 5994308 - DNA, 25 bp, Homo sapien
ataattcatttgcagatttcaaagt

SEQ ID NO: 5994309 - DNA, 25 bp, Homo sapien
ccacaggtatgaaatcttctcttgt

SEQ ID NO: 5994310 - DNA, 25 bp, Homo sapien
gatttgtcctttgatgtcaaccgtt

SEQ ID NO: 5994311 - DNA, 25 bp, Homo sapien
gttcttttgtttagagcatcttccg

SEQ ID NO: 5994312 - DNA, 25 bp, Homo sapien
ttcatacaatttgtctacactaggg

SEQ ID NO: 5994313 - DNA, 25 bp, Homo sapien
acctcttgaaaccaagtcatgatat

SEQ ID NO: 5994314 - DNA, 25 bp, Homo sapien
ttcacaaactggtttacttcataaa

SEQ ID NO: 5994315 - DNA, 25 bp, Homo sapien
tttatacttttctgggatatcgtta

SEQ ID NO: 5994316 - DNA, 25 bp, Homo sapien
tatccttcaataacttttccacagg

SEQ ID NO: 5994317 - DNA, 25 bp, Homo sapien
tataatatcttcgataggagcatcg

SEQ ID NO: 5994318 - DNA, 25 bp, Homo sapien
catgtagatatccgtcatatcctcg

SEQ ID NO: 5994319 - DNA, 25 bp, Homo sapien
cccggctgtacgcttacatttgcaa

SEQ ID NO: 5994320 - DNA, 25 bp, Homo sapien
aactggtcttttttggctggtgata

SEQ ID NO: 5994321 - DNA, 25 bp, Homo sapien
tatccttaatttgggtcttcacaaa

SEQ ID NO: 5994322 - DNA, 25 bp, Homo sapien
tcatttcacaacctcttgaaaccaa

SEQ ID NO: 5994323 - DNA, 25 bp, Homo sapien
gagaatctaataattcatttgcaga

SEQ ID NO: 5994324 - DNA, 25 bp, Homo sapien
ttaatagctcctttaagtatgaact

SEQ ID NO: 5994325 - DNA, 25 bp, Homo sapien
aattcatccacatctagagttacat

SEQ ID NO: 5994326 - DNA, 25 bp, Homo sapien
ttccacaggtatgaaatcttctctt

SEQ ID NO: 5994327 - DNA, 25 bp, Homo sapien
taaatgcaacgaaaggtcgactctg

SEQ ID NO: 5994328 - DNA, 25 bp, Homo sapien
tgcagatttcaaagtctctttatca

SEQ ID NO: 5994329 - DNA, 25 bp, Homo sapien
aaagtctctttatcagcggttgtag

SEQ ID NO: 5994330 - DNA, 25 bp, Homo sapien
gcatgggctcgtcgtctatctgatt

SEQ ID NO: 5994331 - DNA, 25 bp, Homo sapien
tcgtcgtctatctgattcgccctta

SEQ ID NO: 5994332 - DNA, 25 bp, Homo sapien
agtatgaactggtcttttttggctg

SEQ ID NO: 5994333 - DNA, 25 bp, Homo sapien
tcgactctgtgcgagtgttctagag

SEQ ID NO: 5994334 - DNA, 25 bp, Homo sapien
gaatttgtttgggcagtctgaattt

SEQ ID NO: 5994335 - DNA, 25 bp, Homo sapien
cggtatatcttcatacaatttgtct

SEQ ID NO: 5994336 - DNA, 25 bp, Homo sapien
tccagttatccttaatttgggtctt

SEQ ID NO: 5994337 - DNA, 25 bp, Homo sapien
gtggtaagctcagatcctcgtataa

SEQ ID NO: 5994338 - DNA, 25 bp, Homo sapien
cttttctgggatatcgttatatagc

SEQ ID NO: 5994339 - DNA, 25 bp, Homo sapien
tagctcctttaagtatgaactggtc

SEQ ID NO: 5994340 - DNA, 25 bp, Homo sapien
tagccctttacctgaaaaaatgttc

SEQ ID NO: 5994341 - DNA, 25 bp, Homo sapien
agaggtacgcagagtataaatgcaa

SEQ ID NO: 5994342 - DNA, 25 bp, Homo sapien
tcttttgtttagagcatcttccgtc

SEQ ID NO: 5994343 - DNA, 25 bp, Homo sapien
tacatttgcaataccttccggtata

SEQ ID NO: 5994344 - DNA, 25 bp, Homo sapien
gatctgagtttcaatttgactttct

SEQ ID NO: 5994345 - DNA, 25 bp, Homo sapien
tagggtcaataattgtattgggatt

SEQ ID NO: 5994346 - DNA, 25 bp, Homo sapien
tctgagtttcaatttgactttcttc

SEQ ID NO: 5994347 - DNA, 25 bp, Homo sapien
attaaagccctatttgagatctccc

SEQ ID NO: 5994348 - DNA, 25 bp, Homo sapien
ctaatgatttcatgtagatatccgt

SEQ ID NO: 5994349 - DNA, 25 bp, Homo sapien
tctgggatatcgttatatagctcta

SEQ ID NO: 5994350 - DNA, 25 bp, Homo sapien
gttctatgaggcagtcgtccaactc

SEQ ID NO: 5994351 - DNA, 25 bp, Homo sapien
tgggatatcgttatatagctctaat

SEQ ID NO: 5994352 - DNA, 25 bp, Homo sapien
cttccggtatatcttcatacaattt

SEQ ID NO: 5994353 - DNA, 25 bp, Homo sapien
gaattcgttctctttggctatttta

SEQ ID NO: 5994354 - DNA, 25 bp, Homo sapien
tcatgatatgtgtatttaattcgtc

SEQ ID NO: 5994355 - DNA, 25 bp, Homo sapien
aactcgtaatcagagatctcattct

SEQ ID NO: 5994356 - DNA, 25 bp, Homo sapien
atattattagaatgcttatcttgcc

SEQ ID NO: 5994357 - DNA, 25 bp, Homo sapien
ctgcatgggctcgtcgtctatctga

SEQ ID NO: 5994358 - DNA, 25 bp, Homo sapien
gggcagtctgaattttctcttttta

SEQ ID NO: 5994359 - DNA, 25 bp, Homo sapien
tccacatctagagttacatcatggt

SEQ ID NO: 5994360 - DNA, 25 bp, Homo sapien
aggtacgcagagtataaatgcaacg

SEQ ID NO: 5994361 - DNA, 25 bp, Homo sapien
gtttatccttcaataacttttccac

SEQ ID NO: 5994362 - DNA, 25 bp, Homo sapien
tcatatcctcgttcatttcacaacc

SEQ ID NO: 5994363 - DNA, 25 bp, Homo sapien
taggcagttctatgaggcagtcgtc

SEQ ID NO: 5994364 - DNA, 25 bp, Homo sapien
cttatacaatagtcttttcaagagg

SEQ ID NO: 5994365 - DNA, 25 bp, Homo sapien
gtattgggattaggccagctcgtcc

SEQ ID NO: 5994366 - DNA, 25 bp, Homo sapien
atatcttcgataggagcatcgatct

SEQ ID NO: 5994367 - DNA, 25 bp, Homo sapien
tcaaccgtttatccttcaataactt

SEQ ID NO: 5994368 - DNA, 25 bp, Homo sapien
caacgaaaggtcgactctgtgcgag

SEQ ID NO: 5994369 - DNA, 25 bp, Homo sapien
caataccttccggtatatcttcata

SEQ ID NO: 5994370 - DNA, 25 bp, Homo sapien
tccgggatatttcgtttggaatgtt

SEQ ID NO: 5994371 - DNA, 25 bp, Homo sapien
gcagtctgaattttctctttttata

SEQ ID NO: 5994372 - DNA, 25 bp, Homo sapien
ggatatttcgtttggaatgttcaat

SEQ ID NO: 5994373 - DNA, 25 bp, Homo sapien
gaatgttcaattcatccacatctag

SEQ ID NO: 5994374 - DNA, 25 bp, Homo sapien
gctcgtcgtctatctgattcgccct

SEQ ID NO: 5994375 - DNA, 25 bp, Homo sapien
gcattaaagccctatttgagatctc

SEQ ID NO: 5994376 - DNA, 25 bp, Homo sapien
tctttggctattttatcatgcaacc

SEQ ID NO: 5994377 - DNA, 25 bp, Homo sapien
tcctcgtataatatcttcgatagga

SEQ ID NO: 5994378 - DNA, 25 bp, Homo sapien
gcagacttagagagaaatttttgcc

SEQ ID NO: 5994379 - DNA, 25 bp, Homo sapien
tttcaaagtctctttatcagcggtt

SEQ ID NO: 5994380 - DNA, 25 bp, Homo sapien
gtgcgagtgttctagagaatctaat

SEQ ID NO: 5994381 - DNA, 25 bp, Homo sapien
tctcattctcatcctctaagtagcc

SEQ ID NO: 5994382 - DNA, 25 bp, Homo sapien
atgggctcgtcgtctatctgattcg

SEQ ID NO: 5994383 - DNA, 25 bp, Homo sapien
aatgatttcatgtagatatccgtca

SEQ ID NO: 5994384 - DNA, 25 bp, Homo sapien
tttgtcctttgatgtcaaccgttta

SEQ ID NO: 5994385 - DNA, 25 bp, Homo sapien
agagagaaatttttgccattgagca

SEQ ID NO: 5994386 - DNA, 25 bp, Homo sapien
ccagctcgtccagttatccttaatt

SEQ ID NO: 5994387 - DNA, 25 bp, Homo sapien
ccagctcaaccctcatcatatcaga

SEQ ID NO: 5994388 - DNA, 25 bp, Homo sapien
tacaatttgtctacactagggtcaa

SEQ ID NO: 5994389 - DNA, 25 bp, Homo sapien
catcgatctgagtttcaatttgact

SEQ ID NO: 5994390 - DNA, 25 bp, Homo sapien
gtgcattaaagccctatttgagatc

SEQ ID NO: 5994391 - DNA, 25 bp, Homo sapien
taaagccctatttgagatctccccc

SEQ ID NO: 5994392 - DNA, 25 bp, Homo sapien
ttcaagaggtacgcagagtataaat

SEQ ID NO: 5994393 - DNA, 25 bp, Homo sapien
aggcgtgcattaaagccctatttga

SEQ ID NO: 5994394 - DNA, 25 bp, Homo sapien
aggtatgaaatcttctcttgtttta

SEQ ID NO: 5994395 - DNA, 25 bp, Homo sapien
tctagagaatctaataattcatttg

SEQ ID NO: 5994396 - DNA, 25 bp, Homo sapien
ctcccccggctgtacgcttacattt

SEQ ID NO: 5994397 - DNA, 25 bp, Homo sapien
cttacatttgcaataccttccggta

SEQ ID NO: 5994398 - DNA, 25 bp, Homo sapien
agtcgtccaactcgtaatcagagat

SEQ ID NO: 5994399 - DNA, 25 bp, Homo sapien
gttctctttggctattttatcatgc

SEQ ID NO: 5994400 - DNA, 25 bp, Homo sapien
ccaactcgtaatcagagatctcatt

SEQ ID NO: 5994401 - DNA, 25 bp, Homo sapien
caaccctcatcatatcagaggcgtg

SEQ ID NO: 5994402 - DNA, 25 bp, Homo sapien
taagcgttgtagcttggatttgtcc

SEQ ID NO: 5994403 - DNA, 25 bp, Homo sapien
tcttcatacaatttgtctacactag

SEQ ID NO: 5994404 - DNA, 25 bp, Homo sapien
agcatcttccgtctcttcacgattt

SEQ ID NO: 5994405 - DNA, 25 bp, Homo sapien
atagtcttttcaagaggtacgcaga

SEQ ID NO: 5994406 - DNA, 25 bp, Homo sapien
ttagaatgcttatcttgccttacat

SEQ ID NO: 5994407 - DNA, 25 bp, Homo sapien
taataattcatttgcagatttcaaa

SEQ ID NO: 5994408 - DNA, 25 bp, Homo sapien
atttgtctacactagggtcaataat

SEQ ID NO: 5994409 - DNA, 25 bp, Homo sapien
agagaaatttttgccattgagcatc

SEQ ID NO: 5994410 - DNA, 25 bp, Homo sapien
atcctcgttcatttcacaacctctt

SEQ ID NO: 5994411 - DNA, 25 bp, Homo sapien
atcgttatatagctctaatgatttc

SEQ ID NO: 5994412 - DNA, 25 bp, Homo sapien
gtcgtctatctgattcgcccttata

SEQ ID NO: 5994413 - DNA, 25 bp, Homo sapien
tccttaatttgggtcttcacaaact

SEQ ID NO: 5994414 - DNA, 25 bp, Homo sapien
taattcgtcgattggcctgcatggg

SEQ ID NO: 5994415 - DNA, 25 bp, Homo sapien
gttctagagaatctaataattcatt

SEQ ID NO: 5994416 - DNA, 25 bp, Homo sapien
gatctcattctcatcctctaagtag

SEQ ID NO: 5994417 - DNA, 25 bp, Homo sapien
ggtcttcacaaactggtttacttca

SEQ ID NO: 5994418 - DNA, 25 bp, Homo sapien
gtctcttcacgatttaagcgttgta

SEQ ID NO: 5994419 - DNA, 25 bp, Homo sapien
ctacactagggtcaataattgtatt

SEQ ID NO: 5994420 - DNA, 25 bp, Homo sapien
tgagatctcccccggctgtacgctt

SEQ ID NO: 5994421 - DNA, 25 bp, Homo sapien
ttttgtttagagcatcttccgtctc

SEQ ID NO: 5994422 - DNA, 25 bp, Homo sapien
tgaggcagtcgtccaactcgtaatc

SEQ ID NO: 5994423 - DNA, 25 bp, Homo sapien
ttgccttatacaatagtcttttcaa

SEQ ID NO: 5994424 - DNA, 25 bp, Homo sapien
tcgttctctttggctattttatcat

SEQ ID NO: 5994425 - DNA, 25 bp, Homo sapien
tacttttctgggatatcgttatata

SEQ ID NO: 5994426 - DNA, 25 bp, Homo sapien
cacaacctcttgaaaccaagtcatg

SEQ ID NO: 5994427 - DNA, 25 bp, Homo sapien
tttaattcgtcgattggcctgcatg

SEQ ID NO: 5994428 - DNA, 25 bp, Homo sapien
agctgtccagtttaactaagatatt

SEQ ID NO: 5994429 - DNA, 25 bp, Homo sapien
tgtagatatccgtcatatcctcgtt

SEQ ID NO: 5994430 - DNA, 25 bp, Homo sapien
ttccgtctcttcacgatttaagcgt

SEQ ID NO: 5994431 - DNA, 25 bp, Homo sapien
tcgttcatttcacaacctcttgaaa

SEQ ID NO: 5994432 - DNA, 25 bp, Homo sapien
ttatattattagaatgcttatcttg

SEQ ID NO: 5994433 - DNA, 25 bp, Homo sapien
caaggcagacttagagagaaatttt

SEQ ID NO: 5994434 - DNA, 25 bp, Homo sapien
acttaatagctcctttaagtatgaa

SEQ ID NO: 5994435 - DNA, 25 bp, Homo sapien
tgatttcatgtagatatccgtcata

SEQ ID NO: 5994436 - DNA, 25 bp, Homo sapien
ttgccattgagcatccagctcaacc

SEQ ID NO: 5994437 - DNA, 25 bp, Homo sapien
caacccttcgaataagctgtccagt

SEQ ID NO: 5994438 - DNA, 25 bp, Homo sapien
ctggtcttttttggctggtgatact

SEQ ID NO: 5994439 - DNA, 25 bp, Homo sapien
tttggaatgttcaattcatccacat

SEQ ID NO: 5994440 - DNA, 25 bp, Homo sapien
aatagctcctttaagtatgaactgg

SEQ ID NO: 5994441 - DNA, 25 bp, Homo sapien
ttcatccacatctagagttacatca

SEQ ID NO: 5994442 - DNA, 25 bp, Homo sapien
tgattcgcccttatattattagaat

SEQ ID NO: 5994443 - DNA, 25 bp, Homo sapien
ataccttccggtatatcttcataca

SEQ ID NO: 5994444 - DNA, 25 bp, Homo sapien
tggctattttatcatgcaacccttc

SEQ ID NO: 5994445 - DNA, 25 bp, Homo sapien
gctattttatcatgcaacccttcga

SEQ ID NO: 5994446 - DNA, 25 bp, Homo sapien
ctcttcacgatttaagcgttgtagc

SEQ ID NO: 5994447 - DNA, 25 bp, Homo sapien
tacatcatggtccaaggcagactta

SEQ ID NO: 5994448 - DNA, 25 bp, Homo sapien
tttgggtcttcacaaactggtttac

SEQ ID NO: 5994449 - DNA, 25 bp, Homo sapien
ttatcatgcaacccttcgaataagc

SEQ ID NO: 5994450 - DNA, 25 bp, Homo sapien
atgttcaattcatccacatctagag

SEQ ID NO: 5994451 - DNA, 25 bp, Homo sapien
tatgtgtatttaattcgtcgattgg

SEQ ID NO: 5994452 - DNA, 25 bp, Homo sapien
cgattggcctgcatgggctcgtcgt

SEQ ID NO: 5994453 - DNA, 25 bp, Homo sapien
tcctttaagtatgaactggtctttt

SEQ ID NO: 5994454 - DNA, 25 bp, Homo sapien
atatcgttatatagctctaatgatt

SEQ ID NO: 5994455 - DNA, 25 bp, Homo sapien
tttaagcgttgtagcttggatttgt

SEQ ID NO: 5994456 - DNA, 25 bp, Homo sapien
tccttcaataacttttccacaggta

SEQ ID NO: 5994457 - DNA, 25 bp, Homo sapien
aagccctatttgagatctcccccgg

SEQ ID NO: 5994458 - DNA, 25 bp, Homo sapien
tatcttgccttacatcgaattcgtt

SEQ ID NO: 5994459 - DNA, 25 bp, Homo sapien
cagttctatgaggcagtcgtccaac

SEQ ID NO: 5994460 - DNA, 25 bp, Homo sapien
ggatatcgttatatagctctaatga

SEQ ID NO: 5994461 - DNA, 25 bp, Homo sapien
tgtacgcttacatttgcaatacctt

SEQ ID NO: 5994462 - DNA, 25 bp, Homo sapien
ttgtctacactagggtcaataattg

SEQ ID NO: 5994463 - DNA, 25 bp, Homo sapien
cgcttacatttgcaataccttccgg

SEQ ID NO: 5994464 - DNA, 25 bp, Homo sapien
tcttcacaaactggtttacttcata

SEQ ID NO: 5994465 - DNA, 25 bp, Homo sapien
gtatatcttcatacaatttgtctac

SEQ ID NO: 5994466 - DNA, 25 bp, Homo sapien
atgttcccattaggcagttctatga

SEQ ID NO: 5994467 - DNA, 25 bp, Homo sapien
caagaggtacgcagagtataaatgc

SEQ ID NO: 5994468 - DNA, 25 bp, Homo sapien
gactctgtgcgagtgttctagagaa

SEQ ID NO: 5994469 - DNA, 25 bp, Homo sapien
tcaaagtctctttatcagcggttgt

SEQ ID NO: 5994470 - DNA, 25 bp, Homo sapien
actagggtcaataattgtattggga

SEQ ID NO: 5994471 - DNA, 25 bp, Homo sapien
ttttgccattgagcatccagctcaa

SEQ ID NO: 5994472 - DNA, 25 bp, Homo sapien
atatagctctaatgatttcatgtag

SEQ ID NO: 5994473 - DNA, 25 bp, Homo sapien
gatcctcgtataatatcttcgatag

SEQ ID NO: 5994474 - DNA, 25 bp, Homo sapien
ggagcatcgatctgagtttcaattt

SEQ ID NO: 5994475 - DNA, 25 bp, Homo sapien
ttcatttgcagatttcaaagtctct

SEQ ID NO: 5994476 - DNA, 25 bp, Homo sapien
attattagaatgcttatcttgcctt

SEQ ID NO: 5994477 - DNA, 25 bp, Homo sapien
gcgagtgttctagagaatctaataa

SEQ ID NO: 5994478 - DNA, 25 bp, Homo sapien
tcgtccaactcgtaatcagagatct

SEQ ID NO: 5994479 - DNA, 25 bp, Homo sapien
caatttgtctacactagggtcaata

SEQ ID NO: 5994480 - DNA, 25 bp, Homo sapien
tgcttatcttgccttacatcgaatt

SEQ ID NO: 5994481 - DNA, 25 bp, Homo sapien
tacaatagtcttttcaagaggtacg

SEQ ID NO: 5994482 - DNA, 25 bp, Homo sapien
acaggtatgaaatcttctcttgttt

SEQ ID NO: 5994483 - DNA, 25 bp, Homo sapien
caaactggtttacttcataaaaatg

SEQ ID NO: 5994484 - DNA, 25 bp, Homo sapien
cagttatccttaatttgggtcttca

SEQ ID NO: 5994485 - DNA, 25 bp, Homo sapien
cattgagcatccagctcaaccctca

SEQ ID NO: 5994486 - DNA, 25 bp, Homo sapien
cttaatttgggtcttcacaaactgg

SEQ ID NO: 5994487 - DNA, 25 bp, Homo sapien
tacttttttagaatttgtttgggca

SEQ ID NO: 5994488 - DNA, 25 bp, Homo sapien
tgaactggtcttttttggctggtga

SEQ ID NO: 5994489 - DNA, 25 bp, Homo sapien
ttgtttgggcagtctgaattttctc

SEQ ID NO: 5994490 - DNA, 25 bp, Homo sapien
tgcaacgaaaggtcgactctgtgcg

SEQ ID NO: 5994491 - DNA, 25 bp, Homo sapien
ggtcgactctgtgcgagtgttctag

SEQ ID NO: 5994492 - DNA, 25 bp, Homo sapien
cctcgttcatttcacaacctcttga

SEQ ID NO: 5994493 - DNA, 25 bp, Homo sapien
catccacatctagagttacatcatg

SEQ ID NO: 5994494 - DNA, 25 bp, Homo sapien
cgtccagttatccttaatttgggtc

SEQ ID NO: 5994495 - DNA, 25 bp, Homo sapien
tctctttggctattttatcatgcaa

SEQ ID NO: 5994496 - DNA, 25 bp, Homo sapien
tcccattaggcagttctatgaggca

SEQ ID NO: 5994497 - DNA, 25 bp, Homo sapien
acgatttaagcgttgtagcttggat

SEQ ID NO: 5994498 - DNA, 25 bp, Homo sapien
ctcgtataatatcttcgataggagc

SEQ ID NO: 5994499 - DNA, 25 bp, Homo sapien
ggtcttttttggctggtgatacttt

SEQ ID NO: 5994500 - DNA, 25 bp, Homo sapien
accaagtcatgatatgtgtatttaa

SEQ ID NO: 5994501 - DNA, 25 bp, Homo sapien
cctatttgagatctcccccggctgt

SEQ ID NO: 5994502 - DNA, 25 bp, Homo sapien
tccgtcatatcctcgttcatttcac

SEQ ID NO: 5994503 - DNA, 25 bp, Homo sapien
gcagagtataaatgcaacgaaaggt

SEQ ID NO: 5994504 - DNA, 25 bp, Homo sapien
tttaagtatgaactggtcttttttg

SEQ ID NO: 5994505 - DNA, 25 bp, Homo sapien
gatttaagcgttgtagcttggattt

SEQ ID NO: 5994506 - DNA, 25 bp, Homo sapien
tcattctcatcctctaagtagccct

SEQ ID NO: 5994507 - DNA, 25 bp, Homo sapien
agtttaactaagatattccgggata

SEQ ID NO: 5994508 - DNA, 25 bp, Homo sapien
taactaagatattccgggatatttc

SEQ ID NO: 5994509 - DNA, 25 bp, Homo sapien
cttgaaaccaagtcatgatatgtgt

SEQ ID NO: 5994510 - DNA, 25 bp, Homo sapien
ggccagctcgtccagttatccttaa

SEQ ID NO: 5994511 - DNA, 25 bp, Homo sapien
tcatatgttcccattaggcagttct

SEQ ID NO: 5994512 - DNA, 25 bp, Homo sapien
caatttgactttcttcgtcaagatc

SEQ ID NO: 5994513 - DNA, 25 bp, Homo sapien
gttcaattcatccacatctagagtt

SEQ ID NO: 5994514 - DNA, 25 bp, Homo sapien
tggatttgtcctttgatgtcaaccg

SEQ ID NO: 5994515 - DNA, 25 bp, Homo sapien
agtataaatgcaacgaaaggtcgac

SEQ ID NO: 5994516 - DNA, 25 bp, Homo sapien
atgttcttttgtttagagcatcttc

SEQ ID NO: 5994517 - DNA, 25 bp, Homo sapien
catcatggtccaaggcagacttaga

SEQ ID NO: 5994518 - DNA, 25 bp, Homo sapien
ctctgtgcgagtgttctagagaatc

SEQ ID NO: 5994519 - DNA, 25 bp, Homo sapien
tctctttatcagcggttgtagtggt

SEQ ID NO: 5994520 - DNA, 25 bp, Homo sapien
taagctcagatcctcgtataatatc

SEQ ID NO: 5994521 - DNA, 25 bp, Homo sapien
cgtctatctgattcgcccttatatt

SEQ ID NO: 5994522 - DNA, 25 bp, Homo sapien
tgggtcttcacaaactggtttactt

SEQ ID NO: 5994523 - DNA, 25 bp, Homo sapien
tatccgtcatatcctcgttcatttc

SEQ ID NO: 5994524 - DNA, 25 bp, Homo sapien
taagatattccgggatatttcgttt

SEQ ID NO: 5994525 - DNA, 25 bp, Homo sapien
aggcagacttagagagaaatttttg

SEQ ID NO: 5994526 - DNA, 25 bp, Homo sapien
aaggtcgactctgtgcgagtgttct

SEQ ID NO: 5994527 - DNA, 25 bp, Homo sapien
gtcaataattgtattgggattaggc

SEQ ID NO: 5994528 - DNA, 25 bp, Homo sapien
acgcagagtataaatgcaacgaaag

SEQ ID NO: 5994529 - DNA, 25 bp, Homo sapien
acttagagagaaatttttgccattg

SEQ ID NO: 5994530 - DNA, 25 bp, Homo sapien
ttgtttagagcatcttccgtctctt

SEQ ID NO: 5994531 - DNA, 25 bp, Homo sapien
catgcaacccttcgaataagctgtc

SEQ ID NO: 5994532 - DNA, 25 bp, Homo sapien
gcccttatattattagaatgcttat

SEQ ID NO: 5994533 - DNA, 25 bp, Homo sapien
gagtgttctagagaatctaataatt

SEQ ID NO: 5994534 - DNA, 25 bp, Homo sapien
gcagtcgtccaactcgtaatcagag

SEQ ID NO: 5994535 - DNA, 25 bp, Homo sapien
tttgcagatttcaaagtctctttat

SEQ ID NO: 5994536 - DNA, 25 bp, Homo sapien
cacatctagagttacatcatggtcc

SEQ ID NO: 5994537 - DNA, 25 bp, Homo sapien
ctcgtccagttatccttaatttggg

SEQ ID NO: 5994538 - DNA, 25 bp, Homo sapien
tagagaatctaataattcatttgca

SEQ ID NO: 5994539 - DNA, 25 bp, Homo sapien
tcgtcgattggcctgcatgggctcg

SEQ ID NO: 5994540 - DNA, 25 bp, Homo sapien
tattagaatgcttatcttgccttac

SEQ ID NO: 5994541 - DNA, 25 bp, Homo sapien
tctttatcagcggttgtagtggtaa

SEQ ID NO: 5994542 - DNA, 25 bp, Homo sapien
ctcttgaaaccaagtcatgatatgt

SEQ ID NO: 5994543 - DNA, 25 bp, Homo sapien
atttgactttcttcgtcaagatcac

SEQ ID NO: 5994544 - DNA, 25 bp, Homo sapien
atcatatcagaggcgtgcattaaag

SEQ ID NO: 5994545 - DNA, 25 bp, Homo sapien
caatagtcttttcaagaggtacgca

SEQ ID NO: 5994546 - DNA, 25 bp, Homo sapien
actaagatattccgggatatttcgt

SEQ ID NO: 5994547 - DNA, 25 bp, Homo sapien
atcttcgataggagcatcgatctga

SEQ ID NO: 5994548 - DNA, 25 bp, Homo sapien
agagtataaatgcaacgaaaggtcg

SEQ ID NO: 5994549 - DNA, 25 bp, Homo sapien
tcatcatatcagaggcgtgcattaa

SEQ ID NO: 5994550 - DNA, 25 bp, Homo sapien
tagatatccgtcatatcctcgttca

SEQ ID NO: 5994551 - DNA, 25 bp, Homo sapien
atttcgtttggaatgttcaattcat

SEQ ID NO: 5994552 - DNA, 25 bp, Homo sapien
cacaaactggtttacttcataaaaa

SEQ ID NO: 5994553 - DNA, 25 bp, Homo sapien
tcatttgccttatacaatagtcttt

SEQ ID NO: 5994554 - DNA, 25 bp, Homo sapien
gatatccgtcatatcctcgttcatt

SEQ ID NO: 5994555 - DNA, 25 bp, Homo sapien
tttttatacttttctgggatatcgt

SEQ ID NO: 5994556 - DNA, 25 bp, Homo sapien
gggtcaataattgtattgggattag

SEQ ID NO: 5994557 - DNA, 25 bp, Homo sapien
tagaatttgtttgggcagtctgaat

SEQ ID NO: 5994558 - DNA, 25 bp, Homo sapien
ttgttttacttaatagctcctttaa

SEQ ID NO: 5994559 - DNA, 25 bp, Homo sapien
atttcatgtagatatccgtcatatc

SEQ ID NO: 5994560 - DNA, 25 bp, Homo sapien
tctcatcctctaagtagccctttac

SEQ ID NO: 5994561 - DNA, 25 bp, Homo sapien
gactttcttcgtcaagatcactcat

SEQ ID NO: 5994562 - DNA, 25 bp, Homo sapien
cgttatatagctctaatgatttcat

SEQ ID NO: 5994563 - DNA, 25 bp, Homo sapien
gccttacatcgaattcgttctcttt

SEQ ID NO: 5994564 - DNA, 25 bp, Homo sapien
attcgttctctttggctattttatc

SEQ ID NO: 5994565 - DNA, 25 bp, Homo sapien
ttcacaacctcttgaaaccaagtca

SEQ ID NO: 5994566 - DNA, 25 bp, Homo sapien
tgggattaggccagctcgtccagtt

SEQ ID NO: 5994567 - DNA, 25 bp, Homo sapien
cttatcttgccttacatcgaattcg

SEQ ID NO: 5994568 - DNA, 25 bp, Homo sapien
agagcatcttccgtctcttcacgat

SEQ ID NO: 5994569 - DNA, 25 bp, Homo sapien
gagatctcattctcatcctctaagt

SEQ ID NO: 5994570 - DNA, 25 bp, Homo sapien
tggtgatacttttttagaatttgtt

SEQ ID NO: 5994571 - DNA, 25 bp, Homo sapien
atatgttcccattaggcagttctat

SEQ ID NO: 5994572 - DNA, 25 bp, Homo sapien
acccttcgaataagctgtccagttt

SEQ ID NO: 5994573 - DNA, 25 bp, Homo sapien
tttctgggatatcgttatatagctc

SEQ ID NO: 5994574 - DNA, 25 bp, Homo sapien
gatatgtgtatttaattcgtcgatt

SEQ ID NO: 5994575 - DNA, 25 bp, Homo sapien
gctcctttaagtatgaactggtctt

SEQ ID NO: 5994576 - DNA, 25 bp, Homo sapien
atttttgccattgagcatccagctc

SEQ ID NO: 5994577 - DNA, 25 bp, Homo sapien
ctgtccagtttaactaagatattcc

SEQ ID NO: 5994578 - DNA, 25 bp, Homo sapien
tttcatttgccttatacaatagtct

SEQ ID NO: 5994579 - DNA, 25 bp, Homo sapien
acactagggtcaataattgtattgg

SEQ ID NO: 5994580 - DNA, 25 bp, Homo sapien
tacgcttacatttgcaataccttcc

SEQ ID NO: 5994581 - DNA, 25 bp, Homo sapien
gcctgcatgggctcgtcgtctatct

SEQ ID NO: 5994582 - DNA, 25 bp, Homo sapien
tgagtttcaatttgactttcttcgt

SEQ ID NO: 5994583 - DNA, 25 bp, Homo sapien
gttatccttaatttgggtcttcaca

SEQ ID NO: 5994584 - DNA, 25 bp, Homo sapien
tgaaaccaagtcatgatatgtgtat

SEQ ID NO: 5994585 - DNA, 25 bp, Homo sapien
tggaatgttcaattcatccacatct

SEQ ID NO: 5994586 - DNA, 25 bp, Homo sapien
tctatctgattcgcccttatattat

SEQ ID NO: 5994587 - DNA, 25 bp, Homo sapien
accctcatcatatcagaggcgtgca

SEQ ID NO: 5994588 - DNA, 25 bp, Homo sapien
cttctcttgttttacttaatagctc

SEQ ID NO: 5994589 - DNA, 25 bp, Homo sapien
agtcatgatatgtgtatttaattcg

SEQ ID NO: 5994590 - DNA, 25 bp, Homo sapien
gcatccagctcaaccctcatcatat

SEQ ID NO: 5994591 - DNA, 25 bp, Homo sapien
tttgagatctcccccggctgtacgc

SEQ ID NO: 5994592 - DNA, 25 bp, Homo sapien
tatcagaggcgtgcattaaagccct

SEQ ID NO: 5994593 - DNA, 25 bp, Homo sapien
agcgttgtagcttggatttgtcctt

SEQ ID NO: 5994594 - DNA, 25 bp, Homo sapien
atgatatgtgtatttaattcgtcga

SEQ ID NO: 5994595 - DNA, 25 bp, Homo sapien
atttgccttatacaatagtcttttc

SEQ ID NO: 5994596 - DNA, 25 bp, Homo sapien
ccttcgaataagctgtccagtttaa

SEQ ID NO: 5994597 - DNA, 25 bp, Homo sapien
tttagaatttgtttgggcagtctga

SEQ ID NO: 5994598 - DNA, 25 bp, Homo sapien
catacaatttgtctacactagggtc

SEQ ID NO: 5994599 - DNA, 25 bp, Homo sapien
cctcatcatatcagaggcgtgcatt

SEQ ID NO: 5994600 - DNA, 25 bp, Homo sapien
agtctctttatcagcggttgtagtg

SEQ ID NO: 5994601 - DNA, 25 bp, Homo sapien
agatattccgggatatttcgtttgg

SEQ ID NO: 5994602 - DNA, 25 bp, Homo sapien
ttcgtttggaatgttcaattcatcc

SEQ ID NO: 5994603 - DNA, 25 bp, Homo sapien
tttaactaagatattccgggatatt

SEQ ID NO: 5994604 - DNA, 25 bp, Homo sapien
agacttagagagaaatttttgccat

SEQ ID NO: 5994605 - DNA, 25 bp, Homo sapien
agctcgtccagttatccttaatttg

SEQ ID NO: 5994606 - DNA, 25 bp, Homo sapien
agcggttgtagtggtaagctcagat

SEQ ID NO: 5994607 - DNA, 25 bp, Homo sapien
gtctacactagggtcaataattgta

SEQ ID NO: 5994608 - DNA, 25 bp, Homo sapien
tggcctgcatgggctcgtcgtctat

SEQ ID NO: 5994609 - DNA, 25 bp, Homo sapien
atccagctcaaccctcatcatatca

SEQ ID NO: 5994610 - DNA, 25 bp, Homo sapien
ccagtttaactaagatattccggga

SEQ ID NO: 5994611 - DNA, 25 bp, Homo sapien
ctgaaaaaatgttcttttgtttaga

SEQ ID NO: 5994612 - DNA, 25 bp, Homo sapien
ccgtctcttcacgatttaagcgttg

SEQ ID NO: 5994613 - DNA, 25 bp, Homo sapien
aaatttttgccattgagcatccagc

SEQ ID NO: 5994614 - DNA, 25 bp, Homo sapien
tatacaatagtcttttcaagaggta

SEQ ID NO: 5994615 - DNA, 25 bp, Homo sapien
agcttggatttgtcctttgatgtca

SEQ ID NO: 5994616 - DNA, 25 bp, Homo sapien
cccccggctgtacgcttacatttgc

SEQ ID NO: 5994617 - DNA, 25 bp, Homo sapien
caagtcatgatatgtgtatttaatt

SEQ ID NO: 5994618 - DNA, 25 bp, Homo sapien
cgtttggaatgttcaattcatccac

SEQ ID NO: 5994619 - DNA, 25 bp, Homo sapien
caataattgtattgggattaggcca

SEQ ID NO: 5994620 - DNA, 25 bp, Homo sapien
gctggtgatacttttttagaatttg

SEQ ID NO: 5994621 - DNA, 25 bp, Homo sapien
tggctggtgatacttttttagaatt

SEQ ID NO: 5994622 - DNA, 25 bp, Homo sapien
taggccagctcgtccagttatcctt

SEQ ID NO: 5994623 - DNA, 25 bp, Homo sapien
tattttatcatgcaacccttcgaat

SEQ ID NO: 5994624 - DNA, 25 bp, Homo sapien
attgggattaggccagctcgtccag

SEQ ID NO: 5994625 - DNA, 25 bp, Homo sapien
aataacttttccacaggtatgaaat

SEQ ID NO: 5994626 - DNA, 25 bp, Homo sapien
tatcttcatacaatttgtctacact

SEQ ID NO: 5994627 - DNA, 25 bp, Homo sapien
tcttttcaagaggtacgcagagtat

SEQ ID NO: 5994628 - DNA, 25 bp, Homo sapien
taatatcttcgataggagcatcgat

SEQ ID NO: 5994629 - DNA, 25 bp, Homo sapien
atgaaatcttctcttgttttactta

SEQ ID NO: 5994630 - DNA, 25 bp, Homo sapien
ttcgaataagctgtccagtttaact

SEQ ID NO: 5994631 - DNA, 25 bp, Homo sapien
tcgataggagcatcgatctgagttt

SEQ ID NO: 5994632 - DNA, 25 bp, Homo sapien
ggtaagctcagatcctcgtataata

SEQ ID NO: 5994633 - DNA, 25 bp, Homo sapien
tatgaggcagtcgtccaactcgtaa

SEQ ID NO: 5994634 - DNA, 25 bp, Homo sapien
ttagagagaaatttttgccattgag

SEQ ID NO: 5994635 - DNA, 25 bp, Homo sapien
ttgagcatccagctcaaccctcatc

SEQ ID NO: 5994636 - DNA, 25 bp, Homo sapien
tctctttttatacttttctgggata

SEQ ID NO: 5994637 - DNA, 25 bp, Homo sapien
cggttgtagtggtaagctcagatcc

SEQ ID NO: 5994638 - DNA, 25 bp, Homo sapien
aaaaatgttcttttgtttagagcat

SEQ ID NO: 5994639 - DNA, 25 bp, Homo sapien
gccattgagcatccagctcaaccct

SEQ ID NO: 5994640 - DNA, 25 bp, Homo sapien
tctatgaggcagtcgtccaactcgt

SEQ ID NO: 5994641 - DNA, 25 bp, Homo sapien
gatttcaaagtctctttatcagcgg

SEQ ID NO: 5994642 - DNA, 25 bp, Homo sapien
gtccaactcgtaatcagagatctca

SEQ ID NO: 5994643 - DNA, 25 bp, Homo sapien
ccattaggcagttctatgaggcagt

SEQ ID NO: 5994644 - DNA, 25 bp, Homo sapien
tccggtatatcttcatacaatttgt

SEQ ID NO: 5994645 - DNA, 25 bp, Homo sapien
ttcatgtagatatccgtcatatcct

SEQ ID NO: 5994646 - DNA, 25 bp, Homo sapien
taggagcatcgatctgagtttcaat

SEQ ID NO: 5994647 - DNA, 25 bp, Homo sapien
ggattaggccagctcgtccagttat

SEQ ID NO: 5994648 - DNA, 25 bp, Homo sapien
tgtatttaattcgtcgattggcctg

SEQ ID NO: 5994649 - DNA, 25 bp, Homo sapien
catatcagaggcgtgcattaaagcc

SEQ ID NO: 5994650 - DNA, 25 bp, Homo sapien
tatcagcggttgtagtggtaagctc

SEQ ID NO: 5994651 - DNA, 25 bp, Homo sapien
caacctcttgaaaccaagtcatgat

SEQ ID NO: 5994652 - DNA, 25 bp, Homo sapien
gaaaaaatgttcttttgtttagagc

SEQ ID NO: 5994653 - DNA, 25 bp, Homo sapien
cttcgataggagcatcgatctgagt

SEQ ID NO: 5994654 - DNA, 25 bp, Homo sapien
gtacgcagagtataaatgcaacgaa

SEQ ID NO: 5994655 - DNA, 25 bp, Homo sapien
tataaatgcaacgaaaggtcgactc

SEQ ID NO: 5994656 - DNA, 25 bp, Homo sapien
attggcctgcatgggctcgtcgtct

SEQ ID NO: 5994657 - DNA, 25 bp, Homo sapien
acgaaaggtcgactctgtgcgagtg

SEQ ID NO: 5994658 - DNA, 25 bp, Homo sapien
cgggatatttcgtttggaatgttca

SEQ ID NO: 5994659 - DNA, 25 bp, Homo sapien
tcagcggttgtagtggtaagctcag

SEQ ID NO: 5994660 - DNA, 25 bp, Homo sapien
agaatgcttatcttgccttacatcg

SEQ ID NO: 5994661 - DNA, 25 bp, Homo sapien
catcgaattcgttctctttggctat

SEQ ID NO: 5994662 - DNA, 25 bp, Homo sapien
tcatggtccaaggcagacttagaga

SEQ ID NO: 5994663 - DNA, 25 bp, Homo sapien
catttgcagatttcaaagtctcttt

SEQ ID NO: 5994664 - DNA, 25 bp, Homo sapien
tctagagttacatcatggtccaagg

SEQ ID NO: 5994665 - DNA, 25 bp, Homo sapien
attcgcccttatattattagaatgc

SEQ ID NO: 5994666 - DNA, 25 bp, Homo sapien
ataattgtattgggattaggccagc

SEQ ID NO: 5994667 - DNA, 25 bp, Homo sapien
agctctaatgatttcatgtagatat

SEQ ID NO: 5994668 - DNA, 25 bp, Homo sapien
tttggctattttatcatgcaaccct

SEQ ID NO: 5994669 - DNA, 25 bp, Homo sapien
atggtccaaggcagacttagagaga

SEQ ID NO: 5994670 - DNA, 25 bp, Homo sapien
gttgtagtggtaagctcagatcctc

SEQ ID NO: 5994671 - DNA, 25 bp, Homo sapien
agatctcccccggctgtacgcttac

SEQ ID NO: 5994672 - DNA, 25 bp, Homo sapien
tcagaggcgtgcattaaagccctat

SEQ ID NO: 5994673 - DNA, 25 bp, Homo sapien
cgtcatatcctcgttcatttcacaa

SEQ ID NO: 5994674 - DNA, 25 bp, Homo sapien
gccctatttgagatctcccccggct

SEQ ID NO: 5994675 - DNA, 25 bp, Homo sapien
ctcgtaatcagagatctcattctca

SEQ ID NO: 5994676 - DNA, 25 bp, Homo sapien
tctttttatacttttctgggatatc

SEQ ID NO: 5994677 - DNA, 25 bp, Homo sapien
aggcagtcgtccaactcgtaatcag

SEQ ID NO: 5994678 - DNA, 25 bp, Homo sapien
gttacatcatggtccaaggcagact

SEQ ID NO: 5994679 - DNA, 25 bp, Homo sapien
tctgattcgcccttatattattaga

SEQ ID NO: 5994680 - DNA, 25 bp, Homo sapien
ttgccttacatcgaattcgttctct

SEQ ID NO: 5994681 - DNA, 25 bp, Homo sapien
taacttttccacaggtatgaaatct

SEQ ID NO: 5994682 - DNA, 25 bp, Homo sapien
tctaataattcatttgcagatttca

SEQ ID NO: 5994683 - DNA, 25 bp, Homo sapien
taagctgtccagtttaactaagata

SEQ ID NO: 5994684 - DNA, 25 bp, Homo sapien
agaaatttttgccattgagcatcca

SEQ ID NO: 5994685 - DNA, 25 bp, Homo sapien
gttcatttcacaacctcttgaaacc

SEQ ID NO: 5994686 - DNA, 25 bp, Homo sapien
tcgatctgagtttcaatttgacttt

SEQ ID NO: 5994687 - DNA, 25 bp, Homo sapien
atatcctcgttcatttcacaacctc

SEQ ID NO: 5994688 - DNA, 25 bp, Homo sapien
gtagcttggatttgtcctttgatgt

SEQ ID NO: 5994689 - DNA, 25 bp, Homo sapien
tgcaacccttcgaataagctgtcca

SEQ ID NO: 5994690 - DNA, 25 bp, Homo sapien
gtgttctagagaatctaataattca

SEQ ID NO: 5994691 - DNA, 25 bp, Homo sapien
aattgtattgggattaggccagctc

SEQ ID NO: 5994692 - DNA, 25 bp, Homo sapien
cttacatcgaattcgttctctttgg

SEQ ID NO: 5994693 - DNA, 25 bp, Homo sapien
ttttatcatgcaacccttcgaataa

SEQ ID NO: 5994694 - DNA, 25 bp, Homo sapien
cgtataatatcttcgataggagcat

SEQ ID NO: 5994695 - DNA, 25 bp, Homo sapien
taatttgggtcttcacaaactggtt

SEQ ID NO: 5994696 - DNA, 25 bp, Homo sapien
tcaattcatccacatctagagttac

SEQ ID NO: 5994697 - DNA, 25 bp, Homo sapien
gcgtgcattaaagccctatttgaga

SEQ ID NO: 5994698 - DNA, 25 bp, Homo sapien
gtccagtttaactaagatattccgg

SEQ ID NO: 5994699 - DNA, 25 bp, Homo sapien
cagatcctcgtataatatcttcgat

SEQ ID NO: 5994700 - DNA, 25 bp, Homo sapien
tacatcgaattcgttctctttggct

SEQ ID NO: 5994701 - DNA, 25 bp, Homo sapien
gctgtacgcttacatttgcaatacc

SEQ ID NO: 5994702 - DNA, 25 bp, Homo sapien
tcgaattcgttctctttggctattt

SEQ ID NO: 5994703 - DNA, 25 bp, Homo sapien
gaatctaataattcatttgcagatt

SEQ ID NO: 5994704 - DNA, 25 bp, Homo sapien
aattcatttgcagatttcaaagtct

SEQ ID NO: 5994705 - DNA, 25 bp, Homo sapien
ttttccacaggtatgaaatcttctc

SEQ ID NO: 5994706 - DNA, 25 bp, Homo sapien
tcgcccttatattattagaatgctt

SEQ ID NO: 5994707 - DNA, 25 bp, Homo sapien
ctctaatgatttcatgtagatatcc

SEQ ID NO: 5994708 - DNA, 25 bp, Homo sapien
tatctgattcgcccttatattatta

SEQ ID NO: 5994709 - DNA, 25 bp, Homo sapien
agctcagatcctcgtataatatctt

SEQ ID NO: 5994710 - DNA, 25 bp, Homo sapien
gagcatccagctcaaccctcatcat

SEQ ID NO: 5994711 - DNA, 25 bp, Homo sapien
gtcgattggcctgcatgggctcgtc

SEQ ID NO: 5994712 - DNA, 25 bp, Homo sapien
cagagatctcattctcatcctctaa

SEQ ID NO: 5994713 - DNA, 25 bp, Homo sapien
attccgggatatttcgtttggaatg

SEQ ID NO: 5994714 - DNA, 25 bp, Homo sapien
ttgactttcttcgtcaagatcactc

SEQ ID NO: 5994715 - DNA, 25 bp, Homo sapien
cctctaagtagccctttacctgaaa

SEQ ID NO: 5994716 - DNA, 25 bp, Homo sapien
attcgtcgattggcctgcatgggct

SEQ ID NO: 5994717 - DNA, 25 bp, Homo sapien
attaggcagttctatgaggcagtcg

SEQ ID NO: 5994718 - DNA, 25 bp, Homo sapien
cttcaataacttttccacaggtatg

SEQ ID NO: 5994719 - DNA, 25 bp, Homo sapien
tttttggctggtgatacttttttag

SEQ ID NO: 5994720 - DNA, 25 bp, Homo sapien
gataggagcatcgatctgagtttca

SEQ ID NO: 5994721 - DNA, 25 bp, Homo sapien
tctcttgttttacttaatagctcct

SEQ ID NO: 5994722 - DNA, 25 bp, Homo sapien
tcaataacttttccacaggtatgaa

SEQ ID NO: 5994723 - DNA, 25 bp, Homo sapien
gggctcgtcgtctatctgattcgcc

SEQ ID NO: 5994724 - DNA, 25 bp, Homo sapien
tcctttgatgtcaaccgtttatcct

SEQ ID NO: 5994725 - DNA, 25 bp, Homo sapien
atagctctaatgatttcatgtagat

SEQ ID NO: 5994726 - DNA, 25 bp, Homo sapien
ttttcaagaggtacgcagagtataa

SEQ ID NO: 5994727 - DNA, 25 bp, Homo sapien
tcttttttggctggtgatacttttt

SEQ ID NO: 5994728 - DNA, 25 bp, Homo sapien
attaggccagctcgtccagttatcc

SEQ ID NO: 5994729 - DNA, 25 bp, Homo sapien
agtcttttcaagaggtacgcagagt

SEQ ID NO: 5994730 - DNA, 25 bp, Homo sapien
tccaaggcagacttagagagaaatt

SEQ ID NO: 5994731 - DNA, 25 bp, Homo sapien
atctcccccggctgtacgcttacat

SEQ ID NO: 5994732 - DNA, 25 bp, Homo sapien
taagtatgaactggtcttttttggc

SEQ ID NO: 5994733 - DNA, 25 bp, Homo sapien
tatttgagatctcccccggctgtac

SEQ ID NO: 5994734 - DNA, 25 bp, Homo sapien
agtttcaatttgactttcttcgtca

SEQ ID NO: 5994735 - DNA, 25 bp, Homo sapien
aatgcaacgaaaggtcgactctgtg

SEQ ID NO: 5994736 - DNA, 25 bp, Homo sapien
tagtggtaagctcagatcctcgtat

SEQ ID NO: 5994737 - DNA, 25 bp, Homo sapien
tatgaactggtcttttttggctggt

SEQ ID NO: 5994738 - DNA, 25 bp, Homo sapien
catttgcaataccttccggtatatc

SEQ ID NO: 5994739 - DNA, 25 bp, Homo sapien
cgttgtagcttggatttgtcctttg

SEQ ID NO: 5994740 - DNA, 25 bp, Homo sapien
ctgtgcgagtgttctagagaatcta

SEQ ID NO: 5994741 - DNA, 25 bp, Homo sapien
ccttatattattagaatgcttatct

SEQ ID NO: 5994742 - DNA, 25 bp, Homo sapien
ggtccaaggcagacttagagagaaa

SEQ ID NO: 5994743 - DNA, 25 bp, Homo sapien
catctagagttacatcatggtccaa

SEQ ID NO: 5994744 - DNA, 25 bp, Homo sapien
ctcaaccctcatcatatcagaggcg

SEQ ID NO: 5994745 - DNA, 25 bp, Homo sapien
ttgatgtcaaccgtttatccttcaa

SEQ ID NO: 5994746 - DNA, 25 bp, Homo sapien
tcttgccttacatcgaattcgttct

SEQ ID NO: 5994747 - DNA, 25 bp, Homo sapien
taatcagagatctcattctcatcct

SEQ ID NO: 5994748 - DNA, 25 bp, Homo sapien
tcttgttttacttaatagctccttt

SEQ ID NO: 5994749 - DNA, 25 bp, Homo sapien
gtttagagcatcttccgtctcttca

SEQ ID NO: 5994750 - DNA, 25 bp, Homo sapien
cggctgtacgcttacatttgcaata

SEQ ID NO: 5994751 - DNA, 25 bp, Homo sapien
tttggctggtgatacttttttagaa

SEQ ID NO: 5994752 - DNA, 25 bp, Homo sapien
accttccggtatatcttcatacaat

SEQ ID NO: 5994753 - DNA, 25 bp, Homo sapien
tgtcaaccgtttatccttcaataac

SEQ ID NO: 5994754 - DNA, 25 bp, Homo sapien
tatttaattcgtcgattggcctgca

SEQ ID NO: 5994755 - DNA, 25 bp, Homo sapien
atttcacaacctcttgaaaccaagt

SEQ ID NO: 5994756 - DNA, 25 bp, Homo sapien
gagttacatcatggtccaaggcaga

SEQ ID NO: 5994757 - DNA, 25 bp, Homo sapien
tcacgatttaagcgttgtagcttgg

SEQ ID NO: 5994758 - DNA, 25 bp, Homo sapien
agctcaaccctcatcatatcagagg

SEQ ID NO: 5994759 - DNA, 25 bp, Homo sapien
gtttgggcagtctgaattttctctt

SEQ ID NO: 5994760 - DNA, 25 bp, Homo sapien
acgcagggactaatgcaggtaccaa

SEQ ID NO: 5994761 - DNA, 25 bp, Homo sapien
tctgcagacatgtttggcccggacg

SEQ ID NO: 5994762 - DNA, 25 bp, Homo sapien
tacgctggatatttgaatatgccat

SEQ ID NO: 5994763 - DNA, 25 bp, Homo sapien
gactcgaataaccaagacgagctgt

SEQ ID NO: 5994764 - DNA, 25 bp, Homo sapien
ctgtacaagcatctcaagcagaaga

SEQ ID NO: 5994765 - DNA, 25 bp, Homo sapien
atgaacgagatgttgagtaaccctc

SEQ ID NO: 5994766 - DNA, 25 bp, Homo sapien
caccaatcctgatatgattagacag

SEQ ID NO: 5994767 - DNA, 25 bp, Homo sapien
tgtcgtcaggtcaaagtgcaggctt

SEQ ID NO: 5994768 - DNA, 25 bp, Homo sapien
cgctggcgcaaataacgccaccgcc

SEQ ID NO: 5994769 - DNA, 25 bp, Homo sapien
ctggcactggcgccaccccgaacat

SEQ ID NO: 5994770 - DNA, 25 bp, Homo sapien
accgggatgcccgccttcgatcctg

SEQ ID NO: 5994771 - DNA, 25 bp, Homo sapien
ggcgcaaataacgccaccgccaccg

SEQ ID NO: 5994772 - DNA, 25 bp, Homo sapien
gaaggctccaacacgaacactactt

SEQ ID NO: 5994773 - DNA, 25 bp, Homo sapien
gcaattcaaggaggcgataaacaaa

SEQ ID NO: 5994774 - DNA, 25 bp, Homo sapien
taacgcgggaaacgctgcatccacc

SEQ ID NO: 5994775 - DNA, 25 bp, Homo sapien
atgcaggtaccaacgcaggcgctaa

SEQ ID NO: 5994776 - DNA, 25 bp, Homo sapien
cagagcatgcaattcgcaagaatga

SEQ ID NO: 5994777 - DNA, 25 bp, Homo sapien
tacttcctcatccaacacagggaac

SEQ ID NO: 5994778 - DNA, 25 bp, Homo sapien
aatcagagattgatctactcgggta

SEQ ID NO: 5994779 - DNA, 25 bp, Homo sapien
cttcgatcctgcattgctagcgtct

SEQ ID NO: 5994780 - DNA, 25 bp, Homo sapien
aggaaggctccaacacgaacactac

SEQ ID NO: 5994781 - DNA, 25 bp, Homo sapien
ggatatttgaatatgccatctgcag

SEQ ID NO: 5994782 - DNA, 25 bp, Homo sapien
gaagtaaatgtggcacctgaaagca

SEQ ID NO: 5994783 - DNA, 25 bp, Homo sapien
gggaagtaaatgtggcacctgaaag

SEQ ID NO: 5994784 - DNA, 25 bp, Homo sapien
gccctcaggagaagcggtggctccg

SEQ ID NO: 5994785 - DNA, 25 bp, Homo sapien
atttgcgtctcttctgaaccctgca

SEQ ID NO: 5994786 - DNA, 25 bp, Homo sapien
tgccttccccgctcctggtggcgat

SEQ ID NO: 5994787 - DNA, 25 bp, Homo sapien
atgcaattcgcaagaatgatggacc

SEQ ID NO: 5994788 - DNA, 25 bp, Homo sapien
agcgtctatgttccaaccccctgta

SEQ ID NO: 5994789 - DNA, 25 bp, Homo sapien
agtcacaacccaaaccacaaaccgc

SEQ ID NO: 5994790 - DNA, 25 bp, Homo sapien
agtcaggacaagacaagtgggaagt

SEQ ID NO: 5994791 - DNA, 25 bp, Homo sapien
gtccatctggtcaagtcacaaccca

SEQ ID NO: 5994792 - DNA, 25 bp, Homo sapien
gtcgcagccctcaggagaagcggtg

SEQ ID NO: 5994793 - DNA, 25 bp, Homo sapien
tgatggaccctaatgccggtatggg

SEQ ID NO: 5994794 - DNA, 25 bp, Homo sapien
ttgcgtctcttctgaaccctgcatt

SEQ ID NO: 5994795 - DNA, 25 bp, Homo sapien
aattcgcaagaatgatggaccctaa

SEQ ID NO: 5994796 - DNA, 25 bp, Homo sapien
aatcgcaaatgaacgagatgttgag

SEQ ID NO: 5994797 - DNA, 25 bp, Homo sapien
acctgaaagcacagtgttgcaattc

SEQ ID NO: 5994798 - DNA, 25 bp, Homo sapien
gtggcaaatcagagattgatctact

SEQ ID NO: 5994799 - DNA, 25 bp, Homo sapien
gcattaaacaacgactcgaataacc

SEQ ID NO: 5994800 - DNA, 25 bp, Homo sapien
atgctacaaagtcccatgtttagac

SEQ ID NO: 5994801 - DNA, 25 bp, Homo sapien
cgaacatgtcgtcaggtcaaagtgc

SEQ ID NO: 5994802 - DNA, 25 bp, Homo sapien
cctcaggagaagcggtggctccgtc

SEQ ID NO: 5994803 - DNA, 25 bp, Homo sapien
gacttgaccagtgccagatacgctg

SEQ ID NO: 5994804 - DNA, 25 bp, Homo sapien
tagacagagcatgcaattcgcaaga

SEQ ID NO: 5994805 - DNA, 25 bp, Homo sapien
aaggacgaccaaaccgtggagtcat

SEQ ID NO: 5994806 - DNA, 25 bp, Homo sapien
ggaacaacgcagggactaatgcagg

SEQ ID NO: 5994807 - DNA, 25 bp, Homo sapien
gtcataccacattcaagacggtcac

SEQ ID NO: 5994808 - DNA, 25 bp, Homo sapien
gaaacgctgcatccaccgggatgcc

SEQ ID NO: 5994809 - DNA, 25 bp, Homo sapien
tagacagatgctcaccaatcctgat

SEQ ID NO: 5994810 - DNA, 25 bp, Homo sapien
gcacctgaaagcacagtgttgcaat

SEQ ID NO: 5994811 - DNA, 25 bp, Homo sapien
ccctcagatgttggactttatgatc

SEQ ID NO: 5994812 - DNA, 25 bp, Homo sapien
atctcaagcagaagacaccagacca

SEQ ID NO: 5994813 - DNA, 25 bp, Homo sapien
ggacgaccaaaccgtggagtcatac

SEQ ID NO: 5994814 - DNA, 25 bp, Homo sapien
caagccaggcaaatgctacaaagtc

SEQ ID NO: 5994815 - DNA, 25 bp, Homo sapien
gacatgtttggcccggacggtggtg

SEQ ID NO: 5994816 - DNA, 25 bp, Homo sapien
ttgcaggccatgggtccacaagcca

SEQ ID NO: 5994817 - DNA, 25 bp, Homo sapien
accgtggagtcataccacattcaag

SEQ ID NO: 5994818 - DNA, 25 bp, Homo sapien
ctcaccaatcctgatatgattagac

SEQ ID NO: 5994819 - DNA, 25 bp, Homo sapien
acacagctgcaaacccatttgcgtc

SEQ ID NO: 5994820 - DNA, 25 bp, Homo sapien
tcagagattgatctactcgggtaag

SEQ ID NO: 5994821 - DNA, 25 bp, Homo sapien
ggtcaagtcacaacccaaaccacaa

SEQ ID NO: 5994822 - DNA, 25 bp, Homo sapien
caacccgcaattgcaggccatgggt

SEQ ID NO: 5994823 - DNA, 25 bp, Homo sapien
acagtgttgcaattcaaggaggcga

SEQ ID NO: 5994824 - DNA, 25 bp, Homo sapien
gccatgggtccacaagccaggcaaa

SEQ ID NO: 5994825 - DNA, 25 bp, Homo sapien
gaaaaccccatcttccaatcgcaaa

SEQ ID NO: 5994826 - DNA, 25 bp, Homo sapien
gcgggaaacgctgcatccaccggga

SEQ ID NO: 5994827 - DNA, 25 bp, Homo sapien
ccccctgtacaagcatctcaagcag

SEQ ID NO: 5994828 - DNA, 25 bp, Homo sapien
ctcttgattcactactgaacggcga

SEQ ID NO: 5994829 - DNA, 25 bp, Homo sapien
gaggcgataaacaaagcgaacggta

SEQ ID NO: 5994830 - DNA, 25 bp, Homo sapien
ttccaatcgcaaatgaacgagatgt

SEQ ID NO: 5994831 - DNA, 25 bp, Homo sapien
cagtgccagatacgctggatatttg

SEQ ID NO: 5994832 - DNA, 25 bp, Homo sapien
acgacatgggcttcttcgatttcga

SEQ ID NO: 5994833 - DNA, 25 bp, Homo sapien
tgaccagtgccagatacgctggata

SEQ ID NO: 5994834 - DNA, 25 bp, Homo sapien
tcctggtggcgatgctccagaggaa

SEQ ID NO: 5994835 - DNA, 25 bp, Homo sapien
gatacgctggatatttgaatatgcc

SEQ ID NO: 5994836 - DNA, 25 bp, Homo sapien
gagatgttgagtaaccctcagatgt

SEQ ID NO: 5994837 - DNA, 25 bp, Homo sapien
ccaccggaagaacgctatgaacatc

SEQ ID NO: 5994838 - DNA, 25 bp, Homo sapien
aagacggtcacagcgtccatctggt

SEQ ID NO: 5994839 - DNA, 25 bp, Homo sapien
tccaacccgcaattgcaggccatgg

SEQ ID NO: 5994840 - DNA, 25 bp, Homo sapien
caaataacgccaccgccaccggtgc

SEQ ID NO: 5994841 - DNA, 25 bp, Homo sapien
taaatgtggcacctgaaagcacagt

SEQ ID NO: 5994842 - DNA, 25 bp, Homo sapien
gaaagcacagtgttgcaattcaagg

SEQ ID NO: 5994843 - DNA, 25 bp, Homo sapien
accctaatgccggtatgggctctgc

SEQ ID NO: 5994844 - DNA, 25 bp, Homo sapien
gcattaaacccctttgctaacgcgg

SEQ ID NO: 5994845 - DNA, 25 bp, Homo sapien
gaccaaaccgtggagtcataccaca

SEQ ID NO: 5994846 - DNA, 25 bp, Homo sapien
atttgaatatgccatctgcagacat

SEQ ID NO: 5994847 - DNA, 25 bp, Homo sapien
aatccgctggccgacttgaccagtg

SEQ ID NO: 5994848 - DNA, 25 bp, Homo sapien
tgcctctgccttccccgctcctggt

SEQ ID NO: 5994849 - DNA, 25 bp, Homo sapien
aaaccccatcttccaatcgcaaatg

SEQ ID NO: 5994850 - DNA, 25 bp, Homo sapien
tgctagcgtctatgttccaaccccc

SEQ ID NO: 5994851 - DNA, 25 bp, Homo sapien
aaacgtcgcagccctcaggagaagc

SEQ ID NO: 5994852 - DNA, 25 bp, Homo sapien
ccaatcgcaaatgaacgagatgttg

SEQ ID NO: 5994853 - DNA, 25 bp, Homo sapien
ccagtccaacccgcaattgcaggcc

SEQ ID NO: 5994854 - DNA, 25 bp, Homo sapien
ccttccccgctcctggtggcgatgc

SEQ ID NO: 5994855 - DNA, 25 bp, Homo sapien
tcttccaatcgcaaatgaacgagat

SEQ ID NO: 5994856 - DNA, 25 bp, Homo sapien
catcttccaatcgcaaatgaacgag

SEQ ID NO: 5994857 - DNA, 25 bp, Homo sapien
acgcgggaaacgctgcatccaccgg

SEQ ID NO: 5994858 - DNA, 25 bp, Homo sapien
atgccggtatgggctctgcaggtgg

SEQ ID NO: 5994859 - DNA, 25 bp, Homo sapien
cctctgccttccccgctcctggtgg

SEQ ID NO: 5994860 - DNA, 25 bp, Homo sapien
gctccaacacgaacactacttcctc

SEQ ID NO: 5994861 - DNA, 25 bp, Homo sapien
gtcacagcgtccatctggtcaagtc

SEQ ID NO: 5994862 - DNA, 25 bp, Homo sapien
taaccaagacgagctgttgaggatg

SEQ ID NO: 5994863 - DNA, 25 bp, Homo sapien
gccagtgccgctggcgcaaataacg

SEQ ID NO: 5994864 - DNA, 25 bp, Homo sapien
agacgagctgttgaggatgatggaa

SEQ ID NO: 5994865 - DNA, 25 bp, Homo sapien
accaacgcaggcgctaacacagctg

SEQ ID NO: 5994866 - DNA, 25 bp, Homo sapien
cggtatcccggtggcaaatcagaga

SEQ ID NO: 5994867 - DNA, 25 bp, Homo sapien
ccctgtacaagcatctcaagcagaa

SEQ ID NO: 5994868 - DNA, 25 bp, Homo sapien
taagacaactaaacgacatgggctt

SEQ ID NO: 5994869 - DNA, 25 bp, Homo sapien
ccaaccccctgtacaagcatctcaa

SEQ ID NO: 5994870 - DNA, 25 bp, Homo sapien
gcaggccatgggtccacaagccagg

SEQ ID NO: 5994871 - DNA, 25 bp, Homo sapien
tgttgagtaaccctcagatgttgga

SEQ ID NO: 5994872 - DNA, 25 bp, Homo sapien
ctgatatgattagacagagcatgca

SEQ ID NO: 5994873 - DNA, 25 bp, Homo sapien
caggcttcaatccgctggccgactt

SEQ ID NO: 5994874 - DNA, 25 bp, Homo sapien
tcctcatccaacacagggaacaacg

SEQ ID NO: 5994875 - DNA, 25 bp, Homo sapien
ggtggtgcattaaacaacgactcga

SEQ ID NO: 5994876 - DNA, 25 bp, Homo sapien
gatatgattagacagagcatgcaat

SEQ ID NO: 5994877 - DNA, 25 bp, Homo sapien
ctcaagcagaagacaccagaccacc

SEQ ID NO: 5994878 - DNA, 25 bp, Homo sapien
gtgggaagtaaatgtggcacctgaa

SEQ ID NO: 5994879 - DNA, 25 bp, Homo sapien
caacgcaggcgctaacacagctgca

SEQ ID NO: 5994880 - DNA, 25 bp, Homo sapien
cgccaccccgaacatgtcgtcaggt

SEQ ID NO: 5994881 - DNA, 25 bp, Homo sapien
atcaattaagacaactaaacgacat

SEQ ID NO: 5994882 - DNA, 25 bp, Homo sapien
ttcgcaagaatgatggaccctaatg

SEQ ID NO: 5994883 - DNA, 25 bp, Homo sapien
gacaagacaagtgggaagtaaatgt

SEQ ID NO: 5994884 - DNA, 25 bp, Homo sapien
ttccaaccccctgtacaagcatctc

SEQ ID NO: 5994885 - DNA, 25 bp, Homo sapien
agaaacgtcgcagccctcaggagaa

SEQ ID NO: 5994886 - DNA, 25 bp, Homo sapien
attaagacaactaaacgacatgggc

SEQ ID NO: 5994887 - DNA, 25 bp, Homo sapien
gcacagtgttgcaattcaaggaggc

SEQ ID NO: 5994888 - DNA, 25 bp, Homo sapien
acgaacactacttcctcatccaaca

SEQ ID NO: 5994889 - DNA, 25 bp, Homo sapien
cgatagaaacgtcgcagccctcagg

SEQ ID NO: 5994890 - DNA, 25 bp, Homo sapien
tgctcaccaatcctgatatgattag

SEQ ID NO: 5994891 - DNA, 25 bp, Homo sapien
aacaacgactcgaataaccaagacg

SEQ ID NO: 5994892 - DNA, 25 bp, Homo sapien
agggactaatgcaggtaccaacgca

SEQ ID NO: 5994893 - DNA, 25 bp, Homo sapien
cgggatgcccgccttcgatcctgca

SEQ ID NO: 5994894 - DNA, 25 bp, Homo sapien
gaacgagatgttgagtaaccctcag

SEQ ID NO: 5994895 - DNA, 25 bp, Homo sapien
aggacaagacaagtgggaagtaaat

SEQ ID NO: 5994896 - DNA, 25 bp, Homo sapien
cgttgaatatacatatcaagtcagg

SEQ ID NO: 5994897 - DNA, 25 bp, Homo sapien
cgtctatgttccaaccccctgtaca

SEQ ID NO: 5994898 - DNA, 25 bp, Homo sapien
cttcaatccgctggccgacttgacc

SEQ ID NO: 5994899 - DNA, 25 bp, Homo sapien
tcaaagtgcaggcttcaatccgctg

SEQ ID NO: 5994900 - DNA, 25 bp, Homo sapien
atttcgatagaaacgtcgcagccct

SEQ ID NO: 5994901 - DNA, 25 bp, Homo sapien
ggtggcgatgctccagaggaaggct

SEQ ID NO: 5994902 - DNA, 25 bp, Homo sapien
ccgccttcgatcctgcattgctagc

SEQ ID NO: 5994903 - DNA, 25 bp, Homo sapien
ctggcgccaccccgaacatgtcgtc

SEQ ID NO: 5994904 - DNA, 25 bp, Homo sapien
gcatgcaattcgcaagaatgatgga

SEQ ID NO: 5994905 - DNA, 25 bp, Homo sapien
cgcaagaatgatggaccctaatgcc

SEQ ID NO: 5994906 - DNA, 25 bp, Homo sapien
tgtggcacctgaaagcacagtgttg

SEQ ID NO: 5994907 - DNA, 25 bp, Homo sapien
ctggcgcaaataacgccaccgccac

SEQ ID NO: 5994908 - DNA, 25 bp, Homo sapien
tgttgaggatgatggaaaaccccat

SEQ ID NO: 5994909 - DNA, 25 bp, Homo sapien
ccctttgctaacgcgggaaacgctg

SEQ ID NO: 5994910 - DNA, 25 bp, Homo sapien
acatatcaagtcaggacaagacaag

SEQ ID NO: 5994911 - DNA, 25 bp, Homo sapien
cgcaaataacgccaccgccaccggt

SEQ ID NO: 5994912 - DNA, 25 bp, Homo sapien
aatcctgatatgattagacagagca

SEQ ID NO: 5994913 - DNA, 25 bp, Homo sapien
gccttcgatcctgcattgctagcgt

SEQ ID NO: 5994914 - DNA, 25 bp, Homo sapien
taaacaacgactcgaataaccaaga

SEQ ID NO: 5994915 - DNA, 25 bp, Homo sapien
agacaagtgggaagtaaatgtggca

SEQ ID NO: 5994916 - DNA, 25 bp, Homo sapien
cccgaacatgtcgtcaggtcaaagt

SEQ ID NO: 5994917 - DNA, 25 bp, Homo sapien
ggctccgtccaaggcgctcttgatt

SEQ ID NO: 5994918 - DNA, 25 bp, Homo sapien
cgctcttgattcactactgaacggc

SEQ ID NO: 5994919 - DNA, 25 bp, Homo sapien
aggtaccaacgcaggcgctaacaca

SEQ ID NO: 5994920 - DNA, 25 bp, Homo sapien
atctggtcaagtcacaacccaaacc

SEQ ID NO: 5994921 - DNA, 25 bp, Homo sapien
agtgcaggcttcaatccgctggccg

SEQ ID NO: 5994922 - DNA, 25 bp, Homo sapien
ctttgctaacgcgggaaacgctgca

SEQ ID NO: 5994923 - DNA, 25 bp, Homo sapien
aggccatgggtccacaagccaggca

SEQ ID NO: 5994924 - DNA, 25 bp, Homo sapien
ccgccagtgccgctggcgcaaataa

SEQ ID NO: 5994925 - DNA, 25 bp, Homo sapien
ctcagatgttggactttatgatcca

SEQ ID NO: 5994926 - DNA, 25 bp, Homo sapien
aagcacagtgttgcaattcaaggag

SEQ ID NO: 5994927 - DNA, 25 bp, Homo sapien
ggcttcaatccgctggccgacttga

SEQ ID NO: 5994928 - DNA, 25 bp, Homo sapien
tgttgcaattcaaggaggcgataaa

SEQ ID NO: 5994929 - DNA, 25 bp, Homo sapien
agacaccagaccaccggaagaacgc

SEQ ID NO: 5994930 - DNA, 25 bp, Homo sapien
accggaagaacgctatgaacatcaa

SEQ ID NO: 5994931 - DNA, 25 bp, Homo sapien
catgtttagacagatgctcaccaat

SEQ ID NO: 5994932 - DNA, 25 bp, Homo sapien
gatgttggactttatgatccagtcc

SEQ ID NO: 5994933 - DNA, 25 bp, Homo sapien
tttagacagatgctcaccaatcctg

SEQ ID NO: 5994934 - DNA, 25 bp, Homo sapien
atatcaagtcaggacaagacaagtg

SEQ ID NO: 5994935 - DNA, 25 bp, Homo sapien
ttgaatatacatatcaagtcaggac

SEQ ID NO: 5994936 - DNA, 25 bp, Homo sapien
taatgcaggtaccaacgcaggcgct

SEQ ID NO: 5994937 - DNA, 25 bp, Homo sapien
catctgcagacatgtttggcccgga

SEQ ID NO: 5994938 - DNA, 25 bp, Homo sapien
tcaggacaagacaagtgggaagtaa

SEQ ID NO: 5994939 - DNA, 25 bp, Homo sapien
caagaatgatggaccctaatgccgg

SEQ ID NO: 5994940 - DNA, 25 bp, Homo sapien
gtcaggtcaaagtgcaggcttcaat

SEQ ID NO: 5994941 - DNA, 25 bp, Homo sapien
ccaaaccacaaaccgccagtgccgc

SEQ ID NO: 5994942 - DNA, 25 bp, Homo sapien
ccatctggtcaagtcacaacccaaa

SEQ ID NO: 5994943 - DNA, 25 bp, Homo sapien
gagaagcggtggctccgtccaaggc

SEQ ID NO: 5994944 - DNA, 25 bp, Homo sapien
catccaacacagggaacaacgcagg

SEQ ID NO: 5994945 - DNA, 25 bp, Homo sapien
cccatgtttagacagatgctcacca

SEQ ID NO: 5994946 - DNA, 25 bp, Homo sapien
ctagcgtctatgttccaaccccctg

SEQ ID NO: 5994947 - DNA, 25 bp, Homo sapien
gccgctggcgcaaataacgccaccg

SEQ ID NO: 5994948 - DNA, 25 bp, Homo sapien
ttccccgctcctggtggcgatgctc

SEQ ID NO: 5994949 - DNA, 25 bp, Homo sapien
ttgagtaaccctcagatgttggact

SEQ ID NO: 5994950 - DNA, 25 bp, Homo sapien
aagtcccatgtttagacagatgctc

SEQ ID NO: 5994951 - DNA, 25 bp, Homo sapien
cgataaacaaagcgaacggtatccc

SEQ ID NO: 5994952 - DNA, 25 bp, Homo sapien
agattgatctactcgggtaagattt

SEQ ID NO: 5994953 - DNA, 25 bp, Homo sapien
attagacagagcatgcaattcgcaa

SEQ ID NO: 5994954 - DNA, 25 bp, Homo sapien
cataccacattcaagacggtcacag

SEQ ID NO: 5994955 - DNA, 25 bp, Homo sapien
ctgaaagcacagtgttgcaattcaa

SEQ ID NO: 5994956 - DNA, 25 bp, Homo sapien
atacatatcaagtcaggacaagaca

SEQ ID NO: 5994957 - DNA, 25 bp, Homo sapien
ccagaggaaggctccaacacgaaca

SEQ ID NO: 5994958 - DNA, 25 bp, Homo sapien
acgaccaaaccgtggagtcatacca

SEQ ID NO: 5994959 - DNA, 25 bp, Homo sapien
cggtggctccgtccaaggcgctctt

SEQ ID NO: 5994960 - DNA, 25 bp, Homo sapien
gccggtatgggctctgcaggtgggg

SEQ ID NO: 5994961 - DNA, 25 bp, Homo sapien
cactggcgccaccccgaacatgtcg

SEQ ID NO: 5994962 - DNA, 25 bp, Homo sapien
ggtgcagcagctggcactggcgcca

SEQ ID NO: 5994963 - DNA, 25 bp, Homo sapien
gtccaaggcgctcttgattcactac

SEQ ID NO: 5994964 - DNA, 25 bp, Homo sapien
gtgccagatacgctggatatttgaa

SEQ ID NO: 5994965 - DNA, 25 bp, Homo sapien
acgtcgcagccctcaggagaagcgg

SEQ ID NO: 5994966 - DNA, 25 bp, Homo sapien
acgagatgttgagtaaccctcagat

SEQ ID NO: 5994967 - DNA, 25 bp, Homo sapien
tccaacacagggaacaacgcaggga

SEQ ID NO: 5994968 - DNA, 25 bp, Homo sapien
tgctccagaggaaggctccaacacg

SEQ ID NO: 5994969 - DNA, 25 bp, Homo sapien
gacagatgctcaccaatcctgatat

SEQ ID NO: 5994970 - DNA, 25 bp, Homo sapien
attcaagacggtcacagcgtccatc

SEQ ID NO: 5994971 - DNA, 25 bp, Homo sapien
ttgaggatgatggaaaaccccatct

SEQ ID NO: 5994972 - DNA, 25 bp, Homo sapien
tcaagtcacaacccaaaccacaaac

SEQ ID NO: 5994973 - DNA, 25 bp, Homo sapien
accagaccaccggaagaacgctatg

SEQ ID NO: 5994974 - DNA, 25 bp, Homo sapien
atcccggtggcaaatcagagattga

SEQ ID NO: 5994975 - DNA, 25 bp, Homo sapien
tgttccaaccccctgtacaagcatc

SEQ ID NO: 5994976 - DNA, 25 bp, Homo sapien
cccatcttccaatcgcaaatgaacg

SEQ ID NO: 5994977 - DNA, 25 bp, Homo sapien
gaggatgatggaaaaccccatcttc

SEQ ID NO: 5994978 - DNA, 25 bp, Homo sapien
caccggtgcagcagctggcactggc

SEQ ID NO: 5994979 - DNA, 25 bp, Homo sapien
ttggactttatgatccagtccaacc

SEQ ID NO: 5994980 - DNA, 25 bp, Homo sapien
atccagtccaacccgcaattgcagg

SEQ ID NO: 5994981 - DNA, 25 bp, Homo sapien
actacttcctcatccaacacaggga

SEQ ID NO: 5994982 - DNA, 25 bp, Homo sapien
tcgcaaatgaacgagatgttgagta

SEQ ID NO: 5994983 - DNA, 25 bp, Homo sapien
cagcgtccatctggtcaagtcacaa

SEQ ID NO: 5994984 - DNA, 25 bp, Homo sapien
caacacagggaacaacgcagggact

SEQ ID NO: 5994985 - DNA, 25 bp, Homo sapien
gcagggactaatgcaggtaccaacg

SEQ ID NO: 5994986 - DNA, 25 bp, Homo sapien
aaccccctgtacaagcatctcaagc

SEQ ID NO: 5994987 - DNA, 25 bp, Homo sapien
gcgtccatctggtcaagtcacaacc

SEQ ID NO: 5994988 - DNA, 25 bp, Homo sapien
accaagacgagctgttgaggatgat

SEQ ID NO: 5994989 - DNA, 25 bp, Homo sapien
tgggtccacaagccaggcaaatgct

SEQ ID NO: 5994990 - DNA, 25 bp, Homo sapien
ccccgctcctggtggcgatgctcca

SEQ ID NO: 5994991 - DNA, 25 bp, Homo sapien
tctgccttccccgctcctggtggcg

SEQ ID NO: 5994992 - DNA, 25 bp, Homo sapien
tggcacctgaaagcacagtgttgca

SEQ ID NO: 5994993 - DNA, 25 bp, Homo sapien
aaccctgcattaaacccctttgcta

SEQ ID NO: 5994994 - DNA, 25 bp, Homo sapien
caccgccaccggtgcagcagctggc

SEQ ID NO: 5994995 - DNA, 25 bp, Homo sapien
cgctgcatccaccgggatgcccgcc

SEQ ID NO: 5994996 - DNA, 25 bp, Homo sapien
cagaagacaccagaccaccggaaga

SEQ ID NO: 5994997 - DNA, 25 bp, Homo sapien
gctacaaagtcccatgtttagacag

SEQ ID NO: 5994998 - DNA, 25 bp, Homo sapien
ttcgatagaaacgtcgcagccctca

SEQ ID NO: 5994999 - DNA, 25 bp, Homo sapien
caacgcagggactaatgcaggtacc

SEQ ID NO: 5995000 - DNA, 25 bp, Homo sapien
gggaaacgctgcatccaccgggatg

SEQ ID NO: 5995001 - DNA, 25 bp, Homo sapien
gacatgggcttcttcgatttcgata

SEQ ID NO: 5995002 - DNA, 25 bp, Homo sapien
tgtttggcccggacggtggtgcatt

SEQ ID NO: 5995003 - DNA, 25 bp, Homo sapien
aaggcgctcttgattcactactgaa

SEQ ID NO: 5995004 - DNA, 25 bp, Homo sapien
gatcctgcattgctagcgtctatgt

SEQ ID NO: 5995005 - DNA, 25 bp, Homo sapien
caattaagacaactaaacgacatgg

SEQ ID NO: 5995006 - DNA, 25 bp, Homo sapien
accagtgccagatacgctggatatt

SEQ ID NO: 5995007 - DNA, 25 bp, Homo sapien
gctctgcaggtggggctgcctctgc

SEQ ID NO: 5995008 - DNA, 25 bp, Homo sapien
attcactactgaacggcgatgttta

SEQ ID NO: 5995009 - DNA, 25 bp, Homo sapien
caagacaagtgggaagtaaatgtgg

SEQ ID NO: 5995010 - DNA, 25 bp, Homo sapien
attgctagcgtctatgttccaaccc

SEQ ID NO: 5995011 - DNA, 25 bp, Homo sapien
acaaagcgaacggtatcccggtggc

SEQ ID NO: 5995012 - DNA, 25 bp, Homo sapien
tctatgttccaaccccctgtacaag

SEQ ID NO: 5995013 - DNA, 25 bp, Homo sapien
gctcctggtggcgatgctccagagg

SEQ ID NO: 5995014 - DNA, 25 bp, Homo sapien
aataaccaagacgagctgttgagga

SEQ ID NO: 5995015 - DNA, 25 bp, Homo sapien
aggctccaacacgaacactacttcc

SEQ ID NO: 5995016 - DNA, 25 bp, Homo sapien
aaccgccagtgccgctggcgcaaat

SEQ ID NO: 5995017 - DNA, 25 bp, Homo sapien
ggcgataaacaaagcgaacggtatc

SEQ ID NO: 5995018 - DNA, 25 bp, Homo sapien
agcagaagacaccagaccaccggaa

SEQ ID NO: 5995019 - DNA, 25 bp, Homo sapien
tcaatccgctggccgacttgaccag

SEQ ID NO: 5995020 - DNA, 25 bp, Homo sapien
cccggtggcaaatcagagattgatc

SEQ ID NO: 5995021 - DNA, 25 bp, Homo sapien
gctaacgcgggaaacgctgcatcca

SEQ ID NO: 5995022 - DNA, 25 bp, Homo sapien
taccacattcaagacggtcacagcg

SEQ ID NO: 5995023 - DNA, 25 bp, Homo sapien
aacaacgcagggactaatgcaggta

SEQ ID NO: 5995024 - DNA, 25 bp, Homo sapien
tcctgatatgattagacagagcatg

SEQ ID NO: 5995025 - DNA, 25 bp, Homo sapien
tccacaagccaggcaaatgctacaa

SEQ ID NO: 5995026 - DNA, 25 bp, Homo sapien
gtctcttctgaaccctgcattaaac

SEQ ID NO: 5995027 - DNA, 25 bp, Homo sapien
ccgctcctggtggcgatgctccaga

SEQ ID NO: 5995028 - DNA, 25 bp, Homo sapien
ccggtgcagcagctggcactggcgc

SEQ ID NO: 5995029 - DNA, 25 bp, Homo sapien
gagctgttgaggatgatggaaaacc

SEQ ID NO: 5995030 - DNA, 25 bp, Homo sapien
aggcaaatgctacaaagtcccatgt

SEQ ID NO: 5995031 - DNA, 25 bp, Homo sapien
cagatacgctggatatttgaatatg

SEQ ID NO: 5995032 - DNA, 25 bp, Homo sapien
aagtgggaagtaaatgtggcacctg

SEQ ID NO: 5995033 - DNA, 25 bp, Homo sapien
taatgccggtatgggctctgcaggt

SEQ ID NO: 5995034 - DNA, 25 bp, Homo sapien
tcacaacccaaaccacaaaccgcca

SEQ ID NO: 5995035 - DNA, 25 bp, Homo sapien
cctaatgccggtatgggctctgcag

SEQ ID NO: 5995036 - DNA, 25 bp, Homo sapien
cttcttcgatttcgatagaaacgtc

SEQ ID NO: 5995037 - DNA, 25 bp, Homo sapien
accacaaaccgccagtgccgctggc

SEQ ID NO: 5995038 - DNA, 25 bp, Homo sapien
atgggctctgcaggtggggctgcct

SEQ ID NO: 5995039 - DNA, 25 bp, Homo sapien
acgccaccgccaccggtgcagcagc

SEQ ID NO: 5995040 - DNA, 25 bp, Homo sapien
ccgccaccggtgcagcagctggcac

SEQ ID NO: 5995041 - DNA, 25 bp, Homo sapien
gtatcccggtggcaaatcagagatt

SEQ ID NO: 5995042 - DNA, 25 bp, Homo sapien
gtgccgctggcgcaaataacgccac

SEQ ID NO: 5995043 - DNA, 25 bp, Homo sapien
aattcaaggaggcgataaacaaagc

SEQ ID NO: 5995044 - DNA, 25 bp, Homo sapien
cagatgttggactttatgatccagt

SEQ ID NO: 5995045 - DNA, 25 bp, Homo sapien
acactacttcctcatccaacacagg

SEQ ID NO: 5995046 - DNA, 25 bp, Homo sapien
aaaccgtggagtcataccacattca

SEQ ID NO: 5995047 - DNA, 25 bp, Homo sapien
tgaaccctgcattaaacccctttgc

SEQ ID NO: 5995048 - DNA, 25 bp, Homo sapien
tgcagcagctggcactggcgccacc

SEQ ID NO: 5995049 - DNA, 25 bp, Homo sapien
ccaaggcgctcttgattcactactg

SEQ ID NO: 5995050 - DNA, 25 bp, Homo sapien
tcgatcctgcattgctagcgtctat

SEQ ID NO: 5995051 - DNA, 25 bp, Homo sapien
cagacatgtttggcccggacggtgg

SEQ ID NO: 5995052 - DNA, 25 bp, Homo sapien
caaagtcccatgtttagacagatgc

SEQ ID NO: 5995053 - DNA, 25 bp, Homo sapien
ggaccctaatgccggtatgggctct

SEQ ID NO: 5995054 - DNA, 25 bp, Homo sapien
gcgctaacacagctgcaaacccatt

SEQ ID NO: 5995055 - DNA, 25 bp, Homo sapien
gcaaacccatttgcgtctcttctga

SEQ ID NO: 5995056 - DNA, 25 bp, Homo sapien
gagcatgcaattcgcaagaatgatg

SEQ ID NO: 5995057 - DNA, 25 bp, Homo sapien
cagccctcaggagaagcggtggctc

SEQ ID NO: 5995058 - DNA, 25 bp, Homo sapien
aagcatctcaagcagaagacaccag

SEQ ID NO: 5995059 - DNA, 25 bp, Homo sapien
gcgtctcttctgaaccctgcattaa

SEQ ID NO: 5995060 - DNA, 25 bp, Homo sapien
agaacgctatgaacatcaattaaga

SEQ ID NO: 5995061 - DNA, 25 bp, Homo sapien
gcaggcgctaacacagctgcaaacc

SEQ ID NO: 5995062 - DNA, 25 bp, Homo sapien
tggggctgcctctgccttccccgct

SEQ ID NO: 5995063 - DNA, 25 bp, Homo sapien
gagtaaccctcagatgttggacttt

SEQ ID NO: 5995064 - DNA, 25 bp, Homo sapien
cggtatgggctctgcaggtggggct

SEQ ID NO: 5995065 - DNA, 25 bp, Homo sapien
ccggacggtggtgcattaaacaacg

SEQ ID NO: 5995066 - DNA, 25 bp, Homo sapien
acccaaaccacaaaccgccagtgcc

SEQ ID NO: 5995067 - DNA, 25 bp, Homo sapien
aatgatggaccctaatgccggtatg

SEQ ID NO: 5995068 - DNA, 25 bp, Homo sapien
aactaaacgacatgggcttcttcga

SEQ ID NO: 5995069 - DNA, 25 bp, Homo sapien
gggctctgcaggtggggctgcctct

SEQ ID NO: 5995070 - DNA, 25 bp, Homo sapien
tctactcgggtaagattttaaagga

SEQ ID NO: 5995071 - DNA, 25 bp, Homo sapien
catgtcgtcaggtcaaagtgcaggc

SEQ ID NO: 5995072 - DNA, 25 bp, Homo sapien
gccaccggtgcagcagctggcactg

SEQ ID NO: 5995073 - DNA, 25 bp, Homo sapien
gcattgctagcgtctatgttccaac

SEQ ID NO: 5995074 - DNA, 25 bp, Homo sapien
tgcaggcttcaatccgctggccgac

SEQ ID NO: 5995075 - DNA, 25 bp, Homo sapien
ccgcaattgcaggccatgggtccac

SEQ ID NO: 5995076 - DNA, 25 bp, Homo sapien
tttatgatccagtccaacccgcaat

SEQ ID NO: 5995077 - DNA, 25 bp, Homo sapien
gccagatacgctggatatttgaata

SEQ ID NO: 5995078 - DNA, 25 bp, Homo sapien
cttgattcactactgaacggcgatg

SEQ ID NO: 5995079 - DNA, 25 bp, Homo sapien
aggcgctaacacagctgcaaaccca

SEQ ID NO: 5995080 - DNA, 25 bp, Homo sapien
tgttggactttatgatccagtccaa

SEQ ID NO: 5995081 - DNA, 25 bp, Homo sapien
aaaccacaaaccgccagtgccgctg

SEQ ID NO: 5995082 - DNA, 25 bp, Homo sapien
ccaatcctgatatgattagacagag

SEQ ID NO: 5995083 - DNA, 25 bp, Homo sapien
caggtggggctgcctctgccttccc

SEQ ID NO: 5995084 - DNA, 25 bp, Homo sapien
gcaattgcaggccatgggtccacaa

SEQ ID NO: 5995085 - DNA, 25 bp, Homo sapien
caacgactcgaataaccaagacgag

SEQ ID NO: 5995086 - DNA, 25 bp, Homo sapien
agctgcaaacccatttgcgtctctt

SEQ ID NO: 5995087 - DNA, 25 bp, Homo sapien
aacggtatcccggtggcaaatcaga

SEQ ID NO: 5995088 - DNA, 25 bp, Homo sapien
aacatgtcgtcaggtcaaagtgcag

SEQ ID NO: 5995089 - DNA, 25 bp, Homo sapien
ggacggtggtgcattaaacaacgac

SEQ ID NO: 5995090 - DNA, 25 bp, Homo sapien
atgtcgttgaatatacatatcaagt

SEQ ID NO: 5995091 - DNA, 25 bp, Homo sapien
tccgctggccgacttgaccagtgcc

SEQ ID NO: 5995092 - DNA, 25 bp, Homo sapien
accccatcttccaatcgcaaatgaa

SEQ ID NO: 5995093 - DNA, 25 bp, Homo sapien
attaaacaacgactcgaataaccaa

SEQ ID NO: 5995094 - DNA, 25 bp, Homo sapien
acatcaattaagacaactaaacgac

SEQ ID NO: 5995095 - DNA, 25 bp, Homo sapien
ctatgaacatcaattaagacaacta

SEQ ID NO: 5995096 - DNA, 25 bp, Homo sapien
tcgtcaggtcaaagtgcaggcttca

SEQ ID NO: 5995097 - DNA, 25 bp, Homo sapien
ttcaaggaggcgataaacaaagcga

SEQ ID NO: 5995098 - DNA, 25 bp, Homo sapien
ttcgatttcgatagaaacgtcgcag

SEQ ID NO: 5995099 - DNA, 25 bp, Homo sapien
cggaagaacgctatgaacatcaatt

SEQ ID NO: 5995100 - DNA, 25 bp, Homo sapien
cagcagctggcactggcgccacccc

SEQ ID NO: 5995101 - DNA, 25 bp, Homo sapien
ctcgaataaccaagacgagctgttg

SEQ ID NO: 5995102 - DNA, 25 bp, Homo sapien
gaagaacgctatgaacatcaattaa

SEQ ID NO: 5995103 - DNA, 25 bp, Homo sapien
gctaacacagctgcaaacccatttg

SEQ ID NO: 5995104 - DNA, 25 bp, Homo sapien
agtaaatgtggcacctgaaagcaca

SEQ ID NO: 5995105 - DNA, 25 bp, Homo sapien
gtacaagcatctcaagcagaagaca

SEQ ID NO: 5995106 - DNA, 25 bp, Homo sapien
tcaggagaagcggtggctccgtcca

SEQ ID NO: 5995107 - DNA, 25 bp, Homo sapien
gctgcctctgccttccccgctcctg

SEQ ID NO: 5995108 - DNA, 25 bp, Homo sapien
aaatgaacgagatgttgagtaaccc

SEQ ID NO: 5995109 - DNA, 25 bp, Homo sapien
acccatttgcgtctcttctgaaccc

SEQ ID NO: 5995110 - DNA, 25 bp, Homo sapien
atcaagtcaggacaagacaagtggg

SEQ ID NO: 5995111 - DNA, 25 bp, Homo sapien
cagaccaccggaagaacgctatgaa

SEQ ID NO: 5995112 - DNA, 25 bp, Homo sapien
gcagctggcactggcgccaccccga

SEQ ID NO: 5995113 - DNA, 25 bp, Homo sapien
cttctgaaccctgcattaaacccct

SEQ ID NO: 5995114 - DNA, 25 bp, Homo sapien
caaaccgccagtgccgctggcgcaa

SEQ ID NO: 5995115 - DNA, 25 bp, Homo sapien
tggcccggacggtggtgcattaaac

SEQ ID NO: 5995116 - DNA, 25 bp, Homo sapien
gcaaatgaacgagatgttgagtaac

SEQ ID NO: 5995117 - DNA, 25 bp, Homo sapien
ggatgcccgccttcgatcctgcatt

SEQ ID NO: 5995118 - DNA, 25 bp, Homo sapien
atgccatctgcagacatgtttggcc

SEQ ID NO: 5995119 - DNA, 25 bp, Homo sapien
ttgctaacgcgggaaacgctgcatc

SEQ ID NO: 5995120 - DNA, 25 bp, Homo sapien
tggagtcataccacattcaagacgg

SEQ ID NO: 5995121 - DNA, 25 bp, Homo sapien
tatgttccaaccccctgtacaagca

SEQ ID NO: 5995122 - DNA, 25 bp, Homo sapien
tccaacacgaacactacttcctcat

SEQ ID NO: 5995123 - DNA, 25 bp, Homo sapien
acagggaacaacgcagggactaatg

SEQ ID NO: 5995124 - DNA, 25 bp, Homo sapien
aacgctgcatccaccgggatgcccg

SEQ ID NO: 5995125 - DNA, 25 bp, Homo sapien
tcaagacggtcacagcgtccatctg

SEQ ID NO: 5995126 - DNA, 25 bp, Homo sapien
tctgcaggtggggctgcctctgcct

SEQ ID NO: 5995127 - DNA, 25 bp, Homo sapien
ctggccgacttgaccagtgccagat

SEQ ID NO: 5995128 - DNA, 25 bp, Homo sapien
ccaccgggatgcccgccttcgatcc

SEQ ID NO: 5995129 - DNA, 25 bp, Homo sapien
gacggtcacagcgtccatctggtca

SEQ ID NO: 5995130 - DNA, 25 bp, Homo sapien
ccatttgcgtctcttctgaaccctg

SEQ ID NO: 5995131 - DNA, 25 bp, Homo sapien
tgatctactcgggtaagattttaaa

SEQ ID NO: 5995132 - DNA, 25 bp, Homo sapien
gaatatgccatctgcagacatgttt

SEQ ID NO: 5995133 - DNA, 25 bp, Homo sapien
catgtttggcccggacggtggtgca

SEQ ID NO: 5995134 - DNA, 25 bp, Homo sapien
ctggtggcgatgctccagaggaagg

SEQ ID NO: 5995135 - DNA, 25 bp, Homo sapien
atccaccgggatgcccgccttcgat

SEQ ID NO: 5995136 - DNA, 25 bp, Homo sapien
caacccaaaccacaaaccgccagtg

SEQ ID NO: 5995137 - DNA, 25 bp, Homo sapien
acattcaagacggtcacagcgtcca

SEQ ID NO: 5995138 - DNA, 25 bp, Homo sapien
gccaccgccaccggtgcagcagctg

SEQ ID NO: 5995139 - DNA, 25 bp, Homo sapien
tggaaaaccccatcttccaatcgca

SEQ ID NO: 5995140 - DNA, 25 bp, Homo sapien
gtatgggctctgcaggtggggctgc

SEQ ID NO: 5995141 - DNA, 25 bp, Homo sapien
agtccaacccgcaattgcaggccat

SEQ ID NO: 5995142 - DNA, 25 bp, Homo sapien
gcaattcgcaagaatgatggaccct

SEQ ID NO: 5995143 - DNA, 25 bp, Homo sapien
atggaccctaatgccggtatgggct

SEQ ID NO: 5995144 - DNA, 25 bp, Homo sapien
tgggcttcttcgatttcgatagaaa

SEQ ID NO: 5995145 - DNA, 25 bp, Homo sapien
cgaataaccaagacgagctgttgag

SEQ ID NO: 5995146 - DNA, 25 bp, Homo sapien
aaagtgcaggcttcaatccgctggc

SEQ ID NO: 5995147 - DNA, 25 bp, Homo sapien
ctgcaaacccatttgcgtctcttct

SEQ ID NO: 5995148 - DNA, 25 bp, Homo sapien
agaatgatggaccctaatgccggta

SEQ ID NO: 5995149 - DNA, 25 bp, Homo sapien
gtaaccctcagatgttggactttat

SEQ ID NO: 5995150 - DNA, 25 bp, Homo sapien
ccctgcattaaacccctttgctaac

SEQ ID NO: 5995151 - DNA, 25 bp, Homo sapien
tggtgcattaaacaacgactcgaat

SEQ ID NO: 5995152 - DNA, 25 bp, Homo sapien
gcaggtaccaacgcaggcgctaaca

SEQ ID NO: 5995153 - DNA, 25 bp, Homo sapien
taacgccaccgccaccggtgcagca

SEQ ID NO: 5995154 - DNA, 25 bp, Homo sapien
gaagacaccagaccaccggaagaac

SEQ ID NO: 5995155 - DNA, 25 bp, Homo sapien
gatgttgagtaaccctcagatgttg

SEQ ID NO: 5995156 - DNA, 25 bp, Homo sapien
acaactaaacgacatgggcttcttc

SEQ ID NO: 5995157 - DNA, 25 bp, Homo sapien
gaacatcaattaagacaactaaacg

SEQ ID NO: 5995158 - DNA, 25 bp, Homo sapien
tgatccagtccaacccgcaattgca

SEQ ID NO: 5995159 - DNA, 25 bp, Homo sapien
caagacgagctgttgaggatgatgg

SEQ ID NO: 5995160 - DNA, 25 bp, Homo sapien
ctccgtccaaggcgctcttgattca

SEQ ID NO: 5995161 - DNA, 25 bp, Homo sapien
caaggaggcgataaacaaagcgaac

SEQ ID NO: 5995162 - DNA, 25 bp, Homo sapien
gtaccaacgcaggcgctaacacagc

SEQ ID NO: 5995163 - DNA, 25 bp, Homo sapien
atgatggaaaaccccatcttccaat

SEQ ID NO: 5995164 - DNA, 25 bp, Homo sapien
tgcagacatgtttggcccggacggt

SEQ ID NO: 5995165 - DNA, 25 bp, Homo sapien
ggcgccaccccgaacatgtcgtcag

SEQ ID NO: 5995166 - DNA, 25 bp, Homo sapien
tggcgatgctccagaggaaggctcc

SEQ ID NO: 5995167 - DNA, 25 bp, Homo sapien
agccaggcaaatgctacaaagtccc

SEQ ID NO: 5995168 - DNA, 25 bp, Homo sapien
cacaagccaggcaaatgctacaaag

SEQ ID NO: 5995169 - DNA, 25 bp, Homo sapien
cgctggatatttgaatatgccatct

SEQ ID NO: 5995170 - DNA, 25 bp, Homo sapien
aaatgctacaaagtcccatgtttag

SEQ ID NO: 5995171 - DNA, 25 bp, Homo sapien
agggaacaacgcagggactaatgca

SEQ ID NO: 5995172 - DNA, 25 bp, Homo sapien
ctgcatccaccgggatgcccgcctt

SEQ ID NO: 5995173 - DNA, 25 bp, Homo sapien
ctcttctgaaccctgcattaaaccc

SEQ ID NO: 5995174 - DNA, 25 bp, Homo sapien
acggtggtgcattaaacaacgactc

SEQ ID NO: 5995175 - DNA, 25 bp, Homo sapien
gacagagcatgcaattcgcaagaat

SEQ ID NO: 5995176 - DNA, 25 bp, Homo sapien
taacacagctgcaaacccatttgcg

SEQ ID NO: 5995177 - DNA, 25 bp, Homo sapien
acacgaacactacttcctcatccaa

SEQ ID NO: 5995178 - DNA, 25 bp, Homo sapien
gtcgttgaatatacatatcaagtca

SEQ ID NO: 5995179 - DNA, 25 bp, Homo sapien
catgggtccacaagccaggcaaatg

SEQ ID NO: 5995180 - DNA, 25 bp, Homo sapien
ctggatatttgaatatgccatctgc

SEQ ID NO: 5995181 - DNA, 25 bp, Homo sapien
acaccagaccaccggaagaacgcta

SEQ ID NO: 5995182 - DNA, 25 bp, Homo sapien
agagattgatctactcgggtaagat

SEQ ID NO: 5995183 - DNA, 25 bp, Homo sapien
ctccagaggaaggctccaacacgaa

SEQ ID NO: 5995184 - DNA, 25 bp, Homo sapien
tatgatccagtccaacccgcaattg

SEQ ID NO: 5995185 - DNA, 25 bp, Homo sapien
acgagctgttgaggatgatggaaaa

SEQ ID NO: 5995186 - DNA, 25 bp, Homo sapien
tatgattagacagagcatgcaattc

SEQ ID NO: 5995187 - DNA, 25 bp, Homo sapien
cttgaccagtgccagatacgctgga

SEQ ID NO: 5995188 - DNA, 25 bp, Homo sapien
ccaccccgaacatgtcgtcaggtca

SEQ ID NO: 5995189 - DNA, 25 bp, Homo sapien
gtcccatgtttagacagatgctcac

SEQ ID NO: 5995190 - DNA, 25 bp, Homo sapien
cacaaaccgccagtgccgctggcgc

SEQ ID NO: 5995191 - DNA, 25 bp, Homo sapien
gcccggacggtggtgcattaaacaa

SEQ ID NO: 5995192 - DNA, 25 bp, Homo sapien
ccaaaccgtggagtcataccacatt

SEQ ID NO: 5995193 - DNA, 25 bp, Homo sapien
gggctgcctctgccttccccgctcc

SEQ ID NO: 5995194 - DNA, 25 bp, Homo sapien
actaatgcaggtaccaacgcaggcg

SEQ ID NO: 5995195 - DNA, 25 bp, Homo sapien
ctgcattaaacccctttgctaacgc

SEQ ID NO: 5995196 - DNA, 25 bp, Homo sapien
ggccgacttgaccagtgccagatac

SEQ ID NO: 5995197 - DNA, 25 bp, Homo sapien
gatggaaaaccccatcttccaatcg

SEQ ID NO: 5995198 - DNA, 25 bp, Homo sapien
tgtttagacagatgctcaccaatcc

SEQ ID NO: 5995199 - DNA, 25 bp, Homo sapien
agtgttgcaattcaaggaggcgata

SEQ ID NO: 5995200 - DNA, 25 bp, Homo sapien
tcctgcattgctagcgtctatgttc

SEQ ID NO: 5995201 - DNA, 25 bp, Homo sapien
ccacattcaagacggtcacagcgtc

SEQ ID NO: 5995202 - DNA, 25 bp, Homo sapien
aaacgacatgggcttcttcgatttc

SEQ ID NO: 5995203 - DNA, 25 bp, Homo sapien
ccaggcaaatgctacaaagtcccat

SEQ ID NO: 5995204 - DNA, 25 bp, Homo sapien
accccgaacatgtcgtcaggtcaaa

SEQ ID NO: 5995205 - DNA, 25 bp, Homo sapien
tgattcactactgaacggcgatgtt

SEQ ID NO: 5995206 - DNA, 25 bp, Homo sapien
aatgtggcacctgaaagcacagtgt

SEQ ID NO: 5995207 - DNA, 25 bp, Homo sapien
ggatgatggaaaaccccatcttcca

SEQ ID NO: 5995208 - DNA, 25 bp, Homo sapien
tctgaaccctgcattaaaccccttt

SEQ ID NO: 5995209 - DNA, 25 bp, Homo sapien
atatacatatcaagtcaggacaaga

SEQ ID NO: 5995210 - DNA, 25 bp, Homo sapien
cgatttcgatagaaacgtcgcagcc

SEQ ID NO: 5995211 - DNA, 25 bp, Homo sapien
atgcccgccttcgatcctgcattgc

SEQ ID NO: 5995212 - DNA, 25 bp, Homo sapien
gaagcggtggctccgtccaaggcgc

SEQ ID NO: 5995213 - DNA, 25 bp, Homo sapien
aataacgccaccgccaccggtgcag

SEQ ID NO: 5995214 - DNA, 25 bp, Homo sapien
gagtcataccacattcaagacggtc

SEQ ID NO: 5995215 - DNA, 25 bp, Homo sapien
tttggcccggacggtggtgcattaa

SEQ ID NO: 5995216 - DNA, 25 bp, Homo sapien
gcgatgctccagaggaaggctccaa

SEQ ID NO: 5995217 - DNA, 25 bp, Homo sapien
ctaaacgacatgggcttcttcgatt

SEQ ID NO: 5995218 - DNA, 25 bp, Homo sapien
ggactttatgatccagtccaacccg

SEQ ID NO: 5995219 - DNA, 25 bp, Homo sapien
cgaacggtatcccggtggcaaatca

SEQ ID NO: 5995220 - DNA, 25 bp, Homo sapien
ggtcaaagtgcaggcttcaatccgc

SEQ ID NO: 5995221 - DNA, 25 bp, Homo sapien
gaccaccggaagaacgctatgaaca

SEQ ID NO: 5995222 - DNA, 25 bp, Homo sapien
gaacactacttcctcatccaacaca

SEQ ID NO: 5995223 - DNA, 25 bp, Homo sapien
gaatatacatatcaagtcaggacaa

SEQ ID NO: 5995224 - DNA, 25 bp, Homo sapien
agctggcactggcgccaccccgaac

SEQ ID NO: 5995225 - DNA, 25 bp, Homo sapien
tcttcgatttcgatagaaacgtcgc

SEQ ID NO: 5995226 - DNA, 25 bp, Homo sapien
acgcaggcgctaacacagctgcaaa

SEQ ID NO: 5995227 - DNA, 25 bp, Homo sapien
cggtggcaaatcagagattgatcta

SEQ ID NO: 5995228 - DNA, 25 bp, Homo sapien
tacaaagtcccatgtttagacagat

SEQ ID NO: 5995229 - DNA, 25 bp, Homo sapien
cgctatgaacatcaattaagacaac

SEQ ID NO: 5995230 - DNA, 25 bp, Homo sapien
ttgcaattcaaggaggcgataaaca

SEQ ID NO: 5995231 - DNA, 25 bp, Homo sapien
aaacccatttgcgtctcttctgaac

SEQ ID NO: 5995232 - DNA, 25 bp, Homo sapien
gcatctcaagcagaagacaccagac

SEQ ID NO: 5995233 - DNA, 25 bp, Homo sapien
taaaggacgaccaaaccgtggagtc

SEQ ID NO: 5995234 - DNA, 25 bp, Homo sapien
atgaacatcaattaagacaactaaa

SEQ ID NO: 5995235 - DNA, 25 bp, Homo sapien
ccgtccaaggcgctcttgattcact

SEQ ID NO: 5995236 - DNA, 25 bp, Homo sapien
gtgcattaaacaacgactcgaataa

SEQ ID NO: 5995237 - DNA, 25 bp, Homo sapien
acaagtgggaagtaaatgtggcacc

SEQ ID NO: 5995238 - DNA, 25 bp, Homo sapien
caaatcagagattgatctactcggg

SEQ ID NO: 5995239 - DNA, 25 bp, Homo sapien
tgcaggtggggctgcctctgccttc

SEQ ID NO: 5995240 - DNA, 25 bp, Homo sapien
caagtcaggacaagacaagtgggaa

SEQ ID NO: 5995241 - DNA, 25 bp, Homo sapien
ggtggggctgcctctgccttccccg

SEQ ID NO: 5995242 - DNA, 25 bp, Homo sapien
gcaaatgctacaaagtcccatgttt

SEQ ID NO: 5995243 - DNA, 25 bp, Homo sapien
aaccctcagatgttggactttatga

SEQ ID NO: 5995244 - DNA, 25 bp, Homo sapien
ggcttcttcgatttcgatagaaacg

SEQ ID NO: 5995245 - DNA, 25 bp, Homo sapien
actttatgatccagtccaacccgca

SEQ ID NO: 5995246 - DNA, 25 bp, Homo sapien
catgggcttcttcgatttcgataga

SEQ ID NO: 5995247 - DNA, 25 bp, Homo sapien
acagctgcaaacccatttgcgtctc

SEQ ID NO: 5995248 - DNA, 25 bp, Homo sapien
atatgccatctgcagacatgtttgg

SEQ ID NO: 5995249 - DNA, 25 bp, Homo sapien
attgatctactcgggtaagatttta

SEQ ID NO: 5995250 - DNA, 25 bp, Homo sapien
acacagggaacaacgcagggactaa

SEQ ID NO: 5995251 - DNA, 25 bp, Homo sapien
ccgacttgaccagtgccagatacgc

SEQ ID NO: 5995252 - DNA, 25 bp, Homo sapien
ctggtcaagtcacaacccaaaccac

SEQ ID NO: 5995253 - DNA, 25 bp, Homo sapien
gatgctcaccaatcctgatatgatt

SEQ ID NO: 5995254 - DNA, 25 bp, Homo sapien
acaagcatctcaagcagaagacacc

SEQ ID NO: 5995255 - DNA, 25 bp, Homo sapien
ggactaatgcaggtaccaacgcagg

SEQ ID NO: 5995256 - DNA, 25 bp, Homo sapien
agcggtggctccgtccaaggcgctc

SEQ ID NO: 5995257 - DNA, 25 bp, Homo sapien
caggtcaaagtgcaggcttcaatcc

SEQ ID NO: 5995258 - DNA, 25 bp, Homo sapien
gcatccaccgggatgcccgccttcg

SEQ ID NO: 5995259 - DNA, 25 bp, Homo sapien
gctgttgaggatgatggaaaacccc

SEQ ID NO: 5995260 - DNA, 25 bp, Homo sapien
cgtggagtcataccacattcaagac

SEQ ID NO: 5995261 - DNA, 25 bp, Homo sapien
ggcgctcttgattcactactgaacg

SEQ ID NO: 5995262 - DNA, 25 bp, Homo sapien
gtggctccgtccaaggcgctcttga

SEQ ID NO: 5995263 - DNA, 25 bp, Homo sapien
agaggaaggctccaacacgaacact

SEQ ID NO: 5995264 - DNA, 25 bp, Homo sapien
cttcctcatccaacacagggaacaa

SEQ ID NO: 5995265 - DNA, 25 bp, Homo sapien
agcgaacggtatcccggtggcaaat

SEQ ID NO: 5995266 - DNA, 25 bp, Homo sapien
ggtccacaagccaggcaaatgctac

SEQ ID NO: 5995267 - DNA, 25 bp, Homo sapien
caagcagaagacaccagaccaccgg

SEQ ID NO: 5995268 - DNA, 25 bp, Homo sapien
ttgaatatgccatctgcagacatgt

SEQ ID NO: 5995269 - DNA, 25 bp, Homo sapien
atatttgaatatgccatctgcagac

SEQ ID NO: 5995270 - DNA, 25 bp, Homo sapien
cagtgccgctggcgcaaataacgcc

SEQ ID NO: 5995271 - DNA, 25 bp, Homo sapien
acccgcaattgcaggccatgggtcc

SEQ ID NO: 5995272 - DNA, 25 bp, Homo sapien
gcccgccttcgatcctgcattgcta

SEQ ID NO: 5995273 - DNA, 25 bp, Homo sapien
ctgcattgctagcgtctatgttcca

SEQ ID NO: 5995274 - DNA, 25 bp, Homo sapien
aggagaagcggtggctccgtccaag

SEQ ID NO: 5995275 - DNA, 25 bp, Homo sapien
ggcactggcgccaccccgaacatgt

SEQ ID NO: 5995276 - DNA, 25 bp, Homo sapien
aattgcaggccatgggtccacaagc

SEQ ID NO: 5995277 - DNA, 25 bp, Homo sapien
atagaaacgtcgcagccctcaggag

SEQ ID NO: 5995278 - DNA, 25 bp, Homo sapien
aacgctatgaacatcaattaagaca

SEQ ID NO: 5995279 - DNA, 25 bp, Homo sapien
cacagcgtccatctggtcaagtcac

SEQ ID NO: 5995280 - DNA, 25 bp, Homo sapien
aaagcgaacggtatcccggtggcaa

SEQ ID NO: 5995281 - DNA, 25 bp, Homo sapien
ctcatccaacacagggaacaacgca

SEQ ID NO: 5995282 - DNA, 25 bp, Homo sapien
ggcaaatcagagattgatctactcg

SEQ ID NO: 5995283 - DNA, 25 bp, Homo sapien
caacacgaacactacttcctcatcc

SEQ ID NO: 5995284 - DNA, 25 bp, Homo sapien
cggtcacagcgtccatctggtcaag

SEQ ID NO: 5995285 - DNA, 25 bp, Homo sapien
cgctggccgacttgaccagtgccag

SEQ ID NO: 5995286 - DNA, 25 bp, Homo sapien
acgactcgaataaccaagacgagct

SEQ ID NO: 5995287 - DNA, 25 bp, Homo sapien
cgcagccctcaggagaagcggtggc

SEQ ID NO: 5995288 - DNA, 25 bp, Homo sapien
agacaactaaacgacatgggcttct

SEQ ID NO: 5995289 - DNA, 25 bp, Homo sapien
aggaggcgataaacaaagcgaacgg

SEQ ID NO: 5995290 - DNA, 25 bp, Homo sapien
tgattagacagagcatgcaattcgc

SEQ ID NO: 5995291 - DNA, 25 bp, Homo sapien
gatgctccagaggaaggctccaaca

SEQ ID NO: 5995292 - DNA, 25 bp, Homo sapien
gccatctgcagacatgtttggcccg

SEQ ID NO: 5995293 - DNA, 25 bp, Homo sapien
cagatgctcaccaatcctgatatga

SEQ ID NO: 5995294 - DNA, 25 bp, Homo sapien
gcagaggcagccccacctgcagagc

SEQ ID NO: 5995295 - DNA, 25 bp, Homo sapien
ttaatgcaccaccgtccgggccaaa

SEQ ID NO: 5995296 - DNA, 25 bp, Homo sapien
ggatcgaaggcgggcatcccggtgg

SEQ ID NO: 5995297 - DNA, 25 bp, Homo sapien
tcgaagaagcccatgtcgtttagtt

SEQ ID NO: 5995298 - DNA, 25 bp, Homo sapien
gagccaccgcttctcctgagggctg

SEQ ID NO: 5995299 - DNA, 25 bp, Homo sapien
tttaaaatcttacccgagtagatca

SEQ ID NO: 5995300 - DNA, 25 bp, Homo sapien
gccgttcagtagtgaatcaagagcg

SEQ ID NO: 5995301 - DNA, 25 bp, Homo sapien
ttgtgacttgaccagatggacgctg

SEQ ID NO: 5995302 - DNA, 25 bp, Homo sapien
gagtcgttgtttaatgcaccaccgt

SEQ ID NO: 5995303 - DNA, 25 bp, Homo sapien
ggcgttatttgcgccagcggcactg

SEQ ID NO: 5995304 - DNA, 25 bp, Homo sapien
tactcaacatctcgttcatttgcga

SEQ ID NO: 5995305 - DNA, 25 bp, Homo sapien
ctgtctaatcatatcaggattggtg

SEQ ID NO: 5995306 - DNA, 25 bp, Homo sapien
aatatccagcgtatctggcactggt

SEQ ID NO: 5995307 - DNA, 25 bp, Homo sapien
cagatggacgctgtgaccgtcttga

SEQ ID NO: 5995308 - DNA, 25 bp, Homo sapien
ttgagatgcttgtacagggggttgg

SEQ ID NO: 5995309 - DNA, 25 bp, Homo sapien
gttccctgtgttggatgaggaagta

SEQ ID NO: 5995310 - DNA, 25 bp, Homo sapien
catcattcttgcgaattgcatgctc

SEQ ID NO: 5995311 - DNA, 25 bp, Homo sapien
atcatcctcaacagctcgtcttggt

SEQ ID NO: 5995312 - DNA, 25 bp, Homo sapien
gatcataaagtccaacatctgaggg

SEQ ID NO: 5995313 - DNA, 25 bp, Homo sapien
gggttcagaagagacgcaaatgggt

SEQ ID NO: 5995314 - DNA, 25 bp, Homo sapien
agaagcccatgtcgtttagttgtct

SEQ ID NO: 5995315 - DNA, 25 bp, Homo sapien
ctgcaccggtggcggtggcgttatt

SEQ ID NO: 5995316 - DNA, 25 bp, Homo sapien
gtggacccatggcctgcaattgcgg

SEQ ID NO: 5995317 - DNA, 25 bp, Homo sapien
ttcctctggagcatcgccaccagga

SEQ ID NO: 5995318 - DNA, 25 bp, Homo sapien
gccaccgggataccgttcgctttgt

SEQ ID NO: 5995319 - DNA, 25 bp, Homo sapien
gacggagccaccgcttctcctgagg

SEQ ID NO: 5995320 - DNA, 25 bp, Homo sapien
agcggggaaggcagaggcagcccca

SEQ ID NO: 5995321 - DNA, 25 bp, Homo sapien
gatgttcatagcgttcttccggtgg

SEQ ID NO: 5995322 - DNA, 25 bp, Homo sapien
tgccacatttacttcccacttgtct

SEQ ID NO: 5995323 - DNA, 25 bp, Homo sapien
ccacatttacttcccacttgtcttg

SEQ ID NO: 5995324 - DNA, 25 bp, Homo sapien
ccgcttctcctgagggctgcgacgt

SEQ ID NO: 5995325 - DNA, 25 bp, Homo sapien
cccataccggcattagggtccatca

SEQ ID NO: 5995326 - DNA, 25 bp, Homo sapien
acatctcgttcatttgcgattggaa

SEQ ID NO: 5995327 - DNA, 25 bp, Homo sapien
ttcatagcgttcttccggtggtctg

SEQ ID NO: 5995328 - DNA, 25 bp, Homo sapien
tgcgattggaagatggggttttcca

SEQ ID NO: 5995329 - DNA, 25 bp, Homo sapien
attcttgcgaattgcatgctctgtc

SEQ ID NO: 5995330 - DNA, 25 bp, Homo sapien
atcgaaggcgggcatcccggtggat

SEQ ID NO: 5995331 - DNA, 25 bp, Homo sapien
tgcgttgttccctgtgttggatgag

SEQ ID NO: 5995332 - DNA, 25 bp, Homo sapien
ggcatattcaaatatccagcgtatc

SEQ ID NO: 5995333 - DNA, 25 bp, Homo sapien
aggggtttaatgcagggttcagaag

SEQ ID NO: 5995334 - DNA, 25 bp, Homo sapien
caggatcgaaggcgggcatcccggt

SEQ ID NO: 5995335 - DNA, 25 bp, Homo sapien
aagcccatgtcgtttagttgtctta

SEQ ID NO: 5995336 - DNA, 25 bp, Homo sapien
cttgaccagatggacgctgtgaccg

SEQ ID NO: 5995337 - DNA, 25 bp, Homo sapien
ataaagtccaacatctgagggttac

SEQ ID NO: 5995338 - DNA, 25 bp, Homo sapien
ttgtttaatgcaccaccgtccgggc

SEQ ID NO: 5995339 - DNA, 25 bp, Homo sapien
cagctgtgttagcgcctgcgttggt

SEQ ID NO: 5995340 - DNA, 25 bp, Homo sapien
ttgatgttcatagcgttcttccggt

SEQ ID NO: 5995341 - DNA, 25 bp, Homo sapien
ccttcctctggagcatcgccaccag

SEQ ID NO: 5995342 - DNA, 25 bp, Homo sapien
agccttcctctggagcatcgccacc

SEQ ID NO: 5995343 - DNA, 25 bp, Homo sapien
gggaaggcagaggcagccccacctg

SEQ ID NO: 5995344 - DNA, 25 bp, Homo sapien
gacgctgtgaccgtcttgaatgtgg

SEQ ID NO: 5995345 - DNA, 25 bp, Homo sapien
ctctgtctaatcatatcaggattgg

SEQ ID NO: 5995346 - DNA, 25 bp, Homo sapien
atcttacccgagtagatcaatctct

SEQ ID NO: 5995347 - DNA, 25 bp, Homo sapien
ggggtggcgccagtgccagctgctg

SEQ ID NO: 5995348 - DNA, 25 bp, Homo sapien
acagctcgtcttggttattcgagtc

SEQ ID NO: 5995349 - DNA, 25 bp, Homo sapien
ctgcactttgacctgacgacatgtt

SEQ ID NO: 5995350 - DNA, 25 bp, Homo sapien
gcatcgccaccaggagcggggaagg

SEQ ID NO: 5995351 - DNA, 25 bp, Homo sapien
gcatctgtctaaacatgggactttg

SEQ ID NO: 5995352 - DNA, 25 bp, Homo sapien
gggggttggaacatagacgctagca

SEQ ID NO: 5995353 - DNA, 25 bp, Homo sapien
gaagatggggttttccatcatcctc

SEQ ID NO: 5995354 - DNA, 25 bp, Homo sapien
cgacatgttcggggtggcgccagtg

SEQ ID NO: 5995355 - DNA, 25 bp, Homo sapien
gcgtatctggcactggtcaagtcgg

SEQ ID NO: 5995356 - DNA, 25 bp, Homo sapien
tggacgctgtgaccgtcttgaatgt

SEQ ID NO: 5995357 - DNA, 25 bp, Homo sapien
tggcggtttgtggtttgggttgtga

SEQ ID NO: 5995358 - DNA, 25 bp, Homo sapien
cgttcatttgcgattggaagatggg

SEQ ID NO: 5995359 - DNA, 25 bp, Homo sapien
aggcagaggcagccccacctgcaga

SEQ ID NO: 5995360 - DNA, 25 bp, Homo sapien
gtctggtgtcttctgcttgagatgc

SEQ ID NO: 5995361 - DNA, 25 bp, Homo sapien
cgtttctatcgaaatcgaagaagcc

SEQ ID NO: 5995362 - DNA, 25 bp, Homo sapien
cctgcgttggtacctgcattagtcc

SEQ ID NO: 5995363 - DNA, 25 bp, Homo sapien
gtttaatgcagggttcagaagagac

SEQ ID NO: 5995364 - DNA, 25 bp, Homo sapien
atcgccaccaggagcggggaaggca

SEQ ID NO: 5995365 - DNA, 25 bp, Homo sapien
cacttgtcttgtcctgacttgatat

SEQ ID NO: 5995366 - DNA, 25 bp, Homo sapien
ttttccatcatcctcaacagctcgt

SEQ ID NO: 5995367 - DNA, 25 bp, Homo sapien
ggaagtagtgttcgtgttggagcct

SEQ ID NO: 5995368 - DNA, 25 bp, Homo sapien
tggatgcagcgtttcccgcgttagc

SEQ ID NO: 5995369 - DNA, 25 bp, Homo sapien
ttggatgaggaagtagtgttcgtgt

SEQ ID NO: 5995370 - DNA, 25 bp, Homo sapien
gatcaatctctgatttgccaccggg

SEQ ID NO: 5995371 - DNA, 25 bp, Homo sapien
cactggcggtttgtggtttgggttg

SEQ ID NO: 5995372 - DNA, 25 bp, Homo sapien
cgggcatcccggtggatgcagcgtt

SEQ ID NO: 5995373 - DNA, 25 bp, Homo sapien
cagctgctgcaccggtggcggtggc

SEQ ID NO: 5995374 - DNA, 25 bp, Homo sapien
cctctggagcatcgccaccaggagc

SEQ ID NO: 5995375 - DNA, 25 bp, Homo sapien
cagcgtttcccgcgttagcaaaggg

SEQ ID NO: 5995376 - DNA, 25 bp, Homo sapien
ggactggatcataaagtccaacatc

SEQ ID NO: 5995377 - DNA, 25 bp, Homo sapien
aacatcgccgttcagtagtgaatca

SEQ ID NO: 5995378 - DNA, 25 bp, Homo sapien
gtctaaacatgggactttgtagcat

SEQ ID NO: 5995379 - DNA, 25 bp, Homo sapien
gggataccgttcgctttgtttatcg

SEQ ID NO: 5995380 - DNA, 25 bp, Homo sapien
ccccacctgcagagcccataccggc

SEQ ID NO: 5995381 - DNA, 25 bp, Homo sapien
gcagccccacctgcagagcccatac

SEQ ID NO: 5995382 - DNA, 25 bp, Homo sapien
agacgctagcaatgcaggatcgaag

SEQ ID NO: 5995383 - DNA, 25 bp, Homo sapien
atgaggaagtagtgttcgtgttgga

SEQ ID NO: 5995384 - DNA, 25 bp, Homo sapien
gtagtgaatcaagagcgccttggac

SEQ ID NO: 5995385 - DNA, 25 bp, Homo sapien
cattagtccctgcgttgttccctgt

SEQ ID NO: 5995386 - DNA, 25 bp, Homo sapien
tcgccgttcagtagtgaatcaagag

SEQ ID NO: 5995387 - DNA, 25 bp, Homo sapien
cgttgtttaatgcaccaccgtccgg

SEQ ID NO: 5995388 - DNA, 25 bp, Homo sapien
gccagcggcactggcggtttgtggt

SEQ ID NO: 5995389 - DNA, 25 bp, Homo sapien
cagggggttggaacatagacgctag

SEQ ID NO: 5995390 - DNA, 25 bp, Homo sapien
acctgcagagcccataccggcatta

SEQ ID NO: 5995391 - DNA, 25 bp, Homo sapien
gtctgcagatggcatattcaaatat

SEQ ID NO: 5995392 - DNA, 25 bp, Homo sapien
atgttcggggtggcgccagtgccag

SEQ ID NO: 5995393 - DNA, 25 bp, Homo sapien
gcttctcctgagggctgcgacgttt

SEQ ID NO: 5995394 - DNA, 25 bp, Homo sapien
accggtggcggtggcgttatttgcg

SEQ ID NO: 5995395 - DNA, 25 bp, Homo sapien
ttatttgcgccagcggcactggcgg

SEQ ID NO: 5995396 - DNA, 25 bp, Homo sapien
tacctgcattagtccctgcgttgtt

SEQ ID NO: 5995397 - DNA, 25 bp, Homo sapien
gccagctgctgcaccggtggcggtg

SEQ ID NO: 5995398 - DNA, 25 bp, Homo sapien
agtagatcaatctctgatttgccac

SEQ ID NO: 5995399 - DNA, 25 bp, Homo sapien
cgtccgggccaaacatgtctgcaga

SEQ ID NO: 5995400 - DNA, 25 bp, Homo sapien
cagcggcactggcggtttgtggttt

SEQ ID NO: 5995401 - DNA, 25 bp, Homo sapien
cctgacttgatatgtatattcaacg

SEQ ID NO: 5995402 - DNA, 25 bp, Homo sapien
gaattgcatgctctgtctaatcata

SEQ ID NO: 5995403 - DNA, 25 bp, Homo sapien
attggtgagcatctgtctaaacatg

SEQ ID NO: 5995404 - DNA, 25 bp, Homo sapien
gtagtgttcgtgttggagccttcct

SEQ ID NO: 5995405 - DNA, 25 bp, Homo sapien
tgaatcaagagcgccttggacggag

SEQ ID NO: 5995406 - DNA, 25 bp, Homo sapien
ccggtggatgcagcgtttcccgcgt

SEQ ID NO: 5995407 - DNA, 25 bp, Homo sapien
ttcaaatatccagcgtatctggcac

SEQ ID NO: 5995408 - DNA, 25 bp, Homo sapien
ctgacgacatgttcggggtggcgcc

SEQ ID NO: 5995409 - DNA, 25 bp, Homo sapien
gcgccttggacggagccaccgcttc

SEQ ID NO: 5995410 - DNA, 25 bp, Homo sapien
tattcaaatatccagcgtatctggc

SEQ ID NO: 5995411 - DNA, 25 bp, Homo sapien
ttagtccctgcgttgttccctgtgt

SEQ ID NO: 5995412 - DNA, 25 bp, Homo sapien
ctgcgacgtttctatcgaaatcgaa

SEQ ID NO: 5995413 - DNA, 25 bp, Homo sapien
atgggactttgtagcatttgcctgg

SEQ ID NO: 5995414 - DNA, 25 bp, Homo sapien
tctatcgaaatcgaagaagcccatg

SEQ ID NO: 5995415 - DNA, 25 bp, Homo sapien
tgtcttctgcttgagatgcttgtac

SEQ ID NO: 5995416 - DNA, 25 bp, Homo sapien
gcaaaggggtttaatgcagggttca

SEQ ID NO: 5995417 - DNA, 25 bp, Homo sapien
cgattggaagatggggttttccatc

SEQ ID NO: 5995418 - DNA, 25 bp, Homo sapien
tagttgtcttaattgatgttcatag

SEQ ID NO: 5995419 - DNA, 25 bp, Homo sapien
tcccggtggatgcagcgtttcccgc

SEQ ID NO: 5995420 - DNA, 25 bp, Homo sapien
gagcatcgccaccaggagcggggaa

SEQ ID NO: 5995421 - DNA, 25 bp, Homo sapien
tttgcagctgtgttagcgcctgcgt

SEQ ID NO: 5995422 - DNA, 25 bp, Homo sapien
cgttatttgcgccagcggcactggc

SEQ ID NO: 5995423 - DNA, 25 bp, Homo sapien
tgtggtatgactccacggtttggtc

SEQ ID NO: 5995424 - DNA, 25 bp, Homo sapien
ggagcggggaaggcagaggcagccc

SEQ ID NO: 5995425 - DNA, 25 bp, Homo sapien
actggatcataaagtccaacatctg

SEQ ID NO: 5995426 - DNA, 25 bp, Homo sapien
ttgttccctgtgttggatgaggaag

SEQ ID NO: 5995427 - DNA, 25 bp, Homo sapien
gttcttccggtggtctggtgtcttc

SEQ ID NO: 5995428 - DNA, 25 bp, Homo sapien
acatgtctgcagatggcatattcaa

SEQ ID NO: 5995429 - DNA, 25 bp, Homo sapien
cctggcttgtggacccatggcctgc

SEQ ID NO: 5995430 - DNA, 25 bp, Homo sapien
tagcaatgcaggatcgaaggcgggc

SEQ ID NO: 5995431 - DNA, 25 bp, Homo sapien
ttcatttgcgattggaagatggggt

SEQ ID NO: 5995432 - DNA, 25 bp, Homo sapien
ttgccaccgggataccgttcgcttt

SEQ ID NO: 5995433 - DNA, 25 bp, Homo sapien
tgttcgtgttggagccttcctctgg

SEQ ID NO: 5995434 - DNA, 25 bp, Homo sapien
caggagcggggaaggcagaggcagc

SEQ ID NO: 5995435 - DNA, 25 bp, Homo sapien
tgcagggttcagaagagacgcaaat

SEQ ID NO: 5995436 - DNA, 25 bp, Homo sapien
gcaatgcaggatcgaaggcgggcat

SEQ ID NO: 5995437 - DNA, 25 bp, Homo sapien
agggtccatcattcttgcgaattgc

SEQ ID NO: 5995438 - DNA, 25 bp, Homo sapien
gcctgcactttgacctgacgacatg

SEQ ID NO: 5995439 - DNA, 25 bp, Homo sapien
agtccctgcgttgttccctgtgttg

SEQ ID NO: 5995440 - DNA, 25 bp, Homo sapien
ggttgtgacttgaccagatggacgc

SEQ ID NO: 5995441 - DNA, 25 bp, Homo sapien
cgtttagttgtcttaattgatgttc

SEQ ID NO: 5995442 - DNA, 25 bp, Homo sapien
aagtcggccagcggattgaagcctg

SEQ ID NO: 5995443 - DNA, 25 bp, Homo sapien
ggttggactggatcataaagtccaa

SEQ ID NO: 5995444 - DNA, 25 bp, Homo sapien
gtagcatttgcctggcttgtggacc

SEQ ID NO: 5995445 - DNA, 25 bp, Homo sapien
ccggcattagggtccatcattcttg

SEQ ID NO: 5995446 - DNA, 25 bp, Homo sapien
tcgctttgtttatcgcctccttgaa

SEQ ID NO: 5995447 - DNA, 25 bp, Homo sapien
tttagttgtcttaattgatgttcat

SEQ ID NO: 5995448 - DNA, 25 bp, Homo sapien
catcctcaacagctcgtcttggtta

SEQ ID NO: 5995449 - DNA, 25 bp, Homo sapien
cttgaatgtggtatgactccacggt

SEQ ID NO: 5995450 - DNA, 25 bp, Homo sapien
ctttcaggtgccacatttacttccc

SEQ ID NO: 5995451 - DNA, 25 bp, Homo sapien
atctcgttcatttgcgattggaaga

SEQ ID NO: 5995452 - DNA, 25 bp, Homo sapien
tgtgctttcaggtgccacatttact

SEQ ID NO: 5995453 - DNA, 25 bp, Homo sapien
tttgggttgtgacttgaccagatgg

SEQ ID NO: 5995454 - DNA, 25 bp, Homo sapien
tttatcgcctccttgaattgcaaca

SEQ ID NO: 5995455 - DNA, 25 bp, Homo sapien
ctgcagatggcatattcaaatatcc

SEQ ID NO: 5995456 - DNA, 25 bp, Homo sapien
tggcgccagtgccagctgctgcacc

SEQ ID NO: 5995457 - DNA, 25 bp, Homo sapien
gtggcggtggcgttatttgcgccag

SEQ ID NO: 5995458 - DNA, 25 bp, Homo sapien
atcaggattggtgagcatctgtcta

SEQ ID NO: 5995459 - DNA, 25 bp, Homo sapien
accagatggacgctgtgaccgtctt

SEQ ID NO: 5995460 - DNA, 25 bp, Homo sapien
gtatgactccacggtttggtcgtcc

SEQ ID NO: 5995461 - DNA, 25 bp, Homo sapien
gttcgctttgtttatcgcctccttg

SEQ ID NO: 5995462 - DNA, 25 bp, Homo sapien
tggtctggtgtcttctgcttgagat

SEQ ID NO: 5995463 - DNA, 25 bp, Homo sapien
gttactcaacatctcgttcatttgc

SEQ ID NO: 5995464 - DNA, 25 bp, Homo sapien
ggtcaagtcggccagcggattgaag

SEQ ID NO: 5995465 - DNA, 25 bp, Homo sapien
tttgtttatcgcctccttgaattgc

SEQ ID NO: 5995466 - DNA, 25 bp, Homo sapien
gcagagcccataccggcattagggt

SEQ ID NO: 5995467 - DNA, 25 bp, Homo sapien
attgcatgctctgtctaatcatatc

SEQ ID NO: 5995468 - DNA, 25 bp, Homo sapien
atttgcgccagcggcactggcggtt

SEQ ID NO: 5995469 - DNA, 25 bp, Homo sapien
aagagcgccttggacggagccaccg

SEQ ID NO: 5995470 - DNA, 25 bp, Homo sapien
caacatctgagggttactcaacatc

SEQ ID NO: 5995471 - DNA, 25 bp, Homo sapien
gctagcaatgcaggatcgaaggcgg

SEQ ID NO: 5995472 - DNA, 25 bp, Homo sapien
ggtggatgcagcgtttcccgcgtta

SEQ ID NO: 5995473 - DNA, 25 bp, Homo sapien
gaacatagacgctagcaatgcagga

SEQ ID NO: 5995474 - DNA, 25 bp, Homo sapien
ctgtctaaacatgggactttgtagc

SEQ ID NO: 5995475 - DNA, 25 bp, Homo sapien
ttagggtccatcattcttgcgaatt

SEQ ID NO: 5995476 - DNA, 25 bp, Homo sapien
caccaccgtccgggccaaacatgtc

SEQ ID NO: 5995477 - DNA, 25 bp, Homo sapien
tatccagcgtatctggcactggtca

SEQ ID NO: 5995478 - DNA, 25 bp, Homo sapien
gaccgtcttgaatgtggtatgactc

SEQ ID NO: 5995479 - DNA, 25 bp, Homo sapien
tcatatcaggattggtgagcatctg

SEQ ID NO: 5995480 - DNA, 25 bp, Homo sapien
acatttacttcccacttgtcttgtc

SEQ ID NO: 5995481 - DNA, 25 bp, Homo sapien
ccgttcgctttgtttatcgcctcct

SEQ ID NO: 5995482 - DNA, 25 bp, Homo sapien
tgcaggatcgaaggcgggcatcccg

SEQ ID NO: 5995483 - DNA, 25 bp, Homo sapien
atggggttttccatcatcctcaaca

SEQ ID NO: 5995484 - DNA, 25 bp, Homo sapien
tatcgcctccttgaattgcaacact

SEQ ID NO: 5995485 - DNA, 25 bp, Homo sapien
cgttgttccctgtgttggatgagga

SEQ ID NO: 5995486 - DNA, 25 bp, Homo sapien
gggttggaacatagacgctagcaat

SEQ ID NO: 5995487 - DNA, 25 bp, Homo sapien
gtttgtggtttgggttgtgacttga

SEQ ID NO: 5995488 - DNA, 25 bp, Homo sapien
ctaatcatatcaggattggtgagca

SEQ ID NO: 5995489 - DNA, 25 bp, Homo sapien
gataccgttcgctttgtttatcgcc

SEQ ID NO: 5995490 - DNA, 25 bp, Homo sapien
attgcaacactgtgctttcaggtgc

SEQ ID NO: 5995491 - DNA, 25 bp, Homo sapien
catgctctgtctaatcatatcagga

SEQ ID NO: 5995492 - DNA, 25 bp, Homo sapien
gcttgtggacccatggcctgcaatt

SEQ ID NO: 5995493 - DNA, 25 bp, Homo sapien
gaaatcgaagaagcccatgtcgttt

SEQ ID NO: 5995494 - DNA, 25 bp, Homo sapien
tgaatgtggtatgactccacggttt

SEQ ID NO: 5995495 - DNA, 25 bp, Homo sapien
caccgcttctcctgagggctgcgac

SEQ ID NO: 5995496 - DNA, 25 bp, Homo sapien
tggatcataaagtccaacatctgag

SEQ ID NO: 5995497 - DNA, 25 bp, Homo sapien
acatgggactttgtagcatttgcct

SEQ ID NO: 5995498 - DNA, 25 bp, Homo sapien
tgcagcgtttcccgcgttagcaaag

SEQ ID NO: 5995499 - DNA, 25 bp, Homo sapien
atctgtctaaacatgggactttgta

SEQ ID NO: 5995500 - DNA, 25 bp, Homo sapien
tggtgagcatctgtctaaacatggg

SEQ ID NO: 5995501 - DNA, 25 bp, Homo sapien
ttgaattgcaacactgtgctttcag

SEQ ID NO: 5995502 - DNA, 25 bp, Homo sapien
attggaagatggggttttccatcat

SEQ ID NO: 5995503 - DNA, 25 bp, Homo sapien
tggcttgtggacccatggcctgcaa

SEQ ID NO: 5995504 - DNA, 25 bp, Homo sapien
ggattggtgagcatctgtctaaaca

SEQ ID NO: 5995505 - DNA, 25 bp, Homo sapien
gctgtgttagcgcctgcgttggtac

SEQ ID NO: 5995506 - DNA, 25 bp, Homo sapien
gagacgcaaatgggtttgcagctgt

SEQ ID NO: 5995507 - DNA, 25 bp, Homo sapien
ggccaaacatgtctgcagatggcat

SEQ ID NO: 5995508 - DNA, 25 bp, Homo sapien
catattcaaatatccagcgtatctg

SEQ ID NO: 5995509 - DNA, 25 bp, Homo sapien
cgttggtacctgcattagtccctgc

SEQ ID NO: 5995510 - DNA, 25 bp, Homo sapien
agatggcatattcaaatatccagcg

SEQ ID NO: 5995511 - DNA, 25 bp, Homo sapien
ttattcgagtcgttgtttaatgcac

SEQ ID NO: 5995512 - DNA, 25 bp, Homo sapien
tgttagcgcctgcgttggtacctgc

SEQ ID NO: 5995513 - DNA, 25 bp, Homo sapien
attcgagtcgttgtttaatgcacca

SEQ ID NO: 5995514 - DNA, 25 bp, Homo sapien
tcttggttattcgagtcgttgttta

SEQ ID NO: 5995515 - DNA, 25 bp, Homo sapien
tgaagcctgcactttgacctgacga

SEQ ID NO: 5995516 - DNA, 25 bp, Homo sapien
tgggtttgcagctgtgttagcgcct

SEQ ID NO: 5995517 - DNA, 25 bp, Homo sapien
atgtcgtttagttgtcttaattgat

SEQ ID NO: 5995518 - DNA, 25 bp, Homo sapien
aatgcaccaccgtccgggccaaaca

SEQ ID NO: 5995519 - DNA, 25 bp, Homo sapien
ggtttgggttgtgacttgaccagat

SEQ ID NO: 5995520 - DNA, 25 bp, Homo sapien
tccctgtgttggatgaggaagtagt

SEQ ID NO: 5995521 - DNA, 25 bp, Homo sapien
cctgcgttgttccctgtgttggatg

SEQ ID NO: 5995522 - DNA, 25 bp, Homo sapien
caggattggtgagcatctgtctaaa

SEQ ID NO: 5995523 - DNA, 25 bp, Homo sapien
gaggaagtagtgttcgtgttggagc

SEQ ID NO: 5995524 - DNA, 25 bp, Homo sapien
gctgctgcaccggtggcggtggcgt

SEQ ID NO: 5995525 - DNA, 25 bp, Homo sapien
cggtggcgttatttgcgccagcggc

SEQ ID NO: 5995526 - DNA, 25 bp, Homo sapien
ggcattagggtccatcattcttgcg

SEQ ID NO: 5995527 - DNA, 25 bp, Homo sapien
caggtgccacatttacttcccactt

SEQ ID NO: 5995528 - DNA, 25 bp, Homo sapien
acatctgagggttactcaacatctc

SEQ ID NO: 5995529 - DNA, 25 bp, Homo sapien
accgtccgggccaaacatgtctgca

SEQ ID NO: 5995530 - DNA, 25 bp, Homo sapien
accaggagcggggaaggcagaggca

SEQ ID NO: 5995531 - DNA, 25 bp, Homo sapien
gcgttagcaaaggggtttaatgcag

SEQ ID NO: 5995532 - DNA, 25 bp, Homo sapien
taaacatcgccgttcagtagtgaat

SEQ ID NO: 5995533 - DNA, 25 bp, Homo sapien
ccatggcctgcaattgcgggttgga

SEQ ID NO: 5995534 - DNA, 25 bp, Homo sapien
catcgccgttcagtagtgaatcaag

SEQ ID NO: 5995535 - DNA, 25 bp, Homo sapien
tttgcctggcttgtggacccatggc

SEQ ID NO: 5995536 - DNA, 25 bp, Homo sapien
gtggcgttatttgcgccagcggcac

SEQ ID NO: 5995537 - DNA, 25 bp, Homo sapien
aatcgaagaagcccatgtcgtttag

SEQ ID NO: 5995538 - DNA, 25 bp, Homo sapien
ggttttccatcatcctcaacagctc

SEQ ID NO: 5995539 - DNA, 25 bp, Homo sapien
ctgtgaccgtcttgaatgtggtatg

SEQ ID NO: 5995540 - DNA, 25 bp, Homo sapien
cggccagcggattgaagcctgcact

SEQ ID NO: 5995541 - DNA, 25 bp, Homo sapien
tgtttatcgcctccttgaattgcaa

SEQ ID NO: 5995542 - DNA, 25 bp, Homo sapien
ctggtcaagtcggccagcggattga

SEQ ID NO: 5995543 - DNA, 25 bp, Homo sapien
ctaaacatgggactttgtagcattt

SEQ ID NO: 5995544 - DNA, 25 bp, Homo sapien
aattgatgttcatagcgttcttccg

SEQ ID NO: 5995545 - DNA, 25 bp, Homo sapien
atctgagggttactcaacatctcgt

SEQ ID NO: 5995546 - DNA, 25 bp, Homo sapien
gtggtttgggttgtgacttgaccag

SEQ ID NO: 5995547 - DNA, 25 bp, Homo sapien
ctcctgagggctgcgacgtttctat

SEQ ID NO: 5995548 - DNA, 25 bp, Homo sapien
acatagacgctagcaatgcaggatc

SEQ ID NO: 5995549 - DNA, 25 bp, Homo sapien
agaggcagccccacctgcagagccc

SEQ ID NO: 5995550 - DNA, 25 bp, Homo sapien
acctgacgacatgttcggggtggcg

SEQ ID NO: 5995551 - DNA, 25 bp, Homo sapien
gggactttgtagcatttgcctggct

SEQ ID NO: 5995552 - DNA, 25 bp, Homo sapien
cagcggattgaagcctgcactttga

SEQ ID NO: 5995553 - DNA, 25 bp, Homo sapien
gttggaacatagacgctagcaatgc

SEQ ID NO: 5995554 - DNA, 25 bp, Homo sapien
ttccggtggtctggtgtcttctgct

SEQ ID NO: 5995555 - DNA, 25 bp, Homo sapien
gcggattgaagcctgcactttgacc

SEQ ID NO: 5995556 - DNA, 25 bp, Homo sapien
agggctgcgacgtttctatcgaaat

SEQ ID NO: 5995557 - DNA, 25 bp, Homo sapien
cgagtagatcaatctctgatttgcc

SEQ ID NO: 5995558 - DNA, 25 bp, Homo sapien
ttggttattcgagtcgttgtttaat

SEQ ID NO: 5995559 - DNA, 25 bp, Homo sapien
cgtgttggagccttcctctggagca

SEQ ID NO: 5995560 - DNA, 25 bp, Homo sapien
cctgtgttggatgaggaagtagtgt

SEQ ID NO: 5995561 - DNA, 25 bp, Homo sapien
ttagcgcctgcgttggtacctgcat

SEQ ID NO: 5995562 - DNA, 25 bp, Homo sapien
ggtgtcttctgcttgagatgcttgt

SEQ ID NO: 5995563 - DNA, 25 bp, Homo sapien
gtgccagctgctgcaccggtggcgg

SEQ ID NO: 5995564 - DNA, 25 bp, Homo sapien
gttgtcttaattgatgttcatagcg

SEQ ID NO: 5995565 - DNA, 25 bp, Homo sapien
ggtggcgccagtgccagctgctgca

SEQ ID NO: 5995566 - DNA, 25 bp, Homo sapien
ggcatcccggtggatgcagcgtttc

SEQ ID NO: 5995567 - DNA, 25 bp, Homo sapien
tttctatcgaaatcgaagaagccca

SEQ ID NO: 5995568 - DNA, 25 bp, Homo sapien
ttcagtagtgaatcaagagcgcctt

SEQ ID NO: 5995569 - DNA, 25 bp, Homo sapien
gaaggcagaggcagccccacctgca

SEQ ID NO: 5995570 - DNA, 25 bp, Homo sapien
ttggactggatcataaagtccaaca

SEQ ID NO: 5995571 - DNA, 25 bp, Homo sapien
atggcatattcaaatatccagcgta

SEQ ID NO: 5995572 - DNA, 25 bp, Homo sapien
tgcaattgcgggttggactggatca

SEQ ID NO: 5995573 - DNA, 25 bp, Homo sapien
ctgagggttactcaacatctcgttc

SEQ ID NO: 5995574 - DNA, 25 bp, Homo sapien
tggagcatcgccaccaggagcgggg

SEQ ID NO: 5995575 - DNA, 25 bp, Homo sapien
tcgagtcgttgtttaatgcaccacc

SEQ ID NO: 5995576 - DNA, 25 bp, Homo sapien
aatgcaggatcgaaggcgggcatcc

SEQ ID NO: 5995577 - DNA, 25 bp, Homo sapien
tagcgttcttccggtggtctggtgt

SEQ ID NO: 5995578 - DNA, 25 bp, Homo sapien
taccggcattagggtccatcattct

SEQ ID NO: 5995579 - DNA, 25 bp, Homo sapien
atgactccacggtttggtcgtcctt

SEQ ID NO: 5995580 - DNA, 25 bp, Homo sapien
ttaatgcagggttcagaagagacgc

SEQ ID NO: 5995581 - DNA, 25 bp, Homo sapien
tgttggagccttcctctggagcatc

SEQ ID NO: 5995582 - DNA, 25 bp, Homo sapien
gcagatggcatattcaaatatccag

SEQ ID NO: 5995583 - DNA, 25 bp, Homo sapien
ccatcatcctcaacagctcgtcttg

SEQ ID NO: 5995584 - DNA, 25 bp, Homo sapien
gtcggccagcggattgaagcctgca

SEQ ID NO: 5995585 - DNA, 25 bp, Homo sapien
caattgcgggttggactggatcata

SEQ ID NO: 5995586 - DNA, 25 bp, Homo sapien
ttggagccttcctctggagcatcgc

SEQ ID NO: 5995587 - DNA, 25 bp, Homo sapien
ccttgaattgcaacactgtgctttc

SEQ ID NO: 5995588 - DNA, 25 bp, Homo sapien
ttgtggacccatggcctgcaattgc

SEQ ID NO: 5995589 - DNA, 25 bp, Homo sapien
gtcttgaatgtggtatgactccacg

SEQ ID NO: 5995590 - DNA, 25 bp, Homo sapien
catttgcgattggaagatggggttt

SEQ ID NO: 5995591 - DNA, 25 bp, Homo sapien
tccctgcgttgttccctgtgttgga

SEQ ID NO: 5995592 - DNA, 25 bp, Homo sapien
tcggggtggcgccagtgccagctgc

SEQ ID NO: 5995593 - DNA, 25 bp, Homo sapien
gcaccggtggcggtggcgttatttg

SEQ ID NO: 5995594 - DNA, 25 bp, Homo sapien
tgacctgacgacatgttcggggtgg

SEQ ID NO: 5995595 - DNA, 25 bp, Homo sapien
gtgaccgtcttgaatgtggtatgac

SEQ ID NO: 5995596 - DNA, 25 bp, Homo sapien
gtcgtttagttgtcttaattgatgt

SEQ ID NO: 5995597 - DNA, 25 bp, Homo sapien
gttcggggtggcgccagtgccagct

SEQ ID NO: 5995598 - DNA, 25 bp, Homo sapien
cctgcaattgcgggttggactggat

SEQ ID NO: 5995599 - DNA, 25 bp, Homo sapien
tccatcattcttgcgaattgcatgc

SEQ ID NO: 5995600 - DNA, 25 bp, Homo sapien
gagatgcttgtacagggggttggaa

SEQ ID NO: 5995601 - DNA, 25 bp, Homo sapien
gcttgagatgcttgtacagggggtt

SEQ ID NO: 5995602 - DNA, 25 bp, Homo sapien
agctcgtcttggttattcgagtcgt

SEQ ID NO: 5995603 - DNA, 25 bp, Homo sapien
agtgttcgtgttggagccttcctct

SEQ ID NO: 5995604 - DNA, 25 bp, Homo sapien
aatcaagagcgccttggacggagcc

SEQ ID NO: 5995605 - DNA, 25 bp, Homo sapien
tgcttgtacagggggttggaacata

SEQ ID NO: 5995606 - DNA, 25 bp, Homo sapien
gggtttaatgcagggttcagaagag

SEQ ID NO: 5995607 - DNA, 25 bp, Homo sapien
aaacatgggactttgtagcatttgc

SEQ ID NO: 5995608 - DNA, 25 bp, Homo sapien
ggatgaggaagtagtgttcgtgttg

SEQ ID NO: 5995609 - DNA, 25 bp, Homo sapien
gttagcaaaggggtttaatgcaggg

SEQ ID NO: 5995610 - DNA, 25 bp, Homo sapien
cattagggtccatcattcttgcgaa

SEQ ID NO: 5995611 - DNA, 25 bp, Homo sapien
ggtgccacatttacttcccacttgt

SEQ ID NO: 5995612 - DNA, 25 bp, Homo sapien
tgcgttggtacctgcattagtccct

SEQ ID NO: 5995613 - DNA, 25 bp, Homo sapien
tgatttgccaccgggataccgttcg

SEQ ID NO: 5995614 - DNA, 25 bp, Homo sapien
gtttaatgcaccaccgtccgggcca

SEQ ID NO: 5995615 - DNA, 25 bp, Homo sapien
ttgcgaattgcatgctctgtctaat

SEQ ID NO: 5995616 - DNA, 25 bp, Homo sapien
aatgggtttgcagctgtgttagcgc

SEQ ID NO: 5995617 - DNA, 25 bp, Homo sapien
gcctccttgaattgcaacactgtgc

SEQ ID NO: 5995618 - DNA, 25 bp, Homo sapien
tttgacctgacgacatgttcggggt

SEQ ID NO: 5995619 - DNA, 25 bp, Homo sapien
gaagaagcccatgtcgtttagttgt

SEQ ID NO: 5995620 - DNA, 25 bp, Homo sapien
catttgcctggcttgtggacccatg

SEQ ID NO: 5995621 - DNA, 25 bp, Homo sapien
tgctgcaccggtggcggtggcgtta

SEQ ID NO: 5995622 - DNA, 25 bp, Homo sapien
ctccttgaattgcaacactgtgctt

SEQ ID NO: 5995623 - DNA, 25 bp, Homo sapien
ggctgcgacgtttctatcgaaatcg

SEQ ID NO: 5995624 - DNA, 25 bp, Homo sapien
agccccacctgcagagcccataccg

SEQ ID NO: 5995625 - DNA, 25 bp, Homo sapien
agcatttgcctggcttgtggaccca

SEQ ID NO: 5995626 - DNA, 25 bp, Homo sapien
cctgcattagtccctgcgttgttcc

SEQ ID NO: 5995627 - DNA, 25 bp, Homo sapien
cataccggcattagggtccatcatt

SEQ ID NO: 5995628 - DNA, 25 bp, Homo sapien
cttgtcttgtcctgacttgatatgt

SEQ ID NO: 5995629 - DNA, 25 bp, Homo sapien
ttgtcctgacttgatatgtatattc

SEQ ID NO: 5995630 - DNA, 25 bp, Homo sapien
aatgtggtatgactccacggtttgg

SEQ ID NO: 5995631 - DNA, 25 bp, Homo sapien
agcgcctgcgttggtacctgcatta

SEQ ID NO: 5995632 - DNA, 25 bp, Homo sapien
tcgaaatcgaagaagcccatgtcgt

SEQ ID NO: 5995633 - DNA, 25 bp, Homo sapien
tgtcttgtcctgacttgatatgtat

SEQ ID NO: 5995634 - DNA, 25 bp, Homo sapien
cttacccgagtagatcaatctctga

SEQ ID NO: 5995635 - DNA, 25 bp, Homo sapien
ccacctgcagagcccataccggcat

SEQ ID NO: 5995636 - DNA, 25 bp, Homo sapien
aatgcagggttcagaagagacgcaa

SEQ ID NO: 5995637 - DNA, 25 bp, Homo sapien
cgggttggactggatcataaagtcc

SEQ ID NO: 5995638 - DNA, 25 bp, Homo sapien
gactttgtagcatttgcctggcttg

SEQ ID NO: 5995639 - DNA, 25 bp, Homo sapien
gccttggacggagccaccgcttctc

SEQ ID NO: 5995640 - DNA, 25 bp, Homo sapien
ccggtggtctggtgtcttctgcttg

SEQ ID NO: 5995641 - DNA, 25 bp, Homo sapien
aaaggggtttaatgcagggttcaga

SEQ ID NO: 5995642 - DNA, 25 bp, Homo sapien
catcccggtggatgcagcgtttccc

SEQ ID NO: 5995643 - DNA, 25 bp, Homo sapien
ggcgggcatcccggtggatgcagcg

SEQ ID NO: 5995644 - DNA, 25 bp, Homo sapien
gacgtttctatcgaaatcgaagaag

SEQ ID NO: 5995645 - DNA, 25 bp, Homo sapien
gacgacatgttcggggtggcgccag

SEQ ID NO: 5995646 - DNA, 25 bp, Homo sapien
ctggtgtcttctgcttgagatgctt

SEQ ID NO: 5995647 - DNA, 25 bp, Homo sapien
tgggttgtgacttgaccagatggac

SEQ ID NO: 5995648 - DNA, 25 bp, Homo sapien
ggagccttcctctggagcatcgcca

SEQ ID NO: 5995649 - DNA, 25 bp, Homo sapien
cgctgtgaccgtcttgaatgtggta

SEQ ID NO: 5995650 - DNA, 25 bp, Homo sapien
gacgcaaatgggtttgcagctgtgt

SEQ ID NO: 5995651 - DNA, 25 bp, Homo sapien
tctctgatttgccaccgggataccg

SEQ ID NO: 5995652 - DNA, 25 bp, Homo sapien
ggcactggcggtttgtggtttgggt

SEQ ID NO: 5995653 - DNA, 25 bp, Homo sapien
atatcaggattggtgagcatctgtc

SEQ ID NO: 5995654 - DNA, 25 bp, Homo sapien
aggcagccccacctgcagagcccat

SEQ ID NO: 5995655 - DNA, 25 bp, Homo sapien
tagatcaatctctgatttgccaccg

SEQ ID NO: 5995656 - DNA, 25 bp, Homo sapien
cctgagggctgcgacgtttctatcg

SEQ ID NO: 5995657 - DNA, 25 bp, Homo sapien
tacagggggttggaacatagacgct

SEQ ID NO: 5995658 - DNA, 25 bp, Homo sapien
tacccgagtagatcaatctctgatt

SEQ ID NO: 5995659 - DNA, 25 bp, Homo sapien
ctggcactggtcaagtcggccagcg

SEQ ID NO: 5995660 - DNA, 25 bp, Homo sapien
aaatcttacccgagtagatcaatct

SEQ ID NO: 5995661 - DNA, 25 bp, Homo sapien
atagacgctagcaatgcaggatcga

SEQ ID NO: 5995662 - DNA, 25 bp, Homo sapien
aagagacgcaaatgggtttgcagct

SEQ ID NO: 5995663 - DNA, 25 bp, Homo sapien
tgttggatgaggaagtagtgttcgt

SEQ ID NO: 5995664 - DNA, 25 bp, Homo sapien
gttcagaagagacgcaaatgggttt

SEQ ID NO: 5995665 - DNA, 25 bp, Homo sapien
ttgcgccagcggcactggcggtttg

SEQ ID NO: 5995666 - DNA, 25 bp, Homo sapien
acatgttcggggtggcgccagtgcc

SEQ ID NO: 5995667 - DNA, 25 bp, Homo sapien
ctcaacatctcgttcatttgcgatt

SEQ ID NO: 5995668 - DNA, 25 bp, Homo sapien
ggcggtggcgttatttgcgccagcg

SEQ ID NO: 5995669 - DNA, 25 bp, Homo sapien
ggttattcgagtcgttgtttaatgc

SEQ ID NO: 5995670 - DNA, 25 bp, Homo sapien
tggaacatagacgctagcaatgcag

SEQ ID NO: 5995671 - DNA, 25 bp, Homo sapien
tgtacagggggttggaacatagacg

SEQ ID NO: 5995672 - DNA, 25 bp, Homo sapien
gctttgtttatcgcctccttgaatt

SEQ ID NO: 5995673 - DNA, 25 bp, Homo sapien
cgcctgcgttggtacctgcattagt

SEQ ID NO: 5995674 - DNA, 25 bp, Homo sapien
tgtgttagcgcctgcgttggtacct

SEQ ID NO: 5995675 - DNA, 25 bp, Homo sapien
cgcaaatgggtttgcagctgtgtta

SEQ ID NO: 5995676 - DNA, 25 bp, Homo sapien
tgaccagatggacgctgtgaccgtc

SEQ ID NO: 5995677 - DNA, 25 bp, Homo sapien
atttgccaccgggataccgttcgct

SEQ ID NO: 5995678 - DNA, 25 bp, Homo sapien
cgaaggcgggcatcccggtggatgc

SEQ ID NO: 5995679 - DNA, 25 bp, Homo sapien
tgctttcaggtgccacatttacttc

SEQ ID NO: 5995680 - DNA, 25 bp, Homo sapien
gatgcttgtacagggggttggaaca

SEQ ID NO: 5995681 - DNA, 25 bp, Homo sapien
tatcgaaatcgaagaagcccatgtc

SEQ ID NO: 5995682 - DNA, 25 bp, Homo sapien
gagcgccttggacggagccaccgct

SEQ ID NO: 5995683 - DNA, 25 bp, Homo sapien
ggacccatggcctgcaattgcgggt

SEQ ID NO: 5995684 - DNA, 25 bp, Homo sapien
aagcctgcactttgacctgacgaca

SEQ ID NO: 5995685 - DNA, 25 bp, Homo sapien
acccatggcctgcaattgcgggttg

SEQ ID NO: 5995686 - DNA, 25 bp, Homo sapien
cccacttgtcttgtcctgacttgat

SEQ ID NO: 5995687 - DNA, 25 bp, Homo sapien
caaatgggtttgcagctgtgttagc

SEQ ID NO: 5995688 - DNA, 25 bp, Homo sapien
ttcccacttgtcttgtcctgacttg

SEQ ID NO: 5995689 - DNA, 25 bp, Homo sapien
ttgtagcatttgcctggcttgtgga

SEQ ID NO: 5995690 - DNA, 25 bp, Homo sapien
ccaccgtccgggccaaacatgtctg

SEQ ID NO: 5995691 - DNA, 25 bp, Homo sapien
cagtgccagctgctgcaccggtggc

SEQ ID NO: 5995692 - DNA, 25 bp, Homo sapien
agtccaacatctgagggttactcaa

SEQ ID NO: 5995693 - DNA, 25 bp, Homo sapien
tccaacatctgagggttactcaaca

SEQ ID NO: 5995694 - DNA, 25 bp, Homo sapien
gcccatgtcgtttagttgtcttaat

SEQ ID NO: 5995695 - DNA, 25 bp, Homo sapien
tcaatctctgatttgccaccgggat

SEQ ID NO: 5995696 - DNA, 25 bp, Homo sapien
ttctcctgagggctgcgacgtttct

SEQ ID NO: 5995697 - DNA, 25 bp, Homo sapien
cttggacggagccaccgcttctcct

SEQ ID NO: 5995698 - DNA, 25 bp, Homo sapien
cgtcttggttattcgagtcgttgtt

SEQ ID NO: 5995699 - DNA, 25 bp, Homo sapien
aatcatatcaggattggtgagcatc

SEQ ID NO: 5995700 - DNA, 25 bp, Homo sapien
gtcctgacttgatatgtatattcaa

SEQ ID NO: 5995701 - DNA, 25 bp, Homo sapien
tgacttgatatgtatattcaacgac

SEQ ID NO: 5995702 - DNA, 25 bp, Homo sapien
cagtagtgaatcaagagcgccttgg

SEQ ID NO: 5995703 - DNA, 25 bp, Homo sapien
tgcatgctctgtctaatcatatcag

SEQ ID NO: 5995704 - DNA, 25 bp, Homo sapien
tggacggagccaccgcttctcctga

SEQ ID NO: 5995705 - DNA, 25 bp, Homo sapien
attgaagcctgcactttgacctgac

SEQ ID NO: 5995706 - DNA, 25 bp, Homo sapien
taaaatcttacccgagtagatcaat

SEQ ID NO: 5995707 - DNA, 25 bp, Homo sapien
atgtctgcagatggcatattcaaat

SEQ ID NO: 5995708 - DNA, 25 bp, Homo sapien
cactggtcaagtcggccagcggatt

SEQ ID NO: 5995709 - DNA, 25 bp, Homo sapien
tgctctgtctaatcatatcaggatt

SEQ ID NO: 5995710 - DNA, 25 bp, Homo sapien
ctttgtagcatttgcctggcttgtg

SEQ ID NO: 5995711 - DNA, 25 bp, Homo sapien
caacatctcgttcatttgcgattgg

SEQ ID NO: 5995712 - DNA, 25 bp, Homo sapien
ggtacctgcattagtccctgcgttg

SEQ ID NO: 5995713 - DNA, 25 bp, Homo sapien
gccagtgccagctgctgcaccggtg

SEQ ID NO: 5995714 - DNA, 25 bp, Homo sapien
tcttctgcttgagatgcttgtacag

SEQ ID NO: 5995715 - DNA, 25 bp, Homo sapien
tagcaaaggggtttaatgcagggtt

SEQ ID NO: 5995716 - DNA, 25 bp, Homo sapien
ctgcttgagatgcttgtacaggggg

SEQ ID NO: 5995717 - DNA, 25 bp, Homo sapien
ggcactggtcaagtcggccagcgga

SEQ ID NO: 5995718 - DNA, 25 bp, Homo sapien
gcggtttgtggtttgggttgtgact

SEQ ID NO: 5995719 - DNA, 25 bp, Homo sapien
tccgggccaaacatgtctgcagatg

SEQ ID NO: 5995720 - DNA, 25 bp, Homo sapien
ttccatcatcctcaacagctcgtct

SEQ ID NO: 5995721 - DNA, 25 bp, Homo sapien
gccagcggattgaagcctgcacttt

SEQ ID NO: 5995722 - DNA, 25 bp, Homo sapien
aatctctgatttgccaccgggatac

SEQ ID NO: 5995723 - DNA, 25 bp, Homo sapien
gcactttgacctgacgacatgttcg

SEQ ID NO: 5995724 - DNA, 25 bp, Homo sapien
gtctaatcatatcaggattggtgag

SEQ ID NO: 5995725 - DNA, 25 bp, Homo sapien
tctggagcatcgccaccaggagcgg

SEQ ID NO: 5995726 - DNA, 25 bp, Homo sapien
agatggggttttccatcatcctcaa

SEQ ID NO: 5995727 - DNA, 25 bp, Homo sapien
ccaaacatgtctgcagatggcatat

SEQ ID NO: 5995728 - DNA, 25 bp, Homo sapien
agagcccataccggcattagggtcc

SEQ ID NO: 5995729 - DNA, 25 bp, Homo sapien
cgccaccaggagcggggaaggcaga

SEQ ID NO: 5995730 - DNA, 25 bp, Homo sapien
gtgagcatctgtctaaacatgggac

SEQ ID NO: 5995731 - DNA, 25 bp, Homo sapien
acttcccacttgtcttgtcctgact

SEQ ID NO: 5995732 - DNA, 25 bp, Homo sapien
tttgcgattggaagatggggttttc

SEQ ID NO: 5995733 - DNA, 25 bp, Homo sapien
caacagctcgtcttggttattcgag

SEQ ID NO: 5995734 - DNA, 25 bp, Homo sapien
caacactgtgctttcaggtgccaca

SEQ ID NO: 5995735 - DNA, 25 bp, Homo sapien
agtgaatcaagagcgccttggacgg

SEQ ID NO: 5995736 - DNA, 25 bp, Homo sapien
tgtcttaattgatgttcatagcgtt

SEQ ID NO: 5995737 - DNA, 25 bp, Homo sapien
gacttgaccagatggacgctgtgac

SEQ ID NO: 5995738 - DNA, 25 bp, Homo sapien
ggtccatcattcttgcgaattgcat

SEQ ID NO: 5995739 - DNA, 25 bp, Homo sapien
tcagaagagacgcaaatgggtttgc

SEQ ID NO: 5995740 - DNA, 25 bp, Homo sapien
ctcgtcttggttattcgagtcgttg

SEQ ID NO: 5995741 - DNA, 25 bp, Homo sapien
tcaagtcggccagcggattgaagcc

SEQ ID NO: 5995742 - DNA, 25 bp, Homo sapien
attgcgggttggactggatcataaa

SEQ ID NO: 5995743 - DNA, 25 bp, Homo sapien
ttgtggtttgggttgtgacttgacc

SEQ ID NO: 5995744 - DNA, 25 bp, Homo sapien
gatggacgctgtgaccgtcttgaat

SEQ ID NO: 5995745 - DNA, 25 bp, Homo sapien
catagcgttcttccggtggtctggt

SEQ ID NO: 5995746 - DNA, 25 bp, Homo sapien
tcctttaaaatcttacccgagtaga

SEQ ID NO: 5995747 - DNA, 25 bp, Homo sapien
gcgttcttccggtggtctggtgtct

SEQ ID NO: 5995748 - DNA, 25 bp, Homo sapien
tgcaacactgtgctttcaggtgcca

SEQ ID NO: 5995749 - DNA, 25 bp, Homo sapien
acttgatatgtatattcaacgacat

SEQ ID NO: 5995750 - DNA, 25 bp, Homo sapien
aagtagtgttcgtgttggagccttc

SEQ ID NO: 5995751 - DNA, 25 bp, Homo sapien
tcttgcgaattgcatgctctgtcta

SEQ ID NO: 5995752 - DNA, 25 bp, Homo sapien
gcgccagcggcactggcggtttgtg

SEQ ID NO: 5995753 - DNA, 25 bp, Homo sapien
cggggaaggcagaggcagccccacc

SEQ ID NO: 5995754 - DNA, 25 bp, Homo sapien
gtatctggcactggtcaagtcggcc

SEQ ID NO: 5995755 - DNA, 25 bp, Homo sapien
cttgtacagggggttggaacataga

SEQ ID NO: 5995756 - DNA, 25 bp, Homo sapien
ggtttgcagctgtgttagcgcctgc

SEQ ID NO: 5995757 - DNA, 25 bp, Homo sapien
tggaagatggggttttccatcatcc

SEQ ID NO: 5995758 - DNA, 25 bp, Homo sapien
atttacttcccacttgtcttgtcct

SEQ ID NO: 5995759 - DNA, 25 bp, Homo sapien
ttaattgatgttcatagcgttcttc

SEQ ID NO: 5995760 - DNA, 25 bp, Homo sapien
tgcattagtccctgcgttgttccct

SEQ ID NO: 5995761 - DNA, 25 bp, Homo sapien
ggcctgcaattgcgggttggactgg

SEQ ID NO: 5995762 - DNA, 25 bp, Homo sapien
tcataaagtccaacatctgagggtt

SEQ ID NO: 5995763 - DNA, 25 bp, Homo sapien
actttgacctgacgacatgttcggg

SEQ ID NO: 5995764 - DNA, 25 bp, Homo sapien
tgagggctgcgacgtttctatcgaa

SEQ ID NO: 5995765 - DNA, 25 bp, Homo sapien
tcttgtcctgacttgatatgtatat

SEQ ID NO: 5995766 - DNA, 25 bp, Homo sapien
cgttcagtagtgaatcaagagcgcc

SEQ ID NO: 5995767 - DNA, 25 bp, Homo sapien
gtgacttgaccagatggacgctgtg

SEQ ID NO: 5995768 - DNA, 25 bp, Homo sapien
atggcctgcaattgcgggttggact

SEQ ID NO: 5995769 - DNA, 25 bp, Homo sapien
ggattgaagcctgcactttgacctg

SEQ ID NO: 5995770 - DNA, 25 bp, Homo sapien
ttacttcccacttgtcttgtcctga

SEQ ID NO: 5995771 - DNA, 25 bp, Homo sapien
actgtgctttcaggtgccacattta

SEQ ID NO: 5995772 - DNA, 25 bp, Homo sapien
acactgtgctttcaggtgccacatt

SEQ ID NO: 5995773 - DNA, 25 bp, Homo sapien
ccaccaggagcggggaaggcagagg

SEQ ID NO: 5995774 - DNA, 25 bp, Homo sapien
gcggcactggcggtttgtggtttgg

SEQ ID NO: 5995775 - DNA, 25 bp, Homo sapien
gggttactcaacatctcgttcattt

SEQ ID NO: 5995776 - DNA, 25 bp, Homo sapien
gagcatctgtctaaacatgggactt

SEQ ID NO: 5995777 - DNA, 25 bp, Homo sapien
ttcgtgttggagccttcctctggag

SEQ ID NO: 5995778 - DNA, 25 bp, Homo sapien
ggggttttccatcatcctcaacagc

SEQ ID NO: 5995779 - DNA, 25 bp, Homo sapien
gcgacgtttctatcgaaatcgaaga

SEQ ID NO: 5995780 - DNA, 25 bp, Homo sapien
cagcgtatctggcactggtcaagtc

SEQ ID NO: 5995781 - DNA, 25 bp, Homo sapien
tcattcttgcgaattgcatgctctg

SEQ ID NO: 5995782 - DNA, 25 bp, Homo sapien
tcttccggtggtctggtgtcttctg

SEQ ID NO: 5995783 - DNA, 25 bp, Homo sapien
gcgccagtgccagctgctgcaccgg

SEQ ID NO: 5995784 - DNA, 25 bp, Homo sapien
tggtatgactccacggtttggtcgt

SEQ ID NO: 5995785 - DNA, 25 bp, Homo sapien
tgcagctgtgttagcgcctgcgttg

SEQ ID NO: 5995786 - DNA, 25 bp, Homo sapien
tccagcgtatctggcactggtcaag

SEQ ID NO: 5995787 - DNA, 25 bp, Homo sapien
gaattgcaacactgtgctttcaggt

SEQ ID NO: 5995788 - DNA, 25 bp, Homo sapien
tcgcctccttgaattgcaacactgt

SEQ ID NO: 5995789 - DNA, 25 bp, Homo sapien
atctggcactggtcaagtcggccag

SEQ ID NO: 5995790 - DNA, 25 bp, Homo sapien
ccgtcttgaatgtggtatgactcca

SEQ ID NO: 5995791 - DNA, 25 bp, Homo sapien
caaatatccagcgtatctggcactg

SEQ ID NO: 5995792 - DNA, 25 bp, Homo sapien
ccgcgttagcaaaggggtttaatgc

SEQ ID NO: 5995793 - DNA, 25 bp, Homo sapien
ccatgtcgtttagttgtcttaattg

SEQ ID NO: 5995794 - DNA, 25 bp, Homo sapien
tgcaccaccgtccgggccaaacatg

SEQ ID NO: 5995795 - DNA, 25 bp, Homo sapien
ttctgcttgagatgcttgtacaggg

SEQ ID NO: 5995796 - DNA, 25 bp, Homo sapien
tgcgggttggactggatcataaagt

SEQ ID NO: 5995797 - DNA, 25 bp, Homo sapien
gcgaattgcatgctctgtctaatca

SEQ ID NO: 5995798 - DNA, 25 bp, Homo sapien
aaacatgtctgcagatggcatattc

SEQ ID NO: 5995799 - DNA, 25 bp, Homo sapien
gagggttactcaacatctcgttcat

SEQ ID NO: 5995800 - DNA, 25 bp, Homo sapien
tctgatttgccaccgggataccgtt

SEQ ID NO: 5995801 - DNA, 25 bp, Homo sapien
aaagtccaacatctgagggttactc

SEQ ID NO: 5995802 - DNA, 25 bp, Homo sapien
ttggtacctgcattagtccctgcgt

SEQ ID NO: 5995803 - DNA, 25 bp, Homo sapien
tgtgttggatgaggaagtagtgttc

SEQ ID NO: 5995804 - DNA, 25 bp, Homo sapien
gactccacggtttggtcgtccttta

SEQ ID NO: 5995805 - DNA, 25 bp, Homo sapien
tcctcaacagctcgtcttggttatt

SEQ ID NO: 5995806 - DNA, 25 bp, Homo sapien
ggtggtctggtgtcttctgcttgag

SEQ ID NO: 5995807 - DNA, 25 bp, Homo sapien
ctcaacagctcgtcttggttattcg

SEQ ID NO: 5995808 - DNA, 25 bp, Homo sapien
gatgcagcgtttcccgcgttagcaa

SEQ ID NO: 5995809 - DNA, 25 bp, Homo sapien
acgctagcaatgcaggatcgaaggc

SEQ ID NO: 5995810 - DNA, 25 bp, Homo sapien
cggagccaccgcttctcctgagggc

SEQ ID NO: 5995811 - DNA, 25 bp, Homo sapien
cgggccaaacatgtctgcagatggc

SEQ ID NO: 5995812 - DNA, 25 bp, Homo sapien
ctcgttcatttgcgattggaagatg

SEQ ID NO: 5995813 - DNA, 25 bp, Homo sapien
aaggcgggcatcccggtggatgcag

SEQ ID NO: 5995814 - DNA, 25 bp, Homo sapien
ctgcagagcccataccggcattagg

SEQ ID NO: 5995815 - DNA, 25 bp, Homo sapien
tcaagagcgccttggacggagccac

SEQ ID NO: 5995816 - DNA, 25 bp, Homo sapien
taccgttcgctttgtttatcgcctc

SEQ ID NO: 5995817 - DNA, 25 bp, Homo sapien
tcttaattgatgttcatagcgttct

SEQ ID NO: 5995818 - DNA, 25 bp, Homo sapien
tgttcatagcgttcttccggtggtc

SEQ ID NO: 5995819 - DNA, 25 bp, Homo sapien
tgcctggcttgtggacccatggcct

SEQ ID NO: 5995820 - DNA, 25 bp, Homo sapien
cagggttcagaagagacgcaaatgg

SEQ ID NO: 5995821 - DNA, 25 bp, Homo sapien
cccgagtagatcaatctctgatttg

SEQ ID NO: 5995822 - DNA, 25 bp, Homo sapien
cggtggcggtggcgttatttgcgcc

SEQ ID NO: 5995823 - DNA, 25 bp, Homo sapien
ttcaggtgccacatttacttcccac

SEQ ID NO: 5995824 - DNA, 25 bp, Homo sapien
agcccataccggcattagggtccat

SEQ ID NO: 5995825 - DNA, 25 bp, Homo sapien
agaagagacgcaaatgggtttgcag

SEQ ID NO: 5995826 - DNA, 25 bp, Homo sapien
gccaccgcttctcctgagggctgcg

SEQ ID NO: 5995827 - DNA, 25 bp, Homo sapien
gtcgttgtttaatgcaccaccgtcc

SEQ ID NO: 5995828 - DNA, 25 bp, Homo sapien
gcagttagaggtcagggaatctaaa

SEQ ID NO: 5995829 - DNA, 25 bp, Homo sapien
aattcattggtgttgccttgaggcg

SEQ ID NO: 5995830 - DNA, 25 bp, Homo sapien
aattgtgtctagacgttttgattac

SEQ ID NO: 5995831 - DNA, 25 bp, Homo sapien
acatctttcaataacaagctagagc

SEQ ID NO: 5995832 - DNA, 25 bp, Homo sapien
aaaagggctgcgggctcgagaacaa

SEQ ID NO: 5995833 - DNA, 25 bp, Homo sapien
tatttctagaaaagactatctcgca

SEQ ID NO: 5995834 - DNA, 25 bp, Homo sapien
caagttgagtaaggttcttcgggat

SEQ ID NO: 5995835 - DNA, 25 bp, Homo sapien
ctattttactagatacttctagttt

SEQ ID NO: 5995836 - DNA, 25 bp, Homo sapien
aagattgatgagtgtagtgatcttt

SEQ ID NO: 5995837 - DNA, 25 bp, Homo sapien
tgaagcagttagaggtcagggaatc

SEQ ID NO: 5995838 - DNA, 25 bp, Homo sapien
caacacttagaaaccaaaaaagaca

SEQ ID NO: 5995839 - DNA, 25 bp, Homo sapien
gaaaattctatttctagaaaagact

SEQ ID NO: 5995840 - DNA, 25 bp, Homo sapien
ttttgaactcatctacatctttcaa

SEQ ID NO: 5995841 - DNA, 25 bp, Homo sapien
agttgagtaaggttcttcgggatga

SEQ ID NO: 5995842 - DNA, 25 bp, Homo sapien
ggtgttgccttgaggcgtgatttga

SEQ ID NO: 5995843 - DNA, 25 bp, Homo sapien
gatcttttgaactcatctacatctt

SEQ ID NO: 5995844 - DNA, 25 bp, Homo sapien
cgagaacaagtatgaaggattctgc

SEQ ID NO: 5995845 - DNA, 25 bp, Homo sapien
ttgttcgttactatcttgatccttt

SEQ ID NO: 5995846 - DNA, 25 bp, Homo sapien
caaaaataaagttgaagtcattgct

SEQ ID NO: 5995847 - DNA, 25 bp, Homo sapien
caacgtcatacttaattcgtgtaag

SEQ ID NO: 5995848 - DNA, 25 bp, Homo sapien
attctgcaggaagaaggttaggacc

SEQ ID NO: 5995849 - DNA, 25 bp, Homo sapien
accaaaagcgggaagaagtcaattg

SEQ ID NO: 5995850 - DNA, 25 bp, Homo sapien
ctatccaagattgatgagtgtagtg

SEQ ID NO: 5995851 - DNA, 25 bp, Homo sapien
aatcctattttactagatacttcta

SEQ ID NO: 5995852 - DNA, 25 bp, Homo sapien
aaattattatgaggcaaagaggaac

SEQ ID NO: 5995853 - DNA, 25 bp, Homo sapien
caaaaaaatatgaaggccaggatgt

SEQ ID NO: 5995854 - DNA, 25 bp, Homo sapien
gaagaagagcgtttgaaggcaagga

SEQ ID NO: 5995855 - DNA, 25 bp, Homo sapien
atctaaaagaaaggagttacaagac

SEQ ID NO: 5995856 - DNA, 25 bp, Homo sapien
agaagatgcaaggttcaatagtaga

SEQ ID NO: 5995857 - DNA, 25 bp, Homo sapien
ttcaataacaagctagagctacacc

SEQ ID NO: 5995858 - DNA, 25 bp, Homo sapien
tcattttgagcctaccgtaaggagg

SEQ ID NO: 5995859 - DNA, 25 bp, Homo sapien
ggcaaagaggaacaaagttttatcc

SEQ ID NO: 5995860 - DNA, 25 bp, Homo sapien
tttccacaggtgaaattattatgag

SEQ ID NO: 5995861 - DNA, 25 bp, Homo sapien
gtaaggttcttcgggatgaacttaa

SEQ ID NO: 5995862 - DNA, 25 bp, Homo sapien
ttttttgactttatctgaagaagta

SEQ ID NO: 5995863 - DNA, 25 bp, Homo sapien
agctggacgaatgagaaattgtcgg

SEQ ID NO: 5995864 - DNA, 25 bp, Homo sapien
gcgcttttcaaggacgcttgtaatt

SEQ ID NO: 5995865 - DNA, 25 bp, Homo sapien
gcttttcaaggacgcttgtaatttt

SEQ ID NO: 5995866 - DNA, 25 bp, Homo sapien
gatagtacggttgaaaccaaaagcg

SEQ ID NO: 5995867 - DNA, 25 bp, Homo sapien
ttgaactcatctacatctttcaata

SEQ ID NO: 5995868 - DNA, 25 bp, Homo sapien
ggagagaaagctggacgaatgagaa

SEQ ID NO: 5995869 - DNA, 25 bp, Homo sapien
atgaggcaaagaggaacaaagtttt

SEQ ID NO: 5995870 - DNA, 25 bp, Homo sapien
tggataccccatagaagatgcaagg

SEQ ID NO: 5995871 - DNA, 25 bp, Homo sapien
gttaacaaataaaagggcagcatat

SEQ ID NO: 5995872 - DNA, 25 bp, Homo sapien
gtcttccccgaaacagatagtacgg

SEQ ID NO: 5995873 - DNA, 25 bp, Homo sapien
tcctattttactagatacttctagt

SEQ ID NO: 5995874 - DNA, 25 bp, Homo sapien
aagtcattgctagaagtaggcgggc

SEQ ID NO: 5995875 - DNA, 25 bp, Homo sapien
aacagatagtacggttgaaaccaaa

SEQ ID NO: 5995876 - DNA, 25 bp, Homo sapien
taaagttgaagtcattgctagaagt

SEQ ID NO: 5995877 - DNA, 25 bp, Homo sapien
cagggaatctaaaagaaaggagtta

SEQ ID NO: 5995878 - DNA, 25 bp, Homo sapien
agactatctcgcaaaacctaatatt

SEQ ID NO: 5995879 - DNA, 25 bp, Homo sapien
tgttgccttgaggcgtgatttgaaa

SEQ ID NO: 5995880 - DNA, 25 bp, Homo sapien
tagtttttcattccaaaaacatgtg

SEQ ID NO: 5995881 - DNA, 25 bp, Homo sapien
aaagctggacgaatgagaaattgtc

SEQ ID NO: 5995882 - DNA, 25 bp, Homo sapien
gttgaagtcattgctagaagtaggc

SEQ ID NO: 5995883 - DNA, 25 bp, Homo sapien
ggaatcctattttactagatacttc

SEQ ID NO: 5995884 - DNA, 25 bp, Homo sapien
gacaagttgagtaaggttcttcggg

SEQ ID NO: 5995885 - DNA, 25 bp, Homo sapien
gggcttccctgaagaatggataccc

SEQ ID NO: 5995886 - DNA, 25 bp, Homo sapien
tcaaggacgcttgtaattttttgac

SEQ ID NO: 5995887 - DNA, 25 bp, Homo sapien
gccttgaggcgtgatttgaaactgc

SEQ ID NO: 5995888 - DNA, 25 bp, Homo sapien
ttgatgagtgtagtgatcttttgaa

SEQ ID NO: 5995889 - DNA, 25 bp, Homo sapien
aagaggaacaaagttttatcctgga

SEQ ID NO: 5995890 - DNA, 25 bp, Homo sapien
agtaggcgggcttttttgagcaagc

SEQ ID NO: 5995891 - DNA, 25 bp, Homo sapien
aagtcggtcttccccgaaacagata

SEQ ID NO: 5995892 - DNA, 25 bp, Homo sapien
tgaagtcattgctagaagtaggcgg

SEQ ID NO: 5995893 - DNA, 25 bp, Homo sapien
gaaggcaaggagagaaagctggacg

SEQ ID NO: 5995894 - DNA, 25 bp, Homo sapien
cggaacaagaaaaacaagctttgaa

SEQ ID NO: 5995895 - DNA, 25 bp, Homo sapien
caccaaaagggctgcgggctcgaga

SEQ ID NO: 5995896 - DNA, 25 bp, Homo sapien
acctagaaaaatcccaacacttaga

SEQ ID NO: 5995897 - DNA, 25 bp, Homo sapien
acatcgaattggcaacgtcatactt

SEQ ID NO: 5995898 - DNA, 25 bp, Homo sapien
aattttttgactttatctgaagaag

SEQ ID NO: 5995899 - DNA, 25 bp, Homo sapien
ccaaaagggctgcgggctcgagaac

SEQ ID NO: 5995900 - DNA, 25 bp, Homo sapien
aagttgaagtcattgctagaagtag

SEQ ID NO: 5995901 - DNA, 25 bp, Homo sapien
aattggcaacgtcatacttaattcg

SEQ ID NO: 5995902 - DNA, 25 bp, Homo sapien
ttactagatacttctagtttttcat

SEQ ID NO: 5995903 - DNA, 25 bp, Homo sapien
tatgaaggccaggatgtttccacag

SEQ ID NO: 5995904 - DNA, 25 bp, Homo sapien
tttctagaaaagactatctcgcaaa

SEQ ID NO: 5995905 - DNA, 25 bp, Homo sapien
aaaaaatatgaaggccaggatgttt

SEQ ID NO: 5995906 - DNA, 25 bp, Homo sapien
tgttgttcgttactatcttgatcct

SEQ ID NO: 5995907 - DNA, 25 bp, Homo sapien
tgcgggctcgagaacaagtatgaag

SEQ ID NO: 5995908 - DNA, 25 bp, Homo sapien
ttttactagatacttctagtttttc

SEQ ID NO: 5995909 - DNA, 25 bp, Homo sapien
ctggtgtgttccttcaagtgcgtaa

SEQ ID NO: 5995910 - DNA, 25 bp, Homo sapien
actagatacttctagtttttcattc

SEQ ID NO: 5995911 - DNA, 25 bp, Homo sapien
agtatgaaggattctgcaggaagaa

SEQ ID NO: 5995912 - DNA, 25 bp, Homo sapien
acgcttgtaattttttgactttatc

SEQ ID NO: 5995913 - DNA, 25 bp, Homo sapien
taaaagacatcgaattggcaacgtc

SEQ ID NO: 5995914 - DNA, 25 bp, Homo sapien
caaaagcgggaagaagtcaattgtg

SEQ ID NO: 5995915 - DNA, 25 bp, Homo sapien
ttcggaacaagaaaaacaagctttg

SEQ ID NO: 5995916 - DNA, 25 bp, Homo sapien
aattatattaaggcgcttttcaagg

SEQ ID NO: 5995917 - DNA, 25 bp, Homo sapien
acatgtgtctggtgtgttccttcaa

SEQ ID NO: 5995918 - DNA, 25 bp, Homo sapien
tgatccttttcatcctaaaagaaaa

SEQ ID NO: 5995919 - DNA, 25 bp, Homo sapien
aggtcagggaatctaaaagaaagga

SEQ ID NO: 5995920 - DNA, 25 bp, Homo sapien
ctgaagaagtacatttgcgtaggaa

SEQ ID NO: 5995921 - DNA, 25 bp, Homo sapien
taaaagaaaattcattggtgttgcc

SEQ ID NO: 5995922 - DNA, 25 bp, Homo sapien
ttgaaaccaaaagcgggaagaagtc

SEQ ID NO: 5995923 - DNA, 25 bp, Homo sapien
agaggtcagggaatctaaaagaaag

SEQ ID NO: 5995924 - DNA, 25 bp, Homo sapien
gcagcatataaggaagaaaattcta

SEQ ID NO: 5995925 - DNA, 25 bp, Homo sapien
gaagaatggataccccatagaagat

SEQ ID NO: 5995926 - DNA, 25 bp, Homo sapien
taggaaatacttaaagtcggtcttc

SEQ ID NO: 5995927 - DNA, 25 bp, Homo sapien
atcctaaaagaaaattcattggtgt

SEQ ID NO: 5995928 - DNA, 25 bp, Homo sapien
caagtgcgtaatgccaccaaaaggg

SEQ ID NO: 5995929 - DNA, 25 bp, Homo sapien
ttggtgttgccttgaggcgtgattt

SEQ ID NO: 5995930 - DNA, 25 bp, Homo sapien
gagttaacaaataaaagggcagcat

SEQ ID NO: 5995931 - DNA, 25 bp, Homo sapien
accaaaaataaagttgaagtcattg

SEQ ID NO: 5995932 - DNA, 25 bp, Homo sapien
agaaagctggacgaatgagaaattg

SEQ ID NO: 5995933 - DNA, 25 bp, Homo sapien
ttgactttatctgaagaagtacatt

SEQ ID NO: 5995934 - DNA, 25 bp, Homo sapien
gggctgcgggctcgagaacaagtat

SEQ ID NO: 5995935 - DNA, 25 bp, Homo sapien
aaaaacatgtgtctggtgtgttcct

SEQ ID NO: 5995936 - DNA, 25 bp, Homo sapien
aagaagaagagcgtttgaaggcaag

SEQ ID NO: 5995937 - DNA, 25 bp, Homo sapien
tcatctacatctttcaataacaagc

SEQ ID NO: 5995938 - DNA, 25 bp, Homo sapien
aatggataccccatagaagatgcaa

SEQ ID NO: 5995939 - DNA, 25 bp, Homo sapien
ctattagaggacctagaaaaatccc

SEQ ID NO: 5995940 - DNA, 25 bp, Homo sapien
ccgaaacagatagtacggttgaaac

SEQ ID NO: 5995941 - DNA, 25 bp, Homo sapien
gtaattttttgactttatctgaaga

SEQ ID NO: 5995942 - DNA, 25 bp, Homo sapien
tctagaaaagactatctcgcaaaac

SEQ ID NO: 5995943 - DNA, 25 bp, Homo sapien
aaattctatttctagaaaagactat

SEQ ID NO: 5995944 - DNA, 25 bp, Homo sapien
cattgctagaagtaggcgggctttt

SEQ ID NO: 5995945 - DNA, 25 bp, Homo sapien
aattgtcggagagtctatccaagat

SEQ ID NO: 5995946 - DNA, 25 bp, Homo sapien
aaaacaagctttgaaggcaaaacta

SEQ ID NO: 5995947 - DNA, 25 bp, Homo sapien
agaaaattcattggtgttgccttga

SEQ ID NO: 5995948 - DNA, 25 bp, Homo sapien
gagaaaacgttggtatagggaaaga

SEQ ID NO: 5995949 - DNA, 25 bp, Homo sapien
gaaggcaaaactattagaggaccta

SEQ ID NO: 5995950 - DNA, 25 bp, Homo sapien
cgggaagaagtcaattgtgtctaga

SEQ ID NO: 5995951 - DNA, 25 bp, Homo sapien
tgaaactgccatctcctcattttga

SEQ ID NO: 5995952 - DNA, 25 bp, Homo sapien
ttgagttaacaaataaaagggcagc

SEQ ID NO: 5995953 - DNA, 25 bp, Homo sapien
aaaataaagttgaagtcattgctag

SEQ ID NO: 5995954 - DNA, 25 bp, Homo sapien
tgtgttccttcaagtgcgtaatgcc

SEQ ID NO: 5995955 - DNA, 25 bp, Homo sapien
gaaattgtcggagagtctatccaag

SEQ ID NO: 5995956 - DNA, 25 bp, Homo sapien
tactatcttgatccttttcatccta

SEQ ID NO: 5995957 - DNA, 25 bp, Homo sapien
ggaaagatcattccatattcgcctt

SEQ ID NO: 5995958 - DNA, 25 bp, Homo sapien
tagaggacctagaaaaatcccaaca

SEQ ID NO: 5995959 - DNA, 25 bp, Homo sapien
attagaggacctagaaaaatcccaa

SEQ ID NO: 5995960 - DNA, 25 bp, Homo sapien
ctatcttgatccttttcatcctaaa

SEQ ID NO: 5995961 - DNA, 25 bp, Homo sapien
tattatttaaaagaagaagagcgtt

SEQ ID NO: 5995962 - DNA, 25 bp, Homo sapien
taatgccaccaaaagggctgcgggc

SEQ ID NO: 5995963 - DNA, 25 bp, Homo sapien
cattggtgttgccttgaggcgtgat

SEQ ID NO: 5995964 - DNA, 25 bp, Homo sapien
gaggaacaaagttttatcctggaga

SEQ ID NO: 5995965 - DNA, 25 bp, Homo sapien
gagtaaggttcttcgggatgaactt

SEQ ID NO: 5995966 - DNA, 25 bp, Homo sapien
acgtcatacttaattcgtgtaaggg

SEQ ID NO: 5995967 - DNA, 25 bp, Homo sapien
ggcaacgtcatacttaattcgtgta

SEQ ID NO: 5995968 - DNA, 25 bp, Homo sapien
atattaaggcgcttttcaaggacgc

SEQ ID NO: 5995969 - DNA, 25 bp, Homo sapien
tgattacaccaaaaataaagttgaa

SEQ ID NO: 5995970 - DNA, 25 bp, Homo sapien
attaaggcgcttttcaaggacgctt

SEQ ID NO: 5995971 - DNA, 25 bp, Homo sapien
aaagatcattccatattcgccttag

SEQ ID NO: 5995972 - DNA, 25 bp, Homo sapien
gctagaagtaggcgggcttttttga

SEQ ID NO: 5995973 - DNA, 25 bp, Homo sapien
tagatataaaagacatcgaattggc

SEQ ID NO: 5995974 - DNA, 25 bp, Homo sapien
actgccatctcctcattttgagcct

SEQ ID NO: 5995975 - DNA, 25 bp, Homo sapien
ggacgaatgagaaattgtcggagag

SEQ ID NO: 5995976 - DNA, 25 bp, Homo sapien
tttgaaactgccatctcctcatttt

SEQ ID NO: 5995977 - DNA, 25 bp, Homo sapien
ggaagaagtcaattgtgtctagacg

SEQ ID NO: 5995978 - DNA, 25 bp, Homo sapien
ttttcattccaaaaacatgtgtctg

SEQ ID NO: 5995979 - DNA, 25 bp, Homo sapien
gtctagacgttttgattacaccaaa

SEQ ID NO: 5995980 - DNA, 25 bp, Homo sapien
gctgcgggctcgagaacaagtatga

SEQ ID NO: 5995981 - DNA, 25 bp, Homo sapien
aggcgtgatttgaaactgccatctc

SEQ ID NO: 5995982 - DNA, 25 bp, Homo sapien
ctttatctgaagaagtacatttgcg

SEQ ID NO: 5995983 - DNA, 25 bp, Homo sapien
ggtgtgttccttcaagtgcgtaatg

SEQ ID NO: 5995984 - DNA, 25 bp, Homo sapien
aaggattctgcaggaagaaggttag

SEQ ID NO: 5995985 - DNA, 25 bp, Homo sapien
aacaagctagagctacaccagtata

SEQ ID NO: 5995986 - DNA, 25 bp, Homo sapien
actcatctacatctttcaataacaa

SEQ ID NO: 5995987 - DNA, 25 bp, Homo sapien
ttgaaggcaaaactattagaggacc

SEQ ID NO: 5995988 - DNA, 25 bp, Homo sapien
atattttgaagcagttagaggtcag

SEQ ID NO: 5995989 - DNA, 25 bp, Homo sapien
tctgcaggaagaaggttaggaccaa

SEQ ID NO: 5995990 - DNA, 25 bp, Homo sapien
tccacaggtgaaattattatgaggc

SEQ ID NO: 5995991 - DNA, 25 bp, Homo sapien
ggtgaaattattatgaggcaaagag

SEQ ID NO: 5995992 - DNA, 25 bp, Homo sapien
gcgtttgaaggcaaggagagaaagc

SEQ ID NO: 5995993 - DNA, 25 bp, Homo sapien
aaaattcattggtgttgccttgagg

SEQ ID NO: 5995994 - DNA, 25 bp, Homo sapien
ccaagattgatgagtgtagtgatct

SEQ ID NO: 5995995 - DNA, 25 bp, Homo sapien
cctcattttgagcctaccgtaagga

SEQ ID NO: 5995996 - DNA, 25 bp, Homo sapien
aagttagatataaaagacatcgaat

SEQ ID NO: 5995997 - DNA, 25 bp, Homo sapien
gcaaaacctaatattttgaagcagt

SEQ ID NO: 5995998 - DNA, 25 bp, Homo sapien
gtgtaagggcttccctgaagaatgg

SEQ ID NO: 5995999 - DNA, 25 bp, Homo sapien
gtgtctagacgttttgattacacca

SEQ ID NO: 5996000 - DNA, 25 bp, Homo sapien
tctagtttttcattccaaaaacatg

SEQ ID NO: 5996001 - DNA, 25 bp, Homo sapien
taattcgtgtaagggcttccctgaa

SEQ ID NO: 5996002 - DNA, 25 bp, Homo sapien
agcgggaagaagtcaattgtgtcta

SEQ ID NO: 5996003 - DNA, 25 bp, Homo sapien
ccctgaagaatggataccccataga

SEQ ID NO: 5996004 - DNA, 25 bp, Homo sapien
taccccatagaagatgcaaggttca

SEQ ID NO: 5996005 - DNA, 25 bp, Homo sapien
ttaaaagaagaagagcgtttgaagg

SEQ ID NO: 5996006 - DNA, 25 bp, Homo sapien
ttagaggtcagggaatctaaaagaa

SEQ ID NO: 5996007 - DNA, 25 bp, Homo sapien
tgttccttcaagtgcgtaatgccac

SEQ ID NO: 5996008 - DNA, 25 bp, Homo sapien
agctagagctacaccagtatatttc

SEQ ID NO: 5996009 - DNA, 25 bp, Homo sapien
cttctagtttttcattccaaaaaca

SEQ ID NO: 5996010 - DNA, 25 bp, Homo sapien
cggtcttccccgaaacagatagtac

SEQ ID NO: 5996011 - DNA, 25 bp, Homo sapien
aagatgcaaggttcaatagtagata

SEQ ID NO: 5996012 - DNA, 25 bp, Homo sapien
tagtgatcttttgaactcatctaca

SEQ ID NO: 5996013 - DNA, 25 bp, Homo sapien
gtatagggaaagatcattccatatt

SEQ ID NO: 5996014 - DNA, 25 bp, Homo sapien
taaggcgcttttcaaggacgcttgt

SEQ ID NO: 5996015 - DNA, 25 bp, Homo sapien
gaagtcaattgtgtctagacgtttt

SEQ ID NO: 5996016 - DNA, 25 bp, Homo sapien
ccccgaaacagatagtacggttgaa

SEQ ID NO: 5996017 - DNA, 25 bp, Homo sapien
agacgttttgattacaccaaaaata

SEQ ID NO: 5996018 - DNA, 25 bp, Homo sapien
agaacaagtatgaaggattctgcag

SEQ ID NO: 5996019 - DNA, 25 bp, Homo sapien
atttaaaagaagaagagcgtttgaa

SEQ ID NO: 5996020 - DNA, 25 bp, Homo sapien
tgaaggattctgcaggaagaaggtt

SEQ ID NO: 5996021 - DNA, 25 bp, Homo sapien
gcgtgatttgaaactgccatctcct

SEQ ID NO: 5996022 - DNA, 25 bp, Homo sapien
ctcgagaacaagtatgaaggattct

SEQ ID NO: 5996023 - DNA, 25 bp, Homo sapien
gtctatccaagattgatgagtgtag

SEQ ID NO: 5996024 - DNA, 25 bp, Homo sapien
ggattctgcaggaagaaggttagga

SEQ ID NO: 5996025 - DNA, 25 bp, Homo sapien
ataaaagggcagcatataaggaaga

SEQ ID NO: 5996026 - DNA, 25 bp, Homo sapien
ttatcctggagaaaacgttggtata

SEQ ID NO: 5996027 - DNA, 25 bp, Homo sapien
gagagtctatccaagattgatgagt

SEQ ID NO: 5996028 - DNA, 25 bp, Homo sapien
ggacgcttgtaattttttgacttta

SEQ ID NO: 5996029 - DNA, 25 bp, Homo sapien
aagggctgcgggctcgagaacaagt

SEQ ID NO: 5996030 - DNA, 25 bp, Homo sapien
taaagtcggtcttccccgaaacaga

SEQ ID NO: 5996031 - DNA, 25 bp, Homo sapien
taacaaataaaagggcagcatataa

SEQ ID NO: 5996032 - DNA, 25 bp, Homo sapien
ttccaaaaacatgtgtctggtgtgt

SEQ ID NO: 5996033 - DNA, 25 bp, Homo sapien
cagatagtacggttgaaaccaaaag

SEQ ID NO: 5996034 - DNA, 25 bp, Homo sapien
ggcgggcttttttgagcaagctttg

SEQ ID NO: 5996035 - DNA, 25 bp, Homo sapien
aagacaagttgagtaaggttcttcg

SEQ ID NO: 5996036 - DNA, 25 bp, Homo sapien
gggatgaacttaagttagatataaa

SEQ ID NO: 5996037 - DNA, 25 bp, Homo sapien
ggagttacaagacaagttgagtaag

SEQ ID NO: 5996038 - DNA, 25 bp, Homo sapien
gatgcaaggttcaatagtagatatt

SEQ ID NO: 5996039 - DNA, 25 bp, Homo sapien
gatgtttccacaggtgaaattatta

SEQ ID NO: 5996040 - DNA, 25 bp, Homo sapien
atatttcggaacaagaaaaacaagc

SEQ ID NO: 5996041 - DNA, 25 bp, Homo sapien
ataacaagctagagctacaccagta

SEQ ID NO: 5996042 - DNA, 25 bp, Homo sapien
acaagacaagttgagtaaggttctt

SEQ ID NO: 5996043 - DNA, 25 bp, Homo sapien
ctagacgttttgattacaccaaaaa

SEQ ID NO: 5996044 - DNA, 25 bp, Homo sapien
ttatctgaagaagtacatttgcgta

SEQ ID NO: 5996045 - DNA, 25 bp, Homo sapien
aaaacctaatattttgaagcagtta

SEQ ID NO: 5996046 - DNA, 25 bp, Homo sapien
cttagaacctggtgttgttcgttac

SEQ ID NO: 5996047 - DNA, 25 bp, Homo sapien
ccttcaagtgcgtaatgccaccaaa

SEQ ID NO: 5996048 - DNA, 25 bp, Homo sapien
tattatgaggcaaagaggaacaaag

SEQ ID NO: 5996049 - DNA, 25 bp, Homo sapien
cttgaggcgtgatttgaaactgcca

SEQ ID NO: 5996050 - DNA, 25 bp, Homo sapien
aaagactatctcgcaaaacctaata

SEQ ID NO: 5996051 - DNA, 25 bp, Homo sapien
ttgaaggcaaggagagaaagctgga

SEQ ID NO: 5996052 - DNA, 25 bp, Homo sapien
ttcttcgggatgaacttaagttaga

SEQ ID NO: 5996053 - DNA, 25 bp, Homo sapien
ttgtaattttttgactttatctgaa

SEQ ID NO: 5996054 - DNA, 25 bp, Homo sapien
atttgcgtaggaaatacttaaagtc

SEQ ID NO: 5996055 - DNA, 25 bp, Homo sapien
gaggcaaagaggaacaaagttttat

SEQ ID NO: 5996056 - DNA, 25 bp, Homo sapien
gtggaatcctattttactagatact

SEQ ID NO: 5996057 - DNA, 25 bp, Homo sapien
tctatttctagaaaagactatctcg

SEQ ID NO: 5996058 - DNA, 25 bp, Homo sapien
tgagcctaccgtaaggaggtttggc

SEQ ID NO: 5996059 - DNA, 25 bp, Homo sapien
caagctttgaaggcaaaactattag

SEQ ID NO: 5996060 - DNA, 25 bp, Homo sapien
ttttgactttatctgaagaagtaca

SEQ ID NO: 5996061 - DNA, 25 bp, Homo sapien
cttttcatcctaaaagaaaattcat

SEQ ID NO: 5996062 - DNA, 25 bp, Homo sapien
tacttctagtttttcattccaaaaa

SEQ ID NO: 5996063 - DNA, 25 bp, Homo sapien
gactttatctgaagaagtacatttg

SEQ ID NO: 5996064 - DNA, 25 bp, Homo sapien
gtcattgctagaagtaggcgggctt

SEQ ID NO: 5996065 - DNA, 25 bp, Homo sapien
aactattagaggacctagaaaaatc

SEQ ID NO: 5996066 - DNA, 25 bp, Homo sapien
atcctggagaaaacgttggtatagg

SEQ ID NO: 5996067 - DNA, 25 bp, Homo sapien
atctacatctttcaataacaagcta

SEQ ID NO: 5996068 - DNA, 25 bp, Homo sapien
cattccaaaaacatgtgtctggtgt

SEQ ID NO: 5996069 - DNA, 25 bp, Homo sapien
atgtgtctggtgtgttccttcaagt

SEQ ID NO: 5996070 - DNA, 25 bp, Homo sapien
caagctagagctacaccagtatatt

SEQ ID NO: 5996071 - DNA, 25 bp, Homo sapien
ggtgttgttcgttactatcttgatc

SEQ ID NO: 5996072 - DNA, 25 bp, Homo sapien
atctcctcattttgagcctaccgta

SEQ ID NO: 5996073 - DNA, 25 bp, Homo sapien
gcttgtaattttttgactttatctg

SEQ ID NO: 5996074 - DNA, 25 bp, Homo sapien
tcaattgtgtctagacgttttgatt

SEQ ID NO: 5996075 - DNA, 25 bp, Homo sapien
ttccctgaagaatggataccccata

SEQ ID NO: 5996076 - DNA, 25 bp, Homo sapien
aagaaaaacaagctttgaaggcaaa

SEQ ID NO: 5996077 - DNA, 25 bp, Homo sapien
tggagaaaacgttggtatagggaaa

SEQ ID NO: 5996078 - DNA, 25 bp, Homo sapien
aagggcagcatataaggaagaaaat

SEQ ID NO: 5996079 - DNA, 25 bp, Homo sapien
ttcaagtgcgtaatgccaccaaaag

SEQ ID NO: 5996080 - DNA, 25 bp, Homo sapien
cgaattggcaacgtcatacttaatt

SEQ ID NO: 5996081 - DNA, 25 bp, Homo sapien
attttgaagcagttagaggtcaggg

SEQ ID NO: 5996082 - DNA, 25 bp, Homo sapien
gaggacctagaaaaatcccaacact

SEQ ID NO: 5996083 - DNA, 25 bp, Homo sapien
gtatatttcggaacaagaaaaacaa

SEQ ID NO: 5996084 - DNA, 25 bp, Homo sapien
cattccatattcgccttagaacctg

SEQ ID NO: 5996085 - DNA, 25 bp, Homo sapien
gaaaacgttggtatagggaaagatc

SEQ ID NO: 5996086 - DNA, 25 bp, Homo sapien
tagaaaagactatctcgcaaaacct

SEQ ID NO: 5996087 - DNA, 25 bp, Homo sapien
tttgattacaccaaaaataaagttg

SEQ ID NO: 5996088 - DNA, 25 bp, Homo sapien
aagagcgtttgaaggcaaggagaga

SEQ ID NO: 5996089 - DNA, 25 bp, Homo sapien
tcgtgtaagggcttccctgaagaat

SEQ ID NO: 5996090 - DNA, 25 bp, Homo sapien
aaaagaagaagagcgtttgaaggca

SEQ ID NO: 5996091 - DNA, 25 bp, Homo sapien
agtgtagtgatcttttgaactcatc

SEQ ID NO: 5996092 - DNA, 25 bp, Homo sapien
aaaagggcagcatataaggaagaaa

SEQ ID NO: 5996093 - DNA, 25 bp, Homo sapien
gaaaaatcccaacacttagaaacca

SEQ ID NO: 5996094 - DNA, 25 bp, Homo sapien
atcttgatccttttcatcctaaaag

SEQ ID NO: 5996095 - DNA, 25 bp, Homo sapien
tccttttcatcctaaaagaaaattc

SEQ ID NO: 5996096 - DNA, 25 bp, Homo sapien
caaggttcaatagtagatattattt

SEQ ID NO: 5996097 - DNA, 25 bp, Homo sapien
ttcattccaaaaacatgtgtctggt

SEQ ID NO: 5996098 - DNA, 25 bp, Homo sapien
ttccccgaaacagatagtacggttg

SEQ ID NO: 5996099 - DNA, 25 bp, Homo sapien
gaaaggagttacaagacaagttgag

SEQ ID NO: 5996100 - DNA, 25 bp, Homo sapien
gtcggagagtctatccaagattgat

SEQ ID NO: 5996101 - DNA, 25 bp, Homo sapien
ttgcgtaggaaatacttaaagtcgg

SEQ ID NO: 5996102 - DNA, 25 bp, Homo sapien
cgggctcgagaacaagtatgaagga

SEQ ID NO: 5996103 - DNA, 25 bp, Homo sapien
tatctcgcaaaacctaatattttga

SEQ ID NO: 5996104 - DNA, 25 bp, Homo sapien
gagcgtttgaaggcaaggagagaaa

SEQ ID NO: 5996105 - DNA, 25 bp, Homo sapien
ggccaggatgtttccacaggtgaaa

SEQ ID NO: 5996106 - DNA, 25 bp, Homo sapien
ctagaaaaatcccaacacttagaaa

SEQ ID NO: 5996107 - DNA, 25 bp, Homo sapien
ttatttaaaagaagaagagcgtttg

SEQ ID NO: 5996108 - DNA, 25 bp, Homo sapien
gtgtctggtgtgttccttcaagtgc

SEQ ID NO: 5996109 - DNA, 25 bp, Homo sapien
agggaaagatcattccatattcgcc

SEQ ID NO: 5996110 - DNA, 25 bp, Homo sapien
aacctaatattttgaagcagttaga

SEQ ID NO: 5996111 - DNA, 25 bp, Homo sapien
accagtatatttcggaacaagaaaa

SEQ ID NO: 5996112 - DNA, 25 bp, Homo sapien
actatctcgcaaaacctaatatttt

SEQ ID NO: 5996113 - DNA, 25 bp, Homo sapien
ctaaaagaaaggagttacaagacaa

SEQ ID NO: 5996114 - DNA, 25 bp, Homo sapien
gttggtatagggaaagatcattcca

SEQ ID NO: 5996115 - DNA, 25 bp, Homo sapien
ttacaagacaagttgagtaaggttc

SEQ ID NO: 5996116 - DNA, 25 bp, Homo sapien
agaatggataccccatagaagatgc

SEQ ID NO: 5996117 - DNA, 25 bp, Homo sapien
agtcaattgtgtctagacgttttga

SEQ ID NO: 5996118 - DNA, 25 bp, Homo sapien
agtgcgtaatgccaccaaaagggct

SEQ ID NO: 5996119 - DNA, 25 bp, Homo sapien
gaactcatctacatctttcaataac

SEQ ID NO: 5996120 - DNA, 25 bp, Homo sapien
ccaggatgtttccacaggtgaaatt

SEQ ID NO: 5996121 - DNA, 25 bp, Homo sapien
gtcatacttaattcgtgtaagggct

SEQ ID NO: 5996122 - DNA, 25 bp, Homo sapien
aaagcgggaagaagtcaattgtgtc

SEQ ID NO: 5996123 - DNA, 25 bp, Homo sapien
ccatattcgccttagaacctggtgt

SEQ ID NO: 5996124 - DNA, 25 bp, Homo sapien
aaaatatgaaggccaggatgtttcc

SEQ ID NO: 5996125 - DNA, 25 bp, Homo sapien
gaaacagatagtacggttgaaacca

SEQ ID NO: 5996126 - DNA, 25 bp, Homo sapien
gaacctggtgttgttcgttactatc

SEQ ID NO: 5996127 - DNA, 25 bp, Homo sapien
ttgtcggagagtctatccaagattg

SEQ ID NO: 5996128 - DNA, 25 bp, Homo sapien
atagggaaagatcattccatattcg

SEQ ID NO: 5996129 - DNA, 25 bp, Homo sapien
acatttgcgtaggaaatacttaaag

SEQ ID NO: 5996130 - DNA, 25 bp, Homo sapien
tttcatcctaaaagaaaattcattg

SEQ ID NO: 5996131 - DNA, 25 bp, Homo sapien
tctcgcaaaacctaatattttgaag

SEQ ID NO: 5996132 - DNA, 25 bp, Homo sapien
ttgccttgaggcgtgatttgaaact

SEQ ID NO: 5996133 - DNA, 25 bp, Homo sapien
tgcaggaagaaggttaggaccaaaa

SEQ ID NO: 5996134 - DNA, 25 bp, Homo sapien
caggtgaaattattatgaggcaaag

SEQ ID NO: 5996135 - DNA, 25 bp, Homo sapien
tcgttactatcttgatccttttcat

SEQ ID NO: 5996136 - DNA, 25 bp, Homo sapien
atgtggaatcctattttactagata

SEQ ID NO: 5996137 - DNA, 25 bp, Homo sapien
aagcagttagaggtcagggaatcta

SEQ ID NO: 5996138 - DNA, 25 bp, Homo sapien
tgaaattattatgaggcaaagagga

SEQ ID NO: 5996139 - DNA, 25 bp, Homo sapien
gtttgaaggcaaggagagaaagctg

SEQ ID NO: 5996140 - DNA, 25 bp, Homo sapien
tttggccgttttgagttaacaaata

SEQ ID NO: 5996141 - DNA, 25 bp, Homo sapien
tgaacttaagttagatataaaagac

SEQ ID NO: 5996142 - DNA, 25 bp, Homo sapien
atcattccatattcgccttagaacc

SEQ ID NO: 5996143 - DNA, 25 bp, Homo sapien
acgaatgagaaattgtcggagagtc

SEQ ID NO: 5996144 - DNA, 25 bp, Homo sapien
aggttcaatagtagatattatttaa

SEQ ID NO: 5996145 - DNA, 25 bp, Homo sapien
tgcaaggttcaatagtagatattat

SEQ ID NO: 5996146 - DNA, 25 bp, Homo sapien
acctggtgttgttcgttactatctt

SEQ ID NO: 5996147 - DNA, 25 bp, Homo sapien
ttgtgtctagacgttttgattacac

SEQ ID NO: 5996148 - DNA, 25 bp, Homo sapien
gaacaagaaaaacaagctttgaagg

SEQ ID NO: 5996149 - DNA, 25 bp, Homo sapien
gaagtaggcgggcttttttgagcaa

SEQ ID NO: 5996150 - DNA, 25 bp, Homo sapien
gattgatgagtgtagtgatcttttg

SEQ ID NO: 5996151 - DNA, 25 bp, Homo sapien
ctacaccagtatatttcggaacaag

SEQ ID NO: 5996152 - DNA, 25 bp, Homo sapien
acgttggtatagggaaagatcattc

SEQ ID NO: 5996153 - DNA, 25 bp, Homo sapien
aaggagttacaagacaagttgagta

SEQ ID NO: 5996154 - DNA, 25 bp, Homo sapien
atagaagatgcaaggttcaatagta

SEQ ID NO: 5996155 - DNA, 25 bp, Homo sapien
aataaagttgaagtcattgctagaa

SEQ ID NO: 5996156 - DNA, 25 bp, Homo sapien
gaagaagtacatttgcgtaggaaat

SEQ ID NO: 5996157 - DNA, 25 bp, Homo sapien
ttggcaacgtcatacttaattcgtg

SEQ ID NO: 5996158 - DNA, 25 bp, Homo sapien
agatcattccatattcgccttagaa

SEQ ID NO: 5996159 - DNA, 25 bp, Homo sapien
ttccttcaagtgcgtaatgccacca

SEQ ID NO: 5996160 - DNA, 25 bp, Homo sapien
gcttccctgaagaatggatacccca

SEQ ID NO: 5996161 - DNA, 25 bp, Homo sapien
tcgggatgaacttaagttagatata

SEQ ID NO: 5996162 - DNA, 25 bp, Homo sapien
cttcgggatgaacttaagttagata

SEQ ID NO: 5996163 - DNA, 25 bp, Homo sapien
aaataaaagggcagcatataaggaa

SEQ ID NO: 5996164 - DNA, 25 bp, Homo sapien
ttatgaggcaaagaggaacaaagtt

SEQ ID NO: 5996165 - DNA, 25 bp, Homo sapien
cctaatattttgaagcagttagagg

SEQ ID NO: 5996166 - DNA, 25 bp, Homo sapien
tagaacctggtgttgttcgttacta

SEQ ID NO: 5996167 - DNA, 25 bp, Homo sapien
aatatgaaggccaggatgtttccac

SEQ ID NO: 5996168 - DNA, 25 bp, Homo sapien
gagtctatccaagattgatgagtgt

SEQ ID NO: 5996169 - DNA, 25 bp, Homo sapien
taatattttgaagcagttagaggtc

SEQ ID NO: 5996170 - DNA, 25 bp, Homo sapien
gaaaccaaaagcgggaagaagtcaa

SEQ ID NO: 5996171 - DNA, 25 bp, Homo sapien
cgtaatgccaccaaaagggctgcgg

SEQ ID NO: 5996172 - DNA, 25 bp, Homo sapien
aaacgttggtatagggaaagatcat

SEQ ID NO: 5996173 - DNA, 25 bp, Homo sapien
acaaataaaagggcagcatataagg

SEQ ID NO: 5996174 - DNA, 25 bp, Homo sapien
atccaagattgatgagtgtagtgat

SEQ ID NO: 5996175 - DNA, 25 bp, Homo sapien
tggtatagggaaagatcattccata

SEQ ID NO: 5996176 - DNA, 25 bp, Homo sapien
gttagatataaaagacatcgaattg

SEQ ID NO: 5996177 - DNA, 25 bp, Homo sapien
gtcagggaatctaaaagaaaggagt

SEQ ID NO: 5996178 - DNA, 25 bp, Homo sapien
atcgaattggcaacgtcatacttaa

SEQ ID NO: 5996179 - DNA, 25 bp, Homo sapien
gtcggtcttccccgaaacagatagt

SEQ ID NO: 5996180 - DNA, 25 bp, Homo sapien
agctttgaaggcaaaactattagag

SEQ ID NO: 5996181 - DNA, 25 bp, Homo sapien
tcgccttagaacctggtgttgttcg

SEQ ID NO: 5996182 - DNA, 25 bp, Homo sapien
tgtagtgatcttttgaactcatcta

SEQ ID NO: 5996183 - DNA, 25 bp, Homo sapien
aacaagtatgaaggattctgcagga

SEQ ID NO: 5996184 - DNA, 25 bp, Homo sapien
aaagacatcgaattggcaacgtcat

SEQ ID NO: 5996185 - DNA, 25 bp, Homo sapien
ctttcaataacaagctagagctaca

SEQ ID NO: 5996186 - DNA, 25 bp, Homo sapien
ctttgaaggcaaaactattagagga

SEQ ID NO: 5996187 - DNA, 25 bp, Homo sapien
taggcgggcttttttgagcaagctt

SEQ ID NO: 5996188 - DNA, 25 bp, Homo sapien
aagtacatttgcgtaggaaatactt

SEQ ID NO: 5996189 - DNA, 25 bp, Homo sapien
tcgcaaaacctaatattttgaagca

SEQ ID NO: 5996190 - DNA, 25 bp, Homo sapien
agagctacaccagtatatttcggaa

SEQ ID NO: 5996191 - DNA, 25 bp, Homo sapien
agacatcgaattggcaacgtcatac

SEQ ID NO: 5996192 - DNA, 25 bp, Homo sapien
tttgaagcagttagaggtcagggaa

SEQ ID NO: 5996193 - DNA, 25 bp, Homo sapien
agttacaagacaagttgagtaaggt

SEQ ID NO: 5996194 - DNA, 25 bp, Homo sapien
ggctcgagaacaagtatgaaggatt

SEQ ID NO: 5996195 - DNA, 25 bp, Homo sapien
aagaaaattctatttctagaaaaga

SEQ ID NO: 5996196 - DNA, 25 bp, Homo sapien
gaaaaacaagctttgaaggcaaaac

SEQ ID NO: 5996197 - DNA, 25 bp, Homo sapien
atgccaccaaaagggctgcgggctc

SEQ ID NO: 5996198 - DNA, 25 bp, Homo sapien
agaagagcgtttgaaggcaaggaga

SEQ ID NO: 5996199 - DNA, 25 bp, Homo sapien
tgaggcgtgatttgaaactgccatc

SEQ ID NO: 5996200 - DNA, 25 bp, Homo sapien
gatgagtgtagtgatcttttgaact

SEQ ID NO: 5996201 - DNA, 25 bp, Homo sapien
aggcaaaactattagaggacctaga

SEQ ID NO: 5996202 - DNA, 25 bp, Homo sapien
acaagaaaaacaagctttgaaggca

SEQ ID NO: 5996203 - DNA, 25 bp, Homo sapien
agaattatattaaggcgcttttcaa

SEQ ID NO: 5996204 - DNA, 25 bp, Homo sapien
ggaacaaagttttatcctggagaaa

SEQ ID NO: 5996205 - DNA, 25 bp, Homo sapien
gacaagaattatattaaggcgcttt

SEQ ID NO: 5996206 - DNA, 25 bp, Homo sapien
attcgtgtaagggcttccctgaaga

SEQ ID NO: 5996207 - DNA, 25 bp, Homo sapien
cggagagtctatccaagattgatga

SEQ ID NO: 5996208 - DNA, 25 bp, Homo sapien
ccatagaagatgcaaggttcaatag

SEQ ID NO: 5996209 - DNA, 25 bp, Homo sapien
cacaggtgaaattattatgaggcaa

SEQ ID NO: 5996210 - DNA, 25 bp, Homo sapien
gggcagcatataaggaagaaaattc

SEQ ID NO: 5996211 - DNA, 25 bp, Homo sapien
aagacaagaattatattaaggcgct

SEQ ID NO: 5996212 - DNA, 25 bp, Homo sapien
tagatacttctagtttttcattcca

SEQ ID NO: 5996213 - DNA, 25 bp, Homo sapien
gtctggtgtgttccttcaagtgcgt

SEQ ID NO: 5996214 - DNA, 25 bp, Homo sapien
cctggagaaaacgttggtataggga

SEQ ID NO: 5996215 - DNA, 25 bp, Homo sapien
aggcgcttttcaaggacgcttgtaa

SEQ ID NO: 5996216 - DNA, 25 bp, Homo sapien
ttccatattcgccttagaacctggt

SEQ ID NO: 5996217 - DNA, 25 bp, Homo sapien
ctagagctacaccagtatatttcgg

SEQ ID NO: 5996218 - DNA, 25 bp, Homo sapien
aagaagtcaattgtgtctagacgtt

SEQ ID NO: 5996219 - DNA, 25 bp, Homo sapien
gtgatcttttgaactcatctacatc

SEQ ID NO: 5996220 - DNA, 25 bp, Homo sapien
atctgaagaagtacatttgcgtagg

SEQ ID NO: 5996221 - DNA, 25 bp, Homo sapien
caataacaagctagagctacaccag

SEQ ID NO: 5996222 - DNA, 25 bp, Homo sapien
acaccagtatatttcggaacaagaa

SEQ ID NO: 5996223 - DNA, 25 bp, Homo sapien
tagaagtaggcgggcttttttgagc

SEQ ID NO: 5996224 - DNA, 25 bp, Homo sapien
ctgaagaatggataccccatagaag

SEQ ID NO: 5996225 - DNA, 25 bp, Homo sapien
gttcgttactatcttgatccttttc

SEQ ID NO: 5996226 - DNA, 25 bp, Homo sapien
caaagaggaacaaagttttatcctg

SEQ ID NO: 5996227 - DNA, 25 bp, Homo sapien
aaacatgtgtctggtgtgttccttc

SEQ ID NO: 5996228 - DNA, 25 bp, Homo sapien
ctggacgaatgagaaattgtcggag

SEQ ID NO: 5996229 - DNA, 25 bp, Homo sapien
atctttcaataacaagctagagcta

SEQ ID NO: 5996230 - DNA, 25 bp, Homo sapien
aaagaaaattcattggtgttgcctt

SEQ ID NO: 5996231 - DNA, 25 bp, Homo sapien
ttacaccaaaaataaagttgaagtc

SEQ ID NO: 5996232 - DNA, 25 bp, Homo sapien
ggttcttcgggatgaacttaagtta

SEQ ID NO: 5996233 - DNA, 25 bp, Homo sapien
ctcctcattttgagcctaccgtaag

SEQ ID NO: 5996234 - DNA, 25 bp, Homo sapien
agctacaccagtatatttcggaaca

SEQ ID NO: 5996235 - DNA, 25 bp, Homo sapien
tttgagcctaccgtaaggaggtttg

SEQ ID NO: 5996236 - DNA, 25 bp, Homo sapien
gatttgaaactgccatctcctcatt

SEQ ID NO: 5996237 - DNA, 25 bp, Homo sapien
gccttagaacctggtgttgttcgtt

SEQ ID NO: 5996238 - DNA, 25 bp, Homo sapien
gttactatcttgatccttttcatcc

SEQ ID NO: 5996239 - DNA, 25 bp, Homo sapien
cttgatccttttcatcctaaaagaa

SEQ ID NO: 5996240 - DNA, 25 bp, Homo sapien
tgagtgtagtgatcttttgaactca

SEQ ID NO: 5996241 - DNA, 25 bp, Homo sapien
catacttaattcgtgtaagggcttc

SEQ ID NO: 5996242 - DNA, 25 bp, Homo sapien
ctggtgttgttcgttactatcttga

SEQ ID NO: 5996243 - DNA, 25 bp, Homo sapien
atattcgccttagaacctggtgttg

SEQ ID NO: 5996244 - DNA, 25 bp, Homo sapien
aaggccaggatgtttccacaggtga

SEQ ID NO: 5996245 - DNA, 25 bp, Homo sapien
ccatctcctcattttgagcctaccg

SEQ ID NO: 5996246 - DNA, 25 bp, Homo sapien
gatacttctagtttttcattccaaa

SEQ ID NO: 5996247 - DNA, 25 bp, Homo sapien
ttgctagaagtaggcgggctttttt

SEQ ID NO: 5996248 - DNA, 25 bp, Homo sapien
ataaggaagaaaattctatttctag

SEQ ID NO: 5996249 - DNA, 25 bp, Homo sapien
tcatcctaaaagaaaattcattggt

SEQ ID NO: 5996250 - DNA, 25 bp, Homo sapien
aacaagctttgaaggcaaaactatt

SEQ ID NO: 5996251 - DNA, 25 bp, Homo sapien
attattatgaggcaaagaggaacaa

SEQ ID NO: 5996252 - DNA, 25 bp, Homo sapien
aagaaaggagttacaagacaagttg

SEQ ID NO: 5996253 - DNA, 25 bp, Homo sapien
ccaaaaacatgtgtctggtgtgttc

SEQ ID NO: 5996254 - DNA, 25 bp, Homo sapien
accaaaaaaatatgaaggccaggat

SEQ ID NO: 5996255 - DNA, 25 bp, Homo sapien
tgccatctcctcattttgagcctac

SEQ ID NO: 5996256 - DNA, 25 bp, Homo sapien
gataccccatagaagatgcaaggtt

SEQ ID NO: 5996257 - DNA, 25 bp, Homo sapien
gtaagggcttccctgaagaatggat

SEQ ID NO: 5996258 - DNA, 25 bp, Homo sapien
cagtatatttcggaacaagaaaaac

SEQ ID NO: 5996259 - DNA, 25 bp, Homo sapien
tacttaattcgtgtaagggcttccc

SEQ ID NO: 5996260 - DNA, 25 bp, Homo sapien
tcttttgaactcatctacatctttc

SEQ ID NO: 5996261 - DNA, 25 bp, Homo sapien
ttgagtaaggttcttcgggatgaac

SEQ ID NO: 5996262 - DNA, 25 bp, Homo sapien
gaatgagaaattgtcggagagtcta

SEQ ID NO: 5996263 - DNA, 25 bp, Homo sapien
gaatctaaaagaaaggagttacaag

SEQ ID NO: 5996264 - DNA, 25 bp, Homo sapien
gtttttcattccaaaaacatgtgtc

SEQ ID NO: 5996265 - DNA, 25 bp, Homo sapien
aagggcttccctgaagaatggatac

SEQ ID NO: 5996266 - DNA, 25 bp, Homo sapien
aaactgccatctcctcattttgagc

SEQ ID NO: 5996267 - DNA, 25 bp, Homo sapien
aggatgtttccacaggtgaaattat

SEQ ID NO: 5996268 - DNA, 25 bp, Homo sapien
attcgccttagaacctggtgttgtt

SEQ ID NO: 5996269 - DNA, 25 bp, Homo sapien
cttaattcgtgtaagggcttccctg

SEQ ID NO: 5996270 - DNA, 25 bp, Homo sapien
acaccaaaaataaagttgaagtcat

SEQ ID NO: 5996271 - DNA, 25 bp, Homo sapien
ccccatagaagatgcaaggttcaat

SEQ ID NO: 5996272 - DNA, 25 bp, Homo sapien
agaagtacatttgcgtaggaaatac

SEQ ID NO: 5996273 - DNA, 25 bp, Homo sapien
ttttatcctggagaaaacgttggta

SEQ ID NO: 5996274 - DNA, 25 bp, Homo sapien
gaggtttggccgttttgagttaaca

SEQ ID NO: 5996275 - DNA, 25 bp, Homo sapien
caagaattatattaaggcgcttttc

SEQ ID NO: 5996276 - DNA, 25 bp, Homo sapien
tatgaaggattctgcaggaagaagg

SEQ ID NO: 5996277 - DNA, 25 bp, Homo sapien
gtgatttgaaactgccatctcctca

SEQ ID NO: 5996278 - DNA, 25 bp, Homo sapien
gaaggttaggaccaaaaaaatatga

SEQ ID NO: 5996279 - DNA, 25 bp, Homo sapien
gcgtaggaaatacttaaagtcggtc

SEQ ID NO: 5996280 - DNA, 25 bp, Homo sapien
tgaaggccaggatgtttccacaggt

SEQ ID NO: 5996281 - DNA, 25 bp, Homo sapien
tataaaagacatcgaattggcaacg

SEQ ID NO: 5996282 - DNA, 25 bp, Homo sapien
gagaaattgtcggagagtctatcca

SEQ ID NO: 5996283 - DNA, 25 bp, Homo sapien
attctatttctagaaaagactatct

SEQ ID NO: 5996284 - DNA, 25 bp, Homo sapien
aaggaagaaaattctatttctagaa

SEQ ID NO: 5996285 - DNA, 25 bp, Homo sapien
caagtatgaaggattctgcaggaag

SEQ ID NO: 5996286 - DNA, 25 bp, Homo sapien
ttcattggtgttgccttgaggcgtg

SEQ ID NO: 5996287 - DNA, 25 bp, Homo sapien
tttcaaggacgcttgtaattttttg

SEQ ID NO: 5996288 - DNA, 25 bp, Homo sapien
ggaccaaaaaaatatgaaggccagg

SEQ ID NO: 5996289 - DNA, 25 bp, Homo sapien
ggacctagaaaaatcccaacactta

SEQ ID NO: 5996290 - DNA, 25 bp, Homo sapien
gggaatctaaaagaaaggagttaca

SEQ ID NO: 5996291 - DNA, 25 bp, Homo sapien
cctaaaagaaaattcattggtgttg

SEQ ID NO: 5996292 - DNA, 25 bp, Homo sapien
agttagaggtcagggaatctaaaag

SEQ ID NO: 5996293 - DNA, 25 bp, Homo sapien
tggccgttttgagttaacaaataaa

SEQ ID NO: 5996294 - DNA, 25 bp, Homo sapien
gcaaggagagaaagctggacgaatg

SEQ ID NO: 5996295 - DNA, 25 bp, Homo sapien
gcaaaactattagaggacctagaaa

SEQ ID NO: 5996296 - DNA, 25 bp, Homo sapien
aaggagagaaagctggacgaatgag

SEQ ID NO: 5996297 - DNA, 25 bp, Homo sapien
ggaagaaaattctatttctagaaaa

SEQ ID NO: 5996298 - DNA, 25 bp, Homo sapien
gccaccaaaagggctgcgggctcga

SEQ ID NO: 5996299 - DNA, 25 bp, Homo sapien
gtacatttgcgtaggaaatacttaa

SEQ ID NO: 5996300 - DNA, 25 bp, Homo sapien
tgcgtaatgccaccaaaagggctgc

SEQ ID NO: 5996301 - DNA, 25 bp, Homo sapien
tgtttccacaggtgaaattattatg

SEQ ID NO: 5996302 - DNA, 25 bp, Homo sapien
gatataaaagacatcgaattggcaa

SEQ ID NO: 5996303 - DNA, 25 bp, Homo sapien
ctacatctttcaataacaagctaga

SEQ ID NO: 5996304 - DNA, 25 bp, Homo sapien
gaaaagactatctcgcaaaacctaa

SEQ ID NO: 5996305 - DNA, 25 bp, Homo sapien
atgagaaattgtcggagagtctatc

SEQ ID NO: 5996306 - DNA, 25 bp, Homo sapien
taggaccaaaaaaatatgaaggcca

SEQ ID NO: 5996307 - DNA, 25 bp, Homo sapien
aggcaaggagagaaagctggacgaa

SEQ ID NO: 5996308 - DNA, 25 bp, Homo sapien
aaaagacaagaattatattaaggcg

SEQ ID NO: 5996309 - DNA, 25 bp, Homo sapien
ttatattaaggcgcttttcaaggac

SEQ ID NO: 5996310 - DNA, 25 bp, Homo sapien
agagaaagctggacgaatgagaaat

SEQ ID NO: 5996311 - DNA, 25 bp, Homo sapien
gttaggaccaaaaaaatatgaaggc

SEQ ID NO: 5996312 - DNA, 25 bp, Homo sapien
gaatgatctttccctataccaacgt

SEQ ID NO: 5996313 - DNA, 25 bp, Homo sapien
aggaacacaccagacacatgttttt

SEQ ID NO: 5996314 - DNA, 25 bp, Homo sapien
aacgaacaacaccaggttctaaggc

SEQ ID NO: 5996315 - DNA, 25 bp, Homo sapien
ataatttcacctgtggaaacatcct

SEQ ID NO: 5996316 - DNA, 25 bp, Homo sapien
actatctgtttcggggaagaccgac

SEQ ID NO: 5996317 - DNA, 25 bp, Homo sapien
gcccgcagcccttttggtggcatta

SEQ ID NO: 5996318 - DNA, 25 bp, Homo sapien
tttgccttcaaagcttgtttttctt

SEQ ID NO: 5996319 - DNA, 25 bp, Homo sapien
cattcgtccagctttctctccttgc

SEQ ID NO: 5996320 - DNA, 25 bp, Homo sapien
aaatcacgcctcaaggcaacaccaa

SEQ ID NO: 5996321 - DNA, 25 bp, Homo sapien
cttttggtggcattacgcacttgaa

SEQ ID NO: 5996322 - DNA, 25 bp, Homo sapien
tctaggtcctctaatagttttgcct

SEQ ID NO: 5996323 - DNA, 25 bp, Homo sapien
cttcaaaatattaggttttgcgaga

SEQ ID NO: 5996324 - DNA, 25 bp, Homo sapien
aaaatgaggagatggcagtttcaaa

SEQ ID NO: 5996325 - DNA, 25 bp, Homo sapien
gacctctaactgcttcaaaatatta

SEQ ID NO: 5996326 - DNA, 25 bp, Homo sapien
gaattttcttccttatatgctgccc

SEQ ID NO: 5996327 - DNA, 25 bp, Homo sapien
caaagcttgctcaaaaaagcccgcc

SEQ ID NO: 5996328 - DNA, 25 bp, Homo sapien
tttggtttcaaccgtactatctgtt

SEQ ID NO: 5996329 - DNA, 25 bp, Homo sapien
cgagatagtcttttctagaaataga

SEQ ID NO: 5996330 - DNA, 25 bp, Homo sapien
cctataccaacgttttctccaggat

SEQ ID NO: 5996331 - DNA, 25 bp, Homo sapien
ttttggtcctaaccttcttcctgca

SEQ ID NO: 5996332 - DNA, 25 bp, Homo sapien
cagataaagtcaaaaaattacaagc

SEQ ID NO: 5996333 - DNA, 25 bp, Homo sapien
gtcttgtaactcctttcttttagat

SEQ ID NO: 5996334 - DNA, 25 bp, Homo sapien
tcgagcccgcagcccttttggtggc

SEQ ID NO: 5996335 - DNA, 25 bp, Homo sapien
cccttttggtggcattacgcacttg

SEQ ID NO: 5996336 - DNA, 25 bp, Homo sapien
tggaatgatctttccctataccaac

SEQ ID NO: 5996337 - DNA, 25 bp, Homo sapien
tccttgccttcaaacgctcttcttc

SEQ ID NO: 5996338 - DNA, 25 bp, Homo sapien
ttctagcaatgacttcaactttatt

SEQ ID NO: 5996339 - DNA, 25 bp, Homo sapien
tatttgttaactcaaaacggccaaa

SEQ ID NO: 5996340 - DNA, 25 bp, Homo sapien
gaaaaggatcaagatagtaacgaac

SEQ ID NO: 5996341 - DNA, 25 bp, Homo sapien
atcacgcctcaaggcaacaccaatg

SEQ ID NO: 5996342 - DNA, 25 bp, Homo sapien
tagattccctgacctctaactgctt

SEQ ID NO: 5996343 - DNA, 25 bp, Homo sapien
tctagacacaattgacttcttcccg

SEQ ID NO: 5996344 - DNA, 25 bp, Homo sapien
tgtacttcttcagataaagtcaaaa

SEQ ID NO: 5996345 - DNA, 25 bp, Homo sapien
ttcagggaagcccttacacgaatta

SEQ ID NO: 5996346 - DNA, 25 bp, Homo sapien
taaagtcaaaaaattacaagcgtcc

SEQ ID NO: 5996347 - DNA, 25 bp, Homo sapien
tagatgagttcaaaagatcactaca

SEQ ID NO: 5996348 - DNA, 25 bp, Homo sapien
tcaagatagtaacgaacaacaccag

SEQ ID NO: 5996349 - DNA, 25 bp, Homo sapien
agcgccttaatataattcttgtctt

SEQ ID NO: 5996350 - DNA, 25 bp, Homo sapien
ttgttattgaaagatgtagatgagt

SEQ ID NO: 5996351 - DNA, 25 bp, Homo sapien
ttgttctcgagcccgcagccctttt

SEQ ID NO: 5996352 - DNA, 25 bp, Homo sapien
gtttttcttgttccgaaatatactg

SEQ ID NO: 5996353 - DNA, 25 bp, Homo sapien
gcttgctcaaaaaagcccgcctact

SEQ ID NO: 5996354 - DNA, 25 bp, Homo sapien
cgcaaatgtacttcttcagataaag

SEQ ID NO: 5996355 - DNA, 25 bp, Homo sapien
aaaggatcaagatagtaacgaacaa

SEQ ID NO: 5996356 - DNA, 25 bp, Homo sapien
caaagcttgtttttcttgttccgaa

SEQ ID NO: 5996357 - DNA, 25 bp, Homo sapien
ttcaaccgtactatctgtttcgggg

SEQ ID NO: 5996358 - DNA, 25 bp, Homo sapien
gcctcataataatttcacctgtgga

SEQ ID NO: 5996359 - DNA, 25 bp, Homo sapien
atccattcttcagggaagcccttac

SEQ ID NO: 5996360 - DNA, 25 bp, Homo sapien
gatggcagtttcaaatcacgcctca

SEQ ID NO: 5996361 - DNA, 25 bp, Homo sapien
tggggtatccattcttcagggaagc

SEQ ID NO: 5996362 - DNA, 25 bp, Homo sapien
tttgcgagatagtcttttctagaaa

SEQ ID NO: 5996363 - DNA, 25 bp, Homo sapien
ctttaagtatttcctacgcaaatgt

SEQ ID NO: 5996364 - DNA, 25 bp, Homo sapien
tttctaagtgttgggatttttctag

SEQ ID NO: 5996365 - DNA, 25 bp, Homo sapien
aatatactggtgtagctctagcttg

SEQ ID NO: 5996366 - DNA, 25 bp, Homo sapien
ggcgaatatggaatgatctttccct

SEQ ID NO: 5996367 - DNA, 25 bp, Homo sapien
gacgttgccaattcgatgtctttta

SEQ ID NO: 5996368 - DNA, 25 bp, Homo sapien
tcctctttgcctcataataatttca

SEQ ID NO: 5996369 - DNA, 25 bp, Homo sapien
actcctttcttttagattccctgac

SEQ ID NO: 5996370 - DNA, 25 bp, Homo sapien
gatagactctccgacaatttctcat

SEQ ID NO: 5996371 - DNA, 25 bp, Homo sapien
ttaaataatatctactattgaacct

SEQ ID NO: 5996372 - DNA, 25 bp, Homo sapien
ttctagaaatagaattttcttcctt

SEQ ID NO: 5996373 - DNA, 25 bp, Homo sapien
gttttgccttcaaagcttgtttttc

SEQ ID NO: 5996374 - DNA, 25 bp, Homo sapien
caatcttggatagactctccgacaa

SEQ ID NO: 5996375 - DNA, 25 bp, Homo sapien
gcttgttattgaaagatgtagatga

SEQ ID NO: 5996376 - DNA, 25 bp, Homo sapien
cgaagaaccttactcaacttgtctt

SEQ ID NO: 5996377 - DNA, 25 bp, Homo sapien
tttctaggtcctctaatagttttgc

SEQ ID NO: 5996378 - DNA, 25 bp, Homo sapien
gattccctgacctctaactgcttca

SEQ ID NO: 5996379 - DNA, 25 bp, Homo sapien
agtttcaaatcacgcctcaaggcaa

SEQ ID NO: 5996380 - DNA, 25 bp, Homo sapien
ctagcaatgacttcaactttatttt

SEQ ID NO: 5996381 - DNA, 25 bp, Homo sapien
tcctaaccttcttcctgcagaatcc

SEQ ID NO: 5996382 - DNA, 25 bp, Homo sapien
gccaaacctccttacggtaggctca

SEQ ID NO: 5996383 - DNA, 25 bp, Homo sapien
aatattaggttttgcgagatagtct

SEQ ID NO: 5996384 - DNA, 25 bp, Homo sapien
aaaactttgttcctctttgcctcat

SEQ ID NO: 5996385 - DNA, 25 bp, Homo sapien
cctccttacggtaggctcaaaatga

SEQ ID NO: 5996386 - DNA, 25 bp, Homo sapien
cgaattaagtatgacgttgccaatt

SEQ ID NO: 5996387 - DNA, 25 bp, Homo sapien
actagaagtatctagtaaaatagga

SEQ ID NO: 5996388 - DNA, 25 bp, Homo sapien
atgctgcccttttatttgttaactc

SEQ ID NO: 5996389 - DNA, 25 bp, Homo sapien
tatctgtttcggggaagaccgactt

SEQ ID NO: 5996390 - DNA, 25 bp, Homo sapien
ttgttcctctttgcctcataataat

SEQ ID NO: 5996391 - DNA, 25 bp, Homo sapien
cttactcaacttgtcttgtaactcc

SEQ ID NO: 5996392 - DNA, 25 bp, Homo sapien
caatttctcattcgtccagctttct

SEQ ID NO: 5996393 - DNA, 25 bp, Homo sapien
tctactattgaaccttgcatcttct

SEQ ID NO: 5996394 - DNA, 25 bp, Homo sapien
cttgttccgaaatatactggtgtag

SEQ ID NO: 5996395 - DNA, 25 bp, Homo sapien
caatgacttcaactttatttttggt

SEQ ID NO: 5996396 - DNA, 25 bp, Homo sapien
tatttttggtgtaatcaaaacgtct

SEQ ID NO: 5996397 - DNA, 25 bp, Homo sapien
ggcattacgcacttgaaggaacaca

SEQ ID NO: 5996398 - DNA, 25 bp, Homo sapien
tatatctaacttaagttcatcccga

SEQ ID NO: 5996399 - DNA, 25 bp, Homo sapien
gcctacttctagcaatgacttcaac

SEQ ID NO: 5996400 - DNA, 25 bp, Homo sapien
tttccctataccaacgttttctcca

SEQ ID NO: 5996401 - DNA, 25 bp, Homo sapien
tgttccgaaatatactggtgtagct

SEQ ID NO: 5996402 - DNA, 25 bp, Homo sapien
gttattgaaagatgtagatgagttc

SEQ ID NO: 5996403 - DNA, 25 bp, Homo sapien
cacgcctcaaggcaacaccaatgaa

SEQ ID NO: 5996404 - DNA, 25 bp, Homo sapien
tcttccttatatgctgcccttttat

SEQ ID NO: 5996405 - DNA, 25 bp, Homo sapien
tttagattccctgacctctaactgc

SEQ ID NO: 5996406 - DNA, 25 bp, Homo sapien
gaagaccgactttaagtatttccta

SEQ ID NO: 5996407 - DNA, 25 bp, Homo sapien
ttgacttcttcccgcttttggtttc

SEQ ID NO: 5996408 - DNA, 25 bp, Homo sapien
ctctaatagttttgccttcaaagct

SEQ ID NO: 5996409 - DNA, 25 bp, Homo sapien
aaccttcttcctgcagaatccttca

SEQ ID NO: 5996410 - DNA, 25 bp, Homo sapien
gcacttgaaggaacacaccagacac

SEQ ID NO: 5996411 - DNA, 25 bp, Homo sapien
ttgtttttcttgttccgaaatatac

SEQ ID NO: 5996412 - DNA, 25 bp, Homo sapien
cataataatttcacctgtggaaaca

SEQ ID NO: 5996413 - DNA, 25 bp, Homo sapien
gactctccgacaatttctcattcgt

SEQ ID NO: 5996414 - DNA, 25 bp, Homo sapien
aatagttttgccttcaaagcttgtt

SEQ ID NO: 5996415 - DNA, 25 bp, Homo sapien
acctgtggaaacatcctggccttca

SEQ ID NO: 5996416 - DNA, 25 bp, Homo sapien
tttctccaggataaaactttgttcc

SEQ ID NO: 5996417 - DNA, 25 bp, Homo sapien
aaataatatctactattgaaccttg

SEQ ID NO: 5996418 - DNA, 25 bp, Homo sapien
atatgctgcccttttatttgttaac

SEQ ID NO: 5996419 - DNA, 25 bp, Homo sapien
cattacgcacttgaaggaacacacc

SEQ ID NO: 5996420 - DNA, 25 bp, Homo sapien
agtcttttctagaaatagaattttc

SEQ ID NO: 5996421 - DNA, 25 bp, Homo sapien
ttctaaggcgaatatggaatgatct

SEQ ID NO: 5996422 - DNA, 25 bp, Homo sapien
gatgagttcaaaagatcactacact

SEQ ID NO: 5996423 - DNA, 25 bp, Homo sapien
tatctagtaaaataggattccacat

SEQ ID NO: 5996424 - DNA, 25 bp, Homo sapien
gacttcttcccgcttttggtttcaa

SEQ ID NO: 5996425 - DNA, 25 bp, Homo sapien
tactcaacttgtcttgtaactcctt

SEQ ID NO: 5996426 - DNA, 25 bp, Homo sapien
caacttgtcttgtaactcctttctt

SEQ ID NO: 5996427 - DNA, 25 bp, Homo sapien
ttcgtccagctttctctccttgcct

SEQ ID NO: 5996428 - DNA, 25 bp, Homo sapien
ttgcatcttctatggggtatccatt

SEQ ID NO: 5996429 - DNA, 25 bp, Homo sapien
cgtccagctttctctccttgccttc

SEQ ID NO: 5996430 - DNA, 25 bp, Homo sapien
gaaatatactggtgtagctctagct

SEQ ID NO: 5996431 - DNA, 25 bp, Homo sapien
tttggtgtaatcaaaacgtctagac

SEQ ID NO: 5996432 - DNA, 25 bp, Homo sapien
gaacacaccagacacatgtttttgg

SEQ ID NO: 5996433 - DNA, 25 bp, Homo sapien
ctcattcgtccagctttctctcctt

SEQ ID NO: 5996434 - DNA, 25 bp, Homo sapien
gactttaagtatttcctacgcaaat

SEQ ID NO: 5996435 - DNA, 25 bp, Homo sapien
gtcaaaaaattacaagcgtccttga

SEQ ID NO: 5996436 - DNA, 25 bp, Homo sapien
gtggaaacatcctggccttcatatt

SEQ ID NO: 5996437 - DNA, 25 bp, Homo sapien
gcttgtttttcttgttccgaaatat

SEQ ID NO: 5996438 - DNA, 25 bp, Homo sapien
ccgactttaagtatttcctacgcaa

SEQ ID NO: 5996439 - DNA, 25 bp, Homo sapien
agcccttacacgaattaagtatgac

SEQ ID NO: 5996440 - DNA, 25 bp, Homo sapien
tgttaactcaaaacggccaaacctc

SEQ ID NO: 5996441 - DNA, 25 bp, Homo sapien
atgaaaaactagaagtatctagtaa

SEQ ID NO: 5996442 - DNA, 25 bp, Homo sapien
tatggggtatccattcttcagggaa

SEQ ID NO: 5996443 - DNA, 25 bp, Homo sapien
ccgtactatctgtttcggggaagac

SEQ ID NO: 5996444 - DNA, 25 bp, Homo sapien
gccttcatatttttttggtcctaac

SEQ ID NO: 5996445 - DNA, 25 bp, Homo sapien
ctggtgtagctctagcttgttattg

SEQ ID NO: 5996446 - DNA, 25 bp, Homo sapien
gaaaagcgccttaatataattcttg

SEQ ID NO: 5996447 - DNA, 25 bp, Homo sapien
gacacatgtttttggaatgaaaaac

SEQ ID NO: 5996448 - DNA, 25 bp, Homo sapien
aagaaccttactcaacttgtcttgt

SEQ ID NO: 5996449 - DNA, 25 bp, Homo sapien
tctttccctataccaacgttttctc

SEQ ID NO: 5996450 - DNA, 25 bp, Homo sapien
aaactagaagtatctagtaaaatag

SEQ ID NO: 5996451 - DNA, 25 bp, Homo sapien
ggttctaaggcgaatatggaatgat

SEQ ID NO: 5996452 - DNA, 25 bp, Homo sapien
gaaggaacacaccagacacatgttt

SEQ ID NO: 5996453 - DNA, 25 bp, Homo sapien
acatcctggccttcatatttttttg

SEQ ID NO: 5996454 - DNA, 25 bp, Homo sapien
tcctttcttttagattccctgacct

SEQ ID NO: 5996455 - DNA, 25 bp, Homo sapien
ttctcattcgtccagctttctctcc

SEQ ID NO: 5996456 - DNA, 25 bp, Homo sapien
cgaatatggaatgatctttccctat

SEQ ID NO: 5996457 - DNA, 25 bp, Homo sapien
tccttcatacttgttctcgagcccg

SEQ ID NO: 5996458 - DNA, 25 bp, Homo sapien
aaaaaagcccgcctacttctagcaa

SEQ ID NO: 5996459 - DNA, 25 bp, Homo sapien
ctaatagttttgccttcaaagcttg

SEQ ID NO: 5996460 - DNA, 25 bp, Homo sapien
cttttagattccctgacctctaact

SEQ ID NO: 5996461 - DNA, 25 bp, Homo sapien
ggtcctaaccttcttcctgcagaat

SEQ ID NO: 5996462 - DNA, 25 bp, Homo sapien
tcttttctagaaatagaattttctt

SEQ ID NO: 5996463 - DNA, 25 bp, Homo sapien
cacaattgacttcttcccgcttttg

SEQ ID NO: 5996464 - DNA, 25 bp, Homo sapien
tctaacttaagttcatcccgaagaa

SEQ ID NO: 5996465 - DNA, 25 bp, Homo sapien
agcccttttggtggcattacgcact

SEQ ID NO: 5996466 - DNA, 25 bp, Homo sapien
tggccttcatatttttttggtccta

SEQ ID NO: 5996467 - DNA, 25 bp, Homo sapien
ccttcttcctgcagaatccttcata

SEQ ID NO: 5996468 - DNA, 25 bp, Homo sapien
aatccttcatacttgttctcgagcc

SEQ ID NO: 5996469 - DNA, 25 bp, Homo sapien
gggatttttctaggtcctctaatag

SEQ ID NO: 5996470 - DNA, 25 bp, Homo sapien
gaatgaaaaactagaagtatctagt

SEQ ID NO: 5996471 - DNA, 25 bp, Homo sapien
agatagtcttttctagaaatagaat

SEQ ID NO: 5996472 - DNA, 25 bp, Homo sapien
ataatatctactattgaaccttgca

SEQ ID NO: 5996473 - DNA, 25 bp, Homo sapien
acaccaatgaattttcttttaggat

SEQ ID NO: 5996474 - DNA, 25 bp, Homo sapien
gtggcattacgcacttgaaggaaca

SEQ ID NO: 5996475 - DNA, 25 bp, Homo sapien
tataccaacgttttctccaggataa

SEQ ID NO: 5996476 - DNA, 25 bp, Homo sapien
aattaagtatgacgttgccaattcg

SEQ ID NO: 5996477 - DNA, 25 bp, Homo sapien
ggaaacatcctggccttcatatttt

SEQ ID NO: 5996478 - DNA, 25 bp, Homo sapien
atgatctttccctataccaacgttt

SEQ ID NO: 5996479 - DNA, 25 bp, Homo sapien
tctagcttgttattgaaagatgtag

SEQ ID NO: 5996480 - DNA, 25 bp, Homo sapien
tttggaatgaaaaactagaagtatc

SEQ ID NO: 5996481 - DNA, 25 bp, Homo sapien
ctctccgacaatttctcattcgtcc

SEQ ID NO: 5996482 - DNA, 25 bp, Homo sapien
atgacttcaactttatttttggtgt

SEQ ID NO: 5996483 - DNA, 25 bp, Homo sapien
atagtcttttctagaaatagaattt

SEQ ID NO: 5996484 - DNA, 25 bp, Homo sapien
ccttgcatcttctatggggtatcca

SEQ ID NO: 5996485 - DNA, 25 bp, Homo sapien
ccttgaaaagcgccttaatataatt

SEQ ID NO: 5996486 - DNA, 25 bp, Homo sapien
aagttcatcccgaagaaccttactc

SEQ ID NO: 5996487 - DNA, 25 bp, Homo sapien
gctcaaaaaagcccgcctacttcta

SEQ ID NO: 5996488 - DNA, 25 bp, Homo sapien
ttcttcctgcagaatccttcatact

SEQ ID NO: 5996489 - DNA, 25 bp, Homo sapien
caattcgatgtcttttatatctaac

SEQ ID NO: 5996490 - DNA, 25 bp, Homo sapien
agcaatgacttcaactttatttttg

SEQ ID NO: 5996491 - DNA, 25 bp, Homo sapien
ctcataataatttcacctgtggaaa

SEQ ID NO: 5996492 - DNA, 25 bp, Homo sapien
ctaaccttcttcctgcagaatcctt

SEQ ID NO: 5996493 - DNA, 25 bp, Homo sapien
tccaggataaaactttgttcctctt

SEQ ID NO: 5996494 - DNA, 25 bp, Homo sapien
aatttcacctgtggaaacatcctgg

SEQ ID NO: 5996495 - DNA, 25 bp, Homo sapien
gcagtttcaaatcacgcctcaaggc

SEQ ID NO: 5996496 - DNA, 25 bp, Homo sapien
tagttttgccttcaaagcttgtttt

SEQ ID NO: 5996497 - DNA, 25 bp, Homo sapien
tctccaggataaaactttgttcctc

SEQ ID NO: 5996498 - DNA, 25 bp, Homo sapien
gtccttgaaaagcgccttaatataa

SEQ ID NO: 5996499 - DNA, 25 bp, Homo sapien
aaacatcctggccttcatatttttt

SEQ ID NO: 5996500 - DNA, 25 bp, Homo sapien
atcttggatagactctccgacaatt

SEQ ID NO: 5996501 - DNA, 25 bp, Homo sapien
tcttcagataaagtcaaaaaattac

SEQ ID NO: 5996502 - DNA, 25 bp, Homo sapien
taacttaagttcatcccgaagaacc

SEQ ID NO: 5996503 - DNA, 25 bp, Homo sapien
aacgctcttcttcttttaaataata

SEQ ID NO: 5996504 - DNA, 25 bp, Homo sapien
cctacgcaaatgtacttcttcagat

SEQ ID NO: 5996505 - DNA, 25 bp, Homo sapien
tgcgagatagtcttttctagaaata

SEQ ID NO: 5996506 - DNA, 25 bp, Homo sapien
tttcttccttatatgctgccctttt

SEQ ID NO: 5996507 - DNA, 25 bp, Homo sapien
aagtatgacgttgccaattcgatgt

SEQ ID NO: 5996508 - DNA, 25 bp, Homo sapien
tatactggtgtagctctagcttgtt

SEQ ID NO: 5996509 - DNA, 25 bp, Homo sapien
gcagcccttttggtggcattacgca

SEQ ID NO: 5996510 - DNA, 25 bp, Homo sapien
gtgtaatcaaaacgtctagacacaa

SEQ ID NO: 5996511 - DNA, 25 bp, Homo sapien
ttcctacgcaaatgtacttcttcag

SEQ ID NO: 5996512 - DNA, 25 bp, Homo sapien
tagactctccgacaatttctcattc

SEQ ID NO: 5996513 - DNA, 25 bp, Homo sapien
tccctataccaacgttttctccagg

SEQ ID NO: 5996514 - DNA, 25 bp, Homo sapien
atacttgttctcgagcccgcagccc

SEQ ID NO: 5996515 - DNA, 25 bp, Homo sapien
aaaacgtctagacacaattgacttc

SEQ ID NO: 5996516 - DNA, 25 bp, Homo sapien
ccgacaatttctcattcgtccagct

SEQ ID NO: 5996517 - DNA, 25 bp, Homo sapien
tttttggaatgaaaaactagaagta

SEQ ID NO: 5996518 - DNA, 25 bp, Homo sapien
aaagatcactacactcatcaatctt

SEQ ID NO: 5996519 - DNA, 25 bp, Homo sapien
cgcttttggtttcaaccgtactatc

SEQ ID NO: 5996520 - DNA, 25 bp, Homo sapien
agttcaaaagatcactacactcatc

SEQ ID NO: 5996521 - DNA, 25 bp, Homo sapien
ctacttctagcaatgacttcaactt

SEQ ID NO: 5996522 - DNA, 25 bp, Homo sapien
tcatcaatcttggatagactctccg

SEQ ID NO: 5996523 - DNA, 25 bp, Homo sapien
taggtcctctaatagttttgccttc

SEQ ID NO: 5996524 - DNA, 25 bp, Homo sapien
tccttacggtaggctcaaaatgagg

SEQ ID NO: 5996525 - DNA, 25 bp, Homo sapien
ggcaacaccaatgaattttctttta

SEQ ID NO: 5996526 - DNA, 25 bp, Homo sapien
tggtttctaagtgttgggatttttc

SEQ ID NO: 5996527 - DNA, 25 bp, Homo sapien
ttgcctcataataatttcacctgtg

SEQ ID NO: 5996528 - DNA, 25 bp, Homo sapien
cttcttcagataaagtcaaaaaatt

SEQ ID NO: 5996529 - DNA, 25 bp, Homo sapien
ttaagtatgacgttgccaattcgat

SEQ ID NO: 5996530 - DNA, 25 bp, Homo sapien
ccttatatgctgcccttttatttgt

SEQ ID NO: 5996531 - DNA, 25 bp, Homo sapien
gcagaatccttcatacttgttctcg

SEQ ID NO: 5996532 - DNA, 25 bp, Homo sapien
tgtagctctagcttgttattgaaag

SEQ ID NO: 5996533 - DNA, 25 bp, Homo sapien
cctcaaggcaacaccaatgaatttt

SEQ ID NO: 5996534 - DNA, 25 bp, Homo sapien
ctgcagaatccttcatacttgttct

SEQ ID NO: 5996535 - DNA, 25 bp, Homo sapien
tttcacctgtggaaacatcctggcc

SEQ ID NO: 5996536 - DNA, 25 bp, Homo sapien
tcaaggcaacaccaatgaattttct

SEQ ID NO: 5996537 - DNA, 25 bp, Homo sapien
acttgttctcgagcccgcagccctt

SEQ ID NO: 5996538 - DNA, 25 bp, Homo sapien
tgttgggatttttctaggtcctcta

SEQ ID NO: 5996539 - DNA, 25 bp, Homo sapien
cagacacatgtttttggaatgaaaa

SEQ ID NO: 5996540 - DNA, 25 bp, Homo sapien
cggtaggctcaaaatgaggagatgg

SEQ ID NO: 5996541 - DNA, 25 bp, Homo sapien
gtactatctgtttcggggaagaccg

SEQ ID NO: 5996542 - DNA, 25 bp, Homo sapien
tattgaaagatgtagatgagttcaa

SEQ ID NO: 5996543 - DNA, 25 bp, Homo sapien
actgcttcaaaatattaggttttgc

SEQ ID NO: 5996544 - DNA, 25 bp, Homo sapien
ttatatgctgcccttttatttgtta

SEQ ID NO: 5996545 - DNA, 25 bp, Homo sapien
taagtgttgggatttttctaggtcc

SEQ ID NO: 5996546 - DNA, 25 bp, Homo sapien
aatcaaaacgtctagacacaattga

SEQ ID NO: 5996547 - DNA, 25 bp, Homo sapien
gaattttcttttaggatgaaaagga

SEQ ID NO: 5996548 - DNA, 25 bp, Homo sapien
cttcatacttgttctcgagcccgca

SEQ ID NO: 5996549 - DNA, 25 bp, Homo sapien
ttgaaaagcgccttaatataattct

SEQ ID NO: 5996550 - DNA, 25 bp, Homo sapien
acaccagacacatgtttttggaatg

SEQ ID NO: 5996551 - DNA, 25 bp, Homo sapien
ccattcttcagggaagcccttacac

SEQ ID NO: 5996552 - DNA, 25 bp, Homo sapien
cttcctgcagaatccttcatacttg

SEQ ID NO: 5996553 - DNA, 25 bp, Homo sapien
tattaggttttgcgagatagtcttt

SEQ ID NO: 5996554 - DNA, 25 bp, Homo sapien
gggaagcccttacacgaattaagta

SEQ ID NO: 5996555 - DNA, 25 bp, Homo sapien
ttacaagcgtccttgaaaagcgcct

SEQ ID NO: 5996556 - DNA, 25 bp, Homo sapien
ccgaaatatactggtgtagctctag

SEQ ID NO: 5996557 - DNA, 25 bp, Homo sapien
taactgcttcaaaatattaggtttt

SEQ ID NO: 5996558 - DNA, 25 bp, Homo sapien
ttaggttttgcgagatagtcttttc

SEQ ID NO: 5996559 - DNA, 25 bp, Homo sapien
ctttcttttagattccctgacctct

SEQ ID NO: 5996560 - DNA, 25 bp, Homo sapien
attcgatgtcttttatatctaactt

SEQ ID NO: 5996561 - DNA, 25 bp, Homo sapien
acttgaaggaacacaccagacacat

SEQ ID NO: 5996562 - DNA, 25 bp, Homo sapien
ttcaaagcttgtttttcttgttccg

SEQ ID NO: 5996563 - DNA, 25 bp, Homo sapien
aggctcaaaatgaggagatggcagt

SEQ ID NO: 5996564 - DNA, 25 bp, Homo sapien
gaagtatctagtaaaataggattcc

SEQ ID NO: 5996565 - DNA, 25 bp, Homo sapien
aggagatggcagtttcaaatcacgc

SEQ ID NO: 5996566 - DNA, 25 bp, Homo sapien
aaagcgccttaatataattcttgtc

SEQ ID NO: 5996567 - DNA, 25 bp, Homo sapien
ttaagttcatcccgaagaaccttac

SEQ ID NO: 5996568 - DNA, 25 bp, Homo sapien
ttcaaaagatcactacactcatcaa

SEQ ID NO: 5996569 - DNA, 25 bp, Homo sapien
aagtatttcctacgcaaatgtactt

SEQ ID NO: 5996570 - DNA, 25 bp, Homo sapien
ttcttttagattccctgacctctaa

SEQ ID NO: 5996571 - DNA, 25 bp, Homo sapien
tacttcttcagataaagtcaaaaaa

SEQ ID NO: 5996572 - DNA, 25 bp, Homo sapien
tgcttcaaaatattaggttttgcga

SEQ ID NO: 5996573 - DNA, 25 bp, Homo sapien
aaaatattaggttttgcgagatagt

SEQ ID NO: 5996574 - DNA, 25 bp, Homo sapien
tgaggagatggcagtttcaaatcac

SEQ ID NO: 5996575 - DNA, 25 bp, Homo sapien
cttacggtaggctcaaaatgaggag

SEQ ID NO: 5996576 - DNA, 25 bp, Homo sapien
gtcttttatatctaacttaagttca

SEQ ID NO: 5996577 - DNA, 25 bp, Homo sapien
tcacctgtggaaacatcctggcctt

SEQ ID NO: 5996578 - DNA, 25 bp, Homo sapien
ggtgtagctctagcttgttattgaa

SEQ ID NO: 5996579 - DNA, 25 bp, Homo sapien
ctaaggcgaatatggaatgatcttt

SEQ ID NO: 5996580 - DNA, 25 bp, Homo sapien
gttctcgagcccgcagcccttttgg

SEQ ID NO: 5996581 - DNA, 25 bp, Homo sapien
ccctgacctctaactgcttcaaaat

SEQ ID NO: 5996582 - DNA, 25 bp, Homo sapien
atcaatcttggatagactctccgac

SEQ ID NO: 5996583 - DNA, 25 bp, Homo sapien
tatctactattgaaccttgcatctt

SEQ ID NO: 5996584 - DNA, 25 bp, Homo sapien
gggtatccattcttcagggaagccc

SEQ ID NO: 5996585 - DNA, 25 bp, Homo sapien
cgcctcaaggcaacaccaatgaatt

SEQ ID NO: 5996586 - DNA, 25 bp, Homo sapien
aaggcgaatatggaatgatctttcc

SEQ ID NO: 5996587 - DNA, 25 bp, Homo sapien
tttcaaatcacgcctcaaggcaaca

SEQ ID NO: 5996588 - DNA, 25 bp, Homo sapien
ttgccaattcgatgtcttttatatc

SEQ ID NO: 5996589 - DNA, 25 bp, Homo sapien
caaatgtacttcttcagataaagtc

SEQ ID NO: 5996590 - DNA, 25 bp, Homo sapien
tttaggatgaaaaggatcaagatag

SEQ ID NO: 5996591 - DNA, 25 bp, Homo sapien
agatcactacactcatcaatcttgg

SEQ ID NO: 5996592 - DNA, 25 bp, Homo sapien
accaatgaattttcttttaggatga

SEQ ID NO: 5996593 - DNA, 25 bp, Homo sapien
cgccttaatataattcttgtctttt

SEQ ID NO: 5996594 - DNA, 25 bp, Homo sapien
tcatacttgttctcgagcccgcagc

SEQ ID NO: 5996595 - DNA, 25 bp, Homo sapien
tcaaaatattaggttttgcgagata

SEQ ID NO: 5996596 - DNA, 25 bp, Homo sapien
cagctttctctccttgccttcaaac

SEQ ID NO: 5996597 - DNA, 25 bp, Homo sapien
ttgaaggaacacaccagacacatgt

SEQ ID NO: 5996598 - DNA, 25 bp, Homo sapien
gctgcccttttatttgttaactcaa

SEQ ID NO: 5996599 - DNA, 25 bp, Homo sapien
gaaccttactcaacttgtcttgtaa

SEQ ID NO: 5996600 - DNA, 25 bp, Homo sapien
acacaccagacacatgtttttggaa

SEQ ID NO: 5996601 - DNA, 25 bp, Homo sapien
ctattgaaccttgcatcttctatgg

SEQ ID NO: 5996602 - DNA, 25 bp, Homo sapien
gttcctctttgcctcataataattt

SEQ ID NO: 5996603 - DNA, 25 bp, Homo sapien
tggtgtaatcaaaacgtctagacac

SEQ ID NO: 5996604 - DNA, 25 bp, Homo sapien
caacaccaatgaattttcttttagg

SEQ ID NO: 5996605 - DNA, 25 bp, Homo sapien
tcctctaatagttttgccttcaaag

SEQ ID NO: 5996606 - DNA, 25 bp, Homo sapien
tatggaatgatctttccctatacca

SEQ ID NO: 5996607 - DNA, 25 bp, Homo sapien
cacgaattaagtatgacgttgccaa

SEQ ID NO: 5996608 - DNA, 25 bp, Homo sapien
ctgacctctaactgcttcaaaatat

SEQ ID NO: 5996609 - DNA, 25 bp, Homo sapien
ttccctgacctctaactgcttcaaa

SEQ ID NO: 5996610 - DNA, 25 bp, Homo sapien
tacgcaaatgtacttcttcagataa

SEQ ID NO: 5996611 - DNA, 25 bp, Homo sapien
aggatcaagatagtaacgaacaaca

SEQ ID NO: 5996612 - DNA, 25 bp, Homo sapien
ttttcttttaggatgaaaaggatca

SEQ ID NO: 5996613 - DNA, 25 bp, Homo sapien
ttggtcctaaccttcttcctgcaga

SEQ ID NO: 5996614 - DNA, 25 bp, Homo sapien
gaccgactttaagtatttcctacgc

SEQ ID NO: 5996615 - DNA, 25 bp, Homo sapien
tagtaacgaacaacaccaggttcta

SEQ ID NO: 5996616 - DNA, 25 bp, Homo sapien
gaagcccttacacgaattaagtatg

SEQ ID NO: 5996617 - DNA, 25 bp, Homo sapien
ttccttatatgctgcccttttattt

SEQ ID NO: 5996618 - DNA, 25 bp, Homo sapien
caaacgctcttcttcttttaaataa

SEQ ID NO: 5996619 - DNA, 25 bp, Homo sapien
tatctaacttaagttcatcccgaag

SEQ ID NO: 5996620 - DNA, 25 bp, Homo sapien
gcatcttctatggggtatccattct

SEQ ID NO: 5996621 - DNA, 25 bp, Homo sapien
ctccgacaatttctcattcgtccag

SEQ ID NO: 5996622 - DNA, 25 bp, Homo sapien
atgaaaaggatcaagatagtaacga

SEQ ID NO: 5996623 - DNA, 25 bp, Homo sapien
acttctagcaatgacttcaacttta

SEQ ID NO: 5996624 - DNA, 25 bp, Homo sapien
aggttttgcgagatagtcttttcta

SEQ ID NO: 5996625 - DNA, 25 bp, Homo sapien
ttcttttaggatgaaaaggatcaag

SEQ ID NO: 5996626 - DNA, 25 bp, Homo sapien
atcactacactcatcaatcttggat

SEQ ID NO: 5996627 - DNA, 25 bp, Homo sapien
ttgggatttttctaggtcctctaat

SEQ ID NO: 5996628 - DNA, 25 bp, Homo sapien
tacggtaggctcaaaatgaggagat

SEQ ID NO: 5996629 - DNA, 25 bp, Homo sapien
tggcagtttcaaatcacgcctcaag

SEQ ID NO: 5996630 - DNA, 25 bp, Homo sapien
tctctccttgccttcaaacgctctt

SEQ ID NO: 5996631 - DNA, 25 bp, Homo sapien
aagatgtagatgagttcaaaagatc

SEQ ID NO: 5996632 - DNA, 25 bp, Homo sapien
tgccttcaaagcttgtttttcttgt

SEQ ID NO: 5996633 - DNA, 25 bp, Homo sapien
actcatcaatcttggatagactctc

SEQ ID NO: 5996634 - DNA, 25 bp, Homo sapien
gatagtaacgaacaacaccaggttc

SEQ ID NO: 5996635 - DNA, 25 bp, Homo sapien
gtaacgaacaacaccaggttctaag

SEQ ID NO: 5996636 - DNA, 25 bp, Homo sapien
caaacctccttacggtaggctcaaa

SEQ ID NO: 5996637 - DNA, 25 bp, Homo sapien
tgtagatgagttcaaaagatcacta

SEQ ID NO: 5996638 - DNA, 25 bp, Homo sapien
accaggttctaaggcgaatatggaa

SEQ ID NO: 5996639 - DNA, 25 bp, Homo sapien
ttacgcacttgaaggaacacaccag

SEQ ID NO: 5996640 - DNA, 25 bp, Homo sapien
tcctgcagaatccttcatacttgtt

SEQ ID NO: 5996641 - DNA, 25 bp, Homo sapien
catgtttttggaatgaaaaactaga

SEQ ID NO: 5996642 - DNA, 25 bp, Homo sapien
tctaactgcttcaaaatattaggtt

SEQ ID NO: 5996643 - DNA, 25 bp, Homo sapien
ctgtggaaacatcctggccttcata

SEQ ID NO: 5996644 - DNA, 25 bp, Homo sapien
cttttggtttcaaccgtactatctg

SEQ ID NO: 5996645 - DNA, 25 bp, Homo sapien
agtgttgggatttttctaggtcctc

SEQ ID NO: 5996646 - DNA, 25 bp, Homo sapien
cgtctagacacaattgacttcttcc

SEQ ID NO: 5996647 - DNA, 25 bp, Homo sapien
ttcaaacgctcttcttcttttaaat

SEQ ID NO: 5996648 - DNA, 25 bp, Homo sapien
caggataaaactttgttcctctttg

SEQ ID NO: 5996649 - DNA, 25 bp, Homo sapien
cctggccttcatatttttttggtcc

SEQ ID NO: 5996650 - DNA, 25 bp, Homo sapien
tcaaatcacgcctcaaggcaacacc

SEQ ID NO: 5996651 - DNA, 25 bp, Homo sapien
tctaagtgttgggatttttctaggt

SEQ ID NO: 5996652 - DNA, 25 bp, Homo sapien
ctacactcatcaatcttggatagac

SEQ ID NO: 5996653 - DNA, 25 bp, Homo sapien
cctctaactgcttcaaaatattagg

SEQ ID NO: 5996654 - DNA, 25 bp, Homo sapien
ttttctagaaatagaattttcttcc

SEQ ID NO: 5996655 - DNA, 25 bp, Homo sapien
ataaaactttgttcctctttgcctc

SEQ ID NO: 5996656 - DNA, 25 bp, Homo sapien
cttgccttcaaacgctcttcttctt

SEQ ID NO: 5996657 - DNA, 25 bp, Homo sapien
tgccttcaaacgctcttcttctttt

SEQ ID NO: 5996658 - DNA, 25 bp, Homo sapien
attttcttccttatatgctgccctt

SEQ ID NO: 5996659 - DNA, 25 bp, Homo sapien
atcttctatggggtatccattcttc

SEQ ID NO: 5996660 - DNA, 25 bp, Homo sapien
atgaattttcttttaggatgaaaag

SEQ ID NO: 5996661 - DNA, 25 bp, Homo sapien
acactcatcaatcttggatagactc

SEQ ID NO: 5996662 - DNA, 25 bp, Homo sapien
tgaaccttgcatcttctatggggta

SEQ ID NO: 5996663 - DNA, 25 bp, Homo sapien
tagctctagcttgttattgaaagat

SEQ ID NO: 5996664 - DNA, 25 bp, Homo sapien
tttttggtgtaatcaaaacgtctag

SEQ ID NO: 5996665 - DNA, 25 bp, Homo sapien
caaaagatcactacactcatcaatc

SEQ ID NO: 5996666 - DNA, 25 bp, Homo sapien
caatgaattttcttttaggatgaaa

SEQ ID NO: 5996667 - DNA, 25 bp, Homo sapien
accagacacatgtttttggaatgaa

SEQ ID NO: 5996668 - DNA, 25 bp, Homo sapien
tctcgagcccgcagcccttttggtg

SEQ ID NO: 5996669 - DNA, 25 bp, Homo sapien
aatgtacttcttcagataaagtcaa

SEQ ID NO: 5996670 - DNA, 25 bp, Homo sapien
gagatggcagtttcaaatcacgcct

SEQ ID NO: 5996671 - DNA, 25 bp, Homo sapien
tggatagactctccgacaatttctc

SEQ ID NO: 5996672 - DNA, 25 bp, Homo sapien
aacaacaccaggttctaaggcgaat

SEQ ID NO: 5996673 - DNA, 25 bp, Homo sapien
cttttaggatgaaaaggatcaagat

SEQ ID NO: 5996674 - DNA, 25 bp, Homo sapien
ccgcagcccttttggtggcattacg

SEQ ID NO: 5996675 - DNA, 25 bp, Homo sapien
ttccgaaatatactggtgtagctct

SEQ ID NO: 5996676 - DNA, 25 bp, Homo sapien
tcatcccgaagaaccttactcaact

SEQ ID NO: 5996677 - DNA, 25 bp, Homo sapien
ctagaaatagaattttcttccttat

SEQ ID NO: 5996678 - DNA, 25 bp, Homo sapien
tctccttgccttcaaacgctcttct

SEQ ID NO: 5996679 - DNA, 25 bp, Homo sapien
cttgtaactcctttcttttagattc

SEQ ID NO: 5996680 - DNA, 25 bp, Homo sapien
aagcttgctcaaaaaagcccgccta

SEQ ID NO: 5996681 - DNA, 25 bp, Homo sapien
gcgtccttgaaaagcgccttaatat

SEQ ID NO: 5996682 - DNA, 25 bp, Homo sapien
gtatttcctacgcaaatgtacttct

SEQ ID NO: 5996683 - DNA, 25 bp, Homo sapien
cccgaagaaccttactcaacttgtc

SEQ ID NO: 5996684 - DNA, 25 bp, Homo sapien
accttactcaacttgtcttgtaact

SEQ ID NO: 5996685 - DNA, 25 bp, Homo sapien
atttctcattcgtccagctttctct

SEQ ID NO: 5996686 - DNA, 25 bp, Homo sapien
caacaccaggttctaaggcgaatat

SEQ ID NO: 5996687 - DNA, 25 bp, Homo sapien
cttctatggggtatccattcttcag

SEQ ID NO: 5996688 - DNA, 25 bp, Homo sapien
caactttatttttggtgtaatcaaa

SEQ ID NO: 5996689 - DNA, 25 bp, Homo sapien
cactacactcatcaatcttggatag

SEQ ID NO: 5996690 - DNA, 25 bp, Homo sapien
aatgaggagatggcagtttcaaatc

SEQ ID NO: 5996691 - DNA, 25 bp, Homo sapien
cttggatagactctccgacaatttc

SEQ ID NO: 5996692 - DNA, 25 bp, Homo sapien
ttcagataaagtcaaaaaattacaa

SEQ ID NO: 5996693 - DNA, 25 bp, Homo sapien
ttgaaagatgtagatgagttcaaaa

SEQ ID NO: 5996694 - DNA, 25 bp, Homo sapien
tagaagtatctagtaaaataggatt

SEQ ID NO: 5996695 - DNA, 25 bp, Homo sapien
tctatggggtatccattcttcaggg

SEQ ID NO: 5996696 - DNA, 25 bp, Homo sapien
aatatctactattgaaccttgcatc

SEQ ID NO: 5996697 - DNA, 25 bp, Homo sapien
acaagcgtccttgaaaagcgcctta

SEQ ID NO: 5996698 - DNA, 25 bp, Homo sapien
tggtttcaaccgtactatctgtttc

SEQ ID NO: 5996699 - DNA, 25 bp, Homo sapien
atcctggccttcatatttttttggt

SEQ ID NO: 5996700 - DNA, 25 bp, Homo sapien
gttcatcccgaagaaccttactcaa

SEQ ID NO: 5996701 - DNA, 25 bp, Homo sapien
tcaaaaaagcccgcctacttctagc

SEQ ID NO: 5996702 - DNA, 25 bp, Homo sapien
aaaattacaagcgtccttgaaaagc

SEQ ID NO: 5996703 - DNA, 25 bp, Homo sapien
gctcaaaatgaggagatggcagttt

SEQ ID NO: 5996704 - DNA, 25 bp, Homo sapien
ggataaaactttgttcctctttgcc

SEQ ID NO: 5996705 - DNA, 25 bp, Homo sapien
tgtttttggaatgaaaaactagaag

SEQ ID NO: 5996706 - DNA, 25 bp, Homo sapien
tctgtttcggggaagaccgacttta

SEQ ID NO: 5996707 - DNA, 25 bp, Homo sapien
agaatccttcatacttgttctcgag

SEQ ID NO: 5996708 - DNA, 25 bp, Homo sapien
caattgacttcttcccgcttttggt

SEQ ID NO: 5996709 - DNA, 25 bp, Homo sapien
atttcctacgcaaatgtacttcttc

SEQ ID NO: 5996710 - DNA, 25 bp, Homo sapien
tcaaaatgaggagatggcagtttca

SEQ ID NO: 5996711 - DNA, 25 bp, Homo sapien
acaccaggttctaaggcgaatatgg

SEQ ID NO: 5996712 - DNA, 25 bp, Homo sapien
tactggtgtagctctagcttgttat

SEQ ID NO: 5996713 - DNA, 25 bp, Homo sapien
caggttctaaggcgaatatggaatg

SEQ ID NO: 5996714 - DNA, 25 bp, Homo sapien
aagcgtccttgaaaagcgccttaat

SEQ ID NO: 5996715 - DNA, 25 bp, Homo sapien
ggtcctctaatagttttgccttcaa

SEQ ID NO: 5996716 - DNA, 25 bp, Homo sapien
ctttgttcctctttgcctcataata

SEQ ID NO: 5996717 - DNA, 25 bp, Homo sapien
gatctttccctataccaacgttttc

SEQ ID NO: 5996718 - DNA, 25 bp, Homo sapien
ttgctcaaaaaagcccgcctacttc

SEQ ID NO: 5996719 - DNA, 25 bp, Homo sapien
tcatatttttttggtcctaaccttc

SEQ ID NO: 5996720 - DNA, 25 bp, Homo sapien
ctcaacttgtcttgtaactcctttc

SEQ ID NO: 5996721 - DNA, 25 bp, Homo sapien
tgtcttttttggtttctaagtgttg

SEQ ID NO: 5996722 - DNA, 25 bp, Homo sapien
gaaaaactagaagtatctagtaaaa

SEQ ID NO: 5996723 - DNA, 25 bp, Homo sapien
tagaattttcttccttatatgctgc

SEQ ID NO: 5996724 - DNA, 25 bp, Homo sapien
gatgtagatgagttcaaaagatcac

SEQ ID NO: 5996725 - DNA, 25 bp, Homo sapien
gataaagtcaaaaaattacaagcgt

SEQ ID NO: 5996726 - DNA, 25 bp, Homo sapien
atcccgaagaaccttactcaacttg

SEQ ID NO: 5996727 - DNA, 25 bp, Homo sapien
gccaattcgatgtcttttatatcta

SEQ ID NO: 5996728 - DNA, 25 bp, Homo sapien
tacacgaattaagtatgacgttgcc

SEQ ID NO: 5996729 - DNA, 25 bp, Homo sapien
cttacacgaattaagtatgacgttg

SEQ ID NO: 5996730 - DNA, 25 bp, Homo sapien
ttaagtatttcctacgcaaatgtac

SEQ ID NO: 5996731 - DNA, 25 bp, Homo sapien
tactattgaaccttgcatcttctat

SEQ ID NO: 5996732 - DNA, 25 bp, Homo sapien
agtatctagtaaaataggattccac

SEQ ID NO: 5996733 - DNA, 25 bp, Homo sapien
aagcccgcctacttctagcaatgac

SEQ ID NO: 5996734 - DNA, 25 bp, Homo sapien
gtttcaaccgtactatctgtttcgg

SEQ ID NO: 5996735 - DNA, 25 bp, Homo sapien
ccttcaaagcttgtttttcttgttc

SEQ ID NO: 5996736 - DNA, 25 bp, Homo sapien
aaaagcccgcctacttctagcaatg

SEQ ID NO: 5996737 - DNA, 25 bp, Homo sapien
gctctagcttgttattgaaagatgt

SEQ ID NO: 5996738 - DNA, 25 bp, Homo sapien
taactcctttcttttagattccctg

SEQ ID NO: 5996739 - DNA, 25 bp, Homo sapien
taccaacgttttctccaggataaaa

SEQ ID NO: 5996740 - DNA, 25 bp, Homo sapien
gaaagatgtagatgagttcaaaaga

SEQ ID NO: 5996741 - DNA, 25 bp, Homo sapien
tttggtggcattacgcacttgaagg

SEQ ID NO: 5996742 - DNA, 25 bp, Homo sapien
tgagttcaaaagatcactacactca

SEQ ID NO: 5996743 - DNA, 25 bp, Homo sapien
gacaatttctcattcgtccagcttt

SEQ ID NO: 5996744 - DNA, 25 bp, Homo sapien
gtatccattcttcagggaagccctt

SEQ ID NO: 5996745 - DNA, 25 bp, Homo sapien
cgttgccaattcgatgtcttttata

SEQ ID NO: 5996746 - DNA, 25 bp, Homo sapien
acgcacttgaaggaacacaccagac

SEQ ID NO: 5996747 - DNA, 25 bp, Homo sapien
atgacgttgccaattcgatgtcttt

SEQ ID NO: 5996748 - DNA, 25 bp, Homo sapien
cacatgtttttggaatgaaaaacta

SEQ ID NO: 5996749 - DNA, 25 bp, Homo sapien
gtaggctcaaaatgaggagatggca

SEQ ID NO: 5996750 - DNA, 25 bp, Homo sapien
aagatagtaacgaacaacaccaggt

SEQ ID NO: 5996751 - DNA, 25 bp, Homo sapien
tcttcagggaagcccttacacgaat

SEQ ID NO: 5996752 - DNA, 25 bp, Homo sapien
attgaaccttgcatcttctatgggg

SEQ ID NO: 5996753 - DNA, 25 bp, Homo sapien
aaggcaacaccaatgaattttcttt

SEQ ID NO: 5996754 - DNA, 25 bp, Homo sapien
tggaatgaaaaactagaagtatcta

SEQ ID NO: 5996755 - DNA, 25 bp, Homo sapien
tttatttgttaactcaaaacggcca

SEQ ID NO: 5996756 - DNA, 25 bp, Homo sapien
gacttcaactttatttttggtgtaa

SEQ ID NO: 5996757 - DNA, 25 bp, Homo sapien
tccagctttctctccttgccttcaa

SEQ ID NO: 5996758 - DNA, 25 bp, Homo sapien
gatcaagatagtaacgaacaacacc

SEQ ID NO: 5996759 - DNA, 25 bp, Homo sapien
ttttcttgttccgaaatatactggt

SEQ ID NO: 5996760 - DNA, 25 bp, Homo sapien
gagcccgcagcccttttggtggcat

SEQ ID NO: 5996761 - DNA, 25 bp, Homo sapien
taataatttcacctgtggaaacatc

SEQ ID NO: 5996762 - DNA, 25 bp, Homo sapien
gttttgcgagatagtcttttctaga

SEQ ID NO: 5996763 - DNA, 25 bp, Homo sapien
attcttcagggaagcccttacacga

SEQ ID NO: 5996764 - DNA, 25 bp, Homo sapien
tcaaaacgtctagacacaattgact

SEQ ID NO: 5996765 - DNA, 25 bp, Homo sapien
cgaacaacaccaggttctaaggcga

SEQ ID NO: 5996766 - DNA, 25 bp, Homo sapien
tagacacaattgacttcttcccgct

SEQ ID NO: 5996767 - DNA, 25 bp, Homo sapien
gctttctctccttgccttcaaacgc

SEQ ID NO: 5996768 - DNA, 25 bp, Homo sapien
gacacaattgacttcttcccgcttt

SEQ ID NO: 5996769 - DNA, 25 bp, Homo sapien
ttcaactttatttttggtgtaatca

SEQ ID NO: 5996770 - DNA, 25 bp, Homo sapien
ccttcaaacgctcttcttcttttaa

SEQ ID NO: 5996771 - DNA, 25 bp, Homo sapien
ttcttgttccgaaatatactggtgt

SEQ ID NO: 5996772 - DNA, 25 bp, Homo sapien
gtatgacgttgccaattcgatgtct

SEQ ID NO: 5996773 - DNA, 25 bp, Homo sapien
tggtggcattacgcacttgaaggaa

SEQ ID NO: 5996774 - DNA, 25 bp, Homo sapien
tttctctccttgccttcaaacgctc

SEQ ID NO: 5996775 - DNA, 25 bp, Homo sapien
taggatgaaaaggatcaagatagta

SEQ ID NO: 5996776 - DNA, 25 bp, Homo sapien
tagcttgttattgaaagatgtagat

SEQ ID NO: 5996777 - DNA, 25 bp, Homo sapien
tttatatctaacttaagttcatccc

SEQ ID NO: 5996778 - DNA, 25 bp, Homo sapien
ggatgaaaaggatcaagatagtaac

SEQ ID NO: 5996779 - DNA, 25 bp, Homo sapien
aattacaagcgtccttgaaaagcgc

SEQ ID NO: 5996780 - DNA, 25 bp, Homo sapien
ctttgcctcataataatttcacctg

SEQ ID NO: 5996781 - DNA, 25 bp, Homo sapien
aaccttgcatcttctatggggtatc

SEQ ID NO: 5996782 - DNA, 25 bp, Homo sapien
ctctttgcctcataataatttcacc

SEQ ID NO: 5996783 - DNA, 25 bp, Homo sapien
aatatggaatgatctttccctatac

SEQ ID NO: 5996784 - DNA, 25 bp, Homo sapien
aactttgttcctctttgcctcataa

SEQ ID NO: 5996785 - DNA, 25 bp, Homo sapien
aacgtctagacacaattgacttctt

SEQ ID NO: 5996786 - DNA, 25 bp, Homo sapien
tgtaactcctttcttttagattccc

SEQ ID NO: 5996787 - DNA, 25 bp, Homo sapien
cagggaagcccttacacgaattaag

SEQ ID NO: 5996788 - DNA, 25 bp, Homo sapien
gatttttctaggtcctctaatagtt

SEQ ID NO: 5996789 - DNA, 25 bp, Homo sapien
gcccgcctacttctagcaatgactt

SEQ ID NO: 5996790 - DNA, 25 bp, Homo sapien
gtaatcaaaacgtctagacacaatt

SEQ ID NO: 5996791 - DNA, 25 bp, Homo sapien
caaccgtactatctgtttcggggaa

SEQ ID NO: 5996792 - DNA, 25 bp, Homo sapien
caaaaaattacaagcgtccttgaaa

SEQ ID NO: 5996793 - DNA, 25 bp, Homo sapien
ttgtcttgtaactcctttcttttag

SEQ ID NO: 5996794 - DNA, 25 bp, Homo sapien
ccgcctacttctagcaatgacttca

SEQ ID NO: 5996795 - DNA, 25 bp, Homo sapien
cccttacacgaattaagtatgacgt

SEQ ID NO: 5996796 - DNA, 25 bp, Homo sapien
gaacatgaatccgtccctggtgtag

SEQ ID NO: 5996797 - DNA, 25 bp, Homo sapien
cacagctgtgcataaggcaaatatc

SEQ ID NO: 5996798 - DNA, 25 bp, Homo sapien
acaatgcctccatgcaggcggtggc

SEQ ID NO: 5996799 - DNA, 25 bp, Homo sapien
gggtttgaatgaatatgctactaga

SEQ ID NO: 5996800 - DNA, 25 bp, Homo sapien
gctgaaaatatcccgatcgactggg

SEQ ID NO: 5996801 - DNA, 25 bp, Homo sapien
ctcaggcctggaacatgaatccgtc

SEQ ID NO: 5996802 - DNA, 25 bp, Homo sapien
aaaatatcccgatcgactgggaaac

SEQ ID NO: 5996803 - DNA, 25 bp, Homo sapien
tggtttagatattaaaggccaaaat

SEQ ID NO: 5996804 - DNA, 25 bp, Homo sapien
tagtggaatctttgaaagttatgac

SEQ ID NO: 5996805 - DNA, 25 bp, Homo sapien
ggatcgccagatttgcctttgactt

SEQ ID NO: 5996806 - DNA, 25 bp, Homo sapien
tattggtggttcctcttctactact

SEQ ID NO: 5996807 - DNA, 25 bp, Homo sapien
tatggcacactcctgctgaccaaac

SEQ ID NO: 5996808 - DNA, 25 bp, Homo sapien
cttcgaaccaggttccagacatgtt

SEQ ID NO: 5996809 - DNA, 25 bp, Homo sapien
tttgatgtcctagttaccccttcaa

SEQ ID NO: 5996810 - DNA, 25 bp, Homo sapien
agtatggcggtcgtttcaccgtcac

SEQ ID NO: 5996811 - DNA, 25 bp, Homo sapien
atttgggtttgaatgaatatgctac

SEQ ID NO: 5996812 - DNA, 25 bp, Homo sapien
aatgtggcccttttcaaatccttga

SEQ ID NO: 5996813 - DNA, 25 bp, Homo sapien
ccctggtgtagtggaatctttgaaa

SEQ ID NO: 5996814 - DNA, 25 bp, Homo sapien
gtcttcgaaccaggttccagacatg

SEQ ID NO: 5996815 - DNA, 25 bp, Homo sapien
acatgaatccgtccctggtgtagtg

SEQ ID NO: 5996816 - DNA, 25 bp, Homo sapien
gcctttgacttcgccaagaaataca

SEQ ID NO: 5996817 - DNA, 25 bp, Homo sapien
aaggccaaaatgtggctaacccaac

SEQ ID NO: 5996818 - DNA, 25 bp, Homo sapien
aaggcgtctatgaagctgttgagtc

SEQ ID NO: 5996819 - DNA, 25 bp, Homo sapien
gctgctttgatcggtggtccaggat

SEQ ID NO: 5996820 - DNA, 25 bp, Homo sapien
agaatatcctgatattgacgtatcg

SEQ ID NO: 5996821 - DNA, 25 bp, Homo sapien
ctataaacattaagcaaacagatca

SEQ ID NO: 5996822 - DNA, 25 bp, Homo sapien
cttgaagggtgtcaagactagaatt

SEQ ID NO: 5996823 - DNA, 25 bp, Homo sapien
aagctgttgagtctctaaagagaaa

SEQ ID NO: 5996824 - DNA, 25 bp, Homo sapien
aactgaaattggccaaaaagaatat

SEQ ID NO: 5996825 - DNA, 25 bp, Homo sapien
aagttaggtgacggtctgttcagaa

SEQ ID NO: 5996826 - DNA, 25 bp, Homo sapien
ccatcattgtcgacaatgcctccat

SEQ ID NO: 5996827 - DNA, 25 bp, Homo sapien
aggtcacggttcactaaacgttgct

SEQ ID NO: 5996828 - DNA, 25 bp, Homo sapien
ctagaatctcaaaggcagttcatga

SEQ ID NO: 5996829 - DNA, 25 bp, Homo sapien
attaagcaaacagatcataaggaag

SEQ ID NO: 5996830 - DNA, 25 bp, Homo sapien
tcattagagaaaacacggagggtga

SEQ ID NO: 5996831 - DNA, 25 bp, Homo sapien
cactgattcagtgagaaccattttt

SEQ ID NO: 5996832 - DNA, 25 bp, Homo sapien
tttgcgtaaacaactagatatctac

SEQ ID NO: 5996833 - DNA, 25 bp, Homo sapien
atttgcctttgacttcgccaagaaa

SEQ ID NO: 5996834 - DNA, 25 bp, Homo sapien
cattgtcgacaatgcctccatgcag

SEQ ID NO: 5996835 - DNA, 25 bp, Homo sapien
tatgctgtcttcgaaccaggttcca

SEQ ID NO: 5996836 - DNA, 25 bp, Homo sapien
tgaagggtgtcaagactagaattcc

SEQ ID NO: 5996837 - DNA, 25 bp, Homo sapien
ttgggtttgaatgaatatgctacta

SEQ ID NO: 5996838 - DNA, 25 bp, Homo sapien
ctagttaccccttcaatgtacggta

SEQ ID NO: 5996839 - DNA, 25 bp, Homo sapien
gactagacctaagacagaaaggatc

SEQ ID NO: 5996840 - DNA, 25 bp, Homo sapien
tgctttgatcggtggtccaggattg

SEQ ID NO: 5996841 - DNA, 25 bp, Homo sapien
cctccatgcaggcggtggccaaacc

SEQ ID NO: 5996842 - DNA, 25 bp, Homo sapien
acgatcgcagaaggtaagcatacca

SEQ ID NO: 5996843 - DNA, 25 bp, Homo sapien
gtcctagttaccccttcaatgtacg

SEQ ID NO: 5996844 - DNA, 25 bp, Homo sapien
gtctgtcacagctgtgcataaggca

SEQ ID NO: 5996845 - DNA, 25 bp, Homo sapien
gatattgacgtatcgtccatcattg

SEQ ID NO: 5996846 - DNA, 25 bp, Homo sapien
ggtcgtttcaccgtcactttgatac

SEQ ID NO: 5996847 - DNA, 25 bp, Homo sapien
gctatggcacactcctgctgaccaa

SEQ ID NO: 5996848 - DNA, 25 bp, Homo sapien
agagaactttagccactgccgctca

SEQ ID NO: 5996849 - DNA, 25 bp, Homo sapien
tcctcttctactactgacttcacga

SEQ ID NO: 5996850 - DNA, 25 bp, Homo sapien
gtctctaaagagaaataagattggt

SEQ ID NO: 5996851 - DNA, 25 bp, Homo sapien
gtcactttgatacctggtgacggtg

SEQ ID NO: 5996852 - DNA, 25 bp, Homo sapien
ttgcctttgacttcgccaagaaata

SEQ ID NO: 5996853 - DNA, 25 bp, Homo sapien
gtccatcattgtcgacaatgcctcc

SEQ ID NO: 5996854 - DNA, 25 bp, Homo sapien
gctgtgcataaggcaaatatcatga

SEQ ID NO: 5996855 - DNA, 25 bp, Homo sapien
gcggaacgcaccctacccaagaagt

SEQ ID NO: 5996856 - DNA, 25 bp, Homo sapien
gttggtttagatattaaaggccaaa

SEQ ID NO: 5996857 - DNA, 25 bp, Homo sapien
taacccaactgccatgatcctttcc

SEQ ID NO: 5996858 - DNA, 25 bp, Homo sapien
gaatccgtccctggtgtagtggaat

SEQ ID NO: 5996859 - DNA, 25 bp, Homo sapien
caacattggcgctgctttgatcggt

SEQ ID NO: 5996860 - DNA, 25 bp, Homo sapien
aaagttatgactagacctaagacag

SEQ ID NO: 5996861 - DNA, 25 bp, Homo sapien
cgccaatgtggcccttttcaaatcc

SEQ ID NO: 5996862 - DNA, 25 bp, Homo sapien
ggccaaaatgtggctaacccaactg

SEQ ID NO: 5996863 - DNA, 25 bp, Homo sapien
actatgctgtcttcgaaccaggttc

SEQ ID NO: 5996864 - DNA, 25 bp, Homo sapien
gattcagtgagaaccatttttgagg

SEQ ID NO: 5996865 - DNA, 25 bp, Homo sapien
cactttgatacctggtgacggtgtt

SEQ ID NO: 5996866 - DNA, 25 bp, Homo sapien
agacctaagacagaaaggatcgcca

SEQ ID NO: 5996867 - DNA, 25 bp, Homo sapien
acccaactgccatgatcctttcctc

SEQ ID NO: 5996868 - DNA, 25 bp, Homo sapien
gctgttgagtctctaaagagaaata

SEQ ID NO: 5996869 - DNA, 25 bp, Homo sapien
tcactaaacgttgctttgcgtaaac

SEQ ID NO: 5996870 - DNA, 25 bp, Homo sapien
cgccagatttgcctttgacttcgcc

SEQ ID NO: 5996871 - DNA, 25 bp, Homo sapien
acggagggtgagttctcaggcctgg

SEQ ID NO: 5996872 - DNA, 25 bp, Homo sapien
gcacactcctgctgaccaaacaggt

SEQ ID NO: 5996873 - DNA, 25 bp, Homo sapien
cctttcctccacgttaatgttgaac

SEQ ID NO: 5996874 - DNA, 25 bp, Homo sapien
caggcctggaacatgaatccgtccc

SEQ ID NO: 5996875 - DNA, 25 bp, Homo sapien
aaagaatatcctgatattgacgtat

SEQ ID NO: 5996876 - DNA, 25 bp, Homo sapien
ccaagaagtatggcggtcgtttcac

SEQ ID NO: 5996877 - DNA, 25 bp, Homo sapien
taggtgacggtctgttcagaaatat

SEQ ID NO: 5996878 - DNA, 25 bp, Homo sapien
atcttaggcaacattggcgctgctt

SEQ ID NO: 5996879 - DNA, 25 bp, Homo sapien
cgtctatgaagctgttgagtctcta

SEQ ID NO: 5996880 - DNA, 25 bp, Homo sapien
gacgtatcgtccatcattgtcgaca

SEQ ID NO: 5996881 - DNA, 25 bp, Homo sapien
tgcaggcggtggccaaacctcatca

SEQ ID NO: 5996882 - DNA, 25 bp, Homo sapien
aaacattaagcaaacagatcataag

SEQ ID NO: 5996883 - DNA, 25 bp, Homo sapien
ttccagacatgttggtttagatatt

SEQ ID NO: 5996884 - DNA, 25 bp, Homo sapien
aatccttgaagggtgtcaagactag

SEQ ID NO: 5996885 - DNA, 25 bp, Homo sapien
tcggtggtccaggattggtggcagg

SEQ ID NO: 5996886 - DNA, 25 bp, Homo sapien
atacaacagaaagtctgtcacagct

SEQ ID NO: 5996887 - DNA, 25 bp, Homo sapien
caaacagatcataaggaaggcgtct

SEQ ID NO: 5996888 - DNA, 25 bp, Homo sapien
gctaacccaactgccatgatccttt

SEQ ID NO: 5996889 - DNA, 25 bp, Homo sapien
ccaaaatgtggctaacccaactgcc

SEQ ID NO: 5996890 - DNA, 25 bp, Homo sapien
tacgccaatgtggcccttttcaaat

SEQ ID NO: 5996891 - DNA, 25 bp, Homo sapien
gctttgcgtaaacaactagatatct

SEQ ID NO: 5996892 - DNA, 25 bp, Homo sapien
taccactagagatattggtggttcc

SEQ ID NO: 5996893 - DNA, 25 bp, Homo sapien
attggtcttaaggggctatggcaca

SEQ ID NO: 5996894 - DNA, 25 bp, Homo sapien
caaatccttgaagggtgtcaagact

SEQ ID NO: 5996895 - DNA, 25 bp, Homo sapien
gactgggaaactataaacattaagc

SEQ ID NO: 5996896 - DNA, 25 bp, Homo sapien
accatttttgaggctgaaaatatcc

SEQ ID NO: 5996897 - DNA, 25 bp, Homo sapien
tcgactgggaaactataaacattaa

SEQ ID NO: 5996898 - DNA, 25 bp, Homo sapien
ttagccactgccgctcaggcggaac

SEQ ID NO: 5996899 - DNA, 25 bp, Homo sapien
gaacaattgctaagagaactttagc

SEQ ID NO: 5996900 - DNA, 25 bp, Homo sapien
gcttaacagaacaattgctaagaga

SEQ ID NO: 5996901 - DNA, 25 bp, Homo sapien
gggtgtcaagactagaattccagac

SEQ ID NO: 5996902 - DNA, 25 bp, Homo sapien
gatatctacgccaatgtggcccttt

SEQ ID NO: 5996903 - DNA, 25 bp, Homo sapien
taaacgttgctttgcgtaaacaact

SEQ ID NO: 5996904 - DNA, 25 bp, Homo sapien
atgaatatgctactagaatctcaaa

SEQ ID NO: 5996905 - DNA, 25 bp, Homo sapien
gatacctggtgacggtgttgggaaa

SEQ ID NO: 5996906 - DNA, 25 bp, Homo sapien
ggcgtctatgaagctgttgagtctc

SEQ ID NO: 5996907 - DNA, 25 bp, Homo sapien
aggcagttcatgaaacgatcgcaga

SEQ ID NO: 5996908 - DNA, 25 bp, Homo sapien
caccgtcactttgatacctggtgac

SEQ ID NO: 5996909 - DNA, 25 bp, Homo sapien
gtgccaactttggcagggactatgc

SEQ ID NO: 5996910 - DNA, 25 bp, Homo sapien
cggtgttgggaaagaaatcactgat

SEQ ID NO: 5996911 - DNA, 25 bp, Homo sapien
aaacacggagggtgagttctcaggc

SEQ ID NO: 5996912 - DNA, 25 bp, Homo sapien
atatgctactagaatctcaaaggca

SEQ ID NO: 5996913 - DNA, 25 bp, Homo sapien
ggccaaacctcatcaatttgatgtc

SEQ ID NO: 5996914 - DNA, 25 bp, Homo sapien
tgtagtggaatctttgaaagttatg

SEQ ID NO: 5996915 - DNA, 25 bp, Homo sapien
cttaaggggctatggcacactcctg

SEQ ID NO: 5996916 - DNA, 25 bp, Homo sapien
tttcctccacgttaatgttgaacca

SEQ ID NO: 5996917 - DNA, 25 bp, Homo sapien
gaaagtctgtcacagctgtgcataa

SEQ ID NO: 5996918 - DNA, 25 bp, Homo sapien
gaaccaggttccagacatgttggtt

SEQ ID NO: 5996919 - DNA, 25 bp, Homo sapien
ataaacattaagcaaacagatcata

SEQ ID NO: 5996920 - DNA, 25 bp, Homo sapien
cgttgctttgcgtaaacaactagat

SEQ ID NO: 5996921 - DNA, 25 bp, Homo sapien
tataataactgaaattggccaaaaa

SEQ ID NO: 5996922 - DNA, 25 bp, Homo sapien
acggtaccatcttaggcaacattgg

SEQ ID NO: 5996923 - DNA, 25 bp, Homo sapien
taaacaactagatatctacgccaat

SEQ ID NO: 5996924 - DNA, 25 bp, Homo sapien
tatgaagctgttgagtctctaaaga

SEQ ID NO: 5996925 - DNA, 25 bp, Homo sapien
ggtaagcataccactagagatattg

SEQ ID NO: 5996926 - DNA, 25 bp, Homo sapien
cagctgtgcataaggcaaatatcat

SEQ ID NO: 5996927 - DNA, 25 bp, Homo sapien
gtggccaaacctcatcaatttgatg

SEQ ID NO: 5996928 - DNA, 25 bp, Homo sapien
tgctgtcttcgaaccaggttccaga

SEQ ID NO: 5996929 - DNA, 25 bp, Homo sapien
tgaaaatatcccgatcgactgggaa

SEQ ID NO: 5996930 - DNA, 25 bp, Homo sapien
ccttcaatgtacggtaccatcttag

SEQ ID NO: 5996931 - DNA, 25 bp, Homo sapien
gtggaatctttgaaagttatgacta

SEQ ID NO: 5996932 - DNA, 25 bp, Homo sapien
agaatctcaaaggcagttcatgaaa

SEQ ID NO: 5996933 - DNA, 25 bp, Homo sapien
gtccaggattggtggcaggtgccaa

SEQ ID NO: 5996934 - DNA, 25 bp, Homo sapien
ccaactgccatgatcctttcctcca

SEQ ID NO: 5996935 - DNA, 25 bp, Homo sapien
tagaattccagacatagatttgatt

SEQ ID NO: 5996936 - DNA, 25 bp, Homo sapien
cagtgagaaccatttttgaggctga

SEQ ID NO: 5996937 - DNA, 25 bp, Homo sapien
ttggtggttcctcttctactactga

SEQ ID NO: 5996938 - DNA, 25 bp, Homo sapien
taagattggtcttaaggggctatgg

SEQ ID NO: 5996939 - DNA, 25 bp, Homo sapien
aaatacaacagaaagtctgtcacag

SEQ ID NO: 5996940 - DNA, 25 bp, Homo sapien
aatgaaatcatcaacaaattatcta

SEQ ID NO: 5996941 - DNA, 25 bp, Homo sapien
ggccaaaaagaatatcctgatattg

SEQ ID NO: 5996942 - DNA, 25 bp, Homo sapien
gtcaagactagaattccagacatag

SEQ ID NO: 5996943 - DNA, 25 bp, Homo sapien
gaatgaatatgctactagaatctca

SEQ ID NO: 5996944 - DNA, 25 bp, Homo sapien
ggaaggcgtctatgaagctgttgag

SEQ ID NO: 5996945 - DNA, 25 bp, Homo sapien
ggtgtagtggaatctttgaaagtta

SEQ ID NO: 5996946 - DNA, 25 bp, Homo sapien
actgccgctcaggcggaacgcaccc

SEQ ID NO: 5996947 - DNA, 25 bp, Homo sapien
ccaggattggtggcaggtgccaact

SEQ ID NO: 5996948 - DNA, 25 bp, Homo sapien
ggcggtggccaaacctcatcaattt

SEQ ID NO: 5996949 - DNA, 25 bp, Homo sapien
caatgtacggtaccatcttaggcaa

SEQ ID NO: 5996950 - DNA, 25 bp, Homo sapien
catagatttgattgtcattagagaa

SEQ ID NO: 5996951 - DNA, 25 bp, Homo sapien
tcctccacgttaatgttgaaccatt

SEQ ID NO: 5996952 - DNA, 25 bp, Homo sapien
gcagaaggtaagcataccactagag

SEQ ID NO: 5996953 - DNA, 25 bp, Homo sapien
gaaccatttttgaggctgaaaatat

SEQ ID NO: 5996954 - DNA, 25 bp, Homo sapien
gcagttcatgaaacgatcgcagaag

SEQ ID NO: 5996955 - DNA, 25 bp, Homo sapien
cctggtgacggtgttgggaaagaaa

SEQ ID NO: 5996956 - DNA, 25 bp, Homo sapien
tcaaaggcagttcatgaaacgatcg

SEQ ID NO: 5996957 - DNA, 25 bp, Homo sapien
tgggaaagaaatcactgattcagtg

SEQ ID NO: 5996958 - DNA, 25 bp, Homo sapien
ctgattcagtgagaaccatttttga

SEQ ID NO: 5996959 - DNA, 25 bp, Homo sapien
ccccttcaatgtacggtaccatctt

SEQ ID NO: 5996960 - DNA, 25 bp, Homo sapien
tgaccaaacaggtcacggttcacta

SEQ ID NO: 5996961 - DNA, 25 bp, Homo sapien
tttgaaagttatgactagacctaag

SEQ ID NO: 5996962 - DNA, 25 bp, Homo sapien
acctaagacagaaaggatcgccaga

SEQ ID NO: 5996963 - DNA, 25 bp, Homo sapien
acacggagggtgagttctcaggcct

SEQ ID NO: 5996964 - DNA, 25 bp, Homo sapien
atgaatccgtccctggtgtagtgga

SEQ ID NO: 5996965 - DNA, 25 bp, Homo sapien
ccgtccctggtgtagtggaatcttt

SEQ ID NO: 5996966 - DNA, 25 bp, Homo sapien
caagactagaattccagacatagat

SEQ ID NO: 5996967 - DNA, 25 bp, Homo sapien
taccccttcaatgtacggtaccatc

SEQ ID NO: 5996968 - DNA, 25 bp, Homo sapien
agaaatacaacagaaagtctgtcac

SEQ ID NO: 5996969 - DNA, 25 bp, Homo sapien
gtttgaatgaatatgctactagaat

SEQ ID NO: 5996970 - DNA, 25 bp, Homo sapien
agatttgcctttgacttcgccaaga

SEQ ID NO: 5996971 - DNA, 25 bp, Homo sapien
cggttcactaaacgttgctttgcgt

SEQ ID NO: 5996972 - DNA, 25 bp, Homo sapien
ggagggtgagttctcaggcctggaa

SEQ ID NO: 5996973 - DNA, 25 bp, Homo sapien
ttgaatgaatatgctactagaatct

SEQ ID NO: 5996974 - DNA, 25 bp, Homo sapien
gggctatggcacactcctgctgacc

SEQ ID NO: 5996975 - DNA, 25 bp, Homo sapien
aataagattggtcttaaggggctat

SEQ ID NO: 5996976 - DNA, 25 bp, Homo sapien
taagcataccactagagatattggt

SEQ ID NO: 5996977 - DNA, 25 bp, Homo sapien
ctcatcaatttgatgtcctagttac

SEQ ID NO: 5996978 - DNA, 25 bp, Homo sapien
ccacgttaatgttgaaccatttggg

SEQ ID NO: 5996979 - DNA, 25 bp, Homo sapien
tttgaggctgaaaatatcccgatcg

SEQ ID NO: 5996980 - DNA, 25 bp, Homo sapien
aaacgatcgcagaaggtaagcatac

SEQ ID NO: 5996981 - DNA, 25 bp, Homo sapien
ggtctgttcagaaatataataactg

SEQ ID NO: 5996982 - DNA, 25 bp, Homo sapien
gcgctgctttgatcggtggtccagg

SEQ ID NO: 5996983 - DNA, 25 bp, Homo sapien
cacggttcactaaacgttgctttgc

SEQ ID NO: 5996984 - DNA, 25 bp, Homo sapien
ccagacatgttggtttagatattaa

SEQ ID NO: 5996985 - DNA, 25 bp, Homo sapien
tttttgaggctgaaaatatcccgat

SEQ ID NO: 5996986 - DNA, 25 bp, Homo sapien
aaacctcatcaatttgatgtcctag

SEQ ID NO: 5996987 - DNA, 25 bp, Homo sapien
agcataccactagagatattggtgg

SEQ ID NO: 5996988 - DNA, 25 bp, Homo sapien
tgcataaggcaaatatcatgaagtt

SEQ ID NO: 5996989 - DNA, 25 bp, Homo sapien
cacgaatgaaatcatcaacaaatta

SEQ ID NO: 5996990 - DNA, 25 bp, Homo sapien
caagaaatacaacagaaagtctgtc

SEQ ID NO: 5996991 - DNA, 25 bp, Homo sapien
tgaaacgatcgcagaaggtaagcat

SEQ ID NO: 5996992 - DNA, 25 bp, Homo sapien
tgaaatcatcaacaaattatctacc

SEQ ID NO: 5996993 - DNA, 25 bp, Homo sapien
ttcaatgtacggtaccatcttaggc

SEQ ID NO: 5996994 - DNA, 25 bp, Homo sapien
aatctcaaaggcagttcatgaaacg

SEQ ID NO: 5996995 - DNA, 25 bp, Homo sapien
gagaaaacacggagggtgagttctc

SEQ ID NO: 5996996 - DNA, 25 bp, Homo sapien
tcctgatattgacgtatcgtccatc

SEQ ID NO: 5996997 - DNA, 25 bp, Homo sapien
ctttgacttcgccaagaaatacaac

SEQ ID NO: 5996998 - DNA, 25 bp, Homo sapien
aagggtgtcaagactagaattccag

SEQ ID NO: 5996999 - DNA, 25 bp, Homo sapien
gacagaaaggatcgccagatttgcc

SEQ ID NO: 5997000 - DNA, 25 bp, Homo sapien
gaatatgctactagaatctcaaagg

SEQ ID NO: 5997001 - DNA, 25 bp, Homo sapien
tagagaaaacacggagggtgagttc

SEQ ID NO: 5997002 - DNA, 25 bp, Homo sapien
tcgcagaaggtaagcataccactag

SEQ ID NO: 5997003 - DNA, 25 bp, Homo sapien
ggcctggaacatgaatccgtccctg

SEQ ID NO: 5997004 - DNA, 25 bp, Homo sapien
tcataaggaaggcgtctatgaagct

SEQ ID NO: 5997005 - DNA, 25 bp, Homo sapien
cagatcataaggaaggcgtctatga

SEQ ID NO: 5997006 - DNA, 25 bp, Homo sapien
tggctaacccaactgccatgatcct

SEQ ID NO: 5997007 - DNA, 25 bp, Homo sapien
tgaaagttatgactagacctaagac

SEQ ID NO: 5997008 - DNA, 25 bp, Homo sapien
gcaaatatcatgaagttaggtgacg

SEQ ID NO: 5997009 - DNA, 25 bp, Homo sapien
ccgctcaggcggaacgcaccctacc

SEQ ID NO: 5997010 - DNA, 25 bp, Homo sapien
acttcacgaatgaaatcatcaacaa

SEQ ID NO: 5997011 - DNA, 25 bp, Homo sapien
gacttcgccaagaaatacaacagaa

SEQ ID NO: 5997012 - DNA, 25 bp, Homo sapien
ttaacagaacaattgctaagagaac

SEQ ID NO: 5997013 - DNA, 25 bp, Homo sapien
aacagaaagtctgtcacagctgtgc

SEQ ID NO: 5997014 - DNA, 25 bp, Homo sapien
ggttccagacatgttggtttagata

SEQ ID NO: 5997015 - DNA, 25 bp, Homo sapien
attccagacatagatttgattgtca

SEQ ID NO: 5997016 - DNA, 25 bp, Homo sapien
aatttgatgtcctagttaccccttc

SEQ ID NO: 5997017 - DNA, 25 bp, Homo sapien
tgattgtcattagagaaaacacgga

SEQ ID NO: 5997018 - DNA, 25 bp, Homo sapien
actagaattccagacatagatttga

SEQ ID NO: 5997019 - DNA, 25 bp, Homo sapien
ccatcttaggcaacattggcgctgc

SEQ ID NO: 5997020 - DNA, 25 bp, Homo sapien
tggaacatgaatccgtccctggtgt

SEQ ID NO: 5997021 - DNA, 25 bp, Homo sapien
acaacagaaagtctgtcacagctgt

SEQ ID NO: 5997022 - DNA, 25 bp, Homo sapien
aatatcctgatattgacgtatcgtc

SEQ ID NO: 5997023 - DNA, 25 bp, Homo sapien
tccttgaagggtgtcaagactagaa

SEQ ID NO: 5997024 - DNA, 25 bp, Homo sapien
ggaacgcaccctacccaagaagtat

SEQ ID NO: 5997025 - DNA, 25 bp, Homo sapien
tcgccaagaaatacaacagaaagtc

SEQ ID NO: 5997026 - DNA, 25 bp, Homo sapien
aactttagccactgccgctcaggcg

SEQ ID NO: 5997027 - DNA, 25 bp, Homo sapien
tgcctccatgcaggcggtggccaaa

SEQ ID NO: 5997028 - DNA, 25 bp, Homo sapien
cagaaagtctgtcacagctgtgcat

SEQ ID NO: 5997029 - DNA, 25 bp, Homo sapien
tgtggcccttttcaaatccttgaag

SEQ ID NO: 5997030 - DNA, 25 bp, Homo sapien
aaggtaagcataccactagagatat

SEQ ID NO: 5997031 - DNA, 25 bp, Homo sapien
ttgatcggtggtccaggattggtgg

SEQ ID NO: 5997032 - DNA, 25 bp, Homo sapien
agaaggtaagcataccactagagat

SEQ ID NO: 5997033 - DNA, 25 bp, Homo sapien
tgcgtaaacaactagatatctacgc

SEQ ID NO: 5997034 - DNA, 25 bp, Homo sapien
aagacagaaaggatcgccagatttg

SEQ ID NO: 5997035 - DNA, 25 bp, Homo sapien
cttctactactgacttcacgaatga

SEQ ID NO: 5997036 - DNA, 25 bp, Homo sapien
catcaacaaattatctaccatgtaa

SEQ ID NO: 5997037 - DNA, 25 bp, Homo sapien
gacggtgttgggaaagaaatcactg

SEQ ID NO: 5997038 - DNA, 25 bp, Homo sapien
ttttcaaatccttgaagggtgtcaa

SEQ ID NO: 5997039 - DNA, 25 bp, Homo sapien
gcggtcgtttcaccgtcactttgat

SEQ ID NO: 5997040 - DNA, 25 bp, Homo sapien
aacaactagatatctacgccaatgt

SEQ ID NO: 5997041 - DNA, 25 bp, Homo sapien
ccatttgggtttgaatgaatatgct

SEQ ID NO: 5997042 - DNA, 25 bp, Homo sapien
tgccgctcaggcggaacgcacccta

SEQ ID NO: 5997043 - DNA, 25 bp, Homo sapien
aggtgccaactttggcagggactat

SEQ ID NO: 5997044 - DNA, 25 bp, Homo sapien
ccttttcaaatccttgaagggtgtc

SEQ ID NO: 5997045 - DNA, 25 bp, Homo sapien
cttaggcaacattggcgctgctttg

SEQ ID NO: 5997046 - DNA, 25 bp, Homo sapien
gccaagaaatacaacagaaagtctg

SEQ ID NO: 5997047 - DNA, 25 bp, Homo sapien
tgatgtcctagttaccccttcaatg

SEQ ID NO: 5997048 - DNA, 25 bp, Homo sapien
attagagaaaacacggagggtgagt

SEQ ID NO: 5997049 - DNA, 25 bp, Homo sapien
gtcacagctgtgcataaggcaaata

SEQ ID NO: 5997050 - DNA, 25 bp, Homo sapien
atattaaaggccaaaatgtggctaa

SEQ ID NO: 5997051 - DNA, 25 bp, Homo sapien
tgatcctttcctccacgttaatgtt

SEQ ID NO: 5997052 - DNA, 25 bp, Homo sapien
aaatatcatgaagttaggtgacggt

SEQ ID NO: 5997053 - DNA, 25 bp, Homo sapien
agttatgactagacctaagacagaa

SEQ ID NO: 5997054 - DNA, 25 bp, Homo sapien
cttcgccaagaaatacaacagaaag

SEQ ID NO: 5997055 - DNA, 25 bp, Homo sapien
caactttggcagggactatgctgtc

SEQ ID NO: 5997056 - DNA, 25 bp, Homo sapien
tcctgctgaccaaacaggtcacggt

SEQ ID NO: 5997057 - DNA, 25 bp, Homo sapien
aacagaacaattgctaagagaactt

SEQ ID NO: 5997058 - DNA, 25 bp, Homo sapien
catgatcctttcctccacgttaatg

SEQ ID NO: 5997059 - DNA, 25 bp, Homo sapien
gatcataaggaaggcgtctatgaag

SEQ ID NO: 5997060 - DNA, 25 bp, Homo sapien
ctgaaattggccaaaaagaatatcc

SEQ ID NO: 5997061 - DNA, 25 bp, Homo sapien
taataactgaaattggccaaaaaga

SEQ ID NO: 5997062 - DNA, 25 bp, Homo sapien
ctgctgaccaaacaggtcacggttc

SEQ ID NO: 5997063 - DNA, 25 bp, Homo sapien
taagcaaacagatcataaggaaggc

SEQ ID NO: 5997064 - DNA, 25 bp, Homo sapien
ttgctaagagaactttagccactgc

SEQ ID NO: 5997065 - DNA, 25 bp, Homo sapien
aactataaacattaagcaaacagat

SEQ ID NO: 5997066 - DNA, 25 bp, Homo sapien
gctaagagaactttagccactgccg

SEQ ID NO: 5997067 - DNA, 25 bp, Homo sapien
aatctttgaaagttatgactagacc

SEQ ID NO: 5997068 - DNA, 25 bp, Homo sapien
ggaaagaaatcactgattcagtgag

SEQ ID NO: 5997069 - DNA, 25 bp, Homo sapien
agaactttagccactgccgctcagg

SEQ ID NO: 5997070 - DNA, 25 bp, Homo sapien
tggttcctcttctactactgacttc

SEQ ID NO: 5997071 - DNA, 25 bp, Homo sapien
acggtctgttcagaaatataataac

SEQ ID NO: 5997072 - DNA, 25 bp, Homo sapien
ccaaaaagaatatcctgatattgac

SEQ ID NO: 5997073 - DNA, 25 bp, Homo sapien
ctagacctaagacagaaaggatcgc

SEQ ID NO: 5997074 - DNA, 25 bp, Homo sapien
atgtcctagttaccccttcaatgta

SEQ ID NO: 5997075 - DNA, 25 bp, Homo sapien
ctggtgtagtggaatctttgaaagt

SEQ ID NO: 5997076 - DNA, 25 bp, Homo sapien
gctgaccaaacaggtcacggttcac

SEQ ID NO: 5997077 - DNA, 25 bp, Homo sapien
agggactatgctgtcttcgaaccag

SEQ ID NO: 5997078 - DNA, 25 bp, Homo sapien
catgcaggcggtggccaaacctcat

SEQ ID NO: 5997079 - DNA, 25 bp, Homo sapien
ctgccatgatcctttcctccacgtt

SEQ ID NO: 5997080 - DNA, 25 bp, Homo sapien
tcaatttgatgtcctagttacccct

SEQ ID NO: 5997081 - DNA, 25 bp, Homo sapien
aagaagtatggcggtcgtttcaccg

SEQ ID NO: 5997082 - DNA, 25 bp, Homo sapien
tatggcggtcgtttcaccgtcactt

SEQ ID NO: 5997083 - DNA, 25 bp, Homo sapien
aaatcatcaacaaattatctaccat

SEQ ID NO: 5997084 - DNA, 25 bp, Homo sapien
gacatagatttgattgtcattagag

SEQ ID NO: 5997085 - DNA, 25 bp, Homo sapien
tgttgagtctctaaagagaaataag

SEQ ID NO: 5997086 - DNA, 25 bp, Homo sapien
agacatgttggtttagatattaaag

SEQ ID NO: 5997087 - DNA, 25 bp, Homo sapien
caggttccagacatgttggtttaga

SEQ ID NO: 5997088 - DNA, 25 bp, Homo sapien
gccaactttggcagggactatgctg

SEQ ID NO: 5997089 - DNA, 25 bp, Homo sapien
ttctcaggcctggaacatgaatccg

SEQ ID NO: 5997090 - DNA, 25 bp, Homo sapien
ttcacgaatgaaatcatcaacaaat

SEQ ID NO: 5997091 - DNA, 25 bp, Homo sapien
ataaggaaggcgtctatgaagctgt

SEQ ID NO: 5997092 - DNA, 25 bp, Homo sapien
accaggttccagacatgttggttta

SEQ ID NO: 5997093 - DNA, 25 bp, Homo sapien
ttgtcgacaatgcctccatgcaggc

SEQ ID NO: 5997094 - DNA, 25 bp, Homo sapien
taggcaacattggcgctgctttgat

SEQ ID NO: 5997095 - DNA, 25 bp, Homo sapien
atcatcaacaaattatctaccatgt

SEQ ID NO: 5997096 - DNA, 25 bp, Homo sapien
agggtgagttctcaggcctggaaca

SEQ ID NO: 5997097 - DNA, 25 bp, Homo sapien
gcccttttcaaatccttgaagggtg

SEQ ID NO: 5997098 - DNA, 25 bp, Homo sapien
gatattggtggttcctcttctacta

SEQ ID NO: 5997099 - DNA, 25 bp, Homo sapien
atcactgattcagtgagaaccattt

SEQ ID NO: 5997100 - DNA, 25 bp, Homo sapien
ctcttctactactgacttcacgaat

SEQ ID NO: 5997101 - DNA, 25 bp, Homo sapien
actagatatctacgccaatgtggcc

SEQ ID NO: 5997102 - DNA, 25 bp, Homo sapien
gtgtcaagactagaattccagacat

SEQ ID NO: 5997103 - DNA, 25 bp, Homo sapien
aagtctgtcacagctgtgcataagg

SEQ ID NO: 5997104 - DNA, 25 bp, Homo sapien
ctaagacagaaaggatcgccagatt

SEQ ID NO: 5997105 - DNA, 25 bp, Homo sapien
acatgttggtttagatattaaaggc

SEQ ID NO: 5997106 - DNA, 25 bp, Homo sapien
aacgttgctttgcgtaaacaactag

SEQ ID NO: 5997107 - DNA, 25 bp, Homo sapien
tagatatctacgccaatgtggccct

SEQ ID NO: 5997108 - DNA, 25 bp, Homo sapien
acactcctgctgaccaaacaggtca

SEQ ID NO: 5997109 - DNA, 25 bp, Homo sapien
tgagttctcaggcctggaacatgaa

SEQ ID NO: 5997110 - DNA, 25 bp, Homo sapien
caactagatatctacgccaatgtgg

SEQ ID NO: 5997111 - DNA, 25 bp, Homo sapien
gaaactataaacattaagcaaacag

SEQ ID NO: 5997112 - DNA, 25 bp, Homo sapien
tctcaaaggcagttcatgaaacgat

SEQ ID NO: 5997113 - DNA, 25 bp, Homo sapien
ccagatttgcctttgacttcgccaa

SEQ ID NO: 5997114 - DNA, 25 bp, Homo sapien
tgtcattagagaaaacacggagggt

SEQ ID NO: 5997115 - DNA, 25 bp, Homo sapien
tactactgacttcacgaatgaaatc

SEQ ID NO: 5997116 - DNA, 25 bp, Homo sapien
atcattgtcgacaatgcctccatgc

SEQ ID NO: 5997117 - DNA, 25 bp, Homo sapien
ttgctttgcgtaaacaactagatat

SEQ ID NO: 5997118 - DNA, 25 bp, Homo sapien
aggctgaaaatatcccgatcgactg

SEQ ID NO: 5997119 - DNA, 25 bp, Homo sapien
cataccactagagatattggtggtt

SEQ ID NO: 5997120 - DNA, 25 bp, Homo sapien
actgacttcacgaatgaaatcatca

SEQ ID NO: 5997121 - DNA, 25 bp, Homo sapien
tgaagctgttgagtctctaaagaga

SEQ ID NO: 5997122 - DNA, 25 bp, Homo sapien
aacagatcataaggaaggcgtctat

SEQ ID NO: 5997123 - DNA, 25 bp, Homo sapien
catgaagttaggtgacggtctgttc

SEQ ID NO: 5997124 - DNA, 25 bp, Homo sapien
ccactagagatattggtggttcctc

SEQ ID NO: 5997125 - DNA, 25 bp, Homo sapien
tatcctgatattgacgtatcgtcca

SEQ ID NO: 5997126 - DNA, 25 bp, Homo sapien
tagatttgattgtcattagagaaaa

SEQ ID NO: 5997127 - DNA, 25 bp, Homo sapien
atccgtccctggtgtagtggaatct

SEQ ID NO: 5997128 - DNA, 25 bp, Homo sapien
ctttgatacctggtgacggtgttgg

SEQ ID NO: 5997129 - DNA, 25 bp, Homo sapien
cgacaatgcctccatgcaggcggtg

SEQ ID NO: 5997130 - DNA, 25 bp, Homo sapien
ttatgactagacctaagacagaaag

SEQ ID NO: 5997131 - DNA, 25 bp, Homo sapien
cataaggcaaatatcatgaagttag

SEQ ID NO: 5997132 - DNA, 25 bp, Homo sapien
gttgggaaagaaatcactgattcag

SEQ ID NO: 5997133 - DNA, 25 bp, Homo sapien
tcgtccatcattgtcgacaatgcct

SEQ ID NO: 5997134 - DNA, 25 bp, Homo sapien
atgactagacctaagacagaaagga

SEQ ID NO: 5997135 - DNA, 25 bp, Homo sapien
cgtaaacaactagatatctacgcca

SEQ ID NO: 5997136 - DNA, 25 bp, Homo sapien
ttcatgaaacgatcgcagaaggtaa

SEQ ID NO: 5997137 - DNA, 25 bp, Homo sapien
cgcaccctacccaagaagtatggcg

SEQ ID NO: 5997138 - DNA, 25 bp, Homo sapien
gtacggtaccatcttaggcaacatt

SEQ ID NO: 5997139 - DNA, 25 bp, Homo sapien
cagaaaggatcgccagatttgcctt

SEQ ID NO: 5997140 - DNA, 25 bp, Homo sapien
tctactactgacttcacgaatgaaa

SEQ ID NO: 5997141 - DNA, 25 bp, Homo sapien
ctctaaagagaaataagattggtct

SEQ ID NO: 5997142 - DNA, 25 bp, Homo sapien
gaagtatggcggtcgtttcaccgtc

SEQ ID NO: 5997143 - DNA, 25 bp, Homo sapien
agcaaacagatcataaggaaggcgt

SEQ ID NO: 5997144 - DNA, 25 bp, Homo sapien
cagaacaattgctaagagaacttta

SEQ ID NO: 5997145 - DNA, 25 bp, Homo sapien
tttggcagggactatgctgtcttcg

SEQ ID NO: 5997146 - DNA, 25 bp, Homo sapien
atatcatgaagttaggtgacggtct

SEQ ID NO: 5997147 - DNA, 25 bp, Homo sapien
tgaggctgaaaatatcccgatcgac

SEQ ID NO: 5997148 - DNA, 25 bp, Homo sapien
taaggggctatggcacactcctgct

SEQ ID NO: 5997149 - DNA, 25 bp, Homo sapien
cagacatagatttgattgtcattag

SEQ ID NO: 5997150 - DNA, 25 bp, Homo sapien
tatcgtccatcattgtcgacaatgc

SEQ ID NO: 5997151 - DNA, 25 bp, Homo sapien
gatcgcagaaggtaagcataccact

SEQ ID NO: 5997152 - DNA, 25 bp, Homo sapien
agccactgccgctcaggcggaacgc

SEQ ID NO: 5997153 - DNA, 25 bp, Homo sapien
tggcaggtgccaactttggcaggga

SEQ ID NO: 5997154 - DNA, 25 bp, Homo sapien
ggaatctttgaaagttatgactaga

SEQ ID NO: 5997155 - DNA, 25 bp, Homo sapien
ggtggtccaggattggtggcaggtg

SEQ ID NO: 5997156 - DNA, 25 bp, Homo sapien
gtgttgggaaagaaatcactgattc

SEQ ID NO: 5997157 - DNA, 25 bp, Homo sapien
gggaaactataaacattaagcaaac

SEQ ID NO: 5997158 - DNA, 25 bp, Homo sapien
tggcagggactatgctgtcttcgaa

SEQ ID NO: 5997159 - DNA, 25 bp, Homo sapien
tagagatattggtggttcctcttct

SEQ ID NO: 5997160 - DNA, 25 bp, Homo sapien
ccactgccgctcaggcggaacgcac

SEQ ID NO: 5997161 - DNA, 25 bp, Homo sapien
tccagacatagatttgattgtcatt

SEQ ID NO: 5997162 - DNA, 25 bp, Homo sapien
ttagatattaaaggccaaaatgtgg

SEQ ID NO: 5997163 - DNA, 25 bp, Homo sapien
accaaacaggtcacggttcactaaa

SEQ ID NO: 5997164 - DNA, 25 bp, Homo sapien
aaatcactgattcagtgagaaccat

SEQ ID NO: 5997165 - DNA, 25 bp, Homo sapien
caccctacccaagaagtatggcggt

SEQ ID NO: 5997166 - DNA, 25 bp, Homo sapien
gttaccccttcaatgtacggtacca

SEQ ID NO: 5997167 - DNA, 25 bp, Homo sapien
aaaggcagttcatgaaacgatcgca

SEQ ID NO: 5997168 - DNA, 25 bp, Homo sapien
tgacggtctgttcagaaatataata

SEQ ID NO: 5997169 - DNA, 25 bp, Homo sapien
ttggtggcaggtgccaactttggca

SEQ ID NO: 5997170 - DNA, 25 bp, Homo sapien
tactagaatctcaaaggcagttcat

SEQ ID NO: 5997171 - DNA, 25 bp, Homo sapien
acaattgctaagagaactttagcca

SEQ ID NO: 5997172 - DNA, 25 bp, Homo sapien
gtcgacaatgcctccatgcaggcgg

SEQ ID NO: 5997173 - DNA, 25 bp, Homo sapien
ctttagccactgccgctcaggcgga

SEQ ID NO: 5997174 - DNA, 25 bp, Homo sapien
tggcggtcgtttcaccgtcactttg

SEQ ID NO: 5997175 - DNA, 25 bp, Homo sapien
ggtggcaggtgccaactttggcagg

SEQ ID NO: 5997176 - DNA, 25 bp, Homo sapien
gaaattggccaaaaagaatatcctg

SEQ ID NO: 5997177 - DNA, 25 bp, Homo sapien
ttggccaaaaagaatatcctgatat

SEQ ID NO: 5997178 - DNA, 25 bp, Homo sapien
ggtgagttctcaggcctggaacatg

SEQ ID NO: 5997179 - DNA, 25 bp, Homo sapien
ctgtcttcgaaccaggttccagaca

SEQ ID NO: 5997180 - DNA, 25 bp, Homo sapien
gctcaggcggaacgcaccctaccca

SEQ ID NO: 5997181 - DNA, 25 bp, Homo sapien
aggcggaacgcaccctacccaagaa

SEQ ID NO: 5997182 - DNA, 25 bp, Homo sapien
taaaggccaaaatgtggctaaccca

SEQ ID NO: 5997183 - DNA, 25 bp, Homo sapien
gtttagatattaaaggccaaaatgt

SEQ ID NO: 5997184 - DNA, 25 bp, Homo sapien
tctacgccaatgtggcccttttcaa

SEQ ID NO: 5997185 - DNA, 25 bp, Homo sapien
tggtgacggtgttgggaaagaaatc

SEQ ID NO: 5997186 - DNA, 25 bp, Homo sapien
gaaaggatcgccagatttgcctttg

SEQ ID NO: 5997187 - DNA, 25 bp, Homo sapien
ttgacttcgccaagaaatacaacag

SEQ ID NO: 5997188 - DNA, 25 bp, Homo sapien
tattgacgtatcgtccatcattgtc

SEQ ID NO: 5997189 - DNA, 25 bp, Homo sapien
gatttgattgtcattagagaaaaca

SEQ ID NO: 5997190 - DNA, 25 bp, Homo sapien
gtcacggttcactaaacgttgcttt

SEQ ID NO: 5997191 - DNA, 25 bp, Homo sapien
ataactgaaattggccaaaaagaat

SEQ ID NO: 5997192 - DNA, 25 bp, Homo sapien
ggtggttcctcttctactactgact

SEQ ID NO: 5997193 - DNA, 25 bp, Homo sapien
ggcaacattggcgctgctttgatcg

SEQ ID NO: 5997194 - DNA, 25 bp, Homo sapien
ggtaccatcttaggcaacattggcg

SEQ ID NO: 5997195 - DNA, 25 bp, Homo sapien
tgacttcacgaatgaaatcatcaac

SEQ ID NO: 5997196 - DNA, 25 bp, Homo sapien
ccgtcactttgatacctggtgacgg

SEQ ID NO: 5997197 - DNA, 25 bp, Homo sapien
tgtgcataaggcaaatatcatgaag

SEQ ID NO: 5997198 - DNA, 25 bp, Homo sapien
gccatgatcctttcctccacgttaa

SEQ ID NO: 5997199 - DNA, 25 bp, Homo sapien
tggcccttttcaaatccttgaaggg

SEQ ID NO: 5997200 - DNA, 25 bp, Homo sapien
agaaatcactgattcagtgagaacc

SEQ ID NO: 5997201 - DNA, 25 bp, Homo sapien
gttcctcttctactactgacttcac

SEQ ID NO: 5997202 - DNA, 25 bp, Homo sapien
tatctacgccaatgtggcccttttc

SEQ ID NO: 5997203 - DNA, 25 bp, Homo sapien
acaggtcacggttcactaaacgttg

SEQ ID NO: 5997204 - DNA, 25 bp, Homo sapien
atcgccagatttgcctttgacttcg

SEQ ID NO: 5997205 - DNA, 25 bp, Homo sapien
attgtcattagagaaaacacggagg

SEQ ID NO: 5997206 - DNA, 25 bp, Homo sapien
gtgagaaccatttttgaggctgaaa

SEQ ID NO: 5997207 - DNA, 25 bp, Homo sapien
tacctggtgacggtgttgggaaaga

SEQ ID NO: 5997208 - DNA, 25 bp, Homo sapien
ccgatcgactgggaaactataaaca

SEQ ID NO: 5997209 - DNA, 25 bp, Homo sapien
acattggcgctgctttgatcggtgg

SEQ ID NO: 5997210 - DNA, 25 bp, Homo sapien
agactagaattccagacatagattt

SEQ ID NO: 5997211 - DNA, 25 bp, Homo sapien
gcagggactatgctgtcttcgaacc

SEQ ID NO: 5997212 - DNA, 25 bp, Homo sapien
aatgcctccatgcaggcggtggcca

SEQ ID NO: 5997213 - DNA, 25 bp, Homo sapien
tgaaccatttgggtttgaatgaata

SEQ ID NO: 5997214 - DNA, 25 bp, Homo sapien
aatataataactgaaattggccaaa

SEQ ID NO: 5997215 - DNA, 25 bp, Homo sapien
aaaatgtggctaacccaactgccat

SEQ ID NO: 5997216 - DNA, 25 bp, Homo sapien
atgttgaaccatttgggtttgaatg

SEQ ID NO: 5997217 - DNA, 25 bp, Homo sapien
tggcgctgctttgatcggtggtcca

SEQ ID NO: 5997218 - DNA, 25 bp, Homo sapien
catttttgaggctgaaaatatcccg

SEQ ID NO: 5997219 - DNA, 25 bp, Homo sapien
caggcggtggccaaacctcatcaat

SEQ ID NO: 5997220 - DNA, 25 bp, Homo sapien
agattggtcttaaggggctatggca

SEQ ID NO: 5997221 - DNA, 25 bp, Homo sapien
actttggcagggactatgctgtctt

SEQ ID NO: 5997222 - DNA, 25 bp, Homo sapien
aggggctatggcacactcctgctga

SEQ ID NO: 5997223 - DNA, 25 bp, Homo sapien
acctcatcaatttgatgtcctagtt

SEQ ID NO: 5997224 - DNA, 25 bp, Homo sapien
atcctttcctccacgttaatgttga

SEQ ID NO: 5997225 - DNA, 25 bp, Homo sapien
aaggaaggcgtctatgaagctgttg

SEQ ID NO: 5997226 - DNA, 25 bp, Homo sapien
actaaacgttgctttgcgtaaacaa

SEQ ID NO: 5997227 - DNA, 25 bp, Homo sapien
agatattaaaggccaaaatgtggct

SEQ ID NO: 5997228 - DNA, 25 bp, Homo sapien
ctactgacttcacgaatgaaatcat

SEQ ID NO: 5997229 - DNA, 25 bp, Homo sapien
aaagaaatcactgattcagtgagaa

SEQ ID NO: 5997230 - DNA, 25 bp, Homo sapien
agttctcaggcctggaacatgaatc

SEQ ID NO: 5997231 - DNA, 25 bp, Homo sapien
gagaaccatttttgaggctgaaaat

SEQ ID NO: 5997232 - DNA, 25 bp, Homo sapien
taaggcaaatatcatgaagttaggt

SEQ ID NO: 5997233 - DNA, 25 bp, Homo sapien
tcaggcggaacgcaccctacccaag

SEQ ID NO: 5997234 - DNA, 25 bp, Homo sapien
tggtcttaaggggctatggcacact

SEQ ID NO: 5997235 - DNA, 25 bp, Homo sapien
tccatgcaggcggtggccaaacctc

SEQ ID NO: 5997236 - DNA, 25 bp, Homo sapien
gttaggtgacggtctgttcagaaat

SEQ ID NO: 5997237 - DNA, 25 bp, Homo sapien
aaggatcgccagatttgcctttgac

SEQ ID NO: 5997238 - DNA, 25 bp, Homo sapien
aaccatttgggtttgaatgaatatg

SEQ ID NO: 5997239 - DNA, 25 bp, Homo sapien
atcatgaagttaggtgacggtctgt

SEQ ID NO: 5997240 - DNA, 25 bp, Homo sapien
actcctgctgaccaaacaggtcacg

SEQ ID NO: 5997241 - DNA, 25 bp, Homo sapien
gttaatgttgaaccatttgggtttg

SEQ ID NO: 5997242 - DNA, 25 bp, Homo sapien
ctgatattgacgtatcgtccatcat

SEQ ID NO: 5997243 - DNA, 25 bp, Homo sapien
cctggaacatgaatccgtccctggt

SEQ ID NO: 5997244 - DNA, 25 bp, Homo sapien
attaaaggccaaaatgtggctaacc

SEQ ID NO: 5997245 - DNA, 25 bp, Homo sapien
tctttgaaagttatgactagaccta

SEQ ID NO: 5997246 - DNA, 25 bp, Homo sapien
aattggccaaaaagaatatcctgat

SEQ ID NO: 5997247 - DNA, 25 bp, Homo sapien
ttcagtgagaaccatttttgaggct

SEQ ID NO: 5997248 - DNA, 25 bp, Homo sapien
gttgaaccatttgggtttgaatgaa

SEQ ID NO: 5997249 - DNA, 25 bp, Homo sapien
ttgatacctggtgacggtgttggga

SEQ ID NO: 5997250 - DNA, 25 bp, Homo sapien
gcaggtgccaactttggcagggact

SEQ ID NO: 5997251 - DNA, 25 bp, Homo sapien
ctttgatcggtggtccaggattggt

SEQ ID NO: 5997252 - DNA, 25 bp, Homo sapien
aactgccatgatcctttcctccacg

SEQ ID NO: 5997253 - DNA, 25 bp, Homo sapien
ttcaaatccttgaagggtgtcaaga

SEQ ID NO: 5997254 - DNA, 25 bp, Homo sapien
attggcgctgctttgatcggtggtc

SEQ ID NO: 5997255 - DNA, 25 bp, Homo sapien
actagagatattggtggttcctctt

SEQ ID NO: 5997256 - DNA, 25 bp, Homo sapien
acccaagaagtatggcggtcgtttc

SEQ ID NO: 5997257 - DNA, 25 bp, Homo sapien
gctactagaatctcaaaggcagttc

SEQ ID NO: 5997258 - DNA, 25 bp, Homo sapien
catcaatttgatgtcctagttaccc

SEQ ID NO: 5997259 - DNA, 25 bp, Homo sapien
taatgttgaaccatttgggtttgaa

SEQ ID NO: 5997260 - DNA, 25 bp, Homo sapien
ccaaacctcatcaatttgatgtcct

SEQ ID NO: 5997261 - DNA, 25 bp, Homo sapien
ctccacgttaatgttgaaccatttg

SEQ ID NO: 5997262 - DNA, 25 bp, Homo sapien
caaacaggtcacggttcactaaacg

SEQ ID NO: 5997263 - DNA, 25 bp, Homo sapien
ggtgacggtctgttcagaaatataa

SEQ ID NO: 5997264 - DNA, 25 bp, Homo sapien
gaaatataataactgaaattggcca

SEQ ID NO: 5997265 - DNA, 25 bp, Homo sapien
atgtacggtaccatcttaggcaaca

SEQ ID NO: 5997266 - DNA, 25 bp, Homo sapien
tatcccgatcgactgggaaactata

SEQ ID NO: 5997267 - DNA, 25 bp, Homo sapien
aatatcccgatcgactgggaaacta

SEQ ID NO: 5997268 - DNA, 25 bp, Homo sapien
aatgtggctaacccaactgccatga

SEQ ID NO: 5997269 - DNA, 25 bp, Homo sapien
aaaaagaatatcctgatattgacgt

SEQ ID NO: 5997270 - DNA, 25 bp, Homo sapien
ccaatgtggcccttttcaaatcctt

SEQ ID NO: 5997271 - DNA, 25 bp, Homo sapien
gaattccagacatagatttgattgt

SEQ ID NO: 5997272 - DNA, 25 bp, Homo sapien
aggattggtggcaggtgccaacttt

SEQ ID NO: 5997273 - DNA, 25 bp, Homo sapien
gatcggtggtccaggattggtggca

SEQ ID NO: 5997274 - DNA, 25 bp, Homo sapien
cagaaatataataactgaaattggc

SEQ ID NO: 5997275 - DNA, 25 bp, Homo sapien
ccctacccaagaagtatggcggtcg

SEQ ID NO: 5997276 - DNA, 25 bp, Homo sapien
taccatcttaggcaacattggcgct

SEQ ID NO: 5997277 - DNA, 25 bp, Homo sapien
ctgtcacagctgtgcataaggcaaa

SEQ ID NO: 5997278 - DNA, 25 bp, Homo sapien
cggtggccaaacctcatcaatttga

SEQ ID NO: 5997279 - DNA, 25 bp, Homo sapien
ctgggaaactataaacattaagcaa

SEQ ID NO: 5997280 - DNA, 25 bp, Homo sapien
ttcaccgtcactttgatacctggtg

SEQ ID NO: 5997281 - DNA, 25 bp, Homo sapien
ttgacgtatcgtccatcattgtcga

SEQ ID NO: 5997282 - DNA, 25 bp, Homo sapien
aacgcaccctacccaagaagtatgg

SEQ ID NO: 5997283 - DNA, 25 bp, Homo sapien
agttcatgaaacgatcgcagaaggt

SEQ ID NO: 5997284 - DNA, 25 bp, Homo sapien
gagatattggtggttcctcttctac

SEQ ID NO: 5997285 - DNA, 25 bp, Homo sapien
gattggtggcaggtgccaactttgg

SEQ ID NO: 5997286 - DNA, 25 bp, Homo sapien
acattaagcaaacagatcataagga

SEQ ID NO: 5997287 - DNA, 25 bp, Homo sapien
gatcgactgggaaactataaacatt

SEQ ID NO: 5997288 - DNA, 25 bp, Homo sapien
aattgctaagagaactttagccact

SEQ ID NO: 5997289 - DNA, 25 bp, Homo sapien
tcccgatcgactgggaaactataaa

SEQ ID NO: 5997290 - DNA, 25 bp, Homo sapien
tctatgaagctgttgagtctctaaa

SEQ ID NO: 5997291 - DNA, 25 bp, Homo sapien
tggtccaggattggtggcaggtgcc

SEQ ID NO: 5997292 - DNA, 25 bp, Homo sapien
tcgaaccaggttccagacatgttgg

SEQ ID NO: 5997293 - DNA, 25 bp, Homo sapien
gttcactaaacgttgctttgcgtaa

SEQ ID NO: 5997294 - DNA, 25 bp, Homo sapien
ggactatgctgtcttcgaaccaggt

SEQ ID NO: 5997295 - DNA, 25 bp, Homo sapien
gaaaacacggagggtgagttctcag

SEQ ID NO: 5997296 - DNA, 25 bp, Homo sapien
catgaaacgatcgcagaaggtaagc

SEQ ID NO: 5997297 - DNA, 25 bp, Homo sapien
atgctactagaatctcaaaggcagt

SEQ ID NO: 5997298 - DNA, 25 bp, Homo sapien
tgaagttaggtgacggtctgttcag

SEQ ID NO: 5997299 - DNA, 25 bp, Homo sapien
gtccctggtgtagtggaatctttga

SEQ ID NO: 5997300 - DNA, 25 bp, Homo sapien
aggcaaatatcatgaagttaggtga

SEQ ID NO: 5997301 - DNA, 25 bp, Homo sapien
ctacccaagaagtatggcggtcgtt

SEQ ID NO: 5997302 - DNA, 25 bp, Homo sapien
tttgattgtcattagagaaaacacg

SEQ ID NO: 5997303 - DNA, 25 bp, Homo sapien
atgcttaacagaacaattgctaaga

SEQ ID NO: 5997304 - DNA, 25 bp, Homo sapien
atgttggtttagatattaaaggcca

SEQ ID NO: 5997305 - DNA, 25 bp, Homo sapien
cgtatcgtccatcattgtcgacaat

SEQ ID NO: 5997306 - DNA, 25 bp, Homo sapien
tggcacactcctgctgaccaaacag

SEQ ID NO: 5997307 - DNA, 25 bp, Homo sapien
cgaatgaaatcatcaacaaattatc

SEQ ID NO: 5997308 - DNA, 25 bp, Homo sapien
tgtggctaacccaactgccatgatc

SEQ ID NO: 5997309 - DNA, 25 bp, Homo sapien
tcgtttcaccgtcactttgatacct

SEQ ID NO: 5997310 - DNA, 25 bp, Homo sapien
taagagaactttagccactgccgct

SEQ ID NO: 5997311 - DNA, 25 bp, Homo sapien
gtgacggtgttgggaaagaaatcac

SEQ ID NO: 5997312 - DNA, 25 bp, Homo sapien
gtttcaccgtcactttgatacctgg

SEQ ID NO: 5997313 - DNA, 25 bp, Homo sapien
gtcttaaggggctatggcacactcc

SEQ ID NO: 5997314 - DNA, 25 bp, Homo sapien
gcagcgccaatgttgcctaagatgg

SEQ ID NO: 5997315 - DNA, 25 bp, Homo sapien
aggacatcaaattgatgaggtttgg

SEQ ID NO: 5997316 - DNA, 25 bp, Homo sapien
ccgcctgcatggaggcattgtcgac

SEQ ID NO: 5997317 - DNA, 25 bp, Homo sapien
tcaccctccgtgttttctctaatga

SEQ ID NO: 5997318 - DNA, 25 bp, Homo sapien
tttagagactcaacagcttcataga

SEQ ID NO: 5997319 - DNA, 25 bp, Homo sapien
cagcatagtccctgccaaagttggc

SEQ ID NO: 5997320 - DNA, 25 bp, Homo sapien
cttccttatgatctgtttgcttaat

SEQ ID NO: 5997321 - DNA, 25 bp, Homo sapien
agttgtttacgcaaagcaacgttta

SEQ ID NO: 5997322 - DNA, 25 bp, Homo sapien
cattgaaggggtaactaggacatca

SEQ ID NO: 5997323 - DNA, 25 bp, Homo sapien
ttgaaaagggccacattggcgtaga

SEQ ID NO: 5997324 - DNA, 25 bp, Homo sapien
aacaccgtcaccaggtatcaaagtg

SEQ ID NO: 5997325 - DNA, 25 bp, Homo sapien
tccactacaccagggacggattcat

SEQ ID NO: 5997326 - DNA, 25 bp, Homo sapien
catattcattcaaacccaaatggtt

SEQ ID NO: 5997327 - DNA, 25 bp, Homo sapien
taggtctagtcataactttcaaaga

SEQ ID NO: 5997328 - DNA, 25 bp, Homo sapien
atcaggatattctttttggccaatt

SEQ ID NO: 5997329 - DNA, 25 bp, Homo sapien
acgccttccttatgatctgtttgct

SEQ ID NO: 5997330 - DNA, 25 bp, Homo sapien
gttctcttagcaattgttctgttaa

SEQ ID NO: 5997331 - DNA, 25 bp, Homo sapien
cgcctgagcggcagtggctaaagtt

SEQ ID NO: 5997332 - DNA, 25 bp, Homo sapien
tgggttagccacattttggccttta

SEQ ID NO: 5997333 - DNA, 25 bp, Homo sapien
tgttttctctaatgacaatcaaatc

SEQ ID NO: 5997334 - DNA, 25 bp, Homo sapien
gcagtggctaaagttctcttagcaa

SEQ ID NO: 5997335 - DNA, 25 bp, Homo sapien
tggtatgcttaccttctgcgatcgt

SEQ ID NO: 5997336 - DNA, 25 bp, Homo sapien
tgtcgacaatgatggacgatacgtc

SEQ ID NO: 5997337 - DNA, 25 bp, Homo sapien
ttctctaatgacaatcaaatctatg

SEQ ID NO: 5997338 - DNA, 25 bp, Homo sapien
gccaccgcctgcatggaggcattgt

SEQ ID NO: 5997339 - DNA, 25 bp, Homo sapien
aagtcaaaggcaaatctggcgatcc

SEQ ID NO: 5997340 - DNA, 25 bp, Homo sapien
agtggctaaagttctcttagcaatt

SEQ ID NO: 5997341 - DNA, 25 bp, Homo sapien
tcaaggatttgaaaagggccacatt

SEQ ID NO: 5997342 - DNA, 25 bp, Homo sapien
atgaggtttggccaccgcctgcatg

SEQ ID NO: 5997343 - DNA, 25 bp, Homo sapien
atagtccctgccaaagttggcacct

SEQ ID NO: 5997344 - DNA, 25 bp, Homo sapien
acgtcaatatcaggatattcttttt

SEQ ID NO: 5997345 - DNA, 25 bp, Homo sapien
cttatgatctgtttgcttaatgttt

SEQ ID NO: 5997346 - DNA, 25 bp, Homo sapien
aagtgacggtgaaacgaccgccata

SEQ ID NO: 5997347 - DNA, 25 bp, Homo sapien
caatatcaggatattctttttggcc

SEQ ID NO: 5997348 - DNA, 25 bp, Homo sapien
ctgcatggaggcattgtcgacaatg

SEQ ID NO: 5997349 - DNA, 25 bp, Homo sapien
gtgaaccgtgacctgtttggtcagc

SEQ ID NO: 5997350 - DNA, 25 bp, Homo sapien
cctgccaccaatcctggaccaccga

SEQ ID NO: 5997351 - DNA, 25 bp, Homo sapien
atacttcttgggtagggtgcgttcc

SEQ ID NO: 5997352 - DNA, 25 bp, Homo sapien
cgaagacagcatagtccctgccaaa

SEQ ID NO: 5997353 - DNA, 25 bp, Homo sapien
tggaggaaaggatcatggcagttgg

SEQ ID NO: 5997354 - DNA, 25 bp, Homo sapien
tgacaatcaaatctatgtctggaat

SEQ ID NO: 5997355 - DNA, 25 bp, Homo sapien
atgatggacgatacgtcaatatcag

SEQ ID NO: 5997356 - DNA, 25 bp, Homo sapien
agaccgtcacctaacttcatgatat

SEQ ID NO: 5997357 - DNA, 25 bp, Homo sapien
accagggacggattcatgttccagg

SEQ ID NO: 5997358 - DNA, 25 bp, Homo sapien
cgatcgggatattttcagcctcaaa

SEQ ID NO: 5997359 - DNA, 25 bp, Homo sapien
cattaacgtggaggaaaggatcatg

SEQ ID NO: 5997360 - DNA, 25 bp, Homo sapien
cagactttctgttgtatttcttggc

SEQ ID NO: 5997361 - DNA, 25 bp, Homo sapien
attccactacaccagggacggattc

SEQ ID NO: 5997362 - DNA, 25 bp, Homo sapien
actgcctttgagattctagtagcat

SEQ ID NO: 5997363 - DNA, 25 bp, Homo sapien
ccatacttcttgggtagggtgcgtt

SEQ ID NO: 5997364 - DNA, 25 bp, Homo sapien
gtgacggtgaaacgaccgccatact

SEQ ID NO: 5997365 - DNA, 25 bp, Homo sapien
tagtagaagaggaaccaccaatatc

SEQ ID NO: 5997366 - DNA, 25 bp, Homo sapien
catgttccaggcctgagaactcacc

SEQ ID NO: 5997367 - DNA, 25 bp, Homo sapien
acaatcaaatctatgtctggaattc

SEQ ID NO: 5997368 - DNA, 25 bp, Homo sapien
accaatcttatttctctttagagac

SEQ ID NO: 5997369 - DNA, 25 bp, Homo sapien
tatgatctgtttgcttaatgtttat

SEQ ID NO: 5997370 - DNA, 25 bp, Homo sapien
acagctgtgacagactttctgttgt

SEQ ID NO: 5997371 - DNA, 25 bp, Homo sapien
catcaaattgatgaggtttggccac

SEQ ID NO: 5997372 - DNA, 25 bp, Homo sapien
caggatattctttttggccaatttc

SEQ ID NO: 5997373 - DNA, 25 bp, Homo sapien
cgtcacctaacttcatgatatttgc

SEQ ID NO: 5997374 - DNA, 25 bp, Homo sapien
ggtcagcaggagtgtgccatagccc

SEQ ID NO: 5997375 - DNA, 25 bp, Homo sapien
aaggatttgaaaagggccacattgg

SEQ ID NO: 5997376 - DNA, 25 bp, Homo sapien
ttcaaacccaaatggttcaacatta

SEQ ID NO: 5997377 - DNA, 25 bp, Homo sapien
ggaaccaccaatatctctagtggta

SEQ ID NO: 5997378 - DNA, 25 bp, Homo sapien
tttctttcccaacaccgtcaccagg

SEQ ID NO: 5997379 - DNA, 25 bp, Homo sapien
ctagtggtatgcttaccttctgcga

SEQ ID NO: 5997380 - DNA, 25 bp, Homo sapien
gcgttccgcctgagcggcagtggct

SEQ ID NO: 5997381 - DNA, 25 bp, Homo sapien
cttcatagacgccttccttatgatc

SEQ ID NO: 5997382 - DNA, 25 bp, Homo sapien
aaagattccactacaccagggacgg

SEQ ID NO: 5997383 - DNA, 25 bp, Homo sapien
agacgccttccttatgatctgtttg

SEQ ID NO: 5997384 - DNA, 25 bp, Homo sapien
tcctttctgtcttaggtctagtcat

SEQ ID NO: 5997385 - DNA, 25 bp, Homo sapien
caatcctggaccaccgatcaaagca

SEQ ID NO: 5997386 - DNA, 25 bp, Homo sapien
gtcaaaggcaaatctggcgatcctt

SEQ ID NO: 5997387 - DNA, 25 bp, Homo sapien
gtatgcttaccttctgcgatcgttt

SEQ ID NO: 5997388 - DNA, 25 bp, Homo sapien
gggtaactaggacatcaaattgatg

SEQ ID NO: 5997389 - DNA, 25 bp, Homo sapien
ggaattctagtcttgacacccttca

SEQ ID NO: 5997390 - DNA, 25 bp, Homo sapien
caaagtgacggtgaaacgaccgcca

SEQ ID NO: 5997391 - DNA, 25 bp, Homo sapien
tcagcctcaaaaatggttctcactg

SEQ ID NO: 5997392 - DNA, 25 bp, Homo sapien
caaacccaaatggttcaacattaac

SEQ ID NO: 5997393 - DNA, 25 bp, Homo sapien
ctacaccagggacggattcatgttc

SEQ ID NO: 5997394 - DNA, 25 bp, Homo sapien
gactcaacagcttcatagacgcctt

SEQ ID NO: 5997395 - DNA, 25 bp, Homo sapien
ctagttgtttacgcaaagcaacgtt

SEQ ID NO: 5997396 - DNA, 25 bp, Homo sapien
tttgccttatgcacagctgtgacag

SEQ ID NO: 5997397 - DNA, 25 bp, Homo sapien
caaaggcaaatctggcgatcctttc

SEQ ID NO: 5997398 - DNA, 25 bp, Homo sapien
gagactcaacagcttcatagacgcc

SEQ ID NO: 5997399 - DNA, 25 bp, Homo sapien
cgaagtcaaaggcaaatctggcgat

SEQ ID NO: 5997400 - DNA, 25 bp, Homo sapien
tgatgatttcattcgtgaagtcagt

SEQ ID NO: 5997401 - DNA, 25 bp, Homo sapien
ttcattcaaacccaaatggttcaac

SEQ ID NO: 5997402 - DNA, 25 bp, Homo sapien
gttattatatttctgaacagaccgt

SEQ ID NO: 5997403 - DNA, 25 bp, Homo sapien
agcaacgtttagtgaaccgtgacct

SEQ ID NO: 5997404 - DNA, 25 bp, Homo sapien
acctggttcgaagacagcatagtcc

SEQ ID NO: 5997405 - DNA, 25 bp, Homo sapien
atctctagtggtatgcttaccttct

SEQ ID NO: 5997406 - DNA, 25 bp, Homo sapien
tggtaccgtacattgaaggggtaac

SEQ ID NO: 5997407 - DNA, 25 bp, Homo sapien
agtagtagaagaggaaccaccaata

SEQ ID NO: 5997408 - DNA, 25 bp, Homo sapien
agcctcaaaaatggttctcactgaa

SEQ ID NO: 5997409 - DNA, 25 bp, Homo sapien
tccgcctgagcggcagtggctaaag

SEQ ID NO: 5997410 - DNA, 25 bp, Homo sapien
atggtagataatttgttgatgattt

SEQ ID NO: 5997411 - DNA, 25 bp, Homo sapien
caacgtttagtgaaccgtgacctgt

SEQ ID NO: 5997412 - DNA, 25 bp, Homo sapien
atacgtcaatatcaggatattcttt

SEQ ID NO: 5997413 - DNA, 25 bp, Homo sapien
agcgccaatgttgcctaagatggta

SEQ ID NO: 5997414 - DNA, 25 bp, Homo sapien
tagagactcaacagcttcatagacg

SEQ ID NO: 5997415 - DNA, 25 bp, Homo sapien
tcaaattgatgaggtttggccaccg

SEQ ID NO: 5997416 - DNA, 25 bp, Homo sapien
tgccaccaatcctggaccaccgatc

SEQ ID NO: 5997417 - DNA, 25 bp, Homo sapien
tagtgaaccgtgacctgtttggtca

SEQ ID NO: 5997418 - DNA, 25 bp, Homo sapien
ggtagggtgcgttccgcctgagcgg

SEQ ID NO: 5997419 - DNA, 25 bp, Homo sapien
ctgagaactcaccctccgtgttttc

SEQ ID NO: 5997420 - DNA, 25 bp, Homo sapien
cgatacgtcaatatcaggatattct

SEQ ID NO: 5997421 - DNA, 25 bp, Homo sapien
tcatggcagttgggttagccacatt

SEQ ID NO: 5997422 - DNA, 25 bp, Homo sapien
gtaactaggacatcaaattgatgag

SEQ ID NO: 5997423 - DNA, 25 bp, Homo sapien
taaaccaacatgtctggaacctggt

SEQ ID NO: 5997424 - DNA, 25 bp, Homo sapien
atattctttttggccaatttcagtt

SEQ ID NO: 5997425 - DNA, 25 bp, Homo sapien
ccaacaccgtcaccaggtatcaaag

SEQ ID NO: 5997426 - DNA, 25 bp, Homo sapien
ttgttgatgatttcattcgtgaagt

SEQ ID NO: 5997427 - DNA, 25 bp, Homo sapien
gaacctggttcgaagacagcatagt

SEQ ID NO: 5997428 - DNA, 25 bp, Homo sapien
aatcaaatctatgtctggaattcta

SEQ ID NO: 5997429 - DNA, 25 bp, Homo sapien
gggtgcgttccgcctgagcggcagt

SEQ ID NO: 5997430 - DNA, 25 bp, Homo sapien
tggttcaacattaacgtggaggaaa

SEQ ID NO: 5997431 - DNA, 25 bp, Homo sapien
ggatattctttttggccaatttcag

SEQ ID NO: 5997432 - DNA, 25 bp, Homo sapien
tgttgcctaagatggtaccgtacat

SEQ ID NO: 5997433 - DNA, 25 bp, Homo sapien
aaagggccacattggcgtagatatc

SEQ ID NO: 5997434 - DNA, 25 bp, Homo sapien
tcacctaacttcatgatatttgcct

SEQ ID NO: 5997435 - DNA, 25 bp, Homo sapien
agctgtgacagactttctgttgtat

SEQ ID NO: 5997436 - DNA, 25 bp, Homo sapien
cagttattatatttctgaacagacc

SEQ ID NO: 5997437 - DNA, 25 bp, Homo sapien
cagggacggattcatgttccaggcc

SEQ ID NO: 5997438 - DNA, 25 bp, Homo sapien
tttcaaagattccactacaccaggg

SEQ ID NO: 5997439 - DNA, 25 bp, Homo sapien
cccaaatggttcaacattaacgtgg

SEQ ID NO: 5997440 - DNA, 25 bp, Homo sapien
ctgtttgcttaatgtttatagtttc

SEQ ID NO: 5997441 - DNA, 25 bp, Homo sapien
aagttctcttagcaattgttctgtt

SEQ ID NO: 5997442 - DNA, 25 bp, Homo sapien
cttcatgatatttgccttatgcaca

SEQ ID NO: 5997443 - DNA, 25 bp, Homo sapien
ttctgtcttaggtctagtcataact

SEQ ID NO: 5997444 - DNA, 25 bp, Homo sapien
tgtttatagtttcccagtcgatcgg

SEQ ID NO: 5997445 - DNA, 25 bp, Homo sapien
ctctaatgacaatcaaatctatgtc

SEQ ID NO: 5997446 - DNA, 25 bp, Homo sapien
tcgacaatgatggacgatacgtcaa

SEQ ID NO: 5997447 - DNA, 25 bp, Homo sapien
tggaacctggttcgaagacagcata

SEQ ID NO: 5997448 - DNA, 25 bp, Homo sapien
acctaacttcatgatatttgcctta

SEQ ID NO: 5997449 - DNA, 25 bp, Homo sapien
ctgtcttaggtctagtcataacttt

SEQ ID NO: 5997450 - DNA, 25 bp, Homo sapien
ttcccagtcgatcgggatattttca

SEQ ID NO: 5997451 - DNA, 25 bp, Homo sapien
ttcgaagacagcatagtccctgcca

SEQ ID NO: 5997452 - DNA, 25 bp, Homo sapien
gttgtatttcttggcgaagtcaaag

SEQ ID NO: 5997453 - DNA, 25 bp, Homo sapien
atctgtttgcttaatgtttatagtt

SEQ ID NO: 5997454 - DNA, 25 bp, Homo sapien
agccacattttggcctttaatatct

SEQ ID NO: 5997455 - DNA, 25 bp, Homo sapien
cataactttcaaagattccactaca

SEQ ID NO: 5997456 - DNA, 25 bp, Homo sapien
ctaggacatcaaattgatgaggttt

SEQ ID NO: 5997457 - DNA, 25 bp, Homo sapien
ctgaatcagtgatttctttcccaac

SEQ ID NO: 5997458 - DNA, 25 bp, Homo sapien
gacggtgaaacgaccgccatacttc

SEQ ID NO: 5997459 - DNA, 25 bp, Homo sapien
agaagaggaaccaccaatatctcta

SEQ ID NO: 5997460 - DNA, 25 bp, Homo sapien
tcccaacaccgtcaccaggtatcaa

SEQ ID NO: 5997461 - DNA, 25 bp, Homo sapien
ggatattttcagcctcaaaaatggt

SEQ ID NO: 5997462 - DNA, 25 bp, Homo sapien
gttcaacattaacgtggaggaaagg

SEQ ID NO: 5997463 - DNA, 25 bp, Homo sapien
cccagtcgatcgggatattttcagc

SEQ ID NO: 5997464 - DNA, 25 bp, Homo sapien
taactttcaaagattccactacacc

SEQ ID NO: 5997465 - DNA, 25 bp, Homo sapien
aagacagcatagtccctgccaaagt

SEQ ID NO: 5997466 - DNA, 25 bp, Homo sapien
tctagtagcatattcattcaaaccc

SEQ ID NO: 5997467 - DNA, 25 bp, Homo sapien
gatcatggcagttgggttagccaca

SEQ ID NO: 5997468 - DNA, 25 bp, Homo sapien
agcatattcattcaaacccaaatgg

SEQ ID NO: 5997469 - DNA, 25 bp, Homo sapien
gcgtagatatctagttgtttacgca

SEQ ID NO: 5997470 - DNA, 25 bp, Homo sapien
tttcattcgtgaagtcagtagtaga

SEQ ID NO: 5997471 - DNA, 25 bp, Homo sapien
tcttgacacccttcaaggatttgaa

SEQ ID NO: 5997472 - DNA, 25 bp, Homo sapien
accgccatacttcttgggtagggtg

SEQ ID NO: 5997473 - DNA, 25 bp, Homo sapien
tcagtagtagaagaggaaccaccaa

SEQ ID NO: 5997474 - DNA, 25 bp, Homo sapien
acatggtagataatttgttgatgat

SEQ ID NO: 5997475 - DNA, 25 bp, Homo sapien
gaggaaccaccaatatctctagtgg

SEQ ID NO: 5997476 - DNA, 25 bp, Homo sapien
ggaggcattgtcgacaatgatggac

SEQ ID NO: 5997477 - DNA, 25 bp, Homo sapien
tacattgaaggggtaactaggacat

SEQ ID NO: 5997478 - DNA, 25 bp, Homo sapien
agtggtatgcttaccttctgcgatc

SEQ ID NO: 5997479 - DNA, 25 bp, Homo sapien
tttcagcctcaaaaatggttctcac

SEQ ID NO: 5997480 - DNA, 25 bp, Homo sapien
ctatgtctggaattctagtcttgac

SEQ ID NO: 5997481 - DNA, 25 bp, Homo sapien
tgggtagggtgcgttccgcctgagc

SEQ ID NO: 5997482 - DNA, 25 bp, Homo sapien
aattctagtcttgacacccttcaag

SEQ ID NO: 5997483 - DNA, 25 bp, Homo sapien
cctttgagattctagtagcatattc

SEQ ID NO: 5997484 - DNA, 25 bp, Homo sapien
tagggtgcgttccgcctgagcggca

SEQ ID NO: 5997485 - DNA, 25 bp, Homo sapien
gtgaagtcagtagtagaagaggaac

SEQ ID NO: 5997486 - DNA, 25 bp, Homo sapien
taaagttctcttagcaattgttctg

SEQ ID NO: 5997487 - DNA, 25 bp, Homo sapien
aatatctaaaccaacatgtctggaa

SEQ ID NO: 5997488 - DNA, 25 bp, Homo sapien
cggattcatgttccaggcctgagaa

SEQ ID NO: 5997489 - DNA, 25 bp, Homo sapien
tgtatttcttggcgaagtcaaaggc

SEQ ID NO: 5997490 - DNA, 25 bp, Homo sapien
ctgttgtatttcttggcgaagtcaa

SEQ ID NO: 5997491 - DNA, 25 bp, Homo sapien
tctcttagcaattgttctgttaagc

SEQ ID NO: 5997492 - DNA, 25 bp, Homo sapien
ttacgcaaagcaacgtttagtgaac

SEQ ID NO: 5997493 - DNA, 25 bp, Homo sapien
gatatttgccttatgcacagctgtg

SEQ ID NO: 5997494 - DNA, 25 bp, Homo sapien
attgatgaggtttggccaccgcctg

SEQ ID NO: 5997495 - DNA, 25 bp, Homo sapien
gtgatttctttcccaacaccgtcac

SEQ ID NO: 5997496 - DNA, 25 bp, Homo sapien
caccgcctgcatggaggcattgtcg

SEQ ID NO: 5997497 - DNA, 25 bp, Homo sapien
ggatttgaaaagggccacattggcg

SEQ ID NO: 5997498 - DNA, 25 bp, Homo sapien
gttgggttagccacattttggcctt

SEQ ID NO: 5997499 - DNA, 25 bp, Homo sapien
gaactgcctttgagattctagtagc

SEQ ID NO: 5997500 - DNA, 25 bp, Homo sapien
atggttctcactgaatcagtgattt

SEQ ID NO: 5997501 - DNA, 25 bp, Homo sapien
tgccaaagttggcacctgccaccaa

SEQ ID NO: 5997502 - DNA, 25 bp, Homo sapien
aggcattgtcgacaatgatggacga

SEQ ID NO: 5997503 - DNA, 25 bp, Homo sapien
cttatttctctttagagactcaaca

SEQ ID NO: 5997504 - DNA, 25 bp, Homo sapien
attttcagcctcaaaaatggttctc

SEQ ID NO: 5997505 - DNA, 25 bp, Homo sapien
agcttcatagacgccttccttatga

SEQ ID NO: 5997506 - DNA, 25 bp, Homo sapien
tatttctctttagagactcaacagc

SEQ ID NO: 5997507 - DNA, 25 bp, Homo sapien
tctttagagactcaacagcttcata

SEQ ID NO: 5997508 - DNA, 25 bp, Homo sapien
gacagcatagtccctgccaaagttg

SEQ ID NO: 5997509 - DNA, 25 bp, Homo sapien
ggcgaagtcaaaggcaaatctggcg

SEQ ID NO: 5997510 - DNA, 25 bp, Homo sapien
ttagccacattttggcctttaatat

SEQ ID NO: 5997511 - DNA, 25 bp, Homo sapien
gaactcaccctccgtgttttctcta

SEQ ID NO: 5997512 - DNA, 25 bp, Homo sapien
tatctaaaccaacatgtctggaacc

SEQ ID NO: 5997513 - DNA, 25 bp, Homo sapien
accaatatctctagtggtatgctta

SEQ ID NO: 5997514 - DNA, 25 bp, Homo sapien
aggatcatggcagttgggttagcca

SEQ ID NO: 5997515 - DNA, 25 bp, Homo sapien
caatatctctagtggtatgcttacc

SEQ ID NO: 5997516 - DNA, 25 bp, Homo sapien
ttctgaacagaccgtcacctaactt

SEQ ID NO: 5997517 - DNA, 25 bp, Homo sapien
tggccaatttcagttattatatttc

SEQ ID NO: 5997518 - DNA, 25 bp, Homo sapien
cacccttcaaggatttgaaaagggc

SEQ ID NO: 5997519 - DNA, 25 bp, Homo sapien
gtagaagaggaaccaccaatatctc

SEQ ID NO: 5997520 - DNA, 25 bp, Homo sapien
tcttggcgaagtcaaaggcaaatct

SEQ ID NO: 5997521 - DNA, 25 bp, Homo sapien
tagtagcatattcattcaaacccaa

SEQ ID NO: 5997522 - DNA, 25 bp, Homo sapien
tctggaacctggttcgaagacagca

SEQ ID NO: 5997523 - DNA, 25 bp, Homo sapien
agattctagtagcatattcattcaa

SEQ ID NO: 5997524 - DNA, 25 bp, Homo sapien
caaagcagcgccaatgttgcctaag

SEQ ID NO: 5997525 - DNA, 25 bp, Homo sapien
atggcagttgggttagccacatttt

SEQ ID NO: 5997526 - DNA, 25 bp, Homo sapien
ttcatgttccaggcctgagaactca

SEQ ID NO: 5997527 - DNA, 25 bp, Homo sapien
ttggcgaagtcaaaggcaaatctgg

SEQ ID NO: 5997528 - DNA, 25 bp, Homo sapien
tgccttatgcacagctgtgacagac

SEQ ID NO: 5997529 - DNA, 25 bp, Homo sapien
tctctttagagactcaacagcttca

SEQ ID NO: 5997530 - DNA, 25 bp, Homo sapien
ccacattggcgtagatatctagttg

SEQ ID NO: 5997531 - DNA, 25 bp, Homo sapien
tagtttcccagtcgatcgggatatt

SEQ ID NO: 5997532 - DNA, 25 bp, Homo sapien
atgcacagctgtgacagactttctg

SEQ ID NO: 5997533 - DNA, 25 bp, Homo sapien
agcggcagtggctaaagttctctta

SEQ ID NO: 5997534 - DNA, 25 bp, Homo sapien
cttgggtagggtgcgttccgcctga

SEQ ID NO: 5997535 - DNA, 25 bp, Homo sapien
cgatcgtttcatgaactgcctttga

SEQ ID NO: 5997536 - DNA, 25 bp, Homo sapien
cccttcaaggatttgaaaagggcca

SEQ ID NO: 5997537 - DNA, 25 bp, Homo sapien
agattccactacaccagggacggat

SEQ ID NO: 5997538 - DNA, 25 bp, Homo sapien
atcgggatattttcagcctcaaaaa

SEQ ID NO: 5997539 - DNA, 25 bp, Homo sapien
acttcttgggtagggtgcgttccgc

SEQ ID NO: 5997540 - DNA, 25 bp, Homo sapien
ctttctgtcttaggtctagtcataa

SEQ ID NO: 5997541 - DNA, 25 bp, Homo sapien
ccatagccccttaagaccaatctta

SEQ ID NO: 5997542 - DNA, 25 bp, Homo sapien
agtgtgccatagccccttaagacca

SEQ ID NO: 5997543 - DNA, 25 bp, Homo sapien
atgaactgcctttgagattctagta

SEQ ID NO: 5997544 - DNA, 25 bp, Homo sapien
aaatggttctcactgaatcagtgat

SEQ ID NO: 5997545 - DNA, 25 bp, Homo sapien
gtgaaacgaccgccatacttcttgg

SEQ ID NO: 5997546 - DNA, 25 bp, Homo sapien
aaagttggcacctgccaccaatcct

SEQ ID NO: 5997547 - DNA, 25 bp, Homo sapien
attggcgtagatatctagttgttta

SEQ ID NO: 5997548 - DNA, 25 bp, Homo sapien
cagttgggttagccacattttggcc

SEQ ID NO: 5997549 - DNA, 25 bp, Homo sapien
gcaaagcaacgtttagtgaaccgtg

SEQ ID NO: 5997550 - DNA, 25 bp, Homo sapien
tgcgatcgtttcatgaactgccttt

SEQ ID NO: 5997551 - DNA, 25 bp, Homo sapien
gtgcgttccgcctgagcggcagtgg

SEQ ID NO: 5997552 - DNA, 25 bp, Homo sapien
ttaacgtggaggaaaggatcatggc

SEQ ID NO: 5997553 - DNA, 25 bp, Homo sapien
caccaggtatcaaagtgacggtgaa

SEQ ID NO: 5997554 - DNA, 25 bp, Homo sapien
gtatcaaagtgacggtgaaacgacc

SEQ ID NO: 5997555 - DNA, 25 bp, Homo sapien
acattttggcctttaatatctaaac

SEQ ID NO: 5997556 - DNA, 25 bp, Homo sapien
tcaaaaatggttctcactgaatcag

SEQ ID NO: 5997557 - DNA, 25 bp, Homo sapien
ttgcttaatgtttatagtttcccag

SEQ ID NO: 5997558 - DNA, 25 bp, Homo sapien
atcaaagtgacggtgaaacgaccgc

SEQ ID NO: 5997559 - DNA, 25 bp, Homo sapien
aaggcaaatctggcgatcctttctg

SEQ ID NO: 5997560 - DNA, 25 bp, Homo sapien
cggtgaaacgaccgccatacttctt

SEQ ID NO: 5997561 - DNA, 25 bp, Homo sapien
attctagtagcatattcattcaaac

SEQ ID NO: 5997562 - DNA, 25 bp, Homo sapien
ccacattttggcctttaatatctaa

SEQ ID NO: 5997563 - DNA, 25 bp, Homo sapien
gcttaccttctgcgatcgtttcatg

SEQ ID NO: 5997564 - DNA, 25 bp, Homo sapien
ttatgcacagctgtgacagactttc

SEQ ID NO: 5997565 - DNA, 25 bp, Homo sapien
ttaatgtttatagtttcccagtcga

SEQ ID NO: 5997566 - DNA, 25 bp, Homo sapien
gccaatttcagttattatatttctg

SEQ ID NO: 5997567 - DNA, 25 bp, Homo sapien
tgtctggaacctggttcgaagacag

SEQ ID NO: 5997568 - DNA, 25 bp, Homo sapien
tttctctttagagactcaacagctt

SEQ ID NO: 5997569 - DNA, 25 bp, Homo sapien
cgatcaaagcagcgccaatgttgcc

SEQ ID NO: 5997570 - DNA, 25 bp, Homo sapien
ccaccaatcctggaccaccgatcaa

SEQ ID NO: 5997571 - DNA, 25 bp, Homo sapien
tggctaaagttctcttagcaattgt

SEQ ID NO: 5997572 - DNA, 25 bp, Homo sapien
gacagactttctgttgtatttcttg

SEQ ID NO: 5997573 - DNA, 25 bp, Homo sapien
tattatatttctgaacagaccgtca

SEQ ID NO: 5997574 - DNA, 25 bp, Homo sapien
tttggccaatttcagttattatatt

SEQ ID NO: 5997575 - DNA, 25 bp, Homo sapien
tttcttggcgaagtcaaaggcaaat

SEQ ID NO: 5997576 - DNA, 25 bp, Homo sapien
cctgccaaagttggcacctgccacc

SEQ ID NO: 5997577 - DNA, 25 bp, Homo sapien
atctagttgtttacgcaaagcaacg

SEQ ID NO: 5997578 - DNA, 25 bp, Homo sapien
atgcttaccttctgcgatcgtttca

SEQ ID NO: 5997579 - DNA, 25 bp, Homo sapien
tatttcttggcgaagtcaaaggcaa

SEQ ID NO: 5997580 - DNA, 25 bp, Homo sapien
accctccgtgttttctctaatgaca

SEQ ID NO: 5997581 - DNA, 25 bp, Homo sapien
ccaggtatcaaagtgacggtgaaac

SEQ ID NO: 5997582 - DNA, 25 bp, Homo sapien
cattcaaacccaaatggttcaacat

SEQ ID NO: 5997583 - DNA, 25 bp, Homo sapien
attgtcgacaatgatggacgatacg

SEQ ID NO: 5997584 - DNA, 25 bp, Homo sapien
ctctagtggtatgcttaccttctgc

SEQ ID NO: 5997585 - DNA, 25 bp, Homo sapien
tctttttggccaatttcagttatta

SEQ ID NO: 5997586 - DNA, 25 bp, Homo sapien
agtcagtagtagaagaggaaccacc

SEQ ID NO: 5997587 - DNA, 25 bp, Homo sapien
atatttctgaacagaccgtcaccta

SEQ ID NO: 5997588 - DNA, 25 bp, Homo sapien
accgatcaaagcagcgccaatgttg

SEQ ID NO: 5997589 - DNA, 25 bp, Homo sapien
ctgaacagaccgtcacctaacttca

SEQ ID NO: 5997590 - DNA, 25 bp, Homo sapien
ggagtgtgccatagccccttaagac

SEQ ID NO: 5997591 - DNA, 25 bp, Homo sapien
tttcccaacaccgtcaccaggtatc

SEQ ID NO: 5997592 - DNA, 25 bp, Homo sapien
ccaacatgtctggaacctggttcga

SEQ ID NO: 5997593 - DNA, 25 bp, Homo sapien
ggtagataatttgttgatgatttca

SEQ ID NO: 5997594 - DNA, 25 bp, Homo sapien
aatggttcaacattaacgtggagga

SEQ ID NO: 5997595 - DNA, 25 bp, Homo sapien
cgtacattgaaggggtaactaggac

SEQ ID NO: 5997596 - DNA, 25 bp, Homo sapien
tgttccaggcctgagaactcaccct

SEQ ID NO: 5997597 - DNA, 25 bp, Homo sapien
acattggcgtagatatctagttgtt

SEQ ID NO: 5997598 - DNA, 25 bp, Homo sapien
gatggacgatacgtcaatatcagga

SEQ ID NO: 5997599 - DNA, 25 bp, Homo sapien
tctaaaccaacatgtctggaacctg

SEQ ID NO: 5997600 - DNA, 25 bp, Homo sapien
cgtttcatgaactgcctttgagatt

SEQ ID NO: 5997601 - DNA, 25 bp, Homo sapien
tctttcccaacaccgtcaccaggta

SEQ ID NO: 5997602 - DNA, 25 bp, Homo sapien
aagaggaaccaccaatatctctagt

SEQ ID NO: 5997603 - DNA, 25 bp, Homo sapien
attcgtgaagtcagtagtagaagag

SEQ ID NO: 5997604 - DNA, 25 bp, Homo sapien
ccaccaatatctctagtggtatgct

SEQ ID NO: 5997605 - DNA, 25 bp, Homo sapien
tgagcggcagtggctaaagttctct

SEQ ID NO: 5997606 - DNA, 25 bp, Homo sapien
tgccatagccccttaagaccaatct

SEQ ID NO: 5997607 - DNA, 25 bp, Homo sapien
cgggatattttcagcctcaaaaatg

SEQ ID NO: 5997608 - DNA, 25 bp, Homo sapien
atgtctggaattctagtcttgacac

SEQ ID NO: 5997609 - DNA, 25 bp, Homo sapien
tttatagtttcccagtcgatcggga

SEQ ID NO: 5997610 - DNA, 25 bp, Homo sapien
gtcgatcgggatattttcagcctca

SEQ ID NO: 5997611 - DNA, 25 bp, Homo sapien
cagtgatttctttcccaacaccgtc

SEQ ID NO: 5997612 - DNA, 25 bp, Homo sapien
gttccgcctgagcggcagtggctaa

SEQ ID NO: 5997613 - DNA, 25 bp, Homo sapien
attctttttggccaatttcagttat

SEQ ID NO: 5997614 - DNA, 25 bp, Homo sapien
tggcgatcctttctgtcttaggtct

SEQ ID NO: 5997615 - DNA, 25 bp, Homo sapien
gtgacagactttctgttgtatttct

SEQ ID NO: 5997616 - DNA, 25 bp, Homo sapien
tccttatgatctgtttgcttaatgt

SEQ ID NO: 5997617 - DNA, 25 bp, Homo sapien
ggcagttgggttagccacattttgg

SEQ ID NO: 5997618 - DNA, 25 bp, Homo sapien
gtttgcttaatgtttatagtttccc

SEQ ID NO: 5997619 - DNA, 25 bp, Homo sapien
caatgatggacgatacgtcaatatc

SEQ ID NO: 5997620 - DNA, 25 bp, Homo sapien
cactgaatcagtgatttctttccca

SEQ ID NO: 5997621 - DNA, 25 bp, Homo sapien
ttcttgggtagggtgcgttccgcct

SEQ ID NO: 5997622 - DNA, 25 bp, Homo sapien
atagacgccttccttatgatctgtt

SEQ ID NO: 5997623 - DNA, 25 bp, Homo sapien
tttgagattctagtagcatattcat

SEQ ID NO: 5997624 - DNA, 25 bp, Homo sapien
tgacctgtttggtcagcaggagtgt

SEQ ID NO: 5997625 - DNA, 25 bp, Homo sapien
gaaaagggccacattggcgtagata

SEQ ID NO: 5997626 - DNA, 25 bp, Homo sapien
agtccctgccaaagttggcacctgc

SEQ ID NO: 5997627 - DNA, 25 bp, Homo sapien
accaatcctggaccaccgatcaaag

SEQ ID NO: 5997628 - DNA, 25 bp, Homo sapien
ctggttcgaagacagcatagtccct

SEQ ID NO: 5997629 - DNA, 25 bp, Homo sapien
tcaaatctatgtctggaattctagt

SEQ ID NO: 5997630 - DNA, 25 bp, Homo sapien
atattttcagcctcaaaaatggttc

SEQ ID NO: 5997631 - DNA, 25 bp, Homo sapien
cgtgacctgtttggtcagcaggagt

SEQ ID NO: 5997632 - DNA, 25 bp, Homo sapien
cttctgcgatcgtttcatgaactgc

SEQ ID NO: 5997633 - DNA, 25 bp, Homo sapien
aagatggtaccgtacattgaagggg

SEQ ID NO: 5997634 - DNA, 25 bp, Homo sapien
ctgtttggtcagcaggagtgtgcca

SEQ ID NO: 5997635 - DNA, 25 bp, Homo sapien
cacctgccaccaatcctggaccacc

SEQ ID NO: 5997636 - DNA, 25 bp, Homo sapien
tcagcaggagtgtgccatagcccct

SEQ ID NO: 5997637 - DNA, 25 bp, Homo sapien
ctggaattctagtcttgacaccctt

SEQ ID NO: 5997638 - DNA, 25 bp, Homo sapien
cctgagcggcagtggctaaagttct

SEQ ID NO: 5997639 - DNA, 25 bp, Homo sapien
gatcctttctgtcttaggtctagtc

SEQ ID NO: 5997640 - DNA, 25 bp, Homo sapien
gccttccttatgatctgtttgctta

SEQ ID NO: 5997641 - DNA, 25 bp, Homo sapien
ggttagccacattttggcctttaat

SEQ ID NO: 5997642 - DNA, 25 bp, Homo sapien
gctaaagttctcttagcaattgttc

SEQ ID NO: 5997643 - DNA, 25 bp, Homo sapien
tgatgaggtttggccaccgcctgca

SEQ ID NO: 5997644 - DNA, 25 bp, Homo sapien
gacaatgatggacgatacgtcaata

SEQ ID NO: 5997645 - DNA, 25 bp, Homo sapien
taatttgttgatgatttcattcgtg

SEQ ID NO: 5997646 - DNA, 25 bp, Homo sapien
ttctcactgaatcagtgatttcttt

SEQ ID NO: 5997647 - DNA, 25 bp, Homo sapien
tctgcgatcgtttcatgaactgcct

SEQ ID NO: 5997648 - DNA, 25 bp, Homo sapien
aggtatcaaagtgacggtgaaacga

SEQ ID NO: 5997649 - DNA, 25 bp, Homo sapien
gtcaatatcaggatattctttttgg

SEQ ID NO: 5997650 - DNA, 25 bp, Homo sapien
aacttcatgatatttgccttatgca

SEQ ID NO: 5997651 - DNA, 25 bp, Homo sapien
atcctggaccaccgatcaaagcagc

SEQ ID NO: 5997652 - DNA, 25 bp, Homo sapien
gcctaagatggtaccgtacattgaa

SEQ ID NO: 5997653 - DNA, 25 bp, Homo sapien
gaccaccgatcaaagcagcgccaat

SEQ ID NO: 5997654 - DNA, 25 bp, Homo sapien
ttgtttacgcaaagcaacgtttagt

SEQ ID NO: 5997655 - DNA, 25 bp, Homo sapien
gactttctgttgtatttcttggcga

SEQ ID NO: 5997656 - DNA, 25 bp, Homo sapien
aaaaatggttctcactgaatcagtg

SEQ ID NO: 5997657 - DNA, 25 bp, Homo sapien
gaggaaaggatcatggcagttgggt

SEQ ID NO: 5997658 - DNA, 25 bp, Homo sapien
gataatttgttgatgatttcattcg

SEQ ID NO: 5997659 - DNA, 25 bp, Homo sapien
ggaaaggatcatggcagttgggtta

SEQ ID NO: 5997660 - DNA, 25 bp, Homo sapien
accgtgacctgtttggtcagcagga

SEQ ID NO: 5997661 - DNA, 25 bp, Homo sapien
atttgttgatgatttcattcgtgaa

SEQ ID NO: 5997662 - DNA, 25 bp, Homo sapien
tccctgccaaagttggcacctgcca

SEQ ID NO: 5997663 - DNA, 25 bp, Homo sapien
ctaatgacaatcaaatctatgtctg

SEQ ID NO: 5997664 - DNA, 25 bp, Homo sapien
aaccaacatgtctggaacctggttc

SEQ ID NO: 5997665 - DNA, 25 bp, Homo sapien
ccttatgcacagctgtgacagactt

SEQ ID NO: 5997666 - DNA, 25 bp, Homo sapien
gtagcatattcattcaaacccaaat

SEQ ID NO: 5997667 - DNA, 25 bp, Homo sapien
aatgacaatcaaatctatgtctgga

SEQ ID NO: 5997668 - DNA, 25 bp, Homo sapien
gcattgtcgacaatgatggacgata

SEQ ID NO: 5997669 - DNA, 25 bp, Homo sapien
aggcctgagaactcaccctccgtgt

SEQ ID NO: 5997670 - DNA, 25 bp, Homo sapien
gcatagtccctgccaaagttggcac

SEQ ID NO: 5997671 - DNA, 25 bp, Homo sapien
ttggcacctgccaccaatcctggac

SEQ ID NO: 5997672 - DNA, 25 bp, Homo sapien
gggacggattcatgttccaggcctg

SEQ ID NO: 5997673 - DNA, 25 bp, Homo sapien
ggttctcactgaatcagtgatttct

SEQ ID NO: 5997674 - DNA, 25 bp, Homo sapien
tcattcgtgaagtcagtagtagaag

SEQ ID NO: 5997675 - DNA, 25 bp, Homo sapien
tttggccaccgcctgcatggaggca

SEQ ID NO: 5997676 - DNA, 25 bp, Homo sapien
cactacaccagggacggattcatgt

SEQ ID NO: 5997677 - DNA, 25 bp, Homo sapien
tcttagcaattgttctgttaagcat

SEQ ID NO: 5997678 - DNA, 25 bp, Homo sapien
tggcgtagatatctagttgtttacg

SEQ ID NO: 5997679 - DNA, 25 bp, Homo sapien
tcatagacgccttccttatgatctg

SEQ ID NO: 5997680 - DNA, 25 bp, Homo sapien
atgatatttgccttatgcacagctg

SEQ ID NO: 5997681 - DNA, 25 bp, Homo sapien
gaggtttggccaccgcctgcatgga

SEQ ID NO: 5997682 - DNA, 25 bp, Homo sapien
accttctgcgatcgtttcatgaact

SEQ ID NO: 5997683 - DNA, 25 bp, Homo sapien
aaatctatgtctggaattctagtct

SEQ ID NO: 5997684 - DNA, 25 bp, Homo sapien
tggaccaccgatcaaagcagcgcca

SEQ ID NO: 5997685 - DNA, 25 bp, Homo sapien
tcaacattaacgtggaggaaaggat

SEQ ID NO: 5997686 - DNA, 25 bp, Homo sapien
ctcaacagcttcatagacgccttcc

SEQ ID NO: 5997687 - DNA, 25 bp, Homo sapien
aactaggacatcaaattgatgaggt

SEQ ID NO: 5997688 - DNA, 25 bp, Homo sapien
aacattaacgtggaggaaaggatca

SEQ ID NO: 5997689 - DNA, 25 bp, Homo sapien
ccaccgatcaaagcagcgccaatgt

SEQ ID NO: 5997690 - DNA, 25 bp, Homo sapien
aggggtaactaggacatcaaattga

SEQ ID NO: 5997691 - DNA, 25 bp, Homo sapien
acgcaaagcaacgtttagtgaaccg

SEQ ID NO: 5997692 - DNA, 25 bp, Homo sapien
cgccatacttcttgggtagggtgcg

SEQ ID NO: 5997693 - DNA, 25 bp, Homo sapien
aatgttgcctaagatggtaccgtac

SEQ ID NO: 5997694 - DNA, 25 bp, Homo sapien
tttagtgaaccgtgacctgtttggt

SEQ ID NO: 5997695 - DNA, 25 bp, Homo sapien
tggccaccgcctgcatggaggcatt

SEQ ID NO: 5997696 - DNA, 25 bp, Homo sapien
ttctagtcttgacacccttcaagga

SEQ ID NO: 5997697 - DNA, 25 bp, Homo sapien
catgtctggaacctggttcgaagac

SEQ ID NO: 5997698 - DNA, 25 bp, Homo sapien
gcatggaggcattgtcgacaatgat

SEQ ID NO: 5997699 - DNA, 25 bp, Homo sapien
aaccaccaatatctctagtggtatg

SEQ ID NO: 5997700 - DNA, 25 bp, Homo sapien
aatctggcgatcctttctgtcttag

SEQ ID NO: 5997701 - DNA, 25 bp, Homo sapien
cttaggtctagtcataactttcaaa

SEQ ID NO: 5997702 - DNA, 25 bp, Homo sapien
gtcttaggtctagtcataactttca

SEQ ID NO: 5997703 - DNA, 25 bp, Homo sapien
ctttctgttgtatttcttggcgaag

SEQ ID NO: 5997704 - DNA, 25 bp, Homo sapien
aaagcaacgtttagtgaaccgtgac

SEQ ID NO: 5997705 - DNA, 25 bp, Homo sapien
ttacatggtagataatttgttgatg

SEQ ID NO: 5997706 - DNA, 25 bp, Homo sapien
atgatttcattcgtgaagtcagtag

SEQ ID NO: 5997707 - DNA, 25 bp, Homo sapien
atcaaagcagcgccaatgttgccta

SEQ ID NO: 5997708 - DNA, 25 bp, Homo sapien
caccgtcaccaggtatcaaagtgac

SEQ ID NO: 5997709 - DNA, 25 bp, Homo sapien
ggcacctgccaccaatcctggacca

SEQ ID NO: 5997710 - DNA, 25 bp, Homo sapien
actttcaaagattccactacaccag

SEQ ID NO: 5997711 - DNA, 25 bp, Homo sapien
ctgtgacagactttctgttgtattt

SEQ ID NO: 5997712 - DNA, 25 bp, Homo sapien
ctagtcttgacacccttcaaggatt

SEQ ID NO: 5997713 - DNA, 25 bp, Homo sapien
caacagcttcatagacgccttcctt

SEQ ID NO: 5997714 - DNA, 25 bp, Homo sapien
attttggcctttaatatctaaacca

SEQ ID NO: 5997715 - DNA, 25 bp, Homo sapien
caggagtgtgccatagccccttaag

SEQ ID NO: 5997716 - DNA, 25 bp, Homo sapien
atcagtgatttctttcccaacaccg

SEQ ID NO: 5997717 - DNA, 25 bp, Homo sapien
gatggtaccgtacattgaaggggta

SEQ ID NO: 5997718 - DNA, 25 bp, Homo sapien
cctcaaaaatggttctcactgaatc

SEQ ID NO: 5997719 - DNA, 25 bp, Homo sapien
atttgaaaagggccacattggcgta

SEQ ID NO: 5997720 - DNA, 25 bp, Homo sapien
gaatcagtgatttctttcccaacac

SEQ ID NO: 5997721 - DNA, 25 bp, Homo sapien
gattcatgttccaggcctgagaact

SEQ ID NO: 5997722 - DNA, 25 bp, Homo sapien
ttatatttctgaacagaccgtcacc

SEQ ID NO: 5997723 - DNA, 25 bp, Homo sapien
aagcagcgccaatgttgcctaagat

SEQ ID NO: 5997724 - DNA, 25 bp, Homo sapien
gtagatatctagttgtttacgcaaa

SEQ ID NO: 5997725 - DNA, 25 bp, Homo sapien
tctagtcataactttcaaagattcc

SEQ ID NO: 5997726 - DNA, 25 bp, Homo sapien
cgtgttttctctaatgacaatcaaa

SEQ ID NO: 5997727 - DNA, 25 bp, Homo sapien
tttttggccaatttcagttattata

SEQ ID NO: 5997728 - DNA, 25 bp, Homo sapien
atagccccttaagaccaatcttatt

SEQ ID NO: 5997729 - DNA, 25 bp, Homo sapien
gatttcattcgtgaagtcagtagta

SEQ ID NO: 5997730 - DNA, 25 bp, Homo sapien
gtttcccagtcgatcgggatatttt

SEQ ID NO: 5997731 - DNA, 25 bp, Homo sapien
gacatcaaattgatgaggtttggcc

SEQ ID NO: 5997732 - DNA, 25 bp, Homo sapien
cttcaaggatttgaaaagggccaca

SEQ ID NO: 5997733 - DNA, 25 bp, Homo sapien
ctcactgaatcagtgatttctttcc

SEQ ID NO: 5997734 - DNA, 25 bp, Homo sapien
atatctagttgtttacgcaaagcaa

SEQ ID NO: 5997735 - DNA, 25 bp, Homo sapien
agggccacattggcgtagatatcta

SEQ ID NO: 5997736 - DNA, 25 bp, Homo sapien
accgtcacctaacttcatgatattt

SEQ ID NO: 5997737 - DNA, 25 bp, Homo sapien
agaccaatcttatttctctttagag

SEQ ID NO: 5997738 - DNA, 25 bp, Homo sapien
ttgcctaagatggtaccgtacattg

SEQ ID NO: 5997739 - DNA, 25 bp, Homo sapien
ggttcgaagacagcatagtccctgc

SEQ ID NO: 5997740 - DNA, 25 bp, Homo sapien
gaaccgtgacctgtttggtcagcag

SEQ ID NO: 5997741 - DNA, 25 bp, Homo sapien
cgaccgccatacttcttgggtaggg

SEQ ID NO: 5997742 - DNA, 25 bp, Homo sapien
tttcatgaactgcctttgagattct

SEQ ID NO: 5997743 - DNA, 25 bp, Homo sapien
gtcaccaggtatcaaagtgacggtg

SEQ ID NO: 5997744 - DNA, 25 bp, Homo sapien
ccgtcaccaggtatcaaagtgacgg

SEQ ID NO: 5997745 - DNA, 25 bp, Homo sapien
caaatctggcgatcctttctgtctt

SEQ ID NO: 5997746 - DNA, 25 bp, Homo sapien
ccaaagttggcacctgccaccaatc

SEQ ID NO: 5997747 - DNA, 25 bp, Homo sapien
tcaaagattccactacaccagggac

SEQ ID NO: 5997748 - DNA, 25 bp, Homo sapien
ttaatatctaaaccaacatgtctgg

SEQ ID NO: 5997749 - DNA, 25 bp, Homo sapien
tgatctgtttgcttaatgtttatag

SEQ ID NO: 5997750 - DNA, 25 bp, Homo sapien
cctggaccaccgatcaaagcagcgc

SEQ ID NO: 5997751 - DNA, 25 bp, Homo sapien
ttccaggcctgagaactcaccctcc

SEQ ID NO: 5997752 - DNA, 25 bp, Homo sapien
ttttctctaatgacaatcaaatcta

SEQ ID NO: 5997753 - DNA, 25 bp, Homo sapien
gatttctttcccaacaccgtcacca

SEQ ID NO: 5997754 - DNA, 25 bp, Homo sapien
taccgtacattgaaggggtaactag

SEQ ID NO: 5997755 - DNA, 25 bp, Homo sapien
ttctgttgtatttcttggcgaagtc

SEQ ID NO: 5997756 - DNA, 25 bp, Homo sapien
atggaggcattgtcgacaatgatgg

SEQ ID NO: 5997757 - DNA, 25 bp, Homo sapien
aacgaccgccatacttcttgggtag

SEQ ID NO: 5997758 - DNA, 25 bp, Homo sapien
cgtttagtgaaccgtgacctgtttg

SEQ ID NO: 5997759 - DNA, 25 bp, Homo sapien
tggcctttaatatctaaaccaacat

SEQ ID NO: 5997760 - DNA, 25 bp, Homo sapien
tgagattctagtagcatattcattc

SEQ ID NO: 5997761 - DNA, 25 bp, Homo sapien
tcgtgaagtcagtagtagaagagga

SEQ ID NO: 5997762 - DNA, 25 bp, Homo sapien
gacggattcatgttccaggcctgag

SEQ ID NO: 5997763 - DNA, 25 bp, Homo sapien
ttgacacccttcaaggatttgaaaa

SEQ ID NO: 5997764 - DNA, 25 bp, Homo sapien
tagtcataactttcaaagattccac

SEQ ID NO: 5997765 - DNA, 25 bp, Homo sapien
gcgatcctttctgtcttaggtctag

SEQ ID NO: 5997766 - DNA, 25 bp, Homo sapien
actcaccctccgtgttttctctaat

SEQ ID NO: 5997767 - DNA, 25 bp, Homo sapien
gacgatacgtcaatatcaggatatt

SEQ ID NO: 5997768 - DNA, 25 bp, Homo sapien
tatagtttcccagtcgatcgggata

SEQ ID NO: 5997769 - DNA, 25 bp, Homo sapien
tcatgatatttgccttatgcacagc

SEQ ID NO: 5997770 - DNA, 25 bp, Homo sapien
caaatggttcaacattaacgtggag

SEQ ID NO: 5997771 - DNA, 25 bp, Homo sapien
gtcataactttcaaagattccacta

SEQ ID NO: 5997772 - DNA, 25 bp, Homo sapien
tggacgatacgtcaatatcaggata

SEQ ID NO: 5997773 - DNA, 25 bp, Homo sapien
ctaagatggtaccgtacattgaagg

SEQ ID NO: 5997774 - DNA, 25 bp, Homo sapien
aaattgatgaggtttggccaccgcc

SEQ ID NO: 5997775 - DNA, 25 bp, Homo sapien
atcgtttcatgaactgcctttgaga

SEQ ID NO: 5997776 - DNA, 25 bp, Homo sapien
ttgaaggggtaactaggacatcaaa

SEQ ID NO: 5997777 - DNA, 25 bp, Homo sapien
aacgtggaggaaaggatcatggcag

SEQ ID NO: 5997778 - DNA, 25 bp, Homo sapien
cggcagtggctaaagttctcttagc

SEQ ID NO: 5997779 - DNA, 25 bp, Homo sapien
cgccaatgttgcctaagatggtacc

SEQ ID NO: 5997780 - DNA, 25 bp, Homo sapien
tccgtgttttctctaatgacaatca

SEQ ID NO: 5997781 - DNA, 25 bp, Homo sapien
ggtttggccaccgcctgcatggagg

SEQ ID NO: 5997782 - DNA, 25 bp, Homo sapien
acctgtttggtcagcaggagtgtgc

SEQ ID NO: 5997783 - DNA, 25 bp, Homo sapien
acaccagggacggattcatgttcca

SEQ ID NO: 5997784 - DNA, 25 bp, Homo sapien
gcctgcatggaggcattgtcgacaa

SEQ ID NO: 5997785 - DNA, 25 bp, Homo sapien
ctaacttcatgatatttgccttatg

SEQ ID NO: 5997786 - DNA, 25 bp, Homo sapien
tgcctttgagattctagtagcatat

SEQ ID NO: 5997787 - DNA, 25 bp, Homo sapien
cgtggaggaaaggatcatggcagtt

SEQ ID NO: 5997788 - DNA, 25 bp, Homo sapien
tttggcctttaatatctaaaccaac

SEQ ID NO: 5997789 - DNA, 25 bp, Homo sapien
acagaccgtcacctaacttcatgat

SEQ ID NO: 5997790 - DNA, 25 bp, Homo sapien
ttaccttctgcgatcgtttcatgaa

SEQ ID NO: 5997791 - DNA, 25 bp, Homo sapien
tagataatttgttgatgatttcatt

SEQ ID NO: 5997792 - DNA, 25 bp, Homo sapien
acagcttcatagacgccttccttat

SEQ ID NO: 5997793 - DNA, 25 bp, Homo sapien
gtttacgcaaagcaacgtttagtga

SEQ ID NO: 5997794 - DNA, 25 bp, Homo sapien
agttggcacctgccaccaatcctgg

SEQ ID NO: 5997795 - DNA, 25 bp, Homo sapien
gcttaatgtttatagtttcccagtc

SEQ ID NO: 5997796 - DNA, 25 bp, Homo sapien
aatgtttatagtttcccagtcgatc

SEQ ID NO: 5997797 - DNA, 25 bp, Homo sapien
ccaggcctgagaactcaccctccgt

SEQ ID NO: 5997798 - DNA, 25 bp, Homo sapien
agatatctagttgtttacgcaaagc

SEQ ID NO: 5997799 - DNA, 25 bp, Homo sapien
gcctgagaactcaccctccgtgttt

SEQ ID NO: 5997800 - DNA, 25 bp, Homo sapien
tatttgccttatgcacagctgtgac

SEQ ID NO: 5997801 - DNA, 25 bp, Homo sapien
atatctctagtggtatgcttacctt

SEQ ID NO: 5997802 - DNA, 25 bp, Homo sapien
tattcattcaaacccaaatggttca

SEQ ID NO: 5997803 - DNA, 25 bp, Homo sapien
gaaacgaccgccatacttcttgggt

SEQ ID NO: 5997804 - DNA, 25 bp, Homo sapien
gttgatgatttcattcgtgaagtca

SEQ ID NO: 5997805 - DNA, 25 bp, Homo sapien
atatcaggatattctttttggccaa

SEQ ID NO: 5997806 - DNA, 25 bp, Homo sapien
ggcaaatctggcgatcctttctgtc

SEQ ID NO: 5997807 - DNA, 25 bp, Homo sapien
atctatgtctggaattctagtcttg

SEQ ID NO: 5997808 - DNA, 25 bp, Homo sapien
gcacagctgtgacagactttctgtt

SEQ ID NO: 5997809 - DNA, 25 bp, Homo sapien
tctggcgatcctttctgtcttaggt

SEQ ID NO: 5997810 - DNA, 25 bp, Homo sapien
agcaggagtgtgccatagcccctta

SEQ ID NO: 5997811 - DNA, 25 bp, Homo sapien
agtcttgacacccttcaaggatttg

SEQ ID NO: 5997812 - DNA, 25 bp, Homo sapien
gagaactcaccctccgtgttttctc

SEQ ID NO: 5997813 - DNA, 25 bp, Homo sapien
gaaggggtaactaggacatcaaatt

SEQ ID NO: 5997814 - DNA, 25 bp, Homo sapien
tcatgaactgcctttgagattctag

SEQ ID NO: 5997815 - DNA, 25 bp, Homo sapien
gaagtcagtagtagaagaggaacca

SEQ ID NO: 5997816 - DNA, 25 bp, Homo sapien
ggtctagtcataactttcaaagatt

SEQ ID NO: 5997817 - DNA, 25 bp, Homo sapien
ttggtcagcaggagtgtgccatagc

SEQ ID NO: 5997818 - DNA, 25 bp, Homo sapien
gaacagaccgtcacctaacttcatg

SEQ ID NO: 5997819 - DNA, 25 bp, Homo sapien
gtttggtcagcaggagtgtgccata

SEQ ID NO: 5997820 - DNA, 25 bp, Homo sapien
ggccacattggcgtagatatctagt

SEQ ID NO: 5997821 - DNA, 25 bp, Homo sapien
cctccgtgttttctctaatgacaat

SEQ ID NO: 5997822 - DNA, 25 bp, Homo sapien
ccaatgttgcctaagatggtaccgt

SEQ ID NO: 5997823 - DNA, 25 bp, Homo sapien
cagtcgatcgggatattttcagcct

SEQ ID NO: 5997824 - DNA, 25 bp, Homo sapien
aaaggatcatggcagttgggttagc

SEQ ID NO: 5997825 - DNA, 25 bp, Homo sapien
aacatgtctggaacctggttcgaag

SEQ ID NO: 5997826 - DNA, 25 bp, Homo sapien
atttctgaacagaccgtcacctaac

SEQ ID NO: 5997827 - DNA, 25 bp, Homo sapien
gcctttaatatctaaaccaacatgt

SEQ ID NO: 5997828 - DNA, 25 bp, Homo sapien
tgtgccatagccccttaagaccaat

SEQ ID NO: 5997829 - DNA, 25 bp, Homo sapien
gtctggaattctagtcttgacaccc

SEQ ID NO: 5997830 - DNA, 25 bp, Homo sapien
ctttaatatctaaaccaacatgtct

SEQ ID NO: 5997831 - DNA, 25 bp, Homo sapien
gacacccttcaaggatttgaaaagg

SEQ ID NO: 5997832 - DNA, 25 bp, Homo sapien
gttgaatagcttatttcgactatca

SEQ ID NO: 5997833 - DNA, 25 bp, Homo sapien
tttctcgagatcggagagattatcc

SEQ ID NO: 5997834 - DNA, 25 bp, Homo sapien
tccaactcattactccgtttgtctt

SEQ ID NO: 5997835 - DNA, 25 bp, Homo sapien
ccaatcttcatcgtcatccgtttgt

SEQ ID NO: 5997836 - DNA, 25 bp, Homo sapien
ctatatccatttctatgttgagatt

SEQ ID NO: 5997837 - DNA, 25 bp, Homo sapien
cgacttaaatgtcttgttgcagata

SEQ ID NO: 5997838 - DNA, 25 bp, Homo sapien
ttttgtggatttagaattcttttta

SEQ ID NO: 5997839 - DNA, 25 bp, Homo sapien
attatccaacccaagcgttatgttt

SEQ ID NO: 5997840 - DNA, 25 bp, Homo sapien
tgatgccaaaagatcatccaactca

SEQ ID NO: 5997841 - DNA, 25 bp, Homo sapien
agtgatgccaaaagatcatccaact

SEQ ID NO: 5997842 - DNA, 25 bp, Homo sapien
atgattctccgcatgtagtgcacac

SEQ ID NO: 5997843 - DNA, 25 bp, Homo sapien
tgactttctttcttttcactacgtt

SEQ ID NO: 5997844 - DNA, 25 bp, Homo sapien
tagcttatttcgactatcaaatgat

SEQ ID NO: 5997845 - DNA, 25 bp, Homo sapien
ctttaacactttcatctgctgaatc

SEQ ID NO: 5997846 - DNA, 25 bp, Homo sapien
tagagtcgacaaggacggagtgctt

SEQ ID NO: 5997847 - DNA, 25 bp, Homo sapien
cactgccgcatgccctgctatcttc

SEQ ID NO: 5997848 - DNA, 25 bp, Homo sapien
atttctttccgtatctcttccatat

SEQ ID NO: 5997849 - DNA, 25 bp, Homo sapien
aagcgttatgttttcctcttccatt

SEQ ID NO: 5997850 - DNA, 25 bp, Homo sapien
cgaacgattcagattcctctgtttc

SEQ ID NO: 5997851 - DNA, 25 bp, Homo sapien
tcttccatttctttccgtatctctt

SEQ ID NO: 5997852 - DNA, 25 bp, Homo sapien
gagatcggagagattatccaaccca

SEQ ID NO: 5997853 - DNA, 25 bp, Homo sapien
ttaaatgtcttgttgcagataaaac

SEQ ID NO: 5997854 - DNA, 25 bp, Homo sapien
tccgtttgtaagcccttgtctccta

SEQ ID NO: 5997855 - DNA, 25 bp, Homo sapien
tggtgtcactatattcttttggtct

SEQ ID NO: 5997856 - DNA, 25 bp, Homo sapien
atcaatatcttctttttctttaaca

SEQ ID NO: 5997857 - DNA, 25 bp, Homo sapien
attcttcgtattcacatgtacattt

SEQ ID NO: 5997858 - DNA, 25 bp, Homo sapien
cgtttgtaagcccttgtctcctagt

SEQ ID NO: 5997859 - DNA, 25 bp, Homo sapien
gatcgcggaggttggagacatagag

SEQ ID NO: 5997860 - DNA, 25 bp, Homo sapien
cactacgtttttcactgccgcatgc

SEQ ID NO: 5997861 - DNA, 25 bp, Homo sapien
cacatgtacattttcatccgaactg

SEQ ID NO: 5997862 - DNA, 25 bp, Homo sapien
tgcaatgcttgcagatcaatatctt

SEQ ID NO: 5997863 - DNA, 25 bp, Homo sapien
ggagtgctttttgtggatttagaat

SEQ ID NO: 5997864 - DNA, 25 bp, Homo sapien
cttcagaagacgattctgccagttt

SEQ ID NO: 5997865 - DNA, 25 bp, Homo sapien
ttcgtattcacatgtacattttcat

SEQ ID NO: 5997866 - DNA, 25 bp, Homo sapien
cgactatcaaatgattctccgcatg

SEQ ID NO: 5997867 - DNA, 25 bp, Homo sapien
attcctctgtttctgtgtcaacctt

SEQ ID NO: 5997868 - DNA, 25 bp, Homo sapien
attgcttttccgacttaaatgtctt

SEQ ID NO: 5997869 - DNA, 25 bp, Homo sapien
atgtcttgttgcagataaaacactc

SEQ ID NO: 5997870 - DNA, 25 bp, Homo sapien
acttaaatgtcttgttgcagataaa

SEQ ID NO: 5997871 - DNA, 25 bp, Homo sapien
tcgcggaggttggagacatagagga

SEQ ID NO: 5997872 - DNA, 25 bp, Homo sapien
ttctttaacactttcatctgctgaa

SEQ ID NO: 5997873 - DNA, 25 bp, Homo sapien
agattatccaacccaagcgttatgt

SEQ ID NO: 5997874 - DNA, 25 bp, Homo sapien
ttccatttctttccgtatctcttcc

SEQ ID NO: 5997875 - DNA, 25 bp, Homo sapien
tcattactccgtttgtctttagtat

SEQ ID NO: 5997876 - DNA, 25 bp, Homo sapien
agaagacgattctgccagttttctt

SEQ ID NO: 5997877 - DNA, 25 bp, Homo sapien
atcatccaactcattactccgtttg

SEQ ID NO: 5997878 - DNA, 25 bp, Homo sapien
catccgtttgtaagcccttgtctcc

SEQ ID NO: 5997879 - DNA, 25 bp, Homo sapien
cattttcatccgaactgacgtcttc

SEQ ID NO: 5997880 - DNA, 25 bp, Homo sapien
ttcctcttccatttctttccgtatc

SEQ ID NO: 5997881 - DNA, 25 bp, Homo sapien
gtttttcactgccgcatgccctgct

SEQ ID NO: 5997882 - DNA, 25 bp, Homo sapien
tcggagagattatccaacccaagcg

SEQ ID NO: 5997883 - DNA, 25 bp, Homo sapien
caatatcttctttttctttaacact

SEQ ID NO: 5997884 - DNA, 25 bp, Homo sapien
attcttttggtcttgactttctttc

SEQ ID NO: 5997885 - DNA, 25 bp, Homo sapien
tttcttttcactacgtttttcactg

SEQ ID NO: 5997886 - DNA, 25 bp, Homo sapien
ttctttcttttcactacgtttttca

SEQ ID NO: 5997887 - DNA, 25 bp, Homo sapien
tcctctgtttctgtgtcaacctttg

SEQ ID NO: 5997888 - DNA, 25 bp, Homo sapien
ggacggagtgctttttgtggattta

SEQ ID NO: 5997889 - DNA, 25 bp, Homo sapien
taagcccttgtctcctagtgatgcc

SEQ ID NO: 5997890 - DNA, 25 bp, Homo sapien
tattcacatgtacattttcatccga

SEQ ID NO: 5997891 - DNA, 25 bp, Homo sapien
cactttcatctgctgaatcaaattt

SEQ ID NO: 5997892 - DNA, 25 bp, Homo sapien
ggtttggtgtcactatattcttttg

SEQ ID NO: 5997893 - DNA, 25 bp, Homo sapien
cccttgtctcctagtgatgccaaaa

SEQ ID NO: 5997894 - DNA, 25 bp, Homo sapien
tgccctgctatcttcacgtggttga

SEQ ID NO: 5997895 - DNA, 25 bp, Homo sapien
gtcttgactttctttcttttcacta

SEQ ID NO: 5997896 - DNA, 25 bp, Homo sapien
agtgcacacctcgatcgcggaggtt

SEQ ID NO: 5997897 - DNA, 25 bp, Homo sapien
ctgaatcaaatttctcgagatcgga

SEQ ID NO: 5997898 - DNA, 25 bp, Homo sapien
gtcttcagaagacgattctgccagt

SEQ ID NO: 5997899 - DNA, 25 bp, Homo sapien
gccaaaagatcatccaactcattac

SEQ ID NO: 5997900 - DNA, 25 bp, Homo sapien
ctacgtttttcactgccgcatgccc

SEQ ID NO: 5997901 - DNA, 25 bp, Homo sapien
cttccatatttttcttatgcagttt

SEQ ID NO: 5997902 - DNA, 25 bp, Homo sapien
ttatgcagtttagtgtttatgtggt

SEQ ID NO: 5997903 - DNA, 25 bp, Homo sapien
gattctccgcatgtagtgcacacct

SEQ ID NO: 5997904 - DNA, 25 bp, Homo sapien
gagacatagaggacggtagagtcga

SEQ ID NO: 5997905 - DNA, 25 bp, Homo sapien
atgccaaaagatcatccaactcatt

SEQ ID NO: 5997906 - DNA, 25 bp, Homo sapien
cttgcaatgcttgcagatcaatatc

SEQ ID NO: 5997907 - DNA, 25 bp, Homo sapien
cgattcagattcctctgtttctgtg

SEQ ID NO: 5997908 - DNA, 25 bp, Homo sapien
gtcatccgtttgtaagcccttgtct

SEQ ID NO: 5997909 - DNA, 25 bp, Homo sapien
tcttcgtattcacatgtacattttc

SEQ ID NO: 5997910 - DNA, 25 bp, Homo sapien
gtttttcaattgcttttccgactta

SEQ ID NO: 5997911 - DNA, 25 bp, Homo sapien
aaatgtcttgttgcagataaaacac

SEQ ID NO: 5997912 - DNA, 25 bp, Homo sapien
catcgtcatccgtttgtaagccctt

SEQ ID NO: 5997913 - DNA, 25 bp, Homo sapien
ttattcttcgtattcacatgtacat

SEQ ID NO: 5997914 - DNA, 25 bp, Homo sapien
tatcttcacgtggttgaatagctta

SEQ ID NO: 5997915 - DNA, 25 bp, Homo sapien
tttccgacttaaatgtcttgttgca

SEQ ID NO: 5997916 - DNA, 25 bp, Homo sapien
gagttcagcttgcaatgcttgcaga

SEQ ID NO: 5997917 - DNA, 25 bp, Homo sapien
gtggtttttcaattgcttttccgac

SEQ ID NO: 5997918 - DNA, 25 bp, Homo sapien
tcgtcatccgtttgtaagcccttgt

SEQ ID NO: 5997919 - DNA, 25 bp, Homo sapien
ttctacctctatatccatttctatg

SEQ ID NO: 5997920 - DNA, 25 bp, Homo sapien
agtttagtgtttatgtggtttttca

SEQ ID NO: 5997921 - DNA, 25 bp, Homo sapien
tagaggacggtagagtcgacaagga

SEQ ID NO: 5997922 - DNA, 25 bp, Homo sapien
ccgtttgtctttagtatcatcgaac

SEQ ID NO: 5997923 - DNA, 25 bp, Homo sapien
tactccgtttgtctttagtatcatc

SEQ ID NO: 5997924 - DNA, 25 bp, Homo sapien
ttagtatcatcgaacgattcagatt

SEQ ID NO: 5997925 - DNA, 25 bp, Homo sapien
tttttcttatgcagtttagtgttta

SEQ ID NO: 5997926 - DNA, 25 bp, Homo sapien
caatgcttgcagatcaatatcttct

SEQ ID NO: 5997927 - DNA, 25 bp, Homo sapien
ttaacactttcatctgctgaatcaa

SEQ ID NO: 5997928 - DNA, 25 bp, Homo sapien
tgaatagcttatttcgactatcaaa

SEQ ID NO: 5997929 - DNA, 25 bp, Homo sapien
caactcattactccgtttgtcttta

SEQ ID NO: 5997930 - DNA, 25 bp, Homo sapien
cactatattcttttggtcttgactt

SEQ ID NO: 5997931 - DNA, 25 bp, Homo sapien
atgtagtgcacacctcgatcgcgga

SEQ ID NO: 5997932 - DNA, 25 bp, Homo sapien
tcctagtgatgccaaaagatcatcc

SEQ ID NO: 5997933 - DNA, 25 bp, Homo sapien
ttgcagatcaatatcttctttttct

SEQ ID NO: 5997934 - DNA, 25 bp, Homo sapien
gtcactatattcttttggtcttgac

SEQ ID NO: 5997935 - DNA, 25 bp, Homo sapien
cagcgagttcagcttgcaatgcttg

SEQ ID NO: 5997936 - DNA, 25 bp, Homo sapien
attcagattcctctgtttctgtgtc

SEQ ID NO: 5997937 - DNA, 25 bp, Homo sapien
tatcaaatgattctccgcatgtagt

SEQ ID NO: 5997938 - DNA, 25 bp, Homo sapien
gacatagaggacggtagagtcgaca

SEQ ID NO: 5997939 - DNA, 25 bp, Homo sapien
catgccctgctatcttcacgtggtt

SEQ ID NO: 5997940 - DNA, 25 bp, Homo sapien
ggtagagtcgacaaggacggagtgc

SEQ ID NO: 5997941 - DNA, 25 bp, Homo sapien
aggttggagacatagaggacggtag

SEQ ID NO: 5997942 - DNA, 25 bp, Homo sapien
ttttctttaacactttcatctgctg

SEQ ID NO: 5997943 - DNA, 25 bp, Homo sapien
ttttcatccgaactgacgtcttcta

SEQ ID NO: 5997944 - DNA, 25 bp, Homo sapien
tgtaagcccttgtctcctagtgatg

SEQ ID NO: 5997945 - DNA, 25 bp, Homo sapien
cacgtggttgaatagcttatttcga

SEQ ID NO: 5997946 - DNA, 25 bp, Homo sapien
ctccgcatgtagtgcacacctcgat

SEQ ID NO: 5997947 - DNA, 25 bp, Homo sapien
ctgccgcatgccctgctatcttcac

SEQ ID NO: 5997948 - DNA, 25 bp, Homo sapien
ttcaattgcttttccgacttaaatg

SEQ ID NO: 5997949 - DNA, 25 bp, Homo sapien
tcttctacctctatatccatttcta

SEQ ID NO: 5997950 - DNA, 25 bp, Homo sapien
tcactttcgtcttcagaagacgatt

SEQ ID NO: 5997951 - DNA, 25 bp, Homo sapien
ttcacatgtacattttcatccgaac

SEQ ID NO: 5997952 - DNA, 25 bp, Homo sapien
ccctgctatcttcacgtggttgaat

SEQ ID NO: 5997953 - DNA, 25 bp, Homo sapien
tatgttttcctcttccatttctttc

SEQ ID NO: 5997954 - DNA, 25 bp, Homo sapien
tcaaatgattctccgcatgtagtgc

SEQ ID NO: 5997955 - DNA, 25 bp, Homo sapien
ccaagcgttatgttttcctcttcca

SEQ ID NO: 5997956 - DNA, 25 bp, Homo sapien
gtttgtctttagtatcatcgaacga

SEQ ID NO: 5997957 - DNA, 25 bp, Homo sapien
acctctatatccatttctatgttga

SEQ ID NO: 5997958 - DNA, 25 bp, Homo sapien
ccgtatctcttccatatttttctta

SEQ ID NO: 5997959 - DNA, 25 bp, Homo sapien
tctgccagttttctttcaatttcag

SEQ ID NO: 5997960 - DNA, 25 bp, Homo sapien
tttcgtcttcagaagacgattctgc

SEQ ID NO: 5997961 - DNA, 25 bp, Homo sapien
ttcactgccgcatgccctgctatct

SEQ ID NO: 5997962 - DNA, 25 bp, Homo sapien
agcccttgtctcctagtgatgccaa

SEQ ID NO: 5997963 - DNA, 25 bp, Homo sapien
gaggacggtagagtcgacaaggacg

SEQ ID NO: 5997964 - DNA, 25 bp, Homo sapien
tgcacacctcgatcgcggaggttgg

SEQ ID NO: 5997965 - DNA, 25 bp, Homo sapien
tcttctttttctttaacactttcat

SEQ ID NO: 5997966 - DNA, 25 bp, Homo sapien
ctttagtatcatcgaacgattcaga

SEQ ID NO: 5997967 - DNA, 25 bp, Homo sapien
cgctttagtagaccaatcttcatcg

SEQ ID NO: 5997968 - DNA, 25 bp, Homo sapien
attctgccagttttctttcaatttc

SEQ ID NO: 5997969 - DNA, 25 bp, Homo sapien
cgattctgccagttttctttcaatt

SEQ ID NO: 5997970 - DNA, 25 bp, Homo sapien
caattgcttttccgacttaaatgtc

SEQ ID NO: 5997971 - DNA, 25 bp, Homo sapien
gcagtttagtgtttatgtggttttt

SEQ ID NO: 5997972 - DNA, 25 bp, Homo sapien
tggtcttgactttctttcttttcac

SEQ ID NO: 5997973 - DNA, 25 bp, Homo sapien
ttcagcgagttcagcttgcaatgct

SEQ ID NO: 5997974 - DNA, 25 bp, Homo sapien
ttgtggatttagaattctttttagg

SEQ ID NO: 5997975 - DNA, 25 bp, Homo sapien
catgtacattttcatccgaactgac

SEQ ID NO: 5997976 - DNA, 25 bp, Homo sapien
acggtagagtcgacaaggacggagt

SEQ ID NO: 5997977 - DNA, 25 bp, Homo sapien
cgtcttctacctctatatccatttc

SEQ ID NO: 5997978 - DNA, 25 bp, Homo sapien
cgtattcacatgtacattttcatcc

SEQ ID NO: 5997979 - DNA, 25 bp, Homo sapien
ccgcatgtagtgcacacctcgatcg

SEQ ID NO: 5997980 - DNA, 25 bp, Homo sapien
ctttagtagaccaatcttcatcgtc

SEQ ID NO: 5997981 - DNA, 25 bp, Homo sapien
gtgtttatgtggtttttcaattgct

SEQ ID NO: 5997982 - DNA, 25 bp, Homo sapien
ttgtctttagtatcatcgaacgatt

SEQ ID NO: 5997983 - DNA, 25 bp, Homo sapien
tgctgaatcaaatttctcgagatcg

SEQ ID NO: 5997984 - DNA, 25 bp, Homo sapien
ttttattcttcgtattcacatgtac

SEQ ID NO: 5997985 - DNA, 25 bp, Homo sapien
cacctcgatcgcggaggttggagac

SEQ ID NO: 5997986 - DNA, 25 bp, Homo sapien
gcatgtagtgcacacctcgatcgcg

SEQ ID NO: 5997987 - DNA, 25 bp, Homo sapien
tagtgtttatgtggtttttcaattg

SEQ ID NO: 5997988 - DNA, 25 bp, Homo sapien
ttccgtatctcttccatatttttct

SEQ ID NO: 5997989 - DNA, 25 bp, Homo sapien
catccgaactgacgtcttctacctc

SEQ ID NO: 5997990 - DNA, 25 bp, Homo sapien
gtagtgcacacctcgatcgcggagg

SEQ ID NO: 5997991 - DNA, 25 bp, Homo sapien
gacgtcttctacctctatatccatt

SEQ ID NO: 5997992 - DNA, 25 bp, Homo sapien
tcttttctttttattcttcgtattc

SEQ ID NO: 5997993 - DNA, 25 bp, Homo sapien
tgtctcctagtgatgccaaaagatc

SEQ ID NO: 5997994 - DNA, 25 bp, Homo sapien
gcggaggttggagacatagaggacg

SEQ ID NO: 5997995 - DNA, 25 bp, Homo sapien
tgccagttttctttcaatttcagcg

SEQ ID NO: 5997996 - DNA, 25 bp, Homo sapien
tccgaactgacgtcttctacctcta

SEQ ID NO: 5997997 - DNA, 25 bp, Homo sapien
ttttctttttcgctttagtagacca

SEQ ID NO: 5997998 - DNA, 25 bp, Homo sapien
ctgctatcttcacgtggttgaatag

SEQ ID NO: 5997999 - DNA, 25 bp, Homo sapien
ctttttcgctttagtagaccaatct

SEQ ID NO: 5998000 - DNA, 25 bp, Homo sapien
ccatttctttccgtatctcttccat

SEQ ID NO: 5998001 - DNA, 25 bp, Homo sapien
caaatttctcgagatcggagagatt

SEQ ID NO: 5998002 - DNA, 25 bp, Homo sapien
gtttatgtggtttttcaattgcttt

SEQ ID NO: 5998003 - DNA, 25 bp, Homo sapien
cgaactgacgtcttctacctctata

SEQ ID NO: 5998004 - DNA, 25 bp, Homo sapien
ttttcactacgtttttcactgccgc

SEQ ID NO: 5998005 - DNA, 25 bp, Homo sapien
atggtttggtgtcactatattcttt

SEQ ID NO: 5998006 - DNA, 25 bp, Homo sapien
gaccaatcttcatcgtcatccgttt

SEQ ID NO: 5998007 - DNA, 25 bp, Homo sapien
gcttatttcgactatcaaatgattc

SEQ ID NO: 5998008 - DNA, 25 bp, Homo sapien
acgtttttcactgccgcatgccctg

SEQ ID NO: 5998009 - DNA, 25 bp, Homo sapien
atgttgagattgtcatcttcacttt

SEQ ID NO: 5998010 - DNA, 25 bp, Homo sapien
ctttcaatttcagcgagttcagctt

SEQ ID NO: 5998011 - DNA, 25 bp, Homo sapien
tgagattgtcatcttcactttcgtc

SEQ ID NO: 5998012 - DNA, 25 bp, Homo sapien
gtctttagtatcatcgaacgattca

SEQ ID NO: 5998013 - DNA, 25 bp, Homo sapien
agatcaatatcttctttttctttaa

SEQ ID NO: 5998014 - DNA, 25 bp, Homo sapien
attactccgtttgtctttagtatca

SEQ ID NO: 5998015 - DNA, 25 bp, Homo sapien
cctcgatcgcggaggttggagacat

SEQ ID NO: 5998016 - DNA, 25 bp, Homo sapien
tttagtgtttatgtggtttttcaat

SEQ ID NO: 5998017 - DNA, 25 bp, Homo sapien
ttttcactgccgcatgccctgctat

SEQ ID NO: 5998018 - DNA, 25 bp, Homo sapien
ggaggttggagacatagaggacggt

SEQ ID NO: 5998019 - DNA, 25 bp, Homo sapien
actatcaaatgattctccgcatgta

SEQ ID NO: 5998020 - DNA, 25 bp, Homo sapien
ttcatccgaactgacgtcttctacc

SEQ ID NO: 5998021 - DNA, 25 bp, Homo sapien
atgcttgcagatcaatatcttcttt

SEQ ID NO: 5998022 - DNA, 25 bp, Homo sapien
tatttttcttatgcagtttagtgtt

SEQ ID NO: 5998023 - DNA, 25 bp, Homo sapien
tgctttttgtggatttagaattctt

SEQ ID NO: 5998024 - DNA, 25 bp, Homo sapien
ctttcatctgctgaatcaaatttct

SEQ ID NO: 5998025 - DNA, 25 bp, Homo sapien
ctacctctatatccatttctatgtt

SEQ ID NO: 5998026 - DNA, 25 bp, Homo sapien
aagacgattctgccagttttctttc

SEQ ID NO: 5998027 - DNA, 25 bp, Homo sapien
tcttcacgtggttgaatagcttatt

SEQ ID NO: 5998028 - DNA, 25 bp, Homo sapien
atccatttctatgttgagattgtca

SEQ ID NO: 5998029 - DNA, 25 bp, Homo sapien
ctccgtttgtctttagtatcatcga

SEQ ID NO: 5998030 - DNA, 25 bp, Homo sapien
ctctatatccatttctatgttgaga

SEQ ID NO: 5998031 - DNA, 25 bp, Homo sapien
ttcgctttagtagaccaatcttcat

SEQ ID NO: 5998032 - DNA, 25 bp, Homo sapien
ttctgtgtcaacctttgcttttttt

SEQ ID NO: 5998033 - DNA, 25 bp, Homo sapien
ctatattcttttggtcttgactttc

SEQ ID NO: 5998034 - DNA, 25 bp, Homo sapien
caacccaagcgttatgttttcctct

SEQ ID NO: 5998035 - DNA, 25 bp, Homo sapien
ttttctttttattcttcgtattcac

SEQ ID NO: 5998036 - DNA, 25 bp, Homo sapien
ccatttctatgttgagattgtcatc

SEQ ID NO: 5998037 - DNA, 25 bp, Homo sapien
ttcgactatcaaatgattctccgca

SEQ ID NO: 5998038 - DNA, 25 bp, Homo sapien
gtatctcttccatatttttcttatg

SEQ ID NO: 5998039 - DNA, 25 bp, Homo sapien
aacactttcatctgctgaatcaaat

SEQ ID NO: 5998040 - DNA, 25 bp, Homo sapien
tcatcttcactttcgtcttcagaag

SEQ ID NO: 5998041 - DNA, 25 bp, Homo sapien
gtttctgtgtcaacctttgcttttt

SEQ ID NO: 5998042 - DNA, 25 bp, Homo sapien
catctgctgaatcaaatttctcgag

SEQ ID NO: 5998043 - DNA, 25 bp, Homo sapien
tctgctgaatcaaatttctcgagat

SEQ ID NO: 5998044 - DNA, 25 bp, Homo sapien
ttcatcgtcatccgtttgtaagccc

SEQ ID NO: 5998045 - DNA, 25 bp, Homo sapien
gttgagattgtcatcttcactttcg

SEQ ID NO: 5998046 - DNA, 25 bp, Homo sapien
atttcagcgagttcagcttgcaatg

SEQ ID NO: 5998047 - DNA, 25 bp, Homo sapien
tgtcatcttcactttcgtcttcaga

SEQ ID NO: 5998048 - DNA, 25 bp, Homo sapien
aatagcttatttcgactatcaaatg

SEQ ID NO: 5998049 - DNA, 25 bp, Homo sapien
actcattactccgtttgtctttagt

SEQ ID NO: 5998050 - DNA, 25 bp, Homo sapien
tgtacattttcatccgaactgacgt

SEQ ID NO: 5998051 - DNA, 25 bp, Homo sapien
aacgattcagattcctctgtttctg

SEQ ID NO: 5998052 - DNA, 25 bp, Homo sapien
agtagaccaatcttcatcgtcatcc

SEQ ID NO: 5998053 - DNA, 25 bp, Homo sapien
gacgattctgccagttttctttcaa

SEQ ID NO: 5998054 - DNA, 25 bp, Homo sapien
aactgacgtcttctacctctatatc

SEQ ID NO: 5998055 - DNA, 25 bp, Homo sapien
aaagatcatccaactcattactccg

SEQ ID NO: 5998056 - DNA, 25 bp, Homo sapien
cttgactttctttcttttcactacg

SEQ ID NO: 5998057 - DNA, 25 bp, Homo sapien
gctatcttcacgtggttgaatagct

SEQ ID NO: 5998058 - DNA, 25 bp, Homo sapien
gcagatcaatatcttctttttcttt

SEQ ID NO: 5998059 - DNA, 25 bp, Homo sapien
gtcttgttgcagataaaacactcgt

SEQ ID NO: 5998060 - DNA, 25 bp, Homo sapien
cttgttgcagataaaacactcgtaa

SEQ ID NO: 5998061 - DNA, 25 bp, Homo sapien
gatcggagagattatccaacccaag

SEQ ID NO: 5998062 - DNA, 25 bp, Homo sapien
ctttttctttaacactttcatctgc

SEQ ID NO: 5998063 - DNA, 25 bp, Homo sapien
aatcttcatcgtcatccgtttgtaa

SEQ ID NO: 5998064 - DNA, 25 bp, Homo sapien
tacattttcatccgaactgacgtct

SEQ ID NO: 5998065 - DNA, 25 bp, Homo sapien
ccagttttctttcaatttcagcgag

SEQ ID NO: 5998066 - DNA, 25 bp, Homo sapien
tggatttagaattctttttaggttg

SEQ ID NO: 5998067 - DNA, 25 bp, Homo sapien
ttagaattctttttaggttgtttgc

SEQ ID NO: 5998068 - DNA, 25 bp, Homo sapien
ctcttccatatttttcttatgcagt

SEQ ID NO: 5998069 - DNA, 25 bp, Homo sapien
catagaggacggtagagtcgacaag

SEQ ID NO: 5998070 - DNA, 25 bp, Homo sapien
ttctttccgtatctcttccatattt

SEQ ID NO: 5998071 - DNA, 25 bp, Homo sapien
tctcgagatcggagagattatccaa

SEQ ID NO: 5998072 - DNA, 25 bp, Homo sapien
ttcacgtggttgaatagcttatttc

SEQ ID NO: 5998073 - DNA, 25 bp, Homo sapien
tggttgaatagcttatttcgactat

SEQ ID NO: 5998074 - DNA, 25 bp, Homo sapien
agcttgcaatgcttgcagatcaata

SEQ ID NO: 5998075 - DNA, 25 bp, Homo sapien
ttctccgcatgtagtgcacacctcg

SEQ ID NO: 5998076 - DNA, 25 bp, Homo sapien
ttctatgttgagattgtcatcttca

SEQ ID NO: 5998077 - DNA, 25 bp, Homo sapien
ttcactacgtttttcactgccgcat

SEQ ID NO: 5998078 - DNA, 25 bp, Homo sapien
tcttttggtcttgactttctttctt

SEQ ID NO: 5998079 - DNA, 25 bp, Homo sapien
catatttttcttatgcagtttagtg

SEQ ID NO: 5998080 - DNA, 25 bp, Homo sapien
ttatgtggtttttcaattgcttttc

SEQ ID NO: 5998081 - DNA, 25 bp, Homo sapien
ttctttttctttaacactttcatct

SEQ ID NO: 5998082 - DNA, 25 bp, Homo sapien
ttttcctcttccatttctttccgta

SEQ ID NO: 5998083 - DNA, 25 bp, Homo sapien
catccaactcattactccgtttgtc

SEQ ID NO: 5998084 - DNA, 25 bp, Homo sapien
gcgttatgttttcctcttccatttc

SEQ ID NO: 5998085 - DNA, 25 bp, Homo sapien
tcgtcttcagaagacgattctgcca

SEQ ID NO: 5998086 - DNA, 25 bp, Homo sapien
atgcagtttagtgtttatgtggttt

SEQ ID NO: 5998087 - DNA, 25 bp, Homo sapien
atttctatgttgagattgtcatctt

SEQ ID NO: 5998088 - DNA, 25 bp, Homo sapien
tatccaacccaagcgttatgttttc

SEQ ID NO: 5998089 - DNA, 25 bp, Homo sapien
tggagacatagaggacggtagagtc

SEQ ID NO: 5998090 - DNA, 25 bp, Homo sapien
gccgcatgccctgctatcttcacgt

SEQ ID NO: 5998091 - DNA, 25 bp, Homo sapien
ctgtttctgtgtcaacctttgcttt

SEQ ID NO: 5998092 - DNA, 25 bp, Homo sapien
tccgacttaaatgtcttgttgcaga

SEQ ID NO: 5998093 - DNA, 25 bp, Homo sapien
agattcctctgtttctgtgtcaacc

SEQ ID NO: 5998094 - DNA, 25 bp, Homo sapien
tcatcgaacgattcagattcctctg

SEQ ID NO: 5998095 - DNA, 25 bp, Homo sapien
gcttgcagatcaatatcttcttttt

SEQ ID NO: 5998096 - DNA, 25 bp, Homo sapien
ttttcaattgcttttccgacttaaa

SEQ ID NO: 5998097 - DNA, 25 bp, Homo sapien
cacacctcgatcgcggaggttggag

SEQ ID NO: 5998098 - DNA, 25 bp, Homo sapien
tgcttttccgacttaaatgtcttgt

SEQ ID NO: 5998099 - DNA, 25 bp, Homo sapien
tagaccaatcttcatcgtcatccgt

SEQ ID NO: 5998100 - DNA, 25 bp, Homo sapien
tatcatcgaacgattcagattcctc

SEQ ID NO: 5998101 - DNA, 25 bp, Homo sapien
ggacggtagagtcgacaaggacgga

SEQ ID NO: 5998102 - DNA, 25 bp, Homo sapien
ttatttcgactatcaaatgattctc

SEQ ID NO: 5998103 - DNA, 25 bp, Homo sapien
aaggacggagtgctttttgtggatt

SEQ ID NO: 5998104 - DNA, 25 bp, Homo sapien
tcgatcgcggaggttggagacatag

SEQ ID NO: 5998105 - DNA, 25 bp, Homo sapien
agatcatccaactcattactccgtt

SEQ ID NO: 5998106 - DNA, 25 bp, Homo sapien
atgtggtttttcaattgcttttccg

SEQ ID NO: 5998107 - DNA, 25 bp, Homo sapien
ctctgtttctgtgtcaacctttgct

SEQ ID NO: 5998108 - DNA, 25 bp, Homo sapien
tgtgtcaacctttgctttttttttc

SEQ ID NO: 5998109 - DNA, 25 bp, Homo sapien
cgcatgccctgctatcttcacgtgg

SEQ ID NO: 5998110 - DNA, 25 bp, Homo sapien
aatttctcgagatcggagagattat

SEQ ID NO: 5998111 - DNA, 25 bp, Homo sapien
gcgagttcagcttgcaatgcttgca

SEQ ID NO: 5998112 - DNA, 25 bp, Homo sapien
atattcttttggtcttgactttctt

SEQ ID NO: 5998113 - DNA, 25 bp, Homo sapien
tatcttctttttctttaacactttc

SEQ ID NO: 5998114 - DNA, 25 bp, Homo sapien
gttcagcttgcaatgcttgcagatc

SEQ ID NO: 5998115 - DNA, 25 bp, Homo sapien
ctttccgtatctcttccatattttt

SEQ ID NO: 5998116 - DNA, 25 bp, Homo sapien
agtgctttttgtggatttagaattc

SEQ ID NO: 5998117 - DNA, 25 bp, Homo sapien
tttcttatgcagtttagtgtttatg

SEQ ID NO: 5998118 - DNA, 25 bp, Homo sapien
cgtggttgaatagcttatttcgact

SEQ ID NO: 5998119 - DNA, 25 bp, Homo sapien
caaaagatcatccaactcattactc

SEQ ID NO: 5998120 - DNA, 25 bp, Homo sapien
atctcttccatatttttcttatgca

SEQ ID NO: 5998121 - DNA, 25 bp, Homo sapien
tcttttcactacgtttttcactgcc

SEQ ID NO: 5998122 - DNA, 25 bp, Homo sapien
attgtcatcttcactttcgtcttca

SEQ ID NO: 5998123 - DNA, 25 bp, Homo sapien
tcagcttgcaatgcttgcagatcaa

SEQ ID NO: 5998124 - DNA, 25 bp, Homo sapien
ctatgttgagattgtcatcttcact

SEQ ID NO: 5998125 - DNA, 25 bp, Homo sapien
atcttcactttcgtcttcagaagac

SEQ ID NO: 5998126 - DNA, 25 bp, Homo sapien
ctttttattcttcgtattcacatgt

SEQ ID NO: 5998127 - DNA, 25 bp, Homo sapien
tcagattcctctgtttctgtgtcaa

SEQ ID NO: 5998128 - DNA, 25 bp, Homo sapien
tctcctagtgatgccaaaagatcat

SEQ ID NO: 5998129 - DNA, 25 bp, Homo sapien
agagattatccaacccaagcgttat

SEQ ID NO: 5998130 - DNA, 25 bp, Homo sapien
atcgaacgattcagattcctctgtt

SEQ ID NO: 5998131 - DNA, 25 bp, Homo sapien
ctagtgatgccaaaagatcatccaa

SEQ ID NO: 5998132 - DNA, 25 bp, Homo sapien
tcttatgcagtttagtgtttatgtg

SEQ ID NO: 5998133 - DNA, 25 bp, Homo sapien
ctgacgtcttctacctctatatcca

SEQ ID NO: 5998134 - DNA, 25 bp, Homo sapien
tccaacccaagcgttatgttttcct

SEQ ID NO: 5998135 - DNA, 25 bp, Homo sapien
agattgtcatcttcactttcgtctt

SEQ ID NO: 5998136 - DNA, 25 bp, Homo sapien
cttgtctcctagtgatgccaaaaga

SEQ ID NO: 5998137 - DNA, 25 bp, Homo sapien
agttttctttcaatttcagcgagtt

SEQ ID NO: 5998138 - DNA, 25 bp, Homo sapien
tttggtcttgactttctttcttttc

SEQ ID NO: 5998139 - DNA, 25 bp, Homo sapien
agtatcatcgaacgattcagattcc

SEQ ID NO: 5998140 - DNA, 25 bp, Homo sapien
tcagaagacgattctgccagttttc

SEQ ID NO: 5998141 - DNA, 25 bp, Homo sapien
ttagtagaccaatcttcatcgtcat

SEQ ID NO: 5998142 - DNA, 25 bp, Homo sapien
atcaaatttctcgagatcggagaga

SEQ ID NO: 5998143 - DNA, 25 bp, Homo sapien
acccaagcgttatgttttcctcttc

SEQ ID NO: 5998144 - DNA, 25 bp, Homo sapien
aaatgattctccgcatgtagtgcac

SEQ ID NO: 5998145 - DNA, 25 bp, Homo sapien
tcgagatcggagagattatccaacc

SEQ ID NO: 5998146 - DNA, 25 bp, Homo sapien
tttggtgtcactatattcttttggt

SEQ ID NO: 5998147 - DNA, 25 bp, Homo sapien
gtcgacaaggacggagtgctttttg

SEQ ID NO: 5998148 - DNA, 25 bp, Homo sapien
gagtcgacaaggacggagtgctttt

SEQ ID NO: 5998149 - DNA, 25 bp, Homo sapien
gttatgttttcctcttccatttctt

SEQ ID NO: 5998150 - DNA, 25 bp, Homo sapien
ggagagattatccaacccaagcgtt

SEQ ID NO: 5998151 - DNA, 25 bp, Homo sapien
cgacaaggacggagtgctttttgtg

SEQ ID NO: 5998152 - DNA, 25 bp, Homo sapien
acaaggacggagtgctttttgtgga

SEQ ID NO: 5998153 - DNA, 25 bp, Homo sapien
gaatcaaatttctcgagatcggaga

SEQ ID NO: 5998154 - DNA, 25 bp, Homo sapien
tgttttcctcttccatttctttccg

SEQ ID NO: 5998155 - DNA, 25 bp, Homo sapien
gtgtcactatattcttttggtcttg

SEQ ID NO: 5998156 - DNA, 25 bp, Homo sapien
tttgtaagcccttgtctcctagtga

SEQ ID NO: 5998157 - DNA, 25 bp, Homo sapien
atatccatttctatgttgagattgt

SEQ ID NO: 5998158 - DNA, 25 bp, Homo sapien
ttcatctgctgaatcaaatttctcg

SEQ ID NO: 5998159 - DNA, 25 bp, Homo sapien
tcttcatcgtcatccgtttgtaagc

SEQ ID NO: 5998160 - DNA, 25 bp, Homo sapien
ttctttttattcttcgtattcacat

SEQ ID NO: 5998161 - DNA, 25 bp, Homo sapien
gttggagacatagaggacggtagag

SEQ ID NO: 5998162 - DNA, 25 bp, Homo sapien
atttcgactatcaaatgattctccg

SEQ ID NO: 5998163 - DNA, 25 bp, Homo sapien
ttttcgctttagtagaccaatcttc

SEQ ID NO: 5998164 - DNA, 25 bp, Homo sapien
acggagtgctttttgtggatttaga

SEQ ID NO: 5998165 - DNA, 25 bp, Homo sapien
ttctttttcgctttagtagaccaat

SEQ ID NO: 5998166 - DNA, 25 bp, Homo sapien
ttttctttcaatttcagcgagttca

SEQ ID NO: 5998167 - DNA, 25 bp, Homo sapien
tccatatttttcttatgcagtttag

SEQ ID NO: 5998168 - DNA, 25 bp, Homo sapien
caatttcagcgagttcagcttgcaa

SEQ ID NO: 5998169 - DNA, 25 bp, Homo sapien
actttcgtcttcagaagacgattct

SEQ ID NO: 5998170 - DNA, 25 bp, Homo sapien
cctcttccatttctttccgtatctc

SEQ ID NO: 5998171 - DNA, 25 bp, Homo sapien
cttcactttcgtcttcagaagacga

SEQ ID NO: 5998172 - DNA, 25 bp, Homo sapien
ttctttcaatttcagcgagttcagc

SEQ ID NO: 5998173 - DNA, 25 bp, Homo sapien
ttcaatttcagcgagttcagcttgc

SEQ ID NO: 5998174 - DNA, 25 bp, Homo sapien
cttttccgacttaaatgtcttgttg

SEQ ID NO: 5998175 - DNA, 25 bp, Homo sapien
cataaacactaaactgcataagaaa

SEQ ID NO: 5998176 - DNA, 25 bp, Homo sapien
aataagctattcaaccacgtgaaga

SEQ ID NO: 5998177 - DNA, 25 bp, Homo sapien
ctccaacctccgcgatcgaggtgtg

SEQ ID NO: 5998178 - DNA, 25 bp, Homo sapien
aaaagcactccgtccttgtcgactc

SEQ ID NO: 5998179 - DNA, 25 bp, Homo sapien
caaaagaatatagtgacaccaaacc

SEQ ID NO: 5998180 - DNA, 25 bp, Homo sapien
cctaaaaagaattctaaatccacaa

SEQ ID NO: 5998181 - DNA, 25 bp, Homo sapien
tgggttggataatctctccgatctc

SEQ ID NO: 5998182 - DNA, 25 bp, Homo sapien
gaatcatttgatagtcgaaataagc

SEQ ID NO: 5998183 - DNA, 25 bp, Homo sapien
cacataaacactaaactgcataaga

SEQ ID NO: 5998184 - DNA, 25 bp, Homo sapien
aaatttgattcagcagatgaaagtg

SEQ ID NO: 5998185 - DNA, 25 bp, Homo sapien
tagaaatggatatagaggtagaaga

SEQ ID NO: 5998186 - DNA, 25 bp, Homo sapien
ctaaactgcataagaaaaatatgga

SEQ ID NO: 5998187 - DNA, 25 bp, Homo sapien
acaagggcttacaaacggatgacga

SEQ ID NO: 5998188 - DNA, 25 bp, Homo sapien
gaaagaaagtcaagaccaaaagaat

SEQ ID NO: 5998189 - DNA, 25 bp, Homo sapien
atatggaagagatacggaaagaaat

SEQ ID NO: 5998190 - DNA, 25 bp, Homo sapien
actacatgcggagaatcatttgata

SEQ ID NO: 5998191 - DNA, 25 bp, Homo sapien
cggaaaagcaattgaaaaaccacat

SEQ ID NO: 5998192 - DNA, 25 bp, Homo sapien
agacaagggcttacaaacggatgac

SEQ ID NO: 5998193 - DNA, 25 bp, Homo sapien
aacatagaaatggatatagaggtag

SEQ ID NO: 5998194 - DNA, 25 bp, Homo sapien
gcactacatgcggagaatcatttga

SEQ ID NO: 5998195 - DNA, 25 bp, Homo sapien
gtcagttcggatgaaaatgtacatg

SEQ ID NO: 5998196 - DNA, 25 bp, Homo sapien
taaaaagaattctaaatccacaaaa

SEQ ID NO: 5998197 - DNA, 25 bp, Homo sapien
ctaccgtcctctatgtctccaacct

SEQ ID NO: 5998198 - DNA, 25 bp, Homo sapien
agaaaaagaagatattgatctgcaa

SEQ ID NO: 5998199 - DNA, 25 bp, Homo sapien
cgtccttgtcgactctaccgtcctc

SEQ ID NO: 5998200 - DNA, 25 bp, Homo sapien
caaaaagcactccgtccttgtcgac

SEQ ID NO: 5998201 - DNA, 25 bp, Homo sapien
caagaccaaaagaatatagtgacac

SEQ ID NO: 5998202 - DNA, 25 bp, Homo sapien
ctatgtctccaacctccgcgatcga

SEQ ID NO: 5998203 - DNA, 25 bp, Homo sapien
aaagaagatattgatctgcaagcat

SEQ ID NO: 5998204 - DNA, 25 bp, Homo sapien
cttgtcgactctaccgtcctctatg

SEQ ID NO: 5998205 - DNA, 25 bp, Homo sapien
agctattcaaccacgtgaagatagc

SEQ ID NO: 5998206 - DNA, 25 bp, Homo sapien
gtgttttatctgcaacaagacattt

SEQ ID NO: 5998207 - DNA, 25 bp, Homo sapien
ttacaaacggatgacgatgaagatt

SEQ ID NO: 5998208 - DNA, 25 bp, Homo sapien
agaggaaaacataacgcttgggttg

SEQ ID NO: 5998209 - DNA, 25 bp, Homo sapien
cttctgaagacgaaagtgaagatga

SEQ ID NO: 5998210 - DNA, 25 bp, Homo sapien
aattgaaagaaaactggcagaatcg

SEQ ID NO: 5998211 - DNA, 25 bp, Homo sapien
taaagacaaacggagtaatgagttg

SEQ ID NO: 5998212 - DNA, 25 bp, Homo sapien
gtcttctgaagacgaaagtgaagat

SEQ ID NO: 5998213 - DNA, 25 bp, Homo sapien
cagttcggatgaaaatgtacatgtg

SEQ ID NO: 5998214 - DNA, 25 bp, Homo sapien
acatgtgaatacgaagaataaaaag

SEQ ID NO: 5998215 - DNA, 25 bp, Homo sapien
aaatgtacatgtgaatacgaagaat

SEQ ID NO: 5998216 - DNA, 25 bp, Homo sapien
agaccaaaagaatatagtgacacca

SEQ ID NO: 5998217 - DNA, 25 bp, Homo sapien
aatccacaaaaagcactccgtcctt

SEQ ID NO: 5998218 - DNA, 25 bp, Homo sapien
tgcggagaatcatttgatagtcgaa

SEQ ID NO: 5998219 - DNA, 25 bp, Homo sapien
cgtagtgaaaagaaagaaagtcaag

SEQ ID NO: 5998220 - DNA, 25 bp, Homo sapien
gtctccaacctccgcgatcgaggtg

SEQ ID NO: 5998221 - DNA, 25 bp, Homo sapien
tggaagaggaaaacataacgcttgg

SEQ ID NO: 5998222 - DNA, 25 bp, Homo sapien
gaggtagaagacgtcagttcggatg

SEQ ID NO: 5998223 - DNA, 25 bp, Homo sapien
atgtgaatacgaagaataaaaagaa

SEQ ID NO: 5998224 - DNA, 25 bp, Homo sapien
tttatctgcaacaagacatttaagt

SEQ ID NO: 5998225 - DNA, 25 bp, Homo sapien
aatctcaacatagaaatggatatag

SEQ ID NO: 5998226 - DNA, 25 bp, Homo sapien
tcttttggcatcactaggagacaag

SEQ ID NO: 5998227 - DNA, 25 bp, Homo sapien
aagcactccgtccttgtcgactcta

SEQ ID NO: 5998228 - DNA, 25 bp, Homo sapien
cggagaatcatttgatagtcgaaat

SEQ ID NO: 5998229 - DNA, 25 bp, Homo sapien
gcaagctgaactcgctgaaattgaa

SEQ ID NO: 5998230 - DNA, 25 bp, Homo sapien
aggaaaacataacgcttgggttgga

SEQ ID NO: 5998231 - DNA, 25 bp, Homo sapien
attcaaccacgtgaagatagcaggg

SEQ ID NO: 5998232 - DNA, 25 bp, Homo sapien
gaatacgaagaataaaaagaaaaga

SEQ ID NO: 5998233 - DNA, 25 bp, Homo sapien
aagggcttacaaacggatgacgatg

SEQ ID NO: 5998234 - DNA, 25 bp, Homo sapien
tccacaaaaagcactccgtccttgt

SEQ ID NO: 5998235 - DNA, 25 bp, Homo sapien
tctaaatccacaaaaagcactccgt

SEQ ID NO: 5998236 - DNA, 25 bp, Homo sapien
atttgattcagcagatgaaagtgtt

SEQ ID NO: 5998237 - DNA, 25 bp, Homo sapien
cgatctcgagaaatttgattcagca

SEQ ID NO: 5998238 - DNA, 25 bp, Homo sapien
actaaagacaaacggagtaatgagt

SEQ ID NO: 5998239 - DNA, 25 bp, Homo sapien
aagaaagaaagtcaagaccaaaaga

SEQ ID NO: 5998240 - DNA, 25 bp, Homo sapien
aagaaagtcaagaccaaaagaatat

SEQ ID NO: 5998241 - DNA, 25 bp, Homo sapien
acgagtgttttatctgcaacaagac

SEQ ID NO: 5998242 - DNA, 25 bp, Homo sapien
gatacggaaagaaatggaagaggaa

SEQ ID NO: 5998243 - DNA, 25 bp, Homo sapien
gtgtgcactacatgcggagaatcat

SEQ ID NO: 5998244 - DNA, 25 bp, Homo sapien
cagtgaaaaacgtagtgaaaagaaa

SEQ ID NO: 5998245 - DNA, 25 bp, Homo sapien
aaagaatatagtgacaccaaaccat

SEQ ID NO: 5998246 - DNA, 25 bp, Homo sapien
gtacatgtgaatacgaagaataaaa

SEQ ID NO: 5998247 - DNA, 25 bp, Homo sapien
ggagacaagggcttacaaacggatg

SEQ ID NO: 5998248 - DNA, 25 bp, Homo sapien
tgtcgactctaccgtcctctatgtc

SEQ ID NO: 5998249 - DNA, 25 bp, Homo sapien
aaagaaaaagaagatattgatctgc

SEQ ID NO: 5998250 - DNA, 25 bp, Homo sapien
aagtcaagaccaaaagaatatagtg

SEQ ID NO: 5998251 - DNA, 25 bp, Homo sapien
tctgcaacaagacatttaagtcgga

SEQ ID NO: 5998252 - DNA, 25 bp, Homo sapien
acgtgaagatagcagggcatgcggc

SEQ ID NO: 5998253 - DNA, 25 bp, Homo sapien
atactaaagacaaacggagtaatga

SEQ ID NO: 5998254 - DNA, 25 bp, Homo sapien
tgaaaaacgtagtgaaaagaaagaa

SEQ ID NO: 5998255 - DNA, 25 bp, Homo sapien
aagacgaaagtgaagatgacaatct

SEQ ID NO: 5998256 - DNA, 25 bp, Homo sapien
aatggatatagaggtagaagacgtc

SEQ ID NO: 5998257 - DNA, 25 bp, Homo sapien
gactctaccgtcctctatgtctcca

SEQ ID NO: 5998258 - DNA, 25 bp, Homo sapien
aagacaaacggagtaatgagttgga

SEQ ID NO: 5998259 - DNA, 25 bp, Homo sapien
tctgaatcgttcgatgatactaaag

SEQ ID NO: 5998260 - DNA, 25 bp, Homo sapien
tcctctatgtctccaacctccgcga

SEQ ID NO: 5998261 - DNA, 25 bp, Homo sapien
caagcattgcaagctgaactcgctg

SEQ ID NO: 5998262 - DNA, 25 bp, Homo sapien
cgagaaatttgattcagcagatgaa

SEQ ID NO: 5998263 - DNA, 25 bp, Homo sapien
tctgcaagcattgcaagctgaactc

SEQ ID NO: 5998264 - DNA, 25 bp, Homo sapien
aagagatacggaaagaaatggaaga

SEQ ID NO: 5998265 - DNA, 25 bp, Homo sapien
gcactccgtccttgtcgactctacc

SEQ ID NO: 5998266 - DNA, 25 bp, Homo sapien
ggaagagatacggaaagaaatggaa

SEQ ID NO: 5998267 - DNA, 25 bp, Homo sapien
ataacgcttgggttggataatctct

SEQ ID NO: 5998268 - DNA, 25 bp, Homo sapien
cacagaaacagaggaatctgaatcg

SEQ ID NO: 5998269 - DNA, 25 bp, Homo sapien
ttgaaagaaaactggcagaatcgtc

SEQ ID NO: 5998270 - DNA, 25 bp, Homo sapien
attctaaatccacaaaaagcactcc

SEQ ID NO: 5998271 - DNA, 25 bp, Homo sapien
gcagatgaaagtgttaaagaaaaag

SEQ ID NO: 5998272 - DNA, 25 bp, Homo sapien
tatctgcaacaagacatttaagtcg

SEQ ID NO: 5998273 - DNA, 25 bp, Homo sapien
agaatcgtcttctgaagacgaaagt

SEQ ID NO: 5998274 - DNA, 25 bp, Homo sapien
actaggagacaagggcttacaaacg

SEQ ID NO: 5998275 - DNA, 25 bp, Homo sapien
gtgcactacatgcggagaatcattt

SEQ ID NO: 5998276 - DNA, 25 bp, Homo sapien
accaaaagaatatagtgacaccaaa

SEQ ID NO: 5998277 - DNA, 25 bp, Homo sapien
aaagtgaagatgacaatctcaacat

SEQ ID NO: 5998278 - DNA, 25 bp, Homo sapien
gaaaacataacgcttgggttggata

SEQ ID NO: 5998279 - DNA, 25 bp, Homo sapien
gagtgttttatctgcaacaagacat

SEQ ID NO: 5998280 - DNA, 25 bp, Homo sapien
aacgcttgggttggataatctctcc

SEQ ID NO: 5998281 - DNA, 25 bp, Homo sapien
aaggttgacacagaaacagaggaat

SEQ ID NO: 5998282 - DNA, 25 bp, Homo sapien
aaaaagaagatattgatctgcaagc

SEQ ID NO: 5998283 - DNA, 25 bp, Homo sapien
gatctgcaagcattgcaagctgaac

SEQ ID NO: 5998284 - DNA, 25 bp, Homo sapien
tcggatgaaaatgtacatgtgaata

SEQ ID NO: 5998285 - DNA, 25 bp, Homo sapien
tacggaaagaaatggaagaggaaaa

SEQ ID NO: 5998286 - DNA, 25 bp, Homo sapien
gtcaagaccaaaagaatatagtgac

SEQ ID NO: 5998287 - DNA, 25 bp, Homo sapien
ttaaagaaaaagaagatattgatct

SEQ ID NO: 5998288 - DNA, 25 bp, Homo sapien
aaaaagcaaaggttgacacagaaac

SEQ ID NO: 5998289 - DNA, 25 bp, Homo sapien
ctctaccgtcctctatgtctccaac

SEQ ID NO: 5998290 - DNA, 25 bp, Homo sapien
acgtcagttcggatgaaaatgtaca

SEQ ID NO: 5998291 - DNA, 25 bp, Homo sapien
atctcgagaaatttgattcagcaga

SEQ ID NO: 5998292 - DNA, 25 bp, Homo sapien
tgaatcgttcgatgatactaaagac

SEQ ID NO: 5998293 - DNA, 25 bp, Homo sapien
tgagttggatgatcttttggcatca

SEQ ID NO: 5998294 - DNA, 25 bp, Homo sapien
cggagtaatgagttggatgatcttt

SEQ ID NO: 5998295 - DNA, 25 bp, Homo sapien
tcgtcttctgaagacgaaagtgaag

SEQ ID NO: 5998296 - DNA, 25 bp, Homo sapien
tcgactctaccgtcctctatgtctc

SEQ ID NO: 5998297 - DNA, 25 bp, Homo sapien
tccgtccttgtcgactctaccgtcc

SEQ ID NO: 5998298 - DNA, 25 bp, Homo sapien
aaacggatgacgatgaagattggtc

SEQ ID NO: 5998299 - DNA, 25 bp, Homo sapien
aagctgaactcgctgaaattgaaag

SEQ ID NO: 5998300 - DNA, 25 bp, Homo sapien
tctctccgatctcgagaaatttgat

SEQ ID NO: 5998301 - DNA, 25 bp, Homo sapien
attgaaaaaccacataaacactaaa

SEQ ID NO: 5998302 - DNA, 25 bp, Homo sapien
gattcagcagatgaaagtgttaaag

SEQ ID NO: 5998303 - DNA, 25 bp, Homo sapien
ggttgacacagaaacagaggaatct

SEQ ID NO: 5998304 - DNA, 25 bp, Homo sapien
aacagaggaatctgaatcgttcgat

SEQ ID NO: 5998305 - DNA, 25 bp, Homo sapien
ttgacacagaaacagaggaatctga

SEQ ID NO: 5998306 - DNA, 25 bp, Homo sapien
gcatgcggcagtgaaaaacgtagtg

SEQ ID NO: 5998307 - DNA, 25 bp, Homo sapien
tagaggtagaagacgtcagttcgga

SEQ ID NO: 5998308 - DNA, 25 bp, Homo sapien
gatcttttggcatcactaggagaca

SEQ ID NO: 5998309 - DNA, 25 bp, Homo sapien
aatctgaatcgttcgatgatactaa

SEQ ID NO: 5998310 - DNA, 25 bp, Homo sapien
aagatgacaatctcaacatagaaat

SEQ ID NO: 5998311 - DNA, 25 bp, Homo sapien
cactaaactgcataagaaaaatatg

SEQ ID NO: 5998312 - DNA, 25 bp, Homo sapien
ctcgctgaaattgaaagaaaactgg

SEQ ID NO: 5998313 - DNA, 25 bp, Homo sapien
tgcataagaaaaatatggaagagat

SEQ ID NO: 5998314 - DNA, 25 bp, Homo sapien
cacaaaaagcactccgtccttgtcg

SEQ ID NO: 5998315 - DNA, 25 bp, Homo sapien
gaaatggatatagaggtagaagacg

SEQ ID NO: 5998316 - DNA, 25 bp, Homo sapien
catagaaatggatatagaggtagaa

SEQ ID NO: 5998317 - DNA, 25 bp, Homo sapien
gaaagtcaagaccaaaagaatatag

SEQ ID NO: 5998318 - DNA, 25 bp, Homo sapien
tccgcgatcgaggtgtgcactacat

SEQ ID NO: 5998319 - DNA, 25 bp, Homo sapien
ttgcaagctgaactcgctgaaattg

SEQ ID NO: 5998320 - DNA, 25 bp, Homo sapien
taaacactaaactgcataagaaaaa

SEQ ID NO: 5998321 - DNA, 25 bp, Homo sapien
aatcgtcttctgaagacgaaagtga

SEQ ID NO: 5998322 - DNA, 25 bp, Homo sapien
cgctgaaattgaaagaaaactggca

SEQ ID NO: 5998323 - DNA, 25 bp, Homo sapien
taagtcggaaaagcaattgaaaaac

SEQ ID NO: 5998324 - DNA, 25 bp, Homo sapien
aaaccacataaacactaaactgcat

SEQ ID NO: 5998325 - DNA, 25 bp, Homo sapien
aaactggcagaatcgtcttctgaag

SEQ ID NO: 5998326 - DNA, 25 bp, Homo sapien
gacgaaagtgaagatgacaatctca

SEQ ID NO: 5998327 - DNA, 25 bp, Homo sapien
caacctaaaaagaattctaaatcca

SEQ ID NO: 5998328 - DNA, 25 bp, Homo sapien
gaaataagctattcaaccacgtgaa

SEQ ID NO: 5998329 - DNA, 25 bp, Homo sapien
tccttgtcgactctaccgtcctcta

SEQ ID NO: 5998330 - DNA, 25 bp, Homo sapien
agcaattgaaaaaccacataaacac

SEQ ID NO: 5998331 - DNA, 25 bp, Homo sapien
gcagaatcgtcttctgaagacgaaa

SEQ ID NO: 5998332 - DNA, 25 bp, Homo sapien
actccgtccttgtcgactctaccgt

SEQ ID NO: 5998333 - DNA, 25 bp, Homo sapien
ataatctctccgatctcgagaaatt

SEQ ID NO: 5998334 - DNA, 25 bp, Homo sapien
gggcttacaaacggatgacgatgaa

SEQ ID NO: 5998335 - DNA, 25 bp, Homo sapien
agaagatattgatctgcaagcattg

SEQ ID NO: 5998336 - DNA, 25 bp, Homo sapien
gaaaatgtacatgtgaatacgaaga

SEQ ID NO: 5998337 - DNA, 25 bp, Homo sapien
aaatatggaagagatacggaaagaa

SEQ ID NO: 5998338 - DNA, 25 bp, Homo sapien
aatgagttggatgatcttttggcat

SEQ ID NO: 5998339 - DNA, 25 bp, Homo sapien
gggcatgcggcagtgaaaaacgtag

SEQ ID NO: 5998340 - DNA, 25 bp, Homo sapien
gacaaacggagtaatgagttggatg

SEQ ID NO: 5998341 - DNA, 25 bp, Homo sapien
gatgatactaaagacaaacggagta

SEQ ID NO: 5998342 - DNA, 25 bp, Homo sapien
gaaagaaaactggcagaatcgtctt

SEQ ID NO: 5998343 - DNA, 25 bp, Homo sapien
actggcagaatcgtcttctgaagac

SEQ ID NO: 5998344 - DNA, 25 bp, Homo sapien
aagatattgatctgcaagcattgca

SEQ ID NO: 5998345 - DNA, 25 bp, Homo sapien
agcaaaggttgacacagaaacagag

SEQ ID NO: 5998346 - DNA, 25 bp, Homo sapien
ctattcaaccacgtgaagatagcag

SEQ ID NO: 5998347 - DNA, 25 bp, Homo sapien
tctccgatctcgagaaatttgattc

SEQ ID NO: 5998348 - DNA, 25 bp, Homo sapien
gtgaatacgaagaataaaaagaaaa

SEQ ID NO: 5998349 - DNA, 25 bp, Homo sapien
tgcaagcattgcaagctgaactcgc

SEQ ID NO: 5998350 - DNA, 25 bp, Homo sapien
ggatgatcttttggcatcactagga

SEQ ID NO: 5998351 - DNA, 25 bp, Homo sapien
atcgaggtgtgcactacatgcggag

SEQ ID NO: 5998352 - DNA, 25 bp, Homo sapien
gaaaagaaagaaagtcaagaccaaa

SEQ ID NO: 5998353 - DNA, 25 bp, Homo sapien
gaaagtgttaaagaaaaagaagata

SEQ ID NO: 5998354 - DNA, 25 bp, Homo sapien
tgaaaaaccacataaacactaaact

SEQ ID NO: 5998355 - DNA, 25 bp, Homo sapien
cagggcatgcggcagtgaaaaacgt

SEQ ID NO: 5998356 - DNA, 25 bp, Homo sapien
gagaatcatttgatagtcgaaataa

SEQ ID NO: 5998357 - DNA, 25 bp, Homo sapien
aatcgttcgatgatactaaagacaa

SEQ ID NO: 5998358 - DNA, 25 bp, Homo sapien
aagaaaactggcagaatcgtcttct

SEQ ID NO: 5998359 - DNA, 25 bp, Homo sapien
tctcaacatagaaatggatatagag

SEQ ID NO: 5998360 - DNA, 25 bp, Homo sapien
gacacagaaacagaggaatctgaat

SEQ ID NO: 5998361 - DNA, 25 bp, Homo sapien
caacaagacatttaagtcggaaaag

SEQ ID NO: 5998362 - DNA, 25 bp, Homo sapien
cagcagatgaaagtgttaaagaaaa

SEQ ID NO: 5998363 - DNA, 25 bp, Homo sapien
gaaacagaggaatctgaatcgttcg

SEQ ID NO: 5998364 - DNA, 25 bp, Homo sapien
tattgatctgcaagcattgcaagct

SEQ ID NO: 5998365 - DNA, 25 bp, Homo sapien
agaaatttgattcagcagatgaaag

SEQ ID NO: 5998366 - DNA, 25 bp, Homo sapien
gttcgatgatactaaagacaaacgg

SEQ ID NO: 5998367 - DNA, 25 bp, Homo sapien
tagaagacgtcagttcggatgaaaa

SEQ ID NO: 5998368 - DNA, 25 bp, Homo sapien
tgatactaaagacaaacggagtaat

SEQ ID NO: 5998369 - DNA, 25 bp, Homo sapien
gaattctaaatccacaaaaagcact

SEQ ID NO: 5998370 - DNA, 25 bp, Homo sapien
gaaaagcaattgaaaaaccacataa

SEQ ID NO: 5998371 - DNA, 25 bp, Homo sapien
tttgatagtcgaaataagctattca

SEQ ID NO: 5998372 - DNA, 25 bp, Homo sapien
gaagaggaaaacataacgcttgggt

SEQ ID NO: 5998373 - DNA, 25 bp, Homo sapien
ctctatgtctccaacctccgcgatc

SEQ ID NO: 5998374 - DNA, 25 bp, Homo sapien
accacataaacactaaactgcataa

SEQ ID NO: 5998375 - DNA, 25 bp, Homo sapien
gaaagaaatggaagaggaaaacata

SEQ ID NO: 5998376 - DNA, 25 bp, Homo sapien
aatggaagaggaaaacataacgctt

SEQ ID NO: 5998377 - DNA, 25 bp, Homo sapien
gatgacaatctcaacatagaaatgg

SEQ ID NO: 5998378 - DNA, 25 bp, Homo sapien
catcactaggagacaagggcttaca

SEQ ID NO: 5998379 - DNA, 25 bp, Homo sapien
tatagaggtagaagacgtcagttcg

SEQ ID NO: 5998380 - DNA, 25 bp, Homo sapien
catttgatagtcgaaataagctatt

SEQ ID NO: 5998381 - DNA, 25 bp, Homo sapien
atgtacatgtgaatacgaagaataa

SEQ ID NO: 5998382 - DNA, 25 bp, Homo sapien
tggcagaatcgtcttctgaagacga

SEQ ID NO: 5998383 - DNA, 25 bp, Homo sapien
tacatgcggagaatcatttgatagt

SEQ ID NO: 5998384 - DNA, 25 bp, Homo sapien
atagtcgaaataagctattcaacca

SEQ ID NO: 5998385 - DNA, 25 bp, Homo sapien
gaagacgtcagttcggatgaaaatg

SEQ ID NO: 5998386 - DNA, 25 bp, Homo sapien
gaagatagcagggcatgcggcagtg

SEQ ID NO: 5998387 - DNA, 25 bp, Homo sapien
cgaggtgtgcactacatgcggagaa

SEQ ID NO: 5998388 - DNA, 25 bp, Homo sapien
aacactaaactgcataagaaaaata

SEQ ID NO: 5998389 - DNA, 25 bp, Homo sapien
atgacgatgaagattggtctactaa

SEQ ID NO: 5998390 - DNA, 25 bp, Homo sapien
atgcggcagtgaaaaacgtagtgaa

SEQ ID NO: 5998391 - DNA, 25 bp, Homo sapien
acataacgcttgggttggataatct

SEQ ID NO: 5998392 - DNA, 25 bp, Homo sapien
aaaaatatggaagagatacggaaag

SEQ ID NO: 5998393 - DNA, 25 bp, Homo sapien
agtgttaaagaaaaagaagatattg

SEQ ID NO: 5998394 - DNA, 25 bp, Homo sapien
gagtaatgagttggatgatcttttg

SEQ ID NO: 5998395 - DNA, 25 bp, Homo sapien
gaggaatctgaatcgttcgatgata

SEQ ID NO: 5998396 - DNA, 25 bp, Homo sapien
gatattgatctgcaagcattgcaag

SEQ ID NO: 5998397 - DNA, 25 bp, Homo sapien
ggttggataatctctccgatctcga

SEQ ID NO: 5998398 - DNA, 25 bp, Homo sapien
ggcatcactaggagacaagggctta

SEQ ID NO: 5998399 - DNA, 25 bp, Homo sapien
aagacatttaagtcggaaaagcaat

SEQ ID NO: 5998400 - DNA, 25 bp, Homo sapien
aacctccgcgatcgaggtgtgcact

SEQ ID NO: 5998401 - DNA, 25 bp, Homo sapien
tgacaatctcaacatagaaatggat

SEQ ID NO: 5998402 - DNA, 25 bp, Homo sapien
gtaatgagttggatgatcttttggc

SEQ ID NO: 5998403 - DNA, 25 bp, Homo sapien
agttggatgatcttttggcatcact

SEQ ID NO: 5998404 - DNA, 25 bp, Homo sapien
accgtcctctatgtctccaacctcc

SEQ ID NO: 5998405 - DNA, 25 bp, Homo sapien
actgcataagaaaaatatggaagag

SEQ ID NO: 5998406 - DNA, 25 bp, Homo sapien
ggcagtgaaaaacgtagtgaaaaga

SEQ ID NO: 5998407 - DNA, 25 bp, Homo sapien
gaaatggaagaggaaaacataacgc

SEQ ID NO: 5998408 - DNA, 25 bp, Homo sapien
caaaggttgacacagaaacagagga

SEQ ID NO: 5998409 - DNA, 25 bp, Homo sapien
tctgaagacgaaagtgaagatgaca

SEQ ID NO: 5998410 - DNA, 25 bp, Homo sapien
aactcgctgaaattgaaagaaaact

SEQ ID NO: 5998411 - DNA, 25 bp, Homo sapien
tgaagatgacaatctcaacatagaa

SEQ ID NO: 5998412 - DNA, 25 bp, Homo sapien
aaagcaaaggttgacacagaaacag

SEQ ID NO: 5998413 - DNA, 25 bp, Homo sapien
tcactaggagacaagggcttacaaa

SEQ ID NO: 5998414 - DNA, 25 bp, Homo sapien
taaatccacaaaaagcactccgtcc

SEQ ID NO: 5998415 - DNA, 25 bp, Homo sapien
tcaaccacgtgaagatagcagggca

SEQ ID NO: 5998416 - DNA, 25 bp, Homo sapien
gttttatctgcaacaagacatttaa

SEQ ID NO: 5998417 - DNA, 25 bp, Homo sapien
gcaaacaacctaaaaagaattctaa

SEQ ID NO: 5998418 - DNA, 25 bp, Homo sapien
ccacgtgaagatagcagggcatgcg

SEQ ID NO: 5998419 - DNA, 25 bp, Homo sapien
tcgttcgatgatactaaagacaaac

SEQ ID NO: 5998420 - DNA, 25 bp, Homo sapien
acaagacatttaagtcggaaaagca

SEQ ID NO: 5998421 - DNA, 25 bp, Homo sapien
tgaagacgaaagtgaagatgacaat

SEQ ID NO: 5998422 - DNA, 25 bp, Homo sapien
tgatagtcgaaataagctattcaac

SEQ ID NO: 5998423 - DNA, 25 bp, Homo sapien
tttaagtcggaaaagcaattgaaaa

SEQ ID NO: 5998424 - DNA, 25 bp, Homo sapien
atagcagggcatgcggcagtgaaaa

SEQ ID NO: 5998425 - DNA, 25 bp, Homo sapien
cgatcgaggtgtgcactacatgcgg

SEQ ID NO: 5998426 - DNA, 25 bp, Homo sapien
cttgggttggataatctctccgatc

SEQ ID NO: 5998427 - DNA, 25 bp, Homo sapien
cgatgaagattggtctactaaagcg

SEQ ID NO: 5998428 - DNA, 25 bp, Homo sapien
tgcaacaagacatttaagtcggaaa

SEQ ID NO: 5998429 - DNA, 25 bp, Homo sapien
gacgatgaagattggtctactaaag

SEQ ID NO: 5998430 - DNA, 25 bp, Homo sapien
ttggcatcactaggagacaagggct

SEQ ID NO: 5998431 - DNA, 25 bp, Homo sapien
ggaatctgaatcgttcgatgatact

SEQ ID NO: 5998432 - DNA, 25 bp, Homo sapien
gaagattggtctactaaagcgaaaa

SEQ ID NO: 5998433 - DNA, 25 bp, Homo sapien
tggatatagaggtagaagacgtcag

SEQ ID NO: 5998434 - DNA, 25 bp, Homo sapien
aaacataacgcttgggttggataat

SEQ ID NO: 5998435 - DNA, 25 bp, Homo sapien
cagaggaatctgaatcgttcgatga

SEQ ID NO: 5998436 - DNA, 25 bp, Homo sapien
agatagcagggcatgcggcagtgaa

SEQ ID NO: 5998437 - DNA, 25 bp, Homo sapien
aaaaaaagcaaaggttgacacagaa

SEQ ID NO: 5998438 - DNA, 25 bp, Homo sapien
acaatctcaacatagaaatggatat

SEQ ID NO: 5998439 - DNA, 25 bp, Homo sapien
cagaaacagaggaatctgaatcgtt

SEQ ID NO: 5998440 - DNA, 25 bp, Homo sapien
agtcgaaataagctattcaaccacg

SEQ ID NO: 5998441 - DNA, 25 bp, Homo sapien
agattggtctactaaagcgaaaaag

SEQ ID NO: 5998442 - DNA, 25 bp, Homo sapien
tcgaaataagctattcaaccacgtg

SEQ ID NO: 5998443 - DNA, 25 bp, Homo sapien
agcattgcaagctgaactcgctgaa

SEQ ID NO: 5998444 - DNA, 25 bp, Homo sapien
aaactgcataagaaaaatatggaag

SEQ ID NO: 5998445 - DNA, 25 bp, Homo sapien
taagaaaaatatggaagagatacgg

SEQ ID NO: 5998446 - DNA, 25 bp, Homo sapien
atgaaagtgttaaagaaaaagaaga

SEQ ID NO: 5998447 - DNA, 25 bp, Homo sapien
gaaattgaaagaaaactggcagaat

SEQ ID NO: 5998448 - DNA, 25 bp, Homo sapien
ggatgaaaatgtacatgtgaatacg

SEQ ID NO: 5998449 - DNA, 25 bp, Homo sapien
attggtctactaaagcgaaaaagaa

SEQ ID NO: 5998450 - DNA, 25 bp, Homo sapien
aacggagtaatgagttggatgatct

SEQ ID NO: 5998451 - DNA, 25 bp, Homo sapien
cgtcctctatgtctccaacctccgc

SEQ ID NO: 5998452 - DNA, 25 bp, Homo sapien
tagtgaaaagaaagaaagtcaagac

SEQ ID NO: 5998453 - DNA, 25 bp, Homo sapien
caaacggagtaatgagttggatgat

SEQ ID NO: 5998454 - DNA, 25 bp, Homo sapien
acaaacggatgacgatgaagattgg

SEQ ID NO: 5998455 - DNA, 25 bp, Homo sapien
gtgaaaagaaagaaagtcaagacca

SEQ ID NO: 5998456 - DNA, 25 bp, Homo sapien
ttggataatctctccgatctcgaga

SEQ ID NO: 5998457 - DNA, 25 bp, Homo sapien
gacatttaagtcggaaaagcaattg

SEQ ID NO: 5998458 - DNA, 25 bp, Homo sapien
atgatcttttggcatcactaggaga

SEQ ID NO: 5998459 - DNA, 25 bp, Homo sapien
tggtctactaaagcgaaaaagaaaa

SEQ ID NO: 5998460 - DNA, 25 bp, Homo sapien
aagaaatggaagaggaaaacataac

SEQ ID NO: 5998461 - DNA, 25 bp, Homo sapien
aatctctccgatctcgagaaatttg

SEQ ID NO: 5998462 - DNA, 25 bp, Homo sapien
gcttacaaacggatgacgatgaaga

SEQ ID NO: 5998463 - DNA, 25 bp, Homo sapien
aggtgtgcactacatgcggagaatc

SEQ ID NO: 5998464 - DNA, 25 bp, Homo sapien
ttgatctgcaagcattgcaagctga

SEQ ID NO: 5998465 - DNA, 25 bp, Homo sapien
cgcttgggttggataatctctccga

SEQ ID NO: 5998466 - DNA, 25 bp, Homo sapien
tccgatctcgagaaatttgattcag

SEQ ID NO: 5998467 - DNA, 25 bp, Homo sapien
atgaaaatgtacatgtgaatacgaa

SEQ ID NO: 5998468 - DNA, 25 bp, Homo sapien
agcagggcatgcggcagtgaaaaac

SEQ ID NO: 5998469 - DNA, 25 bp, Homo sapien
aaagcaattgaaaaaccacataaac

SEQ ID NO: 5998470 - DNA, 25 bp, Homo sapien
gatatagaggtagaagacgtcagtt

SEQ ID NO: 5998471 - DNA, 25 bp, Homo sapien
tgaactcgctgaaattgaaagaaaa

SEQ ID NO: 5998472 - DNA, 25 bp, Homo sapien
gagatacggaaagaaatggaagagg

SEQ ID NO: 5998473 - DNA, 25 bp, Homo sapien
tcaacatagaaatggatatagaggt

SEQ ID NO: 5998474 - DNA, 25 bp, Homo sapien
gctgaactcgctgaaattgaaagaa

SEQ ID NO: 5998475 - DNA, 25 bp, Homo sapien
gtgaagatagcagggcatgcggcag

SEQ ID NO: 5998476 - DNA, 25 bp, Homo sapien
ttacgagtgttttatctgcaacaag

SEQ ID NO: 5998477 - DNA, 25 bp, Homo sapien
gaaaactggcagaatcgtcttctga

SEQ ID NO: 5998478 - DNA, 25 bp, Homo sapien
atgtctccaacctccgcgatcgagg

SEQ ID NO: 5998479 - DNA, 25 bp, Homo sapien
atcatttgatagtcgaaataagcta

SEQ ID NO: 5998480 - DNA, 25 bp, Homo sapien
cgaaagtgaagatgacaatctcaac

SEQ ID NO: 5998481 - DNA, 25 bp, Homo sapien
catttaagtcggaaaagcaattgaa

SEQ ID NO: 5998482 - DNA, 25 bp, Homo sapien
atggaagagatacggaaagaaatgg

SEQ ID NO: 5998483 - DNA, 25 bp, Homo sapien
gcggcagtgaaaaacgtagtgaaaa

SEQ ID NO: 5998484 - DNA, 25 bp, Homo sapien
ggtagaagacgtcagttcggatgaa

SEQ ID NO: 5998485 - DNA, 25 bp, Homo sapien
aaccacgtgaagatagcagggcatg

SEQ ID NO: 5998486 - DNA, 25 bp, Homo sapien
ttcagcagatgaaagtgttaaagaa

SEQ ID NO: 5998487 - DNA, 25 bp, Homo sapien
aagaattctaaatccacaaaaagca

SEQ ID NO: 5998488 - DNA, 25 bp, Homo sapien
atgaagattggtctactaaagcgaa

SEQ ID NO: 5998489 - DNA, 25 bp, Homo sapien
ccaacctccgcgatcgaggtgtgca

SEQ ID NO: 5998490 - DNA, 25 bp, Homo sapien
cggaaagaaatggaagaggaaaaca

SEQ ID NO: 5998491 - DNA, 25 bp, Homo sapien
cctccgcgatcgaggtgtgcactac

SEQ ID NO: 5998492 - DNA, 25 bp, Homo sapien
tgttaaagaaaaagaagatattgat

SEQ ID NO: 5998493 - DNA, 25 bp, Homo sapien
agaaaaatatggaagagatacggaa

SEQ ID NO: 5998494 - DNA, 25 bp, Homo sapien
catgcggagaatcatttgatagtcg

SEQ ID NO: 5998495 - DNA, 25 bp, Homo sapien
ttggatgatcttttggcatcactag

SEQ ID NO: 5998496 - DNA, 25 bp, Homo sapien
acggatgacgatgaagattggtcta

SEQ ID NO: 5998497 - DNA, 25 bp, Homo sapien
cattgcaagctgaactcgctgaaat

SEQ ID NO: 5998498 - DNA, 25 bp, Homo sapien
aaaaaccacataaacactaaactgc

SEQ ID NO: 5998499 - DNA, 25 bp, Homo sapien
ctgaaattgaaagaaaactggcaga

SEQ ID NO: 5998500 - DNA, 25 bp, Homo sapien
ttgattcagcagatgaaagtgttaa

SEQ ID NO: 5998501 - DNA, 25 bp, Homo sapien
tcgatgatactaaagacaaacggag

SEQ ID NO: 5998502 - DNA, 25 bp, Homo sapien
gtcggaaaagcaattgaaaaaccac

SEQ ID NO: 5998503 - DNA, 25 bp, Homo sapien
agacgtcagttcggatgaaaatgta

SEQ ID NO: 5998504 - DNA, 25 bp, Homo sapien
gaaaaaaaaagcaaaggttgacaca

SEQ ID NO: 5998505 - DNA, 25 bp, Homo sapien
cataagaaaaatatggaagagatac

SEQ ID NO: 5998506 - DNA, 25 bp, Homo sapien
taggagacaagggcttacaaacgga

SEQ ID NO: 5998507 - DNA, 25 bp, Homo sapien
taagctattcaaccacgtgaagata

SEQ ID NO: 5998508 - DNA, 25 bp, Homo sapien
ggataatctctccgatctcgagaaa

SEQ ID NO: 5998509 - DNA, 25 bp, Homo sapien
agatgaaagtgttaaagaaaaagaa

SEQ ID NO: 5998510 - DNA, 25 bp, Homo sapien
cgcgatcgaggtgtgcactacatgc

SEQ ID NO: 5998511 - DNA, 25 bp, Homo sapien
aacgtagtgaaaagaaagaaagtca

SEQ ID NO: 5998512 - DNA, 25 bp, Homo sapien
ctcgagaaatttgattcagcagatg

SEQ ID NO: 5998513 - DNA, 25 bp, Homo sapien
ggatgacgatgaagattggtctact

SEQ ID NO: 5998514 - DNA, 25 bp, Homo sapien
agtgaagatgacaatctcaacatag

SEQ ID NO: 5998515 - DNA, 25 bp, Homo sapien
caattgaaaaaccacataaacacta

SEQ ID NO: 5998516 - DNA, 25 bp, Homo sapien
gttcggatgaaaatgtacatgtgaa

SEQ ID NO: 5998517 - DNA, 25 bp, Homo sapien
ttttggcatcactaggagacaaggg

SEQ ID NO: 5998518 - DNA, 25 bp, Homo sapien
ttagtagatgtatatactacacttc

SEQ ID NO: 5998519 - DNA, 25 bp, Homo sapien
caatgtcgtcatgacctgctcggga

SEQ ID NO: 5998520 - DNA, 25 bp, Homo sapien
atatatcccttgaaaagcaattagt

SEQ ID NO: 5998521 - DNA, 25 bp, Homo sapien
ctcgggatgttctggtgcagtcaat

SEQ ID NO: 5998522 - DNA, 25 bp, Homo sapien
cacttccttacgattttattttaga

SEQ ID NO: 5998523 - DNA, 25 bp, Homo sapien
acattatcaattcaatgtcgtcatg

SEQ ID NO: 5998524 - DNA, 25 bp, Homo sapien
tcaattcaatgtcgtcatgacctgc

SEQ ID NO: 5998525 - DNA, 25 bp, Homo sapien
gcagtcaataaagttttgacgaaat

SEQ ID NO: 5998526 - DNA, 25 bp, Homo sapien
ggaaaggaagttagatctggcaaac

SEQ ID NO: 5998527 - DNA, 25 bp, Homo sapien
ttcaatgtcgtcatgacctgctcgg

SEQ ID NO: 5998528 - DNA, 25 bp, Homo sapien
atgttctggtgcagtcaataaagtt

SEQ ID NO: 5998529 - DNA, 25 bp, Homo sapien
gtgcagtcaataaagttttgacgaa

SEQ ID NO: 5998530 - DNA, 25 bp, Homo sapien
gttctggtgcagtcaataaagtttt

SEQ ID NO: 5998531 - DNA, 25 bp, Homo sapien
tccaaaatagatatatcccttgaaa

SEQ ID NO: 5998532 - DNA, 25 bp, Homo sapien
gaagttagatctggcaaacaattgt

SEQ ID NO: 5998533 - DNA, 25 bp, Homo sapien
aggaagttagatctggcaaacaatt

SEQ ID NO: 5998534 - DNA, 25 bp, Homo sapien
tggtgcagtcaataaagttttgacg

SEQ ID NO: 5998535 - DNA, 25 bp, Homo sapien
gacgtttccaaaatagatatatccc

SEQ ID NO: 5998536 - DNA, 25 bp, Homo sapien
aaccggaaaggaagttagatctggc

SEQ ID NO: 5998537 - DNA, 25 bp, Homo sapien
gatgtatatactacacttccttacg

SEQ ID NO: 5998538 - DNA, 25 bp, Homo sapien
atggcagagataaaacattatcaat

SEQ ID NO: 5998539 - DNA, 25 bp, Homo sapien
attatcaattcaatgtcgtcatgac

SEQ ID NO: 5998540 - DNA, 25 bp, Homo sapien
tatactacacttccttacgatttta

SEQ ID NO: 5998541 - DNA, 25 bp, Homo sapien
tgtatatactacacttccttacgat

SEQ ID NO: 5998542 - DNA, 25 bp, Homo sapien
tctggtgcagtcaataaagttttga

SEQ ID NO: 5998543 - DNA, 25 bp, Homo sapien
atatcccttgaaaagcaattagtag

SEQ ID NO: 5998544 - DNA, 25 bp, Homo sapien
agttagatctggcaaacaattgtga

SEQ ID NO: 5998545 - DNA, 25 bp, Homo sapien
tagaaccagacgtttccaaaataga

SEQ ID NO: 5998546 - DNA, 25 bp, Homo sapien
aaaagcaattagtagatgtatatac

SEQ ID NO: 5998547 - DNA, 25 bp, Homo sapien
ggatgttctggtgcagtcaataaag

SEQ ID NO: 5998548 - DNA, 25 bp, Homo sapien
cctgctcgggatgttctggtgcagt

SEQ ID NO: 5998549 - DNA, 25 bp, Homo sapien
tactacacttccttacgattttatt

SEQ ID NO: 5998550 - DNA, 25 bp, Homo sapien
cgtcatgacctgctcgggatgttct

SEQ ID NO: 5998551 - DNA, 25 bp, Homo sapien
tgacgaaattagaaccagacgtttc

SEQ ID NO: 5998552 - DNA, 25 bp, Homo sapien
ggcagagataaaacattatcaattc

SEQ ID NO: 5998553 - DNA, 25 bp, Homo sapien
accagacgtttccaaaatagatata

SEQ ID NO: 5998554 - DNA, 25 bp, Homo sapien
cccttgaaaagcaattagtagatgt

SEQ ID NO: 5998555 - DNA, 25 bp, Homo sapien
cgtttccaaaatagatatatccctt

SEQ ID NO: 5998556 - DNA, 25 bp, Homo sapien
ccggaaaggaagttagatctggcaa

SEQ ID NO: 5998557 - DNA, 25 bp, Homo sapien
taaaacattatcaattcaatgtcgt

SEQ ID NO: 5998558 - DNA, 25 bp, Homo sapien
aaaggaagttagatctggcaaacaa

SEQ ID NO: 5998559 - DNA, 25 bp, Homo sapien
aattagtagatgtatatactacact

SEQ ID NO: 5998560 - DNA, 25 bp, Homo sapien
tgaaaagcaattagtagatgtatat

SEQ ID NO: 5998561 - DNA, 25 bp, Homo sapien
tacacttccttacgattttatttta

SEQ ID NO: 5998562 - DNA, 25 bp, Homo sapien
atgacctgctcgggatgttctggtg

SEQ ID NO: 5998563 - DNA, 25 bp, Homo sapien
attagaaccagacgtttccaaaata

SEQ ID NO: 5998564 - DNA, 25 bp, Homo sapien
tatcaattcaatgtcgtcatgacct

SEQ ID NO: 5998565 - DNA, 25 bp, Homo sapien
aagttttgacgaaattagaaccaga

SEQ ID NO: 5998566 - DNA, 25 bp, Homo sapien
tgctcgggatgttctggtgcagtca

SEQ ID NO: 5998567 - DNA, 25 bp, Homo sapien
agtagatgtatatactacacttcct

SEQ ID NO: 5998568 - DNA, 25 bp, Homo sapien
gataaaacattatcaattcaatgtc

SEQ ID NO: 5998569 - DNA, 25 bp, Homo sapien
tagatgtatatactacacttcctta

SEQ ID NO: 5998570 - DNA, 25 bp, Homo sapien
gttttgacgaaattagaaccagacg

SEQ ID NO: 5998571 - DNA, 25 bp, Homo sapien
atcccttgaaaagcaattagtagat

SEQ ID NO: 5998572 - DNA, 25 bp, Homo sapien
tttgacgaaattagaaccagacgtt

SEQ ID NO: 5998573 - DNA, 25 bp, Homo sapien
aagcaattagtagatgtatatacta

SEQ ID NO: 5998574 - DNA, 25 bp, Homo sapien
gcaattagtagatgtatatactaca

SEQ ID NO: 5998575 - DNA, 25 bp, Homo sapien
gacctgctcgggatgttctggtgca

SEQ ID NO: 5998576 - DNA, 25 bp, Homo sapien
caaaatagatatatcccttgaaaag

SEQ ID NO: 5998577 - DNA, 25 bp, Homo sapien
tatatactacacttccttacgattt

SEQ ID NO: 5998578 - DNA, 25 bp, Homo sapien
gaaattagaaccagacgtttccaaa

SEQ ID NO: 5998579 - DNA, 25 bp, Homo sapien
aattcaatgtcgtcatgacctgctc

SEQ ID NO: 5998580 - DNA, 25 bp, Homo sapien
cgggatgttctggtgcagtcaataa

SEQ ID NO: 5998581 - DNA, 25 bp, Homo sapien
acgaaattagaaccagacgtttcca

SEQ ID NO: 5998582 - DNA, 25 bp, Homo sapien
cttgaaaagcaattagtagatgtat

SEQ ID NO: 5998583 - DNA, 25 bp, Homo sapien
gagataaaacattatcaattcaatg

SEQ ID NO: 5998584 - DNA, 25 bp, Homo sapien
tttccaaaatagatatatcccttga

SEQ ID NO: 5998585 - DNA, 25 bp, Homo sapien
gaaccagacgtttccaaaatagata

SEQ ID NO: 5998586 - DNA, 25 bp, Homo sapien
aaatagatatatcccttgaaaagca

SEQ ID NO: 5998587 - DNA, 25 bp, Homo sapien
taaagttttgacgaaattagaacca

SEQ ID NO: 5998588 - DNA, 25 bp, Homo sapien
atagatatatcccttgaaaagcaat

SEQ ID NO: 5998589 - DNA, 25 bp, Homo sapien
tcatgacctgctcgggatgttctgg

SEQ ID NO: 5998590 - DNA, 25 bp, Homo sapien
caataaagttttgacgaaattagaa

SEQ ID NO: 5998591 - DNA, 25 bp, Homo sapien
cagacgtttccaaaatagatatatc

SEQ ID NO: 5998592 - DNA, 25 bp, Homo sapien
aaacattatcaattcaatgtcgtca

SEQ ID NO: 5998593 - DNA, 25 bp, Homo sapien
atgtcgtcatgacctgctcgggatg

SEQ ID NO: 5998594 - DNA, 25 bp, Homo sapien
agatatatcccttgaaaagcaatta

SEQ ID NO: 5998595 - DNA, 25 bp, Homo sapien
gtcgtcatgacctgctcgggatgtt

SEQ ID NO: 5998596 - DNA, 25 bp, Homo sapien
atcgtaaggaagtgtagtatataca

SEQ ID NO: 5998597 - DNA, 25 bp, Homo sapien
gcaggtcatgacgacattgaattga

SEQ ID NO: 5998598 - DNA, 25 bp, Homo sapien
tattttggaaacgtctggttctaat

SEQ ID NO: 5998599 - DNA, 25 bp, Homo sapien
attgactgcaccagaacatcccgag

SEQ ID NO: 5998600 - DNA, 25 bp, Homo sapien
actgcaccagaacatcccgagcagg

SEQ ID NO: 5998601 - DNA, 25 bp, Homo sapien
ctttattgactgcaccagaacatcc

SEQ ID NO: 5998602 - DNA, 25 bp, Homo sapien
gtcatgacgacattgaattgataat

SEQ ID NO: 5998603 - DNA, 25 bp, Homo sapien
aggaagtgtagtatatacatctact

SEQ ID NO: 5998604 - DNA, 25 bp, Homo sapien
acaattgtttgccagatctaacttc

SEQ ID NO: 5998605 - DNA, 25 bp, Homo sapien
ttcgtcaaaactttattgactgcac

SEQ ID NO: 5998606 - DNA, 25 bp, Homo sapien
cattgaattgataatgttttatctc

SEQ ID NO: 5998607 - DNA, 25 bp, Homo sapien
tgtagtatatacatctactaattgc

SEQ ID NO: 5998608 - DNA, 25 bp, Homo sapien
tggttctaatttcgtcaaaacttta

SEQ ID NO: 5998609 - DNA, 25 bp, Homo sapien
gggatatatctattttggaaacgtc

SEQ ID NO: 5998610 - DNA, 25 bp, Homo sapien
ccgagcaggtcatgacgacattgaa

SEQ ID NO: 5998611 - DNA, 25 bp, Homo sapien
tgacgacattgaattgataatgttt

SEQ ID NO: 5998612 - DNA, 25 bp, Homo sapien
tgactgcaccagaacatcccgagca

SEQ ID NO: 5998613 - DNA, 25 bp, Homo sapien
taattgcttttcaagggatatatct

SEQ ID NO: 5998614 - DNA, 25 bp, Homo sapien
taaaatcgtaaggaagtgtagtata

SEQ ID NO: 5998615 - DNA, 25 bp, Homo sapien
aattgtttgccagatctaacttcct

SEQ ID NO: 5998616 - DNA, 25 bp, Homo sapien
gacattgaattgataatgttttatc

SEQ ID NO: 5998617 - DNA, 25 bp, Homo sapien
gccagatctaacttcctttccggtt

SEQ ID NO: 5998618 - DNA, 25 bp, Homo sapien
aggtcatgacgacattgaattgata

SEQ ID NO: 5998619 - DNA, 25 bp, Homo sapien
aataaaatcgtaaggaagtgtagta

SEQ ID NO: 5998620 - DNA, 25 bp, Homo sapien
tcacaattgtttgccagatctaact

SEQ ID NO: 5998621 - DNA, 25 bp, Homo sapien
attgcttttcaagggatatatctat

SEQ ID NO: 5998622 - DNA, 25 bp, Homo sapien
catgacgacattgaattgataatgt

SEQ ID NO: 5998623 - DNA, 25 bp, Homo sapien
tcaaaactttattgactgcaccaga

SEQ ID NO: 5998624 - DNA, 25 bp, Homo sapien
ccagaacatcccgagcaggtcatga

SEQ ID NO: 5998625 - DNA, 25 bp, Homo sapien
acatctactaattgcttttcaaggg

SEQ ID NO: 5998626 - DNA, 25 bp, Homo sapien
ctactaattgcttttcaagggatat

SEQ ID NO: 5998627 - DNA, 25 bp, Homo sapien
aaaactttattgactgcaccagaac

SEQ ID NO: 5998628 - DNA, 25 bp, Homo sapien
aaatcgtaaggaagtgtagtatata

SEQ ID NO: 5998629 - DNA, 25 bp, Homo sapien
ttctaatttcgtcaaaactttattg

SEQ ID NO: 5998630 - DNA, 25 bp, Homo sapien
taaaataaaatcgtaaggaagtgta

SEQ ID NO: 5998631 - DNA, 25 bp, Homo sapien
cgtcaaaactttattgactgcacca

SEQ ID NO: 5998632 - DNA, 25 bp, Homo sapien
catcccgagcaggtcatgacgacat

SEQ ID NO: 5998633 - DNA, 25 bp, Homo sapien
tttggaaacgtctggttctaatttc

SEQ ID NO: 5998634 - DNA, 25 bp, Homo sapien
ttattgactgcaccagaacatcccg

SEQ ID NO: 5998635 - DNA, 25 bp, Homo sapien
tcaagggatatatctattttggaaa

SEQ ID NO: 5998636 - DNA, 25 bp, Homo sapien
agtgtagtatatacatctactaatt

SEQ ID NO: 5998637 - DNA, 25 bp, Homo sapien
tcccgagcaggtcatgacgacattg

SEQ ID NO: 5998638 - DNA, 25 bp, Homo sapien
aacgtctggttctaatttcgtcaaa

SEQ ID NO: 5998639 - DNA, 25 bp, Homo sapien
taaggaagtgtagtatatacatcta

SEQ ID NO: 5998640 - DNA, 25 bp, Homo sapien
aagggatatatctattttggaaacg

SEQ ID NO: 5998641 - DNA, 25 bp, Homo sapien
tctaaaataaaatcgtaaggaagtg

SEQ ID NO: 5998642 - DNA, 25 bp, Homo sapien
gaaacgtctggttctaatttcgtca

SEQ ID NO: 5998643 - DNA, 25 bp, Homo sapien
ttgtttgccagatctaacttccttt

SEQ ID NO: 5998644 - DNA, 25 bp, Homo sapien
actaattgcttttcaagggatatat

SEQ ID NO: 5998645 - DNA, 25 bp, Homo sapien
tctggttctaatttcgtcaaaactt

SEQ ID NO: 5998646 - DNA, 25 bp, Homo sapien
gaattgataatgttttatctctgcc

SEQ ID NO: 5998647 - DNA, 25 bp, Homo sapien
tggaaacgtctggttctaatttcgt

SEQ ID NO: 5998648 - DNA, 25 bp, Homo sapien
attgataatgttttatctctgccat

SEQ ID NO: 5998649 - DNA, 25 bp, Homo sapien
gtatatacatctactaattgctttt

SEQ ID NO: 5998650 - DNA, 25 bp, Homo sapien
acgacattgaattgataatgtttta

SEQ ID NO: 5998651 - DNA, 25 bp, Homo sapien
aactttattgactgcaccagaacat

SEQ ID NO: 5998652 - DNA, 25 bp, Homo sapien
tgcaccagaacatcccgagcaggtc

SEQ ID NO: 5998653 - DNA, 25 bp, Homo sapien
cgtctggttctaatttcgtcaaaac

SEQ ID NO: 5998654 - DNA, 25 bp, Homo sapien
gatatatctattttggaaacgtctg

SEQ ID NO: 5998655 - DNA, 25 bp, Homo sapien
atatacatctactaattgcttttca

SEQ ID NO: 5998656 - DNA, 25 bp, Homo sapien
atacatctactaattgcttttcaag

SEQ ID NO: 5998657 - DNA, 25 bp, Homo sapien
cttttcaagggatatatctattttg

SEQ ID NO: 5998658 - DNA, 25 bp, Homo sapien
caccagaacatcccgagcaggtcat

SEQ ID NO: 5998659 - DNA, 25 bp, Homo sapien
tatatctattttggaaacgtctggt

SEQ ID NO: 5998660 - DNA, 25 bp, Homo sapien
tgcttttcaagggatatatctattt

SEQ ID NO: 5998661 - DNA, 25 bp, Homo sapien
agaacatcccgagcaggtcatgacg

SEQ ID NO: 5998662 - DNA, 25 bp, Homo sapien
gtttgccagatctaacttcctttcc

SEQ ID NO: 5998663 - DNA, 25 bp, Homo sapien
atctactaattgcttttcaagggat

SEQ ID NO: 5998664 - DNA, 25 bp, Homo sapien
tctattttggaaacgtctggttcta

SEQ ID NO: 5998665 - DNA, 25 bp, Homo sapien
cgtaaggaagtgtagtatatacatc

SEQ ID NO: 5998666 - DNA, 25 bp, Homo sapien
tttcaagggatatatctattttgga

SEQ ID NO: 5998667 - DNA, 25 bp, Homo sapien
tagtatatacatctactaattgctt

SEQ ID NO: 5998668 - DNA, 25 bp, Homo sapien
gagcaggtcatgacgacattgaatt

SEQ ID NO: 5998669 - DNA, 25 bp, Homo sapien
tatctattttggaaacgtctggttc

SEQ ID NO: 5998670 - DNA, 25 bp, Homo sapien
gaagtgtagtatatacatctactaa

SEQ ID NO: 5998671 - DNA, 25 bp, Homo sapien
atttcgtcaaaactttattgactgc

SEQ ID NO: 5998672 - DNA, 25 bp, Homo sapien
aacatcccgagcaggtcatgacgac

SEQ ID NO: 5998673 - DNA, 25 bp, Homo sapien
ttgccagatctaacttcctttccgg

SEQ ID NO: 5998674 - DNA, 25 bp, Homo sapien
gtacaagtccagggaattacagatt

SEQ ID NO: 5998675 - DNA, 25 bp, Homo sapien
ctttgggactgttgtacaagcatat

SEQ ID NO: 5998676 - DNA, 25 bp, Homo sapien
tcctctgcaaaggggatctgaattc

SEQ ID NO: 5998677 - DNA, 25 bp, Homo sapien
aatcaagctaccaaatttgtttgat

SEQ ID NO: 5998678 - DNA, 25 bp, Homo sapien
agattttatagagcgcctgaattga

SEQ ID NO: 5998679 - DNA, 25 bp, Homo sapien
tataccacccagatcgatatatggg

SEQ ID NO: 5998680 - DNA, 25 bp, Homo sapien
taatcgttatgtgacaaacaagcta

SEQ ID NO: 5998681 - DNA, 25 bp, Homo sapien
catctgttcaagattttatagagcg

SEQ ID NO: 5998682 - DNA, 25 bp, Homo sapien
taccaaatttgtttgattttaatga

SEQ ID NO: 5998683 - DNA, 25 bp, Homo sapien
gagtacaagtccagggaattacaga

SEQ ID NO: 5998684 - DNA, 25 bp, Homo sapien
ttacagattctgaggattgccgacc

SEQ ID NO: 5998685 - DNA, 25 bp, Homo sapien
tacacggtcttggcgtttgtcatcg

SEQ ID NO: 5998686 - DNA, 25 bp, Homo sapien
ccgagtacaagtccagggaattaca

SEQ ID NO: 5998687 - DNA, 25 bp, Homo sapien
catggaatgcttaccagaaactcta

SEQ ID NO: 5998688 - DNA, 25 bp, Homo sapien
ggaattacagattctgaggattgcc

SEQ ID NO: 5998689 - DNA, 25 bp, Homo sapien
gatgcttatcggcaaagccatattt

SEQ ID NO: 5998690 - DNA, 25 bp, Homo sapien
ctaagggaaattgctaaattgttag

SEQ ID NO: 5998691 - DNA, 25 bp, Homo sapien
cttatcggcaaagccatatttcaag

SEQ ID NO: 5998692 - DNA, 25 bp, Homo sapien
tccaagaagaatccttgcccatcag

SEQ ID NO: 5998693 - DNA, 25 bp, Homo sapien
accagaaactctacaaatcgagatt

SEQ ID NO: 5998694 - DNA, 25 bp, Homo sapien
atgggcgagatgcttatcggcaaag

SEQ ID NO: 5998695 - DNA, 25 bp, Homo sapien
ttaaggaatgatgacactttcttac

SEQ ID NO: 5998696 - DNA, 25 bp, Homo sapien
taccacccagatcgatatatggggg

SEQ ID NO: 5998697 - DNA, 25 bp, Homo sapien
cagttctttaatgaattaaggaatg

SEQ ID NO: 5998698 - DNA, 25 bp, Homo sapien
ctgcaaaggggatctgaattcattg

SEQ ID NO: 5998699 - DNA, 25 bp, Homo sapien
tttaatgattttgagttacaaattc

SEQ ID NO: 5998700 - DNA, 25 bp, Homo sapien
cgttatgtgacaaacaagctagaaa

SEQ ID NO: 5998701 - DNA, 25 bp, Homo sapien
ctgccaaaaaattggaacataacca

SEQ ID NO: 5998702 - DNA, 25 bp, Homo sapien
cacgaggcggatgctggtgaaagag

SEQ ID NO: 5998703 - DNA, 25 bp, Homo sapien
atgtgacaaacaagctagaaatgcc

SEQ ID NO: 5998704 - DNA, 25 bp, Homo sapien
cattgcagacgatgtaacctcgaat

SEQ ID NO: 5998705 - DNA, 25 bp, Homo sapien
gtacccaatataccacccagatcga

SEQ ID NO: 5998706 - DNA, 25 bp, Homo sapien
caattagttacatctgttcaagatt

SEQ ID NO: 5998707 - DNA, 25 bp, Homo sapien
aggtgcctttgggactgttgtacaa

SEQ ID NO: 5998708 - DNA, 25 bp, Homo sapien
ccttcaattagttacatctgttcaa

SEQ ID NO: 5998709 - DNA, 25 bp, Homo sapien
aaagtccctgctcataccgagtaca

SEQ ID NO: 5998710 - DNA, 25 bp, Homo sapien
taaaagattcattttcttttcgaat

SEQ ID NO: 5998711 - DNA, 25 bp, Homo sapien
cctgctcataccgagtacaagtcca

SEQ ID NO: 5998712 - DNA, 25 bp, Homo sapien
tggtatcgatcttttgatgaaaata

SEQ ID NO: 5998713 - DNA, 25 bp, Homo sapien
agaggtgcctttgggactgttgtac

SEQ ID NO: 5998714 - DNA, 25 bp, Homo sapien
ctattttccaaaccactgttctcgg

SEQ ID NO: 5998715 - DNA, 25 bp, Homo sapien
gatcgatatatgggggcttggttgt

SEQ ID NO: 5998716 - DNA, 25 bp, Homo sapien
ctgttgtacaagcatatttaaccca

SEQ ID NO: 5998717 - DNA, 25 bp, Homo sapien
gcaacagaggtttgagaagtatttt

SEQ ID NO: 5998718 - DNA, 25 bp, Homo sapien
gatctgaattcattgcagacgatgt

SEQ ID NO: 5998719 - DNA, 25 bp, Homo sapien
cagatcgatatatgggggcttggtt

SEQ ID NO: 5998720 - DNA, 25 bp, Homo sapien
tttgattttaatgattttgagttac

SEQ ID NO: 5998721 - DNA, 25 bp, Homo sapien
cataccgagtacaagtccagggaat

SEQ ID NO: 5998722 - DNA, 25 bp, Homo sapien
gaaagagtacaggaaaatcggtaga

SEQ ID NO: 5998723 - DNA, 25 bp, Homo sapien
caacaaagactgtctccaagaagaa

SEQ ID NO: 5998724 - DNA, 25 bp, Homo sapien
aagaggtttcactgaaccaatcaag

SEQ ID NO: 5998725 - DNA, 25 bp, Homo sapien
ttcaattagttacatctgttcaaga

SEQ ID NO: 5998726 - DNA, 25 bp, Homo sapien
gaatgcttaccagaaactctacaaa

SEQ ID NO: 5998727 - DNA, 25 bp, Homo sapien
cagaggtttgagaagtattttggcc

SEQ ID NO: 5998728 - DNA, 25 bp, Homo sapien
ggtccagatggtatcgatcttttga

SEQ ID NO: 5998729 - DNA, 25 bp, Homo sapien
aagagcagaatggtgttcctctgca

SEQ ID NO: 5998730 - DNA, 25 bp, Homo sapien
gtgaatttgctgataaaattaaacc

SEQ ID NO: 5998731 - DNA, 25 bp, Homo sapien
cggtcttggcgtttgtcatcgtgat

SEQ ID NO: 5998732 - DNA, 25 bp, Homo sapien
gcaaaggggatctgaattcattgca

SEQ ID NO: 5998733 - DNA, 25 bp, Homo sapien
gttcctctgcaaaggggatctgaat

SEQ ID NO: 5998734 - DNA, 25 bp, Homo sapien
agtccctgctcataccgagtacaag

SEQ ID NO: 5998735 - DNA, 25 bp, Homo sapien
tacgatggccctctattttccaaac

SEQ ID NO: 5998736 - DNA, 25 bp, Homo sapien
ttgccgaccatccaaatatcgttaa

SEQ ID NO: 5998737 - DNA, 25 bp, Homo sapien
tatgggggcttggttgtgtcatggg

SEQ ID NO: 5998738 - DNA, 25 bp, Homo sapien
aagtattttggccattccggtccag

SEQ ID NO: 5998739 - DNA, 25 bp, Homo sapien
gtctacgaaccacaacaaagactgt

SEQ ID NO: 5998740 - DNA, 25 bp, Homo sapien
tgcaattaaaaaagtccctgctcat

SEQ ID NO: 5998741 - DNA, 25 bp, Homo sapien
tatttacacggtcttggcgtttgtc

SEQ ID NO: 5998742 - DNA, 25 bp, Homo sapien
aaagtttatcaacaccttgccatgg

SEQ ID NO: 5998743 - DNA, 25 bp, Homo sapien
gcctttgggactgttgtacaagcat

SEQ ID NO: 5998744 - DNA, 25 bp, Homo sapien
cacttatcagattgcccgcgggatg

SEQ ID NO: 5998745 - DNA, 25 bp, Homo sapien
acccaatataccacccagatcgata

SEQ ID NO: 5998746 - DNA, 25 bp, Homo sapien
aagtccagggaattacagattctga

SEQ ID NO: 5998747 - DNA, 25 bp, Homo sapien
aacaccttgccatggaatgcttacc

SEQ ID NO: 5998748 - DNA, 25 bp, Homo sapien
gataataaagtttatcaacaccttg

SEQ ID NO: 5998749 - DNA, 25 bp, Homo sapien
aattaaggaatgatgacactttctt

SEQ ID NO: 5998750 - DNA, 25 bp, Homo sapien
aaatcggtagaggtgcctttgggac

SEQ ID NO: 5998751 - DNA, 25 bp, Homo sapien
gccgaccatccaaatatcgttaaat

SEQ ID NO: 5998752 - DNA, 25 bp, Homo sapien
agctagaaatgccattaaaacatat

SEQ ID NO: 5998753 - DNA, 25 bp, Homo sapien
ctacagctaagggaaattgctaaat

SEQ ID NO: 5998754 - DNA, 25 bp, Homo sapien
atgctggtgaaagagtacaggaaaa

SEQ ID NO: 5998755 - DNA, 25 bp, Homo sapien
gatggtatcgatcttttgatgaaaa

SEQ ID NO: 5998756 - DNA, 25 bp, Homo sapien
ggaagagcagaatggtgttcctctg

SEQ ID NO: 5998757 - DNA, 25 bp, Homo sapien
tcttgtagacccggaaaccggtgtc

SEQ ID NO: 5998758 - DNA, 25 bp, Homo sapien
tttgagaagtattttggccattccg

SEQ ID NO: 5998759 - DNA, 25 bp, Homo sapien
cacggtcttggcgtttgtcatcgtg

SEQ ID NO: 5998760 - DNA, 25 bp, Homo sapien
tccctgctcataccgagtacaagtc

SEQ ID NO: 5998761 - DNA, 25 bp, Homo sapien
tttctttactcatttgtccccgcaa

SEQ ID NO: 5998762 - DNA, 25 bp, Homo sapien
tgatgacactttcttaccaagaggt

SEQ ID NO: 5998763 - DNA, 25 bp, Homo sapien
atcgatcttttgatgaaaatattgg

SEQ ID NO: 5998764 - DNA, 25 bp, Homo sapien
tcactgaaccaatcaagctaccaaa

SEQ ID NO: 5998765 - DNA, 25 bp, Homo sapien
tccccgcaagataataaagtttatc

SEQ ID NO: 5998766 - DNA, 25 bp, Homo sapien
tgtctccaagaagaatccttgccca

SEQ ID NO: 5998767 - DNA, 25 bp, Homo sapien
cggtagaggtgcctttgggactgtt

SEQ ID NO: 5998768 - DNA, 25 bp, Homo sapien
gattttgggtctgccaaaaaattgg

SEQ ID NO: 5998769 - DNA, 25 bp, Homo sapien
attagttacatctgttcaagatttt

SEQ ID NO: 5998770 - DNA, 25 bp, Homo sapien
gttacaaattctgggtgaatttgct

SEQ ID NO: 5998771 - DNA, 25 bp, Homo sapien
gaatccggcctacgatggccctcta

SEQ ID NO: 5998772 - DNA, 25 bp, Homo sapien
gttacatctgttcaagattttatag

SEQ ID NO: 5998773 - DNA, 25 bp, Homo sapien
ccaaatttgtttgattttaatgatt

SEQ ID NO: 5998774 - DNA, 25 bp, Homo sapien
attgatcattggttgtacccaatat

SEQ ID NO: 5998775 - DNA, 25 bp, Homo sapien
aaatcgagattaatcgttatgtgac

SEQ ID NO: 5998776 - DNA, 25 bp, Homo sapien
gtcttggcgtttgtcatcgtgatat

SEQ ID NO: 5998777 - DNA, 25 bp, Homo sapien
aatatcgttaaattgcagtatttct

SEQ ID NO: 5998778 - DNA, 25 bp, Homo sapien
ggtgtcttgaaaatctgcgattttg

SEQ ID NO: 5998779 - DNA, 25 bp, Homo sapien
tccaatgttcttgtagacccggaaa

SEQ ID NO: 5998780 - DNA, 25 bp, Homo sapien
tagacccggaaaccggtgtcttgaa

SEQ ID NO: 5998781 - DNA, 25 bp, Homo sapien
ccaggataagaaaaactggttgggc

SEQ ID NO: 5998782 - DNA, 25 bp, Homo sapien
ttaggtcctcccgataaaagattca

SEQ ID NO: 5998783 - DNA, 25 bp, Homo sapien
attcattttcttttcgaatccggcc

SEQ ID NO: 5998784 - DNA, 25 bp, Homo sapien
tcaagaaccccttctacagctaagg

SEQ ID NO: 5998785 - DNA, 25 bp, Homo sapien
ttttcttttcgaatccggcctacga

SEQ ID NO: 5998786 - DNA, 25 bp, Homo sapien
acctcgaataaatcgaacaacacga

SEQ ID NO: 5998787 - DNA, 25 bp, Homo sapien
ggtcaagaaccccttctacagctaa

SEQ ID NO: 5998788 - DNA, 25 bp, Homo sapien
gattttgagttacaaattctgggtg

SEQ ID NO: 5998789 - DNA, 25 bp, Homo sapien
caaacaagctagaaatgccattaaa

SEQ ID NO: 5998790 - DNA, 25 bp, Homo sapien
aatttgtttgattttaatgattttg

SEQ ID NO: 5998791 - DNA, 25 bp, Homo sapien
tgtaacctcgaataaatcgaacaac

SEQ ID NO: 5998792 - DNA, 25 bp, Homo sapien
ttcttaccaagaggtttcactgaac

SEQ ID NO: 5998793 - DNA, 25 bp, Homo sapien
tttgcaattaaaaaagtccctgctc

SEQ ID NO: 5998794 - DNA, 25 bp, Homo sapien
gtagaggtgcctttgggactgttgt

SEQ ID NO: 5998795 - DNA, 25 bp, Homo sapien
tgtcttgaaaatctgcgattttggg

SEQ ID NO: 5998796 - DNA, 25 bp, Homo sapien
ggatgctttatttacacggtcttgg

SEQ ID NO: 5998797 - DNA, 25 bp, Homo sapien
aaattaaacctacgaaagttgctga

SEQ ID NO: 5998798 - DNA, 25 bp, Homo sapien
aaccagccttcaattagttacatct

SEQ ID NO: 5998799 - DNA, 25 bp, Homo sapien
atcggtagaggtgcctttgggactg

SEQ ID NO: 5998800 - DNA, 25 bp, Homo sapien
ataaagtttatcaacaccttgccat

SEQ ID NO: 5998801 - DNA, 25 bp, Homo sapien
gtacaggaaaatcggtagaggtgcc

SEQ ID NO: 5998802 - DNA, 25 bp, Homo sapien
gcgagatgcttatcggcaaagccat

SEQ ID NO: 5998803 - DNA, 25 bp, Homo sapien
gcgcctgaattgatcattggttgta

SEQ ID NO: 5998804 - DNA, 25 bp, Homo sapien
gcttaccagaaactctacaaatcga

SEQ ID NO: 5998805 - DNA, 25 bp, Homo sapien
tagttacatctgttcaagattttat

SEQ ID NO: 5998806 - DNA, 25 bp, Homo sapien
taataaagtttatcaacaccttgcc

SEQ ID NO: 5998807 - DNA, 25 bp, Homo sapien
gtattttggccattccggtccagat

SEQ ID NO: 5998808 - DNA, 25 bp, Homo sapien
cctttgcaattaaaaaagtccctgc

SEQ ID NO: 5998809 - DNA, 25 bp, Homo sapien
gtgacaaacaagctagaaatgccat

SEQ ID NO: 5998810 - DNA, 25 bp, Homo sapien
tgggggcttggttgtgtcatgggcg

SEQ ID NO: 5998811 - DNA, 25 bp, Homo sapien
aaatgccattaaaacatatcaggct

SEQ ID NO: 5998812 - DNA, 25 bp, Homo sapien
ggcttggttgtgtcatgggcgagat

SEQ ID NO: 5998813 - DNA, 25 bp, Homo sapien
tctttactcatttgtccccgcaaga

SEQ ID NO: 5998814 - DNA, 25 bp, Homo sapien
attgcccgcgggatgctttatttac

SEQ ID NO: 5998815 - DNA, 25 bp, Homo sapien
ctctacaaatcgagattaatcgtta

SEQ ID NO: 5998816 - DNA, 25 bp, Homo sapien
gcccatcagttctttaatgaattaa

SEQ ID NO: 5998817 - DNA, 25 bp, Homo sapien
tttacacggtcttggcgtttgtcat

SEQ ID NO: 5998818 - DNA, 25 bp, Homo sapien
gatatcaaaccatccaatgttcttg

SEQ ID NO: 5998819 - DNA, 25 bp, Homo sapien
cgatggccctctattttccaaacca

SEQ ID NO: 5998820 - DNA, 25 bp, Homo sapien
ccttgcccatcagttctttaatgaa

SEQ ID NO: 5998821 - DNA, 25 bp, Homo sapien
gacactttcttaccaagaggtttca

SEQ ID NO: 5998822 - DNA, 25 bp, Homo sapien
caattaaaaaagtccctgctcatac

SEQ ID NO: 5998823 - DNA, 25 bp, Homo sapien
gaaccacaacaaagactgtctccaa

SEQ ID NO: 5998824 - DNA, 25 bp, Homo sapien
gaacataaccagccttcaattagtt

SEQ ID NO: 5998825 - DNA, 25 bp, Homo sapien
tgatcattggttgtacccaatatac

SEQ ID NO: 5998826 - DNA, 25 bp, Homo sapien
tgtgtcatgggcgagatgcttatcg

SEQ ID NO: 5998827 - DNA, 25 bp, Homo sapien
cactttcttaccaagaggtttcact

SEQ ID NO: 5998828 - DNA, 25 bp, Homo sapien
tacacttatcagattgcccgcggga

SEQ ID NO: 5998829 - DNA, 25 bp, Homo sapien
catatcaggctatacacttatcaga

SEQ ID NO: 5998830 - DNA, 25 bp, Homo sapien
ccggtccagatggtatcgatctttt

SEQ ID NO: 5998831 - DNA, 25 bp, Homo sapien
gtcatcgtgatatcaaaccatccaa

SEQ ID NO: 5998832 - DNA, 25 bp, Homo sapien
gcctgaattgatcattggttgtacc

SEQ ID NO: 5998833 - DNA, 25 bp, Homo sapien
taaatcgaacaacacgaggcggatg

SEQ ID NO: 5998834 - DNA, 25 bp, Homo sapien
aactggttgggcccctttgcaatta

SEQ ID NO: 5998835 - DNA, 25 bp, Homo sapien
ttttgggtctgccaaaaaattggaa

SEQ ID NO: 5998836 - DNA, 25 bp, Homo sapien
catttgtccccgcaagataataaag

SEQ ID NO: 5998837 - DNA, 25 bp, Homo sapien
aagaaccccttctacagctaaggga

SEQ ID NO: 5998838 - DNA, 25 bp, Homo sapien
gccattccggtccagatggtatcga

SEQ ID NO: 5998839 - DNA, 25 bp, Homo sapien
ataaccagccttcaattagttacat

SEQ ID NO: 5998840 - DNA, 25 bp, Homo sapien
ccactgttctcgggctcttcgcaac

SEQ ID NO: 5998841 - DNA, 25 bp, Homo sapien
caagctagaaatgccattaaaacat

SEQ ID NO: 5998842 - DNA, 25 bp, Homo sapien
aattctgggtgaatttgctgataaa

SEQ ID NO: 5998843 - DNA, 25 bp, Homo sapien
cagaaactctacaaatcgagattaa

SEQ ID NO: 5998844 - DNA, 25 bp, Homo sapien
tccagatggtatcgatcttttgatg

SEQ ID NO: 5998845 - DNA, 25 bp, Homo sapien
gtcctcccgataaaagattcatttt

SEQ ID NO: 5998846 - DNA, 25 bp, Homo sapien
aagctaccaaatttgtttgatttta

SEQ ID NO: 5998847 - DNA, 25 bp, Homo sapien
taaacctacgaaagttgctgaataa

SEQ ID NO: 5998848 - DNA, 25 bp, Homo sapien
ttatgtgacaaacaagctagaaatg

SEQ ID NO: 5998849 - DNA, 25 bp, Homo sapien
ccggcctacgatggccctctatttt

SEQ ID NO: 5998850 - DNA, 25 bp, Homo sapien
tactcatttgtccccgcaagataat

SEQ ID NO: 5998851 - DNA, 25 bp, Homo sapien
tgttaggtcctcccgataaaagatt

SEQ ID NO: 5998852 - DNA, 25 bp, Homo sapien
tctccaagaagaatccttgcccatc

SEQ ID NO: 5998853 - DNA, 25 bp, Homo sapien
acggaagagcagaatggtgttcctc

SEQ ID NO: 5998854 - DNA, 25 bp, Homo sapien
agccttcaattagttacatctgttc

SEQ ID NO: 5998855 - DNA, 25 bp, Homo sapien
caagaagaatccttgcccatcagtt

SEQ ID NO: 5998856 - DNA, 25 bp, Homo sapien
tcaagctaccaaatttgtttgattt

SEQ ID NO: 5998857 - DNA, 25 bp, Homo sapien
tcgcaacagaggtttgagaagtatt

SEQ ID NO: 5998858 - DNA, 25 bp, Homo sapien
tatcaaaccatccaatgttcttgta

SEQ ID NO: 5998859 - DNA, 25 bp, Homo sapien
tgtacaagcatatttaacccaggat

SEQ ID NO: 5998860 - DNA, 25 bp, Homo sapien
tttgtttgattttaatgattttgag

SEQ ID NO: 5998861 - DNA, 25 bp, Homo sapien
cggaaaccggtgtcttgaaaatctg

SEQ ID NO: 5998862 - DNA, 25 bp, Homo sapien
ttgggactgttgtacaagcatattt

SEQ ID NO: 5998863 - DNA, 25 bp, Homo sapien
ctctgcaaaggggatctgaattcat

SEQ ID NO: 5998864 - DNA, 25 bp, Homo sapien
tttactcatttgtccccgcaagata

SEQ ID NO: 5998865 - DNA, 25 bp, Homo sapien
aacacgaggcggatgctggtgaaag

SEQ ID NO: 5998866 - DNA, 25 bp, Homo sapien
attaaaaaagtccctgctcataccg

SEQ ID NO: 5998867 - DNA, 25 bp, Homo sapien
gctggtgaaagagtacaggaaaatc

SEQ ID NO: 5998868 - DNA, 25 bp, Homo sapien
ccccttctacagctaagggaaattg

SEQ ID NO: 5998869 - DNA, 25 bp, Homo sapien
tttccaaaccactgttctcgggctc

SEQ ID NO: 5998870 - DNA, 25 bp, Homo sapien
attgttaggtcctcccgataaaaga

SEQ ID NO: 5998871 - DNA, 25 bp, Homo sapien
attaatcgttatgtgacaaacaagc

SEQ ID NO: 5998872 - DNA, 25 bp, Homo sapien
ggcctacgatggccctctattttcc

SEQ ID NO: 5998873 - DNA, 25 bp, Homo sapien
cgaataaatcgaacaacacgaggcg

SEQ ID NO: 5998874 - DNA, 25 bp, Homo sapien
accacaacaaagactgtctccaaga

SEQ ID NO: 5998875 - DNA, 25 bp, Homo sapien
ctaaattgttaggtcctcccgataa

SEQ ID NO: 5998876 - DNA, 25 bp, Homo sapien
tttatagagcgcctgaattgatcat

SEQ ID NO: 5998877 - DNA, 25 bp, Homo sapien
gaaccccttctacagctaagggaaa

SEQ ID NO: 5998878 - DNA, 25 bp, Homo sapien
cttggttgtgtcatgggcgagatgc

SEQ ID NO: 5998879 - DNA, 25 bp, Homo sapien
tttcactgaaccaatcaagctacca

SEQ ID NO: 5998880 - DNA, 25 bp, Homo sapien
tatcggcaaagccatatttcaaggt

SEQ ID NO: 5998881 - DNA, 25 bp, Homo sapien
aggattgccgaccatccaaatatcg

SEQ ID NO: 5998882 - DNA, 25 bp, Homo sapien
agattcattttcttttcgaatccgg

SEQ ID NO: 5998883 - DNA, 25 bp, Homo sapien
cctacgatggccctctattttccaa

SEQ ID NO: 5998884 - DNA, 25 bp, Homo sapien
aaattgctaaattgttaggtcctcc

SEQ ID NO: 5998885 - DNA, 25 bp, Homo sapien
tttggccattccggtccagatggta

SEQ ID NO: 5998886 - DNA, 25 bp, Homo sapien
aataaatcgaacaacacgaggcgga

SEQ ID NO: 5998887 - DNA, 25 bp, Homo sapien
gcgtttgtcatcgtgatatcaaacc

SEQ ID NO: 5998888 - DNA, 25 bp, Homo sapien
aaatctgcgattttgggtctgccaa

SEQ ID NO: 5998889 - DNA, 25 bp, Homo sapien
ctggttgggcccctttgcaattaaa

SEQ ID NO: 5998890 - DNA, 25 bp, Homo sapien
acgaaccacaacaaagactgtctcc

SEQ ID NO: 5998891 - DNA, 25 bp, Homo sapien
gatatatgggggcttggttgtgtca

SEQ ID NO: 5998892 - DNA, 25 bp, Homo sapien
tggcgtttgtcatcgtgatatcaaa

SEQ ID NO: 5998893 - DNA, 25 bp, Homo sapien
gctgataaaattaaacctacgaaag

SEQ ID NO: 5998894 - DNA, 25 bp, Homo sapien
gattgccgaccatccaaatatcgtt

SEQ ID NO: 5998895 - DNA, 25 bp, Homo sapien
ccgataaaagattcattttcttttc

SEQ ID NO: 5998896 - DNA, 25 bp, Homo sapien
gggtgaatttgctgataaaattaaa

SEQ ID NO: 5998897 - DNA, 25 bp, Homo sapien
agattctgaggattgccgaccatcc

SEQ ID NO: 5998898 - DNA, 25 bp, Homo sapien
aaatattggtctacgaaccacaaca

SEQ ID NO: 5998899 - DNA, 25 bp, Homo sapien
ttgtcatcgtgatatcaaaccatcc

SEQ ID NO: 5998900 - DNA, 25 bp, Homo sapien
gaaaatcggtagaggtgcctttggg

SEQ ID NO: 5998901 - DNA, 25 bp, Homo sapien
atcgttatgtgacaaacaagctaga

SEQ ID NO: 5998902 - DNA, 25 bp, Homo sapien
ttaaaacatatcaggctatacactt

SEQ ID NO: 5998903 - DNA, 25 bp, Homo sapien
tatcaggctatacacttatcagatt

SEQ ID NO: 5998904 - DNA, 25 bp, Homo sapien
ttgggtctgccaaaaaattggaaca

SEQ ID NO: 5998905 - DNA, 25 bp, Homo sapien
agcatatttaacccaggataagaaa

SEQ ID NO: 5998906 - DNA, 25 bp, Homo sapien
tccaaaccactgttctcgggctctt

SEQ ID NO: 5998907 - DNA, 25 bp, Homo sapien
gccatggaatgcttaccagaaactc

SEQ ID NO: 5998908 - DNA, 25 bp, Homo sapien
ttaatgaattaaggaatgatgacac

SEQ ID NO: 5998909 - DNA, 25 bp, Homo sapien
tgcttatcggcaaagccatatttca

SEQ ID NO: 5998910 - DNA, 25 bp, Homo sapien
aaccactgttctcgggctcttcgca

SEQ ID NO: 5998911 - DNA, 25 bp, Homo sapien
actgtctccaagaagaatccttgcc

SEQ ID NO: 5998912 - DNA, 25 bp, Homo sapien
atgaaaatattggtctacgaaccac

SEQ ID NO: 5998913 - DNA, 25 bp, Homo sapien
aggaaaatcggtagaggtgcctttg

SEQ ID NO: 5998914 - DNA, 25 bp, Homo sapien
atcttttgatgaaaatattggtcta

SEQ ID NO: 5998915 - DNA, 25 bp, Homo sapien
tatcgttaaattgcagtatttcttt

SEQ ID NO: 5998916 - DNA, 25 bp, Homo sapien
tcaggctatacacttatcagattgc

SEQ ID NO: 5998917 - DNA, 25 bp, Homo sapien
tgtttgattttaatgattttgagtt

SEQ ID NO: 5998918 - DNA, 25 bp, Homo sapien
atgcttaccagaaactctacaaatc

SEQ ID NO: 5998919 - DNA, 25 bp, Homo sapien
ctcttcgcaacagaggtttgagaag

SEQ ID NO: 5998920 - DNA, 25 bp, Homo sapien
tggccattccggtccagatggtatc

SEQ ID NO: 5998921 - DNA, 25 bp, Homo sapien
ccaatcaagctaccaaatttgtttg

SEQ ID NO: 5998922 - DNA, 25 bp, Homo sapien
taatgattttgagttacaaattctg

SEQ ID NO: 5998923 - DNA, 25 bp, Homo sapien
aggcggatgctggtgaaagagtaca

SEQ ID NO: 5998924 - DNA, 25 bp, Homo sapien
caccttgccatggaatgcttaccag

SEQ ID NO: 5998925 - DNA, 25 bp, Homo sapien
ccagggaattacagattctgaggat

SEQ ID NO: 5998926 - DNA, 25 bp, Homo sapien
accatccaaatatcgttaaattgca

SEQ ID NO: 5998927 - DNA, 25 bp, Homo sapien
attttccaaaccactgttctcgggc

SEQ ID NO: 5998928 - DNA, 25 bp, Homo sapien
tggtgaaagagtacaggaaaatcgg

SEQ ID NO: 5998929 - DNA, 25 bp, Homo sapien
aaaaattggaacataaccagccttc

SEQ ID NO: 5998930 - DNA, 25 bp, Homo sapien
aactctacaaatcgagattaatcgt

SEQ ID NO: 5998931 - DNA, 25 bp, Homo sapien
agtttatcaacaccttgccatggaa

SEQ ID NO: 5998932 - DNA, 25 bp, Homo sapien
gtttgtcatcgtgatatcaaaccat

SEQ ID NO: 5998933 - DNA, 25 bp, Homo sapien
tcgaacaacacgaggcggatgctgg

SEQ ID NO: 5998934 - DNA, 25 bp, Homo sapien
cgaggcggatgctggtgaaagagta

SEQ ID NO: 5998935 - DNA, 25 bp, Homo sapien
aaagactgtctccaagaagaatcct

SEQ ID NO: 5998936 - DNA, 25 bp, Homo sapien
gataaaagattcattttcttttcga

SEQ ID NO: 5998937 - DNA, 25 bp, Homo sapien
agaaatgccattaaaacatatcagg

SEQ ID NO: 5998938 - DNA, 25 bp, Homo sapien
tctgaattcattgcagacgatgtaa

SEQ ID NO: 5998939 - DNA, 25 bp, Homo sapien
attttggccattccggtccagatgg

SEQ ID NO: 5998940 - DNA, 25 bp, Homo sapien
tcgtgatatcaaaccatccaatgtt

SEQ ID NO: 5998941 - DNA, 25 bp, Homo sapien
cgaccatccaaatatcgttaaattg

SEQ ID NO: 5998942 - DNA, 25 bp, Homo sapien
acataaccagccttcaattagttac

SEQ ID NO: 5998943 - DNA, 25 bp, Homo sapien
agacgatgtaacctcgaataaatcg

SEQ ID NO: 5998944 - DNA, 25 bp, Homo sapien
tggtctacgaaccacaacaaagact

SEQ ID NO: 5998945 - DNA, 25 bp, Homo sapien
agggaaattgctaaattgttaggtc

SEQ ID NO: 5998946 - DNA, 25 bp, Homo sapien
gtgaaagagtacaggaaaatcggta

SEQ ID NO: 5998947 - DNA, 25 bp, Homo sapien
gggcgagatgcttatcggcaaagcc

SEQ ID NO: 5998948 - DNA, 25 bp, Homo sapien
aatgatgacactttcttaccaagag

SEQ ID NO: 5998949 - DNA, 25 bp, Homo sapien
tggaatgcttaccagaaactctaca

SEQ ID NO: 5998950 - DNA, 25 bp, Homo sapien
ccaatataccacccagatcgatata

SEQ ID NO: 5998951 - DNA, 25 bp, Homo sapien
aggtcctcccgataaaagattcatt

SEQ ID NO: 5998952 - DNA, 25 bp, Homo sapien
ctacgaaccacaacaaagactgtct

SEQ ID NO: 5998953 - DNA, 25 bp, Homo sapien
gtccagggaattacagattctgagg

SEQ ID NO: 5998954 - DNA, 25 bp, Homo sapien
tgtagacccggaaaccggtgtcttg

SEQ ID NO: 5998955 - DNA, 25 bp, Homo sapien
tttcgaatccggcctacgatggccc

SEQ ID NO: 5998956 - DNA, 25 bp, Homo sapien
acagctaagggaaattgctaaattg

SEQ ID NO: 5998957 - DNA, 25 bp, Homo sapien
tgatgaaaatattggtctacgaacc

SEQ ID NO: 5998958 - DNA, 25 bp, Homo sapien
agattgcccgcgggatgctttattt

SEQ ID NO: 5998959 - DNA, 25 bp, Homo sapien
acaggaaaatcggtagaggtgcctt

SEQ ID NO: 5998960 - DNA, 25 bp, Homo sapien
taacctcgaataaatcgaacaacac

SEQ ID NO: 5998961 - DNA, 25 bp, Homo sapien
atgtctacggaagagcagaatggtg

SEQ ID NO: 5998962 - DNA, 25 bp, Homo sapien
atgctttatttacacggtcttggcg

SEQ ID NO: 5998963 - DNA, 25 bp, Homo sapien
ctctattttccaaaccactgttctc

SEQ ID NO: 5998964 - DNA, 25 bp, Homo sapien
tcatgggcgagatgcttatcggcaa

SEQ ID NO: 5998965 - DNA, 25 bp, Homo sapien
atcgagattaatcgttatgtgacaa

SEQ ID NO: 5998966 - DNA, 25 bp, Homo sapien
tatacacttatcagattgcccgcgg

SEQ ID NO: 5998967 - DNA, 25 bp, Homo sapien
aagaatccttgcccatcagttcttt

SEQ ID NO: 5998968 - DNA, 25 bp, Homo sapien
ttgccatggaatgcttaccagaaac

SEQ ID NO: 5998969 - DNA, 25 bp, Homo sapien
gaatttgctgataaaattaaaccta

SEQ ID NO: 5998970 - DNA, 25 bp, Homo sapien
ggctcttcgcaacagaggtttgaga

SEQ ID NO: 5998971 - DNA, 25 bp, Homo sapien
ggtttcactgaaccaatcaagctac

SEQ ID NO: 5998972 - DNA, 25 bp, Homo sapien
aatggtgttcctctgcaaaggggat

SEQ ID NO: 5998973 - DNA, 25 bp, Homo sapien
atggccctctattttccaaaccact

SEQ ID NO: 5998974 - DNA, 25 bp, Homo sapien
gacaaacaagctagaaatgccatta

SEQ ID NO: 5998975 - DNA, 25 bp, Homo sapien
cccgcgggatgctttatttacacgg

SEQ ID NO: 5998976 - DNA, 25 bp, Homo sapien
ttcaagattttatagagcgcctgaa

SEQ ID NO: 5998977 - DNA, 25 bp, Homo sapien
tcggcaaagccatatttcaaggtca

SEQ ID NO: 5998978 - DNA, 25 bp, Homo sapien
tgctcataccgagtacaagtccagg

SEQ ID NO: 5998979 - DNA, 25 bp, Homo sapien
ggatgctggtgaaagagtacaggaa

SEQ ID NO: 5998980 - DNA, 25 bp, Homo sapien
caaattctgggtgaatttgctgata

SEQ ID NO: 5998981 - DNA, 25 bp, Homo sapien
tcgttaaattgcagtatttctttac

SEQ ID NO: 5998982 - DNA, 25 bp, Homo sapien
cttcgcaacagaggtttgagaagta

SEQ ID NO: 5998983 - DNA, 25 bp, Homo sapien
cccagatcgatatatgggggcttgg

SEQ ID NO: 5998984 - DNA, 25 bp, Homo sapien
aatataccacccagatcgatatatg

SEQ ID NO: 5998985 - DNA, 25 bp, Homo sapien
tcattttcttttcgaatccggccta

SEQ ID NO: 5998986 - DNA, 25 bp, Homo sapien
cgggatgctttatttacacggtctt

SEQ ID NO: 5998987 - DNA, 25 bp, Homo sapien
cgcgggatgctttatttacacggtc

SEQ ID NO: 5998988 - DNA, 25 bp, Homo sapien
gtatcgatcttttgatgaaaatatt

SEQ ID NO: 5998989 - DNA, 25 bp, Homo sapien
acgatgtaacctcgaataaatcgaa

SEQ ID NO: 5998990 - DNA, 25 bp, Homo sapien
ttgcccatcagttctttaatgaatt

SEQ ID NO: 5998991 - DNA, 25 bp, Homo sapien
aaaaagtccctgctcataccgagta

SEQ ID NO: 5998992 - DNA, 25 bp, Homo sapien
ccaagaggtttcactgaaccaatca

SEQ ID NO: 5998993 - DNA, 25 bp, Homo sapien
ttgcagtatttctttactcatttgt

SEQ ID NO: 5998994 - DNA, 25 bp, Homo sapien
agaagaatccttgcccatcagttct

SEQ ID NO: 5998995 - DNA, 25 bp, Homo sapien
gctttatttacacggtcttggcgtt

SEQ ID NO: 5998996 - DNA, 25 bp, Homo sapien
aaggtcaagaaccccttctacagct

SEQ ID NO: 5998997 - DNA, 25 bp, Homo sapien
aggctatacacttatcagattgccc

SEQ ID NO: 5998998 - DNA, 25 bp, Homo sapien
tttcaaggtcaagaaccccttctac

SEQ ID NO: 5998999 - DNA, 25 bp, Homo sapien
agctaagggaaattgctaaattgtt

SEQ ID NO: 5999000 - DNA, 25 bp, Homo sapien
gaaaatattggtctacgaaccacaa

SEQ ID NO: 5999001 - DNA, 25 bp, Homo sapien
tgaattaaggaatgatgacactttc

SEQ ID NO: 5999002 - DNA, 25 bp, Homo sapien
gcagtatttctttactcatttgtcc

SEQ ID NO: 5999003 - DNA, 25 bp, Homo sapien
gaggtttcactgaaccaatcaagct

SEQ ID NO: 5999004 - DNA, 25 bp, Homo sapien
ccagccttcaattagttacatctgt

SEQ ID NO: 5999005 - DNA, 25 bp, Homo sapien
gggtctgccaaaaaattggaacata

SEQ ID NO: 5999006 - DNA, 25 bp, Homo sapien
gtctacggaagagcagaatggtgtt

SEQ ID NO: 5999007 - DNA, 25 bp, Homo sapien
aattgcagtatttctttactcattt

SEQ ID NO: 5999008 - DNA, 25 bp, Homo sapien
ggggcttggttgtgtcatgggcgag

SEQ ID NO: 5999009 - DNA, 25 bp, Homo sapien
gagatgcttatcggcaaagccatat

SEQ ID NO: 5999010 - DNA, 25 bp, Homo sapien
aaggaatgatgacactttcttacca

SEQ ID NO: 5999011 - DNA, 25 bp, Homo sapien
atgacactttcttaccaagaggttt

SEQ ID NO: 5999012 - DNA, 25 bp, Homo sapien
gttgtacaagcatatttaacccagg

SEQ ID NO: 5999013 - DNA, 25 bp, Homo sapien
caaatatcgttaaattgcagtattt

SEQ ID NO: 5999014 - DNA, 25 bp, Homo sapien
tgtccccgcaagataataaagttta

SEQ ID NO: 5999015 - DNA, 25 bp, Homo sapien
taccgagtacaagtccagggaatta

SEQ ID NO: 5999016 - DNA, 25 bp, Homo sapien
gcgattttgggtctgccaaaaaatt

SEQ ID NO: 5999017 - DNA, 25 bp, Homo sapien
tcgaatccggcctacgatggccctc

SEQ ID NO: 5999018 - DNA, 25 bp, Homo sapien
cattccggtccagatggtatcgatc

SEQ ID NO: 5999019 - DNA, 25 bp, Homo sapien
acaaatcgagattaatcgttatgtg

SEQ ID NO: 5999020 - DNA, 25 bp, Homo sapien
gtgttcctctgcaaaggggatctga

SEQ ID NO: 5999021 - DNA, 25 bp, Homo sapien
atgattttgagttacaaattctggg

SEQ ID NO: 5999022 - DNA, 25 bp, Homo sapien
acaacacgaggcggatgctggtgaa

SEQ ID NO: 5999023 - DNA, 25 bp, Homo sapien
ctcataccgagtacaagtccaggga

SEQ ID NO: 5999024 - DNA, 25 bp, Homo sapien
tatagagcgcctgaattgatcattg

SEQ ID NO: 5999025 - DNA, 25 bp, Homo sapien
aagccatatttcaaggtcaagaacc

SEQ ID NO: 5999026 - DNA, 25 bp, Homo sapien
gcagaatggtgttcctctgcaaagg

SEQ ID NO: 5999027 - DNA, 25 bp, Homo sapien
tagagcgcctgaattgatcattggt

SEQ ID NO: 5999028 - DNA, 25 bp, Homo sapien
gcagacgatgtaacctcgaataaat

SEQ ID NO: 5999029 - DNA, 25 bp, Homo sapien
tttgatgaaaatattggtctacgaa

SEQ ID NO: 5999030 - DNA, 25 bp, Homo sapien
gccaaaaaattggaacataaccagc

SEQ ID NO: 5999031 - DNA, 25 bp, Homo sapien
gggatctgaattcattgcagacgat

SEQ ID NO: 5999032 - DNA, 25 bp, Homo sapien
ctacggaagagcagaatggtgttcc

SEQ ID NO: 5999033 - DNA, 25 bp, Homo sapien
caagcatatttaacccaggataaga

SEQ ID NO: 5999034 - DNA, 25 bp, Homo sapien
acaagtccagggaattacagattct

SEQ ID NO: 5999035 - DNA, 25 bp, Homo sapien
gggactgttgtacaagcatatttaa

SEQ ID NO: 5999036 - DNA, 25 bp, Homo sapien
tccaaatatcgttaaattgcagtat

SEQ ID NO: 5999037 - DNA, 25 bp, Homo sapien
tacatctgttcaagattttatagag

SEQ ID NO: 5999038 - DNA, 25 bp, Homo sapien
ttctgggtgaatttgctgataaaat

SEQ ID NO: 5999039 - DNA, 25 bp, Homo sapien
cttggcgtttgtcatcgtgatatca

SEQ ID NO: 5999040 - DNA, 25 bp, Homo sapien
cacccagatcgatatatgggggctt

SEQ ID NO: 5999041 - DNA, 25 bp, Homo sapien
atccttgcccatcagttctttaatg

SEQ ID NO: 5999042 - DNA, 25 bp, Homo sapien
gaaactctacaaatcgagattaatc

SEQ ID NO: 5999043 - DNA, 25 bp, Homo sapien
aatcgaacaacacgaggcggatgct

SEQ ID NO: 5999044 - DNA, 25 bp, Homo sapien
ggttgtacccaatataccacccaga

SEQ ID NO: 5999045 - DNA, 25 bp, Homo sapien
ttcttttcgaatccggcctacgatg

SEQ ID NO: 5999046 - DNA, 25 bp, Homo sapien
atcattggttgtacccaatatacca

SEQ ID NO: 5999047 - DNA, 25 bp, Homo sapien
gagttacaaattctgggtgaatttg

SEQ ID NO: 5999048 - DNA, 25 bp, Homo sapien
aaaccatccaatgttcttgtagacc

SEQ ID NO: 5999049 - DNA, 25 bp, Homo sapien
agactgtctccaagaagaatccttg

SEQ ID NO: 5999050 - DNA, 25 bp, Homo sapien
ggtttgagaagtattttggccattc

SEQ ID NO: 5999051 - DNA, 25 bp, Homo sapien
tttgtccccgcaagataataaagtt

SEQ ID NO: 5999052 - DNA, 25 bp, Homo sapien
ttgcagacgatgtaacctcgaataa

SEQ ID NO: 5999053 - DNA, 25 bp, Homo sapien
caaaccactgttctcgggctcttcg

SEQ ID NO: 5999054 - DNA, 25 bp, Homo sapien
cgggctcttcgcaacagaggtttga

SEQ ID NO: 5999055 - DNA, 25 bp, Homo sapien
cctcccgataaaagattcattttct

SEQ ID NO: 5999056 - DNA, 25 bp, Homo sapien
gaaaatctgcgattttgggtctgcc

SEQ ID NO: 5999057 - DNA, 25 bp, Homo sapien
tgttctcgggctcttcgcaacagag

SEQ ID NO: 5999058 - DNA, 25 bp, Homo sapien
ttgtacccaatataccacccagatc

SEQ ID NO: 5999059 - DNA, 25 bp, Homo sapien
tgagaagtattttggccattccggt

SEQ ID NO: 5999060 - DNA, 25 bp, Homo sapien
ttccggtccagatggtatcgatctt

SEQ ID NO: 5999061 - DNA, 25 bp, Homo sapien
tatatgggggcttggttgtgtcatg

SEQ ID NO: 5999062 - DNA, 25 bp, Homo sapien
tacaagcatatttaacccaggataa

SEQ ID NO: 5999063 - DNA, 25 bp, Homo sapien
caatgttcttgtagacccggaaacc

SEQ ID NO: 5999064 - DNA, 25 bp, Homo sapien
ttttgagttacaaattctgggtgaa

SEQ ID NO: 5999065 - DNA, 25 bp, Homo sapien
aacatatcaggctatacacttatca

SEQ ID NO: 5999066 - DNA, 25 bp, Homo sapien
ctcatttgtccccgcaagataataa

SEQ ID NO: 5999067 - DNA, 25 bp, Homo sapien
gccattaaaacatatcaggctatac

SEQ ID NO: 5999068 - DNA, 25 bp, Homo sapien
ttgagttacaaattctgggtgaatt

SEQ ID NO: 5999069 - DNA, 25 bp, Homo sapien
ttggttgtacccaatataccaccca

SEQ ID NO: 5999070 - DNA, 25 bp, Homo sapien
aaagattcattttcttttcgaatcc

SEQ ID NO: 5999071 - DNA, 25 bp, Homo sapien
tgctaaattgttaggtcctcccgat

SEQ ID NO: 5999072 - DNA, 25 bp, Homo sapien
ttgctgataaaattaaacctacgaa

SEQ ID NO: 5999073 - DNA, 25 bp, Homo sapien
catccaaatatcgttaaattgcagt

SEQ ID NO: 5999074 - DNA, 25 bp, Homo sapien
tcaacaccttgccatggaatgctta

SEQ ID NO: 5999075 - DNA, 25 bp, Homo sapien
actgaaccaatcaagctaccaaatt

SEQ ID NO: 5999076 - DNA, 25 bp, Homo sapien
tcgatatatgggggcttggttgtgt

SEQ ID NO: 5999077 - DNA, 25 bp, Homo sapien
gaatccttgcccatcagttctttaa

SEQ ID NO: 5999078 - DNA, 25 bp, Homo sapien
ggcaaagccatatttcaaggtcaag

SEQ ID NO: 5999079 - DNA, 25 bp, Homo sapien
aggggatctgaattcattgcagacg

SEQ ID NO: 5999080 - DNA, 25 bp, Homo sapien
tatcaacaccttgccatggaatgct

SEQ ID NO: 5999081 - DNA, 25 bp, Homo sapien
atttgctgataaaattaaacctacg

SEQ ID NO: 5999082 - DNA, 25 bp, Homo sapien
ccctctattttccaaaccactgttc

SEQ ID NO: 5999083 - DNA, 25 bp, Homo sapien
cacaacaaagactgtctccaagaag

SEQ ID NO: 5999084 - DNA, 25 bp, Homo sapien
catatttcaaggtcaagaacccctt

SEQ ID NO: 5999085 - DNA, 25 bp, Homo sapien
gttaaattgcagtatttctttactc

SEQ ID NO: 5999086 - DNA, 25 bp, Homo sapien
caaaaaattggaacataaccagcct

SEQ ID NO: 5999087 - DNA, 25 bp, Homo sapien
taccaagaggtttcactgaaccaat

SEQ ID NO: 5999088 - DNA, 25 bp, Homo sapien
gaacaacacgaggcggatgctggtg

SEQ ID NO: 5999089 - DNA, 25 bp, Homo sapien
catcgtgatatcaaaccatccaatg

SEQ ID NO: 5999090 - DNA, 25 bp, Homo sapien
ttcattgcagacgatgtaacctcga

SEQ ID NO: 5999091 - DNA, 25 bp, Homo sapien
attgctaaattgttaggtcctcccg

SEQ ID NO: 5999092 - DNA, 25 bp, Homo sapien
agattaatcgttatgtgacaaacaa

SEQ ID NO: 5999093 - DNA, 25 bp, Homo sapien
acaaagactgtctccaagaagaatc

SEQ ID NO: 5999094 - DNA, 25 bp, Homo sapien
cccgcaagataataaagtttatcaa

SEQ ID NO: 5999095 - DNA, 25 bp, Homo sapien
caagattttatagagcgcctgaatt

SEQ ID NO: 5999096 - DNA, 25 bp, Homo sapien
tgttcaagattttatagagcgcctg

SEQ ID NO: 5999097 - DNA, 25 bp, Homo sapien
tacaaattctgggtgaatttgctga

SEQ ID NO: 5999098 - DNA, 25 bp, Homo sapien
gtctgccaaaaaattggaacataac

SEQ ID NO: 5999099 - DNA, 25 bp, Homo sapien
ggccctctattttccaaaccactgt

SEQ ID NO: 5999100 - DNA, 25 bp, Homo sapien
ctcgaataaatcgaacaacacgagg

SEQ ID NO: 5999101 - DNA, 25 bp, Homo sapien
cttttgatgaaaatattggtctacg

SEQ ID NO: 5999102 - DNA, 25 bp, Homo sapien
aagataataaagtttatcaacacct

SEQ ID NO: 5999103 - DNA, 25 bp, Homo sapien
atctgcgattttgggtctgccaaaa

SEQ ID NO: 5999104 - DNA, 25 bp, Homo sapien
catatttaacccaggataagaaaaa

SEQ ID NO: 5999105 - DNA, 25 bp, Homo sapien
ggaatgatgacactttcttaccaag

SEQ ID NO: 5999106 - DNA, 25 bp, Homo sapien
tgtcatgggcgagatgcttatcggc

SEQ ID NO: 5999107 - DNA, 25 bp, Homo sapien
cttatcagattgcccgcgggatgct

SEQ ID NO: 5999108 - DNA, 25 bp, Homo sapien
atccggcctacgatggccctctatt

SEQ ID NO: 5999109 - DNA, 25 bp, Homo sapien
ccttgccatggaatgcttaccagaa

SEQ ID NO: 5999110 - DNA, 25 bp, Homo sapien
atcagttctttaatgaattaaggaa

SEQ ID NO: 5999111 - DNA, 25 bp, Homo sapien
cattaaaacatatcaggctatacac

SEQ ID NO: 5999112 - DNA, 25 bp, Homo sapien
atattggtctacgaaccacaacaaa

SEQ ID NO: 5999113 - DNA, 25 bp, Homo sapien
gctatacacttatcagattgcccgc

SEQ ID NO: 5999114 - DNA, 25 bp, Homo sapien
tctgaggattgccgaccatccaaat

SEQ ID NO: 5999115 - DNA, 25 bp, Homo sapien
atgccattaaaacatatcaggctat

SEQ ID NO: 5999116 - DNA, 25 bp, Homo sapien
tctgttcaagattttatagagcgcc

SEQ ID NO: 5999117 - DNA, 25 bp, Homo sapien
ttctcgggctcttcgcaacagaggt

SEQ ID NO: 5999118 - DNA, 25 bp, Homo sapien
gaattgatcattggttgtacccaat

SEQ ID NO: 5999119 - DNA, 25 bp, Homo sapien
tatcagattgcccgcgggatgcttt

SEQ ID NO: 5999120 - DNA, 25 bp, Homo sapien
ccatcagttctttaatgaattaagg

SEQ ID NO: 5999121 - DNA, 25 bp, Homo sapien
tcagattgcccgcgggatgctttat

SEQ ID NO: 5999122 - DNA, 25 bp, Homo sapien
cagatggtatcgatcttttgatgaa

SEQ ID NO: 5999123 - DNA, 25 bp, Homo sapien
gtgatatcaaaccatccaatgttct

SEQ ID NO: 5999124 - DNA, 25 bp, Homo sapien
aatgaattaaggaatgatgacactt

SEQ ID NO: 5999125 - DNA, 25 bp, Homo sapien
attctgaggattgccgaccatccaa

SEQ ID NO: 5999126 - DNA, 25 bp, Homo sapien
ctgaattgatcattggttgtaccca

SEQ ID NO: 5999127 - DNA, 25 bp, Homo sapien
attggaacataaccagccttcaatt

SEQ ID NO: 5999128 - DNA, 25 bp, Homo sapien
acagattctgaggattgccgaccat

SEQ ID NO: 5999129 - DNA, 25 bp, Homo sapien
aaaggggatctgaattcattgcaga

SEQ ID NO: 5999130 - DNA, 25 bp, Homo sapien
ctttcttaccaagaggtttcactga

SEQ ID NO: 5999131 - DNA, 25 bp, Homo sapien
tttatcaacaccttgccatggaatg

SEQ ID NO: 5999132 - DNA, 25 bp, Homo sapien
tggttgtgtcatgggcgagatgctt

SEQ ID NO: 5999133 - DNA, 25 bp, Homo sapien
attggtctacgaaccacaacaaaga

SEQ ID NO: 5999134 - DNA, 25 bp, Homo sapien
ccggtgtcttgaaaatctgcgattt

SEQ ID NO: 5999135 - DNA, 25 bp, Homo sapien
ctcgggctcttcgcaacagaggttt

SEQ ID NO: 5999136 - DNA, 25 bp, Homo sapien
taaaaaagtccctgctcataccgag

SEQ ID NO: 5999137 - DNA, 25 bp, Homo sapien
gaaaccggtgtcttgaaaatctgcg

SEQ ID NO: 5999138 - DNA, 25 bp, Homo sapien
aacagaggtttgagaagtattttgg

SEQ ID NO: 5999139 - DNA, 25 bp, Homo sapien
aaccggtgtcttgaaaatctgcgat

SEQ ID NO: 5999140 - DNA, 25 bp, Homo sapien
gtgcctttgggactgttgtacaagc

SEQ ID NO: 5999141 - DNA, 25 bp, Homo sapien
aattcattgcagacgatgtaacctc

SEQ ID NO: 5999142 - DNA, 25 bp, Homo sapien
gagcagaatggtgttcctctgcaaa

SEQ ID NO: 5999143 - DNA, 25 bp, Homo sapien
cttttcgaatccggcctacgatggc

SEQ ID NO: 5999144 - DNA, 25 bp, Homo sapien
tttatttacacggtcttggcgtttg

SEQ ID NO: 5999145 - DNA, 25 bp, Homo sapien
cttaccaagaggtttcactgaacca

SEQ ID NO: 5999146 - DNA, 25 bp, Homo sapien
ttctacagctaagggaaattgctaa

SEQ ID NO: 5999147 - DNA, 25 bp, Homo sapien
tgaaccaatcaagctaccaaatttg

SEQ ID NO: 5999148 - DNA, 25 bp, Homo sapien
tatttcaaggtcaagaaccccttct

SEQ ID NO: 5999149 - DNA, 25 bp, Homo sapien
gctaccaaatttgtttgattttaat

SEQ ID NO: 5999150 - DNA, 25 bp, Homo sapien
cattggttgtacccaatataccacc

SEQ ID NO: 5999151 - DNA, 25 bp, Homo sapien
tgaattcattgcagacgatgtaacc

SEQ ID NO: 5999152 - DNA, 25 bp, Homo sapien
ctgggtgaatttgctgataaaatta

SEQ ID NO: 5999153 - DNA, 25 bp, Homo sapien
accatccaatgttcttgtagacccg

SEQ ID NO: 5999154 - DNA, 25 bp, Homo sapien
aaaacatatcaggctatacacttat

SEQ ID NO: 5999155 - DNA, 25 bp, Homo sapien
taaattgcagtatttctttactcat

SEQ ID NO: 5999156 - DNA, 25 bp, Homo sapien
attaaacctacgaaagttgctgaat

SEQ ID NO: 5999157 - DNA, 25 bp, Homo sapien
ttaccagaaactctacaaatcgaga

SEQ ID NO: 5999158 - DNA, 25 bp, Homo sapien
actgttctcgggctcttcgcaacag

SEQ ID NO: 5999159 - DNA, 25 bp, Homo sapien
ctacaaatcgagattaatcgttatg

SEQ ID NO: 5999160 - DNA, 25 bp, Homo sapien
tgcccgcgggatgctttatttacac

SEQ ID NO: 5999161 - DNA, 25 bp, Homo sapien
agtatttctttactcatttgtcccc

SEQ ID NO: 5999162 - DNA, 25 bp, Homo sapien
caaagccatatttcaaggtcaagaa

SEQ ID NO: 5999163 - DNA, 25 bp, Homo sapien
aacaagctagaaatgccattaaaac

SEQ ID NO: 5999164 - DNA, 25 bp, Homo sapien
agggaattacagattctgaggattg

SEQ ID NO: 5999165 - DNA, 25 bp, Homo sapien
aagagtacaggaaaatcggtagagg

SEQ ID NO: 5999166 - DNA, 25 bp, Homo sapien
tggtgttcctctgcaaaggggatct

SEQ ID NO: 5999167 - DNA, 25 bp, Homo sapien
ctagaaatgccattaaaacatatca

SEQ ID NO: 5999168 - DNA, 25 bp, Homo sapien
tggaacataaccagccttcaattag

SEQ ID NO: 5999169 - DNA, 25 bp, Homo sapien
ccttctacagctaagggaaattgct

SEQ ID NO: 5999170 - DNA, 25 bp, Homo sapien
tcttgaaaatctgcgattttgggtc

SEQ ID NO: 5999171 - DNA, 25 bp, Homo sapien
tatttctttactcatttgtccccgc

SEQ ID NO: 5999172 - DNA, 25 bp, Homo sapien
gaggtttgagaagtattttggccat

SEQ ID NO: 5999173 - DNA, 25 bp, Homo sapien
attttatagagcgcctgaattgatc

SEQ ID NO: 5999174 - DNA, 25 bp, Homo sapien
tcccgataaaagattcattttcttt

SEQ ID NO: 5999175 - DNA, 25 bp, Homo sapien
tcaaggtcaagaaccccttctacag

SEQ ID NO: 5999176 - DNA, 25 bp, Homo sapien
gcggatgctggtgaaagagtacagg

SEQ ID NO: 5999177 - DNA, 25 bp, Homo sapien
gactgttgtacaagcatatttaacc

SEQ ID NO: 5999178 - DNA, 25 bp, Homo sapien
gttgtgtcatgggcgagatgcttat

SEQ ID NO: 5999179 - DNA, 25 bp, Homo sapien
ttgaaaatctgcgattttgggtctg

SEQ ID NO: 5999180 - DNA, 25 bp, Homo sapien
agaagtattttggccattccggtcc

SEQ ID NO: 5999181 - DNA, 25 bp, Homo sapien
tgattttaatgattttgagttacaa

SEQ ID NO: 5999182 - DNA, 25 bp, Homo sapien
aaccaatcaagctaccaaatttgtt

SEQ ID NO: 5999183 - DNA, 25 bp, Homo sapien
agaatggtgttcctctgcaaagggg

SEQ ID NO: 5999184 - DNA, 25 bp, Homo sapien
catccaatgttcttgtagacccgga

SEQ ID NO: 5999185 - DNA, 25 bp, Homo sapien
ggaaattgctaaattgttaggtcct

SEQ ID NO: 5999186 - DNA, 25 bp, Homo sapien
cgatcttttgatgaaaatattggtc

SEQ ID NO: 5999187 - DNA, 25 bp, Homo sapien
ctgcgattttgggtctgccaaaaaa

SEQ ID NO: 5999188 - DNA, 25 bp, Homo sapien
aattacagattctgaggattgccga

SEQ ID NO: 5999189 - DNA, 25 bp, Homo sapien
tcaaaccatccaatgttcttgtaga

SEQ ID NO: 5999190 - DNA, 25 bp, Homo sapien
aaattggaacataaccagccttcaa

SEQ ID NO: 5999191 - DNA, 25 bp, Homo sapien
gaaaaactggttgggcccctttgca

SEQ ID NO: 5999192 - DNA, 25 bp, Homo sapien
tgaggattgccgaccatccaaatat

SEQ ID NO: 5999193 - DNA, 25 bp, Homo sapien
gagcgcctgaattgatcattggttg

SEQ ID NO: 5999194 - DNA, 25 bp, Homo sapien
cgagattaatcgttatgtgacaaac

SEQ ID NO: 5999195 - DNA, 25 bp, Homo sapien
gagtacaggaaaatcggtagaggtg

SEQ ID NO: 5999196 - DNA, 25 bp, Homo sapien
gccatatttcaaggtcaagaacccc

SEQ ID NO: 5999197 - DNA, 25 bp, Homo sapien
gatgtaacctcgaataaatcgaaca

SEQ ID NO: 5999198 - DNA, 25 bp, Homo sapien
acatcgtctgcaatgaattcagatc

SEQ ID NO: 5999199 - DNA, 25 bp, Homo sapien
gaaggctggttatgttccaattttt

SEQ ID NO: 5999200 - DNA, 25 bp, Homo sapien
tgttgtggttcgtagaccaatattt

SEQ ID NO: 5999201 - DNA, 25 bp, Homo sapien
tttcttatcctgggttaaatatgct

SEQ ID NO: 5999202 - DNA, 25 bp, Homo sapien
catcccgcgggcaatctgataagtg

SEQ ID NO: 5999203 - DNA, 25 bp, Homo sapien
ggattcgaaaagaaaatgaatcttt

SEQ ID NO: 5999204 - DNA, 25 bp, Homo sapien
ttgataaactttattatcttgcggg

SEQ ID NO: 5999205 - DNA, 25 bp, Homo sapien
tgttccaattttttggcagacccaa

SEQ ID NO: 5999206 - DNA, 25 bp, Homo sapien
cccctttgcagaggaacaccattct

SEQ ID NO: 5999207 - DNA, 25 bp, Homo sapien
ggcaatcctcagaatctgtaattcc

SEQ ID NO: 5999208 - DNA, 25 bp, Homo sapien
agcttgattggttcagtgaaacctc

SEQ ID NO: 5999209 - DNA, 25 bp, Homo sapien
ttgtttgtcacataacgattaatct

SEQ ID NO: 5999210 - DNA, 25 bp, Homo sapien
attaaaatcaaacaaatttggtagc

SEQ ID NO: 5999211 - DNA, 25 bp, Homo sapien
aagcccccatatatcgatctgggtg

SEQ ID NO: 5999212 - DNA, 25 bp, Homo sapien
cggtatgagcagggacttttttaat

SEQ ID NO: 5999213 - DNA, 25 bp, Homo sapien
ctaattgaaggctggttatgttcca

SEQ ID NO: 5999214 - DNA, 25 bp, Homo sapien
ggttacatcgtctgcaatgaattca

SEQ ID NO: 5999215 - DNA, 25 bp, Homo sapien
cctcagaatctgtaattccctggac

SEQ ID NO: 5999216 - DNA, 25 bp, Homo sapien
aatttggtagcttgattggttcagt

SEQ ID NO: 5999217 - DNA, 25 bp, Homo sapien
gtgtaaataaagcatcccgcgggca

SEQ ID NO: 5999218 - DNA, 25 bp, Homo sapien
tcagatcccctttgcagaggaacac

SEQ ID NO: 5999219 - DNA, 25 bp, Homo sapien
atctcgcccatgacacaaccaagcc

SEQ ID NO: 5999220 - DNA, 25 bp, Homo sapien
aggctggttatgttccaattttttg

SEQ ID NO: 5999221 - DNA, 25 bp, Homo sapien
agaaggggttcttgaccttgaaata

SEQ ID NO: 5999222 - DNA, 25 bp, Homo sapien
gcagggacttttttaattgcaaagg

SEQ ID NO: 5999223 - DNA, 25 bp, Homo sapien
tcttgaacagatgtaactaattgaa

SEQ ID NO: 5999224 - DNA, 25 bp, Homo sapien
agcatccgcctcgtgttgttcgatt

SEQ ID NO: 5999225 - DNA, 25 bp, Homo sapien
tttaattgcaaaggggcccaaccag

SEQ ID NO: 5999226 - DNA, 25 bp, Homo sapien
ctttgccgataagcatctcgcccat

SEQ ID NO: 5999227 - DNA, 25 bp, Homo sapien
aactgatgggcaaggattcttcttg

SEQ ID NO: 5999228 - DNA, 25 bp, Homo sapien
gataccatctggaccggaatggcca

SEQ ID NO: 5999229 - DNA, 25 bp, Homo sapien
gcccgagaacagtggtttggaaaat

SEQ ID NO: 5999230 - DNA, 25 bp, Homo sapien
aattcacccagaatttgtaactcaa

SEQ ID NO: 5999231 - DNA, 25 bp, Homo sapien
tgcaaaggggcccaaccagtttttc

SEQ ID NO: 5999232 - DNA, 25 bp, Homo sapien
cgcagattttcaagacaccggtttc

SEQ ID NO: 5999233 - DNA, 25 bp, Homo sapien
agacagtctttgttgtggttcgtag

SEQ ID NO: 5999234 - DNA, 25 bp, Homo sapien
ttggaaaatagagggccatcgtagg

SEQ ID NO: 5999235 - DNA, 25 bp, Homo sapien
tacttctcaaacctctgttgcgaag

SEQ ID NO: 5999236 - DNA, 25 bp, Homo sapien
acctctgttgcgaagagcccgagaa

SEQ ID NO: 5999237 - DNA, 25 bp, Homo sapien
atttggatggtcggcaatcctcaga

SEQ ID NO: 5999238 - DNA, 25 bp, Homo sapien
atttaacgatatttggatggtcggc

SEQ ID NO: 5999239 - DNA, 25 bp, Homo sapien
ttacatcgtctgcaatgaattcaga

SEQ ID NO: 5999240 - DNA, 25 bp, Homo sapien
tgatatgttttaatggcatttctag

SEQ ID NO: 5999241 - DNA, 25 bp, Homo sapien
gtggttcgtagaccaatattttcat

SEQ ID NO: 5999242 - DNA, 25 bp, Homo sapien
aatctcgatttgtagagtttctggt

SEQ ID NO: 5999243 - DNA, 25 bp, Homo sapien
attggttcagtgaaacctcttggta

SEQ ID NO: 5999244 - DNA, 25 bp, Homo sapien
tatcttgcggggacaaatgagtaaa

SEQ ID NO: 5999245 - DNA, 25 bp, Homo sapien
cagattttcaagacaccggtttccg

SEQ ID NO: 5999246 - DNA, 25 bp, Homo sapien
ataaaatcttgaacagatgtaacta

SEQ ID NO: 5999247 - DNA, 25 bp, Homo sapien
tacaagaacattggatggtttgata

SEQ ID NO: 5999248 - DNA, 25 bp, Homo sapien
tgcaatgaattcagatcccctttgc

SEQ ID NO: 5999249 - DNA, 25 bp, Homo sapien
ggtggtatattgggtacaaccaatg

SEQ ID NO: 5999250 - DNA, 25 bp, Homo sapien
cagacccaaaatcgcagattttcaa

SEQ ID NO: 5999251 - DNA, 25 bp, Homo sapien
aacgccaagaccgtgtaaataaagc

SEQ ID NO: 5999252 - DNA, 25 bp, Homo sapien
agtctttgttgtggttcgtagacca

SEQ ID NO: 5999253 - DNA, 25 bp, Homo sapien
attttatcagcaaattcacccagaa

SEQ ID NO: 5999254 - DNA, 25 bp, Homo sapien
tgaaacctcttggtaagaaagtgtc

SEQ ID NO: 5999255 - DNA, 25 bp, Homo sapien
tgaccttgaaatatggctttgccga

SEQ ID NO: 5999256 - DNA, 25 bp, Homo sapien
gggccatcgtaggccggattcgaaa

SEQ ID NO: 5999257 - DNA, 25 bp, Homo sapien
gtgtcatcattccttaattcattaa

SEQ ID NO: 5999258 - DNA, 25 bp, Homo sapien
gtcacataacgattaatctcgattt

SEQ ID NO: 5999259 - DNA, 25 bp, Homo sapien
acaaccaagcccccatatatcgatc

SEQ ID NO: 5999260 - DNA, 25 bp, Homo sapien
tcttatcctgggttaaatatgcttg

SEQ ID NO: 5999261 - DNA, 25 bp, Homo sapien
aactaattgaaggctggttatgttc

SEQ ID NO: 5999262 - DNA, 25 bp, Homo sapien
aaatcgcagattttcaagacaccgg

SEQ ID NO: 5999263 - DNA, 25 bp, Homo sapien
ttattatcttgcggggacaaatgag

SEQ ID NO: 5999264 - DNA, 25 bp, Homo sapien
accggaatggccaaaatacttctca

SEQ ID NO: 5999265 - DNA, 25 bp, Homo sapien
ctttcaccagcatccgcctcgtgtt

SEQ ID NO: 5999266 - DNA, 25 bp, Homo sapien
taaaatcaaacaaatttggtagctt

SEQ ID NO: 5999267 - DNA, 25 bp, Homo sapien
tccctggacttgtactcggtatgag

SEQ ID NO: 5999268 - DNA, 25 bp, Homo sapien
atggtttgatatcacgatgacaaac

SEQ ID NO: 5999269 - DNA, 25 bp, Homo sapien
ttcgtagaccaatattttcatcaaa

SEQ ID NO: 5999270 - DNA, 25 bp, Homo sapien
tcttggagacagtctttgttgtggt

SEQ ID NO: 5999271 - DNA, 25 bp, Homo sapien
caaaatcgcagattttcaagacacc

SEQ ID NO: 5999272 - DNA, 25 bp, Homo sapien
atggctttgccgataagcatctcgc

SEQ ID NO: 5999273 - DNA, 25 bp, Homo sapien
ttattcagcaactttcgtaggttta

SEQ ID NO: 5999274 - DNA, 25 bp, Homo sapien
gaaagtgtcatcattccttaattca

SEQ ID NO: 5999275 - DNA, 25 bp, Homo sapien
caaacgccaagaccgtgtaaataaa

SEQ ID NO: 5999276 - DNA, 25 bp, Homo sapien
ggagacagtctttgttgtggttcgt

SEQ ID NO: 5999277 - DNA, 25 bp, Homo sapien
atttattcgaggttacatcgtctgc

SEQ ID NO: 5999278 - DNA, 25 bp, Homo sapien
ccggattcgaaaagaaaatgaatct

SEQ ID NO: 5999279 - DNA, 25 bp, Homo sapien
gaatttgtaactcaaaatcattaaa

SEQ ID NO: 5999280 - DNA, 25 bp, Homo sapien
ggtacaaccaatgatcaattcaggc

SEQ ID NO: 5999281 - DNA, 25 bp, Homo sapien
cttggtaagaaagtgtcatcattcc

SEQ ID NO: 5999282 - DNA, 25 bp, Homo sapien
agtgaaacctcttggtaagaaagtg

SEQ ID NO: 5999283 - DNA, 25 bp, Homo sapien
attcagcaactttcgtaggtttaat

SEQ ID NO: 5999284 - DNA, 25 bp, Homo sapien
gttcagtgaaacctcttggtaagaa

SEQ ID NO: 5999285 - DNA, 25 bp, Homo sapien
ccttaattcattaaagaactgatgg

SEQ ID NO: 5999286 - DNA, 25 bp, Homo sapien
tgggtggtatattgggtacaaccaa

SEQ ID NO: 5999287 - DNA, 25 bp, Homo sapien
cacataacgattaatctcgatttgt

SEQ ID NO: 5999288 - DNA, 25 bp, Homo sapien
agaaatactgcaatttaacgatatt

SEQ ID NO: 5999289 - DNA, 25 bp, Homo sapien
gttgcgaagagcccgagaacagtgg

SEQ ID NO: 5999290 - DNA, 25 bp, Homo sapien
cgataagcatctcgcccatgacaca

SEQ ID NO: 5999291 - DNA, 25 bp, Homo sapien
tctgcaatgaattcagatccccttt

SEQ ID NO: 5999292 - DNA, 25 bp, Homo sapien
tttcccttagctgtagaaggggttc

SEQ ID NO: 5999293 - DNA, 25 bp, Homo sapien
ggcaaggtgttgataaactttatta

SEQ ID NO: 5999294 - DNA, 25 bp, Homo sapien
acaacagtcccaaaggcacctctac

SEQ ID NO: 5999295 - DNA, 25 bp, Homo sapien
tactcggtatgagcagggacttttt

SEQ ID NO: 5999296 - DNA, 25 bp, Homo sapien
ggttaaatatgcttgtacaacagtc

SEQ ID NO: 5999297 - DNA, 25 bp, Homo sapien
tctagcttgtttgtcacataacgat

SEQ ID NO: 5999298 - DNA, 25 bp, Homo sapien
attgggtacaaccaatgatcaattc

SEQ ID NO: 5999299 - DNA, 25 bp, Homo sapien
gtgtatagcctgatatgttttaatg

SEQ ID NO: 5999300 - DNA, 25 bp, Homo sapien
cataacgattaatctcgatttgtag

SEQ ID NO: 5999301 - DNA, 25 bp, Homo sapien
gaacagtggtttggaaaatagaggg

SEQ ID NO: 5999302 - DNA, 25 bp, Homo sapien
aaccaagcccccatatatcgatctg

SEQ ID NO: 5999303 - DNA, 25 bp, Homo sapien
ggttcttgaccttgaaatatggctt

SEQ ID NO: 5999304 - DNA, 25 bp, Homo sapien
tccgcctcgtgttgttcgatttatt

SEQ ID NO: 5999305 - DNA, 25 bp, Homo sapien
atgttttaatggcatttctagcttg

SEQ ID NO: 5999306 - DNA, 25 bp, Homo sapien
acagtctttgttgtggttcgtagac

SEQ ID NO: 5999307 - DNA, 25 bp, Homo sapien
gtatagcctgatatgttttaatggc

SEQ ID NO: 5999308 - DNA, 25 bp, Homo sapien
gttgttcgatttattcgaggttaca

SEQ ID NO: 5999309 - DNA, 25 bp, Homo sapien
tgcagaggaacaccattctgctctt

SEQ ID NO: 5999310 - DNA, 25 bp, Homo sapien
cctcgtgttgttcgatttattcgag

SEQ ID NO: 5999311 - DNA, 25 bp, Homo sapien
atatcacgatgacaaacgccaagac

SEQ ID NO: 5999312 - DNA, 25 bp, Homo sapien
ttgccgataagcatctcgcccatga

SEQ ID NO: 5999313 - DNA, 25 bp, Homo sapien
ttagctgtagaaggggttcttgacc

SEQ ID NO: 5999314 - DNA, 25 bp, Homo sapien
atggtcggcaatcctcagaatctgt

SEQ ID NO: 5999315 - DNA, 25 bp, Homo sapien
accaatgatcaattcaggcgctcta

SEQ ID NO: 5999316 - DNA, 25 bp, Homo sapien
tcgtaggccggattcgaaaagaaaa

SEQ ID NO: 5999317 - DNA, 25 bp, Homo sapien
gattttcctgtactctttcaccagc

SEQ ID NO: 5999318 - DNA, 25 bp, Homo sapien
ttccatggcaaggtgttgataaact

SEQ ID NO: 5999319 - DNA, 25 bp, Homo sapien
caaattcacccagaatttgtaactc

SEQ ID NO: 5999320 - DNA, 25 bp, Homo sapien
cacccagaatttgtaactcaaaatc

SEQ ID NO: 5999321 - DNA, 25 bp, Homo sapien
aattgaaggctggttatgttccaat

SEQ ID NO: 5999322 - DNA, 25 bp, Homo sapien
ttggatggtcggcaatcctcagaat

SEQ ID NO: 5999323 - DNA, 25 bp, Homo sapien
ttggatggtttgatatcacgatgac

SEQ ID NO: 5999324 - DNA, 25 bp, Homo sapien
ttcaggcgctctataaaatcttgaa

SEQ ID NO: 5999325 - DNA, 25 bp, Homo sapien
gggcaatctgataagtgtatagcct

SEQ ID NO: 5999326 - DNA, 25 bp, Homo sapien
ttcttgaccttgaaatatggctttg

SEQ ID NO: 5999327 - DNA, 25 bp, Homo sapien
ggcacctctaccgattttcctgtac

SEQ ID NO: 5999328 - DNA, 25 bp, Homo sapien
ttcacccagaatttgtaactcaaaa

SEQ ID NO: 5999329 - DNA, 25 bp, Homo sapien
tcagaatctgtaattccctggactt

SEQ ID NO: 5999330 - DNA, 25 bp, Homo sapien
tcggcaatcctcagaatctgtaatt

SEQ ID NO: 5999331 - DNA, 25 bp, Homo sapien
ccaatattttcatcaaaagatcgat

SEQ ID NO: 5999332 - DNA, 25 bp, Homo sapien
gacaccggtttccgggtctacaaga

SEQ ID NO: 5999333 - DNA, 25 bp, Homo sapien
aatcattaaaatcaaacaaatttgg

SEQ ID NO: 5999334 - DNA, 25 bp, Homo sapien
tacaaccaatgatcaattcaggcgc

SEQ ID NO: 5999335 - DNA, 25 bp, Homo sapien
tatcagcaaattcacccagaatttg

SEQ ID NO: 5999336 - DNA, 25 bp, Homo sapien
gaccaatattttcatcaaaagatcg

SEQ ID NO: 5999337 - DNA, 25 bp, Homo sapien
tgtactctttcaccagcatccgcct

SEQ ID NO: 5999338 - DNA, 25 bp, Homo sapien
ggcagacccaaaatcgcagattttc

SEQ ID NO: 5999339 - DNA, 25 bp, Homo sapien
ggccaaaatacttctcaaacctctg

SEQ ID NO: 5999340 - DNA, 25 bp, Homo sapien
aaagaactgatgggcaaggattctt

SEQ ID NO: 5999341 - DNA, 25 bp, Homo sapien
agctgtagaaggggttcttgacctt

SEQ ID NO: 5999342 - DNA, 25 bp, Homo sapien
tttgtagagtttctggtaagcattc

SEQ ID NO: 5999343 - DNA, 25 bp, Homo sapien
aatcttttatcgggaggacctaaca

SEQ ID NO: 5999344 - DNA, 25 bp, Homo sapien
tttgcagaggaacaccattctgctc

SEQ ID NO: 5999345 - DNA, 25 bp, Homo sapien
caaaggcacctctaccgattttcct

SEQ ID NO: 5999346 - DNA, 25 bp, Homo sapien
ctaacaatttagcaatttcccttag

SEQ ID NO: 5999347 - DNA, 25 bp, Homo sapien
atggcatttctagcttgtttgtcac

SEQ ID NO: 5999348 - DNA, 25 bp, Homo sapien
cttgtactcggtatgagcagggact

SEQ ID NO: 5999349 - DNA, 25 bp, Homo sapien
aaaatcttgaacagatgtaactaat

SEQ ID NO: 5999350 - DNA, 25 bp, Homo sapien
tgacacaaccaagcccccatatatc

SEQ ID NO: 5999351 - DNA, 25 bp, Homo sapien
cgtagaccaatattttcatcaaaag

SEQ ID NO: 5999352 - DNA, 25 bp, Homo sapien
ttaacgatatttggatggtcggcaa

SEQ ID NO: 5999353 - DNA, 25 bp, Homo sapien
tctgataagtgtatagcctgatatg

SEQ ID NO: 5999354 - DNA, 25 bp, Homo sapien
tttctagcttgtttgtcacataacg

SEQ ID NO: 5999355 - DNA, 25 bp, Homo sapien
gacaaacgccaagaccgtgtaaata

SEQ ID NO: 5999356 - DNA, 25 bp, Homo sapien
ctgttgcgaagagcccgagaacagt

SEQ ID NO: 5999357 - DNA, 25 bp, Homo sapien
ggcatttctagcttgtttgtcacat

SEQ ID NO: 5999358 - DNA, 25 bp, Homo sapien
ataagcatctcgcccatgacacaac

SEQ ID NO: 5999359 - DNA, 25 bp, Homo sapien
gaacagatgtaactaattgaaggct

SEQ ID NO: 5999360 - DNA, 25 bp, Homo sapien
ttcgatttattcgaggttacatcgt

SEQ ID NO: 5999361 - DNA, 25 bp, Homo sapien
gatctgggtggtatattgggtacaa

SEQ ID NO: 5999362 - DNA, 25 bp, Homo sapien
taaactttattatcttgcggggaca

SEQ ID NO: 5999363 - DNA, 25 bp, Homo sapien
gcgggcaatctgataagtgtatagc

SEQ ID NO: 5999364 - DNA, 25 bp, Homo sapien
gattaatctcgatttgtagagtttc

SEQ ID NO: 5999365 - DNA, 25 bp, Homo sapien
atatttggatggtcggcaatcctca

SEQ ID NO: 5999366 - DNA, 25 bp, Homo sapien
ctataaaatcttgaacagatgtaac

SEQ ID NO: 5999367 - DNA, 25 bp, Homo sapien
taccgattttcctgtactctttcac

SEQ ID NO: 5999368 - DNA, 25 bp, Homo sapien
acagatgtaactaattgaaggctgg

SEQ ID NO: 5999369 - DNA, 25 bp, Homo sapien
caatttagcaatttcccttagctgt

SEQ ID NO: 5999370 - DNA, 25 bp, Homo sapien
ttggcagacccaaaatcgcagattt

SEQ ID NO: 5999371 - DNA, 25 bp, Homo sapien
catcaaaagatcgataccatctgga

SEQ ID NO: 5999372 - DNA, 25 bp, Homo sapien
atatggctttgccgataagcatctc

SEQ ID NO: 5999373 - DNA, 25 bp, Homo sapien
tcgaaaagaaaatgaatcttttatc

SEQ ID NO: 5999374 - DNA, 25 bp, Homo sapien
cattaaagaactgatgggcaaggat

SEQ ID NO: 5999375 - DNA, 25 bp, Homo sapien
aagagcccgagaacagtggtttgga

SEQ ID NO: 5999376 - DNA, 25 bp, Homo sapien
tggtttggaaaatagagggccatcg

SEQ ID NO: 5999377 - DNA, 25 bp, Homo sapien
tcttttatcgggaggacctaacaat

SEQ ID NO: 5999378 - DNA, 25 bp, Homo sapien
ggtctacaagaacattggatggttt

SEQ ID NO: 5999379 - DNA, 25 bp, Homo sapien
tggttatgttccaattttttggcag

SEQ ID NO: 5999380 - DNA, 25 bp, Homo sapien
tgatatcacgatgacaaacgccaag

SEQ ID NO: 5999381 - DNA, 25 bp, Homo sapien
atcaaacaaatttggtagcttgatt

SEQ ID NO: 5999382 - DNA, 25 bp, Homo sapien
caatcctcagaatctgtaattccct

SEQ ID NO: 5999383 - DNA, 25 bp, Homo sapien
aaagaaatactgcaatttaacgata

SEQ ID NO: 5999384 - DNA, 25 bp, Homo sapien
aaggcacctctaccgattttcctgt

SEQ ID NO: 5999385 - DNA, 25 bp, Homo sapien
ggcaaggattcttcttggagacagt

SEQ ID NO: 5999386 - DNA, 25 bp, Homo sapien
cgatgacaaacgccaagaccgtgta

SEQ ID NO: 5999387 - DNA, 25 bp, Homo sapien
tgtagagtttctggtaagcattcca

SEQ ID NO: 5999388 - DNA, 25 bp, Homo sapien
ttttttggcagacccaaaatcgcag

SEQ ID NO: 5999389 - DNA, 25 bp, Homo sapien
atgatcaattcaggcgctctataaa

SEQ ID NO: 5999390 - DNA, 25 bp, Homo sapien
tcttgcggggacaaatgagtaaaga

SEQ ID NO: 5999391 - DNA, 25 bp, Homo sapien
aaagaaaatgaatcttttatcggga

SEQ ID NO: 5999392 - DNA, 25 bp, Homo sapien
tgttcgatttattcgaggttacatc

SEQ ID NO: 5999393 - DNA, 25 bp, Homo sapien
atttagcaatttcccttagctgtag

SEQ ID NO: 5999394 - DNA, 25 bp, Homo sapien
cacctctaccgattttcctgtactc

SEQ ID NO: 5999395 - DNA, 25 bp, Homo sapien
atggccaaaatacttctcaaacctc

SEQ ID NO: 5999396 - DNA, 25 bp, Homo sapien
tcattaaaatcaaacaaatttggta

SEQ ID NO: 5999397 - DNA, 25 bp, Homo sapien
gataaactttattatcttgcgggga

SEQ ID NO: 5999398 - DNA, 25 bp, Homo sapien
ccatggcaaggtgttgataaacttt

SEQ ID NO: 5999399 - DNA, 25 bp, Homo sapien
agcaaattcacccagaatttgtaac

SEQ ID NO: 5999400 - DNA, 25 bp, Homo sapien
atgaattcagatcccctttgcagag

SEQ ID NO: 5999401 - DNA, 25 bp, Homo sapien
cgggaggacctaacaatttagcaat

SEQ ID NO: 5999402 - DNA, 25 bp, Homo sapien
gtaactcaaaatcattaaaatcaaa

SEQ ID NO: 5999403 - DNA, 25 bp, Homo sapien
aactttattatcttgcggggacaaa

SEQ ID NO: 5999404 - DNA, 25 bp, Homo sapien
atagcctgatatgttttaatggcat

SEQ ID NO: 5999405 - DNA, 25 bp, Homo sapien
ttgaaggctggttatgttccaattt

SEQ ID NO: 5999406 - DNA, 25 bp, Homo sapien
caaggattcttcttggagacagtct

SEQ ID NO: 5999407 - DNA, 25 bp, Homo sapien
ggggttcttgaccttgaaatatggc

SEQ ID NO: 5999408 - DNA, 25 bp, Homo sapien
tttaattttatcagcaaattcaccc

SEQ ID NO: 5999409 - DNA, 25 bp, Homo sapien
aaggggttcttgaccttgaaatatg

SEQ ID NO: 5999410 - DNA, 25 bp, Homo sapien
atgagtaaagaaatactgcaattta

SEQ ID NO: 5999411 - DNA, 25 bp, Homo sapien
cgcccatgacacaaccaagccccca

SEQ ID NO: 5999412 - DNA, 25 bp, Homo sapien
ttggagacagtctttgttgtggttc

SEQ ID NO: 5999413 - DNA, 25 bp, Homo sapien
tctttgttgtggttcgtagaccaat

SEQ ID NO: 5999414 - DNA, 25 bp, Homo sapien
ttccttaattcattaaagaactgat

SEQ ID NO: 5999415 - DNA, 25 bp, Homo sapien
tcccttagctgtagaaggggttctt

SEQ ID NO: 5999416 - DNA, 25 bp, Homo sapien
caatttaacgatatttggatggtcg

SEQ ID NO: 5999417 - DNA, 25 bp, Homo sapien
atgtaactaattgaaggctggttat

SEQ ID NO: 5999418 - DNA, 25 bp, Homo sapien
caaggtgttgataaactttattatc

SEQ ID NO: 5999419 - DNA, 25 bp, Homo sapien
tctgtaattccctggacttgtactc

SEQ ID NO: 5999420 - DNA, 25 bp, Homo sapien
agcattccatggcaaggtgttgata

SEQ ID NO: 5999421 - DNA, 25 bp, Homo sapien
ggccggattcgaaaagaaaatgaat

SEQ ID NO: 5999422 - DNA, 25 bp, Homo sapien
ctctgttgcgaagagcccgagaaca

SEQ ID NO: 5999423 - DNA, 25 bp, Homo sapien
gacctaacaatttagcaatttccct

SEQ ID NO: 5999424 - DNA, 25 bp, Homo sapien
ctgtagaaggggttcttgaccttga

SEQ ID NO: 5999425 - DNA, 25 bp, Homo sapien
cctggacttgtactcggtatgagca

SEQ ID NO: 5999426 - DNA, 25 bp, Homo sapien
ggcgctctataaaatcttgaacaga

SEQ ID NO: 5999427 - DNA, 25 bp, Homo sapien
caagacaccggtttccgggtctaca

SEQ ID NO: 5999428 - DNA, 25 bp, Homo sapien
attatcttgcggggacaaatgagta

SEQ ID NO: 5999429 - DNA, 25 bp, Homo sapien
ggttcgtagaccaatattttcatca

SEQ ID NO: 5999430 - DNA, 25 bp, Homo sapien
gttatgttccaattttttggcagac

SEQ ID NO: 5999431 - DNA, 25 bp, Homo sapien
tcgatctgggtggtatattgggtac

SEQ ID NO: 5999432 - DNA, 25 bp, Homo sapien
ggaaaatagagggccatcgtaggcc

SEQ ID NO: 5999433 - DNA, 25 bp, Homo sapien
cgcctcgtgttgttcgatttattcg

SEQ ID NO: 5999434 - DNA, 25 bp, Homo sapien
atcctgggttaaatatgcttgtaca

SEQ ID NO: 5999435 - DNA, 25 bp, Homo sapien
ttttggcagacccaaaatcgcagat

SEQ ID NO: 5999436 - DNA, 25 bp, Homo sapien
cggaatggccaaaatacttctcaaa

SEQ ID NO: 5999437 - DNA, 25 bp, Homo sapien
tcgatttgtagagtttctggtaagc

SEQ ID NO: 5999438 - DNA, 25 bp, Homo sapien
aacaaatttggtagcttgattggtt

SEQ ID NO: 5999439 - DNA, 25 bp, Homo sapien
tggacttgtactcggtatgagcagg

SEQ ID NO: 5999440 - DNA, 25 bp, Homo sapien
tgggcaaggattcttcttggagaca

SEQ ID NO: 5999441 - DNA, 25 bp, Homo sapien
gtttctggtaagcattccatggcaa

SEQ ID NO: 5999442 - DNA, 25 bp, Homo sapien
ggtcggcaatcctcagaatctgtaa

SEQ ID NO: 5999443 - DNA, 25 bp, Homo sapien
ccaagaccgtgtaaataaagcatcc

SEQ ID NO: 5999444 - DNA, 25 bp, Homo sapien
ataaagcatcccgcgggcaatctga

SEQ ID NO: 5999445 - DNA, 25 bp, Homo sapien
ctcaaaatcattaaaatcaaacaaa

SEQ ID NO: 5999446 - DNA, 25 bp, Homo sapien
catgacacaaccaagcccccatata

SEQ ID NO: 5999447 - DNA, 25 bp, Homo sapien
tctaccgattttcctgtactctttc

SEQ ID NO: 5999448 - DNA, 25 bp, Homo sapien
taattttatcagcaaattcacccag

SEQ ID NO: 5999449 - DNA, 25 bp, Homo sapien
acagtggtttggaaaatagagggcc

SEQ ID NO: 5999450 - DNA, 25 bp, Homo sapien
ctctttcaccagcatccgcctcgtg

SEQ ID NO: 5999451 - DNA, 25 bp, Homo sapien
gagcagggacttttttaattgcaaa

SEQ ID NO: 5999452 - DNA, 25 bp, Homo sapien
ggaacaccattctgctcttccgtag

SEQ ID NO: 5999453 - DNA, 25 bp, Homo sapien
agaaaatgaatcttttatcgggagg

SEQ ID NO: 5999454 - DNA, 25 bp, Homo sapien
gcccaaccagtttttcttatcctgg

SEQ ID NO: 5999455 - DNA, 25 bp, Homo sapien
taacgattaatctcgatttgtagag

SEQ ID NO: 5999456 - DNA, 25 bp, Homo sapien
atcccctttgcagaggaacaccatt

SEQ ID NO: 5999457 - DNA, 25 bp, Homo sapien
tggtagcttgattggttcagtgaaa

SEQ ID NO: 5999458 - DNA, 25 bp, Homo sapien
caaccaatgatcaattcaggcgctc

SEQ ID NO: 5999459 - DNA, 25 bp, Homo sapien
aacattggatggtttgatatcacga

SEQ ID NO: 5999460 - DNA, 25 bp, Homo sapien
tgataagtgtatagcctgatatgtt

SEQ ID NO: 5999461 - DNA, 25 bp, Homo sapien
aaatactgcaatttaacgatatttg

SEQ ID NO: 5999462 - DNA, 25 bp, Homo sapien
gattcttcttggagacagtctttgt

SEQ ID NO: 5999463 - DNA, 25 bp, Homo sapien
ccaaaatacttctcaaacctctgtt

SEQ ID NO: 5999464 - DNA, 25 bp, Homo sapien
cgtctgcaatgaattcagatcccct

SEQ ID NO: 5999465 - DNA, 25 bp, Homo sapien
tcgtgttgttcgatttattcgaggt

SEQ ID NO: 5999466 - DNA, 25 bp, Homo sapien
ttatcctgggttaaatatgcttgta

SEQ ID NO: 5999467 - DNA, 25 bp, Homo sapien
gaccgtgtaaataaagcatcccgcg

SEQ ID NO: 5999468 - DNA, 25 bp, Homo sapien
agaatctgtaattccctggacttgt

SEQ ID NO: 5999469 - DNA, 25 bp, Homo sapien
aatctgtaattccctggacttgtac

SEQ ID NO: 5999470 - DNA, 25 bp, Homo sapien
gatttgtagagtttctggtaagcat

SEQ ID NO: 5999471 - DNA, 25 bp, Homo sapien
gtatgagcagggacttttttaattg

SEQ ID NO: 5999472 - DNA, 25 bp, Homo sapien
gccgataagcatctcgcccatgaca

SEQ ID NO: 5999473 - DNA, 25 bp, Homo sapien
tcagcaaattcacccagaatttgta

SEQ ID NO: 5999474 - DNA, 25 bp, Homo sapien
taggccggattcgaaaagaaaatga

SEQ ID NO: 5999475 - DNA, 25 bp, Homo sapien
ctcgcccatgacacaaccaagcccc

SEQ ID NO: 5999476 - DNA, 25 bp, Homo sapien
tgcaatttaacgatatttggatggt

SEQ ID NO: 5999477 - DNA, 25 bp, Homo sapien
tatcgatctgggtggtatattgggt

SEQ ID NO: 5999478 - DNA, 25 bp, Homo sapien
ttgtacaacagtcccaaaggcacct

SEQ ID NO: 5999479 - DNA, 25 bp, Homo sapien
gaggttacatcgtctgcaatgaatt

SEQ ID NO: 5999480 - DNA, 25 bp, Homo sapien
ttttcctgtactctttcaccagcat

SEQ ID NO: 5999481 - DNA, 25 bp, Homo sapien
tttgatatcacgatgacaaacgcca

SEQ ID NO: 5999482 - DNA, 25 bp, Homo sapien
tattttcatcaaaagatcgatacca

SEQ ID NO: 5999483 - DNA, 25 bp, Homo sapien
acacaaccaagcccccatatatcga

SEQ ID NO: 5999484 - DNA, 25 bp, Homo sapien
taagcattccatggcaaggtgttga

SEQ ID NO: 5999485 - DNA, 25 bp, Homo sapien
gcttgtttgtcacataacgattaat

SEQ ID NO: 5999486 - DNA, 25 bp, Homo sapien
gtaactaattgaaggctggttatgt

SEQ ID NO: 5999487 - DNA, 25 bp, Homo sapien
aggacctaacaatttagcaatttcc

SEQ ID NO: 5999488 - DNA, 25 bp, Homo sapien
tatgttccaattttttggcagaccc

SEQ ID NO: 5999489 - DNA, 25 bp, Homo sapien
gagtaaagaaatactgcaatttaac

SEQ ID NO: 5999490 - DNA, 25 bp, Homo sapien
cattccttaattcattaaagaactg

SEQ ID NO: 5999491 - DNA, 25 bp, Homo sapien
aaatatgcttgtacaacagtcccaa

SEQ ID NO: 5999492 - DNA, 25 bp, Homo sapien
ttattcgaggttacatcgtctgcaa

SEQ ID NO: 5999493 - DNA, 25 bp, Homo sapien
tcgaggttacatcgtctgcaatgaa

SEQ ID NO: 5999494 - DNA, 25 bp, Homo sapien
aaacctctgttgcgaagagcccgag

SEQ ID NO: 5999495 - DNA, 25 bp, Homo sapien
catcgtaggccggattcgaaaagaa

SEQ ID NO: 5999496 - DNA, 25 bp, Homo sapien
aattcaggcgctctataaaatcttg

SEQ ID NO: 5999497 - DNA, 25 bp, Homo sapien
gtgttgttcgatttattcgaggtta

SEQ ID NO: 5999498 - DNA, 25 bp, Homo sapien
ggtttgatatcacgatgacaaacgc

SEQ ID NO: 5999499 - DNA, 25 bp, Homo sapien
aattttttggcagacccaaaatcgc

SEQ ID NO: 5999500 - DNA, 25 bp, Homo sapien
cttgaccttgaaatatggctttgcc

SEQ ID NO: 5999501 - DNA, 25 bp, Homo sapien
tcagtgaaacctcttggtaagaaag

SEQ ID NO: 5999502 - DNA, 25 bp, Homo sapien
cattggatggtttgatatcacgatg

SEQ ID NO: 5999503 - DNA, 25 bp, Homo sapien
gatgggcaaggattcttcttggaga

SEQ ID NO: 5999504 - DNA, 25 bp, Homo sapien
ccgcgggcaatctgataagtgtata

SEQ ID NO: 5999505 - DNA, 25 bp, Homo sapien
ttgaacagatgtaactaattgaagg

SEQ ID NO: 5999506 - DNA, 25 bp, Homo sapien
tttatcagcaaattcacccagaatt

SEQ ID NO: 5999507 - DNA, 25 bp, Homo sapien
aagtgtcatcattccttaattcatt

SEQ ID NO: 5999508 - DNA, 25 bp, Homo sapien
atatgttttaatggcatttctagct

SEQ ID NO: 5999509 - DNA, 25 bp, Homo sapien
ttaaatatgcttgtacaacagtccc

SEQ ID NO: 5999510 - DNA, 25 bp, Homo sapien
actgcaatttaacgatatttggatg

SEQ ID NO: 5999511 - DNA, 25 bp, Homo sapien
tcagcaactttcgtaggtttaattt

SEQ ID NO: 5999512 - DNA, 25 bp, Homo sapien
caatttcccttagctgtagaagggg

SEQ ID NO: 5999513 - DNA, 25 bp, Homo sapien
tttaatggcatttctagcttgtttg

SEQ ID NO: 5999514 - DNA, 25 bp, Homo sapien
aaaatgaatcttttatcgggaggac

SEQ ID NO: 5999515 - DNA, 25 bp, Homo sapien
cgatttattcgaggttacatcgtct

SEQ ID NO: 5999516 - DNA, 25 bp, Homo sapien
tcaaaagatcgataccatctggacc

SEQ ID NO: 5999517 - DNA, 25 bp, Homo sapien
cctgggttaaatatgcttgtacaac

SEQ ID NO: 5999518 - DNA, 25 bp, Homo sapien
gagaacagtggtttggaaaatagag

SEQ ID NO: 5999519 - DNA, 25 bp, Homo sapien
atgcttgtacaacagtcccaaaggc

SEQ ID NO: 5999520 - DNA, 25 bp, Homo sapien
ttctggtaagcattccatggcaagg

SEQ ID NO: 5999521 - DNA, 25 bp, Homo sapien
attcagatcccctttgcagaggaac

SEQ ID NO: 5999522 - DNA, 25 bp, Homo sapien
ttcaccagcatccgcctcgtgttgt

SEQ ID NO: 5999523 - DNA, 25 bp, Homo sapien
cccatatatcgatctgggtggtata

SEQ ID NO: 5999524 - DNA, 25 bp, Homo sapien
caatgatcaattcaggcgctctata

SEQ ID NO: 5999525 - DNA, 25 bp, Homo sapien
attcgaaaagaaaatgaatctttta

SEQ ID NO: 5999526 - DNA, 25 bp, Homo sapien
gagggccatcgtaggccggattcga

SEQ ID NO: 5999527 - DNA, 25 bp, Homo sapien
tttggtagcttgattggttcagtga

SEQ ID NO: 5999528 - DNA, 25 bp, Homo sapien
tgggtacaaccaatgatcaattcag

SEQ ID NO: 5999529 - DNA, 25 bp, Homo sapien
ccgattttcctgtactctttcacca

SEQ ID NO: 5999530 - DNA, 25 bp, Homo sapien
gtagcttgattggttcagtgaaacc

SEQ ID NO: 5999531 - DNA, 25 bp, Homo sapien
tcaaacctctgttgcgaagagcccg

SEQ ID NO: 5999532 - DNA, 25 bp, Homo sapien
ttagcaatttcccttagctgtagaa

SEQ ID NO: 5999533 - DNA, 25 bp, Homo sapien
gtaagaaagtgtcatcattccttaa

SEQ ID NO: 5999534 - DNA, 25 bp, Homo sapien
atggcaaggtgttgataaactttat

SEQ ID NO: 5999535 - DNA, 25 bp, Homo sapien
attccctggacttgtactcggtatg

SEQ ID NO: 5999536 - DNA, 25 bp, Homo sapien
atattgggtacaaccaatgatcaat

SEQ ID NO: 5999537 - DNA, 25 bp, Homo sapien
ttaattcattaaagaactgatgggc

SEQ ID NO: 5999538 - DNA, 25 bp, Homo sapien
gaaaagaaaatgaatcttttatcgg

SEQ ID NO: 5999539 - DNA, 25 bp, Homo sapien
ctcttggtaagaaagtgtcatcatt

SEQ ID NO: 5999540 - DNA, 25 bp, Homo sapien
aacagtcccaaaggcacctctaccg

SEQ ID NO: 5999541 - DNA, 25 bp, Homo sapien
ggggacaaatgagtaaagaaatact

SEQ ID NO: 5999542 - DNA, 25 bp, Homo sapien
tggtatattgggtacaaccaatgat

SEQ ID NO: 5999543 - DNA, 25 bp, Homo sapien
cagtcccaaaggcacctctaccgat

SEQ ID NO: 5999544 - DNA, 25 bp, Homo sapien
cccccatatatcgatctgggtggta

SEQ ID NO: 5999545 - DNA, 25 bp, Homo sapien
agaacattggatggtttgatatcac

SEQ ID NO: 5999546 - DNA, 25 bp, Homo sapien
gacccaaaatcgcagattttcaaga

SEQ ID NO: 5999547 - DNA, 25 bp, Homo sapien
tctacaagaacattggatggtttga

SEQ ID NO: 5999548 - DNA, 25 bp, Homo sapien
ttatcgggaggacctaacaatttag

SEQ ID NO: 5999549 - DNA, 25 bp, Homo sapien
cctctaccgattttcctgtactctt

SEQ ID NO: 5999550 - DNA, 25 bp, Homo sapien
aatagagggccatcgtaggccggat

SEQ ID NO: 5999551 - DNA, 25 bp, Homo sapien
ccgagaacagtggtttggaaaatag

SEQ ID NO: 5999552 - DNA, 25 bp, Homo sapien
aaaagatcgataccatctggaccgg

SEQ ID NO: 5999553 - DNA, 25 bp, Homo sapien
agcatcccgcgggcaatctgataag

SEQ ID NO: 5999554 - DNA, 25 bp, Homo sapien
tgtactcggtatgagcagggacttt

SEQ ID NO: 5999555 - DNA, 25 bp, Homo sapien
taattccctggacttgtactcggta

SEQ ID NO: 5999556 - DNA, 25 bp, Homo sapien
ggtttccgggtctacaagaacattg

SEQ ID NO: 5999557 - DNA, 25 bp, Homo sapien
tactctttcaccagcatccgcctcg

SEQ ID NO: 5999558 - DNA, 25 bp, Homo sapien
cccaaaatcgcagattttcaagaca

SEQ ID NO: 5999559 - DNA, 25 bp, Homo sapien
ggtaagcattccatggcaaggtgtt

SEQ ID NO: 5999560 - DNA, 25 bp, Homo sapien
tgattggttcagtgaaacctcttgg

SEQ ID NO: 5999561 - DNA, 25 bp, Homo sapien
ctggaccggaatggccaaaatactt

SEQ ID NO: 5999562 - DNA, 25 bp, Homo sapien
caaaatcattaaaatcaaacaaatt

SEQ ID NO: 5999563 - DNA, 25 bp, Homo sapien
atcctcagaatctgtaattccctgg

SEQ ID NO: 5999564 - DNA, 25 bp, Homo sapien
aagtgtatagcctgatatgttttaa

SEQ ID NO: 5999565 - DNA, 25 bp, Homo sapien
aacaccattctgctcttccgtagac

SEQ ID NO: 5999566 - DNA, 25 bp, Homo sapien
tgtaattccctggacttgtactcgg

SEQ ID NO: 5999567 - DNA, 25 bp, Homo sapien
ccatctggaccggaatggccaaaat

SEQ ID NO: 5999568 - DNA, 25 bp, Homo sapien
aaaatacttctcaaacctctgttgc

SEQ ID NO: 5999569 - DNA, 25 bp, Homo sapien
caaacaaatttggtagcttgattgg

SEQ ID NO: 5999570 - DNA, 25 bp, Homo sapien
tctgggtggtatattgggtacaacc

SEQ ID NO: 5999571 - DNA, 25 bp, Homo sapien
aagcatctcgcccatgacacaacca

SEQ ID NO: 5999572 - DNA, 25 bp, Homo sapien
agatgtaactaattgaaggctggtt

SEQ ID NO: 5999573 - DNA, 25 bp, Homo sapien
tctcgatttgtagagtttctggtaa

SEQ ID NO: 5999574 - DNA, 25 bp, Homo sapien
cgatatttggatggtcggcaatcct

SEQ ID NO: 5999575 - DNA, 25 bp, Homo sapien
gaattcagatcccctttgcagagga

SEQ ID NO: 5999576 - DNA, 25 bp, Homo sapien
gcggggacaaatgagtaaagaaata

SEQ ID NO: 5999577 - DNA, 25 bp, Homo sapien
gtaaagaaatactgcaatttaacga

SEQ ID NO: 5999578 - DNA, 25 bp, Homo sapien
tccgggtctacaagaacattggatg

SEQ ID NO: 5999579 - DNA, 25 bp, Homo sapien
atactgcaatttaacgatatttgga

SEQ ID NO: 5999580 - DNA, 25 bp, Homo sapien
aacaatttagcaatttcccttagct

SEQ ID NO: 5999581 - DNA, 25 bp, Homo sapien
cttgattggttcagtgaaacctctt

SEQ ID NO: 5999582 - DNA, 25 bp, Homo sapien
catatatcgatctgggtggtatatt

SEQ ID NO: 5999583 - DNA, 25 bp, Homo sapien
agaactgatgggcaaggattcttct

SEQ ID NO: 5999584 - DNA, 25 bp, Homo sapien
tcccgcgggcaatctgataagtgta

SEQ ID NO: 5999585 - DNA, 25 bp, Homo sapien
gaggaacaccattctgctcttccgt

SEQ ID NO: 5999586 - DNA, 25 bp, Homo sapien
ggaggacctaacaatttagcaattt

SEQ ID NO: 5999587 - DNA, 25 bp, Homo sapien
tcaattcaggcgctctataaaatct

SEQ ID NO: 5999588 - DNA, 25 bp, Homo sapien
tggtaagaaagtgtcatcattcctt

SEQ ID NO: 5999589 - DNA, 25 bp, Homo sapien
atgacaaacgccaagaccgtgtaaa

SEQ ID NO: 5999590 - DNA, 25 bp, Homo sapien
ttgtcacataacgattaatctcgat

SEQ ID NO: 5999591 - DNA, 25 bp, Homo sapien
atctggaccggaatggccaaaatac

SEQ ID NO: 5999592 - DNA, 25 bp, Homo sapien
gatcgataccatctggaccggaatg

SEQ ID NO: 5999593 - DNA, 25 bp, Homo sapien
aatgaatcttttatcgggaggacct

SEQ ID NO: 5999594 - DNA, 25 bp, Homo sapien
ggaccggaatggccaaaatacttct

SEQ ID NO: 5999595 - DNA, 25 bp, Homo sapien
caccattctgctcttccgtagacat

SEQ ID NO: 5999596 - DNA, 25 bp, Homo sapien
catttctagcttgtttgtcacataa

SEQ ID NO: 5999597 - DNA, 25 bp, Homo sapien
cattccatggcaaggtgttgataaa

SEQ ID NO: 5999598 - DNA, 25 bp, Homo sapien
tttccgggtctacaagaacattgga

SEQ ID NO: 5999599 - DNA, 25 bp, Homo sapien
ggacaaatgagtaaagaaatactgc

SEQ ID NO: 5999600 - DNA, 25 bp, Homo sapien
ttcatcaaaagatcgataccatctg

SEQ ID NO: 5999601 - DNA, 25 bp, Homo sapien
ctgatgggcaaggattcttcttgga

SEQ ID NO: 5999602 - DNA, 25 bp, Homo sapien
aatacttctcaaacctctgttgcga

SEQ ID NO: 5999603 - DNA, 25 bp, Homo sapien
aaagcatcccgcgggcaatctgata

SEQ ID NO: 5999604 - DNA, 25 bp, Homo sapien
cgccaagaccgtgtaaataaagcat

SEQ ID NO: 5999605 - DNA, 25 bp, Homo sapien
aaatgagtaaagaaatactgcaatt

SEQ ID NO: 5999606 - DNA, 25 bp, Homo sapien
cccagaatttgtaactcaaaatcat

SEQ ID NO: 5999607 - DNA, 25 bp, Homo sapien
aaatatggctttgccgataagcatc

SEQ ID NO: 5999608 - DNA, 25 bp, Homo sapien
ttaaagaactgatgggcaaggattc

SEQ ID NO: 5999609 - DNA, 25 bp, Homo sapien
ttttcatcaaaagatcgataccatc

SEQ ID NO: 5999610 - DNA, 25 bp, Homo sapien
ctttcgtaggtttaattttatcagc

SEQ ID NO: 5999611 - DNA, 25 bp, Homo sapien
aggtgttgataaactttattatctt

SEQ ID NO: 5999612 - DNA, 25 bp, Homo sapien
gtatattgggtacaaccaatgatca

SEQ ID NO: 5999613 - DNA, 25 bp, Homo sapien
tgcgaagagcccgagaacagtggtt

SEQ ID NO: 5999614 - DNA, 25 bp, Homo sapien
aacgatatttggatggtcggcaatc

SEQ ID NO: 5999615 - DNA, 25 bp, Homo sapien
cttgaaatatggctttgccgataag

SEQ ID NO: 5999616 - DNA, 25 bp, Homo sapien
gacttgtactcggtatgagcaggga

SEQ ID NO: 5999617 - DNA, 25 bp, Homo sapien
cgtaggtttaattttatcagcaaat

SEQ ID NO: 5999618 - DNA, 25 bp, Homo sapien
tgaaatatggctttgccgataagca

SEQ ID NO: 5999619 - DNA, 25 bp, Homo sapien
atcgggaggacctaacaatttagca

SEQ ID NO: 5999620 - DNA, 25 bp, Homo sapien
gagcccgagaacagtggtttggaaa

SEQ ID NO: 5999621 - DNA, 25 bp, Homo sapien
ataagtgtatagcctgatatgtttt

SEQ ID NO: 5999622 - DNA, 25 bp, Homo sapien
caggcgctctataaaatcttgaaca

SEQ ID NO: 5999623 - DNA, 25 bp, Homo sapien
ttcattaaagaactgatgggcaagg

SEQ ID NO: 5999624 - DNA, 25 bp, Homo sapien
caagaacattggatggtttgatatc

SEQ ID NO: 5999625 - DNA, 25 bp, Homo sapien
caatgaattcagatcccctttgcag

SEQ ID NO: 5999626 - DNA, 25 bp, Homo sapien
gcaatctgataagtgtatagcctga

SEQ ID NO: 5999627 - DNA, 25 bp, Homo sapien
ggatggtttgatatcacgatgacaa

SEQ ID NO: 5999628 - DNA, 25 bp, Homo sapien
ccagcatccgcctcgtgttgttcga

SEQ ID NO: 5999629 - DNA, 25 bp, Homo sapien
ccgtgtaaataaagcatcccgcggg

SEQ ID NO: 5999630 - DNA, 25 bp, Homo sapien
catccgcctcgtgttgttcgattta

SEQ ID NO: 5999631 - DNA, 25 bp, Homo sapien
tctcaaacctctgttgcgaagagcc

SEQ ID NO: 5999632 - DNA, 25 bp, Homo sapien
accttgaaatatggctttgccgata

SEQ ID NO: 5999633 - DNA, 25 bp, Homo sapien
gtcccaaaggcacctctaccgattt

SEQ ID NO: 5999634 - DNA, 25 bp, Homo sapien
aggattcttcttggagacagtcttt

SEQ ID NO: 5999635 - DNA, 25 bp, Homo sapien
cagaggaacaccattctgctcttcc

SEQ ID NO: 5999636 - DNA, 25 bp, Homo sapien
acctcttggtaagaaagtgtcatca

SEQ ID NO: 5999637 - DNA, 25 bp, Homo sapien
cagaatttgtaactcaaaatcatta

SEQ ID NO: 5999638 - DNA, 25 bp, Homo sapien
tcgataccatctggaccggaatggc

SEQ ID NO: 5999639 - DNA, 25 bp, Homo sapien
agtggtttggaaaatagagggccat

SEQ ID NO: 5999640 - DNA, 25 bp, Homo sapien
ttgtggttcgtagaccaatattttc

SEQ ID NO: 5999641 - DNA, 25 bp, Homo sapien
cgaagagcccgagaacagtggtttg

SEQ ID NO: 5999642 - DNA, 25 bp, Homo sapien
gttttaatggcatttctagcttgtt

SEQ ID NO: 5999643 - DNA, 25 bp, Homo sapien
aagatcgataccatctggaccggaa

SEQ ID NO: 5999644 - DNA, 25 bp, Homo sapien
aatattttcatcaaaagatcgatac

SEQ ID NO: 5999645 - DNA, 25 bp, Homo sapien
caccagcatccgcctcgtgttgttc

SEQ ID NO: 5999646 - DNA, 25 bp, Homo sapien
aaacctcttggtaagaaagtgtcat

SEQ ID NO: 5999647 - DNA, 25 bp, Homo sapien
gtttggaaaatagagggccatcgta

SEQ ID NO: 5999648 - DNA, 25 bp, Homo sapien
tgaatcttttatcgggaggacctaa

SEQ ID NO: 5999649 - DNA, 25 bp, Homo sapien
ggctttgccgataagcatctcgccc

SEQ ID NO: 5999650 - DNA, 25 bp, Homo sapien
caaatttggtagcttgattggttca

SEQ ID NO: 5999651 - DNA, 25 bp, Homo sapien
agcaatttcccttagctgtagaagg

SEQ ID NO: 5999652 - DNA, 25 bp, Homo sapien
tgggttaaatatgcttgtacaacag

SEQ ID NO: 5999653 - DNA, 25 bp, Homo sapien
ttccaattttttggcagacccaaaa

SEQ ID NO: 5999654 - DNA, 25 bp, Homo sapien
cgctctataaaatcttgaacagatg

SEQ ID NO: 5999655 - DNA, 25 bp, Homo sapien
ttcctgtactctttcaccagcatcc

SEQ ID NO: 5999656 - DNA, 25 bp, Homo sapien
ttcaagacaccggtttccgggtcta

SEQ ID NO: 5999657 - DNA, 25 bp, Homo sapien
tagaccaatattttcatcaaaagat

SEQ ID NO: 5999658 - DNA, 25 bp, Homo sapien
tatatcgatctgggtggtatattgg

SEQ ID NO: 5999659 - DNA, 25 bp, Homo sapien
cgggtctacaagaacattggatggt

SEQ ID NO: 5999660 - DNA, 25 bp, Homo sapien
gtaaataaagcatcccgcgggcaat

SEQ ID NO: 5999661 - DNA, 25 bp, Homo sapien
cttcttggagacagtctttgttgtg

SEQ ID NO: 5999662 - DNA, 25 bp, Homo sapien
aagaaagtgtcatcattccttaatt

SEQ ID NO: 5999663 - DNA, 25 bp, Homo sapien
ccaagcccccatatatcgatctggg

SEQ ID NO: 5999664 - DNA, 25 bp, Homo sapien
acaaatgagtaaagaaatactgcaa

SEQ ID NO: 5999665 - DNA, 25 bp, Homo sapien
atgagcagggacttttttaattgca

SEQ ID NO: 5999666 - DNA, 25 bp, Homo sapien
gcatctcgcccatgacacaaccaag

SEQ ID NO: 5999667 - DNA, 25 bp, Homo sapien
taccatctggaccggaatggccaaa

SEQ ID NO: 5999668 - DNA, 25 bp, Homo sapien
taattgcaaaggggcccaaccagtt

SEQ ID NO: 5999669 - DNA, 25 bp, Homo sapien
aatcttgaacagatgtaactaattg

SEQ ID NO: 5999670 - DNA, 25 bp, Homo sapien
acgattaatctcgatttgtagagtt

SEQ ID NO: 5999671 - DNA, 25 bp, Homo sapien
ttcgtaggtttaattttatcagcaa

SEQ ID NO: 5999672 - DNA, 25 bp, Homo sapien
tggttcagtgaaacctcttggtaag

SEQ ID NO: 5999673 - DNA, 25 bp, Homo sapien
ccaattttttggcagacccaaaatc

SEQ ID NO: 5999674 - DNA, 25 bp, Homo sapien
tagagtttctggtaagcattccatg

SEQ ID NO: 5999675 - DNA, 25 bp, Homo sapien
tagagggccatcgtaggccggattc

SEQ ID NO: 5999676 - DNA, 25 bp, Homo sapien
ctctataaaatcttgaacagatgta

SEQ ID NO: 5999677 - DNA, 25 bp, Homo sapien
atcacgatgacaaacgccaagaccg

SEQ ID NO: 5999678 - DNA, 25 bp, Homo sapien
gcttgtacaacagtcccaaaggcac

SEQ ID NO: 5999679 - DNA, 25 bp, Homo sapien
cctttgcagaggaacaccattctgc

SEQ ID NO: 5999680 - DNA, 25 bp, Homo sapien
cccaaaggcacctctaccgattttc

SEQ ID NO: 5999681 - DNA, 25 bp, Homo sapien
attcgaggttacatcgtctgcaatg

SEQ ID NO: 5999682 - DNA, 25 bp, Homo sapien
aaatcaaacaaatttggtagcttga

SEQ ID NO: 5999683 - DNA, 25 bp, Homo sapien
ttcttcttggagacagtctttgttg

SEQ ID NO: 5999684 - DNA, 25 bp, Homo sapien
tttttcttatcctgggttaaatatg

SEQ ID NO: 5999685 - DNA, 25 bp, Homo sapien
ttgtaactcaaaatcattaaaatca

SEQ ID NO: 5999686 - DNA, 25 bp, Homo sapien
gtagaaggggttcttgaccttgaaa

SEQ ID NO: 5999687 - DNA, 25 bp, Homo sapien
atcgcagattttcaagacaccggtt

SEQ ID NO: 5999688 - DNA, 25 bp, Homo sapien
ttaatctcgatttgtagagtttctg

SEQ ID NO: 5999689 - DNA, 25 bp, Homo sapien
gctggttatgttccaattttttggc

SEQ ID NO: 5999690 - DNA, 25 bp, Homo sapien
aagaccgtgtaaataaagcatcccg

SEQ ID NO: 5999691 - DNA, 25 bp, Homo sapien
gtttgtcacataacgattaatctcg

SEQ ID NO: 5999692 - DNA, 25 bp, Homo sapien
taatggcatttctagcttgtttgtc

SEQ ID NO: 5999693 - DNA, 25 bp, Homo sapien
aattcattaaagaactgatgggcaa

SEQ ID NO: 5999694 - DNA, 25 bp, Homo sapien
gatcaattcaggcgctctataaaat

SEQ ID NO: 5999695 - DNA, 25 bp, Homo sapien
ttgcggggacaaatgagtaaagaaa

SEQ ID NO: 5999696 - DNA, 25 bp, Homo sapien
cttctcaaacctctgttgcgaagag

SEQ ID NO: 5999697 - DNA, 25 bp, Homo sapien
ggatggtcggcaatcctcagaatct

SEQ ID NO: 5999698 - DNA, 25 bp, Homo sapien
ccttagctgtagaaggggttcttga

SEQ ID NO: 5999699 - DNA, 25 bp, Homo sapien
gtacaacagtcccaaaggcacctct

SEQ ID NO: 5999700 - DNA, 25 bp, Homo sapien
aaataaagcatcccgcgggcaatct

SEQ ID NO: 5999701 - DNA, 25 bp, Homo sapien
aatctgataagtgtatagcctgata

SEQ ID NO: 5999702 - DNA, 25 bp, Homo sapien
cccatgacacaaccaagcccccata

SEQ ID NO: 5999703 - DNA, 25 bp, Homo sapien
gagtttctggtaagcattccatggc

SEQ ID NO: 5999704 - DNA, 25 bp, Homo sapien
ctcggtatgagcagggactttttta

SEQ ID NO: 5999705 - DNA, 25 bp, Homo sapien
gccatcgtaggccggattcgaaaag

SEQ ID NO: 5999706 - DNA, 25 bp, Homo sapien
gaatggccaaaatacttctcaaacc

SEQ ID NO: 5999707 - DNA, 25 bp, Homo sapien
cacgatgacaaacgccaagaccgtg

SEQ ID NO: 5999708 - DNA, 25 bp, Homo sapien
aaaatagagggccatcgtaggccgg

SEQ ID NO: 5999709 - DNA, 25 bp, Homo sapien
taggtttaattttatcagcaaattc

SEQ ID NO: 5999710 - DNA, 25 bp, Homo sapien
atatgcttgtacaacagtcccaaag

SEQ ID NO: 5999711 - DNA, 25 bp, Homo sapien
cctgatatgttttaatggcatttct

SEQ ID NO: 5999712 - DNA, 25 bp, Homo sapien
ctggtaagcattccatggcaaggtg

SEQ ID NO: 5999713 - DNA, 25 bp, Homo sapien
agatcccctttgcagaggaacacca

SEQ ID NO: 5999714 - DNA, 25 bp, Homo sapien
atcgtctgcaatgaattcagatccc

SEQ ID NO: 5999715 - DNA, 25 bp, Homo sapien
ctttattatcttgcggggacaaatg

SEQ ID NO: 5999716 - DNA, 25 bp, Homo sapien
aactcaaaatcattaaaatcaaaca

SEQ ID NO: 5999717 - DNA, 25 bp, Homo sapien
ggtttaattttatcagcaaattcac

SEQ ID NO: 5999718 - DNA, 25 bp, Homo sapien
tttgttgtggttcgtagaccaatat

SEQ ID NO: 5999719 - DNA, 25 bp, Homo sapien
tagcttgtttgtcacataacgatta

SEQ ID NO: 5999720 - DNA, 25 bp, Homo sapien
cctgtactctttcaccagcatccgc

SEQ ID NO: 5999721 - DNA, 25 bp, Homo sapien
agcctgatatgttttaatggcattt

SEQ ID NO: 5999722 - DNA, 25 bp, Homo sapien
cgaggccggagacgctcgttttcag

SEQ ID NO: 5999723 - DNA, 25 bp, Homo sapien
ttcagaacatatccaaaactagaat

SEQ ID NO: 5999724 - DNA, 25 bp, Homo sapien
gaaaaacgccaacgccatcgccaag

SEQ ID NO: 5999725 - DNA, 25 bp, Homo sapien
gatagatatcaatgcaggctgcccc

SEQ ID NO: 5999726 - DNA, 25 bp, Homo sapien
attttccagatcgggtctgcatccc

SEQ ID NO: 5999727 - DNA, 25 bp, Homo sapien
ttaagcagaattgtccccggaaaat

SEQ ID NO: 5999728 - DNA, 25 bp, Homo sapien
cgctatccgcgaccgctctcatttt

SEQ ID NO: 5999729 - DNA, 25 bp, Homo sapien
atgccaggcaaataacgtgtcgttg

SEQ ID NO: 5999730 - DNA, 25 bp, Homo sapien
tctgtgtgccacgggcatcacaaat

SEQ ID NO: 5999731 - DNA, 25 bp, Homo sapien
attggaaaaacactaacattggtgg

SEQ ID NO: 5999732 - DNA, 25 bp, Homo sapien
ttgaaagaactggttaagaacgtgg

SEQ ID NO: 5999733 - DNA, 25 bp, Homo sapien
ccggctctggccacccaggctgctt

SEQ ID NO: 5999734 - DNA, 25 bp, Homo sapien
tccccagaaatcatcgacaaaaagc

SEQ ID NO: 5999735 - DNA, 25 bp, Homo sapien
atacaaaatacatgttaagcagaat

SEQ ID NO: 5999736 - DNA, 25 bp, Homo sapien
tcgggtctgcatccccggctctggc

SEQ ID NO: 5999737 - DNA, 25 bp, Homo sapien
ccacgggcatcacaaatcttacagt

SEQ ID NO: 5999738 - DNA, 25 bp, Homo sapien
gtcagcgggatagatatcaatgcag

SEQ ID NO: 5999739 - DNA, 25 bp, Homo sapien
ggctgccccaaacacttctctatac

SEQ ID NO: 5999740 - DNA, 25 bp, Homo sapien
gaacggcgctatccgcgaccgctct

SEQ ID NO: 5999741 - DNA, 25 bp, Homo sapien
gtttgacaaccacatcggcaataca

SEQ ID NO: 5999742 - DNA, 25 bp, Homo sapien
aatacatgttaagcagaattgtccc

SEQ ID NO: 5999743 - DNA, 25 bp, Homo sapien
agacactctacagctcgtcaaacgt

SEQ ID NO: 5999744 - DNA, 25 bp, Homo sapien
taagagccggcgaactgcccacgag

SEQ ID NO: 5999745 - DNA, 25 bp, Homo sapien
gcgggatagatatcaatgcaggctg

SEQ ID NO: 5999746 - DNA, 25 bp, Homo sapien
aagaggaaacagaccgatcacatag

SEQ ID NO: 5999747 - DNA, 25 bp, Homo sapien
gccctcttgcgcaccccagacacac

SEQ ID NO: 5999748 - DNA, 25 bp, Homo sapien
ctaacattggtggtatgattgcaga

SEQ ID NO: 5999749 - DNA, 25 bp, Homo sapien
gcagagctcaagaaaaagctttgaa

SEQ ID NO: 5999750 - DNA, 25 bp, Homo sapien
catcttgggtcgttgcttgtcgcga

SEQ ID NO: 5999751 - DNA, 25 bp, Homo sapien
atcgccaagcaaaagaggaaacaga

SEQ ID NO: 5999752 - DNA, 25 bp, Homo sapien
agaaacagagagcagcccatcacag

SEQ ID NO: 5999753 - DNA, 25 bp, Homo sapien
accacatcggcaatacaaaatacat

SEQ ID NO: 5999754 - DNA, 25 bp, Homo sapien
gatatcaatgcaggctgccccaaac

SEQ ID NO: 5999755 - DNA, 25 bp, Homo sapien
ttcactgcaggaagactgaaatgag

SEQ ID NO: 5999756 - DNA, 25 bp, Homo sapien
cgtccaaggttcaaacgaggccgga

SEQ ID NO: 5999757 - DNA, 25 bp, Homo sapien
ccacggtgcagatctcgtctggtcc

SEQ ID NO: 5999758 - DNA, 25 bp, Homo sapien
tcattttcatgatttacaagcgaat

SEQ ID NO: 5999759 - DNA, 25 bp, Homo sapien
ctacagtttttgatcacacttctaa

SEQ ID NO: 5999760 - DNA, 25 bp, Homo sapien
aacattggtggtatgattgcagagt

SEQ ID NO: 5999761 - DNA, 25 bp, Homo sapien
ttgcttgtcgcgagtttattcagtg

SEQ ID NO: 5999762 - DNA, 25 bp, Homo sapien
tcattggaaaaacactaacattggt

SEQ ID NO: 5999763 - DNA, 25 bp, Homo sapien
ttcagagtacttggaaaactgcaga

SEQ ID NO: 5999764 - DNA, 25 bp, Homo sapien
agtttttgatcacacttctaagcct

SEQ ID NO: 5999765 - DNA, 25 bp, Homo sapien
cagacacactgtgtctcatcttgaa

SEQ ID NO: 5999766 - DNA, 25 bp, Homo sapien
tttgcccgttgcaagagcccggaag

SEQ ID NO: 5999767 - DNA, 25 bp, Homo sapien
attttcatgatttacaagcgaatca

SEQ ID NO: 5999768 - DNA, 25 bp, Homo sapien
atcagtcttttttcagtactttgcc

SEQ ID NO: 5999769 - DNA, 25 bp, Homo sapien
agccggcgaactgcccacgagactg

SEQ ID NO: 5999770 - DNA, 25 bp, Homo sapien
ctcatcttgaaagaactggttaaga

SEQ ID NO: 5999771 - DNA, 25 bp, Homo sapien
gctccaatggtaagagccggcgaac

SEQ ID NO: 5999772 - DNA, 25 bp, Homo sapien
aacactgcactccaaactgtcgact

SEQ ID NO: 5999773 - DNA, 25 bp, Homo sapien
gtctcatcttgaaagaactggttaa

SEQ ID NO: 5999774 - DNA, 25 bp, Homo sapien
aaaataagactcttggacaccaagc

SEQ ID NO: 5999775 - DNA, 25 bp, Homo sapien
actacgtcgtgccgtccaaggttca

SEQ ID NO: 5999776 - DNA, 25 bp, Homo sapien
gcgtcaggaaggaaaacactgcact

SEQ ID NO: 5999777 - DNA, 25 bp, Homo sapien
gactgaaatgagaaacagagagcag

SEQ ID NO: 5999778 - DNA, 25 bp, Homo sapien
ttcagtgcgtcaggaaggaaaacac

SEQ ID NO: 5999779 - DNA, 25 bp, Homo sapien
gtgcgtcaggaaggaaaacactgca

SEQ ID NO: 5999780 - DNA, 25 bp, Homo sapien
tacaagcgaatcattggaaaaacac

SEQ ID NO: 5999781 - DNA, 25 bp, Homo sapien
gtcaaacgtctgtgtgccacgggca

SEQ ID NO: 5999782 - DNA, 25 bp, Homo sapien
ccaagcaaaagaggaaacagaccga

SEQ ID NO: 5999783 - DNA, 25 bp, Homo sapien
aaagctaattcagtgcgtcaggaag

SEQ ID NO: 5999784 - DNA, 25 bp, Homo sapien
agactcttggacaccaagcaagaca

SEQ ID NO: 5999785 - DNA, 25 bp, Homo sapien
acagagagcagcccatcacagatta

SEQ ID NO: 5999786 - DNA, 25 bp, Homo sapien
gcaagagcccggaagaagttagttt

SEQ ID NO: 5999787 - DNA, 25 bp, Homo sapien
gtactttgcccgttgcaagagcccg

SEQ ID NO: 5999788 - DNA, 25 bp, Homo sapien
tgttaagcagaattgtccccggaaa

SEQ ID NO: 5999789 - DNA, 25 bp, Homo sapien
cggagacgctcgttttcagaacata

SEQ ID NO: 5999790 - DNA, 25 bp, Homo sapien
aaacagatccttcagagtacttgga

SEQ ID NO: 5999791 - DNA, 25 bp, Homo sapien
aaactggttctagctccaatggtaa

SEQ ID NO: 5999792 - DNA, 25 bp, Homo sapien
cagaagacggtccatcttgggtcgt

SEQ ID NO: 5999793 - DNA, 25 bp, Homo sapien
aaaatacatgttaagcagaattgtc

SEQ ID NO: 5999794 - DNA, 25 bp, Homo sapien
acagtttttgatcacacttctaagc

SEQ ID NO: 5999795 - DNA, 25 bp, Homo sapien
ttacagttcactgcaggaagactga

SEQ ID NO: 5999796 - DNA, 25 bp, Homo sapien
aagcaaaagaggaaacagaccgatc

SEQ ID NO: 5999797 - DNA, 25 bp, Homo sapien
tcgtgccgtccaaggttcaaacgag

SEQ ID NO: 5999798 - DNA, 25 bp, Homo sapien
tcatcgacaaaaagctaattcagtg

SEQ ID NO: 5999799 - DNA, 25 bp, Homo sapien
caagaaaaagctttgaaaaacgcca

SEQ ID NO: 5999800 - DNA, 25 bp, Homo sapien
caaggttcaaacgaggccggagacg

SEQ ID NO: 5999801 - DNA, 25 bp, Homo sapien
gtgggcaacgaagtttgacaaccac

SEQ ID NO: 5999802 - DNA, 25 bp, Homo sapien
aacgaggccggagacgctcgttttc

SEQ ID NO: 5999803 - DNA, 25 bp, Homo sapien
gtactaaagcaattgaacgatgatg

SEQ ID NO: 5999804 - DNA, 25 bp, Homo sapien
tcgtcaaacgtctgtgtgccacggg

SEQ ID NO: 5999805 - DNA, 25 bp, Homo sapien
taagactcttggacaccaagcaaga

SEQ ID NO: 5999806 - DNA, 25 bp, Homo sapien
gaaaactggttctagctccaatggt

SEQ ID NO: 5999807 - DNA, 25 bp, Homo sapien
agtttattcagtgggcaacgaagtt

SEQ ID NO: 5999808 - DNA, 25 bp, Homo sapien
ctgaacgggaccctacagtttttga

SEQ ID NO: 5999809 - DNA, 25 bp, Homo sapien
gaccctacagtttttgatcacactt

SEQ ID NO: 5999810 - DNA, 25 bp, Homo sapien
cggagatctacgagatatgccaggc

SEQ ID NO: 5999811 - DNA, 25 bp, Homo sapien
attgattttccagatcgggtctgca

SEQ ID NO: 5999812 - DNA, 25 bp, Homo sapien
cgccatcgccaagcaaaagaggaaa

SEQ ID NO: 5999813 - DNA, 25 bp, Homo sapien
atcacacttctaagccttcagaaga

SEQ ID NO: 5999814 - DNA, 25 bp, Homo sapien
gatggcgctggcccacggtgcagat

SEQ ID NO: 5999815 - DNA, 25 bp, Homo sapien
gtcgactacgtcgtgccgtccaagg

SEQ ID NO: 5999816 - DNA, 25 bp, Homo sapien
ttgaacgatgatggaagcgctcaaa

SEQ ID NO: 5999817 - DNA, 25 bp, Homo sapien
gcaacgaagtttgacaaccacatcg

SEQ ID NO: 5999818 - DNA, 25 bp, Homo sapien
acagttcactgcaggaagactgaaa

SEQ ID NO: 5999819 - DNA, 25 bp, Homo sapien
cattggtggtatgattgcagagtgt

SEQ ID NO: 5999820 - DNA, 25 bp, Homo sapien
cactgcaggaagactgaaatgagaa

SEQ ID NO: 5999821 - DNA, 25 bp, Homo sapien
agtgtgaaaataagactcttggaca

SEQ ID NO: 5999822 - DNA, 25 bp, Homo sapien
aacgacgtcagcgggatagatatca

SEQ ID NO: 5999823 - DNA, 25 bp, Homo sapien
tgcggagatctacgagatatgccag

SEQ ID NO: 5999824 - DNA, 25 bp, Homo sapien
gtgtcgttgattgtgaacggcgcta

SEQ ID NO: 5999825 - DNA, 25 bp, Homo sapien
cactaacattggtggtatgattgca

SEQ ID NO: 5999826 - DNA, 25 bp, Homo sapien
aagcgctcaaacagatccttcagag

SEQ ID NO: 5999827 - DNA, 25 bp, Homo sapien
ccatcgccaagcaaaagaggaaaca

SEQ ID NO: 5999828 - DNA, 25 bp, Homo sapien
cagctcgtcaaacgtctgtgtgcca

SEQ ID NO: 5999829 - DNA, 25 bp, Homo sapien
aaggttgtaccccttcccacagata

SEQ ID NO: 5999830 - DNA, 25 bp, Homo sapien
ctcgttttcagaacatatccaaaac

SEQ ID NO: 5999831 - DNA, 25 bp, Homo sapien
ttgacaaccacatcggcaatacaaa

SEQ ID NO: 5999832 - DNA, 25 bp, Homo sapien
tattcagtgggcaacgaagtttgac

SEQ ID NO: 5999833 - DNA, 25 bp, Homo sapien
tacagctcgtcaaacgtctgtgtgc

SEQ ID NO: 5999834 - DNA, 25 bp, Homo sapien
caggaaggaaaacactgcactccaa

SEQ ID NO: 5999835 - DNA, 25 bp, Homo sapien
gatttacaagcgaatcattggaaaa

SEQ ID NO: 5999836 - DNA, 25 bp, Homo sapien
aacgccatcgccaagcaaaagagga

SEQ ID NO: 5999837 - DNA, 25 bp, Homo sapien
ctgcccacgagactgatggcgctgg

SEQ ID NO: 5999838 - DNA, 25 bp, Homo sapien
agaccgatcacataggcagtgacac

SEQ ID NO: 5999839 - DNA, 25 bp, Homo sapien
ggaagcgctcaaacagatccttcag

SEQ ID NO: 5999840 - DNA, 25 bp, Homo sapien
aaaaagctaattcagtgcgtcagga

SEQ ID NO: 5999841 - DNA, 25 bp, Homo sapien
gcccacgagactgatggcgctggcc

SEQ ID NO: 5999842 - DNA, 25 bp, Homo sapien
acgtcagcgggatagatatcaatgc

SEQ ID NO: 5999843 - DNA, 25 bp, Homo sapien
cgtgggtaaccctcacagcaaaccc

SEQ ID NO: 5999844 - DNA, 25 bp, Homo sapien
cagtcttttttcagtactttgcccg

SEQ ID NO: 5999845 - DNA, 25 bp, Homo sapien
ggaaacagaccgatcacataggcag

SEQ ID NO: 5999846 - DNA, 25 bp, Homo sapien
cttctctatacactccggcatgggc

SEQ ID NO: 5999847 - DNA, 25 bp, Homo sapien
gctcaaacagatccttcagagtact

SEQ ID NO: 5999848 - DNA, 25 bp, Homo sapien
agctaattcagtgcgtcaggaagga

SEQ ID NO: 5999849 - DNA, 25 bp, Homo sapien
gcgaccgctctcattttcatgattt

SEQ ID NO: 5999850 - DNA, 25 bp, Homo sapien
gacaaccacatcggcaatacaaaat

SEQ ID NO: 5999851 - DNA, 25 bp, Homo sapien
acagcaaacccatcagtgtgaaaat

SEQ ID NO: 5999852 - DNA, 25 bp, Homo sapien
ggcaaataacgtgtcgttgattgtg

SEQ ID NO: 5999853 - DNA, 25 bp, Homo sapien
gacgctcgttttcagaacatatcca

SEQ ID NO: 5999854 - DNA, 25 bp, Homo sapien
gaacatatccaaaactagaatcctc

SEQ ID NO: 5999855 - DNA, 25 bp, Homo sapien
gcaaaaggttgtaccccttcccaca

SEQ ID NO: 5999856 - DNA, 25 bp, Homo sapien
cgttgattgtgaacggcgctatccg

SEQ ID NO: 5999857 - DNA, 25 bp, Homo sapien
tgagaaacagagagcagcccatcac

SEQ ID NO: 5999858 - DNA, 25 bp, Homo sapien
cgtcgtgccgtccaaggttcaaacg

SEQ ID NO: 5999859 - DNA, 25 bp, Homo sapien
ttgcagagtgtgctgaacgggaccc

SEQ ID NO: 5999860 - DNA, 25 bp, Homo sapien
caaatcttacagttcactgcaggaa

SEQ ID NO: 5999861 - DNA, 25 bp, Homo sapien
acaaaatacatgttaagcagaattg

SEQ ID NO: 5999862 - DNA, 25 bp, Homo sapien
agatatgccaggcaaataacgtgtc

SEQ ID NO: 5999863 - DNA, 25 bp, Homo sapien
taaagcaattgaacgatgatggaag

SEQ ID NO: 5999864 - DNA, 25 bp, Homo sapien
atggtaagagccggcgaactgccca

SEQ ID NO: 5999865 - DNA, 25 bp, Homo sapien
agtgtgctgaacgggaccctacagt

SEQ ID NO: 5999866 - DNA, 25 bp, Homo sapien
gtgacactaaaaagcaaaaggttgt

SEQ ID NO: 5999867 - DNA, 25 bp, Homo sapien
gatctacgagatatgccaggcaaat

SEQ ID NO: 5999868 - DNA, 25 bp, Homo sapien
agagcagcccatcacagattacatt

SEQ ID NO: 5999869 - DNA, 25 bp, Homo sapien
gtgtctcatcttgaaagaactggtt

SEQ ID NO: 5999870 - DNA, 25 bp, Homo sapien
gagcccggaagaagttagtttcgta

SEQ ID NO: 5999871 - DNA, 25 bp, Homo sapien
aactgcccacgagactgatggcgct

SEQ ID NO: 5999872 - DNA, 25 bp, Homo sapien
gaggaaacagaccgatcacataggc

SEQ ID NO: 5999873 - DNA, 25 bp, Homo sapien
tctacagctcgtcaaacgtctgtgt

SEQ ID NO: 5999874 - DNA, 25 bp, Homo sapien
cacttctaagccttcagaagacggt

SEQ ID NO: 5999875 - DNA, 25 bp, Homo sapien
agacggtccatcttgggtcgttgct

SEQ ID NO: 5999876 - DNA, 25 bp, Homo sapien
cccagacacactgtgtctcatcttg

SEQ ID NO: 5999877 - DNA, 25 bp, Homo sapien
tcggcaatacaaaatacatgttaag

SEQ ID NO: 5999878 - DNA, 25 bp, Homo sapien
tcatgatttacaagcgaatcattgg

SEQ ID NO: 5999879 - DNA, 25 bp, Homo sapien
tcttttttcagtactttgcccgttg

SEQ ID NO: 5999880 - DNA, 25 bp, Homo sapien
tgatggaagcgctcaaacagatcct

SEQ ID NO: 5999881 - DNA, 25 bp, Homo sapien
aacgaagtttgacaaccacatcggc

SEQ ID NO: 5999882 - DNA, 25 bp, Homo sapien
aactgtcgactacgtcgtgccgtcc

SEQ ID NO: 5999883 - DNA, 25 bp, Homo sapien
ctgccccaaacacttctctatacac

SEQ ID NO: 5999884 - DNA, 25 bp, Homo sapien
ggctctgccctcttgcgcaccccag

SEQ ID NO: 5999885 - DNA, 25 bp, Homo sapien
gccaggcaaataacgtgtcgttgat

SEQ ID NO: 5999886 - DNA, 25 bp, Homo sapien
tctcgtctggtccccagaaatcatc

SEQ ID NO: 5999887 - DNA, 25 bp, Homo sapien
tttgatcacacttctaagccttcag

SEQ ID NO: 5999888 - DNA, 25 bp, Homo sapien
ctagaatcctctaaattgattttcc

SEQ ID NO: 5999889 - DNA, 25 bp, Homo sapien
gattgcagagtgtgctgaacgggac

SEQ ID NO: 5999890 - DNA, 25 bp, Homo sapien
tcaaacagatccttcagagtacttg

SEQ ID NO: 5999891 - DNA, 25 bp, Homo sapien
ccaggctgctttgaaagtgatcaac

SEQ ID NO: 5999892 - DNA, 25 bp, Homo sapien
ccttcagagtacttggaaaactgca

SEQ ID NO: 5999893 - DNA, 25 bp, Homo sapien
tcttgaaagaactggttaagaacgt

SEQ ID NO: 5999894 - DNA, 25 bp, Homo sapien
tttattcagtgggcaacgaagtttg

SEQ ID NO: 5999895 - DNA, 25 bp, Homo sapien
ggcgaactgcccacgagactgatgg

SEQ ID NO: 5999896 - DNA, 25 bp, Homo sapien
gtctggtccccagaaatcatcgaca

SEQ ID NO: 5999897 - DNA, 25 bp, Homo sapien
gtgatcaacgacgtcagcgggatag

SEQ ID NO: 5999898 - DNA, 25 bp, Homo sapien
ggaaaacactgcactccaaactgtc

SEQ ID NO: 5999899 - DNA, 25 bp, Homo sapien
tcctctaaattgattttccagatcg

SEQ ID NO: 5999900 - DNA, 25 bp, Homo sapien
actaaagcaattgaacgatgatgga

SEQ ID NO: 5999901 - DNA, 25 bp, Homo sapien
agctcaagaaaaagctttgaaaaac

SEQ ID NO: 5999902 - DNA, 25 bp, Homo sapien
cgccaagcaaaagaggaaacagacc

SEQ ID NO: 5999903 - DNA, 25 bp, Homo sapien
taaccctcacagcaaacccatcagt

SEQ ID NO: 5999904 - DNA, 25 bp, Homo sapien
caggctgccccaaacacttctctat

SEQ ID NO: 5999905 - DNA, 25 bp, Homo sapien
ttacatatgctggaaaactggttct

SEQ ID NO: 5999906 - DNA, 25 bp, Homo sapien
gcaaaagaggaaacagaccgatcac

SEQ ID NO: 5999907 - DNA, 25 bp, Homo sapien
tgcccgttgcaagagcccggaagaa

SEQ ID NO: 5999908 - DNA, 25 bp, Homo sapien
tgtgctgaacgggaccctacagttt

SEQ ID NO: 5999909 - DNA, 25 bp, Homo sapien
ggaaggaaaacactgcactccaaac

SEQ ID NO: 5999910 - DNA, 25 bp, Homo sapien
ccggcgaactgcccacgagactgat

SEQ ID NO: 5999911 - DNA, 25 bp, Homo sapien
ccatcacagattacattgcggagat

SEQ ID NO: 5999912 - DNA, 25 bp, Homo sapien
gctgctttgaaagtgatcaacgacg

SEQ ID NO: 5999913 - DNA, 25 bp, Homo sapien
ttttttcagtactttgcccgttgca

SEQ ID NO: 5999914 - DNA, 25 bp, Homo sapien
agcgaatcattggaaaaacactaac

SEQ ID NO: 5999915 - DNA, 25 bp, Homo sapien
gaaaaacactaacattggtggtatg

SEQ ID NO: 5999916 - DNA, 25 bp, Homo sapien
catgggctctgccctcttgcgcacc

SEQ ID NO: 5999917 - DNA, 25 bp, Homo sapien
ggtccatcttgggtcgttgcttgtc

SEQ ID NO: 5999918 - DNA, 25 bp, Homo sapien
cactgtgtctcatcttgaaagaact

SEQ ID NO: 5999919 - DNA, 25 bp, Homo sapien
atcacagattacattgcggagatct

SEQ ID NO: 5999920 - DNA, 25 bp, Homo sapien
ggacaccaagcaagacactctacag

SEQ ID NO: 5999921 - DNA, 25 bp, Homo sapien
cgacaaaaagctaattcagtgcgtc

SEQ ID NO: 5999922 - DNA, 25 bp, Homo sapien
tctctatacactccggcatgggctc

SEQ ID NO: 5999923 - DNA, 25 bp, Homo sapien
acaccaagcaagacactctacagct

SEQ ID NO: 5999924 - DNA, 25 bp, Homo sapien
agaagttagtttcgtactaaagcaa

SEQ ID NO: 5999925 - DNA, 25 bp, Homo sapien
ttgaaagtgatcaacgacgtcagcg

SEQ ID NO: 5999926 - DNA, 25 bp, Homo sapien
aaaactagaatcctctaaattgatt

SEQ ID NO: 5999927 - DNA, 25 bp, Homo sapien
gctctcattttcatgatttacaagc

SEQ ID NO: 5999928 - DNA, 25 bp, Homo sapien
ttagtttcgtactaaagcaattgaa

SEQ ID NO: 5999929 - DNA, 25 bp, Homo sapien
cagtactttgcccgttgcaagagcc

SEQ ID NO: 5999930 - DNA, 25 bp, Homo sapien
caatacaaaatacatgttaagcaga

SEQ ID NO: 5999931 - DNA, 25 bp, Homo sapien
cgacgtcagcgggatagatatcaat

SEQ ID NO: 5999932 - DNA, 25 bp, Homo sapien
agcaaacccatcagtgtgaaaataa

SEQ ID NO: 5999933 - DNA, 25 bp, Homo sapien
cgttgcaagagcccggaagaagtta

SEQ ID NO: 5999934 - DNA, 25 bp, Homo sapien
tggcgctggcccacggtgcagatct

SEQ ID NO: 5999935 - DNA, 25 bp, Homo sapien
ctgcaggaagactgaaatgagaaac

SEQ ID NO: 5999936 - DNA, 25 bp, Homo sapien
ccttcagaagacggtccatcttggg

SEQ ID NO: 5999937 - DNA, 25 bp, Homo sapien
acgtgtcgttgattgtgaacggcgc

SEQ ID NO: 5999938 - DNA, 25 bp, Homo sapien
acgagactgatggcgctggcccacg

SEQ ID NO: 5999939 - DNA, 25 bp, Homo sapien
ggcaatacaaaatacatgttaagca

SEQ ID NO: 5999940 - DNA, 25 bp, Homo sapien
tgcagatctcgtctggtccccagaa

SEQ ID NO: 5999941 - DNA, 25 bp, Homo sapien
aacactaacattggtggtatgattg

SEQ ID NO: 5999942 - DNA, 25 bp, Homo sapien
gcagagtgtgctgaacgggacccta

SEQ ID NO: 5999943 - DNA, 25 bp, Homo sapien
agaacgtgggtaaccctcacagcaa

SEQ ID NO: 5999944 - DNA, 25 bp, Homo sapien
cacaaatcttacagttcactgcagg

SEQ ID NO: 5999945 - DNA, 25 bp, Homo sapien
agagtgtgctgaacgggaccctaca

SEQ ID NO: 5999946 - DNA, 25 bp, Homo sapien
atccaaaactagaatcctctaaatt

SEQ ID NO: 5999947 - DNA, 25 bp, Homo sapien
cgtctgtgtgccacgggcatcacaa

SEQ ID NO: 5999948 - DNA, 25 bp, Homo sapien
gatcaacgacgtcagcgggatagat

SEQ ID NO: 5999949 - DNA, 25 bp, Homo sapien
ctgatggcgctggcccacggtgcag

SEQ ID NO: 5999950 - DNA, 25 bp, Homo sapien
tggcccacggtgcagatctcgtctg

SEQ ID NO: 5999951 - DNA, 25 bp, Homo sapien
gctggcccacggtgcagatctcgtc

SEQ ID NO: 5999952 - DNA, 25 bp, Homo sapien
ggttacatatgctggaaaactggtt

SEQ ID NO: 5999953 - DNA, 25 bp, Homo sapien
tccagatcgggtctgcatccccggc

SEQ ID NO: 5999954 - DNA, 25 bp, Homo sapien
ttgaaaaacgccaacgccatcgcca

SEQ ID NO: 5999955 - DNA, 25 bp, Homo sapien
actcttggacaccaagcaagacact

SEQ ID NO: 5999956 - DNA, 25 bp, Homo sapien
ctgcagagctcaagaaaaagctttg

SEQ ID NO: 5999957 - DNA, 25 bp, Homo sapien
aacacttctctatacactccggcat

SEQ ID NO: 5999958 - DNA, 25 bp, Homo sapien
tctcattttcatgatttacaagcga

SEQ ID NO: 5999959 - DNA, 25 bp, Homo sapien
tttttgatcacacttctaagccttc

SEQ ID NO: 5999960 - DNA, 25 bp, Homo sapien
ccccggctctggccacccaggctgc

SEQ ID NO: 5999961 - DNA, 25 bp, Homo sapien
tccaaggttcaaacgaggccggaga

SEQ ID NO: 5999962 - DNA, 25 bp, Homo sapien
ctgccctcttgcgcaccccagacac

SEQ ID NO: 5999963 - DNA, 25 bp, Homo sapien
tcaaacgaggccggagacgctcgtt

SEQ ID NO: 5999964 - DNA, 25 bp, Homo sapien
cgttttcagaacatatccaaaacta

SEQ ID NO: 5999965 - DNA, 25 bp, Homo sapien
tacatgttaagcagaattgtccccg

SEQ ID NO: 5999966 - DNA, 25 bp, Homo sapien
aggttcaaacgaggccggagacgct

SEQ ID NO: 5999967 - DNA, 25 bp, Homo sapien
acggcgctatccgcgaccgctctca

SEQ ID NO: 5999968 - DNA, 25 bp, Homo sapien
actttgcccgttgcaagagcccgga

SEQ ID NO: 5999969 - DNA, 25 bp, Homo sapien
aataacgtgtcgttgattgtgaacg

SEQ ID NO: 5999970 - DNA, 25 bp, Homo sapien
aaattgattttccagatcgggtctg

SEQ ID NO: 5999971 - DNA, 25 bp, Homo sapien
cagtgcgtcaggaaggaaaacactg

SEQ ID NO: 5999972 - DNA, 25 bp, Homo sapien
ggtaagagccggcgaactgcccacg

SEQ ID NO: 5999973 - DNA, 25 bp, Homo sapien
aagactgaaatgagaaacagagagc

SEQ ID NO: 5999974 - DNA, 25 bp, Homo sapien
cagtgacactaaaaagcaaaaggtt

SEQ ID NO: 5999975 - DNA, 25 bp, Homo sapien
cataggcagtgacactaaaaagcaa

SEQ ID NO: 5999976 - DNA, 25 bp, Homo sapien
cagaacatatccaaaactagaatcc

SEQ ID NO: 5999977 - DNA, 25 bp, Homo sapien
atcgacaaaaagctaattcagtgcg

SEQ ID NO: 5999978 - DNA, 25 bp, Homo sapien
cgaactgcccacgagactgatggcg

SEQ ID NO: 5999979 - DNA, 25 bp, Homo sapien
aaaagaggaaacagaccgatcacat

SEQ ID NO: 5999980 - DNA, 25 bp, Homo sapien
caaacacttctctatacactccggc

SEQ ID NO: 5999981 - DNA, 25 bp, Homo sapien
tgggtaaccctcacagcaaacccat

SEQ ID NO: 5999982 - DNA, 25 bp, Homo sapien
gcaccccagacacactgtgtctcat

SEQ ID NO: 5999983 - DNA, 25 bp, Homo sapien
ggccacccaggctgctttgaaagtg

SEQ ID NO: 5999984 - DNA, 25 bp, Homo sapien
aaatcagtcttttttcagtactttg

SEQ ID NO: 5999985 - DNA, 25 bp, Homo sapien
tggaaaactggttctagctccaatg

SEQ ID NO: 5999986 - DNA, 25 bp, Homo sapien
aggccggagacgctcgttttcagaa

SEQ ID NO: 5999987 - DNA, 25 bp, Homo sapien
cacatcggcaatacaaaatacatgt

SEQ ID NO: 5999988 - DNA, 25 bp, Homo sapien
aaagctttgaaaaacgccaacgcca

SEQ ID NO: 5999989 - DNA, 25 bp, Homo sapien
gggaccctacagtttttgatcacac

SEQ ID NO: 5999990 - DNA, 25 bp, Homo sapien
ggtaaccctcacagcaaacccatca

SEQ ID NO: 5999991 - DNA, 25 bp, Homo sapien
ctttgaaaaacgccaacgccatcgc

SEQ ID NO: 5999992 - DNA, 25 bp, Homo sapien
tctagctccaatggtaagagccggc

SEQ ID NO: 5999993 - DNA, 25 bp, Homo sapien
tatcaatgcaggctgccccaaacac

SEQ ID NO: 5999994 - DNA, 25 bp, Homo sapien
ctggccacccaggctgctttgaaag

SEQ ID NO: 5999995 - DNA, 25 bp, Homo sapien
cgaagtttgacaaccacatcggcaa

SEQ ID NO: 5999996 - DNA, 25 bp, Homo sapien
accaagcaagacactctacagctcg

SEQ ID NO: 5999997 - DNA, 25 bp, Homo sapien
ggaaaactgcagagctcaagaaaaa

SEQ ID NO: 5999998 - DNA, 25 bp, Homo sapien
aaaacactgcactccaaactgtcga

SEQ ID NO: 5999999 - DNA, 25 bp, Homo sapien
tgatcacacttctaagccttcagaa

SEQ ID NO: 6000000 - DNA, 25 bp, Homo sapien
gtatgattgcagagtgtgctgaacg

SEQ ID NO: 6000001 - DNA, 25 bp, Homo sapien
aggctgctttgaaagtgatcaacga

SEQ ID NO: 6000002 - DNA, 25 bp, Homo sapien
gccggagacgctcgttttcagaaca

SEQ ID NO: 6000003 - DNA, 25 bp, Homo sapien
tcttgcgcaccccagacacactgtg

SEQ ID NO: 6000004 - DNA, 25 bp, Homo sapien
ccaacgccatcgccaagcaaaagag

SEQ ID NO: 6000005 - DNA, 25 bp, Homo sapien
aacgtctgtgtgccacgggcatcac

SEQ ID NO: 6000006 - DNA, 25 bp, Homo sapien
tacactccggcatgggctctgccct

SEQ ID NO: 6000007 - DNA, 25 bp, Homo sapien
cgactacgtcgtgccgtccaaggtt

SEQ ID NO: 6000008 - DNA, 25 bp, Homo sapien
gagtacttggaaaactgcagagctc

SEQ ID NO: 6000009 - DNA, 25 bp, Homo sapien
gtcgttgcttgtcgcgagtttattc

SEQ ID NO: 6000010 - DNA, 25 bp, Homo sapien
gttaagaacgtgggtaaccctcaca

SEQ ID NO: 6000011 - DNA, 25 bp, Homo sapien
cgctcgttttcagaacatatccaaa

SEQ ID NO: 6000012 - DNA, 25 bp, Homo sapien
aaggaaaacactgcactccaaactg

SEQ ID NO: 6000013 - DNA, 25 bp, Homo sapien
tgccacgggcatcacaaatcttaca

SEQ ID NO: 6000014 - DNA, 25 bp, Homo sapien
acagaccgatcacataggcagtgac

SEQ ID NO: 6000015 - DNA, 25 bp, Homo sapien
tatacactccggcatgggctctgcc

SEQ ID NO: 6000016 - DNA, 25 bp, Homo sapien
ggtgcagatctcgtctggtccccag

SEQ ID NO: 6000017 - DNA, 25 bp, Homo sapien
tcttgggtcgttgcttgtcgcgagt

SEQ ID NO: 6000018 - DNA, 25 bp, Homo sapien
aactagaatcctctaaattgatttt

SEQ ID NO: 6000019 - DNA, 25 bp, Homo sapien
ttcagtactttgcccgttgcaagag

SEQ ID NO: 6000020 - DNA, 25 bp, Homo sapien
gggcaacgaagtttgacaaccacat

SEQ ID NO: 6000021 - DNA, 25 bp, Homo sapien
cacttctctatacactccggcatgg

SEQ ID NO: 6000022 - DNA, 25 bp, Homo sapien
ttgtaccccttcccacagatatata

SEQ ID NO: 6000023 - DNA, 25 bp, Homo sapien
atgctggaaaactggttctagctcc

SEQ ID NO: 6000024 - DNA, 25 bp, Homo sapien
tcagtgtgaaaataagactcttgga

SEQ ID NO: 6000025 - DNA, 25 bp, Homo sapien
acttggaaaactgcagagctcaaga

SEQ ID NO: 6000026 - DNA, 25 bp, Homo sapien
cagatctcgtctggtccccagaaat

SEQ ID NO: 6000027 - DNA, 25 bp, Homo sapien
atggaagcgctcaaacagatccttc

SEQ ID NO: 6000028 - DNA, 25 bp, Homo sapien
acgatgatggaagcgctcaaacaga

SEQ ID NO: 6000029 - DNA, 25 bp, Homo sapien
accccagacacactgtgtctcatct

SEQ ID NO: 6000030 - DNA, 25 bp, Homo sapien
gccccaaacacttctctatacactc

SEQ ID NO: 6000031 - DNA, 25 bp, Homo sapien
ctctgccctcttgcgcaccccagac

SEQ ID NO: 6000032 - DNA, 25 bp, Homo sapien
ggcatgggctctgccctcttgcgca

SEQ ID NO: 6000033 - DNA, 25 bp, Homo sapien
gatcgggtctgcatccccggctctg

SEQ ID NO: 6000034 - DNA, 25 bp, Homo sapien
catcagtgtgaaaataagactcttg

SEQ ID NO: 6000035 - DNA, 25 bp, Homo sapien
tacgagatatgccaggcaaataacg

SEQ ID NO: 6000036 - DNA, 25 bp, Homo sapien
atgatttacaagcgaatcattggaa

SEQ ID NO: 6000037 - DNA, 25 bp, Homo sapien
cctcttgcgcaccccagacacactg

SEQ ID NO: 6000038 - DNA, 25 bp, Homo sapien
acattgcggagatctacgagatatg

SEQ ID NO: 6000039 - DNA, 25 bp, Homo sapien
ttttcagaacatatccaaaactaga

SEQ ID NO: 6000040 - DNA, 25 bp, Homo sapien
aacgccaacgccatcgccaagcaaa

SEQ ID NO: 6000041 - DNA, 25 bp, Homo sapien
actggttctagctccaatggtaaga

SEQ ID NO: 6000042 - DNA, 25 bp, Homo sapien
cgcgagtttattcagtgggcaacga

SEQ ID NO: 6000043 - DNA, 25 bp, Homo sapien
ggcagtgacactaaaaagcaaaagg

SEQ ID NO: 6000044 - DNA, 25 bp, Homo sapien
ttgtgaacggcgctatccgcgaccg

SEQ ID NO: 6000045 - DNA, 25 bp, Homo sapien
aatcttacagttcactgcaggaaga

SEQ ID NO: 6000046 - DNA, 25 bp, Homo sapien
aatcatcgacaaaaagctaattcag

SEQ ID NO: 6000047 - DNA, 25 bp, Homo sapien
cccatcagtgtgaaaataagactct

SEQ ID NO: 6000048 - DNA, 25 bp, Homo sapien
atatgccaggcaaataacgtgtcgt

SEQ ID NO: 6000049 - DNA, 25 bp, Homo sapien
actccaaactgtcgactacgtcgtg

SEQ ID NO: 6000050 - DNA, 25 bp, Homo sapien
ggctctggccacccaggctgctttg

SEQ ID NO: 6000051 - DNA, 25 bp, Homo sapien
ttcagaagacggtccatcttgggtc

SEQ ID NO: 6000052 - DNA, 25 bp, Homo sapien
tggaaaaacactaacattggtggta

SEQ ID NO: 6000053 - DNA, 25 bp, Homo sapien
tggttctagctccaatggtaagagc

SEQ ID NO: 6000054 - DNA, 25 bp, Homo sapien
gagatctacgagatatgccaggcaa

SEQ ID NO: 6000055 - DNA, 25 bp, Homo sapien
agcagcccatcacagattacattgc

SEQ ID NO: 6000056 - DNA, 25 bp, Homo sapien
gatgatggaagcgctcaaacagatc

SEQ ID NO: 6000057 - DNA, 25 bp, Homo sapien
atatccaaaactagaatcctctaaa

SEQ ID NO: 6000058 - DNA, 25 bp, Homo sapien
caaactgtcgactacgtcgtgccgt

SEQ ID NO: 6000059 - DNA, 25 bp, Homo sapien
tcttacagttcactgcaggaagact

SEQ ID NO: 6000060 - DNA, 25 bp, Homo sapien
gctcgtcaaacgtctgtgtgccacg

SEQ ID NO: 6000061 - DNA, 25 bp, Homo sapien
catgttaagcagaattgtccccgga

SEQ ID NO: 6000062 - DNA, 25 bp, Homo sapien
caagacactctacagctcgtcaaac

SEQ ID NO: 6000063 - DNA, 25 bp, Homo sapien
tgtgtgccacgggcatcacaaatct

SEQ ID NO: 6000064 - DNA, 25 bp, Homo sapien
agagagcagcccatcacagattaca

SEQ ID NO: 6000065 - DNA, 25 bp, Homo sapien
gttcaaacgaggccggagacgctcg

SEQ ID NO: 6000066 - DNA, 25 bp, Homo sapien
cacactgtgtctcatcttgaaagaa

SEQ ID NO: 6000067 - DNA, 25 bp, Homo sapien
tttcatgatttacaagcgaatcatt

SEQ ID NO: 6000068 - DNA, 25 bp, Homo sapien
cctcacagcaaacccatcagtgtga

SEQ ID NO: 6000069 - DNA, 25 bp, Homo sapien
ctccggcatgggctctgccctcttg

SEQ ID NO: 6000070 - DNA, 25 bp, Homo sapien
acggtccatcttgggtcgttgcttg

SEQ ID NO: 6000071 - DNA, 25 bp, Homo sapien
aataagactcttggacaccaagcaa

SEQ ID NO: 6000072 - DNA, 25 bp, Homo sapien
cagtgggcaacgaagtttgacaacc

SEQ ID NO: 6000073 - DNA, 25 bp, Homo sapien
atcacaaatcttacagttcactgca

SEQ ID NO: 6000074 - DNA, 25 bp, Homo sapien
gactgatggcgctggcccacggtgc

SEQ ID NO: 6000075 - DNA, 25 bp, Homo sapien
agccttcagaagacggtccatcttg

SEQ ID NO: 6000076 - DNA, 25 bp, Homo sapien
ccggcatgggctctgccctcttgcg

SEQ ID NO: 6000077 - DNA, 25 bp, Homo sapien
tttacaagcgaatcattggaaaaac

SEQ ID NO: 6000078 - DNA, 25 bp, Homo sapien
gatctcgtctggtccccagaaatca

SEQ ID NO: 6000079 - DNA, 25 bp, Homo sapien
atatgctggaaaactggttctagct

SEQ ID NO: 6000080 - DNA, 25 bp, Homo sapien
aattgaacgatgatggaagcgctca

SEQ ID NO: 6000081 - DNA, 25 bp, Homo sapien
tcgtctggtccccagaaatcatcga

SEQ ID NO: 6000082 - DNA, 25 bp, Homo sapien
gccgtccaaggttcaaacgaggccg

SEQ ID NO: 6000083 - DNA, 25 bp, Homo sapien
ctctggccacccaggctgctttgaa

SEQ ID NO: 6000084 - DNA, 25 bp, Homo sapien
gggcatcacaaatcttacagttcac

SEQ ID NO: 6000085 - DNA, 25 bp, Homo sapien
ctggtccccagaaatcatcgacaaa

SEQ ID NO: 6000086 - DNA, 25 bp, Homo sapien
ctaattcagtgcgtcaggaaggaaa

SEQ ID NO: 6000087 - DNA, 25 bp, Homo sapien
tgaaaataagactcttggacaccaa

SEQ ID NO: 6000088 - DNA, 25 bp, Homo sapien
gaccgctctcattttcatgatttac

SEQ ID NO: 6000089 - DNA, 25 bp, Homo sapien
ctaaattgattttccagatcgggtc

SEQ ID NO: 6000090 - DNA, 25 bp, Homo sapien
tgcaggctgccccaaacacttctct

SEQ ID NO: 6000091 - DNA, 25 bp, Homo sapien
ttgtcgcgagtttattcagtgggca

SEQ ID NO: 6000092 - DNA, 25 bp, Homo sapien
tgctgaacgggaccctacagttttt

SEQ ID NO: 6000093 - DNA, 25 bp, Homo sapien
gtcgcgagtttattcagtgggcaac

SEQ ID NO: 6000094 - DNA, 25 bp, Homo sapien
tgggctctgccctcttgcgcacccc

SEQ ID NO: 6000095 - DNA, 25 bp, Homo sapien
ctgcatccccggctctggccaccca

SEQ ID NO: 6000096 - DNA, 25 bp, Homo sapien
ggaagactgaaatgagaaacagaga

SEQ ID NO: 6000097 - DNA, 25 bp, Homo sapien
gaaatcatcgacaaaaagctaattc

SEQ ID NO: 6000098 - DNA, 25 bp, Homo sapien
tggtatgattgcagagtgtgctgaa

SEQ ID NO: 6000099 - DNA, 25 bp, Homo sapien
gaaagtgatcaacgacgtcagcggg

SEQ ID NO: 6000100 - DNA, 25 bp, Homo sapien
ttgcgcaccccagacacactgtgtc

SEQ ID NO: 6000101 - DNA, 25 bp, Homo sapien
ttttcagtactttgcccgttgcaag

SEQ ID NO: 6000102 - DNA, 25 bp, Homo sapien
ccctacagtttttgatcacacttct

SEQ ID NO: 6000103 - DNA, 25 bp, Homo sapien
cagagtacttggaaaactgcagagc

SEQ ID NO: 6000104 - DNA, 25 bp, Homo sapien
aaacagaccgatcacataggcagtg

SEQ ID NO: 6000105 - DNA, 25 bp, Homo sapien
cagattacattgcggagatctacga

SEQ ID NO: 6000106 - DNA, 25 bp, Homo sapien
ttggaaaactgcagagctcaagaaa

SEQ ID NO: 6000107 - DNA, 25 bp, Homo sapien
gggtctgcatccccggctctggcca

SEQ ID NO: 6000108 - DNA, 25 bp, Homo sapien
atccgcgaccgctctcattttcatg

SEQ ID NO: 6000109 - DNA, 25 bp, Homo sapien
ctgtcgactacgtcgtgccgtccaa

SEQ ID NO: 6000110 - DNA, 25 bp, Homo sapien
aatcctctaaattgattttccagat

SEQ ID NO: 6000111 - DNA, 25 bp, Homo sapien
tacgtcgtgccgtccaaggttcaaa

SEQ ID NO: 6000112 - DNA, 25 bp, Homo sapien
gaagacggtccatcttgggtcgttg

SEQ ID NO: 6000113 - DNA, 25 bp, Homo sapien
gcccacggtgcagatctcgtctggt

SEQ ID NO: 6000114 - DNA, 25 bp, Homo sapien
ggtccccagaaatcatcgacaaaaa

SEQ ID NO: 6000115 - DNA, 25 bp, Homo sapien
agatccttcagagtacttggaaaac

SEQ ID NO: 6000116 - DNA, 25 bp, Homo sapien
ggtggtatgattgcagagtgtgctg

SEQ ID NO: 6000117 - DNA, 25 bp, Homo sapien
tccatcttgggtcgttgcttgtcgc

SEQ ID NO: 6000118 - DNA, 25 bp, Homo sapien
gcaattgaacgatgatggaagcgct

SEQ ID NO: 6000119 - DNA, 25 bp, Homo sapien
atgattgcagagtgtgctgaacggg

SEQ ID NO: 6000120 - DNA, 25 bp, Homo sapien
cagaaatcatcgacaaaaagctaat

SEQ ID NO: 6000121 - DNA, 25 bp, Homo sapien
ctctaaattgattttccagatcggg

SEQ ID NO: 6000122 - DNA, 25 bp, Homo sapien
agagctcaagaaaaagctttgaaaa

SEQ ID NO: 6000123 - DNA, 25 bp, Homo sapien
tttccagatcgggtctgcatccccg

SEQ ID NO: 6000124 - DNA, 25 bp, Homo sapien
agaatcctctaaattgattttccag

SEQ ID NO: 6000125 - DNA, 25 bp, Homo sapien
ttgcaagagcccggaagaagttagt

SEQ ID NO: 6000126 - DNA, 25 bp, Homo sapien
catcggcaatacaaaatacatgtta

SEQ ID NO: 6000127 - DNA, 25 bp, Homo sapien
tcacagcaaacccatcagtgtgaaa

SEQ ID NO: 6000128 - DNA, 25 bp, Homo sapien
aagtttgacaaccacatcggcaata

SEQ ID NO: 6000129 - DNA, 25 bp, Homo sapien
gtcgttgattgtgaacggcgctatc

SEQ ID NO: 6000130 - DNA, 25 bp, Homo sapien
gcaggaagactgaaatgagaaacag

SEQ ID NO: 6000131 - DNA, 25 bp, Homo sapien
atggttacatatgctggaaaactgg

SEQ ID NO: 6000132 - DNA, 25 bp, Homo sapien
aaaacactaacattggtggtatgat

SEQ ID NO: 6000133 - DNA, 25 bp, Homo sapien
gttctagctccaatggtaagagccg

SEQ ID NO: 6000134 - DNA, 25 bp, Homo sapien
aacccatcagtgtgaaaataagact

SEQ ID NO: 6000135 - DNA, 25 bp, Homo sapien
tccaatggtaagagccggcgaactg

SEQ ID NO: 6000136 - DNA, 25 bp, Homo sapien
agtttcgtactaaagcaattgaacg

SEQ ID NO: 6000137 - DNA, 25 bp, Homo sapien
agttcactgcaggaagactgaaatg

SEQ ID NO: 6000138 - DNA, 25 bp, Homo sapien
atccccggctctggccacccaggct

SEQ ID NO: 6000139 - DNA, 25 bp, Homo sapien
acagatccttcagagtacttggaaa

SEQ ID NO: 6000140 - DNA, 25 bp, Homo sapien
actctacagctcgtcaaacgtctgt

SEQ ID NO: 6000141 - DNA, 25 bp, Homo sapien
cagcgggatagatatcaatgcaggc

SEQ ID NO: 6000142 - DNA, 25 bp, Homo sapien
caaccacatcggcaatacaaaatac

SEQ ID NO: 6000143 - DNA, 25 bp, Homo sapien
gagacgctcgttttcagaacatatc

SEQ ID NO: 6000144 - DNA, 25 bp, Homo sapien
cactccggcatgggctctgccctct

SEQ ID NO: 6000145 - DNA, 25 bp, Homo sapien
ttgggtcgttgcttgtcgcgagttt

SEQ ID NO: 6000146 - DNA, 25 bp, Homo sapien
gaacgatgatggaagcgctcaaaca

SEQ ID NO: 6000147 - DNA, 25 bp, Homo sapien
aattcagtgcgtcaggaaggaaaac

SEQ ID NO: 6000148 - DNA, 25 bp, Homo sapien
ttacattgcggagatctacgagata

SEQ ID NO: 6000149 - DNA, 25 bp, Homo sapien
gggtcgttgcttgtcgcgagtttat

SEQ ID NO: 6000150 - DNA, 25 bp, Homo sapien
cacataggcagtgacactaaaaagc

SEQ ID NO: 6000151 - DNA, 25 bp, Homo sapien
gtcaggaaggaaaacactgcactcc

SEQ ID NO: 6000152 - DNA, 25 bp, Homo sapien
ctgtgtctcatcttgaaagaactgg

SEQ ID NO: 6000153 - DNA, 25 bp, Homo sapien
ggttgtaccccttcccacagatata

SEQ ID NO: 6000154 - DNA, 25 bp, Homo sapien
caagcgaatcattggaaaaacacta

SEQ ID NO: 6000155 - DNA, 25 bp, Homo sapien
aatgagaaacagagagcagcccatc

SEQ ID NO: 6000156 - DNA, 25 bp, Homo sapien
ttggacaccaagcaagacactctac

SEQ ID NO: 6000157 - DNA, 25 bp, Homo sapien
caagcaagacactctacagctcgtc

SEQ ID NO: 6000158 - DNA, 25 bp, Homo sapien
tctacgagatatgccaggcaaataa

SEQ ID NO: 6000159 - DNA, 25 bp, Homo sapien
caaataacgtgtcgttgattgtgaa

SEQ ID NO: 6000160 - DNA, 25 bp, Homo sapien
attgcggagatctacgagatatgcc

SEQ ID NO: 6000161 - DNA, 25 bp, Homo sapien
tttcgtactaaagcaattgaacgat

SEQ ID NO: 6000162 - DNA, 25 bp, Homo sapien
ccgctctcattttcatgatttacaa

SEQ ID NO: 6000163 - DNA, 25 bp, Homo sapien
gacactaaaaagcaaaaggttgtac

SEQ ID NO: 6000164 - DNA, 25 bp, Homo sapien
tagatatcaatgcaggctgccccaa

SEQ ID NO: 6000165 - DNA, 25 bp, Homo sapien
gcagaattgtccccggaaaatcagt

SEQ ID NO: 6000166 - DNA, 25 bp, Homo sapien
ccgcgaccgctctcattttcatgat

SEQ ID NO: 6000167 - DNA, 25 bp, Homo sapien
agttagtttcgtactaaagcaattg

SEQ ID NO: 6000168 - DNA, 25 bp, Homo sapien
aaaactgcagagctcaagaaaaagc

SEQ ID NO: 6000169 - DNA, 25 bp, Homo sapien
aatgcaggctgccccaaacacttct

SEQ ID NO: 6000170 - DNA, 25 bp, Homo sapien
gcccatcacagattacattgcggag

SEQ ID NO: 6000171 - DNA, 25 bp, Homo sapien
tggttaagaacgtgggtaaccctca

SEQ ID NO: 6000172 - DNA, 25 bp, Homo sapien
cactgcactccaaactgtcgactac

SEQ ID NO: 6000173 - DNA, 25 bp, Homo sapien
acccaggctgctttgaaagtgatca

SEQ ID NO: 6000174 - DNA, 25 bp, Homo sapien
acgggcatcacaaatcttacagttc

SEQ ID NO: 6000175 - DNA, 25 bp, Homo sapien
tccaaactgtcgactacgtcgtgcc

SEQ ID NO: 6000176 - DNA, 25 bp, Homo sapien
cgagatatgccaggcaaataacgtg

SEQ ID NO: 6000177 - DNA, 25 bp, Homo sapien
taagccttcagaagacggtccatct

SEQ ID NO: 6000178 - DNA, 25 bp, Homo sapien
cgccaacgccatcgccaagcaaaag

SEQ ID NO: 6000179 - DNA, 25 bp, Homo sapien
agaattgtccccggaaaatcagtct

SEQ ID NO: 6000180 - DNA, 25 bp, Homo sapien
tcttggacaccaagcaagacactct

SEQ ID NO: 6000181 - DNA, 25 bp, Homo sapien
gcttgtcgcgagtttattcagtggg

SEQ ID NO: 6000182 - DNA, 25 bp, Homo sapien
tctatacactccggcatgggctctg

SEQ ID NO: 6000183 - DNA, 25 bp, Homo sapien
atccttcagagtacttggaaaactg

SEQ ID NO: 6000184 - DNA, 25 bp, Homo sapien
tccccggaaaatcagtcttttttca

SEQ ID NO: 6000185 - DNA, 25 bp, Homo sapien
gtgccgtccaaggttcaaacgaggc

SEQ ID NO: 6000186 - DNA, 25 bp, Homo sapien
tgtgccacgggcatcacaaatctta

SEQ ID NO: 6000187 - DNA, 25 bp, Homo sapien
caaacccatcagtgtgaaaataaga

SEQ ID NO: 6000188 - DNA, 25 bp, Homo sapien
cgagtttattcagtgggcaacgaag

SEQ ID NO: 6000189 - DNA, 25 bp, Homo sapien
gtctgcatccccggctctggccacc

SEQ ID NO: 6000190 - DNA, 25 bp, Homo sapien
ccacgagactgatggcgctggccca

SEQ ID NO: 6000191 - DNA, 25 bp, Homo sapien
tgattttccagatcgggtctgcatc

SEQ ID NO: 6000192 - DNA, 25 bp, Homo sapien
gaagaagttagtttcgtactaaagc

SEQ ID NO: 6000193 - DNA, 25 bp, Homo sapien
cgaatcattggaaaaacactaacat

SEQ ID NO: 6000194 - DNA, 25 bp, Homo sapien
ttggtggtatgattgcagagtgtgc

SEQ ID NO: 6000195 - DNA, 25 bp, Homo sapien
cacacttctaagccttcagaagacg

SEQ ID NO: 6000196 - DNA, 25 bp, Homo sapien
accctcacagcaaacccatcagtgt

SEQ ID NO: 6000197 - DNA, 25 bp, Homo sapien
ttcagtgggcaacgaagtttgacaa

SEQ ID NO: 6000198 - DNA, 25 bp, Homo sapien
taggcagtgacactaaaaagcaaaa

SEQ ID NO: 6000199 - DNA, 25 bp, Homo sapien
gaacgggaccctacagtttttgatc

SEQ ID NO: 6000200 - DNA, 25 bp, Homo sapien
cccaaacacttctctatacactccg

SEQ ID NO: 6000201 - DNA, 25 bp, Homo sapien
cgttgcttgtcgcgagtttattcag

SEQ ID NO: 6000202 - DNA, 25 bp, Homo sapien
cttctaagccttcagaagacggtcc

SEQ ID NO: 6000203 - DNA, 25 bp, Homo sapien
taagaacgtgggtaaccctcacagc

SEQ ID NO: 6000204 - DNA, 25 bp, Homo sapien
gattgtgaacggcgctatccgcgac

SEQ ID NO: 6000205 - DNA, 25 bp, Homo sapien
gcgctggcccacggtgcagatctcg

SEQ ID NO: 6000206 - DNA, 25 bp, Homo sapien
aagtgatcaacgacgtcagcgggat

SEQ ID NO: 6000207 - DNA, 25 bp, Homo sapien
tcaacgacgtcagcgggatagatat

SEQ ID NO: 6000208 - DNA, 25 bp, Homo sapien
acactctacagctcgtcaaacgtct

SEQ ID NO: 6000209 - DNA, 25 bp, Homo sapien
gcactccaaactgtcgactacgtcg

SEQ ID NO: 6000210 - DNA, 25 bp, Homo sapien
cagcccatcacagattacattgcgg

SEQ ID NO: 6000211 - DNA, 25 bp, Homo sapien
tgctttgaaagtgatcaacgacgtc

SEQ ID NO: 6000212 - DNA, 25 bp, Homo sapien
tagctccaatggtaagagccggcga

SEQ ID NO: 6000213 - DNA, 25 bp, Homo sapien
cccagaaatcatcgacaaaaagcta

SEQ ID NO: 6000214 - DNA, 25 bp, Homo sapien
caatggtaagagccggcgaactgcc

SEQ ID NO: 6000215 - DNA, 25 bp, Homo sapien
gggatagatatcaatgcaggctgcc

SEQ ID NO: 6000216 - DNA, 25 bp, Homo sapien
agctttgaaaaacgccaacgccatc

SEQ ID NO: 6000217 - DNA, 25 bp, Homo sapien
ccaaaactagaatcctctaaattga

SEQ ID NO: 6000218 - DNA, 25 bp, Homo sapien
aagcaattgaacgatgatggaagcg

SEQ ID NO: 6000219 - DNA, 25 bp, Homo sapien
acatatccaaaactagaatcctcta

SEQ ID NO: 6000220 - DNA, 25 bp, Homo sapien
ggcgctatccgcgaccgctctcatt

SEQ ID NO: 6000221 - DNA, 25 bp, Homo sapien
gtacttggaaaactgcagagctcaa

SEQ ID NO: 6000222 - DNA, 25 bp, Homo sapien
acggtgcagatctcgtctggtcccc

SEQ ID NO: 6000223 - DNA, 25 bp, Homo sapien
taacgtgtcgttgattgtgaacggc

SEQ ID NO: 6000224 - DNA, 25 bp, Homo sapien
ctatccgcgaccgctctcattttca

SEQ ID NO: 6000225 - DNA, 25 bp, Homo sapien
tcgtactaaagcaattgaacgatga

SEQ ID NO: 6000226 - DNA, 25 bp, Homo sapien
ccacccaggctgctttgaaagtgat

SEQ ID NO: 6000227 - DNA, 25 bp, Homo sapien
gagactgatggcgctggcccacggt

SEQ ID NO: 6000228 - DNA, 25 bp, Homo sapien
aacgtgggtaaccctcacagcaaac

SEQ ID NO: 6000229 - DNA, 25 bp, Homo sapien
ctgcactccaaactgtcgactacgt

SEQ ID NO: 6000230 - DNA, 25 bp, Homo sapien
catcttgaaagaactggttaagaac

SEQ ID NO: 6000231 - DNA, 25 bp, Homo sapien
agagccggcgaactgcccacgagac

SEQ ID NO: 6000232 - DNA, 25 bp, Homo sapien
acgggaccctacagtttttgatcac

SEQ ID NO: 6000233 - DNA, 25 bp, Homo sapien
aactgcagagctcaagaaaaagctt

SEQ ID NO: 6000234 - DNA, 25 bp, Homo sapien
gcatccccggctctggccacccagg

SEQ ID NO: 6000235 - DNA, 25 bp, Homo sapien
tctaagccttcagaagacggtccat

SEQ ID NO: 6000236 - DNA, 25 bp, Homo sapien
cccgttgcaagagcccggaagaagt

SEQ ID NO: 6000237 - DNA, 25 bp, Homo sapien
gacacactgtgtctcatcttgaaag

SEQ ID NO: 6000238 - DNA, 25 bp, Homo sapien
ccggaaaatcagtcttttttcagta

SEQ ID NO: 6000239 - DNA, 25 bp, Homo sapien
cgatcacataggcagtgacactaaa

SEQ ID NO: 6000240 - DNA, 25 bp, Homo sapien
ggaaaatcagtcttttttcagtact

SEQ ID NO: 6000241 - DNA, 25 bp, Homo sapien
ctcaagaaaaagctttgaaaaacgc

SEQ ID NO: 6000242 - DNA, 25 bp, Homo sapien
atcacataggcagtgacactaaaaa

SEQ ID NO: 6000243 - DNA, 25 bp, Homo sapien
gcgcaccccagacacactgtgtctc

SEQ ID NO: 6000244 - DNA, 25 bp, Homo sapien
cagatcgggtctgcatccccggctc

SEQ ID NO: 6000245 - DNA, 25 bp, Homo sapien
gcgctcaaacagatccttcagagta

SEQ ID NO: 6000246 - DNA, 25 bp, Homo sapien
ctttgaaagtgatcaacgacgtcag

SEQ ID NO: 6000247 - DNA, 25 bp, Homo sapien
gtgaacggcgctatccgcgaccgct

SEQ ID NO: 6000248 - DNA, 25 bp, Homo sapien
agcaagacactctacagctcgtcaa

SEQ ID NO: 6000249 - DNA, 25 bp, Homo sapien
tcaatgcaggctgccccaaacactt

SEQ ID NO: 6000250 - DNA, 25 bp, Homo sapien
ctgaaatgagaaacagagagcagcc

SEQ ID NO: 6000251 - DNA, 25 bp, Homo sapien
aaaacgccaacgccatcgccaagca

SEQ ID NO: 6000252 - DNA, 25 bp, Homo sapien
tgtgaaaataagactcttggacacc

SEQ ID NO: 6000253 - DNA, 25 bp, Homo sapien
acatatgctggaaaactggttctag

SEQ ID NO: 6000254 - DNA, 25 bp, Homo sapien
accgatcacataggcagtgacacta

SEQ ID NO: 6000255 - DNA, 25 bp, Homo sapien
caaacgtctgtgtgccacgggcatc

SEQ ID NO: 6000256 - DNA, 25 bp, Homo sapien
cacagattacattgcggagatctac

SEQ ID NO: 6000257 - DNA, 25 bp, Homo sapien
gcatcacaaatcttacagttcactg

SEQ ID NO: 6000258 - DNA, 25 bp, Homo sapien
gaaatgagaaacagagagcagccca

SEQ ID NO: 6000259 - DNA, 25 bp, Homo sapien
acaaaaagctaattcagtgcgtcag

SEQ ID NO: 6000260 - DNA, 25 bp, Homo sapien
aagcagaattgtccccggaaaatca

SEQ ID NO: 6000261 - DNA, 25 bp, Homo sapien
aaacagagagcagcccatcacagat

SEQ ID NO: 6000262 - DNA, 25 bp, Homo sapien
caggcaaataacgtgtcgttgattg

SEQ ID NO: 6000263 - DNA, 25 bp, Homo sapien
aatcattggaaaaacactaacattg

SEQ ID NO: 6000264 - DNA, 25 bp, Homo sapien
ttgattgtgaacggcgctatccgcg

SEQ ID NO: 6000265 - DNA, 25 bp, Homo sapien
gctggaaaactggttctagctccaa

SEQ ID NO: 6000266 - DNA, 25 bp, Homo sapien
gattacattgcggagatctacgaga

SEQ ID NO: 6000267 - DNA, 25 bp, Homo sapien
cctgggtggccagagccggggatgc

SEQ ID NO: 6000268 - DNA, 25 bp, Homo sapien
ctgtttctcatttcagtcttcctgc

SEQ ID NO: 6000269 - DNA, 25 bp, Homo sapien
ggtctgtttcctcttttgcttggcg

SEQ ID NO: 6000270 - DNA, 25 bp, Homo sapien
tccgggctcttgcaacgggcaaagt

SEQ ID NO: 6000271 - DNA, 25 bp, Homo sapien
atctccgcaatgtaatctgtgatgg

SEQ ID NO: 6000272 - DNA, 25 bp, Homo sapien
ggccagcgccatcagtctcgtgggc

SEQ ID NO: 6000273 - DNA, 25 bp, Homo sapien
agcaacgacccaagatggaccgtct

SEQ ID NO: 6000274 - DNA, 25 bp, Homo sapien
ctgaaggatctgtttgagcgcttcc

SEQ ID NO: 6000275 - DNA, 25 bp, Homo sapien
tcttcctgcagtgaactgtaagatt

SEQ ID NO: 6000276 - DNA, 25 bp, Homo sapien
cagagccggggatgcagacccgatc

SEQ ID NO: 6000277 - DNA, 25 bp, Homo sapien
tcgcttgtaaatcatgaaaatgaga

SEQ ID NO: 6000278 - DNA, 25 bp, Homo sapien
catttcagtcttcctgcagtgaact

SEQ ID NO: 6000279 - DNA, 25 bp, Homo sapien
aaccttttgctttttagtgtcactg

SEQ ID NO: 6000280 - DNA, 25 bp, Homo sapien
gtagatctccgcaatgtaatctgtg

SEQ ID NO: 6000281 - DNA, 25 bp, Homo sapien
gaaaacgagcgtctccggcctcgtt

SEQ ID NO: 6000282 - DNA, 25 bp, Homo sapien
gttttccaagtactctgaaggatct

SEQ ID NO: 6000283 - DNA, 25 bp, Homo sapien
accgtgggccagcgccatcagtctc

SEQ ID NO: 6000284 - DNA, 25 bp, Homo sapien
tgcaacgggcaaagtactgaaaaaa

SEQ ID NO: 6000285 - DNA, 25 bp, Homo sapien
gtcccgttcagcacactctgcaatc

SEQ ID NO: 6000286 - DNA, 25 bp, Homo sapien
tggatatgttctgaaaacgagcgtc

SEQ ID NO: 6000287 - DNA, 25 bp, Homo sapien
tcgacagtttggagtgcagtgtttt

SEQ ID NO: 6000288 - DNA, 25 bp, Homo sapien
tgtttcctcttttgcttggcgatgg

SEQ ID NO: 6000289 - DNA, 25 bp, Homo sapien
tcgatgatttctggggaccagacga

SEQ ID NO: 6000290 - DNA, 25 bp, Homo sapien
cagttttccaagtactctgaaggat

SEQ ID NO: 6000291 - DNA, 25 bp, Homo sapien
caattgctttagtacgaaactaact

SEQ ID NO: 6000292 - DNA, 25 bp, Homo sapien
gggatgcagacccgatctggaaaat

SEQ ID NO: 6000293 - DNA, 25 bp, Homo sapien
gtcaaacttcgttgcccactgaata

SEQ ID NO: 6000294 - DNA, 25 bp, Homo sapien
ggaccgtcttctgaaggcttagaag

SEQ ID NO: 6000295 - DNA, 25 bp, Homo sapien
ctctgaaggatctgtttgagcgctt

SEQ ID NO: 6000296 - DNA, 25 bp, Homo sapien
gacgagatctgcaccgtgggccagc

SEQ ID NO: 6000297 - DNA, 25 bp, Homo sapien
agtcgacagtttggagtgcagtgtt

SEQ ID NO: 6000298 - DNA, 25 bp, Homo sapien
ttgcttggtgtccaagagtcttatt

SEQ ID NO: 6000299 - DNA, 25 bp, Homo sapien
gccgatgtggttgtcaaacttcgtt

SEQ ID NO: 6000300 - DNA, 25 bp, Homo sapien
tttgcttggcgatggcgttggcgtt

SEQ ID NO: 6000301 - DNA, 25 bp, Homo sapien
tgcagtgttttccttcctgacgcac

SEQ ID NO: 6000302 - DNA, 25 bp, Homo sapien
tgtcttgcttggtgtccaagagtct

SEQ ID NO: 6000303 - DNA, 25 bp, Homo sapien
caagcaacgacccaagatggaccgt

SEQ ID NO: 6000304 - DNA, 25 bp, Homo sapien
ttcaaagctttttcttgagctctgc

SEQ ID NO: 6000305 - DNA, 25 bp, Homo sapien
cgtcttctgaaggcttagaagtgtg

SEQ ID NO: 6000306 - DNA, 25 bp, Homo sapien
cgtctccggcctcgtttgaaccttg

SEQ ID NO: 6000307 - DNA, 25 bp, Homo sapien
tgagcgcttccatcatcgttcaatt

SEQ ID NO: 6000308 - DNA, 25 bp, Homo sapien
gctctctgtttctcatttcagtctt

SEQ ID NO: 6000309 - DNA, 25 bp, Homo sapien
gtgtcactgcctatgtgatcggtct

SEQ ID NO: 6000310 - DNA, 25 bp, Homo sapien
gggtttgctgtgagggttacccacg

SEQ ID NO: 6000311 - DNA, 25 bp, Homo sapien
tgggcagttcgccggctcttaccat

SEQ ID NO: 6000312 - DNA, 25 bp, Homo sapien
aatcaatttagaggattctagtttt

SEQ ID NO: 6000313 - DNA, 25 bp, Homo sapien
gtagagtgtcttgcttggtgtccaa

SEQ ID NO: 6000314 - DNA, 25 bp, Homo sapien
tccggcctcgtttgaaccttggacg

SEQ ID NO: 6000315 - DNA, 25 bp, Homo sapien
cccgctgacgtcgttgatcactttc

SEQ ID NO: 6000316 - DNA, 25 bp, Homo sapien
tgtagggtcccgttcagcacactct

SEQ ID NO: 6000317 - DNA, 25 bp, Homo sapien
gtgatcggtctgtttcctcttttgc

SEQ ID NO: 6000318 - DNA, 25 bp, Homo sapien
ttgctttagtacgaaactaacttct

SEQ ID NO: 6000319 - DNA, 25 bp, Homo sapien
cgtttgaaccttggacggcacgacg

SEQ ID NO: 6000320 - DNA, 25 bp, Homo sapien
tgcgcaagagggcagagcccatgcc

SEQ ID NO: 6000321 - DNA, 25 bp, Homo sapien
tgagggttacccacgttcttaacca

SEQ ID NO: 6000322 - DNA, 25 bp, Homo sapien
ttctcatttcagtcttcctgcagtg

SEQ ID NO: 6000323 - DNA, 25 bp, Homo sapien
caacgggcaaagtactgaaaaaaga

SEQ ID NO: 6000324 - DNA, 25 bp, Homo sapien
ctggcatatctcgtagatctccgca

SEQ ID NO: 6000325 - DNA, 25 bp, Homo sapien
ctcttgcaacgggcaaagtactgaa

SEQ ID NO: 6000326 - DNA, 25 bp, Homo sapien
tccggggacaattctgcttaacatg

SEQ ID NO: 6000327 - DNA, 25 bp, Homo sapien
gtgatgggctgctctctgtttctca

SEQ ID NO: 6000328 - DNA, 25 bp, Homo sapien
tttttagtgtcactgcctatgtgat

SEQ ID NO: 6000329 - DNA, 25 bp, Homo sapien
ggaaaatcaatttagaggattctag

SEQ ID NO: 6000330 - DNA, 25 bp, Homo sapien
cgtggcacacagacgtttgacgagc

SEQ ID NO: 6000331 - DNA, 25 bp, Homo sapien
tcctgacgcactgaattagcttttt

SEQ ID NO: 6000332 - DNA, 25 bp, Homo sapien
tctgtttgagcgcttccatcatcgt

SEQ ID NO: 6000333 - DNA, 25 bp, Homo sapien
cagagcccatgccggagtgtataga

SEQ ID NO: 6000334 - DNA, 25 bp, Homo sapien
gttcttaaccagttctttcaagatg

SEQ ID NO: 6000335 - DNA, 25 bp, Homo sapien
gatgcagacccgatctggaaaatca

SEQ ID NO: 6000336 - DNA, 25 bp, Homo sapien
ctccgcaatgtaatctgtgatgggc

SEQ ID NO: 6000337 - DNA, 25 bp, Homo sapien
ttggtgtccaagagtcttattttca

SEQ ID NO: 6000338 - DNA, 25 bp, Homo sapien
tttccggggacaattctgcttaaca

SEQ ID NO: 6000339 - DNA, 25 bp, Homo sapien
tgattcgcttgtaaatcatgaaaat

SEQ ID NO: 6000340 - DNA, 25 bp, Homo sapien
tttggatatgttctgaaaacgagcg

SEQ ID NO: 6000341 - DNA, 25 bp, Homo sapien
tcttattttcacactgatgggtttg

SEQ ID NO: 6000342 - DNA, 25 bp, Homo sapien
cggagtgtatagagaagtgtttggg

SEQ ID NO: 6000343 - DNA, 25 bp, Homo sapien
tcgttgatcactttcaaagcagcct

SEQ ID NO: 6000344 - DNA, 25 bp, Homo sapien
atctgtgatgggctgctctctgttt

SEQ ID NO: 6000345 - DNA, 25 bp, Homo sapien
ggcagcctgcattgatatctatccc

SEQ ID NO: 6000346 - DNA, 25 bp, Homo sapien
tccatcatcgttcaattgctttagt

SEQ ID NO: 6000347 - DNA, 25 bp, Homo sapien
ttctttcaagatgagacacagtgtg

SEQ ID NO: 6000348 - DNA, 25 bp, Homo sapien
ttcacaatcaacgacacgttatttg

SEQ ID NO: 6000349 - DNA, 25 bp, Homo sapien
gtacaaccttttgctttttagtgtc

SEQ ID NO: 6000350 - DNA, 25 bp, Homo sapien
gtgtatagagaagtgtttggggcag

SEQ ID NO: 6000351 - DNA, 25 bp, Homo sapien
gccggggatgcagacccgatctgga

SEQ ID NO: 6000352 - DNA, 25 bp, Homo sapien
gggtcccgttcagcacactctgcaa

SEQ ID NO: 6000353 - DNA, 25 bp, Homo sapien
ttttcaaagctttttcttgagctct

SEQ ID NO: 6000354 - DNA, 25 bp, Homo sapien
tctgcaatcataccaccaatgttag

SEQ ID NO: 6000355 - DNA, 25 bp, Homo sapien
ttgtaaatcatgaaaatgagagcgg

SEQ ID NO: 6000356 - DNA, 25 bp, Homo sapien
ctggggtgcgcaagagggcagagcc

SEQ ID NO: 6000357 - DNA, 25 bp, Homo sapien
aaccagttctttcaagatgagacac

SEQ ID NO: 6000358 - DNA, 25 bp, Homo sapien
cccgtggcacacagacgtttgacga

SEQ ID NO: 6000359 - DNA, 25 bp, Homo sapien
tttccaagtactctgaaggatctgt

SEQ ID NO: 6000360 - DNA, 25 bp, Homo sapien
gcaccgtgggccagcgccatcagtc

SEQ ID NO: 6000361 - DNA, 25 bp, Homo sapien
ctgtagagtgtcttgcttggtgtcc

SEQ ID NO: 6000362 - DNA, 25 bp, Homo sapien
gccgttcacaatcaacgacacgtta

SEQ ID NO: 6000363 - DNA, 25 bp, Homo sapien
tttcacactgatgggtttgctgtga

SEQ ID NO: 6000364 - DNA, 25 bp, Homo sapien
ttgagctctgcagttttccaagtac

SEQ ID NO: 6000365 - DNA, 25 bp, Homo sapien
accagacgagatctgcaccgtgggc

SEQ ID NO: 6000366 - DNA, 25 bp, Homo sapien
atgagacacagtgtgtctggggtgc

SEQ ID NO: 6000367 - DNA, 25 bp, Homo sapien
gtttttcaaagctttttcttgagct

SEQ ID NO: 6000368 - DNA, 25 bp, Homo sapien
ctttcaaagcagcctgggtggccag

SEQ ID NO: 6000369 - DNA, 25 bp, Homo sapien
ataaactcgcgacaagcaacgaccc

SEQ ID NO: 6000370 - DNA, 25 bp, Homo sapien
acatgtattttgtattgccgatgtg

SEQ ID NO: 6000371 - DNA, 25 bp, Homo sapien
actgattttccggggacaattctgc

SEQ ID NO: 6000372 - DNA, 25 bp, Homo sapien
ttcaaagcagcctgggtggccagag

SEQ ID NO: 6000373 - DNA, 25 bp, Homo sapien
tttgagcgcttccatcatcgttcaa

SEQ ID NO: 6000374 - DNA, 25 bp, Homo sapien
attctagttttggatatgttctgaa

SEQ ID NO: 6000375 - DNA, 25 bp, Homo sapien
tcgcgacaagcaacgacccaagatg

SEQ ID NO: 6000376 - DNA, 25 bp, Homo sapien
caagagtcttattttcacactgatg

SEQ ID NO: 6000377 - DNA, 25 bp, Homo sapien
tgaaaaaagactgattttccgggga

SEQ ID NO: 6000378 - DNA, 25 bp, Homo sapien
cttgcaacgggcaaagtactgaaaa

SEQ ID NO: 6000379 - DNA, 25 bp, Homo sapien
tggccagagccggggatgcagaccc

SEQ ID NO: 6000380 - DNA, 25 bp, Homo sapien
ggttgtcaaacttcgttgcccactg

SEQ ID NO: 6000381 - DNA, 25 bp, Homo sapien
ggcatatctcgtagatctccgcaat

SEQ ID NO: 6000382 - DNA, 25 bp, Homo sapien
atcataccaccaatgttagtgtttt

SEQ ID NO: 6000383 - DNA, 25 bp, Homo sapien
cttccatcatcgttcaattgcttta

SEQ ID NO: 6000384 - DNA, 25 bp, Homo sapien
tgtccaagagtcttattttcacact

SEQ ID NO: 6000385 - DNA, 25 bp, Homo sapien
actgatgggtttgctgtgagggtta

SEQ ID NO: 6000386 - DNA, 25 bp, Homo sapien
agaaccagttttccagcatatgtaa

SEQ ID NO: 6000387 - DNA, 25 bp, Homo sapien
gtgtctggggtgcgcaagagggcag

SEQ ID NO: 6000388 - DNA, 25 bp, Homo sapien
ccttggacggcacgacgtagtcgac

SEQ ID NO: 6000389 - DNA, 25 bp, Homo sapien
tgcagtgaactgtaagatttgtgat

SEQ ID NO: 6000390 - DNA, 25 bp, Homo sapien
ctcttttgcttggcgatggcgttgg

SEQ ID NO: 6000391 - DNA, 25 bp, Homo sapien
cccaagatggaccgtcttctgaagg

SEQ ID NO: 6000392 - DNA, 25 bp, Homo sapien
cactttcaaagcagcctgggtggcc

SEQ ID NO: 6000393 - DNA, 25 bp, Homo sapien
actcgcgacaagcaacgacccaaga

SEQ ID NO: 6000394 - DNA, 25 bp, Homo sapien
gttgatcactttcaaagcagcctgg

SEQ ID NO: 6000395 - DNA, 25 bp, Homo sapien
agcgtctccggcctcgtttgaacct

SEQ ID NO: 6000396 - DNA, 25 bp, Homo sapien
attttccggggacaattctgcttaa

SEQ ID NO: 6000397 - DNA, 25 bp, Homo sapien
tagggtcccgttcagcacactctgc

SEQ ID NO: 6000398 - DNA, 25 bp, Homo sapien
tgggccagcgccatcagtctcgtgg

SEQ ID NO: 6000399 - DNA, 25 bp, Homo sapien
tcacactgatgggtttgctgtgagg

SEQ ID NO: 6000400 - DNA, 25 bp, Homo sapien
agactgattttccggggacaattct

SEQ ID NO: 6000401 - DNA, 25 bp, Homo sapien
gccggctcttaccattggagctaga

SEQ ID NO: 6000402 - DNA, 25 bp, Homo sapien
ccaatgattcgcttgtaaatcatga

SEQ ID NO: 6000403 - DNA, 25 bp, Homo sapien
tgcagttttccaagtactctgaagg

SEQ ID NO: 6000404 - DNA, 25 bp, Homo sapien
gcacactctgcaatcataccaccaa

SEQ ID NO: 6000405 - DNA, 25 bp, Homo sapien
atttgcctggcatatctcgtagatc

SEQ ID NO: 6000406 - DNA, 25 bp, Homo sapien
caatgttagtgtttttccaatgatt

SEQ ID NO: 6000407 - DNA, 25 bp, Homo sapien
catatctcgtagatctccgcaatgt

SEQ ID NO: 6000408 - DNA, 25 bp, Homo sapien
atcactttcaaagcagcctgggtgg

SEQ ID NO: 6000409 - DNA, 25 bp, Homo sapien
ggctgctctctgtttctcatttcag

SEQ ID NO: 6000410 - DNA, 25 bp, Homo sapien
ttccaatgattcgcttgtaaatcat

SEQ ID NO: 6000411 - DNA, 25 bp, Homo sapien
atcgttcaattgctttagtacgaaa

SEQ ID NO: 6000412 - DNA, 25 bp, Homo sapien
agcgcttccatcatcgttcaattgc

SEQ ID NO: 6000413 - DNA, 25 bp, Homo sapien
acgacccaagatggaccgtcttctg

SEQ ID NO: 6000414 - DNA, 25 bp, Homo sapien
tctgcagttttccaagtactctgaa

SEQ ID NO: 6000415 - DNA, 25 bp, Homo sapien
tcaaaaactgtagggtcccgttcag

SEQ ID NO: 6000416 - DNA, 25 bp, Homo sapien
ctttcaagatgagacacagtgtgtc

SEQ ID NO: 6000417 - DNA, 25 bp, Homo sapien
gagcccatgccggagtgtatagaga

SEQ ID NO: 6000418 - DNA, 25 bp, Homo sapien
tgcccgtggcacacagacgtttgac

SEQ ID NO: 6000419 - DNA, 25 bp, Homo sapien
gctttagtacgaaactaacttcttc

SEQ ID NO: 6000420 - DNA, 25 bp, Homo sapien
ctggggaccagacgagatctgcacc

SEQ ID NO: 6000421 - DNA, 25 bp, Homo sapien
ggggtgcgcaagagggcagagccca

SEQ ID NO: 6000422 - DNA, 25 bp, Homo sapien
cccgttcagcacactctgcaatcat

SEQ ID NO: 6000423 - DNA, 25 bp, Homo sapien
gacacagtgtgtctggggtgcgcaa

SEQ ID NO: 6000424 - DNA, 25 bp, Homo sapien
gtgttttccttcctgacgcactgaa

SEQ ID NO: 6000425 - DNA, 25 bp, Homo sapien
agctgtagagtgtcttgcttggtgt

SEQ ID NO: 6000426 - DNA, 25 bp, Homo sapien
tagaggattctagttttggatatgt

SEQ ID NO: 6000427 - DNA, 25 bp, Homo sapien
taccaccaatgttagtgtttttcca

SEQ ID NO: 6000428 - DNA, 25 bp, Homo sapien
attttgtattgccgatgtggttgtc

SEQ ID NO: 6000429 - DNA, 25 bp, Homo sapien
ttcagcacactctgcaatcatacca

SEQ ID NO: 6000430 - DNA, 25 bp, Homo sapien
cagtgtgtctggggtgcgcaagagg

SEQ ID NO: 6000431 - DNA, 25 bp, Homo sapien
cgttatttgcctggcatatctcgta

SEQ ID NO: 6000432 - DNA, 25 bp, Homo sapien
aacttcgttgcccactgaataaact

SEQ ID NO: 6000433 - DNA, 25 bp, Homo sapien
ttggggcagcctgcattgatatcta

SEQ ID NO: 6000434 - DNA, 25 bp, Homo sapien
agctagaaccagttttccagcatat

SEQ ID NO: 6000435 - DNA, 25 bp, Homo sapien
ttggagtgcagtgttttccttcctg

SEQ ID NO: 6000436 - DNA, 25 bp, Homo sapien
tatatatctgtgggaaggggtacaa

SEQ ID NO: 6000437 - DNA, 25 bp, Homo sapien
tccttcctgacgcactgaattagct

SEQ ID NO: 6000438 - DNA, 25 bp, Homo sapien
gtattttgtattgccgatgtggttg

SEQ ID NO: 6000439 - DNA, 25 bp, Homo sapien
ggctcttgcaacgggcaaagtactg

SEQ ID NO: 6000440 - DNA, 25 bp, Homo sapien
tactctgaaggatctgtttgagcgc

SEQ ID NO: 6000441 - DNA, 25 bp, Homo sapien
tttagaggattctagttttggatat

SEQ ID NO: 6000442 - DNA, 25 bp, Homo sapien
gacacgttatttgcctggcatatct

SEQ ID NO: 6000443 - DNA, 25 bp, Homo sapien
tttccttcctgacgcactgaattag

SEQ ID NO: 6000444 - DNA, 25 bp, Homo sapien
gaaggatctgtttgagcgcttccat

SEQ ID NO: 6000445 - DNA, 25 bp, Homo sapien
agtcttattttcacactgatgggtt

SEQ ID NO: 6000446 - DNA, 25 bp, Homo sapien
ggagtgcagtgttttccttcctgac

SEQ ID NO: 6000447 - DNA, 25 bp, Homo sapien
acactctgcaatcataccaccaatg

SEQ ID NO: 6000448 - DNA, 25 bp, Homo sapien
cccgatctggaaaatcaatttagag

SEQ ID NO: 6000449 - DNA, 25 bp, Homo sapien
ccacgttcttaaccagttctttcaa

SEQ ID NO: 6000450 - DNA, 25 bp, Homo sapien
tgaaccttggacggcacgacgtagt

SEQ ID NO: 6000451 - DNA, 25 bp, Homo sapien
cataccaccaatgttagtgtttttc

SEQ ID NO: 6000452 - DNA, 25 bp, Homo sapien
atcagtctcgtgggcagttcgccgg

SEQ ID NO: 6000453 - DNA, 25 bp, Homo sapien
attctgcttaacatgtattttgtat

SEQ ID NO: 6000454 - DNA, 25 bp, Homo sapien
attagctttttgtcgatgatttctg

SEQ ID NO: 6000455 - DNA, 25 bp, Homo sapien
gcctatgtgatcggtctgtttcctc

SEQ ID NO: 6000456 - DNA, 25 bp, Homo sapien
cttccgggctcttgcaacgggcaaa

SEQ ID NO: 6000457 - DNA, 25 bp, Homo sapien
gtttggagtgcagtgttttccttcc

SEQ ID NO: 6000458 - DNA, 25 bp, Homo sapien
aaccttggacggcacgacgtagtcg

SEQ ID NO: 6000459 - DNA, 25 bp, Homo sapien
cagcctgcattgatatctatcccgc

SEQ ID NO: 6000460 - DNA, 25 bp, Homo sapien
gcaatgtaatctgtgatgggctgct

SEQ ID NO: 6000461 - DNA, 25 bp, Homo sapien
ccttttgctttttagtgtcactgcc

SEQ ID NO: 6000462 - DNA, 25 bp, Homo sapien
ttggacggcacgacgtagtcgacag

SEQ ID NO: 6000463 - DNA, 25 bp, Homo sapien
gacccgatctggaaaatcaatttag

SEQ ID NO: 6000464 - DNA, 25 bp, Homo sapien
atgtggttgtcaaacttcgttgccc

SEQ ID NO: 6000465 - DNA, 25 bp, Homo sapien
tggcgatggcgttggcgtttttcaa

SEQ ID NO: 6000466 - DNA, 25 bp, Homo sapien
atgtgatcggtctgtttcctctttt

SEQ ID NO: 6000467 - DNA, 25 bp, Homo sapien
ctgctctctgtttctcatttcagtc

SEQ ID NO: 6000468 - DNA, 25 bp, Homo sapien
atcatgaaaatgagagcggtcgcgg

SEQ ID NO: 6000469 - DNA, 25 bp, Homo sapien
cgtgggccagcgccatcagtctcgt

SEQ ID NO: 6000470 - DNA, 25 bp, Homo sapien
gaaggcttagaagtgtgatcaaaaa

SEQ ID NO: 6000471 - DNA, 25 bp, Homo sapien
ttttgctttttagtgtcactgccta

SEQ ID NO: 6000472 - DNA, 25 bp, Homo sapien
caatcaacgacacgttatttgcctg

SEQ ID NO: 6000473 - DNA, 25 bp, Homo sapien
ctggaaaatcaatttagaggattct

SEQ ID NO: 6000474 - DNA, 25 bp, Homo sapien
agagaagtgtttggggcagcctgca

SEQ ID NO: 6000475 - DNA, 25 bp, Homo sapien
tcatcgttcaattgctttagtacga

SEQ ID NO: 6000476 - DNA, 25 bp, Homo sapien
caaagcagcctgggtggccagagcc

SEQ ID NO: 6000477 - DNA, 25 bp, Homo sapien
tgtttgagcgcttccatcatcgttc

SEQ ID NO: 6000478 - DNA, 25 bp, Homo sapien
gtttttccaatgattcgcttgtaaa

SEQ ID NO: 6000479 - DNA, 25 bp, Homo sapien
acactgatgggtttgctgtgagggt

SEQ ID NO: 6000480 - DNA, 25 bp, Homo sapien
ctgaataaactcgcgacaagcaacg

SEQ ID NO: 6000481 - DNA, 25 bp, Homo sapien
tagcgccgttcacaatcaacgacac

SEQ ID NO: 6000482 - DNA, 25 bp, Homo sapien
cttcgttgcccactgaataaactcg

SEQ ID NO: 6000483 - DNA, 25 bp, Homo sapien
ccagttttccagcatatgtaaccat

SEQ ID NO: 6000484 - DNA, 25 bp, Homo sapien
tctccggcctcgtttgaaccttgga

SEQ ID NO: 6000485 - DNA, 25 bp, Homo sapien
gcgacaagcaacgacccaagatgga

SEQ ID NO: 6000486 - DNA, 25 bp, Homo sapien
caaagctttttcttgagctctgcag

SEQ ID NO: 6000487 - DNA, 25 bp, Homo sapien
caagagggcagagcccatgccggag

SEQ ID NO: 6000488 - DNA, 25 bp, Homo sapien
catgaaaatgagagcggtcgcggat

SEQ ID NO: 6000489 - DNA, 25 bp, Homo sapien
caagatgagacacagtgtgtctggg

SEQ ID NO: 6000490 - DNA, 25 bp, Homo sapien
aaactcgcgacaagcaacgacccaa

SEQ ID NO: 6000491 - DNA, 25 bp, Homo sapien
aagctttttcttgagctctgcagtt

SEQ ID NO: 6000492 - DNA, 25 bp, Homo sapien
gcagcctgggtggccagagccgggg

SEQ ID NO: 6000493 - DNA, 25 bp, Homo sapien
gttttccttcctgacgcactgaatt

SEQ ID NO: 6000494 - DNA, 25 bp, Homo sapien
cgagatctgcaccgtgggccagcgc

SEQ ID NO: 6000495 - DNA, 25 bp, Homo sapien
tgtcgatgatttctggggaccagac

SEQ ID NO: 6000496 - DNA, 25 bp, Homo sapien
ccagcgccatcagtctcgtgggcag

SEQ ID NO: 6000497 - DNA, 25 bp, Homo sapien
aaaatcaatttagaggattctagtt

SEQ ID NO: 6000498 - DNA, 25 bp, Homo sapien
agtgcagtgttttccttcctgacgc

SEQ ID NO: 6000499 - DNA, 25 bp, Homo sapien
atggaccgtcttctgaaggcttaga

SEQ ID NO: 6000500 - DNA, 25 bp, Homo sapien
tgtaagatttgtgatgcccgtggca

SEQ ID NO: 6000501 - DNA, 25 bp, Homo sapien
tcttgcttggtgtccaagagtctta

SEQ ID NO: 6000502 - DNA, 25 bp, Homo sapien
ggacggcacgacgtagtcgacagtt

SEQ ID NO: 6000503 - DNA, 25 bp, Homo sapien
tggcgttggcgtttttcaaagcttt

SEQ ID NO: 6000504 - DNA, 25 bp, Homo sapien
tgcagacccgatctggaaaatcaat

SEQ ID NO: 6000505 - DNA, 25 bp, Homo sapien
gtgaactgtaagatttgtgatgccc

SEQ ID NO: 6000506 - DNA, 25 bp, Homo sapien
agatgagacacagtgtgtctggggt

SEQ ID NO: 6000507 - DNA, 25 bp, Homo sapien
ctcgtgggcagttcgccggctctta

SEQ ID NO: 6000508 - DNA, 25 bp, Homo sapien
aggatctgtttgagcgcttccatca

SEQ ID NO: 6000509 - DNA, 25 bp, Homo sapien
ttttccaatgattcgcttgtaaatc

SEQ ID NO: 6000510 - DNA, 25 bp, Homo sapien
tccaagtactctgaaggatctgttt

SEQ ID NO: 6000511 - DNA, 25 bp, Homo sapien
tcttaaccagttctttcaagatgag

SEQ ID NO: 6000512 - DNA, 25 bp, Homo sapien
actaacttcttccgggctcttgcaa

SEQ ID NO: 6000513 - DNA, 25 bp, Homo sapien
aaccagttttccagcatatgtaacc

SEQ ID NO: 6000514 - DNA, 25 bp, Homo sapien
agagcggtcgcggatagcgccgttc

SEQ ID NO: 6000515 - DNA, 25 bp, Homo sapien
agtactctgaaggatctgtttgagc

SEQ ID NO: 6000516 - DNA, 25 bp, Homo sapien
tagtgtcactgcctatgtgatcggt

SEQ ID NO: 6000517 - DNA, 25 bp, Homo sapien
tgcaatcataccaccaatgttagtg

SEQ ID NO: 6000518 - DNA, 25 bp, Homo sapien
tattgccgatgtggttgtcaaactt

SEQ ID NO: 6000519 - DNA, 25 bp, Homo sapien
agaagtgtttggggcagcctgcatt

SEQ ID NO: 6000520 - DNA, 25 bp, Homo sapien
ttcctgcagtgaactgtaagatttg

SEQ ID NO: 6000521 - DNA, 25 bp, Homo sapien
gacaagcaacgacccaagatggacc

SEQ ID NO: 6000522 - DNA, 25 bp, Homo sapien
ttctgaaaacgagcgtctccggcct

SEQ ID NO: 6000523 - DNA, 25 bp, Homo sapien
tctagttttggatatgttctgaaaa

SEQ ID NO: 6000524 - DNA, 25 bp, Homo sapien
catcatcgttcaattgctttagtac

SEQ ID NO: 6000525 - DNA, 25 bp, Homo sapien
caaacttcgttgcccactgaataaa

SEQ ID NO: 6000526 - DNA, 25 bp, Homo sapien
gtgatgcccgtggcacacagacgtt

SEQ ID NO: 6000527 - DNA, 25 bp, Homo sapien
cttaacatgtattttgtattgccga

SEQ ID NO: 6000528 - DNA, 25 bp, Homo sapien
tgtgagggttacccacgttcttaac

SEQ ID NO: 6000529 - DNA, 25 bp, Homo sapien
cgatgtggttgtcaaacttcgttgc

SEQ ID NO: 6000530 - DNA, 25 bp, Homo sapien
ctcatttcagtcttcctgcagtgaa

SEQ ID NO: 6000531 - DNA, 25 bp, Homo sapien
cggtcgcggatagcgccgttcacaa

SEQ ID NO: 6000532 - DNA, 25 bp, Homo sapien
tcgttgcccactgaataaactcgcg

SEQ ID NO: 6000533 - DNA, 25 bp, Homo sapien
gacgagctgtagagtgtcttgcttg

SEQ ID NO: 6000534 - DNA, 25 bp, Homo sapien
agaagtgtgatcaaaaactgtaggg

SEQ ID NO: 6000535 - DNA, 25 bp, Homo sapien
ttggagctagaaccagttttccagc

SEQ ID NO: 6000536 - DNA, 25 bp, Homo sapien
tatgttctgaaaacgagcgtctccg

SEQ ID NO: 6000537 - DNA, 25 bp, Homo sapien
cgctgacgtcgttgatcactttcaa

SEQ ID NO: 6000538 - DNA, 25 bp, Homo sapien
tgatatctatcccgctgacgtcgtt

SEQ ID NO: 6000539 - DNA, 25 bp, Homo sapien
aaaaactgtagggtcccgttcagca

SEQ ID NO: 6000540 - DNA, 25 bp, Homo sapien
cactgcctatgtgatcggtctgttt

SEQ ID NO: 6000541 - DNA, 25 bp, Homo sapien
tgattttccggggacaattctgctt

SEQ ID NO: 6000542 - DNA, 25 bp, Homo sapien
ttcttccgggctcttgcaacgggca

SEQ ID NO: 6000543 - DNA, 25 bp, Homo sapien
ttagaagtgtgatcaaaaactgtag

SEQ ID NO: 6000544 - DNA, 25 bp, Homo sapien
cggggatgcagacccgatctggaaa

SEQ ID NO: 6000545 - DNA, 25 bp, Homo sapien
accaatgttagtgtttttccaatga

SEQ ID NO: 6000546 - DNA, 25 bp, Homo sapien
acaaccttttgctttttagtgtcac

SEQ ID NO: 6000547 - DNA, 25 bp, Homo sapien
tactgaaaaaagactgattttccgg

SEQ ID NO: 6000548 - DNA, 25 bp, Homo sapien
gagctctgcagttttccaagtactc

SEQ ID NO: 6000549 - DNA, 25 bp, Homo sapien
cacgttatttgcctggcatatctcg

SEQ ID NO: 6000550 - DNA, 25 bp, Homo sapien
tgggtggccagagccggggatgcag

SEQ ID NO: 6000551 - DNA, 25 bp, Homo sapien
aaactgtagggtcccgttcagcaca

SEQ ID NO: 6000552 - DNA, 25 bp, Homo sapien
gtatagagaagtgtttggggcagcc

SEQ ID NO: 6000553 - DNA, 25 bp, Homo sapien
tacgaaactaacttcttccgggctc

SEQ ID NO: 6000554 - DNA, 25 bp, Homo sapien
cgatctggaaaatcaatttagagga

SEQ ID NO: 6000555 - DNA, 25 bp, Homo sapien
gctttttcttgagctctgcagtttt

SEQ ID NO: 6000556 - DNA, 25 bp, Homo sapien
tttcctcttttgcttggcgatggcg

SEQ ID NO: 6000557 - DNA, 25 bp, Homo sapien
caaagtactgaaaaaagactgattt

SEQ ID NO: 6000558 - DNA, 25 bp, Homo sapien
ctagaaccagttttccagcatatgt

SEQ ID NO: 6000559 - DNA, 25 bp, Homo sapien
gctttttagtgtcactgcctatgtg

SEQ ID NO: 6000560 - DNA, 25 bp, Homo sapien
gacccaagatggaccgtcttctgaa

SEQ ID NO: 6000561 - DNA, 25 bp, Homo sapien
gatagcgccgttcacaatcaacgac

SEQ ID NO: 6000562 - DNA, 25 bp, Homo sapien
atagagaagtgtttggggcagcctg

SEQ ID NO: 6000563 - DNA, 25 bp, Homo sapien
tgatgggtttgctgtgagggttacc

SEQ ID NO: 6000564 - DNA, 25 bp, Homo sapien
attttcacactgatgggtttgctgt

SEQ ID NO: 6000565 - DNA, 25 bp, Homo sapien
ctgaaaacgagcgtctccggcctcg

SEQ ID NO: 6000566 - DNA, 25 bp, Homo sapien
gctgtgagggttacccacgttctta

SEQ ID NO: 6000567 - DNA, 25 bp, Homo sapien
ctgcaccgtgggccagcgccatcag

SEQ ID NO: 6000568 - DNA, 25 bp, Homo sapien
ccatcagtctcgtgggcagttcgcc

SEQ ID NO: 6000569 - DNA, 25 bp, Homo sapien
ccagttctttcaagatgagacacag

SEQ ID NO: 6000570 - DNA, 25 bp, Homo sapien
gctttttgtcgatgatttctgggga

SEQ ID NO: 6000571 - DNA, 25 bp, Homo sapien
gacaattctgcttaacatgtatttt

SEQ ID NO: 6000572 - DNA, 25 bp, Homo sapien
gtgtttggggcagcctgcattgata

SEQ ID NO: 6000573 - DNA, 25 bp, Homo sapien
atttctggggaccagacgagatctg

SEQ ID NO: 6000574 - DNA, 25 bp, Homo sapien
cggggacaattctgcttaacatgta

SEQ ID NO: 6000575 - DNA, 25 bp, Homo sapien
ctgcattgatatctatcccgctgac

SEQ ID NO: 6000576 - DNA, 25 bp, Homo sapien
gcctggcatatctcgtagatctccg

SEQ ID NO: 6000577 - DNA, 25 bp, Homo sapien
gaggattctagttttggatatgttc

SEQ ID NO: 6000578 - DNA, 25 bp, Homo sapien
tatatctgtgggaaggggtacaacc

SEQ ID NO: 6000579 - DNA, 25 bp, Homo sapien
aaaatgagagcggtcgcggatagcg

SEQ ID NO: 6000580 - DNA, 25 bp, Homo sapien
gatcaaaaactgtagggtcccgttc

SEQ ID NO: 6000581 - DNA, 25 bp, Homo sapien
gtgtgatcaaaaactgtagggtccc

SEQ ID NO: 6000582 - DNA, 25 bp, Homo sapien
atgggtttgctgtgagggttaccca

SEQ ID NO: 6000583 - DNA, 25 bp, Homo sapien
tttttcttgagctctgcagttttcc

SEQ ID NO: 6000584 - DNA, 25 bp, Homo sapien
gcttagaagtgtgatcaaaaactgt

SEQ ID NO: 6000585 - DNA, 25 bp, Homo sapien
tctcgtagatctccgcaatgtaatc

SEQ ID NO: 6000586 - DNA, 25 bp, Homo sapien
gcctgcattgatatctatcccgctg

SEQ ID NO: 6000587 - DNA, 25 bp, Homo sapien
cagacccgatctggaaaatcaattt

SEQ ID NO: 6000588 - DNA, 25 bp, Homo sapien
gatctgtttgagcgcttccatcatc

SEQ ID NO: 6000589 - DNA, 25 bp, Homo sapien
ctgacgcactgaattagctttttgt

SEQ ID NO: 6000590 - DNA, 25 bp, Homo sapien
gaattagctttttgtcgatgatttc

SEQ ID NO: 6000591 - DNA, 25 bp, Homo sapien
cagttcgccggctcttaccattgga

SEQ ID NO: 6000592 - DNA, 25 bp, Homo sapien
ttcaagatgagacacagtgtgtctg

SEQ ID NO: 6000593 - DNA, 25 bp, Homo sapien
cacgacgtagtcgacagtttggagt

SEQ ID NO: 6000594 - DNA, 25 bp, Homo sapien
tgtattgccgatgtggttgtcaaac

SEQ ID NO: 6000595 - DNA, 25 bp, Homo sapien
tttagtgtcactgcctatgtgatcg

SEQ ID NO: 6000596 - DNA, 25 bp, Homo sapien
tttgaaccttggacggcacgacgta

SEQ ID NO: 6000597 - DNA, 25 bp, Homo sapien
ttaccattggagctagaaccagttt

SEQ ID NO: 6000598 - DNA, 25 bp, Homo sapien
agcctgggtggccagagccggggat

SEQ ID NO: 6000599 - DNA, 25 bp, Homo sapien
tcgtagatctccgcaatgtaatctg

SEQ ID NO: 6000600 - DNA, 25 bp, Homo sapien
ttgcctggcatatctcgtagatctc

SEQ ID NO: 6000601 - DNA, 25 bp, Homo sapien
ttgtgatgcccgtggcacacagacg

SEQ ID NO: 6000602 - DNA, 25 bp, Homo sapien
tccaagagtcttattttcacactga

SEQ ID NO: 6000603 - DNA, 25 bp, Homo sapien
tggcacacagacgtttgacgagctg

SEQ ID NO: 6000604 - DNA, 25 bp, Homo sapien
attcgcttgtaaatcatgaaaatga

SEQ ID NO: 6000605 - DNA, 25 bp, Homo sapien
tagctttttgtcgatgatttctggg

SEQ ID NO: 6000606 - DNA, 25 bp, Homo sapien
gcccatgccggagtgtatagagaag

SEQ ID NO: 6000607 - DNA, 25 bp, Homo sapien
aaactaacttcttccgggctcttgc

SEQ ID NO: 6000608 - DNA, 25 bp, Homo sapien
agagtgtcttgcttggtgtccaaga

SEQ ID NO: 6000609 - DNA, 25 bp, Homo sapien
tcctcttttgcttggcgatggcgtt

SEQ ID NO: 6000610 - DNA, 25 bp, Homo sapien
aatttagaggattctagttttggat

SEQ ID NO: 6000611 - DNA, 25 bp, Homo sapien
cggatagcgccgttcacaatcaacg

SEQ ID NO: 6000612 - DNA, 25 bp, Homo sapien
cgttcacaatcaacgacacgttatt

SEQ ID NO: 6000613 - DNA, 25 bp, Homo sapien
ctgaaggcttagaagtgtgatcaaa

SEQ ID NO: 6000614 - DNA, 25 bp, Homo sapien
gtggttgtcaaacttcgttgcccac

SEQ ID NO: 6000615 - DNA, 25 bp, Homo sapien
gtttggggcagcctgcattgatatc

SEQ ID NO: 6000616 - DNA, 25 bp, Homo sapien
ttctgaaggcttagaagtgtgatca

SEQ ID NO: 6000617 - DNA, 25 bp, Homo sapien
gtagtcgacagtttggagtgcagtg

SEQ ID NO: 6000618 - DNA, 25 bp, Homo sapien
gcgccgttcacaatcaacgacacgt

SEQ ID NO: 6000619 - DNA, 25 bp, Homo sapien
gagacacagtgtgtctggggtgcgc

SEQ ID NO: 6000620 - DNA, 25 bp, Homo sapien
acgtagtcgacagtttggagtgcag

SEQ ID NO: 6000621 - DNA, 25 bp, Homo sapien
gtctggggtgcgcaagagggcagag

SEQ ID NO: 6000622 - DNA, 25 bp, Homo sapien
gtcactgcctatgtgatcggtctgt

SEQ ID NO: 6000623 - DNA, 25 bp, Homo sapien
gctcttaccattggagctagaacca

SEQ ID NO: 6000624 - DNA, 25 bp, Homo sapien
ttgctttttagtgtcactgcctatg

SEQ ID NO: 6000625 - DNA, 25 bp, Homo sapien
atctatcccgctgacgtcgttgatc

SEQ ID NO: 6000626 - DNA, 25 bp, Homo sapien
gaactgtaagatttgtgatgcccgt

SEQ ID NO: 6000627 - DNA, 25 bp, Homo sapien
gcgtttttcaaagctttttcttgag

SEQ ID NO: 6000628 - DNA, 25 bp, Homo sapien
acgtttgacgagctgtagagtgtct

SEQ ID NO: 6000629 - DNA, 25 bp, Homo sapien
caatcataccaccaatgttagtgtt

SEQ ID NO: 6000630 - DNA, 25 bp, Homo sapien
acgacacgttatttgcctggcatat

SEQ ID NO: 6000631 - DNA, 25 bp, Homo sapien
tcaatttagaggattctagttttgg

SEQ ID NO: 6000632 - DNA, 25 bp, Homo sapien
agagggcagagcccatgccggagtg

SEQ ID NO: 6000633 - DNA, 25 bp, Homo sapien
gtcgcggatagcgccgttcacaatc

SEQ ID NO: 6000634 - DNA, 25 bp, Homo sapien
cagtctcgtgggcagttcgccggct

SEQ ID NO: 6000635 - DNA, 25 bp, Homo sapien
gcctcgtttgaaccttggacggcac

SEQ ID NO: 6000636 - DNA, 25 bp, Homo sapien
tgatcactttcaaagcagcctgggt

SEQ ID NO: 6000637 - DNA, 25 bp, Homo sapien
tgtaatctgtgatgggctgctctct

SEQ ID NO: 6000638 - DNA, 25 bp, Homo sapien
cagacgagatctgcaccgtgggcca

SEQ ID NO: 6000639 - DNA, 25 bp, Homo sapien
ttatttgcctggcatatctcgtaga

SEQ ID NO: 6000640 - DNA, 25 bp, Homo sapien
tgagagcggtcgcggatagcgccgt

SEQ ID NO: 6000641 - DNA, 25 bp, Homo sapien
aatgtaatctgtgatgggctgctct

SEQ ID NO: 6000642 - DNA, 25 bp, Homo sapien
gccagagccggggatgcagacccga

SEQ ID NO: 6000643 - DNA, 25 bp, Homo sapien
ggtgtccaagagtcttattttcaca

SEQ ID NO: 6000644 - DNA, 25 bp, Homo sapien
attgatatctatcccgctgacgtcg

SEQ ID NO: 6000645 - DNA, 25 bp, Homo sapien
acagacgtttgacgagctgtagagt

SEQ ID NO: 6000646 - DNA, 25 bp, Homo sapien
cacaatcaacgacacgttatttgcc

SEQ ID NO: 6000647 - DNA, 25 bp, Homo sapien
ttgctgtgagggttacccacgttct

SEQ ID NO: 6000648 - DNA, 25 bp, Homo sapien
gccggagtgtatagagaagtgtttg

SEQ ID NO: 6000649 - DNA, 25 bp, Homo sapien
aagcagcctgggtggccagagccgg

SEQ ID NO: 6000650 - DNA, 25 bp, Homo sapien
gctctgcagttttccaagtactctg

SEQ ID NO: 6000651 - DNA, 25 bp, Homo sapien
ggtgcgcaagagggcagagcccatg

SEQ ID NO: 6000652 - DNA, 25 bp, Homo sapien
gatcggtctgtttcctcttttgctt

SEQ ID NO: 6000653 - DNA, 25 bp, Homo sapien
cagtgttttccttcctgacgcactg

SEQ ID NO: 6000654 - DNA, 25 bp, Homo sapien
ctatgtgatcggtctgtttcctctt

SEQ ID NO: 6000655 - DNA, 25 bp, Homo sapien
agtgtcttgcttggtgtccaagagt

SEQ ID NO: 6000656 - DNA, 25 bp, Homo sapien
tcgccggctcttaccattggagcta

SEQ ID NO: 6000657 - DNA, 25 bp, Homo sapien
ttctggggaccagacgagatctgca

SEQ ID NO: 6000658 - DNA, 25 bp, Homo sapien
agatctccgcaatgtaatctgtgat

SEQ ID NO: 6000659 - DNA, 25 bp, Homo sapien
gacagtttggagtgcagtgttttcc

SEQ ID NO: 6000660 - DNA, 25 bp, Homo sapien
tgcttaacatgtattttgtattgcc

SEQ ID NO: 6000661 - DNA, 25 bp, Homo sapien
caacgacacgttatttgcctggcat

SEQ ID NO: 6000662 - DNA, 25 bp, Homo sapien
atttgtgatgcccgtggcacacaga

SEQ ID NO: 6000663 - DNA, 25 bp, Homo sapien
ggtggccagagccggggatgcagac

SEQ ID NO: 6000664 - DNA, 25 bp, Homo sapien
tctgtttcctcttttgcttggcgat

SEQ ID NO: 6000665 - DNA, 25 bp, Homo sapien
gcttggtgtccaagagtcttatttt

SEQ ID NO: 6000666 - DNA, 25 bp, Homo sapien
agatctgcaccgtgggccagcgcca

SEQ ID NO: 6000667 - DNA, 25 bp, Homo sapien
ggcacgacgtagtcgacagtttgga

SEQ ID NO: 6000668 - DNA, 25 bp, Homo sapien
caacgacccaagatggaccgtcttc

SEQ ID NO: 6000669 - DNA, 25 bp, Homo sapien
gcattgatatctatcccgctgacgt

SEQ ID NO: 6000670 - DNA, 25 bp, Homo sapien
ctgaattagctttttgtcgatgatt

SEQ ID NO: 6000671 - DNA, 25 bp, Homo sapien
acgttcttaaccagttctttcaaga

SEQ ID NO: 6000672 - DNA, 25 bp, Homo sapien
gatatgttctgaaaacgagcgtctc

SEQ ID NO: 6000673 - DNA, 25 bp, Homo sapien
cactgaataaactcgcgacaagcaa

SEQ ID NO: 6000674 - DNA, 25 bp, Homo sapien
atcccgctgacgtcgttgatcactt

SEQ ID NO: 6000675 - DNA, 25 bp, Homo sapien
gagccggggatgcagacccgatctg

SEQ ID NO: 6000676 - DNA, 25 bp, Homo sapien
tctgcttaacatgtattttgtattg

SEQ ID NO: 6000677 - DNA, 25 bp, Homo sapien
atgtattttgtattgccgatgtggt

SEQ ID NO: 6000678 - DNA, 25 bp, Homo sapien
aacgagcgtctccggcctcgtttga

SEQ ID NO: 6000679 - DNA, 25 bp, Homo sapien
gtttctcatttcagtcttcctgcag

SEQ ID NO: 6000680 - DNA, 25 bp, Homo sapien
cgcggatagcgccgttcacaatcaa

SEQ ID NO: 6000681 - DNA, 25 bp, Homo sapien
cagtgaactgtaagatttgtgatgc

SEQ ID NO: 6000682 - DNA, 25 bp, Homo sapien
ttgacgagctgtagagtgtcttgct

SEQ ID NO: 6000683 - DNA, 25 bp, Homo sapien
ttattttcacactgatgggtttgct

SEQ ID NO: 6000684 - DNA, 25 bp, Homo sapien
tggcgtttttcaaagctttttcttg

SEQ ID NO: 6000685 - DNA, 25 bp, Homo sapien
tttcttgagctctgcagttttccaa

SEQ ID NO: 6000686 - DNA, 25 bp, Homo sapien
gacgcactgaattagctttttgtcg

SEQ ID NO: 6000687 - DNA, 25 bp, Homo sapien
ggcagagcccatgccggagtgtata

SEQ ID NO: 6000688 - DNA, 25 bp, Homo sapien
agcgccatcagtctcgtgggcagtt

SEQ ID NO: 6000689 - DNA, 25 bp, Homo sapien
gtctcgtgggcagttcgccggctct

SEQ ID NO: 6000690 - DNA, 25 bp, Homo sapien
gatgatttctggggaccagacgaga

SEQ ID NO: 6000691 - DNA, 25 bp, Homo sapien
tcggtctgtttcctcttttgcttgg

SEQ ID NO: 6000692 - DNA, 25 bp, Homo sapien
tatctcgtagatctccgcaatgtaa

SEQ ID NO: 6000693 - DNA, 25 bp, Homo sapien
aatgattcgcttgtaaatcatgaaa

SEQ ID NO: 6000694 - DNA, 25 bp, Homo sapien
ctgtgatgggctgctctctgtttct

SEQ ID NO: 6000695 - DNA, 25 bp, Homo sapien
cgacgtagtcgacagtttggagtgc

SEQ ID NO: 6000696 - DNA, 25 bp, Homo sapien
agatggaccgtcttctgaaggctta

SEQ ID NO: 6000697 - DNA, 25 bp, Homo sapien
cgccatcagtctcgtgggcagttcg

SEQ ID NO: 6000698 - DNA, 25 bp, Homo sapien
tcttctgaaggcttagaagtgtgat

SEQ ID NO: 6000699 - DNA, 25 bp, Homo sapien
ctgcctatgtgatcggtctgtttcc

SEQ ID NO: 6000700 - DNA, 25 bp, Homo sapien
tttgtattgccgatgtggttgtcaa

SEQ ID NO: 6000701 - DNA, 25 bp, Homo sapien
gtgatcaaaaactgtagggtcccgt

SEQ ID NO: 6000702 - DNA, 25 bp, Homo sapien
actctgcaatcataccaccaatgtt

SEQ ID NO: 6000703 - DNA, 25 bp, Homo sapien
ggaccagacgagatctgcaccgtgg

SEQ ID NO: 6000704 - DNA, 25 bp, Homo sapien
gcgatggcgttggcgtttttcaaag

SEQ ID NO: 6000705 - DNA, 25 bp, Homo sapien
cattggagctagaaccagttttcca

SEQ ID NO: 6000706 - DNA, 25 bp, Homo sapien
cgcttccatcatcgttcaattgctt

SEQ ID NO: 6000707 - DNA, 25 bp, Homo sapien
tcttaccattggagctagaaccagt

SEQ ID NO: 6000708 - DNA, 25 bp, Homo sapien
cacagtgtgtctggggtgcgcaaga

SEQ ID NO: 6000709 - DNA, 25 bp, Homo sapien
cggctcttaccattggagctagaac

SEQ ID NO: 6000710 - DNA, 25 bp, Homo sapien
taacatgtattttgtattgccgatg

SEQ ID NO: 6000711 - DNA, 25 bp, Homo sapien
gttttggatatgttctgaaaacgag

SEQ ID NO: 6000712 - DNA, 25 bp, Homo sapien
actgtagggtcccgttcagcacact

SEQ ID NO: 6000713 - DNA, 25 bp, Homo sapien
gatgggctgctctctgtttctcatt

SEQ ID NO: 6000714 - DNA, 25 bp, Homo sapien
gacgtcgttgatcactttcaaagca

SEQ ID NO: 6000715 - DNA, 25 bp, Homo sapien
ggagctagaaccagttttccagcat

SEQ ID NO: 6000716 - DNA, 25 bp, Homo sapien
atctggaaaatcaatttagaggatt

SEQ ID NO: 6000717 - DNA, 25 bp, Homo sapien
cgagcgtctccggcctcgtttgaac

SEQ ID NO: 6000718 - DNA, 25 bp, Homo sapien
gatggcgttggcgtttttcaaagct

SEQ ID NO: 6000719 - DNA, 25 bp, Homo sapien
accgtcttctgaaggcttagaagtg

SEQ ID NO: 6000720 - DNA, 25 bp, Homo sapien
cttcctgacgcactgaattagcttt

SEQ ID NO: 6000721 - DNA, 25 bp, Homo sapien
ttgtcaaacttcgttgcccactgaa

SEQ ID NO: 6000722 - DNA, 25 bp, Homo sapien
cgttcaattgctttagtacgaaact

SEQ ID NO: 6000723 - DNA, 25 bp, Homo sapien
tttcagtcttcctgcagtgaactgt

SEQ ID NO: 6000724 - DNA, 25 bp, Homo sapien
ttgccgatgtggttgtcaaacttcg

SEQ ID NO: 6000725 - DNA, 25 bp, Homo sapien
actgtaagatttgtgatgcccgtgg

SEQ ID NO: 6000726 - DNA, 25 bp, Homo sapien
atatctatcccgctgacgtcgttga

SEQ ID NO: 6000727 - DNA, 25 bp, Homo sapien
tcttgagctctgcagttttccaagt

SEQ ID NO: 6000728 - DNA, 25 bp, Homo sapien
agcggtcgcggatagcgccgttcac

SEQ ID NO: 6000729 - DNA, 25 bp, Homo sapien
ggattctagttttggatatgttctg

SEQ ID NO: 6000730 - DNA, 25 bp, Homo sapien
taacttcttccgggctcttgcaacg

SEQ ID NO: 6000731 - DNA, 25 bp, Homo sapien
gcttgtaaatcatgaaaatgagagc

SEQ ID NO: 6000732 - DNA, 25 bp, Homo sapien
tagttttggatatgttctgaaaacg

SEQ ID NO: 6000733 - DNA, 25 bp, Homo sapien
tgatttctggggaccagacgagatc

SEQ ID NO: 6000734 - DNA, 25 bp, Homo sapien
cactgaattagctttttgtcgatga

SEQ ID NO: 6000735 - DNA, 25 bp, Homo sapien
cccactgaataaactcgcgacaagc

SEQ ID NO: 6000736 - DNA, 25 bp, Homo sapien
caagatggaccgtcttctgaaggct

SEQ ID NO: 6000737 - DNA, 25 bp, Homo sapien
aagtgtgatcaaaaactgtagggtc

SEQ ID NO: 6000738 - DNA, 25 bp, Homo sapien
caagtactctgaaggatctgtttga

SEQ ID NO: 6000739 - DNA, 25 bp, Homo sapien
caattctgcttaacatgtattttgt

SEQ ID NO: 6000740 - DNA, 25 bp, Homo sapien
cgtgggcagttcgccggctcttacc

SEQ ID NO: 6000741 - DNA, 25 bp, Homo sapien
cctgcagtgaactgtaagatttgtg

SEQ ID NO: 6000742 - DNA, 25 bp, Homo sapien
cgttcagcacactctgcaatcatac

SEQ ID NO: 6000743 - DNA, 25 bp, Homo sapien
tgaaaatgagagcggtcgcggatag

SEQ ID NO: 6000744 - DNA, 25 bp, Homo sapien
tttgtcgatgatttctggggaccag

SEQ ID NO: 6000745 - DNA, 25 bp, Homo sapien
taatctgtgatgggctgctctctgt

SEQ ID NO: 6000746 - DNA, 25 bp, Homo sapien
acttcttccgggctcttgcaacggg

SEQ ID NO: 6000747 - DNA, 25 bp, Homo sapien
gatgcccgtggcacacagacgtttg

SEQ ID NO: 6000748 - DNA, 25 bp, Homo sapien
accattggagctagaaccagttttc

SEQ ID NO: 6000749 - DNA, 25 bp, Homo sapien
tctctgtttctcatttcagtcttcc

SEQ ID NO: 6000750 - DNA, 25 bp, Homo sapien
aatgagagcggtcgcggatagcgcc

SEQ ID NO: 6000751 - DNA, 25 bp, Homo sapien
cagtttggagtgcagtgttttcctt

SEQ ID NO: 6000752 - DNA, 25 bp, Homo sapien
ctatcccgctgacgtcgttgatcac

SEQ ID NO: 6000753 - DNA, 25 bp, Homo sapien
ttaaccagttctttcaagatgagac

SEQ ID NO: 6000754 - DNA, 25 bp, Homo sapien
cagcacactctgcaatcataccacc

SEQ ID NO: 6000755 - DNA, 25 bp, Homo sapien
cttttgcttggcgatggcgttggcg

SEQ ID NO: 6000756 - DNA, 25 bp, Homo sapien
aaatcatgaaaatgagagcggtcgc

SEQ ID NO: 6000757 - DNA, 25 bp, Homo sapien
taagatttgtgatgcccgtggcaca

SEQ ID NO: 6000758 - DNA, 25 bp, Homo sapien
gagtgtatagagaagtgtttggggc

SEQ ID NO: 6000759 - DNA, 25 bp, Homo sapien
aagtgtttggggcagcctgcattga

SEQ ID NO: 6000760 - DNA, 25 bp, Homo sapien
cttggcgatggcgttggcgtttttc

SEQ ID NO: 6000761 - DNA, 25 bp, Homo sapien
aggcttagaagtgtgatcaaaaact

SEQ ID NO: 6000762 - DNA, 25 bp, Homo sapien
gtgtttttccaatgattcgcttgta

SEQ ID NO: 6000763 - DNA, 25 bp, Homo sapien
cggcctcgtttgaaccttggacggc

SEQ ID NO: 6000764 - DNA, 25 bp, Homo sapien
gtttgctgtgagggttacccacgtt

SEQ ID NO: 6000765 - DNA, 25 bp, Homo sapien
tatctgtgggaaggggtacaacctt

SEQ ID NO: 6000766 - DNA, 25 bp, Homo sapien
gggacaattctgcttaacatgtatt

SEQ ID NO: 6000767 - DNA, 25 bp, Homo sapien
gtgtgtctggggtgcgcaagagggc

SEQ ID NO: 6000768 - DNA, 25 bp, Homo sapien
tgggctgctctctgtttctcatttc

SEQ ID NO: 6000769 - DNA, 25 bp, Homo sapien
ggcagttcgccggctcttaccattg

SEQ ID NO: 6000770 - DNA, 25 bp, Homo sapien
ccaccaatgttagtgtttttccaat

SEQ ID NO: 6000771 - DNA, 25 bp, Homo sapien
tgcttggcgatggcgttggcgtttt

SEQ ID NO: 6000772 - DNA, 25 bp, Homo sapien
tgcccactgaataaactcgcgacaa

SEQ ID NO: 6000773 - DNA, 25 bp, Homo sapien
agtactgaaaaaagactgattttcc

SEQ ID NO: 6000774 - DNA, 25 bp, Homo sapien
agggcagagcccatgccggagtgta

SEQ ID NO: 6000775 - DNA, 25 bp, Homo sapien
tgttctgaaaacgagcgtctccggc

SEQ ID NO: 6000776 - DNA, 25 bp, Homo sapien
gtttgacgagctgtagagtgtcttg

SEQ ID NO: 6000777 - DNA, 25 bp, Homo sapien
agagtcttattttcacactgatggg

SEQ ID NO: 6000778 - DNA, 25 bp, Homo sapien
tttttgtcgatgatttctggggacc

SEQ ID NO: 6000779 - DNA, 25 bp, Homo sapien
ccatgccggagtgtatagagaagtg

SEQ ID NO: 6000780 - DNA, 25 bp, Homo sapien
atgccggagtgtatagagaagtgtt

SEQ ID NO: 6000781 - DNA, 25 bp, Homo sapien
ccgcaatgtaatctgtgatgggctg

SEQ ID NO: 6000782 - DNA, 25 bp, Homo sapien
atctgcaccgtgggccagcgccatc

SEQ ID NO: 6000783 - DNA, 25 bp, Homo sapien
cgggctcttgcaacgggcaaagtac

SEQ ID NO: 6000784 - DNA, 25 bp, Homo sapien
ttcaattgctttagtacgaaactaa

SEQ ID NO: 6000785 - DNA, 25 bp, Homo sapien
atgttagtgtttttccaatgattcg

SEQ ID NO: 6000786 - DNA, 25 bp, Homo sapien
gttagtgtttttccaatgattcgct

SEQ ID NO: 6000787 - DNA, 25 bp, Homo sapien
agttctttcaagatgagacacagtg

SEQ ID NO: 6000788 - DNA, 25 bp, Homo sapien
gttcgccggctcttaccattggagc

SEQ ID NO: 6000789 - DNA, 25 bp, Homo sapien
tcagtcttcctgcagtgaactgtaa

SEQ ID NO: 6000790 - DNA, 25 bp, Homo sapien
acggcacgacgtagtcgacagtttg

SEQ ID NO: 6000791 - DNA, 25 bp, Homo sapien
cgcaagagggcagagcccatgccgg

SEQ ID NO: 6000792 - DNA, 25 bp, Homo sapien
agatttgtgatgcccgtggcacaca

SEQ ID NO: 6000793 - DNA, 25 bp, Homo sapien
agacgtttgacgagctgtagagtgt

SEQ ID NO: 6000794 - DNA, 25 bp, Homo sapien
cgggcaaagtactgaaaaaagactg

SEQ ID NO: 6000795 - DNA, 25 bp, Homo sapien
cgtcgttgatcactttcaaagcagc

SEQ ID NO: 6000796 - DNA, 25 bp, Homo sapien
tgtgggaaggggtacaaccttttgc

SEQ ID NO: 6000797 - DNA, 25 bp, Homo sapien
ctcgtttgaaccttggacggcacga

SEQ ID NO: 6000798 - DNA, 25 bp, Homo sapien
ggggaccagacgagatctgcaccgt

SEQ ID NO: 6000799 - DNA, 25 bp, Homo sapien
atcaacgacacgttatttgcctggc

SEQ ID NO: 6000800 - DNA, 25 bp, Homo sapien
cgagctgtagagtgtcttgcttggt

SEQ ID NO: 6000801 - DNA, 25 bp, Homo sapien
ctgacgtcgttgatcactttcaaag

SEQ ID NO: 6000802 - DNA, 25 bp, Homo sapien
agtcttcctgcagtgaactgtaaga

SEQ ID NO: 6000803 - DNA, 25 bp, Homo sapien
tagtgtttttccaatgattcgcttg

SEQ ID NO: 6000804 - DNA, 25 bp, Homo sapien
acacagacgtttgacgagctgtaga

SEQ ID NO: 6000805 - DNA, 25 bp, Homo sapien
cgcactgaattagctttttgtcgat

SEQ ID NO: 6000806 - DNA, 25 bp, Homo sapien
gcacacagacgtttgacgagctgta

SEQ ID NO: 6000807 - DNA, 25 bp, Homo sapien
ggcaaagtactgaaaaaagactgat

SEQ ID NO: 6000808 - DNA, 25 bp, Homo sapien
gttgcccactgaataaactcgcgac

SEQ ID NO: 6000809 - DNA, 25 bp, Homo sapien
gtaaatcatgaaaatgagagcggtc

SEQ ID NO: 6000810 - DNA, 25 bp, Homo sapien
ggggcagcctgcattgatatctatc

SEQ ID NO: 6000811 - DNA, 25 bp, Homo sapien
gaataaactcgcgacaagcaacgac

SEQ ID NO: 6000812 - DNA, 25 bp, Homo sapien
ttgccagttaacattgtttagaaac

SEQ ID NO: 6000813 - DNA, 25 bp, Homo sapien
gaacatcttcatcaaaccttccaat

SEQ ID NO: 6000814 - DNA, 25 bp, Homo sapien
gagaacatcttcatcaaaccttcca

SEQ ID NO: 6000815 - DNA, 25 bp, Homo sapien
cgaattggccatttcgaagtttatt

SEQ ID NO: 6000816 - DNA, 25 bp, Homo sapien
tgatgaattgagtgcagaaggcaga

SEQ ID NO: 6000817 - DNA, 25 bp, Homo sapien
attgagttttcccttcgaattggcc

SEQ ID NO: 6000818 - DNA, 25 bp, Homo sapien
cactccagaatgagattcagagtgg

SEQ ID NO: 6000819 - DNA, 25 bp, Homo sapien
tgtctctgagtgccaattggacggt

SEQ ID NO: 6000820 - DNA, 25 bp, Homo sapien
cgttactgaagtttctggccgacca

SEQ ID NO: 6000821 - DNA, 25 bp, Homo sapien
agacaacaggcaagaagaaccttca

SEQ ID NO: 6000822 - DNA, 25 bp, Homo sapien
tcatcaaaccttccaatgacagagt

SEQ ID NO: 6000823 - DNA, 25 bp, Homo sapien
ttttcccacgtcatttccagacaaa

SEQ ID NO: 6000824 - DNA, 25 bp, Homo sapien
caattccattcaatttgccagttaa

SEQ ID NO: 6000825 - DNA, 25 bp, Homo sapien
tccaatccgctccacaagttttata

SEQ ID NO: 6000826 - DNA, 25 bp, Homo sapien
tccgatttcgactataccacctacc

SEQ ID NO: 6000827 - DNA, 25 bp, Homo sapien
accggcacctgtcgaagcagaaatt

SEQ ID NO: 6000828 - DNA, 25 bp, Homo sapien
tcttttcccacgtcatttccagaca

SEQ ID NO: 6000829 - DNA, 25 bp, Homo sapien
atactcacatgaaccaccattggag

SEQ ID NO: 6000830 - DNA, 25 bp, Homo sapien
actgtctgttttgaagaccattata

SEQ ID NO: 6000831 - DNA, 25 bp, Homo sapien
ttggccgaattggttcaagaatcga

SEQ ID NO: 6000832 - DNA, 25 bp, Homo sapien
ggagcccggctatgactacactctt

SEQ ID NO: 6000833 - DNA, 25 bp, Homo sapien
gaattgtttccgatttcgactatac

SEQ ID NO: 6000834 - DNA, 25 bp, Homo sapien
caagaagaaccttcaccggtagaaa

SEQ ID NO: 6000835 - DNA, 25 bp, Homo sapien
agagccaaggtggacgaagatgatg

SEQ ID NO: 6000836 - DNA, 25 bp, Homo sapien
taaagttgcagagcaaagtagaaga

SEQ ID NO: 6000837 - DNA, 25 bp, Homo sapien
ttctggccgaccactactcctcttt

SEQ ID NO: 6000838 - DNA, 25 bp, Homo sapien
catttcaaacacagcagaagataag

SEQ ID NO: 6000839 - DNA, 25 bp, Homo sapien
actactcctctttgggtggggtgac

SEQ ID NO: 6000840 - DNA, 25 bp, Homo sapien
ttaccataatcttcgagactatttt

SEQ ID NO: 6000841 - DNA, 25 bp, Homo sapien
ttctttgacgttactgaagtttctg

SEQ ID NO: 6000842 - DNA, 25 bp, Homo sapien
attctgttgttgagtgttaagacca

SEQ ID NO: 6000843 - DNA, 25 bp, Homo sapien
tggagttgaagagactatatcaacc

SEQ ID NO: 6000844 - DNA, 25 bp, Homo sapien
acagagttaccataatcttcgagac

SEQ ID NO: 6000845 - DNA, 25 bp, Homo sapien
tatgactacactcttcagattacgt

SEQ ID NO: 6000846 - DNA, 25 bp, Homo sapien
cagttaacattgtttagaaactact

SEQ ID NO: 6000847 - DNA, 25 bp, Homo sapien
ccaaagcttgggtaagtgtctctga

SEQ ID NO: 6000848 - DNA, 25 bp, Homo sapien
attttacaactgtctgttttgaaga

SEQ ID NO: 6000849 - DNA, 25 bp, Homo sapien
gacactgaatgaagcgatagaggca

SEQ ID NO: 6000850 - DNA, 25 bp, Homo sapien
cttgggtaagtgtctctgagtgcca

SEQ ID NO: 6000851 - DNA, 25 bp, Homo sapien
caaatccaatccgctccacaagttt

SEQ ID NO: 6000852 - DNA, 25 bp, Homo sapien
aatgacagagttaccataatcttcg

SEQ ID NO: 6000853 - DNA, 25 bp, Homo sapien
accacctaaagttgcagagcaaagt

SEQ ID NO: 6000854 - DNA, 25 bp, Homo sapien
tatcgtgacgaggagaacatcttca

SEQ ID NO: 6000855 - DNA, 25 bp, Homo sapien
gagttgcaattccattcaatttgcc

SEQ ID NO: 6000856 - DNA, 25 bp, Homo sapien
cggtgaggttgctgccaatggagac

SEQ ID NO: 6000857 - DNA, 25 bp, Homo sapien
tccattcaatttgccagttaacatt

SEQ ID NO: 6000858 - DNA, 25 bp, Homo sapien
gccagttaacattgtttagaaacta

SEQ ID NO: 6000859 - DNA, 25 bp, Homo sapien
cctctttgggtggggtgactatccc

SEQ ID NO: 6000860 - DNA, 25 bp, Homo sapien
aaagcctacatgcactccagaatga

SEQ ID NO: 6000861 - DNA, 25 bp, Homo sapien
tgaagagactatatcaaccacctaa

SEQ ID NO: 6000862 - DNA, 25 bp, Homo sapien
cacgtttgttcttttcccacgtcat

SEQ ID NO: 6000863 - DNA, 25 bp, Homo sapien
tacactcttcagattacgttggccg

SEQ ID NO: 6000864 - DNA, 25 bp, Homo sapien
acttcgcaagggttcgccgttgacc

SEQ ID NO: 6000865 - DNA, 25 bp, Homo sapien
ctggccgaccactactcctctttgg

SEQ ID NO: 6000866 - DNA, 25 bp, Homo sapien
atgatgaaaatgatgaattgagtgc

SEQ ID NO: 6000867 - DNA, 25 bp, Homo sapien
agagtggactcgttcatcaaagtct

SEQ ID NO: 6000868 - DNA, 25 bp, Homo sapien
aatgatgaattgagtgcagaaggca

SEQ ID NO: 6000869 - DNA, 25 bp, Homo sapien
atcttcgagactatttttcaagacg

SEQ ID NO: 6000870 - DNA, 25 bp, Homo sapien
caggcaagaagaaccttcaccggta

SEQ ID NO: 6000871 - DNA, 25 bp, Homo sapien
tgccaattggacggttctttgacgt

SEQ ID NO: 6000872 - DNA, 25 bp, Homo sapien
ccattctgttgttgagtgttaagac

SEQ ID NO: 6000873 - DNA, 25 bp, Homo sapien
cggctatgactacactcttcagatt

SEQ ID NO: 6000874 - DNA, 25 bp, Homo sapien
gttttcccttcgaattggccatttc

SEQ ID NO: 6000875 - DNA, 25 bp, Homo sapien
gtttgttcttttcccacgtcatttc

SEQ ID NO: 6000876 - DNA, 25 bp, Homo sapien
atgcacgtaagagaaaccgtcaaat

SEQ ID NO: 6000877 - DNA, 25 bp, Homo sapien
tggcaaggtctttttacaagaattc

SEQ ID NO: 6000878 - DNA, 25 bp, Homo sapien
tgcagagcaaagtagaagatttatc

SEQ ID NO: 6000879 - DNA, 25 bp, Homo sapien
ctttttacaagaattcgtggatgca

SEQ ID NO: 6000880 - DNA, 25 bp, Homo sapien
tacatgcactccagaatgagattca

SEQ ID NO: 6000881 - DNA, 25 bp, Homo sapien
ataagtccattctgttgttgagtgt

SEQ ID NO: 6000882 - DNA, 25 bp, Homo sapien
aggcacttcgcaagggttcgccgtt

SEQ ID NO: 6000883 - DNA, 25 bp, Homo sapien
tttgggtggggtgactatcccaagt

SEQ ID NO: 6000884 - DNA, 25 bp, Homo sapien
aagtttattgaactaagccagcagc

SEQ ID NO: 6000885 - DNA, 25 bp, Homo sapien
acctaccacatttcaaacacagcag

SEQ ID NO: 6000886 - DNA, 25 bp, Homo sapien
ggccgaccactactcctctttgggt

SEQ ID NO: 6000887 - DNA, 25 bp, Homo sapien
actacactcttcagattacgttggc

SEQ ID NO: 6000888 - DNA, 25 bp, Homo sapien
ataaagtgctctaaagcctacatgc

SEQ ID NO: 6000889 - DNA, 25 bp, Homo sapien
tcaagaatcgattttacaactgtct

SEQ ID NO: 6000890 - DNA, 25 bp, Homo sapien
tactggcggtgaggttgctgccaat

SEQ ID NO: 6000891 - DNA, 25 bp, Homo sapien
gcacctgtcgaagcagaaattactg

SEQ ID NO: 6000892 - DNA, 25 bp, Homo sapien
ccttcaccggtagaaagattgtcta

SEQ ID NO: 6000893 - DNA, 25 bp, Homo sapien
gaaggcagacaacaggcaagaagaa

SEQ ID NO: 6000894 - DNA, 25 bp, Homo sapien
gaaccaccattggagttgaagagac

SEQ ID NO: 6000895 - DNA, 25 bp, Homo sapien
agcttgggtaagtgtctctgagtgc

SEQ ID NO: 6000896 - DNA, 25 bp, Homo sapien
aggtctttttacaagaattcgtgga

SEQ ID NO: 6000897 - DNA, 25 bp, Homo sapien
acacagcagaagataagtccattct

SEQ ID NO: 6000898 - DNA, 25 bp, Homo sapien
tgcagaaggcagacaacaggcaaga

SEQ ID NO: 6000899 - DNA, 25 bp, Homo sapien
ccactactcctctttgggtggggtg

SEQ ID NO: 6000900 - DNA, 25 bp, Homo sapien
tgtctgttttgaagaccattatatt

SEQ ID NO: 6000901 - DNA, 25 bp, Homo sapien
tcccttcgaattggccatttcgaag

SEQ ID NO: 6000902 - DNA, 25 bp, Homo sapien
cccaagtgaagtggagcccggctat

SEQ ID NO: 6000903 - DNA, 25 bp, Homo sapien
aatccaatccgctccacaagtttta

SEQ ID NO: 6000904 - DNA, 25 bp, Homo sapien
ggttctttgacgttactgaagtttc

SEQ ID NO: 6000905 - DNA, 25 bp, Homo sapien
atcttcatcaaaccttccaatgaca

SEQ ID NO: 6000906 - DNA, 25 bp, Homo sapien
aaatagagccaaggtggacgaagat

SEQ ID NO: 6000907 - DNA, 25 bp, Homo sapien
ttttatactcacatgaaccaccatt

SEQ ID NO: 6000908 - DNA, 25 bp, Homo sapien
tctcatccaaaagacactgaatgaa

SEQ ID NO: 6000909 - DNA, 25 bp, Homo sapien
ttttgaagaccattatattgagttt

SEQ ID NO: 6000910 - DNA, 25 bp, Homo sapien
gcagcaaccggcacctgtcgaagca

SEQ ID NO: 6000911 - DNA, 25 bp, Homo sapien
aggcagacaacaggcaagaagaacc

SEQ ID NO: 6000912 - DNA, 25 bp, Homo sapien
aacagataaaatttttggcaaggtc

SEQ ID NO: 6000913 - DNA, 25 bp, Homo sapien
aattggccatttcgaagtttattga

SEQ ID NO: 6000914 - DNA, 25 bp, Homo sapien
gacgaagatgatgaaaatgatgaat

SEQ ID NO: 6000915 - DNA, 25 bp, Homo sapien
ttcgaagtttattgaactaagccag

SEQ ID NO: 6000916 - DNA, 25 bp, Homo sapien
cgccgttgaccatggacagaattgt

SEQ ID NO: 6000917 - DNA, 25 bp, Homo sapien
tactcctctttgggtggggtgacta

SEQ ID NO: 6000918 - DNA, 25 bp, Homo sapien
gttcttttcccacgtcatttccaga

SEQ ID NO: 6000919 - DNA, 25 bp, Homo sapien
accataatcttcgagactatttttc

SEQ ID NO: 6000920 - DNA, 25 bp, Homo sapien
caatttgccagttaacattgtttag

SEQ ID NO: 6000921 - DNA, 25 bp, Homo sapien
agaccattatattgagttttccctt

SEQ ID NO: 6000922 - DNA, 25 bp, Homo sapien
agataagtccattctgttgttgagt

SEQ ID NO: 6000923 - DNA, 25 bp, Homo sapien
ccagacaaaagagttgcaattccat

SEQ ID NO: 6000924 - DNA, 25 bp, Homo sapien
tcgagactatttttcaagacgaaac

SEQ ID NO: 6000925 - DNA, 25 bp, Homo sapien
gtgactatcccaagtgaagtggagc

SEQ ID NO: 6000926 - DNA, 25 bp, Homo sapien
tttcccttcgaattggccatttcga

SEQ ID NO: 6000927 - DNA, 25 bp, Homo sapien
gtttctggccgaccactactcctct

SEQ ID NO: 6000928 - DNA, 25 bp, Homo sapien
ccgttgaccatggacagaattgttt

SEQ ID NO: 6000929 - DNA, 25 bp, Homo sapien
aaggtggacgaagatgatgaaaatg

SEQ ID NO: 6000930 - DNA, 25 bp, Homo sapien
atgaattgagtgcagaaggcagaca

SEQ ID NO: 6000931 - DNA, 25 bp, Homo sapien
agtgtctctgagtgccaattggacg

SEQ ID NO: 6000932 - DNA, 25 bp, Homo sapien
aggagaacatcttcatcaaaccttc

SEQ ID NO: 6000933 - DNA, 25 bp, Homo sapien
ccaattggacggttctttgacgtta

SEQ ID NO: 6000934 - DNA, 25 bp, Homo sapien
cagaagataagtccattctgttgtt

SEQ ID NO: 6000935 - DNA, 25 bp, Homo sapien
tggagacaacactttgttcacaatc

SEQ ID NO: 6000936 - DNA, 25 bp, Homo sapien
gaaaccgtcaaatccaatccgctcc

SEQ ID NO: 6000937 - DNA, 25 bp, Homo sapien
aaccttccaatgacagagttaccat

SEQ ID NO: 6000938 - DNA, 25 bp, Homo sapien
tcacatgaaccaccattggagttga

SEQ ID NO: 6000939 - DNA, 25 bp, Homo sapien
cgatagaggcacttcgcaagggttc

SEQ ID NO: 6000940 - DNA, 25 bp, Homo sapien
agtatcgtgacgaggagaacatctt

SEQ ID NO: 6000941 - DNA, 25 bp, Homo sapien
gagaaaccgtcaaatccaatccgct

SEQ ID NO: 6000942 - DNA, 25 bp, Homo sapien
cactgaatgaagcgatagaggcact

SEQ ID NO: 6000943 - DNA, 25 bp, Homo sapien
ggcggtgaggttgctgccaatggag

SEQ ID NO: 6000944 - DNA, 25 bp, Homo sapien
gctatgactacactcttcagattac

SEQ ID NO: 6000945 - DNA, 25 bp, Homo sapien
attgtttagaaactacttccattat

SEQ ID NO: 6000946 - DNA, 25 bp, Homo sapien
ctacttccattatcacataaagtgc

SEQ ID NO: 6000947 - DNA, 25 bp, Homo sapien
tacacttacaaccacaaaaccttct

SEQ ID NO: 6000948 - DNA, 25 bp, Homo sapien
aaagcttgggtaagtgtctctgagt

SEQ ID NO: 6000949 - DNA, 25 bp, Homo sapien
gaagatttatcacgtttgttctttt

SEQ ID NO: 6000950 - DNA, 25 bp, Homo sapien
ccaaggtggacgaagatgatgaaaa

SEQ ID NO: 6000951 - DNA, 25 bp, Homo sapien
tcacataaagtgctctaaagcctac

SEQ ID NO: 6000952 - DNA, 25 bp, Homo sapien
agcaaccggcacctgtcgaagcaga

SEQ ID NO: 6000953 - DNA, 25 bp, Homo sapien
tgggtaagtgtctctgagtgccaat

SEQ ID NO: 6000954 - DNA, 25 bp, Homo sapien
tggactcgttcatcaaagtcttaaa

SEQ ID NO: 6000955 - DNA, 25 bp, Homo sapien
aaccttcaccggtagaaagattgtc

SEQ ID NO: 6000956 - DNA, 25 bp, Homo sapien
tgccaatggagacaacactttgttc

SEQ ID NO: 6000957 - DNA, 25 bp, Homo sapien
acaagaattcgtggatgcacgtaag

SEQ ID NO: 6000958 - DNA, 25 bp, Homo sapien
tagaagatttatcacgtttgttctt

SEQ ID NO: 6000959 - DNA, 25 bp, Homo sapien
gaagaccattatattgagttttccc

SEQ ID NO: 6000960 - DNA, 25 bp, Homo sapien
ggttcgccgttgaccatggacagaa

SEQ ID NO: 6000961 - DNA, 25 bp, Homo sapien
gacaacactttgttcacaatcaagt

SEQ ID NO: 6000962 - DNA, 25 bp, Homo sapien
catggacagaattgtttccgatttc

SEQ ID NO: 6000963 - DNA, 25 bp, Homo sapien
gcacgtaagagaaaccgtcaaatcc

SEQ ID NO: 6000964 - DNA, 25 bp, Homo sapien
agtcttaaatagagccaaggtggac

SEQ ID NO: 6000965 - DNA, 25 bp, Homo sapien
gaatcgattttacaactgtctgttt

SEQ ID NO: 6000966 - DNA, 25 bp, Homo sapien
agaggcacttcgcaagggttcgccg

SEQ ID NO: 6000967 - DNA, 25 bp, Homo sapien
cttacaaccacaaaaccttctcatc

SEQ ID NO: 6000968 - DNA, 25 bp, Homo sapien
cctacatgcactccagaatgagatt

SEQ ID NO: 6000969 - DNA, 25 bp, Homo sapien
gactatatcaaccacctaaagttgc

SEQ ID NO: 6000970 - DNA, 25 bp, Homo sapien
tgtttccgatttcgactataccacc

SEQ ID NO: 6000971 - DNA, 25 bp, Homo sapien
agacgaaacagataaaatttttggc

SEQ ID NO: 6000972 - DNA, 25 bp, Homo sapien
ttttacaagaattcgtggatgcacg

SEQ ID NO: 6000973 - DNA, 25 bp, Homo sapien
cattatattgagttttcccttcgaa

SEQ ID NO: 6000974 - DNA, 25 bp, Homo sapien
ctggcggtgaggttgctgccaatgg

SEQ ID NO: 6000975 - DNA, 25 bp, Homo sapien
agttttatactcacatgaaccacca

SEQ ID NO: 6000976 - DNA, 25 bp, Homo sapien
agtagaagatttatcacgtttgttc

SEQ ID NO: 6000977 - DNA, 25 bp, Homo sapien
agaaattactggcggtgaggttgct

SEQ ID NO: 6000978 - DNA, 25 bp, Homo sapien
gatgaaaatgatgaattgagtgcag

SEQ ID NO: 6000979 - DNA, 25 bp, Homo sapien
tcttaaatagagccaaggtggacga

SEQ ID NO: 6000980 - DNA, 25 bp, Homo sapien
gacggttctttgacgttactgaagt

SEQ ID NO: 6000981 - DNA, 25 bp, Homo sapien
tttttggcaaggtctttttacaaga

SEQ ID NO: 6000982 - DNA, 25 bp, Homo sapien
tgttaagaccaaagcttgggtaagt

SEQ ID NO: 6000983 - DNA, 25 bp, Homo sapien
atttcgaagtttattgaactaagcc

SEQ ID NO: 6000984 - DNA, 25 bp, Homo sapien
atcacgtttgttcttttcccacgtc

SEQ ID NO: 6000985 - DNA, 25 bp, Homo sapien
aaagtgctctaaagcctacatgcac

SEQ ID NO: 6000986 - DNA, 25 bp, Homo sapien
gtgaggttgctgccaatggagacaa

SEQ ID NO: 6000987 - DNA, 25 bp, Homo sapien
ctgaatgaagcgatagaggcacttc

SEQ ID NO: 6000988 - DNA, 25 bp, Homo sapien
gggtgactatcccaagtgaagtgga

SEQ ID NO: 6000989 - DNA, 25 bp, Homo sapien
acgtaagagaaaccgtcaaatccaa

SEQ ID NO: 6000990 - DNA, 25 bp, Homo sapien
aatgagattcagagtggactcgttc

SEQ ID NO: 6000991 - DNA, 25 bp, Homo sapien
ctatatcaaccacctaaagttgcag

SEQ ID NO: 6000992 - DNA, 25 bp, Homo sapien
agagttaccataatcttcgagacta

SEQ ID NO: 6000993 - DNA, 25 bp, Homo sapien
agcccggctatgactacactcttca

SEQ ID NO: 6000994 - DNA, 25 bp, Homo sapien
tgaagtttctggccgaccactactc

SEQ ID NO: 6000995 - DNA, 25 bp, Homo sapien
attcgtggatgcacgtaagagaaac

SEQ ID NO: 6000996 - DNA, 25 bp, Homo sapien
tctgagtgccaattggacggttctt

SEQ ID NO: 6000997 - DNA, 25 bp, Homo sapien
tgagtgttaagaccaaagcttgggt

SEQ ID NO: 6000998 - DNA, 25 bp, Homo sapien
ttgctgccaatggagacaacacttt

SEQ ID NO: 6000999 - DNA, 25 bp, Homo sapien
ccttcgaattggccatttcgaagtt

SEQ ID NO: 6001000 - DNA, 25 bp, Homo sapien
tacaactgtctgttttgaagaccat

SEQ ID NO: 6001001 - DNA, 25 bp, Homo sapien
cgatttcgactataccacctaccac

SEQ ID NO: 6001002 - DNA, 25 bp, Homo sapien
caagttttatactcacatgaaccac

SEQ ID NO: 6001003 - DNA, 25 bp, Homo sapien
caaaaccttctcatccaaaagacac

SEQ ID NO: 6001004 - DNA, 25 bp, Homo sapien
gagactatttttcaagacgaaacag

SEQ ID NO: 6001005 - DNA, 25 bp, Homo sapien
gagcaaagtagaagatttatcacgt

SEQ ID NO: 6001006 - DNA, 25 bp, Homo sapien
tgaccatggacagaattgtttccga

SEQ ID NO: 6001007 - DNA, 25 bp, Homo sapien
ccagaatgagattcagagtggactc

SEQ ID NO: 6001008 - DNA, 25 bp, Homo sapien
aaattactggcggtgaggttgctgc

SEQ ID NO: 6001009 - DNA, 25 bp, Homo sapien
gtcgaagcagaaattactggcggtg

SEQ ID NO: 6001010 - DNA, 25 bp, Homo sapien
gagacaacactttgttcacaatcaa

SEQ ID NO: 6001011 - DNA, 25 bp, Homo sapien
ccacctaccacatttcaaacacagc

SEQ ID NO: 6001012 - DNA, 25 bp, Homo sapien
ccgaccactactcctctttgggtgg

SEQ ID NO: 6001013 - DNA, 25 bp, Homo sapien
gttgaagagactatatcaaccacct

SEQ ID NO: 6001014 - DNA, 25 bp, Homo sapien
tatcacataaagtgctctaaagcct

SEQ ID NO: 6001015 - DNA, 25 bp, Homo sapien
ttcccacgtcatttccagacaaaag

SEQ ID NO: 6001016 - DNA, 25 bp, Homo sapien
aagagttgcaattccattcaatttg

SEQ ID NO: 6001017 - DNA, 25 bp, Homo sapien
gaaactacttccattatcacataaa

SEQ ID NO: 6001018 - DNA, 25 bp, Homo sapien
tgagttttcccttcgaattggccat

SEQ ID NO: 6001019 - DNA, 25 bp, Homo sapien
gttgcagagcaaagtagaagattta

SEQ ID NO: 6001020 - DNA, 25 bp, Homo sapien
ttccaatgacagagttaccataatc

SEQ ID NO: 6001021 - DNA, 25 bp, Homo sapien
aagacactgaatgaagcgatagagg

SEQ ID NO: 6001022 - DNA, 25 bp, Homo sapien
acaaaagagttgcaattccattcaa

SEQ ID NO: 6001023 - DNA, 25 bp, Homo sapien
agattacgttggccgaattggttca

SEQ ID NO: 6001024 - DNA, 25 bp, Homo sapien
tttagaaactacttccattatcaca

SEQ ID NO: 6001025 - DNA, 25 bp, Homo sapien
tttggcaaggtctttttacaagaat

SEQ ID NO: 6001026 - DNA, 25 bp, Homo sapien
ccaatgacagagttaccataatctt

SEQ ID NO: 6001027 - DNA, 25 bp, Homo sapien
gttaacattgtttagaaactacttc

SEQ ID NO: 6001028 - DNA, 25 bp, Homo sapien
aaaccttctcatccaaaagacactg

SEQ ID NO: 6001029 - DNA, 25 bp, Homo sapien
caaccacaaaaccttctcatccaaa

SEQ ID NO: 6001030 - DNA, 25 bp, Homo sapien
gtttattgaactaagccagcagcaa

SEQ ID NO: 6001031 - DNA, 25 bp, Homo sapien
ctaagccagcagcaaccggcacctg

SEQ ID NO: 6001032 - DNA, 25 bp, Homo sapien
ggcaagaagaaccttcaccggtaga

SEQ ID NO: 6001033 - DNA, 25 bp, Homo sapien
tgaagtggagcccggctatgactac

SEQ ID NO: 6001034 - DNA, 25 bp, Homo sapien
caccggtagaaagattgtctactag

SEQ ID NO: 6001035 - DNA, 25 bp, Homo sapien
tcgtggatgcacgtaagagaaaccg

SEQ ID NO: 6001036 - DNA, 25 bp, Homo sapien
tcatttccagacaaaagagttgcaa

SEQ ID NO: 6001037 - DNA, 25 bp, Homo sapien
gttcaagaatcgattttacaactgt

SEQ ID NO: 6001038 - DNA, 25 bp, Homo sapien
cacaatcaagtatcgtgacgaggag

SEQ ID NO: 6001039 - DNA, 25 bp, Homo sapien
atttcgactataccacctaccacat

SEQ ID NO: 6001040 - DNA, 25 bp, Homo sapien
cgaagcagaaattactggcggtgag

SEQ ID NO: 6001041 - DNA, 25 bp, Homo sapien
attggttcaagaatcgattttacaa

SEQ ID NO: 6001042 - DNA, 25 bp, Homo sapien
attacgttggccgaattggttcaag

SEQ ID NO: 6001043 - DNA, 25 bp, Homo sapien
gtaagagaaaccgtcaaatccaatc

SEQ ID NO: 6001044 - DNA, 25 bp, Homo sapien
ttcacaatcaagtatcgtgacgagg

SEQ ID NO: 6001045 - DNA, 25 bp, Homo sapien
agtgcagaaggcagacaacaggcaa

SEQ ID NO: 6001046 - DNA, 25 bp, Homo sapien
ctaaagcctacatgcactccagaat

SEQ ID NO: 6001047 - DNA, 25 bp, Homo sapien
tcatccaaaagacactgaatgaagc

SEQ ID NO: 6001048 - DNA, 25 bp, Homo sapien
tacgttggccgaattggttcaagaa

SEQ ID NO: 6001049 - DNA, 25 bp, Homo sapien
aaccgtcaaatccaatccgctccac

SEQ ID NO: 6001050 - DNA, 25 bp, Homo sapien
atgctacacttacaaccacaaaacc

SEQ ID NO: 6001051 - DNA, 25 bp, Homo sapien
gactcgttcatcaaagtcttaaata

SEQ ID NO: 6001052 - DNA, 25 bp, Homo sapien
gacgttactgaagtttctggccgac

SEQ ID NO: 6001053 - DNA, 25 bp, Homo sapien
ctcttcagattacgttggccgaatt

SEQ ID NO: 6001054 - DNA, 25 bp, Homo sapien
atccgctccacaagttttatactca

SEQ ID NO: 6001055 - DNA, 25 bp, Homo sapien
aaaagacactgaatgaagcgataga

SEQ ID NO: 6001056 - DNA, 25 bp, Homo sapien
acgaaacagataaaatttttggcaa

SEQ ID NO: 6001057 - DNA, 25 bp, Homo sapien
tgcactccagaatgagattcagagt

SEQ ID NO: 6001058 - DNA, 25 bp, Homo sapien
acatgaaccaccattggagttgaag

SEQ ID NO: 6001059 - DNA, 25 bp, Homo sapien
tataccacctaccacatttcaaaca

SEQ ID NO: 6001060 - DNA, 25 bp, Homo sapien
ccgaattggttcaagaatcgatttt

SEQ ID NO: 6001061 - DNA, 25 bp, Homo sapien
tgactacactcttcagattacgttg

SEQ ID NO: 6001062 - DNA, 25 bp, Homo sapien
attgtttccgatttcgactatacca

SEQ ID NO: 6001063 - DNA, 25 bp, Homo sapien
tggggtgactatcccaagtgaagtg

SEQ ID NO: 6001064 - DNA, 25 bp, Homo sapien
aaagtagaagatttatcacgtttgt

SEQ ID NO: 6001065 - DNA, 25 bp, Homo sapien
ttgttgagtgttaagaccaaagctt

SEQ ID NO: 6001066 - DNA, 25 bp, Homo sapien
tttgttcacaatcaagtatcgtgac

SEQ ID NO: 6001067 - DNA, 25 bp, Homo sapien
cttcagattacgttggccgaattgg

SEQ ID NO: 6001068 - DNA, 25 bp, Homo sapien
ggatgcacgtaagagaaaccgtcaa

SEQ ID NO: 6001069 - DNA, 25 bp, Homo sapien
ccaaaagacactgaatgaagcgata

SEQ ID NO: 6001070 - DNA, 25 bp, Homo sapien
atttttcaagacgaaacagataaaa

SEQ ID NO: 6001071 - DNA, 25 bp, Homo sapien
aagaccaaagcttgggtaagtgtct

SEQ ID NO: 6001072 - DNA, 25 bp, Homo sapien
ggccatttcgaagtttattgaacta

SEQ ID NO: 6001073 - DNA, 25 bp, Homo sapien
tgagattcagagtggactcgttcat

SEQ ID NO: 6001074 - DNA, 25 bp, Homo sapien
gaaacagataaaatttttggcaagg

SEQ ID NO: 6001075 - DNA, 25 bp, Homo sapien
tcagattacgttggccgaattggtt

SEQ ID NO: 6001076 - DNA, 25 bp, Homo sapien
tctgttttgaagaccattatattga

SEQ ID NO: 6001077 - DNA, 25 bp, Homo sapien
accacaaaaccttctcatccaaaag

SEQ ID NO: 6001078 - DNA, 25 bp, Homo sapien
atatcaaccacctaaagttgcagag

SEQ ID NO: 6001079 - DNA, 25 bp, Homo sapien
aagaattcgtggatgcacgtaagag

SEQ ID NO: 6001080 - DNA, 25 bp, Homo sapien
attgagtgcagaaggcagacaacag

SEQ ID NO: 6001081 - DNA, 25 bp, Homo sapien
caagtgaagtggagcccggctatga

SEQ ID NO: 6001082 - DNA, 25 bp, Homo sapien
tttcaaacacagcagaagataagtc

SEQ ID NO: 6001083 - DNA, 25 bp, Homo sapien
aagccagcagcaaccggcacctgtc

SEQ ID NO: 6001084 - DNA, 25 bp, Homo sapien
gccagcagcaaccggcacctgtcga

SEQ ID NO: 6001085 - DNA, 25 bp, Homo sapien
cattcaatttgccagttaacattgt

SEQ ID NO: 6001086 - DNA, 25 bp, Homo sapien
attccattcaatttgccagttaaca

SEQ ID NO: 6001087 - DNA, 25 bp, Homo sapien
catgcactccagaatgagattcaga

SEQ ID NO: 6001088 - DNA, 25 bp, Homo sapien
gtctttttacaagaattcgtggatg

SEQ ID NO: 6001089 - DNA, 25 bp, Homo sapien
gctacacttacaaccacaaaacctt

SEQ ID NO: 6001090 - DNA, 25 bp, Homo sapien
gcaaagtagaagatttatcacgttt

SEQ ID NO: 6001091 - DNA, 25 bp, Homo sapien
aagtccattctgttgttgagtgtta

SEQ ID NO: 6001092 - DNA, 25 bp, Homo sapien
tgaaaatgatgaattgagtgcagaa

SEQ ID NO: 6001093 - DNA, 25 bp, Homo sapien
ggtggacgaagatgatgaaaatgat

SEQ ID NO: 6001094 - DNA, 25 bp, Homo sapien
gaattgagtgcagaaggcagacaac

SEQ ID NO: 6001095 - DNA, 25 bp, Homo sapien
tgggtggggtgactatcccaagtga

SEQ ID NO: 6001096 - DNA, 25 bp, Homo sapien
tgctctaaagcctacatgcactcca

SEQ ID NO: 6001097 - DNA, 25 bp, Homo sapien
cactcttcagattacgttggccgaa

SEQ ID NO: 6001098 - DNA, 25 bp, Homo sapien
gcagaaattactggcggtgaggttg

SEQ ID NO: 6001099 - DNA, 25 bp, Homo sapien
ttattgaactaagccagcagcaacc

SEQ ID NO: 6001100 - DNA, 25 bp, Homo sapien
agtgccaattggacggttctttgac

SEQ ID NO: 6001101 - DNA, 25 bp, Homo sapien
gaagcgatagaggcacttcgcaagg

SEQ ID NO: 6001102 - DNA, 25 bp, Homo sapien
gcagacaacaggcaagaagaacctt

SEQ ID NO: 6001103 - DNA, 25 bp, Homo sapien
ttacaagaattcgtggatgcacgta

SEQ ID NO: 6001104 - DNA, 25 bp, Homo sapien
tgaactaagccagcagcaaccggca

SEQ ID NO: 6001105 - DNA, 25 bp, Homo sapien
atgaagcgatagaggcacttcgcaa

SEQ ID NO: 6001106 - DNA, 25 bp, Homo sapien
gtggatgcacgtaagagaaaccgtc

SEQ ID NO: 6001107 - DNA, 25 bp, Homo sapien
gcacttcgcaagggttcgccgttga

SEQ ID NO: 6001108 - DNA, 25 bp, Homo sapien
tacaaccacaaaaccttctcatcca

SEQ ID NO: 6001109 - DNA, 25 bp, Homo sapien
acataaagtgctctaaagcctacat

SEQ ID NO: 6001110 - DNA, 25 bp, Homo sapien
cggcacctgtcgaagcagaaattac

SEQ ID NO: 6001111 - DNA, 25 bp, Homo sapien
agttaccataatcttcgagactatt

SEQ ID NO: 6001112 - DNA, 25 bp, Homo sapien
tgagtgcagaaggcagacaacaggc

SEQ ID NO: 6001113 - DNA, 25 bp, Homo sapien
acagcagaagataagtccattctgt

SEQ ID NO: 6001114 - DNA, 25 bp, Homo sapien
atgaaccaccattggagttgaagag

SEQ ID NO: 6001115 - DNA, 25 bp, Homo sapien
agtgttaagaccaaagcttgggtaa

SEQ ID NO: 6001116 - DNA, 25 bp, Homo sapien
tcagagtggactcgttcatcaaagt

SEQ ID NO: 6001117 - DNA, 25 bp, Homo sapien
ccgtcaaatccaatccgctccacaa

SEQ ID NO: 6001118 - DNA, 25 bp, Homo sapien
ttccattatcacataaagtgctcta

SEQ ID NO: 6001119 - DNA, 25 bp, Homo sapien
ttggccatttcgaagtttattgaac

SEQ ID NO: 6001120 - DNA, 25 bp, Homo sapien
ccaatggagacaacactttgttcac

SEQ ID NO: 6001121 - DNA, 25 bp, Homo sapien
tttcaagacgaaacagataaaattt

SEQ ID NO: 6001122 - DNA, 25 bp, Homo sapien
caaccggcacctgtcgaagcagaaa

SEQ ID NO: 6001123 - DNA, 25 bp, Homo sapien
aactaagccagcagcaaccggcacc

SEQ ID NO: 6001124 - DNA, 25 bp, Homo sapien
tagaaactacttccattatcacata

SEQ ID NO: 6001125 - DNA, 25 bp, Homo sapien
agtgctctaaagcctacatgcactc

SEQ ID NO: 6001126 - DNA, 25 bp, Homo sapien
ggccgaattggttcaagaatcgatt

SEQ ID NO: 6001127 - DNA, 25 bp, Homo sapien
accatggacagaattgtttccgatt

SEQ ID NO: 6001128 - DNA, 25 bp, Homo sapien
ttcgcaagggttcgccgttgaccat

SEQ ID NO: 6001129 - DNA, 25 bp, Homo sapien
attatcacataaagtgctctaaagc

SEQ ID NO: 6001130 - DNA, 25 bp, Homo sapien
gaattggttcaagaatcgattttac

SEQ ID NO: 6001131 - DNA, 25 bp, Homo sapien
gaagataagtccattctgttgttga

SEQ ID NO: 6001132 - DNA, 25 bp, Homo sapien
ctaccacatttcaaacacagcagaa

SEQ ID NO: 6001133 - DNA, 25 bp, Homo sapien
cataatcttcgagactatttttcaa

SEQ ID NO: 6001134 - DNA, 25 bp, Homo sapien
ttatattgagttttcccttcgaatt

SEQ ID NO: 6001135 - DNA, 25 bp, Homo sapien
cgaggagaacatcttcatcaaacct

SEQ ID NO: 6001136 - DNA, 25 bp, Homo sapien
accacatttcaaacacagcagaaga

SEQ ID NO: 6001137 - DNA, 25 bp, Homo sapien
actataccacctaccacatttcaaa

SEQ ID NO: 6001138 - DNA, 25 bp, Homo sapien
tggttcaagaatcgattttacaact

SEQ ID NO: 6001139 - DNA, 25 bp, Homo sapien
ctttgacgttactgaagtttctggc

SEQ ID NO: 6001140 - DNA, 25 bp, Homo sapien
atcgattttacaactgtctgttttg

SEQ ID NO: 6001141 - DNA, 25 bp, Homo sapien
atcccaagtgaagtggagcccggct

SEQ ID NO: 6001142 - DNA, 25 bp, Homo sapien
tgagtgccaattggacggttctttg

SEQ ID NO: 6001143 - DNA, 25 bp, Homo sapien
agtggactcgttcatcaaagtctta

SEQ ID NO: 6001144 - DNA, 25 bp, Homo sapien
cccggctatgactacactcttcaga

SEQ ID NO: 6001145 - DNA, 25 bp, Homo sapien
acaacaggcaagaagaaccttcacc

SEQ ID NO: 6001146 - DNA, 25 bp, Homo sapien
gtcaaatccaatccgctccacaagt

SEQ ID NO: 6001147 - DNA, 25 bp, Homo sapien
ttcgactataccacctaccacattt

SEQ ID NO: 6001148 - DNA, 25 bp, Homo sapien
ctgtcgaagcagaaattactggcgg

SEQ ID NO: 6001149 - DNA, 25 bp, Homo sapien
ttcaatttgccagttaacattgttt

SEQ ID NO: 6001150 - DNA, 25 bp, Homo sapien
attggagttgaagagactatatcaa

SEQ ID NO: 6001151 - DNA, 25 bp, Homo sapien
gcaaggtctttttacaagaattcgt

SEQ ID NO: 6001152 - DNA, 25 bp, Homo sapien
acttccattatcacataaagtgctc

SEQ ID NO: 6001153 - DNA, 25 bp, Homo sapien
tgttcacaatcaagtatcgtgacga

SEQ ID NO: 6001154 - DNA, 25 bp, Homo sapien
cgcaagggttcgccgttgaccatgg

SEQ ID NO: 6001155 - DNA, 25 bp, Homo sapien
ctccagaatgagattcagagtggac

SEQ ID NO: 6001156 - DNA, 25 bp, Homo sapien
taccacctaccacatttcaaacaca

SEQ ID NO: 6001157 - DNA, 25 bp, Homo sapien
catcaaagtcttaaatagagccaag

SEQ ID NO: 6001158 - DNA, 25 bp, Homo sapien
tggacgaagatgatgaaaatgatga

SEQ ID NO: 6001159 - DNA, 25 bp, Homo sapien
actgaagtttctggccgaccactac

SEQ ID NO: 6001160 - DNA, 25 bp, Homo sapien
aatggagacaacactttgttcacaa

SEQ ID NO: 6001161 - DNA, 25 bp, Homo sapien
cgttcatcaaagtcttaaatagagc

SEQ ID NO: 6001162 - DNA, 25 bp, Homo sapien
ccgctccacaagttttatactcaca

SEQ ID NO: 6001163 - DNA, 25 bp, Homo sapien
atttgccagttaacattgtttagaa

SEQ ID NO: 6001164 - DNA, 25 bp, Homo sapien
tgacagagttaccataatcttcgag

SEQ ID NO: 6001165 - DNA, 25 bp, Homo sapien
attcagagtggactcgttcatcaaa

SEQ ID NO: 6001166 - DNA, 25 bp, Homo sapien
acatcttcatcaaaccttccaatga

SEQ ID NO: 6001167 - DNA, 25 bp, Homo sapien
atccaaaagacactgaatgaagcga

SEQ ID NO: 6001168 - DNA, 25 bp, Homo sapien
gacgaggagaacatcttcatcaaac

SEQ ID NO: 6001169 - DNA, 25 bp, Homo sapien
cagcagcaaccggcacctgtcgaag

SEQ ID NO: 6001170 - DNA, 25 bp, Homo sapien
tgtttagaaactacttccattatca

SEQ ID NO: 6001171 - DNA, 25 bp, Homo sapien
atttccagacaaaagagttgcaatt

SEQ ID NO: 6001172 - DNA, 25 bp, Homo sapien
tttacaactgtctgttttgaagacc

SEQ ID NO: 6001173 - DNA, 25 bp, Homo sapien
tggacggttctttgacgttactgaa

SEQ ID NO: 6001174 - DNA, 25 bp, Homo sapien
aagagactatatcaaccacctaaag

SEQ ID NO: 6001175 - DNA, 25 bp, Homo sapien
agatttatcacgtttgttcttttcc

SEQ ID NO: 6001176 - DNA, 25 bp, Homo sapien
agcctacatgcactccagaatgaga

SEQ ID NO: 6001177 - DNA, 25 bp, Homo sapien
tttccgatttcgactataccaccta

SEQ ID NO: 6001178 - DNA, 25 bp, Homo sapien
cgtcatttccagacaaaagagttgc

SEQ ID NO: 6001179 - DNA, 25 bp, Homo sapien
agaagaaccttcaccggtagaaaga

SEQ ID NO: 6001180 - DNA, 25 bp, Homo sapien
ctatttttcaagacgaaacagataa

SEQ ID NO: 6001181 - DNA, 25 bp, Homo sapien
ttaagaccaaagcttgggtaagtgt

SEQ ID NO: 6001182 - DNA, 25 bp, Homo sapien
attactggcggtgaggttgctgcca

SEQ ID NO: 6001183 - DNA, 25 bp, Homo sapien
gaccactactcctctttgggtgggg

SEQ ID NO: 6001184 - DNA, 25 bp, Homo sapien
taagtgtctctgagtgccaattgga

SEQ ID NO: 6001185 - DNA, 25 bp, Homo sapien
ctctaaagcctacatgcactccaga

SEQ ID NO: 6001186 - DNA, 25 bp, Homo sapien
ttgttcttttcccacgtcatttcca

SEQ ID NO: 6001187 - DNA, 25 bp, Homo sapien
acattgtttagaaactacttccatt

SEQ ID NO: 6001188 - DNA, 25 bp, Homo sapien
aaaatgatgaattgagtgcagaagg

SEQ ID NO: 6001189 - DNA, 25 bp, Homo sapien
aactacttccattatcacataaagt

SEQ ID NO: 6001190 - DNA, 25 bp, Homo sapien
ctcgttcatcaaagtcttaaataga

SEQ ID NO: 6001191 - DNA, 25 bp, Homo sapien
gagttgaagagactatatcaaccac

SEQ ID NO: 6001192 - DNA, 25 bp, Homo sapien
agattcagagtggactcgttcatca

SEQ ID NO: 6001193 - DNA, 25 bp, Homo sapien
aaagtcttaaatagagccaaggtgg

SEQ ID NO: 6001194 - DNA, 25 bp, Homo sapien
ggtggggtgactatcccaagtgaag

SEQ ID NO: 6001195 - DNA, 25 bp, Homo sapien
caatcaagtatcgtgacgaggagaa

SEQ ID NO: 6001196 - DNA, 25 bp, Homo sapien
accattatattgagttttcccttcg

SEQ ID NO: 6001197 - DNA, 25 bp, Homo sapien
aaaagagttgcaattccattcaatt

SEQ ID NO: 6001198 - DNA, 25 bp, Homo sapien
caagtatcgtgacgaggagaacatc

SEQ ID NO: 6001199 - DNA, 25 bp, Homo sapien
aagagaaaccgtcaaatccaatccg

SEQ ID NO: 6001200 - DNA, 25 bp, Homo sapien
ccatttcgaagtttattgaactaag

SEQ ID NO: 6001201 - DNA, 25 bp, Homo sapien
ccattggagttgaagagactatatc

SEQ ID NO: 6001202 - DNA, 25 bp, Homo sapien
cacaaaaccttctcatccaaaagac

SEQ ID NO: 6001203 - DNA, 25 bp, Homo sapien
caagggttcgccgttgaccatggac

SEQ ID NO: 6001204 - DNA, 25 bp, Homo sapien
ttgaagaccattatattgagttttc

SEQ ID NO: 6001205 - DNA, 25 bp, Homo sapien
ttcaccggtagaaagattgtctact

SEQ ID NO: 6001206 - DNA, 25 bp, Homo sapien
tctgttgttgagtgttaagaccaaa

SEQ ID NO: 6001207 - DNA, 25 bp, Homo sapien
agaatgagattcagagtggactcgt

SEQ ID NO: 6001208 - DNA, 25 bp, Homo sapien
caccattggagttgaagagactata

SEQ ID NO: 6001209 - DNA, 25 bp, Homo sapien
gctgccaatggagacaacactttgt

SEQ ID NO: 6001210 - DNA, 25 bp, Homo sapien
agcgatagaggcacttcgcaagggt

SEQ ID NO: 6001211 - DNA, 25 bp, Homo sapien
gaggttgctgccaatggagacaaca

SEQ ID NO: 6001212 - DNA, 25 bp, Homo sapien
ttcgaattggccatttcgaagttta

SEQ ID NO: 6001213 - DNA, 25 bp, Homo sapien
tgttgttgagtgttaagaccaaagc

SEQ ID NO: 6001214 - DNA, 25 bp, Homo sapien
atcaaaccttccaatgacagagtta

SEQ ID NO: 6001215 - DNA, 25 bp, Homo sapien
agccaaggtggacgaagatgatgaa

SEQ ID NO: 6001216 - DNA, 25 bp, Homo sapien
aagtggagcccggctatgactacac

SEQ ID NO: 6001217 - DNA, 25 bp, Homo sapien
ccttccaatgacagagttaccataa

SEQ ID NO: 6001218 - DNA, 25 bp, Homo sapien
gagactatatcaaccacctaaagtt

SEQ ID NO: 6001219 - DNA, 25 bp, Homo sapien
acctgtcgaagcagaaattactggc

SEQ ID NO: 6001220 - DNA, 25 bp, Homo sapien
actttgttcacaatcaagtatcgtg

SEQ ID NO: 6001221 - DNA, 25 bp, Homo sapien
cgactataccacctaccacatttca

SEQ ID NO: 6001222 - DNA, 25 bp, Homo sapien
cacctaaagttgcagagcaaagtag

SEQ ID NO: 6001223 - DNA, 25 bp, Homo sapien
agcagaagataagtccattctgttg

SEQ ID NO: 6001224 - DNA, 25 bp, Homo sapien
gctccacaagttttatactcacatg

SEQ ID NO: 6001225 - DNA, 25 bp, Homo sapien
gaatgaagcgatagaggcacttcgc

SEQ ID NO: 6001226 - DNA, 25 bp, Homo sapien
cagaattgtttccgatttcgactat

SEQ ID NO: 6001227 - DNA, 25 bp, Homo sapien
atattgagttttcccttcgaattgg

SEQ ID NO: 6001228 - DNA, 25 bp, Homo sapien
agtgaagtggagcccggctatgact

SEQ ID NO: 6001229 - DNA, 25 bp, Homo sapien
tgcaattccattcaatttgccagtt

SEQ ID NO: 6001230 - DNA, 25 bp, Homo sapien
ggtaagtgtctctgagtgccaattg

SEQ ID NO: 6001231 - DNA, 25 bp, Homo sapien
cacatttcaaacacagcagaagata

SEQ ID NO: 6001232 - DNA, 25 bp, Homo sapien
cagaaggcagacaacaggcaagaag

SEQ ID NO: 6001233 - DNA, 25 bp, Homo sapien
tcaagacgaaacagataaaattttt

SEQ ID NO: 6001234 - DNA, 25 bp, Homo sapien
taacattgtttagaaactacttcca

SEQ ID NO: 6001235 - DNA, 25 bp, Homo sapien
aagcagaaattactggcggtgaggt

SEQ ID NO: 6001236 - DNA, 25 bp, Homo sapien
ttcgccgttgaccatggacagaatt

SEQ ID NO: 6001237 - DNA, 25 bp, Homo sapien
actcacatgaaccaccattggagtt

SEQ ID NO: 6001238 - DNA, 25 bp, Homo sapien
atttatcacgtttgttcttttccca

SEQ ID NO: 6001239 - DNA, 25 bp, Homo sapien
gttgaccatggacagaattgtttcc

SEQ ID NO: 6001240 - DNA, 25 bp, Homo sapien
caaaccttccaatgacagagttacc

SEQ ID NO: 6001241 - DNA, 25 bp, Homo sapien
tcaaagtcttaaatagagccaaggt

SEQ ID NO: 6001242 - DNA, 25 bp, Homo sapien
ttatactcacatgaaccaccattgg

SEQ ID NO: 6001243 - DNA, 25 bp, Homo sapien
gttgagtgttaagaccaaagcttgg

SEQ ID NO: 6001244 - DNA, 25 bp, Homo sapien
atagagccaaggtggacgaagatga

SEQ ID NO: 6001245 - DNA, 25 bp, Homo sapien
attgaactaagccagcagcaaccgg

SEQ ID NO: 6001246 - DNA, 25 bp, Homo sapien
cgaagtttattgaactaagccagca

SEQ ID NO: 6001247 - DNA, 25 bp, Homo sapien
accaccattggagttgaagagacta

SEQ ID NO: 6001248 - DNA, 25 bp, Homo sapien
tctttgggtggggtgactatcccaa

SEQ ID NO: 6001249 - DNA, 25 bp, Homo sapien
gaattcgtggatgcacgtaagagaa

SEQ ID NO: 6001250 - DNA, 25 bp, Homo sapien
tctctgagtgccaattggacggttc

SEQ ID NO: 6001251 - DNA, 25 bp, Homo sapien
ttactgaagtttctggccgaccact

SEQ ID NO: 6001252 - DNA, 25 bp, Homo sapien
aaacacagcagaagataagtccatt

SEQ ID NO: 6001253 - DNA, 25 bp, Homo sapien
gttgcaattccattcaatttgccag

SEQ ID NO: 6001254 - DNA, 25 bp, Homo sapien
ttcatcaaagtcttaaatagagcca

SEQ ID NO: 6001255 - DNA, 25 bp, Homo sapien
tggacagaattgtttccgatttcga

SEQ ID NO: 6001256 - DNA, 25 bp, Homo sapien
ctatcccaagtgaagtggagcccgg

SEQ ID NO: 6001257 - DNA, 25 bp, Homo sapien
ttaaatagagccaaggtggacgaag

SEQ ID NO: 6001258 - DNA, 25 bp, Homo sapien
agaaccttcaccggtagaaagattg

SEQ ID NO: 6001259 - DNA, 25 bp, Homo sapien
caacactttgttcacaatcaagtat

SEQ ID NO: 6001260 - DNA, 25 bp, Homo sapien
cttctcatccaaaagacactgaatg

SEQ ID NO: 6001261 - DNA, 25 bp, Homo sapien
agggttcgccgttgaccatggacag

SEQ ID NO: 6001262 - DNA, 25 bp, Homo sapien
cttcatcaaaccttccaatgacaga

SEQ ID NO: 6001263 - DNA, 25 bp, Homo sapien
tgttttgaagaccattatattgagt

SEQ ID NO: 6001264 - DNA, 25 bp, Homo sapien
aagaatcgattttacaactgtctgt

SEQ ID NO: 6001265 - DNA, 25 bp, Homo sapien
gtggagcccggctatgactacactc

SEQ ID NO: 6001266 - DNA, 25 bp, Homo sapien
caaccacctaaagttgcagagcaaa

SEQ ID NO: 6001267 - DNA, 25 bp, Homo sapien
aagtttctggccgaccactactcct

SEQ ID NO: 6001268 - DNA, 25 bp, Homo sapien
atagaggcacttcgcaagggttcgc

SEQ ID NO: 6001269 - DNA, 25 bp, Homo sapien
ccattatcacataaagtgctctaaa

SEQ ID NO: 6001270 - DNA, 25 bp, Homo sapien
cttcgagactatttttcaagacgaa

SEQ ID NO: 6001271 - DNA, 25 bp, Homo sapien
cccacgtcatttccagacaaaagag

SEQ ID NO: 6001272 - DNA, 25 bp, Homo sapien
atcaagtatcgtgacgaggagaaca

SEQ ID NO: 6001273 - DNA, 25 bp, Homo sapien
gactatttttcaagacgaaacagat

SEQ ID NO: 6001274 - DNA, 25 bp, Homo sapien
attggacggttctttgacgttactg

SEQ ID NO: 6001275 - DNA, 25 bp, Homo sapien
tccacaagttttatactcacatgaa

SEQ ID NO: 6001276 - DNA, 25 bp, Homo sapien
cagataaaatttttggcaaggtctt

SEQ ID NO: 6001277 - DNA, 25 bp, Homo sapien
ctcctctttgggtggggtgactatc

SEQ ID NO: 6001278 - DNA, 25 bp, Homo sapien
gacagaattgtttccgatttcgact

SEQ ID NO: 6001279 - DNA, 25 bp, Homo sapien
ttccagacaaaagagttgcaattcc

SEQ ID NO: 6001280 - DNA, 25 bp, Homo sapien
cacttacaaccacaaaaccttctca

SEQ ID NO: 6001281 - DNA, 25 bp, Homo sapien
gtgacgaggagaacatcttcatcaa

SEQ ID NO: 6001282 - DNA, 25 bp, Homo sapien
cctaaagttgcagagcaaagtagaa

SEQ ID NO: 6001283 - DNA, 25 bp, Homo sapien
taatcttcgagactatttttcaaga

SEQ ID NO: 6001284 - DNA, 25 bp, Homo sapien
agacaaaagagttgcaattccattc

SEQ ID NO: 6001285 - DNA, 25 bp, Homo sapien
ttatcacgtttgttcttttcccacg

SEQ ID NO: 6001286 - DNA, 25 bp, Homo sapien
cagagcaaagtagaagatttatcac

SEQ ID NO: 6001287 - DNA, 25 bp, Homo sapien
tcaaacacagcagaagataagtcca

SEQ ID NO: 6001288 - DNA, 25 bp, Homo sapien
cgttggccgaattggttcaagaatc

SEQ ID NO: 6001289 - DNA, 25 bp, Homo sapien
cacaagttttatactcacatgaacc

SEQ ID NO: 6001290 - DNA, 25 bp, Homo sapien
gactatcccaagtgaagtggagccc

SEQ ID NO: 6001291 - DNA, 25 bp, Homo sapien
caatccgctccacaagttttatact

SEQ ID NO: 6001292 - DNA, 25 bp, Homo sapien
ggttgctgccaatggagacaacact

SEQ ID NO: 6001293 - DNA, 25 bp, Homo sapien
acactttgttcacaatcaagtatcg

SEQ ID NO: 6001294 - DNA, 25 bp, Homo sapien
aagttgcagagcaaagtagaagatt

SEQ ID NO: 6001295 - DNA, 25 bp, Homo sapien
ttgacgttactgaagtttctggccg

SEQ ID NO: 6001296 - DNA, 25 bp, Homo sapien
aacaggcaagaagaaccttcaccgg

SEQ ID NO: 6001297 - DNA, 25 bp, Homo sapien
tcgtgacgaggagaacatcttcatc

SEQ ID NO: 6001298 - DNA, 25 bp, Homo sapien
caactgtctgttttgaagaccatta

SEQ ID NO: 6001299 - DNA, 25 bp, Homo sapien
cgattttacaactgtctgttttgaa

SEQ ID NO: 6001300 - DNA, 25 bp, Homo sapien
cacgtcatttccagacaaaagagtt

SEQ ID NO: 6001301 - DNA, 25 bp, Homo sapien
accttctcatccaaaagacactgaa

SEQ ID NO: 6001302 - DNA, 25 bp, Homo sapien
gtccattctgttgttgagtgttaag

SEQ ID NO: 6001303 - DNA, 25 bp, Homo sapien
atcaaccacctaaagttgcagagca

SEQ ID NO: 6001304 - DNA, 25 bp, Homo sapien
gaccaaagcttgggtaagtgtctct

SEQ ID NO: 6001305 - DNA, 25 bp, Homo sapien
gataaatcttctactttgctctgca

SEQ ID NO: 6001306 - DNA, 25 bp, Homo sapien
gtctcgaagattatggtaactctgt

SEQ ID NO: 6001307 - DNA, 25 bp, Homo sapien
agaatggacttatcttctgctgtgt

SEQ ID NO: 6001308 - DNA, 25 bp, Homo sapien
acgagtccactctgaatctcattct

SEQ ID NO: 6001309 - DNA, 25 bp, Homo sapien
cggccaacgtaatctgaagagtgta

SEQ ID NO: 6001310 - DNA, 25 bp, Homo sapien
aatagtctcgaagattatggtaact

SEQ ID NO: 6001311 - DNA, 25 bp, Homo sapien
catgtgagtataaaacttgtggagc

SEQ ID NO: 6001312 - DNA, 25 bp, Homo sapien
aattcgaagggaaaactcaatataa

SEQ ID NO: 6001313 - DNA, 25 bp, Homo sapien
gtcttttggatgagaaggttttgtg

SEQ ID NO: 6001314 - DNA, 25 bp, Homo sapien
tgccttctgcactcaattcatcatt

SEQ ID NO: 6001315 - DNA, 25 bp, Homo sapien
gaaaaatagtctcgaagattatggt

SEQ ID NO: 6001316 - DNA, 25 bp, Homo sapien
ttgacggtttctcttacgtgcatcc

SEQ ID NO: 6001317 - DNA, 25 bp, Homo sapien
tcgtccaccttggctctatttaaga

SEQ ID NO: 6001318 - DNA, 25 bp, Homo sapien
gtccaccttggctctatttaagact

SEQ ID NO: 6001319 - DNA, 25 bp, Homo sapien
gaagtgcctctatcgcttcattcag

SEQ ID NO: 6001320 - DNA, 25 bp, Homo sapien
tgttctcctcgtcacgatacttgat

SEQ ID NO: 6001321 - DNA, 25 bp, Homo sapien
taagactttgatgaacgagtccact

SEQ ID NO: 6001322 - DNA, 25 bp, Homo sapien
cattttcatcatcttcgtccacctt

SEQ ID NO: 6001323 - DNA, 25 bp, Homo sapien
aaggttttgtggttgtaagtgtagc

SEQ ID NO: 6001324 - DNA, 25 bp, Homo sapien
aaaatcgattcttgaaccaattcgg

SEQ ID NO: 6001325 - DNA, 25 bp, Homo sapien
tccacttcacttgggatagtcaccc

SEQ ID NO: 6001326 - DNA, 25 bp, Homo sapien
gtcaaagaaccgtccaattggcact

SEQ ID NO: 6001327 - DNA, 25 bp, Homo sapien
gaacaaagtgttgtctccattggca

SEQ ID NO: 6001328 - DNA, 25 bp, Homo sapien
tcacttgggatagtcaccccaccca

SEQ ID NO: 6001329 - DNA, 25 bp, Homo sapien
caaaacagacagttgtaaaatcgat

SEQ ID NO: 6001330 - DNA, 25 bp, Homo sapien
gcgaacccttgcgaagtgcctctat

SEQ ID NO: 6001331 - DNA, 25 bp, Homo sapien
agagacacttacccaagctttggtc

SEQ ID NO: 6001332 - DNA, 25 bp, Homo sapien
cttcaactccaatggtggttcatgt

SEQ ID NO: 6001333 - DNA, 25 bp, Homo sapien
tggcactcagagacacttacccaag

SEQ ID NO: 6001334 - DNA, 25 bp, Homo sapien
gtttctaaacaatgttaactggcaa

SEQ ID NO: 6001335 - DNA, 25 bp, Homo sapien
ccaccttggctctatttaagacttt

SEQ ID NO: 6001336 - DNA, 25 bp, Homo sapien
tagtttctaaacaatgttaactggc

SEQ ID NO: 6001337 - DNA, 25 bp, Homo sapien
tcaacaacagaatggacttatcttc

SEQ ID NO: 6001338 - DNA, 25 bp, Homo sapien
ccgggctccacttcacttgggatag

SEQ ID NO: 6001339 - DNA, 25 bp, Homo sapien
gtagtcatagccgggctccacttca

SEQ ID NO: 6001340 - DNA, 25 bp, Homo sapien
cgatacttgattgtgaacaaagtgt

SEQ ID NO: 6001341 - DNA, 25 bp, Homo sapien
gacaatctttctaccggtgaaggtt

SEQ ID NO: 6001342 - DNA, 25 bp, Homo sapien
cggccagaaacttcagtaacgtcaa

SEQ ID NO: 6001343 - DNA, 25 bp, Homo sapien
tgggaaaagaacaaacgtgataaat

SEQ ID NO: 6001344 - DNA, 25 bp, Homo sapien
actctgaatctcattctggagtgca

SEQ ID NO: 6001345 - DNA, 25 bp, Homo sapien
gtaggctttagagcactttatgtga

SEQ ID NO: 6001346 - DNA, 25 bp, Homo sapien
acaaagtgttgtctccattggcagc

SEQ ID NO: 6001347 - DNA, 25 bp, Homo sapien
tctgccttctgcactcaattcatca

SEQ ID NO: 6001348 - DNA, 25 bp, Homo sapien
ccccacccaaagaggagtagtggtc

SEQ ID NO: 6001349 - DNA, 25 bp, Homo sapien
ttcattcagtgtcttttggatgaga

SEQ ID NO: 6001350 - DNA, 25 bp, Homo sapien
atgaacgagtccactctgaatctca

SEQ ID NO: 6001351 - DNA, 25 bp, Homo sapien
atggccaattcgaagggaaaactca

SEQ ID NO: 6001352 - DNA, 25 bp, Homo sapien
ccattggcagcaacctcaccgccag

SEQ ID NO: 6001353 - DNA, 25 bp, Homo sapien
ctggcaaattgaatggaattgcaac

SEQ ID NO: 6001354 - DNA, 25 bp, Homo sapien
atcttcgtccaccttggctctattt

SEQ ID NO: 6001355 - DNA, 25 bp, Homo sapien
tgcttcgacaggtgccggttgctgc

SEQ ID NO: 6001356 - DNA, 25 bp, Homo sapien
gctccacttcacttgggatagtcac

SEQ ID NO: 6001357 - DNA, 25 bp, Homo sapien
tcttgcctgttgtctgccttctgca

SEQ ID NO: 6001358 - DNA, 25 bp, Homo sapien
gtttgatgaagatgttctcctcgtc

SEQ ID NO: 6001359 - DNA, 25 bp, Homo sapien
ccactctgaatctcattctggagtg

SEQ ID NO: 6001360 - DNA, 25 bp, Homo sapien
gctgtgtttgaaatgtggtaggtgg

SEQ ID NO: 6001361 - DNA, 25 bp, Homo sapien
ttcagtgtcttttggatgagaaggt

SEQ ID NO: 6001362 - DNA, 25 bp, Homo sapien
ggtaactctgtcattggaaggtttg

SEQ ID NO: 6001363 - DNA, 25 bp, Homo sapien
tggagtgcatgtaggctttagagca

SEQ ID NO: 6001364 - DNA, 25 bp, Homo sapien
ggttgctgctggcttagttcaataa

SEQ ID NO: 6001365 - DNA, 25 bp, Homo sapien
ctactttgctctgcaactttaggtg

SEQ ID NO: 6001366 - DNA, 25 bp, Homo sapien
cgaagggaaaactcaatataatggt

SEQ ID NO: 6001367 - DNA, 25 bp, Homo sapien
gaaacttcagtaacgtcaaagaacc

SEQ ID NO: 6001368 - DNA, 25 bp, Homo sapien
acacttacccaagctttggtcttaa

SEQ ID NO: 6001369 - DNA, 25 bp, Homo sapien
tttggatgagaaggttttgtggttg

SEQ ID NO: 6001370 - DNA, 25 bp, Homo sapien
atttgacggtttctcttacgtgcat

SEQ ID NO: 6001371 - DNA, 25 bp, Homo sapien
caggtgccggttgctgctggcttag

SEQ ID NO: 6001372 - DNA, 25 bp, Homo sapien
ctcttttgtctggaaatgacgtggg

SEQ ID NO: 6001373 - DNA, 25 bp, Homo sapien
gacggtttctcttacgtgcatccac

SEQ ID NO: 6001374 - DNA, 25 bp, Homo sapien
tgtgagtataaaacttgtggagcgg

SEQ ID NO: 6001375 - DNA, 25 bp, Homo sapien
tggacttatcttctgctgtgtttga

SEQ ID NO: 6001376 - DNA, 25 bp, Homo sapien
accttggctctatttaagactttga

SEQ ID NO: 6001377 - DNA, 25 bp, Homo sapien
gctctatttaagactttgatgaacg

SEQ ID NO: 6001378 - DNA, 25 bp, Homo sapien
tccacgaattcttgtaaaaagacct

SEQ ID NO: 6001379 - DNA, 25 bp, Homo sapien
gtcttaacactcaacaacagaatgg

SEQ ID NO: 6001380 - DNA, 25 bp, Homo sapien
gtctccattggcagcaacctcaccg

SEQ ID NO: 6001381 - DNA, 25 bp, Homo sapien
ggtgccggttgctgctggcttagtt

SEQ ID NO: 6001382 - DNA, 25 bp, Homo sapien
ggtcttcaaaacagacagttgtaaa

SEQ ID NO: 6001383 - DNA, 25 bp, Homo sapien
tcatcattttcatcatcttcgtcca

SEQ ID NO: 6001384 - DNA, 25 bp, Homo sapien
ctcaccgccagtaatttctgcttcg

SEQ ID NO: 6001385 - DNA, 25 bp, Homo sapien
agtataaaacttgtggagcggattg

SEQ ID NO: 6001386 - DNA, 25 bp, Homo sapien
tcgaaatcggaaacaattctgtcca

SEQ ID NO: 6001387 - DNA, 25 bp, Homo sapien
acctcaccgccagtaatttctgctt

SEQ ID NO: 6001388 - DNA, 25 bp, Homo sapien
gcactttatgtgataatggaagtag

SEQ ID NO: 6001389 - DNA, 25 bp, Homo sapien
cctctatcgcttcattcagtgtctt

SEQ ID NO: 6001390 - DNA, 25 bp, Homo sapien
tcaatataatggtcttcaaaacaga

SEQ ID NO: 6001391 - DNA, 25 bp, Homo sapien
tttagagcactttatgtgataatgg

SEQ ID NO: 6001392 - DNA, 25 bp, Homo sapien
aaagaggagtagtggtcggccagaa

SEQ ID NO: 6001393 - DNA, 25 bp, Homo sapien
gatgagaaggttttgtggttgtaag

SEQ ID NO: 6001394 - DNA, 25 bp, Homo sapien
aattgaatggaattgcaactctttt

SEQ ID NO: 6001395 - DNA, 25 bp, Homo sapien
agaaggttttgtggttgtaagtgta

SEQ ID NO: 6001396 - DNA, 25 bp, Homo sapien
ccaattcggccaacgtaatctgaag

SEQ ID NO: 6001397 - DNA, 25 bp, Homo sapien
cagtaatttctgcttcgacaggtgc

SEQ ID NO: 6001398 - DNA, 25 bp, Homo sapien
acaattctgtccatggtcaacggcg

SEQ ID NO: 6001399 - DNA, 25 bp, Homo sapien
tatgtgataatggaagtagtttcta

SEQ ID NO: 6001400 - DNA, 25 bp, Homo sapien
ataatggaagtagtttctaaacaat

SEQ ID NO: 6001401 - DNA, 25 bp, Homo sapien
cttacgtgcatccacgaattcttgt

SEQ ID NO: 6001402 - DNA, 25 bp, Homo sapien
cggcgaacccttgcgaagtgcctct

SEQ ID NO: 6001403 - DNA, 25 bp, Homo sapien
cctcgtcacgatacttgattgtgaa

SEQ ID NO: 6001404 - DNA, 25 bp, Homo sapien
atgtggtaggtggtatagtcgaaat

SEQ ID NO: 6001405 - DNA, 25 bp, Homo sapien
agtcatagccgggctccacttcact

SEQ ID NO: 6001406 - DNA, 25 bp, Homo sapien
ttgcaactcttttgtctggaaatga

SEQ ID NO: 6001407 - DNA, 25 bp, Homo sapien
aggtggttgatatagtctcttcaac

SEQ ID NO: 6001408 - DNA, 25 bp, Homo sapien
ttacccaagctttggtcttaacact

SEQ ID NO: 6001409 - DNA, 25 bp, Homo sapien
gtgaacaaagtgttgtctccattgg

SEQ ID NO: 6001410 - DNA, 25 bp, Homo sapien
gaacccttgcgaagtgcctctatcg

SEQ ID NO: 6001411 - DNA, 25 bp, Homo sapien
ggaaaagaacaaacgtgataaatct

SEQ ID NO: 6001412 - DNA, 25 bp, Homo sapien
aatcgattcttgaaccaattcggcc

SEQ ID NO: 6001413 - DNA, 25 bp, Homo sapien
acgtcaaagaaccgtccaattggca

SEQ ID NO: 6001414 - DNA, 25 bp, Homo sapien
ttgctgctggcttagttcaataaac

SEQ ID NO: 6001415 - DNA, 25 bp, Homo sapien
agacacttacccaagctttggtctt

SEQ ID NO: 6001416 - DNA, 25 bp, Homo sapien
tctatcgcttcattcagtgtctttt

SEQ ID NO: 6001417 - DNA, 25 bp, Homo sapien
tctgaagagtgtagtcatagccggg

SEQ ID NO: 6001418 - DNA, 25 bp, Homo sapien
tcttcaaaacagacagttgtaaaat

SEQ ID NO: 6001419 - DNA, 25 bp, Homo sapien
aaaatagtctcgaagattatggtaa

SEQ ID NO: 6001420 - DNA, 25 bp, Homo sapien
cacttcacttgggatagtcacccca

SEQ ID NO: 6001421 - DNA, 25 bp, Homo sapien
acgtgataaatcttctactttgctc

SEQ ID NO: 6001422 - DNA, 25 bp, Homo sapien
aacggcgaacccttgcgaagtgcct

SEQ ID NO: 6001423 - DNA, 25 bp, Homo sapien
agccgggctccacttcacttgggat

SEQ ID NO: 6001424 - DNA, 25 bp, Homo sapien
acccttgcgaagtgcctctatcgct

SEQ ID NO: 6001425 - DNA, 25 bp, Homo sapien
acccaagctttggtcttaacactca

SEQ ID NO: 6001426 - DNA, 25 bp, Homo sapien
tcttctgctgtgtttgaaatgtggt

SEQ ID NO: 6001427 - DNA, 25 bp, Homo sapien
aaattttatctgtttcgtcttgaaa

SEQ ID NO: 6001428 - DNA, 25 bp, Homo sapien
gccagtaatttctgcttcgacaggt

SEQ ID NO: 6001429 - DNA, 25 bp, Homo sapien
tggaaatgacgtgggaaaagaacaa

SEQ ID NO: 6001430 - DNA, 25 bp, Homo sapien
gattcttgaaccaattcggccaacg

SEQ ID NO: 6001431 - DNA, 25 bp, Homo sapien
gaaggtttgatgaagatgttctcct

SEQ ID NO: 6001432 - DNA, 25 bp, Homo sapien
tgtctggaaatgacgtgggaaaaga

SEQ ID NO: 6001433 - DNA, 25 bp, Homo sapien
agtcgaaatcggaaacaattctgtc

SEQ ID NO: 6001434 - DNA, 25 bp, Homo sapien
cttcgacaggtgccggttgctgctg

SEQ ID NO: 6001435 - DNA, 25 bp, Homo sapien
aactcttttgtctggaaatgacgtg

SEQ ID NO: 6001436 - DNA, 25 bp, Homo sapien
tatagtctcttcaactccaatggtg

SEQ ID NO: 6001437 - DNA, 25 bp, Homo sapien
ttttcatcatcttcgtccaccttgg

SEQ ID NO: 6001438 - DNA, 25 bp, Homo sapien
acagaatggacttatcttctgctgt

SEQ ID NO: 6001439 - DNA, 25 bp, Homo sapien
ttcatcatcttcgtccaccttggct

SEQ ID NO: 6001440 - DNA, 25 bp, Homo sapien
aatctgaagagtgtagtcatagccg

SEQ ID NO: 6001441 - DNA, 25 bp, Homo sapien
ttcttgaaccaattcggccaacgta

SEQ ID NO: 6001442 - DNA, 25 bp, Homo sapien
atacttgattgtgaacaaagtgttg

SEQ ID NO: 6001443 - DNA, 25 bp, Homo sapien
ttgaaaaatagtctcgaagattatg

SEQ ID NO: 6001444 - DNA, 25 bp, Homo sapien
tttgctctgcaactttaggtggttg

SEQ ID NO: 6001445 - DNA, 25 bp, Homo sapien
gtggttcatgtgagtataaaacttg

SEQ ID NO: 6001446 - DNA, 25 bp, Homo sapien
gtaatttctgcttcgacaggtgccg

SEQ ID NO: 6001447 - DNA, 25 bp, Homo sapien
ggttcttcttgcctgttgtctgcct

SEQ ID NO: 6001448 - DNA, 25 bp, Homo sapien
aatggacttatcttctgctgtgttt

SEQ ID NO: 6001449 - DNA, 25 bp, Homo sapien
accgtccaattggcactcagagaca

SEQ ID NO: 6001450 - DNA, 25 bp, Homo sapien
aaccaattcggccaacgtaatctga

SEQ ID NO: 6001451 - DNA, 25 bp, Homo sapien
ctcgaagattatggtaactctgtca

SEQ ID NO: 6001452 - DNA, 25 bp, Homo sapien
tttaagactttgatgaacgagtcca

SEQ ID NO: 6001453 - DNA, 25 bp, Homo sapien
ggccaattcgaagggaaaactcaat

SEQ ID NO: 6001454 - DNA, 25 bp, Homo sapien
gaacaaacgtgataaatcttctact

SEQ ID NO: 6001455 - DNA, 25 bp, Homo sapien
ttcggccaacgtaatctgaagagtg

SEQ ID NO: 6001456 - DNA, 25 bp, Homo sapien
gattgtgaacaaagtgttgtctcca

SEQ ID NO: 6001457 - DNA, 25 bp, Homo sapien
gaaccgtccaattggcactcagaga

SEQ ID NO: 6001458 - DNA, 25 bp, Homo sapien
gtccatggtcaacggcgaacccttg

SEQ ID NO: 6001459 - DNA, 25 bp, Homo sapien
ttctgcactcaattcatcattttca

SEQ ID NO: 6001460 - DNA, 25 bp, Homo sapien
taactctgtcattggaaggtttgat

SEQ ID NO: 6001461 - DNA, 25 bp, Homo sapien
gctttggtcttaacactcaacaaca

SEQ ID NO: 6001462 - DNA, 25 bp, Homo sapien
aatataatggtcttcaaaacagaca

SEQ ID NO: 6001463 - DNA, 25 bp, Homo sapien
tcggaaacaattctgtccatggtca

SEQ ID NO: 6001464 - DNA, 25 bp, Homo sapien
ttttatctgtttcgtcttgaaaaat

SEQ ID NO: 6001465 - DNA, 25 bp, Homo sapien
ttgatgaagatgttctcctcgtcac

SEQ ID NO: 6001466 - DNA, 25 bp, Homo sapien
tgatgaacgagtccactctgaatct

SEQ ID NO: 6001467 - DNA, 25 bp, Homo sapien
acaatgttaactggcaaattgaatg

SEQ ID NO: 6001468 - DNA, 25 bp, Homo sapien
tttgtctggaaatgacgtgggaaaa

SEQ ID NO: 6001469 - DNA, 25 bp, Homo sapien
taacactcaacaacagaatggactt

SEQ ID NO: 6001470 - DNA, 25 bp, Homo sapien
acaaacgtgataaatcttctacttt

SEQ ID NO: 6001471 - DNA, 25 bp, Homo sapien
cttcgaaatggccaattcgaaggga

SEQ ID NO: 6001472 - DNA, 25 bp, Homo sapien
gtctcttcaactccaatggtggttc

SEQ ID NO: 6001473 - DNA, 25 bp, Homo sapien
tgaatctcattctggagtgcatgta

SEQ ID NO: 6001474 - DNA, 25 bp, Homo sapien
gttcaataaacttcgaaatggccaa

SEQ ID NO: 6001475 - DNA, 25 bp, Homo sapien
tatttaagactttgatgaacgagtc

SEQ ID NO: 6001476 - DNA, 25 bp, Homo sapien
aatctcattctggagtgcatgtagg

SEQ ID NO: 6001477 - DNA, 25 bp, Homo sapien
ctgtttcgtcttgaaaaatagtctc

SEQ ID NO: 6001478 - DNA, 25 bp, Homo sapien
gcatgtaggctttagagcactttat

SEQ ID NO: 6001479 - DNA, 25 bp, Homo sapien
taggtggtatagtcgaaatcggaaa

SEQ ID NO: 6001480 - DNA, 25 bp, Homo sapien
ttatctgtttcgtcttgaaaaatag

SEQ ID NO: 6001481 - DNA, 25 bp, Homo sapien
attggaaggtttgatgaagatgttc

SEQ ID NO: 6001482 - DNA, 25 bp, Homo sapien
caatctttctaccggtgaaggttct

SEQ ID NO: 6001483 - DNA, 25 bp, Homo sapien
tgtcattggaaggtttgatgaagat

SEQ ID NO: 6001484 - DNA, 25 bp, Homo sapien
ttctgtccatggtcaacggcgaacc

SEQ ID NO: 6001485 - DNA, 25 bp, Homo sapien
gtcggccagaaacttcagtaacgtc

SEQ ID NO: 6001486 - DNA, 25 bp, Homo sapien
aatcggaaacaattctgtccatggt

SEQ ID NO: 6001487 - DNA, 25 bp, Homo sapien
tcaacggcgaacccttgcgaagtgc

SEQ ID NO: 6001488 - DNA, 25 bp, Homo sapien
ctccaatggtggttcatgtgagtat

SEQ ID NO: 6001489 - DNA, 25 bp, Homo sapien
tctgaatctcattctggagtgcatg

SEQ ID NO: 6001490 - DNA, 25 bp, Homo sapien
gaaatcggaaacaattctgtccatg

SEQ ID NO: 6001491 - DNA, 25 bp, Homo sapien
ctgcaactttaggtggttgatatag

SEQ ID NO: 6001492 - DNA, 25 bp, Homo sapien
ccaagctttggtcttaacactcaac

SEQ ID NO: 6001493 - DNA, 25 bp, Homo sapien
acagttgtaaaatcgattcttgaac

SEQ ID NO: 6001494 - DNA, 25 bp, Homo sapien
agaggagtagtggtcggccagaaac

SEQ ID NO: 6001495 - DNA, 25 bp, Homo sapien
tttgatgaacgagtccactctgaat

SEQ ID NO: 6001496 - DNA, 25 bp, Homo sapien
acactcaacaacagaatggacttat

SEQ ID NO: 6001497 - DNA, 25 bp, Homo sapien
ttctaaacaatgttaactggcaaat

SEQ ID NO: 6001498 - DNA, 25 bp, Homo sapien
gctttagagcactttatgtgataat

SEQ ID NO: 6001499 - DNA, 25 bp, Homo sapien
aatgttaactggcaaattgaatgga

SEQ ID NO: 6001500 - DNA, 25 bp, Homo sapien
ttctactttgctctgcaactttagg

SEQ ID NO: 6001501 - DNA, 25 bp, Homo sapien
gcaactttaggtggttgatatagtc

SEQ ID NO: 6001502 - DNA, 25 bp, Homo sapien
tctggaaatgacgtgggaaaagaac

SEQ ID NO: 6001503 - DNA, 25 bp, Homo sapien
atggtaactctgtcattggaaggtt

SEQ ID NO: 6001504 - DNA, 25 bp, Homo sapien
tcttgaaaaatagtctcgaagatta

SEQ ID NO: 6001505 - DNA, 25 bp, Homo sapien
tgtgtttgaaatgtggtaggtggta

SEQ ID NO: 6001506 - DNA, 25 bp, Homo sapien
aattgcaactcttttgtctggaaat

SEQ ID NO: 6001507 - DNA, 25 bp, Homo sapien
ggttttgtggttgtaagtgtagcat

SEQ ID NO: 6001508 - DNA, 25 bp, Homo sapien
caccccacccaaagaggagtagtgg

SEQ ID NO: 6001509 - DNA, 25 bp, Homo sapien
ggtggtatagtcgaaatcggaaaca

SEQ ID NO: 6001510 - DNA, 25 bp, Homo sapien
ttgattgtgaacaaagtgttgtctc

SEQ ID NO: 6001511 - DNA, 25 bp, Homo sapien
ttctcctcgtcacgatacttgattg

SEQ ID NO: 6001512 - DNA, 25 bp, Homo sapien
cagtgtcttttggatgagaaggttt

SEQ ID NO: 6001513 - DNA, 25 bp, Homo sapien
ggtaggtggtatagtcgaaatcgga

SEQ ID NO: 6001514 - DNA, 25 bp, Homo sapien
ttcttcttgcctgttgtctgccttc

SEQ ID NO: 6001515 - DNA, 25 bp, Homo sapien
tataatggtcttcaaaacagacagt

SEQ ID NO: 6001516 - DNA, 25 bp, Homo sapien
tgcatccacgaattcttgtaaaaag

SEQ ID NO: 6001517 - DNA, 25 bp, Homo sapien
tcattggaaggtttgatgaagatgt

SEQ ID NO: 6001518 - DNA, 25 bp, Homo sapien
aagagtgtagtcatagccgggctcc

SEQ ID NO: 6001519 - DNA, 25 bp, Homo sapien
ggttgatatagtctcttcaactcca

SEQ ID NO: 6001520 - DNA, 25 bp, Homo sapien
aaagtgttgtctccattggcagcaa

SEQ ID NO: 6001521 - DNA, 25 bp, Homo sapien
tccaattggcactcagagacactta

SEQ ID NO: 6001522 - DNA, 25 bp, Homo sapien
cggtttctcttacgtgcatccacga

SEQ ID NO: 6001523 - DNA, 25 bp, Homo sapien
taaatcttctactttgctctgcaac

SEQ ID NO: 6001524 - DNA, 25 bp, Homo sapien
gagtagtggtcggccagaaacttca

SEQ ID NO: 6001525 - DNA, 25 bp, Homo sapien
ttcatgtgagtataaaacttgtgga

SEQ ID NO: 6001526 - DNA, 25 bp, Homo sapien
acttacccaagctttggtcttaaca

SEQ ID NO: 6001527 - DNA, 25 bp, Homo sapien
aatttctgcttcgacaggtgccggt

SEQ ID NO: 6001528 - DNA, 25 bp, Homo sapien
tttctgcttcgacaggtgccggttg

SEQ ID NO: 6001529 - DNA, 25 bp, Homo sapien
aattctgtccatggtcaacggcgaa

SEQ ID NO: 6001530 - DNA, 25 bp, Homo sapien
aatggtggttcatgtgagtataaaa

SEQ ID NO: 6001531 - DNA, 25 bp, Homo sapien
actcagagacacttacccaagcttt

SEQ ID NO: 6001532 - DNA, 25 bp, Homo sapien
ttggatttgacggtttctcttacgt

SEQ ID NO: 6001533 - DNA, 25 bp, Homo sapien
tcagagacacttacccaagctttgg

SEQ ID NO: 6001534 - DNA, 25 bp, Homo sapien
agtgttgtctccattggcagcaacc

SEQ ID NO: 6001535 - DNA, 25 bp, Homo sapien
ctagtagacaatctttctaccggtg

SEQ ID NO: 6001536 - DNA, 25 bp, Homo sapien
ggaaacaattctgtccatggtcaac

SEQ ID NO: 6001537 - DNA, 25 bp, Homo sapien
atctgtttcgtcttgaaaaatagtc

SEQ ID NO: 6001538 - DNA, 25 bp, Homo sapien
attcatcattttcatcatcttcgtc

SEQ ID NO: 6001539 - DNA, 25 bp, Homo sapien
taacgtcaaagaaccgtccaattgg

SEQ ID NO: 6001540 - DNA, 25 bp, Homo sapien
gattggatttgacggtttctcttac

SEQ ID NO: 6001541 - DNA, 25 bp, Homo sapien
tagagcactttatgtgataatggaa

SEQ ID NO: 6001542 - DNA, 25 bp, Homo sapien
gtgcatgtaggctttagagcacttt

SEQ ID NO: 6001543 - DNA, 25 bp, Homo sapien
gggatagtcaccccacccaaagagg

SEQ ID NO: 6001544 - DNA, 25 bp, Homo sapien
gacaggtgccggttgctgctggctt

SEQ ID NO: 6001545 - DNA, 25 bp, Homo sapien
tgataatggaagtagtttctaaaca

SEQ ID NO: 6001546 - DNA, 25 bp, Homo sapien
gtgtcttttggatgagaaggttttg

SEQ ID NO: 6001547 - DNA, 25 bp, Homo sapien
aacaacagaatggacttatcttctg

SEQ ID NO: 6001548 - DNA, 25 bp, Homo sapien
cttttgtctggaaatgacgtgggaa

SEQ ID NO: 6001549 - DNA, 25 bp, Homo sapien
ttgcgaagtgcctctatcgcttcat

SEQ ID NO: 6001550 - DNA, 25 bp, Homo sapien
actttatgtgataatggaagtagtt

SEQ ID NO: 6001551 - DNA, 25 bp, Homo sapien
tctcattctggagtgcatgtaggct

SEQ ID NO: 6001552 - DNA, 25 bp, Homo sapien
tggcagcaacctcaccgccagtaat

SEQ ID NO: 6001553 - DNA, 25 bp, Homo sapien
tcattctggagtgcatgtaggcttt

SEQ ID NO: 6001554 - DNA, 25 bp, Homo sapien
aaacaattctgtccatggtcaacgg

SEQ ID NO: 6001555 - DNA, 25 bp, Homo sapien
ctccattggcagcaacctcaccgcc

SEQ ID NO: 6001556 - DNA, 25 bp, Homo sapien
gtgataaatcttctactttgctctg

SEQ ID NO: 6001557 - DNA, 25 bp, Homo sapien
acttcagtaacgtcaaagaaccgtc

SEQ ID NO: 6001558 - DNA, 25 bp, Homo sapien
gacttatcttctgctgtgtttgaaa

SEQ ID NO: 6001559 - DNA, 25 bp, Homo sapien
gaatggaattgcaactcttttgtct

SEQ ID NO: 6001560 - DNA, 25 bp, Homo sapien
gaacgagtccactctgaatctcatt

SEQ ID NO: 6001561 - DNA, 25 bp, Homo sapien
tctaccggtgaaggttcttcttgcc

SEQ ID NO: 6001562 - DNA, 25 bp, Homo sapien
gagtgcatgtaggctttagagcact

SEQ ID NO: 6001563 - DNA, 25 bp, Homo sapien
gcactcaattcatcattttcatcat

SEQ ID NO: 6001564 - DNA, 25 bp, Homo sapien
tgaagagtgtagtcatagccgggct

SEQ ID NO: 6001565 - DNA, 25 bp, Homo sapien
caacgtaatctgaagagtgtagtca

SEQ ID NO: 6001566 - DNA, 25 bp, Homo sapien
ggcttagttcaataaacttcgaaat

SEQ ID NO: 6001567 - DNA, 25 bp, Homo sapien
aattcggccaacgtaatctgaagag

SEQ ID NO: 6001568 - DNA, 25 bp, Homo sapien
aaacaatgttaactggcaaattgaa

SEQ ID NO: 6001569 - DNA, 25 bp, Homo sapien
aagggaaaactcaatataatggtct

SEQ ID NO: 6001570 - DNA, 25 bp, Homo sapien
atcattttcatcatcttcgtccacc

SEQ ID NO: 6001571 - DNA, 25 bp, Homo sapien
gccaaaaattttatctgtttcgtct

SEQ ID NO: 6001572 - DNA, 25 bp, Homo sapien
gccagaaacttcagtaacgtcaaag

SEQ ID NO: 6001573 - DNA, 25 bp, Homo sapien
tataaaacttgtggagcggattgga

SEQ ID NO: 6001574 - DNA, 25 bp, Homo sapien
tgcctctatcgcttcattcagtgtc

SEQ ID NO: 6001575 - DNA, 25 bp, Homo sapien
ttctgctgtgtttgaaatgtggtag

SEQ ID NO: 6001576 - DNA, 25 bp, Homo sapien
aagaccttgccaaaaattttatctg

SEQ ID NO: 6001577 - DNA, 25 bp, Homo sapien
gtttcgtcttgaaaaatagtctcga

SEQ ID NO: 6001578 - DNA, 25 bp, Homo sapien
gtggtaggtggtatagtcgaaatcg

SEQ ID NO: 6001579 - DNA, 25 bp, Homo sapien
ccggttgctgctggcttagttcaat

SEQ ID NO: 6001580 - DNA, 25 bp, Homo sapien
taaacttcgaaatggccaattcgaa

SEQ ID NO: 6001581 - DNA, 25 bp, Homo sapien
cttatcttctgctgtgtttgaaatg

SEQ ID NO: 6001582 - DNA, 25 bp, Homo sapien
gcactcagagacacttacccaagct

SEQ ID NO: 6001583 - DNA, 25 bp, Homo sapien
cttagttcaataaacttcgaaatgg

SEQ ID NO: 6001584 - DNA, 25 bp, Homo sapien
ccaattcgaagggaaaactcaatat

SEQ ID NO: 6001585 - DNA, 25 bp, Homo sapien
aaacttgtggagcggattggatttg

SEQ ID NO: 6001586 - DNA, 25 bp, Homo sapien
attggcagcaacctcaccgccagta

SEQ ID NO: 6001587 - DNA, 25 bp, Homo sapien
gatatagtctcttcaactccaatgg

SEQ ID NO: 6001588 - DNA, 25 bp, Homo sapien
actcaatataatggtcttcaaaaca

SEQ ID NO: 6001589 - DNA, 25 bp, Homo sapien
aagctttggtcttaacactcaacaa

SEQ ID NO: 6001590 - DNA, 25 bp, Homo sapien
tgaaggttcttcttgcctgttgtct

SEQ ID NO: 6001591 - DNA, 25 bp, Homo sapien
atggtcaacggcgaacccttgcgaa

SEQ ID NO: 6001592 - DNA, 25 bp, Homo sapien
gaaaactcaatataatggtcttcaa

SEQ ID NO: 6001593 - DNA, 25 bp, Homo sapien
ccttgccaaaaattttatctgtttc

SEQ ID NO: 6001594 - DNA, 25 bp, Homo sapien
caacctcaccgccagtaatttctgc

SEQ ID NO: 6001595 - DNA, 25 bp, Homo sapien
cttggctctatttaagactttgatg

SEQ ID NO: 6001596 - DNA, 25 bp, Homo sapien
cttcttgcctgttgtctgccttctg

SEQ ID NO: 6001597 - DNA, 25 bp, Homo sapien
gagtccactctgaatctcattctgg

SEQ ID NO: 6001598 - DNA, 25 bp, Homo sapien
aactggcaaattgaatggaattgca

SEQ ID NO: 6001599 - DNA, 25 bp, Homo sapien
ttcgtcttgaaaaatagtctcgaag

SEQ ID NO: 6001600 - DNA, 25 bp, Homo sapien
tgctggcttagttcaataaacttcg

SEQ ID NO: 6001601 - DNA, 25 bp, Homo sapien
agtagtttctaaacaatgttaactg

SEQ ID NO: 6001602 - DNA, 25 bp, Homo sapien
tgtctgccttctgcactcaattcat

SEQ ID NO: 6001603 - DNA, 25 bp, Homo sapien
aaacgtgataaatcttctactttgc

SEQ ID NO: 6001604 - DNA, 25 bp, Homo sapien
cagaaacttcagtaacgtcaaagaa

SEQ ID NO: 6001605 - DNA, 25 bp, Homo sapien
tttggtcttaacactcaacaacaga

SEQ ID NO: 6001606 - DNA, 25 bp, Homo sapien
acccaaagaggagtagtggtcggcc

SEQ ID NO: 6001607 - DNA, 25 bp, Homo sapien
gtttctcttacgtgcatccacgaat

SEQ ID NO: 6001608 - DNA, 25 bp, Homo sapien
ctcttacgtgcatccacgaattctt

SEQ ID NO: 6001609 - DNA, 25 bp, Homo sapien
ctgctgtgtttgaaatgtggtaggt

SEQ ID NO: 6001610 - DNA, 25 bp, Homo sapien
ggagcggattggatttgacggtttc

SEQ ID NO: 6001611 - DNA, 25 bp, Homo sapien
aggtttgatgaagatgttctcctcg

SEQ ID NO: 6001612 - DNA, 25 bp, Homo sapien
acttgggatagtcaccccacccaaa

SEQ ID NO: 6001613 - DNA, 25 bp, Homo sapien
cagtaacgtcaaagaaccgtccaat

SEQ ID NO: 6001614 - DNA, 25 bp, Homo sapien
ggtgaaggttcttcttgcctgttgt

SEQ ID NO: 6001615 - DNA, 25 bp, Homo sapien
cttaacactcaacaacagaatggac

SEQ ID NO: 6001616 - DNA, 25 bp, Homo sapien
gagtgtagtcatagccgggctccac

SEQ ID NO: 6001617 - DNA, 25 bp, Homo sapien
gctgctggcttagttcaataaactt

SEQ ID NO: 6001618 - DNA, 25 bp, Homo sapien
tatcttctgctgtgtttgaaatgtg

SEQ ID NO: 6001619 - DNA, 25 bp, Homo sapien
actctgtcattggaaggtttgatga

SEQ ID NO: 6001620 - DNA, 25 bp, Homo sapien
tggtatagtcgaaatcggaaacaat

SEQ ID NO: 6001621 - DNA, 25 bp, Homo sapien
actcaacaacagaatggacttatct

SEQ ID NO: 6001622 - DNA, 25 bp, Homo sapien
gcttcattcagtgtcttttggatga

SEQ ID NO: 6001623 - DNA, 25 bp, Homo sapien
tcgtcacgatacttgattgtgaaca

SEQ ID NO: 6001624 - DNA, 25 bp, Homo sapien
aatcttctactttgctctgcaactt

SEQ ID NO: 6001625 - DNA, 25 bp, Homo sapien
caaattgaatggaattgcaactctt

SEQ ID NO: 6001626 - DNA, 25 bp, Homo sapien
cacgatacttgattgtgaacaaagt

SEQ ID NO: 6001627 - DNA, 25 bp, Homo sapien
ttgaatggaattgcaactcttttgt

SEQ ID NO: 6001628 - DNA, 25 bp, Homo sapien
tctttctaccggtgaaggttcttct

SEQ ID NO: 6001629 - DNA, 25 bp, Homo sapien
aactccaatggtggttcatgtgagt

SEQ ID NO: 6001630 - DNA, 25 bp, Homo sapien
ttgtctccattggcagcaacctcac

SEQ ID NO: 6001631 - DNA, 25 bp, Homo sapien
gtcacgatacttgattgtgaacaaa

SEQ ID NO: 6001632 - DNA, 25 bp, Homo sapien
cttgaaccaattcggccaacgtaat

SEQ ID NO: 6001633 - DNA, 25 bp, Homo sapien
tctgtcattggaaggtttgatgaag

SEQ ID NO: 6001634 - DNA, 25 bp, Homo sapien
cttttggatgagaaggttttgtggt

SEQ ID NO: 6001635 - DNA, 25 bp, Homo sapien
ctcctcgtcacgatacttgattgtg

SEQ ID NO: 6001636 - DNA, 25 bp, Homo sapien
tcgaaatggccaattcgaagggaaa

SEQ ID NO: 6001637 - DNA, 25 bp, Homo sapien
gtccactctgaatctcattctggag

SEQ ID NO: 6001638 - DNA, 25 bp, Homo sapien
gatagtcaccccacccaaagaggag

SEQ ID NO: 6001639 - DNA, 25 bp, Homo sapien
gagcactttatgtgataatggaagt

SEQ ID NO: 6001640 - DNA, 25 bp, Homo sapien
tggtcggccagaaacttcagtaacg

SEQ ID NO: 6001641 - DNA, 25 bp, Homo sapien
gatgttctcctcgtcacgatacttg

SEQ ID NO: 6001642 - DNA, 25 bp, Homo sapien
gccaacgtaatctgaagagtgtagt

SEQ ID NO: 6001643 - DNA, 25 bp, Homo sapien
tggaagtagtttctaaacaatgtta

SEQ ID NO: 6001644 - DNA, 25 bp, Homo sapien
ttgatatagtctcttcaactccaat

SEQ ID NO: 6001645 - DNA, 25 bp, Homo sapien
gcctgttgtctgccttctgcactca

SEQ ID NO: 6001646 - DNA, 25 bp, Homo sapien
gaaatgacgtgggaaaagaacaaac

SEQ ID NO: 6001647 - DNA, 25 bp, Homo sapien
ctgcactcaattcatcattttcatc

SEQ ID NO: 6001648 - DNA, 25 bp, Homo sapien
gatgaagatgttctcctcgtcacga

SEQ ID NO: 6001649 - DNA, 25 bp, Homo sapien
acgaattcttgtaaaaagaccttgc

SEQ ID NO: 6001650 - DNA, 25 bp, Homo sapien
atgtaggctttagagcactttatgt

SEQ ID NO: 6001651 - DNA, 25 bp, Homo sapien
ccacccaaagaggagtagtggtcgg

SEQ ID NO: 6001652 - DNA, 25 bp, Homo sapien
tgctctgcaactttaggtggttgat

SEQ ID NO: 6001653 - DNA, 25 bp, Homo sapien
ccaatggtggttcatgtgagtataa

SEQ ID NO: 6001654 - DNA, 25 bp, Homo sapien
tcgacaggtgccggttgctgctggc

SEQ ID NO: 6001655 - DNA, 25 bp, Homo sapien
ccttgcgaagtgcctctatcgcttc

SEQ ID NO: 6001656 - DNA, 25 bp, Homo sapien
gggctccacttcacttgggatagtc

SEQ ID NO: 6001657 - DNA, 25 bp, Homo sapien
tgccggttgctgctggcttagttca

SEQ ID NO: 6001658 - DNA, 25 bp, Homo sapien
ggcaaattgaatggaattgcaactc

SEQ ID NO: 6001659 - DNA, 25 bp, Homo sapien
ctctgcaactttaggtggttgatat

SEQ ID NO: 6001660 - DNA, 25 bp, Homo sapien
tacgtgcatccacgaattcttgtaa

SEQ ID NO: 6001661 - DNA, 25 bp, Homo sapien
agtagacaatctttctaccggtgaa

SEQ ID NO: 6001662 - DNA, 25 bp, Homo sapien
agactttgatgaacgagtccactct

SEQ ID NO: 6001663 - DNA, 25 bp, Homo sapien
gaccttgccaaaaattttatctgtt

SEQ ID NO: 6001664 - DNA, 25 bp, Homo sapien
tttgaaatgtggtaggtggtatagt

SEQ ID NO: 6001665 - DNA, 25 bp, Homo sapien
gcgaagtgcctctatcgcttcattc

SEQ ID NO: 6001666 - DNA, 25 bp, Homo sapien
ttgcctgttgtctgccttctgcact

SEQ ID NO: 6001667 - DNA, 25 bp, Homo sapien
cgtgcatccacgaattcttgtaaaa

SEQ ID NO: 6001668 - DNA, 25 bp, Homo sapien
taccggtgaaggttcttcttgcctg

SEQ ID NO: 6001669 - DNA, 25 bp, Homo sapien
tggtggttcatgtgagtataaaact

SEQ ID NO: 6001670 - DNA, 25 bp, Homo sapien
gtggagcggattggatttgacggtt

SEQ ID NO: 6001671 - DNA, 25 bp, Homo sapien
tcgcttcattcagtgtcttttggat

SEQ ID NO: 6001672 - DNA, 25 bp, Homo sapien
acttgtggagcggattggatttgac

SEQ ID NO: 6001673 - DNA, 25 bp, Homo sapien
tgttgtctccattggcagcaacctc

SEQ ID NO: 6001674 - DNA, 25 bp, Homo sapien
ccatggtcaacggcgaacccttgcg

SEQ ID NO: 6001675 - DNA, 25 bp, Homo sapien
gttgtctgccttctgcactcaattc

SEQ ID NO: 6001676 - DNA, 25 bp, Homo sapien
atggaattgcaactcttttgtctgg

SEQ ID NO: 6001677 - DNA, 25 bp, Homo sapien
caccgccagtaatttctgcttcgac

SEQ ID NO: 6001678 - DNA, 25 bp, Homo sapien
ccggtgaaggttcttcttgcctgtt

SEQ ID NO: 6001679 - DNA, 25 bp, Homo sapien
atgacgtgggaaaagaacaaacgtg

SEQ ID NO: 6001680 - DNA, 25 bp, Homo sapien
ctgtccatggtcaacggcgaaccct

SEQ ID NO: 6001681 - DNA, 25 bp, Homo sapien
caacagaatggacttatcttctgct

SEQ ID NO: 6001682 - DNA, 25 bp, Homo sapien
aactttaggtggttgatatagtctc

SEQ ID NO: 6001683 - DNA, 25 bp, Homo sapien
caaagaaccgtccaattggcactca

SEQ ID NO: 6001684 - DNA, 25 bp, Homo sapien
tgttaactggcaaattgaatggaat

SEQ ID NO: 6001685 - DNA, 25 bp, Homo sapien
ctcttcaactccaatggtggttcat

SEQ ID NO: 6001686 - DNA, 25 bp, Homo sapien
tgagtataaaacttgtggagcggat

SEQ ID NO: 6001687 - DNA, 25 bp, Homo sapien
ttatggtaactctgtcattggaagg

SEQ ID NO: 6001688 - DNA, 25 bp, Homo sapien
tagtcaccccacccaaagaggagta

SEQ ID NO: 6001689 - DNA, 25 bp, Homo sapien
ccaaagaggagtagtggtcggccag

SEQ ID NO: 6001690 - DNA, 25 bp, Homo sapien
ttgccaaaaattttatctgtttcgt

SEQ ID NO: 6001691 - DNA, 25 bp, Homo sapien
ttaactggcaaattgaatggaattg

SEQ ID NO: 6001692 - DNA, 25 bp, Homo sapien
ttgggatagtcaccccacccaaaga

SEQ ID NO: 6001693 - DNA, 25 bp, Homo sapien
ggaattgcaactcttttgtctggaa

SEQ ID NO: 6001694 - DNA, 25 bp, Homo sapien
agcaacctcaccgccagtaatttct

SEQ ID NO: 6001695 - DNA, 25 bp, Homo sapien
taaaacttgtggagcggattggatt

SEQ ID NO: 6001696 - DNA, 25 bp, Homo sapien
aggctttagagcactttatgtgata

SEQ ID NO: 6001697 - DNA, 25 bp, Homo sapien
gaattcttgtaaaaagaccttgcca

SEQ ID NO: 6001698 - DNA, 25 bp, Homo sapien
actttgctctgcaactttaggtggt

SEQ ID NO: 6001699 - DNA, 25 bp, Homo sapien
atagtcgaaatcggaaacaattctg

SEQ ID NO: 6001700 - DNA, 25 bp, Homo sapien
aaaagaacaaacgtgataaatcttc

SEQ ID NO: 6001701 - DNA, 25 bp, Homo sapien
gtaaaatcgattcttgaaccaattc

SEQ ID NO: 6001702 - DNA, 25 bp, Homo sapien
tctggagtgcatgtaggctttagag

SEQ ID NO: 6001703 - DNA, 25 bp, Homo sapien
acagacagttgtaaaatcgattctt

SEQ ID NO: 6001704 - DNA, 25 bp, Homo sapien
ttcagtaacgtcaaagaaccgtcca

SEQ ID NO: 6001705 - DNA, 25 bp, Homo sapien
aagatgttctcctcgtcacgatact

SEQ ID NO: 6001706 - DNA, 25 bp, Homo sapien
tctgcttcgacaggtgccggttgct

SEQ ID NO: 6001707 - DNA, 25 bp, Homo sapien
ctggcttagttcaataaacttcgaa

SEQ ID NO: 6001708 - DNA, 25 bp, Homo sapien
tcatagccgggctccacttcacttg

SEQ ID NO: 6001709 - DNA, 25 bp, Homo sapien
acttgattgtgaacaaagtgttgtc

SEQ ID NO: 6001710 - DNA, 25 bp, Homo sapien
gaagtagtttctaaacaatgttaac

SEQ ID NO: 6001711 - DNA, 25 bp, Homo sapien
agacagttgtaaaatcgattcttga

SEQ ID NO: 6001712 - DNA, 25 bp, Homo sapien
ttaggtggttgatatagtctcttca

SEQ ID NO: 6001713 - DNA, 25 bp, Homo sapien
gtatagtcgaaatcggaaacaattc

SEQ ID NO: 6001714 - DNA, 25 bp, Homo sapien
cattcagtgtcttttggatgagaag

SEQ ID NO: 6001715 - DNA, 25 bp, Homo sapien
cttcacttgggatagtcaccccacc

SEQ ID NO: 6001716 - DNA, 25 bp, Homo sapien
ttctcttacgtgcatccacgaattc

SEQ ID NO: 6001717 - DNA, 25 bp, Homo sapien
gcaactcttttgtctggaaatgacg

SEQ ID NO: 6001718 - DNA, 25 bp, Homo sapien
cgtgggaaaagaacaaacgtgataa

SEQ ID NO: 6001719 - DNA, 25 bp, Homo sapien
agtggtcggccagaaacttcagtaa

SEQ ID NO: 6001720 - DNA, 25 bp, Homo sapien
gattatggtaactctgtcattggaa

SEQ ID NO: 6001721 - DNA, 25 bp, Homo sapien
tggctctatttaagactttgatgaa

SEQ ID NO: 6001722 - DNA, 25 bp, Homo sapien
agcggattggatttgacggtttctc

SEQ ID NO: 6001723 - DNA, 25 bp, Homo sapien
tcatcttcgtccaccttggctctat

SEQ ID NO: 6001724 - DNA, 25 bp, Homo sapien
aaacagacagttgtaaaatcgattc

SEQ ID NO: 6001725 - DNA, 25 bp, Homo sapien
ttcaaaacagacagttgtaaaatcg

SEQ ID NO: 6001726 - DNA, 25 bp, Homo sapien
tgaaccaattcggccaacgtaatct

SEQ ID NO: 6001727 - DNA, 25 bp, Homo sapien
ggtcaacggcgaacccttgcgaagt

SEQ ID NO: 6001728 - DNA, 25 bp, Homo sapien
ttgtaaaatcgattcttgaaccaat

SEQ ID NO: 6001729 - DNA, 25 bp, Homo sapien
gcagcaacctcaccgccagtaattt

SEQ ID NO: 6001730 - DNA, 25 bp, Homo sapien
tcttgtaaaaagaccttgccaaaaa

SEQ ID NO: 6001731 - DNA, 25 bp, Homo sapien
aacttcgaaatggccaattcgaagg

SEQ ID NO: 6001732 - DNA, 25 bp, Homo sapien
tggatgagaaggttttgtggttgta

SEQ ID NO: 6001733 - DNA, 25 bp, Homo sapien
tagtctcgaagattatggtaactct

SEQ ID NO: 6001734 - DNA, 25 bp, Homo sapien
tggtcttaacactcaacaacagaat

SEQ ID NO: 6001735 - DNA, 25 bp, Homo sapien
tcaataaacttcgaaatggccaatt

SEQ ID NO: 6001736 - DNA, 25 bp, Homo sapien
cggattggatttgacggtttctctt

SEQ ID NO: 6001737 - DNA, 25 bp, Homo sapien
tgagaaggttttgtggttgtaagtg

SEQ ID NO: 6001738 - DNA, 25 bp, Homo sapien
caattggcactcagagacacttacc

SEQ ID NO: 6001739 - DNA, 25 bp, Homo sapien
ctgttgtctgccttctgcactcaat

SEQ ID NO: 6001740 - DNA, 25 bp, Homo sapien
gtaatctgaagagtgtagtcatagc

SEQ ID NO: 6001741 - DNA, 25 bp, Homo sapien
aataaacttcgaaatggccaattcg

SEQ ID NO: 6001742 - DNA, 25 bp, Homo sapien
agttgtaaaatcgattcttgaacca

SEQ ID NO: 6001743 - DNA, 25 bp, Homo sapien
ggttcatgtgagtataaaacttgtg

SEQ ID NO: 6001744 - DNA, 25 bp, Homo sapien
tagttcaataaacttcgaaatggcc

SEQ ID NO: 6001745 - DNA, 25 bp, Homo sapien
gtgtagtcatagccgggctccactt

SEQ ID NO: 6001746 - DNA, 25 bp, Homo sapien
aagaacaaacgtgataaatcttcta

SEQ ID NO: 6001747 - DNA, 25 bp, Homo sapien
attcttgtaaaaagaccttgccaaa

SEQ ID NO: 6001748 - DNA, 25 bp, Homo sapien
gtcaccccacccaaagaggagtagt

SEQ ID NO: 6001749 - DNA, 25 bp, Homo sapien
ccgccagtaatttctgcttcgacag

SEQ ID NO: 6001750 - DNA, 25 bp, Homo sapien
cgtccaattggcactcagagacact

SEQ ID NO: 6001751 - DNA, 25 bp, Homo sapien
ttgtggagcggattggatttgacgg

SEQ ID NO: 6001752 - DNA, 25 bp, Homo sapien
attggcactcagagacacttaccca

SEQ ID NO: 6001753 - DNA, 25 bp, Homo sapien
ctaaacaatgttaactggcaaattg

SEQ ID NO: 6001754 - DNA, 25 bp, Homo sapien
gggaaaactcaatataatggtcttc

SEQ ID NO: 6001755 - DNA, 25 bp, Homo sapien
tctatttaagactttgatgaacgag

SEQ ID NO: 6001756 - DNA, 25 bp, Homo sapien
atggtcttcaaaacagacagttgta

SEQ ID NO: 6001757 - DNA, 25 bp, Homo sapien
aagaaccgtccaattggcactcaga

SEQ ID NO: 6001758 - DNA, 25 bp, Homo sapien
tttctaccggtgaaggttcttcttg

SEQ ID NO: 6001759 - DNA, 25 bp, Homo sapien
tcgattcttgaaccaattcggccaa

SEQ ID NO: 6001760 - DNA, 25 bp, Homo sapien
tttatgtgataatggaagtagtttc

SEQ ID NO: 6001761 - DNA, 25 bp, Homo sapien
aaggttcttcttgcctgttgtctgc

SEQ ID NO: 6001762 - DNA, 25 bp, Homo sapien
gtggttgatatagtctcttcaactc

SEQ ID NO: 6001763 - DNA, 25 bp, Homo sapien
aatggaagtagtttctaaacaatgt

SEQ ID NO: 6001764 - DNA, 25 bp, Homo sapien
aaatgtggtaggtggtatagtcgaa

SEQ ID NO: 6001765 - DNA, 25 bp, Homo sapien
tcaactccaatggtggttcatgtga

SEQ ID NO: 6001766 - DNA, 25 bp, Homo sapien
tgtttgaaatgtggtaggtggtata

SEQ ID NO: 6001767 - DNA, 25 bp, Homo sapien
tagacaatctttctaccggtgaagg

SEQ ID NO: 6001768 - DNA, 25 bp, Homo sapien
aaaaattttatctgtttcgtcttga

SEQ ID NO: 6001769 - DNA, 25 bp, Homo sapien
aggagtagtggtcggccagaaactt

SEQ ID NO: 6001770 - DNA, 25 bp, Homo sapien
ttcgaagggaaaactcaatataatg

SEQ ID NO: 6001771 - DNA, 25 bp, Homo sapien
catccacgaattcttgtaaaaagac

SEQ ID NO: 6001772 - DNA, 25 bp, Homo sapien
ctttaggtggttgatatagtctctt

SEQ ID NO: 6001773 - DNA, 25 bp, Homo sapien
cgtcttgaaaaatagtctcgaagat

SEQ ID NO: 6001774 - DNA, 25 bp, Homo sapien
cttcgtccaccttggctctatttaa

SEQ ID NO: 6001775 - DNA, 25 bp, Homo sapien
gacgtgggaaaagaacaaacgtgat

SEQ ID NO: 6001776 - DNA, 25 bp, Homo sapien
tgaaatgtggtaggtggtatagtcg

SEQ ID NO: 6001777 - DNA, 25 bp, Homo sapien
attctggagtgcatgtaggctttag

SEQ ID NO: 6001778 - DNA, 25 bp, Homo sapien
gaaatggccaattcgaagggaaaac

SEQ ID NO: 6001779 - DNA, 25 bp, Homo sapien
gtagtggtcggccagaaacttcagt

SEQ ID NO: 6001780 - DNA, 25 bp, Homo sapien
aaactcaatataatggtcttcaaaa

SEQ ID NO: 6001781 - DNA, 25 bp, Homo sapien
tgtgataatggaagtagtttctaaa

SEQ ID NO: 6001782 - DNA, 25 bp, Homo sapien
ggatttgacggtttctcttacgtgc

SEQ ID NO: 6001783 - DNA, 25 bp, Homo sapien
ccttctgcactcaattcatcatttt

SEQ ID NO: 6001784 - DNA, 25 bp, Homo sapien
cgaagattatggtaactctgtcatt

SEQ ID NO: 6001785 - DNA, 25 bp, Homo sapien
tggaaggtttgatgaagatgttctc

SEQ ID NO: 6001786 - DNA, 25 bp, Homo sapien
tagtctcttcaactccaatggtggt

SEQ ID NO: 6001787 - DNA, 25 bp, Homo sapien
catcatcttcgtccaccttggctct

SEQ ID NO: 6001788 - DNA, 25 bp, Homo sapien
aagattatggtaactctgtcattgg

SEQ ID NO: 6001789 - DNA, 25 bp, Homo sapien
actttgatgaacgagtccactctga

SEQ ID NO: 6001790 - DNA, 25 bp, Homo sapien
tatcgcttcattcagtgtcttttgg

SEQ ID NO: 6001791 - DNA, 25 bp, Homo sapien
agtgcctctatcgcttcattcagtg

SEQ ID NO: 6001792 - DNA, 25 bp, Homo sapien
atagccgggctccacttcacttggg

SEQ ID NO: 6001793 - DNA, 25 bp, Homo sapien
ttgtgaacaaagtgttgtctccatt

SEQ ID NO: 6001794 - DNA, 25 bp, Homo sapien
tcttctactttgctctgcaacttta

SEQ ID NO: 6001795 - DNA, 25 bp, Homo sapien
acgtaatctgaagagtgtagtcata

SEQ ID NO: 6001796 - DNA, 25 bp, Homo sapien
taatggtcttcaaaacagacagttg

SEQ ID NO: 6001797 - DNA, 25 bp, Homo sapien
tgaagatgttctcctcgtcacgata

SEQ ID NO: 6001798 - DNA, 25 bp, Homo sapien
tgtgatgatccgagaacttggggac

SEQ ID NO: 6001799 - DNA, 25 bp, Homo sapien
aaaaccccggtagatgctatgggat

SEQ ID NO: 6001800 - DNA, 25 bp, Homo sapien
ccctattaagtgtaagactgccgag

SEQ ID NO: 6001801 - DNA, 25 bp, Homo sapien
ctgcttaaaattgatgaacctgtat

SEQ ID NO: 6001802 - DNA, 25 bp, Homo sapien
aatatcaccgaatactgcttaaaca

SEQ ID NO: 6001803 - DNA, 25 bp, Homo sapien
ttacggcggagtaaatattgactgg

SEQ ID NO: 6001804 - DNA, 25 bp, Homo sapien
gttggacctaaaatgggatatttaa

SEQ ID NO: 6001805 - DNA, 25 bp, Homo sapien
gatccgagaacttggggacggccaa

SEQ ID NO: 6001806 - DNA, 25 bp, Homo sapien
cctgagagtttcttacccatatata

SEQ ID NO: 6001807 - DNA, 25 bp, Homo sapien
gagcatactagaaaggagttacagg

SEQ ID NO: 6001808 - DNA, 25 bp, Homo sapien
ctcaaacgagggacgaaaggatggc

SEQ ID NO: 6001809 - DNA, 25 bp, Homo sapien
agttcgatctaagtatttcaaaaag

SEQ ID NO: 6001810 - DNA, 25 bp, Homo sapien
tcgaatcaaggacttgtgatgatcc

SEQ ID NO: 6001811 - DNA, 25 bp, Homo sapien
aaaaggttgggggctgattgccggc

SEQ ID NO: 6001812 - DNA, 25 bp, Homo sapien
ctggggcgaaagttcctgagagttt

SEQ ID NO: 6001813 - DNA, 25 bp, Homo sapien
taagactgccgagcatactagaaag

SEQ ID NO: 6001814 - DNA, 25 bp, Homo sapien
tgagattaatgaggtccaaggttaa

SEQ ID NO: 6001815 - DNA, 25 bp, Homo sapien
atgggatgtagcatgattcctgttt

SEQ ID NO: 6001816 - DNA, 25 bp, Homo sapien
taagtgtaagactgccgagcatact

SEQ ID NO: 6001817 - DNA, 25 bp, Homo sapien
catatgcgtcgatgttcatgtccat

SEQ ID NO: 6001818 - DNA, 25 bp, Homo sapien
cactatgctttctgctcaaacgagg

SEQ ID NO: 6001819 - DNA, 25 bp, Homo sapien
gcaatgagaagctaatcgaatcttc

SEQ ID NO: 6001820 - DNA, 25 bp, Homo sapien
tcgatgcgttagcttctataccaga

SEQ ID NO: 6001821 - DNA, 25 bp, Homo sapien
gcagagggtattacgctagatggac

SEQ ID NO: 6001822 - DNA, 25 bp, Homo sapien
ttgggggctgattgccggcatatgc

SEQ ID NO: 6001823 - DNA, 25 bp, Homo sapien
tggacctaaaatgggatatttaaca

SEQ ID NO: 6001824 - DNA, 25 bp, Homo sapien
ggaagagaaagcatattcctgttga

SEQ ID NO: 6001825 - DNA, 25 bp, Homo sapien
aattacggcggagtaaatattgact

SEQ ID NO: 6001826 - DNA, 25 bp, Homo sapien
gggggctgattgccggcatatgcgt

SEQ ID NO: 6001827 - DNA, 25 bp, Homo sapien
tgtccataggctgtgtaaaatgtgg

SEQ ID NO: 6001828 - DNA, 25 bp, Homo sapien
cctagtgaaaaagtcgatccaaaga

SEQ ID NO: 6001829 - DNA, 25 bp, Homo sapien
cttctataccagaaaagccaatttc

SEQ ID NO: 6001830 - DNA, 25 bp, Homo sapien
aaggcactgaagccaatagagtatt

SEQ ID NO: 6001831 - DNA, 25 bp, Homo sapien
atttcttattggcactatgctttct

SEQ ID NO: 6001832 - DNA, 25 bp, Homo sapien
ttacccatatataatcgggtgagat

SEQ ID NO: 6001833 - DNA, 25 bp, Homo sapien
ttcatcaattggaggacaaagaaga

SEQ ID NO: 6001834 - DNA, 25 bp, Homo sapien
atgctcgcaatgagaagctaatcga

SEQ ID NO: 6001835 - DNA, 25 bp, Homo sapien
ttacaaatggaattacaacagaaag

SEQ ID NO: 6001836 - DNA, 25 bp, Homo sapien
aaaatagcagagggtattacgctag

SEQ ID NO: 6001837 - DNA, 25 bp, Homo sapien
ggtaagaggtgtgatttatgtctag

SEQ ID NO: 6001838 - DNA, 25 bp, Homo sapien
gttacctggagttggacctaaaatg

SEQ ID NO: 6001839 - DNA, 25 bp, Homo sapien
ctcgttacctggagttggacctaaa

SEQ ID NO: 6001840 - DNA, 25 bp, Homo sapien
ggacacggttacaaatggaattaca

SEQ ID NO: 6001841 - DNA, 25 bp, Homo sapien
gagttggacctaaaatgggatattt

SEQ ID NO: 6001842 - DNA, 25 bp, Homo sapien
cgatccaaagaatttcaggcttcaa

SEQ ID NO: 6001843 - DNA, 25 bp, Homo sapien
gggatgtagcatgattcctgtttta

SEQ ID NO: 6001844 - DNA, 25 bp, Homo sapien
tttcaggcttcaatttcttattggc

SEQ ID NO: 6001845 - DNA, 25 bp, Homo sapien
atttgcaaaattacggcggagtaaa

SEQ ID NO: 6001846 - DNA, 25 bp, Homo sapien
gactgcttaaaattgatgaacctgt

SEQ ID NO: 6001847 - DNA, 25 bp, Homo sapien
taaaaatagcagagggtattacgct

SEQ ID NO: 6001848 - DNA, 25 bp, Homo sapien
atttcgattcagatataccgtatga

SEQ ID NO: 6001849 - DNA, 25 bp, Homo sapien
gattctggggcgaaagttcctgaga

SEQ ID NO: 6001850 - DNA, 25 bp, Homo sapien
ttcatcaaaagaaccgcacaattat

SEQ ID NO: 6001851 - DNA, 25 bp, Homo sapien
aagaaccgcacaattattggtagac

SEQ ID NO: 6001852 - DNA, 25 bp, Homo sapien
aatagcagagggtattacgctagat

SEQ ID NO: 6001853 - DNA, 25 bp, Homo sapien
gcttaaaattgatgaacctgtatta

SEQ ID NO: 6001854 - DNA, 25 bp, Homo sapien
tatgatatagagggaattctctcgt

SEQ ID NO: 6001855 - DNA, 25 bp, Homo sapien
attgggtagaccctattaagtgtaa

SEQ ID NO: 6001856 - DNA, 25 bp, Homo sapien
caataaagatttgcaaaattacggc

SEQ ID NO: 6001857 - DNA, 25 bp, Homo sapien
gtcgatccaaagaatttcaggcttc

SEQ ID NO: 6001858 - DNA, 25 bp, Homo sapien
atgtgggatacctagtgaaaaagtc

SEQ ID NO: 6001859 - DNA, 25 bp, Homo sapien
cgaaagttcctgagagtttcttacc

SEQ ID NO: 6001860 - DNA, 25 bp, Homo sapien
aaagaagaaatgattaacgattctg

SEQ ID NO: 6001861 - DNA, 25 bp, Homo sapien
taccagaaaagccaatttcatcaaa

SEQ ID NO: 6001862 - DNA, 25 bp, Homo sapien
ataaagatttgcaaaattacggcgg

SEQ ID NO: 6001863 - DNA, 25 bp, Homo sapien
tgttcatgtccataggctgtgtaaa

SEQ ID NO: 6001864 - DNA, 25 bp, Homo sapien
agactgccgagcatactagaaagga

SEQ ID NO: 6001865 - DNA, 25 bp, Homo sapien
ctacctcactcactgtggtacgaaa

SEQ ID NO: 6001866 - DNA, 25 bp, Homo sapien
gtattttgaatggatcgaatcaagg

SEQ ID NO: 6001867 - DNA, 25 bp, Homo sapien
ggtagaccctattaagtgtaagact

SEQ ID NO: 6001868 - DNA, 25 bp, Homo sapien
tttgaatatcaccgaatactgctta

SEQ ID NO: 6001869 - DNA, 25 bp, Homo sapien
ttaaaattgatgaacctgtattagc

SEQ ID NO: 6001870 - DNA, 25 bp, Homo sapien
ggcgaaagttcctgagagtttctta

SEQ ID NO: 6001871 - DNA, 25 bp, Homo sapien
ttaacactgcaaaaaggttgggggc

SEQ ID NO: 6001872 - DNA, 25 bp, Homo sapien
atattgactggatcaaggcactgaa

SEQ ID NO: 6001873 - DNA, 25 bp, Homo sapien
ccagaaaagccaatttcatcaaaag

SEQ ID NO: 6001874 - DNA, 25 bp, Homo sapien
acctcactcactgtggtacgaaata

SEQ ID NO: 6001875 - DNA, 25 bp, Homo sapien
tctaataaatgtgggatacctagtg

SEQ ID NO: 6001876 - DNA, 25 bp, Homo sapien
gagagaggaaagtaggtctaggaag

SEQ ID NO: 6001877 - DNA, 25 bp, Homo sapien
tataccagaaaagccaatttcatca

SEQ ID NO: 6001878 - DNA, 25 bp, Homo sapien
ttggtagacaatttcgattcagata

SEQ ID NO: 6001879 - DNA, 25 bp, Homo sapien
gggctgattgccggcatatgcgtcg

SEQ ID NO: 6001880 - DNA, 25 bp, Homo sapien
gggacggccaataactaaagaagaa

SEQ ID NO: 6001881 - DNA, 25 bp, Homo sapien
gcttaaacacattaaaaatagcaga

SEQ ID NO: 6001882 - DNA, 25 bp, Homo sapien
tattcgcattggttggacacggtta

SEQ ID NO: 6001883 - DNA, 25 bp, Homo sapien
tggaattgggtagaccctattaagt

SEQ ID NO: 6001884 - DNA, 25 bp, Homo sapien
caatttcttattggcactatgcttt

SEQ ID NO: 6001885 - DNA, 25 bp, Homo sapien
ttaaaaccccggtagatgctatggg

SEQ ID NO: 6001886 - DNA, 25 bp, Homo sapien
cgaatactgcttaaacacattaaaa

SEQ ID NO: 6001887 - DNA, 25 bp, Homo sapien
aagagaaagcatattcctgttgata

SEQ ID NO: 6001888 - DNA, 25 bp, Homo sapien
tgtattagcaaatctaattcgatgc

SEQ ID NO: 6001889 - DNA, 25 bp, Homo sapien
cataggctgtgtaaaatgtggaatt

SEQ ID NO: 6001890 - DNA, 25 bp, Homo sapien
attaagtgtaagactgccgagcata

SEQ ID NO: 6001891 - DNA, 25 bp, Homo sapien
aattgatctgcatggccaggggtaa

SEQ ID NO: 6001892 - DNA, 25 bp, Homo sapien
tcgcaatgagaagctaatcgaatct

SEQ ID NO: 6001893 - DNA, 25 bp, Homo sapien
gatgaacctgtattagcaaatctaa

SEQ ID NO: 6001894 - DNA, 25 bp, Homo sapien
cctaaaatgggatatttaacactgc

SEQ ID NO: 6001895 - DNA, 25 bp, Homo sapien
ggtctaggaagagaaagcatattcc

SEQ ID NO: 6001896 - DNA, 25 bp, Homo sapien
ctgtgtaaaatgtggaattgggtag

SEQ ID NO: 6001897 - DNA, 25 bp, Homo sapien
tgctcaaacgagggacgaaaggatg

SEQ ID NO: 6001898 - DNA, 25 bp, Homo sapien
cactgaagccaatagagtattttga

SEQ ID NO: 6001899 - DNA, 25 bp, Homo sapien
attcctgttgatattgaagaggtag

SEQ ID NO: 6001900 - DNA, 25 bp, Homo sapien
tgatatagagggaattctctcgtta

SEQ ID NO: 6001901 - DNA, 25 bp, Homo sapien
agttacaggtttggctacctcactc

SEQ ID NO: 6001902 - DNA, 25 bp, Homo sapien
ttggacacggttacaaatggaatta

SEQ ID NO: 6001903 - DNA, 25 bp, Homo sapien
ttggttggacacggttacaaatgga

SEQ ID NO: 6001904 - DNA, 25 bp, Homo sapien
aatggatcgaatcaaggacttgtga

SEQ ID NO: 6001905 - DNA, 25 bp, Homo sapien
atattgaagaggtagaagttcgatc

SEQ ID NO: 6001906 - DNA, 25 bp, Homo sapien
ggggtaagaggtgtgatttatgtct

SEQ ID NO: 6001907 - DNA, 25 bp, Homo sapien
attcgatgcgttagcttctatacca

SEQ ID NO: 6001908 - DNA, 25 bp, Homo sapien
aagtcgatccaaagaatttcaggct

SEQ ID NO: 6001909 - DNA, 25 bp, Homo sapien
cgagggacgaaaggatggcgcaagc

SEQ ID NO: 6001910 - DNA, 25 bp, Homo sapien
agattaatgaggtccaaggttaaaa

SEQ ID NO: 6001911 - DNA, 25 bp, Homo sapien
tagacaatttcgattcagatatacc

SEQ ID NO: 6001912 - DNA, 25 bp, Homo sapien
cgcaagcggctttgaatatcaccga

SEQ ID NO: 6001913 - DNA, 25 bp, Homo sapien
agaaaagccaatttcatcaaaagaa

SEQ ID NO: 6001914 - DNA, 25 bp, Homo sapien
accgtatgatatagagggaattctc

SEQ ID NO: 6001915 - DNA, 25 bp, Homo sapien
aacctgtattagcaaatctaattcg

SEQ ID NO: 6001916 - DNA, 25 bp, Homo sapien
acgaaaggatggcgcaagcggcttt

SEQ ID NO: 6001917 - DNA, 25 bp, Homo sapien
tgagagtttcttacccatatataat

SEQ ID NO: 6001918 - DNA, 25 bp, Homo sapien
ggcactgaagccaatagagtatttt

SEQ ID NO: 6001919 - DNA, 25 bp, Homo sapien
tgaatggatcgaatcaaggacttgt

SEQ ID NO: 6001920 - DNA, 25 bp, Homo sapien
tgccggcatatgcgtcgatgttcat

SEQ ID NO: 6001921 - DNA, 25 bp, Homo sapien
gatatttaacactgcaaaaaggttg

SEQ ID NO: 6001922 - DNA, 25 bp, Homo sapien
gagtaaatattgactggatcaaggc

SEQ ID NO: 6001923 - DNA, 25 bp, Homo sapien
tagtgaaaaagtcgatccaaagaat

SEQ ID NO: 6001924 - DNA, 25 bp, Homo sapien
acccatatataatcgggtgagatta

SEQ ID NO: 6001925 - DNA, 25 bp, Homo sapien
caaagaagacatcgagaaagtatat

SEQ ID NO: 6001926 - DNA, 25 bp, Homo sapien
gagaggaaagtaggtctaggaagag

SEQ ID NO: 6001927 - DNA, 25 bp, Homo sapien
taatcgaatcttccaaatttcatca

SEQ ID NO: 6001928 - DNA, 25 bp, Homo sapien
ttctctcgttacctggagttggacc

SEQ ID NO: 6001929 - DNA, 25 bp, Homo sapien
atgagagaggaaagtaggtctagga

SEQ ID NO: 6001930 - DNA, 25 bp, Homo sapien
ggatttggtcaattgatctgcatgg

SEQ ID NO: 6001931 - DNA, 25 bp, Homo sapien
tatgtctagcaaacgatgtctgcaa

SEQ ID NO: 6001932 - DNA, 25 bp, Homo sapien
ggttggacacggttacaaatggaat

SEQ ID NO: 6001933 - DNA, 25 bp, Homo sapien
tttctgctcaaacgagggacgaaag

SEQ ID NO: 6001934 - DNA, 25 bp, Homo sapien
aaagtatattcgcattggttggaca

SEQ ID NO: 6001935 - DNA, 25 bp, Homo sapien
gaagccaatagagtattttgaatgg

SEQ ID NO: 6001936 - DNA, 25 bp, Homo sapien
gaaatgattaacgattctggggcga

SEQ ID NO: 6001937 - DNA, 25 bp, Homo sapien
aggcttcaatttcttattggcacta

SEQ ID NO: 6001938 - DNA, 25 bp, Homo sapien
tatcaccgaatactgcttaaacaca

SEQ ID NO: 6001939 - DNA, 25 bp, Homo sapien
tgtctagcaaacgatgtctgcaatg

SEQ ID NO: 6001940 - DNA, 25 bp, Homo sapien
tacctagtgaaaaagtcgatccaaa

SEQ ID NO: 6001941 - DNA, 25 bp, Homo sapien
tctgctcaaacgagggacgaaagga

SEQ ID NO: 6001942 - DNA, 25 bp, Homo sapien
ctgcatggccaggggtaagaggtgt

SEQ ID NO: 6001943 - DNA, 25 bp, Homo sapien
gcatgattcctgttttagtttctaa

SEQ ID NO: 6001944 - DNA, 25 bp, Homo sapien
gaaaggatggcgcaagcggctttga

SEQ ID NO: 6001945 - DNA, 25 bp, Homo sapien
ttggctacctcactcactgtggtac

SEQ ID NO: 6001946 - DNA, 25 bp, Homo sapien
gacggccaataactaaagaagaaat

SEQ ID NO: 6001947 - DNA, 25 bp, Homo sapien
ttagcaaatctaattcgatgcgtta

SEQ ID NO: 6001948 - DNA, 25 bp, Homo sapien
tacctggagttggacctaaaatggg

SEQ ID NO: 6001949 - DNA, 25 bp, Homo sapien
acattaaaaatagcagagggtatta

SEQ ID NO: 6001950 - DNA, 25 bp, Homo sapien
gggatacctagtgaaaaagtcgatc

SEQ ID NO: 6001951 - DNA, 25 bp, Homo sapien
attaaaaatagcagagggtattacg

SEQ ID NO: 6001952 - DNA, 25 bp, Homo sapien
caagcggctttgaatatcaccgaat

SEQ ID NO: 6001953 - DNA, 25 bp, Homo sapien
agggaattctctcgttacctggagt

SEQ ID NO: 6001954 - DNA, 25 bp, Homo sapien
ctcactcactgtggtacgaaataaa

SEQ ID NO: 6001955 - DNA, 25 bp, Homo sapien
atggcgcaagcggctttgaatatca

SEQ ID NO: 6001956 - DNA, 25 bp, Homo sapien
cttggggacggccaataactaaaga

SEQ ID NO: 6001957 - DNA, 25 bp, Homo sapien
tagagtattttgaatggatcgaatc

SEQ ID NO: 6001958 - DNA, 25 bp, Homo sapien
tatattcgcattggttggacacggt

SEQ ID NO: 6001959 - DNA, 25 bp, Homo sapien
tattagcaaatctaattcgatgcgt

SEQ ID NO: 6001960 - DNA, 25 bp, Homo sapien
gagagaactgttgagttagtaaaag

SEQ ID NO: 6001961 - DNA, 25 bp, Homo sapien
cgtcgatgttcatgtccataggctg

SEQ ID NO: 6001962 - DNA, 25 bp, Homo sapien
tcttccaaatttcatcaattggagg

SEQ ID NO: 6001963 - DNA, 25 bp, Homo sapien
acgatgtctgcaatgctcgcaatga

SEQ ID NO: 6001964 - DNA, 25 bp, Homo sapien
ttttggttggatttggtcaattgat

SEQ ID NO: 6001965 - DNA, 25 bp, Homo sapien
aagaatgagagaactgttgagttag

SEQ ID NO: 6001966 - DNA, 25 bp, Homo sapien
taggtctaggaagagaaagcatatt

SEQ ID NO: 6001967 - DNA, 25 bp, Homo sapien
atcaataaagatttgcaaaattacg

SEQ ID NO: 6001968 - DNA, 25 bp, Homo sapien
atttcatcaaaagaaccgcacaatt

SEQ ID NO: 6001969 - DNA, 25 bp, Homo sapien
gcatattcctgttgatattgaagag

SEQ ID NO: 6001970 - DNA, 25 bp, Homo sapien
aaatattgactggatcaaggcactg

SEQ ID NO: 6001971 - DNA, 25 bp, Homo sapien
acaaatggaattacaacagaaagac

SEQ ID NO: 6001972 - DNA, 25 bp, Homo sapien
agttcctgagagtttcttacccata

SEQ ID NO: 6001973 - DNA, 25 bp, Homo sapien
ggttaaaaccccggtagatgctatg

SEQ ID NO: 6001974 - DNA, 25 bp, Homo sapien
ggtcaattgatctgcatggccaggg

SEQ ID NO: 6001975 - DNA, 25 bp, Homo sapien
actagaaaggagttacaggtttggc

SEQ ID NO: 6001976 - DNA, 25 bp, Homo sapien
tcaggcttcaatttcttattggcac

SEQ ID NO: 6001977 - DNA, 25 bp, Homo sapien
taacgattctggggcgaaagttcct

SEQ ID NO: 6001978 - DNA, 25 bp, Homo sapien
acgattctggggcgaaagttcctga

SEQ ID NO: 6001979 - DNA, 25 bp, Homo sapien
tctaggaagagaaagcatattcctg

SEQ ID NO: 6001980 - DNA, 25 bp, Homo sapien
aaggagttacaggtttggctacctc

SEQ ID NO: 6001981 - DNA, 25 bp, Homo sapien
ttacgctagatggactgcttaaaat

SEQ ID NO: 6001982 - DNA, 25 bp, Homo sapien
aaacacattaaaaatagcagagggt

SEQ ID NO: 6001983 - DNA, 25 bp, Homo sapien
tcaccgaatactgcttaaacacatt

SEQ ID NO: 6001984 - DNA, 25 bp, Homo sapien
caaaaagaatgagagaactgttgag

SEQ ID NO: 6001985 - DNA, 25 bp, Homo sapien
atccaaagaatttcaggcttcaatt

SEQ ID NO: 6001986 - DNA, 25 bp, Homo sapien
tcgatgttcatgtccataggctgtg

SEQ ID NO: 6001987 - DNA, 25 bp, Homo sapien
cgcattggttggacacggttacaaa

SEQ ID NO: 6001988 - DNA, 25 bp, Homo sapien
ggtattacgctagatggactgctta

SEQ ID NO: 6001989 - DNA, 25 bp, Homo sapien
agaagaaatgattaacgattctggg

SEQ ID NO: 6001990 - DNA, 25 bp, Homo sapien
agtaggtctaggaagagaaagcata

SEQ ID NO: 6001991 - DNA, 25 bp, Homo sapien
agccaatagagtattttgaatggat

SEQ ID NO: 6001992 - DNA, 25 bp, Homo sapien
ggtagacaatttcgattcagatata

SEQ ID NO: 6001993 - DNA, 25 bp, Homo sapien
cactcactgtggtacgaaataaaca

SEQ ID NO: 6001994 - DNA, 25 bp, Homo sapien
tgatgatccgagaacttggggacgg

SEQ ID NO: 6001995 - DNA, 25 bp, Homo sapien
tgcgttagcttctataccagaaaag

SEQ ID NO: 6001996 - DNA, 25 bp, Homo sapien
caaatctaattcgatgcgttagctt

SEQ ID NO: 6001997 - DNA, 25 bp, Homo sapien
gatgctatgggatgtagcatgattc

SEQ ID NO: 6001998 - DNA, 25 bp, Homo sapien
tcttacccatatataatcgggtgag

SEQ ID NO: 6001999 - DNA, 25 bp, Homo sapien
cctgttttagtttctaataaatgtg

SEQ ID NO: 6002000 - DNA, 25 bp, Homo sapien
atcaaggacttgtgatgatccgaga

SEQ ID NO: 6002001 - DNA, 25 bp, Homo sapien
ctctcgttacctggagttggaccta

SEQ ID NO: 6002002 - DNA, 25 bp, Homo sapien
caatgctcgcaatgagaagctaatc

SEQ ID NO: 6002003 - DNA, 25 bp, Homo sapien
acatcgagaaagtatattcgcattg

SEQ ID NO: 6002004 - DNA, 25 bp, Homo sapien
agagggtattacgctagatggactg

SEQ ID NO: 6002005 - DNA, 25 bp, Homo sapien
gacctaaaatgggatatttaacact

SEQ ID NO: 6002006 - DNA, 25 bp, Homo sapien
ggcactatgctttctgctcaaacga

SEQ ID NO: 6002007 - DNA, 25 bp, Homo sapien
aaaagaaccgcacaattattggtag

SEQ ID NO: 6002008 - DNA, 25 bp, Homo sapien
gaagttcgatctaagtatttcaaaa

SEQ ID NO: 6002009 - DNA, 25 bp, Homo sapien
catcaaaagaaccgcacaattattg

SEQ ID NO: 6002010 - DNA, 25 bp, Homo sapien
gatcaaggcactgaagccaatagag

SEQ ID NO: 6002011 - DNA, 25 bp, Homo sapien
aagcatattcctgttgatattgaag

SEQ ID NO: 6002012 - DNA, 25 bp, Homo sapien
gatgtctgcaatgctcgcaatgaga

SEQ ID NO: 6002013 - DNA, 25 bp, Homo sapien
aagaaatgattaacgattctggggc

SEQ ID NO: 6002014 - DNA, 25 bp, Homo sapien
tttcaaaaagaatgagagaactgtt

SEQ ID NO: 6002015 - DNA, 25 bp, Homo sapien
gtgatttatgtctagcaaacgatgt

SEQ ID NO: 6002016 - DNA, 25 bp, Homo sapien
tctagcaaacgatgtctgcaatgct

SEQ ID NO: 6002017 - DNA, 25 bp, Homo sapien
atcgaatcttccaaatttcatcaat

SEQ ID NO: 6002018 - DNA, 25 bp, Homo sapien
acaggtttggctacctcactcactg

SEQ ID NO: 6002019 - DNA, 25 bp, Homo sapien
atactagaaaggagttacaggtttg

SEQ ID NO: 6002020 - DNA, 25 bp, Homo sapien
aagaagacatcgagaaagtatattc

SEQ ID NO: 6002021 - DNA, 25 bp, Homo sapien
cgattcagatataccgtatgatata

SEQ ID NO: 6002022 - DNA, 25 bp, Homo sapien
caattattggtagacaatttcgatt

SEQ ID NO: 6002023 - DNA, 25 bp, Homo sapien
actggatcaaggcactgaagccaat

SEQ ID NO: 6002024 - DNA, 25 bp, Homo sapien
ttgatctgcatggccaggggtaaga

SEQ ID NO: 6002025 - DNA, 25 bp, Homo sapien
atggaattacaacagaaagacacaa

SEQ ID NO: 6002026 - DNA, 25 bp, Homo sapien
tcaattgatctgcatggccaggggt

SEQ ID NO: 6002027 - DNA, 25 bp, Homo sapien
ttcgatctaagtatttcaaaaagaa

SEQ ID NO: 6002028 - DNA, 25 bp, Homo sapien
tgtggaattgggtagaccctattaa

SEQ ID NO: 6002029 - DNA, 25 bp, Homo sapien
tggagttggacctaaaatgggatat

SEQ ID NO: 6002030 - DNA, 25 bp, Homo sapien
attgactggatcaaggcactgaagc

SEQ ID NO: 6002031 - DNA, 25 bp, Homo sapien
agtttcttacccatatataatcggg

SEQ ID NO: 6002032 - DNA, 25 bp, Homo sapien
aggtttggctacctcactcactgtg

SEQ ID NO: 6002033 - DNA, 25 bp, Homo sapien
gcatactagaaaggagttacaggtt

SEQ ID NO: 6002034 - DNA, 25 bp, Homo sapien
cctgtattagcaaatctaattcgat

SEQ ID NO: 6002035 - DNA, 25 bp, Homo sapien
atttggtcaattgatctgcatggcc

SEQ ID NO: 6002036 - DNA, 25 bp, Homo sapien
atgatccgagaacttggggacggcc

SEQ ID NO: 6002037 - DNA, 25 bp, Homo sapien
tctataccagaaaagccaatttcat

SEQ ID NO: 6002038 - DNA, 25 bp, Homo sapien
ccaatagagtattttgaatggatcg

SEQ ID NO: 6002039 - DNA, 25 bp, Homo sapien
cactgcaaaaaggttgggggctgat

SEQ ID NO: 6002040 - DNA, 25 bp, Homo sapien
tatgcgtcgatgttcatgtccatag

SEQ ID NO: 6002041 - DNA, 25 bp, Homo sapien
gatgtagcatgattcctgttttagt

SEQ ID NO: 6002042 - DNA, 25 bp, Homo sapien
caaggacttgtgatgatccgagaac

SEQ ID NO: 6002043 - DNA, 25 bp, Homo sapien
gctcgcaatgagaagctaatcgaat

SEQ ID NO: 6002044 - DNA, 25 bp, Homo sapien
aaagttcctgagagtttcttaccca

SEQ ID NO: 6002045 - DNA, 25 bp, Homo sapien
ttaaacacattaaaaatagcagagg

SEQ ID NO: 6002046 - DNA, 25 bp, Homo sapien
cgagaaagtatattcgcattggttg

SEQ ID NO: 6002047 - DNA, 25 bp, Homo sapien
tgtaagactgccgagcatactagaa

SEQ ID NO: 6002048 - DNA, 25 bp, Homo sapien
tctgcaatgctcgcaatgagaagct

SEQ ID NO: 6002049 - DNA, 25 bp, Homo sapien
ttcctgttttagtttctaataaatg

SEQ ID NO: 6002050 - DNA, 25 bp, Homo sapien
ccgagcatactagaaaggagttaca

SEQ ID NO: 6002051 - DNA, 25 bp, Homo sapien
tagatggactgcttaaaattgatga

SEQ ID NO: 6002052 - DNA, 25 bp, Homo sapien
attttgaatggatcgaatcaaggac

SEQ ID NO: 6002053 - DNA, 25 bp, Homo sapien
tcaaaagaaccgcacaattattggt

SEQ ID NO: 6002054 - DNA, 25 bp, Homo sapien
tttgaatggatcgaatcaaggactt

SEQ ID NO: 6002055 - DNA, 25 bp, Homo sapien
agcttctataccagaaaagccaatt

SEQ ID NO: 6002056 - DNA, 25 bp, Homo sapien
aatttcaggcttcaatttcttattg

SEQ ID NO: 6002057 - DNA, 25 bp, Homo sapien
agtatattcgcattggttggacacg

SEQ ID NO: 6002058 - DNA, 25 bp, Homo sapien
tagcaaacgatgtctgcaatgctcg

SEQ ID NO: 6002059 - DNA, 25 bp, Homo sapien
aattggaggacaaagaagacatcga

SEQ ID NO: 6002060 - DNA, 25 bp, Homo sapien
aacactgcaaaaaggttgggggctg

SEQ ID NO: 6002061 - DNA, 25 bp, Homo sapien
cggccaataactaaagaagaaatga

SEQ ID NO: 6002062 - DNA, 25 bp, Homo sapien
tggatcgaatcaaggacttgtgatg

SEQ ID NO: 6002063 - DNA, 25 bp, Homo sapien
ggttacaaatggaattacaacagaa

SEQ ID NO: 6002064 - DNA, 25 bp, Homo sapien
gtaaatattgactggatcaaggcac

SEQ ID NO: 6002065 - DNA, 25 bp, Homo sapien
gtttggctacctcactcactgtggt

SEQ ID NO: 6002066 - DNA, 25 bp, Homo sapien
ttggttggatttggtcaattgatct

SEQ ID NO: 6002067 - DNA, 25 bp, Homo sapien
tttcttacccatatataatcgggtg

SEQ ID NO: 6002068 - DNA, 25 bp, Homo sapien
taagaggtgtgatttatgtctagca

SEQ ID NO: 6002069 - DNA, 25 bp, Homo sapien
aatctaattcgatgcgttagcttct

SEQ ID NO: 6002070 - DNA, 25 bp, Homo sapien
tggactgcttaaaattgatgaacct

SEQ ID NO: 6002071 - DNA, 25 bp, Homo sapien
atataccgtatgatatagagggaat

SEQ ID NO: 6002072 - DNA, 25 bp, Homo sapien
atatagagggaattctctcgttacc

SEQ ID NO: 6002073 - DNA, 25 bp, Homo sapien
gatcgaatcaaggacttgtgatgat

SEQ ID NO: 6002074 - DNA, 25 bp, Homo sapien
aaagatttgcaaaattacggcggag

SEQ ID NO: 6002075 - DNA, 25 bp, Homo sapien
taattcgatgcgttagcttctatac

SEQ ID NO: 6002076 - DNA, 25 bp, Homo sapien
gaatgagagaactgttgagttagta

SEQ ID NO: 6002077 - DNA, 25 bp, Homo sapien
ggatggcgcaagcggctttgaatat

SEQ ID NO: 6002078 - DNA, 25 bp, Homo sapien
gaccctattaagtgtaagactgccg

SEQ ID NO: 6002079 - DNA, 25 bp, Homo sapien
aagctaatcgaatcttccaaatttc

SEQ ID NO: 6002080 - DNA, 25 bp, Homo sapien
aatgagaagctaatcgaatcttcca

SEQ ID NO: 6002081 - DNA, 25 bp, Homo sapien
ttggatttggtcaattgatctgcat

SEQ ID NO: 6002082 - DNA, 25 bp, Homo sapien
gacaatttcgattcagatataccgt

SEQ ID NO: 6002083 - DNA, 25 bp, Homo sapien
gtaaaatgtggaattgggtagaccc

SEQ ID NO: 6002084 - DNA, 25 bp, Homo sapien
aaggatggcgcaagcggctttgaat

SEQ ID NO: 6002085 - DNA, 25 bp, Homo sapien
caatttcgattcagatataccgtat

SEQ ID NO: 6002086 - DNA, 25 bp, Homo sapien
gctttgaatatcaccgaatactgct

SEQ ID NO: 6002087 - DNA, 25 bp, Homo sapien
gaactgttgagttagtaaaagaaaa

SEQ ID NO: 6002088 - DNA, 25 bp, Homo sapien
taataaatgtgggatacctagtgaa

SEQ ID NO: 6002089 - DNA, 25 bp, Homo sapien
catgtccataggctgtgtaaaatgt

SEQ ID NO: 6002090 - DNA, 25 bp, Homo sapien
tgttttagtttctaataaatgtggg

SEQ ID NO: 6002091 - DNA, 25 bp, Homo sapien
tccataggctgtgtaaaatgtggaa

SEQ ID NO: 6002092 - DNA, 25 bp, Homo sapien
ggcgcaagcggctttgaatatcacc

SEQ ID NO: 6002093 - DNA, 25 bp, Homo sapien
ggtgagattaatgaggtccaaggtt

SEQ ID NO: 6002094 - DNA, 25 bp, Homo sapien
gctagatggactgcttaaaattgat

SEQ ID NO: 6002095 - DNA, 25 bp, Homo sapien
atagagggaattctctcgttacctg

SEQ ID NO: 6002096 - DNA, 25 bp, Homo sapien
ttctggggcgaaagttcctgagagt

SEQ ID NO: 6002097 - DNA, 25 bp, Homo sapien
gagtattttgaatggatcgaatcaa

SEQ ID NO: 6002098 - DNA, 25 bp, Homo sapien
tgcaatgctcgcaatgagaagctaa

SEQ ID NO: 6002099 - DNA, 25 bp, Homo sapien
cggctttgaatatcaccgaatactg

SEQ ID NO: 6002100 - DNA, 25 bp, Homo sapien
ggaaagtaggtctaggaagagaaag

SEQ ID NO: 6002101 - DNA, 25 bp, Homo sapien
agggtattacgctagatggactgct

SEQ ID NO: 6002102 - DNA, 25 bp, Homo sapien
gatggactgcttaaaattgatgaac

SEQ ID NO: 6002103 - DNA, 25 bp, Homo sapien
attaacgattctggggcgaaagttc

SEQ ID NO: 6002104 - DNA, 25 bp, Homo sapien
tgtagcatgattcctgttttagttt

SEQ ID NO: 6002105 - DNA, 25 bp, Homo sapien
acaccgttttggttggatttggtca

SEQ ID NO: 6002106 - DNA, 25 bp, Homo sapien
caaacgagggacgaaaggatggcgc

SEQ ID NO: 6002107 - DNA, 25 bp, Homo sapien
atttcatcaattggaggacaaagaa

SEQ ID NO: 6002108 - DNA, 25 bp, Homo sapien
aaaagccaatttcatcaaaagaacc

SEQ ID NO: 6002109 - DNA, 25 bp, Homo sapien
atattcctgttgatattgaagaggt

SEQ ID NO: 6002110 - DNA, 25 bp, Homo sapien
aaacgatgtctgcaatgctcgcaat

SEQ ID NO: 6002111 - DNA, 25 bp, Homo sapien
ggcatatgcgtcgatgttcatgtcc

SEQ ID NO: 6002112 - DNA, 25 bp, Homo sapien
atggccaggggtaagaggtgtgatt

SEQ ID NO: 6002113 - DNA, 25 bp, Homo sapien
aaagaatttcaggcttcaatttctt

SEQ ID NO: 6002114 - DNA, 25 bp, Homo sapien
ttcaatttcttattggcactatgct

SEQ ID NO: 6002115 - DNA, 25 bp, Homo sapien
ctcactgtggtacgaaataaacacc

SEQ ID NO: 6002116 - DNA, 25 bp, Homo sapien
tattggcactatgctttctgctcaa

SEQ ID NO: 6002117 - DNA, 25 bp, Homo sapien
attattggtagacaatttcgattca

SEQ ID NO: 6002118 - DNA, 25 bp, Homo sapien
ccaaatttcatcaattggaggacaa

SEQ ID NO: 6002119 - DNA, 25 bp, Homo sapien
acacattaaaaatagcagagggtat

SEQ ID NO: 6002120 - DNA, 25 bp, Homo sapien
tgactggatcaaggcactgaagcca

SEQ ID NO: 6002121 - DNA, 25 bp, Homo sapien
aatactgcttaaacacattaaaaat

SEQ ID NO: 6002122 - DNA, 25 bp, Homo sapien
gatgttcatgtccataggctgtgta

SEQ ID NO: 6002123 - DNA, 25 bp, Homo sapien
ggccaggggtaagaggtgtgattta

SEQ ID NO: 6002124 - DNA, 25 bp, Homo sapien
ataaatgtgggatacctagtgaaaa

SEQ ID NO: 6002125 - DNA, 25 bp, Homo sapien
cgcacaattattggtagacaatttc

SEQ ID NO: 6002126 - DNA, 25 bp, Homo sapien
accgaatactgcttaaacacattaa

SEQ ID NO: 6002127 - DNA, 25 bp, Homo sapien
gcaaacgatgtctgcaatgctcgca

SEQ ID NO: 6002128 - DNA, 25 bp, Homo sapien
gacttgtgatgatccgagaacttgg

SEQ ID NO: 6002129 - DNA, 25 bp, Homo sapien
attgccggcatatgcgtcgatgttc

SEQ ID NO: 6002130 - DNA, 25 bp, Homo sapien
cgagaacttggggacggccaataac

SEQ ID NO: 6002131 - DNA, 25 bp, Homo sapien
gaaagcatattcctgttgatattga

SEQ ID NO: 6002132 - DNA, 25 bp, Homo sapien
agtttctaataaatgtgggatacct

SEQ ID NO: 6002133 - DNA, 25 bp, Homo sapien
ccggtagatgctatgggatgtagca

SEQ ID NO: 6002134 - DNA, 25 bp, Homo sapien
caaaaaggttgggggctgattgccg

SEQ ID NO: 6002135 - DNA, 25 bp, Homo sapien
ttgatgaacctgtattagcaaatct

SEQ ID NO: 6002136 - DNA, 25 bp, Homo sapien
aattacaacagaaagacacaagaaa

SEQ ID NO: 6002137 - DNA, 25 bp, Homo sapien
tggatcaaggcactgaagccaatag

SEQ ID NO: 6002138 - DNA, 25 bp, Homo sapien
gctttctgctcaaacgagggacgaa

SEQ ID NO: 6002139 - DNA, 25 bp, Homo sapien
ggacgaaaggatggcgcaagcggct

SEQ ID NO: 6002140 - DNA, 25 bp, Homo sapien
ttcatgtccataggctgtgtaaaat

SEQ ID NO: 6002141 - DNA, 25 bp, Homo sapien
tactgcttaaacacattaaaaatag

SEQ ID NO: 6002142 - DNA, 25 bp, Homo sapien
ttggaggacaaagaagacatcgaga

SEQ ID NO: 6002143 - DNA, 25 bp, Homo sapien
ctgttgatattgaagaggtagaagt

SEQ ID NO: 6002144 - DNA, 25 bp, Homo sapien
ttcttattggcactatgctttctgc

SEQ ID NO: 6002145 - DNA, 25 bp, Homo sapien
aagccaatttcatcaaaagaaccgc

SEQ ID NO: 6002146 - DNA, 25 bp, Homo sapien
tagcatgattcctgttttagtttct

SEQ ID NO: 6002147 - DNA, 25 bp, Homo sapien
tctaattcgatgcgttagcttctat

SEQ ID NO: 6002148 - DNA, 25 bp, Homo sapien
ggagttacaggtttggctacctcac

SEQ ID NO: 6002149 - DNA, 25 bp, Homo sapien
tgccgagcatactagaaaggagtta

SEQ ID NO: 6002150 - DNA, 25 bp, Homo sapien
gtgaaaaagtcgatccaaagaattt

SEQ ID NO: 6002151 - DNA, 25 bp, Homo sapien
aggacttgtgatgatccgagaactt

SEQ ID NO: 6002152 - DNA, 25 bp, Homo sapien
tagatgctatgggatgtagcatgat

SEQ ID NO: 6002153 - DNA, 25 bp, Homo sapien
aatgtggaattgggtagaccctatt

SEQ ID NO: 6002154 - DNA, 25 bp, Homo sapien
ggctacctcactcactgtggtacga

SEQ ID NO: 6002155 - DNA, 25 bp, Homo sapien
tagaccctattaagtgtaagactgc

SEQ ID NO: 6002156 - DNA, 25 bp, Homo sapien
tcagatataccgtatgatatagagg

SEQ ID NO: 6002157 - DNA, 25 bp, Homo sapien
gaaccgcacaattattggtagacaa

SEQ ID NO: 6002158 - DNA, 25 bp, Homo sapien
atcgagaaagtatattcgcattggt

SEQ ID NO: 6002159 - DNA, 25 bp, Homo sapien
cttgtgatgatccgagaacttgggg

SEQ ID NO: 6002160 - DNA, 25 bp, Homo sapien
cgaatcttccaaatttcatcaattg

SEQ ID NO: 6002161 - DNA, 25 bp, Homo sapien
agcaaatctaattcgatgcgttagc

SEQ ID NO: 6002162 - DNA, 25 bp, Homo sapien
gagaactgttgagttagtaaaagaa

SEQ ID NO: 6002163 - DNA, 25 bp, Homo sapien
tgggtagaccctattaagtgtaaga

SEQ ID NO: 6002164 - DNA, 25 bp, Homo sapien
cattggttggacacggttacaaatg

SEQ ID NO: 6002165 - DNA, 25 bp, Homo sapien
gaattgggtagaccctattaagtgt

SEQ ID NO: 6002166 - DNA, 25 bp, Homo sapien
ttggtcaattgatctgcatggccag

SEQ ID NO: 6002167 - DNA, 25 bp, Homo sapien
acacggttacaaatggaattacaac

SEQ ID NO: 6002168 - DNA, 25 bp, Homo sapien
tgattgccggcatatgcgtcgatgt

SEQ ID NO: 6002169 - DNA, 25 bp, Homo sapien
ttcgattcagatataccgtatgata

SEQ ID NO: 6002170 - DNA, 25 bp, Homo sapien
ttcgcattggttggacacggttaca

SEQ ID NO: 6002171 - DNA, 25 bp, Homo sapien
agatataccgtatgatatagaggga

SEQ ID NO: 6002172 - DNA, 25 bp, Homo sapien
atgggatatttaacactgcaaaaag

SEQ ID NO: 6002173 - DNA, 25 bp, Homo sapien
attcagatataccgtatgatataga

SEQ ID NO: 6002174 - DNA, 25 bp, Homo sapien
ccccggtagatgctatgggatgtag

SEQ ID NO: 6002175 - DNA, 25 bp, Homo sapien
agaacttggggacggccaataacta

SEQ ID NO: 6002176 - DNA, 25 bp, Homo sapien
ttccaaatttcatcaattggaggac

SEQ ID NO: 6002177 - DNA, 25 bp, Homo sapien
aaagtaggtctaggaagagaaagca

SEQ ID NO: 6002178 - DNA, 25 bp, Homo sapien
gaagacatcgagaaagtatattcgc

SEQ ID NO: 6002179 - DNA, 25 bp, Homo sapien
ctatgctttctgctcaaacgaggga

SEQ ID NO: 6002180 - DNA, 25 bp, Homo sapien
tgaatatcaccgaatactgcttaaa

SEQ ID NO: 6002181 - DNA, 25 bp, Homo sapien
tgcgtcgatgttcatgtccataggc

SEQ ID NO: 6002182 - DNA, 25 bp, Homo sapien
agatttgcaaaattacggcggagta

SEQ ID NO: 6002183 - DNA, 25 bp, Homo sapien
ttagtttctaataaatgtgggatac

SEQ ID NO: 6002184 - DNA, 25 bp, Homo sapien
ggcggagtaaatattgactggatca

SEQ ID NO: 6002185 - DNA, 25 bp, Homo sapien
ggaattacaacagaaagacacaaga

SEQ ID NO: 6002186 - DNA, 25 bp, Homo sapien
agcggctttgaatatcaccgaatac

SEQ ID NO: 6002187 - DNA, 25 bp, Homo sapien
ctgaagccaatagagtattttgaat

SEQ ID NO: 6002188 - DNA, 25 bp, Homo sapien
ctattaagtgtaagactgccgagca

SEQ ID NO: 6002189 - DNA, 25 bp, Homo sapien
agggacgaaaggatggcgcaagcgg

SEQ ID NO: 6002190 - DNA, 25 bp, Homo sapien
ccaaagaatttcaggcttcaatttc

SEQ ID NO: 6002191 - DNA, 25 bp, Homo sapien
tagaagttcgatctaagtatttcaa

SEQ ID NO: 6002192 - DNA, 25 bp, Homo sapien
gcaaaattacggcggagtaaatatt

SEQ ID NO: 6002193 - DNA, 25 bp, Homo sapien
tagcagagggtattacgctagatgg

SEQ ID NO: 6002194 - DNA, 25 bp, Homo sapien
atgagagaactgttgagttagtaaa

SEQ ID NO: 6002195 - DNA, 25 bp, Homo sapien
tattacgctagatggactgcttaaa

SEQ ID NO: 6002196 - DNA, 25 bp, Homo sapien
aggtgtgatttatgtctagcaaacg

SEQ ID NO: 6002197 - DNA, 25 bp, Homo sapien
cttattggcactatgctttctgctc

SEQ ID NO: 6002198 - DNA, 25 bp, Homo sapien
agaggtgtgatttatgtctagcaaa

SEQ ID NO: 6002199 - DNA, 25 bp, Homo sapien
ttggcactatgctttctgctcaaac

SEQ ID NO: 6002200 - DNA, 25 bp, Homo sapien
cggagtaaatattgactggatcaag

SEQ ID NO: 6002201 - DNA, 25 bp, Homo sapien
aaccccggtagatgctatgggatgt

SEQ ID NO: 6002202 - DNA, 25 bp, Homo sapien
gatctgcatggccaggggtaagagg

SEQ ID NO: 6002203 - DNA, 25 bp, Homo sapien
ggtagatgctatgggatgtagcatg

SEQ ID NO: 6002204 - DNA, 25 bp, Homo sapien
tattggtagacaatttcgattcaga

SEQ ID NO: 6002205 - DNA, 25 bp, Homo sapien
ggctgtgtaaaatgtggaattgggt

SEQ ID NO: 6002206 - DNA, 25 bp, Homo sapien
aaaagaatgagagaactgttgagtt

SEQ ID NO: 6002207 - DNA, 25 bp, Homo sapien
agaaagtatattcgcattggttgga

SEQ ID NO: 6002208 - DNA, 25 bp, Homo sapien
ccggcatatgcgtcgatgttcatgt

SEQ ID NO: 6002209 - DNA, 25 bp, Homo sapien
gcatggccaggggtaagaggtgtga

SEQ ID NO: 6002210 - DNA, 25 bp, Homo sapien
gaaaaagtcgatccaaagaatttca

SEQ ID NO: 6002211 - DNA, 25 bp, Homo sapien
atgctttctgctcaaacgagggacg

SEQ ID NO: 6002212 - DNA, 25 bp, Homo sapien
acggttacaaatggaattacaacag

SEQ ID NO: 6002213 - DNA, 25 bp, Homo sapien
gatacctagtgaaaaagtcgatcca

SEQ ID NO: 6002214 - DNA, 25 bp, Homo sapien
tcctgttgatattgaagaggtagaa

SEQ ID NO: 6002215 - DNA, 25 bp, Homo sapien
actgccgagcatactagaaaggagt

SEQ ID NO: 6002216 - DNA, 25 bp, Homo sapien
tttctaataaatgtgggatacctag

SEQ ID NO: 6002217 - DNA, 25 bp, Homo sapien
ggttggatttggtcaattgatctgc

SEQ ID NO: 6002218 - DNA, 25 bp, Homo sapien
acgctagatggactgcttaaaattg

SEQ ID NO: 6002219 - DNA, 25 bp, Homo sapien
ttgcaaaattacggcggagtaaata

SEQ ID NO: 6002220 - DNA, 25 bp, Homo sapien
tttatgtctagcaaacgatgtctgc

SEQ ID NO: 6002221 - DNA, 25 bp, Homo sapien
tgagaagctaatcgaatcttccaaa

SEQ ID NO: 6002222 - DNA, 25 bp, Homo sapien
ttagcttctataccagaaaagccaa

SEQ ID NO: 6002223 - DNA, 25 bp, Homo sapien
aatcttccaaatttcatcaattgga

SEQ ID NO: 6002224 - DNA, 25 bp, Homo sapien
aaaattacggcggagtaaatattga

SEQ ID NO: 6002225 - DNA, 25 bp, Homo sapien
acggcggagtaaatattgactggat

SEQ ID NO: 6002226 - DNA, 25 bp, Homo sapien
gggatatttaacactgcaaaaaggt

SEQ ID NO: 6002227 - DNA, 25 bp, Homo sapien
tgctatgggatgtagcatgattcct

SEQ ID NO: 6002228 - DNA, 25 bp, Homo sapien
gagaaagcatattcctgttgatatt

SEQ ID NO: 6002229 - DNA, 25 bp, Homo sapien
aattctctcgttacctggagttgga

SEQ ID NO: 6002230 - DNA, 25 bp, Homo sapien
gttgatattgaagaggtagaagttc

SEQ ID NO: 6002231 - DNA, 25 bp, Homo sapien
ccatatataatcgggtgagattaat

SEQ ID NO: 6002232 - DNA, 25 bp, Homo sapien
gacaaagaagacatcgagaaagtat

SEQ ID NO: 6002233 - DNA, 25 bp, Homo sapien
tggggacggccaataactaaagaag

SEQ ID NO: 6002234 - DNA, 25 bp, Homo sapien
gatttatgtctagcaaacgatgtct

SEQ ID NO: 6002235 - DNA, 25 bp, Homo sapien
taatcgggtgagattaatgaggtcc

SEQ ID NO: 6002236 - DNA, 25 bp, Homo sapien
gcttcaatttcttattggcactatg

SEQ ID NO: 6002237 - DNA, 25 bp, Homo sapien
catcaattggaggacaaagaagaca

SEQ ID NO: 6002238 - DNA, 25 bp, Homo sapien
agagtttcttacccatatataatcg

SEQ ID NO: 6002239 - DNA, 25 bp, Homo sapien
ggaattctctcgttacctggagttg

SEQ ID NO: 6002240 - DNA, 25 bp, Homo sapien
ggttgggggctgattgccggcatat

SEQ ID NO: 6002241 - DNA, 25 bp, Homo sapien
ataccgtatgatatagagggaattc

SEQ ID NO: 6002242 - DNA, 25 bp, Homo sapien
aaaattgatgaacctgtattagcaa

SEQ ID NO: 6002243 - DNA, 25 bp, Homo sapien
aaatggaattacaacagaaagacac

SEQ ID NO: 6002244 - DNA, 25 bp, Homo sapien
gaggaaagtaggtctaggaagagaa

SEQ ID NO: 6002245 - DNA, 25 bp, Homo sapien
atgattcctgttttagtttctaata

SEQ ID NO: 6002246 - DNA, 25 bp, Homo sapien
ttcctgagagtttcttacccatata

SEQ ID NO: 6002247 - DNA, 25 bp, Homo sapien
taaaatgggatatttaacactgcaa

SEQ ID NO: 6002248 - DNA, 25 bp, Homo sapien
cgttagcttctataccagaaaagcc

SEQ ID NO: 6002249 - DNA, 25 bp, Homo sapien
aaatgtgggatacctagtgaaaaag

SEQ ID NO: 6002250 - DNA, 25 bp, Homo sapien
attgaagaggtagaagttcgatcta

SEQ ID NO: 6002251 - DNA, 25 bp, Homo sapien
aaatgggatatttaacactgcaaaa

SEQ ID NO: 6002252 - DNA, 25 bp, Homo sapien
ttacaggtttggctacctcactcac

SEQ ID NO: 6002253 - DNA, 25 bp, Homo sapien
gtgtaaaatgtggaattgggtagac

SEQ ID NO: 6002254 - DNA, 25 bp, Homo sapien
gattcctgttttagtttctaataaa

SEQ ID NO: 6002255 - DNA, 25 bp, Homo sapien
atcgggtgagattaatgaggtccaa

SEQ ID NO: 6002256 - DNA, 25 bp, Homo sapien
gccaataactaaagaagaaatgatt

SEQ ID NO: 6002257 - DNA, 25 bp, Homo sapien
cgatctaagtatttcaaaaagaatg

SEQ ID NO: 6002258 - DNA, 25 bp, Homo sapien
gctaatcgaatcttccaaatttcat

SEQ ID NO: 6002259 - DNA, 25 bp, Homo sapien
gccaatttcatcaaaagaaccgcac

SEQ ID NO: 6002260 - DNA, 25 bp, Homo sapien
cgttttggttggatttggtcaattg

SEQ ID NO: 6002261 - DNA, 25 bp, Homo sapien
ttttagtttctaataaatgtgggat

SEQ ID NO: 6002262 - DNA, 25 bp, Homo sapien
tccgagaacttggggacggccaata

SEQ ID NO: 6002263 - DNA, 25 bp, Homo sapien
caatttcatcaaaagaaccgcacaa

SEQ ID NO: 6002264 - DNA, 25 bp, Homo sapien
gaaaggagttacaggtttggctacc

SEQ ID NO: 6002265 - DNA, 25 bp, Homo sapien
aacgagggacgaaaggatggcgcaa

SEQ ID NO: 6002266 - DNA, 25 bp, Homo sapien
aaatttcatcaattggaggacaaag

SEQ ID NO: 6002267 - DNA, 25 bp, Homo sapien
gtgtgatttatgtctagcaaacgat

SEQ ID NO: 6002268 - DNA, 25 bp, Homo sapien
ggtagaagttcgatctaagtatttc

SEQ ID NO: 6002269 - DNA, 25 bp, Homo sapien
tgtctgcaatgctcgcaatgagaag

SEQ ID NO: 6002270 - DNA, 25 bp, Homo sapien
taggctgtgtaaaatgtggaattgg

SEQ ID NO: 6002271 - DNA, 25 bp, Homo sapien
gaggtagaagttcgatctaagtatt

SEQ ID NO: 6002272 - DNA, 25 bp, Homo sapien
aaaatgtggaattgggtagacccta

SEQ ID NO: 6002273 - DNA, 25 bp, Homo sapien
cgtatgatatagagggaattctctc

SEQ ID NO: 6002274 - DNA, 25 bp, Homo sapien
gaatcaaggacttgtgatgatccga

SEQ ID NO: 6002275 - DNA, 25 bp, Homo sapien
taggaagagaaagcatattcctgtt

SEQ ID NO: 6002276 - DNA, 25 bp, Homo sapien
ctatgggatgtagcatgattcctgt

SEQ ID NO: 6002277 - DNA, 25 bp, Homo sapien
tcaattggaggacaaagaagacatc

SEQ ID NO: 6002278 - DNA, 25 bp, Homo sapien
agagggaattctctcgttacctgga

SEQ ID NO: 6002279 - DNA, 25 bp, Homo sapien
cctggagttggacctaaaatgggat

SEQ ID NO: 6002280 - DNA, 25 bp, Homo sapien
ggggcgaaagttcctgagagtttct

SEQ ID NO: 6002281 - DNA, 25 bp, Homo sapien
tatttaacactgcaaaaaggttggg

SEQ ID NO: 6002282 - DNA, 25 bp, Homo sapien
aatgattaacgattctggggcgaaa

SEQ ID NO: 6002283 - DNA, 25 bp, Homo sapien
ggaggacaaagaagacatcgagaaa

SEQ ID NO: 6002284 - DNA, 25 bp, Homo sapien
gtgggatacctagtgaaaaagtcga

SEQ ID NO: 6002285 - DNA, 25 bp, Homo sapien
tgatattgaagaggtagaagttcga

SEQ ID NO: 6002286 - DNA, 25 bp, Homo sapien
cacaattattggtagacaatttcga

SEQ ID NO: 6002287 - DNA, 25 bp, Homo sapien
tcaaggcactgaagccaatagagta

SEQ ID NO: 6002288 - DNA, 25 bp, Homo sapien
tgaagaggtagaagttcgatctaag

SEQ ID NO: 6002289 - DNA, 25 bp, Homo sapien
tataatcgggtgagattaatgaggt

SEQ ID NO: 6002290 - DNA, 25 bp, Homo sapien
aagaggtagaagttcgatctaagta

SEQ ID NO: 6002291 - DNA, 25 bp, Homo sapien
cgggtgagattaatgaggtccaagg

SEQ ID NO: 6002292 - DNA, 25 bp, Homo sapien
aaaagtcgatccaaagaatttcagg

SEQ ID NO: 6002293 - DNA, 25 bp, Homo sapien
aatagagtattttgaatggatcgaa

SEQ ID NO: 6002294 - DNA, 25 bp, Homo sapien
tagaaaggagttacaggtttggcta

SEQ ID NO: 6002295 - DNA, 25 bp, Homo sapien
agaatttcaggcttcaatttcttat

SEQ ID NO: 6002296 - DNA, 25 bp, Homo sapien
aaggttgggggctgattgccggcat

SEQ ID NO: 6002297 - DNA, 25 bp, Homo sapien
gctgattgccggcatatgcgtcgat

SEQ ID NO: 6002298 - DNA, 25 bp, Homo sapien
aattgatgaacctgtattagcaaat

SEQ ID NO: 6002299 - DNA, 25 bp, Homo sapien
cactgtggtacgaaataaacaccgt

SEQ ID NO: 6002300 - DNA, 25 bp, Homo sapien
tgaacctgtattagcaaatctaatt

SEQ ID NO: 6002301 - DNA, 25 bp, Homo sapien
tgattaacgattctggggcgaaagt

SEQ ID NO: 6002302 - DNA, 25 bp, Homo sapien
gatgcgttagcttctataccagaaa

SEQ ID NO: 6002303 - DNA, 25 bp, Homo sapien
aggacaaagaagacatcgagaaagt

SEQ ID NO: 6002304 - DNA, 25 bp, Homo sapien
agacatcgagaaagtatattcgcat

SEQ ID NO: 6002305 - DNA, 25 bp, Homo sapien
ttacaacagaaagacacaagaaaaa

SEQ ID NO: 6002306 - DNA, 25 bp, Homo sapien
agtgtaagactgccgagcatactag

SEQ ID NO: 6002307 - DNA, 25 bp, Homo sapien
agaagctaatcgaatcttccaaatt

SEQ ID NO: 6002308 - DNA, 25 bp, Homo sapien
accgcacaattattggtagacaatt

SEQ ID NO: 6002309 - DNA, 25 bp, Homo sapien
tatttcgtaccacagtgagtgaggt

SEQ ID NO: 6002310 - DNA, 25 bp, Homo sapien
gtgagtgaggtagccaaacctgtaa

SEQ ID NO: 6002311 - DNA, 25 bp, Homo sapien
ttctttgtcctccaattgatgaaat

SEQ ID NO: 6002312 - DNA, 25 bp, Homo sapien
ccaagttctcggatcatcacaagtc

SEQ ID NO: 6002313 - DNA, 25 bp, Homo sapien
gggtctacccaattccacattttac

SEQ ID NO: 6002314 - DNA, 25 bp, Homo sapien
ctacctcttcaatatcaacaggaat

SEQ ID NO: 6002315 - DNA, 25 bp, Homo sapien
ttgaaatacttagatcgaacttcta

SEQ ID NO: 6002316 - DNA, 25 bp, Homo sapien
ttttcttttactaactcaacagttc

SEQ ID NO: 6002317 - DNA, 25 bp, Homo sapien
ccatgcagatcaattgaccaaatcc

SEQ ID NO: 6002318 - DNA, 25 bp, Homo sapien
acttctacctcttcaatatcaacag

SEQ ID NO: 6002319 - DNA, 25 bp, Homo sapien
gccccagaatcgttaatcatttctt

SEQ ID NO: 6002320 - DNA, 25 bp, Homo sapien
tgtgtttaagcagtattcggtgata

SEQ ID NO: 6002321 - DNA, 25 bp, Homo sapien
gtgccaataagaaattgaagcctga

SEQ ID NO: 6002322 - DNA, 25 bp, Homo sapien
gctaatacaggttcatcaattttaa

SEQ ID NO: 6002323 - DNA, 25 bp, Homo sapien
aatcatttcttctttagttattggc

SEQ ID NO: 6002324 - DNA, 25 bp, Homo sapien
cggcagtcttacacttaatagggtc

SEQ ID NO: 6002325 - DNA, 25 bp, Homo sapien
tactaactcaacagttctctcattc

SEQ ID NO: 6002326 - DNA, 25 bp, Homo sapien
tttctcgatgtcttctttgtcctcc

SEQ ID NO: 6002327 - DNA, 25 bp, Homo sapien
attctttggatcgactttttcacta

SEQ ID NO: 6002328 - DNA, 25 bp, Homo sapien
ttaaatatcccattttaggtccaac

SEQ ID NO: 6002329 - DNA, 25 bp, Homo sapien
caattttaagcagtccatctagcgt

SEQ ID NO: 6002330 - DNA, 25 bp, Homo sapien
ctttgtcctccaattgatgaaattt

SEQ ID NO: 6002331 - DNA, 25 bp, Homo sapien
tttactaactcaacagttctctcat

SEQ ID NO: 6002332 - DNA, 25 bp, Homo sapien
actccaggtaacgagagaattccct

SEQ ID NO: 6002333 - DNA, 25 bp, Homo sapien
atgcagatcaattgaccaaatccaa

SEQ ID NO: 6002334 - DNA, 25 bp, Homo sapien
catgctacatcccatagcatctacc

SEQ ID NO: 6002335 - DNA, 25 bp, Homo sapien
accaataattgtgcggttcttttga

SEQ ID NO: 6002336 - DNA, 25 bp, Homo sapien
atcatcacaagtccttgattcgatc

SEQ ID NO: 6002337 - DNA, 25 bp, Homo sapien
atcagcccccaacctttttgcagtg

SEQ ID NO: 6002338 - DNA, 25 bp, Homo sapien
atcccacatttattagaaactaaaa

SEQ ID NO: 6002339 - DNA, 25 bp, Homo sapien
ataagaaattgaagcctgaaattct

SEQ ID NO: 6002340 - DNA, 25 bp, Homo sapien
aatatcaacaggaatatgctttctc

SEQ ID NO: 6002341 - DNA, 25 bp, Homo sapien
aatagggtctacccaattccacatt

SEQ ID NO: 6002342 - DNA, 25 bp, Homo sapien
agcagtccatctagcgtaataccct

SEQ ID NO: 6002343 - DNA, 25 bp, Homo sapien
cagtccatctagcgtaataccctct

SEQ ID NO: 6002344 - DNA, 25 bp, Homo sapien
actcctttctagtatgctcggcagt

SEQ ID NO: 6002345 - DNA, 25 bp, Homo sapien
ccttgattcgatccattcaaaatac

SEQ ID NO: 6002346 - DNA, 25 bp, Homo sapien
cctccaattgatgaaatttggaaga

SEQ ID NO: 6002347 - DNA, 25 bp, Homo sapien
ggtgtttatttcgtaccacagtgag

SEQ ID NO: 6002348 - DNA, 25 bp, Homo sapien
ctttcgtccctcgtttgagcagaaa

SEQ ID NO: 6002349 - DNA, 25 bp, Homo sapien
ttaaccttggacctcattaatctca

SEQ ID NO: 6002350 - DNA, 25 bp, Homo sapien
aggaactttcgccccagaatcgtta

SEQ ID NO: 6002351 - DNA, 25 bp, Homo sapien
ctcacccgattatatatgggtaaga

SEQ ID NO: 6002352 - DNA, 25 bp, Homo sapien
tattggccgtccccaagttctcgga

SEQ ID NO: 6002353 - DNA, 25 bp, Homo sapien
acatcgtttgctagacataaatcac

SEQ ID NO: 6002354 - DNA, 25 bp, Homo sapien
ccacattttacacagcctatggaca

SEQ ID NO: 6002355 - DNA, 25 bp, Homo sapien
gcgaatatactttctcgatgtcttc

SEQ ID NO: 6002356 - DNA, 25 bp, Homo sapien
cctcttacccctggccatgcagatc

SEQ ID NO: 6002357 - DNA, 25 bp, Homo sapien
ttttaatgtgtttaagcagtattcg

SEQ ID NO: 6002358 - DNA, 25 bp, Homo sapien
cgaattagatttgctaatacaggtt

SEQ ID NO: 6002359 - DNA, 25 bp, Homo sapien
tcgccccagaatcgttaatcatttc

SEQ ID NO: 6002360 - DNA, 25 bp, Homo sapien
ctagtatgctcggcagtcttacact

SEQ ID NO: 6002361 - DNA, 25 bp, Homo sapien
ttgcgccatcctttcgtccctcgtt

SEQ ID NO: 6002362 - DNA, 25 bp, Homo sapien
agatcaattgaccaaatccaaccaa

SEQ ID NO: 6002363 - DNA, 25 bp, Homo sapien
cgatccattcaaaatactctattgg

SEQ ID NO: 6002364 - DNA, 25 bp, Homo sapien
ctagacataaatcacacctcttacc

SEQ ID NO: 6002365 - DNA, 25 bp, Homo sapien
atcgaattagatttgctaatacagg

SEQ ID NO: 6002366 - DNA, 25 bp, Homo sapien
gtgccttgatccagtcaatatttac

SEQ ID NO: 6002367 - DNA, 25 bp, Homo sapien
ttcactaggtatcccacatttatta

SEQ ID NO: 6002368 - DNA, 25 bp, Homo sapien
caactccaggtaacgagagaattcc

SEQ ID NO: 6002369 - DNA, 25 bp, Homo sapien
aaattctttggatcgactttttcac

SEQ ID NO: 6002370 - DNA, 25 bp, Homo sapien
gaacttctacctcttcaatatcaac

SEQ ID NO: 6002371 - DNA, 25 bp, Homo sapien
tactccgccgtaattttgcaaatct

SEQ ID NO: 6002372 - DNA, 25 bp, Homo sapien
ccgtccccaagttctcggatcatca

SEQ ID NO: 6002373 - DNA, 25 bp, Homo sapien
ttctcttcctagacctactttcctc

SEQ ID NO: 6002374 - DNA, 25 bp, Homo sapien
tcttgtgtctttctgttgtaattcc

SEQ ID NO: 6002375 - DNA, 25 bp, Homo sapien
atatgccggcaatcagcccccaacc

SEQ ID NO: 6002376 - DNA, 25 bp, Homo sapien
atatcccattttaggtccaactcca

SEQ ID NO: 6002377 - DNA, 25 bp, Homo sapien
cattctttttgaaatacttagatcg

SEQ ID NO: 6002378 - DNA, 25 bp, Homo sapien
caggtaacgagagaattccctctat

SEQ ID NO: 6002379 - DNA, 25 bp, Homo sapien
ttgtcctccaattgatgaaatttgg

SEQ ID NO: 6002380 - DNA, 25 bp, Homo sapien
aaagccgcttgcgccatcctttcgt

SEQ ID NO: 6002381 - DNA, 25 bp, Homo sapien
gtccccaagttctcggatcatcaca

SEQ ID NO: 6002382 - DNA, 25 bp, Homo sapien
aattgtctaccaataattgtgcggt

SEQ ID NO: 6002383 - DNA, 25 bp, Homo sapien
agcctgaaattctttggatcgactt

SEQ ID NO: 6002384 - DNA, 25 bp, Homo sapien
acgagagaattccctctatatcata

SEQ ID NO: 6002385 - DNA, 25 bp, Homo sapien
attgatgaaatttggaagattcgat

SEQ ID NO: 6002386 - DNA, 25 bp, Homo sapien
gttgtaattccatttgtaaccgtgt

SEQ ID NO: 6002387 - DNA, 25 bp, Homo sapien
tgtaattccatttgtaaccgtgtcc

SEQ ID NO: 6002388 - DNA, 25 bp, Homo sapien
tttgatgaaattggcttttctggta

SEQ ID NO: 6002389 - DNA, 25 bp, Homo sapien
ttgtgcggttcttttgatgaaattg

SEQ ID NO: 6002390 - DNA, 25 bp, Homo sapien
tagttattggccgtccccaagttct

SEQ ID NO: 6002391 - DNA, 25 bp, Homo sapien
tcacaagtccttgattcgatccatt

SEQ ID NO: 6002392 - DNA, 25 bp, Homo sapien
cagaatcgttaatcatttcttcttt

SEQ ID NO: 6002393 - DNA, 25 bp, Homo sapien
atcatgctacatcccatagcatcta

SEQ ID NO: 6002394 - DNA, 25 bp, Homo sapien
gttcatcaattttaagcagtccatc

SEQ ID NO: 6002395 - DNA, 25 bp, Homo sapien
gagagaattccctctatatcatacg

SEQ ID NO: 6002396 - DNA, 25 bp, Homo sapien
acatcccatagcatctaccggggtt

SEQ ID NO: 6002397 - DNA, 25 bp, Homo sapien
acaggaatcatgctacatcccatag

SEQ ID NO: 6002398 - DNA, 25 bp, Homo sapien
atccattcaaaatactctattggct

SEQ ID NO: 6002399 - DNA, 25 bp, Homo sapien
tccatttgtaaccgtgtccaaccaa

SEQ ID NO: 6002400 - DNA, 25 bp, Homo sapien
tttttcttgtgtctttctgttgtaa

SEQ ID NO: 6002401 - DNA, 25 bp, Homo sapien
tatcatacggtatatctgaatcgaa

SEQ ID NO: 6002402 - DNA, 25 bp, Homo sapien
gcttcagtgccttgatccagtcaat

SEQ ID NO: 6002403 - DNA, 25 bp, Homo sapien
tgaatcgaaattgtctaccaataat

SEQ ID NO: 6002404 - DNA, 25 bp, Homo sapien
aatgtgtttaagcagtattcggtga

SEQ ID NO: 6002405 - DNA, 25 bp, Homo sapien
ataccctctgctatttttaatgtgt

SEQ ID NO: 6002406 - DNA, 25 bp, Homo sapien
ctacatcccatagcatctaccgggg

SEQ ID NO: 6002407 - DNA, 25 bp, Homo sapien
tatatatgggtaagaaactctcagg

SEQ ID NO: 6002408 - DNA, 25 bp, Homo sapien
aattccacattttacacagcctatg

SEQ ID NO: 6002409 - DNA, 25 bp, Homo sapien
cctctatatcatacggtatatctga

SEQ ID NO: 6002410 - DNA, 25 bp, Homo sapien
ttgcagtgttaaatatcccatttta

SEQ ID NO: 6002411 - DNA, 25 bp, Homo sapien
acggtgtttatttcgtaccacagtg

SEQ ID NO: 6002412 - DNA, 25 bp, Homo sapien
tccaactccaggtaacgagagaatt

SEQ ID NO: 6002413 - DNA, 25 bp, Homo sapien
gttctcggatcatcacaagtccttg

SEQ ID NO: 6002414 - DNA, 25 bp, Homo sapien
caacctttttgcagtgttaaatatc

SEQ ID NO: 6002415 - DNA, 25 bp, Homo sapien
gccaataagaaattgaagcctgaaa

SEQ ID NO: 6002416 - DNA, 25 bp, Homo sapien
cctctgctatttttaatgtgtttaa

SEQ ID NO: 6002417 - DNA, 25 bp, Homo sapien
tcaatatttactccgccgtaatttt

SEQ ID NO: 6002418 - DNA, 25 bp, Homo sapien
aattagatttgctaatacaggttca

SEQ ID NO: 6002419 - DNA, 25 bp, Homo sapien
gaaatttggaagattcgattagctt

SEQ ID NO: 6002420 - DNA, 25 bp, Homo sapien
ggtaacgagagaattccctctatat

SEQ ID NO: 6002421 - DNA, 25 bp, Homo sapien
gtctttctgttgtaattccatttgt

SEQ ID NO: 6002422 - DNA, 25 bp, Homo sapien
aaactaaaacaggaatcatgctaca

SEQ ID NO: 6002423 - DNA, 25 bp, Homo sapien
ttgtctaccaataattgtgcggttc

SEQ ID NO: 6002424 - DNA, 25 bp, Homo sapien
tttactccgccgtaattttgcaaat

SEQ ID NO: 6002425 - DNA, 25 bp, Homo sapien
acgcatatgccggcaatcagccccc

SEQ ID NO: 6002426 - DNA, 25 bp, Homo sapien
agatttgctaatacaggttcatcaa

SEQ ID NO: 6002427 - DNA, 25 bp, Homo sapien
tgctagacataaatcacacctctta

SEQ ID NO: 6002428 - DNA, 25 bp, Homo sapien
tgatgaaattggcttttctggtata

SEQ ID NO: 6002429 - DNA, 25 bp, Homo sapien
gaactttcgccccagaatcgttaat

SEQ ID NO: 6002430 - DNA, 25 bp, Homo sapien
tttatttcgtaccacagtgagtgag

SEQ ID NO: 6002431 - DNA, 25 bp, Homo sapien
agacataaatcacacctcttacccc

SEQ ID NO: 6002432 - DNA, 25 bp, Homo sapien
attccatttgtaaccgtgtccaacc

SEQ ID NO: 6002433 - DNA, 25 bp, Homo sapien
cttctttagttattggccgtcccca

SEQ ID NO: 6002434 - DNA, 25 bp, Homo sapien
cttttgatgaaattggcttttctgg

SEQ ID NO: 6002435 - DNA, 25 bp, Homo sapien
agacatcgtttgctagacataaatc

SEQ ID NO: 6002436 - DNA, 25 bp, Homo sapien
ctggccatgcagatcaattgaccaa

SEQ ID NO: 6002437 - DNA, 25 bp, Homo sapien
taactcctttctagtatgctcggca

SEQ ID NO: 6002438 - DNA, 25 bp, Homo sapien
aggttcatcaattttaagcagtcca

SEQ ID NO: 6002439 - DNA, 25 bp, Homo sapien
cagtgccttgatccagtcaatattt

SEQ ID NO: 6002440 - DNA, 25 bp, Homo sapien
ttgcagacatcgtttgctagacata

SEQ ID NO: 6002441 - DNA, 25 bp, Homo sapien
tattagaaactaaaacaggaatcat

SEQ ID NO: 6002442 - DNA, 25 bp, Homo sapien
taattccatttgtaaccgtgtccaa

SEQ ID NO: 6002443 - DNA, 25 bp, Homo sapien
ctcttcaatatcaacaggaatatgc

SEQ ID NO: 6002444 - DNA, 25 bp, Homo sapien
attggcttcagtgccttgatccagt

SEQ ID NO: 6002445 - DNA, 25 bp, Homo sapien
tagggtctacccaattccacatttt

SEQ ID NO: 6002446 - DNA, 25 bp, Homo sapien
gtccttgattcgatccattcaaaat

SEQ ID NO: 6002447 - DNA, 25 bp, Homo sapien
taagcagtccatctagcgtaatacc

SEQ ID NO: 6002448 - DNA, 25 bp, Homo sapien
tctatatcatacggtatatctgaat

SEQ ID NO: 6002449 - DNA, 25 bp, Homo sapien
tgatgaaatttggaagattcgatta

SEQ ID NO: 6002450 - DNA, 25 bp, Homo sapien
tccaggtaacgagagaattccctct

SEQ ID NO: 6002451 - DNA, 25 bp, Homo sapien
ctttttcactaggtatcccacattt

SEQ ID NO: 6002452 - DNA, 25 bp, Homo sapien
gagaattccctctatatcatacggt

SEQ ID NO: 6002453 - DNA, 25 bp, Homo sapien
taacgcatcgaattagatttgctaa

SEQ ID NO: 6002454 - DNA, 25 bp, Homo sapien
tccaaccaatgcgaatatactttct

SEQ ID NO: 6002455 - DNA, 25 bp, Homo sapien
tttaggtccaactccaggtaacgag

SEQ ID NO: 6002456 - DNA, 25 bp, Homo sapien
agtatgctcggcagtcttacactta

SEQ ID NO: 6002457 - DNA, 25 bp, Homo sapien
ttctagtatgctcggcagtcttaca

SEQ ID NO: 6002458 - DNA, 25 bp, Homo sapien
cttcctagacctactttcctctctc

SEQ ID NO: 6002459 - DNA, 25 bp, Homo sapien
gagtgaggtagccaaacctgtaact

SEQ ID NO: 6002460 - DNA, 25 bp, Homo sapien
ggatcatcacaagtccttgattcga

SEQ ID NO: 6002461 - DNA, 25 bp, Homo sapien
tgctttctcttcctagacctacttt

SEQ ID NO: 6002462 - DNA, 25 bp, Homo sapien
cccaacctttttgcagtgttaaata

SEQ ID NO: 6002463 - DNA, 25 bp, Homo sapien
atctcacccgattatatatgggtaa

SEQ ID NO: 6002464 - DNA, 25 bp, Homo sapien
tcaatatcaacaggaatatgctttc

SEQ ID NO: 6002465 - DNA, 25 bp, Homo sapien
acccctggccatgcagatcaattga

SEQ ID NO: 6002466 - DNA, 25 bp, Homo sapien
agaagctaacgcatcgaattagatt

SEQ ID NO: 6002467 - DNA, 25 bp, Homo sapien
attaatctcacccgattatatatgg

SEQ ID NO: 6002468 - DNA, 25 bp, Homo sapien
gtatcccacatttattagaaactaa

SEQ ID NO: 6002469 - DNA, 25 bp, Homo sapien
caaccaatgcgaatatactttctcg

SEQ ID NO: 6002470 - DNA, 25 bp, Homo sapien
ccttggacctcattaatctcacccg

SEQ ID NO: 6002471 - DNA, 25 bp, Homo sapien
gtccatctagcgtaataccctctgc

SEQ ID NO: 6002472 - DNA, 25 bp, Homo sapien
cctgtaactcctttctagtatgctc

SEQ ID NO: 6002473 - DNA, 25 bp, Homo sapien
tatatctgaatcgaaattgtctacc

SEQ ID NO: 6002474 - DNA, 25 bp, Homo sapien
cgtgtccaaccaatgcgaatatact

SEQ ID NO: 6002475 - DNA, 25 bp, Homo sapien
acacctcttacccctggccatgcag

SEQ ID NO: 6002476 - DNA, 25 bp, Homo sapien
tcaggaactttcgccccagaatcgt

SEQ ID NO: 6002477 - DNA, 25 bp, Homo sapien
aatttggaagattcgattagcttct

SEQ ID NO: 6002478 - DNA, 25 bp, Homo sapien
tatatcatacggtatatctgaatcg

SEQ ID NO: 6002479 - DNA, 25 bp, Homo sapien
ttaatgtgtttaagcagtattcggt

SEQ ID NO: 6002480 - DNA, 25 bp, Homo sapien
catttgtaaccgtgtccaaccaatg

SEQ ID NO: 6002481 - DNA, 25 bp, Homo sapien
tctcattgcgagcattgcagacatc

SEQ ID NO: 6002482 - DNA, 25 bp, Homo sapien
tatatgggtaagaaactctcaggaa

SEQ ID NO: 6002483 - DNA, 25 bp, Homo sapien
gttattggccgtccccaagttctcg

SEQ ID NO: 6002484 - DNA, 25 bp, Homo sapien
taatacaggttcatcaattttaagc

SEQ ID NO: 6002485 - DNA, 25 bp, Homo sapien
aattggcttttctggtatagaagct

SEQ ID NO: 6002486 - DNA, 25 bp, Homo sapien
ctttctcttcctagacctactttcc

SEQ ID NO: 6002487 - DNA, 25 bp, Homo sapien
gatcgaacttctacctcttcaatat

SEQ ID NO: 6002488 - DNA, 25 bp, Homo sapien
tttcgtaccacagtgagtgaggtag

SEQ ID NO: 6002489 - DNA, 25 bp, Homo sapien
aagctaacgcatcgaattagatttg

SEQ ID NO: 6002490 - DNA, 25 bp, Homo sapien
aggaatcatgctacatcccatagca

SEQ ID NO: 6002491 - DNA, 25 bp, Homo sapien
taagaaactctcaggaactttcgcc

SEQ ID NO: 6002492 - DNA, 25 bp, Homo sapien
taataccctctgctatttttaatgt

SEQ ID NO: 6002493 - DNA, 25 bp, Homo sapien
acaagtccttgattcgatccattca

SEQ ID NO: 6002494 - DNA, 25 bp, Homo sapien
ctacccaattccacattttacacag

SEQ ID NO: 6002495 - DNA, 25 bp, Homo sapien
ttagcttctcattgcgagcattgca

SEQ ID NO: 6002496 - DNA, 25 bp, Homo sapien
cccatagcatctaccggggttttaa

SEQ ID NO: 6002497 - DNA, 25 bp, Homo sapien
gccaaacctgtaactcctttctagt

SEQ ID NO: 6002498 - DNA, 25 bp, Homo sapien
aggtatcccacatttattagaaact

SEQ ID NO: 6002499 - DNA, 25 bp, Homo sapien
ggccatgcagatcaattgaccaaat

SEQ ID NO: 6002500 - DNA, 25 bp, Homo sapien
ggtgatattcaaagccgcttgcgcc

SEQ ID NO: 6002501 - DNA, 25 bp, Homo sapien
ttaatagggtctacccaattccaca

SEQ ID NO: 6002502 - DNA, 25 bp, Homo sapien
tcgatgtcttctttgtcctccaatt

SEQ ID NO: 6002503 - DNA, 25 bp, Homo sapien
tagccaaacctgtaactcctttcta

SEQ ID NO: 6002504 - DNA, 25 bp, Homo sapien
actctcaggaactttcgccccagaa

SEQ ID NO: 6002505 - DNA, 25 bp, Homo sapien
ttttaaccttggacctcattaatct

SEQ ID NO: 6002506 - DNA, 25 bp, Homo sapien
agtcttacacttaatagggtctacc

SEQ ID NO: 6002507 - DNA, 25 bp, Homo sapien
cgacgcatatgccggcaatcagccc

SEQ ID NO: 6002508 - DNA, 25 bp, Homo sapien
gattagcttctcattgcgagcattg

SEQ ID NO: 6002509 - DNA, 25 bp, Homo sapien
atcccatagcatctaccggggtttt

SEQ ID NO: 6002510 - DNA, 25 bp, Homo sapien
atccagtcaatatttactccgccgt

SEQ ID NO: 6002511 - DNA, 25 bp, Homo sapien
ctttctagtatgctcggcagtctta

SEQ ID NO: 6002512 - DNA, 25 bp, Homo sapien
cttagatcgaacttctacctcttca

SEQ ID NO: 6002513 - DNA, 25 bp, Homo sapien
cccattttaggtccaactccaggta

SEQ ID NO: 6002514 - DNA, 25 bp, Homo sapien
tctgctatttttaatgtgtttaagc

SEQ ID NO: 6002515 - DNA, 25 bp, Homo sapien
aagtccttgattcgatccattcaaa

SEQ ID NO: 6002516 - DNA, 25 bp, Homo sapien
atctagcgtaataccctctgctatt

SEQ ID NO: 6002517 - DNA, 25 bp, Homo sapien
gcagacatcgtttgctagacataaa

SEQ ID NO: 6002518 - DNA, 25 bp, Homo sapien
tttaagcagtccatctagcgtaata

SEQ ID NO: 6002519 - DNA, 25 bp, Homo sapien
agtgttaaatatcccattttaggtc

SEQ ID NO: 6002520 - DNA, 25 bp, Homo sapien
caggaatatgctttctcttcctaga

SEQ ID NO: 6002521 - DNA, 25 bp, Homo sapien
ttcgatccattcaaaatactctatt

SEQ ID NO: 6002522 - DNA, 25 bp, Homo sapien
ggacatgaacatcgacgcatatgcc

SEQ ID NO: 6002523 - DNA, 25 bp, Homo sapien
gaatcatgctacatcccatagcatc

SEQ ID NO: 6002524 - DNA, 25 bp, Homo sapien
atagaagctaacgcatcgaattaga

SEQ ID NO: 6002525 - DNA, 25 bp, Homo sapien
cgtaattttgcaaatctttattgat

SEQ ID NO: 6002526 - DNA, 25 bp, Homo sapien
tgggtaagaaactctcaggaacttt

SEQ ID NO: 6002527 - DNA, 25 bp, Homo sapien
acatgaacatcgacgcatatgccgg

SEQ ID NO: 6002528 - DNA, 25 bp, Homo sapien
taaaacaggaatcatgctacatccc

SEQ ID NO: 6002529 - DNA, 25 bp, Homo sapien
aattgaagcctgaaattctttggat

SEQ ID NO: 6002530 - DNA, 25 bp, Homo sapien
cgattatatatgggtaagaaactct

SEQ ID NO: 6002531 - DNA, 25 bp, Homo sapien
tctcggatcatcacaagtccttgat

SEQ ID NO: 6002532 - DNA, 25 bp, Homo sapien
ggtatatctgaatcgaaattgtcta

SEQ ID NO: 6002533 - DNA, 25 bp, Homo sapien
atttttaatgtgtttaagcagtatt

SEQ ID NO: 6002534 - DNA, 25 bp, Homo sapien
ttcttttgatgaaattggcttttct

SEQ ID NO: 6002535 - DNA, 25 bp, Homo sapien
ctccgccgtaattttgcaaatcttt

SEQ ID NO: 6002536 - DNA, 25 bp, Homo sapien
cccgattatatatgggtaagaaact

SEQ ID NO: 6002537 - DNA, 25 bp, Homo sapien
tttcgccccagaatcgttaatcatt

SEQ ID NO: 6002538 - DNA, 25 bp, Homo sapien
ggaatatgctttctcttcctagacc

SEQ ID NO: 6002539 - DNA, 25 bp, Homo sapien
tgcgagcattgcagacatcgtttgc

SEQ ID NO: 6002540 - DNA, 25 bp, Homo sapien
ctctattggcttcagtgccttgatc

SEQ ID NO: 6002541 - DNA, 25 bp, Homo sapien
taacgagagaattccctctatatca

SEQ ID NO: 6002542 - DNA, 25 bp, Homo sapien
cagtattcggtgatattcaaagccg

SEQ ID NO: 6002543 - DNA, 25 bp, Homo sapien
attatatatgggtaagaaactctca

SEQ ID NO: 6002544 - DNA, 25 bp, Homo sapien
gtattcggtgatattcaaagccgct

SEQ ID NO: 6002545 - DNA, 25 bp, Homo sapien
tgaccaaatccaaccaaaacggtgt

SEQ ID NO: 6002546 - DNA, 25 bp, Homo sapien
attccctctatatcatacggtatat

SEQ ID NO: 6002547 - DNA, 25 bp, Homo sapien
tctttggatcgactttttcactagg

SEQ ID NO: 6002548 - DNA, 25 bp, Homo sapien
tcttacacttaatagggtctaccca

SEQ ID NO: 6002549 - DNA, 25 bp, Homo sapien
ggccgtccccaagttctcggatcat

SEQ ID NO: 6002550 - DNA, 25 bp, Homo sapien
attgcgagcattgcagacatcgttt

SEQ ID NO: 6002551 - DNA, 25 bp, Homo sapien
cgagcattgcagacatcgtttgcta

SEQ ID NO: 6002552 - DNA, 25 bp, Homo sapien
catcacaagtccttgattcgatcca

SEQ ID NO: 6002553 - DNA, 25 bp, Homo sapien
caatgcgaatatactttctcgatgt

SEQ ID NO: 6002554 - DNA, 25 bp, Homo sapien
agccgcttgcgccatcctttcgtcc

SEQ ID NO: 6002555 - DNA, 25 bp, Homo sapien
gtatagaagctaacgcatcgaatta

SEQ ID NO: 6002556 - DNA, 25 bp, Homo sapien
accctctgctatttttaatgtgttt

SEQ ID NO: 6002557 - DNA, 25 bp, Homo sapien
tcgaacttctacctcttcaatatca

SEQ ID NO: 6002558 - DNA, 25 bp, Homo sapien
acggtatatctgaatcgaaattgtc

SEQ ID NO: 6002559 - DNA, 25 bp, Homo sapien
agattcgattagcttctcattgcga

SEQ ID NO: 6002560 - DNA, 25 bp, Homo sapien
ccagtcaatatttactccgccgtaa

SEQ ID NO: 6002561 - DNA, 25 bp, Homo sapien
gaagattcgattagcttctcattgc

SEQ ID NO: 6002562 - DNA, 25 bp, Homo sapien
accgtgtccaaccaatgcgaatata

SEQ ID NO: 6002563 - DNA, 25 bp, Homo sapien
attcggtgatattcaaagccgcttg

SEQ ID NO: 6002564 - DNA, 25 bp, Homo sapien
tgaaattctttggatcgactttttc

SEQ ID NO: 6002565 - DNA, 25 bp, Homo sapien
ttggcttttctggtatagaagctaa

SEQ ID NO: 6002566 - DNA, 25 bp, Homo sapien
ttgctaatacaggttcatcaatttt

SEQ ID NO: 6002567 - DNA, 25 bp, Homo sapien
atttcttctttagttattggccgtc

SEQ ID NO: 6002568 - DNA, 25 bp, Homo sapien
atactttctcgatgtcttctttgtc

SEQ ID NO: 6002569 - DNA, 25 bp, Homo sapien
cacatttattagaaactaaaacagg

SEQ ID NO: 6002570 - DNA, 25 bp, Homo sapien
gccatcctttcgtccctcgtttgag

SEQ ID NO: 6002571 - DNA, 25 bp, Homo sapien
agtcaatatttactccgccgtaatt

SEQ ID NO: 6002572 - DNA, 25 bp, Homo sapien
ctgttgtaattccatttgtaaccgt

SEQ ID NO: 6002573 - DNA, 25 bp, Homo sapien
gcgccatcctttcgtccctcgtttg

SEQ ID NO: 6002574 - DNA, 25 bp, Homo sapien
gtgaggtagccaaacctgtaactcc

SEQ ID NO: 6002575 - DNA, 25 bp, Homo sapien
catagtgccaataagaaattgaagc

SEQ ID NO: 6002576 - DNA, 25 bp, Homo sapien
tccctcgtttgagcagaaagcatag

SEQ ID NO: 6002577 - DNA, 25 bp, Homo sapien
ctatggacatgaacatcgacgcata

SEQ ID NO: 6002578 - DNA, 25 bp, Homo sapien
cctcgtttgagcagaaagcatagtg

SEQ ID NO: 6002579 - DNA, 25 bp, Homo sapien
aaccttggacctcattaatctcacc

SEQ ID NO: 6002580 - DNA, 25 bp, Homo sapien
ggtagccaaacctgtaactcctttc

SEQ ID NO: 6002581 - DNA, 25 bp, Homo sapien
gaattccctctatatcatacggtat

SEQ ID NO: 6002582 - DNA, 25 bp, Homo sapien
tttacacagcctatggacatgaaca

SEQ ID NO: 6002583 - DNA, 25 bp, Homo sapien
tcttacccctggccatgcagatcaa

SEQ ID NO: 6002584 - DNA, 25 bp, Homo sapien
attttaagcagtccatctagcgtaa

SEQ ID NO: 6002585 - DNA, 25 bp, Homo sapien
tatgctcggcagtcttacacttaat

SEQ ID NO: 6002586 - DNA, 25 bp, Homo sapien
tgatattcaaagccgcttgcgccat

SEQ ID NO: 6002587 - DNA, 25 bp, Homo sapien
gatcgactttttcactaggtatccc

SEQ ID NO: 6002588 - DNA, 25 bp, Homo sapien
atacaggttcatcaattttaagcag

SEQ ID NO: 6002589 - DNA, 25 bp, Homo sapien
atcgtttgctagacataaatcacac

SEQ ID NO: 6002590 - DNA, 25 bp, Homo sapien
tttaagcagtattcggtgatattca

SEQ ID NO: 6002591 - DNA, 25 bp, Homo sapien
ttgattcgatccattcaaaatactc

SEQ ID NO: 6002592 - DNA, 25 bp, Homo sapien
atattcaaagccgcttgcgccatcc

SEQ ID NO: 6002593 - DNA, 25 bp, Homo sapien
tcctagacctactttcctctctcat

SEQ ID NO: 6002594 - DNA, 25 bp, Homo sapien
tatctgaatcgaaattgtctaccaa

SEQ ID NO: 6002595 - DNA, 25 bp, Homo sapien
tctgaatcgaaattgtctaccaata

SEQ ID NO: 6002596 - DNA, 25 bp, Homo sapien
actttcgccccagaatcgttaatca

SEQ ID NO: 6002597 - DNA, 25 bp, Homo sapien
gtcctccaattgatgaaatttggaa

SEQ ID NO: 6002598 - DNA, 25 bp, Homo sapien
aagaaattgaagcctgaaattcttt

SEQ ID NO: 6002599 - DNA, 25 bp, Homo sapien
tcgaaattgtctaccaataattgtg

SEQ ID NO: 6002600 - DNA, 25 bp, Homo sapien
aatacttagatcgaacttctacctc

SEQ ID NO: 6002601 - DNA, 25 bp, Homo sapien
tttattagaaactaaaacaggaatc

SEQ ID NO: 6002602 - DNA, 25 bp, Homo sapien
ctcggcagtcttacacttaataggg

SEQ ID NO: 6002603 - DNA, 25 bp, Homo sapien
ccctggccatgcagatcaattgacc

SEQ ID NO: 6002604 - DNA, 25 bp, Homo sapien
gaaatacttagatcgaacttctacc

SEQ ID NO: 6002605 - DNA, 25 bp, Homo sapien
tacacagcctatggacatgaacatc

SEQ ID NO: 6002606 - DNA, 25 bp, Homo sapien
tcattgcgagcattgcagacatcgt

SEQ ID NO: 6002607 - DNA, 25 bp, Homo sapien
aacctgtaactcctttctagtatgc

SEQ ID NO: 6002608 - DNA, 25 bp, Homo sapien
tcaaaatactctattggcttcagtg

SEQ ID NO: 6002609 - DNA, 25 bp, Homo sapien
tttgtaaccgtgtccaaccaatgcg

SEQ ID NO: 6002610 - DNA, 25 bp, Homo sapien
gccggcaatcagcccccaacctttt

SEQ ID NO: 6002611 - DNA, 25 bp, Homo sapien
cgtaataccctctgctatttttaat

SEQ ID NO: 6002612 - DNA, 25 bp, Homo sapien
tcggatcatcacaagtccttgattc

SEQ ID NO: 6002613 - DNA, 25 bp, Homo sapien
atgcgaatatactttctcgatgtct

SEQ ID NO: 6002614 - DNA, 25 bp, Homo sapien
gaacatcgacgcatatgccggcaat

SEQ ID NO: 6002615 - DNA, 25 bp, Homo sapien
agaaactaaaacaggaatcatgcta

SEQ ID NO: 6002616 - DNA, 25 bp, Homo sapien
cagcccccaacctttttgcagtgtt

SEQ ID NO: 6002617 - DNA, 25 bp, Homo sapien
tcatacggtatatctgaatcgaaat

SEQ ID NO: 6002618 - DNA, 25 bp, Homo sapien
cacccgattatatatgggtaagaaa

SEQ ID NO: 6002619 - DNA, 25 bp, Homo sapien
ttcgtccctcgtttgagcagaaagc

SEQ ID NO: 6002620 - DNA, 25 bp, Homo sapien
acaggttcatcaattttaagcagtc

SEQ ID NO: 6002621 - DNA, 25 bp, Homo sapien
actaaaacaggaatcatgctacatc

SEQ ID NO: 6002622 - DNA, 25 bp, Homo sapien
cacagtgagtgaggtagccaaacct

SEQ ID NO: 6002623 - DNA, 25 bp, Homo sapien
tatgggtaagaaactctcaggaact

SEQ ID NO: 6002624 - DNA, 25 bp, Homo sapien
caattgaccaaatccaaccaaaacg

SEQ ID NO: 6002625 - DNA, 25 bp, Homo sapien
ttccacattttacacagcctatgga

SEQ ID NO: 6002626 - DNA, 25 bp, Homo sapien
catcctttcgtccctcgtttgagca

SEQ ID NO: 6002627 - DNA, 25 bp, Homo sapien
gccttgatccagtcaatatttactc

SEQ ID NO: 6002628 - DNA, 25 bp, Homo sapien
gcggttcttttgatgaaattggctt

SEQ ID NO: 6002629 - DNA, 25 bp, Homo sapien
tggcttcagtgccttgatccagtca

SEQ ID NO: 6002630 - DNA, 25 bp, Homo sapien
aaactctcaggaactttcgccccag

SEQ ID NO: 6002631 - DNA, 25 bp, Homo sapien
tttggatcgactttttcactaggta

SEQ ID NO: 6002632 - DNA, 25 bp, Homo sapien
atacggtatatctgaatcgaaattg

SEQ ID NO: 6002633 - DNA, 25 bp, Homo sapien
tacttagatcgaacttctacctctt

SEQ ID NO: 6002634 - DNA, 25 bp, Homo sapien
gcctatggacatgaacatcgacgca

SEQ ID NO: 6002635 - DNA, 25 bp, Homo sapien
tcctttctagtatgctcggcagtct

SEQ ID NO: 6002636 - DNA, 25 bp, Homo sapien
gtgcggttcttttgatgaaattggc

SEQ ID NO: 6002637 - DNA, 25 bp, Homo sapien
aaacaggaatcatgctacatcccat

SEQ ID NO: 6002638 - DNA, 25 bp, Homo sapien
ataattgtgcggttcttttgatgaa

SEQ ID NO: 6002639 - DNA, 25 bp, Homo sapien
gcagtcttacacttaatagggtcta

SEQ ID NO: 6002640 - DNA, 25 bp, Homo sapien
ctattggcttcagtgccttgatcca

SEQ ID NO: 6002641 - DNA, 25 bp, Homo sapien
tactctattggcttcagtgccttga

SEQ ID NO: 6002642 - DNA, 25 bp, Homo sapien
agcatagtgccaataagaaattgaa

SEQ ID NO: 6002643 - DNA, 25 bp, Homo sapien
gcagaaagcatagtgccaataagaa

SEQ ID NO: 6002644 - DNA, 25 bp, Homo sapien
gtgtctttctgttgtaattccattt

SEQ ID NO: 6002645 - DNA, 25 bp, Homo sapien
cttcaatatcaacaggaatatgctt

SEQ ID NO: 6002646 - DNA, 25 bp, Homo sapien
taatctcacccgattatatatgggt

SEQ ID NO: 6002647 - DNA, 25 bp, Homo sapien
tcacacctcttacccctggccatgc

SEQ ID NO: 6002648 - DNA, 25 bp, Homo sapien
gccgtaattttgcaaatctttattg

SEQ ID NO: 6002649 - DNA, 25 bp, Homo sapien
ccatctagcgtaataccctctgcta

SEQ ID NO: 6002650 - DNA, 25 bp, Homo sapien
ttacccctggccatgcagatcaatt

SEQ ID NO: 6002651 - DNA, 25 bp, Homo sapien
agcagtattcggtgatattcaaagc

SEQ ID NO: 6002652 - DNA, 25 bp, Homo sapien
gatgtcttctttgtcctccaattga

SEQ ID NO: 6002653 - DNA, 25 bp, Homo sapien
ttgtgtctttctgttgtaattccat

SEQ ID NO: 6002654 - DNA, 25 bp, Homo sapien
cgtttgctagacataaatcacacct

SEQ ID NO: 6002655 - DNA, 25 bp, Homo sapien
gctaacgcatcgaattagatttgct

SEQ ID NO: 6002656 - DNA, 25 bp, Homo sapien
ttcttctttagttattggccgtccc

SEQ ID NO: 6002657 - DNA, 25 bp, Homo sapien
tcgactttttcactaggtatcccac

SEQ ID NO: 6002658 - DNA, 25 bp, Homo sapien
ttcagtgccttgatccagtcaatat

SEQ ID NO: 6002659 - DNA, 25 bp, Homo sapien
ctaggtatcccacatttattagaaa

SEQ ID NO: 6002660 - DNA, 25 bp, Homo sapien
acctcttcaatatcaacaggaatat

SEQ ID NO: 6002661 - DNA, 25 bp, Homo sapien
aatactctattggcttcagtgcctt

SEQ ID NO: 6002662 - DNA, 25 bp, Homo sapien
aacaggaatatgctttctcttccta

SEQ ID NO: 6002663 - DNA, 25 bp, Homo sapien
accacagtgagtgaggtagccaaac

SEQ ID NO: 6002664 - DNA, 25 bp, Homo sapien
catagcatctaccggggttttaacc

SEQ ID NO: 6002665 - DNA, 25 bp, Homo sapien
ctttctgttgtaattccatttgtaa

SEQ ID NO: 6002666 - DNA, 25 bp, Homo sapien
tagatcgaacttctacctcttcaat

SEQ ID NO: 6002667 - DNA, 25 bp, Homo sapien
cactaggtatcccacatttattaga

SEQ ID NO: 6002668 - DNA, 25 bp, Homo sapien
attcgattagcttctcattgcgagc

SEQ ID NO: 6002669 - DNA, 25 bp, Homo sapien
acctcattaatctcacccgattata

SEQ ID NO: 6002670 - DNA, 25 bp, Homo sapien
gactttttcactaggtatcccacat

SEQ ID NO: 6002671 - DNA, 25 bp, Homo sapien
ttttgcagtgttaaatatcccattt

SEQ ID NO: 6002672 - DNA, 25 bp, Homo sapien
aagttctcggatcatcacaagtcct

SEQ ID NO: 6002673 - DNA, 25 bp, Homo sapien
ttctttttgaaatacttagatcgaa

SEQ ID NO: 6002674 - DNA, 25 bp, Homo sapien
tgtttaagcagtattcggtgatatt

SEQ ID NO: 6002675 - DNA, 25 bp, Homo sapien
ttttcactaggtatcccacatttat

SEQ ID NO: 6002676 - DNA, 25 bp, Homo sapien
ctaactcaacagttctctcattctt

SEQ ID NO: 6002677 - DNA, 25 bp, Homo sapien
ttgagcagaaagcatagtgccaata

SEQ ID NO: 6002678 - DNA, 25 bp, Homo sapien
acttaatagggtctacccaattcca

SEQ ID NO: 6002679 - DNA, 25 bp, Homo sapien
tcttctttgtcctccaattgatgaa

SEQ ID NO: 6002680 - DNA, 25 bp, Homo sapien
ttagaaactaaaacaggaatcatgc

SEQ ID NO: 6002681 - DNA, 25 bp, Homo sapien
cgtccctcgtttgagcagaaagcat

SEQ ID NO: 6002682 - DNA, 25 bp, Homo sapien
ccgcttgcgccatcctttcgtccct

SEQ ID NO: 6002683 - DNA, 25 bp, Homo sapien
ttctgttgtaattccatttgtaacc

SEQ ID NO: 6002684 - DNA, 25 bp, Homo sapien
ttgaagcctgaaattctttggatcg

SEQ ID NO: 6002685 - DNA, 25 bp, Homo sapien
acatcgacgcatatgccggcaatca

SEQ ID NO: 6002686 - DNA, 25 bp, Homo sapien
aaaatactctattggcttcagtgcc

SEQ ID NO: 6002687 - DNA, 25 bp, Homo sapien
atcgacgcatatgccggcaatcagc

SEQ ID NO: 6002688 - DNA, 25 bp, Homo sapien
aatcacacctcttacccctggccat

SEQ ID NO: 6002689 - DNA, 25 bp, Homo sapien
tatgctttctcttcctagacctact

SEQ ID NO: 6002690 - DNA, 25 bp, Homo sapien
tgtaactcctttctagtatgctcgg

SEQ ID NO: 6002691 - DNA, 25 bp, Homo sapien
ttctacctcttcaatatcaacagga

SEQ ID NO: 6002692 - DNA, 25 bp, Homo sapien
tcaacaggaatatgctttctcttcc

SEQ ID NO: 6002693 - DNA, 25 bp, Homo sapien
ttagatttgctaatacaggttcatc

SEQ ID NO: 6002694 - DNA, 25 bp, Homo sapien
ttacacttaatagggtctacccaat

SEQ ID NO: 6002695 - DNA, 25 bp, Homo sapien
atcaattgaccaaatccaaccaaaa

SEQ ID NO: 6002696 - DNA, 25 bp, Homo sapien
atcaattttaagcagtccatctagc

SEQ ID NO: 6002697 - DNA, 25 bp, Homo sapien
gcagatcaattgaccaaatccaacc

SEQ ID NO: 6002698 - DNA, 25 bp, Homo sapien
actttctcgatgtcttctttgtcct

SEQ ID NO: 6002699 - DNA, 25 bp, Homo sapien
gcatcgaattagatttgctaataca

SEQ ID NO: 6002700 - DNA, 25 bp, Homo sapien
ctttttgcagtgttaaatatcccat

SEQ ID NO: 6002701 - DNA, 25 bp, Homo sapien
caataagaaattgaagcctgaaatt

SEQ ID NO: 6002702 - DNA, 25 bp, Homo sapien
gagcagaaagcatagtgccaataag

SEQ ID NO: 6002703 - DNA, 25 bp, Homo sapien
aacagttctctcattctttttgaaa

SEQ ID NO: 6002704 - DNA, 25 bp, Homo sapien
ccaattccacattttacacagccta

SEQ ID NO: 6002705 - DNA, 25 bp, Homo sapien
tggatcgactttttcactaggtatc

SEQ ID NO: 6002706 - DNA, 25 bp, Homo sapien
gaaattgaagcctgaaattctttgg

SEQ ID NO: 6002707 - DNA, 25 bp, Homo sapien
acacttaatagggtctacccaattc

SEQ ID NO: 6002708 - DNA, 25 bp, Homo sapien
acctttttgcagtgttaaatatccc

SEQ ID NO: 6002709 - DNA, 25 bp, Homo sapien
cttttactaactcaacagttctctc

SEQ ID NO: 6002710 - DNA, 25 bp, Homo sapien
tccaattgatgaaatttggaagatt

SEQ ID NO: 6002711 - DNA, 25 bp, Homo sapien
aatatgctttctcttcctagaccta

SEQ ID NO: 6002712 - DNA, 25 bp, Homo sapien
attcaaagccgcttgcgccatcctt

SEQ ID NO: 6002713 - DNA, 25 bp, Homo sapien
ggttcttttgatgaaattggctttt

SEQ ID NO: 6002714 - DNA, 25 bp, Homo sapien
cccagaatcgttaatcatttcttct

SEQ ID NO: 6002715 - DNA, 25 bp, Homo sapien
accaatgcgaatatactttctcgat

SEQ ID NO: 6002716 - DNA, 25 bp, Homo sapien
tgtccaaccaatgcgaatatacttt

SEQ ID NO: 6002717 - DNA, 25 bp, Homo sapien
ccattcaaaatactctattggcttc

SEQ ID NO: 6002718 - DNA, 25 bp, Homo sapien
ccgccgtaattttgcaaatctttat

SEQ ID NO: 6002719 - DNA, 25 bp, Homo sapien
tccctctatatcatacggtatatct

SEQ ID NO: 6002720 - DNA, 25 bp, Homo sapien
tttctggtatagaagctaacgcatc

SEQ ID NO: 6002721 - DNA, 25 bp, Homo sapien
cttctcattgcgagcattgcagaca

SEQ ID NO: 6002722 - DNA, 25 bp, Homo sapien
cagtgagtgaggtagccaaacctgt

SEQ ID NO: 6002723 - DNA, 25 bp, Homo sapien
agcattgcagacatcgtttgctaga

SEQ ID NO: 6002724 - DNA, 25 bp, Homo sapien
caaacctgtaactcctttctagtat

SEQ ID NO: 6002725 - DNA, 25 bp, Homo sapien
tggtatagaagctaacgcatcgaat

SEQ ID NO: 6002726 - DNA, 25 bp, Homo sapien
agaaactctcaggaactttcgcccc

SEQ ID NO: 6002727 - DNA, 25 bp, Homo sapien
tgatccagtcaatatttactccgcc

SEQ ID NO: 6002728 - DNA, 25 bp, Homo sapien
atgaaatttggaagattcgattagc

SEQ ID NO: 6002729 - DNA, 25 bp, Homo sapien
ggtccaactccaggtaacgagagaa

SEQ ID NO: 6002730 - DNA, 25 bp, Homo sapien
tgtttatttcgtaccacagtgagtg

SEQ ID NO: 6002731 - DNA, 25 bp, Homo sapien
cttttctggtatagaagctaacgca

SEQ ID NO: 6002732 - DNA, 25 bp, Homo sapien
acattttacacagcctatggacatg

SEQ ID NO: 6002733 - DNA, 25 bp, Homo sapien
ctagcgtaataccctctgctatttt

SEQ ID NO: 6002734 - DNA, 25 bp, Homo sapien
ctcaacagttctctcattctttttg

SEQ ID NO: 6002735 - DNA, 25 bp, Homo sapien
tcgtttgagcagaaagcatagtgcc

SEQ ID NO: 6002736 - DNA, 25 bp, Homo sapien
tctcaggaactttcgccccagaatc

SEQ ID NO: 6002737 - DNA, 25 bp, Homo sapien
tgctcggcagtcttacacttaatag

SEQ ID NO: 6002738 - DNA, 25 bp, Homo sapien
taaccgtgtccaaccaatgcgaata

SEQ ID NO: 6002739 - DNA, 25 bp, Homo sapien
gtttgagcagaaagcatagtgccaa

SEQ ID NO: 6002740 - DNA, 25 bp, Homo sapien
gtaccacagtgagtgaggtagccaa

SEQ ID NO: 6002741 - DNA, 25 bp, Homo sapien
tagtgccaataagaaattgaagcct

SEQ ID NO: 6002742 - DNA, 25 bp, Homo sapien
tcatttcttctttagttattggccg

SEQ ID NO: 6002743 - DNA, 25 bp, Homo sapien
ttggccgtccccaagttctcggatc

SEQ ID NO: 6002744 - DNA, 25 bp, Homo sapien
ggcttttctggtatagaagctaacg

SEQ ID NO: 6002745 - DNA, 25 bp, Homo sapien
atgaaattggcttttctggtataga

SEQ ID NO: 6002746 - DNA, 25 bp, Homo sapien
gaaattgtctaccaataattgtgcg

SEQ ID NO: 6002747 - DNA, 25 bp, Homo sapien
agaaagcatagtgccaataagaaat

SEQ ID NO: 6002748 - DNA, 25 bp, Homo sapien
tcaaagccgcttgcgccatcctttc

SEQ ID NO: 6002749 - DNA, 25 bp, Homo sapien
attttacacagcctatggacatgaa

SEQ ID NO: 6002750 - DNA, 25 bp, Homo sapien
gcatatgccggcaatcagcccccaa

SEQ ID NO: 6002751 - DNA, 25 bp, Homo sapien
caattgatgaaatttggaagattcg

SEQ ID NO: 6002752 - DNA, 25 bp, Homo sapien
catttattagaaactaaaacaggaa

SEQ ID NO: 6002753 - DNA, 25 bp, Homo sapien
gaggtagccaaacctgtaactcctt

SEQ ID NO: 6002754 - DNA, 25 bp, Homo sapien
taagcagtattcggtgatattcaaa

SEQ ID NO: 6002755 - DNA, 25 bp, Homo sapien
ggtaagaaactctcaggaactttcg

SEQ ID NO: 6002756 - DNA, 25 bp, Homo sapien
attcaaaatactctattggcttcag

SEQ ID NO: 6002757 - DNA, 25 bp, Homo sapien
gcttgcgccatcctttcgtccctcg

SEQ ID NO: 6002758 - DNA, 25 bp, Homo sapien
tatttactccgccgtaattttgcaa

SEQ ID NO: 6002759 - DNA, 25 bp, Homo sapien
aactcaacagttctctcattctttt

SEQ ID NO: 6002760 - DNA, 25 bp, Homo sapien
agcgtaataccctctgctattttta

SEQ ID NO: 6002761 - DNA, 25 bp, Homo sapien
ctcttcctagacctactttcctctc

SEQ ID NO: 6002762 - DNA, 25 bp, Homo sapien
cttgatccagtcaatatttactccg

SEQ ID NO: 6002763 - DNA, 25 bp, Homo sapien
gtctaccaataattgtgcggttctt

SEQ ID NO: 6002764 - DNA, 25 bp, Homo sapien
cccacatttattagaaactaaaaca

SEQ ID NO: 6002765 - DNA, 25 bp, Homo sapien
cacagcctatggacatgaacatcga

SEQ ID NO: 6002766 - DNA, 25 bp, Homo sapien
tttggaagattcgattagcttctca

SEQ ID NO: 6002767 - DNA, 25 bp, Homo sapien
tatcaacaggaatatgctttctctt

SEQ ID NO: 6002768 - DNA, 25 bp, Homo sapien
agcttctcattgcgagcattgcaga

SEQ ID NO: 6002769 - DNA, 25 bp, Homo sapien
gcccccaacctttttgcagtgttaa

SEQ ID NO: 6002770 - DNA, 25 bp, Homo sapien
aatcgaaattgtctaccaataattg

SEQ ID NO: 6002771 - DNA, 25 bp, Homo sapien
ttcttttactaactcaacagttctc

SEQ ID NO: 6002772 - DNA, 25 bp, Homo sapien
ttttgaaatacttagatcgaacttc

SEQ ID NO: 6002773 - DNA, 25 bp, Homo sapien
atcccattttaggtccaactccagg

SEQ ID NO: 6002774 - DNA, 25 bp, Homo sapien
tttcttgtgtctttctgttgtaatt

SEQ ID NO: 6002775 - DNA, 25 bp, Homo sapien
taggtccaactccaggtaacgagag

SEQ ID NO: 6002776 - DNA, 25 bp, Homo sapien
tctttagttattggccgtccccaag

SEQ ID NO: 6002777 - DNA, 25 bp, Homo sapien
taaatcacacctcttacccctggcc

SEQ ID NO: 6002778 - DNA, 25 bp, Homo sapien
cagcctatggacatgaacatcgacg

SEQ ID NO: 6002779 - DNA, 25 bp, Homo sapien
tctcgatgtcttctttgtcctccaa

SEQ ID NO: 6002780 - DNA, 25 bp, Homo sapien
tggaagattcgattagcttctcatt

SEQ ID NO: 6002781 - DNA, 25 bp, Homo sapien
acccaattccacattttacacagcc

SEQ ID NO: 6002782 - DNA, 25 bp, Homo sapien
tcgattagcttctcattgcgagcat

SEQ ID NO: 6002783 - DNA, 25 bp, Homo sapien
tcggtgatattcaaagccgcttgcg

SEQ ID NO: 6002784 - DNA, 25 bp, Homo sapien
atatactttctcgatgtcttctttg

SEQ ID NO: 6002785 - DNA, 25 bp, Homo sapien
aaatatcccattttaggtccaactc

SEQ ID NO: 6002786 - DNA, 25 bp, Homo sapien
ggacctcattaatctcacccgatta

SEQ ID NO: 6002787 - DNA, 25 bp, Homo sapien
tttgctagacataaatcacacctct

SEQ ID NO: 6002788 - DNA, 25 bp, Homo sapien
cctgaaattctttggatcgactttt

SEQ ID NO: 6002789 - DNA, 25 bp, Homo sapien
atggacatgaacatcgacgcatatg

SEQ ID NO: 6002790 - DNA, 25 bp, Homo sapien
tcatcaattttaagcagtccatcta

SEQ ID NO: 6002791 - DNA, 25 bp, Homo sapien
gcagtgttaaatatcccattttagg

SEQ ID NO: 6002792 - DNA, 25 bp, Homo sapien
gaatatactttctcgatgtcttctt

SEQ ID NO: 6002793 - DNA, 25 bp, Homo sapien
tcctttcgtccctcgtttgagcaga

SEQ ID NO: 6002794 - DNA, 25 bp, Homo sapien
aattgtgcggttcttttgatgaaat

SEQ ID NO: 6002795 - DNA, 25 bp, Homo sapien
atgaacatcgacgcatatgccggca

SEQ ID NO: 6002796 - DNA, 25 bp, Homo sapien
gaaattggcttttctggtatagaag

SEQ ID NO: 6002797 - DNA, 25 bp, Homo sapien
cattgcagacatcgtttgctagaca

SEQ ID NO: 6002798 - DNA, 25 bp, Homo sapien
ccccaagttctcggatcatcacaag

SEQ ID NO: 6002799 - DNA, 25 bp, Homo sapien
tctggtatagaagctaacgcatcga

SEQ ID NO: 6002800 - DNA, 25 bp, Homo sapien
atgccggcaatcagcccccaacctt

SEQ ID NO: 6002801 - DNA, 25 bp, Homo sapien
gtctacccaattccacattttacac

SEQ ID NO: 6002802 - DNA, 25 bp, Homo sapien
acgcatcgaattagatttgctaata

SEQ ID NO: 6002803 - DNA, 25 bp, Homo sapien
tgtcttctttgtcctccaattgatg

SEQ ID NO: 6002804 - DNA, 25 bp, Homo sapien
tcgtaccacagtgagtgaggtagcc

SEQ ID NO: 6002805 - DNA, 25 bp, Homo sapien
ttggacctcattaatctcacccgat

SEQ ID NO: 6002806 - DNA, 25 bp, Homo sapien
ctatttttaatgtgtttaagcagta

SEQ ID NO: 6002807 - DNA, 25 bp, Homo sapien
tgtaaccgtgtccaaccaatgcgaa

SEQ ID NO: 6002808 - DNA, 25 bp, Homo sapien
ctaccaataattgtgcggttctttt

SEQ ID NO: 6002809 - DNA, 25 bp, Homo sapien
atttgctaatacaggttcatcaatt

SEQ ID NO: 6002810 - DNA, 25 bp, Homo sapien
cattttaggtccaactccaggtaac

SEQ ID NO: 6002811 - DNA, 25 bp, Homo sapien
caataattgtgcggttcttttgatg

SEQ ID NO: 6002812 - DNA, 25 bp, Homo sapien
gattcgatccattcaaaatactcta

SEQ ID NO: 6002813 - DNA, 25 bp, Homo sapien
ctttttgaaatacttagatcgaact

SEQ ID NO: 6002814 - DNA, 25 bp, Homo sapien
gaagcctgaaattctttggatcgac

SEQ ID NO: 6002815 - DNA, 25 bp, Homo sapien
cggcaatcagcccccaacctttttg

SEQ ID NO: 6002816 - DNA, 25 bp, Homo sapien
tgttaaatatcccattttaggtcca

SEQ ID NO: 6002817 - DNA, 25 bp, Homo sapien
tgctacatcccatagcatctaccgg

SEQ ID NO: 6002818 - DNA, 25 bp, Homo sapien
aatatttactccgccgtaattttgc

SEQ ID NO: 6002819 - DNA, 25 bp, Homo sapien
aaagcatagtgccaataagaaattg

SEQ ID NO: 6002820 - DNA, 25 bp, Homo sapien
ttacgtctgcctatcaaactttctt

SEQ ID NO: 6002821 - DNA, 25 bp, Homo sapien
ccgctaaaatctttggaggacgtca

SEQ ID NO: 6002822 - DNA, 25 bp, Homo sapien
aagccaatgacgaagtttataacaa

SEQ ID NO: 6002823 - DNA, 25 bp, Homo sapien
tcctctcatgatgaacaaactgcta

SEQ ID NO: 6002824 - DNA, 25 bp, Homo sapien
ggcaattacgaaggtggtagaaaag

SEQ ID NO: 6002825 - DNA, 25 bp, Homo sapien
gagcaattttcctgatgataaggta

SEQ ID NO: 6002826 - DNA, 25 bp, Homo sapien
ttctcacaaggactccactactatt

SEQ ID NO: 6002827 - DNA, 25 bp, Homo sapien
gaacagtttgcagtatgtctggcct

SEQ ID NO: 6002828 - DNA, 25 bp, Homo sapien
actaagagaattcaatctgaagtga

SEQ ID NO: 6002829 - DNA, 25 bp, Homo sapien
attctccagtaaccacaggtgatta

SEQ ID NO: 6002830 - DNA, 25 bp, Homo sapien
aagtggcccacgcgagttacatgac

SEQ ID NO: 6002831 - DNA, 25 bp, Homo sapien
aacggtagaacgctagctacgaagg

SEQ ID NO: 6002832 - DNA, 25 bp, Homo sapien
ttattgactaagagaattcaatctg

SEQ ID NO: 6002833 - DNA, 25 bp, Homo sapien
tcatcaggattgagcgacgcattcg

SEQ ID NO: 6002834 - DNA, 25 bp, Homo sapien
atttgaaaggccatgagtcatttgg

SEQ ID NO: 6002835 - DNA, 25 bp, Homo sapien
aggcaaatcatcgatttcggcaatt

SEQ ID NO: 6002836 - DNA, 25 bp, Homo sapien
aaggccatgagtcatttggttatat

SEQ ID NO: 6002837 - DNA, 25 bp, Homo sapien
gtgctgttagaggtttaggtgcctt

SEQ ID NO: 6002838 - DNA, 25 bp, Homo sapien
aacgaaataaaagccaatgacgaag

SEQ ID NO: 6002839 - DNA, 25 bp, Homo sapien
atgagtcatttggttatatctttcg

SEQ ID NO: 6002840 - DNA, 25 bp, Homo sapien
agaggtttaggtgccttctattctc

SEQ ID NO: 6002841 - DNA, 25 bp, Homo sapien
caaacgatcagtttccgctaaaatc

SEQ ID NO: 6002842 - DNA, 25 bp, Homo sapien
catgatgaacaaactgctatcaaaa

SEQ ID NO: 6002843 - DNA, 25 bp, Homo sapien
ctaaatatatccaaatctttgcact

SEQ ID NO: 6002844 - DNA, 25 bp, Homo sapien
gatttcggcaattacgaaggtggta

SEQ ID NO: 6002845 - DNA, 25 bp, Homo sapien
tcgatttcggcaattacgaaggtgg

SEQ ID NO: 6002846 - DNA, 25 bp, Homo sapien
aaatcatcgatttcggcaattacga

SEQ ID NO: 6002847 - DNA, 25 bp, Homo sapien
atcagtttccgctaaaatctttgga

SEQ ID NO: 6002848 - DNA, 25 bp, Homo sapien
aaaggcgtctttattgactaagaga

SEQ ID NO: 6002849 - DNA, 25 bp, Homo sapien
ctttggaggacgtcaggcaaatcat

SEQ ID NO: 6002850 - DNA, 25 bp, Homo sapien
agggagttatagcgtcaagtggccc

SEQ ID NO: 6002851 - DNA, 25 bp, Homo sapien
tgttagaggtttaggtgccttctat

SEQ ID NO: 6002852 - DNA, 25 bp, Homo sapien
atccatacagatgccatggaagatg

SEQ ID NO: 6002853 - DNA, 25 bp, Homo sapien
acagatgccatggaagatgttcctc

SEQ ID NO: 6002854 - DNA, 25 bp, Homo sapien
attgggcttagcagacgtatattta

SEQ ID NO: 6002855 - DNA, 25 bp, Homo sapien
gacgtcaggcaaatcatcgatttcg

SEQ ID NO: 6002856 - DNA, 25 bp, Homo sapien
aaatctttgcacttggattctcaag

SEQ ID NO: 6002857 - DNA, 25 bp, Homo sapien
gaacaaactgctatcaaaaacaaac

SEQ ID NO: 6002858 - DNA, 25 bp, Homo sapien
cctgatgataaggtagttggtgaag

SEQ ID NO: 6002859 - DNA, 25 bp, Homo sapien
tttacaaacgatcagtttccgctaa

SEQ ID NO: 6002860 - DNA, 25 bp, Homo sapien
ccttaattgtggacggtgttgttca

SEQ ID NO: 6002861 - DNA, 25 bp, Homo sapien
atgaagctggaggtatccatacaga

SEQ ID NO: 6002862 - DNA, 25 bp, Homo sapien
agagaattattggttgcaactcaag

SEQ ID NO: 6002863 - DNA, 25 bp, Homo sapien
ttagagggagttgaaaagggacact

SEQ ID NO: 6002864 - DNA, 25 bp, Homo sapien
acactcctctcatgatgaacaaact

SEQ ID NO: 6002865 - DNA, 25 bp, Homo sapien
atgttcctctagacttcggtaacgg

SEQ ID NO: 6002866 - DNA, 25 bp, Homo sapien
tggttgtattggatgccccaactta

SEQ ID NO: 6002867 - DNA, 25 bp, Homo sapien
ctacgaagggagttatagcgtcaag

SEQ ID NO: 6002868 - DNA, 25 bp, Homo sapien
acatgattactttagagggagttga

SEQ ID NO: 6002869 - DNA, 25 bp, Homo sapien
attggttgcaactcaagctgtacga

SEQ ID NO: 6002870 - DNA, 25 bp, Homo sapien
ccaagaaaagatctgggaccatgct

SEQ ID NO: 6002871 - DNA, 25 bp, Homo sapien
gtcatttggttatatctttcgtgct

SEQ ID NO: 6002872 - DNA, 25 bp, Homo sapien
cacttaaaagacactaaagacatga

SEQ ID NO: 6002873 - DNA, 25 bp, Homo sapien
ttagaggtttaggtgccttctattc

SEQ ID NO: 6002874 - DNA, 25 bp, Homo sapien
gaagatgttcctctagacttcggta

SEQ ID NO: 6002875 - DNA, 25 bp, Homo sapien
gaaaggccatgagtcatttggttat

SEQ ID NO: 6002876 - DNA, 25 bp, Homo sapien
tgtattggatgccccaacttagttt

SEQ ID NO: 6002877 - DNA, 25 bp, Homo sapien
aaagatctgggaccatgctgcaggc

SEQ ID NO: 6002878 - DNA, 25 bp, Homo sapien
agagaattcaatctgaagtgatttc

SEQ ID NO: 6002879 - DNA, 25 bp, Homo sapien
ctgtttgttagcattgggcttagca

SEQ ID NO: 6002880 - DNA, 25 bp, Homo sapien
acgttattgtccatgaagctggagg

SEQ ID NO: 6002881 - DNA, 25 bp, Homo sapien
tttgcagtatgtctggccttaattg

SEQ ID NO: 6002882 - DNA, 25 bp, Homo sapien
atgaacaaactgctatcaaaaacaa

SEQ ID NO: 6002883 - DNA, 25 bp, Homo sapien
ctggaggtatccatacagatgccat

SEQ ID NO: 6002884 - DNA, 25 bp, Homo sapien
gccaagtactgtttgttagcattgg

SEQ ID NO: 6002885 - DNA, 25 bp, Homo sapien
ttgaaaagggacactcctctcatga

SEQ ID NO: 6002886 - DNA, 25 bp, Homo sapien
aaccacaggtgattatgctgcacaa

SEQ ID NO: 6002887 - DNA, 25 bp, Homo sapien
gtggtgtctacatcatgcgatgtca

SEQ ID NO: 6002888 - DNA, 25 bp, Homo sapien
atgctatcaagagcaattttcctga

SEQ ID NO: 6002889 - DNA, 25 bp, Homo sapien
aggtagttggtgaagaatcctcatc

SEQ ID NO: 6002890 - DNA, 25 bp, Homo sapien
caatgacgaagtttataacaagaat

SEQ ID NO: 6002891 - DNA, 25 bp, Homo sapien
ttttcctgatgataaggtagttggt

SEQ ID NO: 6002892 - DNA, 25 bp, Homo sapien
atcatcgatttcggcaattacgaag

SEQ ID NO: 6002893 - DNA, 25 bp, Homo sapien
agacatgattactttagagggagtt

SEQ ID NO: 6002894 - DNA, 25 bp, Homo sapien
atatccaaatctttgcacttggatt

SEQ ID NO: 6002895 - DNA, 25 bp, Homo sapien
acgttagacacttaaaagacactaa

SEQ ID NO: 6002896 - DNA, 25 bp, Homo sapien
gtgtttggatcctattgacggaacc

SEQ ID NO: 6002897 - DNA, 25 bp, Homo sapien
ggatcctattgacggaaccaagggg

SEQ ID NO: 6002898 - DNA, 25 bp, Homo sapien
caaaatccacgttagacacttaaaa

SEQ ID NO: 6002899 - DNA, 25 bp, Homo sapien
caatctgaagtgatttctcacaagg

SEQ ID NO: 6002900 - DNA, 25 bp, Homo sapien
ggacggtgttgttcagcttggttgt

SEQ ID NO: 6002901 - DNA, 25 bp, Homo sapien
gattactttagagggagttgaaaag

SEQ ID NO: 6002902 - DNA, 25 bp, Homo sapien
attttctgtttacaaacgatcagtt

SEQ ID NO: 6002903 - DNA, 25 bp, Homo sapien
cgacgcattcgtctcaggaatttta

SEQ ID NO: 6002904 - DNA, 25 bp, Homo sapien
aggtgattatgctgcacaaacgatc

SEQ ID NO: 6002905 - DNA, 25 bp, Homo sapien
catcgatttcggcaattacgaaggt

SEQ ID NO: 6002906 - DNA, 25 bp, Homo sapien
cgtcaggcaaatcatcgatttcggc

SEQ ID NO: 6002907 - DNA, 25 bp, Homo sapien
cgcgagttacatgacttggtggtgt

SEQ ID NO: 6002908 - DNA, 25 bp, Homo sapien
atcaaactttcttaccaagaaaaga

SEQ ID NO: 6002909 - DNA, 25 bp, Homo sapien
ctcacaaggactccactactattac

SEQ ID NO: 6002910 - DNA, 25 bp, Homo sapien
tattggatgccccaacttagtttta

SEQ ID NO: 6002911 - DNA, 25 bp, Homo sapien
gtttccgctaaaatctttggaggac

SEQ ID NO: 6002912 - DNA, 25 bp, Homo sapien
tgatgataaggtagttggtgaagaa

SEQ ID NO: 6002913 - DNA, 25 bp, Homo sapien
aaatctttggaggacgtcaggcaaa

SEQ ID NO: 6002914 - DNA, 25 bp, Homo sapien
ttttaagttcttatggggcccaaga

SEQ ID NO: 6002915 - DNA, 25 bp, Homo sapien
taaaagacactaaagacatgattac

SEQ ID NO: 6002916 - DNA, 25 bp, Homo sapien
gcctatcaaactttcttaccaagaa

SEQ ID NO: 6002917 - DNA, 25 bp, Homo sapien
cgtcaagtggcccacgcgagttaca

SEQ ID NO: 6002918 - DNA, 25 bp, Homo sapien
gaaaagggacactcctctcatgatg

SEQ ID NO: 6002919 - DNA, 25 bp, Homo sapien
aacgatcatcataaatgctatcaag

SEQ ID NO: 6002920 - DNA, 25 bp, Homo sapien
acgaagggagttatagcgtcaagtg

SEQ ID NO: 6002921 - DNA, 25 bp, Homo sapien
aaaggaagattttggtgtttggatc

SEQ ID NO: 6002922 - DNA, 25 bp, Homo sapien
ccatgctgcaggcaacgttattgtc

SEQ ID NO: 6002923 - DNA, 25 bp, Homo sapien
gtatgtctggccttaattgtggacg

SEQ ID NO: 6002924 - DNA, 25 bp, Homo sapien
atgacgaagtttataacaagaatta

SEQ ID NO: 6002925 - DNA, 25 bp, Homo sapien
attcgtctcaggaattttaaacgaa

SEQ ID NO: 6002926 - DNA, 25 bp, Homo sapien
aggactccactactattaccaagaa

SEQ ID NO: 6002927 - DNA, 25 bp, Homo sapien
cttggttgtattggatgccccaact

SEQ ID NO: 6002928 - DNA, 25 bp, Homo sapien
atatatccaaatctttgcacttgga

SEQ ID NO: 6002929 - DNA, 25 bp, Homo sapien
gcgatgtcattcagtcaagaaacgc

SEQ ID NO: 6002930 - DNA, 25 bp, Homo sapien
caaggactccactactattaccaag

SEQ ID NO: 6002931 - DNA, 25 bp, Homo sapien
ttcggtaacggtagaacgctagcta

SEQ ID NO: 6002932 - DNA, 25 bp, Homo sapien
agttacatgacttggtggtgtctac

SEQ ID NO: 6002933 - DNA, 25 bp, Homo sapien
gttcagcttggttgtattggatgcc

SEQ ID NO: 6002934 - DNA, 25 bp, Homo sapien
tgactaagagaattcaatctgaagt

SEQ ID NO: 6002935 - DNA, 25 bp, Homo sapien
tgaagaatcctcatcaggattgagc

SEQ ID NO: 6002936 - DNA, 25 bp, Homo sapien
agacttcggtaacggtagaacgcta

SEQ ID NO: 6002937 - DNA, 25 bp, Homo sapien
acttggattctcaagccaagtactg

SEQ ID NO: 6002938 - DNA, 25 bp, Homo sapien
cattggaaagagaattattggttgc

SEQ ID NO: 6002939 - DNA, 25 bp, Homo sapien
tcaggcaaatcatcgatttcggcaa

SEQ ID NO: 6002940 - DNA, 25 bp, Homo sapien
gaagtgatttctcacaaggactcca

SEQ ID NO: 6002941 - DNA, 25 bp, Homo sapien
ggagttatagcgtcaagtggcccac

SEQ ID NO: 6002942 - DNA, 25 bp, Homo sapien
gtatatttacgtctgcctatcaaac

SEQ ID NO: 6002943 - DNA, 25 bp, Homo sapien
atccacgttagacacttaaaagaca

SEQ ID NO: 6002944 - DNA, 25 bp, Homo sapien
atgctgcacaaacgatcatcataaa

SEQ ID NO: 6002945 - DNA, 25 bp, Homo sapien
tacatcatgcgatgtcattcagtca

SEQ ID NO: 6002946 - DNA, 25 bp, Homo sapien
cccaagatttgaaaggccatgagtc

SEQ ID NO: 6002947 - DNA, 25 bp, Homo sapien
ttggatgccccaacttagttttaag

SEQ ID NO: 6002948 - DNA, 25 bp, Homo sapien
acttcggtaacggtagaacgctagc

SEQ ID NO: 6002949 - DNA, 25 bp, Homo sapien
taattctccagtaaccacaggtgat

SEQ ID NO: 6002950 - DNA, 25 bp, Homo sapien
caactcaagctgtacgaaaggcgtc

SEQ ID NO: 6002951 - DNA, 25 bp, Homo sapien
tgcacaaacgatcatcataaatgct

SEQ ID NO: 6002952 - DNA, 25 bp, Homo sapien
gtggcccacgcgagttacatgactt

SEQ ID NO: 6002953 - DNA, 25 bp, Homo sapien
tagttttaagttcttatggggccca

SEQ ID NO: 6002954 - DNA, 25 bp, Homo sapien
aacaaactaaatatatccaaatctt

SEQ ID NO: 6002955 - DNA, 25 bp, Homo sapien
tgtacgaaaggcgtctttattgact

SEQ ID NO: 6002956 - DNA, 25 bp, Homo sapien
gaccatgctgcaggcaacgttattg

SEQ ID NO: 6002957 - DNA, 25 bp, Homo sapien
atacagatgccatggaagatgttcc

SEQ ID NO: 6002958 - DNA, 25 bp, Homo sapien
gtctggccttaattgtggacggtgt

SEQ ID NO: 6002959 - DNA, 25 bp, Homo sapien
gttgcaactcaagctgtacgaaagg

SEQ ID NO: 6002960 - DNA, 25 bp, Homo sapien
tcaagtggcccacgcgagttacatg

SEQ ID NO: 6002961 - DNA, 25 bp, Homo sapien
ttgcacttggattctcaagccaagt

SEQ ID NO: 6002962 - DNA, 25 bp, Homo sapien
ttaagttcttatggggcccaagatt

SEQ ID NO: 6002963 - DNA, 25 bp, Homo sapien
tcctctagacttcggtaacggtaga

SEQ ID NO: 6002964 - DNA, 25 bp, Homo sapien
tacgaaaggcgtctttattgactaa

SEQ ID NO: 6002965 - DNA, 25 bp, Homo sapien
ggaggtatccatacagatgccatgg

SEQ ID NO: 6002966 - DNA, 25 bp, Homo sapien
gcattcgtctcaggaattttaaacg

SEQ ID NO: 6002967 - DNA, 25 bp, Homo sapien
taaacgaaataaaagccaatgacga

SEQ ID NO: 6002968 - DNA, 25 bp, Homo sapien
tcatggaccaaaatccacgttagac

SEQ ID NO: 6002969 - DNA, 25 bp, Homo sapien
atctttggaggacgtcaggcaaatc

SEQ ID NO: 6002970 - DNA, 25 bp, Homo sapien
agtactgtttgttagcattgggctt

SEQ ID NO: 6002971 - DNA, 25 bp, Homo sapien
cttaccaagaaaagatctgggacca

SEQ ID NO: 6002972 - DNA, 25 bp, Homo sapien
agatgccatggaagatgttcctcta

SEQ ID NO: 6002973 - DNA, 25 bp, Homo sapien
agtttgcagtatgtctggccttaat

SEQ ID NO: 6002974 - DNA, 25 bp, Homo sapien
tatcaagagcaattttcctgatgat

SEQ ID NO: 6002975 - DNA, 25 bp, Homo sapien
gtttgttagcattgggcttagcaga

SEQ ID NO: 6002976 - DNA, 25 bp, Homo sapien
gaatgataattctccagtaaccaca

SEQ ID NO: 6002977 - DNA, 25 bp, Homo sapien
taaggtagttggtgaagaatcctca

SEQ ID NO: 6002978 - DNA, 25 bp, Homo sapien
ctttgcacttggattctcaagccaa

SEQ ID NO: 6002979 - DNA, 25 bp, Homo sapien
tcaagctgtacgaaaggcgtcttta

SEQ ID NO: 6002980 - DNA, 25 bp, Homo sapien
tgcaactcaagctgtacgaaaggcg

SEQ ID NO: 6002981 - DNA, 25 bp, Homo sapien
ggcattggaaagagaattattggtt

SEQ ID NO: 6002982 - DNA, 25 bp, Homo sapien
aaaaaggatgattttctgtttacaa

SEQ ID NO: 6002983 - DNA, 25 bp, Homo sapien
taagagaattcaatctgaagtgatt

SEQ ID NO: 6002984 - DNA, 25 bp, Homo sapien
cacgcgagttacatgacttggtggt

SEQ ID NO: 6002985 - DNA, 25 bp, Homo sapien
tttggttatatctttcgtgctgtta

SEQ ID NO: 6002986 - DNA, 25 bp, Homo sapien
aaagagaattattggttgcaactca

SEQ ID NO: 6002987 - DNA, 25 bp, Homo sapien
aggtgaacagtttgcagtatgtctg

SEQ ID NO: 6002988 - DNA, 25 bp, Homo sapien
ggattctcaagccaagtactgtttg

SEQ ID NO: 6002989 - DNA, 25 bp, Homo sapien
gataattctccagtaaccacaggtg

SEQ ID NO: 6002990 - DNA, 25 bp, Homo sapien
gttattgtccatgaagctggaggta

SEQ ID NO: 6002991 - DNA, 25 bp, Homo sapien
taccaagaatgataattctccagta

SEQ ID NO: 6002992 - DNA, 25 bp, Homo sapien
aactaaatatatccaaatctttgca

SEQ ID NO: 6002993 - DNA, 25 bp, Homo sapien
gaatcctcatcaggattgagcgacg

SEQ ID NO: 6002994 - DNA, 25 bp, Homo sapien
gccatggaagatgttcctctagact

SEQ ID NO: 6002995 - DNA, 25 bp, Homo sapien
gtttaggtgccttctattctccatc

SEQ ID NO: 6002996 - DNA, 25 bp, Homo sapien
tacaaacgatcagtttccgctaaaa

SEQ ID NO: 6002997 - DNA, 25 bp, Homo sapien
cggtaacggtagaacgctagctacg

SEQ ID NO: 6002998 - DNA, 25 bp, Homo sapien
aaagggacactcctctcatgatgaa

SEQ ID NO: 6002999 - DNA, 25 bp, Homo sapien
aggtttaggtgccttctattctcca

SEQ ID NO: 6003000 - DNA, 25 bp, Homo sapien
aggcgtctttattgactaagagaat

SEQ ID NO: 6003001 - DNA, 25 bp, Homo sapien
atctgggaccatgctgcaggcaacg

SEQ ID NO: 6003002 - DNA, 25 bp, Homo sapien
ggtgaagaatcctcatcaggattga

SEQ ID NO: 6003003 - DNA, 25 bp, Homo sapien
catcatgcgatgtcattcagtcaag

SEQ ID NO: 6003004 - DNA, 25 bp, Homo sapien
tgtctacatcatgcgatgtcattca

SEQ ID NO: 6003005 - DNA, 25 bp, Homo sapien
tcgtctcaggaattttaaacgaaat

SEQ ID NO: 6003006 - DNA, 25 bp, Homo sapien
aattttcctgatgataaggtagttg

SEQ ID NO: 6003007 - DNA, 25 bp, Homo sapien
attttggtgtttggatcctattgac

SEQ ID NO: 6003008 - DNA, 25 bp, Homo sapien
ggagttgaaaagggacactcctctc

SEQ ID NO: 6003009 - DNA, 25 bp, Homo sapien
atcaggattgagcgacgcattcgtc

SEQ ID NO: 6003010 - DNA, 25 bp, Homo sapien
agttggtgaagaatcctcatcagga

SEQ ID NO: 6003011 - DNA, 25 bp, Homo sapien
tttttaagaggtgaacagtttgcag

SEQ ID NO: 6003012 - DNA, 25 bp, Homo sapien
tccagtaaccacaggtgattatgct

SEQ ID NO: 6003013 - DNA, 25 bp, Homo sapien
gctgtacgaaaggcgtctttattga

SEQ ID NO: 6003014 - DNA, 25 bp, Homo sapien
gcacttggattctcaagccaagtac

SEQ ID NO: 6003015 - DNA, 25 bp, Homo sapien
aactttcttaccaagaaaagatctg

SEQ ID NO: 6003016 - DNA, 25 bp, Homo sapien
tcttatggggcccaagatttgaaag

SEQ ID NO: 6003017 - DNA, 25 bp, Homo sapien
atttctcacaaggactccactacta

SEQ ID NO: 6003018 - DNA, 25 bp, Homo sapien
aggtatccatacagatgccatggaa

SEQ ID NO: 6003019 - DNA, 25 bp, Homo sapien
gtgattatgctgcacaaacgatcat

SEQ ID NO: 6003020 - DNA, 25 bp, Homo sapien
tcggcaattacgaaggtggtagaaa

SEQ ID NO: 6003021 - DNA, 25 bp, Homo sapien
caattacgaaggtggtagaaaagga

SEQ ID NO: 6003022 - DNA, 25 bp, Homo sapien
cgagttacatgacttggtggtgtct

SEQ ID NO: 6003023 - DNA, 25 bp, Homo sapien
ttgttcagcttggttgtattggatg

SEQ ID NO: 6003024 - DNA, 25 bp, Homo sapien
caggcaacgttattgtccatgaagc

SEQ ID NO: 6003025 - DNA, 25 bp, Homo sapien
ccacaggtgattatgctgcacaaac

SEQ ID NO: 6003026 - DNA, 25 bp, Homo sapien
ccacgttagacacttaaaagacact

SEQ ID NO: 6003027 - DNA, 25 bp, Homo sapien
ctgaagtgatttctcacaaggactc

SEQ ID NO: 6003028 - DNA, 25 bp, Homo sapien
tgatttctcacaaggactccactac

SEQ ID NO: 6003029 - DNA, 25 bp, Homo sapien
atcatcataaatgctatcaagagca

SEQ ID NO: 6003030 - DNA, 25 bp, Homo sapien
gggaccatgctgcaggcaacgttat

SEQ ID NO: 6003031 - DNA, 25 bp, Homo sapien
aaaacaaactaaatatatccaaatc

SEQ ID NO: 6003032 - DNA, 25 bp, Homo sapien
tgatgaacaaactgctatcaaaaac

SEQ ID NO: 6003033 - DNA, 25 bp, Homo sapien
tcagatgcagagtcatggaccaaaa

SEQ ID NO: 6003034 - DNA, 25 bp, Homo sapien
acaggtgattatgctgcacaaacga

SEQ ID NO: 6003035 - DNA, 25 bp, Homo sapien
gtagttggtgaagaatcctcatcag

SEQ ID NO: 6003036 - DNA, 25 bp, Homo sapien
ataaaaaggatgattttctgtttac

SEQ ID NO: 6003037 - DNA, 25 bp, Homo sapien
atggggcccaagatttgaaaggcca

SEQ ID NO: 6003038 - DNA, 25 bp, Homo sapien
gccaatgacgaagtttataacaaga

SEQ ID NO: 6003039 - DNA, 25 bp, Homo sapien
ggaccaaaatccacgttagacactt

SEQ ID NO: 6003040 - DNA, 25 bp, Homo sapien
atatttacgtctgcctatcaaactt

SEQ ID NO: 6003041 - DNA, 25 bp, Homo sapien
gaagctggaggtatccatacagatg

SEQ ID NO: 6003042 - DNA, 25 bp, Homo sapien
aagagcaattttcctgatgataagg

SEQ ID NO: 6003043 - DNA, 25 bp, Homo sapien
aggacgtcaggcaaatcatcgattt

SEQ ID NO: 6003044 - DNA, 25 bp, Homo sapien
atcctcatcaggattgagcgacgca

SEQ ID NO: 6003045 - DNA, 25 bp, Homo sapien
ctttattgactaagagaattcaatc

SEQ ID NO: 6003046 - DNA, 25 bp, Homo sapien
aacgctagctacgaagggagttata

SEQ ID NO: 6003047 - DNA, 25 bp, Homo sapien
ccatgaagctggaggtatccataca

SEQ ID NO: 6003048 - DNA, 25 bp, Homo sapien
ttctccatcttcagatgcagagtca

SEQ ID NO: 6003049 - DNA, 25 bp, Homo sapien
cgaaaggcgtctttattgactaaga

SEQ ID NO: 6003050 - DNA, 25 bp, Homo sapien
tagacacttaaaagacactaaagac

SEQ ID NO: 6003051 - DNA, 25 bp, Homo sapien
ctccactactattaccaagaatgat

SEQ ID NO: 6003052 - DNA, 25 bp, Homo sapien
aaactgctatcaaaaacaaactaaa

SEQ ID NO: 6003053 - DNA, 25 bp, Homo sapien
tggtgtttggatcctattgacggaa

SEQ ID NO: 6003054 - DNA, 25 bp, Homo sapien
ttacatgacttggtggtgtctacat

SEQ ID NO: 6003055 - DNA, 25 bp, Homo sapien
gttcttatggggcccaagatttgaa

SEQ ID NO: 6003056 - DNA, 25 bp, Homo sapien
gattatgctgcacaaacgatcatca

SEQ ID NO: 6003057 - DNA, 25 bp, Homo sapien
ctctagacttcggtaacggtagaac

SEQ ID NO: 6003058 - DNA, 25 bp, Homo sapien
cttagcagacgtatatttacgtctg

SEQ ID NO: 6003059 - DNA, 25 bp, Homo sapien
gttagacacttaaaagacactaaag

SEQ ID NO: 6003060 - DNA, 25 bp, Homo sapien
agcgacgcattcgtctcaggaattt

SEQ ID NO: 6003061 - DNA, 25 bp, Homo sapien
ccatcttcagatgcagagtcatgga

SEQ ID NO: 6003062 - DNA, 25 bp, Homo sapien
agagtcatggaccaaaatccacgtt

SEQ ID NO: 6003063 - DNA, 25 bp, Homo sapien
gcagacgtatatttacgtctgccta

SEQ ID NO: 6003064 - DNA, 25 bp, Homo sapien
cgaaataaaagccaatgacgaagtt

SEQ ID NO: 6003065 - DNA, 25 bp, Homo sapien
aggtgccttctattctccatcttca

SEQ ID NO: 6003066 - DNA, 25 bp, Homo sapien
ttattggttgcaactcaagctgtac

SEQ ID NO: 6003067 - DNA, 25 bp, Homo sapien
agctggaggtatccatacagatgcc

SEQ ID NO: 6003068 - DNA, 25 bp, Homo sapien
tgagcgacgcattcgtctcaggaat

SEQ ID NO: 6003069 - DNA, 25 bp, Homo sapien
tcagcttggttgtattggatgcccc

SEQ ID NO: 6003070 - DNA, 25 bp, Homo sapien
tggttatatctttcgtgctgttaga

SEQ ID NO: 6003071 - DNA, 25 bp, Homo sapien
caagatttgaaaggccatgagtcat

SEQ ID NO: 6003072 - DNA, 25 bp, Homo sapien
tcaagccaagtactgtttgttagca

SEQ ID NO: 6003073 - DNA, 25 bp, Homo sapien
tgcagtatgtctggccttaattgtg

SEQ ID NO: 6003074 - DNA, 25 bp, Homo sapien
cttaaaagacactaaagacatgatt

SEQ ID NO: 6003075 - DNA, 25 bp, Homo sapien
ttgttagcattgggcttagcagacg

SEQ ID NO: 6003076 - DNA, 25 bp, Homo sapien
gtaaccacaggtgattatgctgcac

SEQ ID NO: 6003077 - DNA, 25 bp, Homo sapien
acgcattcgtctcaggaattttaaa

SEQ ID NO: 6003078 - DNA, 25 bp, Homo sapien
tgcaggcaacgttattgtccatgaa

SEQ ID NO: 6003079 - DNA, 25 bp, Homo sapien
tactattaccaagaatgataattct

SEQ ID NO: 6003080 - DNA, 25 bp, Homo sapien
aagttcttatggggcccaagatttg

SEQ ID NO: 6003081 - DNA, 25 bp, Homo sapien
tagaaaaggaagattttggtgtttg

SEQ ID NO: 6003082 - DNA, 25 bp, Homo sapien
ctattaccaagaatgataattctcc

SEQ ID NO: 6003083 - DNA, 25 bp, Homo sapien
gcaaatcatcgatttcggcaattac

SEQ ID NO: 6003084 - DNA, 25 bp, Homo sapien
atccaaatctttgcacttggattct

SEQ ID NO: 6003085 - DNA, 25 bp, Homo sapien
actactattaccaagaatgataatt

SEQ ID NO: 6003086 - DNA, 25 bp, Homo sapien
atcttcagatgcagagtcatggacc

SEQ ID NO: 6003087 - DNA, 25 bp, Homo sapien
atagcgtcaagtggcccacgcgagt

SEQ ID NO: 6003088 - DNA, 25 bp, Homo sapien
tgttgttcagcttggttgtattgga

SEQ ID NO: 6003089 - DNA, 25 bp, Homo sapien
agaacgctagctacgaagggagtta

SEQ ID NO: 6003090 - DNA, 25 bp, Homo sapien
gttatatctttcgtgctgttagagg

SEQ ID NO: 6003091 - DNA, 25 bp, Homo sapien
agctacgaagggagttatagcgtca

SEQ ID NO: 6003092 - DNA, 25 bp, Homo sapien
gacttggtggtgtctacatcatgcg

SEQ ID NO: 6003093 - DNA, 25 bp, Homo sapien
agggacactcctctcatgatgaaca

SEQ ID NO: 6003094 - DNA, 25 bp, Homo sapien
atgcgatgtcattcagtcaagaaac

SEQ ID NO: 6003095 - DNA, 25 bp, Homo sapien
ttcttaccaagaaaagatctgggac

SEQ ID NO: 6003096 - DNA, 25 bp, Homo sapien
cctcatcaggattgagcgacgcatt

SEQ ID NO: 6003097 - DNA, 25 bp, Homo sapien
ttcctgatgataaggtagttggtga

SEQ ID NO: 6003098 - DNA, 25 bp, Homo sapien
ggccatgagtcatttggttatatct

SEQ ID NO: 6003099 - DNA, 25 bp, Homo sapien
ttataaaaaggatgattttctgttt

SEQ ID NO: 6003100 - DNA, 25 bp, Homo sapien
gttagcattgggcttagcagacgta

SEQ ID NO: 6003101 - DNA, 25 bp, Homo sapien
cacaaggactccactactattacca

SEQ ID NO: 6003102 - DNA, 25 bp, Homo sapien
aaatatatccaaatctttgcacttg

SEQ ID NO: 6003103 - DNA, 25 bp, Homo sapien
cgatcatcataaatgctatcaagag

SEQ ID NO: 6003104 - DNA, 25 bp, Homo sapien
tctacatcatgcgatgtcattcagt

SEQ ID NO: 6003105 - DNA, 25 bp, Homo sapien
agatttgaaaggccatgagtcattt

SEQ ID NO: 6003106 - DNA, 25 bp, Homo sapien
gttcctctagacttcggtaacggta

SEQ ID NO: 6003107 - DNA, 25 bp, Homo sapien
ctctcatgatgaacaaactgctatc

SEQ ID NO: 6003108 - DNA, 25 bp, Homo sapien
gatgattttctgtttacaaacgatc

SEQ ID NO: 6003109 - DNA, 25 bp, Homo sapien
agaattattggttgcaactcaagct

SEQ ID NO: 6003110 - DNA, 25 bp, Homo sapien
cttggtggtgtctacatcatgcgat

SEQ ID NO: 6003111 - DNA, 25 bp, Homo sapien
ggccttaattgtggacggtgttgtt

SEQ ID NO: 6003112 - DNA, 25 bp, Homo sapien
gtatccatacagatgccatggaaga

SEQ ID NO: 6003113 - DNA, 25 bp, Homo sapien
ttaggtgccttctattctccatctt

SEQ ID NO: 6003114 - DNA, 25 bp, Homo sapien
gacacttaaaagacactaaagacat

SEQ ID NO: 6003115 - DNA, 25 bp, Homo sapien
actcctctcatgatgaacaaactgc

SEQ ID NO: 6003116 - DNA, 25 bp, Homo sapien
agatgttcctctagacttcggtaac

SEQ ID NO: 6003117 - DNA, 25 bp, Homo sapien
caagtactgtttgttagcattgggc

SEQ ID NO: 6003118 - DNA, 25 bp, Homo sapien
tctgtttacaaacgatcagtttccg

SEQ ID NO: 6003119 - DNA, 25 bp, Homo sapien
ttgtggacggtgttgttcagcttgg

SEQ ID NO: 6003120 - DNA, 25 bp, Homo sapien
atggaccaaaatccacgttagacac

SEQ ID NO: 6003121 - DNA, 25 bp, Homo sapien
tagcattgggcttagcagacgtata

SEQ ID NO: 6003122 - DNA, 25 bp, Homo sapien
tcataaatgctatcaagagcaattt

SEQ ID NO: 6003123 - DNA, 25 bp, Homo sapien
taccaagaaaagatctgggaccatg

SEQ ID NO: 6003124 - DNA, 25 bp, Homo sapien
ctttagagggagttgaaaagggaca

SEQ ID NO: 6003125 - DNA, 25 bp, Homo sapien
tgattttctgtttacaaacgatcag

SEQ ID NO: 6003126 - DNA, 25 bp, Homo sapien
gctaaaatctttggaggacgtcagg

SEQ ID NO: 6003127 - DNA, 25 bp, Homo sapien
gcagagtcatggaccaaaatccacg

SEQ ID NO: 6003128 - DNA, 25 bp, Homo sapien
cactaaagacatgattactttagag

SEQ ID NO: 6003129 - DNA, 25 bp, Homo sapien
cgatcagtttccgctaaaatctttg

SEQ ID NO: 6003130 - DNA, 25 bp, Homo sapien
ataaaagccaatgacgaagtttata

SEQ ID NO: 6003131 - DNA, 25 bp, Homo sapien
tattgtccatgaagctggaggtatc

SEQ ID NO: 6003132 - DNA, 25 bp, Homo sapien
tttctgtttacaaacgatcagtttc

SEQ ID NO: 6003133 - DNA, 25 bp, Homo sapien
gataaggtagttggtgaagaatcct

SEQ ID NO: 6003134 - DNA, 25 bp, Homo sapien
tatctttcgtgctgttagaggttta

SEQ ID NO: 6003135 - DNA, 25 bp, Homo sapien
gagtcatttggttatatctttcgtg

SEQ ID NO: 6003136 - DNA, 25 bp, Homo sapien
ttggaggacgtcaggcaaatcatcg

SEQ ID NO: 6003137 - DNA, 25 bp, Homo sapien
tactgtttgttagcattgggcttag

SEQ ID NO: 6003138 - DNA, 25 bp, Homo sapien
ccatgagtcatttggttatatcttt

SEQ ID NO: 6003139 - DNA, 25 bp, Homo sapien
tgggcttagcagacgtatatttacg

SEQ ID NO: 6003140 - DNA, 25 bp, Homo sapien
aattcaatctgaagtgatttctcac

SEQ ID NO: 6003141 - DNA, 25 bp, Homo sapien
tggaagatgttcctctagacttcgg

SEQ ID NO: 6003142 - DNA, 25 bp, Homo sapien
ctatcaaactttcttaccaagaaaa

SEQ ID NO: 6003143 - DNA, 25 bp, Homo sapien
atgataaggtagttggtgaagaatc

SEQ ID NO: 6003144 - DNA, 25 bp, Homo sapien
ttatagcgtcaagtggcccacgcga

SEQ ID NO: 6003145 - DNA, 25 bp, Homo sapien
ggacactcctctcatgatgaacaaa

SEQ ID NO: 6003146 - DNA, 25 bp, Homo sapien
tttcggcaattacgaaggtggtaga

SEQ ID NO: 6003147 - DNA, 25 bp, Homo sapien
ctagacttcggtaacggtagaacgc

SEQ ID NO: 6003148 - DNA, 25 bp, Homo sapien
atctttgcacttggattctcaagcc

SEQ ID NO: 6003149 - DNA, 25 bp, Homo sapien
tctccagtaaccacaggtgattatg

SEQ ID NO: 6003150 - DNA, 25 bp, Homo sapien
tacgaaggtggtagaaaaggaagat

SEQ ID NO: 6003151 - DNA, 25 bp, Homo sapien
aaagacatgattactttagagggag

SEQ ID NO: 6003152 - DNA, 25 bp, Homo sapien
ggaggacgtcaggcaaatcatcgat

SEQ ID NO: 6003153 - DNA, 25 bp, Homo sapien
gcgtctttattgactaagagaattc

SEQ ID NO: 6003154 - DNA, 25 bp, Homo sapien
tgtcattcagtcaagaaacgcctaa

SEQ ID NO: 6003155 - DNA, 25 bp, Homo sapien
ttaattgtggacggtgttgttcagc

SEQ ID NO: 6003156 - DNA, 25 bp, Homo sapien
agggagttgaaaagggacactcctc

SEQ ID NO: 6003157 - DNA, 25 bp, Homo sapien
ggtgtctacatcatgcgatgtcatt

SEQ ID NO: 6003158 - DNA, 25 bp, Homo sapien
attgactaagagaattcaatctgaa

SEQ ID NO: 6003159 - DNA, 25 bp, Homo sapien
taaaatctttggaggacgtcaggca

SEQ ID NO: 6003160 - DNA, 25 bp, Homo sapien
gccttctattctccatcttcagatg

SEQ ID NO: 6003161 - DNA, 25 bp, Homo sapien
gactccactactattaccaagaatg

SEQ ID NO: 6003162 - DNA, 25 bp, Homo sapien
aattattggttgcaactcaagctgt

SEQ ID NO: 6003163 - DNA, 25 bp, Homo sapien
tcgtgctgttagaggtttaggtgcc

SEQ ID NO: 6003164 - DNA, 25 bp, Homo sapien
cggtagaacgctagctacgaaggga

SEQ ID NO: 6003165 - DNA, 25 bp, Homo sapien
agttgaaaagggacactcctctcat

SEQ ID NO: 6003166 - DNA, 25 bp, Homo sapien
catcataaatgctatcaagagcaat

SEQ ID NO: 6003167 - DNA, 25 bp, Homo sapien
aagccaagtactgtttgttagcatt

SEQ ID NO: 6003168 - DNA, 25 bp, Homo sapien
gacgaagtttataacaagaattata

SEQ ID NO: 6003169 - DNA, 25 bp, Homo sapien
acggtgttgttcagcttggttgtat

SEQ ID NO: 6003170 - DNA, 25 bp, Homo sapien
acatgacttggtggtgtctacatca

SEQ ID NO: 6003171 - DNA, 25 bp, Homo sapien
gtctgcctatcaaactttcttacca

SEQ ID NO: 6003172 - DNA, 25 bp, Homo sapien
gcattgggcttagcagacgtatatt

SEQ ID NO: 6003173 - DNA, 25 bp, Homo sapien
gtggacggtgttgttcagcttggtt

SEQ ID NO: 6003174 - DNA, 25 bp, Homo sapien
acagtttgcagtatgtctggcctta

SEQ ID NO: 6003175 - DNA, 25 bp, Homo sapien
atgccatggaagatgttcctctaga

SEQ ID NO: 6003176 - DNA, 25 bp, Homo sapien
ccatacagatgccatggaagatgtt

SEQ ID NO: 6003177 - DNA, 25 bp, Homo sapien
ggggcccaagatttgaaaggccatg

SEQ ID NO: 6003178 - DNA, 25 bp, Homo sapien
ttgtccatgaagctggaggtatcca

SEQ ID NO: 6003179 - DNA, 25 bp, Homo sapien
tagcagacgtatatttacgtctgcc

SEQ ID NO: 6003180 - DNA, 25 bp, Homo sapien
gatgtcattcagtcaagaaacgcct

SEQ ID NO: 6003181 - DNA, 25 bp, Homo sapien
tgtttacaaacgatcagtttccgct

SEQ ID NO: 6003182 - DNA, 25 bp, Homo sapien
tggtggtgtctacatcatgcgatgt

SEQ ID NO: 6003183 - DNA, 25 bp, Homo sapien
aaaagccaatgacgaagtttataac

SEQ ID NO: 6003184 - DNA, 25 bp, Homo sapien
tctattctccatcttcagatgcaga

SEQ ID NO: 6003185 - DNA, 25 bp, Homo sapien
aaaggatgattttctgtttacaaac

SEQ ID NO: 6003186 - DNA, 25 bp, Homo sapien
gtccatgaagctggaggtatccata

SEQ ID NO: 6003187 - DNA, 25 bp, Homo sapien
ggtgttgttcagcttggttgtattg

SEQ ID NO: 6003188 - DNA, 25 bp, Homo sapien
gtagaacgctagctacgaagggagt

SEQ ID NO: 6003189 - DNA, 25 bp, Homo sapien
ttggtgaagaatcctcatcaggatt

SEQ ID NO: 6003190 - DNA, 25 bp, Homo sapien
ggaaagagaattattggttgcaact

SEQ ID NO: 6003191 - DNA, 25 bp, Homo sapien
gcaattttcctgatgataaggtagt

SEQ ID NO: 6003192 - DNA, 25 bp, Homo sapien
ttggattctcaagccaagtactgtt

SEQ ID NO: 6003193 - DNA, 25 bp, Homo sapien
ccactactattaccaagaatgataa

SEQ ID NO: 6003194 - DNA, 25 bp, Homo sapien
atttacgtctgcctatcaaactttc

SEQ ID NO: 6003195 - DNA, 25 bp, Homo sapien
taagaggtgaacagtttgcagtatg

SEQ ID NO: 6003196 - DNA, 25 bp, Homo sapien
attaccaagaatgataattctccag

SEQ ID NO: 6003197 - DNA, 25 bp, Homo sapien
tcaagagcaattttcctgatgataa

SEQ ID NO: 6003198 - DNA, 25 bp, Homo sapien
ggcccaagatttgaaaggccatgag

SEQ ID NO: 6003199 - DNA, 25 bp, Homo sapien
attctcaagccaagtactgtttgtt

SEQ ID NO: 6003200 - DNA, 25 bp, Homo sapien
aaataaaagccaatgacgaagttta

SEQ ID NO: 6003201 - DNA, 25 bp, Homo sapien
atgtctggccttaattgtggacggt

SEQ ID NO: 6003202 - DNA, 25 bp, Homo sapien
agtgatttctcacaaggactccact

SEQ ID NO: 6003203 - DNA, 25 bp, Homo sapien
agaattcaatctgaagtgatttctc

SEQ ID NO: 6003204 - DNA, 25 bp, Homo sapien
ttatggggcccaagatttgaaaggc

SEQ ID NO: 6003205 - DNA, 25 bp, Homo sapien
gctgcacaaacgatcatcataaatg

SEQ ID NO: 6003206 - DNA, 25 bp, Homo sapien
agacgtatatttacgtctgcctatc

SEQ ID NO: 6003207 - DNA, 25 bp, Homo sapien
gaaaaggaagattttggtgtttgga

SEQ ID NO: 6003208 - DNA, 25 bp, Homo sapien
caacgttattgtccatgaagctgga

SEQ ID NO: 6003209 - DNA, 25 bp, Homo sapien
aggatgattttctgtttacaaacga

SEQ ID NO: 6003210 - DNA, 25 bp, Homo sapien
aagaatgataattctccagtaacca

SEQ ID NO: 6003211 - DNA, 25 bp, Homo sapien
atgcagagtcatggaccaaaatcca

SEQ ID NO: 6003212 - DNA, 25 bp, Homo sapien
agattttggtgtttggatcctattg

SEQ ID NO: 6003213 - DNA, 25 bp, Homo sapien
gtgccttctattctccatcttcaga

SEQ ID NO: 6003214 - DNA, 25 bp, Homo sapien
tctcaagccaagtactgtttgttag

SEQ ID NO: 6003215 - DNA, 25 bp, Homo sapien
tttaaacgaaataaaagccaatgac

SEQ ID NO: 6003216 - DNA, 25 bp, Homo sapien
catttggttatatctttcgtgctgt

SEQ ID NO: 6003217 - DNA, 25 bp, Homo sapien
gtaacggtagaacgctagctacgaa

SEQ ID NO: 6003218 - DNA, 25 bp, Homo sapien
ttgaaaggccatgagtcatttggtt

SEQ ID NO: 6003219 - DNA, 25 bp, Homo sapien
atctgaagtgatttctcacaaggac

SEQ ID NO: 6003220 - DNA, 25 bp, Homo sapien
ataaatgctatcaagagcaattttc

SEQ ID NO: 6003221 - DNA, 25 bp, Homo sapien
ggattgagcgacgcattcgtctcag

SEQ ID NO: 6003222 - DNA, 25 bp, Homo sapien
atgctgcaggcaacgttattgtcca

SEQ ID NO: 6003223 - DNA, 25 bp, Homo sapien
tttggtgtttggatcctattgacgg

SEQ ID NO: 6003224 - DNA, 25 bp, Homo sapien
cgctagctacgaagggagttatagc

SEQ ID NO: 6003225 - DNA, 25 bp, Homo sapien
aacgatcagtttccgctaaaatctt

SEQ ID NO: 6003226 - DNA, 25 bp, Homo sapien
gtctttattgactaagagaattcaa

SEQ ID NO: 6003227 - DNA, 25 bp, Homo sapien
aagaaaagatctgggaccatgctgc

SEQ ID NO: 6003228 - DNA, 25 bp, Homo sapien
gtgaacagtttgcagtatgtctggc

SEQ ID NO: 6003229 - DNA, 25 bp, Homo sapien
ccaagaatgataattctccagtaac

SEQ ID NO: 6003230 - DNA, 25 bp, Homo sapien
cccacgcgagttacatgacttggtg

SEQ ID NO: 6003231 - DNA, 25 bp, Homo sapien
gaagggagttatagcgtcaagtggc

SEQ ID NO: 6003232 - DNA, 25 bp, Homo sapien
ttggatcctattgacggaaccaagg

SEQ ID NO: 6003233 - DNA, 25 bp, Homo sapien
ctagctacgaagggagttatagcgt

SEQ ID NO: 6003234 - DNA, 25 bp, Homo sapien
agcttggttgtattggatgccccaa

SEQ ID NO: 6003235 - DNA, 25 bp, Homo sapien
attgagcgacgcattcgtctcagga

SEQ ID NO: 6003236 - DNA, 25 bp, Homo sapien
gatgccccaacttagttttaagttc

SEQ ID NO: 6003237 - DNA, 25 bp, Homo sapien
agaggtgaacagtttgcagtatgtc

SEQ ID NO: 6003238 - DNA, 25 bp, Homo sapien
ctaaagacatgattactttagaggg

SEQ ID NO: 6003239 - DNA, 25 bp, Homo sapien
ggcccacgcgagttacatgacttgg

SEQ ID NO: 6003240 - DNA, 25 bp, Homo sapien
tttcgtgctgttagaggtttaggtg

SEQ ID NO: 6003241 - DNA, 25 bp, Homo sapien
actgctatcaaaaacaaactaaata

SEQ ID NO: 6003242 - DNA, 25 bp, Homo sapien
tcatgcgatgtcattcagtcaagaa

SEQ ID NO: 6003243 - DNA, 25 bp, Homo sapien
gctgcaggcaacgttattgtccatg

SEQ ID NO: 6003244 - DNA, 25 bp, Homo sapien
ctcatgatgaacaaactgctatcaa

SEQ ID NO: 6003245 - DNA, 25 bp, Homo sapien
accaaaatccacgttagacacttaa

SEQ ID NO: 6003246 - DNA, 25 bp, Homo sapien
ttcaatctgaagtgatttctcacaa

SEQ ID NO: 6003247 - DNA, 25 bp, Homo sapien
caggattgagcgacgcattcgtctc

SEQ ID NO: 6003248 - DNA, 25 bp, Homo sapien
aaagacactaaagacatgattactt

SEQ ID NO: 6003249 - DNA, 25 bp, Homo sapien
caaactaaatatatccaaatctttg

SEQ ID NO: 6003250 - DNA, 25 bp, Homo sapien
gttgtattggatgccccaacttagt

SEQ ID NO: 6003251 - DNA, 25 bp, Homo sapien
acgtctgcctatcaaactttcttac

SEQ ID NO: 6003252 - DNA, 25 bp, Homo sapien
ctgcctatcaaactttcttaccaag

SEQ ID NO: 6003253 - DNA, 25 bp, Homo sapien
cagtatgtctggccttaattgtgga

SEQ ID NO: 6003254 - DNA, 25 bp, Homo sapien
tattctccatcttcagatgcagagt

SEQ ID NO: 6003255 - DNA, 25 bp, Homo sapien
tttaagaggtgaacagtttgcagta

SEQ ID NO: 6003256 - DNA, 25 bp, Homo sapien
caaactttcttaccaagaaaagatc

SEQ ID NO: 6003257 - DNA, 25 bp, Homo sapien
atgattactttagagggagttgaaa

SEQ ID NO: 6003258 - DNA, 25 bp, Homo sapien
cacaaacgatcatcataaatgctat

SEQ ID NO: 6003259 - DNA, 25 bp, Homo sapien
ttggaaagagaattattggttgcaa

SEQ ID NO: 6003260 - DNA, 25 bp, Homo sapien
ctccatcttcagatgcagagtcatg

SEQ ID NO: 6003261 - DNA, 25 bp, Homo sapien
gaagattttggtgtttggatcctat

SEQ ID NO: 6003262 - DNA, 25 bp, Homo sapien
ttccgctaaaatctttggaggacgt

SEQ ID NO: 6003263 - DNA, 25 bp, Homo sapien
atgacttggtggtgtctacatcatg

SEQ ID NO: 6003264 - DNA, 25 bp, Homo sapien
agatctgggaccatgctgcaggcaa

SEQ ID NO: 6003265 - DNA, 25 bp, Homo sapien
ttatgctgcacaaacgatcatcata

SEQ ID NO: 6003266 - DNA, 25 bp, Homo sapien
agttatagcgtcaagtggcccacgc

SEQ ID NO: 6003267 - DNA, 25 bp, Homo sapien
ctgggaccatgctgcaggcaacgtt

SEQ ID NO: 6003268 - DNA, 25 bp, Homo sapien
acaaactgctatcaaaaacaaacta

SEQ ID NO: 6003269 - DNA, 25 bp, Homo sapien
ggcaacgttattgtccatgaagctg

SEQ ID NO: 6003270 - DNA, 25 bp, Homo sapien
ggtttttaagaggtgaacagtttgc

SEQ ID NO: 6003271 - DNA, 25 bp, Homo sapien
aagaatcctcatcaggattgagcga

SEQ ID NO: 6003272 - DNA, 25 bp, Homo sapien
agcgtcaagtggcccacgcgagtta

SEQ ID NO: 6003273 - DNA, 25 bp, Homo sapien
tctttcgtgctgttagaggtttagg

SEQ ID NO: 6003274 - DNA, 25 bp, Homo sapien
ctggccttaattgtggacggtgttg

SEQ ID NO: 6003275 - DNA, 25 bp, Homo sapien
agtcatggaccaaaatccacgttag

SEQ ID NO: 6003276 - DNA, 25 bp, Homo sapien
caaacgatcatcataaatgctatca

SEQ ID NO: 6003277 - DNA, 25 bp, Homo sapien
ccaaatctttgcacttggattctca

SEQ ID NO: 6003278 - DNA, 25 bp, Homo sapien
cttcagatgcagagtcatggaccaa

SEQ ID NO: 6003279 - DNA, 25 bp, Homo sapien
agacactaaagacatgattacttta

SEQ ID NO: 6003280 - DNA, 25 bp, Homo sapien
cttctattctccatcttcagatgca

SEQ ID NO: 6003281 - DNA, 25 bp, Homo sapien
gtttggatcctattgacggaaccaa

SEQ ID NO: 6003282 - DNA, 25 bp, Homo sapien
atggcattggaaagagaattattgg

SEQ ID NO: 6003283 - DNA, 25 bp, Homo sapien
aggaagattttggtgtttggatcct

SEQ ID NO: 6003284 - DNA, 25 bp, Homo sapien
gctatcaagagcaattttcctgatg

SEQ ID NO: 6003285 - DNA, 25 bp, Homo sapien
aaatgctatcaagagcaattttcct

SEQ ID NO: 6003286 - DNA, 25 bp, Homo sapien
actcaagctgtacgaaaggcgtctt

SEQ ID NO: 6003287 - DNA, 25 bp, Homo sapien
gtctcaggaattttaaacgaaataa

SEQ ID NO: 6003288 - DNA, 25 bp, Homo sapien
agatgcagagtcatggaccaaaatc

SEQ ID NO: 6003289 - DNA, 25 bp, Homo sapien
tatatctttcgtgctgttagaggtt

SEQ ID NO: 6003290 - DNA, 25 bp, Homo sapien
gctgttagaggtttaggtgccttct

SEQ ID NO: 6003291 - DNA, 25 bp, Homo sapien
ggcttagcagacgtatatttacgtc

SEQ ID NO: 6003292 - DNA, 25 bp, Homo sapien
tggttgcaactcaagctgtacgaaa

SEQ ID NO: 6003293 - DNA, 25 bp, Homo sapien
aaatccacgttagacacttaaaaga

SEQ ID NO: 6003294 - DNA, 25 bp, Homo sapien
agagggagttgaaaagggacactcc

SEQ ID NO: 6003295 - DNA, 25 bp, Homo sapien
acgtatatttacgtctgcctatcaa

SEQ ID NO: 6003296 - DNA, 25 bp, Homo sapien
catggaagatgttcctctagacttc

SEQ ID NO: 6003297 - DNA, 25 bp, Homo sapien
gaaaagatctgggaccatgctgcag

SEQ ID NO: 6003298 - DNA, 25 bp, Homo sapien
aagctgtacgaaaggcgtctttatt

SEQ ID NO: 6003299 - DNA, 25 bp, Homo sapien
cagtttccgctaaaatctttggagg

SEQ ID NO: 6003300 - DNA, 25 bp, Homo sapien
ctttcttaccaagaaaagatctggg

SEQ ID NO: 6003301 - DNA, 25 bp, Homo sapien
cagtaaccacaggtgattatgctgc

SEQ ID NO: 6003302 - DNA, 25 bp, Homo sapien
atgataattctccagtaaccacagg

SEQ ID NO: 6003303 - DNA, 25 bp, Homo sapien
aattgtggacggtgttgttcagctt

SEQ ID NO: 6003304 - DNA, 25 bp, Homo sapien
tggtaagaaagtttgataggcagac

SEQ ID NO: 6003305 - DNA, 25 bp, Homo sapien
catcaggaaaattgctcttgatagc

SEQ ID NO: 6003306 - DNA, 25 bp, Homo sapien
catgactctgcatctgaagatggag

SEQ ID NO: 6003307 - DNA, 25 bp, Homo sapien
tccttttctaccaccttcgtaattg

SEQ ID NO: 6003308 - DNA, 25 bp, Homo sapien
gcaaactgttcacctcttaaaaacc

SEQ ID NO: 6003309 - DNA, 25 bp, Homo sapien
cctttcgtacagcttgagttgcaac

SEQ ID NO: 6003310 - DNA, 25 bp, Homo sapien
cttggtaagaaagtttgataggcag

SEQ ID NO: 6003311 - DNA, 25 bp, Homo sapien
tgacatcgcatgatgtagacaccac

SEQ ID NO: 6003312 - DNA, 25 bp, Homo sapien
taaagtaatcatgtctttagtgtct

SEQ ID NO: 6003313 - DNA, 25 bp, Homo sapien
cggaaactgatcgtttgtaaacaga

SEQ ID NO: 6003314 - DNA, 25 bp, Homo sapien
atgactcatggcctttcaaatcttg

SEQ ID NO: 6003315 - DNA, 25 bp, Homo sapien
tctaccgttaccgaagtctagagga

SEQ ID NO: 6003316 - DNA, 25 bp, Homo sapien
gagaatagaaggcacctaaacctct

SEQ ID NO: 6003317 - DNA, 25 bp, Homo sapien
ctgcaaactgttcacctcttaaaaa

SEQ ID NO: 6003318 - DNA, 25 bp, Homo sapien
aagtttgataggcagacgtaaatat

SEQ ID NO: 6003319 - DNA, 25 bp, Homo sapien
aacgtggattttggtccatgactct

SEQ ID NO: 6003320 - DNA, 25 bp, Homo sapien
gttataaacttcgtcattggctttt

SEQ ID NO: 6003321 - DNA, 25 bp, Homo sapien
tcgtaattgccgaaatcgatgattt

SEQ ID NO: 6003322 - DNA, 25 bp, Homo sapien
cgtcgctcaatcctgatgaggattc

SEQ ID NO: 6003323 - DNA, 25 bp, Homo sapien
gtgggccacttgacgctataactcc

SEQ ID NO: 6003324 - DNA, 25 bp, Homo sapien
aactccctctaaagtaatcatgtct

SEQ ID NO: 6003325 - DNA, 25 bp, Homo sapien
ttgaattctcttagtcaataaagac

SEQ ID NO: 6003326 - DNA, 25 bp, Homo sapien
gtttttgatagcagtttgttcatca

SEQ ID NO: 6003327 - DNA, 25 bp, Homo sapien
aacctctaacagcacgaaagatata

SEQ ID NO: 6003328 - DNA, 25 bp, Homo sapien
ctggagaattatcattcttggtaat

SEQ ID NO: 6003329 - DNA, 25 bp, Homo sapien
ttaagtgtctaacgtggattttggt

SEQ ID NO: 6003330 - DNA, 25 bp, Homo sapien
catgatgtagacaccaccaagtcat

SEQ ID NO: 6003331 - DNA, 25 bp, Homo sapien
catccaatacaaccaagctgaacaa

SEQ ID NO: 6003332 - DNA, 25 bp, Homo sapien
ggagaattatcattcttggtaatag

SEQ ID NO: 6003333 - DNA, 25 bp, Homo sapien
tgcgtcgctcaatcctgatgaggat

SEQ ID NO: 6003334 - DNA, 25 bp, Homo sapien
tggttactggagaattatcattctt

SEQ ID NO: 6003335 - DNA, 25 bp, Homo sapien
cttgacgctataactcccttcgtag

SEQ ID NO: 6003336 - DNA, 25 bp, Homo sapien
caaagatttggatatatttagtttg

SEQ ID NO: 6003337 - DNA, 25 bp, Homo sapien
gaaatcacttcagattgaattctct

SEQ ID NO: 6003338 - DNA, 25 bp, Homo sapien
cctccagcttcatggacaataacgt

SEQ ID NO: 6003339 - DNA, 25 bp, Homo sapien
aagtaatcatgtctttagtgtcttt

SEQ ID NO: 6003340 - DNA, 25 bp, Homo sapien
ttccatggcatctgtatggatacct

SEQ ID NO: 6003341 - DNA, 25 bp, Homo sapien
aacaaacagtacttggcttgagaat

SEQ ID NO: 6003342 - DNA, 25 bp, Homo sapien
ttttcttggtaagaaagtttgatag

SEQ ID NO: 6003343 - DNA, 25 bp, Homo sapien
ccctctaaagtaatcatgtctttag

SEQ ID NO: 6003344 - DNA, 25 bp, Homo sapien
tttcgtacagcttgagttgcaacca

SEQ ID NO: 6003345 - DNA, 25 bp, Homo sapien
gtttgtgcagcataatcacctgtgg

SEQ ID NO: 6003346 - DNA, 25 bp, Homo sapien
catactgcaaactgttcacctctta

SEQ ID NO: 6003347 - DNA, 25 bp, Homo sapien
ctgcagcatggtcccagatcttttc

SEQ ID NO: 6003348 - DNA, 25 bp, Homo sapien
ttggcttgagaatccaagtgcaaag

SEQ ID NO: 6003349 - DNA, 25 bp, Homo sapien
aacatcttccatggcatctgtatgg

SEQ ID NO: 6003350 - DNA, 25 bp, Homo sapien
ctttagtgtcttttaagtgtctaac

SEQ ID NO: 6003351 - DNA, 25 bp, Homo sapien
caatacaaccaagctgaacaacacc

SEQ ID NO: 6003352 - DNA, 25 bp, Homo sapien
ttagtgtcttttaagtgtctaacgt

SEQ ID NO: 6003353 - DNA, 25 bp, Homo sapien
accgtccacaattaaggccagacat

SEQ ID NO: 6003354 - DNA, 25 bp, Homo sapien
cttttcaactccctctaaagtaatc

SEQ ID NO: 6003355 - DNA, 25 bp, Homo sapien
tgacgtcctccaaagattttagcgg

SEQ ID NO: 6003356 - DNA, 25 bp, Homo sapien
tgatgtagacaccaccaagtcatgt

SEQ ID NO: 6003357 - DNA, 25 bp, Homo sapien
atcatcaggaaaattgctcttgata

SEQ ID NO: 6003358 - DNA, 25 bp, Homo sapien
ccgttaccgaagtctagaggaacat

SEQ ID NO: 6003359 - DNA, 25 bp, Homo sapien
taggcagacgtaaatatacgtctgc

SEQ ID NO: 6003360 - DNA, 25 bp, Homo sapien
ctaacgtggattttggtccatgact

SEQ ID NO: 6003361 - DNA, 25 bp, Homo sapien
gattgaattctcttagtcaataaag

SEQ ID NO: 6003362 - DNA, 25 bp, Homo sapien
agaaggcacctaaacctctaacagc

SEQ ID NO: 6003363 - DNA, 25 bp, Homo sapien
aaatcgatgatttgcctgacgtcct

SEQ ID NO: 6003364 - DNA, 25 bp, Homo sapien
ggcatccaatacaaccaagctgaac

SEQ ID NO: 6003365 - DNA, 25 bp, Homo sapien
atcattcttggtaatagtagtggag

SEQ ID NO: 6003366 - DNA, 25 bp, Homo sapien
tcacttcagattgaattctcttagt

SEQ ID NO: 6003367 - DNA, 25 bp, Homo sapien
acaccgtccacaattaaggccagac

SEQ ID NO: 6003368 - DNA, 25 bp, Homo sapien
cgtttaaaattcctgagacgaatgc

SEQ ID NO: 6003369 - DNA, 25 bp, Homo sapien
aacgttgcctgcagcatggtcccag

SEQ ID NO: 6003370 - DNA, 25 bp, Homo sapien
tcatgtctttagtgtcttttaagtg

SEQ ID NO: 6003371 - DNA, 25 bp, Homo sapien
tagtttgtttttgatagcagtttgt

SEQ ID NO: 6003372 - DNA, 25 bp, Homo sapien
ccatggcatctgtatggatacctcc

SEQ ID NO: 6003373 - DNA, 25 bp, Homo sapien
ttgtaaacagaaaatcatccttttt

SEQ ID NO: 6003374 - DNA, 25 bp, Homo sapien
tagcagtttgttcatcatgagagga

SEQ ID NO: 6003375 - DNA, 25 bp, Homo sapien
acaccaccaagtcatgtaactcgcg

SEQ ID NO: 6003376 - DNA, 25 bp, Homo sapien
cacttgacgctataactcccttcgt

SEQ ID NO: 6003377 - DNA, 25 bp, Homo sapien
tctaccaccttcgtaattgccgaaa

SEQ ID NO: 6003378 - DNA, 25 bp, Homo sapien
gtaatcatgtctttagtgtctttta

SEQ ID NO: 6003379 - DNA, 25 bp, Homo sapien
cttcgtcattggcttttatttcgtt

SEQ ID NO: 6003380 - DNA, 25 bp, Homo sapien
gcagcatggtcccagatcttttctt

SEQ ID NO: 6003381 - DNA, 25 bp, Homo sapien
agaattatcattcttggtaatagta

SEQ ID NO: 6003382 - DNA, 25 bp, Homo sapien
aatcttgggccccataagaacttaa

SEQ ID NO: 6003383 - DNA, 25 bp, Homo sapien
tataattcttgttataaacttcgtc

SEQ ID NO: 6003384 - DNA, 25 bp, Homo sapien
tcatgagaggagtgtcccttttcaa

SEQ ID NO: 6003385 - DNA, 25 bp, Homo sapien
agatataaccaaatgactcatggcc

SEQ ID NO: 6003386 - DNA, 25 bp, Homo sapien
tgaacaacaccgtccacaattaagg

SEQ ID NO: 6003387 - DNA, 25 bp, Homo sapien
tccaaagattttagcggaaactgat

SEQ ID NO: 6003388 - DNA, 25 bp, Homo sapien
gtaagaaagtttgataggcagacgt

SEQ ID NO: 6003389 - DNA, 25 bp, Homo sapien
attgctcttgatagcatttatgatg

SEQ ID NO: 6003390 - DNA, 25 bp, Homo sapien
ttaggcgtttcttgactgaatgaca

SEQ ID NO: 6003391 - DNA, 25 bp, Homo sapien
gatttggatatatttagtttgtttt

SEQ ID NO: 6003392 - DNA, 25 bp, Homo sapien
tgatgatcgtttgtgcagcataatc

SEQ ID NO: 6003393 - DNA, 25 bp, Homo sapien
gtttgataggcagacgtaaatatac

SEQ ID NO: 6003394 - DNA, 25 bp, Homo sapien
agtcaataaagacgcctttcgtaca

SEQ ID NO: 6003395 - DNA, 25 bp, Homo sapien
ataaccaaatgactcatggcctttc

SEQ ID NO: 6003396 - DNA, 25 bp, Homo sapien
tccaagtgcaaagatttggatatat

SEQ ID NO: 6003397 - DNA, 25 bp, Homo sapien
gtcctccaaagattttagcggaaac

SEQ ID NO: 6003398 - DNA, 25 bp, Homo sapien
aagacgcctttcgtacagcttgagt

SEQ ID NO: 6003399 - DNA, 25 bp, Homo sapien
taactcccttcgtagctagcgttct

SEQ ID NO: 6003400 - DNA, 25 bp, Homo sapien
aacaacaccgtccacaattaaggcc

SEQ ID NO: 6003401 - DNA, 25 bp, Homo sapien
cacgaaagatataaccaaatgactc

SEQ ID NO: 6003402 - DNA, 25 bp, Homo sapien
gcgtgggccacttgacgctataact

SEQ ID NO: 6003403 - DNA, 25 bp, Homo sapien
cagatcttttcttggtaagaaagtt

SEQ ID NO: 6003404 - DNA, 25 bp, Homo sapien
ttttgatagcagtttgttcatcatg

SEQ ID NO: 6003405 - DNA, 25 bp, Homo sapien
taattcttgttataaacttcgtcat

SEQ ID NO: 6003406 - DNA, 25 bp, Homo sapien
tcgcgtgggccacttgacgctataa

SEQ ID NO: 6003407 - DNA, 25 bp, Homo sapien
ggcagacgtaaatatacgtctgcta

SEQ ID NO: 6003408 - DNA, 25 bp, Homo sapien
gaaactgatcgtttgtaaacagaaa

SEQ ID NO: 6003409 - DNA, 25 bp, Homo sapien
aggaaaattgctcttgatagcattt

SEQ ID NO: 6003410 - DNA, 25 bp, Homo sapien
tcttttcttggtaagaaagtttgat

SEQ ID NO: 6003411 - DNA, 25 bp, Homo sapien
ttcaaatcttgggccccataagaac

SEQ ID NO: 6003412 - DNA, 25 bp, Homo sapien
gatcgtttgtaaacagaaaatcatc

SEQ ID NO: 6003413 - DNA, 25 bp, Homo sapien
gtcaataggatccaaacaccaaaat

SEQ ID NO: 6003414 - DNA, 25 bp, Homo sapien
ggagtgtcccttttcaactccctct

SEQ ID NO: 6003415 - DNA, 25 bp, Homo sapien
tcttagtcaataaagacgcctttcg

SEQ ID NO: 6003416 - DNA, 25 bp, Homo sapien
gtccttgtgagaaatcacttcagat

SEQ ID NO: 6003417 - DNA, 25 bp, Homo sapien
cgttgcctgcagcatggtcccagat

SEQ ID NO: 6003418 - DNA, 25 bp, Homo sapien
cttttctaccaccttcgtaattgcc

SEQ ID NO: 6003419 - DNA, 25 bp, Homo sapien
tatgatgatcgtttgtgcagcataa

SEQ ID NO: 6003420 - DNA, 25 bp, Homo sapien
aaccaataattctctttccaatgcc

SEQ ID NO: 6003421 - DNA, 25 bp, Homo sapien
gatcttttcttggtaagaaagtttg

SEQ ID NO: 6003422 - DNA, 25 bp, Homo sapien
cctaaacctctaacagcacgaaaga

SEQ ID NO: 6003423 - DNA, 25 bp, Homo sapien
cacctaaacctctaacagcacgaaa

SEQ ID NO: 6003424 - DNA, 25 bp, Homo sapien
accttcgtaattgccgaaatcgatg

SEQ ID NO: 6003425 - DNA, 25 bp, Homo sapien
tggagtccttgtgagaaatcacttc

SEQ ID NO: 6003426 - DNA, 25 bp, Homo sapien
cgaaatcgatgatttgcctgacgtc

SEQ ID NO: 6003427 - DNA, 25 bp, Homo sapien
caaagattttagcggaaactgatcg

SEQ ID NO: 6003428 - DNA, 25 bp, Homo sapien
ttggtccatgactctgcatctgaag

SEQ ID NO: 6003429 - DNA, 25 bp, Homo sapien
acaaccaagctgaacaacaccgtcc

SEQ ID NO: 6003430 - DNA, 25 bp, Homo sapien
accaactaccttatcatcaggaaaa

SEQ ID NO: 6003431 - DNA, 25 bp, Homo sapien
taactcgcgtgggccacttgacgct

SEQ ID NO: 6003432 - DNA, 25 bp, Homo sapien
gcctgcagcatggtcccagatcttt

SEQ ID NO: 6003433 - DNA, 25 bp, Homo sapien
gctataactcccttcgtagctagcg

SEQ ID NO: 6003434 - DNA, 25 bp, Homo sapien
ccgtcaataggatccaaacaccaaa

SEQ ID NO: 6003435 - DNA, 25 bp, Homo sapien
agtgtcccttttcaactccctctaa

SEQ ID NO: 6003436 - DNA, 25 bp, Homo sapien
tttgttcatcatgagaggagtgtcc

SEQ ID NO: 6003437 - DNA, 25 bp, Homo sapien
aaggcacctaaacctctaacagcac

SEQ ID NO: 6003438 - DNA, 25 bp, Homo sapien
taaagacgcctttcgtacagcttga

SEQ ID NO: 6003439 - DNA, 25 bp, Homo sapien
cgtccacaattaaggccagacatac

SEQ ID NO: 6003440 - DNA, 25 bp, Homo sapien
taccaccttcgtaattgccgaaatc

SEQ ID NO: 6003441 - DNA, 25 bp, Homo sapien
taaggccagacatactgcaaactgt

SEQ ID NO: 6003442 - DNA, 25 bp, Homo sapien
ttatcatcaggaaaattgctcttga

SEQ ID NO: 6003443 - DNA, 25 bp, Homo sapien
tcttccatggcatctgtatggatac

SEQ ID NO: 6003444 - DNA, 25 bp, Homo sapien
ctgatcgtttgtaaacagaaaatca

SEQ ID NO: 6003445 - DNA, 25 bp, Homo sapien
cttcaccaactaccttatcatcagg

SEQ ID NO: 6003446 - DNA, 25 bp, Homo sapien
aatatacgtctgctaagcccaatgc

SEQ ID NO: 6003447 - DNA, 25 bp, Homo sapien
gtcattggcttttatttcgtttaaa

SEQ ID NO: 6003448 - DNA, 25 bp, Homo sapien
ggcacctaaacctctaacagcacga

SEQ ID NO: 6003449 - DNA, 25 bp, Homo sapien
gtttgtttttgatagcagtttgttc

SEQ ID NO: 6003450 - DNA, 25 bp, Homo sapien
ttgatagcagtttgttcatcatgag

SEQ ID NO: 6003451 - DNA, 25 bp, Homo sapien
aatgacatcgcatgatgtagacacc

SEQ ID NO: 6003452 - DNA, 25 bp, Homo sapien
ttccgtcaataggatccaaacacca

SEQ ID NO: 6003453 - DNA, 25 bp, Homo sapien
gtcccagatcttttcttggtaagaa

SEQ ID NO: 6003454 - DNA, 25 bp, Homo sapien
aggcgtttcttgactgaatgacatc

SEQ ID NO: 6003455 - DNA, 25 bp, Homo sapien
cgaatgcgtcgctcaatcctgatga

SEQ ID NO: 6003456 - DNA, 25 bp, Homo sapien
taagttggggcatccaatacaacca

SEQ ID NO: 6003457 - DNA, 25 bp, Homo sapien
tatacgtctgctaagcccaatgcta

SEQ ID NO: 6003458 - DNA, 25 bp, Homo sapien
ttcagattgaattctcttagtcaat

SEQ ID NO: 6003459 - DNA, 25 bp, Homo sapien
agtgtcttttaagtgtctaacgtgg

SEQ ID NO: 6003460 - DNA, 25 bp, Homo sapien
acatcgcatgatgtagacaccacca

SEQ ID NO: 6003461 - DNA, 25 bp, Homo sapien
ttgtttttgatagcagtttgttcat

SEQ ID NO: 6003462 - DNA, 25 bp, Homo sapien
gagtccttgtgagaaatcacttcag

SEQ ID NO: 6003463 - DNA, 25 bp, Homo sapien
gcttcatggacaataacgttgcctg

SEQ ID NO: 6003464 - DNA, 25 bp, Homo sapien
gcaaccaataattctctttccaatg

SEQ ID NO: 6003465 - DNA, 25 bp, Homo sapien
ttgcaaccaataattctctttccaa

SEQ ID NO: 6003466 - DNA, 25 bp, Homo sapien
ttttaagtgtctaacgtggattttg

SEQ ID NO: 6003467 - DNA, 25 bp, Homo sapien
taaacctctaacagcacgaaagata

SEQ ID NO: 6003468 - DNA, 25 bp, Homo sapien
gccgaaatcgatgatttgcctgacg

SEQ ID NO: 6003469 - DNA, 25 bp, Homo sapien
tataaacttcgtcattggcttttat

SEQ ID NO: 6003470 - DNA, 25 bp, Homo sapien
tgtaactcgcgtgggccacttgacg

SEQ ID NO: 6003471 - DNA, 25 bp, Homo sapien
acttggcttgagaatccaagtgcaa

SEQ ID NO: 6003472 - DNA, 25 bp, Homo sapien
taaaattcctgagacgaatgcgtcg

SEQ ID NO: 6003473 - DNA, 25 bp, Homo sapien
gatccaaacaccaaaatcttccttt

SEQ ID NO: 6003474 - DNA, 25 bp, Homo sapien
tagaggaacatcttccatggcatct

SEQ ID NO: 6003475 - DNA, 25 bp, Homo sapien
tgctaacaaacagtacttggcttga

SEQ ID NO: 6003476 - DNA, 25 bp, Homo sapien
gagaggagtgtcccttttcaactcc

SEQ ID NO: 6003477 - DNA, 25 bp, Homo sapien
taccgaagtctagaggaacatcttc

SEQ ID NO: 6003478 - DNA, 25 bp, Homo sapien
accaccaagtcatgtaactcgcgtg

SEQ ID NO: 6003479 - DNA, 25 bp, Homo sapien
tggtaatagtagtggagtccttgtg

SEQ ID NO: 6003480 - DNA, 25 bp, Homo sapien
gaaagtttgataggcagacgtaaat

SEQ ID NO: 6003481 - DNA, 25 bp, Homo sapien
gacaataacgttgcctgcagcatgg

SEQ ID NO: 6003482 - DNA, 25 bp, Homo sapien
ctcatggcctttcaaatcttgggcc

SEQ ID NO: 6003483 - DNA, 25 bp, Homo sapien
gtaaacagaaaatcatcctttttat

SEQ ID NO: 6003484 - DNA, 25 bp, Homo sapien
caataacgttgcctgcagcatggtc

SEQ ID NO: 6003485 - DNA, 25 bp, Homo sapien
aaccaagctgaacaacaccgtccac

SEQ ID NO: 6003486 - DNA, 25 bp, Homo sapien
aagctgaacaacaccgtccacaatt

SEQ ID NO: 6003487 - DNA, 25 bp, Homo sapien
gaacttaaaactaagttggggcatc

SEQ ID NO: 6003488 - DNA, 25 bp, Homo sapien
gatagcagtttgttcatcatgagag

SEQ ID NO: 6003489 - DNA, 25 bp, Homo sapien
ctttcaaatcttgggccccataaga

SEQ ID NO: 6003490 - DNA, 25 bp, Homo sapien
tgaagatggagaatagaaggcacct

SEQ ID NO: 6003491 - DNA, 25 bp, Homo sapien
cgtagctagcgttctaccgttaccg

SEQ ID NO: 6003492 - DNA, 25 bp, Homo sapien
atacaaccaagctgaacaacaccgt

SEQ ID NO: 6003493 - DNA, 25 bp, Homo sapien
aaacagaaaatcatcctttttataa

SEQ ID NO: 6003494 - DNA, 25 bp, Homo sapien
aatcatgtctttagtgtcttttaag

SEQ ID NO: 6003495 - DNA, 25 bp, Homo sapien
aaccaaatgactcatggcctttcaa

SEQ ID NO: 6003496 - DNA, 25 bp, Homo sapien
agttggggcatccaatacaaccaag

SEQ ID NO: 6003497 - DNA, 25 bp, Homo sapien
gagaaatcacttcagattgaattct

SEQ ID NO: 6003498 - DNA, 25 bp, Homo sapien
ttcttggtaatagtagtggagtcct

SEQ ID NO: 6003499 - DNA, 25 bp, Homo sapien
cagacgtaaatatacgtctgctaag

SEQ ID NO: 6003500 - DNA, 25 bp, Homo sapien
tcgtcattggcttttatttcgttta

SEQ ID NO: 6003501 - DNA, 25 bp, Homo sapien
catcttccatggcatctgtatggat

SEQ ID NO: 6003502 - DNA, 25 bp, Homo sapien
tcgtttgtaaacagaaaatcatcct

SEQ ID NO: 6003503 - DNA, 25 bp, Homo sapien
gcagtttgttcatcatgagaggagt

SEQ ID NO: 6003504 - DNA, 25 bp, Homo sapien
aataaagacgcctttcgtacagctt

SEQ ID NO: 6003505 - DNA, 25 bp, Homo sapien
gtaatagtagtggagtccttgtgag

SEQ ID NO: 6003506 - DNA, 25 bp, Homo sapien
gaggagtgtcccttttcaactccct

SEQ ID NO: 6003507 - DNA, 25 bp, Homo sapien
tcgtttgtgcagcataatcacctgt

SEQ ID NO: 6003508 - DNA, 25 bp, Homo sapien
cttcgtaattgccgaaatcgatgat

SEQ ID NO: 6003509 - DNA, 25 bp, Homo sapien
aatagtagtggagtccttgtgagaa

SEQ ID NO: 6003510 - DNA, 25 bp, Homo sapien
gaattctcttagtcaataaagacgc

SEQ ID NO: 6003511 - DNA, 25 bp, Homo sapien
gattcttcaccaactaccttatcat

SEQ ID NO: 6003512 - DNA, 25 bp, Homo sapien
ataggatccaaacaccaaaatcttc

SEQ ID NO: 6003513 - DNA, 25 bp, Homo sapien
acagcttgagttgcaaccaataatt

SEQ ID NO: 6003514 - DNA, 25 bp, Homo sapien
cttgagttgcaaccaataattctct

SEQ ID NO: 6003515 - DNA, 25 bp, Homo sapien
tgactgaatgacatcgcatgatgta

SEQ ID NO: 6003516 - DNA, 25 bp, Homo sapien
cttggtaatagtagtggagtccttg

SEQ ID NO: 6003517 - DNA, 25 bp, Homo sapien
gctgaacaacaccgtccacaattaa

SEQ ID NO: 6003518 - DNA, 25 bp, Homo sapien
ttatcattcttggtaatagtagtgg

SEQ ID NO: 6003519 - DNA, 25 bp, Homo sapien
gcctttcaaatcttgggccccataa

SEQ ID NO: 6003520 - DNA, 25 bp, Homo sapien
ttcatcatgagaggagtgtcccttt

SEQ ID NO: 6003521 - DNA, 25 bp, Homo sapien
atcttccttttctaccaccttcgta

SEQ ID NO: 6003522 - DNA, 25 bp, Homo sapien
aattgccgaaatcgatgatttgcct

SEQ ID NO: 6003523 - DNA, 25 bp, Homo sapien
caataggatccaaacaccaaaatct

SEQ ID NO: 6003524 - DNA, 25 bp, Homo sapien
gtgtctaacgtggattttggtccat

SEQ ID NO: 6003525 - DNA, 25 bp, Homo sapien
gtacagcttgagttgcaaccaataa

SEQ ID NO: 6003526 - DNA, 25 bp, Homo sapien
atcacctgtggttactggagaatta

SEQ ID NO: 6003527 - DNA, 25 bp, Homo sapien
aagatggagaatagaaggcacctaa

SEQ ID NO: 6003528 - DNA, 25 bp, Homo sapien
actcgcgtgggccacttgacgctat

SEQ ID NO: 6003529 - DNA, 25 bp, Homo sapien
tccaatacaaccaagctgaacaaca

SEQ ID NO: 6003530 - DNA, 25 bp, Homo sapien
aacttcgtcattggcttttatttcg

SEQ ID NO: 6003531 - DNA, 25 bp, Homo sapien
tttgcctgacgtcctccaaagattt

SEQ ID NO: 6003532 - DNA, 25 bp, Homo sapien
ggaacatcttccatggcatctgtat

SEQ ID NO: 6003533 - DNA, 25 bp, Homo sapien
ttagtcaataaagacgcctttcgta

SEQ ID NO: 6003534 - DNA, 25 bp, Homo sapien
cagattgaattctcttagtcaataa

SEQ ID NO: 6003535 - DNA, 25 bp, Homo sapien
cgtaaatatacgtctgctaagccca

SEQ ID NO: 6003536 - DNA, 25 bp, Homo sapien
ctgagacgaatgcgtcgctcaatcc

SEQ ID NO: 6003537 - DNA, 25 bp, Homo sapien
tcgtacagcttgagttgcaaccaat

SEQ ID NO: 6003538 - DNA, 25 bp, Homo sapien
gcgttctaccgttaccgaagtctag

SEQ ID NO: 6003539 - DNA, 25 bp, Homo sapien
taaaactaagttggggcatccaata

SEQ ID NO: 6003540 - DNA, 25 bp, Homo sapien
tacgtctgctaagcccaatgctaac

SEQ ID NO: 6003541 - DNA, 25 bp, Homo sapien
acttcagattgaattctcttagtca

SEQ ID NO: 6003542 - DNA, 25 bp, Homo sapien
gatggagaatagaaggcacctaaac

SEQ ID NO: 6003543 - DNA, 25 bp, Homo sapien
catctgaagatggagaatagaaggc

SEQ ID NO: 6003544 - DNA, 25 bp, Homo sapien
aatcctgatgaggattcttcaccaa

SEQ ID NO: 6003545 - DNA, 25 bp, Homo sapien
tgagttgcaaccaataattctcttt

SEQ ID NO: 6003546 - DNA, 25 bp, Homo sapien
tcttgttataaacttcgtcattggc

SEQ ID NO: 6003547 - DNA, 25 bp, Homo sapien
aggattcttcaccaactaccttatc

SEQ ID NO: 6003548 - DNA, 25 bp, Homo sapien
ctccctctaaagtaatcatgtcttt

SEQ ID NO: 6003549 - DNA, 25 bp, Homo sapien
ttgataggcagacgtaaatatacgt

SEQ ID NO: 6003550 - DNA, 25 bp, Homo sapien
ccttcgtagctagcgttctaccgtt

SEQ ID NO: 6003551 - DNA, 25 bp, Homo sapien
ccaagtcatgtaactcgcgtgggcc

SEQ ID NO: 6003552 - DNA, 25 bp, Homo sapien
gcagcataatcacctgtggttactg

SEQ ID NO: 6003553 - DNA, 25 bp, Homo sapien
gacgtaaatatacgtctgctaagcc

SEQ ID NO: 6003554 - DNA, 25 bp, Homo sapien
tcaatcctgatgaggattcttcacc

SEQ ID NO: 6003555 - DNA, 25 bp, Homo sapien
gaagtctagaggaacatcttccatg

SEQ ID NO: 6003556 - DNA, 25 bp, Homo sapien
tacctccagcttcatggacaataac

SEQ ID NO: 6003557 - DNA, 25 bp, Homo sapien
tctagaggaacatcttccatggcat

SEQ ID NO: 6003558 - DNA, 25 bp, Homo sapien
atgtagacaccaccaagtcatgtaa

SEQ ID NO: 6003559 - DNA, 25 bp, Homo sapien
tgggccccataagaacttaaaacta

SEQ ID NO: 6003560 - DNA, 25 bp, Homo sapien
cgaaagatataaccaaatgactcat

SEQ ID NO: 6003561 - DNA, 25 bp, Homo sapien
gatacctccagcttcatggacaata

SEQ ID NO: 6003562 - DNA, 25 bp, Homo sapien
tcaggaaaattgctcttgatagcat

SEQ ID NO: 6003563 - DNA, 25 bp, Homo sapien
cttgagaatccaagtgcaaagattt

SEQ ID NO: 6003564 - DNA, 25 bp, Homo sapien
tgtcccttttcaactccctctaaag

SEQ ID NO: 6003565 - DNA, 25 bp, Homo sapien
taccttatcatcaggaaaattgctc

SEQ ID NO: 6003566 - DNA, 25 bp, Homo sapien
tgttcatcatgagaggagtgtccct

SEQ ID NO: 6003567 - DNA, 25 bp, Homo sapien
gacgcctttcgtacagcttgagttg

SEQ ID NO: 6003568 - DNA, 25 bp, Homo sapien
atgatcgtttgtgcagcataatcac

SEQ ID NO: 6003569 - DNA, 25 bp, Homo sapien
gctagcgttctaccgttaccgaagt

SEQ ID NO: 6003570 - DNA, 25 bp, Homo sapien
tttaaaattcctgagacgaatgcgt

SEQ ID NO: 6003571 - DNA, 25 bp, Homo sapien
aagatttggatatatttagtttgtt

SEQ ID NO: 6003572 - DNA, 25 bp, Homo sapien
catctgtatggatacctccagcttc

SEQ ID NO: 6003573 - DNA, 25 bp, Homo sapien
taatcacctgtggttactggagaat

SEQ ID NO: 6003574 - DNA, 25 bp, Homo sapien
tagctagcgttctaccgttaccgaa

SEQ ID NO: 6003575 - DNA, 25 bp, Homo sapien
tcaccaactaccttatcatcaggaa

SEQ ID NO: 6003576 - DNA, 25 bp, Homo sapien
caacaccgtccacaattaaggccag

SEQ ID NO: 6003577 - DNA, 25 bp, Homo sapien
acagcacgaaagatataaccaaatg

SEQ ID NO: 6003578 - DNA, 25 bp, Homo sapien
ctaagcccaatgctaacaaacagta

SEQ ID NO: 6003579 - DNA, 25 bp, Homo sapien
aactgatcgtttgtaaacagaaaat

SEQ ID NO: 6003580 - DNA, 25 bp, Homo sapien
gacgaatgcgtcgctcaatcctgat

SEQ ID NO: 6003581 - DNA, 25 bp, Homo sapien
gatttgcctgacgtcctccaaagat

SEQ ID NO: 6003582 - DNA, 25 bp, Homo sapien
tctgaagatggagaatagaaggcac

SEQ ID NO: 6003583 - DNA, 25 bp, Homo sapien
tactgcaaactgttcacctcttaaa

SEQ ID NO: 6003584 - DNA, 25 bp, Homo sapien
agcttgagttgcaaccaataattct

SEQ ID NO: 6003585 - DNA, 25 bp, Homo sapien
ccttatcatcaggaaaattgctctt

SEQ ID NO: 6003586 - DNA, 25 bp, Homo sapien
atataaccaaatgactcatggcctt

SEQ ID NO: 6003587 - DNA, 25 bp, Homo sapien
agtgcaaagatttggatatatttag

SEQ ID NO: 6003588 - DNA, 25 bp, Homo sapien
ctaacaaacagtacttggcttgaga

SEQ ID NO: 6003589 - DNA, 25 bp, Homo sapien
gattttggtccatgactctgcatct

SEQ ID NO: 6003590 - DNA, 25 bp, Homo sapien
tttatgatgatcgtttgtgcagcat

SEQ ID NO: 6003591 - DNA, 25 bp, Homo sapien
gataggcagacgtaaatatacgtct

SEQ ID NO: 6003592 - DNA, 25 bp, Homo sapien
tgacgctataactcccttcgtagct

SEQ ID NO: 6003593 - DNA, 25 bp, Homo sapien
atcgcatgatgtagacaccaccaag

SEQ ID NO: 6003594 - DNA, 25 bp, Homo sapien
attcttgttataaacttcgtcattg

SEQ ID NO: 6003595 - DNA, 25 bp, Homo sapien
gtagtggagtccttgtgagaaatca

SEQ ID NO: 6003596 - DNA, 25 bp, Homo sapien
agcataatcacctgtggttactgga

SEQ ID NO: 6003597 - DNA, 25 bp, Homo sapien
gagacgaatgcgtcgctcaatcctg

SEQ ID NO: 6003598 - DNA, 25 bp, Homo sapien
taacagcacgaaagatataaccaaa

SEQ ID NO: 6003599 - DNA, 25 bp, Homo sapien
aaactaagttggggcatccaataca

SEQ ID NO: 6003600 - DNA, 25 bp, Homo sapien
aaatgactcatggcctttcaaatct

SEQ ID NO: 6003601 - DNA, 25 bp, Homo sapien
actcccttcgtagctagcgttctac

SEQ ID NO: 6003602 - DNA, 25 bp, Homo sapien
cttgactgaatgacatcgcatgatg

SEQ ID NO: 6003603 - DNA, 25 bp, Homo sapien
gccagacatactgcaaactgttcac

SEQ ID NO: 6003604 - DNA, 25 bp, Homo sapien
caaacagtacttggcttgagaatcc

SEQ ID NO: 6003605 - DNA, 25 bp, Homo sapien
gaaaattgctcttgatagcatttat

SEQ ID NO: 6003606 - DNA, 25 bp, Homo sapien
atggcatctgtatggatacctccag

SEQ ID NO: 6003607 - DNA, 25 bp, Homo sapien
gttctaccgttaccgaagtctagag

SEQ ID NO: 6003608 - DNA, 25 bp, Homo sapien
agcatttatgatgatcgtttgtgca

SEQ ID NO: 6003609 - DNA, 25 bp, Homo sapien
catcatgagaggagtgtcccttttc

SEQ ID NO: 6003610 - DNA, 25 bp, Homo sapien
gtttcttgactgaatgacatcgcat

SEQ ID NO: 6003611 - DNA, 25 bp, Homo sapien
tcaataaagacgcctttcgtacagc

SEQ ID NO: 6003612 - DNA, 25 bp, Homo sapien
agcacgaaagatataaccaaatgac

SEQ ID NO: 6003613 - DNA, 25 bp, Homo sapien
tggattttggtccatgactctgcat

SEQ ID NO: 6003614 - DNA, 25 bp, Homo sapien
aacagtacttggcttgagaatccaa

SEQ ID NO: 6003615 - DNA, 25 bp, Homo sapien
aagcccaatgctaacaaacagtact

SEQ ID NO: 6003616 - DNA, 25 bp, Homo sapien
cttgatagcatttatgatgatcgtt

SEQ ID NO: 6003617 - DNA, 25 bp, Homo sapien
tgcatctgaagatggagaatagaag

SEQ ID NO: 6003618 - DNA, 25 bp, Homo sapien
tctcttagtcaataaagacgccttt

SEQ ID NO: 6003619 - DNA, 25 bp, Homo sapien
agacaccaccaagtcatgtaactcg

SEQ ID NO: 6003620 - DNA, 25 bp, Homo sapien
ttgccgaaatcgatgatttgcctga

SEQ ID NO: 6003621 - DNA, 25 bp, Homo sapien
tcaactccctctaaagtaatcatgt

SEQ ID NO: 6003622 - DNA, 25 bp, Homo sapien
ttgtgcagcataatcacctgtggtt

SEQ ID NO: 6003623 - DNA, 25 bp, Homo sapien
caattaaggccagacatactgcaaa

SEQ ID NO: 6003624 - DNA, 25 bp, Homo sapien
ggttccgtcaataggatccaaacac

SEQ ID NO: 6003625 - DNA, 25 bp, Homo sapien
ggcttgagaatccaagtgcaaagat

SEQ ID NO: 6003626 - DNA, 25 bp, Homo sapien
agtctagaggaacatcttccatggc

SEQ ID NO: 6003627 - DNA, 25 bp, Homo sapien
ttttggtccatgactctgcatctga

SEQ ID NO: 6003628 - DNA, 25 bp, Homo sapien
aagtgtctaacgtggattttggtcc

SEQ ID NO: 6003629 - DNA, 25 bp, Homo sapien
catggacaataacgttgcctgcagc

SEQ ID NO: 6003630 - DNA, 25 bp, Homo sapien
tgaggattcttcaccaactacctta

SEQ ID NO: 6003631 - DNA, 25 bp, Homo sapien
tggcctttcaaatcttgggccccat

SEQ ID NO: 6003632 - DNA, 25 bp, Homo sapien
ttcgtttaaaattcctgagacgaat

SEQ ID NO: 6003633 - DNA, 25 bp, Homo sapien
ccccttggttccgtcaataggatcc

SEQ ID NO: 6003634 - DNA, 25 bp, Homo sapien
ccaatgctaacaaacagtacttggc

SEQ ID NO: 6003635 - DNA, 25 bp, Homo sapien
tcttttaagtgtctaacgtggattt

SEQ ID NO: 6003636 - DNA, 25 bp, Homo sapien
cagcttcatggacaataacgttgcc

SEQ ID NO: 6003637 - DNA, 25 bp, Homo sapien
gccacttgacgctataactcccttc

SEQ ID NO: 6003638 - DNA, 25 bp, Homo sapien
ggggcatccaatacaaccaagctga

SEQ ID NO: 6003639 - DNA, 25 bp, Homo sapien
ccaaatgactcatggcctttcaaat

SEQ ID NO: 6003640 - DNA, 25 bp, Homo sapien
ccaataattctctttccaatgccat

SEQ ID NO: 6003641 - DNA, 25 bp, Homo sapien
ccttgtgagaaatcacttcagattg

SEQ ID NO: 6003642 - DNA, 25 bp, Homo sapien
attaaggccagacatactgcaaact

SEQ ID NO: 6003643 - DNA, 25 bp, Homo sapien
tgctcttgatagcatttatgatgat

SEQ ID NO: 6003644 - DNA, 25 bp, Homo sapien
gctcaatcctgatgaggattcttca

SEQ ID NO: 6003645 - DNA, 25 bp, Homo sapien
agttgcaaccaataattctctttcc

SEQ ID NO: 6003646 - DNA, 25 bp, Homo sapien
actaagttggggcatccaatacaac

SEQ ID NO: 6003647 - DNA, 25 bp, Homo sapien
ttggggcatccaatacaaccaagct

SEQ ID NO: 6003648 - DNA, 25 bp, Homo sapien
attcctgagacgaatgcgtcgctca

SEQ ID NO: 6003649 - DNA, 25 bp, Homo sapien
tactggagaattatcattcttggta

SEQ ID NO: 6003650 - DNA, 25 bp, Homo sapien
tccacaattaaggccagacatactg

SEQ ID NO: 6003651 - DNA, 25 bp, Homo sapien
tgaatgacatcgcatgatgtagaca

SEQ ID NO: 6003652 - DNA, 25 bp, Homo sapien
caactaccttatcatcaggaaaatt

SEQ ID NO: 6003653 - DNA, 25 bp, Homo sapien
ttcatggacaataacgttgcctgca

SEQ ID NO: 6003654 - DNA, 25 bp, Homo sapien
tatggatacctccagcttcatggac

SEQ ID NO: 6003655 - DNA, 25 bp, Homo sapien
atcgatgatttgcctgacgtcctcc

SEQ ID NO: 6003656 - DNA, 25 bp, Homo sapien
ttcttggtaagaaagtttgataggc

SEQ ID NO: 6003657 - DNA, 25 bp, Homo sapien
cgtggattttggtccatgactctgc

SEQ ID NO: 6003658 - DNA, 25 bp, Homo sapien
gatcgtttgtgcagcataatcacct

SEQ ID NO: 6003659 - DNA, 25 bp, Homo sapien
tcttgggccccataagaacttaaaa

SEQ ID NO: 6003660 - DNA, 25 bp, Homo sapien
tataactcccttcgtagctagcgtt

SEQ ID NO: 6003661 - DNA, 25 bp, Homo sapien
ttgtgagaaatcacttcagattgaa

SEQ ID NO: 6003662 - DNA, 25 bp, Homo sapien
aatgctaacaaacagtacttggctt

SEQ ID NO: 6003663 - DNA, 25 bp, Homo sapien
tcccttcgtagctagcgttctaccg

SEQ ID NO: 6003664 - DNA, 25 bp, Homo sapien
attctcttagtcaataaagacgcct

SEQ ID NO: 6003665 - DNA, 25 bp, Homo sapien
tccagcttcatggacaataacgttg

SEQ ID NO: 6003666 - DNA, 25 bp, Homo sapien
gaatagaaggcacctaaacctctaa

SEQ ID NO: 6003667 - DNA, 25 bp, Homo sapien
acgctataactcccttcgtagctag

SEQ ID NO: 6003668 - DNA, 25 bp, Homo sapien
tcctgatgaggattcttcaccaact

SEQ ID NO: 6003669 - DNA, 25 bp, Homo sapien
ttcttcaccaactaccttatcatca

SEQ ID NO: 6003670 - DNA, 25 bp, Homo sapien
cgcctttcgtacagcttgagttgca

SEQ ID NO: 6003671 - DNA, 25 bp, Homo sapien
aagtcatgtaactcgcgtgggccac

SEQ ID NO: 6003672 - DNA, 25 bp, Homo sapien
tgcaaagatttggatatatttagtt

SEQ ID NO: 6003673 - DNA, 25 bp, Homo sapien
taaatatacgtctgctaagcccaat

SEQ ID NO: 6003674 - DNA, 25 bp, Homo sapien
gtctaacgtggattttggtccatga

SEQ ID NO: 6003675 - DNA, 25 bp, Homo sapien
ccaagctgaacaacaccgtccacaa

SEQ ID NO: 6003676 - DNA, 25 bp, Homo sapien
gtagacaccaccaagtcatgtaact

SEQ ID NO: 6003677 - DNA, 25 bp, Homo sapien
atgagaggagtgtcccttttcaact

SEQ ID NO: 6003678 - DNA, 25 bp, Homo sapien
ttcttgactgaatgacatcgcatga

SEQ ID NO: 6003679 - DNA, 25 bp, Homo sapien
cattcttggtaatagtagtggagtc

SEQ ID NO: 6003680 - DNA, 25 bp, Homo sapien
ataacgttgcctgcagcatggtccc

SEQ ID NO: 6003681 - DNA, 25 bp, Homo sapien
aagaaagtttgataggcagacgtaa

SEQ ID NO: 6003682 - DNA, 25 bp, Homo sapien
tgctaagcccaatgctaacaaacag

SEQ ID NO: 6003683 - DNA, 25 bp, Homo sapien
tttcaactccctctaaagtaatcat

SEQ ID NO: 6003684 - DNA, 25 bp, Homo sapien
tttctaccaccttcgtaattgccga

SEQ ID NO: 6003685 - DNA, 25 bp, Homo sapien
ttggttccgtcaataggatccaaac

SEQ ID NO: 6003686 - DNA, 25 bp, Homo sapien
cacctgtggttactggagaattatc

SEQ ID NO: 6003687 - DNA, 25 bp, Homo sapien
aagattttagcggaaactgatcgtt

SEQ ID NO: 6003688 - DNA, 25 bp, Homo sapien
ggcatctgtatggatacctccagct

SEQ ID NO: 6003689 - DNA, 25 bp, Homo sapien
ccaccttcgtaattgccgaaatcga

SEQ ID NO: 6003690 - DNA, 25 bp, Homo sapien
tagtagtggagtccttgtgagaaat

SEQ ID NO: 6003691 - DNA, 25 bp, Homo sapien
aaattgctcttgatagcatttatga

SEQ ID NO: 6003692 - DNA, 25 bp, Homo sapien
catggtcccagatcttttcttggta

SEQ ID NO: 6003693 - DNA, 25 bp, Homo sapien
tgtatggatacctccagcttcatgg

SEQ ID NO: 6003694 - DNA, 25 bp, Homo sapien
tgcctgacgtcctccaaagatttta

SEQ ID NO: 6003695 - DNA, 25 bp, Homo sapien
gtaattgccgaaatcgatgatttgc

SEQ ID NO: 6003696 - DNA, 25 bp, Homo sapien
aggccagacatactgcaaactgttc

SEQ ID NO: 6003697 - DNA, 25 bp, Homo sapien
caccaagtcatgtaactcgcgtggg

SEQ ID NO: 6003698 - DNA, 25 bp, Homo sapien
atgatttgcctgacgtcctccaaag

SEQ ID NO: 6003699 - DNA, 25 bp, Homo sapien
tctgcatctgaagatggagaataga

SEQ ID NO: 6003700 - DNA, 25 bp, Homo sapien
actctgcatctgaagatggagaata

SEQ ID NO: 6003701 - DNA, 25 bp, Homo sapien
gaggaacatcttccatggcatctgt

SEQ ID NO: 6003702 - DNA, 25 bp, Homo sapien
tgactctgcatctgaagatggagaa

SEQ ID NO: 6003703 - DNA, 25 bp, Homo sapien
gggccacttgacgctataactccct

SEQ ID NO: 6003704 - DNA, 25 bp, Homo sapien
gttaccgaagtctagaggaacatct

SEQ ID NO: 6003705 - DNA, 25 bp, Homo sapien
atagcatttatgatgatcgtttgtg

SEQ ID NO: 6003706 - DNA, 25 bp, Homo sapien
catggcctttcaaatcttgggcccc

SEQ ID NO: 6003707 - DNA, 25 bp, Homo sapien
gatgaggattcttcaccaactacct

SEQ ID NO: 6003708 - DNA, 25 bp, Homo sapien
gattttagcggaaactgatcgtttg

SEQ ID NO: 6003709 - DNA, 25 bp, Homo sapien
tccatgactctgcatctgaagatgg

SEQ ID NO: 6003710 - DNA, 25 bp, Homo sapien
ttgcctgcagcatggtcccagatct

SEQ ID NO: 6003711 - DNA, 25 bp, Homo sapien
tttagtttgtttttgatagcagttt

SEQ ID NO: 6003712 - DNA, 25 bp, Homo sapien
aggatccaaacaccaaaatcttcct

SEQ ID NO: 6003713 - DNA, 25 bp, Homo sapien
cgtctgctaagcccaatgctaacaa

SEQ ID NO: 6003714 - DNA, 25 bp, Homo sapien
tcctgagacgaatgcgtcgctcaat

SEQ ID NO: 6003715 - DNA, 25 bp, Homo sapien
actaccttatcatcaggaaaattgc

SEQ ID NO: 6003716 - DNA, 25 bp, Homo sapien
tggatacctccagcttcatggacaa

SEQ ID NO: 6003717 - DNA, 25 bp, Homo sapien
cacaattaaggccagacatactgca

SEQ ID NO: 6003718 - DNA, 25 bp, Homo sapien
catgtaactcgcgtgggccacttga

SEQ ID NO: 6003719 - DNA, 25 bp, Homo sapien
taaacttcgtcattggcttttattt

SEQ ID NO: 6003720 - DNA, 25 bp, Homo sapien
tctaacagcacgaaagatataacca

SEQ ID NO: 6003721 - DNA, 25 bp, Homo sapien
aattatcattcttggtaatagtagt

SEQ ID NO: 6003722 - DNA, 25 bp, Homo sapien
aatccaagtgcaaagatttggatat

SEQ ID NO: 6003723 - DNA, 25 bp, Homo sapien
ctgatgaggattcttcaccaactac

SEQ ID NO: 6003724 - DNA, 25 bp, Homo sapien
ttcgtagctagcgttctaccgttac

SEQ ID NO: 6003725 - DNA, 25 bp, Homo sapien
cctctaacagcacgaaagatataac

SEQ ID NO: 6003726 - DNA, 25 bp, Homo sapien
gtgcagcataatcacctgtggttac

SEQ ID NO: 6003727 - DNA, 25 bp, Homo sapien
cataatcacctgtggttactggaga

SEQ ID NO: 6003728 - DNA, 25 bp, Homo sapien
gtacttggcttgagaatccaagtgc

SEQ ID NO: 6003729 - DNA, 25 bp, Homo sapien
gcgtttcttgactgaatgacatcgc

SEQ ID NO: 6003730 - DNA, 25 bp, Homo sapien
agcatggtcccagatcttttcttgg

SEQ ID NO: 6003731 - DNA, 25 bp, Homo sapien
agaatccaagtgcaaagatttggat

SEQ ID NO: 6003732 - DNA, 25 bp, Homo sapien
aaattcctgagacgaatgcgtcgct

SEQ ID NO: 6003733 - DNA, 25 bp, Homo sapien
cttaaaactaagttggggcatccaa

SEQ ID NO: 6003734 - DNA, 25 bp, Homo sapien
ccttggttccgtcaataggatccaa

SEQ ID NO: 6003735 - DNA, 25 bp, Homo sapien
atgtctttagtgtcttttaagtgtc

SEQ ID NO: 6003736 - DNA, 25 bp, Homo sapien
tctgctaagcccaatgctaacaaac

SEQ ID NO: 6003737 - DNA, 25 bp, Homo sapien
caaacaccaaaatcttccttttcta

SEQ ID NO: 6003738 - DNA, 25 bp, Homo sapien
tccaaacaccaaaatcttccttttc

SEQ ID NO: 6003739 - DNA, 25 bp, Homo sapien
cccagatcttttcttggtaagaaag

SEQ ID NO: 6003740 - DNA, 25 bp, Homo sapien
gacatactgcaaactgttcacctct

SEQ ID NO: 6003741 - DNA, 25 bp, Homo sapien
ttatttcgtttaaaattcctgagac

SEQ ID NO: 6003742 - DNA, 25 bp, Homo sapien
cctgtggttactggagaattatcat

SEQ ID NO: 6003743 - DNA, 25 bp, Homo sapien
atagaaggcacctaaacctctaaca

SEQ ID NO: 6003744 - DNA, 25 bp, Homo sapien
gtcatgtaactcgcgtgggccactt

SEQ ID NO: 6003745 - DNA, 25 bp, Homo sapien
tgatagcatttatgatgatcgtttg

SEQ ID NO: 6003746 - DNA, 25 bp, Homo sapien
tggtcccagatcttttcttggtaag

SEQ ID NO: 6003747 - DNA, 25 bp, Homo sapien
tagcgttctaccgttaccgaagtct

SEQ ID NO: 6003748 - DNA, 25 bp, Homo sapien
gcccaatgctaacaaacagtacttg

SEQ ID NO: 6003749 - DNA, 25 bp, Homo sapien
tgtcttttaagtgtctaacgtggat

SEQ ID NO: 6003750 - DNA, 25 bp, Homo sapien
cagtacttggcttgagaatccaagt

SEQ ID NO: 6003751 - DNA, 25 bp, Homo sapien
gttactggagaattatcattcttgg

SEQ ID NO: 6003752 - DNA, 25 bp, Homo sapien
tgtggttactggagaattatcattc

SEQ ID NO: 6003753 - DNA, 25 bp, Homo sapien
aaagatataaccaaatgactcatgg

SEQ ID NO: 6003754 - DNA, 25 bp, Homo sapien
cagacatactgcaaactgttcacct

SEQ ID NO: 6003755 - DNA, 25 bp, Homo sapien
taccgttaccgaagtctagaggaac

SEQ ID NO: 6003756 - DNA, 25 bp, Homo sapien
cgcatgatgtagacaccaccaagtc

SEQ ID NO: 6003757 - DNA, 25 bp, Homo sapien
acgtcctccaaagattttagcggaa

SEQ ID NO: 6003758 - DNA, 25 bp, Homo sapien
aatgcgtcgctcaatcctgatgagg

SEQ ID NO: 6003759 - DNA, 25 bp, Homo sapien
actgaatgacatcgcatgatgtaga

SEQ ID NO: 6003760 - DNA, 25 bp, Homo sapien
gactcatggcctttcaaatcttggg

SEQ ID NO: 6003761 - DNA, 25 bp, Homo sapien
cctgacgtcctccaaagattttagc

SEQ ID NO: 6003762 - DNA, 25 bp, Homo sapien
ccgaagtctagaggaacatcttcca

SEQ ID NO: 6003763 - DNA, 25 bp, Homo sapien
ttttagcggaaactgatcgtttgta

SEQ ID NO: 6003764 - DNA, 25 bp, Homo sapien
gtttgtaaacagaaaatcatccttt

SEQ ID NO: 6003765 - DNA, 25 bp, Homo sapien
atttcgtttaaaattcctgagacga

SEQ ID NO: 6003766 - DNA, 25 bp, Homo sapien
aatcacttcagattgaattctctta

SEQ ID NO: 6003767 - DNA, 25 bp, Homo sapien
cgatgatttgcctgacgtcctccaa

SEQ ID NO: 6003768 - DNA, 25 bp, Homo sapien
catttatgatgatcgtttgtgcagc

SEQ ID NO: 6003769 - DNA, 25 bp, Homo sapien
gtgagaaatcacttcagattgaatt

SEQ ID NO: 6003770 - DNA, 25 bp, Homo sapien
tcgctcaatcctgatgaggattctt

SEQ ID NO: 6003771 - DNA, 25 bp, Homo sapien
tgagaatccaagtgcaaagatttgg

SEQ ID NO: 6003772 - DNA, 25 bp, Homo sapien
agcggaaactgatcgtttgtaaaca

SEQ ID NO: 6003773 - DNA, 25 bp, Homo sapien
ctcttgatagcatttatgatgatcg

SEQ ID NO: 6003774 - DNA, 25 bp, Homo sapien
ctctaaagtaatcatgtctttagtg

SEQ ID NO: 6003775 - DNA, 25 bp, Homo sapien
ttagcggaaactgatcgtttgtaaa

SEQ ID NO: 6003776 - DNA, 25 bp, Homo sapien
tggagaatagaaggcacctaaacct

SEQ ID NO: 6003777 - DNA, 25 bp, Homo sapien
tggacaataacgttgcctgcagcat

SEQ ID NO: 6003778 - DNA, 25 bp, Homo sapien
agtggagtccttgtgagaaatcact

SEQ ID NO: 6003779 - DNA, 25 bp, Homo sapien
ttgttataaacttcgtcattggctt

SEQ ID NO: 6003780 - DNA, 25 bp, Homo sapien
gtctttagtgtcttttaagtgtcta

SEQ ID NO: 6003781 - DNA, 25 bp, Homo sapien
tctgtatggatacctccagcttcat

SEQ ID NO: 6003782 - DNA, 25 bp, Homo sapien
cctccaaagattttagcggaaactg

SEQ ID NO: 6003783 - DNA, 25 bp, Homo sapien
agtttgttcatcatgagaggagtgt

SEQ ID NO: 6003784 - DNA, 25 bp, Homo sapien
ggtccatgactctgcatctgaagat

SEQ ID NO: 6003785 - DNA, 25 bp, Homo sapien
caagtgcaaagatttggatatattt

SEQ ID NO: 6003786 - DNA, 25 bp, Homo sapien
tatttagtttgtttttgatagcagt

SEQ ID NO: 6003787 - DNA, 25 bp, Homo sapien
caaatcttgggccccataagaactt

SEQ ID NO: 6003788 - DNA, 25 bp, Homo sapien
cgccaaggctatgggttacagagtc

SEQ ID NO: 6003789 - DNA, 25 bp, Homo sapien
gctggaagatcggtgactacgccgg

SEQ ID NO: 6003790 - DNA, 25 bp, Homo sapien
acgccggtatcaaatggttgaacgg

SEQ ID NO: 6003791 - DNA, 25 bp, Homo sapien
gatacgttgttgacacttctaaata

SEQ ID NO: 6003792 - DNA, 25 bp, Homo sapien
ttgacggtggtgaaggtaaggaaga

SEQ ID NO: 6003793 - DNA, 25 bp, Homo sapien
gaggtttggtcaagtctccaatcaa

SEQ ID NO: 6003794 - DNA, 25 bp, Homo sapien
gccaaaggccaacgaattgttgatc

SEQ ID NO: 6003795 - DNA, 25 bp, Homo sapien
taccagatacgttagagctaacggt

SEQ ID NO: 6003796 - DNA, 25 bp, Homo sapien
agatacgttagagctaacggtacca

SEQ ID NO: 6003797 - DNA, 25 bp, Homo sapien
actgacttgcacgcttggcacggtg

SEQ ID NO: 6003798 - DNA, 25 bp, Homo sapien
aggccactgacggtggtgctcacgg

SEQ ID NO: 6003799 - DNA, 25 bp, Homo sapien
tttgaagtctgctaacttgatggcc

SEQ ID NO: 6003800 - DNA, 25 bp, Homo sapien
caaagccaaaggccaacgaattgtt

SEQ ID NO: 6003801 - DNA, 25 bp, Homo sapien
gaagccgctattgaagcttctacca

SEQ ID NO: 6003802 - DNA, 25 bp, Homo sapien
ccaagtgttgttctgatgtcttcaa

SEQ ID NO: 6003803 - DNA, 25 bp, Homo sapien
caagtcgcccccatcttgtgtgctg

SEQ ID NO: 6003804 - DNA, 25 bp, Homo sapien
catcaacgtttccgtttccgaagcc

SEQ ID NO: 6003805 - DNA, 25 bp, Homo sapien
gccggtgtcgttgtcggcatgggtg

SEQ ID NO: 6003806 - DNA, 25 bp, Homo sapien
gggttgctatctccggtgctgctgg

SEQ ID NO: 6003807 - DNA, 25 bp, Homo sapien
ggcacggtgactggccattgccagt

SEQ ID NO: 6003808 - DNA, 25 bp, Homo sapien
tcccacggtaagttggaatacaaag

SEQ ID NO: 6003809 - DNA, 25 bp, Homo sapien
cagaaactcaaaaaggtgttatctt

SEQ ID NO: 6003810 - DNA, 25 bp, Homo sapien
ggtaacgaatccaactgtcctcacg

SEQ ID NO: 6003811 - DNA, 25 bp, Homo sapien
ggtctaggttctttggctgttcaat

SEQ ID NO: 6003812 - DNA, 25 bp, Homo sapien
aagaattattcagatccatcggtgg

SEQ ID NO: 6003813 - DNA, 25 bp, Homo sapien
ttggacttcttcgccagaggtttgg

SEQ ID NO: 6003814 - DNA, 25 bp, Homo sapien
cagttccaaagccaaaggccaacga

SEQ ID NO: 6003815 - DNA, 25 bp, Homo sapien
accgttttggtcggtatgccagctg

SEQ ID NO: 6003816 - DNA, 25 bp, Homo sapien
aggtaccgacttggcccaagtcgcc

SEQ ID NO: 6003817 - DNA, 25 bp, Homo sapien
gggttacagagtcttgggtattgac

SEQ ID NO: 6003818 - DNA, 25 bp, Homo sapien
gtgactacgccggtatcaaatggtt

SEQ ID NO: 6003819 - DNA, 25 bp, Homo sapien
cccacgacggttctttccaacaata

SEQ ID NO: 6003820 - DNA, 25 bp, Homo sapien
gtcgttgtcggcatgggtgaaaacg

SEQ ID NO: 6003821 - DNA, 25 bp, Homo sapien
cgaatcccacggtaagttggaatac

SEQ ID NO: 6003822 - DNA, 25 bp, Homo sapien
cggtggtgctcacggtgtcatcaac

SEQ ID NO: 6003823 - DNA, 25 bp, Homo sapien
ttacgtcggtaacagagctgacacc

SEQ ID NO: 6003824 - DNA, 25 bp, Homo sapien
gtaccgacttggcccaagtcgcccc

SEQ ID NO: 6003825 - DNA, 25 bp, Homo sapien
ggttctttccaacaatacgctaccg

SEQ ID NO: 6003826 - DNA, 25 bp, Homo sapien
gtcggtggtcacgaaggtgccggtg

SEQ ID NO: 6003827 - DNA, 25 bp, Homo sapien
tgccaagtgttgttctgatgtcttc

SEQ ID NO: 6003828 - DNA, 25 bp, Homo sapien
ttgttggttcttacgtcggtaacag

SEQ ID NO: 6003829 - DNA, 25 bp, Homo sapien
ttctaaaggccactgacggtggtgc

SEQ ID NO: 6003830 - DNA, 25 bp, Homo sapien
ccgctattgaagcttctaccagata

SEQ ID NO: 6003831 - DNA, 25 bp, Homo sapien
tgtcacactgacttgcacgcttggc

SEQ ID NO: 6003832 - DNA, 25 bp, Homo sapien
aaggccaacgaattgttgatcaacg

SEQ ID NO: 6003833 - DNA, 25 bp, Homo sapien
gggctggaagatcggtgactacgcc

SEQ ID NO: 6003834 - DNA, 25 bp, Homo sapien
gtgctgttctaaaggccactgacgg

SEQ ID NO: 6003835 - DNA, 25 bp, Homo sapien
tcggcttgtctaccttgccagaaat

SEQ ID NO: 6003836 - DNA, 25 bp, Homo sapien
gtaaggaagaattattcagatccat

SEQ ID NO: 6003837 - DNA, 25 bp, Homo sapien
tatcaccgtctacaaggctttgaag

SEQ ID NO: 6003838 - DNA, 25 bp, Homo sapien
ccaccgttttggtcggtatgccagc

SEQ ID NO: 6003839 - DNA, 25 bp, Homo sapien
ttggtagatacgttgttgacacttc

SEQ ID NO: 6003840 - DNA, 25 bp, Homo sapien
ctatgggttacagagtcttgggtat

SEQ ID NO: 6003841 - DNA, 25 bp, Homo sapien
gtgaattgggtaacgaatccaactg

SEQ ID NO: 6003842 - DNA, 25 bp, Homo sapien
ccgaagccgctattgaagcttctac

SEQ ID NO: 6003843 - DNA, 25 bp, Homo sapien
atggcctgtgaatactgtgaattgg

SEQ ID NO: 6003844 - DNA, 25 bp, Homo sapien
tcacgctgacttgtctggttacacc

SEQ ID NO: 6003845 - DNA, 25 bp, Homo sapien
ggtagatacgttgttgacacttcta

SEQ ID NO: 6003846 - DNA, 25 bp, Homo sapien
acttgtctggttacacccacgacgg

SEQ ID NO: 6003847 - DNA, 25 bp, Homo sapien
tagagctaacggtaccaccgttttg

SEQ ID NO: 6003848 - DNA, 25 bp, Homo sapien
ttctgatgtcttcaaccaagtcgtc

SEQ ID NO: 6003849 - DNA, 25 bp, Homo sapien
ttcttcgccagaggtttggtcaagt

SEQ ID NO: 6003850 - DNA, 25 bp, Homo sapien
tgccagctggtgccaagtgttgttc

SEQ ID NO: 6003851 - DNA, 25 bp, Homo sapien
gttgttctgatgtcttcaaccaagt

SEQ ID NO: 6003852 - DNA, 25 bp, Homo sapien
tgtctgtcacactgacttgcacgct

SEQ ID NO: 6003853 - DNA, 25 bp, Homo sapien
caagccgctcacattcctcaaggta

SEQ ID NO: 6003854 - DNA, 25 bp, Homo sapien
gaaggtgccggtgtcgttgtcggca

SEQ ID NO: 6003855 - DNA, 25 bp, Homo sapien
tactctggtgtctgtcacactgact

SEQ ID NO: 6003856 - DNA, 25 bp, Homo sapien
tacacccacgacggttctttccaac

SEQ ID NO: 6003857 - DNA, 25 bp, Homo sapien
gttgctatctccggtgctgctggtg

SEQ ID NO: 6003858 - DNA, 25 bp, Homo sapien
caatcaaggttgtcggcttgtctac

SEQ ID NO: 6003859 - DNA, 25 bp, Homo sapien
ggtcggtatgccagctggtgccaag

SEQ ID NO: 6003860 - DNA, 25 bp, Homo sapien
aactgtcctcacgctgacttgtctg

SEQ ID NO: 6003861 - DNA, 25 bp, Homo sapien
tctacaaggctttgaagtctgctaa

SEQ ID NO: 6003862 - DNA, 25 bp, Homo sapien
cagagaagctttggacttcttcgcc

SEQ ID NO: 6003863 - DNA, 25 bp, Homo sapien
tattgacggtggtgaaggtaaggaa

SEQ ID NO: 6003864 - DNA, 25 bp, Homo sapien
gtctatcccagaaactcaaaaaggt

SEQ ID NO: 6003865 - DNA, 25 bp, Homo sapien
caaaggccaacgaattgttgatcaa

SEQ ID NO: 6003866 - DNA, 25 bp, Homo sapien
cggttcttgtatggcctgtgaatac

SEQ ID NO: 6003867 - DNA, 25 bp, Homo sapien
ctaaaggccactgacggtggtgctc

SEQ ID NO: 6003868 - DNA, 25 bp, Homo sapien
aggttgtcggcttgtctaccttgcc

SEQ ID NO: 6003869 - DNA, 25 bp, Homo sapien
ttgacttcactaaggaaaaggacat

SEQ ID NO: 6003870 - DNA, 25 bp, Homo sapien
tcggtggtgaagtcttcattgactt

SEQ ID NO: 6003871 - DNA, 25 bp, Homo sapien
tggaaaagggtcaaatcgttggtag

SEQ ID NO: 6003872 - DNA, 25 bp, Homo sapien
ctggtatcaccgtctacaaggcttt

SEQ ID NO: 6003873 - DNA, 25 bp, Homo sapien
cggcatgggtgaaaacgttaagggc

SEQ ID NO: 6003874 - DNA, 25 bp, Homo sapien
tcttcaaccaagtcgtcaagtccat

SEQ ID NO: 6003875 - DNA, 25 bp, Homo sapien
ttggctgttcaatacgccaaggcta

SEQ ID NO: 6003876 - DNA, 25 bp, Homo sapien
ctcaaaaaggtgttatcttctacga

SEQ ID NO: 6003877 - DNA, 25 bp, Homo sapien
tggccggtcactgggttgctatctc

SEQ ID NO: 6003878 - DNA, 25 bp, Homo sapien
ctgggttgctatctccggtgctgct

SEQ ID NO: 6003879 - DNA, 25 bp, Homo sapien
ttgccagaaatttacgaaaagatgg

SEQ ID NO: 6003880 - DNA, 25 bp, Homo sapien
tcggtatgccagctggtgccaagtg

SEQ ID NO: 6003881 - DNA, 25 bp, Homo sapien
gaagatcggtgactacgccggtatc

SEQ ID NO: 6003882 - DNA, 25 bp, Homo sapien
ttgaagcttctaccagatacgttag

SEQ ID NO: 6003883 - DNA, 25 bp, Homo sapien
gagtcttgggtattgacggtggtga

SEQ ID NO: 6003884 - DNA, 25 bp, Homo sapien
cgttgtcggcatgggtgaaaacgtt

SEQ ID NO: 6003885 - DNA, 25 bp, Homo sapien
caaccaagtcgtcaagtccatctct

SEQ ID NO: 6003886 - DNA, 25 bp, Homo sapien
gaaaagggtcaaatcgttggtagat

SEQ ID NO: 6003887 - DNA, 25 bp, Homo sapien
acgctaccgctgacgctgttcaagc

SEQ ID NO: 6003888 - DNA, 25 bp, Homo sapien
ggtattgacggtggtgaaggtaagg

SEQ ID NO: 6003889 - DNA, 25 bp, Homo sapien
ttgtcggtgctgttctaaaggccac

SEQ ID NO: 6003890 - DNA, 25 bp, Homo sapien
tcaccgtctacaaggctttgaagtc

SEQ ID NO: 6003891 - DNA, 25 bp, Homo sapien
aacgttaagggctggaagatcggtg

SEQ ID NO: 6003892 - DNA, 25 bp, Homo sapien
ccaacgaattgttgatcaacgttaa

SEQ ID NO: 6003893 - DNA, 25 bp, Homo sapien
cttgtctaccttgccagaaatttac

SEQ ID NO: 6003894 - DNA, 25 bp, Homo sapien
aggctttgaagtctgctaacttgat

SEQ ID NO: 6003895 - DNA, 25 bp, Homo sapien
gctgttctaaaggccactgacggtg

SEQ ID NO: 6003896 - DNA, 25 bp, Homo sapien
gaagtcttcattgacttcactaagg

SEQ ID NO: 6003897 - DNA, 25 bp, Homo sapien
attagtcggtggtcacgaaggtgcc

SEQ ID NO: 6003898 - DNA, 25 bp, Homo sapien
actaaggaaaaggacattgtcggtg

SEQ ID NO: 6003899 - DNA, 25 bp, Homo sapien
ggtcaaatcgttggtagatacgttg

SEQ ID NO: 6003900 - DNA, 25 bp, Homo sapien
tggaatacaaagatattccagttcc

SEQ ID NO: 6003901 - DNA, 25 bp, Homo sapien
tgttctaaaggccactgacggtggt

SEQ ID NO: 6003902 - DNA, 25 bp, Homo sapien
gatccatcggtggtgaagtcttcat

SEQ ID NO: 6003903 - DNA, 25 bp, Homo sapien
caagtctccaatcaaggttgtcggc

SEQ ID NO: 6003904 - DNA, 25 bp, Homo sapien
cacgacggttctttccaacaatacg

SEQ ID NO: 6003905 - DNA, 25 bp, Homo sapien
tgtctaccttgccagaaatttacga

SEQ ID NO: 6003906 - DNA, 25 bp, Homo sapien
catcggtggtgaagtcttcattgac

SEQ ID NO: 6003907 - DNA, 25 bp, Homo sapien
gacggtggtgaaggtaaggaagaat

SEQ ID NO: 6003908 - DNA, 25 bp, Homo sapien
acttcttcgccagaggtttggtcaa

SEQ ID NO: 6003909 - DNA, 25 bp, Homo sapien
tgtcttcaaccaagtcgtcaagtcc

SEQ ID NO: 6003910 - DNA, 25 bp, Homo sapien
tcttcattgacttcactaaggaaaa

SEQ ID NO: 6003911 - DNA, 25 bp, Homo sapien
cgaattgttgatcaacgttaaatac

SEQ ID NO: 6003912 - DNA, 25 bp, Homo sapien
gttacagagtcttgggtattgacgg

SEQ ID NO: 6003913 - DNA, 25 bp, Homo sapien
agatcggtgactacgccggtatcaa

SEQ ID NO: 6003914 - DNA, 25 bp, Homo sapien
tgttcaagccgctcacattcctcaa

SEQ ID NO: 6003915 - DNA, 25 bp, Homo sapien
tacaaggctttgaagtctgctaact

SEQ ID NO: 6003916 - DNA, 25 bp, Homo sapien
tacgaatcccacggtaagttggaat

SEQ ID NO: 6003917 - DNA, 25 bp, Homo sapien
tgctggtatcaccgtctacaaggct

SEQ ID NO: 6003918 - DNA, 25 bp, Homo sapien
ctctggtgtctgtcacactgacttg

SEQ ID NO: 6003919 - DNA, 25 bp, Homo sapien
aggacattgtcggtgctgttctaaa

SEQ ID NO: 6003920 - DNA, 25 bp, Homo sapien
aaaggacattgtcggtgctgttcta

SEQ ID NO: 6003921 - DNA, 25 bp, Homo sapien
gaagcttctaccagatacgttagag

SEQ ID NO: 6003922 - DNA, 25 bp, Homo sapien
ttcaagccgctcacattcctcaagg

SEQ ID NO: 6003923 - DNA, 25 bp, Homo sapien
gctgacgctgttcaagccgctcaca

SEQ ID NO: 6003924 - DNA, 25 bp, Homo sapien
gtttccgaagccgctattgaagctt

SEQ ID NO: 6003925 - DNA, 25 bp, Homo sapien
acttgatggccggtcactgggttgc

SEQ ID NO: 6003926 - DNA, 25 bp, Homo sapien
tctgtcacactgacttgcacgcttg

SEQ ID NO: 6003927 - DNA, 25 bp, Homo sapien
gttgatcaacgttaaatactctggt

SEQ ID NO: 6003928 - DNA, 25 bp, Homo sapien
gtcctcacgctgacttgtctggtta

SEQ ID NO: 6003929 - DNA, 25 bp, Homo sapien
cctgtgaatactgtgaattgggtaa

SEQ ID NO: 6003930 - DNA, 25 bp, Homo sapien
tcgccagaggtttggtcaagtctcc

SEQ ID NO: 6003931 - DNA, 25 bp, Homo sapien
ttaagctaccattagtcggtggtca

SEQ ID NO: 6003932 - DNA, 25 bp, Homo sapien
agggtcaaatcgttggtagatacgt

SEQ ID NO: 6003933 - DNA, 25 bp, Homo sapien
ggtgccaagtgttgttctgatgtct

SEQ ID NO: 6003934 - DNA, 25 bp, Homo sapien
gctaccgctgacgctgttcaagccg

SEQ ID NO: 6003935 - DNA, 25 bp, Homo sapien
acgctgttcaagccgctcacattcc

SEQ ID NO: 6003936 - DNA, 25 bp, Homo sapien
aagatggaaaagggtcaaatcgttg

SEQ ID NO: 6003937 - DNA, 25 bp, Homo sapien
gctaccattagtcggtggtcacgaa

SEQ ID NO: 6003938 - DNA, 25 bp, Homo sapien
ggacttcttcgccagaggtttggtc

SEQ ID NO: 6003939 - DNA, 25 bp, Homo sapien
gttgaacggttcttgtatggcctgt

SEQ ID NO: 6003940 - DNA, 25 bp, Homo sapien
taccattagtcggtggtcacgaagg

SEQ ID NO: 6003941 - DNA, 25 bp, Homo sapien
gaaaaggacattgtcggtgctgttc

SEQ ID NO: 6003942 - DNA, 25 bp, Homo sapien
atgtctatcccagaaactcaaaaag

SEQ ID NO: 6003943 - DNA, 25 bp, Homo sapien
ggttctttggctgttcaatacgcca

SEQ ID NO: 6003944 - DNA, 25 bp, Homo sapien
agtctccaatcaaggttgtcggctt

SEQ ID NO: 6003945 - DNA, 25 bp, Homo sapien
aagtctgctaacttgatggccggtc

SEQ ID NO: 6003946 - DNA, 25 bp, Homo sapien
aaagggtcaaatcgttggtagatac

SEQ ID NO: 6003947 - DNA, 25 bp, Homo sapien
gccagaggtttggtcaagtctccaa

SEQ ID NO: 6003948 - DNA, 25 bp, Homo sapien
ctatcccagaaactcaaaaaggtgt

SEQ ID NO: 6003949 - DNA, 25 bp, Homo sapien
tgaagtctgctaacttgatggccgg

SEQ ID NO: 6003950 - DNA, 25 bp, Homo sapien
attattcagatccatcggtggtgaa

SEQ ID NO: 6003951 - DNA, 25 bp, Homo sapien
tgaaaacgttaagggctggaagatc

SEQ ID NO: 6003952 - DNA, 25 bp, Homo sapien
atacgctaccgctgacgctgttcaa

SEQ ID NO: 6003953 - DNA, 25 bp, Homo sapien
gaatccaactgtcctcacgctgact

SEQ ID NO: 6003954 - DNA, 25 bp, Homo sapien
attcctcaaggtaccgacttggccc

SEQ ID NO: 6003955 - DNA, 25 bp, Homo sapien
gacattgtcggtgctgttctaaagg

SEQ ID NO: 6003956 - DNA, 25 bp, Homo sapien
gtttccgtttccgaagccgctattg

SEQ ID NO: 6003957 - DNA, 25 bp, Homo sapien
ccttgccagaaatttacgaaaagat

SEQ ID NO: 6003958 - DNA, 25 bp, Homo sapien
cttcgccagaggtttggtcaagtct

SEQ ID NO: 6003959 - DNA, 25 bp, Homo sapien
aaaggccactgacggtggtgctcac

SEQ ID NO: 6003960 - DNA, 25 bp, Homo sapien
gtggtctaggttctttggctgttca

SEQ ID NO: 6003961 - DNA, 25 bp, Homo sapien
cgttaagggctggaagatcggtgac

SEQ ID NO: 6003962 - DNA, 25 bp, Homo sapien
cggtggtgaaggtaaggaagaatta

SEQ ID NO: 6003963 - DNA, 25 bp, Homo sapien
taccgctgacgctgttcaagccgct

SEQ ID NO: 6003964 - DNA, 25 bp, Homo sapien
gtcggcatgggtgaaaacgttaagg

SEQ ID NO: 6003965 - DNA, 25 bp, Homo sapien
gctgacaccagagaagctttggact

SEQ ID NO: 6003966 - DNA, 25 bp, Homo sapien
ttgttgatcaacgttaaatactctg

SEQ ID NO: 6003967 - DNA, 25 bp, Homo sapien
cattgtcggtgctgttctaaaggcc

SEQ ID NO: 6003968 - DNA, 25 bp, Homo sapien
aattgttgatcaacgttaaatactc

SEQ ID NO: 6003969 - DNA, 25 bp, Homo sapien
atgggttacagagtcttgggtattg

SEQ ID NO: 6003970 - DNA, 25 bp, Homo sapien
cacggtgtcatcaacgtttccgttt

SEQ ID NO: 6003971 - DNA, 25 bp, Homo sapien
ccattagtcggtggtcacgaaggtg

SEQ ID NO: 6003972 - DNA, 25 bp, Homo sapien
gtgttgttctgatgtcttcaaccaa

SEQ ID NO: 6003973 - DNA, 25 bp, Homo sapien
gtgaagtcttcattgacttcactaa

SEQ ID NO: 6003974 - DNA, 25 bp, Homo sapien
atcaaatggttgaacggttcttgta

SEQ ID NO: 6003975 - DNA, 25 bp, Homo sapien
agcttctaccagatacgttagagct

SEQ ID NO: 6003976 - DNA, 25 bp, Homo sapien
caaggtaccgacttggcccaagtcg

SEQ ID NO: 6003977 - DNA, 25 bp, Homo sapien
taccttgccagaaatttacgaaaag

SEQ ID NO: 6003978 - DNA, 25 bp, Homo sapien
aacagagctgacaccagagaagctt

SEQ ID NO: 6003979 - DNA, 25 bp, Homo sapien
attgccagttaagctaccattagtc

SEQ ID NO: 6003980 - DNA, 25 bp, Homo sapien
ggctgttcaatacgccaaggctatg

SEQ ID NO: 6003981 - DNA, 25 bp, Homo sapien
aggtgccggtgtcgttgtcggcatg

SEQ ID NO: 6003982 - DNA, 25 bp, Homo sapien
aaggctatgggttacagagtcttgg

SEQ ID NO: 6003983 - DNA, 25 bp, Homo sapien
cggtcactgggttgctatctccggt

SEQ ID NO: 6003984 - DNA, 25 bp, Homo sapien
caaaaaggtgttatcttctacgaat

SEQ ID NO: 6003985 - DNA, 25 bp, Homo sapien
taaggaaaaggacattgtcggtgct

SEQ ID NO: 6003986 - DNA, 25 bp, Homo sapien
ttcagatccatcggtggtgaagtct

SEQ ID NO: 6003987 - DNA, 25 bp, Homo sapien
caaggttgtcggcttgtctaccttg

SEQ ID NO: 6003988 - DNA, 25 bp, Homo sapien
gtggtcacgaaggtgccggtgtcgt

SEQ ID NO: 6003989 - DNA, 25 bp, Homo sapien
ttgtcggcatgggtgaaaacgttaa

SEQ ID NO: 6003990 - DNA, 25 bp, Homo sapien
aggaaaaggacattgtcggtgctgt

SEQ ID NO: 6003991 - DNA, 25 bp, Homo sapien
tgctatctccggtgctgctggtggt

SEQ ID NO: 6003992 - DNA, 25 bp, Homo sapien
tgctgctggtggtctaggttctttg

SEQ ID NO: 6003993 - DNA, 25 bp, Homo sapien
ttccgtttccgaagccgctattgaa

SEQ ID NO: 6003994 - DNA, 25 bp, Homo sapien
gtatcaaatggttgaacggttcttg

SEQ ID NO: 6003995 - DNA, 25 bp, Homo sapien
gaatacaaagatattccagttccaa

SEQ ID NO: 6003996 - DNA, 25 bp, Homo sapien
agctggtgccaagtgttgttctgat

SEQ ID NO: 6003997 - DNA, 25 bp, Homo sapien
gttggaatacaaagatattccagtt

SEQ ID NO: 6003998 - DNA, 25 bp, Homo sapien
ggccattgccagttaagctaccatt

SEQ ID NO: 6003999 - DNA, 25 bp, Homo sapien
acactgacttgcacgcttggcacgg

SEQ ID NO: 6004000 - DNA, 25 bp, Homo sapien
tcacattcctcaaggtaccgacttg

SEQ ID NO: 6004001 - DNA, 25 bp, Homo sapien
cgttttggtcggtatgccagctggt

SEQ ID NO: 6004002 - DNA, 25 bp, Homo sapien
tcgtcaagtccatctctattgttgg

SEQ ID NO: 6004003 - DNA, 25 bp, Homo sapien
gatggccggtcactgggttgctatc

SEQ ID NO: 6004004 - DNA, 25 bp, Homo sapien
tggtcaagtctccaatcaaggttgt

SEQ ID NO: 6004005 - DNA, 25 bp, Homo sapien
gtcttgggtattgacggtggtgaag

SEQ ID NO: 6004006 - DNA, 25 bp, Homo sapien
agatattccagttccaaagccaaag

SEQ ID NO: 6004007 - DNA, 25 bp, Homo sapien
caaggctttgaagtctgctaacttg

SEQ ID NO: 6004008 - DNA, 25 bp, Homo sapien
taaatactctggtgtctgtcacact

SEQ ID NO: 6004009 - DNA, 25 bp, Homo sapien
gtcggtgctgttctaaaggccactg

SEQ ID NO: 6004010 - DNA, 25 bp, Homo sapien
tcttacgtcggtaacagagctgaca

SEQ ID NO: 6004011 - DNA, 25 bp, Homo sapien
tgtgctggtatcaccgtctacaagg

SEQ ID NO: 6004012 - DNA, 25 bp, Homo sapien
ctgctggtggtctaggttctttggc

SEQ ID NO: 6004013 - DNA, 25 bp, Homo sapien
tgtgaatactgtgaattgggtaacg

SEQ ID NO: 6004014 - DNA, 25 bp, Homo sapien
tcctcaaggtaccgacttggcccaa

SEQ ID NO: 6004015 - DNA, 25 bp, Homo sapien
ctggccattgccagttaagctacca

SEQ ID NO: 6004016 - DNA, 25 bp, Homo sapien
attccagttccaaagccaaaggcca

SEQ ID NO: 6004017 - DNA, 25 bp, Homo sapien
tgtgtgctggtatcaccgtctacaa

SEQ ID NO: 6004018 - DNA, 25 bp, Homo sapien
gctttgaagtctgctaacttgatgg

SEQ ID NO: 6004019 - DNA, 25 bp, Homo sapien
atcggtgactacgccggtatcaaat

SEQ ID NO: 6004020 - DNA, 25 bp, Homo sapien
gctgacttgtctggttacacccacg

SEQ ID NO: 6004021 - DNA, 25 bp, Homo sapien
ccggtgctgctggtggtctaggttc

SEQ ID NO: 6004022 - DNA, 25 bp, Homo sapien
acggtaagttggaatacaaagatat

SEQ ID NO: 6004023 - DNA, 25 bp, Homo sapien
aagtgttgttctgatgtcttcaacc

SEQ ID NO: 6004024 - DNA, 25 bp, Homo sapien
aaagatattccagttccaaagccaa

SEQ ID NO: 6004025 - DNA, 25 bp, Homo sapien
tccatctctattgttggttcttacg

SEQ ID NO: 6004026 - DNA, 25 bp, Homo sapien
ccaactgtcctcacgctgacttgtc

SEQ ID NO: 6004027 - DNA, 25 bp, Homo sapien
gtcggtaacagagctgacaccagag

SEQ ID NO: 6004028 - DNA, 25 bp, Homo sapien
caagtcgtcaagtccatctctattg

SEQ ID NO: 6004029 - DNA, 25 bp, Homo sapien
tcacgaaggtgccggtgtcgttgtc

SEQ ID NO: 6004030 - DNA, 25 bp, Homo sapien
cgttggtagatacgttgttgacact

SEQ ID NO: 6004031 - DNA, 25 bp, Homo sapien
ttcattgacttcactaaggaaaagg

SEQ ID NO: 6004032 - DNA, 25 bp, Homo sapien
gatggaaaagggtcaaatcgttggt

SEQ ID NO: 6004033 - DNA, 25 bp, Homo sapien
ctacgccggtatcaaatggttgaac

SEQ ID NO: 6004034 - DNA, 25 bp, Homo sapien
taacttgatggccggtcactgggtt

SEQ ID NO: 6004035 - DNA, 25 bp, Homo sapien
cgacggttctttccaacaatacgct

SEQ ID NO: 6004036 - DNA, 25 bp, Homo sapien
tcgcccccatcttgtgtgctggtat

SEQ ID NO: 6004037 - DNA, 25 bp, Homo sapien
ggtggtgaagtcttcattgacttca

SEQ ID NO: 6004038 - DNA, 25 bp, Homo sapien
ggcctgtgaatactgtgaattgggt

SEQ ID NO: 6004039 - DNA, 25 bp, Homo sapien
ttgatggccggtcactgggttgcta

SEQ ID NO: 6004040 - DNA, 25 bp, Homo sapien
tcaacgtttccgtttccgaagccgc

SEQ ID NO: 6004041 - DNA, 25 bp, Homo sapien
attgggtaacgaatccaactgtcct

SEQ ID NO: 6004042 - DNA, 25 bp, Homo sapien
tattcagatccatcggtggtgaagt

SEQ ID NO: 6004043 - DNA, 25 bp, Homo sapien
cttctacgaatcccacggtaagttg

SEQ ID NO: 6004044 - DNA, 25 bp, Homo sapien
gccggtatcaaatggttgaacggtt

SEQ ID NO: 6004045 - DNA, 25 bp, Homo sapien
acgctgacttgtctggttacaccca

SEQ ID NO: 6004046 - DNA, 25 bp, Homo sapien
gtgactggccattgccagttaagct

SEQ ID NO: 6004047 - DNA, 25 bp, Homo sapien
gcttggcacggtgactggccattgc

SEQ ID NO: 6004048 - DNA, 25 bp, Homo sapien
tctacgaatcccacggtaagttgga

SEQ ID NO: 6004049 - DNA, 25 bp, Homo sapien
acgaaggtgccggtgtcgttgtcgg

SEQ ID NO: 6004050 - DNA, 25 bp, Homo sapien
tgttatcttctacgaatcccacggt

SEQ ID NO: 6004051 - DNA, 25 bp, Homo sapien
aaggaagaattattcagatccatcg

SEQ ID NO: 6004052 - DNA, 25 bp, Homo sapien
aatacgccaaggctatgggttacag

SEQ ID NO: 6004053 - DNA, 25 bp, Homo sapien
ttccaacaatacgctaccgctgacg

SEQ ID NO: 6004054 - DNA, 25 bp, Homo sapien
gcacgcttggcacggtgactggcca

SEQ ID NO: 6004055 - DNA, 25 bp, Homo sapien
ctgtgaattgggtaacgaatccaac

SEQ ID NO: 6004056 - DNA, 25 bp, Homo sapien
ccagctggtgccaagtgttgttctg

SEQ ID NO: 6004057 - DNA, 25 bp, Homo sapien
cacggtgactggccattgccagtta

SEQ ID NO: 6004058 - DNA, 25 bp, Homo sapien
tgggtattgacggtggtgaaggtaa

SEQ ID NO: 6004059 - DNA, 25 bp, Homo sapien
tgctcacggtgtcatcaacgtttcc

SEQ ID NO: 6004060 - DNA, 25 bp, Homo sapien
tcactaaggaaaaggacattgtcgg

SEQ ID NO: 6004061 - DNA, 25 bp, Homo sapien
tccaatcaaggttgtcggcttgtct

SEQ ID NO: 6004062 - DNA, 25 bp, Homo sapien
ctttccaacaatacgctaccgctga

SEQ ID NO: 6004063 - DNA, 25 bp, Homo sapien
gaattattcagatccatcggtggtg

SEQ ID NO: 6004064 - DNA, 25 bp, Homo sapien
cggtatcaaatggttgaacggttct

SEQ ID NO: 6004065 - DNA, 25 bp, Homo sapien
aagctaccattagtcggtggtcacg

SEQ ID NO: 6004066 - DNA, 25 bp, Homo sapien
gaaactcaaaaaggtgttatcttct

SEQ ID NO: 6004067 - DNA, 25 bp, Homo sapien
tattgttggttcttacgtcggtaac

SEQ ID NO: 6004068 - DNA, 25 bp, Homo sapien
ctccggtgctgctggtggtctaggt

SEQ ID NO: 6004069 - DNA, 25 bp, Homo sapien
tgacttgtctggttacacccacgac

SEQ ID NO: 6004070 - DNA, 25 bp, Homo sapien
ttgcacgcttggcacggtgactggc

SEQ ID NO: 6004071 - DNA, 25 bp, Homo sapien
ccgtttccgaagccgctattgaagc

SEQ ID NO: 6004072 - DNA, 25 bp, Homo sapien
tacagagtcttgggtattgacggtg

SEQ ID NO: 6004073 - DNA, 25 bp, Homo sapien
ttcaaccaagtcgtcaagtccatct

SEQ ID NO: 6004074 - DNA, 25 bp, Homo sapien
cagatccatcggtggtgaagtcttc

SEQ ID NO: 6004075 - DNA, 25 bp, Homo sapien
ttaagggctggaagatcggtgacta

SEQ ID NO: 6004076 - DNA, 25 bp, Homo sapien
cgacttggcccaagtcgcccccatc

SEQ ID NO: 6004077 - DNA, 25 bp, Homo sapien
tgttctgatgtcttcaaccaagtcg

SEQ ID NO: 6004078 - DNA, 25 bp, Homo sapien
tgaatactgtgaattgggtaacgaa

SEQ ID NO: 6004079 - DNA, 25 bp, Homo sapien
aagccaaaggccaacgaattgttga

SEQ ID NO: 6004080 - DNA, 25 bp, Homo sapien
ttgtatggcctgtgaatactgtgaa

SEQ ID NO: 6004081 - DNA, 25 bp, Homo sapien
cattgacttcactaaggaaaaggac

SEQ ID NO: 6004082 - DNA, 25 bp, Homo sapien
ccaaggctatgggttacagagtctt

SEQ ID NO: 6004083 - DNA, 25 bp, Homo sapien
cactgacggtggtgctcacggtgtc

SEQ ID NO: 6004084 - DNA, 25 bp, Homo sapien
taccaccgttttggtcggtatgcca

SEQ ID NO: 6004085 - DNA, 25 bp, Homo sapien
atacgttagagctaacggtaccacc

SEQ ID NO: 6004086 - DNA, 25 bp, Homo sapien
agctttggacttcttcgccagaggt

SEQ ID NO: 6004087 - DNA, 25 bp, Homo sapien
tggtggtctaggttctttggctgtt

SEQ ID NO: 6004088 - DNA, 25 bp, Homo sapien
tcaaatcgttggtagatacgttgtt

SEQ ID NO: 6004089 - DNA, 25 bp, Homo sapien
tagtcggtggtcacgaaggtgccgg

SEQ ID NO: 6004090 - DNA, 25 bp, Homo sapien
ttggtcggtatgccagctggtgcca

SEQ ID NO: 6004091 - DNA, 25 bp, Homo sapien
atcttgtgtgctggtatcaccgtct

SEQ ID NO: 6004092 - DNA, 25 bp, Homo sapien
acggttctttccaacaatacgctac

SEQ ID NO: 6004093 - DNA, 25 bp, Homo sapien
aacgaattgttgatcaacgttaaat

SEQ ID NO: 6004094 - DNA, 25 bp, Homo sapien
agtcgcccccatcttgtgtgctggt

SEQ ID NO: 6004095 - DNA, 25 bp, Homo sapien
ttccgaagccgctattgaagcttct

SEQ ID NO: 6004096 - DNA, 25 bp, Homo sapien
atacaaagatattccagttccaaag

SEQ ID NO: 6004097 - DNA, 25 bp, Homo sapien
ggaagaattattcagatccatcggt

SEQ ID NO: 6004098 - DNA, 25 bp, Homo sapien
cagaggtttggtcaagtctccaatc

SEQ ID NO: 6004099 - DNA, 25 bp, Homo sapien
ggtatgccagctggtgccaagtgtt

SEQ ID NO: 6004100 - DNA, 25 bp, Homo sapien
ctgatgtcttcaaccaagtcgtcaa

SEQ ID NO: 6004101 - DNA, 25 bp, Homo sapien
gatgtcttcaaccaagtcgtcaagt

SEQ ID NO: 6004102 - DNA, 25 bp, Homo sapien
tgacaccagagaagctttggacttc

SEQ ID NO: 6004103 - DNA, 25 bp, Homo sapien
atcttctacgaatcccacggtaagt

SEQ ID NO: 6004104 - DNA, 25 bp, Homo sapien
ccagatacgttagagctaacggtac

SEQ ID NO: 6004105 - DNA, 25 bp, Homo sapien
tgacgctgttcaagccgctcacatt

SEQ ID NO: 6004106 - DNA, 25 bp, Homo sapien
gttcttgtatggcctgtgaatactg

SEQ ID NO: 6004107 - DNA, 25 bp, Homo sapien
gctaacttgatggccggtcactggg

SEQ ID NO: 6004108 - DNA, 25 bp, Homo sapien
ggtatcaccgtctacaaggctttga

SEQ ID NO: 6004109 - DNA, 25 bp, Homo sapien
agtcgtcaagtccatctctattgtt

SEQ ID NO: 6004110 - DNA, 25 bp, Homo sapien
tagatacgttgttgacacttctaaa

SEQ ID NO: 6004111 - DNA, 25 bp, Homo sapien
tggttcttacgtcggtaacagagct

SEQ ID NO: 6004112 - DNA, 25 bp, Homo sapien
tattgaagcttctaccagatacgtt

SEQ ID NO: 6004113 - DNA, 25 bp, Homo sapien
cggtaacagagctgacaccagagaa

SEQ ID NO: 6004114 - DNA, 25 bp, Homo sapien
aacaatacgctaccgctgacgctgt

SEQ ID NO: 6004115 - DNA, 25 bp, Homo sapien
catctctattgttggttcttacgtc

SEQ ID NO: 6004116 - DNA, 25 bp, Homo sapien
gccactgacggtggtgctcacggtg

SEQ ID NO: 6004117 - DNA, 25 bp, Homo sapien
ggtgctgctggtggtctaggttctt

SEQ ID NO: 6004118 - DNA, 25 bp, Homo sapien
ctttggacttcttcgccagaggttt

SEQ ID NO: 6004119 - DNA, 25 bp, Homo sapien
tgccagttaagctaccattagtcgg

SEQ ID NO: 6004120 - DNA, 25 bp, Homo sapien
gactggccattgccagttaagctac

SEQ ID NO: 6004121 - DNA, 25 bp, Homo sapien
cttctaccagatacgttagagctaa

SEQ ID NO: 6004122 - DNA, 25 bp, Homo sapien
gtctgctaacttgatggccggtcac

SEQ ID NO: 6004123 - DNA, 25 bp, Homo sapien
ttatcttctacgaatcccacggtaa

SEQ ID NO: 6004124 - DNA, 25 bp, Homo sapien
ttctttggctgttcaatacgccaag

SEQ ID NO: 6004125 - DNA, 25 bp, Homo sapien
ccgctgacgctgttcaagccgctca

SEQ ID NO: 6004126 - DNA, 25 bp, Homo sapien
tgatcaacgttaaatactctggtgt

SEQ ID NO: 6004127 - DNA, 25 bp, Homo sapien
atcaacgttaaatactctggtgtct

SEQ ID NO: 6004128 - DNA, 25 bp, Homo sapien
ggccaacgaattgttgatcaacgtt

SEQ ID NO: 6004129 - DNA, 25 bp, Homo sapien
atcaaggttgtcggcttgtctacct

SEQ ID NO: 6004130 - DNA, 25 bp, Homo sapien
aatggttgaacggttcttgtatggc

SEQ ID NO: 6004131 - DNA, 25 bp, Homo sapien
acgaatccaactgtcctcacgctga

SEQ ID NO: 6004132 - DNA, 25 bp, Homo sapien
tgacttgcacgcttggcacggtgac

SEQ ID NO: 6004133 - DNA, 25 bp, Homo sapien
cttcactaaggaaaaggacattgtc

SEQ ID NO: 6004134 - DNA, 25 bp, Homo sapien
tcacactgacttgcacgcttggcac

SEQ ID NO: 6004135 - DNA, 25 bp, Homo sapien
gttcttacgtcggtaacagagctga

SEQ ID NO: 6004136 - DNA, 25 bp, Homo sapien
ttctttccaacaatacgctaccgct

SEQ ID NO: 6004137 - DNA, 25 bp, Homo sapien
gttacacccacgacggttctttcca

SEQ ID NO: 6004138 - DNA, 25 bp, Homo sapien
gctcacattcctcaaggtaccgact

SEQ ID NO: 6004139 - DNA, 25 bp, Homo sapien
gtcatcaacgtttccgtttccgaag

SEQ ID NO: 6004140 - DNA, 25 bp, Homo sapien
ttgtctggttacacccacgacggtt

SEQ ID NO: 6004141 - DNA, 25 bp, Homo sapien
ctggtgtctgtcacactgacttgca

SEQ ID NO: 6004142 - DNA, 25 bp, Homo sapien
taacgaatccaactgtcctcacgct

SEQ ID NO: 6004143 - DNA, 25 bp, Homo sapien
tgtcggcttgtctaccttgccagaa

SEQ ID NO: 6004144 - DNA, 25 bp, Homo sapien
tttacgaaaagatggaaaagggtca

SEQ ID NO: 6004145 - DNA, 25 bp, Homo sapien
cactgggttgctatctccggtgctg

SEQ ID NO: 6004146 - DNA, 25 bp, Homo sapien
agccgctattgaagcttctaccaga

SEQ ID NO: 6004147 - DNA, 25 bp, Homo sapien
aatactctggtgtctgtcacactga

SEQ ID NO: 6004148 - DNA, 25 bp, Homo sapien
cggtgtcgttgtcggcatgggtgaa

SEQ ID NO: 6004149 - DNA, 25 bp, Homo sapien
gcatgggtgaaaacgttaagggctg

SEQ ID NO: 6004150 - DNA, 25 bp, Homo sapien
cccaagtcgcccccatcttgtgtgc

SEQ ID NO: 6004151 - DNA, 25 bp, Homo sapien
ggtaccaccgttttggtcggtatgc

SEQ ID NO: 6004152 - DNA, 25 bp, Homo sapien
aggtaaggaagaattattcagatcc

SEQ ID NO: 6004153 - DNA, 25 bp, Homo sapien
tccatcggtggtgaagtcttcattg

SEQ ID NO: 6004154 - DNA, 25 bp, Homo sapien
gtaacagagctgacaccagagaagc

SEQ ID NO: 6004155 - DNA, 25 bp, Homo sapien
gcccccatcttgtgtgctggtatca

SEQ ID NO: 6004156 - DNA, 25 bp, Homo sapien
gaattgggtaacgaatccaactgtc

SEQ ID NO: 6004157 - DNA, 25 bp, Homo sapien
tccagttccaaagccaaaggccaac

SEQ ID NO: 6004158 - DNA, 25 bp, Homo sapien
gttaaatactctggtgtctgtcaca

SEQ ID NO: 6004159 - DNA, 25 bp, Homo sapien
aatcccacggtaagttggaatacaa

SEQ ID NO: 6004160 - DNA, 25 bp, Homo sapien
gtgccggtgtcgttgtcggcatggg

SEQ ID NO: 6004161 - DNA, 25 bp, Homo sapien
ggtgaaaacgttaagggctggaaga

SEQ ID NO: 6004162 - DNA, 25 bp, Homo sapien
ccatcttgtgtgctggtatcaccgt

SEQ ID NO: 6004163 - DNA, 25 bp, Homo sapien
gacggtggtgctcacggtgtcatca

SEQ ID NO: 6004164 - DNA, 25 bp, Homo sapien
ctgacggtggtgctcacggtgtcat

SEQ ID NO: 6004165 - DNA, 25 bp, Homo sapien
ggtcacgaaggtgccggtgtcgttg

SEQ ID NO: 6004166 - DNA, 25 bp, Homo sapien
ctcaaggtaccgacttggcccaagt

SEQ ID NO: 6004167 - DNA, 25 bp, Homo sapien
ctgttcaatacgccaaggctatggg

SEQ ID NO: 6004168 - DNA, 25 bp, Homo sapien
cacccacgacggttctttccaacaa

SEQ ID NO: 6004169 - DNA, 25 bp, Homo sapien
agtcttcattgacttcactaaggaa

SEQ ID NO: 6004170 - DNA, 25 bp, Homo sapien
accaagtcgtcaagtccatctctat

SEQ ID NO: 6004171 - DNA, 25 bp, Homo sapien
tgggtaacgaatccaactgtcctca

SEQ ID NO: 6004172 - DNA, 25 bp, Homo sapien
ggtgtctgtcacactgacttgcacg

SEQ ID NO: 6004173 - DNA, 25 bp, Homo sapien
cgtctacaaggctttgaagtctgct

SEQ ID NO: 6004174 - DNA, 25 bp, Homo sapien
acttggcccaagtcgcccccatctt

SEQ ID NO: 6004175 - DNA, 25 bp, Homo sapien
tctaggttctttggctgttcaatac

SEQ ID NO: 6004176 - DNA, 25 bp, Homo sapien
acttgcacgcttggcacggtgactg

SEQ ID NO: 6004177 - DNA, 25 bp, Homo sapien
tggttgaacggttcttgtatggcct

SEQ ID NO: 6004178 - DNA, 25 bp, Homo sapien
gttggttcttacgtcggtaacagag

SEQ ID NO: 6004179 - DNA, 25 bp, Homo sapien
acgcttggcacggtgactggccatt

SEQ ID NO: 6004180 - DNA, 25 bp, Homo sapien
ctgtcctcacgctgacttgtctggt

SEQ ID NO: 6004181 - DNA, 25 bp, Homo sapien
tggtgaagtcttcattgacttcact

SEQ ID NO: 6004182 - DNA, 25 bp, Homo sapien
caacgttaaatactctggtgtctgt

SEQ ID NO: 6004183 - DNA, 25 bp, Homo sapien
atattccagttccaaagccaaaggc

SEQ ID NO: 6004184 - DNA, 25 bp, Homo sapien
tctaccttgccagaaatttacgaaa

SEQ ID NO: 6004185 - DNA, 25 bp, Homo sapien
gtatggcctgtgaatactgtgaatt

SEQ ID NO: 6004186 - DNA, 25 bp, Homo sapien
gagctgacaccagagaagctttgga

SEQ ID NO: 6004187 - DNA, 25 bp, Homo sapien
ctttggctgttcaatacgccaaggc

SEQ ID NO: 6004188 - DNA, 25 bp, Homo sapien
gtcaagtccatctctattgttggtt

SEQ ID NO: 6004189 - DNA, 25 bp, Homo sapien
tttggtcaagtctccaatcaaggtt

SEQ ID NO: 6004190 - DNA, 25 bp, Homo sapien
atgggtgaaaacgttaagggctgga

SEQ ID NO: 6004191 - DNA, 25 bp, Homo sapien
ccagttaagctaccattagtcggtg

SEQ ID NO: 6004192 - DNA, 25 bp, Homo sapien
ctggtgccaagtgttgttctgatgt

SEQ ID NO: 6004193 - DNA, 25 bp, Homo sapien
accgacttggcccaagtcgccccca

SEQ ID NO: 6004194 - DNA, 25 bp, Homo sapien
cctcacgctgacttgtctggttaca

SEQ ID NO: 6004195 - DNA, 25 bp, Homo sapien
tctattgttggttcttacgtcggta

SEQ ID NO: 6004196 - DNA, 25 bp, Homo sapien
gttcaatacgccaaggctatgggtt

SEQ ID NO: 6004197 - DNA, 25 bp, Homo sapien
ggtgttatcttctacgaatcccacg

SEQ ID NO: 6004198 - DNA, 25 bp, Homo sapien
ggtttggtcaagtctccaatcaagg

SEQ ID NO: 6004199 - DNA, 25 bp, Homo sapien
tccaaagccaaaggccaacgaattg

SEQ ID NO: 6004200 - DNA, 25 bp, Homo sapien
gctggtggtctaggttctttggctg

SEQ ID NO: 6004201 - DNA, 25 bp, Homo sapien
gtctggttacacccacgacggttct

SEQ ID NO: 6004202 - DNA, 25 bp, Homo sapien
cttgggtattgacggtggtgaaggt

SEQ ID NO: 6004203 - DNA, 25 bp, Homo sapien
tctaccagatacgttagagctaacg

SEQ ID NO: 6004204 - DNA, 25 bp, Homo sapien
agccgctcacattcctcaaggtacc

SEQ ID NO: 6004205 - DNA, 25 bp, Homo sapien
tcaatacgccaaggctatgggttac

SEQ ID NO: 6004206 - DNA, 25 bp, Homo sapien
gtgtcgttgtcggcatgggtgaaaa

SEQ ID NO: 6004207 - DNA, 25 bp, Homo sapien
gtggtgctcacggtgtcatcaacgt

SEQ ID NO: 6004208 - DNA, 25 bp, Homo sapien
ggctatgggttacagagtcttgggt

SEQ ID NO: 6004209 - DNA, 25 bp, Homo sapien
tggaagatcggtgactacgccggta

SEQ ID NO: 6004210 - DNA, 25 bp, Homo sapien
cggtgactggccattgccagttaag

SEQ ID NO: 6004211 - DNA, 25 bp, Homo sapien
ccccatcttgtgtgctggtatcacc

SEQ ID NO: 6004212 - DNA, 25 bp, Homo sapien
aaatcgttggtagatacgttgttga

SEQ ID NO: 6004213 - DNA, 25 bp, Homo sapien
atccaactgtcctcacgctgacttg

SEQ ID NO: 6004214 - DNA, 25 bp, Homo sapien
agtccatctctattgttggttctta

SEQ ID NO: 6004215 - DNA, 25 bp, Homo sapien
ccaacaatacgctaccgctgacgct

SEQ ID NO: 6004216 - DNA, 25 bp, Homo sapien
gacttcactaaggaaaaggacattg

SEQ ID NO: 6004217 - DNA, 25 bp, Homo sapien
ggcttgtctaccttgccagaaattt

SEQ ID NO: 6004218 - DNA, 25 bp, Homo sapien
tggttacacccacgacggttctttc

SEQ ID NO: 6004219 - DNA, 25 bp, Homo sapien
tatgccagctggtgccaagtgttgt

SEQ ID NO: 6004220 - DNA, 25 bp, Homo sapien
aagggctggaagatcggtgactacg

SEQ ID NO: 6004221 - DNA, 25 bp, Homo sapien
caaatggttgaacggttcttgtatg

SEQ ID NO: 6004222 - DNA, 25 bp, Homo sapien
gtggtgaaggtaaggaagaattatt

SEQ ID NO: 6004223 - DNA, 25 bp, Homo sapien
tcttgtatggcctgtgaatactgtg

SEQ ID NO: 6004224 - DNA, 25 bp, Homo sapien
caagtccatctctattgttggttct

SEQ ID NO: 6004225 - DNA, 25 bp, Homo sapien
acaaagatattccagttccaaagcc

SEQ ID NO: 6004226 - DNA, 25 bp, Homo sapien
cagaaatttacgaaaagatggaaaa

SEQ ID NO: 6004227 - DNA, 25 bp, Homo sapien
gccggtcactgggttgctatctccg

SEQ ID NO: 6004228 - DNA, 25 bp, Homo sapien
cggtgtcatcaacgtttccgtttcc

SEQ ID NO: 6004229 - DNA, 25 bp, Homo sapien
cagagtcttgggtattgacggtggt

SEQ ID NO: 6004230 - DNA, 25 bp, Homo sapien
gaaggtaaggaagaattattcagat

SEQ ID NO: 6004231 - DNA, 25 bp, Homo sapien
aatactgtgaattgggtaacgaatc

SEQ ID NO: 6004232 - DNA, 25 bp, Homo sapien
cggtgctgttctaaaggccactgac

SEQ ID NO: 6004233 - DNA, 25 bp, Homo sapien
gttgtcggcttgtctaccttgccag

SEQ ID NO: 6004234 - DNA, 25 bp, Homo sapien
aaaaggtgttatcttctacgaatcc

SEQ ID NO: 6004235 - DNA, 25 bp, Homo sapien
atctccggtgctgctggtggtctag

SEQ ID NO: 6004236 - DNA, 25 bp, Homo sapien
tgaacggttcttgtatggcctgtga

SEQ ID NO: 6004237 - DNA, 25 bp, Homo sapien
ccacggtaagttggaatacaaagat

SEQ ID NO: 6004238 - DNA, 25 bp, Homo sapien
taggttctttggctgttcaatacgc

SEQ ID NO: 6004239 - DNA, 25 bp, Homo sapien
cagagctgacaccagagaagctttg

SEQ ID NO: 6004240 - DNA, 25 bp, Homo sapien
gtcactgggttgctatctccggtgc

SEQ ID NO: 6004241 - DNA, 25 bp, Homo sapien
tacgaaaagatggaaaagggtcaaa

SEQ ID NO: 6004242 - DNA, 25 bp, Homo sapien
ttggcccaagtcgcccccatcttgt

SEQ ID NO: 6004243 - DNA, 25 bp, Homo sapien
ttggcacggtgactggccattgcca

SEQ ID NO: 6004244 - DNA, 25 bp, Homo sapien
accgtctacaaggctttgaagtctg

SEQ ID NO: 6004245 - DNA, 25 bp, Homo sapien
tacgccaaggctatgggttacagag

SEQ ID NO: 6004246 - DNA, 25 bp, Homo sapien
gtcaagtctccaatcaaggttgtcg

SEQ ID NO: 6004247 - DNA, 25 bp, Homo sapien
ccattgccagttaagctaccattag

SEQ ID NO: 6004248 - DNA, 25 bp, Homo sapien
caatacgctaccgctgacgctgttc

SEQ ID NO: 6004249 - DNA, 25 bp, Homo sapien
ccgctcacattcctcaaggtaccga

SEQ ID NO: 6004250 - DNA, 25 bp, Homo sapien
atcgttggtagatacgttgttgaca

SEQ ID NO: 6004251 - DNA, 25 bp, Homo sapien
aacggttcttgtatggcctgtgaat

SEQ ID NO: 6004252 - DNA, 25 bp, Homo sapien
gagaagctttggacttcttcgccag

SEQ ID NO: 6004253 - DNA, 25 bp, Homo sapien
acattcctcaaggtaccgacttggc

SEQ ID NO: 6004254 - DNA, 25 bp, Homo sapien
ggtaagttggaatacaaagatattc

SEQ ID NO: 6004255 - DNA, 25 bp, Homo sapien
aaggtgttatcttctacgaatccca

SEQ ID NO: 6004256 - DNA, 25 bp, Homo sapien
cccagaaactcaaaaaggtgttatc

SEQ ID NO: 6004257 - DNA, 25 bp, Homo sapien
gaagctttggacttcttcgccagag

SEQ ID NO: 6004258 - DNA, 25 bp, Homo sapien
cgaaaagatggaaaagggtcaaatc

SEQ ID NO: 6004259 - DNA, 25 bp, Homo sapien
gctattgaagcttctaccagatacg

SEQ ID NO: 6004260 - DNA, 25 bp, Homo sapien
atcccagaaactcaaaaaggtgtta

SEQ ID NO: 6004261 - DNA, 25 bp, Homo sapien
gctgttcaagccgctcacattcctc

SEQ ID NO: 6004262 - DNA, 25 bp, Homo sapien
gactacgccggtatcaaatggttga

SEQ ID NO: 6004263 - DNA, 25 bp, Homo sapien
cttgtgtgctggtatcaccgtctac

SEQ ID NO: 6004264 - DNA, 25 bp, Homo sapien
gtgtcatcaacgtttccgtttccga

SEQ ID NO: 6004265 - DNA, 25 bp, Homo sapien
tactgtgaattgggtaacgaatcca

SEQ ID NO: 6004266 - DNA, 25 bp, Homo sapien
ggcccaagtcgcccccatcttgtgt

SEQ ID NO: 6004267 - DNA, 25 bp, Homo sapien
ctgctaacttgatggccggtcactg

SEQ ID NO: 6004268 - DNA, 25 bp, Homo sapien
accagagaagctttggacttcttcg

SEQ ID NO: 6004269 - DNA, 25 bp, Homo sapien
acaccagagaagctttggacttctt

SEQ ID NO: 6004270 - DNA, 25 bp, Homo sapien
acgttaaatactctggtgtctgtca

SEQ ID NO: 6004271 - DNA, 25 bp, Homo sapien
gccagaaatttacgaaaagatggaa

SEQ ID NO: 6004272 - DNA, 25 bp, Homo sapien
acgtcggtaacagagctgacaccag

SEQ ID NO: 6004273 - DNA, 25 bp, Homo sapien
tctccaatcaaggttgtcggcttgt

SEQ ID NO: 6004274 - DNA, 25 bp, Homo sapien
aactcaaaaaggtgttatcttctac

SEQ ID NO: 6004275 - DNA, 25 bp, Homo sapien
gttccaaagccaaaggccaacgaat

SEQ ID NO: 6004276 - DNA, 25 bp, Homo sapien
ctcacggtgtcatcaacgtttccgt

SEQ ID NO: 6004277 - DNA, 25 bp, Homo sapien
cggtggtcacgaaggtgccggtgtc

SEQ ID NO: 6004278 - DNA, 25 bp, Homo sapien
agttaagctaccattagtcggtggt

SEQ ID NO: 6004279 - DNA, 25 bp, Homo sapien
ctatctccggtgctgctggtggtct

SEQ ID NO: 6004280 - DNA, 25 bp, Homo sapien
ttttggtcggtatgccagctggtgc

SEQ ID NO: 6004281 - DNA, 25 bp, Homo sapien
tctctattgttggttcttacgtcgg

SEQ ID NO: 6004282 - DNA, 25 bp, Homo sapien
ggtgctcacggtgtcatcaacgttt

SEQ ID NO: 6004283 - DNA, 25 bp, Homo sapien
cggtgactacgccggtatcaaatgg

SEQ ID NO: 6004284 - DNA, 25 bp, Homo sapien
cggagatagcaacccagtgaccggc

SEQ ID NO: 6004285 - DNA, 25 bp, Homo sapien
ggcgacttgggccaagtcggtacct

SEQ ID NO: 6004286 - DNA, 25 bp, Homo sapien
ctaacgtatctggtagaagcttcaa

SEQ ID NO: 6004287 - DNA, 25 bp, Homo sapien
acgacaccggcaccttcgtgaccac

SEQ ID NO: 6004288 - DNA, 25 bp, Homo sapien
cagccaaagaacctagaccaccagc

SEQ ID NO: 6004289 - DNA, 25 bp, Homo sapien
ttccatcttttcgtaaatttctggc

SEQ ID NO: 6004290 - DNA, 25 bp, Homo sapien
gaagacatcagaacaacacttggca

SEQ ID NO: 6004291 - DNA, 25 bp, Homo sapien
ccaaacctctggcgaagaagtccaa

SEQ ID NO: 6004292 - DNA, 25 bp, Homo sapien
ccttaccttcaccaccgtcaatacc

SEQ ID NO: 6004293 - DNA, 25 bp, Homo sapien
aaatttctggcaaggtagacaagcc

SEQ ID NO: 6004294 - DNA, 25 bp, Homo sapien
gaccggccatcaagttagcagactt

SEQ ID NO: 6004295 - DNA, 25 bp, Homo sapien
ctgtaacccatagccttggcgtatt

SEQ ID NO: 6004296 - DNA, 25 bp, Homo sapien
tcagtgtgacagacaccagagtatt

SEQ ID NO: 6004297 - DNA, 25 bp, Homo sapien
aagaacctagaccaccagcagcacc

SEQ ID NO: 6004298 - DNA, 25 bp, Homo sapien
aaacgttgatgacaccgtgagcacc

SEQ ID NO: 6004299 - DNA, 25 bp, Homo sapien
acagcaccgacaatgtccttttcct

SEQ ID NO: 6004300 - DNA, 25 bp, Homo sapien
gaggaatgtgagcggcttgaacagc

SEQ ID NO: 6004301 - DNA, 25 bp, Homo sapien
cgttagctctaacgtatctggtaga

SEQ ID NO: 6004302 - DNA, 25 bp, Homo sapien
agccttgtagacggtgataccagca

SEQ ID NO: 6004303 - DNA, 25 bp, Homo sapien
gtcaccgatcttccagcccttaacg

SEQ ID NO: 6004304 - DNA, 25 bp, Homo sapien
gttggattcgttacccaattcacag

SEQ ID NO: 6004305 - DNA, 25 bp, Homo sapien
ccgtcagtggcctttagaacagcac

SEQ ID NO: 6004306 - DNA, 25 bp, Homo sapien
ccaattcacagtattcacaggccat

SEQ ID NO: 6004307 - DNA, 25 bp, Homo sapien
acagacaccagagtatttaacgttg

SEQ ID NO: 6004308 - DNA, 25 bp, Homo sapien
ttgtagacggtgataccagcacaca

SEQ ID NO: 6004309 - DNA, 25 bp, Homo sapien
tgaggacagttggattcgttaccca

SEQ ID NO: 6004310 - DNA, 25 bp, Homo sapien
gttggaaagaaccgtcgtgggtgta

SEQ ID NO: 6004311 - DNA, 25 bp, Homo sapien
ttttccatcttttcgtaaatttctg

SEQ ID NO: 6004312 - DNA, 25 bp, Homo sapien
agatggacttgacgacttggttgaa

SEQ ID NO: 6004313 - DNA, 25 bp, Homo sapien
accaccgtcaatacccaagactctg

SEQ ID NO: 6004314 - DNA, 25 bp, Homo sapien
tcttccttaccttcaccaccgtcaa

SEQ ID NO: 6004315 - DNA, 25 bp, Homo sapien
ggggcgacttgggccaagtcggtac

SEQ ID NO: 6004316 - DNA, 25 bp, Homo sapien
taagaaccaacaatagagatggact

SEQ ID NO: 6004317 - DNA, 25 bp, Homo sapien
tcaacaattcgttggcctttggctt

SEQ ID NO: 6004318 - DNA, 25 bp, Homo sapien
tattgttggaaagaaccgtcgtggg

SEQ ID NO: 6004319 - DNA, 25 bp, Homo sapien
ttccttaccttcaccaccgtcaata

SEQ ID NO: 6004320 - DNA, 25 bp, Homo sapien
caaaacggtggtaccgttagctcta

SEQ ID NO: 6004321 - DNA, 25 bp, Homo sapien
aggtagacaagccgacaaccttgat

SEQ ID NO: 6004322 - DNA, 25 bp, Homo sapien
aaccatttgataccggcgtagtcac

SEQ ID NO: 6004323 - DNA, 25 bp, Homo sapien
ctctaacgtatctggtagaagcttc

SEQ ID NO: 6004324 - DNA, 25 bp, Homo sapien
agcaccgacaatgtccttttcctta

SEQ ID NO: 6004325 - DNA, 25 bp, Homo sapien
gtaacccatagccttggcgtattga

SEQ ID NO: 6004326 - DNA, 25 bp, Homo sapien
atcttttcgtaaatttctggcaagg

SEQ ID NO: 6004327 - DNA, 25 bp, Homo sapien
aaacggaaacgttgatgacaccgtg

SEQ ID NO: 6004328 - DNA, 25 bp, Homo sapien
attcgtagaagataacacctttttg

SEQ ID NO: 6004329 - DNA, 25 bp, Homo sapien
aagcttctctggtgtcagctctgtt

SEQ ID NO: 6004330 - DNA, 25 bp, Homo sapien
taccttgaggaatgtgagcggcttg

SEQ ID NO: 6004331 - DNA, 25 bp, Homo sapien
tgatgacaccgtgagcaccaccgtc

SEQ ID NO: 6004332 - DNA, 25 bp, Homo sapien
cggcttgaacagcgtcagcggtagc

SEQ ID NO: 6004333 - DNA, 25 bp, Homo sapien
tcttccagcccttaacgttttcacc

SEQ ID NO: 6004334 - DNA, 25 bp, Homo sapien
cgtgaccaccgactaatggtagctt

SEQ ID NO: 6004335 - DNA, 25 bp, Homo sapien
ttcacagtattcacaggccatacaa

SEQ ID NO: 6004336 - DNA, 25 bp, Homo sapien
gttgatgacaccgtgagcaccaccg

SEQ ID NO: 6004337 - DNA, 25 bp, Homo sapien
ccgactaatggtagcttaactggca

SEQ ID NO: 6004338 - DNA, 25 bp, Homo sapien
acaccagagtatttaacgttgatca

SEQ ID NO: 6004339 - DNA, 25 bp, Homo sapien
cagacttcaaagccttgtagacggt

SEQ ID NO: 6004340 - DNA, 25 bp, Homo sapien
gaacagcaccgacaatgtccttttc

SEQ ID NO: 6004341 - DNA, 25 bp, Homo sapien
agaaccaacaatagagatggacttg

SEQ ID NO: 6004342 - DNA, 25 bp, Homo sapien
gatcttccagcccttaacgttttca

SEQ ID NO: 6004343 - DNA, 25 bp, Homo sapien
tggtaccgttagctctaacgtatct

SEQ ID NO: 6004344 - DNA, 25 bp, Homo sapien
cgtcagcggtagcgtattgttggaa

SEQ ID NO: 6004345 - DNA, 25 bp, Homo sapien
acccaattcacagtattcacaggcc

SEQ ID NO: 6004346 - DNA, 25 bp, Homo sapien
acaggccatacaagaaccgttcaac

SEQ ID NO: 6004347 - DNA, 25 bp, Homo sapien
caatagagatggacttgacgacttg

SEQ ID NO: 6004348 - DNA, 25 bp, Homo sapien
gtgccaagcgtgcaagtcagtgtga

SEQ ID NO: 6004349 - DNA, 25 bp, Homo sapien
atctaccaacgatttgacccttttc

SEQ ID NO: 6004350 - DNA, 25 bp, Homo sapien
ccgacgtaagaaccaacaatagaga

SEQ ID NO: 6004351 - DNA, 25 bp, Homo sapien
tggcataccgaccaaaacggtggta

SEQ ID NO: 6004352 - DNA, 25 bp, Homo sapien
cagtgaccggccatcaagttagcag

SEQ ID NO: 6004353 - DNA, 25 bp, Homo sapien
aaccgttcaaccatttgataccggc

SEQ ID NO: 6004354 - DNA, 25 bp, Homo sapien
gccaaagaacctagaccaccagcag

SEQ ID NO: 6004355 - DNA, 25 bp, Homo sapien
aacagccaaagaacctagaccacca

SEQ ID NO: 6004356 - DNA, 25 bp, Homo sapien
aatggtagcttaactggcaatggcc

SEQ ID NO: 6004357 - DNA, 25 bp, Homo sapien
atacccaagactctgtaacccatag

SEQ ID NO: 6004358 - DNA, 25 bp, Homo sapien
tagaagtgtcaacaacgtatctacc

SEQ ID NO: 6004359 - DNA, 25 bp, Homo sapien
attccaacttaccgtgggattcgta

SEQ ID NO: 6004360 - DNA, 25 bp, Homo sapien
caccgtcagtggcctttagaacagc

SEQ ID NO: 6004361 - DNA, 25 bp, Homo sapien
gcataccgaccaaaacggtggtacc

SEQ ID NO: 6004362 - DNA, 25 bp, Homo sapien
tgggtgtaaccagacaagtcagcgt

SEQ ID NO: 6004363 - DNA, 25 bp, Homo sapien
ttgacgacttggttgaagacatcag

SEQ ID NO: 6004364 - DNA, 25 bp, Homo sapien
ggcaaggtagacaagccgacaacct

SEQ ID NO: 6004365 - DNA, 25 bp, Homo sapien
tgtgacagacaccagagtatttaac

SEQ ID NO: 6004366 - DNA, 25 bp, Homo sapien
cgttgatcaacaattcgttggcctt

SEQ ID NO: 6004367 - DNA, 25 bp, Homo sapien
acgttgatgacaccgtgagcaccac

SEQ ID NO: 6004368 - DNA, 25 bp, Homo sapien
ttgataccggcgtagtcaccgatct

SEQ ID NO: 6004369 - DNA, 25 bp, Homo sapien
gcttcaatagcggcttcggaaacgg

SEQ ID NO: 6004370 - DNA, 25 bp, Homo sapien
ctggtgtcagctctgttaccgacgt

SEQ ID NO: 6004371 - DNA, 25 bp, Homo sapien
gatttgacccttttccatcttttcg

SEQ ID NO: 6004372 - DNA, 25 bp, Homo sapien
ccggcgtagtcaccgatcttccagc

SEQ ID NO: 6004373 - DNA, 25 bp, Homo sapien
ttcacccatgccgacaacgacaccg

SEQ ID NO: 6004374 - DNA, 25 bp, Homo sapien
gattggagacttgaccaaacctctg

SEQ ID NO: 6004375 - DNA, 25 bp, Homo sapien
acaacacttggcaccagctggcata

SEQ ID NO: 6004376 - DNA, 25 bp, Homo sapien
ttggttgaagacatcagaacaacac

SEQ ID NO: 6004377 - DNA, 25 bp, Homo sapien
tcgttggcctttggctttggaactg

SEQ ID NO: 6004378 - DNA, 25 bp, Homo sapien
ccgtcgtgggtgtaaccagacaagt

SEQ ID NO: 6004379 - DNA, 25 bp, Homo sapien
gacgtaagaaccaacaatagagatg

SEQ ID NO: 6004380 - DNA, 25 bp, Homo sapien
tcacaggccatacaagaaccgttca

SEQ ID NO: 6004381 - DNA, 25 bp, Homo sapien
acctagaccaccagcagcaccggag

SEQ ID NO: 6004382 - DNA, 25 bp, Homo sapien
gtcaatgaagacttcaccaccgatg

SEQ ID NO: 6004383 - DNA, 25 bp, Homo sapien
agaagcttcaatagcggcttcggaa

SEQ ID NO: 6004384 - DNA, 25 bp, Homo sapien
gtgagcaccaccgtcagtggccttt

SEQ ID NO: 6004385 - DNA, 25 bp, Homo sapien
attcgttggcctttggctttggaac

SEQ ID NO: 6004386 - DNA, 25 bp, Homo sapien
agtcggtaccttgaggaatgtgagc

SEQ ID NO: 6004387 - DNA, 25 bp, Homo sapien
caattcgttggcctttggctttgga

SEQ ID NO: 6004388 - DNA, 25 bp, Homo sapien
ggaaacggaaacgttgatgacaccg

SEQ ID NO: 6004389 - DNA, 25 bp, Homo sapien
atttaacgttgatcaacaattcgtt

SEQ ID NO: 6004390 - DNA, 25 bp, Homo sapien
cgatggatctgaataattcttcctt

SEQ ID NO: 6004391 - DNA, 25 bp, Homo sapien
ctttggctttggaactggaatatct

SEQ ID NO: 6004392 - DNA, 25 bp, Homo sapien
ctctgttaccgacgtaagaaccaac

SEQ ID NO: 6004393 - DNA, 25 bp, Homo sapien
cgacaaccttgattggagacttgac

SEQ ID NO: 6004394 - DNA, 25 bp, Homo sapien
caatgtccttttccttagtgaagtc

SEQ ID NO: 6004395 - DNA, 25 bp, Homo sapien
ttcaccaccgatggatctgaataat

SEQ ID NO: 6004396 - DNA, 25 bp, Homo sapien
ggccatcaagttagcagacttcaaa

SEQ ID NO: 6004397 - DNA, 25 bp, Homo sapien
caaagcttctctggtgtcagctctg

SEQ ID NO: 6004398 - DNA, 25 bp, Homo sapien
cgtaagaaccaacaatagagatgga

SEQ ID NO: 6004399 - DNA, 25 bp, Homo sapien
tcagctctgttaccgacgtaagaac

SEQ ID NO: 6004400 - DNA, 25 bp, Homo sapien
caccggcaccttcgtgaccaccgac

SEQ ID NO: 6004401 - DNA, 25 bp, Homo sapien
ctaccaacgatttgacccttttcca

SEQ ID NO: 6004402 - DNA, 25 bp, Homo sapien
ttaccgtgggattcgtagaagataa

SEQ ID NO: 6004403 - DNA, 25 bp, Homo sapien
tggccagtcaccgtgccaagcgtgc

SEQ ID NO: 6004404 - DNA, 25 bp, Homo sapien
ttgaacagcgtcagcggtagcgtat

SEQ ID NO: 6004405 - DNA, 25 bp, Homo sapien
tgagcggcttgaacagcgtcagcgg

SEQ ID NO: 6004406 - DNA, 25 bp, Homo sapien
caagtcggtaccttgaggaatgtga

SEQ ID NO: 6004407 - DNA, 25 bp, Homo sapien
gcgtattgaacagccaaagaaccta

SEQ ID NO: 6004408 - DNA, 25 bp, Homo sapien
cccatagccttggcgtattgaacag

SEQ ID NO: 6004409 - DNA, 25 bp, Homo sapien
ctaatggtagcttaactggcaatgg

SEQ ID NO: 6004410 - DNA, 25 bp, Homo sapien
taattcttccttaccttcaccaccg

SEQ ID NO: 6004411 - DNA, 25 bp, Homo sapien
tcagcgtgaggacagttggattcgt

SEQ ID NO: 6004412 - DNA, 25 bp, Homo sapien
taacacctttttgagtttctgggat

SEQ ID NO: 6004413 - DNA, 25 bp, Homo sapien
tggattcgttacccaattcacagta

SEQ ID NO: 6004414 - DNA, 25 bp, Homo sapien
acttggttgaagacatcagaacaac

SEQ ID NO: 6004415 - DNA, 25 bp, Homo sapien
ggtaccttgaggaatgtgagcggct

SEQ ID NO: 6004416 - DNA, 25 bp, Homo sapien
ccaacaatagagatggacttgacga

SEQ ID NO: 6004417 - DNA, 25 bp, Homo sapien
gactaatggtagcttaactggcaat

SEQ ID NO: 6004418 - DNA, 25 bp, Homo sapien
accagagtatttaacgttgatcaac

SEQ ID NO: 6004419 - DNA, 25 bp, Homo sapien
aaccgtcgtgggtgtaaccagacaa

SEQ ID NO: 6004420 - DNA, 25 bp, Homo sapien
gcacacaagatgggggcgacttggg

SEQ ID NO: 6004421 - DNA, 25 bp, Homo sapien
aagataacacctttttgagtttctg

SEQ ID NO: 6004422 - DNA, 25 bp, Homo sapien
cacccatgccgacaacgacaccggc

SEQ ID NO: 6004423 - DNA, 25 bp, Homo sapien
accggagatagcaacccagtgaccg

SEQ ID NO: 6004424 - DNA, 25 bp, Homo sapien
ttttcacccatgccgacaacgacac

SEQ ID NO: 6004425 - DNA, 25 bp, Homo sapien
aacgttttcacccatgccgacaacg

SEQ ID NO: 6004426 - DNA, 25 bp, Homo sapien
accaccgtcagtggcctttagaaca

SEQ ID NO: 6004427 - DNA, 25 bp, Homo sapien
caagtcagcgtgaggacagttggat

SEQ ID NO: 6004428 - DNA, 25 bp, Homo sapien
ctctggtgtcagctctgttaccgac

SEQ ID NO: 6004429 - DNA, 25 bp, Homo sapien
tttagaagtgtcaacaacgtatcta

SEQ ID NO: 6004430 - DNA, 25 bp, Homo sapien
caccagcagcaccggagatagcaac

SEQ ID NO: 6004431 - DNA, 25 bp, Homo sapien
atagagatggacttgacgacttggt

SEQ ID NO: 6004432 - DNA, 25 bp, Homo sapien
tgaacagccaaagaacctagaccac

SEQ ID NO: 6004433 - DNA, 25 bp, Homo sapien
atctgaataattcttccttaccttc

SEQ ID NO: 6004434 - DNA, 25 bp, Homo sapien
gacttcaaagccttgtagacggtga

SEQ ID NO: 6004435 - DNA, 25 bp, Homo sapien
ccgtgagcaccaccgtcagtggcct

SEQ ID NO: 6004436 - DNA, 25 bp, Homo sapien
gtatttaacgttgatcaacaattcg

SEQ ID NO: 6004437 - DNA, 25 bp, Homo sapien
tgccgacaacgacaccggcaccttc

SEQ ID NO: 6004438 - DNA, 25 bp, Homo sapien
aagcttcaatagcggcttcggaaac

SEQ ID NO: 6004439 - DNA, 25 bp, Homo sapien
gacagttggattcgttacccaattc

SEQ ID NO: 6004440 - DNA, 25 bp, Homo sapien
tcggtaccttgaggaatgtgagcgg

SEQ ID NO: 6004441 - DNA, 25 bp, Homo sapien
ttgaagacatcagaacaacacttgg

SEQ ID NO: 6004442 - DNA, 25 bp, Homo sapien
aacgtatctggtagaagcttcaata

SEQ ID NO: 6004443 - DNA, 25 bp, Homo sapien
aatgtgagcggcttgaacagcgtca

SEQ ID NO: 6004444 - DNA, 25 bp, Homo sapien
ggctttggaactggaatatctttgt

SEQ ID NO: 6004445 - DNA, 25 bp, Homo sapien
ttagtgaagtcaatgaagacttcac

SEQ ID NO: 6004446 - DNA, 25 bp, Homo sapien
cttcaccaccgtcaatacccaagac

SEQ ID NO: 6004447 - DNA, 25 bp, Homo sapien
tgtcagctctgttaccgacgtaaga

SEQ ID NO: 6004448 - DNA, 25 bp, Homo sapien
caacgatttgacccttttccatctt

SEQ ID NO: 6004449 - DNA, 25 bp, Homo sapien
cagaacaacacttggcaccagctgg

SEQ ID NO: 6004450 - DNA, 25 bp, Homo sapien
tctggtagaagcttcaatagcggct

SEQ ID NO: 6004451 - DNA, 25 bp, Homo sapien
tcggaaacggaaacgttgatgacac

SEQ ID NO: 6004452 - DNA, 25 bp, Homo sapien
agcggtagcgtattgttggaaagaa

SEQ ID NO: 6004453 - DNA, 25 bp, Homo sapien
ggattcgtagaagataacacctttt

SEQ ID NO: 6004454 - DNA, 25 bp, Homo sapien
tccaaagcttctctggtgtcagctc

SEQ ID NO: 6004455 - DNA, 25 bp, Homo sapien
agacttcaccaccgatggatctgaa

SEQ ID NO: 6004456 - DNA, 25 bp, Homo sapien
accgatggatctgaataattcttcc

SEQ ID NO: 6004457 - DNA, 25 bp, Homo sapien
caatagcggcttcggaaacggaaac

SEQ ID NO: 6004458 - DNA, 25 bp, Homo sapien
accgttagctctaacgtatctggta

SEQ ID NO: 6004459 - DNA, 25 bp, Homo sapien
ccggcaccttcgtgaccaccgacta

SEQ ID NO: 6004460 - DNA, 25 bp, Homo sapien
agacatcagaacaacacttggcacc

SEQ ID NO: 6004461 - DNA, 25 bp, Homo sapien
ttgttggaaagaaccgtcgtgggtg

SEQ ID NO: 6004462 - DNA, 25 bp, Homo sapien
atttgataccggcgtagtcaccgat

SEQ ID NO: 6004463 - DNA, 25 bp, Homo sapien
gccgacaaccttgattggagacttg

SEQ ID NO: 6004464 - DNA, 25 bp, Homo sapien
gcccttaacgttttcacccatgccg

SEQ ID NO: 6004465 - DNA, 25 bp, Homo sapien
caacgacaccggcaccttcgtgacc

SEQ ID NO: 6004466 - DNA, 25 bp, Homo sapien
gctggcataccgaccaaaacggtgg

SEQ ID NO: 6004467 - DNA, 25 bp, Homo sapien
caatacccaagactctgtaacccat

SEQ ID NO: 6004468 - DNA, 25 bp, Homo sapien
ttgatcaacaattcgttggcctttg

SEQ ID NO: 6004469 - DNA, 25 bp, Homo sapien
aaccttgattggagacttgaccaaa

SEQ ID NO: 6004470 - DNA, 25 bp, Homo sapien
ggcgtagtcaccgatcttccagccc

SEQ ID NO: 6004471 - DNA, 25 bp, Homo sapien
gatcaacaattcgttggcctttggc

SEQ ID NO: 6004472 - DNA, 25 bp, Homo sapien
agcggcttgaacagcgtcagcggta

SEQ ID NO: 6004473 - DNA, 25 bp, Homo sapien
caagttagcagacttcaaagccttg

SEQ ID NO: 6004474 - DNA, 25 bp, Homo sapien
ccaagactctgtaacccatagcctt

SEQ ID NO: 6004475 - DNA, 25 bp, Homo sapien
aggccatacaagaaccgttcaacca

SEQ ID NO: 6004476 - DNA, 25 bp, Homo sapien
ttcaatagcggcttcggaaacggaa

SEQ ID NO: 6004477 - DNA, 25 bp, Homo sapien
accttcaccaccgtcaatacccaag

SEQ ID NO: 6004478 - DNA, 25 bp, Homo sapien
acacctttttgagtttctgggatag

SEQ ID NO: 6004479 - DNA, 25 bp, Homo sapien
ccttcgtgaccaccgactaatggta

SEQ ID NO: 6004480 - DNA, 25 bp, Homo sapien
tcagcggtagcgtattgttggaaag

SEQ ID NO: 6004481 - DNA, 25 bp, Homo sapien
ctggcgaagaagtccaaagcttctc

SEQ ID NO: 6004482 - DNA, 25 bp, Homo sapien
ccgtgccaagcgtgcaagtcagtgt

SEQ ID NO: 6004483 - DNA, 25 bp, Homo sapien
agtccaaagcttctctggtgtcagc

SEQ ID NO: 6004484 - DNA, 25 bp, Homo sapien
cttttcgtaaatttctggcaaggta

SEQ ID NO: 6004485 - DNA, 25 bp, Homo sapien
aacaatagagatggacttgacgact

SEQ ID NO: 6004486 - DNA, 25 bp, Homo sapien
acaagccgacaaccttgattggaga

SEQ ID NO: 6004487 - DNA, 25 bp, Homo sapien
tagtcaccgatcttccagcccttaa

SEQ ID NO: 6004488 - DNA, 25 bp, Homo sapien
ggacttgacgacttggttgaagaca

SEQ ID NO: 6004489 - DNA, 25 bp, Homo sapien
agaccaccagcagcaccggagatag

SEQ ID NO: 6004490 - DNA, 25 bp, Homo sapien
aataattcttccttaccttcaccac

SEQ ID NO: 6004491 - DNA, 25 bp, Homo sapien
accaccgactaatggtagcttaact

SEQ ID NO: 6004492 - DNA, 25 bp, Homo sapien
acggaaacgttgatgacaccgtgag

SEQ ID NO: 6004493 - DNA, 25 bp, Homo sapien
cttggcgtattgaacagccaaagaa

SEQ ID NO: 6004494 - DNA, 25 bp, Homo sapien
gcaccggagatagcaacccagtgac

SEQ ID NO: 6004495 - DNA, 25 bp, Homo sapien
ttggagacttgaccaaacctctggc

SEQ ID NO: 6004496 - DNA, 25 bp, Homo sapien
agagatggacttgacgacttggttg

SEQ ID NO: 6004497 - DNA, 25 bp, Homo sapien
taccggcgtagtcaccgatcttcca

SEQ ID NO: 6004498 - DNA, 25 bp, Homo sapien
caaggtagacaagccgacaaccttg

SEQ ID NO: 6004499 - DNA, 25 bp, Homo sapien
cagtattcacaggccatacaagaac

SEQ ID NO: 6004500 - DNA, 25 bp, Homo sapien
tgggattcgtagaagataacacctt

SEQ ID NO: 6004501 - DNA, 25 bp, Homo sapien
cccagtgaccggccatcaagttagc

SEQ ID NO: 6004502 - DNA, 25 bp, Homo sapien
ttaacgttttcacccatgccgacaa

SEQ ID NO: 6004503 - DNA, 25 bp, Homo sapien
ggaactggaatatctttgtattcca

SEQ ID NO: 6004504 - DNA, 25 bp, Homo sapien
ttccttagtgaagtcaatgaagact

SEQ ID NO: 6004505 - DNA, 25 bp, Homo sapien
gtattgaacagccaaagaacctaga

SEQ ID NO: 6004506 - DNA, 25 bp, Homo sapien
aatggccagtcaccgtgccaagcgt

SEQ ID NO: 6004507 - DNA, 25 bp, Homo sapien
ctttgtattccaacttaccgtggga

SEQ ID NO: 6004508 - DNA, 25 bp, Homo sapien
caagaaccgttcaaccatttgatac

SEQ ID NO: 6004509 - DNA, 25 bp, Homo sapien
accaccagcagcaccggagatagca

SEQ ID NO: 6004510 - DNA, 25 bp, Homo sapien
tggtagaagcttcaatagcggcttc

SEQ ID NO: 6004511 - DNA, 25 bp, Homo sapien
ccgacaacgacaccggcaccttcgt

SEQ ID NO: 6004512 - DNA, 25 bp, Homo sapien
ctagaccaccagcagcaccggagat

SEQ ID NO: 6004513 - DNA, 25 bp, Homo sapien
gattcgttacccaattcacagtatt

SEQ ID NO: 6004514 - DNA, 25 bp, Homo sapien
cgtgaggacagttggattcgttacc

SEQ ID NO: 6004515 - DNA, 25 bp, Homo sapien
agcgtcagcggtagcgtattgttgg

SEQ ID NO: 6004516 - DNA, 25 bp, Homo sapien
aggacagttggattcgttacccaat

SEQ ID NO: 6004517 - DNA, 25 bp, Homo sapien
gagcaccaccgtcagtggcctttag

SEQ ID NO: 6004518 - DNA, 25 bp, Homo sapien
ttcgtgaccaccgactaatggtagc

SEQ ID NO: 6004519 - DNA, 25 bp, Homo sapien
gaagtgtcaacaacgtatctaccaa

SEQ ID NO: 6004520 - DNA, 25 bp, Homo sapien
caagtcagtgtgacagacaccagag

SEQ ID NO: 6004521 - DNA, 25 bp, Homo sapien
agctctgttaccgacgtaagaacca

SEQ ID NO: 6004522 - DNA, 25 bp, Homo sapien
caacgtatctaccaacgatttgacc

SEQ ID NO: 6004523 - DNA, 25 bp, Homo sapien
ggtgataccagcacacaagatgggg

SEQ ID NO: 6004524 - DNA, 25 bp, Homo sapien
ttgtattccaacttaccgtgggatt

SEQ ID NO: 6004525 - DNA, 25 bp, Homo sapien
ctttggaactggaatatctttgtat

SEQ ID NO: 6004526 - DNA, 25 bp, Homo sapien
tcaaagccttgtagacggtgatacc

SEQ ID NO: 6004527 - DNA, 25 bp, Homo sapien
ttgattggagacttgaccaaacctc

SEQ ID NO: 6004528 - DNA, 25 bp, Homo sapien
tgtgagcggcttgaacagcgtcagc

SEQ ID NO: 6004529 - DNA, 25 bp, Homo sapien
aacgttgatcaacaattcgttggcc

SEQ ID NO: 6004530 - DNA, 25 bp, Homo sapien
tgtcaacaacgtatctaccaacgat

SEQ ID NO: 6004531 - DNA, 25 bp, Homo sapien
gaccaaacctctggcgaagaagtcc

SEQ ID NO: 6004532 - DNA, 25 bp, Homo sapien
acagcgtcagcggtagcgtattgtt

SEQ ID NO: 6004533 - DNA, 25 bp, Homo sapien
gcaatggccagtcaccgtgccaagc

SEQ ID NO: 6004534 - DNA, 25 bp, Homo sapien
gtagacaagccgacaaccttgattg

SEQ ID NO: 6004535 - DNA, 25 bp, Homo sapien
cagagtatttaacgttgatcaacaa

SEQ ID NO: 6004536 - DNA, 25 bp, Homo sapien
ggcaccttcgtgaccaccgactaat

SEQ ID NO: 6004537 - DNA, 25 bp, Homo sapien
tagccttggcgtattgaacagccaa

SEQ ID NO: 6004538 - DNA, 25 bp, Homo sapien
cccatgccgacaacgacaccggcac

SEQ ID NO: 6004539 - DNA, 25 bp, Homo sapien
tggcaatggccagtcaccgtgccaa

SEQ ID NO: 6004540 - DNA, 25 bp, Homo sapien
agtcagtgtgacagacaccagagta

SEQ ID NO: 6004541 - DNA, 25 bp, Homo sapien
agacttgaccaaacctctggcgaag

SEQ ID NO: 6004542 - DNA, 25 bp, Homo sapien
ggaaacgttgatgacaccgtgagca

SEQ ID NO: 6004543 - DNA, 25 bp, Homo sapien
gtggcctttagaacagcaccgacaa

SEQ ID NO: 6004544 - DNA, 25 bp, Homo sapien
gccaagcgtgcaagtcagtgtgaca

SEQ ID NO: 6004545 - DNA, 25 bp, Homo sapien
acttgaccaaacctctggcgaagaa

SEQ ID NO: 6004546 - DNA, 25 bp, Homo sapien
gacaccggcaccttcgtgaccaccg

SEQ ID NO: 6004547 - DNA, 25 bp, Homo sapien
cgttttcacccatgccgacaacgac

SEQ ID NO: 6004548 - DNA, 25 bp, Homo sapien
caccgtgccaagcgtgcaagtcagt

SEQ ID NO: 6004549 - DNA, 25 bp, Homo sapien
gataccggcgtagtcaccgatcttc

SEQ ID NO: 6004550 - DNA, 25 bp, Homo sapien
tggcgtattgaacagccaaagaacc

SEQ ID NO: 6004551 - DNA, 25 bp, Homo sapien
aaccaacaatagagatggacttgac

SEQ ID NO: 6004552 - DNA, 25 bp, Homo sapien
atgacaccgtgagcaccaccgtcag

SEQ ID NO: 6004553 - DNA, 25 bp, Homo sapien
acccaagactctgtaacccatagcc

SEQ ID NO: 6004554 - DNA, 25 bp, Homo sapien
atgtccttttccttagtgaagtcaa

SEQ ID NO: 6004555 - DNA, 25 bp, Homo sapien
atggatctgaataattcttccttac

SEQ ID NO: 6004556 - DNA, 25 bp, Homo sapien
aagccgacaaccttgattggagact

SEQ ID NO: 6004557 - DNA, 25 bp, Homo sapien
aagactctgtaacccatagccttgg

SEQ ID NO: 6004558 - DNA, 25 bp, Homo sapien
gtgaccggccatcaagttagcagac

SEQ ID NO: 6004559 - DNA, 25 bp, Homo sapien
ccgttcaaccatttgataccggcgt

SEQ ID NO: 6004560 - DNA, 25 bp, Homo sapien
ggatctgaataattcttccttacct

SEQ ID NO: 6004561 - DNA, 25 bp, Homo sapien
tagcaacccagtgaccggccatcaa

SEQ ID NO: 6004562 - DNA, 25 bp, Homo sapien
gtattccaacttaccgtgggattcg

SEQ ID NO: 6004563 - DNA, 25 bp, Homo sapien
agacggtgataccagcacacaagat

SEQ ID NO: 6004564 - DNA, 25 bp, Homo sapien
tcaccaccgtcaatacccaagactc

SEQ ID NO: 6004565 - DNA, 25 bp, Homo sapien
acctctggcgaagaagtccaaagct

SEQ ID NO: 6004566 - DNA, 25 bp, Homo sapien
tgaccaccgactaatggtagcttaa

SEQ ID NO: 6004567 - DNA, 25 bp, Homo sapien
taaccagacaagtcagcgtgaggac

SEQ ID NO: 6004568 - DNA, 25 bp, Homo sapien
gtcaccgtgccaagcgtgcaagtca

SEQ ID NO: 6004569 - DNA, 25 bp, Homo sapien
caagcgtgcaagtcagtgtgacaga

SEQ ID NO: 6004570 - DNA, 25 bp, Homo sapien
cttcaaagccttgtagacggtgata

SEQ ID NO: 6004571 - DNA, 25 bp, Homo sapien
ctctgtaacccatagccttggcgta

SEQ ID NO: 6004572 - DNA, 25 bp, Homo sapien
ggcgaagaagtccaaagcttctctg

SEQ ID NO: 6004573 - DNA, 25 bp, Homo sapien
ggagacttgaccaaacctctggcga

SEQ ID NO: 6004574 - DNA, 25 bp, Homo sapien
ggtggtaccgttagctctaacgtat

SEQ ID NO: 6004575 - DNA, 25 bp, Homo sapien
gtaaatttctggcaaggtagacaag

SEQ ID NO: 6004576 - DNA, 25 bp, Homo sapien
caccgacaatgtccttttccttagt

SEQ ID NO: 6004577 - DNA, 25 bp, Homo sapien
accagacaagtcagcgtgaggacag

SEQ ID NO: 6004578 - DNA, 25 bp, Homo sapien
taactggcaatggccagtcaccgtg

SEQ ID NO: 6004579 - DNA, 25 bp, Homo sapien
aacaacgtatctaccaacgatttga

SEQ ID NO: 6004580 - DNA, 25 bp, Homo sapien
ttcgttacccaattcacagtattca

SEQ ID NO: 6004581 - DNA, 25 bp, Homo sapien
cttaactggcaatggccagtcaccg

SEQ ID NO: 6004582 - DNA, 25 bp, Homo sapien
gaagacttcaccaccgatggatctg

SEQ ID NO: 6004583 - DNA, 25 bp, Homo sapien
tccaacttaccgtgggattcgtaga

SEQ ID NO: 6004584 - DNA, 25 bp, Homo sapien
cagacaagtcagcgtgaggacagtt

SEQ ID NO: 6004585 - DNA, 25 bp, Homo sapien
agcagacttcaaagccttgtagacg

SEQ ID NO: 6004586 - DNA, 25 bp, Homo sapien
cagcacacaagatgggggcgacttg

SEQ ID NO: 6004587 - DNA, 25 bp, Homo sapien
ggtgtaaccagacaagtcagcgtga

SEQ ID NO: 6004588 - DNA, 25 bp, Homo sapien
ccaccgatggatctgaataattctt

SEQ ID NO: 6004589 - DNA, 25 bp, Homo sapien
ttggctttggaactggaatatcttt

SEQ ID NO: 6004590 - DNA, 25 bp, Homo sapien
gaacctagaccaccagcagcaccgg

SEQ ID NO: 6004591 - DNA, 25 bp, Homo sapien
tatctggtagaagcttcaatagcgg

SEQ ID NO: 6004592 - DNA, 25 bp, Homo sapien
tgtaaccagacaagtcagcgtgagg

SEQ ID NO: 6004593 - DNA, 25 bp, Homo sapien
gtagcttaactggcaatggccagtc

SEQ ID NO: 6004594 - DNA, 25 bp, Homo sapien
tgacagacaccagagtatttaacgt

SEQ ID NO: 6004595 - DNA, 25 bp, Homo sapien
gactctgtaacccatagccttggcg

SEQ ID NO: 6004596 - DNA, 25 bp, Homo sapien
aacccatagccttggcgtattgaac

SEQ ID NO: 6004597 - DNA, 25 bp, Homo sapien
gaacagcgtcagcggtagcgtattg

SEQ ID NO: 6004598 - DNA, 25 bp, Homo sapien
gacaatgtccttttccttagtgaag

SEQ ID NO: 6004599 - DNA, 25 bp, Homo sapien
gaatatctttgtattccaacttacc

SEQ ID NO: 6004600 - DNA, 25 bp, Homo sapien
tgaagtcaatgaagacttcaccacc

SEQ ID NO: 6004601 - DNA, 25 bp, Homo sapien
cgacttgggccaagtcggtaccttg

SEQ ID NO: 6004602 - DNA, 25 bp, Homo sapien
tcgtaaatttctggcaaggtagaca

SEQ ID NO: 6004603 - DNA, 25 bp, Homo sapien
cttggcaccagctggcataccgacc

SEQ ID NO: 6004604 - DNA, 25 bp, Homo sapien
caaagaacctagaccaccagcagca

SEQ ID NO: 6004605 - DNA, 25 bp, Homo sapien
gcttgaacagcgtcagcggtagcgt

SEQ ID NO: 6004606 - DNA, 25 bp, Homo sapien
gcggcttcggaaacggaaacgttga

SEQ ID NO: 6004607 - DNA, 25 bp, Homo sapien
agacaagccgacaaccttgattgga

SEQ ID NO: 6004608 - DNA, 25 bp, Homo sapien
ccttaacgttttcacccatgccgac

SEQ ID NO: 6004609 - DNA, 25 bp, Homo sapien
agcagcaccggagatagcaacccag

SEQ ID NO: 6004610 - DNA, 25 bp, Homo sapien
tccagcccttaacgttttcacccat

SEQ ID NO: 6004611 - DNA, 25 bp, Homo sapien
acatcagaacaacacttggcaccag

SEQ ID NO: 6004612 - DNA, 25 bp, Homo sapien
acttcaccaccgatggatctgaata

SEQ ID NO: 6004613 - DNA, 25 bp, Homo sapien
caatgaagacttcaccaccgatgga

SEQ ID NO: 6004614 - DNA, 25 bp, Homo sapien
acacaagatgggggcgacttgggcc

SEQ ID NO: 6004615 - DNA, 25 bp, Homo sapien
ggttgaagacatcagaacaacactt

SEQ ID NO: 6004616 - DNA, 25 bp, Homo sapien
atttctggcaaggtagacaagccga

SEQ ID NO: 6004617 - DNA, 25 bp, Homo sapien
ttctggcaaggtagacaagccgaca

SEQ ID NO: 6004618 - DNA, 25 bp, Homo sapien
caccgatcttccagcccttaacgtt

SEQ ID NO: 6004619 - DNA, 25 bp, Homo sapien
aacccagtgaccggccatcaagtta

SEQ ID NO: 6004620 - DNA, 25 bp, Homo sapien
tggaaagaaccgtcgtgggtgtaac

SEQ ID NO: 6004621 - DNA, 25 bp, Homo sapien
aactggaatatctttgtattccaac

SEQ ID NO: 6004622 - DNA, 25 bp, Homo sapien
gtccttttccttagtgaagtcaatg

SEQ ID NO: 6004623 - DNA, 25 bp, Homo sapien
agtgtgacagacaccagagtattta

SEQ ID NO: 6004624 - DNA, 25 bp, Homo sapien
atcagaacaacacttggcaccagct

SEQ ID NO: 6004625 - DNA, 25 bp, Homo sapien
tggcctttggctttggaactggaat

SEQ ID NO: 6004626 - DNA, 25 bp, Homo sapien
cgtattgttggaaagaaccgtcgtg

SEQ ID NO: 6004627 - DNA, 25 bp, Homo sapien
ctttttgagtttctgggatagacat

SEQ ID NO: 6004628 - DNA, 25 bp, Homo sapien
tgataccagcacacaagatgggggc

SEQ ID NO: 6004629 - DNA, 25 bp, Homo sapien
cagttggattcgttacccaattcac

SEQ ID NO: 6004630 - DNA, 25 bp, Homo sapien
atctttgtattccaacttaccgtgg

SEQ ID NO: 6004631 - DNA, 25 bp, Homo sapien
accagcacacaagatgggggcgact

SEQ ID NO: 6004632 - DNA, 25 bp, Homo sapien
ttctctggtgtcagctctgttaccg

SEQ ID NO: 6004633 - DNA, 25 bp, Homo sapien
cgtgcaagtcagtgtgacagacacc

SEQ ID NO: 6004634 - DNA, 25 bp, Homo sapien
caccttcgtgaccaccgactaatgg

SEQ ID NO: 6004635 - DNA, 25 bp, Homo sapien
gggccaagtcggtaccttgaggaat

SEQ ID NO: 6004636 - DNA, 25 bp, Homo sapien
gacgacttggttgaagacatcagaa

SEQ ID NO: 6004637 - DNA, 25 bp, Homo sapien
cagtggcctttagaacagcaccgac

SEQ ID NO: 6004638 - DNA, 25 bp, Homo sapien
cagtcaccgtgccaagcgtgcaagt

SEQ ID NO: 6004639 - DNA, 25 bp, Homo sapien
ccgacaatgtccttttccttagtga

SEQ ID NO: 6004640 - DNA, 25 bp, Homo sapien
tcaaccatttgataccggcgtagtc

SEQ ID NO: 6004641 - DNA, 25 bp, Homo sapien
tagaacagcaccgacaatgtccttt

SEQ ID NO: 6004642 - DNA, 25 bp, Homo sapien
aacacttggcaccagctggcatacc

SEQ ID NO: 6004643 - DNA, 25 bp, Homo sapien
gcttctctggtgtcagctctgttac

SEQ ID NO: 6004644 - DNA, 25 bp, Homo sapien
agtgaagtcaatgaagacttcacca

SEQ ID NO: 6004645 - DNA, 25 bp, Homo sapien
agtgtcaacaacgtatctaccaacg

SEQ ID NO: 6004646 - DNA, 25 bp, Homo sapien
ttgaggaatgtgagcggcttgaaca

SEQ ID NO: 6004647 - DNA, 25 bp, Homo sapien
tcaacaacgtatctaccaacgattt

SEQ ID NO: 6004648 - DNA, 25 bp, Homo sapien
cgtatctggtagaagcttcaatagc

SEQ ID NO: 6004649 - DNA, 25 bp, Homo sapien
acttgggccaagtcggtaccttgag

SEQ ID NO: 6004650 - DNA, 25 bp, Homo sapien
gttcaaccatttgataccggcgtag

SEQ ID NO: 6004651 - DNA, 25 bp, Homo sapien
aattcacagtattcacaggccatac

SEQ ID NO: 6004652 - DNA, 25 bp, Homo sapien
cagcccttaacgttttcacccatgc

SEQ ID NO: 6004653 - DNA, 25 bp, Homo sapien
ccttgtagacggtgataccagcaca

SEQ ID NO: 6004654 - DNA, 25 bp, Homo sapien
gtaccgttagctctaacgtatctgg

SEQ ID NO: 6004655 - DNA, 25 bp, Homo sapien
tttcgtaaatttctggcaaggtaga

SEQ ID NO: 6004656 - DNA, 25 bp, Homo sapien
tgcaagtcagtgtgacagacaccag

SEQ ID NO: 6004657 - DNA, 25 bp, Homo sapien
gtatctaccaacgatttgacccttt

SEQ ID NO: 6004658 - DNA, 25 bp, Homo sapien
cgaagaagtccaaagcttctctggt

SEQ ID NO: 6004659 - DNA, 25 bp, Homo sapien
gtagaagataacacctttttgagtt

SEQ ID NO: 6004660 - DNA, 25 bp, Homo sapien
ttagcagacttcaaagccttgtaga

SEQ ID NO: 6004661 - DNA, 25 bp, Homo sapien
cgttacccaattcacagtattcaca

SEQ ID NO: 6004662 - DNA, 25 bp, Homo sapien
ggcctttagaacagcaccgacaatg

SEQ ID NO: 6004663 - DNA, 25 bp, Homo sapien
acaaccttgattggagacttgacca

SEQ ID NO: 6004664 - DNA, 25 bp, Homo sapien
tggcaccagctggcataccgaccaa

SEQ ID NO: 6004665 - DNA, 25 bp, Homo sapien
attcttccttaccttcaccaccgtc

SEQ ID NO: 6004666 - DNA, 25 bp, Homo sapien
gttggcctttggctttggaactgga

SEQ ID NO: 6004667 - DNA, 25 bp, Homo sapien
ggcttcggaaacggaaacgttgatg

SEQ ID NO: 6004668 - DNA, 25 bp, Homo sapien
ttttccttagtgaagtcaatgaaga

SEQ ID NO: 6004669 - DNA, 25 bp, Homo sapien
cagctggcataccgaccaaaacggt

SEQ ID NO: 6004670 - DNA, 25 bp, Homo sapien
tttgacccttttccatcttttcgta

SEQ ID NO: 6004671 - DNA, 25 bp, Homo sapien
agacaccagagtatttaacgttgat

SEQ ID NO: 6004672 - DNA, 25 bp, Homo sapien
aacaattcgttggcctttggctttg

SEQ ID NO: 6004673 - DNA, 25 bp, Homo sapien
ccttttccttagtgaagtcaatgaa

SEQ ID NO: 6004674 - DNA, 25 bp, Homo sapien
agcgtgaggacagttggattcgtta

SEQ ID NO: 6004675 - DNA, 25 bp, Homo sapien
aaagccttgtagacggtgataccag

SEQ ID NO: 6004676 - DNA, 25 bp, Homo sapien
gtcgtgggtgtaaccagacaagtca

SEQ ID NO: 6004677 - DNA, 25 bp, Homo sapien
attgaacagccaaagaacctagacc

SEQ ID NO: 6004678 - DNA, 25 bp, Homo sapien
gtagaagcttcaatagcggcttcgg

SEQ ID NO: 6004679 - DNA, 25 bp, Homo sapien
acctttttgagtttctgggatagac

SEQ ID NO: 6004680 - DNA, 25 bp, Homo sapien
gaaagaaccgtcgtgggtgtaacca

SEQ ID NO: 6004681 - DNA, 25 bp, Homo sapien
gaacaacacttggcaccagctggca

SEQ ID NO: 6004682 - DNA, 25 bp, Homo sapien
acttaccgtgggattcgtagaagat

SEQ ID NO: 6004683 - DNA, 25 bp, Homo sapien
agttagcagacttcaaagccttgta

SEQ ID NO: 6004684 - DNA, 25 bp, Homo sapien
catagccttggcgtattgaacagcc

SEQ ID NO: 6004685 - DNA, 25 bp, Homo sapien
gacaacgacaccggcaccttcgtga

SEQ ID NO: 6004686 - DNA, 25 bp, Homo sapien
gccagtcaccgtgccaagcgtgcaa

SEQ ID NO: 6004687 - DNA, 25 bp, Homo sapien
agaagataacacctttttgagtttc

SEQ ID NO: 6004688 - DNA, 25 bp, Homo sapien
tggtagcttaactggcaatggccag

SEQ ID NO: 6004689 - DNA, 25 bp, Homo sapien
gcctttggctttggaactggaatat

SEQ ID NO: 6004690 - DNA, 25 bp, Homo sapien
cgacttggttgaagacatcagaaca

SEQ ID NO: 6004691 - DNA, 25 bp, Homo sapien
tacaagaaccgttcaaccatttgat

SEQ ID NO: 6004692 - DNA, 25 bp, Homo sapien
gtattcacaggccatacaagaaccg

SEQ ID NO: 6004693 - DNA, 25 bp, Homo sapien
gacaagtcagcgtgaggacagttgg

SEQ ID NO: 6004694 - DNA, 25 bp, Homo sapien
acgtatctaccaacgatttgaccct

SEQ ID NO: 6004695 - DNA, 25 bp, Homo sapien
ctctggcgaagaagtccaaagcttc

SEQ ID NO: 6004696 - DNA, 25 bp, Homo sapien
acttgacgacttggttgaagacatc

SEQ ID NO: 6004697 - DNA, 25 bp, Homo sapien
gcaccaccgtcagtggcctttagaa

SEQ ID NO: 6004698 - DNA, 25 bp, Homo sapien
cgtagtcaccgatcttccagccctt

SEQ ID NO: 6004699 - DNA, 25 bp, Homo sapien
tgggggcgacttgggccaagtcggt

SEQ ID NO: 6004700 - DNA, 25 bp, Homo sapien
ataccagcacacaagatgggggcga

SEQ ID NO: 6004701 - DNA, 25 bp, Homo sapien
catacaagaaccgttcaaccatttg

SEQ ID NO: 6004702 - DNA, 25 bp, Homo sapien
ttagctctaacgtatctggtagaag

SEQ ID NO: 6004703 - DNA, 25 bp, Homo sapien
atatctttgtattccaacttaccgt

SEQ ID NO: 6004704 - DNA, 25 bp, Homo sapien
cgtgggtgtaaccagacaagtcagc

SEQ ID NO: 6004705 - DNA, 25 bp, Homo sapien
tcgtagaagataacacctttttgag

SEQ ID NO: 6004706 - DNA, 25 bp, Homo sapien
ttgggccaagtcggtaccttgagga

SEQ ID NO: 6004707 - DNA, 25 bp, Homo sapien
ccttgaggaatgtgagcggcttgaa

SEQ ID NO: 6004708 - DNA, 25 bp, Homo sapien
cctttagaacagcaccgacaatgtc

SEQ ID NO: 6004709 - DNA, 25 bp, Homo sapien
ctgttaccgacgtaagaaccaacaa

SEQ ID NO: 6004710 - DNA, 25 bp, Homo sapien
gtcaatacccaagactctgtaaccc

SEQ ID NO: 6004711 - DNA, 25 bp, Homo sapien
ttacccaattcacagtattcacagg

SEQ ID NO: 6004712 - DNA, 25 bp, Homo sapien
taccgacgtaagaaccaacaataga

SEQ ID NO: 6004713 - DNA, 25 bp, Homo sapien
agtcagcgtgaggacagttggattc

SEQ ID NO: 6004714 - DNA, 25 bp, Homo sapien
acggtgataccagcacacaagatgg

SEQ ID NO: 6004715 - DNA, 25 bp, Homo sapien
caccgtgagcaccaccgtcagtggc

SEQ ID NO: 6004716 - DNA, 25 bp, Homo sapien
attcacaggccatacaagaaccgtt

SEQ ID NO: 6004717 - DNA, 25 bp, Homo sapien
ttgaccaaacctctggcgaagaagt

SEQ ID NO: 6004718 - DNA, 25 bp, Homo sapien
caccaccgatggatctgaataattc

SEQ ID NO: 6004719 - DNA, 25 bp, Homo sapien
caacttaccgtgggattcgtagaag

SEQ ID NO: 6004720 - DNA, 25 bp, Homo sapien
gccaagtcggtaccttgaggaatgt

SEQ ID NO: 6004721 - DNA, 25 bp, Homo sapien
gatagcaacccagtgaccggccatc

SEQ ID NO: 6004722 - DNA, 25 bp, Homo sapien
cttcggaaacggaaacgttgatgac

SEQ ID NO: 6004723 - DNA, 25 bp, Homo sapien
cgtgggattcgtagaagataacacc

SEQ ID NO: 6004724 - DNA, 25 bp, Homo sapien
agcgtgcaagtcagtgtgacagaca

SEQ ID NO: 6004725 - DNA, 25 bp, Homo sapien
atggacttgacgacttggttgaaga

SEQ ID NO: 6004726 - DNA, 25 bp, Homo sapien
ccttgattggagacttgaccaaacc

SEQ ID NO: 6004727 - DNA, 25 bp, Homo sapien
cggtagcgtattgttggaaagaacc

SEQ ID NO: 6004728 - DNA, 25 bp, Homo sapien
catgccgacaacgacaccggcacct

SEQ ID NO: 6004729 - DNA, 25 bp, Homo sapien
gatgggggcgacttgggccaagtcg

SEQ ID NO: 6004730 - DNA, 25 bp, Homo sapien
gagatagcaacccagtgaccggcca

SEQ ID NO: 6004731 - DNA, 25 bp, Homo sapien
ttggaactggaatatctttgtattc

SEQ ID NO: 6004732 - DNA, 25 bp, Homo sapien
gagtatttaacgttgatcaacaatt

SEQ ID NO: 6004733 - DNA, 25 bp, Homo sapien
actggcaatggccagtcaccgtgcc

SEQ ID NO: 6004734 - DNA, 25 bp, Homo sapien
agcttaactggcaatggccagtcac

SEQ ID NO: 6004735 - DNA, 25 bp, Homo sapien
ccatcttttcgtaaatttctggcaa

SEQ ID NO: 6004736 - DNA, 25 bp, Homo sapien
gccatacaagaaccgttcaaccatt

SEQ ID NO: 6004737 - DNA, 25 bp, Homo sapien
gttaccgacgtaagaaccaacaata

SEQ ID NO: 6004738 - DNA, 25 bp, Homo sapien
ttaacgttgatcaacaattcgttgg

SEQ ID NO: 6004739 - DNA, 25 bp, Homo sapien
gcaccagctggcataccgaccaaaa

SEQ ID NO: 6004740 - DNA, 25 bp, Homo sapien
ccgtcaatacccaagactctgtaac

SEQ ID NO: 6004741 - DNA, 25 bp, Homo sapien
aagatgggggcgacttgggccaagt

SEQ ID NO: 6004742 - DNA, 25 bp, Homo sapien
cacagtattcacaggccatacaaga

SEQ ID NO: 6004743 - DNA, 25 bp, Homo sapien
acaagatgggggcgacttgggccaa

SEQ ID NO: 6004744 - DNA, 25 bp, Homo sapien
ccatttgataccggcgtagtcaccg

SEQ ID NO: 6004745 - DNA, 25 bp, Homo sapien
gataacacctttttgagtttctggg

SEQ ID NO: 6004746 - DNA, 25 bp, Homo sapien
ccagcagcaccggagatagcaaccc

SEQ ID NO: 6004747 - DNA, 25 bp, Homo sapien
ccatcaagttagcagacttcaaagc

SEQ ID NO: 6004748 - DNA, 25 bp, Homo sapien
atgaagacttcaccaccgatggatc

SEQ ID NO: 6004749 - DNA, 25 bp, Homo sapien
aagaagtccaaagcttctctggtgt

SEQ ID NO: 6004750 - DNA, 25 bp, Homo sapien
agctctaacgtatctggtagaagct

SEQ ID NO: 6004751 - DNA, 25 bp, Homo sapien
gacaccgtgagcaccaccgtcagtg

SEQ ID NO: 6004752 - DNA, 25 bp, Homo sapien
ccttagtgaagtcaatgaagacttc

SEQ ID NO: 6004753 - DNA, 25 bp, Homo sapien
aaacctctggcgaagaagtccaaag

SEQ ID NO: 6004754 - DNA, 25 bp, Homo sapien
cagcaccggagatagcaacccagtg

SEQ ID NO: 6004755 - DNA, 25 bp, Homo sapien
accgtgggattcgtagaagataaca

SEQ ID NO: 6004756 - DNA, 25 bp, Homo sapien
tatttagaagtgtcaacaacgtatc

SEQ ID NO: 6004757 - DNA, 25 bp, Homo sapien
cacttggcaccagctggcataccga

SEQ ID NO: 6004758 - DNA, 25 bp, Homo sapien
agaaccgttcaaccatttgataccg

SEQ ID NO: 6004759 - DNA, 25 bp, Homo sapien
gtagacggtgataccagcacacaag

SEQ ID NO: 6004760 - DNA, 25 bp, Homo sapien
gtagcgtattgttggaaagaaccgt

SEQ ID NO: 6004761 - DNA, 25 bp, Homo sapien
atcaagttagcagacttcaaagcct

SEQ ID NO: 6004762 - DNA, 25 bp, Homo sapien
ggaatgtgagcggcttgaacagcgt

SEQ ID NO: 6004763 - DNA, 25 bp, Homo sapien
gccttggcgtattgaacagccaaag

SEQ ID NO: 6004764 - DNA, 25 bp, Homo sapien
gaagtccaaagcttctctggtgtca

SEQ ID NO: 6004765 - DNA, 25 bp, Homo sapien
aagtcaatgaagacttcaccaccga

SEQ ID NO: 6004766 - DNA, 25 bp, Homo sapien
ttaccttcaccaccgtcaataccca

SEQ ID NO: 6004767 - DNA, 25 bp, Homo sapien
caccgtcaatacccaagactctgta

SEQ ID NO: 6004768 - DNA, 25 bp, Homo sapien
caccgactaatggtagcttaactgg

SEQ ID NO: 6004769 - DNA, 25 bp, Homo sapien
tttagaacagcaccgacaatgtcct

SEQ ID NO: 6004770 - DNA, 25 bp, Homo sapien
ggtgtcagctctgttaccgacgtaa

SEQ ID NO: 6004771 - DNA, 25 bp, Homo sapien
ctggcaaggtagacaagccgacaac

SEQ ID NO: 6004772 - DNA, 25 bp, Homo sapien
gtcagtggcctttagaacagcaccg

SEQ ID NO: 6004773 - DNA, 25 bp, Homo sapien
accagctggcataccgaccaaaacg

SEQ ID NO: 6004774 - DNA, 25 bp, Homo sapien
accaacgatttgacccttttccatc

SEQ ID NO: 6004775 - DNA, 25 bp, Homo sapien
ccggccatcaagttagcagacttca

SEQ ID NO: 6004776 - DNA, 25 bp, Homo sapien
tgacccttttccatcttttcgtaaa

SEQ ID NO: 6004777 - DNA, 25 bp, Homo sapien
agcgtattgttggaaagaaccgtcg

SEQ ID NO: 6004778 - DNA, 25 bp, Homo sapien
gcaacccagtgaccggccatcaagt

SEQ ID NO: 6004779 - DNA, 25 bp, Homo sapien
agaaccgtcgtgggtgtaaccagac

SEQ ID NO: 6004780 - DNA, 25 bp, Homo sapien
tgcccgttggaaccgtgtcattatt

SEQ ID NO: 6004781 - DNA, 25 bp, Homo sapien
gaaatggctgttaagttcggtaaaa

SEQ ID NO: 6004782 - DNA, 25 bp, Homo sapien
actttgaatacatttcagattccac

SEQ ID NO: 6004783 - DNA, 25 bp, Homo sapien
catttcagattccaccactcacgca

SEQ ID NO: 6004784 - DNA, 25 bp, Homo sapien
tcagattccaccactcacgcattga

SEQ ID NO: 6004785 - DNA, 25 bp, Homo sapien
agattggggtgctgcagcagtggaa

SEQ ID NO: 6004786 - DNA, 25 bp, Homo sapien
ggatcctatgaattaccttggggga

SEQ ID NO: 6004787 - DNA, 25 bp, Homo sapien
tgctattgaaagaatggcttccctt

SEQ ID NO: 6004788 - DNA, 25 bp, Homo sapien
cattattgacgctcttgtgaaaggt

SEQ ID NO: 6004789 - DNA, 25 bp, Homo sapien
aagtcgacatgcccgtcatttttgg

SEQ ID NO: 6004790 - DNA, 25 bp, Homo sapien
ctggatcctatgaattaccttgggg

SEQ ID NO: 6004791 - DNA, 25 bp, Homo sapien
tggcttcccttggtgtcgaggaaaa

SEQ ID NO: 6004792 - DNA, 25 bp, Homo sapien
gaacttacaagaaaaagtcgacatg

SEQ ID NO: 6004793 - DNA, 25 bp, Homo sapien
ccagagctggcatcgatgaagcgca

SEQ ID NO: 6004794 - DNA, 25 bp, Homo sapien
agagctggcatcgatgaagcgcact

SEQ ID NO: 6004795 - DNA, 25 bp, Homo sapien
tcacgcattgatgaacttacaagaa

SEQ ID NO: 6004796 - DNA, 25 bp, Homo sapien
taacttgcatgactgaagaacaagc

SEQ ID NO: 6004797 - DNA, 25 bp, Homo sapien
tttggcctcttaacttgcatgactg

SEQ ID NO: 6004798 - DNA, 25 bp, Homo sapien
aaaaggtttgttgacagacaagcga

SEQ ID NO: 6004799 - DNA, 25 bp, Homo sapien
aactgttcctggatcctatgaatta

SEQ ID NO: 6004800 - DNA, 25 bp, Homo sapien
catggtgaagattggggtgctgcag

SEQ ID NO: 6004801 - DNA, 25 bp, Homo sapien
cagcagtggaaatggctgttaagtt

SEQ ID NO: 6004802 - DNA, 25 bp, Homo sapien
ggcatcgatgaagcgcactccatgc

SEQ ID NO: 6004803 - DNA, 25 bp, Homo sapien
atcctatgaattaccttgggggaca

SEQ ID NO: 6004804 - DNA, 25 bp, Homo sapien
ttcccttggtgtcgaggaaaataac

SEQ ID NO: 6004805 - DNA, 25 bp, Homo sapien
gcagtggaaatggctgttaagttcg

SEQ ID NO: 6004806 - DNA, 25 bp, Homo sapien
agccctggccagagctggcatcgat

SEQ ID NO: 6004807 - DNA, 25 bp, Homo sapien
ggattaggcaaaccagatcaagttt

SEQ ID NO: 6004808 - DNA, 25 bp, Homo sapien
ggtgtacttatcaaaggtagtacaa

SEQ ID NO: 6004809 - DNA, 25 bp, Homo sapien
aagaaaaagtcgacatgcccgtcat

SEQ ID NO: 6004810 - DNA, 25 bp, Homo sapien
ctgttcctggatcctatgaattacc

SEQ ID NO: 6004811 - DNA, 25 bp, Homo sapien
gcccgtcatttttggcctcttaact

SEQ ID NO: 6004812 - DNA, 25 bp, Homo sapien
acttgcatgactgaagaacaagccc

SEQ ID NO: 6004813 - DNA, 25 bp, Homo sapien
gtcatttttggcctcttaacttgca

SEQ ID NO: 6004814 - DNA, 25 bp, Homo sapien
aatggcttcccttggtgtcgaggaa

SEQ ID NO: 6004815 - DNA, 25 bp, Homo sapien
tgaatacatttcagattccaccact

SEQ ID NO: 6004816 - DNA, 25 bp, Homo sapien
gggacaaaaaggtttgttgacagac

SEQ ID NO: 6004817 - DNA, 25 bp, Homo sapien
gctcttgtgaaaggtgctattgaaa

SEQ ID NO: 6004818 - DNA, 25 bp, Homo sapien
ccctggccagagctggcatcgatga

SEQ ID NO: 6004819 - DNA, 25 bp, Homo sapien
ggcaaaccagatcaagtttatgacg

SEQ ID NO: 6004820 - DNA, 25 bp, Homo sapien
atgaacttacaagaaaaagtcgaca

SEQ ID NO: 6004821 - DNA, 25 bp, Homo sapien
ctcttaacttgcatgactgaagaac

SEQ ID NO: 6004822 - DNA, 25 bp, Homo sapien
ttggtgtacttatcaaaggtagtac

SEQ ID NO: 6004823 - DNA, 25 bp, Homo sapien
tgaagcgcactccatgcacaaccat

SEQ ID NO: 6004824 - DNA, 25 bp, Homo sapien
tttatgacggttccaaaatcagggt

SEQ ID NO: 6004825 - DNA, 25 bp, Homo sapien
gttaaaggattaggcaaaccagatc

SEQ ID NO: 6004826 - DNA, 25 bp, Homo sapien
tccaccactcacgcattgatgaact

SEQ ID NO: 6004827 - DNA, 25 bp, Homo sapien
aggtagtacaatgcactttgaatac

SEQ ID NO: 6004828 - DNA, 25 bp, Homo sapien
ttgcatgactgaagaacaagccctg

SEQ ID NO: 6004829 - DNA, 25 bp, Homo sapien
aaagccgctagatgttgtaattcct

SEQ ID NO: 6004830 - DNA, 25 bp, Homo sapien
ccgtgtcattattgacgctcttgtg

SEQ ID NO: 6004831 - DNA, 25 bp, Homo sapien
caaaccagatcaagtttatgacggt

SEQ ID NO: 6004832 - DNA, 25 bp, Homo sapien
tggcctcttaacttgcatgactgaa

SEQ ID NO: 6004833 - DNA, 25 bp, Homo sapien
gcctcttaacttgcatgactgaaga

SEQ ID NO: 6004834 - DNA, 25 bp, Homo sapien
tcctggatcctatgaattaccttgg

SEQ ID NO: 6004835 - DNA, 25 bp, Homo sapien
gttcctggatcctatgaattacctt

SEQ ID NO: 6004836 - DNA, 25 bp, Homo sapien
tgcacaaccatggtgaagattgggg

SEQ ID NO: 6004837 - DNA, 25 bp, Homo sapien
tccaaaatcagggtcggtatcattc

SEQ ID NO: 6004838 - DNA, 25 bp, Homo sapien
tttcagattccaccactcacgcatt

SEQ ID NO: 6004839 - DNA, 25 bp, Homo sapien
atcattcatgcccgttggaaccgtg

SEQ ID NO: 6004840 - DNA, 25 bp, Homo sapien
agaatggcttcccttggtgtcgagg

SEQ ID NO: 6004841 - DNA, 25 bp, Homo sapien
actcacgcattgatgaacttacaag

SEQ ID NO: 6004842 - DNA, 25 bp, Homo sapien
caaaaaggtttgttgacagacaagc

SEQ ID NO: 6004843 - DNA, 25 bp, Homo sapien
ttacaagaaaaagtcgacatgcccg

SEQ ID NO: 6004844 - DNA, 25 bp, Homo sapien
aaaagtcgacatgcccgtcattttt

SEQ ID NO: 6004845 - DNA, 25 bp, Homo sapien
ttgtaattcctattggtgtacttat

SEQ ID NO: 6004846 - DNA, 25 bp, Homo sapien
cctatgaattaccttgggggacaaa

SEQ ID NO: 6004847 - DNA, 25 bp, Homo sapien
caccactcacgcattgatgaactta

SEQ ID NO: 6004848 - DNA, 25 bp, Homo sapien
aatacatttcagattccaccactca

SEQ ID NO: 6004849 - DNA, 25 bp, Homo sapien
gctgcagcagtggaaatggctgtta

SEQ ID NO: 6004850 - DNA, 25 bp, Homo sapien
gaaactgttcctggatcctatgaat

SEQ ID NO: 6004851 - DNA, 25 bp, Homo sapien
gtgtcattattgacgctcttgtgaa

SEQ ID NO: 6004852 - DNA, 25 bp, Homo sapien
acgcattgatgaacttacaagaaaa

SEQ ID NO: 6004853 - DNA, 25 bp, Homo sapien
caagccctggccagagctggcatcg

SEQ ID NO: 6004854 - DNA, 25 bp, Homo sapien
gcttcccttggtgtcgaggaaaata

SEQ ID NO: 6004855 - DNA, 25 bp, Homo sapien
gggtgctgcagcagtggaaatggct

SEQ ID NO: 6004856 - DNA, 25 bp, Homo sapien
tgacggttccaaaatcagggtcggt

SEQ ID NO: 6004857 - DNA, 25 bp, Homo sapien
cagacaagcgaagttgggaaagccg

SEQ ID NO: 6004858 - DNA, 25 bp, Homo sapien
gacaaaaaggtttgttgacagacaa

SEQ ID NO: 6004859 - DNA, 25 bp, Homo sapien
ccactcacgcattgatgaacttaca

SEQ ID NO: 6004860 - DNA, 25 bp, Homo sapien
cataataattgaaactgttcctgga

SEQ ID NO: 6004861 - DNA, 25 bp, Homo sapien
gactgaagaacaagccctggccaga

SEQ ID NO: 6004862 - DNA, 25 bp, Homo sapien
tgtacttatcaaaggtagtacaatg

SEQ ID NO: 6004863 - DNA, 25 bp, Homo sapien
atggctgttaagttcggtaaaaatg

SEQ ID NO: 6004864 - DNA, 25 bp, Homo sapien
ggaaccgtgtcattattgacgctct

SEQ ID NO: 6004865 - DNA, 25 bp, Homo sapien
gaagattggggtgctgcagcagtgg

SEQ ID NO: 6004866 - DNA, 25 bp, Homo sapien
tggtgtcgaggaaaataacataata

SEQ ID NO: 6004867 - DNA, 25 bp, Homo sapien
tatcaaaggtagtacaatgcacttt

SEQ ID NO: 6004868 - DNA, 25 bp, Homo sapien
cttaacttgcatgactgaagaacaa

SEQ ID NO: 6004869 - DNA, 25 bp, Homo sapien
cccgttggaaccgtgtcattattga

SEQ ID NO: 6004870 - DNA, 25 bp, Homo sapien
gctagatgttgtaattcctattggt

SEQ ID NO: 6004871 - DNA, 25 bp, Homo sapien
tttgttgacagacaagcgaagttgg

SEQ ID NO: 6004872 - DNA, 25 bp, Homo sapien
tttttggcctcttaacttgcatgac

SEQ ID NO: 6004873 - DNA, 25 bp, Homo sapien
catgcacaaccatggtgaagattgg

SEQ ID NO: 6004874 - DNA, 25 bp, Homo sapien
tatgacggttccaaaatcagggtcg

SEQ ID NO: 6004875 - DNA, 25 bp, Homo sapien
gacaagcgaagttgggaaagccgct

SEQ ID NO: 6004876 - DNA, 25 bp, Homo sapien
cttatcaaaggtagtacaatgcact

SEQ ID NO: 6004877 - DNA, 25 bp, Homo sapien
caaccatggtgaagattggggtgct

SEQ ID NO: 6004878 - DNA, 25 bp, Homo sapien
gtagtacaatgcactttgaatacat

SEQ ID NO: 6004879 - DNA, 25 bp, Homo sapien
gttccaaaatcagggtcggtatcat

SEQ ID NO: 6004880 - DNA, 25 bp, Homo sapien
aacaagccctggccagagctggcat

SEQ ID NO: 6004881 - DNA, 25 bp, Homo sapien
catttttggcctcttaacttgcatg

SEQ ID NO: 6004882 - DNA, 25 bp, Homo sapien
cctattggtgtacttatcaaaggta

SEQ ID NO: 6004883 - DNA, 25 bp, Homo sapien
aattcctattggtgtacttatcaaa

SEQ ID NO: 6004884 - DNA, 25 bp, Homo sapien
agctggcatcgatgaagcgcactcc

SEQ ID NO: 6004885 - DNA, 25 bp, Homo sapien
aagcgcactccatgcacaaccatgg

SEQ ID NO: 6004886 - DNA, 25 bp, Homo sapien
ttgaaactgttcctggatcctatga

SEQ ID NO: 6004887 - DNA, 25 bp, Homo sapien
acgctcttgtgaaaggtgctattga

SEQ ID NO: 6004888 - DNA, 25 bp, Homo sapien
tattggtgtacttatcaaaggtagt

SEQ ID NO: 6004889 - DNA, 25 bp, Homo sapien
cggtatcattcatgcccgttggaac

SEQ ID NO: 6004890 - DNA, 25 bp, Homo sapien
ccgtcatttttggcctcttaacttg

SEQ ID NO: 6004891 - DNA, 25 bp, Homo sapien
ccgctagatgttgtaattcctattg

SEQ ID NO: 6004892 - DNA, 25 bp, Homo sapien
aacataataattgaaactgttcctg

SEQ ID NO: 6004893 - DNA, 25 bp, Homo sapien
tttgaatacatttcagattccacca

SEQ ID NO: 6004894 - DNA, 25 bp, Homo sapien
agtggaaatggctgttaagttcggt

SEQ ID NO: 6004895 - DNA, 25 bp, Homo sapien
taggcaaaccagatcaagtttatga

SEQ ID NO: 6004896 - DNA, 25 bp, Homo sapien
catgcccgttggaaccgtgtcatta

SEQ ID NO: 6004897 - DNA, 25 bp, Homo sapien
atgcccgtcatttttggcctcttaa

SEQ ID NO: 6004898 - DNA, 25 bp, Homo sapien
cgaagttgggaaagccgctagatgt

SEQ ID NO: 6004899 - DNA, 25 bp, Homo sapien
aaatcagggtcggtatcattcatgc

SEQ ID NO: 6004900 - DNA, 25 bp, Homo sapien
tcaaaggtagtacaatgcactttga

SEQ ID NO: 6004901 - DNA, 25 bp, Homo sapien
gtcgacatgcccgtcatttttggcc

SEQ ID NO: 6004902 - DNA, 25 bp, Homo sapien
tgaaagaatggcttcccttggtgtc

SEQ ID NO: 6004903 - DNA, 25 bp, Homo sapien
gtcgaggaaaataacataataattg

SEQ ID NO: 6004904 - DNA, 25 bp, Homo sapien
gtaattcctattggtgtacttatca

SEQ ID NO: 6004905 - DNA, 25 bp, Homo sapien
tacaatgcactttgaatacatttca

SEQ ID NO: 6004906 - DNA, 25 bp, Homo sapien
cgttggaaccgtgtcattattgacg

SEQ ID NO: 6004907 - DNA, 25 bp, Homo sapien
gggtcggtatcattcatgcccgttg

SEQ ID NO: 6004908 - DNA, 25 bp, Homo sapien
gaaaggtgctattgaaagaatggct

SEQ ID NO: 6004909 - DNA, 25 bp, Homo sapien
ataattgaaactgttcctggatcct

SEQ ID NO: 6004910 - DNA, 25 bp, Homo sapien
ctgaagaacaagccctggccagagc

SEQ ID NO: 6004911 - DNA, 25 bp, Homo sapien
aaagaatggcttcccttggtgtcga

SEQ ID NO: 6004912 - DNA, 25 bp, Homo sapien
tggaaatggctgttaagttcggtaa

SEQ ID NO: 6004913 - DNA, 25 bp, Homo sapien
gcgcactccatgcacaaccatggtg

SEQ ID NO: 6004914 - DNA, 25 bp, Homo sapien
ccagatcaagtttatgacggttcca

SEQ ID NO: 6004915 - DNA, 25 bp, Homo sapien
gtgctgcagcagtggaaatggctgt

SEQ ID NO: 6004916 - DNA, 25 bp, Homo sapien
ttattgacgctcttgtgaaaggtgc

SEQ ID NO: 6004917 - DNA, 25 bp, Homo sapien
ttgacagacaagcgaagttgggaaa

SEQ ID NO: 6004918 - DNA, 25 bp, Homo sapien
gcatgactgaagaacaagccctggc

SEQ ID NO: 6004919 - DNA, 25 bp, Homo sapien
gcattgatgaacttacaagaaaaag

SEQ ID NO: 6004920 - DNA, 25 bp, Homo sapien
taataattgaaactgttcctggatc

SEQ ID NO: 6004921 - DNA, 25 bp, Homo sapien
agtacaatgcactttgaatacattt

SEQ ID NO: 6004922 - DNA, 25 bp, Homo sapien
aattgaaactgttcctggatcctat

SEQ ID NO: 6004923 - DNA, 25 bp, Homo sapien
tacatttcagattccaccactcacg

SEQ ID NO: 6004924 - DNA, 25 bp, Homo sapien
gtcattattgacgctcttgtgaaag

SEQ ID NO: 6004925 - DNA, 25 bp, Homo sapien
ggaaagccgctagatgttgtaattc

SEQ ID NO: 6004926 - DNA, 25 bp, Homo sapien
acttacaagaaaaagtcgacatgcc

SEQ ID NO: 6004927 - DNA, 25 bp, Homo sapien
atcaagtttatgacggttccaaaat

SEQ ID NO: 6004928 - DNA, 25 bp, Homo sapien
tcttgtgaaaggtgctattgaaaga

SEQ ID NO: 6004929 - DNA, 25 bp, Homo sapien
ggtgctattgaaagaatggcttccc

SEQ ID NO: 6004930 - DNA, 25 bp, Homo sapien
ctattgaaagaatggcttcccttgg

SEQ ID NO: 6004931 - DNA, 25 bp, Homo sapien
gcactttgaatacatttcagattcc

SEQ ID NO: 6004932 - DNA, 25 bp, Homo sapien
attgaaagaatggcttcccttggtg

SEQ ID NO: 6004933 - DNA, 25 bp, Homo sapien
ttggaaccgtgtcattattgacgct

SEQ ID NO: 6004934 - DNA, 25 bp, Homo sapien
ttcctattggtgtacttatcaaagg

SEQ ID NO: 6004935 - DNA, 25 bp, Homo sapien
actccatgcacaaccatggtgaaga

SEQ ID NO: 6004936 - DNA, 25 bp, Homo sapien
catcgatgaagcgcactccatgcac

SEQ ID NO: 6004937 - DNA, 25 bp, Homo sapien
attgatgaacttacaagaaaaagtc

SEQ ID NO: 6004938 - DNA, 25 bp, Homo sapien
gatgttgtaattcctattggtgtac

SEQ ID NO: 6004939 - DNA, 25 bp, Homo sapien
agccgctagatgttgtaattcctat

SEQ ID NO: 6004940 - DNA, 25 bp, Homo sapien
ttcatgcccgttggaaccgtgtcat

SEQ ID NO: 6004941 - DNA, 25 bp, Homo sapien
aaaggtagtacaatgcactttgaat

SEQ ID NO: 6004942 - DNA, 25 bp, Homo sapien
gtgaaaggtgctattgaaagaatgg

SEQ ID NO: 6004943 - DNA, 25 bp, Homo sapien
aaggtttgttgacagacaagcgaag

SEQ ID NO: 6004944 - DNA, 25 bp, Homo sapien
taagttcggtaaaaatgctttttga

SEQ ID NO: 6004945 - DNA, 25 bp, Homo sapien
tggtgaagattggggtgctgcagca

SEQ ID NO: 6004946 - DNA, 25 bp, Homo sapien
caagtttatgacggttccaaaatca

SEQ ID NO: 6004947 - DNA, 25 bp, Homo sapien
cacaaccatggtgaagattggggtg

SEQ ID NO: 6004948 - DNA, 25 bp, Homo sapien
tgacgctcttgtgaaaggtgctatt

SEQ ID NO: 6004949 - DNA, 25 bp, Homo sapien
gtgtcgaggaaaataacataataat

SEQ ID NO: 6004950 - DNA, 25 bp, Homo sapien
tgcagcagtggaaatggctgttaag

SEQ ID NO: 6004951 - DNA, 25 bp, Homo sapien
gcactccatgcacaaccatggtgaa

SEQ ID NO: 6004952 - DNA, 25 bp, Homo sapien
attggggtgctgcagcagtggaaat

SEQ ID NO: 6004953 - DNA, 25 bp, Homo sapien
aaggattaggcaaaccagatcaagt

SEQ ID NO: 6004954 - DNA, 25 bp, Homo sapien
attaggcaaaccagatcaagtttat

SEQ ID NO: 6004955 - DNA, 25 bp, Homo sapien
accatggtgaagattggggtgctgc

SEQ ID NO: 6004956 - DNA, 25 bp, Homo sapien
tatgaattaccttgggggacaaaaa

SEQ ID NO: 6004957 - DNA, 25 bp, Homo sapien
attccaccactcacgcattgatgaa

SEQ ID NO: 6004958 - DNA, 25 bp, Homo sapien
tgatgaacttacaagaaaaagtcga

SEQ ID NO: 6004959 - DNA, 25 bp, Homo sapien
cagttaaaggattaggcaaaccaga

SEQ ID NO: 6004960 - DNA, 25 bp, Homo sapien
caaaatcagggtcggtatcattcat

SEQ ID NO: 6004961 - DNA, 25 bp, Homo sapien
cgacatgcccgtcatttttggcctc

SEQ ID NO: 6004962 - DNA, 25 bp, Homo sapien
tgttgacagacaagcgaagttggga

SEQ ID NO: 6004963 - DNA, 25 bp, Homo sapien
ggcagttaaaggattaggcaaacca

SEQ ID NO: 6004964 - DNA, 25 bp, Homo sapien
tgggaaagccgctagatgttgtaat

SEQ ID NO: 6004965 - DNA, 25 bp, Homo sapien
tagatgttgtaattcctattggtgt

SEQ ID NO: 6004966 - DNA, 25 bp, Homo sapien
acaagaaaaagtcgacatgcccgtc

SEQ ID NO: 6004967 - DNA, 25 bp, Homo sapien
agatcaagtttatgacggttccaaa

SEQ ID NO: 6004968 - DNA, 25 bp, Homo sapien
cagggtcggtatcattcatgcccgt

SEQ ID NO: 6004969 - DNA, 25 bp, Homo sapien
aaccgtgtcattattgacgctcttg

SEQ ID NO: 6004970 - DNA, 25 bp, Homo sapien
gtgaagattggggtgctgcagcagt

SEQ ID NO: 6004971 - DNA, 25 bp, Homo sapien
aaccagatcaagtttatgacggttc

SEQ ID NO: 6004972 - DNA, 25 bp, Homo sapien
gaaaaagtcgacatgcccgtcattt

SEQ ID NO: 6004973 - DNA, 25 bp, Homo sapien
atggcagttaaaggattaggcaaac

SEQ ID NO: 6004974 - DNA, 25 bp, Homo sapien
tcgatgaagcgcactccatgcacaa

SEQ ID NO: 6004975 - DNA, 25 bp, Homo sapien
tgttgtaattcctattggtgtactt

SEQ ID NO: 6004976 - DNA, 25 bp, Homo sapien
cattcatgcccgttggaaccgtgtc

SEQ ID NO: 6004977 - DNA, 25 bp, Homo sapien
attgacgctcttgtgaaaggtgcta

SEQ ID NO: 6004978 - DNA, 25 bp, Homo sapien
caagcgaagttgggaaagccgctag

SEQ ID NO: 6004979 - DNA, 25 bp, Homo sapien
cggttccaaaatcagggtcggtatc

SEQ ID NO: 6004980 - DNA, 25 bp, Homo sapien
taaaggattaggcaaaccagatcaa

SEQ ID NO: 6004981 - DNA, 25 bp, Homo sapien
gatgaagcgcactccatgcacaacc

SEQ ID NO: 6004982 - DNA, 25 bp, Homo sapien
ggctgttaagttcggtaaaaatgct

SEQ ID NO: 6004983 - DNA, 25 bp, Homo sapien
agattccaccactcacgcattgatg

SEQ ID NO: 6004984 - DNA, 25 bp, Homo sapien
atcagggtcggtatcattcatgccc

SEQ ID NO: 6004985 - DNA, 25 bp, Homo sapien
caatgcactttgaatacatttcaga

SEQ ID NO: 6004986 - DNA, 25 bp, Homo sapien
ataacataataattgaaactgttcc

SEQ ID NO: 6004987 - DNA, 25 bp, Homo sapien
agaacaagccctggccagagctggc

SEQ ID NO: 6004988 - DNA, 25 bp, Homo sapien
ggccagagctggcatcgatgaagcg

SEQ ID NO: 6004989 - DNA, 25 bp, Homo sapien
agtttatgacggttccaaaatcagg

SEQ ID NO: 6004990 - DNA, 25 bp, Homo sapien
ggtttgttgacagacaagcgaagtt

SEQ ID NO: 6004991 - DNA, 25 bp, Homo sapien
aaggtgctattgaaagaatggcttc

SEQ ID NO: 6004992 - DNA, 25 bp, Homo sapien
ttgtgaaaggtgctattgaaagaat

SEQ ID NO: 6004993 - DNA, 25 bp, Homo sapien
gtcggtatcattcatgcccgttgga

SEQ ID NO: 6004994 - DNA, 25 bp, Homo sapien
ctggccagagctggcatcgatgaag

SEQ ID NO: 6004995 - DNA, 25 bp, Homo sapien
atgactgaagaacaagccctggcca

SEQ ID NO: 6004996 - DNA, 25 bp, Homo sapien
gttgggaaagccgctagatgttgta

SEQ ID NO: 6004997 - DNA, 25 bp, Homo sapien
tacttatcaaaggtagtacaatgca

SEQ ID NO: 6004998 - DNA, 25 bp, Homo sapien
tccatgcacaaccatggtgaagatt

SEQ ID NO: 6004999 - DNA, 25 bp, Homo sapien
gaagaacaagccctggccagagctg

SEQ ID NO: 6005000 - DNA, 25 bp, Homo sapien
gtatcattcatgcccgttggaaccg

SEQ ID NO: 6005001 - DNA, 25 bp, Homo sapien
agcgaagttgggaaagccgctagat

SEQ ID NO: 6005002 - DNA, 25 bp, Homo sapien
gacagacaagcgaagttgggaaagc

SEQ ID NO: 6005003 - DNA, 25 bp, Homo sapien
atgcactttgaatacatttcagatt

SEQ ID NO: 6005004 - DNA, 25 bp, Homo sapien
ctggcatcgatgaagcgcactccat

SEQ ID NO: 6005005 - DNA, 25 bp, Homo sapien
cttggtgtcgaggaaaataacataa

SEQ ID NO: 6005006 - DNA, 25 bp, Homo sapien
aagttgggaaagccgctagatgttg

SEQ ID NO: 6005007 - DNA, 25 bp, Homo sapien
cccttggtgtcgaggaaaataacat

SEQ ID NO: 6005008 - DNA, 25 bp, Homo sapien
acatgcccgtcatttttggcctctt

SEQ ID NO: 6005009 - DNA, 25 bp, Homo sapien
attttggaaccgtcataaacttgat

SEQ ID NO: 6005010 - DNA, 25 bp, Homo sapien
gcatgaatgataccgaccctgattt

SEQ ID NO: 6005011 - DNA, 25 bp, Homo sapien
tcaatagcacctttcacaagagcgt

SEQ ID NO: 6005012 - DNA, 25 bp, Homo sapien
ttaagaggccaaaaatgacgggcat

SEQ ID NO: 6005013 - DNA, 25 bp, Homo sapien
agccatttccactgctgcagcaccc

SEQ ID NO: 6005014 - DNA, 25 bp, Homo sapien
atgataccgaccctgattttggaac

SEQ ID NO: 6005015 - DNA, 25 bp, Homo sapien
tagcacctttcacaagagcgtcaat

SEQ ID NO: 6005016 - DNA, 25 bp, Homo sapien
ggagtgcgcttcatcgatgccagct

SEQ ID NO: 6005017 - DNA, 25 bp, Homo sapien
ttcaccatggttgtgcatggagtgc

SEQ ID NO: 6005018 - DNA, 25 bp, Homo sapien
aggaattacaacatctagcggcttt

SEQ ID NO: 6005019 - DNA, 25 bp, Homo sapien
tcccaacttcgcttgtctgtcaaca

SEQ ID NO: 6005020 - DNA, 25 bp, Homo sapien
gaagccattctttcaatagcacctt

SEQ ID NO: 6005021 - DNA, 25 bp, Homo sapien
catgtcgactttttcttgtaagttc

SEQ ID NO: 6005022 - DNA, 25 bp, Homo sapien
ccattctttcaatagcacctttcac

SEQ ID NO: 6005023 - DNA, 25 bp, Homo sapien
gtcatgcaagttaagaggccaaaaa

SEQ ID NO: 6005024 - DNA, 25 bp, Homo sapien
cggctttcccaacttcgcttgtctg

SEQ ID NO: 6005025 - DNA, 25 bp, Homo sapien
tgagtggtggaatctgaaatgtatt

SEQ ID NO: 6005026 - DNA, 25 bp, Homo sapien
agcatttttaccgaacttaacagcc

SEQ ID NO: 6005027 - DNA, 25 bp, Homo sapien
gccagctctggccagggcttgttct

SEQ ID NO: 6005028 - DNA, 25 bp, Homo sapien
accgtcataaacttgatctggtttg

SEQ ID NO: 6005029 - DNA, 25 bp, Homo sapien
agcggctttcccaacttcgcttgtc

SEQ ID NO: 6005030 - DNA, 25 bp, Homo sapien
ttatgttattttcctcgacaccaag

SEQ ID NO: 6005031 - DNA, 25 bp, Homo sapien
cttcatcgatgccagctctggccag

SEQ ID NO: 6005032 - DNA, 25 bp, Homo sapien
ggaacagtttcaattattatgttat

SEQ ID NO: 6005033 - DNA, 25 bp, Homo sapien
ccaaggtaattcataggatccagga

SEQ ID NO: 6005034 - DNA, 25 bp, Homo sapien
cgggcatgtcgactttttcttgtaa

SEQ ID NO: 6005035 - DNA, 25 bp, Homo sapien
tggccagggcttgttcttcagtcat

SEQ ID NO: 6005036 - DNA, 25 bp, Homo sapien
tttggaaccgtcataaacttgatct

SEQ ID NO: 6005037 - DNA, 25 bp, Homo sapien
tttgataagtacaccaataggaatt

SEQ ID NO: 6005038 - DNA, 25 bp, Homo sapien
cgtcaataatgacacggttccaacg

SEQ ID NO: 6005039 - DNA, 25 bp, Homo sapien
tggaaccgtcataaacttgatctgg

SEQ ID NO: 6005040 - DNA, 25 bp, Homo sapien
caccccaatcttcaccatggttgtg

SEQ ID NO: 6005041 - DNA, 25 bp, Homo sapien
gataccgaccctgattttggaaccg

SEQ ID NO: 6005042 - DNA, 25 bp, Homo sapien
tctgaaatgtattcaaagtgcattg

SEQ ID NO: 6005043 - DNA, 25 bp, Homo sapien
atggagtgcgcttcatcgatgccag

SEQ ID NO: 6005044 - DNA, 25 bp, Homo sapien
cctcgacaccaagggaagccattct

SEQ ID NO: 6005045 - DNA, 25 bp, Homo sapien
atttccactgctgcagcaccccaat

SEQ ID NO: 6005046 - DNA, 25 bp, Homo sapien
atgccagctctggccagggcttgtt

SEQ ID NO: 6005047 - DNA, 25 bp, Homo sapien
tcaatgcgtgagtggtggaatctga

SEQ ID NO: 6005048 - DNA, 25 bp, Homo sapien
ttcctcgacaccaagggaagccatt

SEQ ID NO: 6005049 - DNA, 25 bp, Homo sapien
ctttcacaagagcgtcaataatgac

SEQ ID NO: 6005050 - DNA, 25 bp, Homo sapien
agttcatcaatgcgtgagtggtgga

SEQ ID NO: 6005051 - DNA, 25 bp, Homo sapien
cgtcataaacttgatctggtttgcc

SEQ ID NO: 6005052 - DNA, 25 bp, Homo sapien
ccaacttcgcttgtctgtcaacaaa

SEQ ID NO: 6005053 - DNA, 25 bp, Homo sapien
ttttcttgtaagttcatcaatgcgt

SEQ ID NO: 6005054 - DNA, 25 bp, Homo sapien
tttgtcccccaaggtaattcatagg

SEQ ID NO: 6005055 - DNA, 25 bp, Homo sapien
gggcatgaatgataccgaccctgat

SEQ ID NO: 6005056 - DNA, 25 bp, Homo sapien
caccaagggaagccattctttcaat

SEQ ID NO: 6005057 - DNA, 25 bp, Homo sapien
catcaatgcgtgagtggtggaatct

SEQ ID NO: 6005058 - DNA, 25 bp, Homo sapien
tcaaagtgcattgtactacctttga

SEQ ID NO: 6005059 - DNA, 25 bp, Homo sapien
ccaaaaatgacgggcatgtcgactt

SEQ ID NO: 6005060 - DNA, 25 bp, Homo sapien
ccccaatcttcaccatggttgtgca

SEQ ID NO: 6005061 - DNA, 25 bp, Homo sapien
ataggaattacaacatctagcggct

SEQ ID NO: 6005062 - DNA, 25 bp, Homo sapien
aagaggccaaaaatgacgggcatgt

SEQ ID NO: 6005063 - DNA, 25 bp, Homo sapien
cctttgataagtacaccaataggaa

SEQ ID NO: 6005064 - DNA, 25 bp, Homo sapien
atggttgtgcatggagtgcgcttca

SEQ ID NO: 6005065 - DNA, 25 bp, Homo sapien
atgtattcaaagtgcattgtactac

SEQ ID NO: 6005066 - DNA, 25 bp, Homo sapien
aatgcgtgagtggtggaatctgaaa

SEQ ID NO: 6005067 - DNA, 25 bp, Homo sapien
aacttaacagccatttccactgctg

SEQ ID NO: 6005068 - DNA, 25 bp, Homo sapien
atgacacggttccaacgggcatgaa

SEQ ID NO: 6005069 - DNA, 25 bp, Homo sapien
aaatgacgggcatgtcgactttttc

SEQ ID NO: 6005070 - DNA, 25 bp, Homo sapien
cgcttcatcgatgccagctctggcc

SEQ ID NO: 6005071 - DNA, 25 bp, Homo sapien
ttgtgcatggagtgcgcttcatcga

SEQ ID NO: 6005072 - DNA, 25 bp, Homo sapien
ttaccgaacttaacagccatttcca

SEQ ID NO: 6005073 - DNA, 25 bp, Homo sapien
aaggtaattcataggatccaggaac

SEQ ID NO: 6005074 - DNA, 25 bp, Homo sapien
tctttcaatagcacctttcacaaga

SEQ ID NO: 6005075 - DNA, 25 bp, Homo sapien
tttttgtcccccaaggtaattcata

SEQ ID NO: 6005076 - DNA, 25 bp, Homo sapien
accgaccctgattttggaaccgtca

SEQ ID NO: 6005077 - DNA, 25 bp, Homo sapien
gggcttgttcttcagtcatgcaagt

SEQ ID NO: 6005078 - DNA, 25 bp, Homo sapien
tttcaatagcacctttcacaagagc

SEQ ID NO: 6005079 - DNA, 25 bp, Homo sapien
gtactacctttgataagtacaccaa

SEQ ID NO: 6005080 - DNA, 25 bp, Homo sapien
tgcaagttaagaggccaaaaatgac

SEQ ID NO: 6005081 - DNA, 25 bp, Homo sapien
acaccaataggaattacaacatcta

SEQ ID NO: 6005082 - DNA, 25 bp, Homo sapien
ttcttgtaagttcatcaatgcgtga

SEQ ID NO: 6005083 - DNA, 25 bp, Homo sapien
acatctagcggctttcccaacttcg

SEQ ID NO: 6005084 - DNA, 25 bp, Homo sapien
gtattcaaagtgcattgtactacct

SEQ ID NO: 6005085 - DNA, 25 bp, Homo sapien
ttttaccgaacttaacagccatttc

SEQ ID NO: 6005086 - DNA, 25 bp, Homo sapien
attctttcaatagcacctttcacaa

SEQ ID NO: 6005087 - DNA, 25 bp, Homo sapien
caggaacagtttcaattattatgtt

SEQ ID NO: 6005088 - DNA, 25 bp, Homo sapien
cacggttccaacgggcatgaatgat

SEQ ID NO: 6005089 - DNA, 25 bp, Homo sapien
gtttgcctaatcctttaactgccat

SEQ ID NO: 6005090 - DNA, 25 bp, Homo sapien
gactttttcttgtaagttcatcaat

SEQ ID NO: 6005091 - DNA, 25 bp, Homo sapien
ttcatcaatgcgtgagtggtggaat

SEQ ID NO: 6005092 - DNA, 25 bp, Homo sapien
ggcatgtcgactttttcttgtaagt

SEQ ID NO: 6005093 - DNA, 25 bp, Homo sapien
attattatgttattttcctcgacac

SEQ ID NO: 6005094 - DNA, 25 bp, Homo sapien
tgattttggaaccgtcataaacttg

SEQ ID NO: 6005095 - DNA, 25 bp, Homo sapien
ggaatctgaaatgtattcaaagtgc

SEQ ID NO: 6005096 - DNA, 25 bp, Homo sapien
actgctgcagcaccccaatcttcac

SEQ ID NO: 6005097 - DNA, 25 bp, Homo sapien
tgcgcttcatcgatgccagctctgg

SEQ ID NO: 6005098 - DNA, 25 bp, Homo sapien
gccagggcttgttcttcagtcatgc

SEQ ID NO: 6005099 - DNA, 25 bp, Homo sapien
tcatcgatgccagctctggccaggg

SEQ ID NO: 6005100 - DNA, 25 bp, Homo sapien
tgataagtacaccaataggaattac

SEQ ID NO: 6005101 - DNA, 25 bp, Homo sapien
atgttattttcctcgacaccaaggg

SEQ ID NO: 6005102 - DNA, 25 bp, Homo sapien
aatcttcaccatggttgtgcatgga

SEQ ID NO: 6005103 - DNA, 25 bp, Homo sapien
ctgcagcaccccaatcttcaccatg

SEQ ID NO: 6005104 - DNA, 25 bp, Homo sapien
aacttcgcttgtctgtcaacaaacc

SEQ ID NO: 6005105 - DNA, 25 bp, Homo sapien
gaggccaaaaatgacgggcatgtcg

SEQ ID NO: 6005106 - DNA, 25 bp, Homo sapien
gttattttcctcgacaccaagggaa

SEQ ID NO: 6005107 - DNA, 25 bp, Homo sapien
atcgatgccagctctggccagggct

SEQ ID NO: 6005108 - DNA, 25 bp, Homo sapien
gatccaggaacagtttcaattatta

SEQ ID NO: 6005109 - DNA, 25 bp, Homo sapien
gtctgtcaacaaacctttttgtccc

SEQ ID NO: 6005110 - DNA, 25 bp, Homo sapien
ctttttcttgtaagttcatcaatgc

SEQ ID NO: 6005111 - DNA, 25 bp, Homo sapien
tgcattgtactacctttgataagta

SEQ ID NO: 6005112 - DNA, 25 bp, Homo sapien
tattatgttattttcctcgacacca

SEQ ID NO: 6005113 - DNA, 25 bp, Homo sapien
agccattctttcaatagcacctttc

SEQ ID NO: 6005114 - DNA, 25 bp, Homo sapien
atgacgggcatgtcgactttttctt

SEQ ID NO: 6005115 - DNA, 25 bp, Homo sapien
ccccaaggtaattcataggatccag

SEQ ID NO: 6005116 - DNA, 25 bp, Homo sapien
caataggaattacaacatctagcgg

SEQ ID NO: 6005117 - DNA, 25 bp, Homo sapien
agcgtcaataatgacacggttccaa

SEQ ID NO: 6005118 - DNA, 25 bp, Homo sapien
gctttcccaacttcgcttgtctgtc

SEQ ID NO: 6005119 - DNA, 25 bp, Homo sapien
ttcacaagagcgtcaataatgacac

SEQ ID NO: 6005120 - DNA, 25 bp, Homo sapien
caccatggttgtgcatggagtgcgc

SEQ ID NO: 6005121 - DNA, 25 bp, Homo sapien
aataatgacacggttccaacgggca

SEQ ID NO: 6005122 - DNA, 25 bp, Homo sapien
gcatggagtgcgcttcatcgatgcc

SEQ ID NO: 6005123 - DNA, 25 bp, Homo sapien
gtgcatggagtgcgcttcatcgatg

SEQ ID NO: 6005124 - DNA, 25 bp, Homo sapien
agtggtggaatctgaaatgtattca

SEQ ID NO: 6005125 - DNA, 25 bp, Homo sapien
cgaccctgattttggaaccgtcata

SEQ ID NO: 6005126 - DNA, 25 bp, Homo sapien
tccaggaacagtttcaattattatg

SEQ ID NO: 6005127 - DNA, 25 bp, Homo sapien
tcgacaccaagggaagccattcttt

SEQ ID NO: 6005128 - DNA, 25 bp, Homo sapien
acttgatctggtttgcctaatcctt

SEQ ID NO: 6005129 - DNA, 25 bp, Homo sapien
agagcgtcaataatgacacggttcc

SEQ ID NO: 6005130 - DNA, 25 bp, Homo sapien
cattgtactacctttgataagtaca

SEQ ID NO: 6005131 - DNA, 25 bp, Homo sapien
aaatgtattcaaagtgcattgtact

SEQ ID NO: 6005132 - DNA, 25 bp, Homo sapien
tgtaagttcatcaatgcgtgagtgg

SEQ ID NO: 6005133 - DNA, 25 bp, Homo sapien
attcaaagtgcattgtactaccttt

SEQ ID NO: 6005134 - DNA, 25 bp, Homo sapien
caagttaagaggccaaaaatgacgg

SEQ ID NO: 6005135 - DNA, 25 bp, Homo sapien
tgaaatgtattcaaagtgcattgta

SEQ ID NO: 6005136 - DNA, 25 bp, Homo sapien
ccaatcttcaccatggttgtgcatg

SEQ ID NO: 6005137 - DNA, 25 bp, Homo sapien
aaacttgatctggtttgcctaatcc

SEQ ID NO: 6005138 - DNA, 25 bp, Homo sapien
attcataggatccaggaacagtttc

SEQ ID NO: 6005139 - DNA, 25 bp, Homo sapien
gcagcaccccaatcttcaccatggt

SEQ ID NO: 6005140 - DNA, 25 bp, Homo sapien
ccaagggaagccattctttcaatag

SEQ ID NO: 6005141 - DNA, 25 bp, Homo sapien
ttcagtcatgcaagttaagaggcca

SEQ ID NO: 6005142 - DNA, 25 bp, Homo sapien
accgaacttaacagccatttccact

SEQ ID NO: 6005143 - DNA, 25 bp, Homo sapien
tcgcttgtctgtcaacaaacctttt

SEQ ID NO: 6005144 - DNA, 25 bp, Homo sapien
agcaccccaatcttcaccatggttg

SEQ ID NO: 6005145 - DNA, 25 bp, Homo sapien
ataagtacaccaataggaattacaa

SEQ ID NO: 6005146 - DNA, 25 bp, Homo sapien
ggttgtgcatggagtgcgcttcatc

SEQ ID NO: 6005147 - DNA, 25 bp, Homo sapien
caacatctagcggctttcccaactt

SEQ ID NO: 6005148 - DNA, 25 bp, Homo sapien
gttccaacgggcatgaatgataccg

SEQ ID NO: 6005149 - DNA, 25 bp, Homo sapien
actacctttgataagtacaccaata

SEQ ID NO: 6005150 - DNA, 25 bp, Homo sapien
cagggcttgttcttcagtcatgcaa

SEQ ID NO: 6005151 - DNA, 25 bp, Homo sapien
ttttcctcgacaccaagggaagcca

SEQ ID NO: 6005152 - DNA, 25 bp, Homo sapien
ttgttcttcagtcatgcaagttaag

SEQ ID NO: 6005153 - DNA, 25 bp, Homo sapien
cttaacagccatttccactgctgca

SEQ ID NO: 6005154 - DNA, 25 bp, Homo sapien
ggccaaaaatgacgggcatgtcgac

SEQ ID NO: 6005155 - DNA, 25 bp, Homo sapien
ttgtctgtcaacaaacctttttgtc

SEQ ID NO: 6005156 - DNA, 25 bp, Homo sapien
gggaagccattctttcaatagcacc

SEQ ID NO: 6005157 - DNA, 25 bp, Homo sapien
taacagccatttccactgctgcagc

SEQ ID NO: 6005158 - DNA, 25 bp, Homo sapien
gaaccgtcataaacttgatctggtt

SEQ ID NO: 6005159 - DNA, 25 bp, Homo sapien
gcacctttcacaagagcgtcaataa

SEQ ID NO: 6005160 - DNA, 25 bp, Homo sapien
ccactgctgcagcaccccaatcttc

SEQ ID NO: 6005161 - DNA, 25 bp, Homo sapien
acctttcacaagagcgtcaataatg

SEQ ID NO: 6005162 - DNA, 25 bp, Homo sapien
ctagcggctttcccaacttcgcttg

SEQ ID NO: 6005163 - DNA, 25 bp, Homo sapien
tcataggatccaggaacagtttcaa

SEQ ID NO: 6005164 - DNA, 25 bp, Homo sapien
tgcgtgagtggtggaatctgaaatg

SEQ ID NO: 6005165 - DNA, 25 bp, Homo sapien
catttttaccgaacttaacagccat

SEQ ID NO: 6005166 - DNA, 25 bp, Homo sapien
agttaagaggccaaaaatgacgggc

SEQ ID NO: 6005167 - DNA, 25 bp, Homo sapien
ttccactgctgcagcaccccaatct

SEQ ID NO: 6005168 - DNA, 25 bp, Homo sapien
tacaacatctagcggctttcccaac

SEQ ID NO: 6005169 - DNA, 25 bp, Homo sapien
gacaccaagggaagccattctttca

SEQ ID NO: 6005170 - DNA, 25 bp, Homo sapien
gaattacaacatctagcggctttcc

SEQ ID NO: 6005171 - DNA, 25 bp, Homo sapien
agtgcattgtactacctttgataag

SEQ ID NO: 6005172 - DNA, 25 bp, Homo sapien
tcttcagtcatgcaagttaagaggc

SEQ ID NO: 6005173 - DNA, 25 bp, Homo sapien
tctggccagggcttgttcttcagtc

SEQ ID NO: 6005174 - DNA, 25 bp, Homo sapien
acagccatttccactgctgcagcac

SEQ ID NO: 6005175 - DNA, 25 bp, Homo sapien
aagtacaccaataggaattacaaca

SEQ ID NO: 6005176 - DNA, 25 bp, Homo sapien
cacaagagcgtcaataatgacacgg

SEQ ID NO: 6005177 - DNA, 25 bp, Homo sapien
tacctttgataagtacaccaatagg

SEQ ID NO: 6005178 - DNA, 25 bp, Homo sapien
tgctgcagcaccccaatcttcacca

SEQ ID NO: 6005179 - DNA, 25 bp, Homo sapien
cagtcatgcaagttaagaggccaaa

SEQ ID NO: 6005180 - DNA, 25 bp, Homo sapien
gacgggcatgtcgactttttcttgt

SEQ ID NO: 6005181 - DNA, 25 bp, Homo sapien
acgggcatgaatgataccgaccctg

SEQ ID NO: 6005182 - DNA, 25 bp, Homo sapien
cgaacttaacagccatttccactgc

SEQ ID NO: 6005183 - DNA, 25 bp, Homo sapien
caacgggcatgaatgataccgaccc

SEQ ID NO: 6005184 - DNA, 25 bp, Homo sapien
cgatgccagctctggccagggcttg

SEQ ID NO: 6005185 - DNA, 25 bp, Homo sapien
tattttcctcgacaccaagggaagc

SEQ ID NO: 6005186 - DNA, 25 bp, Homo sapien
gaatgataccgaccctgattttgga

SEQ ID NO: 6005187 - DNA, 25 bp, Homo sapien
gtggaatctgaaatgtattcaaagt

SEQ ID NO: 6005188 - DNA, 25 bp, Homo sapien
tcgactttttcttgtaagttcatca

SEQ ID NO: 6005189 - DNA, 25 bp, Homo sapien
gttcttcagtcatgcaagttaagag

SEQ ID NO: 6005190 - DNA, 25 bp, Homo sapien
taagttcatcaatgcgtgagtggtg

SEQ ID NO: 6005191 - DNA, 25 bp, Homo sapien
accaataggaattacaacatctagc

SEQ ID NO: 6005192 - DNA, 25 bp, Homo sapien
taatgacacggttccaacgggcatg

SEQ ID NO: 6005193 - DNA, 25 bp, Homo sapien
gcttgttcttcagtcatgcaagtta

SEQ ID NO: 6005194 - DNA, 25 bp, Homo sapien
gacacggttccaacgggcatgaatg

SEQ ID NO: 6005195 - DNA, 25 bp, Homo sapien
tctggtttgcctaatcctttaactg

SEQ ID NO: 6005196 - DNA, 25 bp, Homo sapien
aatctgaaatgtattcaaagtgcat

SEQ ID NO: 6005197 - DNA, 25 bp, Homo sapien
ccatggttgtgcatggagtgcgctt

SEQ ID NO: 6005198 - DNA, 25 bp, Homo sapien
gcttgtctgtcaacaaacctttttg

SEQ ID NO: 6005199 - DNA, 25 bp, Homo sapien
agtgcgcttcatcgatgccagctct

SEQ ID NO: 6005200 - DNA, 25 bp, Homo sapien
ggtaattcataggatccaggaacag

SEQ ID NO: 6005201 - DNA, 25 bp, Homo sapien
catgcaagttaagaggccaaaaatg

SEQ ID NO: 6005202 - DNA, 25 bp, Homo sapien
cagctctggccagggcttgttcttc

SEQ ID NO: 6005203 - DNA, 25 bp, Homo sapien
cgtgagtggtggaatctgaaatgta

SEQ ID NO: 6005204 - DNA, 25 bp, Homo sapien
cttcgcttgtctgtcaacaaacctt

SEQ ID NO: 6005205 - DNA, 25 bp, Homo sapien
tgtcccccaaggtaattcataggat

SEQ ID NO: 6005206 - DNA, 25 bp, Homo sapien
ataggatccaggaacagtttcaatt

SEQ ID NO: 6005207 - DNA, 25 bp, Homo sapien
aatagcacctttcacaagagcgtca

SEQ ID NO: 6005208 - DNA, 25 bp, Homo sapien
tcttcaccatggttgtgcatggagt

SEQ ID NO: 6005209 - DNA, 25 bp, Homo sapien
gctctggccagggcttgttcttcag

SEQ ID NO: 6005210 - DNA, 25 bp, Homo sapien
cggttccaacgggcatgaatgatac

SEQ ID NO: 6005211 - DNA, 25 bp, Homo sapien
aaagtgcattgtactacctttgata

SEQ ID NO: 6005212 - DNA, 25 bp, Homo sapien
ttgatctggtttgcctaatccttta

SEQ ID NO: 6005213 - DNA, 25 bp, Homo sapien
ataaacttgatctggtttgcctaat

SEQ ID NO: 6005214 - DNA, 25 bp, Homo sapien
aagggaagccattctttcaatagca

SEQ ID NO: 6005215 - DNA, 25 bp, Homo sapien
atgaatgataccgaccctgattttg

SEQ ID NO: 6005216 - DNA, 25 bp, Homo sapien
ttgtactacctttgataagtacacc

SEQ ID NO: 6005217 - DNA, 25 bp, Homo sapien
accctgattttggaaccgtcataaa

SEQ ID NO: 6005218 - DNA, 25 bp, Homo sapien
tggtttgcctaatcctttaactgcc

SEQ ID NO: 6005219 - DNA, 25 bp, Homo sapien
tcaaaaagcatttttaccgaactta

SEQ ID NO: 6005220 - DNA, 25 bp, Homo sapien
attacaacatctagcggctttccca

SEQ ID NO: 6005221 - DNA, 25 bp, Homo sapien
tccaacgggcatgaatgataccgac

SEQ ID NO: 6005222 - DNA, 25 bp, Homo sapien
aggatccaggaacagtttcaattat

SEQ ID NO: 6005223 - DNA, 25 bp, Homo sapien
taattcataggatccaggaacagtt

SEQ ID NO: 6005224 - DNA, 25 bp, Homo sapien
tgtcgactttttcttgtaagttcat

SEQ ID NO: 6005225 - DNA, 25 bp, Homo sapien
gatctggtttgcctaatcctttaac

SEQ ID NO: 6005226 - DNA, 25 bp, Homo sapien
tcccccaaggtaattcataggatcc

SEQ ID NO: 6005227 - DNA, 25 bp, Homo sapien
caagagcgtcaataatgacacggtt

SEQ ID NO: 6005228 - DNA, 25 bp, Homo sapien
tttcccaacttcgcttgtctgtcaa

SEQ ID NO: 6005229 - DNA, 25 bp, Homo sapien
tggtggaatctgaaatgtattcaaa

SEQ ID NO: 6005230 - DNA, 25 bp, Homo sapien
cctgattttggaaccgtcataaact

SEQ ID NO: 6005231 - DNA, 25 bp, Homo sapien
atctagcggctttcccaacttcgct

SEQ ID NO: 6005232 - DNA, 25 bp, Homo sapien
aaaaatgacgggcatgtcgactttt

SEQ ID NO: 6005233 - DNA, 25 bp, Homo sapien
cttgtaagttcatcaatgcgtgagt

SEQ ID NO: 6005234 - DNA, 25 bp, Homo sapien
caattattatgttattttcctcgac

SEQ ID NO: 6005235 - DNA, 25 bp, Homo sapien
tcaataatgacacggttccaacggg

SEQ ID NO: 6005236 - DNA, 25 bp, Homo sapien
tcataaacttgatctggtttgccta

SEQ ID NO: 6005237 - DNA, 25 bp, Homo sapien
gtacaccaataggaattacaacatc

SEQ ID NO: 6005238 - DNA, 25 bp, Homo sapien
attggtattggcgtgtggaacctga

SEQ ID NO: 6005239 - DNA, 25 bp, Homo sapien
ccgctctgaaatccatcacttcggt

SEQ ID NO: 6005240 - DNA, 25 bp, Homo sapien
tttggtctaattttgaaattgctgc

SEQ ID NO: 6005241 - DNA, 25 bp, Homo sapien
cacatgtgtcgttttgaatcaggct

SEQ ID NO: 6005242 - DNA, 25 bp, Homo sapien
ccatttcactcctgtccaatagaca

SEQ ID NO: 6005243 - DNA, 25 bp, Homo sapien
cagctttagttagtggtacaacaaa

SEQ ID NO: 6005244 - DNA, 25 bp, Homo sapien
tcggtgatattggttattaccatgt

SEQ ID NO: 6005245 - DNA, 25 bp, Homo sapien
agatctccagcatactccgcatatt

SEQ ID NO: 6005246 - DNA, 25 bp, Homo sapien
tgctgcgctgttcttggaccgctct

SEQ ID NO: 6005247 - DNA, 25 bp, Homo sapien
ttttgaatgatgaagagttcactga

SEQ ID NO: 6005248 - DNA, 25 bp, Homo sapien
tgaaagatggggtgatgctccagtt

SEQ ID NO: 6005249 - DNA, 25 bp, Homo sapien
actgtgatatcgactacgatgtctt

SEQ ID NO: 6005250 - DNA, 25 bp, Homo sapien
catactccgcatattttgattattt

SEQ ID NO: 6005251 - DNA, 25 bp, Homo sapien
aataatatgttagactttgttagcg

SEQ ID NO: 6005252 - DNA, 25 bp, Homo sapien
taatatgttagactttgttagcgac

SEQ ID NO: 6005253 - DNA, 25 bp, Homo sapien
aagcaaagatttcacatggcacagt

SEQ ID NO: 6005254 - DNA, 25 bp, Homo sapien
acaaaatacggtgtcatcccaaagg

SEQ ID NO: 6005255 - DNA, 25 bp, Homo sapien
tggctgagtctattaaatccgtgga

SEQ ID NO: 6005256 - DNA, 25 bp, Homo sapien
gactactcgtaaattcatggaagcc

SEQ ID NO: 6005257 - DNA, 25 bp, Homo sapien
tacggtgtcatcccaaaggaacatt

SEQ ID NO: 6005258 - DNA, 25 bp, Homo sapien
cggtgattctatctcttacagacac

SEQ ID NO: 6005259 - DNA, 25 bp, Homo sapien
ataaacaagttgccaaagcctgctg

SEQ ID NO: 6005260 - DNA, 25 bp, Homo sapien
cagggactttcatacaatttgtgcc

SEQ ID NO: 6005261 - DNA, 25 bp, Homo sapien
gtggattgatgaagaaaaggccgct

SEQ ID NO: 6005262 - DNA, 25 bp, Homo sapien
ccaagcaaagatttcacatggcaca

SEQ ID NO: 6005263 - DNA, 25 bp, Homo sapien
ccgctcaagtcaggaaggagatggg

SEQ ID NO: 6005264 - DNA, 25 bp, Homo sapien
gaagctactatccccactttatggg

SEQ ID NO: 6005265 - DNA, 25 bp, Homo sapien
tttgaatcaggcttcttttacagac

SEQ ID NO: 6005266 - DNA, 25 bp, Homo sapien
gagaatcatctacggtgattctatc

SEQ ID NO: 6005267 - DNA, 25 bp, Homo sapien
cgggaaaaggccacttttgtcactc

SEQ ID NO: 6005268 - DNA, 25 bp, Homo sapien
ctggttggcaaaaccatatcggttg

SEQ ID NO: 6005269 - DNA, 25 bp, Homo sapien
ggtgatgctccagttcattctattg

SEQ ID NO: 6005270 - DNA, 25 bp, Homo sapien
gtatgaagctactatccccacttta

SEQ ID NO: 6005271 - DNA, 25 bp, Homo sapien
ttgaatgatgaagagttcactgatg

SEQ ID NO: 6005272 - DNA, 25 bp, Homo sapien
tccatgaaaataatatgttagactt

SEQ ID NO: 6005273 - DNA, 25 bp, Homo sapien
tgaatcaggcttcttttacagacat

SEQ ID NO: 6005274 - DNA, 25 bp, Homo sapien
atttcacatggcacagttattcatg

SEQ ID NO: 6005275 - DNA, 25 bp, Homo sapien
attggtccttccctgagtggattga

SEQ ID NO: 6005276 - DNA, 25 bp, Homo sapien
ggtgatattggttattaccatgttc

SEQ ID NO: 6005277 - DNA, 25 bp, Homo sapien
aataagaaaaagtatgcctttgcca

SEQ ID NO: 6005278 - DNA, 25 bp, Homo sapien
gttttgaatcaggcttcttttacag

SEQ ID NO: 6005279 - DNA, 25 bp, Homo sapien
catgaaaataatatgttagactttg

SEQ ID NO: 6005280 - DNA, 25 bp, Homo sapien
attcgttggctgagtctattaaatc

SEQ ID NO: 6005281 - DNA, 25 bp, Homo sapien
gcgtgtggaacctgatatcaagttg

SEQ ID NO: 6005282 - DNA, 25 bp, Homo sapien
ttaactccaagttcaactatgattg

SEQ ID NO: 6005283 - DNA, 25 bp, Homo sapien
gctgagtctattaaatccgtggaag

SEQ ID NO: 6005284 - DNA, 25 bp, Homo sapien
acaataagaaaaagtatgcctttgc

SEQ ID NO: 6005285 - DNA, 25 bp, Homo sapien
aagttgccaaagcctgctggttggc

SEQ ID NO: 6005286 - DNA, 25 bp, Homo sapien
gtactactaaattctacaatataaa

SEQ ID NO: 6005287 - DNA, 25 bp, Homo sapien
ttctttcatggagctcagtatgcga

SEQ ID NO: 6005288 - DNA, 25 bp, Homo sapien
tttttggtctaattttgaaattgct

SEQ ID NO: 6005289 - DNA, 25 bp, Homo sapien
atgctccagttcattctattggtgc

SEQ ID NO: 6005290 - DNA, 25 bp, Homo sapien
tgaagagttcactgatgaattcaaa

SEQ ID NO: 6005291 - DNA, 25 bp, Homo sapien
agagatctatattcgttggctgagt

SEQ ID NO: 6005292 - DNA, 25 bp, Homo sapien
cagcctgtttacaaaaaattaggac

SEQ ID NO: 6005293 - DNA, 25 bp, Homo sapien
aaggccacttttgtcactctagtgc

SEQ ID NO: 6005294 - DNA, 25 bp, Homo sapien
cagacatcctttgatggatgactac

SEQ ID NO: 6005295 - DNA, 25 bp, Homo sapien
aaagcctgctggttggcaaaaccat

SEQ ID NO: 6005296 - DNA, 25 bp, Homo sapien
ttcttttacagacatcctttgatgg

SEQ ID NO: 6005297 - DNA, 25 bp, Homo sapien
tgtatgtgttctttcatggagctca

SEQ ID NO: 6005298 - DNA, 25 bp, Homo sapien
cactcctgtccaatagacacaagta

SEQ ID NO: 6005299 - DNA, 25 bp, Homo sapien
atcaagttgcactgtgatatcgact

SEQ ID NO: 6005300 - DNA, 25 bp, Homo sapien
attggcgtgtggaacctgatatcaa

SEQ ID NO: 6005301 - DNA, 25 bp, Homo sapien
ctcttacagacacatgtgtcgtttt

SEQ ID NO: 6005302 - DNA, 25 bp, Homo sapien
caagttgcactgtgatatcgactac

SEQ ID NO: 6005303 - DNA, 25 bp, Homo sapien
gggtgtttttgaatgatgaagagtt

SEQ ID NO: 6005304 - DNA, 25 bp, Homo sapien
agcttatccatgaaaataatatgtt

SEQ ID NO: 6005305 - DNA, 25 bp, Homo sapien
gctgctttggatttgtggagatctc

SEQ ID NO: 6005306 - DNA, 25 bp, Homo sapien
gacacatgtgtcgttttgaatcagg

SEQ ID NO: 6005307 - DNA, 25 bp, Homo sapien
catctacggtgattctatctcttac

SEQ ID NO: 6005308 - DNA, 25 bp, Homo sapien
caaaaaattaggacttcttctggtc

SEQ ID NO: 6005309 - DNA, 25 bp, Homo sapien
atccaagcaaagatttcacatggca

SEQ ID NO: 6005310 - DNA, 25 bp, Homo sapien
atcacttcggtgatattggttatta

SEQ ID NO: 6005311 - DNA, 25 bp, Homo sapien
tatccccactttatgggagactact

SEQ ID NO: 6005312 - DNA, 25 bp, Homo sapien
ctccagcatactccgcatattttga

SEQ ID NO: 6005313 - DNA, 25 bp, Homo sapien
tgatgaagaaaaggccgctcaagtc

SEQ ID NO: 6005314 - DNA, 25 bp, Homo sapien
tatttagatcgtgaaggtggattct

SEQ ID NO: 6005315 - DNA, 25 bp, Homo sapien
gaacattggtccttccctgagtgga

SEQ ID NO: 6005316 - DNA, 25 bp, Homo sapien
accatgttccatttcactcctgtcc

SEQ ID NO: 6005317 - DNA, 25 bp, Homo sapien
catttttggtctaattttgaaattg

SEQ ID NO: 6005318 - DNA, 25 bp, Homo sapien
agacaataagaaaaagtatgccttt

SEQ ID NO: 6005319 - DNA, 25 bp, Homo sapien
acagttattcatgtactactaaatt

SEQ ID NO: 6005320 - DNA, 25 bp, Homo sapien
acacaagtatcagactggctaacaa

SEQ ID NO: 6005321 - DNA, 25 bp, Homo sapien
ttcttggaccgctctgaaatccatc

SEQ ID NO: 6005322 - DNA, 25 bp, Homo sapien
tctacaatataaacaagttgccaaa

SEQ ID NO: 6005323 - DNA, 25 bp, Homo sapien
ataaatactcgaaagtggaactacc

SEQ ID NO: 6005324 - DNA, 25 bp, Homo sapien
actcgaaagtggaactaccaaagta

SEQ ID NO: 6005325 - DNA, 25 bp, Homo sapien
gaccgctctgaaatccatcacttcg

SEQ ID NO: 6005326 - DNA, 25 bp, Homo sapien
tgccccaagcccaaagtacagtacc

SEQ ID NO: 6005327 - DNA, 25 bp, Homo sapien
tcgaaagtggaactaccaaagtata

SEQ ID NO: 6005328 - DNA, 25 bp, Homo sapien
aacaaatgtgactgtgatccaagca

SEQ ID NO: 6005329 - DNA, 25 bp, Homo sapien
tccccactttatgggagactactcg

SEQ ID NO: 6005330 - DNA, 25 bp, Homo sapien
taaggagtatgaagctactatcccc

SEQ ID NO: 6005331 - DNA, 25 bp, Homo sapien
aagattatgatcccagctagcaagc

SEQ ID NO: 6005332 - DNA, 25 bp, Homo sapien
ttgtgccatttttggtctaattttg

SEQ ID NO: 6005333 - DNA, 25 bp, Homo sapien
gctctgccccaagcccaaagtacag

SEQ ID NO: 6005334 - DNA, 25 bp, Homo sapien
gcatattttgattatttagatcgtg

SEQ ID NO: 6005335 - DNA, 25 bp, Homo sapien
ccatcacttcggtgatattggttat

SEQ ID NO: 6005336 - DNA, 25 bp, Homo sapien
gacatcctttgatggatgactacga

SEQ ID NO: 6005337 - DNA, 25 bp, Homo sapien
tacaatataaacaagttgccaaagc

SEQ ID NO: 6005338 - DNA, 25 bp, Homo sapien
ctatgattgggtgtttttgaatgat

SEQ ID NO: 6005339 - DNA, 25 bp, Homo sapien
tataccggtcctcgggaaaaggcca

SEQ ID NO: 6005340 - DNA, 25 bp, Homo sapien
ttccatttcactcctgtccaataga

SEQ ID NO: 6005341 - DNA, 25 bp, Homo sapien
atggggtgatgctccagttcattct

SEQ ID NO: 6005342 - DNA, 25 bp, Homo sapien
atggcgaagattatgatcccagcta

SEQ ID NO: 6005343 - DNA, 25 bp, Homo sapien
tagcgacgatcagggactttcatac

SEQ ID NO: 6005344 - DNA, 25 bp, Homo sapien
attcatggaagcccatcctgagctt

SEQ ID NO: 6005345 - DNA, 25 bp, Homo sapien
tcccagctagcaagcagcctgttta

SEQ ID NO: 6005346 - DNA, 25 bp, Homo sapien
atctccagcatactccgcatatttt

SEQ ID NO: 6005347 - DNA, 25 bp, Homo sapien
tactccgcatattttgattatttag

SEQ ID NO: 6005348 - DNA, 25 bp, Homo sapien
actatccccactttatgggagacta

SEQ ID NO: 6005349 - DNA, 25 bp, Homo sapien
tgggtgagaagagaatcatctacgg

SEQ ID NO: 6005350 - DNA, 25 bp, Homo sapien
gagctcagtatgcgagaggctctgc

SEQ ID NO: 6005351 - DNA, 25 bp, Homo sapien
tatccatgaaaataatatgttagac

SEQ ID NO: 6005352 - DNA, 25 bp, Homo sapien
tcactgatgaattcaaaaacgttac

SEQ ID NO: 6005353 - DNA, 25 bp, Homo sapien
ccaagttcaactatgattgggtgtt

SEQ ID NO: 6005354 - DNA, 25 bp, Homo sapien
caagcccaaagtacagtaccgtgct

SEQ ID NO: 6005355 - DNA, 25 bp, Homo sapien
ttctatctcttacagacacatgtgt

SEQ ID NO: 6005356 - DNA, 25 bp, Homo sapien
cttggaccgctctgaaatccatcac

SEQ ID NO: 6005357 - DNA, 25 bp, Homo sapien
atcctgagcttatccatgaaaataa

SEQ ID NO: 6005358 - DNA, 25 bp, Homo sapien
gattgggtgtttttgaatgatgaag

SEQ ID NO: 6005359 - DNA, 25 bp, Homo sapien
atatcaagttgcactgtgatatcga

SEQ ID NO: 6005360 - DNA, 25 bp, Homo sapien
gagactactcgtaaattcatggaag

SEQ ID NO: 6005361 - DNA, 25 bp, Homo sapien
atctatattcgttggctgagtctat

SEQ ID NO: 6005362 - DNA, 25 bp, Homo sapien
ccagctagcaagcagcctgtttaca

SEQ ID NO: 6005363 - DNA, 25 bp, Homo sapien
catacaatttgtgccatttttggtc

SEQ ID NO: 6005364 - DNA, 25 bp, Homo sapien
gtgtggaacctgatatcaagttgca

SEQ ID NO: 6005365 - DNA, 25 bp, Homo sapien
gagtatgaagctactatccccactt

SEQ ID NO: 6005366 - DNA, 25 bp, Homo sapien
tcccaaaggaacattggtccttccc

SEQ ID NO: 6005367 - DNA, 25 bp, Homo sapien
ggattgatgaagaaaaggccgctca

SEQ ID NO: 6005368 - DNA, 25 bp, Homo sapien
tgttccatttcactcctgtccaata

SEQ ID NO: 6005369 - DNA, 25 bp, Homo sapien
aattttgaaattgctgctttggatt

SEQ ID NO: 6005370 - DNA, 25 bp, Homo sapien
cgatgtcttcaaattcatgaaagac

SEQ ID NO: 6005371 - DNA, 25 bp, Homo sapien
ctataaatactcgaaagtggaacta

SEQ ID NO: 6005372 - DNA, 25 bp, Homo sapien
gctatcttccggctcgggctataaa

SEQ ID NO: 6005373 - DNA, 25 bp, Homo sapien
agttattcatgtactactaaattct

SEQ ID NO: 6005374 - DNA, 25 bp, Homo sapien
tgatatcgactacgatgtcttcaaa

SEQ ID NO: 6005375 - DNA, 25 bp, Homo sapien
ctccgcatattttgattatttagat

SEQ ID NO: 6005376 - DNA, 25 bp, Homo sapien
ctttcatacaatttgtgccattttt

SEQ ID NO: 6005377 - DNA, 25 bp, Homo sapien
caatagacacaagtatcagactggc

SEQ ID NO: 6005378 - DNA, 25 bp, Homo sapien
aagcccatcctgagcttatccatga

SEQ ID NO: 6005379 - DNA, 25 bp, Homo sapien
gaatgatgaagagttcactgatgaa

SEQ ID NO: 6005380 - DNA, 25 bp, Homo sapien
atggaagcccatcctgagcttatcc

SEQ ID NO: 6005381 - DNA, 25 bp, Homo sapien
cgtaatagagatctatattcgttgg

SEQ ID NO: 6005382 - DNA, 25 bp, Homo sapien
tcatggaagcccatcctgagcttat

SEQ ID NO: 6005383 - DNA, 25 bp, Homo sapien
tgaaaataatatgttagactttgtt

SEQ ID NO: 6005384 - DNA, 25 bp, Homo sapien
cttttacagacatcctttgatggat

SEQ ID NO: 6005385 - DNA, 25 bp, Homo sapien
atgatgaagagttcactgatgaatt

SEQ ID NO: 6005386 - DNA, 25 bp, Homo sapien
caaatgtgactgtgatccaagcaaa

SEQ ID NO: 6005387 - DNA, 25 bp, Homo sapien
aaaaggccacttttgtcactctagt

SEQ ID NO: 6005388 - DNA, 25 bp, Homo sapien
tcctcgggaaaaggccacttttgtc

SEQ ID NO: 6005389 - DNA, 25 bp, Homo sapien
tagactttgttagcgacgatcaggg

SEQ ID NO: 6005390 - DNA, 25 bp, Homo sapien
gatgggtgagaagagaatcatctac

SEQ ID NO: 6005391 - DNA, 25 bp, Homo sapien
ttccggctcgggctataaatactcg

SEQ ID NO: 6005392 - DNA, 25 bp, Homo sapien
ctatattcgttggctgagtctatta

SEQ ID NO: 6005393 - DNA, 25 bp, Homo sapien
cgactacgatgtcttcaaattcatg

SEQ ID NO: 6005394 - DNA, 25 bp, Homo sapien
gtaaattcatggaagcccatcctga

SEQ ID NO: 6005395 - DNA, 25 bp, Homo sapien
aaagatttcacatggcacagttatt

SEQ ID NO: 6005396 - DNA, 25 bp, Homo sapien
acttcttctggtcgccgtgtttact

SEQ ID NO: 6005397 - DNA, 25 bp, Homo sapien
tctacggtgattctatctcttacag

SEQ ID NO: 6005398 - DNA, 25 bp, Homo sapien
tcttccggctcgggctataaatact

SEQ ID NO: 6005399 - DNA, 25 bp, Homo sapien
tggtcgccgtgtttactgtgtatgt

SEQ ID NO: 6005400 - DNA, 25 bp, Homo sapien
gtggtacaacaaaatacggtgtcat

SEQ ID NO: 6005401 - DNA, 25 bp, Homo sapien
ttcactcctgtccaatagacacaag

SEQ ID NO: 6005402 - DNA, 25 bp, Homo sapien
tgcgagaggctctgccccaagccca

SEQ ID NO: 6005403 - DNA, 25 bp, Homo sapien
ctccaagttcaactatgattgggtg

SEQ ID NO: 6005404 - DNA, 25 bp, Homo sapien
aggctctgccccaagcccaaagtac

SEQ ID NO: 6005405 - DNA, 25 bp, Homo sapien
gaactaccaaagtataccggtcctc

SEQ ID NO: 6005406 - DNA, 25 bp, Homo sapien
ttccattaaggagtatgaagctact

SEQ ID NO: 6005407 - DNA, 25 bp, Homo sapien
atgatcccagctagcaagcagcctg

SEQ ID NO: 6005408 - DNA, 25 bp, Homo sapien
gcccatcctgagcttatccatgaaa

SEQ ID NO: 6005409 - DNA, 25 bp, Homo sapien
ccgtgtttactgtgtatgtgttctt

SEQ ID NO: 6005410 - DNA, 25 bp, Homo sapien
gactggctaacaaatgtgactgtga

SEQ ID NO: 6005411 - DNA, 25 bp, Homo sapien
ttgggtgtttttgaatgatgaagag

SEQ ID NO: 6005412 - DNA, 25 bp, Homo sapien
gaatcatctacggtgattctatctc

SEQ ID NO: 6005413 - DNA, 25 bp, Homo sapien
gggactttcatacaatttgtgccat

SEQ ID NO: 6005414 - DNA, 25 bp, Homo sapien
ggcgaagattatgatcccagctagc

SEQ ID NO: 6005415 - DNA, 25 bp, Homo sapien
ggccacttttgtcactctagtgcgt

SEQ ID NO: 6005416 - DNA, 25 bp, Homo sapien
ctgagtggattgatgaagaaaaggc

SEQ ID NO: 6005417 - DNA, 25 bp, Homo sapien
tcaggcttcttttacagacatcctt

SEQ ID NO: 6005418 - DNA, 25 bp, Homo sapien
agatttaactccaagttcaactatg

SEQ ID NO: 6005419 - DNA, 25 bp, Homo sapien
tgatgctccagttcattctattggt

SEQ ID NO: 6005420 - DNA, 25 bp, Homo sapien
ccgcatattttgattatttagatcg

SEQ ID NO: 6005421 - DNA, 25 bp, Homo sapien
cccaagcccaaagtacagtaccgtg

SEQ ID NO: 6005422 - DNA, 25 bp, Homo sapien
gtatcagactggctaacaaatgtga

SEQ ID NO: 6005423 - DNA, 25 bp, Homo sapien
tattaccatgttccatttcactcct

SEQ ID NO: 6005424 - DNA, 25 bp, Homo sapien
ggaagcccatcctgagcttatccat

SEQ ID NO: 6005425 - DNA, 25 bp, Homo sapien
ttactgtgtatgtgttctttcatgg

SEQ ID NO: 6005426 - DNA, 25 bp, Homo sapien
atagacacaagtatcagactggcta

SEQ ID NO: 6005427 - DNA, 25 bp, Homo sapien
gtcttcaaattcatgaaagacaata

SEQ ID NO: 6005428 - DNA, 25 bp, Homo sapien
atcgactacgatgtcttcaaattca

SEQ ID NO: 6005429 - DNA, 25 bp, Homo sapien
tgagcttatccatgaaaataatatg

SEQ ID NO: 6005430 - DNA, 25 bp, Homo sapien
ttacgtcagctttagttagtggtac

SEQ ID NO: 6005431 - DNA, 25 bp, Homo sapien
tggttattaccatgttccatttcac

SEQ ID NO: 6005432 - DNA, 25 bp, Homo sapien
agaggctctgccccaagcccaaagt

SEQ ID NO: 6005433 - DNA, 25 bp, Homo sapien
acaagtatcagactggctaacaaat

SEQ ID NO: 6005434 - DNA, 25 bp, Homo sapien
ctttgatggatgactacgattggta

SEQ ID NO: 6005435 - DNA, 25 bp, Homo sapien
ggggtgatgctccagttcattctat

SEQ ID NO: 6005436 - DNA, 25 bp, Homo sapien
tgtgtatgtgttctttcatggagct

SEQ ID NO: 6005437 - DNA, 25 bp, Homo sapien
tatcttccggctcgggctataaata

SEQ ID NO: 6005438 - DNA, 25 bp, Homo sapien
atgggagactactcgtaaattcatg

SEQ ID NO: 6005439 - DNA, 25 bp, Homo sapien
atagatttaactccaagttcaacta

SEQ ID NO: 6005440 - DNA, 25 bp, Homo sapien
ggctaacaaatgtgactgtgatcca

SEQ ID NO: 6005441 - DNA, 25 bp, Homo sapien
caaagtacagtaccgtgctatcttc

SEQ ID NO: 6005442 - DNA, 25 bp, Homo sapien
gtgctatcttccggctcgggctata

SEQ ID NO: 6005443 - DNA, 25 bp, Homo sapien
ttacaaaaaattaggacttcttctg

SEQ ID NO: 6005444 - DNA, 25 bp, Homo sapien
cagactggctaacaaatgtgactgt

SEQ ID NO: 6005445 - DNA, 25 bp, Homo sapien
tggtctaattttgaaattgctgctt

SEQ ID NO: 6005446 - DNA, 25 bp, Homo sapien
attgatgaagaaaaggccgctcaag

SEQ ID NO: 6005447 - DNA, 25 bp, Homo sapien
ctcgggaaaaggccacttttgtcac

SEQ ID NO: 6005448 - DNA, 25 bp, Homo sapien
gtgtttttgaatgatgaagagttca

SEQ ID NO: 6005449 - DNA, 25 bp, Homo sapien
aaggccgctcaagtcaggaaggaga

SEQ ID NO: 6005450 - DNA, 25 bp, Homo sapien
ttcacatggcacagttattcatgta

SEQ ID NO: 6005451 - DNA, 25 bp, Homo sapien
atcatctacggtgattctatctctt

SEQ ID NO: 6005452 - DNA, 25 bp, Homo sapien
gctttagttagtggtacaacaaaat

SEQ ID NO: 6005453 - DNA, 25 bp, Homo sapien
tgtgatatcgactacgatgtcttca

SEQ ID NO: 6005454 - DNA, 25 bp, Homo sapien
aaattctacaatataaacaagttgc

SEQ ID NO: 6005455 - DNA, 25 bp, Homo sapien
tgccatttccattaaggagtatgaa

SEQ ID NO: 6005456 - DNA, 25 bp, Homo sapien
actactaaattctacaatataaaca

SEQ ID NO: 6005457 - DNA, 25 bp, Homo sapien
gaaggagatgggtgagaagagaatc

SEQ ID NO: 6005458 - DNA, 25 bp, Homo sapien
agcagcctgtttacaaaaaattagg

SEQ ID NO: 6005459 - DNA, 25 bp, Homo sapien
gaattcaaaaacgttacgtcagctt

SEQ ID NO: 6005460 - DNA, 25 bp, Homo sapien
agcatactccgcatattttgattat

SEQ ID NO: 6005461 - DNA, 25 bp, Homo sapien
aaaaggccgctcaagtcaggaagga

SEQ ID NO: 6005462 - DNA, 25 bp, Homo sapien
tgttctttcatggagctcagtatgc

SEQ ID NO: 6005463 - DNA, 25 bp, Homo sapien
ctgcgctgttcttggaccgctctga

SEQ ID NO: 6005464 - DNA, 25 bp, Homo sapien
gctgttcttggaccgctctgaaatc

SEQ ID NO: 6005465 - DNA, 25 bp, Homo sapien
atgttagactttgttagcgacgatc

SEQ ID NO: 6005466 - DNA, 25 bp, Homo sapien
caatataaacaagttgccaaagcct

SEQ ID NO: 6005467 - DNA, 25 bp, Homo sapien
tgagaagagaatcatctacggtgat

SEQ ID NO: 6005468 - DNA, 25 bp, Homo sapien
atttgtggagatctccagcatactc

SEQ ID NO: 6005469 - DNA, 25 bp, Homo sapien
ttcatacaatttgtgccatttttgg

SEQ ID NO: 6005470 - DNA, 25 bp, Homo sapien
caacaaaatacggtgtcatcccaaa

SEQ ID NO: 6005471 - DNA, 25 bp, Homo sapien
tttagttagtggtacaacaaaatac

SEQ ID NO: 6005472 - DNA, 25 bp, Homo sapien
ctttgttagcgacgatcagggactt

SEQ ID NO: 6005473 - DNA, 25 bp, Homo sapien
gaaattgctgctttggatttgtgga

SEQ ID NO: 6005474 - DNA, 25 bp, Homo sapien
tcgttggctgagtctattaaatccg

SEQ ID NO: 6005475 - DNA, 25 bp, Homo sapien
cacatggcacagttattcatgtact

SEQ ID NO: 6005476 - DNA, 25 bp, Homo sapien
ctagcaagcagcctgtttacaaaaa

SEQ ID NO: 6005477 - DNA, 25 bp, Homo sapien
gggagactactcgtaaattcatgga

SEQ ID NO: 6005478 - DNA, 25 bp, Homo sapien
tgtcgttttgaatcaggcttctttt

SEQ ID NO: 6005479 - DNA, 25 bp, Homo sapien
cctgtccaatagacacaagtatcag

SEQ ID NO: 6005480 - DNA, 25 bp, Homo sapien
ggctcgggctataaatactcgaaag

SEQ ID NO: 6005481 - DNA, 25 bp, Homo sapien
tatgcctttgccatttccattaagg

SEQ ID NO: 6005482 - DNA, 25 bp, Homo sapien
cactttatgggagactactcgtaaa

SEQ ID NO: 6005483 - DNA, 25 bp, Homo sapien
gttattaccatgttccatttcactc

SEQ ID NO: 6005484 - DNA, 25 bp, Homo sapien
ctagtgcgtaatagagatctatatt

SEQ ID NO: 6005485 - DNA, 25 bp, Homo sapien
aactatgattgggtgtttttgaatg

SEQ ID NO: 6005486 - DNA, 25 bp, Homo sapien
tatgaaagatggggtgatgctccag

SEQ ID NO: 6005487 - DNA, 25 bp, Homo sapien
gcactgtgatatcgactacgatgtc

SEQ ID NO: 6005488 - DNA, 25 bp, Homo sapien
gaaagtggaactaccaaagtatacc

SEQ ID NO: 6005489 - DNA, 25 bp, Homo sapien
cttcggtgatattggttattaccat

SEQ ID NO: 6005490 - DNA, 25 bp, Homo sapien
gagatgggtgagaagagaatcatct

SEQ ID NO: 6005491 - DNA, 25 bp, Homo sapien
tgtccaatagacacaagtatcagac

SEQ ID NO: 6005492 - DNA, 25 bp, Homo sapien
ccagcatactccgcatattttgatt

SEQ ID NO: 6005493 - DNA, 25 bp, Homo sapien
actgtgatccaagcaaagatttcac

SEQ ID NO: 6005494 - DNA, 25 bp, Homo sapien
gacgatcagggactttcatacaatt

SEQ ID NO: 6005495 - DNA, 25 bp, Homo sapien
gtgccatttttggtctaattttgaa

SEQ ID NO: 6005496 - DNA, 25 bp, Homo sapien
ctttggatttgtggagatctccagc

SEQ ID NO: 6005497 - DNA, 25 bp, Homo sapien
gtgaaggtggattcttttatgaaag

SEQ ID NO: 6005498 - DNA, 25 bp, Homo sapien
tattaaatccgtggaagatagattt

SEQ ID NO: 6005499 - DNA, 25 bp, Homo sapien
catggcacagttattcatgtactac

SEQ ID NO: 6005500 - DNA, 25 bp, Homo sapien
tagatcgtgaaggtggattctttta

SEQ ID NO: 6005501 - DNA, 25 bp, Homo sapien
catggagctcagtatgcgagaggct

SEQ ID NO: 6005502 - DNA, 25 bp, Homo sapien
tgttcttggaccgctctgaaatcca

SEQ ID NO: 6005503 - DNA, 25 bp, Homo sapien
tcctttgatggatgactacgattgg

SEQ ID NO: 6005504 - DNA, 25 bp, Homo sapien
gagtggattgatgaagaaaaggccg

SEQ ID NO: 6005505 - DNA, 25 bp, Homo sapien
gatgactacgattggtattggcgtg

SEQ ID NO: 6005506 - DNA, 25 bp, Homo sapien
tggagctcagtatgcgagaggctct

SEQ ID NO: 6005507 - DNA, 25 bp, Homo sapien
tagtggtacaacaaaatacggtgtc

SEQ ID NO: 6005508 - DNA, 25 bp, Homo sapien
ctttatgggagactactcgtaaatt

SEQ ID NO: 6005509 - DNA, 25 bp, Homo sapien
ggctataaatactcgaaagtggaac

SEQ ID NO: 6005510 - DNA, 25 bp, Homo sapien
ctaaattctacaatataaacaagtt

SEQ ID NO: 6005511 - DNA, 25 bp, Homo sapien
cctgagcttatccatgaaaataata

SEQ ID NO: 6005512 - DNA, 25 bp, Homo sapien
tcatgtactactaaattctacaata

SEQ ID NO: 6005513 - DNA, 25 bp, Homo sapien
tgactgtgatccaagcaaagatttc

SEQ ID NO: 6005514 - DNA, 25 bp, Homo sapien
aaagatggggtgatgctccagttca

SEQ ID NO: 6005515 - DNA, 25 bp, Homo sapien
ctactcgtaaattcatggaagccca

SEQ ID NO: 6005516 - DNA, 25 bp, Homo sapien
aaattcatggaagcccatcctgagc

SEQ ID NO: 6005517 - DNA, 25 bp, Homo sapien
taatagagatctatattcgttggct

SEQ ID NO: 6005518 - DNA, 25 bp, Homo sapien
gttagactttgttagcgacgatcag

SEQ ID NO: 6005519 - DNA, 25 bp, Homo sapien
ttatgggagactactcgtaaattca

SEQ ID NO: 6005520 - DNA, 25 bp, Homo sapien
tttacagacatcctttgatggatga

SEQ ID NO: 6005521 - DNA, 25 bp, Homo sapien
actcgtaaattcatggaagcccatc

SEQ ID NO: 6005522 - DNA, 25 bp, Homo sapien
agtatgcctttgccatttccattaa

SEQ ID NO: 6005523 - DNA, 25 bp, Homo sapien
acaagttgccaaagcctgctggttg

SEQ ID NO: 6005524 - DNA, 25 bp, Homo sapien
attaaggagtatgaagctactatcc

SEQ ID NO: 6005525 - DNA, 25 bp, Homo sapien
aaaaagtatgcctttgccatttcca

SEQ ID NO: 6005526 - DNA, 25 bp, Homo sapien
gtcatcccaaaggaacattggtcct

SEQ ID NO: 6005527 - DNA, 25 bp, Homo sapien
cggtgtcatcccaaaggaacattgg

SEQ ID NO: 6005528 - DNA, 25 bp, Homo sapien
caatttgtgccatttttggtctaat

SEQ ID NO: 6005529 - DNA, 25 bp, Homo sapien
ctactatccccactttatgggagac

SEQ ID NO: 6005530 - DNA, 25 bp, Homo sapien
gaagatagatttaactccaagttca

SEQ ID NO: 6005531 - DNA, 25 bp, Homo sapien
atcagactggctaacaaatgtgact

SEQ ID NO: 6005532 - DNA, 25 bp, Homo sapien
agatttcacatggcacagttattca

SEQ ID NO: 6005533 - DNA, 25 bp, Homo sapien
tatgcgagaggctctgccccaagcc

SEQ ID NO: 6005534 - DNA, 25 bp, Homo sapien
acagtaccgtgctatcttccggctc

SEQ ID NO: 6005535 - DNA, 25 bp, Homo sapien
agtatgcgagaggctctgccccaag

SEQ ID NO: 6005536 - DNA, 25 bp, Homo sapien
aatacggtgtcatcccaaaggaaca

SEQ ID NO: 6005537 - DNA, 25 bp, Homo sapien
agtgcgtaatagagatctatattcg

SEQ ID NO: 6005538 - DNA, 25 bp, Homo sapien
attctattggtgctgcgctgttctt

SEQ ID NO: 6005539 - DNA, 25 bp, Homo sapien
gagttcactgatgaattcaaaaacg

SEQ ID NO: 6005540 - DNA, 25 bp, Homo sapien
atgtcttcaaattcatgaaagacaa

SEQ ID NO: 6005541 - DNA, 25 bp, Homo sapien
atgaattcaaaaacgttacgtcagc

SEQ ID NO: 6005542 - DNA, 25 bp, Homo sapien
ctcctgtccaatagacacaagtatc

SEQ ID NO: 6005543 - DNA, 25 bp, Homo sapien
tcgttttgaatcaggcttcttttac

SEQ ID NO: 6005544 - DNA, 25 bp, Homo sapien
taagaaaaagtatgcctttgccatt

SEQ ID NO: 6005545 - DNA, 25 bp, Homo sapien
atactcgaaagtggaactaccaaag

SEQ ID NO: 6005546 - DNA, 25 bp, Homo sapien
tgagtctattaaatccgtggaagat

SEQ ID NO: 6005547 - DNA, 25 bp, Homo sapien
tggtccttccctgagtggattgatg

SEQ ID NO: 6005548 - DNA, 25 bp, Homo sapien
ttttgaaattgctgctttggatttg

SEQ ID NO: 6005549 - DNA, 25 bp, Homo sapien
ttattcatgtactactaaattctac

SEQ ID NO: 6005550 - DNA, 25 bp, Homo sapien
gaaggtggattcttttatgaaagat

SEQ ID NO: 6005551 - DNA, 25 bp, Homo sapien
tatgtgttctttcatggagctcagt

SEQ ID NO: 6005552 - DNA, 25 bp, Homo sapien
ctggctaacaaatgtgactgtgatc

SEQ ID NO: 6005553 - DNA, 25 bp, Homo sapien
gtggaacctgatatcaagttgcact

SEQ ID NO: 6005554 - DNA, 25 bp, Homo sapien
taccgtgctatcttccggctcgggc

SEQ ID NO: 6005555 - DNA, 25 bp, Homo sapien
tacgatgtcttcaaattcatgaaag

SEQ ID NO: 6005556 - DNA, 25 bp, Homo sapien
gtttttgaatgatgaagagttcact

SEQ ID NO: 6005557 - DNA, 25 bp, Homo sapien
ggtgctgcgctgttcttggaccgct

SEQ ID NO: 6005558 - DNA, 25 bp, Homo sapien
gttggctgagtctattaaatccgtg

SEQ ID NO: 6005559 - DNA, 25 bp, Homo sapien
tacggtgattctatctcttacagac

SEQ ID NO: 6005560 - DNA, 25 bp, Homo sapien
gaagaaaaggccgctcaagtcagga

SEQ ID NO: 6005561 - DNA, 25 bp, Homo sapien
gtctaattttgaaattgctgctttg

SEQ ID NO: 6005562 - DNA, 25 bp, Homo sapien
ttgatggatgactacgattggtatt

SEQ ID NO: 6005563 - DNA, 25 bp, Homo sapien
acttttgtcactctagtgcgtaata

SEQ ID NO: 6005564 - DNA, 25 bp, Homo sapien
agaagagaatcatctacggtgattc

SEQ ID NO: 6005565 - DNA, 25 bp, Homo sapien
agaaaaggccgctcaagtcaggaag

SEQ ID NO: 6005566 - DNA, 25 bp, Homo sapien
tactaaattctacaatataaacaag

SEQ ID NO: 6005567 - DNA, 25 bp, Homo sapien
gtcgccgtgtttactgtgtatgtgt

SEQ ID NO: 6005568 - DNA, 25 bp, Homo sapien
aagagttcactgatgaattcaaaaa

SEQ ID NO: 6005569 - DNA, 25 bp, Homo sapien
tgactacgattggtattggcgtgtg

SEQ ID NO: 6005570 - DNA, 25 bp, Homo sapien
tacgattggtattggcgtgtggaac

SEQ ID NO: 6005571 - DNA, 25 bp, Homo sapien
actgatgaattcaaaaacgttacgt

SEQ ID NO: 6005572 - DNA, 25 bp, Homo sapien
gcgctgttcttggaccgctctgaaa

SEQ ID NO: 6005573 - DNA, 25 bp, Homo sapien
catcctttgatggatgactacgatt

SEQ ID NO: 6005574 - DNA, 25 bp, Homo sapien
gttgccaaagcctgctggttggcaa

SEQ ID NO: 6005575 - DNA, 25 bp, Homo sapien
tacaatttgtgccatttttggtcta

SEQ ID NO: 6005576 - DNA, 25 bp, Homo sapien
tttatgaaagatggggtgatgctcc

SEQ ID NO: 6005577 - DNA, 25 bp, Homo sapien
gcttcttttacagacatcctttgat

SEQ ID NO: 6005578 - DNA, 25 bp, Homo sapien
cgtggaagatagatttaactccaag

SEQ ID NO: 6005579 - DNA, 25 bp, Homo sapien
aagtacagtaccgtgctatcttccg

SEQ ID NO: 6005580 - DNA, 25 bp, Homo sapien
aaaataatatgttagactttgttag

SEQ ID NO: 6005581 - DNA, 25 bp, Homo sapien
aagtcaggaaggagatgggtgagaa

SEQ ID NO: 6005582 - DNA, 25 bp, Homo sapien
aagtatcagactggctaacaaatgt

SEQ ID NO: 6005583 - DNA, 25 bp, Homo sapien
cctttgccatttccattaaggagta

SEQ ID NO: 6005584 - DNA, 25 bp, Homo sapien
atattcgttggctgagtctattaaa

SEQ ID NO: 6005585 - DNA, 25 bp, Homo sapien
tggcacagttattcatgtactacta

SEQ ID NO: 6005586 - DNA, 25 bp, Homo sapien
ggaacctgatatcaagttgcactgt

SEQ ID NO: 6005587 - DNA, 25 bp, Homo sapien
aggaacattggtccttccctgagtg

SEQ ID NO: 6005588 - DNA, 25 bp, Homo sapien
atctcttacagacacatgtgtcgtt

SEQ ID NO: 6005589 - DNA, 25 bp, Homo sapien
ttccctgagtggattgatgaagaaa

SEQ ID NO: 6005590 - DNA, 25 bp, Homo sapien
ttgcactgtgatatcgactacgatg

SEQ ID NO: 6005591 - DNA, 25 bp, Homo sapien
gattatgatcccagctagcaagcag

SEQ ID NO: 6005592 - DNA, 25 bp, Homo sapien
aagttcaactatgattgggtgtttt

SEQ ID NO: 6005593 - DNA, 25 bp, Homo sapien
gatgaagagttcactgatgaattca

SEQ ID NO: 6005594 - DNA, 25 bp, Homo sapien
gctctgaaatccatcacttcggtga

SEQ ID NO: 6005595 - DNA, 25 bp, Homo sapien
cgattggtattggcgtgtggaacct

SEQ ID NO: 6005596 - DNA, 25 bp, Homo sapien
aaaatacggtgtcatcccaaaggaa

SEQ ID NO: 6005597 - DNA, 25 bp, Homo sapien
acgtcagctttagttagtggtacaa

SEQ ID NO: 6005598 - DNA, 25 bp, Homo sapien
ctaacaaatgtgactgtgatccaag

SEQ ID NO: 6005599 - DNA, 25 bp, Homo sapien
aggagtatgaagctactatccccac

SEQ ID NO: 6005600 - DNA, 25 bp, Homo sapien
gttagcgacgatcagggactttcat

SEQ ID NO: 6005601 - DNA, 25 bp, Homo sapien
ttggatttgtggagatctccagcat

SEQ ID NO: 6005602 - DNA, 25 bp, Homo sapien
tcaaaaacgttacgtcagctttagt

SEQ ID NO: 6005603 - DNA, 25 bp, Homo sapien
tggaagatagatttaactccaagtt

SEQ ID NO: 6005604 - DNA, 25 bp, Homo sapien
tttgccatttccattaaggagtatg

SEQ ID NO: 6005605 - DNA, 25 bp, Homo sapien
ttcatggagctcagtatgcgagagg

SEQ ID NO: 6005606 - DNA, 25 bp, Homo sapien
tgattatttagatcgtgaaggtgga

SEQ ID NO: 6005607 - DNA, 25 bp, Homo sapien
ttgtggagatctccagcatactccg

SEQ ID NO: 6005608 - DNA, 25 bp, Homo sapien
cagttcattctattggtgctgcgct

SEQ ID NO: 6005609 - DNA, 25 bp, Homo sapien
tcaagtcaggaaggagatgggtgag

SEQ ID NO: 6005610 - DNA, 25 bp, Homo sapien
gctccagttcattctattggtgctg

SEQ ID NO: 6005611 - DNA, 25 bp, Homo sapien
tcgtgaaggtggattcttttatgaa

SEQ ID NO: 6005612 - DNA, 25 bp, Homo sapien
cgggctataaatactcgaaagtgga

SEQ ID NO: 6005613 - DNA, 25 bp, Homo sapien
cctgctggttggcaaaaccatatcg

SEQ ID NO: 6005614 - DNA, 25 bp, Homo sapien
atgaagctactatccccactttatg

SEQ ID NO: 6005615 - DNA, 25 bp, Homo sapien
tgtgtcgttttgaatcaggcttctt

SEQ ID NO: 6005616 - DNA, 25 bp, Homo sapien
gtgattctatctcttacagacacat

SEQ ID NO: 6005617 - DNA, 25 bp, Homo sapien
tgatatcaagttgcactgtgatatc

SEQ ID NO: 6005618 - DNA, 25 bp, Homo sapien
ccggctcgggctataaatactcgaa

SEQ ID NO: 6005619 - DNA, 25 bp, Homo sapien
caagcagcctgtttacaaaaaatta

SEQ ID NO: 6005620 - DNA, 25 bp, Homo sapien
catgtgtcgttttgaatcaggcttc

SEQ ID NO: 6005621 - DNA, 25 bp, Homo sapien
agctagcaagcagcctgtttacaaa

SEQ ID NO: 6005622 - DNA, 25 bp, Homo sapien
atttgtgccatttttggtctaattt

SEQ ID NO: 6005623 - DNA, 25 bp, Homo sapien
ttcttctggtcgccgtgtttactgt

SEQ ID NO: 6005624 - DNA, 25 bp, Homo sapien
aaaggaacattggtccttccctgag

SEQ ID NO: 6005625 - DNA, 25 bp, Homo sapien
ccatttccattaaggagtatgaagc

SEQ ID NO: 6005626 - DNA, 25 bp, Homo sapien
gccatttttggtctaattttgaaat

SEQ ID NO: 6005627 - DNA, 25 bp, Homo sapien
ccctgagtggattgatgaagaaaag

SEQ ID NO: 6005628 - DNA, 25 bp, Homo sapien
gtcactctagtgcgtaatagagatc

SEQ ID NO: 6005629 - DNA, 25 bp, Homo sapien
aatgtgactgtgatccaagcaaaga

SEQ ID NO: 6005630 - DNA, 25 bp, Homo sapien
aggcttcttttacagacatcctttg

SEQ ID NO: 6005631 - DNA, 25 bp, Homo sapien
gactttgttagcgacgatcagggac

SEQ ID NO: 6005632 - DNA, 25 bp, Homo sapien
tacagacacatgtgtcgttttgaat

SEQ ID NO: 6005633 - DNA, 25 bp, Homo sapien
aacctgatatcaagttgcactgtga

SEQ ID NO: 6005634 - DNA, 25 bp, Homo sapien
attcaaaaacgttacgtcagcttta

SEQ ID NO: 6005635 - DNA, 25 bp, Homo sapien
gcacagttattcatgtactactaaa

SEQ ID NO: 6005636 - DNA, 25 bp, Homo sapien
ccattaaggagtatgaagctactat

SEQ ID NO: 6005637 - DNA, 25 bp, Homo sapien
tctgccccaagcccaaagtacagta

SEQ ID NO: 6005638 - DNA, 25 bp, Homo sapien
catgttccatttcactcctgtccaa

SEQ ID NO: 6005639 - DNA, 25 bp, Homo sapien
ccacttttgtcactctagtgcgtaa

SEQ ID NO: 6005640 - DNA, 25 bp, Homo sapien
tcaactatgattgggtgtttttgaa

SEQ ID NO: 6005641 - DNA, 25 bp, Homo sapien
aaatactcgaaagtggaactaccaa

SEQ ID NO: 6005642 - DNA, 25 bp, Homo sapien
tccagttcattctattggtgctgcg

SEQ ID NO: 6005643 - DNA, 25 bp, Homo sapien
attatttagatcgtgaaggtggatt

SEQ ID NO: 6005644 - DNA, 25 bp, Homo sapien
tctattaaatccgtggaagatagat

SEQ ID NO: 6005645 - DNA, 25 bp, Homo sapien
atcagggactttcatacaatttgtg

SEQ ID NO: 6005646 - DNA, 25 bp, Homo sapien
agtaccgtgctatcttccggctcgg

SEQ ID NO: 6005647 - DNA, 25 bp, Homo sapien
ggagatctccagcatactccgcata

SEQ ID NO: 6005648 - DNA, 25 bp, Homo sapien
cgatcagggactttcatacaatttg

SEQ ID NO: 6005649 - DNA, 25 bp, Homo sapien
attggttattaccatgttccatttc

SEQ ID NO: 6005650 - DNA, 25 bp, Homo sapien
gtttactgtgtatgtgttctttcat

SEQ ID NO: 6005651 - DNA, 25 bp, Homo sapien
gtcagctttagttagtggtacaaca

SEQ ID NO: 6005652 - DNA, 25 bp, Homo sapien
agacacaagtatcagactggctaac

SEQ ID NO: 6005653 - DNA, 25 bp, Homo sapien
gtgtttactgtgtatgtgttctttc

SEQ ID NO: 6005654 - DNA, 25 bp, Homo sapien
ttgaaattgctgctttggatttgtg

SEQ ID NO: 6005655 - DNA, 25 bp, Homo sapien
actacgattggtattggcgtgtgga

SEQ ID NO: 6005656 - DNA, 25 bp, Homo sapien
cttatccatgaaaataatatgttag

SEQ ID NO: 6005657 - DNA, 25 bp, Homo sapien
tcattctattggtgctgcgctgttc

SEQ ID NO: 6005658 - DNA, 25 bp, Homo sapien
atgattgggtgtttttgaatgatga

SEQ ID NO: 6005659 - DNA, 25 bp, Homo sapien
gttcaactatgattgggtgtttttg

SEQ ID NO: 6005660 - DNA, 25 bp, Homo sapien
tacaacaaaatacggtgtcatccca

SEQ ID NO: 6005661 - DNA, 25 bp, Homo sapien
cccactttatgggagactactcgta

SEQ ID NO: 6005662 - DNA, 25 bp, Homo sapien
ttatgatcccagctagcaagcagcc

SEQ ID NO: 6005663 - DNA, 25 bp, Homo sapien
actacgatgtcttcaaattcatgaa

SEQ ID NO: 6005664 - DNA, 25 bp, Homo sapien
tcgtaaattcatggaagcccatcct

SEQ ID NO: 6005665 - DNA, 25 bp, Homo sapien
ggtgagaagagaatcatctacggtg

SEQ ID NO: 6005666 - DNA, 25 bp, Homo sapien
tgtgatccaagcaaagatttcacat

SEQ ID NO: 6005667 - DNA, 25 bp, Homo sapien
gtccttccctgagtggattgatgaa

SEQ ID NO: 6005668 - DNA, 25 bp, Homo sapien
atattttgattatttagatcgtgaa

SEQ ID NO: 6005669 - DNA, 25 bp, Homo sapien
tcagtatgcgagaggctctgcccca

SEQ ID NO: 6005670 - DNA, 25 bp, Homo sapien
cgccgtgtttactgtgtatgtgttc

SEQ ID NO: 6005671 - DNA, 25 bp, Homo sapien
actgtgtatgtgttctttcatggag

SEQ ID NO: 6005672 - DNA, 25 bp, Homo sapien
cccaaagtacagtaccgtgctatct

SEQ ID NO: 6005673 - DNA, 25 bp, Homo sapien
gtacagtaccgtgctatcttccggc

SEQ ID NO: 6005674 - DNA, 25 bp, Homo sapien
atttcactcctgtccaatagacaca

SEQ ID NO: 6005675 - DNA, 25 bp, Homo sapien
atttccattaaggagtatgaagcta

SEQ ID NO: 6005676 - DNA, 25 bp, Homo sapien
agatggggtgatgctccagttcatt

SEQ ID NO: 6005677 - DNA, 25 bp, Homo sapien
agatagatttaactccaagttcaac

SEQ ID NO: 6005678 - DNA, 25 bp, Homo sapien
tgccaaagcctgctggttggcaaaa

SEQ ID NO: 6005679 - DNA, 25 bp, Homo sapien
ctttcatggagctcagtatgcgaga

SEQ ID NO: 6005680 - DNA, 25 bp, Homo sapien
aaaaattaggacttcttctggtcgc

SEQ ID NO: 6005681 - DNA, 25 bp, Homo sapien
gtattggcgtgtggaacctgatatc

SEQ ID NO: 6005682 - DNA, 25 bp, Homo sapien
tctattggtgctgcgctgttcttgg

SEQ ID NO: 6005683 - DNA, 25 bp, Homo sapien
atagagatctatattcgttggctga

SEQ ID NO: 6005684 - DNA, 25 bp, Homo sapien
tggtattggcgtgtggaacctgata

SEQ ID NO: 6005685 - DNA, 25 bp, Homo sapien
gctcagtatgcgagaggctctgccc

SEQ ID NO: 6005686 - DNA, 25 bp, Homo sapien
aacgttacgtcagctttagttagtg

SEQ ID NO: 6005687 - DNA, 25 bp, Homo sapien
cgaagattatgatcccagctagcaa

SEQ ID NO: 6005688 - DNA, 25 bp, Homo sapien
tggatgactacgattggtattggcg

SEQ ID NO: 6005689 - DNA, 25 bp, Homo sapien
tggaccgctctgaaatccatcactt

SEQ ID NO: 6005690 - DNA, 25 bp, Homo sapien
gtgtcatcccaaaggaacattggtc

SEQ ID NO: 6005691 - DNA, 25 bp, Homo sapien
ggccgctcaagtcaggaaggagatg

SEQ ID NO: 6005692 - DNA, 25 bp, Homo sapien
cgagaggctctgccccaagcccaaa

SEQ ID NO: 6005693 - DNA, 25 bp, Homo sapien
cactctagtgcgtaatagagatcta

SEQ ID NO: 6005694 - DNA, 25 bp, Homo sapien
tagttagtggtacaacaaaatacgg

SEQ ID NO: 6005695 - DNA, 25 bp, Homo sapien
acattggtccttccctgagtggatt

SEQ ID NO: 6005696 - DNA, 25 bp, Homo sapien
aggagatgggtgagaagagaatcat

SEQ ID NO: 6005697 - DNA, 25 bp, Homo sapien
agtctattaaatccgtggaagatag

SEQ ID NO: 6005698 - DNA, 25 bp, Homo sapien
aatcaggcttcttttacagacatcc

SEQ ID NO: 6005699 - DNA, 25 bp, Homo sapien
tctggtcgccgtgtttactgtgtat

SEQ ID NO: 6005700 - DNA, 25 bp, Homo sapien
aatccgtggaagatagatttaactc

SEQ ID NO: 6005701 - DNA, 25 bp, Homo sapien
agttgcactgtgatatcgactacga

SEQ ID NO: 6005702 - DNA, 25 bp, Homo sapien
cttacagacacatgtgtcgttttga

SEQ ID NO: 6005703 - DNA, 25 bp, Homo sapien
tccgtggaagatagatttaactcca

SEQ ID NO: 6005704 - DNA, 25 bp, Homo sapien
taggacttcttctggtcgccgtgtt

SEQ ID NO: 6005705 - DNA, 25 bp, Homo sapien
aaatccatcacttcggtgatattgg

SEQ ID NO: 6005706 - DNA, 25 bp, Homo sapien
cacttcggtgatattggttattacc

SEQ ID NO: 6005707 - DNA, 25 bp, Homo sapien
ctatctcttacagacacatgtgtcg

SEQ ID NO: 6005708 - DNA, 25 bp, Homo sapien
attaggacttcttctggtcgccgtg

SEQ ID NO: 6005709 - DNA, 25 bp, Homo sapien
aaagtatgcctttgccatttccatt

SEQ ID NO: 6005710 - DNA, 25 bp, Homo sapien
gctcaagtcaggaaggagatgggtg

SEQ ID NO: 6005711 - DNA, 25 bp, Homo sapien
agctactatccccactttatgggag

SEQ ID NO: 6005712 - DNA, 25 bp, Homo sapien
attttgattatttagatcgtgaagg

SEQ ID NO: 6005713 - DNA, 25 bp, Homo sapien
atttaactccaagttcaactatgat

SEQ ID NO: 6005714 - DNA, 25 bp, Homo sapien
tgctggttggcaaaaccatatcggt

SEQ ID NO: 6005715 - DNA, 25 bp, Homo sapien
ttgctgctttggatttgtggagatc

SEQ ID NO: 6005716 - DNA, 25 bp, Homo sapien
tgcgtaatagagatctatattcgtt

SEQ ID NO: 6005717 - DNA, 25 bp, Homo sapien
tgcctttgccatttccattaaggag

SEQ ID NO: 6005718 - DNA, 25 bp, Homo sapien
agatctatattcgttggctgagtct

SEQ ID NO: 6005719 - DNA, 25 bp, Homo sapien
aggtggattcttttatgaaagatgg

SEQ ID NO: 6005720 - DNA, 25 bp, Homo sapien
gttcactgatgaattcaaaaacgtt

SEQ ID NO: 6005721 - DNA, 25 bp, Homo sapien
aaagacaataagaaaaagtatgcct

SEQ ID NO: 6005722 - DNA, 25 bp, Homo sapien
gattctatctcttacagacacatgt

SEQ ID NO: 6005723 - DNA, 25 bp, Homo sapien
ttggtgctgcgctgttcttggaccg

SEQ ID NO: 6005724 - DNA, 25 bp, Homo sapien
atataaacaagttgccaaagcctgc

SEQ ID NO: 6005725 - DNA, 25 bp, Homo sapien
agaaaaagtatgcctttgccatttc

SEQ ID NO: 6005726 - DNA, 25 bp, Homo sapien
atccatcacttcggtgatattggtt

SEQ ID NO: 6005727 - DNA, 25 bp, Homo sapien
ctcgggctataaatactcgaaagtg

SEQ ID NO: 6005728 - DNA, 25 bp, Homo sapien
ccaaaggaacattggtccttccctg

SEQ ID NO: 6005729 - DNA, 25 bp, Homo sapien
ttttgtcactctagtgcgtaataga

SEQ ID NO: 6005730 - DNA, 25 bp, Homo sapien
atattggttattaccatgttccatt

SEQ ID NO: 6005731 - DNA, 25 bp, Homo sapien
tgatattggttattaccatgttcca

SEQ ID NO: 6005732 - DNA, 25 bp, Homo sapien
aaacaagttgccaaagcctgctggt

SEQ ID NO: 6005733 - DNA, 25 bp, Homo sapien
ggacttcttctggtcgccgtgttta

SEQ ID NO: 6005734 - DNA, 25 bp, Homo sapien
tttagatcgtgaaggtggattcttt

SEQ ID NO: 6005735 - DNA, 25 bp, Homo sapien
agcaagcagcctgtttacaaaaaat

SEQ ID NO: 6005736 - DNA, 25 bp, Homo sapien
tccaatagacacaagtatcagactg

SEQ ID NO: 6005737 - DNA, 25 bp, Homo sapien
taccaaagtataccggtcctcggga

SEQ ID NO: 6005738 - DNA, 25 bp, Homo sapien
ggtacaacaaaatacggtgtcatcc

SEQ ID NO: 6005739 - DNA, 25 bp, Homo sapien
gatcgtgaaggtggattcttttatg

SEQ ID NO: 6005740 - DNA, 25 bp, Homo sapien
ccttccctgagtggattgatgaaga

SEQ ID NO: 6005741 - DNA, 25 bp, Homo sapien
cagacacatgtgtcgttttgaatca

SEQ ID NO: 6005742 - DNA, 25 bp, Homo sapien
aactccaagttcaactatgattggg

SEQ ID NO: 6005743 - DNA, 25 bp, Homo sapien
agcccaaagtacagtaccgtgctat

SEQ ID NO: 6005744 - DNA, 25 bp, Homo sapien
tgctttggatttgtggagatctcca

SEQ ID NO: 6005745 - DNA, 25 bp, Homo sapien
ctaattttgaaattgctgctttgga

SEQ ID NO: 6005746 - DNA, 25 bp, Homo sapien
tgtgttctttcatggagctcagtat

SEQ ID NO: 6005747 - DNA, 25 bp, Homo sapien
gttagtggtacaacaaaatacggtg

SEQ ID NO: 6005748 - DNA, 25 bp, Homo sapien
tggcgtgtggaacctgatatcaagt

SEQ ID NO: 6005749 - DNA, 25 bp, Homo sapien
cgttacgtcagctttagttagtggt

SEQ ID NO: 6005750 - DNA, 25 bp, Homo sapien
ttaccatgttccatttcactcctgt

SEQ ID NO: 6005751 - DNA, 25 bp, Homo sapien
atgaagaaaaggccgctcaagtcag

SEQ ID NO: 6005752 - DNA, 25 bp, Homo sapien
gcgacgatcagggactttcatacaa

SEQ ID NO: 6005753 - DNA, 25 bp, Homo sapien
ccatcctgagcttatccatgaaaat

SEQ ID NO: 6005754 - DNA, 25 bp, Homo sapien
gtggagatctccagcatactccgca

SEQ ID NO: 6005755 - DNA, 25 bp, Homo sapien
tattggtgctgcgctgttcttggac

SEQ ID NO: 6005756 - DNA, 25 bp, Homo sapien
gatggatgactacgattggtattgg

SEQ ID NO: 6005757 - DNA, 25 bp, Homo sapien
gcaaagatttcacatggcacagtta

SEQ ID NO: 6005758 - DNA, 25 bp, Homo sapien
ggatttgtggagatctccagcatac

SEQ ID NO: 6005759 - DNA, 25 bp, Homo sapien
ctctagtgcgtaatagagatctata

SEQ ID NO: 6005760 - DNA, 25 bp, Homo sapien
atatcgactacgatgtcttcaaatt

SEQ ID NO: 6005761 - DNA, 25 bp, Homo sapien
ccaaagcctgctggttggcaaaacc

SEQ ID NO: 6005762 - DNA, 25 bp, Homo sapien
tgatccaagcaaagatttcacatgg

SEQ ID NO: 6005763 - DNA, 25 bp, Homo sapien
tgaaatccatcacttcggtgatatt

SEQ ID NO: 6005764 - DNA, 25 bp, Homo sapien
ttgtcactctagtgcgtaatagaga

SEQ ID NO: 6005765 - DNA, 25 bp, Homo sapien
gttcattctattggtgctgcgctgt

SEQ ID NO: 6005766 - DNA, 25 bp, Homo sapien
gatcccagctagcaagcagcctgtt

SEQ ID NO: 6005767 - DNA, 25 bp, Homo sapien
tgtgactgtgatccaagcaaagatt

SEQ ID NO: 6005768 - DNA, 25 bp, Homo sapien
aaattaggacttcttctggtcgccg

SEQ ID NO: 6005769 - DNA, 25 bp, Homo sapien
gtggaactaccaaagtataccggtc

SEQ ID NO: 6005770 - DNA, 25 bp, Homo sapien
tttgattatttagatcgtgaaggtg

SEQ ID NO: 6005771 - DNA, 25 bp, Homo sapien
catcccaaaggaacattggtccttc

SEQ ID NO: 6005772 - DNA, 25 bp, Homo sapien
cctgatatcaagttgcactgtgata

SEQ ID NO: 6005773 - DNA, 25 bp, Homo sapien
atgtactactaaattctacaatata

SEQ ID NO: 6005774 - DNA, 25 bp, Homo sapien
attctacaatataaacaagttgcca

SEQ ID NO: 6005775 - DNA, 25 bp, Homo sapien
attcatgtactactaaattctacaa

SEQ ID NO: 6005776 - DNA, 25 bp, Homo sapien
tctgaaatccatcacttcggtgata

SEQ ID NO: 6005777 - DNA, 25 bp, Homo sapien
atatgttagactttgttagcgacga

SEQ ID NO: 6005778 - DNA, 25 bp, Homo sapien
ccgtgctatcttccggctcgggcta

SEQ ID NO: 6005779 - DNA, 25 bp, Homo sapien
aagagaatcatctacggtgattcta

SEQ ID NO: 6005780 - DNA, 25 bp, Homo sapien
ttgttagcgacgatcagggactttc

SEQ ID NO: 6005781 - DNA, 25 bp, Homo sapien
taaatccgtggaagatagatttaac

SEQ ID NO: 6005782 - DNA, 25 bp, Homo sapien
tgatgaattcaaaaacgttacgtca

SEQ ID NO: 6005783 - DNA, 25 bp, Homo sapien
agcctgctggttggcaaaaccatat

SEQ ID NO: 6005784 - DNA, 25 bp, Homo sapien
cttctggtcgccgtgtttactgtgt

SEQ ID NO: 6005785 - DNA, 25 bp, Homo sapien
tacagacatcctttgatggatgact

SEQ ID NO: 6005786 - DNA, 25 bp, Homo sapien
gactttcatacaatttgtgccattt

SEQ ID NO: 6005787 - DNA, 25 bp, Homo sapien
aattgctgctttggatttgtggaga

SEQ ID NO: 6005788 - DNA, 25 bp, Homo sapien
ggaaaaggccacttttgtcactcta

SEQ ID NO: 6005789 - DNA, 25 bp, Homo sapien
ccaatcgtagtcatccatcaaagga

SEQ ID NO: 6005790 - DNA, 25 bp, Homo sapien
ccaagaacagcgcagcaccaataga

SEQ ID NO: 6005791 - DNA, 25 bp, Homo sapien
tgtctattggacaggagtgaaatgg

SEQ ID NO: 6005792 - DNA, 25 bp, Homo sapien
gagtatgctggagatctccacaaat

SEQ ID NO: 6005793 - DNA, 25 bp, Homo sapien
cacccatctccttcctgacttgagc

SEQ ID NO: 6005794 - DNA, 25 bp, Homo sapien
acttgatatcaggttccacacgcca

SEQ ID NO: 6005795 - DNA, 25 bp, Homo sapien
aacttggagttaaatctatcttcca

SEQ ID NO: 6005796 - DNA, 25 bp, Homo sapien
ctcacccatctccttcctgacttga

SEQ ID NO: 6005797 - DNA, 25 bp, Homo sapien
atactgagctccatgaaagaacaca

SEQ ID NO: 6005798 - DNA, 25 bp, Homo sapien
tcagagcggtccaagaacagcgcag

SEQ ID NO: 6005799 - DNA, 25 bp, Homo sapien
tctattacgcactagagtgacaaaa

SEQ ID NO: 6005800 - DNA, 25 bp, Homo sapien
cactcagggaaggaccaatgttcct

SEQ ID NO: 6005801 - DNA, 25 bp, Homo sapien
ccttaatggaaatggcaaaggcata

SEQ ID NO: 6005802 - DNA, 25 bp, Homo sapien
gaatcaccgtagatgattctcttct

SEQ ID NO: 6005803 - DNA, 25 bp, Homo sapien
cttggagttaaatctatcttccacg

SEQ ID NO: 6005804 - DNA, 25 bp, Homo sapien
aaaggcatactttttcttattgtct

SEQ ID NO: 6005805 - DNA, 25 bp, Homo sapien
atcatagttgaacttggagttaaat

SEQ ID NO: 6005806 - DNA, 25 bp, Homo sapien
agcacggtactgtactttgggcttg

SEQ ID NO: 6005807 - DNA, 25 bp, Homo sapien
gaagcctgattcaaaacgacacatg

SEQ ID NO: 6005808 - DNA, 25 bp, Homo sapien
ctcagggaaggaccaatgttccttt

SEQ ID NO: 6005809 - DNA, 25 bp, Homo sapien
tttgtaaacaggctgcttgctagct

SEQ ID NO: 6005810 - DNA, 25 bp, Homo sapien
ccatcaaaggatgtctgtaaaagaa

SEQ ID NO: 6005811 - DNA, 25 bp, Homo sapien
gtagtcatccatcaaaggatgtctg

SEQ ID NO: 6005812 - DNA, 25 bp, Homo sapien
tggccttttcccgaggaccggtata

SEQ ID NO: 6005813 - DNA, 25 bp, Homo sapien
cagcaccaatagaatgaactggagc

SEQ ID NO: 6005814 - DNA, 25 bp, Homo sapien
ggttttgccaaccagcaggctttgg

SEQ ID NO: 6005815 - DNA, 25 bp, Homo sapien
agaatgaactggagcatcaccccat

SEQ ID NO: 6005816 - DNA, 25 bp, Homo sapien
ggtaataaccaatatcaccgaagtg

SEQ ID NO: 6005817 - DNA, 25 bp, Homo sapien
tccaaagcagcaatttcaaaattag

SEQ ID NO: 6005818 - DNA, 25 bp, Homo sapien
atcaccgtagatgattctcttctca

SEQ ID NO: 6005819 - DNA, 25 bp, Homo sapien
aaggatgtctgtaaaagaagcctga

SEQ ID NO: 6005820 - DNA, 25 bp, Homo sapien
aatttgaagacatcgtagtcgatat

SEQ ID NO: 6005821 - DNA, 25 bp, Homo sapien
ccatgaaagaacacatacacagtaa

SEQ ID NO: 6005822 - DNA, 25 bp, Homo sapien
gtgatggatttcagagcggtccaag

SEQ ID NO: 6005823 - DNA, 25 bp, Homo sapien
caacttgatatcaggttccacacgc

SEQ ID NO: 6005824 - DNA, 25 bp, Homo sapien
ctgtactttgggcttggggcagagc

SEQ ID NO: 6005825 - DNA, 25 bp, Homo sapien
tgaattcatcagtgaactcttcatc

SEQ ID NO: 6005826 - DNA, 25 bp, Homo sapien
aacatattattttcatggataagct

SEQ ID NO: 6005827 - DNA, 25 bp, Homo sapien
agcggtccaagaacagcgcagcacc

SEQ ID NO: 6005828 - DNA, 25 bp, Homo sapien
gcttgctagctgggatcataatctt

SEQ ID NO: 6005829 - DNA, 25 bp, Homo sapien
acagtcacatttgttagccagtctg

SEQ ID NO: 6005830 - DNA, 25 bp, Homo sapien
gcttcatactccttaatggaaatgg

SEQ ID NO: 6005831 - DNA, 25 bp, Homo sapien
ctgtaaaagaagcctgattcaaaac

SEQ ID NO: 6005832 - DNA, 25 bp, Homo sapien
atcaaaggatgtctgtaaaagaagc

SEQ ID NO: 6005833 - DNA, 25 bp, Homo sapien
tcgatatcacagtgcaacttgatat

SEQ ID NO: 6005834 - DNA, 25 bp, Homo sapien
cttggggcagagcctctcgcatact

SEQ ID NO: 6005835 - DNA, 25 bp, Homo sapien
taaagctgacgtaacgtttttgaat

SEQ ID NO: 6005836 - DNA, 25 bp, Homo sapien
ttgtaccactaactaaagctgacgt

SEQ ID NO: 6005837 - DNA, 25 bp, Homo sapien
ataatcaaaatatgcggagtatgct

SEQ ID NO: 6005838 - DNA, 25 bp, Homo sapien
gtaaaagaagcctgattcaaaacga

SEQ ID NO: 6005839 - DNA, 25 bp, Homo sapien
aatcgtagtcatccatcaaaggatg

SEQ ID NO: 6005840 - DNA, 25 bp, Homo sapien
cagtctgatacttgtgtctattgga

SEQ ID NO: 6005841 - DNA, 25 bp, Homo sapien
gaaatggaacatggtaataaccaat

SEQ ID NO: 6005842 - DNA, 25 bp, Homo sapien
tggggcagagcctctcgcatactga

SEQ ID NO: 6005843 - DNA, 25 bp, Homo sapien
gaaatggcaaaggcatactttttct

SEQ ID NO: 6005844 - DNA, 25 bp, Homo sapien
gtattttgttgtaccactaactaaa

SEQ ID NO: 6005845 - DNA, 25 bp, Homo sapien
agctccatgaaagaacacatacaca

SEQ ID NO: 6005846 - DNA, 25 bp, Homo sapien
aagtccctgatcgtcgctaacaaag

SEQ ID NO: 6005847 - DNA, 25 bp, Homo sapien
tactttggtagttccactttcgagt

SEQ ID NO: 6005848 - DNA, 25 bp, Homo sapien
atagactcagccaacgaatatagat

SEQ ID NO: 6005849 - DNA, 25 bp, Homo sapien
aatccaccttcacgatctaaataat

SEQ ID NO: 6005850 - DNA, 25 bp, Homo sapien
gaaggaccaatgttcctttgggatg

SEQ ID NO: 6005851 - DNA, 25 bp, Homo sapien
aggctttggcaacttgtttatattg

SEQ ID NO: 6005852 - DNA, 25 bp, Homo sapien
gttgaacttggagttaaatctatct

SEQ ID NO: 6005853 - DNA, 25 bp, Homo sapien
atggtaataaccaatatcaccgaag

SEQ ID NO: 6005854 - DNA, 25 bp, Homo sapien
aattcatcagtgaactcttcatcat

SEQ ID NO: 6005855 - DNA, 25 bp, Homo sapien
ctgcttgctagctgggatcataatc

SEQ ID NO: 6005856 - DNA, 25 bp, Homo sapien
caaccagcaggctttggcaacttgt

SEQ ID NO: 6005857 - DNA, 25 bp, Homo sapien
tttcagagcggtccaagaacagcgc

SEQ ID NO: 6005858 - DNA, 25 bp, Homo sapien
tgaagacatcgtagtcgatatcaca

SEQ ID NO: 6005859 - DNA, 25 bp, Homo sapien
tgtgtctattggacaggagtgaaat

SEQ ID NO: 6005860 - DNA, 25 bp, Homo sapien
gtcgctaacaaagtctaacatatta

SEQ ID NO: 6005861 - DNA, 25 bp, Homo sapien
gatgggcttccatgaatttacgagt

SEQ ID NO: 6005862 - DNA, 25 bp, Homo sapien
cgaatatagatctctattacgcact

SEQ ID NO: 6005863 - DNA, 25 bp, Homo sapien
gaccaatgttcctttgggatgacac

SEQ ID NO: 6005864 - DNA, 25 bp, Homo sapien
tgaatttgaagacatcgtagtcgat

SEQ ID NO: 6005865 - DNA, 25 bp, Homo sapien
gctggagatctccacaaatccaaag

SEQ ID NO: 6005866 - DNA, 25 bp, Homo sapien
gcagagcctctcgcatactgagctc

SEQ ID NO: 6005867 - DNA, 25 bp, Homo sapien
tacttgtgtctattggacaggagtg

SEQ ID NO: 6005868 - DNA, 25 bp, Homo sapien
ttcgagtatttatagcccgagccgg

SEQ ID NO: 6005869 - DNA, 25 bp, Homo sapien
actttgggcttggggcagagcctct

SEQ ID NO: 6005870 - DNA, 25 bp, Homo sapien
tattgtctttcatgaatttgaagac

SEQ ID NO: 6005871 - DNA, 25 bp, Homo sapien
tccatgaatttacgagtagtctccc

SEQ ID NO: 6005872 - DNA, 25 bp, Homo sapien
gtctgatacttgtgtctattggaca

SEQ ID NO: 6005873 - DNA, 25 bp, Homo sapien
aatggcaaaggcatactttttctta

SEQ ID NO: 6005874 - DNA, 25 bp, Homo sapien
gatctccacaaatccaaagcagcaa

SEQ ID NO: 6005875 - DNA, 25 bp, Homo sapien
acatgtgtctgtaagagatagaatc

SEQ ID NO: 6005876 - DNA, 25 bp, Homo sapien
atgaaagtccctgatcgtcgctaac

SEQ ID NO: 6005877 - DNA, 25 bp, Homo sapien
agtacatgaataactgtgccatgtg

SEQ ID NO: 6005878 - DNA, 25 bp, Homo sapien
aatccactcagggaaggaccaatgt

SEQ ID NO: 6005879 - DNA, 25 bp, Homo sapien
cacgccaataccaatcgtagtcatc

SEQ ID NO: 6005880 - DNA, 25 bp, Homo sapien
cagaagaagtcctaattttttgtaa

SEQ ID NO: 6005881 - DNA, 25 bp, Homo sapien
gacttgagcggccttttcttcatca

SEQ ID NO: 6005882 - DNA, 25 bp, Homo sapien
atctatcttccacggatttaataga

SEQ ID NO: 6005883 - DNA, 25 bp, Homo sapien
cggcgaccagaagaagtcctaattt

SEQ ID NO: 6005884 - DNA, 25 bp, Homo sapien
acacatgtgtctgtaagagatagaa

SEQ ID NO: 6005885 - DNA, 25 bp, Homo sapien
gccttttcttcatcaatccactcag

SEQ ID NO: 6005886 - DNA, 25 bp, Homo sapien
gcagcaatttcaaaattagaccaaa

SEQ ID NO: 6005887 - DNA, 25 bp, Homo sapien
tgtaaacaggctgcttgctagctgg

SEQ ID NO: 6005888 - DNA, 25 bp, Homo sapien
taataaccaatatcaccgaagtgat

SEQ ID NO: 6005889 - DNA, 25 bp, Homo sapien
cttgtgtctattggacaggagtgaa

SEQ ID NO: 6005890 - DNA, 25 bp, Homo sapien
tttacgagtagtctcccataaagtg

SEQ ID NO: 6005891 - DNA, 25 bp, Homo sapien
ggatagtagcttcatactccttaat

SEQ ID NO: 6005892 - DNA, 25 bp, Homo sapien
tacgagtagtctcccataaagtggg

SEQ ID NO: 6005893 - DNA, 25 bp, Homo sapien
tcagtgaactcttcatcattcaaaa

SEQ ID NO: 6005894 - DNA, 25 bp, Homo sapien
aacgacacatgtgtctgtaagagat

SEQ ID NO: 6005895 - DNA, 25 bp, Homo sapien
taaacaggctgcttgctagctggga

SEQ ID NO: 6005896 - DNA, 25 bp, Homo sapien
tgttgtaccactaactaaagctgac

SEQ ID NO: 6005897 - DNA, 25 bp, Homo sapien
aaccaatatcaccgaagtgatggat

SEQ ID NO: 6005898 - DNA, 25 bp, Homo sapien
actgagctccatgaaagaacacata

SEQ ID NO: 6005899 - DNA, 25 bp, Homo sapien
acacagtaaacacggcgaccagaag

SEQ ID NO: 6005900 - DNA, 25 bp, Homo sapien
cgtttttgaattcatcagtgaactc

SEQ ID NO: 6005901 - DNA, 25 bp, Homo sapien
cggccttttcttcatcaatccactc

SEQ ID NO: 6005902 - DNA, 25 bp, Homo sapien
acagcgcagcaccaatagaatgaac

SEQ ID NO: 6005903 - DNA, 25 bp, Homo sapien
aagctgacgtaacgtttttgaattc

SEQ ID NO: 6005904 - DNA, 25 bp, Homo sapien
gcgaccagaagaagtcctaattttt

SEQ ID NO: 6005905 - DNA, 25 bp, Homo sapien
gtctttcatgaatttgaagacatcg

SEQ ID NO: 6005906 - DNA, 25 bp, Homo sapien
agagcctctcgcatactgagctcca

SEQ ID NO: 6005907 - DNA, 25 bp, Homo sapien
gatcgtcgctaacaaagtctaacat

SEQ ID NO: 6005908 - DNA, 25 bp, Homo sapien
aacgtttttgaattcatcagtgaac

SEQ ID NO: 6005909 - DNA, 25 bp, Homo sapien
gtctaacatattattttcatggata

SEQ ID NO: 6005910 - DNA, 25 bp, Homo sapien
tcacagtgcaacttgatatcaggtt

SEQ ID NO: 6005911 - DNA, 25 bp, Homo sapien
ggcttccatgaatttacgagtagtc

SEQ ID NO: 6005912 - DNA, 25 bp, Homo sapien
tgacgtaacgtttttgaattcatca

SEQ ID NO: 6005913 - DNA, 25 bp, Homo sapien
cccaatcatagttgaacttggagtt

SEQ ID NO: 6005914 - DNA, 25 bp, Homo sapien
tttgggatgacaccgtattttgttg

SEQ ID NO: 6005915 - DNA, 25 bp, Homo sapien
ttggacaggagtgaaatggaacatg

SEQ ID NO: 6005916 - DNA, 25 bp, Homo sapien
cttttcttcatcaatccactcaggg

SEQ ID NO: 6005917 - DNA, 25 bp, Homo sapien
cacacgccaataccaatcgtagtca

SEQ ID NO: 6005918 - DNA, 25 bp, Homo sapien
ggatgacaccgtattttgttgtacc

SEQ ID NO: 6005919 - DNA, 25 bp, Homo sapien
aggcatactttttcttattgtcttt

SEQ ID NO: 6005920 - DNA, 25 bp, Homo sapien
aaattagaccaaaaatggcacaaat

SEQ ID NO: 6005921 - DNA, 25 bp, Homo sapien
gatttaatagactcagccaacgaat

SEQ ID NO: 6005922 - DNA, 25 bp, Homo sapien
gaagatagcacggtactgtactttg

SEQ ID NO: 6005923 - DNA, 25 bp, Homo sapien
tgagctccatgaaagaacacataca

SEQ ID NO: 6005924 - DNA, 25 bp, Homo sapien
atagaatgaactggagcatcacccc

SEQ ID NO: 6005925 - DNA, 25 bp, Homo sapien
aaagaatccaccttcacgatctaaa

SEQ ID NO: 6005926 - DNA, 25 bp, Homo sapien
atgaaagaacacatacacagtaaac

SEQ ID NO: 6005927 - DNA, 25 bp, Homo sapien
cttggatcacagtcacatttgttag

SEQ ID NO: 6005928 - DNA, 25 bp, Homo sapien
aatccaaagcagcaatttcaaaatt

SEQ ID NO: 6005929 - DNA, 25 bp, Homo sapien
ccgagccggaagatagcacggtact

SEQ ID NO: 6005930 - DNA, 25 bp, Homo sapien
tatcaggttccacacgccaatacca

SEQ ID NO: 6005931 - DNA, 25 bp, Homo sapien
ttgtagaatttagtagtacatgaat

SEQ ID NO: 6005932 - DNA, 25 bp, Homo sapien
cctttgggatgacaccgtattttgt

SEQ ID NO: 6005933 - DNA, 25 bp, Homo sapien
atgattctcttctcacccatctcct

SEQ ID NO: 6005934 - DNA, 25 bp, Homo sapien
aacacggcgaccagaagaagtccta

SEQ ID NO: 6005935 - DNA, 25 bp, Homo sapien
tttatattgtagaatttagtagtac

SEQ ID NO: 6005936 - DNA, 25 bp, Homo sapien
tgcttggatcacagtcacatttgtt

SEQ ID NO: 6005937 - DNA, 25 bp, Homo sapien
tggagatctccacaaatccaaagca

SEQ ID NO: 6005938 - DNA, 25 bp, Homo sapien
tggaaatggcaaaggcatacttttt

SEQ ID NO: 6005939 - DNA, 25 bp, Homo sapien
tccacaaatccaaagcagcaatttc

SEQ ID NO: 6005940 - DNA, 25 bp, Homo sapien
agccaacgaatatagatctctatta

SEQ ID NO: 6005941 - DNA, 25 bp, Homo sapien
attagaccaaaaatggcacaaattg

SEQ ID NO: 6005942 - DNA, 25 bp, Homo sapien
aaaagaagcctgattcaaaacgaca

SEQ ID NO: 6005943 - DNA, 25 bp, Homo sapien
tccttcctgacttgagcggcctttt

SEQ ID NO: 6005944 - DNA, 25 bp, Homo sapien
tattggacaggagtgaaatggaaca

SEQ ID NO: 6005945 - DNA, 25 bp, Homo sapien
gattctcttctcacccatctccttc

SEQ ID NO: 6005946 - DNA, 25 bp, Homo sapien
aggagtgaaatggaacatggtaata

SEQ ID NO: 6005947 - DNA, 25 bp, Homo sapien
acagtaaacacggcgaccagaagaa

SEQ ID NO: 6005948 - DNA, 25 bp, Homo sapien
aagtggggatagtagcttcatactc

SEQ ID NO: 6005949 - DNA, 25 bp, Homo sapien
tcgcatactgagctccatgaaagaa

SEQ ID NO: 6005950 - DNA, 25 bp, Homo sapien
gaacatggtaataaccaatatcacc

SEQ ID NO: 6005951 - DNA, 25 bp, Homo sapien
gcaacttgtttatattgtagaattt

SEQ ID NO: 6005952 - DNA, 25 bp, Homo sapien
tcatcattcaaaaacacccaatcat

SEQ ID NO: 6005953 - DNA, 25 bp, Homo sapien
gtaacgtttttgaattcatcagtga

SEQ ID NO: 6005954 - DNA, 25 bp, Homo sapien
gaaagaacacatacacagtaaacac

SEQ ID NO: 6005955 - DNA, 25 bp, Homo sapien
tgaataactgtgccatgtgaaatct

SEQ ID NO: 6005956 - DNA, 25 bp, Homo sapien
atggttttgccaaccagcaggcttt

SEQ ID NO: 6005957 - DNA, 25 bp, Homo sapien
ctaacatattattttcatggataag

SEQ ID NO: 6005958 - DNA, 25 bp, Homo sapien
tttcttcatcaatccactcagggaa

SEQ ID NO: 6005959 - DNA, 25 bp, Homo sapien
tatgcggagtatgctggagatctcc

SEQ ID NO: 6005960 - DNA, 25 bp, Homo sapien
gtgaaatggaacatggtaataacca

SEQ ID NO: 6005961 - DNA, 25 bp, Homo sapien
cgctaacaaagtctaacatattatt

SEQ ID NO: 6005962 - DNA, 25 bp, Homo sapien
ggtagttccactttcgagtatttat

SEQ ID NO: 6005963 - DNA, 25 bp, Homo sapien
caccgtagatgattctcttctcacc

SEQ ID NO: 6005964 - DNA, 25 bp, Homo sapien
catactccttaatggaaatggcaaa

SEQ ID NO: 6005965 - DNA, 25 bp, Homo sapien
tcaaaatatgcggagtatgctggag

SEQ ID NO: 6005966 - DNA, 25 bp, Homo sapien
aagctcaggatgggcttccatgaat

SEQ ID NO: 6005967 - DNA, 25 bp, Homo sapien
ggacaggagtgaaatggaacatggt

SEQ ID NO: 6005968 - DNA, 25 bp, Homo sapien
gtgacaaaagtggccttttcccgag

SEQ ID NO: 6005969 - DNA, 25 bp, Homo sapien
atggcacaaattgtatgaaagtccc

SEQ ID NO: 6005970 - DNA, 25 bp, Homo sapien
atttgttagccagtctgatacttgt

SEQ ID NO: 6005971 - DNA, 25 bp, Homo sapien
tttggcaacttgtttatattgtaga

SEQ ID NO: 6005972 - DNA, 25 bp, Homo sapien
gcatactgagctccatgaaagaaca

SEQ ID NO: 6005973 - DNA, 25 bp, Homo sapien
aatggaacatggtaataaccaatat

SEQ ID NO: 6005974 - DNA, 25 bp, Homo sapien
gatagaatcaccgtagatgattctc

SEQ ID NO: 6005975 - DNA, 25 bp, Homo sapien
gtagaatttagtagtacatgaataa

SEQ ID NO: 6005976 - DNA, 25 bp, Homo sapien
tccaccttcacgatctaaataatca

SEQ ID NO: 6005977 - DNA, 25 bp, Homo sapien
attttcatggataagctcaggatgg

SEQ ID NO: 6005978 - DNA, 25 bp, Homo sapien
cactaactaaagctgacgtaacgtt

SEQ ID NO: 6005979 - DNA, 25 bp, Homo sapien
caggctgcttgctagctgggatcat

SEQ ID NO: 6005980 - DNA, 25 bp, Homo sapien
gaacacatacacagtaaacacggcg

SEQ ID NO: 6005981 - DNA, 25 bp, Homo sapien
ggagcatcaccccatctttcataaa

SEQ ID NO: 6005982 - DNA, 25 bp, Homo sapien
atgtctgtaaaagaagcctgattca

SEQ ID NO: 6005983 - DNA, 25 bp, Homo sapien
acgcactagagtgacaaaagtggcc

SEQ ID NO: 6005984 - DNA, 25 bp, Homo sapien
tagtctcccataaagtggggatagt

SEQ ID NO: 6005985 - DNA, 25 bp, Homo sapien
tacatgaataactgtgccatgtgaa

SEQ ID NO: 6005986 - DNA, 25 bp, Homo sapien
attcaaaacgacacatgtgtctgta

SEQ ID NO: 6005987 - DNA, 25 bp, Homo sapien
cgcagcaccaatagaatgaactgga

SEQ ID NO: 6005988 - DNA, 25 bp, Homo sapien
attttttgtaaacaggctgcttgct

SEQ ID NO: 6005989 - DNA, 25 bp, Homo sapien
tgcaacttgatatcaggttccacac

SEQ ID NO: 6005990 - DNA, 25 bp, Homo sapien
tgaatttacgagtagtctcccataa

SEQ ID NO: 6005991 - DNA, 25 bp, Homo sapien
gagtgacaaaagtggccttttcccg

SEQ ID NO: 6005992 - DNA, 25 bp, Homo sapien
tagttgaacttggagttaaatctat

SEQ ID NO: 6005993 - DNA, 25 bp, Homo sapien
cattcaaaaacacccaatcatagtt

SEQ ID NO: 6005994 - DNA, 25 bp, Homo sapien
cttccatgaatttacgagtagtctc

SEQ ID NO: 6005995 - DNA, 25 bp, Homo sapien
catgaatttacgagtagtctcccat

SEQ ID NO: 6005996 - DNA, 25 bp, Homo sapien
gtgtctgtaagagatagaatcaccg

SEQ ID NO: 6005997 - DNA, 25 bp, Homo sapien
catcagtgaactcttcatcattcaa

SEQ ID NO: 6005998 - DNA, 25 bp, Homo sapien
gtagtacatgaataactgtgccatg

SEQ ID NO: 6005999 - DNA, 25 bp, Homo sapien
ctatcttccacggatttaatagact

SEQ ID NO: 6006000 - DNA, 25 bp, Homo sapien
ctttcgagtatttatagcccgagcc

SEQ ID NO: 6006001 - DNA, 25 bp, Homo sapien
ccgtattttgttgtaccactaacta

SEQ ID NO: 6006002 - DNA, 25 bp, Homo sapien
ttgttagccagtctgatacttgtgt

SEQ ID NO: 6006003 - DNA, 25 bp, Homo sapien
ttttgccaaccagcaggctttggca

SEQ ID NO: 6006004 - DNA, 25 bp, Homo sapien
aatatgcggagtatgctggagatct

SEQ ID NO: 6006005 - DNA, 25 bp, Homo sapien
gaaagtccctgatcgtcgctaacaa

SEQ ID NO: 6006006 - DNA, 25 bp, Homo sapien
gacaccgtattttgttgtaccacta

SEQ ID NO: 6006007 - DNA, 25 bp, Homo sapien
tttagtagtacatgaataactgtgc

SEQ ID NO: 6006008 - DNA, 25 bp, Homo sapien
ttgtatgaaagtccctgatcgtcgc

SEQ ID NO: 6006009 - DNA, 25 bp, Homo sapien
ccgtagatgattctcttctcaccca

SEQ ID NO: 6006010 - DNA, 25 bp, Homo sapien
tccacacgccaataccaatcgtagt

SEQ ID NO: 6006011 - DNA, 25 bp, Homo sapien
taaacacggcgaccagaagaagtcc

SEQ ID NO: 6006012 - DNA, 25 bp, Homo sapien
cgacacatgtgtctgtaagagatag

SEQ ID NO: 6006013 - DNA, 25 bp, Homo sapien
atggataagctcaggatgggcttcc

SEQ ID NO: 6006014 - DNA, 25 bp, Homo sapien
tctttgcttggatcacagtcacatt

SEQ ID NO: 6006015 - DNA, 25 bp, Homo sapien
cagcaggctttggcaacttgtttat

SEQ ID NO: 6006016 - DNA, 25 bp, Homo sapien
tactccttaatggaaatggcaaagg

SEQ ID NO: 6006017 - DNA, 25 bp, Homo sapien
cgaagtgatggatttcagagcggtc

SEQ ID NO: 6006018 - DNA, 25 bp, Homo sapien
tttttgaattcatcagtgaactctt

SEQ ID NO: 6006019 - DNA, 25 bp, Homo sapien
ggcacaaattgtatgaaagtccctg

SEQ ID NO: 6006020 - DNA, 25 bp, Homo sapien
ataaccaatatcaccgaagtgatgg

SEQ ID NO: 6006021 - DNA, 25 bp, Homo sapien
ccatgtgaaatctttgcttggatca

SEQ ID NO: 6006022 - DNA, 25 bp, Homo sapien
aagtgatggatttcagagcggtcca

SEQ ID NO: 6006023 - DNA, 25 bp, Homo sapien
tagagtgacaaaagtggccttttcc

SEQ ID NO: 6006024 - DNA, 25 bp, Homo sapien
tatcacagtgcaacttgatatcagg

SEQ ID NO: 6006025 - DNA, 25 bp, Homo sapien
tttaatagactcagccaacgaatat

SEQ ID NO: 6006026 - DNA, 25 bp, Homo sapien
atagtagcttcatactccttaatgg

SEQ ID NO: 6006027 - DNA, 25 bp, Homo sapien
taaaagaatccaccttcacgatcta

SEQ ID NO: 6006028 - DNA, 25 bp, Homo sapien
tgggcttggggcagagcctctcgca

SEQ ID NO: 6006029 - DNA, 25 bp, Homo sapien
aagtctaacatattattttcatgga

SEQ ID NO: 6006030 - DNA, 25 bp, Homo sapien
aacaaagtctaacatattattttca

SEQ ID NO: 6006031 - DNA, 25 bp, Homo sapien
gcaggctttggcaacttgtttatat

SEQ ID NO: 6006032 - DNA, 25 bp, Homo sapien
gccaaccagcaggctttggcaactt

SEQ ID NO: 6006033 - DNA, 25 bp, Homo sapien
taactgtgccatgtgaaatctttgc

SEQ ID NO: 6006034 - DNA, 25 bp, Homo sapien
acatggtaataaccaatatcaccga

SEQ ID NO: 6006035 - DNA, 25 bp, Homo sapien
ttcaaaattagaccaaaaatggcac

SEQ ID NO: 6006036 - DNA, 25 bp, Homo sapien
atcattcaaaaacacccaatcatag

SEQ ID NO: 6006037 - DNA, 25 bp, Homo sapien
cacaaattgtatgaaagtccctgat

SEQ ID NO: 6006038 - DNA, 25 bp, Homo sapien
cttccacggatttaatagactcagc

SEQ ID NO: 6006039 - DNA, 25 bp, Homo sapien
tcacagtcacatttgttagccagtc

SEQ ID NO: 6006040 - DNA, 25 bp, Homo sapien
tagccagtctgatacttgtgtctat

SEQ ID NO: 6006041 - DNA, 25 bp, Homo sapien
gtatgctggagatctccacaaatcc

SEQ ID NO: 6006042 - DNA, 25 bp, Homo sapien
tccactcagggaaggaccaatgttc

SEQ ID NO: 6006043 - DNA, 25 bp, Homo sapien
tggatcacagtcacatttgttagcc

SEQ ID NO: 6006044 - DNA, 25 bp, Homo sapien
atatggttttgccaaccagcaggct

SEQ ID NO: 6006045 - DNA, 25 bp, Homo sapien
ggtactgtactttgggcttggggca

SEQ ID NO: 6006046 - DNA, 25 bp, Homo sapien
tcaaaacgacacatgtgtctgtaag

SEQ ID NO: 6006047 - DNA, 25 bp, Homo sapien
gcactagagtgacaaaagtggcctt

SEQ ID NO: 6006048 - DNA, 25 bp, Homo sapien
tttttgtaaacaggctgcttgctag

SEQ ID NO: 6006049 - DNA, 25 bp, Homo sapien
agtagcttcatactccttaatggaa

SEQ ID NO: 6006050 - DNA, 25 bp, Homo sapien
gctagctgggatcataatcttcgcc

SEQ ID NO: 6006051 - DNA, 25 bp, Homo sapien
tcaatccactcagggaaggaccaat

SEQ ID NO: 6006052 - DNA, 25 bp, Homo sapien
acacatacacagtaaacacggcgac

SEQ ID NO: 6006053 - DNA, 25 bp, Homo sapien
gatatcacagtgcaacttgatatca

SEQ ID NO: 6006054 - DNA, 25 bp, Homo sapien
tatttatagcccgagccggaagata

SEQ ID NO: 6006055 - DNA, 25 bp, Homo sapien
accgaagtgatggatttcagagcgg

SEQ ID NO: 6006056 - DNA, 25 bp, Homo sapien
aatatagatctctattacgcactag

SEQ ID NO: 6006057 - DNA, 25 bp, Homo sapien
catagttgaacttggagttaaatct

SEQ ID NO: 6006058 - DNA, 25 bp, Homo sapien
atccatcaaaggatgtctgtaaaag

SEQ ID NO: 6006059 - DNA, 25 bp, Homo sapien
tcaccgaagtgatggatttcagagc

SEQ ID NO: 6006060 - DNA, 25 bp, Homo sapien
gagccggaagatagcacggtactgt

SEQ ID NO: 6006061 - DNA, 25 bp, Homo sapien
aaaaatggcacaaattgtatgaaag

SEQ ID NO: 6006062 - DNA, 25 bp, Homo sapien
caaatccaaagcagcaatttcaaaa

SEQ ID NO: 6006063 - DNA, 25 bp, Homo sapien
tgaactggagcatcaccccatcttt

SEQ ID NO: 6006064 - DNA, 25 bp, Homo sapien
agcgcagcaccaatagaatgaactg

SEQ ID NO: 6006065 - DNA, 25 bp, Homo sapien
cgagtagtctcccataaagtgggga

SEQ ID NO: 6006066 - DNA, 25 bp, Homo sapien
agcaatttcaaaattagaccaaaaa

SEQ ID NO: 6006067 - DNA, 25 bp, Homo sapien
gttagccagtctgatacttgtgtct

SEQ ID NO: 6006068 - DNA, 25 bp, Homo sapien
accactaactaaagctgacgtaacg

SEQ ID NO: 6006069 - DNA, 25 bp, Homo sapien
actgtgccatgtgaaatctttgctt

SEQ ID NO: 6006070 - DNA, 25 bp, Homo sapien
ccatctttcataaaagaatccacct

SEQ ID NO: 6006071 - DNA, 25 bp, Homo sapien
ctcccataaagtggggatagtagct

SEQ ID NO: 6006072 - DNA, 25 bp, Homo sapien
cggatttaatagactcagccaacga

SEQ ID NO: 6006073 - DNA, 25 bp, Homo sapien
tcgtcgctaacaaagtctaacatat

SEQ ID NO: 6006074 - DNA, 25 bp, Homo sapien
aagagatagaatcaccgtagatgat

SEQ ID NO: 6006075 - DNA, 25 bp, Homo sapien
cataaagtggggatagtagcttcat

SEQ ID NO: 6006076 - DNA, 25 bp, Homo sapien
acagtgcaacttgatatcaggttcc

SEQ ID NO: 6006077 - DNA, 25 bp, Homo sapien
gctttggcaacttgtttatattgta

SEQ ID NO: 6006078 - DNA, 25 bp, Homo sapien
tagctgggatcataatcttcgccat

SEQ ID NO: 6006079 - DNA, 25 bp, Homo sapien
gggaaggaccaatgttcctttggga

SEQ ID NO: 6006080 - DNA, 25 bp, Homo sapien
gtctgtaaaagaagcctgattcaaa

SEQ ID NO: 6006081 - DNA, 25 bp, Homo sapien
cttcctgacttgagcggccttttct

SEQ ID NO: 6006082 - DNA, 25 bp, Homo sapien
cacgatctaaataatcaaaatatgc

SEQ ID NO: 6006083 - DNA, 25 bp, Homo sapien
ggcttggggcagagcctctcgcata

SEQ ID NO: 6006084 - DNA, 25 bp, Homo sapien
aacacccaatcatagttgaacttgg

SEQ ID NO: 6006085 - DNA, 25 bp, Homo sapien
cttcatcattcaaaaacacccaatc

SEQ ID NO: 6006086 - DNA, 25 bp, Homo sapien
aaaatatgcggagtatgctggagat

SEQ ID NO: 6006087 - DNA, 25 bp, Homo sapien
gtagtcgatatcacagtgcaacttg

SEQ ID NO: 6006088 - DNA, 25 bp, Homo sapien
tcgtagtcatccatcaaaggatgtc

SEQ ID NO: 6006089 - DNA, 25 bp, Homo sapien
tagttccactttcgagtatttatag

SEQ ID NO: 6006090 - DNA, 25 bp, Homo sapien
tttgttgtaccactaactaaagctg

SEQ ID NO: 6006091 - DNA, 25 bp, Homo sapien
tattattttcatggataagctcagg

SEQ ID NO: 6006092 - DNA, 25 bp, Homo sapien
tctccttcctgacttgagcggcctt

SEQ ID NO: 6006093 - DNA, 25 bp, Homo sapien
catgaataactgtgccatgtgaaat

SEQ ID NO: 6006094 - DNA, 25 bp, Homo sapien
caaagcagcaatttcaaaattagac

SEQ ID NO: 6006095 - DNA, 25 bp, Homo sapien
cacaaatccaaagcagcaatttcaa

SEQ ID NO: 6006096 - DNA, 25 bp, Homo sapien
gtctgtaagagatagaatcaccgta

SEQ ID NO: 6006097 - DNA, 25 bp, Homo sapien
agtatttatagcccgagccggaaga

SEQ ID NO: 6006098 - DNA, 25 bp, Homo sapien
tagaatcaccgtagatgattctctt

SEQ ID NO: 6006099 - DNA, 25 bp, Homo sapien
agactcagccaacgaatatagatct

SEQ ID NO: 6006100 - DNA, 25 bp, Homo sapien
catgaatttgaagacatcgtagtcg

SEQ ID NO: 6006101 - DNA, 25 bp, Homo sapien
ttgccaaccagcaggctttggcaac

SEQ ID NO: 6006102 - DNA, 25 bp, Homo sapien
aagaacacatacacagtaaacacgg

SEQ ID NO: 6006103 - DNA, 25 bp, Homo sapien
aaatctatcttccacggatttaata

SEQ ID NO: 6006104 - DNA, 25 bp, Homo sapien
ttcatcagtgaactcttcatcattc

SEQ ID NO: 6006105 - DNA, 25 bp, Homo sapien
atgtgaaatctttgcttggatcaca

SEQ ID NO: 6006106 - DNA, 25 bp, Homo sapien
cagggaaggaccaatgttcctttgg

SEQ ID NO: 6006107 - DNA, 25 bp, Homo sapien
tatactttggtagttccactttcga

SEQ ID NO: 6006108 - DNA, 25 bp, Homo sapien
agatgattctcttctcacccatctc

SEQ ID NO: 6006109 - DNA, 25 bp, Homo sapien
gatggatttcagagcggtccaagaa

SEQ ID NO: 6006110 - DNA, 25 bp, Homo sapien
atctttcataaaagaatccaccttc

SEQ ID NO: 6006111 - DNA, 25 bp, Homo sapien
tggagttaaatctatcttccacgga

SEQ ID NO: 6006112 - DNA, 25 bp, Homo sapien
gcaccaatagaatgaactggagcat

SEQ ID NO: 6006113 - DNA, 25 bp, Homo sapien
gagttaaatctatcttccacggatt

SEQ ID NO: 6006114 - DNA, 25 bp, Homo sapien
ctttcataaaagaatccaccttcac

SEQ ID NO: 6006115 - DNA, 25 bp, Homo sapien
ttcaaaaacacccaatcatagttga

SEQ ID NO: 6006116 - DNA, 25 bp, Homo sapien
tgattcaaaacgacacatgtgtctg

SEQ ID NO: 6006117 - DNA, 25 bp, Homo sapien
ccaaaaatggcacaaattgtatgaa

SEQ ID NO: 6006118 - DNA, 25 bp, Homo sapien
atgtgtctgtaagagatagaatcac

SEQ ID NO: 6006119 - DNA, 25 bp, Homo sapien
gagatagaatcaccgtagatgattc

SEQ ID NO: 6006120 - DNA, 25 bp, Homo sapien
gccagtctgatacttgtgtctattg

SEQ ID NO: 6006121 - DNA, 25 bp, Homo sapien
actagagtgacaaaagtggcctttt

SEQ ID NO: 6006122 - DNA, 25 bp, Homo sapien
aactggagcatcaccccatctttca

SEQ ID NO: 6006123 - DNA, 25 bp, Homo sapien
caaccgatatggttttgccaaccag

SEQ ID NO: 6006124 - DNA, 25 bp, Homo sapien
gttccacacgccaataccaatcgta

SEQ ID NO: 6006125 - DNA, 25 bp, Homo sapien
cctgattcaaaacgacacatgtgtc

SEQ ID NO: 6006126 - DNA, 25 bp, Homo sapien
tgaactcttcatcattcaaaaacac

SEQ ID NO: 6006127 - DNA, 25 bp, Homo sapien
cacggcgaccagaagaagtcctaat

SEQ ID NO: 6006128 - DNA, 25 bp, Homo sapien
tccacggatttaatagactcagcca

SEQ ID NO: 6006129 - DNA, 25 bp, Homo sapien
tttcatggataagctcaggatgggc

SEQ ID NO: 6006130 - DNA, 25 bp, Homo sapien
agtgaactcttcatcattcaaaaac

SEQ ID NO: 6006131 - DNA, 25 bp, Homo sapien
gtggggatagtagcttcatactcct

SEQ ID NO: 6006132 - DNA, 25 bp, Homo sapien
ctggagcatcaccccatctttcata

SEQ ID NO: 6006133 - DNA, 25 bp, Homo sapien
catctccttcctgacttgagcggcc

SEQ ID NO: 6006134 - DNA, 25 bp, Homo sapien
tcttcatcaatccactcagggaagg

SEQ ID NO: 6006135 - DNA, 25 bp, Homo sapien
tttgaagacatcgtagtcgatatca

SEQ ID NO: 6006136 - DNA, 25 bp, Homo sapien
agcctgattcaaaacgacacatgtg

SEQ ID NO: 6006137 - DNA, 25 bp, Homo sapien
tcatccatcaaaggatgtctgtaaa

SEQ ID NO: 6006138 - DNA, 25 bp, Homo sapien
gcccgagccggaagatagcacggta

SEQ ID NO: 6006139 - DNA, 25 bp, Homo sapien
tgcggagtatgctggagatctccac

SEQ ID NO: 6006140 - DNA, 25 bp, Homo sapien
aatttacgagtagtctcccataaag

SEQ ID NO: 6006141 - DNA, 25 bp, Homo sapien
aataactgtgccatgtgaaatcttt

SEQ ID NO: 6006142 - DNA, 25 bp, Homo sapien
ttacgcactagagtgacaaaagtgg

SEQ ID NO: 6006143 - DNA, 25 bp, Homo sapien
tagcccgagccggaagatagcacgg

SEQ ID NO: 6006144 - DNA, 25 bp, Homo sapien
ttattttcatggataagctcaggat

SEQ ID NO: 6006145 - DNA, 25 bp, Homo sapien
gaggaccggtatactttggtagttc

SEQ ID NO: 6006146 - DNA, 25 bp, Homo sapien
catattattttcatggataagctca

SEQ ID NO: 6006147 - DNA, 25 bp, Homo sapien
ccaatgttcctttgggatgacaccg

SEQ ID NO: 6006148 - DNA, 25 bp, Homo sapien
atctaaataatcaaaatatgcggag

SEQ ID NO: 6006149 - DNA, 25 bp, Homo sapien
atcttccacggatttaatagactca

SEQ ID NO: 6006150 - DNA, 25 bp, Homo sapien
gtagatgattctcttctcacccatc

SEQ ID NO: 6006151 - DNA, 25 bp, Homo sapien
aatgaactggagcatcaccccatct

SEQ ID NO: 6006152 - DNA, 25 bp, Homo sapien
cacccaatcatagttgaacttggag

SEQ ID NO: 6006153 - DNA, 25 bp, Homo sapien
caatagaatgaactggagcatcacc

SEQ ID NO: 6006154 - DNA, 25 bp, Homo sapien
gaccggtatactttggtagttccac

SEQ ID NO: 6006155 - DNA, 25 bp, Homo sapien
agagcggtccaagaacagcgcagca

SEQ ID NO: 6006156 - DNA, 25 bp, Homo sapien
ttcataaaagaatccaccttcacga

SEQ ID NO: 6006157 - DNA, 25 bp, Homo sapien
cgagtatttatagcccgagccggaa

SEQ ID NO: 6006158 - DNA, 25 bp, Homo sapien
gtctcccataaagtggggatagtag

SEQ ID NO: 6006159 - DNA, 25 bp, Homo sapien
gggcagagcctctcgcatactgagc

SEQ ID NO: 6006160 - DNA, 25 bp, Homo sapien
gatcacagtcacatttgttagccag

SEQ ID NO: 6006161 - DNA, 25 bp, Homo sapien
agtaaacacggcgaccagaagaagt

SEQ ID NO: 6006162 - DNA, 25 bp, Homo sapien
actaaagctgacgtaacgtttttga

SEQ ID NO: 6006163 - DNA, 25 bp, Homo sapien
caaagtctaacatattattttcatg

SEQ ID NO: 6006164 - DNA, 25 bp, Homo sapien
ctttcatgaatttgaagacatcgta

SEQ ID NO: 6006165 - DNA, 25 bp, Homo sapien
taattttttgtaaacaggctgcttg

SEQ ID NO: 6006166 - DNA, 25 bp, Homo sapien
ccaatatcaccgaagtgatggattt

SEQ ID NO: 6006167 - DNA, 25 bp, Homo sapien
gtccctgatcgtcgctaacaaagtc

SEQ ID NO: 6006168 - DNA, 25 bp, Homo sapien
gaccagaagaagtcctaattttttg

SEQ ID NO: 6006169 - DNA, 25 bp, Homo sapien
caatcatagttgaacttggagttaa

SEQ ID NO: 6006170 - DNA, 25 bp, Homo sapien
caccgtattttgttgtaccactaac

SEQ ID NO: 6006171 - DNA, 25 bp, Homo sapien
gagatctccacaaatccaaagcagc

SEQ ID NO: 6006172 - DNA, 25 bp, Homo sapien
cctctcgcatactgagctccatgaa

SEQ ID NO: 6006173 - DNA, 25 bp, Homo sapien
tttatagcccgagccggaagatagc

SEQ ID NO: 6006174 - DNA, 25 bp, Homo sapien
tggcaacttgtttatattgtagaat

SEQ ID NO: 6006175 - DNA, 25 bp, Homo sapien
gaaatctttgcttggatcacagtca

SEQ ID NO: 6006176 - DNA, 25 bp, Homo sapien
catcaatccactcagggaaggacca

SEQ ID NO: 6006177 - DNA, 25 bp, Homo sapien
cgccaataccaatcgtagtcatcca

SEQ ID NO: 6006178 - DNA, 25 bp, Homo sapien
tatcaccgaagtgatggatttcaga

SEQ ID NO: 6006179 - DNA, 25 bp, Homo sapien
gaacagcgcagcaccaatagaatga

SEQ ID NO: 6006180 - DNA, 25 bp, Homo sapien
agcctctcgcatactgagctccatg

SEQ ID NO: 6006181 - DNA, 25 bp, Homo sapien
gtactttgggcttggggcagagcct

SEQ ID NO: 6006182 - DNA, 25 bp, Homo sapien
ctccatgaaagaacacatacacagt

SEQ ID NO: 6006183 - DNA, 25 bp, Homo sapien
gaccaaaaatggcacaaattgtatg

SEQ ID NO: 6006184 - DNA, 25 bp, Homo sapien
tttgcttggatcacagtcacatttg

SEQ ID NO: 6006185 - DNA, 25 bp, Homo sapien
aatatcaccgaagtgatggatttca

SEQ ID NO: 6006186 - DNA, 25 bp, Homo sapien
taaagtggggatagtagcttcatac

SEQ ID NO: 6006187 - DNA, 25 bp, Homo sapien
taccaatcgtagtcatccatcaaag

SEQ ID NO: 6006188 - DNA, 25 bp, Homo sapien
tgttcctttgggatgacaccgtatt

SEQ ID NO: 6006189 - DNA, 25 bp, Homo sapien
accgatatggttttgccaaccagca

SEQ ID NO: 6006190 - DNA, 25 bp, Homo sapien
gacatcgtagtcgatatcacagtgc

SEQ ID NO: 6006191 - DNA, 25 bp, Homo sapien
agtgcaacttgatatcaggttccac

SEQ ID NO: 6006192 - DNA, 25 bp, Homo sapien
caaaattagaccaaaaatggcacaa

SEQ ID NO: 6006193 - DNA, 25 bp, Homo sapien
atttcaaaattagaccaaaaatggc

SEQ ID NO: 6006194 - DNA, 25 bp, Homo sapien
ctttggtagttccactttcgagtat

SEQ ID NO: 6006195 - DNA, 25 bp, Homo sapien
gtcctaattttttgtaaacaggctg

SEQ ID NO: 6006196 - DNA, 25 bp, Homo sapien
tcaggttccacacgccaataccaat

SEQ ID NO: 6006197 - DNA, 25 bp, Homo sapien
caccttcacgatctaaataatcaaa

SEQ ID NO: 6006198 - DNA, 25 bp, Homo sapien
aataccaatcgtagtcatccatcaa

SEQ ID NO: 6006199 - DNA, 25 bp, Homo sapien
aatctttgcttggatcacagtcaca

SEQ ID NO: 6006200 - DNA, 25 bp, Homo sapien
aaatggcacaaattgtatgaaagtc

SEQ ID NO: 6006201 - DNA, 25 bp, Homo sapien
tcagccaacgaatatagatctctat

SEQ ID NO: 6006202 - DNA, 25 bp, Homo sapien
ttaatggaaatggcaaaggcatact

SEQ ID NO: 6006203 - DNA, 25 bp, Homo sapien
ctcttcatcattcaaaaacacccaa

SEQ ID NO: 6006204 - DNA, 25 bp, Homo sapien
aatttagtagtacatgaataactgt

SEQ ID NO: 6006205 - DNA, 25 bp, Homo sapien
ctgtaagagatagaatcaccgtaga

SEQ ID NO: 6006206 - DNA, 25 bp, Homo sapien
atagcacggtactgtactttgggct

SEQ ID NO: 6006207 - DNA, 25 bp, Homo sapien
tgggatgacaccgtattttgttgta

SEQ ID NO: 6006208 - DNA, 25 bp, Homo sapien
agtcatccatcaaaggatgtctgta

SEQ ID NO: 6006209 - DNA, 25 bp, Homo sapien
ttcatactccttaatggaaatggca

SEQ ID NO: 6006210 - DNA, 25 bp, Homo sapien
aagacatcgtagtcgatatcacagt

SEQ ID NO: 6006211 - DNA, 25 bp, Homo sapien
tgaacttggagttaaatctatcttc

SEQ ID NO: 6006212 - DNA, 25 bp, Homo sapien
taatagactcagccaacgaatatag

SEQ ID NO: 6006213 - DNA, 25 bp, Homo sapien
gagtgaaatggaacatggtaataac

SEQ ID NO: 6006214 - DNA, 25 bp, Homo sapien
gacaaaagtggccttttcccgagga

SEQ ID NO: 6006215 - DNA, 25 bp, Homo sapien
ataagctcaggatgggcttccatga

SEQ ID NO: 6006216 - DNA, 25 bp, Homo sapien
tctccacaaatccaaagcagcaatt

SEQ ID NO: 6006217 - DNA, 25 bp, Homo sapien
cacggtactgtactttgggcttggg

SEQ ID NO: 6006218 - DNA, 25 bp, Homo sapien
ccaataccaatcgtagtcatccatc

SEQ ID NO: 6006219 - DNA, 25 bp, Homo sapien
gatctctattacgcactagagtgac

SEQ ID NO: 6006220 - DNA, 25 bp, Homo sapien
gcaaaggcatactttttcttattgt

SEQ ID NO: 6006221 - DNA, 25 bp, Homo sapien
tcgtagtcgatatcacagtgcaact

SEQ ID NO: 6006222 - DNA, 25 bp, Homo sapien
gctgacgtaacgtttttgaattcat

SEQ ID NO: 6006223 - DNA, 25 bp, Homo sapien
gtatgaaagtccctgatcgtcgcta

SEQ ID NO: 6006224 - DNA, 25 bp, Homo sapien
tctcgcatactgagctccatgaaag

SEQ ID NO: 6006225 - DNA, 25 bp, Homo sapien
cttgtttatattgtagaatttagta

SEQ ID NO: 6006226 - DNA, 25 bp, Homo sapien
ctgacttgagcggccttttcttcat

SEQ ID NO: 6006227 - DNA, 25 bp, Homo sapien
aggaccaatgttcctttgggatgac

SEQ ID NO: 6006228 - DNA, 25 bp, Homo sapien
aaaacacccaatcatagttgaactt

SEQ ID NO: 6006229 - DNA, 25 bp, Homo sapien
ggctgcttgctagctgggatcataa

SEQ ID NO: 6006230 - DNA, 25 bp, Homo sapien
tgtgccatgtgaaatctttgcttgg

SEQ ID NO: 6006231 - DNA, 25 bp, Homo sapien
tggatttcagagcggtccaagaaca

SEQ ID NO: 6006232 - DNA, 25 bp, Homo sapien
caaaaacacccaatcatagttgaac

SEQ ID NO: 6006233 - DNA, 25 bp, Homo sapien
tctctattacgcactagagtgacaa

SEQ ID NO: 6006234 - DNA, 25 bp, Homo sapien
atacacagtaaacacggcgaccaga

SEQ ID NO: 6006235 - DNA, 25 bp, Homo sapien
tagtagtacatgaataactgtgcca

SEQ ID NO: 6006236 - DNA, 25 bp, Homo sapien
cccatctccttcctgacttgagcgg

SEQ ID NO: 6006237 - DNA, 25 bp, Homo sapien
ttgatatcaggttccacacgccaat

SEQ ID NO: 6006238 - DNA, 25 bp, Homo sapien
cggaagatagcacggtactgtactt

SEQ ID NO: 6006239 - DNA, 25 bp, Homo sapien
cccataaagtggggatagtagcttc

SEQ ID NO: 6006240 - DNA, 25 bp, Homo sapien
tgtttatattgtagaatttagtagt

SEQ ID NO: 6006241 - DNA, 25 bp, Homo sapien
atgctggagatctccacaaatccaa

SEQ ID NO: 6006242 - DNA, 25 bp, Homo sapien
tcccgaggaccggtatactttggta

SEQ ID NO: 6006243 - DNA, 25 bp, Homo sapien
tgggcttccatgaatttacgagtag

SEQ ID NO: 6006244 - DNA, 25 bp, Homo sapien
aagaacagcgcagcaccaatagaat

SEQ ID NO: 6006245 - DNA, 25 bp, Homo sapien
aaataatcaaaatatgcggagtatg

SEQ ID NO: 6006246 - DNA, 25 bp, Homo sapien
ttcatcaatccactcagggaaggac

SEQ ID NO: 6006247 - DNA, 25 bp, Homo sapien
ccctgatcgtcgctaacaaagtcta

SEQ ID NO: 6006248 - DNA, 25 bp, Homo sapien
aaaacgacacatgtgtctgtaagag

SEQ ID NO: 6006249 - DNA, 25 bp, Homo sapien
tattgtagaatttagtagtacatga

SEQ ID NO: 6006250 - DNA, 25 bp, Homo sapien
agcggccttttcttcatcaatccac

SEQ ID NO: 6006251 - DNA, 25 bp, Homo sapien
tgagcggccttttcttcatcaatcc

SEQ ID NO: 6006252 - DNA, 25 bp, Homo sapien
ctgatcgtcgctaacaaagtctaac

SEQ ID NO: 6006253 - DNA, 25 bp, Homo sapien
caatttcaaaattagaccaaaaatg

SEQ ID NO: 6006254 - DNA, 25 bp, Homo sapien
tcatggataagctcaggatgggctt

SEQ ID NO: 6006255 - DNA, 25 bp, Homo sapien
tgccatgtgaaatctttgcttggat

SEQ ID NO: 6006256 - DNA, 25 bp, Homo sapien
ctccttaatggaaatggcaaaggca

SEQ ID NO: 6006257 - DNA, 25 bp, Homo sapien
acaggagtgaaatggaacatggtaa

SEQ ID NO: 6006258 - DNA, 25 bp, Homo sapien
ccaacgaatatagatctctattacg

SEQ ID NO: 6006259 - DNA, 25 bp, Homo sapien
ttgtctttcatgaatttgaagacat

SEQ ID NO: 6006260 - DNA, 25 bp, Homo sapien
agaatccaccttcacgatctaaata

SEQ ID NO: 6006261 - DNA, 25 bp, Homo sapien
caaaggatgtctgtaaaagaagcct

SEQ ID NO: 6006262 - DNA, 25 bp, Homo sapien
tatagcccgagccggaagatagcac

SEQ ID NO: 6006263 - DNA, 25 bp, Homo sapien
ttctcacccatctccttcctgactt

SEQ ID NO: 6006264 - DNA, 25 bp, Homo sapien
aactcttcatcattcaaaaacaccc

SEQ ID NO: 6006265 - DNA, 25 bp, Homo sapien
ttgctagctgggatcataatcttcg

SEQ ID NO: 6006266 - DNA, 25 bp, Homo sapien
accagcaggctttggcaacttgttt

SEQ ID NO: 6006267 - DNA, 25 bp, Homo sapien
agtagtctcccataaagtggggata

SEQ ID NO: 6006268 - DNA, 25 bp, Homo sapien
aatgttcctttgggatgacaccgta

SEQ ID NO: 6006269 - DNA, 25 bp, Homo sapien
gtccaagaacagcgcagcaccaata

SEQ ID NO: 6006270 - DNA, 25 bp, Homo sapien
accaatagaatgaactggagcatca

SEQ ID NO: 6006271 - DNA, 25 bp, Homo sapien
agtcgatatcacagtgcaacttgat

SEQ ID NO: 6006272 - DNA, 25 bp, Homo sapien
attttgttgtaccactaactaaagc

SEQ ID NO: 6006273 - DNA, 25 bp, Homo sapien
ggtatactttggtagttccactttc

SEQ ID NO: 6006274 - DNA, 25 bp, Homo sapien
cactttcgagtatttatagcccgag

SEQ ID NO: 6006275 - DNA, 25 bp, Homo sapien
ccttcacgatctaaataatcaaaat

SEQ ID NO: 6006276 - DNA, 25 bp, Homo sapien
tcaggatgggcttccatgaatttac

SEQ ID NO: 6006277 - DNA, 25 bp, Homo sapien
tggaacatggtaataaccaatatca

SEQ ID NO: 6006278 - DNA, 25 bp, Homo sapien
aggttccacacgccaataccaatcg

SEQ ID NO: 6006279 - DNA, 25 bp, Homo sapien
gtgaaatctttgcttggatcacagt

SEQ ID NO: 6006280 - DNA, 25 bp, Homo sapien
acgtaacgtttttgaattcatcagt

SEQ ID NO: 6006281 - DNA, 25 bp, Homo sapien
tcacatttgttagccagtctgatac

SEQ ID NO: 6006282 - DNA, 25 bp, Homo sapien
acatttgttagccagtctgatactt

SEQ ID NO: 6006283 - DNA, 25 bp, Homo sapien
gtaccactaactaaagctgacgtaa

SEQ ID NO: 6006284 - DNA, 25 bp, Homo sapien
gtaagagatagaatcaccgtagatg

SEQ ID NO: 6006285 - DNA, 25 bp, Homo sapien
ctaacaaagtctaacatattatttt

SEQ ID NO: 6006286 - DNA, 25 bp, Homo sapien
ttcctttgggatgacaccgtatttt

SEQ ID NO: 6006287 - DNA, 25 bp, Homo sapien
caaattgtatgaaagtccctgatcg

SEQ ID NO: 6006288 - DNA, 25 bp, Homo sapien
cgatctaaataatcaaaatatgcgg

SEQ ID NO: 6006289 - DNA, 25 bp, Homo sapien
acatacacagtaaacacggcgacca

SEQ ID NO: 6006290 - DNA, 25 bp, Homo sapien
actcagccaacgaatatagatctct

SEQ ID NO: 6006291 - DNA, 25 bp, Homo sapien
cacggatttaatagactcagccaac

SEQ ID NO: 6006292 - DNA, 25 bp, Homo sapien
aattgtatgaaagtccctgatcgtc

SEQ ID NO: 6006293 - DNA, 25 bp, Homo sapien
cggagtatgctggagatctccacaa

SEQ ID NO: 6006294 - DNA, 25 bp, Homo sapien
gatacttgtgtctattggacaggag

SEQ ID NO: 6006295 - DNA, 25 bp, Homo sapien
tattacgcactagagtgacaaaagt

SEQ ID NO: 6006296 - DNA, 25 bp, Homo sapien
tctattggacaggagtgaaatggaa

SEQ ID NO: 6006297 - DNA, 25 bp, Homo sapien
gatttcagagcggtccaagaacagc

SEQ ID NO: 6006298 - DNA, 25 bp, Homo sapien
cgatatggttttgccaaccagcagg

SEQ ID NO: 6006299 - DNA, 25 bp, Homo sapien
tttgggcttggggcagagcctctcg

SEQ ID NO: 6006300 - DNA, 25 bp, Homo sapien
aggatgggcttccatgaatttacga

SEQ ID NO: 6006301 - DNA, 25 bp, Homo sapien
gccggaagatagcacggtactgtac

SEQ ID NO: 6006302 - DNA, 25 bp, Homo sapien
tggcaaaggcatactttttcttatt

SEQ ID NO: 6006303 - DNA, 25 bp, Homo sapien
aacttgtttatattgtagaatttag

SEQ ID NO: 6006304 - DNA, 25 bp, Homo sapien
cttgagcggccttttcttcatcaat

SEQ ID NO: 6006305 - DNA, 25 bp, Homo sapien
ttcatgaatttgaagacatcgtagt

SEQ ID NO: 6006306 - DNA, 25 bp, Homo sapien
ggggatagtagcttcatactcctta

SEQ ID NO: 6006307 - DNA, 25 bp, Homo sapien
aagaagcctgattcaaaacgacaca

SEQ ID NO: 6006308 - DNA, 25 bp, Homo sapien
tagaccaaaaatggcacaaattgta

SEQ ID NO: 6006309 - DNA, 25 bp, Homo sapien
aacaggctgcttgctagctgggatc

SEQ ID NO: 6006310 - DNA, 25 bp, Homo sapien
aatggaaatggcaaaggcatacttt

SEQ ID NO: 6006311 - DNA, 25 bp, Homo sapien
agaatttagtagtacatgaataact

SEQ ID NO: 6006312 - DNA, 25 bp, Homo sapien
gctcaggatgggcttccatgaattt

SEQ ID NO: 6006313 - DNA, 25 bp, Homo sapien
atgacaccgtattttgttgtaccac

SEQ ID NO: 6006314 - DNA, 25 bp, Homo sapien
catcgtagtcgatatcacagtgcaa

SEQ ID NO: 6006315 - DNA, 25 bp, Homo sapien
gttccactttcgagtatttatagcc

SEQ ID NO: 6006316 - DNA, 25 bp, Homo sapien
gatatcaggttccacacgccaatac

SEQ ID NO: 6006317 - DNA, 25 bp, Homo sapien
ttggtagttccactttcgagtattt

SEQ ID NO: 6006318 - DNA, 25 bp, Homo sapien
tatagatctctattacgcactagag

SEQ ID NO: 6006319 - DNA, 25 bp, Homo sapien
tatattgtagaatttagtagtacat

SEQ ID NO: 6006320 - DNA, 25 bp, Homo sapien
ctaaataatcaaaatatgcggagta

SEQ ID NO: 6006321 - DNA, 25 bp, Homo sapien
ttcacgatctaaataatcaaaatat

SEQ ID NO: 6006322 - DNA, 25 bp, Homo sapien
tagcttcatactccttaatggaaat

SEQ ID NO: 6006323 - DNA, 25 bp, Homo sapien
cctaattttttgtaaacaggctgct

SEQ ID NO: 6006324 - DNA, 25 bp, Homo sapien
cataaaagaatccaccttcacgatc

SEQ ID NO: 6006325 - DNA, 25 bp, Homo sapien
agatagcacggtactgtactttggg

SEQ ID NO: 6006326 - DNA, 25 bp, Homo sapien
ggataagctcaggatgggcttccat

SEQ ID NO: 6006327 - DNA, 25 bp, Homo sapien
agtcacatttgttagccagtctgat

SEQ ID NO: 6006328 - DNA, 25 bp, Homo sapien
tactgtactttgggcttggggcaga

SEQ ID NO: 6006329 - DNA, 25 bp, Homo sapien
tcctgacttgagcggccttttcttc

SEQ ID NO: 6006330 - DNA, 25 bp, Homo sapien
aagcagcaatttcaaaattagacca

SEQ ID NO: 6006331 - DNA, 25 bp, Homo sapien
gttaaatctatcttccacggattta

SEQ ID NO: 6006332 - DNA, 25 bp, Homo sapien
ggatgtctgtaaaagaagcctgatt

SEQ ID NO: 6006333 - DNA, 25 bp, Homo sapien
aacgaatatagatctctattacgca

SEQ ID NO: 6006334 - DNA, 25 bp, Homo sapien
cggtccaagaacagcgcagcaccaa

SEQ ID NO: 6006335 - DNA, 25 bp, Homo sapien
aatcaaaatatgcggagtatgctgg

SEQ ID NO: 6006336 - DNA, 25 bp, Homo sapien
ctgatacttgtgtctattggacagg

SEQ ID NO: 6006337 - DNA, 25 bp, Homo sapien
tttgaattcatcagtgaactcttca

SEQ ID NO: 6006338 - DNA, 25 bp, Homo sapien
tagatctctattacgcactagagtg

SEQ ID NO: 6006339 - DNA, 25 bp, Homo sapien
tccactttcgagtatttatagcccg

SEQ ID NO: 6006340 - DNA, 25 bp, Homo sapien
catattgaaacattgcatgaaattg

SEQ ID NO: 6006341 - DNA, 25 bp, Homo sapien
acctaattcccattagtgctaagta

SEQ ID NO: 6006342 - DNA, 25 bp, Homo sapien
tgggtggcccctctaaagttgagga

SEQ ID NO: 6006343 - DNA, 25 bp, Homo sapien
tttcgttacgcaaagccgctaaccg

SEQ ID NO: 6006344 - DNA, 25 bp, Homo sapien
atgctttccagaacaatccgtacac

SEQ ID NO: 6006345 - DNA, 25 bp, Homo sapien
ggactccgagagatctatatcttgg

SEQ ID NO: 6006346 - DNA, 25 bp, Homo sapien
tcaatatcctcatttctcttattcc

SEQ ID NO: 6006347 - DNA, 25 bp, Homo sapien
agctgcgacggtttacaacatcatg

SEQ ID NO: 6006348 - DNA, 25 bp, Homo sapien
acaccggtgatgcctacccagctga

SEQ ID NO: 6006349 - DNA, 25 bp, Homo sapien
ggcgtgaagaaggcagtggcctttt

SEQ ID NO: 6006350 - DNA, 25 bp, Homo sapien
gatcacccacaggaattgttttgat

SEQ ID NO: 6006351 - DNA, 25 bp, Homo sapien
ataaggataaatttaagagatgcga

SEQ ID NO: 6006352 - DNA, 25 bp, Homo sapien
ttattccactaccgggtcatccatc

SEQ ID NO: 6006353 - DNA, 25 bp, Homo sapien
ttgaggaaacatatgattttttgta

SEQ ID NO: 6006354 - DNA, 25 bp, Homo sapien
cagaagacaattgctaaatatattg

SEQ ID NO: 6006355 - DNA, 25 bp, Homo sapien
aaggcattggactccgagagatcta

SEQ ID NO: 6006356 - DNA, 25 bp, Homo sapien
tgtggagacagattaaggcattgga

SEQ ID NO: 6006357 - DNA, 25 bp, Homo sapien
tctctacccatggatgttgttaaca

SEQ ID NO: 6006358 - DNA, 25 bp, Homo sapien
ccaactctattctaatcaactacct

SEQ ID NO: 6006359 - DNA, 25 bp, Homo sapien
tctcttattccactaccgggtcatc

SEQ ID NO: 6006360 - DNA, 25 bp, Homo sapien
attgttttgatgaacatgggtggcc

SEQ ID NO: 6006361 - DNA, 25 bp, Homo sapien
ctaatcaaggccttctccgaaaata

SEQ ID NO: 6006362 - DNA, 25 bp, Homo sapien
agttggaccaaaaccatggttggga

SEQ ID NO: 6006363 - DNA, 25 bp, Homo sapien
caactgaccattacaagatcatttt

SEQ ID NO: 6006364 - DNA, 25 bp, Homo sapien
gtctaatcaaggccttctccgaaaa

SEQ ID NO: 6006365 - DNA, 25 bp, Homo sapien
atttaagagatgcgaatctttaaat

SEQ ID NO: 6006366 - DNA, 25 bp, Homo sapien
attcaacatgcagaatgcacaaaag

SEQ ID NO: 6006367 - DNA, 25 bp, Homo sapien
ttttgcacttggcaagtccaatgat

SEQ ID NO: 6006368 - DNA, 25 bp, Homo sapien
atcacaactgaccattacaagatca

SEQ ID NO: 6006369 - DNA, 25 bp, Homo sapien
ttacaagatcattttcggttacatt

SEQ ID NO: 6006370 - DNA, 25 bp, Homo sapien
atatcaccaaaaaactacaagagtt

SEQ ID NO: 6006371 - DNA, 25 bp, Homo sapien
cttacagagtaaccaactctattct

SEQ ID NO: 6006372 - DNA, 25 bp, Homo sapien
acaaatgaaggtctaatcaaggcct

SEQ ID NO: 6006373 - DNA, 25 bp, Homo sapien
tttcggttacattcaacatgcagaa

SEQ ID NO: 6006374 - DNA, 25 bp, Homo sapien
attggtatttggcaatcacgaatct

SEQ ID NO: 6006375 - DNA, 25 bp, Homo sapien
tggtctgagtatcaagccactgagg

SEQ ID NO: 6006376 - DNA, 25 bp, Homo sapien
cgtttcgttacgcaaagccgctaac

SEQ ID NO: 6006377 - DNA, 25 bp, Homo sapien
tgtatcaattatttgccgataatga

SEQ ID NO: 6006378 - DNA, 25 bp, Homo sapien
actacaagagtttccgcaacctgtc

SEQ ID NO: 6006379 - DNA, 25 bp, Homo sapien
atatcttggtcggttattgatcgtt

SEQ ID NO: 6006380 - DNA, 25 bp, Homo sapien
catggatgttgttaacaccggtgat

SEQ ID NO: 6006381 - DNA, 25 bp, Homo sapien
taaatatattgctaagtttcgtacc

SEQ ID NO: 6006382 - DNA, 25 bp, Homo sapien
agccttacgtggcgtttcgttacgc

SEQ ID NO: 6006383 - DNA, 25 bp, Homo sapien
cggaaatggtctgagtatcaagcca

SEQ ID NO: 6006384 - DNA, 25 bp, Homo sapien
attctctacccatggatgttgttaa

SEQ ID NO: 6006385 - DNA, 25 bp, Homo sapien
cctttacctctgatcatattgaaac

SEQ ID NO: 6006386 - DNA, 25 bp, Homo sapien
attttcggttacattcaacatgcag

SEQ ID NO: 6006387 - DNA, 25 bp, Homo sapien
ggaaacatatgattttttgtatcaa

SEQ ID NO: 6006388 - DNA, 25 bp, Homo sapien
ttacaacatcatgcaaaaattaaag

SEQ ID NO: 6006389 - DNA, 25 bp, Homo sapien
tccggaaatggtctgagtatcaagc

SEQ ID NO: 6006390 - DNA, 25 bp, Homo sapien
caagccactgaggtctgtaaaatct

SEQ ID NO: 6006391 - DNA, 25 bp, Homo sapien
ttataaacaaatgctaaaagatggc

SEQ ID NO: 6006392 - DNA, 25 bp, Homo sapien
ttggcaatcccaagttggaccaaaa

SEQ ID NO: 6006393 - DNA, 25 bp, Homo sapien
acaatccgtacacaaggttccttcc

SEQ ID NO: 6006394 - DNA, 25 bp, Homo sapien
aatctttaaatggcaaccagacctt

SEQ ID NO: 6006395 - DNA, 25 bp, Homo sapien
ccgcagaaacttataaacaaatgct

SEQ ID NO: 6006396 - DNA, 25 bp, Homo sapien
aatgacctaattcccattagtgcta

SEQ ID NO: 6006397 - DNA, 25 bp, Homo sapien
tccgtacacaaggttccttcctaag

SEQ ID NO: 6006398 - DNA, 25 bp, Homo sapien
ggtcatccatcaacgaattgtggag

SEQ ID NO: 6006399 - DNA, 25 bp, Homo sapien
ggttacattcaacatgcagaatgca

SEQ ID NO: 6006400 - DNA, 25 bp, Homo sapien
tccttcctaagaagatcacaactga

SEQ ID NO: 6006401 - DNA, 25 bp, Homo sapien
agatcacaactgaccattacaagat

SEQ ID NO: 6006402 - DNA, 25 bp, Homo sapien
gcacaaaagagatcacccacaggaa

SEQ ID NO: 6006403 - DNA, 25 bp, Homo sapien
atgcacaaaagagatcacccacagg

SEQ ID NO: 6006404 - DNA, 25 bp, Homo sapien
aatatagggaaattggtgggggctc

SEQ ID NO: 6006405 - DNA, 25 bp, Homo sapien
catggcagatctcgtcaaaagccac

SEQ ID NO: 6006406 - DNA, 25 bp, Homo sapien
ctgcgacggtttacaacatcatgca

SEQ ID NO: 6006407 - DNA, 25 bp, Homo sapien
aaatgctaaaagatggcgtgaagaa

SEQ ID NO: 6006408 - DNA, 25 bp, Homo sapien
ttagataaaacctgtccagaaacgg

SEQ ID NO: 6006409 - DNA, 25 bp, Homo sapien
tcgtacccccaagatagagaagcaa

SEQ ID NO: 6006410 - DNA, 25 bp, Homo sapien
aaatttaagagatgcgaatctttaa

SEQ ID NO: 6006411 - DNA, 25 bp, Homo sapien
gcctcataagccttacgtggcgttt

SEQ ID NO: 6006412 - DNA, 25 bp, Homo sapien
cactaccgggtcatccatcaacgaa

SEQ ID NO: 6006413 - DNA, 25 bp, Homo sapien
ctctattctaatcaactacctcttg

SEQ ID NO: 6006414 - DNA, 25 bp, Homo sapien
tacgcaaagccgctaaccgcagaaa

SEQ ID NO: 6006415 - DNA, 25 bp, Homo sapien
gctaagtttcgtacccccaagatag

SEQ ID NO: 6006416 - DNA, 25 bp, Homo sapien
gtaaccaactctattctaatcaact

SEQ ID NO: 6006417 - DNA, 25 bp, Homo sapien
ggcgtttcgttacgcaaagccgcta

SEQ ID NO: 6006418 - DNA, 25 bp, Homo sapien
taaatggcaaccagacctttattga

SEQ ID NO: 6006419 - DNA, 25 bp, Homo sapien
tgggagcgcagacagctgaaattgc

SEQ ID NO: 6006420 - DNA, 25 bp, Homo sapien
aatatcctcatttctcttattccac

SEQ ID NO: 6006421 - DNA, 25 bp, Homo sapien
gaacaatccgtacacaaggttcctt

SEQ ID NO: 6006422 - DNA, 25 bp, Homo sapien
atttgccgataatgacctaattccc

SEQ ID NO: 6006423 - DNA, 25 bp, Homo sapien
aagccacttacagagtaaccaactc

SEQ ID NO: 6006424 - DNA, 25 bp, Homo sapien
ccaaaaaactacaagagtttccgca

SEQ ID NO: 6006425 - DNA, 25 bp, Homo sapien
attgttttccgcacattctctaccc

SEQ ID NO: 6006426 - DNA, 25 bp, Homo sapien
ataaacaaatgctaaaagatggcgt

SEQ ID NO: 6006427 - DNA, 25 bp, Homo sapien
ctatatcttggtcggttattgatcg

SEQ ID NO: 6006428 - DNA, 25 bp, Homo sapien
attgaaggcatggcagatctcgtca

SEQ ID NO: 6006429 - DNA, 25 bp, Homo sapien
agacctttattgaaggcatggcaga

SEQ ID NO: 6006430 - DNA, 25 bp, Homo sapien
gcacttggcaagtccaatgatcctg

SEQ ID NO: 6006431 - DNA, 25 bp, Homo sapien
tttccagaacaatccgtacacaagg

SEQ ID NO: 6006432 - DNA, 25 bp, Homo sapien
catgcagaatgcacaaaagagatca

SEQ ID NO: 6006433 - DNA, 25 bp, Homo sapien
cgcctttacctctgatcatattgaa

SEQ ID NO: 6006434 - DNA, 25 bp, Homo sapien
tcctcatttctcttattccactacc

SEQ ID NO: 6006435 - DNA, 25 bp, Homo sapien
gaaacggcgcctcataagccttacg

SEQ ID NO: 6006436 - DNA, 25 bp, Homo sapien
cttcctaagaagatcacaactgacc

SEQ ID NO: 6006437 - DNA, 25 bp, Homo sapien
tgttttgatgaacatgggtggcccc

SEQ ID NO: 6006438 - DNA, 25 bp, Homo sapien
ttattcctatcgcctttacctctga

SEQ ID NO: 6006439 - DNA, 25 bp, Homo sapien
gacagattaaggcattggactccga

SEQ ID NO: 6006440 - DNA, 25 bp, Homo sapien
atgtttattcctatcgcctttacct

SEQ ID NO: 6006441 - DNA, 25 bp, Homo sapien
ctaagaagatcacaactgaccatta

SEQ ID NO: 6006442 - DNA, 25 bp, Homo sapien
gctaaatatattgctaagtttcgta

SEQ ID NO: 6006443 - DNA, 25 bp, Homo sapien
gtatcagaagacaattgctaaatat

SEQ ID NO: 6006444 - DNA, 25 bp, Homo sapien
tccagaacaatccgtacacaaggtt

SEQ ID NO: 6006445 - DNA, 25 bp, Homo sapien
gcgcctcataagccttacgtggcgt

SEQ ID NO: 6006446 - DNA, 25 bp, Homo sapien
atccatcaacgaattgtggagacag

SEQ ID NO: 6006447 - DNA, 25 bp, Homo sapien
aggcagtggccttttctcaatatcc

SEQ ID NO: 6006448 - DNA, 25 bp, Homo sapien
gattttgcacttggcaagtccaatg

SEQ ID NO: 6006449 - DNA, 25 bp, Homo sapien
tgatcatattgaaacattgcatgaa

SEQ ID NO: 6006450 - DNA, 25 bp, Homo sapien
ttatttgccgataatgacctaattc

SEQ ID NO: 6006451 - DNA, 25 bp, Homo sapien
atgaaggtctaatcaaggccttctc

SEQ ID NO: 6006452 - DNA, 25 bp, Homo sapien
caaggttgttttattgttttccgca

SEQ ID NO: 6006453 - DNA, 25 bp, Homo sapien
ctctaaagttgaggaaacatatgat

SEQ ID NO: 6006454 - DNA, 25 bp, Homo sapien
attgtggagacagattaaggcattg

SEQ ID NO: 6006455 - DNA, 25 bp, Homo sapien
aacatgcagaatgcacaaaagagat

SEQ ID NO: 6006456 - DNA, 25 bp, Homo sapien
agcgcagacagctgaaattgcggaa

SEQ ID NO: 6006457 - DNA, 25 bp, Homo sapien
catggttgggagcgcagacagctga

SEQ ID NO: 6006458 - DNA, 25 bp, Homo sapien
ggcaagtccaatgatcctgtaaagg

SEQ ID NO: 6006459 - DNA, 25 bp, Homo sapien
gtcggttattgatcgttggcctaca

SEQ ID NO: 6006460 - DNA, 25 bp, Homo sapien
atgatcctgtaaaggacctttcatt

SEQ ID NO: 6006461 - DNA, 25 bp, Homo sapien
cagagtaaccaactctattctaatc

SEQ ID NO: 6006462 - DNA, 25 bp, Homo sapien
gagacaaggttgttttattgttttc

SEQ ID NO: 6006463 - DNA, 25 bp, Homo sapien
gttgatggcctaatgtttattccta

SEQ ID NO: 6006464 - DNA, 25 bp, Homo sapien
aattgctaaatatattgctaagttt

SEQ ID NO: 6006465 - DNA, 25 bp, Homo sapien
cggtttacaacatcatgcaaaaatt

SEQ ID NO: 6006466 - DNA, 25 bp, Homo sapien
tcttattccactaccgggtcatcca

SEQ ID NO: 6006467 - DNA, 25 bp, Homo sapien
tgcgaatctttaaatggcaaccaga

SEQ ID NO: 6006468 - DNA, 25 bp, Homo sapien
ccttacgtggcgtttcgttacgcaa

SEQ ID NO: 6006469 - DNA, 25 bp, Homo sapien
gtgggggctccccaatccggaaatg

SEQ ID NO: 6006470 - DNA, 25 bp, Homo sapien
aatatattgctaagtttcgtacccc

SEQ ID NO: 6006471 - DNA, 25 bp, Homo sapien
ctaagtatcagaagacaattgctaa

SEQ ID NO: 6006472 - DNA, 25 bp, Homo sapien
tacctctgatcatattgaaacattg

SEQ ID NO: 6006473 - DNA, 25 bp, Homo sapien
accggtgatgcctacccagctgagg

SEQ ID NO: 6006474 - DNA, 25 bp, Homo sapien
atcaactacctcttgattttgcact

SEQ ID NO: 6006475 - DNA, 25 bp, Homo sapien
gagatgcgaatctttaaatggcaac

SEQ ID NO: 6006476 - DNA, 25 bp, Homo sapien
ctatcgcctttacctctgatcatat

SEQ ID NO: 6006477 - DNA, 25 bp, Homo sapien
cctaatgtttattcctatcgccttt

SEQ ID NO: 6006478 - DNA, 25 bp, Homo sapien
tcgttacgcaaagccgctaaccgca

SEQ ID NO: 6006479 - DNA, 25 bp, Homo sapien
acgtggcgtttcgttacgcaaagcc

SEQ ID NO: 6006480 - DNA, 25 bp, Homo sapien
ctaaagttgaggaaacatatgattt

SEQ ID NO: 6006481 - DNA, 25 bp, Homo sapien
attccactaccgggtcatccatcaa

SEQ ID NO: 6006482 - DNA, 25 bp, Homo sapien
gctaaaagatggcgtgaagaaggca

SEQ ID NO: 6006483 - DNA, 25 bp, Homo sapien
tgctaagtatcagaagacaattgct

SEQ ID NO: 6006484 - DNA, 25 bp, Homo sapien
caaagttgatggcctaatgtttatt

SEQ ID NO: 6006485 - DNA, 25 bp, Homo sapien
ataatgacctaattcccattagtgc

SEQ ID NO: 6006486 - DNA, 25 bp, Homo sapien
atgctaaaagatggcgtgaagaagg

SEQ ID NO: 6006487 - DNA, 25 bp, Homo sapien
tccactaccgggtcatccatcaacg

SEQ ID NO: 6006488 - DNA, 25 bp, Homo sapien
ttacattcaacatgcagaatgcaca

SEQ ID NO: 6006489 - DNA, 25 bp, Homo sapien
agtgctaagtatcagaagacaattg

SEQ ID NO: 6006490 - DNA, 25 bp, Homo sapien
acaacatcatgcaaaaattaaagtt

SEQ ID NO: 6006491 - DNA, 25 bp, Homo sapien
acctttattgaaggcatggcagatc

SEQ ID NO: 6006492 - DNA, 25 bp, Homo sapien
ttataggttggtttggcaatcccaa

SEQ ID NO: 6006493 - DNA, 25 bp, Homo sapien
gaagacaattgctaaatatattgct

SEQ ID NO: 6006494 - DNA, 25 bp, Homo sapien
ctacaaatgaaggtctaatcaaggc

SEQ ID NO: 6006495 - DNA, 25 bp, Homo sapien
tgaagaaggcagtggccttttctca

SEQ ID NO: 6006496 - DNA, 25 bp, Homo sapien
acccttataggttggtttggcaatc

SEQ ID NO: 6006497 - DNA, 25 bp, Homo sapien
tcattttcggttacattcaacatgc

SEQ ID NO: 6006498 - DNA, 25 bp, Homo sapien
tgcagaatgcacaaaagagatcacc

SEQ ID NO: 6006499 - DNA, 25 bp, Homo sapien
cgtcaaaagccacttacagagtaac

SEQ ID NO: 6006500 - DNA, 25 bp, Homo sapien
agacaattgctaaatatattgctaa

SEQ ID NO: 6006501 - DNA, 25 bp, Homo sapien
ttagtgctaagtatcagaagacaat

SEQ ID NO: 6006502 - DNA, 25 bp, Homo sapien
gaggaaacatatgattttttgtatc

SEQ ID NO: 6006503 - DNA, 25 bp, Homo sapien
gccttttctcaatatcctcatttct

SEQ ID NO: 6006504 - DNA, 25 bp, Homo sapien
gtagctgcgacggtttacaacatca

SEQ ID NO: 6006505 - DNA, 25 bp, Homo sapien
tggcctacaaatgaaggtctaatca

SEQ ID NO: 6006506 - DNA, 25 bp, Homo sapien
atcagaagacaattgctaaatatat

SEQ ID NO: 6006507 - DNA, 25 bp, Homo sapien
taggcgtcattggggaatcggaata

SEQ ID NO: 6006508 - DNA, 25 bp, Homo sapien
tatcctcatttctcttattccacta

SEQ ID NO: 6006509 - DNA, 25 bp, Homo sapien
gatgaacatgggtggcccctctaaa

SEQ ID NO: 6006510 - DNA, 25 bp, Homo sapien
tgattttttgtatcaattatttgcc

SEQ ID NO: 6006511 - DNA, 25 bp, Homo sapien
gttacgcaaagccgctaaccgcaga

SEQ ID NO: 6006512 - DNA, 25 bp, Homo sapien
cccatggatgttgttaacaccggtg

SEQ ID NO: 6006513 - DNA, 25 bp, Homo sapien
ataaatttaagagatgcgaatcttt

SEQ ID NO: 6006514 - DNA, 25 bp, Homo sapien
ggtggcccctctaaagttgaggaaa

SEQ ID NO: 6006515 - DNA, 25 bp, Homo sapien
ggcgtcattggggaatcggaatata

SEQ ID NO: 6006516 - DNA, 25 bp, Homo sapien
gccacttacagagtaaccaactcta

SEQ ID NO: 6006517 - DNA, 25 bp, Homo sapien
aaaccatggttgggagcgcagacag

SEQ ID NO: 6006518 - DNA, 25 bp, Homo sapien
ttgacttaggcgtcattggggaatc

SEQ ID NO: 6006519 - DNA, 25 bp, Homo sapien
cgcagacagctgaaattgcggaatt

SEQ ID NO: 6006520 - DNA, 25 bp, Homo sapien
gtaaaggacctttcattggtatttg

SEQ ID NO: 6006521 - DNA, 25 bp, Homo sapien
aacctgtccagaaacggcgcctcat

SEQ ID NO: 6006522 - DNA, 25 bp, Homo sapien
tgttttccgcacattctctacccat

SEQ ID NO: 6006523 - DNA, 25 bp, Homo sapien
cacaactgaccattacaagatcatt

SEQ ID NO: 6006524 - DNA, 25 bp, Homo sapien
acatcatgcaaaaattaaagtttaa

SEQ ID NO: 6006525 - DNA, 25 bp, Homo sapien
gcctacaaatgaaggtctaatcaag

SEQ ID NO: 6006526 - DNA, 25 bp, Homo sapien
tctacccatggatgttgttaacacc

SEQ ID NO: 6006527 - DNA, 25 bp, Homo sapien
acctgtcagagacaaggttgtttta

SEQ ID NO: 6006528 - DNA, 25 bp, Homo sapien
tggtcggttattgatcgttggccta

SEQ ID NO: 6006529 - DNA, 25 bp, Homo sapien
ttaggccccaaagttgatggcctaa

SEQ ID NO: 6006530 - DNA, 25 bp, Homo sapien
ccgcacattctctacccatggatgt

SEQ ID NO: 6006531 - DNA, 25 bp, Homo sapien
gctgaaattgcggaatttttaggcc

SEQ ID NO: 6006532 - DNA, 25 bp, Homo sapien
tctttaaatggcaaccagaccttta

SEQ ID NO: 6006533 - DNA, 25 bp, Homo sapien
acaagatcattttcggttacattca

SEQ ID NO: 6006534 - DNA, 25 bp, Homo sapien
cctttcattggtatttggcaatcac

SEQ ID NO: 6006535 - DNA, 25 bp, Homo sapien
cgtcattggggaatcggaatataag

SEQ ID NO: 6006536 - DNA, 25 bp, Homo sapien
cgctaaccgcagaaacttataaaca

SEQ ID NO: 6006537 - DNA, 25 bp, Homo sapien
ccaatccggaaatggtctgagtatc

SEQ ID NO: 6006538 - DNA, 25 bp, Homo sapien
cgcaaagccgctaaccgcagaaact

SEQ ID NO: 6006539 - DNA, 25 bp, Homo sapien
tggtgggggctccccaatccggaaa

SEQ ID NO: 6006540 - DNA, 25 bp, Homo sapien
ttttattgttttccgcacattctct

SEQ ID NO: 6006541 - DNA, 25 bp, Homo sapien
tacccagctgaggtagctgcgacgg

SEQ ID NO: 6006542 - DNA, 25 bp, Homo sapien
ggcattggactccgagagatctata

SEQ ID NO: 6006543 - DNA, 25 bp, Homo sapien
gttggtttggcaatcccaagttgga

SEQ ID NO: 6006544 - DNA, 25 bp, Homo sapien
aggacctttcattggtatttggcaa

SEQ ID NO: 6006545 - DNA, 25 bp, Homo sapien
tcaacatgcagaatgcacaaaagag

SEQ ID NO: 6006546 - DNA, 25 bp, Homo sapien
aatcaaggccttctccgaaaatatc

SEQ ID NO: 6006547 - DNA, 25 bp, Homo sapien
gaaggcagtggccttttctcaatat

SEQ ID NO: 6006548 - DNA, 25 bp, Homo sapien
aacggcgcctcataagccttacgtg

SEQ ID NO: 6006549 - DNA, 25 bp, Homo sapien
actacctcttgattttgcacttggc

SEQ ID NO: 6006550 - DNA, 25 bp, Homo sapien
gaagatcacaactgaccattacaag

SEQ ID NO: 6006551 - DNA, 25 bp, Homo sapien
ggcctaatgtttattcctatcgcct

SEQ ID NO: 6006552 - DNA, 25 bp, Homo sapien
gaatgcacaaaagagatcacccaca

SEQ ID NO: 6006553 - DNA, 25 bp, Homo sapien
gatgttgttaacaccggtgatgcct

SEQ ID NO: 6006554 - DNA, 25 bp, Homo sapien
aaaatcttagataaaacctgtccag

SEQ ID NO: 6006555 - DNA, 25 bp, Homo sapien
tcctatcgcctttacctctgatcat

SEQ ID NO: 6006556 - DNA, 25 bp, Homo sapien
tgatggcctaatgtttattcctatc

SEQ ID NO: 6006557 - DNA, 25 bp, Homo sapien
gtacccccaagatagagaagcaata

SEQ ID NO: 6006558 - DNA, 25 bp, Homo sapien
tgtccagaaacggcgcctcataagc

SEQ ID NO: 6006559 - DNA, 25 bp, Homo sapien
ttgccgataatgacctaattcccat

SEQ ID NO: 6006560 - DNA, 25 bp, Homo sapien
ctttattgaaggcatggcagatctc

SEQ ID NO: 6006561 - DNA, 25 bp, Homo sapien
aaacatatgattttttgtatcaatt

SEQ ID NO: 6006562 - DNA, 25 bp, Homo sapien
aagaagatcacaactgaccattaca

SEQ ID NO: 6006563 - DNA, 25 bp, Homo sapien
gttgttttattgttttccgcacatt

SEQ ID NO: 6006564 - DNA, 25 bp, Homo sapien
atggcgtgaagaaggcagtggcctt

SEQ ID NO: 6006565 - DNA, 25 bp, Homo sapien
gaatttttaggccccaaagttgatg

SEQ ID NO: 6006566 - DNA, 25 bp, Homo sapien
gagtaaccaactctattctaatcaa

SEQ ID NO: 6006567 - DNA, 25 bp, Homo sapien
agagtttccgcaacctgtcagagac

SEQ ID NO: 6006568 - DNA, 25 bp, Homo sapien
aaaagccacttacagagtaaccaac

SEQ ID NO: 6006569 - DNA, 25 bp, Homo sapien
aaatgaaggtctaatcaaggccttc

SEQ ID NO: 6006570 - DNA, 25 bp, Homo sapien
cagagacaaggttgttttattgttt

SEQ ID NO: 6006571 - DNA, 25 bp, Homo sapien
tcttgattttgcacttggcaagtcc

SEQ ID NO: 6006572 - DNA, 25 bp, Homo sapien
caatgatcctgtaaaggacctttca

SEQ ID NO: 6006573 - DNA, 25 bp, Homo sapien
tcggttacattcaacatgcagaatg

SEQ ID NO: 6006574 - DNA, 25 bp, Homo sapien
aaaggacctttcattggtatttggc

SEQ ID NO: 6006575 - DNA, 25 bp, Homo sapien
gatagagaagcaatatagggaaatt

SEQ ID NO: 6006576 - DNA, 25 bp, Homo sapien
ttaaggcattggactccgagagatc

SEQ ID NO: 6006577 - DNA, 25 bp, Homo sapien
gtaaaatcttagataaaacctgtcc

SEQ ID NO: 6006578 - DNA, 25 bp, Homo sapien
tttaaatggcaaccagacctttatt

SEQ ID NO: 6006579 - DNA, 25 bp, Homo sapien
ttttccgcacattctctacccatgg

SEQ ID NO: 6006580 - DNA, 25 bp, Homo sapien
cccaaagttgatggcctaatgttta

SEQ ID NO: 6006581 - DNA, 25 bp, Homo sapien
ttcccattagtgctaagtatcagaa

SEQ ID NO: 6006582 - DNA, 25 bp, Homo sapien
ctaattcccattagtgctaagtatc

SEQ ID NO: 6006583 - DNA, 25 bp, Homo sapien
ccccaatccggaaatggtctgagta

SEQ ID NO: 6006584 - DNA, 25 bp, Homo sapien
ctcatttctcttattccactaccgg

SEQ ID NO: 6006585 - DNA, 25 bp, Homo sapien
atttggcaatcacgaatctacttga

SEQ ID NO: 6006586 - DNA, 25 bp, Homo sapien
ccatcaacgaattgtggagacagat

SEQ ID NO: 6006587 - DNA, 25 bp, Homo sapien
acaaaagagatcacccacaggaatt

SEQ ID NO: 6006588 - DNA, 25 bp, Homo sapien
cataagccttacgtggcgtttcgtt

SEQ ID NO: 6006589 - DNA, 25 bp, Homo sapien
gtctgagtatcaagccactgaggtc

SEQ ID NO: 6006590 - DNA, 25 bp, Homo sapien
cccattagtgctaagtatcagaaga

SEQ ID NO: 6006591 - DNA, 25 bp, Homo sapien
gaaggtctaatcaaggccttctccg

SEQ ID NO: 6006592 - DNA, 25 bp, Homo sapien
tatgattttttgtatcaattatttg

SEQ ID NO: 6006593 - DNA, 25 bp, Homo sapien
agccactgaggtctgtaaaatctta

SEQ ID NO: 6006594 - DNA, 25 bp, Homo sapien
ccgaaaatatcaccaaaaaactaca

SEQ ID NO: 6006595 - DNA, 25 bp, Homo sapien
ttttaggccccaaagttgatggcct

SEQ ID NO: 6006596 - DNA, 25 bp, Homo sapien
ttttgatgaacatgggtggcccctc

SEQ ID NO: 6006597 - DNA, 25 bp, Homo sapien
atcaagccactgaggtctgtaaaat

SEQ ID NO: 6006598 - DNA, 25 bp, Homo sapien
gtgatgcctacccagctgaggtagc

SEQ ID NO: 6006599 - DNA, 25 bp, Homo sapien
accaaaaccatggttgggagcgcag

SEQ ID NO: 6006600 - DNA, 25 bp, Homo sapien
tccgagagatctatatcttggtcgg

SEQ ID NO: 6006601 - DNA, 25 bp, Homo sapien
gccccaaagttgatggcctaatgtt

SEQ ID NO: 6006602 - DNA, 25 bp, Homo sapien
gacctttcattggtatttggcaatc

SEQ ID NO: 6006603 - DNA, 25 bp, Homo sapien
aaggccttctccgaaaatatcacca

SEQ ID NO: 6006604 - DNA, 25 bp, Homo sapien
gattaaggcattggactccgagaga

SEQ ID NO: 6006605 - DNA, 25 bp, Homo sapien
ccactgaggtctgtaaaatcttaga

SEQ ID NO: 6006606 - DNA, 25 bp, Homo sapien
cctacccagctgaggtagctgcgac

SEQ ID NO: 6006607 - DNA, 25 bp, Homo sapien
ggggctccccaatccggaaatggtc

SEQ ID NO: 6006608 - DNA, 25 bp, Homo sapien
cagctgaggtagctgcgacggttta

SEQ ID NO: 6006609 - DNA, 25 bp, Homo sapien
catttctcttattccactaccgggt

SEQ ID NO: 6006610 - DNA, 25 bp, Homo sapien
tcctgtaaaggacctttcattggta

SEQ ID NO: 6006611 - DNA, 25 bp, Homo sapien
tgttttattgttttccgcacattct

SEQ ID NO: 6006612 - DNA, 25 bp, Homo sapien
cattggactccgagagatctatatc

SEQ ID NO: 6006613 - DNA, 25 bp, Homo sapien
ttacgtggcgtttcgttacgcaaag

SEQ ID NO: 6006614 - DNA, 25 bp, Homo sapien
ttctccgaaaatatcaccaaaaaac

SEQ ID NO: 6006615 - DNA, 25 bp, Homo sapien
gccgataatgacctaattcccatta

SEQ ID NO: 6006616 - DNA, 25 bp, Homo sapien
gtcagagacaaggttgttttattgt

SEQ ID NO: 6006617 - DNA, 25 bp, Homo sapien
aaggcatggcagatctcgtcaaaag

SEQ ID NO: 6006618 - DNA, 25 bp, Homo sapien
ttgttaacaccggtgatgcctaccc

SEQ ID NO: 6006619 - DNA, 25 bp, Homo sapien
gggaatcggaatataaggataaatt

SEQ ID NO: 6006620 - DNA, 25 bp, Homo sapien
ttggactccgagagatctatatctt

SEQ ID NO: 6006621 - DNA, 25 bp, Homo sapien
gccgctaaccgcagaaacttataaa

SEQ ID NO: 6006622 - DNA, 25 bp, Homo sapien
tggcccctctaaagttgaggaaaca

SEQ ID NO: 6006623 - DNA, 25 bp, Homo sapien
acattcaacatgcagaatgcacaaa

SEQ ID NO: 6006624 - DNA, 25 bp, Homo sapien
taagtttcgtacccccaagatagag

SEQ ID NO: 6006625 - DNA, 25 bp, Homo sapien
ccaagatagagaagcaatataggga

SEQ ID NO: 6006626 - DNA, 25 bp, Homo sapien
tccagaaacggcgcctcataagcct

SEQ ID NO: 6006627 - DNA, 25 bp, Homo sapien
tattgctaagtttcgtacccccaag

SEQ ID NO: 6006628 - DNA, 25 bp, Homo sapien
cagctgaaattgcggaatttttagg

SEQ ID NO: 6006629 - DNA, 25 bp, Homo sapien
atcatattgaaacattgcatgaaat

SEQ ID NO: 6006630 - DNA, 25 bp, Homo sapien
tctgatcatattgaaacattgcatg

SEQ ID NO: 6006631 - DNA, 25 bp, Homo sapien
aaccaactctattctaatcaactac

SEQ ID NO: 6006632 - DNA, 25 bp, Homo sapien
ctaaccgcagaaacttataaacaaa

SEQ ID NO: 6006633 - DNA, 25 bp, Homo sapien
tgaccattacaagatcattttcggt

SEQ ID NO: 6006634 - DNA, 25 bp, Homo sapien
aaccagacctttattgaaggcatgg

SEQ ID NO: 6006635 - DNA, 25 bp, Homo sapien
tacacaaggttccttcctaagaaga

SEQ ID NO: 6006636 - DNA, 25 bp, Homo sapien
aaaagagatcacccacaggaattgt

SEQ ID NO: 6006637 - DNA, 25 bp, Homo sapien
tatcaattatttgccgataatgacc

SEQ ID NO: 6006638 - DNA, 25 bp, Homo sapien
gaaatggtctgagtatcaagccact

SEQ ID NO: 6006639 - DNA, 25 bp, Homo sapien
gtatcaagccactgaggtctgtaaa

SEQ ID NO: 6006640 - DNA, 25 bp, Homo sapien
tcaaggccttctccgaaaatatcac

SEQ ID NO: 6006641 - DNA, 25 bp, Homo sapien
ccagacctttattgaaggcatggca

SEQ ID NO: 6006642 - DNA, 25 bp, Homo sapien
caaggttccttcctaagaagatcac

SEQ ID NO: 6006643 - DNA, 25 bp, Homo sapien
tccaatgatcctgtaaaggaccttt

SEQ ID NO: 6006644 - DNA, 25 bp, Homo sapien
ctgtaaaggacctttcattggtatt

SEQ ID NO: 6006645 - DNA, 25 bp, Homo sapien
cgggtcatccatcaacgaattgtgg

SEQ ID NO: 6006646 - DNA, 25 bp, Homo sapien
taacaccggtgatgcctacccagct

SEQ ID NO: 6006647 - DNA, 25 bp, Homo sapien
ttccgcacattctctacccatggat

SEQ ID NO: 6006648 - DNA, 25 bp, Homo sapien
tctcaatatcctcatttctcttatt

SEQ ID NO: 6006649 - DNA, 25 bp, Homo sapien
gcagtggccttttctcaatatcctc

SEQ ID NO: 6006650 - DNA, 25 bp, Homo sapien
agatggcgtgaagaaggcagtggcc

SEQ ID NO: 6006651 - DNA, 25 bp, Homo sapien
ttgctaaatatattgctaagtttcg

SEQ ID NO: 6006652 - DNA, 25 bp, Homo sapien
cctgtccagaaacggcgcctcataa

SEQ ID NO: 6006653 - DNA, 25 bp, Homo sapien
caactacctcttgattttgcacttg

SEQ ID NO: 6006654 - DNA, 25 bp, Homo sapien
ataaaacctgtccagaaacggcgcc

SEQ ID NO: 6006655 - DNA, 25 bp, Homo sapien
aagatcattttcggttacattcaac

SEQ ID NO: 6006656 - DNA, 25 bp, Homo sapien
gtttggcaatcccaagttggaccaa

SEQ ID NO: 6006657 - DNA, 25 bp, Homo sapien
gctttccagaacaatccgtacacaa

SEQ ID NO: 6006658 - DNA, 25 bp, Homo sapien
tattgaaacattgcatgaaattgac

SEQ ID NO: 6006659 - DNA, 25 bp, Homo sapien
caacctgtcagagacaaggttgttt

SEQ ID NO: 6006660 - DNA, 25 bp, Homo sapien
atcgcctttacctctgatcatattg

SEQ ID NO: 6006661 - DNA, 25 bp, Homo sapien
acaaatgctaaaagatggcgtgaag

SEQ ID NO: 6006662 - DNA, 25 bp, Homo sapien
gcgacggtttacaacatcatgcaaa

SEQ ID NO: 6006663 - DNA, 25 bp, Homo sapien
tcattggtatttggcaatcacgaat

SEQ ID NO: 6006664 - DNA, 25 bp, Homo sapien
tttgtatcaattatttgccgataat

SEQ ID NO: 6006665 - DNA, 25 bp, Homo sapien
tgaggtctgtaaaatcttagataaa

SEQ ID NO: 6006666 - DNA, 25 bp, Homo sapien
gacggtttacaacatcatgcaaaaa

SEQ ID NO: 6006667 - DNA, 25 bp, Homo sapien
tgaacatgggtggcccctctaaagt

SEQ ID NO: 6006668 - DNA, 25 bp, Homo sapien
taatcaactacctcttgattttgca

SEQ ID NO: 6006669 - DNA, 25 bp, Homo sapien
ctgtcagagacaaggttgttttatt

SEQ ID NO: 6006670 - DNA, 25 bp, Homo sapien
aggaattgttttgatgaacatgggt

SEQ ID NO: 6006671 - DNA, 25 bp, Homo sapien
tggtttggcaatcccaagttggacc

SEQ ID NO: 6006672 - DNA, 25 bp, Homo sapien
atcccaagttggaccaaaaccatgg

SEQ ID NO: 6006673 - DNA, 25 bp, Homo sapien
accgggtcatccatcaacgaattgt

SEQ ID NO: 6006674 - DNA, 25 bp, Homo sapien
aggccccaaagttgatggcctaatg

SEQ ID NO: 6006675 - DNA, 25 bp, Homo sapien
tatattgctaagtttcgtaccccca

SEQ ID NO: 6006676 - DNA, 25 bp, Homo sapien
aagaaggcagtggccttttctcaat

SEQ ID NO: 6006677 - DNA, 25 bp, Homo sapien
aaacaaatgctaaaagatggcgtga

SEQ ID NO: 6006678 - DNA, 25 bp, Homo sapien
aagccgctaaccgcagaaacttata

SEQ ID NO: 6006679 - DNA, 25 bp, Homo sapien
gttccttcctaagaagatcacaact

SEQ ID NO: 6006680 - DNA, 25 bp, Homo sapien
ccacaggaattgttttgatgaacat

SEQ ID NO: 6006681 - DNA, 25 bp, Homo sapien
tcatccatcaacgaattgtggagac

SEQ ID NO: 6006682 - DNA, 25 bp, Homo sapien
gaaaatatcaccaaaaaactacaag

SEQ ID NO: 6006683 - DNA, 25 bp, Homo sapien
tttacctctgatcatattgaaacat

SEQ ID NO: 6006684 - DNA, 25 bp, Homo sapien
agatctatatcttggtcggttattg

SEQ ID NO: 6006685 - DNA, 25 bp, Homo sapien
ggccttctccgaaaatatcaccaaa

SEQ ID NO: 6006686 - DNA, 25 bp, Homo sapien
ggcatggcagatctcgtcaaaagcc

SEQ ID NO: 6006687 - DNA, 25 bp, Homo sapien
ttgaaacattgcatgaaattgactt

SEQ ID NO: 6006688 - DNA, 25 bp, Homo sapien
ctattctaatcaactacctcttgat

SEQ ID NO: 6006689 - DNA, 25 bp, Homo sapien
tggccttttctcaatatcctcattt

SEQ ID NO: 6006690 - DNA, 25 bp, Homo sapien
tgcctacccagctgaggtagctgcg

SEQ ID NO: 6006691 - DNA, 25 bp, Homo sapien
aacatgggtggcccctctaaagttg

SEQ ID NO: 6006692 - DNA, 25 bp, Homo sapien
atctcgtcaaaagccacttacagag

SEQ ID NO: 6006693 - DNA, 25 bp, Homo sapien
aagatagagaagcaatatagggaaa

SEQ ID NO: 6006694 - DNA, 25 bp, Homo sapien
cggtgatgcctacccagctgaggta

SEQ ID NO: 6006695 - DNA, 25 bp, Homo sapien
ttaagagatgcgaatctttaaatgg

SEQ ID NO: 6006696 - DNA, 25 bp, Homo sapien
aagtatcagaagacaattgctaaat

SEQ ID NO: 6006697 - DNA, 25 bp, Homo sapien
gaaattgacttaggcgtcattgggg

SEQ ID NO: 6006698 - DNA, 25 bp, Homo sapien
actgaggtctgtaaaatcttagata

SEQ ID NO: 6006699 - DNA, 25 bp, Homo sapien
cagacagctgaaattgcggaatttt

SEQ ID NO: 6006700 - DNA, 25 bp, Homo sapien
agtttccgcaacctgtcagagacaa

SEQ ID NO: 6006701 - DNA, 25 bp, Homo sapien
ttgattttgcacttggcaagtccaa

SEQ ID NO: 6006702 - DNA, 25 bp, Homo sapien
caacgaattgtggagacagattaag

SEQ ID NO: 6006703 - DNA, 25 bp, Homo sapien
taatgtttattcctatcgcctttac

SEQ ID NO: 6006704 - DNA, 25 bp, Homo sapien
cagaaacggcgcctcataagcctta

SEQ ID NO: 6006705 - DNA, 25 bp, Homo sapien
caagagtttccgcaacctgtcagag

SEQ ID NO: 6006706 - DNA, 25 bp, Homo sapien
cgagagatctatatcttggtcggtt

SEQ ID NO: 6006707 - DNA, 25 bp, Homo sapien
gatgcgaatctttaaatggcaacca

SEQ ID NO: 6006708 - DNA, 25 bp, Homo sapien
tcttagataaaacctgtccagaaac

SEQ ID NO: 6006709 - DNA, 25 bp, Homo sapien
ccaagttggaccaaaaccatggttg

SEQ ID NO: 6006710 - DNA, 25 bp, Homo sapien
ggataaatttaagagatgcgaatct

SEQ ID NO: 6006711 - DNA, 25 bp, Homo sapien
gttattgatcgttggcctacaaatg

SEQ ID NO: 6006712 - DNA, 25 bp, Homo sapien
tggagacagattaaggcattggact

SEQ ID NO: 6006713 - DNA, 25 bp, Homo sapien
tgaggtagctgcgacggtttacaac

SEQ ID NO: 6006714 - DNA, 25 bp, Homo sapien
aggtctgtaaaatcttagataaaac

SEQ ID NO: 6006715 - DNA, 25 bp, Homo sapien
cttaggcgtcattggggaatcggaa

SEQ ID NO: 6006716 - DNA, 25 bp, Homo sapien
tttcgtacccccaagatagagaagc

SEQ ID NO: 6006717 - DNA, 25 bp, Homo sapien
aagttgatggcctaatgtttattcc

SEQ ID NO: 6006718 - DNA, 25 bp, Homo sapien
atggcctaatgtttattcctatcgc

SEQ ID NO: 6006719 - DNA, 25 bp, Homo sapien
cagaatgcacaaaagagatcaccca

SEQ ID NO: 6006720 - DNA, 25 bp, Homo sapien
tagggaaattggtgggggctcccca

SEQ ID NO: 6006721 - DNA, 25 bp, Homo sapien
aattcccattagtgctaagtatcag

SEQ ID NO: 6006722 - DNA, 25 bp, Homo sapien
ttggaccaaaaccatggttgggagc

SEQ ID NO: 6006723 - DNA, 25 bp, Homo sapien
gttaacaccggtgatgcctacccag

SEQ ID NO: 6006724 - DNA, 25 bp, Homo sapien
aggtagctgcgacggtttacaacat

SEQ ID NO: 6006725 - DNA, 25 bp, Homo sapien
cgataatgacctaattcccattagt

SEQ ID NO: 6006726 - DNA, 25 bp, Homo sapien
ggaccaaaaccatggttgggagcgc

SEQ ID NO: 6006727 - DNA, 25 bp, Homo sapien
ctcgtcaaaagccacttacagagta

SEQ ID NO: 6006728 - DNA, 25 bp, Homo sapien
tcacccacaggaattgttttgatga

SEQ ID NO: 6006729 - DNA, 25 bp, Homo sapien
atttttaggccccaaagttgatggc

SEQ ID NO: 6006730 - DNA, 25 bp, Homo sapien
gcatgaaattgacttaggcgtcatt

SEQ ID NO: 6006731 - DNA, 25 bp, Homo sapien
cctcttgattttgcacttggcaagt

SEQ ID NO: 6006732 - DNA, 25 bp, Homo sapien
cgaatctttaaatggcaaccagacc

SEQ ID NO: 6006733 - DNA, 25 bp, Homo sapien
ccctctaaagttgaggaaacatatg

SEQ ID NO: 6006734 - DNA, 25 bp, Homo sapien
tacccatggatgttgttaacaccgg

SEQ ID NO: 6006735 - DNA, 25 bp, Homo sapien
actgaccattacaagatcattttcg

SEQ ID NO: 6006736 - DNA, 25 bp, Homo sapien
agaaacttataaacaaatgctaaaa

SEQ ID NO: 6006737 - DNA, 25 bp, Homo sapien
tattgatcgttggcctacaaatgaa

SEQ ID NO: 6006738 - DNA, 25 bp, Homo sapien
tctaatcaactacctcttgattttg

SEQ ID NO: 6006739 - DNA, 25 bp, Homo sapien
cggcgcctcataagccttacgtggc

SEQ ID NO: 6006740 - DNA, 25 bp, Homo sapien
gagatcacccacaggaattgttttg

SEQ ID NO: 6006741 - DNA, 25 bp, Homo sapien
attctaatcaactacctcttgattt

SEQ ID NO: 6006742 - DNA, 25 bp, Homo sapien
ggctccccaatccggaaatggtctg

SEQ ID NO: 6006743 - DNA, 25 bp, Homo sapien
tggttgggagcgcagacagctgaaa

SEQ ID NO: 6006744 - DNA, 25 bp, Homo sapien
aatccgtacacaaggttccttccta

SEQ ID NO: 6006745 - DNA, 25 bp, Homo sapien
tttttgtatcaattatttgccgata

SEQ ID NO: 6006746 - DNA, 25 bp, Homo sapien
tgacctaattcccattagtgctaag

SEQ ID NO: 6006747 - DNA, 25 bp, Homo sapien
tacagagtaaccaactctattctaa

SEQ ID NO: 6006748 - DNA, 25 bp, Homo sapien
cgcaacctgtcagagacaaggttgt

SEQ ID NO: 6006749 - DNA, 25 bp, Homo sapien
gatcctgtaaaggacctttcattgg

SEQ ID NO: 6006750 - DNA, 25 bp, Homo sapien
cagaacaatccgtacacaaggttcc

SEQ ID NO: 6006751 - DNA, 25 bp, Homo sapien
acccacaggaattgttttgatgaac

SEQ ID NO: 6006752 - DNA, 25 bp, Homo sapien
aattatttgccgataatgacctaat

SEQ ID NO: 6006753 - DNA, 25 bp, Homo sapien
ggagcgcagacagctgaaattgcgg

SEQ ID NO: 6006754 - DNA, 25 bp, Homo sapien
tttccgcaacctgtcagagacaagg

SEQ ID NO: 6006755 - DNA, 25 bp, Homo sapien
aatccggaaatggtctgagtatcaa

SEQ ID NO: 6006756 - DNA, 25 bp, Homo sapien
gacagctgaaattgcggaattttta

SEQ ID NO: 6006757 - DNA, 25 bp, Homo sapien
cacttacagagtaaccaactctatt

SEQ ID NO: 6006758 - DNA, 25 bp, Homo sapien
caatcccaagttggaccaaaaccat

SEQ ID NO: 6006759 - DNA, 25 bp, Homo sapien
gatcgttggcctacaaatgaaggtc

SEQ ID NO: 6006760 - DNA, 25 bp, Homo sapien
aaagatggcgtgaagaaggcagtgg

SEQ ID NO: 6006761 - DNA, 25 bp, Homo sapien
tacctcttgattttgcacttggcaa

SEQ ID NO: 6006762 - DNA, 25 bp, Homo sapien
tttcattggtatttggcaatcacga

SEQ ID NO: 6006763 - DNA, 25 bp, Homo sapien
gcccctctaaagttgaggaaacata

SEQ ID NO: 6006764 - DNA, 25 bp, Homo sapien
gcacattctctacccatggatgttg

SEQ ID NO: 6006765 - DNA, 25 bp, Homo sapien
aggttgttttattgttttccgcaca

SEQ ID NO: 6006766 - DNA, 25 bp, Homo sapien
aatggtctgagtatcaagccactga

SEQ ID NO: 6006767 - DNA, 25 bp, Homo sapien
cattgcatgaaattgacttaggcgt

SEQ ID NO: 6006768 - DNA, 25 bp, Homo sapien
gcagatctcgtcaaaagccacttac

SEQ ID NO: 6006769 - DNA, 25 bp, Homo sapien
ttgcacttggcaagtccaatgatcc

SEQ ID NO: 6006770 - DNA, 25 bp, Homo sapien
tttctcttattccactaccgggtca

SEQ ID NO: 6006771 - DNA, 25 bp, Homo sapien
gttggcctacaaatgaaggtctaat

SEQ ID NO: 6006772 - DNA, 25 bp, Homo sapien
ttattgaaggcatggcagatctcgt

SEQ ID NO: 6006773 - DNA, 25 bp, Homo sapien
tggcaaccagacctttattgaaggc

SEQ ID NO: 6006774 - DNA, 25 bp, Homo sapien
acccccaagatagagaagcaatata

SEQ ID NO: 6006775 - DNA, 25 bp, Homo sapien
ccttataggttggtttggcaatccc

SEQ ID NO: 6006776 - DNA, 25 bp, Homo sapien
tacaagagtttccgcaacctgtcag

SEQ ID NO: 6006777 - DNA, 25 bp, Homo sapien
tgttgttaacaccggtgatgcctac

SEQ ID NO: 6006778 - DNA, 25 bp, Homo sapien
ttgcatgaaattgacttaggcgtca

SEQ ID NO: 6006779 - DNA, 25 bp, Homo sapien
gtctgtaaaatcttagataaaacct

SEQ ID NO: 6006780 - DNA, 25 bp, Homo sapien
caaagccgctaaccgcagaaactta

SEQ ID NO: 6006781 - DNA, 25 bp, Homo sapien
ttgatgaacatgggtggcccctcta

SEQ ID NO: 6006782 - DNA, 25 bp, Homo sapien
tgaaattgcggaatttttaggcccc

SEQ ID NO: 6006783 - DNA, 25 bp, Homo sapien
gcagaaacttataaacaaatgctaa

SEQ ID NO: 6006784 - DNA, 25 bp, Homo sapien
acaggaattgttttgatgaacatgg

SEQ ID NO: 6006785 - DNA, 25 bp, Homo sapien
atcaacgaattgtggagacagatta

SEQ ID NO: 6006786 - DNA, 25 bp, Homo sapien
cttttctcaatatcctcatttctct

SEQ ID NO: 6006787 - DNA, 25 bp, Homo sapien
cttggtcggttattgatcgttggcc

SEQ ID NO: 6006788 - DNA, 25 bp, Homo sapien
ttggcaagtccaatgatcctgtaaa

SEQ ID NO: 6006789 - DNA, 25 bp, Homo sapien
ggcaatcccaagttggaccaaaacc

SEQ ID NO: 6006790 - DNA, 25 bp, Homo sapien
gaattgttttgatgaacatgggtgg

SEQ ID NO: 6006791 - DNA, 25 bp, Homo sapien
cggttattgatcgttggcctacaaa

SEQ ID NO: 6006792 - DNA, 25 bp, Homo sapien
acattctctacccatggatgttgtt

SEQ ID NO: 6006793 - DNA, 25 bp, Homo sapien
agagatctatatcttggtcggttat

SEQ ID NO: 6006794 - DNA, 25 bp, Homo sapien
aggtctaatcaaggccttctccgaa

SEQ ID NO: 6006795 - DNA, 25 bp, Homo sapien
gatcattttcggttacattcaacat

SEQ ID NO: 6006796 - DNA, 25 bp, Homo sapien
agtggccttttctcaatatcctcat

SEQ ID NO: 6006797 - DNA, 25 bp, Homo sapien
atcaccaaaaaactacaagagtttc

SEQ ID NO: 6006798 - DNA, 25 bp, Homo sapien
ctccgaaaatatcaccaaaaaacta

SEQ ID NO: 6006799 - DNA, 25 bp, Homo sapien
acttggcaagtccaatgatcctgta

SEQ ID NO: 6006800 - DNA, 25 bp, Homo sapien
tcgttggcctacaaatgaaggtcta

SEQ ID NO: 6006801 - DNA, 25 bp, Homo sapien
aactctattctaatcaactacctct

SEQ ID NO: 6006802 - DNA, 25 bp, Homo sapien
tcctaagaagatcacaactgaccat

SEQ ID NO: 6006803 - DNA, 25 bp, Homo sapien
cgtgaagaaggcagtggccttttct

SEQ ID NO: 6006804 - DNA, 25 bp, Homo sapien
actccgagagatctatatcttggtc

SEQ ID NO: 6006805 - DNA, 25 bp, Homo sapien
aatggcaaccagacctttattgaag

SEQ ID NO: 6006806 - DNA, 25 bp, Homo sapien
tggatgttgttaacaccggtgatgc

SEQ ID NO: 6006807 - DNA, 25 bp, Homo sapien
ccccaagatagagaagcaatatagg

SEQ ID NO: 6006808 - DNA, 25 bp, Homo sapien
gagtatcaagccactgaggtctgta

SEQ ID NO: 6006809 - DNA, 25 bp, Homo sapien
attttttgtatcaattatttgccga

SEQ ID NO: 6006810 - DNA, 25 bp, Homo sapien
caagtccaatgatcctgtaaaggac

SEQ ID NO: 6006811 - DNA, 25 bp, Homo sapien
cattacaagatcattttcggttaca

SEQ ID NO: 6006812 - DNA, 25 bp, Homo sapien
tcaaaagccacttacagagtaacca

SEQ ID NO: 6006813 - DNA, 25 bp, Homo sapien
tttctcaatatcctcatttctctta

SEQ ID NO: 6006814 - DNA, 25 bp, Homo sapien
agttgaggaaacatatgattttttg

SEQ ID NO: 6006815 - DNA, 25 bp, Homo sapien
acatatgattttttgtatcaattat

SEQ ID NO: 6006816 - DNA, 25 bp, Homo sapien
tggtatttggcaatcacgaatctac

SEQ ID NO: 6006817 - DNA, 25 bp, Homo sapien
agatctcgtcaaaagccacttacag

SEQ ID NO: 6006818 - DNA, 25 bp, Homo sapien
accatggttgggagcgcagacagct

SEQ ID NO: 6006819 - DNA, 25 bp, Homo sapien
ttgatcgttggcctacaaatgaagg

SEQ ID NO: 6006820 - DNA, 25 bp, Homo sapien
ataggttggtttggcaatcccaagt

SEQ ID NO: 6006821 - DNA, 25 bp, Homo sapien
gtttacaacatcatgcaaaaattaa

SEQ ID NO: 6006822 - DNA, 25 bp, Homo sapien
ctccccaatccggaaatggtctgag

SEQ ID NO: 6006823 - DNA, 25 bp, Homo sapien
aggttggtttggcaatcccaagttg

SEQ ID NO: 6006824 - DNA, 25 bp, Homo sapien
cgtacacaaggttccttcctaagaa

SEQ ID NO: 6006825 - DNA, 25 bp, Homo sapien
atcttggtcggttattgatcgttgg

SEQ ID NO: 6006826 - DNA, 25 bp, Homo sapien
ttattgttttccgcacattctctac

SEQ ID NO: 6006827 - DNA, 25 bp, Homo sapien
ctgtaaaatcttagataaaacctgt

SEQ ID NO: 6006828 - DNA, 25 bp, Homo sapien
gacttaggcgtcattggggaatcgg

SEQ ID NO: 6006829 - DNA, 25 bp, Homo sapien
caaaaccatggttgggagcgcagac

SEQ ID NO: 6006830 - DNA, 25 bp, Homo sapien
gctgaggtagctgcgacggtttaca

SEQ ID NO: 6006831 - DNA, 25 bp, Homo sapien
attcctatcgcctttacctctgatc

SEQ ID NO: 6006832 - DNA, 25 bp, Homo sapien
tatagggaaattggtgggggctccc

SEQ ID NO: 6006833 - DNA, 25 bp, Homo sapien
aattgacttaggcgtcattggggaa

SEQ ID NO: 6006834 - DNA, 25 bp, Homo sapien
atctatatcttggtcggttattgat

SEQ ID NO: 6006835 - DNA, 25 bp, Homo sapien
attggtgggggctccccaatccgga

SEQ ID NO: 6006836 - DNA, 25 bp, Homo sapien
gagacagattaaggcattggactcc

SEQ ID NO: 6006837 - DNA, 25 bp, Homo sapien
aggttccttcctaagaagatcacaa

SEQ ID NO: 6006838 - DNA, 25 bp, Homo sapien
aagagatcacccacaggaattgttt

SEQ ID NO: 6006839 - DNA, 25 bp, Homo sapien
accattacaagatcattttcggtta

SEQ ID NO: 6006840 - DNA, 25 bp, Homo sapien
tccgcaacctgtcagagacaaggtt

SEQ ID NO: 6006841 - DNA, 25 bp, Homo sapien
ggaaattggtgggggctccccaatc

SEQ ID NO: 6006842 - DNA, 25 bp, Homo sapien
agtttcgtacccccaagatagagaa

SEQ ID NO: 6006843 - DNA, 25 bp, Homo sapien
aaactacaagagtttccgcaacctg

SEQ ID NO: 6006844 - DNA, 25 bp, Homo sapien
taaaagatggcgtgaagaaggcagt

SEQ ID NO: 6006845 - DNA, 25 bp, Homo sapien
aagagatgcgaatctttaaatggca

SEQ ID NO: 6006846 - DNA, 25 bp, Homo sapien
catgggtggcccctctaaagttgag

SEQ ID NO: 6006847 - DNA, 25 bp, Homo sapien
aaaacctgtccagaaacggcgcctc

SEQ ID NO: 6006848 - DNA, 25 bp, Homo sapien
tcaattatttgccgataatgaccta

SEQ ID NO: 6006849 - DNA, 25 bp, Homo sapien
tggcagatctcgtcaaaagccactt

SEQ ID NO: 6006850 - DNA, 25 bp, Homo sapien
ttgctaagtttcgtacccccaagat

SEQ ID NO: 6006851 - DNA, 25 bp, Homo sapien
ctcataagccttacgtggcgtttcg

SEQ ID NO: 6006852 - DNA, 25 bp, Homo sapien
cacaaggttccttcctaagaagatc

SEQ ID NO: 6006853 - DNA, 25 bp, Homo sapien
atgaaattgacttaggcgtcattgg

SEQ ID NO: 6006854 - DNA, 25 bp, Homo sapien
cccagctgaggtagctgcgacggtt

SEQ ID NO: 6006855 - DNA, 25 bp, Homo sapien
ctaccgggtcatccatcaacgaatt

SEQ ID NO: 6006856 - DNA, 25 bp, Homo sapien
aacattgcatgaaattgacttaggc

SEQ ID NO: 6006857 - DNA, 25 bp, Homo sapien
acgaattgtggagacagattaaggc

SEQ ID NO: 6006858 - DNA, 25 bp, Homo sapien
gtggcgtttcgttacgcaaagccgc

SEQ ID NO: 6006859 - DNA, 25 bp, Homo sapien
gtttattcctatcgcctttacctct

SEQ ID NO: 6006860 - DNA, 25 bp, Homo sapien
ccttctccgaaaatatcaccaaaaa

SEQ ID NO: 6006861 - DNA, 25 bp, Homo sapien
cctctgatcatattgaaacattgca

SEQ ID NO: 6006862 - DNA, 25 bp, Homo sapien
cagattaaggcattggactccgaga

SEQ ID NO: 6006863 - DNA, 25 bp, Homo sapien
aaggataaatttaagagatgcgaat

SEQ ID NO: 6006864 - DNA, 25 bp, Homo sapien
tgaaggcatggcagatctcgtcaaa

SEQ ID NO: 6006865 - DNA, 25 bp, Homo sapien
gaattgtggagacagattaaggcat

SEQ ID NO: 6006866 - DNA, 25 bp, Homo sapien
aatcttagataaaacctgtccagaa

SEQ ID NO: 6006867 - DNA, 25 bp, Homo sapien
gaaacattgcatgaaattgacttag

SEQ ID NO: 6006868 - DNA, 25 bp, Homo sapien
gttgggagcgcagacagctgaaatt

SEQ ID NO: 6006869 - DNA, 25 bp, Homo sapien
agtccaatgatcctgtaaaggacct

SEQ ID NO: 6006870 - DNA, 25 bp, Homo sapien
taagccttacgtggcgtttcgttac

SEQ ID NO: 6006871 - DNA, 25 bp, Homo sapien
acaattgctaaatatattgctaagt

SEQ ID NO: 6006872 - DNA, 25 bp, Homo sapien
ctgagtatcaagccactgaggtctg

SEQ ID NO: 6006873 - DNA, 25 bp, Homo sapien
agataaaacctgtccagaaacggcg

SEQ ID NO: 6006874 - DNA, 25 bp, Homo sapien
cattagtgctaagtatcagaagaca

SEQ ID NO: 6006875 - DNA, 25 bp, Homo sapien
gcaaccagacctttattgaaggcat

SEQ ID NO: 6006876 - DNA, 25 bp, Homo sapien
gatgcctacccagctgaggtagctg

SEQ ID NO: 6006877 - DNA, 25 bp, Homo sapien
gtatttggcaatcacgaatctactt

SEQ ID NO: 6006878 - DNA, 25 bp, Homo sapien
aaatatcaccaaaaaactacaagag

SEQ ID NO: 6006879 - DNA, 25 bp, Homo sapien
aaagttgaggaaacatatgattttt

SEQ ID NO: 6006880 - DNA, 25 bp, Homo sapien
aaccgcagaaacttataaacaaatg

SEQ ID NO: 6006881 - DNA, 25 bp, Homo sapien
gtggaataagagaaatgaggatatt

SEQ ID NO: 6006882 - DNA, 25 bp, Homo sapien
caatgccttaatctgtctccacaat

SEQ ID NO: 6006883 - DNA, 25 bp, Homo sapien
ctttgcgtaacgaaacgccacgtaa

SEQ ID NO: 6006884 - DNA, 25 bp, Homo sapien
gagatctgccatgccttcaataaag

SEQ ID NO: 6006885 - DNA, 25 bp, Homo sapien
atgccttcaataaaggtctggttgc

SEQ ID NO: 6006886 - DNA, 25 bp, Homo sapien
cttcaataaaggtctggttgccatt

SEQ ID NO: 6006887 - DNA, 25 bp, Homo sapien
cttgtaatggtcagttgtgatcttc

SEQ ID NO: 6006888 - DNA, 25 bp, Homo sapien
ggccactgccttcttcacgccatct

SEQ ID NO: 6006889 - DNA, 25 bp, Homo sapien
gttcatcaaaacaattcctgtgggt

SEQ ID NO: 6006890 - DNA, 25 bp, Homo sapien
gaggatattgagaaaaggccactgc

SEQ ID NO: 6006891 - DNA, 25 bp, Homo sapien
taccaatgaaaggtcctttacagga

SEQ ID NO: 6006892 - DNA, 25 bp, Homo sapien
tgtgcattctgcatgttgaatgtaa

SEQ ID NO: 6006893 - DNA, 25 bp, Homo sapien
cggttagcggctttgcgtaacgaaa

SEQ ID NO: 6006894 - DNA, 25 bp, Homo sapien
caatgtttcaatatgatcagaggta

SEQ ID NO: 6006895 - DNA, 25 bp, Homo sapien
aatgatcttgtaatggtcagttgtg

SEQ ID NO: 6006896 - DNA, 25 bp, Homo sapien
ttaacaacatccatgggtagagaat

SEQ ID NO: 6006897 - DNA, 25 bp, Homo sapien
gtgatattttcggagaaggccttga

SEQ ID NO: 6006898 - DNA, 25 bp, Homo sapien
gtagagaatgtgcggaaaacaataa

SEQ ID NO: 6006899 - DNA, 25 bp, Homo sapien
gggattgccaaaccaacctataagg

SEQ ID NO: 6006900 - DNA, 25 bp, Homo sapien
gatggatgacccggtagtggaataa

SEQ ID NO: 6006901 - DNA, 25 bp, Homo sapien
tgcaaaatcaagaggtagttgatta

SEQ ID NO: 6006902 - DNA, 25 bp, Homo sapien
gatattttcggagaaggccttgatt

SEQ ID NO: 6006903 - DNA, 25 bp, Homo sapien
aaacttagcaatatatttagcaatt

SEQ ID NO: 6006904 - DNA, 25 bp, Homo sapien
attgtcttctgatacttagcactaa

SEQ ID NO: 6006905 - DNA, 25 bp, Homo sapien
ttcggagaaggccttgattagacct

SEQ ID NO: 6006906 - DNA, 25 bp, Homo sapien
aggcttatgaggcgccgtttctgga

SEQ ID NO: 6006907 - DNA, 25 bp, Homo sapien
tttcctcaactttagaggggccacc

SEQ ID NO: 6006908 - DNA, 25 bp, Homo sapien
gaccaagatatagatctctcggagt

SEQ ID NO: 6006909 - DNA, 25 bp, Homo sapien
tgtgcggaaaacaataaaacaacct

SEQ ID NO: 6006910 - DNA, 25 bp, Homo sapien
atatttagcaattgtcttctgatac

SEQ ID NO: 6006911 - DNA, 25 bp, Homo sapien
ataaccgaccaagatatagatctct

SEQ ID NO: 6006912 - DNA, 25 bp, Homo sapien
cgcagctacctcagctgggtaggca

SEQ ID NO: 6006913 - DNA, 25 bp, Homo sapien
ctgcatgttgaatgtaaccgaaaat

SEQ ID NO: 6006914 - DNA, 25 bp, Homo sapien
tttgtttataagtttctgcggttag

SEQ ID NO: 6006915 - DNA, 25 bp, Homo sapien
tatattgcttctctatcttgggggt

SEQ ID NO: 6006916 - DNA, 25 bp, Homo sapien
caacttgggattgccaaaccaacct

SEQ ID NO: 6006917 - DNA, 25 bp, Homo sapien
cattctgcatgttgaatgtaaccga

SEQ ID NO: 6006918 - DNA, 25 bp, Homo sapien
ggtcattatcggcaaataattgata

SEQ ID NO: 6006919 - DNA, 25 bp, Homo sapien
aaggaaccttgtgtacggattgttc

SEQ ID NO: 6006920 - DNA, 25 bp, Homo sapien
agttgtgatcttcttaggaaggaac

SEQ ID NO: 6006921 - DNA, 25 bp, Homo sapien
caggttgcggaaactcttgtagttt

SEQ ID NO: 6006922 - DNA, 25 bp, Homo sapien
cctatattgcttctctatcttgggg

SEQ ID NO: 6006923 - DNA, 25 bp, Homo sapien
ggtccaacttgggattgccaaacca

SEQ ID NO: 6006924 - DNA, 25 bp, Homo sapien
tgcggaaaacaataaaacaaccttg

SEQ ID NO: 6006925 - DNA, 25 bp, Homo sapien
ccgattccccaatgacgcctaagtc

SEQ ID NO: 6006926 - DNA, 25 bp, Homo sapien
aacattaggccatcaactttggggc

SEQ ID NO: 6006927 - DNA, 25 bp, Homo sapien
tctggttgccatttaaagattcgca

SEQ ID NO: 6006928 - DNA, 25 bp, Homo sapien
atcaaaacaattcctgtgggtgatc

SEQ ID NO: 6006929 - DNA, 25 bp, Homo sapien
taagattttacagacctcagtggct

SEQ ID NO: 6006930 - DNA, 25 bp, Homo sapien
aaacaaccttgtctctgacaggttg

SEQ ID NO: 6006931 - DNA, 25 bp, Homo sapien
atttcatgcaatgtttcaatatgat

SEQ ID NO: 6006932 - DNA, 25 bp, Homo sapien
ccatgccttcaataaaggtctggtt

SEQ ID NO: 6006933 - DNA, 25 bp, Homo sapien
gggtaggcatcaccggtgttaacaa

SEQ ID NO: 6006934 - DNA, 25 bp, Homo sapien
attgagaaaaggccactgccttctt

SEQ ID NO: 6006935 - DNA, 25 bp, Homo sapien
tttctgcggttagcggctttgcgta

SEQ ID NO: 6006936 - DNA, 25 bp, Homo sapien
attaggtcattatcggcaaataatt

SEQ ID NO: 6006937 - DNA, 25 bp, Homo sapien
tgtaatggtcagttgtgatcttctt

SEQ ID NO: 6006938 - DNA, 25 bp, Homo sapien
tgacgcctaagtcaatttcatgcaa

SEQ ID NO: 6006939 - DNA, 25 bp, Homo sapien
tccctatattgcttctctatcttgg

SEQ ID NO: 6006940 - DNA, 25 bp, Homo sapien
cgttgatggatgacccggtagtgga

SEQ ID NO: 6006941 - DNA, 25 bp, Homo sapien
ccgaccaagatatagatctctcgga

SEQ ID NO: 6006942 - DNA, 25 bp, Homo sapien
ttatgaggcgccgtttctggacagg

SEQ ID NO: 6006943 - DNA, 25 bp, Homo sapien
tactctgtaagtggcttttgacgag

SEQ ID NO: 6006944 - DNA, 25 bp, Homo sapien
aaccttgtgtacggattgttctgga

SEQ ID NO: 6006945 - DNA, 25 bp, Homo sapien
cattaggccatcaactttggggcct

SEQ ID NO: 6006946 - DNA, 25 bp, Homo sapien
ttctgcatgttgaatgtaaccgaaa

SEQ ID NO: 6006947 - DNA, 25 bp, Homo sapien
gaaaacaataaaacaaccttgtctc

SEQ ID NO: 6006948 - DNA, 25 bp, Homo sapien
tcccaaccatggttttggtccaact

SEQ ID NO: 6006949 - DNA, 25 bp, Homo sapien
ggcaaataattgatacaaaaaatca

SEQ ID NO: 6006950 - DNA, 25 bp, Homo sapien
ttgcgtaacgaaacgccacgtaagg

SEQ ID NO: 6006951 - DNA, 25 bp, Homo sapien
ttctggacaggttttatctaagatt

SEQ ID NO: 6006952 - DNA, 25 bp, Homo sapien
gttagcggctttgcgtaacgaaacg

SEQ ID NO: 6006953 - DNA, 25 bp, Homo sapien
agagaaatgaggatattgagaaaag

SEQ ID NO: 6006954 - DNA, 25 bp, Homo sapien
gagttggttactctgtaagtggctt

SEQ ID NO: 6006955 - DNA, 25 bp, Homo sapien
tcgcatctcttaaatttatccttat

SEQ ID NO: 6006956 - DNA, 25 bp, Homo sapien
aaaggtcctttacaggatcattgga

SEQ ID NO: 6006957 - DNA, 25 bp, Homo sapien
acccatgttcatcaaaacaattcct

SEQ ID NO: 6006958 - DNA, 25 bp, Homo sapien
caactttagaggggccacccatgtt

SEQ ID NO: 6006959 - DNA, 25 bp, Homo sapien
aagtggcttttgacgagatctgcca

SEQ ID NO: 6006960 - DNA, 25 bp, Homo sapien
gtaggcatcaccggtgttaacaaca

SEQ ID NO: 6006961 - DNA, 25 bp, Homo sapien
aaaatgatcttgtaatggtcagttg

SEQ ID NO: 6006962 - DNA, 25 bp, Homo sapien
aagatatagatctctcggagtccaa

SEQ ID NO: 6006963 - DNA, 25 bp, Homo sapien
tgacgagatctgccatgccttcaat

SEQ ID NO: 6006964 - DNA, 25 bp, Homo sapien
ttcttaggaaggaaccttgtgtacg

SEQ ID NO: 6006965 - DNA, 25 bp, Homo sapien
tggttgccatttaaagattcgcatc

SEQ ID NO: 6006966 - DNA, 25 bp, Homo sapien
ttagcaatatatttagcaattgtct

SEQ ID NO: 6006967 - DNA, 25 bp, Homo sapien
gagcccccaccaatttccctatatt

SEQ ID NO: 6006968 - DNA, 25 bp, Homo sapien
gctcccaaccatggttttggtccaa

SEQ ID NO: 6006969 - DNA, 25 bp, Homo sapien
tcagtggcttgatactcagaccatt

SEQ ID NO: 6006970 - DNA, 25 bp, Homo sapien
attttacagacctcagtggcttgat

SEQ ID NO: 6006971 - DNA, 25 bp, Homo sapien
ttagcatttgtttataagtttctgc

SEQ ID NO: 6006972 - DNA, 25 bp, Homo sapien
aaacaataaaacaaccttgtctctg

SEQ ID NO: 6006973 - DNA, 25 bp, Homo sapien
ctctgacaggttgcggaaactcttg

SEQ ID NO: 6006974 - DNA, 25 bp, Homo sapien
tacaaaaaatcatatgtttcctcaa

SEQ ID NO: 6006975 - DNA, 25 bp, Homo sapien
agtttctgcggttagcggctttgcg

SEQ ID NO: 6006976 - DNA, 25 bp, Homo sapien
ggagtccaatgccttaatctgtctc

SEQ ID NO: 6006977 - DNA, 25 bp, Homo sapien
gcgtaacgaaacgccacgtaaggct

SEQ ID NO: 6006978 - DNA, 25 bp, Homo sapien
catttgtttataagtttctgcggtt

SEQ ID NO: 6006979 - DNA, 25 bp, Homo sapien
tatattccgattccccaatgacgcc

SEQ ID NO: 6006980 - DNA, 25 bp, Homo sapien
tcgtgattgccaaataccaatgaaa

SEQ ID NO: 6006981 - DNA, 25 bp, Homo sapien
agcatttgtttataagtttctgcgg

SEQ ID NO: 6006982 - DNA, 25 bp, Homo sapien
atttagcaattgtcttctgatactt

SEQ ID NO: 6006983 - DNA, 25 bp, Homo sapien
ctgtctgcgctcccaaccatggttt

SEQ ID NO: 6006984 - DNA, 25 bp, Homo sapien
ctaagtcaatttcatgcaatgtttc

SEQ ID NO: 6006985 - DNA, 25 bp, Homo sapien
caaccatggttttggtccaacttgg

SEQ ID NO: 6006986 - DNA, 25 bp, Homo sapien
ggaataagagaaatgaggatattga

SEQ ID NO: 6006987 - DNA, 25 bp, Homo sapien
gatacaaaaaatcatatgtttcctc

SEQ ID NO: 6006988 - DNA, 25 bp, Homo sapien
aatttccctatattgcttctctatc

SEQ ID NO: 6006989 - DNA, 25 bp, Homo sapien
tacttagcactaatgggaattaggt

SEQ ID NO: 6006990 - DNA, 25 bp, Homo sapien
ttagaatagagttggttactctgta

SEQ ID NO: 6006991 - DNA, 25 bp, Homo sapien
tttagaggggccacccatgttcatc

SEQ ID NO: 6006992 - DNA, 25 bp, Homo sapien
tagaccttcatttgtaggccaacga

SEQ ID NO: 6006993 - DNA, 25 bp, Homo sapien
cgaaacttagcaatatatttagcaa

SEQ ID NO: 6006994 - DNA, 25 bp, Homo sapien
cgaaacgccacgtaaggcttatgag

SEQ ID NO: 6006995 - DNA, 25 bp, Homo sapien
ccatttaaagattcgcatctcttaa

SEQ ID NO: 6006996 - DNA, 25 bp, Homo sapien
agcaatatatttagcaattgtcttc

SEQ ID NO: 6006997 - DNA, 25 bp, Homo sapien
caaaatcaagaggtagttgattaga

SEQ ID NO: 6006998 - DNA, 25 bp, Homo sapien
agtccaatgccttaatctgtctcca

SEQ ID NO: 6006999 - DNA, 25 bp, Homo sapien
cttgtagttttttggtgatattttc

SEQ ID NO: 6007000 - DNA, 25 bp, Homo sapien
aaagattcgcatctcttaaatttat

SEQ ID NO: 6007001 - DNA, 25 bp, Homo sapien
gaggcgccgtttctggacaggtttt

SEQ ID NO: 6007002 - DNA, 25 bp, Homo sapien
gattgccaaataccaatgaaaggtc

SEQ ID NO: 6007003 - DNA, 25 bp, Homo sapien
gggaattaggtcattatcggcaaat

SEQ ID NO: 6007004 - DNA, 25 bp, Homo sapien
ttcaatatgatcagaggtaaaggcg

SEQ ID NO: 6007005 - DNA, 25 bp, Homo sapien
aaccgaccaagatatagatctctcg

SEQ ID NO: 6007006 - DNA, 25 bp, Homo sapien
ccacaattcgttgatggatgacccg

SEQ ID NO: 6007007 - DNA, 25 bp, Homo sapien
caaataccaatgaaaggtcctttac

SEQ ID NO: 6007008 - DNA, 25 bp, Homo sapien
aaacaattcctgtgggtgatctctt

SEQ ID NO: 6007009 - DNA, 25 bp, Homo sapien
catgcaatgtttcaatatgatcaga

SEQ ID NO: 6007010 - DNA, 25 bp, Homo sapien
tgccatgccttcaataaaggtctgg

SEQ ID NO: 6007011 - DNA, 25 bp, Homo sapien
ggtacgaaacttagcaatatattta

SEQ ID NO: 6007012 - DNA, 25 bp, Homo sapien
aataaaggtctggttgccatttaaa

SEQ ID NO: 6007013 - DNA, 25 bp, Homo sapien
ttaaagattcgcatctcttaaattt

SEQ ID NO: 6007014 - DNA, 25 bp, Homo sapien
tcaagtagattcgtgattgccaaat

SEQ ID NO: 6007015 - DNA, 25 bp, Homo sapien
atcttgggggtacgaaacttagcaa

SEQ ID NO: 6007016 - DNA, 25 bp, Homo sapien
gcttatgaggcgccgtttctggaca

SEQ ID NO: 6007017 - DNA, 25 bp, Homo sapien
catttgtaggccaacgatcaataac

SEQ ID NO: 6007018 - DNA, 25 bp, Homo sapien
ttttggtccaacttgggattgccaa

SEQ ID NO: 6007019 - DNA, 25 bp, Homo sapien
atgccttaatctgtctccacaattc

SEQ ID NO: 6007020 - DNA, 25 bp, Homo sapien
ctcttgtagttttttggtgatattt

SEQ ID NO: 6007021 - DNA, 25 bp, Homo sapien
atgttgaatgtaaccgaaaatgatc

SEQ ID NO: 6007022 - DNA, 25 bp, Homo sapien
aactcttgtagttttttggtgatat

SEQ ID NO: 6007023 - DNA, 25 bp, Homo sapien
ggtctggttgccatttaaagattcg

SEQ ID NO: 6007024 - DNA, 25 bp, Homo sapien
gtaacgaaacgccacgtaaggctta

SEQ ID NO: 6007025 - DNA, 25 bp, Homo sapien
atatatttagcaattgtcttctgat

SEQ ID NO: 6007026 - DNA, 25 bp, Homo sapien
tagatctctcggagtccaatgcctt

SEQ ID NO: 6007027 - DNA, 25 bp, Homo sapien
aataagagaaatgaggatattgaga

SEQ ID NO: 6007028 - DNA, 25 bp, Homo sapien
tgtttcctcaactttagaggggcca

SEQ ID NO: 6007029 - DNA, 25 bp, Homo sapien
ggcgccgtttctggacaggttttat

SEQ ID NO: 6007030 - DNA, 25 bp, Homo sapien
tgattagaccttcatttgtaggcca

SEQ ID NO: 6007031 - DNA, 25 bp, Homo sapien
aggtaaaggcgataggaataaacat

SEQ ID NO: 6007032 - DNA, 25 bp, Homo sapien
gacctcagtggcttgatactcagac

SEQ ID NO: 6007033 - DNA, 25 bp, Homo sapien
ggggtacgaaacttagcaatatatt

SEQ ID NO: 6007034 - DNA, 25 bp, Homo sapien
acaggttttatctaagattttacag

SEQ ID NO: 6007035 - DNA, 25 bp, Homo sapien
ttgatggatgacccggtagtggaat

SEQ ID NO: 6007036 - DNA, 25 bp, Homo sapien
ccgtcgcagctacctcagctgggta

SEQ ID NO: 6007037 - DNA, 25 bp, Homo sapien
aatagagttggttactctgtaagtg

SEQ ID NO: 6007038 - DNA, 25 bp, Homo sapien
acaaccttgtctctgacaggttgcg

SEQ ID NO: 6007039 - DNA, 25 bp, Homo sapien
acccggtagtggaataagagaaatg

SEQ ID NO: 6007040 - DNA, 25 bp, Homo sapien
ttaatttttgcatgatgttgtaaac

SEQ ID NO: 6007041 - DNA, 25 bp, Homo sapien
ccttgtgtacggattgttctggaaa

SEQ ID NO: 6007042 - DNA, 25 bp, Homo sapien
accgaaaatgatcttgtaatggtca

SEQ ID NO: 6007043 - DNA, 25 bp, Homo sapien
taaaggtctggttgccatttaaaga

SEQ ID NO: 6007044 - DNA, 25 bp, Homo sapien
agattcgcatctcttaaatttatcc

SEQ ID NO: 6007045 - DNA, 25 bp, Homo sapien
aattccgcaatttcagctgtctgcg

SEQ ID NO: 6007046 - DNA, 25 bp, Homo sapien
agaaaaggccactgccttcttcacg

SEQ ID NO: 6007047 - DNA, 25 bp, Homo sapien
aatttttgcatgatgttgtaaaccg

SEQ ID NO: 6007048 - DNA, 25 bp, Homo sapien
ttcctgtgggtgatctcttttgtgc

SEQ ID NO: 6007049 - DNA, 25 bp, Homo sapien
tttataagtttctgcggttagcggc

SEQ ID NO: 6007050 - DNA, 25 bp, Homo sapien
gcttctctatcttgggggtacgaaa

SEQ ID NO: 6007051 - DNA, 25 bp, Homo sapien
ttgatactcagaccatttccggatt

SEQ ID NO: 6007052 - DNA, 25 bp, Homo sapien
ggggcctaaaaattccgcaatttca

SEQ ID NO: 6007053 - DNA, 25 bp, Homo sapien
gccatcttttagcatttgtttataa

SEQ ID NO: 6007054 - DNA, 25 bp, Homo sapien
ccacccatgttcatcaaaacaattc

SEQ ID NO: 6007055 - DNA, 25 bp, Homo sapien
tttacaggatcattggacttgccaa

SEQ ID NO: 6007056 - DNA, 25 bp, Homo sapien
ttgccaaataccaatgaaaggtcct

SEQ ID NO: 6007057 - DNA, 25 bp, Homo sapien
cagctacctcagctgggtaggcatc

SEQ ID NO: 6007058 - DNA, 25 bp, Homo sapien
aatgacgcctaagtcaatttcatgc

SEQ ID NO: 6007059 - DNA, 25 bp, Homo sapien
tcaataaaggtctggttgccattta

SEQ ID NO: 6007060 - DNA, 25 bp, Homo sapien
aagtcaatttcatgcaatgtttcaa

SEQ ID NO: 6007061 - DNA, 25 bp, Homo sapien
tccggattggggagcccccaccaat

SEQ ID NO: 6007062 - DNA, 25 bp, Homo sapien
atggtcagttgtgatcttcttagga

SEQ ID NO: 6007063 - DNA, 25 bp, Homo sapien
gtagattcgtgattgccaaatacca

SEQ ID NO: 6007064 - DNA, 25 bp, Homo sapien
tacctcagctgggtaggcatcaccg

SEQ ID NO: 6007065 - DNA, 25 bp, Homo sapien
tatcggcaaataattgatacaaaaa

SEQ ID NO: 6007066 - DNA, 25 bp, Homo sapien
ctttaatttttgcatgatgttgtaa

SEQ ID NO: 6007067 - DNA, 25 bp, Homo sapien
gatacttagcactaatgggaattag

SEQ ID NO: 6007068 - DNA, 25 bp, Homo sapien
tcggcaaataattgatacaaaaaat

SEQ ID NO: 6007069 - DNA, 25 bp, Homo sapien
caatatgatcagaggtaaaggcgat

SEQ ID NO: 6007070 - DNA, 25 bp, Homo sapien
tgcattctgcatgttgaatgtaacc

SEQ ID NO: 6007071 - DNA, 25 bp, Homo sapien
ccatggttttggtccaacttgggat

SEQ ID NO: 6007072 - DNA, 25 bp, Homo sapien
taggaataaacattaggccatcaac

SEQ ID NO: 6007073 - DNA, 25 bp, Homo sapien
atcaataaccgaccaagatatagat

SEQ ID NO: 6007074 - DNA, 25 bp, Homo sapien
gatctctcggagtccaatgccttaa

SEQ ID NO: 6007075 - DNA, 25 bp, Homo sapien
ccggtagtggaataagagaaatgag

SEQ ID NO: 6007076 - DNA, 25 bp, Homo sapien
gaaactcttgtagttttttggtgat

SEQ ID NO: 6007077 - DNA, 25 bp, Homo sapien
ttccccaatgacgcctaagtcaatt

SEQ ID NO: 6007078 - DNA, 25 bp, Homo sapien
gccttaatctgtctccacaattcgt

SEQ ID NO: 6007079 - DNA, 25 bp, Homo sapien
tcctcaactttagaggggccaccca

SEQ ID NO: 6007080 - DNA, 25 bp, Homo sapien
tgaaaggtcctttacaggatcattg

SEQ ID NO: 6007081 - DNA, 25 bp, Homo sapien
ccatgttcatcaaaacaattcctgt

SEQ ID NO: 6007082 - DNA, 25 bp, Homo sapien
ctccacaattcgttgatggatgacc

SEQ ID NO: 6007083 - DNA, 25 bp, Homo sapien
ctctgtaagtggcttttgacgagat

SEQ ID NO: 6007084 - DNA, 25 bp, Homo sapien
acatccatgggtagagaatgtgcgg

SEQ ID NO: 6007085 - DNA, 25 bp, Homo sapien
aaatcaagaggtagttgattagaat

SEQ ID NO: 6007086 - DNA, 25 bp, Homo sapien
ggctttgcgtaacgaaacgccacgt

SEQ ID NO: 6007087 - DNA, 25 bp, Homo sapien
tgatctcttttgtgcattctgcatg

SEQ ID NO: 6007088 - DNA, 25 bp, Homo sapien
acttagcaatatatttagcaattgt

SEQ ID NO: 6007089 - DNA, 25 bp, Homo sapien
tgcaatgtttcaatatgatcagagg

SEQ ID NO: 6007090 - DNA, 25 bp, Homo sapien
taaggcttatgaggcgccgtttctg

SEQ ID NO: 6007091 - DNA, 25 bp, Homo sapien
cctaaaaattccgcaatttcagctg

SEQ ID NO: 6007092 - DNA, 25 bp, Homo sapien
atgaggcgccgtttctggacaggtt

SEQ ID NO: 6007093 - DNA, 25 bp, Homo sapien
atcaagaggtagttgattagaatag

SEQ ID NO: 6007094 - DNA, 25 bp, Homo sapien
ggacaggttttatctaagattttac

SEQ ID NO: 6007095 - DNA, 25 bp, Homo sapien
agattcgtgattgccaaataccaat

SEQ ID NO: 6007096 - DNA, 25 bp, Homo sapien
tgtcttctgatacttagcactaatg

SEQ ID NO: 6007097 - DNA, 25 bp, Homo sapien
tgccttcttcacgccatcttttagc

SEQ ID NO: 6007098 - DNA, 25 bp, Homo sapien
agagaatgtgcggaaaacaataaaa

SEQ ID NO: 6007099 - DNA, 25 bp, Homo sapien
gatgacccggtagtggaataagaga

SEQ ID NO: 6007100 - DNA, 25 bp, Homo sapien
tttatctaagattttacagacctca

SEQ ID NO: 6007101 - DNA, 25 bp, Homo sapien
ttctctatcttgggggtacgaaact

SEQ ID NO: 6007102 - DNA, 25 bp, Homo sapien
gggagcccccaccaatttccctata

SEQ ID NO: 6007103 - DNA, 25 bp, Homo sapien
actttagaggggccacccatgttca

SEQ ID NO: 6007104 - DNA, 25 bp, Homo sapien
gtagttgattagaatagagttggtt

SEQ ID NO: 6007105 - DNA, 25 bp, Homo sapien
tggtgatattttcggagaaggcctt

SEQ ID NO: 6007106 - DNA, 25 bp, Homo sapien
aggtcctttacaggatcattggact

SEQ ID NO: 6007107 - DNA, 25 bp, Homo sapien
catcaactttggggcctaaaaattc

SEQ ID NO: 6007108 - DNA, 25 bp, Homo sapien
cgccgtttctggacaggttttatct

SEQ ID NO: 6007109 - DNA, 25 bp, Homo sapien
aaaaggccactgccttcttcacgcc

SEQ ID NO: 6007110 - DNA, 25 bp, Homo sapien
taagagaaatgaggatattgagaaa

SEQ ID NO: 6007111 - DNA, 25 bp, Homo sapien
ttgtctctgacaggttgcggaaact

SEQ ID NO: 6007112 - DNA, 25 bp, Homo sapien
cagaccatttccggattggggagcc

SEQ ID NO: 6007113 - DNA, 25 bp, Homo sapien
ttgcttctctatcttgggggtacga

SEQ ID NO: 6007114 - DNA, 25 bp, Homo sapien
ttgatacaaaaaatcatatgtttcc

SEQ ID NO: 6007115 - DNA, 25 bp, Homo sapien
ttaaactttaatttttgcatgatgt

SEQ ID NO: 6007116 - DNA, 25 bp, Homo sapien
gaaggccttgattagaccttcattt

SEQ ID NO: 6007117 - DNA, 25 bp, Homo sapien
ggtagtggaataagagaaatgagga

SEQ ID NO: 6007118 - DNA, 25 bp, Homo sapien
gccaaataccaatgaaaggtccttt

SEQ ID NO: 6007119 - DNA, 25 bp, Homo sapien
gtaaaggcgataggaataaacatta

SEQ ID NO: 6007120 - DNA, 25 bp, Homo sapien
tgtaggccaacgatcaataaccgac

SEQ ID NO: 6007121 - DNA, 25 bp, Homo sapien
ttcatttgtaggccaacgatcaata

SEQ ID NO: 6007122 - DNA, 25 bp, Homo sapien
atcttgtaatggtcagttgtgatct

SEQ ID NO: 6007123 - DNA, 25 bp, Homo sapien
agaaatgaggatattgagaaaaggc

SEQ ID NO: 6007124 - DNA, 25 bp, Homo sapien
gtcgcagctacctcagctgggtagg

SEQ ID NO: 6007125 - DNA, 25 bp, Homo sapien
tacagacctcagtggcttgatactc

SEQ ID NO: 6007126 - DNA, 25 bp, Homo sapien
tcttcttaggaaggaaccttgtgta

SEQ ID NO: 6007127 - DNA, 25 bp, Homo sapien
ttgattagaatagagttggttactc

SEQ ID NO: 6007128 - DNA, 25 bp, Homo sapien
cagacctcagtggcttgatactcag

SEQ ID NO: 6007129 - DNA, 25 bp, Homo sapien
atcaccggtgttaacaacatccatg

SEQ ID NO: 6007130 - DNA, 25 bp, Homo sapien
acgagatctgccatgccttcaataa

SEQ ID NO: 6007131 - DNA, 25 bp, Homo sapien
tacgaaacttagcaatatatttagc

SEQ ID NO: 6007132 - DNA, 25 bp, Homo sapien
tcagaggtaaaggcgataggaataa

SEQ ID NO: 6007133 - DNA, 25 bp, Homo sapien
atttaaagattcgcatctcttaaat

SEQ ID NO: 6007134 - DNA, 25 bp, Homo sapien
ttgtgtacggattgttctggaaagc

SEQ ID NO: 6007135 - DNA, 25 bp, Homo sapien
aaaattccgcaatttcagctgtctg

SEQ ID NO: 6007136 - DNA, 25 bp, Homo sapien
ttcatgcaatgtttcaatatgatca

SEQ ID NO: 6007137 - DNA, 25 bp, Homo sapien
ggcttttgacgagatctgccatgcc

SEQ ID NO: 6007138 - DNA, 25 bp, Homo sapien
catatgtttcctcaactttagaggg

SEQ ID NO: 6007139 - DNA, 25 bp, Homo sapien
gtctgcgctcccaaccatggttttg

SEQ ID NO: 6007140 - DNA, 25 bp, Homo sapien
gcctaagtcaatttcatgcaatgtt

SEQ ID NO: 6007141 - DNA, 25 bp, Homo sapien
tcggagtccaatgccttaatctgtc

SEQ ID NO: 6007142 - DNA, 25 bp, Homo sapien
tgtaaccgaaaatgatcttgtaatg

SEQ ID NO: 6007143 - DNA, 25 bp, Homo sapien
atgaggatattgagaaaaggccact

SEQ ID NO: 6007144 - DNA, 25 bp, Homo sapien
caagaggtagttgattagaatagag

SEQ ID NO: 6007145 - DNA, 25 bp, Homo sapien
agtggcttgatactcagaccatttc

SEQ ID NO: 6007146 - DNA, 25 bp, Homo sapien
aattcctgtgggtgatctcttttgt

SEQ ID NO: 6007147 - DNA, 25 bp, Homo sapien
ctgatacttagcactaatgggaatt

SEQ ID NO: 6007148 - DNA, 25 bp, Homo sapien
tgtttataagtttctgcggttagcg

SEQ ID NO: 6007149 - DNA, 25 bp, Homo sapien
tagtggaataagagaaatgaggata

SEQ ID NO: 6007150 - DNA, 25 bp, Homo sapien
tcattatcggcaaataattgataca

SEQ ID NO: 6007151 - DNA, 25 bp, Homo sapien
tcagttgtgatcttcttaggaagga

SEQ ID NO: 6007152 - DNA, 25 bp, Homo sapien
ctgtaagtggcttttgacgagatct

SEQ ID NO: 6007153 - DNA, 25 bp, Homo sapien
aatgaaaggtcctttacaggatcat

SEQ ID NO: 6007154 - DNA, 25 bp, Homo sapien
agattttacagacctcagtggcttg

SEQ ID NO: 6007155 - DNA, 25 bp, Homo sapien
ggatcattggacttgccaagtgcaa

SEQ ID NO: 6007156 - DNA, 25 bp, Homo sapien
agttgattagaatagagttggttac

SEQ ID NO: 6007157 - DNA, 25 bp, Homo sapien
ctcaactttagaggggccacccatg

SEQ ID NO: 6007158 - DNA, 25 bp, Homo sapien
aatttatccttatattccgattccc

SEQ ID NO: 6007159 - DNA, 25 bp, Homo sapien
gaccatttccggattggggagcccc

SEQ ID NO: 6007160 - DNA, 25 bp, Homo sapien
tacaggatcattggacttgccaagt

SEQ ID NO: 6007161 - DNA, 25 bp, Homo sapien
tccaacttgggattgccaaaccaac

SEQ ID NO: 6007162 - DNA, 25 bp, Homo sapien
cggagaaggccttgattagaccttc

SEQ ID NO: 6007163 - DNA, 25 bp, Homo sapien
tggcttgatactcagaccatttccg

SEQ ID NO: 6007164 - DNA, 25 bp, Homo sapien
agctgggtaggcatcaccggtgtta

SEQ ID NO: 6007165 - DNA, 25 bp, Homo sapien
atcattggacttgccaagtgcaaaa

SEQ ID NO: 6007166 - DNA, 25 bp, Homo sapien
aataaaacaaccttgtctctgacag

SEQ ID NO: 6007167 - DNA, 25 bp, Homo sapien
gtgattgccaaataccaatgaaagg

SEQ ID NO: 6007168 - DNA, 25 bp, Homo sapien
ccttcatttgtaggccaacgatcaa

SEQ ID NO: 6007169 - DNA, 25 bp, Homo sapien
acaattcgttgatggatgacccggt

SEQ ID NO: 6007170 - DNA, 25 bp, Homo sapien
taggtcattatcggcaaataattga

SEQ ID NO: 6007171 - DNA, 25 bp, Homo sapien
gtttctggacaggttttatctaaga

SEQ ID NO: 6007172 - DNA, 25 bp, Homo sapien
ttccgattccccaatgacgcctaag

SEQ ID NO: 6007173 - DNA, 25 bp, Homo sapien
gtttcaatatgatcagaggtaaagg

SEQ ID NO: 6007174 - DNA, 25 bp, Homo sapien
caataaccgaccaagatatagatct

SEQ ID NO: 6007175 - DNA, 25 bp, Homo sapien
ggggccacccatgttcatcaaaaca

SEQ ID NO: 6007176 - DNA, 25 bp, Homo sapien
cgatcaataaccgaccaagatatag

SEQ ID NO: 6007177 - DNA, 25 bp, Homo sapien
taatggtcagttgtgatcttcttag

SEQ ID NO: 6007178 - DNA, 25 bp, Homo sapien
aataccaatgaaaggtcctttacag

SEQ ID NO: 6007179 - DNA, 25 bp, Homo sapien
aatttcagctgtctgcgctcccaac

SEQ ID NO: 6007180 - DNA, 25 bp, Homo sapien
cctgtgggtgatctcttttgtgcat

SEQ ID NO: 6007181 - DNA, 25 bp, Homo sapien
agcaattgtcttctgatacttagca

SEQ ID NO: 6007182 - DNA, 25 bp, Homo sapien
cctcagctgggtaggcatcaccggt

SEQ ID NO: 6007183 - DNA, 25 bp, Homo sapien
gccacgtaaggcttatgaggcgccg

SEQ ID NO: 6007184 - DNA, 25 bp, Homo sapien
ctgcgctcccaaccatggttttggt

SEQ ID NO: 6007185 - DNA, 25 bp, Homo sapien
aattgatacaaaaaatcatatgttt

SEQ ID NO: 6007186 - DNA, 25 bp, Homo sapien
aatgtaaccgaaaatgatcttgtaa

SEQ ID NO: 6007187 - DNA, 25 bp, Homo sapien
aacgatcaataaccgaccaagatat

SEQ ID NO: 6007188 - DNA, 25 bp, Homo sapien
tgatgttgtaaaccgtcgcagctac

SEQ ID NO: 6007189 - DNA, 25 bp, Homo sapien
cttttgtgcattctgcatgttgaat

SEQ ID NO: 6007190 - DNA, 25 bp, Homo sapien
ggttttggtccaacttgggattgcc

SEQ ID NO: 6007191 - DNA, 25 bp, Homo sapien
tttcagctgtctgcgctcccaacca

SEQ ID NO: 6007192 - DNA, 25 bp, Homo sapien
cttatattccgattccccaatgacg

SEQ ID NO: 6007193 - DNA, 25 bp, Homo sapien
tcagctgggtaggcatcaccggtgt

SEQ ID NO: 6007194 - DNA, 25 bp, Homo sapien
gatctgccatgccttcaataaaggt

SEQ ID NO: 6007195 - DNA, 25 bp, Homo sapien
aggttttatctaagattttacagac

SEQ ID NO: 6007196 - DNA, 25 bp, Homo sapien
gtgatcttcttaggaaggaaccttg

SEQ ID NO: 6007197 - DNA, 25 bp, Homo sapien
gattccccaatgacgcctaagtcaa

SEQ ID NO: 6007198 - DNA, 25 bp, Homo sapien
tttgcatgatgttgtaaaccgtcgc

SEQ ID NO: 6007199 - DNA, 25 bp, Homo sapien
tggttactctgtaagtggcttttga

SEQ ID NO: 6007200 - DNA, 25 bp, Homo sapien
gccttcaataaaggtctggttgcca

SEQ ID NO: 6007201 - DNA, 25 bp, Homo sapien
aaatcatatgtttcctcaactttag

SEQ ID NO: 6007202 - DNA, 25 bp, Homo sapien
ttggtccaacttgggattgccaaac

SEQ ID NO: 6007203 - DNA, 25 bp, Homo sapien
ttttagcatttgtttataagtttct

SEQ ID NO: 6007204 - DNA, 25 bp, Homo sapien
aaacgccacgtaaggcttatgaggc

SEQ ID NO: 6007205 - DNA, 25 bp, Homo sapien
tctgccatgccttcaataaaggtct

SEQ ID NO: 6007206 - DNA, 25 bp, Homo sapien
tgagaaaaggccactgccttcttca

SEQ ID NO: 6007207 - DNA, 25 bp, Homo sapien
ttgccaagtgcaaaatcaagaggta

SEQ ID NO: 6007208 - DNA, 25 bp, Homo sapien
aataaacattaggccatcaactttg

SEQ ID NO: 6007209 - DNA, 25 bp, Homo sapien
tttacagacctcagtggcttgatac

SEQ ID NO: 6007210 - DNA, 25 bp, Homo sapien
tattccgattccccaatgacgccta

SEQ ID NO: 6007211 - DNA, 25 bp, Homo sapien
aggccttgattagaccttcatttgt

SEQ ID NO: 6007212 - DNA, 25 bp, Homo sapien
tctaagattttacagacctcagtgg

SEQ ID NO: 6007213 - DNA, 25 bp, Homo sapien
tgcggaaactcttgtagttttttgg

SEQ ID NO: 6007214 - DNA, 25 bp, Homo sapien
tataagtttctgcggttagcggctt

SEQ ID NO: 6007215 - DNA, 25 bp, Homo sapien
cttgattagaccttcatttgtaggc

SEQ ID NO: 6007216 - DNA, 25 bp, Homo sapien
gatcttcttaggaaggaaccttgtg

SEQ ID NO: 6007217 - DNA, 25 bp, Homo sapien
atggttttggtccaacttgggattg

SEQ ID NO: 6007218 - DNA, 25 bp, Homo sapien
tttggtgatattttcggagaaggcc

SEQ ID NO: 6007219 - DNA, 25 bp, Homo sapien
ccttgtctctgacaggttgcggaaa

SEQ ID NO: 6007220 - DNA, 25 bp, Homo sapien
ttcttcacgccatcttttagcattt

SEQ ID NO: 6007221 - DNA, 25 bp, Homo sapien
ctcttttgtgcattctgcatgttga

SEQ ID NO: 6007222 - DNA, 25 bp, Homo sapien
ctggacaggttttatctaagatttt

SEQ ID NO: 6007223 - DNA, 25 bp, Homo sapien
gatactcagaccatttccggattgg

SEQ ID NO: 6007224 - DNA, 25 bp, Homo sapien
tagcactaatgggaattaggtcatt

SEQ ID NO: 6007225 - DNA, 25 bp, Homo sapien
taaaaattccgcaatttcagctgtc

SEQ ID NO: 6007226 - DNA, 25 bp, Homo sapien
gtctctgacaggttgcggaaactct

SEQ ID NO: 6007227 - DNA, 25 bp, Homo sapien
atctgtctccacaattcgttgatgg

SEQ ID NO: 6007228 - DNA, 25 bp, Homo sapien
gatcagaggtaaaggcgataggaat

SEQ ID NO: 6007229 - DNA, 25 bp, Homo sapien
agaatagagttggttactctgtaag

SEQ ID NO: 6007230 - DNA, 25 bp, Homo sapien
caagtgcaaaatcaagaggtagttg

SEQ ID NO: 6007231 - DNA, 25 bp, Homo sapien
tttgacgagatctgccatgccttca

SEQ ID NO: 6007232 - DNA, 25 bp, Homo sapien
tttttggtgatattttcggagaagg

SEQ ID NO: 6007233 - DNA, 25 bp, Homo sapien
gttgtaaaccgtcgcagctacctca

SEQ ID NO: 6007234 - DNA, 25 bp, Homo sapien
acaattcctgtgggtgatctctttt

SEQ ID NO: 6007235 - DNA, 25 bp, Homo sapien
ctgggtaggcatcaccggtgttaac

SEQ ID NO: 6007236 - DNA, 25 bp, Homo sapien
taatctgtctccacaattcgttgat

SEQ ID NO: 6007237 - DNA, 25 bp, Homo sapien
ccaagatatagatctctcggagtcc

SEQ ID NO: 6007238 - DNA, 25 bp, Homo sapien
tgttaacaacatccatgggtagaga

SEQ ID NO: 6007239 - DNA, 25 bp, Homo sapien
tctctcggagtccaatgccttaatc

SEQ ID NO: 6007240 - DNA, 25 bp, Homo sapien
gtcaatttcatgcaatgtttcaata

SEQ ID NO: 6007241 - DNA, 25 bp, Homo sapien
ttggacttgccaagtgcaaaatcaa

SEQ ID NO: 6007242 - DNA, 25 bp, Homo sapien
caccggtgttaacaacatccatggg

SEQ ID NO: 6007243 - DNA, 25 bp, Homo sapien
tctcggagtccaatgccttaatctg

SEQ ID NO: 6007244 - DNA, 25 bp, Homo sapien
tttttgcatgatgttgtaaaccgtc

SEQ ID NO: 6007245 - DNA, 25 bp, Homo sapien
gtctccacaattcgttgatggatga

SEQ ID NO: 6007246 - DNA, 25 bp, Homo sapien
tcagctgtctgcgctcccaaccatg

SEQ ID NO: 6007247 - DNA, 25 bp, Homo sapien
gcatcaccggtgttaacaacatcca

SEQ ID NO: 6007248 - DNA, 25 bp, Homo sapien
tttgtgcattctgcatgttgaatgt

SEQ ID NO: 6007249 - DNA, 25 bp, Homo sapien
ctgtctccacaattcgttgatggat

SEQ ID NO: 6007250 - DNA, 25 bp, Homo sapien
tggatgacccggtagtggaataaga

SEQ ID NO: 6007251 - DNA, 25 bp, Homo sapien
ccaacgatcaataaccgaccaagat

SEQ ID NO: 6007252 - DNA, 25 bp, Homo sapien
tgcatgatgttgtaaaccgtcgcag

SEQ ID NO: 6007253 - DNA, 25 bp, Homo sapien
taagtttctgcggttagcggctttg

SEQ ID NO: 6007254 - DNA, 25 bp, Homo sapien
gttactctgtaagtggcttttgacg

SEQ ID NO: 6007255 - DNA, 25 bp, Homo sapien
ccactgccttcttcacgccatcttt

SEQ ID NO: 6007256 - DNA, 25 bp, Homo sapien
atcatatgtttcctcaactttagag

SEQ ID NO: 6007257 - DNA, 25 bp, Homo sapien
ggaataaacattaggccatcaactt

SEQ ID NO: 6007258 - DNA, 25 bp, Homo sapien
ccgcaatttcagctgtctgcgctcc

SEQ ID NO: 6007259 - DNA, 25 bp, Homo sapien
ggccaacgatcaataaccgaccaag

SEQ ID NO: 6007260 - DNA, 25 bp, Homo sapien
tcttctgatacttagcactaatggg

SEQ ID NO: 6007261 - DNA, 25 bp, Homo sapien
agctgtctgcgctcccaaccatggt

SEQ ID NO: 6007262 - DNA, 25 bp, Homo sapien
gcggctttgcgtaacgaaacgccac

SEQ ID NO: 6007263 - DNA, 25 bp, Homo sapien
gaccttcatttgtaggccaacgatc

SEQ ID NO: 6007264 - DNA, 25 bp, Homo sapien
gtgtacggattgttctggaaagcat

SEQ ID NO: 6007265 - DNA, 25 bp, Homo sapien
gacaggttgcggaaactcttgtagt

SEQ ID NO: 6007266 - DNA, 25 bp, Homo sapien
ctatcttgggggtacgaaacttagc

SEQ ID NO: 6007267 - DNA, 25 bp, Homo sapien
tagttttttggtgatattttcggag

SEQ ID NO: 6007268 - DNA, 25 bp, Homo sapien
tttccctatattgcttctctatctt

SEQ ID NO: 6007269 - DNA, 25 bp, Homo sapien
acgccatcttttagcatttgtttat

SEQ ID NO: 6007270 - DNA, 25 bp, Homo sapien
cttttgacgagatctgccatgcctt

SEQ ID NO: 6007271 - DNA, 25 bp, Homo sapien
tggggagcccccaccaatttcccta

SEQ ID NO: 6007272 - DNA, 25 bp, Homo sapien
tgaatgtaaccgaaaatgatcttgt

SEQ ID NO: 6007273 - DNA, 25 bp, Homo sapien
ttagcaattgtcttctgatacttag

SEQ ID NO: 6007274 - DNA, 25 bp, Homo sapien
ctctatcttgggggtacgaaactta

SEQ ID NO: 6007275 - DNA, 25 bp, Homo sapien
ccatgggtagagaatgtgcggaaaa

SEQ ID NO: 6007276 - DNA, 25 bp, Homo sapien
taaaacaaccttgtctctgacaggt

SEQ ID NO: 6007277 - DNA, 25 bp, Homo sapien
tcatcaaaacaattcctgtgggtga

SEQ ID NO: 6007278 - DNA, 25 bp, Homo sapien
gcttgatactcagaccatttccgga

SEQ ID NO: 6007279 - DNA, 25 bp, Homo sapien
ctcagaccatttccggattggggag

SEQ ID NO: 6007280 - DNA, 25 bp, Homo sapien
gaggggccacccatgttcatcaaaa

SEQ ID NO: 6007281 - DNA, 25 bp, Homo sapien
atattgagaaaaggccactgccttc

SEQ ID NO: 6007282 - DNA, 25 bp, Homo sapien
tgcggttagcggctttgcgtaacga

SEQ ID NO: 6007283 - DNA, 25 bp, Homo sapien
caggatcattggacttgccaagtgc

SEQ ID NO: 6007284 - DNA, 25 bp, Homo sapien
taaaccgtcgcagctacctcagctg

SEQ ID NO: 6007285 - DNA, 25 bp, Homo sapien
ctgacaggttgcggaaactcttgta

SEQ ID NO: 6007286 - DNA, 25 bp, Homo sapien
tgggggtacgaaacttagcaatata

SEQ ID NO: 6007287 - DNA, 25 bp, Homo sapien
attcgcatctcttaaatttatcctt

SEQ ID NO: 6007288 - DNA, 25 bp, Homo sapien
ccccaatgacgcctaagtcaatttc

SEQ ID NO: 6007289 - DNA, 25 bp, Homo sapien
tatctaagattttacagacctcagt

SEQ ID NO: 6007290 - DNA, 25 bp, Homo sapien
cgtaaggcttatgaggcgccgtttc

SEQ ID NO: 6007291 - DNA, 25 bp, Homo sapien
taaccgaaaatgatcttgtaatggt

SEQ ID NO: 6007292 - DNA, 25 bp, Homo sapien
taatgggaattaggtcattatcggc

SEQ ID NO: 6007293 - DNA, 25 bp, Homo sapien
cttcacgccatcttttagcatttgt

SEQ ID NO: 6007294 - DNA, 25 bp, Homo sapien
ggcctaaaaattccgcaatttcagc

SEQ ID NO: 6007295 - DNA, 25 bp, Homo sapien
gatatagatctctcggagtccaatg

SEQ ID NO: 6007296 - DNA, 25 bp, Homo sapien
tattttcggagaaggccttgattag

SEQ ID NO: 6007297 - DNA, 25 bp, Homo sapien
ggtgatctcttttgtgcattctgca

SEQ ID NO: 6007298 - DNA, 25 bp, Homo sapien
aacaacatccatgggtagagaatgt

SEQ ID NO: 6007299 - DNA, 25 bp, Homo sapien
gattggggagcccccaccaatttcc

SEQ ID NO: 6007300 - DNA, 25 bp, Homo sapien
actgccttcttcacgccatctttta

SEQ ID NO: 6007301 - DNA, 25 bp, Homo sapien
tgtaaaccgtcgcagctacctcagc

SEQ ID NO: 6007302 - DNA, 25 bp, Homo sapien
atgatcagaggtaaaggcgatagga

SEQ ID NO: 6007303 - DNA, 25 bp, Homo sapien
cacgtaaggcttatgaggcgccgtt

SEQ ID NO: 6007304 - DNA, 25 bp, Homo sapien
atgttcatcaaaacaattcctgtgg

SEQ ID NO: 6007305 - DNA, 25 bp, Homo sapien
gattgccaaaccaacctataagggt

SEQ ID NO: 6007306 - DNA, 25 bp, Homo sapien
ccaatgacgcctaagtcaatttcat

SEQ ID NO: 6007307 - DNA, 25 bp, Homo sapien
catttccggattggggagcccccac

SEQ ID NO: 6007308 - DNA, 25 bp, Homo sapien
tactcagaccatttccggattgggg

SEQ ID NO: 6007309 - DNA, 25 bp, Homo sapien
cttaatctgtctccacaattcgttg

SEQ ID NO: 6007310 - DNA, 25 bp, Homo sapien
caaaacaattcctgtgggtgatctc

SEQ ID NO: 6007311 - DNA, 25 bp, Homo sapien
agaggtaaaggcgataggaataaac

SEQ ID NO: 6007312 - DNA, 25 bp, Homo sapien
ttccgcaatttcagctgtctgcgct

SEQ ID NO: 6007313 - DNA, 25 bp, Homo sapien
tttgtaggccaacgatcaataaccg

SEQ ID NO: 6007314 - DNA, 25 bp, Homo sapien
acgcctaagtcaatttcatgcaatg

SEQ ID NO: 6007315 - DNA, 25 bp, Homo sapien
gttgccatttaaagattcgcatctc

SEQ ID NO: 6007316 - DNA, 25 bp, Homo sapien
taaacattaggccatcaactttggg

SEQ ID NO: 6007317 - DNA, 25 bp, Homo sapien
gcgctcccaaccatggttttggtcc

SEQ ID NO: 6007318 - DNA, 25 bp, Homo sapien
gaattaggtcattatcggcaaataa

SEQ ID NO: 6007319 - DNA, 25 bp, Homo sapien
gtggcttttgacgagatctgccatg

SEQ ID NO: 6007320 - DNA, 25 bp, Homo sapien
tccaatgccttaatctgtctccaca

SEQ ID NO: 6007321 - DNA, 25 bp, Homo sapien
gttttttggtgatattttcggagaa

SEQ ID NO: 6007322 - DNA, 25 bp, Homo sapien
gccaagtgcaaaatcaagaggtagt

SEQ ID NO: 6007323 - DNA, 25 bp, Homo sapien
atatgatcagaggtaaaggcgatag

SEQ ID NO: 6007324 - DNA, 25 bp, Homo sapien
tgatcttgtaatggtcagttgtgat

SEQ ID NO: 6007325 - DNA, 25 bp, Homo sapien
aattcgttgatggatgacccggtag

SEQ ID NO: 6007326 - DNA, 25 bp, Homo sapien
aaccgtcgcagctacctcagctggg

SEQ ID NO: 6007327 - DNA, 25 bp, Homo sapien
gttttatctaagattttacagacct

SEQ ID NO: 6007328 - DNA, 25 bp, Homo sapien
attcgtgattgccaaataccaatga

SEQ ID NO: 6007329 - DNA, 25 bp, Homo sapien
ggtcagttgtgatcttcttaggaag

SEQ ID NO: 6007330 - DNA, 25 bp, Homo sapien
aaggccactgccttcttcacgccat

SEQ ID NO: 6007331 - DNA, 25 bp, Homo sapien
aggccatcaactttggggcctaaaa

SEQ ID NO: 6007332 - DNA, 25 bp, Homo sapien
aggcatcaccggtgttaacaacatc

SEQ ID NO: 6007333 - DNA, 25 bp, Homo sapien
ccgtttctggacaggttttatctaa

SEQ ID NO: 6007334 - DNA, 25 bp, Homo sapien
atgtttcaatatgatcagaggtaaa

SEQ ID NO: 6007335 - DNA, 25 bp, Homo sapien
aactttaatttttgcatgatgttgt

SEQ ID NO: 6007336 - DNA, 25 bp, Homo sapien
ttgggattgccaaaccaacctataa

SEQ ID NO: 6007337 - DNA, 25 bp, Homo sapien
taggaaggaaccttgtgtacggatt

SEQ ID NO: 6007338 - DNA, 25 bp, Homo sapien
acaataaaacaaccttgtctctgac

SEQ ID NO: 6007339 - DNA, 25 bp, Homo sapien
tatgtttcctcaactttagaggggc

SEQ ID NO: 6007340 - DNA, 25 bp, Homo sapien
cttgggggtacgaaacttagcaata

SEQ ID NO: 6007341 - DNA, 25 bp, Homo sapien
gttgaatgtaaccgaaaatgatctt

SEQ ID NO: 6007342 - DNA, 25 bp, Homo sapien
caacatccatgggtagagaatgtgc

SEQ ID NO: 6007343 - DNA, 25 bp, Homo sapien
aaggtctggttgccatttaaagatt

SEQ ID NO: 6007344 - DNA, 25 bp, Homo sapien
atgggaattaggtcattatcggcaa

SEQ ID NO: 6007345 - DNA, 25 bp, Homo sapien
gttggttactctgtaagtggctttt

SEQ ID NO: 6007346 - DNA, 25 bp, Homo sapien
aggcgataggaataaacattaggcc

SEQ ID NO: 6007347 - DNA, 25 bp, Homo sapien
agaggtagttgattagaatagagtt

SEQ ID NO: 6007348 - DNA, 25 bp, Homo sapien
aagtagattcgtgattgccaaatac

SEQ ID NO: 6007349 - DNA, 25 bp, Homo sapien
gtaagtggcttttgacgagatctgc

SEQ ID NO: 6007350 - DNA, 25 bp, Homo sapien
tatagatctctcggagtccaatgcc

SEQ ID NO: 6007351 - DNA, 25 bp, Homo sapien
ttctgatacttagcactaatgggaa

SEQ ID NO: 6007352 - DNA, 25 bp, Homo sapien
gcgataggaataaacattaggccat

SEQ ID NO: 6007353 - DNA, 25 bp, Homo sapien
gctacctcagctgggtaggcatcac

SEQ ID NO: 6007354 - DNA, 25 bp, Homo sapien
tgacccggtagtggaataagagaaa

SEQ ID NO: 6007355 - DNA, 25 bp, Homo sapien
tgtagttttttggtgatattttcgg

SEQ ID NO: 6007356 - DNA, 25 bp, Homo sapien
tattgcttctctatcttgggggtac

SEQ ID NO: 6007357 - DNA, 25 bp, Homo sapien
acttgccaagtgcaaaatcaagagg

SEQ ID NO: 6007358 - DNA, 25 bp, Homo sapien
aaaaatcatatgtttcctcaacttt

SEQ ID NO: 6007359 - DNA, 25 bp, Homo sapien
ataattgatacaaaaaatcatatgt

SEQ ID NO: 6007360 - DNA, 25 bp, Homo sapien
acttgggattgccaaaccaacctat

SEQ ID NO: 6007361 - DNA, 25 bp, Homo sapien
cctttacaggatcattggacttgcc

SEQ ID NO: 6007362 - DNA, 25 bp, Homo sapien
agaatgtgcggaaaacaataaaaca

SEQ ID NO: 6007363 - DNA, 25 bp, Homo sapien
actaatgggaattaggtcattatcg

SEQ ID NO: 6007364 - DNA, 25 bp, Homo sapien
attagaccttcatttgtaggccaac

SEQ ID NO: 6007365 - DNA, 25 bp, Homo sapien
tgggtgatctcttttgtgcattctg

SEQ ID NO: 6007366 - DNA, 25 bp, Homo sapien
gagaaggccttgattagaccttcat

SEQ ID NO: 6007367 - DNA, 25 bp, Homo sapien
ggatattgagaaaaggccactgcct

SEQ ID NO: 6007368 - DNA, 25 bp, Homo sapien
ccttcttcacgccatcttttagcat

SEQ ID NO: 6007369 - DNA, 25 bp, Homo sapien
gattagaatagagttggttactctg

SEQ ID NO: 6007370 - DNA, 25 bp, Homo sapien
ttaggccatcaactttggggcctaa

SEQ ID NO: 6007371 - DNA, 25 bp, Homo sapien
agtgcaaaatcaagaggtagttgat

SEQ ID NO: 6007372 - DNA, 25 bp, Homo sapien
tagaggggccacccatgttcatcaa

SEQ ID NO: 6007373 - DNA, 25 bp, Homo sapien
tctgcggttagcggctttgcgtaac

SEQ ID NO: 6007374 - DNA, 25 bp, Homo sapien
atccatgggtagagaatgtgcggaa

SEQ ID NO: 6007375 - DNA, 25 bp, Homo sapien
atgggtagagaatgtgcggaaaaca

SEQ ID NO: 6007376 - DNA, 25 bp, Homo sapien
ccaatgaaaggtcctttacaggatc

SEQ ID NO: 6007377 - DNA, 25 bp, Homo sapien
gccttgattagaccttcatttgtag

SEQ ID NO: 6007378 - DNA, 25 bp, Homo sapien
tcacgccatcttttagcatttgttt

SEQ ID NO: 6007379 - DNA, 25 bp, Homo sapien
cattggacttgccaagtgcaaaatc

SEQ ID NO: 6007380 - DNA, 25 bp, Homo sapien
gtcctttacaggatcattggacttg

SEQ ID NO: 6007381 - DNA, 25 bp, Homo sapien
atgttgtaaaccgtcgcagctacct

SEQ ID NO: 6007382 - DNA, 25 bp, Homo sapien
atctcttttgtgcattctgcatgtt

SEQ ID NO: 6007383 - DNA, 25 bp, Homo sapien
catgatgttgtaaaccgtcgcagct

SEQ ID NO: 6007384 - DNA, 25 bp, Homo sapien
gccatcaactttggggcctaaaaat

SEQ ID NO: 6007385 - DNA, 25 bp, Homo sapien
cttaggaaggaaccttgtgtacgga

SEQ ID NO: 6007386 - DNA, 25 bp, Homo sapien
tgccatttaaagattcgcatctctt

SEQ ID NO: 6007387 - DNA, 25 bp, Homo sapien
caaataattgatacaaaaaatcata

SEQ ID NO: 6007388 - DNA, 25 bp, Homo sapien
ggccacccatgttcatcaaaacaat

SEQ ID NO: 6007389 - DNA, 25 bp, Homo sapien
ggtgttaacaacatccatgggtaga

SEQ ID NO: 6007390 - DNA, 25 bp, Homo sapien
caattgtcttctgatacttagcact

SEQ ID NO: 6007391 - DNA, 25 bp, Homo sapien
gataggaataaacattaggccatca

SEQ ID NO: 6007392 - DNA, 25 bp, Homo sapien
taggccaacgatcaataaccgacca

SEQ ID NO: 6007393 - DNA, 25 bp, Homo sapien
attatcggcaaataattgatacaaa

SEQ ID NO: 6007394 - DNA, 25 bp, Homo sapien
acgccacgtaaggcttatgaggcgc

SEQ ID NO: 6007395 - DNA, 25 bp, Homo sapien
cttagcactaatgggaattaggtca

SEQ ID NO: 6007396 - DNA, 25 bp, Homo sapien
aaccttgtctctgacaggttgcgga

SEQ ID NO: 6007397 - DNA, 25 bp, Homo sapien
ttgtgatcttcttaggaaggaacct

SEQ ID NO: 6007398 - DNA, 25 bp, Homo sapien
ttcgttgatggatgacccggtagtg

SEQ ID NO: 6007399 - DNA, 25 bp, Homo sapien
gggtagagaatgtgcggaaaacaat

SEQ ID NO: 6007400 - DNA, 25 bp, Homo sapien
gcaatttcagctgtctgcgctccca

SEQ ID NO: 6007401 - DNA, 25 bp, Homo sapien
cgaaaatgatcttgtaatggtcagt

SEQ ID NO: 6007402 - DNA, 25 bp, Homo sapien
aacgaaacgccacgtaaggcttatg

SEQ ID NO: 6007403 - DNA, 25 bp, Homo sapien
tgtgggtgatctcttttgtgcattc

SEQ ID NO: 6007404 - DNA, 25 bp, Homo sapien
ggacttgccaagtgcaaaatcaaga

SEQ ID NO: 6007405 - DNA, 25 bp, Homo sapien
aggtagttgattagaatagagttgg

SEQ ID NO: 6007406 - DNA, 25 bp, Homo sapien
ggaaccttgtgtacggattgttctg

SEQ ID NO: 6007407 - DNA, 25 bp, Homo sapien
caaaaaatcatatgtttcctcaact

SEQ ID NO: 6007408 - DNA, 25 bp, Homo sapien
aaaggcgataggaataaacattagg

SEQ ID NO: 6007409 - DNA, 25 bp, Homo sapien
gcactaatgggaattaggtcattat

SEQ ID NO: 6007410 - DNA, 25 bp, Homo sapien
aaatgaggatattgagaaaaggcca

SEQ ID NO: 6007411 - DNA, 25 bp, Homo sapien
caatttcatgcaatgtttcaatatg

SEQ ID NO: 6007412 - DNA, 25 bp, Homo sapien
ggaaggaaccttgtgtacggattgt

SEQ ID NO: 6007413 - DNA, 25 bp, Homo sapien
tttccggattggggagcccccacca

SEQ ID NO: 6007414 - DNA, 25 bp, Homo sapien
aatgtgcggaaaacaataaaacaac

SEQ ID NO: 6007415 - DNA, 25 bp, Homo sapien
ccggtgttaacaacatccatgggta

SEQ ID NO: 6007416 - DNA, 25 bp, Homo sapien
cctcagtggcttgatactcagacca

SEQ ID NO: 6007417 - DNA, 25 bp, Homo sapien
tagagttggttactctgtaagtggc

SEQ ID NO: 6007418 - DNA, 25 bp, Homo sapien
tagcggctttgcgtaacgaaacgcc

SEQ ID NO: 6007419 - DNA, 25 bp, Homo sapien
gcatgttgaatgtaaccgaaaatga

SEQ ID NO: 6007420 - DNA, 25 bp, Homo sapien
caatatatttagcaattgtcttctg

SEQ ID NO: 6007421 - DNA, 25 bp, Homo sapien
ttttcggagaaggccttgattagac

SEQ ID NO: 6007422 - DNA, 25 bp, Homo sapien
attactctcatttctaccaaaggat

SEQ ID NO: 6007423 - DNA, 25 bp, Homo sapien
ctacttacaagtattggcactacct

SEQ ID NO: 6007424 - DNA, 25 bp, Homo sapien
tcgaagccgctaactatatagatga

SEQ ID NO: 6007425 - DNA, 25 bp, Homo sapien
aattatgatgccctagatcaaactg

SEQ ID NO: 6007426 - DNA, 25 bp, Homo sapien
tggctagaagacaaaagtattactg

SEQ ID NO: 6007427 - DNA, 25 bp, Homo sapien
ctgccaatgatttcaagcctgaaac

SEQ ID NO: 6007428 - DNA, 25 bp, Homo sapien
tatagatgagactgacccgagttgg

SEQ ID NO: 6007429 - DNA, 25 bp, Homo sapien
tggcaaatctattggttgttgaaca

SEQ ID NO: 6007430 - DNA, 25 bp, Homo sapien
gggatgaagctaaatgggtagattg

SEQ ID NO: 6007431 - DNA, 25 bp, Homo sapien
ctatagttggagaaaacgctgttca

SEQ ID NO: 6007432 - DNA, 25 bp, Homo sapien
agttttcaccattattcacgtatcc

SEQ ID NO: 6007433 - DNA, 25 bp, Homo sapien
gacagtttaatcgtcttgtggaaat

SEQ ID NO: 6007434 - DNA, 25 bp, Homo sapien
agactgcgaaaacttggttatgatg

SEQ ID NO: 6007435 - DNA, 25 bp, Homo sapien
tgaaaaagtatcagagtattcgttg

SEQ ID NO: 6007436 - DNA, 25 bp, Homo sapien
tttctaccaaaggatgatgtaattg

SEQ ID NO: 6007437 - DNA, 25 bp, Homo sapien
gtctttatgaggctataatccaatc

SEQ ID NO: 6007438 - DNA, 25 bp, Homo sapien
tctcatcatccacctagcatttgat

SEQ ID NO: 6007439 - DNA, 25 bp, Homo sapien
tagacgtggaaaaaaaattactctc

SEQ ID NO: 6007440 - DNA, 25 bp, Homo sapien
aaatcgagtttggttgacgattttg

SEQ ID NO: 6007441 - DNA, 25 bp, Homo sapien
gatttcaagcctgaaacgtggactt

SEQ ID NO: 6007442 - DNA, 25 bp, Homo sapien
aaagtatcagagtattcgttgaatg

SEQ ID NO: 6007443 - DNA, 25 bp, Homo sapien
tgcttcttcttttaaacaattctcc

SEQ ID NO: 6007444 - DNA, 25 bp, Homo sapien
atcatccacctagcatttgattcag

SEQ ID NO: 6007445 - DNA, 25 bp, Homo sapien
acctttctgatgagtttttggagtc

SEQ ID NO: 6007446 - DNA, 25 bp, Homo sapien
tctttccaccttatcaaaataaagg

SEQ ID NO: 6007447 - DNA, 25 bp, Homo sapien
gtctgccaatgatttcaagcctgaa

SEQ ID NO: 6007448 - DNA, 25 bp, Homo sapien
tggttatgatgctgtctttcagaag

SEQ ID NO: 6007449 - DNA, 25 bp, Homo sapien
catcatttgaattaaaggtaaagaa

SEQ ID NO: 6007450 - DNA, 25 bp, Homo sapien
gctaaatgggtagattgctttgcag

SEQ ID NO: 6007451 - DNA, 25 bp, Homo sapien
agtattactgaaattactgtagagg

SEQ ID NO: 6007452 - DNA, 25 bp, Homo sapien
ataaaaaattcagagccaaaatatc

SEQ ID NO: 6007453 - DNA, 25 bp, Homo sapien
agtttttggagtcaagccgaaaatc

SEQ ID NO: 6007454 - DNA, 25 bp, Homo sapien
tatgatgctgtctttcagaagcact

SEQ ID NO: 6007455 - DNA, 25 bp, Homo sapien
agaagcactccgacctttctgatga

SEQ ID NO: 6007456 - DNA, 25 bp, Homo sapien
tttttggagtcaagccgaaaatctt

SEQ ID NO: 6007457 - DNA, 25 bp, Homo sapien
ataatttatctgatgtttttgaaaa

SEQ ID NO: 6007458 - DNA, 25 bp, Homo sapien
tatagagtcgataaataaatctcaa

SEQ ID NO: 6007459 - DNA, 25 bp, Homo sapien
aacgaagcatttgacgatcttcgcg

SEQ ID NO: 6007460 - DNA, 25 bp, Homo sapien
atgaggctataatccaatcttggct

SEQ ID NO: 6007461 - DNA, 25 bp, Homo sapien
gctttgcagaagaacgaaaaacaca

SEQ ID NO: 6007462 - DNA, 25 bp, Homo sapien
aactgatccagaaaaggcaagagaa

SEQ ID NO: 6007463 - DNA, 25 bp, Homo sapien
aatcgtcttgtggaaatgcttcttc

SEQ ID NO: 6007464 - DNA, 25 bp, Homo sapien
tataaggatctcatcatccacctag

SEQ ID NO: 6007465 - DNA, 25 bp, Homo sapien
ttatcaaaataaaggccacggatcc

SEQ ID NO: 6007466 - DNA, 25 bp, Homo sapien
gtcaagccgaaaatctttaaaactg

SEQ ID NO: 6007467 - DNA, 25 bp, Homo sapien
gttggcaaatctattggttgttgaa

SEQ ID NO: 6007468 - DNA, 25 bp, Homo sapien
actgacccgagttggcaaatctatt

SEQ ID NO: 6007469 - DNA, 25 bp, Homo sapien
ctgtagaggatccaaacgaagcatt

SEQ ID NO: 6007470 - DNA, 25 bp, Homo sapien
caaactgatccagaaaaggcaagag

SEQ ID NO: 6007471 - DNA, 25 bp, Homo sapien
cactacttacaagtattggcactac

SEQ ID NO: 6007472 - DNA, 25 bp, Homo sapien
gtcaaagatgattataggcgtatta

SEQ ID NO: 6007473 - DNA, 25 bp, Homo sapien
cacggatcctgtctttatgaggcta

SEQ ID NO: 6007474 - DNA, 25 bp, Homo sapien
catcgtcgtgttcaaatcttttcat

SEQ ID NO: 6007475 - DNA, 25 bp, Homo sapien
ggtagattgctttgcagaagaacga

SEQ ID NO: 6007476 - DNA, 25 bp, Homo sapien
attggcactaccttggagcaaaatc

SEQ ID NO: 6007477 - DNA, 25 bp, Homo sapien
gacgatcttcgcgacaggaatgata

SEQ ID NO: 6007478 - DNA, 25 bp, Homo sapien
ctctcatttctaccaaaggatgatg

SEQ ID NO: 6007479 - DNA, 25 bp, Homo sapien
gaagaacgaaaaacacataatttat

SEQ ID NO: 6007480 - DNA, 25 bp, Homo sapien
aagcgccaacgaagccttaagagtt

SEQ ID NO: 6007481 - DNA, 25 bp, Homo sapien
cagaaaaggcaagagaagctttaca

SEQ ID NO: 6007482 - DNA, 25 bp, Homo sapien
aagagtttctatagttggagaaaac

SEQ ID NO: 6007483 - DNA, 25 bp, Homo sapien
cgagtttggttgacgattttgccag

SEQ ID NO: 6007484 - DNA, 25 bp, Homo sapien
gagttggcaaatctattggttgttg

SEQ ID NO: 6007485 - DNA, 25 bp, Homo sapien
aacgctgttcagttttcaccattat

SEQ ID NO: 6007486 - DNA, 25 bp, Homo sapien
atttgattcagtaacattcaagccg

SEQ ID NO: 6007487 - DNA, 25 bp, Homo sapien
gcaaatctattggttgttgaacaag

SEQ ID NO: 6007488 - DNA, 25 bp, Homo sapien
gccaggagaatgcatcgtcgtgttc

SEQ ID NO: 6007489 - DNA, 25 bp, Homo sapien
aagatgattataggcgtattataga

SEQ ID NO: 6007490 - DNA, 25 bp, Homo sapien
tctttcagaagcactccgacctttc

SEQ ID NO: 6007491 - DNA, 25 bp, Homo sapien
gaaacgtggacttcaagcgccaacg

SEQ ID NO: 6007492 - DNA, 25 bp, Homo sapien
cgtggacttcaagcgccaacgaagc

SEQ ID NO: 6007493 - DNA, 25 bp, Homo sapien
tgttgtatataaatcgagtttggtt

SEQ ID NO: 6007494 - DNA, 25 bp, Homo sapien
tggagtcaagccgaaaatctttaaa

SEQ ID NO: 6007495 - DNA, 25 bp, Homo sapien
gcgacaggaatgatattcaaagact

SEQ ID NO: 6007496 - DNA, 25 bp, Homo sapien
ccttatcaaaataaaggccacggat

SEQ ID NO: 6007497 - DNA, 25 bp, Homo sapien
tttgaaaaagtatcagagtattcgt

SEQ ID NO: 6007498 - DNA, 25 bp, Homo sapien
taaaggtaaagaataggttgtacat

SEQ ID NO: 6007499 - DNA, 25 bp, Homo sapien
atcaaactgatccagaaaaggcaag

SEQ ID NO: 6007500 - DNA, 25 bp, Homo sapien
gatgagtttttggagtcaagccgaa

SEQ ID NO: 6007501 - DNA, 25 bp, Homo sapien
aagctaaatgggtagattgctttgc

SEQ ID NO: 6007502 - DNA, 25 bp, Homo sapien
aaaattatgatgccctagatcaaac

SEQ ID NO: 6007503 - DNA, 25 bp, Homo sapien
tccgacctttctgatgagtttttgg

SEQ ID NO: 6007504 - DNA, 25 bp, Homo sapien
aactggaagaaagacagtttaatcg

SEQ ID NO: 6007505 - DNA, 25 bp, Homo sapien
tgttcaaatcttttcattacttttt

SEQ ID NO: 6007506 - DNA, 25 bp, Homo sapien
ttgccaggagaatgcatcgtcgtgt

SEQ ID NO: 6007507 - DNA, 25 bp, Homo sapien
tgattataggcgtattatagagtcg

SEQ ID NO: 6007508 - DNA, 25 bp, Homo sapien
gatctttccaccttatcaaaataaa

SEQ ID NO: 6007509 - DNA, 25 bp, Homo sapien
aggcaagagaagctttacaaaattc

SEQ ID NO: 6007510 - DNA, 25 bp, Homo sapien
ggaagaaagacagtttaatcgtctt

SEQ ID NO: 6007511 - DNA, 25 bp, Homo sapien
attatagagtcgataaataaatctc

SEQ ID NO: 6007512 - DNA, 25 bp, Homo sapien
aaagaattgattggtttcgtcacta

SEQ ID NO: 6007513 - DNA, 25 bp, Homo sapien
atcaaaataaaggccacggatcctg

SEQ ID NO: 6007514 - DNA, 25 bp, Homo sapien
tgccctagatcaaactgatccagaa

SEQ ID NO: 6007515 - DNA, 25 bp, Homo sapien
tcgcgacaggaatgatattcaaaga

SEQ ID NO: 6007516 - DNA, 25 bp, Homo sapien
gatgccctagatcaaactgatccag

SEQ ID NO: 6007517 - DNA, 25 bp, Homo sapien
ccgtatgttaacgtcaagtattcag

SEQ ID NO: 6007518 - DNA, 25 bp, Homo sapien
gatcctgtctttatgaggctataat

SEQ ID NO: 6007519 - DNA, 25 bp, Homo sapien
cgtattatagagtcgataaataaat

SEQ ID NO: 6007520 - DNA, 25 bp, Homo sapien
tgtttttgaaaaagtatcagagtat

SEQ ID NO: 6007521 - DNA, 25 bp, Homo sapien
cgtgttcaaatcttttcattacttt

SEQ ID NO: 6007522 - DNA, 25 bp, Homo sapien
tgagtttttggagtcaagccgaaaa

SEQ ID NO: 6007523 - DNA, 25 bp, Homo sapien
acacataatttatctgatgtttttg

SEQ ID NO: 6007524 - DNA, 25 bp, Homo sapien
ggaatgatattcaaagactgcgaaa

SEQ ID NO: 6007525 - DNA, 25 bp, Homo sapien
aatccaatcttggctagaagacaaa

SEQ ID NO: 6007526 - DNA, 25 bp, Homo sapien
gtcgtgttcaaatcttttcattact

SEQ ID NO: 6007527 - DNA, 25 bp, Homo sapien
ccattattcacgtatccaatttacg

SEQ ID NO: 6007528 - DNA, 25 bp, Homo sapien
tcttcttttaaacaattctccatca

SEQ ID NO: 6007529 - DNA, 25 bp, Homo sapien
gagccaaaatatctcaatttctgat

SEQ ID NO: 6007530 - DNA, 25 bp, Homo sapien
ctttatgaggctataatccaatctt

SEQ ID NO: 6007531 - DNA, 25 bp, Homo sapien
tctacggctataaggatctcatcat

SEQ ID NO: 6007532 - DNA, 25 bp, Homo sapien
ttgtacattaaaaattatgatgccc

SEQ ID NO: 6007533 - DNA, 25 bp, Homo sapien
gacgtggaaaaaaaattactctcat

SEQ ID NO: 6007534 - DNA, 25 bp, Homo sapien
ctagatcaaactgatccagaaaagg

SEQ ID NO: 6007535 - DNA, 25 bp, Homo sapien
agatcaaactgatccagaaaaggca

SEQ ID NO: 6007536 - DNA, 25 bp, Homo sapien
aagacaaaagtattactgaaattac

SEQ ID NO: 6007537 - DNA, 25 bp, Homo sapien
aaatctattggttgttgaacaagaa

SEQ ID NO: 6007538 - DNA, 25 bp, Homo sapien
gatgaagctaaatgggtagattgct

SEQ ID NO: 6007539 - DNA, 25 bp, Homo sapien
gtcaagtattcagcaaaattaggag

SEQ ID NO: 6007540 - DNA, 25 bp, Homo sapien
agtattcagcaaaattaggagacga

SEQ ID NO: 6007541 - DNA, 25 bp, Homo sapien
cctagcatttgattcagtaacattc

SEQ ID NO: 6007542 - DNA, 25 bp, Homo sapien
ttgttagggatgaagctaaatgggt

SEQ ID NO: 6007543 - DNA, 25 bp, Homo sapien
acggtgactccgaaaagatctacgg

SEQ ID NO: 6007544 - DNA, 25 bp, Homo sapien
ttactgaaattactgtagaggatcc

SEQ ID NO: 6007545 - DNA, 25 bp, Homo sapien
gccaaaatatctcaatttctgatct

SEQ ID NO: 6007546 - DNA, 25 bp, Homo sapien
cgatcttcgcgacaggaatgatatt

SEQ ID NO: 6007547 - DNA, 25 bp, Homo sapien
aaattactgtagaggatccaaacga

SEQ ID NO: 6007548 - DNA, 25 bp, Homo sapien
gaaatgcttcttcttttaaacaatt

SEQ ID NO: 6007549 - DNA, 25 bp, Homo sapien
aattaggagacgacaatattgtaga

SEQ ID NO: 6007550 - DNA, 25 bp, Homo sapien
tcagaagcactccgacctttctgat

SEQ ID NO: 6007551 - DNA, 25 bp, Homo sapien
gttaacgtcaagtattcagcaaaat

SEQ ID NO: 6007552 - DNA, 25 bp, Homo sapien
aaaacttggttatgatgctgtcttt

SEQ ID NO: 6007553 - DNA, 25 bp, Homo sapien
tttttgaaaaagtatcagagtattc

SEQ ID NO: 6007554 - DNA, 25 bp, Homo sapien
agccttaagagtttctatagttgga

SEQ ID NO: 6007555 - DNA, 25 bp, Homo sapien
caggaatgatattcaaagactgcga

SEQ ID NO: 6007556 - DNA, 25 bp, Homo sapien
ttctgatctttccaccttatcaaaa

SEQ ID NO: 6007557 - DNA, 25 bp, Homo sapien
gtaacattcaagccgtatgttaacg

SEQ ID NO: 6007558 - DNA, 25 bp, Homo sapien
ggtaaagaataggttgtacattaaa

SEQ ID NO: 6007559 - DNA, 25 bp, Homo sapien
attggttgttgaacaagaaaacaaa

SEQ ID NO: 6007560 - DNA, 25 bp, Homo sapien
aaaaagtatcagagtattcgttgaa

SEQ ID NO: 6007561 - DNA, 25 bp, Homo sapien
ttgtatataaatcgagtttggttga

SEQ ID NO: 6007562 - DNA, 25 bp, Homo sapien
tacggctataaggatctcatcatcc

SEQ ID NO: 6007563 - DNA, 25 bp, Homo sapien
atttacggtgactccgaaaagatct

SEQ ID NO: 6007564 - DNA, 25 bp, Homo sapien
tgtagacgtggaaaaaaaattactc

SEQ ID NO: 6007565 - DNA, 25 bp, Homo sapien
catccacctagcatttgattcagta

SEQ ID NO: 6007566 - DNA, 25 bp, Homo sapien
tatctgatgtttttgaaaaagtatc

SEQ ID NO: 6007567 - DNA, 25 bp, Homo sapien
ttactttttatcgaagccgctaact

SEQ ID NO: 6007568 - DNA, 25 bp, Homo sapien
gagtttctatagttggagaaaacgc

SEQ ID NO: 6007569 - DNA, 25 bp, Homo sapien
taactatatagatgagactgacccg

SEQ ID NO: 6007570 - DNA, 25 bp, Homo sapien
tccacctagcatttgattcagtaac

SEQ ID NO: 6007571 - DNA, 25 bp, Homo sapien
ttgacgatcttcgcgacaggaatga

SEQ ID NO: 6007572 - DNA, 25 bp, Homo sapien
aatcttttcattactttttatcgaa

SEQ ID NO: 6007573 - DNA, 25 bp, Homo sapien
tgggtagattgctttgcagaagaac

SEQ ID NO: 6007574 - DNA, 25 bp, Homo sapien
atgatttcaagcctgaaacgtggac

SEQ ID NO: 6007575 - DNA, 25 bp, Homo sapien
ccttaagagtttctatagttggaga

SEQ ID NO: 6007576 - DNA, 25 bp, Homo sapien
gtttctatagttggagaaaacgctg

SEQ ID NO: 6007577 - DNA, 25 bp, Homo sapien
cagtttaatcgtcttgtggaaatgc

SEQ ID NO: 6007578 - DNA, 25 bp, Homo sapien
atagttggagaaaacgctgttcagt

SEQ ID NO: 6007579 - DNA, 25 bp, Homo sapien
agaatttgttgtatataaatcgagt

SEQ ID NO: 6007580 - DNA, 25 bp, Homo sapien
atgtctgccaatgatttcaagcctg

SEQ ID NO: 6007581 - DNA, 25 bp, Homo sapien
tttcagaagcactccgacctttctg

SEQ ID NO: 6007582 - DNA, 25 bp, Homo sapien
cttggctagaagacaaaagtattac

SEQ ID NO: 6007583 - DNA, 25 bp, Homo sapien
tctaccaaaggatgatgtaattgtt

SEQ ID NO: 6007584 - DNA, 25 bp, Homo sapien
attattcacgtatccaatttacggt

SEQ ID NO: 6007585 - DNA, 25 bp, Homo sapien
acccgagttggcaaatctattggtt

SEQ ID NO: 6007586 - DNA, 25 bp, Homo sapien
ttaagagtttctatagttggagaaa

SEQ ID NO: 6007587 - DNA, 25 bp, Homo sapien
ataaatcgagtttggttgacgattt

SEQ ID NO: 6007588 - DNA, 25 bp, Homo sapien
acgattttgccaggagaatgcatcg

SEQ ID NO: 6007589 - DNA, 25 bp, Homo sapien
attctccatcatttgaattaaaggt

SEQ ID NO: 6007590 - DNA, 25 bp, Homo sapien
tcttttcattactttttatcgaagc

SEQ ID NO: 6007591 - DNA, 25 bp, Homo sapien
tcgtcgtgttcaaatcttttcatta

SEQ ID NO: 6007592 - DNA, 25 bp, Homo sapien
gccaacgaagccttaagagtttcta

SEQ ID NO: 6007593 - DNA, 25 bp, Homo sapien
agaatgcatcgtcgtgttcaaatct

SEQ ID NO: 6007594 - DNA, 25 bp, Homo sapien
ttcattactttttatcgaagccgct

SEQ ID NO: 6007595 - DNA, 25 bp, Homo sapien
ttatgaggctataatccaatcttgg

SEQ ID NO: 6007596 - DNA, 25 bp, Homo sapien
agccgtatgttaacgtcaagtattc

SEQ ID NO: 6007597 - DNA, 25 bp, Homo sapien
actccgacctttctgatgagttttt

SEQ ID NO: 6007598 - DNA, 25 bp, Homo sapien
taacgtcaagtattcagcaaaatta

SEQ ID NO: 6007599 - DNA, 25 bp, Homo sapien
aaatctttcgatgaggatatagata

SEQ ID NO: 6007600 - DNA, 25 bp, Homo sapien
tgcagaagaacgaaaaacacataat

SEQ ID NO: 6007601 - DNA, 25 bp, Homo sapien
cttcttcttttaaacaattctccat

SEQ ID NO: 6007602 - DNA, 25 bp, Homo sapien
tattcacgtatccaatttacggtga

SEQ ID NO: 6007603 - DNA, 25 bp, Homo sapien
tgatgtaattgttagggatgaagct

SEQ ID NO: 6007604 - DNA, 25 bp, Homo sapien
tccaccttatcaaaataaaggccac

SEQ ID NO: 6007605 - DNA, 25 bp, Homo sapien
ctgatgagtttttggagtcaagccg

SEQ ID NO: 6007606 - DNA, 25 bp, Homo sapien
ctcaatttctgatctttccacctta

SEQ ID NO: 6007607 - DNA, 25 bp, Homo sapien
gttcagttttcaccattattcacgt

SEQ ID NO: 6007608 - DNA, 25 bp, Homo sapien
atctcaatttctgatctttccacct

SEQ ID NO: 6007609 - DNA, 25 bp, Homo sapien
aatgcttcttcttttaaacaattct

SEQ ID NO: 6007610 - DNA, 25 bp, Homo sapien
tccaatttacggtgactccgaaaag

SEQ ID NO: 6007611 - DNA, 25 bp, Homo sapien
cgacaatattgtagacgtggaaaaa

SEQ ID NO: 6007612 - DNA, 25 bp, Homo sapien
aaagactgcgaaaacttggttatga

SEQ ID NO: 6007613 - DNA, 25 bp, Homo sapien
agctttacaaaattcatttatttta

SEQ ID NO: 6007614 - DNA, 25 bp, Homo sapien
cgctgttcagttttcaccattattc

SEQ ID NO: 6007615 - DNA, 25 bp, Homo sapien
caagtattcagcaaaattaggagac

SEQ ID NO: 6007616 - DNA, 25 bp, Homo sapien
tttcaagcctgaaacgtggacttca

SEQ ID NO: 6007617 - DNA, 25 bp, Homo sapien
ttggagaaaacgctgttcagttttc

SEQ ID NO: 6007618 - DNA, 25 bp, Homo sapien
actccgaaaagatctacggctataa

SEQ ID NO: 6007619 - DNA, 25 bp, Homo sapien
gtcactacttacaagtattggcact

SEQ ID NO: 6007620 - DNA, 25 bp, Homo sapien
tagtcaaagatgattataggcgtat

SEQ ID NO: 6007621 - DNA, 25 bp, Homo sapien
ttggagcaaaatctttcgatgagga

SEQ ID NO: 6007622 - DNA, 25 bp, Homo sapien
acattaaaaattatgatgccctaga

SEQ ID NO: 6007623 - DNA, 25 bp, Homo sapien
cagtaacattcaagccgtatgttaa

SEQ ID NO: 6007624 - DNA, 25 bp, Homo sapien
ggtgactccgaaaagatctacggct

SEQ ID NO: 6007625 - DNA, 25 bp, Homo sapien
aaatatctcaatttctgatctttcc

SEQ ID NO: 6007626 - DNA, 25 bp, Homo sapien
tcaagcgccaacgaagccttaagag

SEQ ID NO: 6007627 - DNA, 25 bp, Homo sapien
taaaaattatgatgccctagatcaa

SEQ ID NO: 6007628 - DNA, 25 bp, Homo sapien
attaaaaattatgatgccctagatc

SEQ ID NO: 6007629 - DNA, 25 bp, Homo sapien
gtcgataaataaatctcaaggttaa

SEQ ID NO: 6007630 - DNA, 25 bp, Homo sapien
aagcatttgacgatcttcgcgacag

SEQ ID NO: 6007631 - DNA, 25 bp, Homo sapien
ttgctttgcagaagaacgaaaaaca

SEQ ID NO: 6007632 - DNA, 25 bp, Homo sapien
aattcagagccaaaatatctcaatt

SEQ ID NO: 6007633 - DNA, 25 bp, Homo sapien
aggatccaaacgaagcatttgacga

SEQ ID NO: 6007634 - DNA, 25 bp, Homo sapien
ttggtttcgtcactacttacaagta

SEQ ID NO: 6007635 - DNA, 25 bp, Homo sapien
gcaagagaagctttacaaaattcat

SEQ ID NO: 6007636 - DNA, 25 bp, Homo sapien
ttcttttaaacaattctccatcatt

SEQ ID NO: 6007637 - DNA, 25 bp, Homo sapien
actttttatcgaagccgctaactat

SEQ ID NO: 6007638 - DNA, 25 bp, Homo sapien
atatctcaatttctgatctttccac

SEQ ID NO: 6007639 - DNA, 25 bp, Homo sapien
cgaaaagatctacggctataaggat

SEQ ID NO: 6007640 - DNA, 25 bp, Homo sapien
gattgctttgcagaagaacgaaaaa

SEQ ID NO: 6007641 - DNA, 25 bp, Homo sapien
gtttaatcgtcttgtggaaatgctt

SEQ ID NO: 6007642 - DNA, 25 bp, Homo sapien
tacaaaattcatttattttagtcaa

SEQ ID NO: 6007643 - DNA, 25 bp, Homo sapien
tgagactgacccgagttggcaaatc

SEQ ID NO: 6007644 - DNA, 25 bp, Homo sapien
tgcatcgtcgtgttcaaatcttttc

SEQ ID NO: 6007645 - DNA, 25 bp, Homo sapien
tgtctttcagaagcactccgacctt

SEQ ID NO: 6007646 - DNA, 25 bp, Homo sapien
aagcactccgacctttctgatgagt

SEQ ID NO: 6007647 - DNA, 25 bp, Homo sapien
agactgacccgagttggcaaatcta

SEQ ID NO: 6007648 - DNA, 25 bp, Homo sapien
aggccacggatcctgtctttatgag

SEQ ID NO: 6007649 - DNA, 25 bp, Homo sapien
tcctgtctttatgaggctataatcc

SEQ ID NO: 6007650 - DNA, 25 bp, Homo sapien
caaacgaagcatttgacgatcttcg

SEQ ID NO: 6007651 - DNA, 25 bp, Homo sapien
tcaagcctgaaacgtggacttcaag

SEQ ID NO: 6007652 - DNA, 25 bp, Homo sapien
acgtcaagtattcagcaaaattagg

SEQ ID NO: 6007653 - DNA, 25 bp, Homo sapien
tagattgctttgcagaagaacgaaa

SEQ ID NO: 6007654 - DNA, 25 bp, Homo sapien
gggaagaatttgttgtatataaatc

SEQ ID NO: 6007655 - DNA, 25 bp, Homo sapien
tccagaaaaggcaagagaagcttta

SEQ ID NO: 6007656 - DNA, 25 bp, Homo sapien
caaaataaaggccacggatcctgtc

SEQ ID NO: 6007657 - DNA, 25 bp, Homo sapien
tttatcgaagccgctaactatatag

SEQ ID NO: 6007658 - DNA, 25 bp, Homo sapien
atatagataaaaaattcagagccaa

SEQ ID NO: 6007659 - DNA, 25 bp, Homo sapien
gcaaaattaggagacgacaatattg

SEQ ID NO: 6007660 - DNA, 25 bp, Homo sapien
acataatttatctgatgtttttgaa

SEQ ID NO: 6007661 - DNA, 25 bp, Homo sapien
atagataaaaaattcagagccaaaa

SEQ ID NO: 6007662 - DNA, 25 bp, Homo sapien
aatttatctgatgtttttgaaaaag

SEQ ID NO: 6007663 - DNA, 25 bp, Homo sapien
gatgagactgacccgagttggcaaa

SEQ ID NO: 6007664 - DNA, 25 bp, Homo sapien
gtacattaaaaattatgatgcccta

SEQ ID NO: 6007665 - DNA, 25 bp, Homo sapien
cgaagcatttgacgatcttcgcgac

SEQ ID NO: 6007666 - DNA, 25 bp, Homo sapien
ttcaccattattcacgtatccaatt

SEQ ID NO: 6007667 - DNA, 25 bp, Homo sapien
gttgacgattttgccaggagaatgc

SEQ ID NO: 6007668 - DNA, 25 bp, Homo sapien
gttatgatgctgtctttcagaagca

SEQ ID NO: 6007669 - DNA, 25 bp, Homo sapien
tccaaacgaagcatttgacgatctt

SEQ ID NO: 6007670 - DNA, 25 bp, Homo sapien
tagatgagactgacccgagttggca

SEQ ID NO: 6007671 - DNA, 25 bp, Homo sapien
caatcttggctagaagacaaaagta

SEQ ID NO: 6007672 - DNA, 25 bp, Homo sapien
gagaagctttacaaaattcatttat

SEQ ID NO: 6007673 - DNA, 25 bp, Homo sapien
gagtcaagccgaaaatctttaaaac

SEQ ID NO: 6007674 - DNA, 25 bp, Homo sapien
cggatcctgtctttatgaggctata

SEQ ID NO: 6007675 - DNA, 25 bp, Homo sapien
ccaaaggatgatgtaattgttaggg

SEQ ID NO: 6007676 - DNA, 25 bp, Homo sapien
caggagaatgcatcgtcgtgttcaa

SEQ ID NO: 6007677 - DNA, 25 bp, Homo sapien
ttcagtaacattcaagccgtatgtt

SEQ ID NO: 6007678 - DNA, 25 bp, Homo sapien
ggatatagataaaaaattcagagcc

SEQ ID NO: 6007679 - DNA, 25 bp, Homo sapien
tggttgacgattttgccaggagaat

SEQ ID NO: 6007680 - DNA, 25 bp, Homo sapien
aaaggcaagagaagctttacaaaat

SEQ ID NO: 6007681 - DNA, 25 bp, Homo sapien
aggatctcatcatccacctagcatt

SEQ ID NO: 6007682 - DNA, 25 bp, Homo sapien
aaaaaaattactctcatttctacca

SEQ ID NO: 6007683 - DNA, 25 bp, Homo sapien
aatttgttgtatataaatcgagttt

SEQ ID NO: 6007684 - DNA, 25 bp, Homo sapien
cattcaagccgtatgttaacgtcaa

SEQ ID NO: 6007685 - DNA, 25 bp, Homo sapien
aaaagatctacggctataaggatct

SEQ ID NO: 6007686 - DNA, 25 bp, Homo sapien
gaggctataatccaatcttggctag

SEQ ID NO: 6007687 - DNA, 25 bp, Homo sapien
ctggaagaaagacagtttaatcgtc

SEQ ID NO: 6007688 - DNA, 25 bp, Homo sapien
attttagtcaaagatgattataggc

SEQ ID NO: 6007689 - DNA, 25 bp, Homo sapien
cttttaaacaattctccatcatttg

SEQ ID NO: 6007690 - DNA, 25 bp, Homo sapien
aagatctacggctataaggatctca

SEQ ID NO: 6007691 - DNA, 25 bp, Homo sapien
taccttggagcaaaatctttcgatg

SEQ ID NO: 6007692 - DNA, 25 bp, Homo sapien
actaccttggagcaaaatctttcga

SEQ ID NO: 6007693 - DNA, 25 bp, Homo sapien
caatttctgatctttccaccttatc

SEQ ID NO: 6007694 - DNA, 25 bp, Homo sapien
ttcacgtatccaatttacggtgact

SEQ ID NO: 6007695 - DNA, 25 bp, Homo sapien
tcatcatccacctagcatttgattc

SEQ ID NO: 6007696 - DNA, 25 bp, Homo sapien
ggttgtacattaaaaattatgatgc

SEQ ID NO: 6007697 - DNA, 25 bp, Homo sapien
agaacgaaaaacacataatttatct

SEQ ID NO: 6007698 - DNA, 25 bp, Homo sapien
caaaagtattactgaaattactgta

SEQ ID NO: 6007699 - DNA, 25 bp, Homo sapien
aagcctgaaacgtggacttcaagcg

SEQ ID NO: 6007700 - DNA, 25 bp, Homo sapien
catttctaccaaaggatgatgtaat

SEQ ID NO: 6007701 - DNA, 25 bp, Homo sapien
tactgtagaggatccaaacgaagca

SEQ ID NO: 6007702 - DNA, 25 bp, Homo sapien
cattactttttatcgaagccgctaa

SEQ ID NO: 6007703 - DNA, 25 bp, Homo sapien
agaaaacgctgttcagttttcacca

SEQ ID NO: 6007704 - DNA, 25 bp, Homo sapien
ttcaaatcttttcattactttttat

SEQ ID NO: 6007705 - DNA, 25 bp, Homo sapien
aacttggttatgatgctgtctttca

SEQ ID NO: 6007706 - DNA, 25 bp, Homo sapien
gatgtttttgaaaaagtatcagagt

SEQ ID NO: 6007707 - DNA, 25 bp, Homo sapien
caatgatttcaagcctgaaacgtgg

SEQ ID NO: 6007708 - DNA, 25 bp, Homo sapien
aaaggatgatgtaattgttagggat

SEQ ID NO: 6007709 - DNA, 25 bp, Homo sapien
ccttggagcaaaatctttcgatgag

SEQ ID NO: 6007710 - DNA, 25 bp, Homo sapien
caatttacggtgactccgaaaagat

SEQ ID NO: 6007711 - DNA, 25 bp, Homo sapien
tccgaaaagatctacggctataagg

SEQ ID NO: 6007712 - DNA, 25 bp, Homo sapien
aatgatattcaaagactgcgaaaac

SEQ ID NO: 6007713 - DNA, 25 bp, Homo sapien
aaaacgctgttcagttttcaccatt

SEQ ID NO: 6007714 - DNA, 25 bp, Homo sapien
aaacacataatttatctgatgtttt

SEQ ID NO: 6007715 - DNA, 25 bp, Homo sapien
aaggtaaagaataggttgtacatta

SEQ ID NO: 6007716 - DNA, 25 bp, Homo sapien
cacctagcatttgattcagtaacat

SEQ ID NO: 6007717 - DNA, 25 bp, Homo sapien
cttcgcgacaggaatgatattcaaa

SEQ ID NO: 6007718 - DNA, 25 bp, Homo sapien
tccaatcttggctagaagacaaaag

SEQ ID NO: 6007719 - DNA, 25 bp, Homo sapien
caattctccatcatttgaattaaag

SEQ ID NO: 6007720 - DNA, 25 bp, Homo sapien
tattactgaaattactgtagaggat

SEQ ID NO: 6007721 - DNA, 25 bp, Homo sapien
ttttgccaggagaatgcatcgtcgt

SEQ ID NO: 6007722 - DNA, 25 bp, Homo sapien
ttgattcagtaacattcaagccgta

SEQ ID NO: 6007723 - DNA, 25 bp, Homo sapien
tcagttttcaccattattcacgtat

SEQ ID NO: 6007724 - DNA, 25 bp, Homo sapien
tttgttgtatataaatcgagtttgg

SEQ ID NO: 6007725 - DNA, 25 bp, Homo sapien
ctttctgatgagtttttggagtcaa

SEQ ID NO: 6007726 - DNA, 25 bp, Homo sapien
ttatgatgccctagatcaaactgat

SEQ ID NO: 6007727 - DNA, 25 bp, Homo sapien
atctttcgatgaggatatagataaa

SEQ ID NO: 6007728 - DNA, 25 bp, Homo sapien
gtggaaaaaaaattactctcatttc

SEQ ID NO: 6007729 - DNA, 25 bp, Homo sapien
tttggagtcaagccgaaaatcttta

SEQ ID NO: 6007730 - DNA, 25 bp, Homo sapien
aacaattctccatcatttgaattaa

SEQ ID NO: 6007731 - DNA, 25 bp, Homo sapien
gtattggcactaccttggagcaaaa

SEQ ID NO: 6007732 - DNA, 25 bp, Homo sapien
cggctataaggatctcatcatccac

SEQ ID NO: 6007733 - DNA, 25 bp, Homo sapien
aaattactctcatttctaccaaagg

SEQ ID NO: 6007734 - DNA, 25 bp, Homo sapien
tccatcatttgaattaaaggtaaag

SEQ ID NO: 6007735 - DNA, 25 bp, Homo sapien
gcactaccttggagcaaaatctttc

SEQ ID NO: 6007736 - DNA, 25 bp, Homo sapien
gcgccaacgaagccttaagagtttc

SEQ ID NO: 6007737 - DNA, 25 bp, Homo sapien
tggcactaccttggagcaaaatctt

SEQ ID NO: 6007738 - DNA, 25 bp, Homo sapien
tagcatttgattcagtaacattcaa

SEQ ID NO: 6007739 - DNA, 25 bp, Homo sapien
tttcgtcactacttacaagtattgg

SEQ ID NO: 6007740 - DNA, 25 bp, Homo sapien
aaaattaggagacgacaatattgta

SEQ ID NO: 6007741 - DNA, 25 bp, Homo sapien
tataggcgtattatagagtcgataa

SEQ ID NO: 6007742 - DNA, 25 bp, Homo sapien
ttctatagttggagaaaacgctgtt

SEQ ID NO: 6007743 - DNA, 25 bp, Homo sapien
gatccagaaaaggcaagagaagctt

SEQ ID NO: 6007744 - DNA, 25 bp, Homo sapien
tagggatgaagctaaatgggtagat

SEQ ID NO: 6007745 - DNA, 25 bp, Homo sapien
ggcgtattatagagtcgataaataa

SEQ ID NO: 6007746 - DNA, 25 bp, Homo sapien
gacttcaagcgccaacgaagcctta

SEQ ID NO: 6007747 - DNA, 25 bp, Homo sapien
tgactccgaaaagatctacggctat

SEQ ID NO: 6007748 - DNA, 25 bp, Homo sapien
taccaaaggatgatgtaattgttag

SEQ ID NO: 6007749 - DNA, 25 bp, Homo sapien
tgatattcaaagactgcgaaaactt

SEQ ID NO: 6007750 - DNA, 25 bp, Homo sapien
aatgggtagattgctttgcagaaga

SEQ ID NO: 6007751 - DNA, 25 bp, Homo sapien
ggagaatgcatcgtcgtgttcaaat

SEQ ID NO: 6007752 - DNA, 25 bp, Homo sapien
aaaaattactctcatttctaccaaa

SEQ ID NO: 6007753 - DNA, 25 bp, Homo sapien
caaaatctttcgatgaggatataga

SEQ ID NO: 6007754 - DNA, 25 bp, Homo sapien
ctttcgatgaggatatagataaaaa

SEQ ID NO: 6007755 - DNA, 25 bp, Homo sapien
gtagaggatccaaacgaagcatttg

SEQ ID NO: 6007756 - DNA, 25 bp, Homo sapien
taaacaattctccatcatttgaatt

SEQ ID NO: 6007757 - DNA, 25 bp, Homo sapien
aaagtattactgaaattactgtaga

SEQ ID NO: 6007758 - DNA, 25 bp, Homo sapien
ttcagagccaaaatatctcaatttc

SEQ ID NO: 6007759 - DNA, 25 bp, Homo sapien
atgttaacgtcaagtattcagcaaa

SEQ ID NO: 6007760 - DNA, 25 bp, Homo sapien
gtatgttaacgtcaagtattcagca

SEQ ID NO: 6007761 - DNA, 25 bp, Homo sapien
aacattcaagccgtatgttaacgtc

SEQ ID NO: 6007762 - DNA, 25 bp, Homo sapien
gtaattgttagggatgaagctaaat

SEQ ID NO: 6007763 - DNA, 25 bp, Homo sapien
tgatgctgtctttcagaagcactcc

SEQ ID NO: 6007764 - DNA, 25 bp, Homo sapien
tctccatcatttgaattaaaggtaa

SEQ ID NO: 6007765 - DNA, 25 bp, Homo sapien
gtcttgtggaaatgcttcttctttt

SEQ ID NO: 6007766 - DNA, 25 bp, Homo sapien
taaatgggtagattgctttgcagaa

SEQ ID NO: 6007767 - DNA, 25 bp, Homo sapien
ctgtctttatgaggctataatccaa

SEQ ID NO: 6007768 - DNA, 25 bp, Homo sapien
caagccgtatgttaacgtcaagtat

SEQ ID NO: 6007769 - DNA, 25 bp, Homo sapien
ggtttcgtcactacttacaagtatt

SEQ ID NO: 6007770 - DNA, 25 bp, Homo sapien
cgtatccaatttacggtgactccga

SEQ ID NO: 6007771 - DNA, 25 bp, Homo sapien
atctattggttgttgaacaagaaaa

SEQ ID NO: 6007772 - DNA, 25 bp, Homo sapien
atataaatcgagtttggttgacgat

SEQ ID NO: 6007773 - DNA, 25 bp, Homo sapien
agaataggttgtacattaaaaatta

SEQ ID NO: 6007774 - DNA, 25 bp, Homo sapien
aaaaaattcagagccaaaatatctc

SEQ ID NO: 6007775 - DNA, 25 bp, Homo sapien
tggaaatgcttcttcttttaaacaa

SEQ ID NO: 6007776 - DNA, 25 bp, Homo sapien
tgcgaaaacttggttatgatgctgt

SEQ ID NO: 6007777 - DNA, 25 bp, Homo sapien
ccgagttggcaaatctattggttgt

SEQ ID NO: 6007778 - DNA, 25 bp, Homo sapien
aattgttagggatgaagctaaatgg

SEQ ID NO: 6007779 - DNA, 25 bp, Homo sapien
agaggatccaaacgaagcatttgac

SEQ ID NO: 6007780 - DNA, 25 bp, Homo sapien
cttcaagcgccaacgaagccttaag

SEQ ID NO: 6007781 - DNA, 25 bp, Homo sapien
cgacctttctgatgagtttttggag

SEQ ID NO: 6007782 - DNA, 25 bp, Homo sapien
gaagccgctaactatatagatgaga

SEQ ID NO: 6007783 - DNA, 25 bp, Homo sapien
ttaatcgtcttgtggaaatgcttct

SEQ ID NO: 6007784 - DNA, 25 bp, Homo sapien
ataaaggccacggatcctgtcttta

SEQ ID NO: 6007785 - DNA, 25 bp, Homo sapien
caagccgaaaatctttaaaactgga

SEQ ID NO: 6007786 - DNA, 25 bp, Homo sapien
atcttcgcgacaggaatgatattca

SEQ ID NO: 6007787 - DNA, 25 bp, Homo sapien
atcagagtattcgttgaatggggaa

SEQ ID NO: 6007788 - DNA, 25 bp, Homo sapien
gctataaggatctcatcatccacct

SEQ ID NO: 6007789 - DNA, 25 bp, Homo sapien
agaattgattggtttcgtcactact

SEQ ID NO: 6007790 - DNA, 25 bp, Homo sapien
ctcatttctaccaaaggatgatgta

SEQ ID NO: 6007791 - DNA, 25 bp, Homo sapien
gagtcgataaataaatctcaaggtt

SEQ ID NO: 6007792 - DNA, 25 bp, Homo sapien
caaaattcatttattttagtcaaag

SEQ ID NO: 6007793 - DNA, 25 bp, Homo sapien
acgaagccttaagagtttctatagt

SEQ ID NO: 6007794 - DNA, 25 bp, Homo sapien
ctgatctttccaccttatcaaaata

SEQ ID NO: 6007795 - DNA, 25 bp, Homo sapien
aatgcatcgtcgtgttcaaatcttt

SEQ ID NO: 6007796 - DNA, 25 bp, Homo sapien
gaagccttaagagtttctatagttg

SEQ ID NO: 6007797 - DNA, 25 bp, Homo sapien
atcttggctagaagacaaaagtatt

SEQ ID NO: 6007798 - DNA, 25 bp, Homo sapien
gattcagtaacattcaagccgtatg

SEQ ID NO: 6007799 - DNA, 25 bp, Homo sapien
tactctcatttctaccaaaggatga

SEQ ID NO: 6007800 - DNA, 25 bp, Homo sapien
gagacgacaatattgtagacgtgga

SEQ ID NO: 6007801 - DNA, 25 bp, Homo sapien
gatctacggctataaggatctcatc

SEQ ID NO: 6007802 - DNA, 25 bp, Homo sapien
caacgaagccttaagagtttctata

SEQ ID NO: 6007803 - DNA, 25 bp, Homo sapien
acaatattgtagacgtggaaaaaaa

SEQ ID NO: 6007804 - DNA, 25 bp, Homo sapien
tatccaatttacggtgactccgaaa

SEQ ID NO: 6007805 - DNA, 25 bp, Homo sapien
acttacaagtattggcactaccttg

SEQ ID NO: 6007806 - DNA, 25 bp, Homo sapien
acaagtattggcactaccttggagc

SEQ ID NO: 6007807 - DNA, 25 bp, Homo sapien
ttctgatgagtttttggagtcaagc

SEQ ID NO: 6007808 - DNA, 25 bp, Homo sapien
ttcagcaaaattaggagacgacaat

SEQ ID NO: 6007809 - DNA, 25 bp, Homo sapien
gttagggatgaagctaaatgggtag

SEQ ID NO: 6007810 - DNA, 25 bp, Homo sapien
gcatttgattcagtaacattcaagc

SEQ ID NO: 6007811 - DNA, 25 bp, Homo sapien
ccgctaactatatagatgagactga

SEQ ID NO: 6007812 - DNA, 25 bp, Homo sapien
tttggttgacgattttgccaggaga

SEQ ID NO: 6007813 - DNA, 25 bp, Homo sapien
ttacggtgactccgaaaagatctac

SEQ ID NO: 6007814 - DNA, 25 bp, Homo sapien
taaggatctcatcatccacctagca

SEQ ID NO: 6007815 - DNA, 25 bp, Homo sapien
tcgtcttgtggaaatgcttcttctt

SEQ ID NO: 6007816 - DNA, 25 bp, Homo sapien
tttccaccttatcaaaataaaggcc

SEQ ID NO: 6007817 - DNA, 25 bp, Homo sapien
aacgaaaaacacataatttatctga

SEQ ID NO: 6007818 - DNA, 25 bp, Homo sapien
taggttgtacattaaaaattatgat

SEQ ID NO: 6007819 - DNA, 25 bp, Homo sapien
aggatgatgtaattgttagggatga

SEQ ID NO: 6007820 - DNA, 25 bp, Homo sapien
agaagacaaaagtattactgaaatt

SEQ ID NO: 6007821 - DNA, 25 bp, Homo sapien
ttaggagacgacaatattgtagacg

SEQ ID NO: 6007822 - DNA, 25 bp, Homo sapien
tatcgaagccgctaactatatagat

SEQ ID NO: 6007823 - DNA, 25 bp, Homo sapien
tgacgattttgccaggagaatgcat

SEQ ID NO: 6007824 - DNA, 25 bp, Homo sapien
tattcagcaaaattaggagacgaca

SEQ ID NO: 6007825 - DNA, 25 bp, Homo sapien
aggagacgacaatattgtagacgtg

SEQ ID NO: 6007826 - DNA, 25 bp, Homo sapien
tttatctgatgtttttgaaaaagta

SEQ ID NO: 6007827 - DNA, 25 bp, Homo sapien
gaagctttacaaaattcatttattt

SEQ ID NO: 6007828 - DNA, 25 bp, Homo sapien
ttcaagccgtatgttaacgtcaagt

SEQ ID NO: 6007829 - DNA, 25 bp, Homo sapien
tttttatcgaagccgctaactatat

SEQ ID NO: 6007830 - DNA, 25 bp, Homo sapien
tgaagctaaatgggtagattgcttt

SEQ ID NO: 6007831 - DNA, 25 bp, Homo sapien
tggacttcaagcgccaacgaagcct

SEQ ID NO: 6007832 - DNA, 25 bp, Homo sapien
aagaaagacagtttaatcgtcttgt

SEQ ID NO: 6007833 - DNA, 25 bp, Homo sapien
gattttgccaggagaatgcatcgtc

SEQ ID NO: 6007834 - DNA, 25 bp, Homo sapien
agtttggttgacgattttgccagga

SEQ ID NO: 6007835 - DNA, 25 bp, Homo sapien
actgcgaaaacttggttatgatgct

SEQ ID NO: 6007836 - DNA, 25 bp, Homo sapien
tttagtcaaagatgattataggcgt

SEQ ID NO: 6007837 - DNA, 25 bp, Homo sapien
ggagaaaacgctgttcagttttcac

SEQ ID NO: 6007838 - DNA, 25 bp, Homo sapien
caccattattcacgtatccaattta

SEQ ID NO: 6007839 - DNA, 25 bp, Homo sapien
tgacccgagttggcaaatctattgg

SEQ ID NO: 6007840 - DNA, 25 bp, Homo sapien
cttggttatgatgctgtctttcaga

SEQ ID NO: 6007841 - DNA, 25 bp, Homo sapien
ggagcaaaatctttcgatgaggata

SEQ ID NO: 6007842 - DNA, 25 bp, Homo sapien
attcaaagactgcgaaaacttggtt

SEQ ID NO: 6007843 - DNA, 25 bp, Homo sapien
gaaagacagtttaatcgtcttgtgg

SEQ ID NO: 6007844 - DNA, 25 bp, Homo sapien
ataatccaatcttggctagaagaca

SEQ ID NO: 6007845 - DNA, 25 bp, Homo sapien
gattggtttcgtcactacttacaag

SEQ ID NO: 6007846 - DNA, 25 bp, Homo sapien
gcctgaaacgtggacttcaagcgcc

SEQ ID NO: 6007847 - DNA, 25 bp, Homo sapien
gtatataaatcgagtttggttgacg

SEQ ID NO: 6007848 - DNA, 25 bp, Homo sapien
caaatcttttcattactttttatcg

SEQ ID NO: 6007849 - DNA, 25 bp, Homo sapien
tgaaattactgtagaggatccaaac

SEQ ID NO: 6007850 - DNA, 25 bp, Homo sapien
cttgtggaaatgcttcttcttttaa

SEQ ID NO: 6007851 - DNA, 25 bp, Homo sapien
gcatttgacgatcttcgcgacagga

SEQ ID NO: 6007852 - DNA, 25 bp, Homo sapien
tagagtcgataaataaatctcaagg

SEQ ID NO: 6007853 - DNA, 25 bp, Homo sapien
attcatttattttagtcaaagatga

SEQ ID NO: 6007854 - DNA, 25 bp, Homo sapien
ttacaagtattggcactaccttgga

SEQ ID NO: 6007855 - DNA, 25 bp, Homo sapien
ttttcaccattattcacgtatccaa

SEQ ID NO: 6007856 - DNA, 25 bp, Homo sapien
ctgttcagttttcaccattattcac

SEQ ID NO: 6007857 - DNA, 25 bp, Homo sapien
gatgattataggcgtattatagagt

SEQ ID NO: 6007858 - DNA, 25 bp, Homo sapien
tatatagatgagactgacccgagtt

SEQ ID NO: 6007859 - DNA, 25 bp, Homo sapien
gacaaaagtattactgaaattactg

SEQ ID NO: 6007860 - DNA, 25 bp, Homo sapien
ttgattggtttcgtcactacttaca

SEQ ID NO: 6007861 - DNA, 25 bp, Homo sapien
aaaggccacggatcctgtctttatg

SEQ ID NO: 6007862 - DNA, 25 bp, Homo sapien
aacaaaagaattgattggtttcgtc

SEQ ID NO: 6007863 - DNA, 25 bp, Homo sapien
gcactccgacctttctgatgagttt

SEQ ID NO: 6007864 - DNA, 25 bp, Homo sapien
cagaagaacgaaaaacacataattt

SEQ ID NO: 6007865 - DNA, 25 bp, Homo sapien
gatccaaacgaagcatttgacgatc

SEQ ID NO: 6007866 - DNA, 25 bp, Homo sapien
atgtaattgttagggatgaagctaa

SEQ ID NO: 6007867 - DNA, 25 bp, Homo sapien
cagagccaaaatatctcaatttctg

SEQ ID NO: 6007868 - DNA, 25 bp, Homo sapien
aacgtggacttcaagcgccaacgaa

SEQ ID NO: 6007869 - DNA, 25 bp, Homo sapien
agttggagaaaacgctgttcagttt

SEQ ID NO: 6007870 - DNA, 25 bp, Homo sapien
tttaaacaattctccatcatttgaa

SEQ ID NO: 6007871 - DNA, 25 bp, Homo sapien
gctaactatatagatgagactgacc

SEQ ID NO: 6007872 - DNA, 25 bp, Homo sapien
tcatttattttagtcaaagatgatt

SEQ ID NO: 6007873 - DNA, 25 bp, Homo sapien
actgaaattactgtagaggatccaa

SEQ ID NO: 6007874 - DNA, 25 bp, Homo sapien
aaaattcagagccaaaatatctcaa

SEQ ID NO: 6007875 - DNA, 25 bp, Homo sapien
attataggcgtattatagagtcgat

SEQ ID NO: 6007876 - DNA, 25 bp, Homo sapien
aagagaagctttacaaaattcattt

SEQ ID NO: 6007877 - DNA, 25 bp, Homo sapien
aagacagtttaatcgtcttgtggaa

SEQ ID NO: 6007878 - DNA, 25 bp, Homo sapien
ttttcattactttttatcgaagccg

SEQ ID NO: 6007879 - DNA, 25 bp, Homo sapien
gatgatgtaattgttagggatgaag

SEQ ID NO: 6007880 - DNA, 25 bp, Homo sapien
ctattggttgttgaacaagaaaaca

SEQ ID NO: 6007881 - DNA, 25 bp, Homo sapien
taaagaataggttgtacattaaaaa

SEQ ID NO: 6007882 - DNA, 25 bp, Homo sapien
atttgacgatcttcgcgacaggaat

SEQ ID NO: 6007883 - DNA, 25 bp, Homo sapien
tcgtcactacttacaagtattggca

SEQ ID NO: 6007884 - DNA, 25 bp, Homo sapien
caaaagaattgattggtttcgtcac

SEQ ID NO: 6007885 - DNA, 25 bp, Homo sapien
caccttatcaaaataaaggccacgg

SEQ ID NO: 6007886 - DNA, 25 bp, Homo sapien
gctgtctttcagaagcactccgacc

SEQ ID NO: 6007887 - DNA, 25 bp, Homo sapien
atgctgtctttcagaagcactccga

SEQ ID NO: 6007888 - DNA, 25 bp, Homo sapien
aattgattggtttcgtcactactta

SEQ ID NO: 6007889 - DNA, 25 bp, Homo sapien
cacgtatccaatttacggtgactcc

SEQ ID NO: 6007890 - DNA, 25 bp, Homo sapien
gccgaaaatctttaaaactggaaga

SEQ ID NO: 6007891 - DNA, 25 bp, Homo sapien
gaagaatttgttgtatataaatcga

SEQ ID NO: 6007892 - DNA, 25 bp, Homo sapien
tttgcagaagaacgaaaaacacata

SEQ ID NO: 6007893 - DNA, 25 bp, Homo sapien
gacaggaatgatattcaaagactgc

SEQ ID NO: 6007894 - DNA, 25 bp, Homo sapien
agtatcagagtattcgttgaatggg

SEQ ID NO: 6007895 - DNA, 25 bp, Homo sapien
atttctgatctttccaccttatcaa

SEQ ID NO: 6007896 - DNA, 25 bp, Homo sapien
ctataatccaatcttggctagaaga

SEQ ID NO: 6007897 - DNA, 25 bp, Homo sapien
atattcaaagactgcgaaaacttgg

SEQ ID NO: 6007898 - DNA, 25 bp, Homo sapien
ggaaaaaaaattactctcatttcta

SEQ ID NO: 6007899 - DNA, 25 bp, Homo sapien
atcgagtttggttgacgattttgcc

SEQ ID NO: 6007900 - DNA, 25 bp, Homo sapien
gccaatgatttcaagcctgaaacgt

SEQ ID NO: 6007901 - DNA, 25 bp, Homo sapien
gctagaagacaaaagtattactgaa

SEQ ID NO: 6007902 - DNA, 25 bp, Homo sapien
tcaaagactgcgaaaacttggttat

SEQ ID NO: 6007903 - DNA, 25 bp, Homo sapien
gatctcatcatccacctagcatttg

SEQ ID NO: 6007904 - DNA, 25 bp, Homo sapien
ggctataatccaatcttggctagaa

SEQ ID NO: 6007905 - DNA, 25 bp, Homo sapien
agataaaaaattcagagccaaaata

SEQ ID NO: 6007906 - DNA, 25 bp, Homo sapien
actatatagatgagactgacccgag

SEQ ID NO: 6007907 - DNA, 25 bp, Homo sapien
gacgacaatattgtagacgtggaaa

SEQ ID NO: 6007908 - DNA, 25 bp, Homo sapien
tattgtagacgtggaaaaaaaatta

SEQ ID NO: 6007909 - DNA, 25 bp, Homo sapien
attactgtagaggatccaaacgaag

SEQ ID NO: 6007910 - DNA, 25 bp, Homo sapien
aaaaacacataatttatctgatgtt

SEQ ID NO: 6007911 - DNA, 25 bp, Homo sapien
agccgctaactatatagatgagact

SEQ ID NO: 6007912 - DNA, 25 bp, Homo sapien
ctgatccagaaaaggcaagagaagc

SEQ ID NO: 6007913 - DNA, 25 bp, Homo sapien
caaaatatctcaatttctgatcttt

SEQ ID NO: 6007914 - DNA, 25 bp, Homo sapien
ccctagatcaaactgatccagaaaa

SEQ ID NO: 6007915 - DNA, 25 bp, Homo sapien
ctgaaacgtggacttcaagcgccaa

SEQ ID NO: 6007916 - DNA, 25 bp, Homo sapien
agcaaaatctttcgatgaggatata

SEQ ID NO: 6007917 - DNA, 25 bp, Homo sapien
aaattcatttattttagtcaaagat

SEQ ID NO: 6007918 - DNA, 25 bp, Homo sapien
aagtattggcactaccttggagcaa

SEQ ID NO: 6007919 - DNA, 25 bp, Homo sapien
gccacggatcctgtctttatgaggc

SEQ ID NO: 6007920 - DNA, 25 bp, Homo sapien
gaaaaggcaagagaagctttacaaa

SEQ ID NO: 6007921 - DNA, 25 bp, Homo sapien
tgtggaaatgcttcttcttttaaac

SEQ ID NO: 6007922 - DNA, 25 bp, Homo sapien
aaataaaggccacggatcctgtctt

SEQ ID NO: 6007923 - DNA, 25 bp, Homo sapien
cgaaaaacacataatttatctgatg

SEQ ID NO: 6007924 - DNA, 25 bp, Homo sapien
taggcgtattatagagtcgataaat

SEQ ID NO: 6007925 - DNA, 25 bp, Homo sapien
caaagatgattataggcgtattata

SEQ ID NO: 6007926 - DNA, 25 bp, Homo sapien
cgaaaacttggttatgatgctgtct

SEQ ID NO: 6007927 - DNA, 25 bp, Homo sapien
atgatgccctagatcaaactgatcc

SEQ ID NO: 6007928 - DNA, 25 bp, Homo sapien
cagcaaaattaggagacgacaatat

SEQ ID NO: 6007929 - DNA, 25 bp, Homo sapien
aagatcgtcaaatgcttcgtttgga

SEQ ID NO: 6007930 - DNA, 25 bp, Homo sapien
tatatcctcatcgaaagattttgct

SEQ ID NO: 6007931 - DNA, 25 bp, Homo sapien
agttagcggcttcgataaaaagtaa

SEQ ID NO: 6007932 - DNA, 25 bp, Homo sapien
tagggcatcataatttttaatgtac

SEQ ID NO: 6007933 - DNA, 25 bp, Homo sapien
ttctttacctttaattcaaatgatg

SEQ ID NO: 6007934 - DNA, 25 bp, Homo sapien
tctccaactatagaaactcttaagg

SEQ ID NO: 6007935 - DNA, 25 bp, Homo sapien
aactcgggtcagtctcatctatata

SEQ ID NO: 6007936 - DNA, 25 bp, Homo sapien
taaagcttctcttgccttttctgga

SEQ ID NO: 6007937 - DNA, 25 bp, Homo sapien
tgcttcgtttggatcctctacagta

SEQ ID NO: 6007938 - DNA, 25 bp, Homo sapien
tccagttttaaagattttcggcttg

SEQ ID NO: 6007939 - DNA, 25 bp, Homo sapien
caacaaccaatagatttgccaactc

SEQ ID NO: 6007940 - DNA, 25 bp, Homo sapien
tgccaactcgggtcagtctcatcta

SEQ ID NO: 6007941 - DNA, 25 bp, Homo sapien
gacgttaacatacggcttgaatgtt

SEQ ID NO: 6007942 - DNA, 25 bp, Homo sapien
ttgctccaaggtagtgccaatactt

SEQ ID NO: 6007943 - DNA, 25 bp, Homo sapien
aaatgaattttgtaaagcttctctt

SEQ ID NO: 6007944 - DNA, 25 bp, Homo sapien
gatgagatccttatagccgtagatc

SEQ ID NO: 6007945 - DNA, 25 bp, Homo sapien
aagcatttccacaagacgattaaac

SEQ ID NO: 6007946 - DNA, 25 bp, Homo sapien
cgataaaaagtaatgaaaagatttg

SEQ ID NO: 6007947 - DNA, 25 bp, Homo sapien
gttcttctgcaaagcaatctaccca

SEQ ID NO: 6007948 - DNA, 25 bp, Homo sapien
caatattgtcgtctcctaattttgc

SEQ ID NO: 6007949 - DNA, 25 bp, Homo sapien
tactgaatcaaatgctaggtggatg

SEQ ID NO: 6007950 - DNA, 25 bp, Homo sapien
cgtaaattggatacgtgaataatgg

SEQ ID NO: 6007951 - DNA, 25 bp, Homo sapien
gatattttggctctgaattttttat

SEQ ID NO: 6007952 - DNA, 25 bp, Homo sapien
tataatacgcctataatcatctttg

SEQ ID NO: 6007953 - DNA, 25 bp, Homo sapien
tttttaatgtacaacctattcttta

SEQ ID NO: 6007954 - DNA, 25 bp, Homo sapien
tatcctcatcgaaagattttgctcc

SEQ ID NO: 6007955 - DNA, 25 bp, Homo sapien
tgaaagacagcatcataaccaagtt

SEQ ID NO: 6007956 - DNA, 25 bp, Homo sapien
tacttgtaagtagtgacgaaaccaa

SEQ ID NO: 6007957 - DNA, 25 bp, Homo sapien
acgacgatgcattctcctggcaaaa

SEQ ID NO: 6007958 - DNA, 25 bp, Homo sapien
gcaaagcaatctacccatttagctt

SEQ ID NO: 6007959 - DNA, 25 bp, Homo sapien
tctataatacgcctataatcatctt

SEQ ID NO: 6007960 - DNA, 25 bp, Homo sapien
ggtcagtctcatctatatagttagc

SEQ ID NO: 6007961 - DNA, 25 bp, Homo sapien
tcttccagttttaaagattttcggc

SEQ ID NO: 6007962 - DNA, 25 bp, Homo sapien
ctcataaagacaggatccgtggcct

SEQ ID NO: 6007963 - DNA, 25 bp, Homo sapien
tcataaccaagttttcgcagtcttt

SEQ ID NO: 6007964 - DNA, 25 bp, Homo sapien
tgctaggtggatgatgagatcctta

SEQ ID NO: 6007965 - DNA, 25 bp, Homo sapien
ataaattatgtgtttttcgttcttc

SEQ ID NO: 6007966 - DNA, 25 bp, Homo sapien
ccacaagacgattaaactgtctttc

SEQ ID NO: 6007967 - DNA, 25 bp, Homo sapien
tttctccaactatagaaactcttaa

SEQ ID NO: 6007968 - DNA, 25 bp, Homo sapien
ttggattatagcctcataaagacag

SEQ ID NO: 6007969 - DNA, 25 bp, Homo sapien
agcttcatccctaacaattacatca

SEQ ID NO: 6007970 - DNA, 25 bp, Homo sapien
tcttctgcaaagcaatctacccatt

SEQ ID NO: 6007971 - DNA, 25 bp, Homo sapien
ttaaccttgagatttatttatcgac

SEQ ID NO: 6007972 - DNA, 25 bp, Homo sapien
aattgagatattttggctctgaatt

SEQ ID NO: 6007973 - DNA, 25 bp, Homo sapien
tttgaatatcattcctgtcgcgaag

SEQ ID NO: 6007974 - DNA, 25 bp, Homo sapien
atctttgactaaaataaatgaattt

SEQ ID NO: 6007975 - DNA, 25 bp, Homo sapien
atttatttatcgactctataatacg

SEQ ID NO: 6007976 - DNA, 25 bp, Homo sapien
tattttgataaggtggaaagatcag

SEQ ID NO: 6007977 - DNA, 25 bp, Homo sapien
gacaggatccgtggcctttattttg

SEQ ID NO: 6007978 - DNA, 25 bp, Homo sapien
tgaagtccacgtttcaggcttgaaa

SEQ ID NO: 6007979 - DNA, 25 bp, Homo sapien
tctcctggcaaaatcgtcaaccaaa

SEQ ID NO: 6007980 - DNA, 25 bp, Homo sapien
aggtggaaagatcagaaattgagat

SEQ ID NO: 6007981 - DNA, 25 bp, Homo sapien
atcctctacagtaatttcagtaata

SEQ ID NO: 6007982 - DNA, 25 bp, Homo sapien
tttattttgataaggtggaaagatc

SEQ ID NO: 6007983 - DNA, 25 bp, Homo sapien
ggagtgcttctgaaagacagcatca

SEQ ID NO: 6007984 - DNA, 25 bp, Homo sapien
gttttctccaactatagaaactctt

SEQ ID NO: 6007985 - DNA, 25 bp, Homo sapien
cggcttgactccaaaaactcatcag

SEQ ID NO: 6007986 - DNA, 25 bp, Homo sapien
gtgacgaaaccaatcaattcttttg

SEQ ID NO: 6007987 - DNA, 25 bp, Homo sapien
caggatccgtggcctttattttgat

SEQ ID NO: 6007988 - DNA, 25 bp, Homo sapien
cattcaacgaatactctgatacttt

SEQ ID NO: 6007989 - DNA, 25 bp, Homo sapien
tcaccgtaaattggatacgtgaata

SEQ ID NO: 6007990 - DNA, 25 bp, Homo sapien
gtcaaatgcttcgtttggatcctct

SEQ ID NO: 6007991 - DNA, 25 bp, Homo sapien
cctttggtagaaatgagagtaattt

SEQ ID NO: 6007992 - DNA, 25 bp, Homo sapien
aaaagaagaagcatttccacaagac

SEQ ID NO: 6007993 - DNA, 25 bp, Homo sapien
atgatgagatccttatagccgtaga

SEQ ID NO: 6007994 - DNA, 25 bp, Homo sapien
ttcgttggcgcttgaagtccacgtt

SEQ ID NO: 6007995 - DNA, 25 bp, Homo sapien
aactcttaaggcttcgttggcgctt

SEQ ID NO: 6007996 - DNA, 25 bp, Homo sapien
ggcctttattttgataaggtggaaa

SEQ ID NO: 6007997 - DNA, 25 bp, Homo sapien
tatagaaactcttaaggcttcgttg

SEQ ID NO: 6007998 - DNA, 25 bp, Homo sapien
ttggctctgaattttttatctatat

SEQ ID NO: 6007999 - DNA, 25 bp, Homo sapien
tcctggcaaaatcgtcaaccaaact

SEQ ID NO: 6008000 - DNA, 25 bp, Homo sapien
ttaaaagaagaagcatttccacaag

SEQ ID NO: 6008001 - DNA, 25 bp, Homo sapien
tgtaaagcttctcttgccttttctg

SEQ ID NO: 6008002 - DNA, 25 bp, Homo sapien
acgaatactctgatactttttcaaa

SEQ ID NO: 6008003 - DNA, 25 bp, Homo sapien
atcaaatgctaggtggatgatgaga

SEQ ID NO: 6008004 - DNA, 25 bp, Homo sapien
tacagtaatttcagtaatacttttg

SEQ ID NO: 6008005 - DNA, 25 bp, Homo sapien
aaaaactcatcagaaaggtcggagt

SEQ ID NO: 6008006 - DNA, 25 bp, Homo sapien
gtgaataatggtgaaaactgaacag

SEQ ID NO: 6008007 - DNA, 25 bp, Homo sapien
cgaagatcgtcaaatgcttcgtttg

SEQ ID NO: 6008008 - DNA, 25 bp, Homo sapien
gtggatgatgagatccttatagccg

SEQ ID NO: 6008009 - DNA, 25 bp, Homo sapien
tctacagtaatttcagtaatacttt

SEQ ID NO: 6008010 - DNA, 25 bp, Homo sapien
ctgaatcaaatgctaggtggatgat

SEQ ID NO: 6008011 - DNA, 25 bp, Homo sapien
ccttatagccgtagatcttttcgga

SEQ ID NO: 6008012 - DNA, 25 bp, Homo sapien
ctccaaaaactcatcagaaaggtcg

SEQ ID NO: 6008013 - DNA, 25 bp, Homo sapien
tttaaagattttcggcttgactcca

SEQ ID NO: 6008014 - DNA, 25 bp, Homo sapien
ttcaacaaccaatagatttgccaac

SEQ ID NO: 6008015 - DNA, 25 bp, Homo sapien
gcttgactccaaaaactcatcagaa

SEQ ID NO: 6008016 - DNA, 25 bp, Homo sapien
catcatcctttggtagaaatgagag

SEQ ID NO: 6008017 - DNA, 25 bp, Homo sapien
agaattgtttaaaagaagaagcatt

SEQ ID NO: 6008018 - DNA, 25 bp, Homo sapien
aatatcattcctgtcgcgaagatcg

SEQ ID NO: 6008019 - DNA, 25 bp, Homo sapien
cagtaatttcagtaatacttttgtc

SEQ ID NO: 6008020 - DNA, 25 bp, Homo sapien
tcctcatcgaaagattttgctccaa

SEQ ID NO: 6008021 - DNA, 25 bp, Homo sapien
tcatcagaaaggtcggagtgcttct

SEQ ID NO: 6008022 - DNA, 25 bp, Homo sapien
ctttacctttaattcaaatgatgga

SEQ ID NO: 6008023 - DNA, 25 bp, Homo sapien
gacgattaaactgtctttcttccag

SEQ ID NO: 6008024 - DNA, 25 bp, Homo sapien
ttgtttaaaagaagaagcatttcca

SEQ ID NO: 6008025 - DNA, 25 bp, Homo sapien
ttctagccaagattggattatagcc

SEQ ID NO: 6008026 - DNA, 25 bp, Homo sapien
ttgaacacgacgatgcattctcctg

SEQ ID NO: 6008027 - DNA, 25 bp, Homo sapien
aaagatcagaaattgagatattttg

SEQ ID NO: 6008028 - DNA, 25 bp, Homo sapien
ggcgcttgaagtccacgtttcaggc

SEQ ID NO: 6008029 - DNA, 25 bp, Homo sapien
tgtgtttttcgttcttctgcaaagc

SEQ ID NO: 6008030 - DNA, 25 bp, Homo sapien
tccaaggtagtgccaatacttgtaa

SEQ ID NO: 6008031 - DNA, 25 bp, Homo sapien
cttctgaaagacagcatcataacca

SEQ ID NO: 6008032 - DNA, 25 bp, Homo sapien
attatgtgtttttcgttcttctgca

SEQ ID NO: 6008033 - DNA, 25 bp, Homo sapien
gttttaaagattttcggcttgactc

SEQ ID NO: 6008034 - DNA, 25 bp, Homo sapien
ttggatcctctacagtaatttcagt

SEQ ID NO: 6008035 - DNA, 25 bp, Homo sapien
cgttggcgcttgaagtccacgtttc

SEQ ID NO: 6008036 - DNA, 25 bp, Homo sapien
tcgatttatatacaacaaattcttc

SEQ ID NO: 6008037 - DNA, 25 bp, Homo sapien
atgtacaacctattctttaccttta

SEQ ID NO: 6008038 - DNA, 25 bp, Homo sapien
tggtgaaaactgaacagcgttttct

SEQ ID NO: 6008039 - DNA, 25 bp, Homo sapien
tagatttgccaactcgggtcagtct

SEQ ID NO: 6008040 - DNA, 25 bp, Homo sapien
ggattatagcctcataaagacagga

SEQ ID NO: 6008041 - DNA, 25 bp, Homo sapien
ccgtagatcttttcggagtcaccgt

SEQ ID NO: 6008042 - DNA, 25 bp, Homo sapien
ttttgataaggtggaaagatcagaa

SEQ ID NO: 6008043 - DNA, 25 bp, Homo sapien
gcattctcctggcaaaatcgtcaac

SEQ ID NO: 6008044 - DNA, 25 bp, Homo sapien
aatacttgtaagtagtgacgaaacc

SEQ ID NO: 6008045 - DNA, 25 bp, Homo sapien
aaactcatcagaaaggtcggagtgc

SEQ ID NO: 6008046 - DNA, 25 bp, Homo sapien
tctgaaagacagcatcataaccaag

SEQ ID NO: 6008047 - DNA, 25 bp, Homo sapien
cagttttaaagattttcggcttgac

SEQ ID NO: 6008048 - DNA, 25 bp, Homo sapien
atattgtcgtctcctaattttgctg

SEQ ID NO: 6008049 - DNA, 25 bp, Homo sapien
tacggcttgaatgttactgaatcaa

SEQ ID NO: 6008050 - DNA, 25 bp, Homo sapien
caattacatcatcctttggtagaaa

SEQ ID NO: 6008051 - DNA, 25 bp, Homo sapien
aattggatacgtgaataatggtgaa

SEQ ID NO: 6008052 - DNA, 25 bp, Homo sapien
aattgtttaaaagaagaagcatttc

SEQ ID NO: 6008053 - DNA, 25 bp, Homo sapien
attcctgtcgcgaagatcgtcaaat

SEQ ID NO: 6008054 - DNA, 25 bp, Homo sapien
cgggtcagtctcatctatatagtta

SEQ ID NO: 6008055 - DNA, 25 bp, Homo sapien
atggagaattgtttaaaagaagaag

SEQ ID NO: 6008056 - DNA, 25 bp, Homo sapien
ggatccgtggcctttattttgataa

SEQ ID NO: 6008057 - DNA, 25 bp, Homo sapien
tcatctttgactaaaataaatgaat

SEQ ID NO: 6008058 - DNA, 25 bp, Homo sapien
gtccacgtttcaggcttgaaatcat

SEQ ID NO: 6008059 - DNA, 25 bp, Homo sapien
ccaatagatttgccaactcgggtca

SEQ ID NO: 6008060 - DNA, 25 bp, Homo sapien
agtctttgaatatcattcctgtcgc

SEQ ID NO: 6008061 - DNA, 25 bp, Homo sapien
aagcttctcttgccttttctggatc

SEQ ID NO: 6008062 - DNA, 25 bp, Homo sapien
aagaagaagcatttccacaagacga

SEQ ID NO: 6008063 - DNA, 25 bp, Homo sapien
ataaaaagtaatgaaaagatttgaa

SEQ ID NO: 6008064 - DNA, 25 bp, Homo sapien
ttcaaaaacatcagataaattatgt

SEQ ID NO: 6008065 - DNA, 25 bp, Homo sapien
cggcttcgataaaaagtaatgaaaa

SEQ ID NO: 6008066 - DNA, 25 bp, Homo sapien
aaccaatagatttgccaactcgggt

SEQ ID NO: 6008067 - DNA, 25 bp, Homo sapien
tacatcatcctttggtagaaatgag

SEQ ID NO: 6008068 - DNA, 25 bp, Homo sapien
gacgaaaccaatcaattcttttgtt

SEQ ID NO: 6008069 - DNA, 25 bp, Homo sapien
ggatacgtgaataatggtgaaaact

SEQ ID NO: 6008070 - DNA, 25 bp, Homo sapien
tcatccctaacaattacatcatcct

SEQ ID NO: 6008071 - DNA, 25 bp, Homo sapien
taaagacaggatccgtggcctttat

SEQ ID NO: 6008072 - DNA, 25 bp, Homo sapien
aagacgattaaactgtctttcttcc

SEQ ID NO: 6008073 - DNA, 25 bp, Homo sapien
ttacctttaattcaaatgatggaga

SEQ ID NO: 6008074 - DNA, 25 bp, Homo sapien
atttagcttcatccctaacaattac

SEQ ID NO: 6008075 - DNA, 25 bp, Homo sapien
attttgctgaatacttgacgttaac

SEQ ID NO: 6008076 - DNA, 25 bp, Homo sapien
actctgatactttttcaaaaacatc

SEQ ID NO: 6008077 - DNA, 25 bp, Homo sapien
cggcttgaatgttactgaatcaaat

SEQ ID NO: 6008078 - DNA, 25 bp, Homo sapien
atctatatagttagcggcttcgata

SEQ ID NO: 6008079 - DNA, 25 bp, Homo sapien
atccctaacaattacatcatccttt

SEQ ID NO: 6008080 - DNA, 25 bp, Homo sapien
gtgaaaactgaacagcgttttctcc

SEQ ID NO: 6008081 - DNA, 25 bp, Homo sapien
tttgtcttctagccaagattggatt

SEQ ID NO: 6008082 - DNA, 25 bp, Homo sapien
gaaaactgaacagcgttttctccaa

SEQ ID NO: 6008083 - DNA, 25 bp, Homo sapien
aggtggatgatgagatccttatagc

SEQ ID NO: 6008084 - DNA, 25 bp, Homo sapien
ttaacatacggcttgaatgttactg

SEQ ID NO: 6008085 - DNA, 25 bp, Homo sapien
gtttaaaagaagaagcatttccaca

SEQ ID NO: 6008086 - DNA, 25 bp, Homo sapien
gcatttccacaagacgattaaactg

SEQ ID NO: 6008087 - DNA, 25 bp, Homo sapien
tttttttccacgtctacaatattgt

SEQ ID NO: 6008088 - DNA, 25 bp, Homo sapien
taatacgcctataatcatctttgac

SEQ ID NO: 6008089 - DNA, 25 bp, Homo sapien
ccaaactcgatttatatacaacaaa

SEQ ID NO: 6008090 - DNA, 25 bp, Homo sapien
aatagatttgccaactcgggtcagt

SEQ ID NO: 6008091 - DNA, 25 bp, Homo sapien
tcttctagccaagattggattatag

SEQ ID NO: 6008092 - DNA, 25 bp, Homo sapien
cttcgtttggatcctctacagtaat

SEQ ID NO: 6008093 - DNA, 25 bp, Homo sapien
tacttttgtcttctagccaagattg

SEQ ID NO: 6008094 - DNA, 25 bp, Homo sapien
tttttccacgtctacaatattgtcg

SEQ ID NO: 6008095 - DNA, 25 bp, Homo sapien
ttttcaaaaacatcagataaattat

SEQ ID NO: 6008096 - DNA, 25 bp, Homo sapien
gaaatgagagtaattttttttccac

SEQ ID NO: 6008097 - DNA, 25 bp, Homo sapien
ttatttatcgactctataatacgcc

SEQ ID NO: 6008098 - DNA, 25 bp, Homo sapien
aggtagtgccaatacttgtaagtag

SEQ ID NO: 6008099 - DNA, 25 bp, Homo sapien
ttcaaatgatggagaattgtttaaa

SEQ ID NO: 6008100 - DNA, 25 bp, Homo sapien
tctatatcctcatcgaaagattttg

SEQ ID NO: 6008101 - DNA, 25 bp, Homo sapien
taatttttaatgtacaacctattct

SEQ ID NO: 6008102 - DNA, 25 bp, Homo sapien
aaactcgatttatatacaacaaatt

SEQ ID NO: 6008103 - DNA, 25 bp, Homo sapien
gctccaaggtagtgccaatacttgt

SEQ ID NO: 6008104 - DNA, 25 bp, Homo sapien
tgttcaacaaccaatagatttgcca

SEQ ID NO: 6008105 - DNA, 25 bp, Homo sapien
caaaatcgtcaaccaaactcgattt

SEQ ID NO: 6008106 - DNA, 25 bp, Homo sapien
tgaacagcgttttctccaactatag

SEQ ID NO: 6008107 - DNA, 25 bp, Homo sapien
gttactgaatcaaatgctaggtgga

SEQ ID NO: 6008108 - DNA, 25 bp, Homo sapien
gcctataatcatctttgactaaaat

SEQ ID NO: 6008109 - DNA, 25 bp, Homo sapien
gagagtaattttttttccacgtcta

SEQ ID NO: 6008110 - DNA, 25 bp, Homo sapien
gagatttatttatcgactctataat

SEQ ID NO: 6008111 - DNA, 25 bp, Homo sapien
tcgttcttctgcaaagcaatctacc

SEQ ID NO: 6008112 - DNA, 25 bp, Homo sapien
gaaagattttgctccaaggtagtgc

SEQ ID NO: 6008113 - DNA, 25 bp, Homo sapien
taatgtacaacctattctttacctt

SEQ ID NO: 6008114 - DNA, 25 bp, Homo sapien
caaggtagtgccaatacttgtaagt

SEQ ID NO: 6008115 - DNA, 25 bp, Homo sapien
atcagaaattgagatattttggctc

SEQ ID NO: 6008116 - DNA, 25 bp, Homo sapien
tgcttctgaaagacagcatcataac

SEQ ID NO: 6008117 - DNA, 25 bp, Homo sapien
ttgatctagggcatcataattttta

SEQ ID NO: 6008118 - DNA, 25 bp, Homo sapien
agatcttttcggagtcaccgtaaat

SEQ ID NO: 6008119 - DNA, 25 bp, Homo sapien
gatttgccaactcgggtcagtctca

SEQ ID NO: 6008120 - DNA, 25 bp, Homo sapien
aaagcaatctacccatttagcttca

SEQ ID NO: 6008121 - DNA, 25 bp, Homo sapien
actcatcagaaaggtcggagtgctt

SEQ ID NO: 6008122 - DNA, 25 bp, Homo sapien
acacgacgatgcattctcctggcaa

SEQ ID NO: 6008123 - DNA, 25 bp, Homo sapien
actctataatacgcctataatcatc

SEQ ID NO: 6008124 - DNA, 25 bp, Homo sapien
gaaactcttaaggcttcgttggcgc

SEQ ID NO: 6008125 - DNA, 25 bp, Homo sapien
acaagacgattaaactgtctttctt

SEQ ID NO: 6008126 - DNA, 25 bp, Homo sapien
ctagccaagattggattatagcctc

SEQ ID NO: 6008127 - DNA, 25 bp, Homo sapien
agcggcttcgataaaaagtaatgaa

SEQ ID NO: 6008128 - DNA, 25 bp, Homo sapien
ctttttcaaaaacatcagataaatt

SEQ ID NO: 6008129 - DNA, 25 bp, Homo sapien
gaataatggtgaaaactgaacagcg

SEQ ID NO: 6008130 - DNA, 25 bp, Homo sapien
actatagaaactcttaaggcttcgt

SEQ ID NO: 6008131 - DNA, 25 bp, Homo sapien
gatttatatacaacaaattcttccc

SEQ ID NO: 6008132 - DNA, 25 bp, Homo sapien
tcgtttggatcctctacagtaattt

SEQ ID NO: 6008133 - DNA, 25 bp, Homo sapien
ctttaattcaaatgatggagaattg

SEQ ID NO: 6008134 - DNA, 25 bp, Homo sapien
ataatggtgaaaactgaacagcgtt

SEQ ID NO: 6008135 - DNA, 25 bp, Homo sapien
ctggatcagtttgatctagggcatc

SEQ ID NO: 6008136 - DNA, 25 bp, Homo sapien
gcttcgataaaaagtaatgaaaaga

SEQ ID NO: 6008137 - DNA, 25 bp, Homo sapien
cgatgcattctcctggcaaaatcgt

SEQ ID NO: 6008138 - DNA, 25 bp, Homo sapien
aaatcgtcaaccaaactcgatttat

SEQ ID NO: 6008139 - DNA, 25 bp, Homo sapien
caaatgctaggtggatgatgagatc

SEQ ID NO: 6008140 - DNA, 25 bp, Homo sapien
gatcgtcaaatgcttcgtttggatc

SEQ ID NO: 6008141 - DNA, 25 bp, Homo sapien
cttaaggcttcgttggcgcttgaag

SEQ ID NO: 6008142 - DNA, 25 bp, Homo sapien
ttccccattcaacgaatactctgat

SEQ ID NO: 6008143 - DNA, 25 bp, Homo sapien
cttttgtcttctagccaagattgga

SEQ ID NO: 6008144 - DNA, 25 bp, Homo sapien
aaaaagtaatgaaaagatttgaaca

SEQ ID NO: 6008145 - DNA, 25 bp, Homo sapien
cgttaacatacggcttgaatgttac

SEQ ID NO: 6008146 - DNA, 25 bp, Homo sapien
tgttttcttgttcaacaaccaatag

SEQ ID NO: 6008147 - DNA, 25 bp, Homo sapien
agacagcatcataaccaagttttcg

SEQ ID NO: 6008148 - DNA, 25 bp, Homo sapien
caacgaatactctgatactttttca

SEQ ID NO: 6008149 - DNA, 25 bp, Homo sapien
tcatcctttggtagaaatgagagta

SEQ ID NO: 6008150 - DNA, 25 bp, Homo sapien
attttgtaaagcttctcttgccttt

SEQ ID NO: 6008151 - DNA, 25 bp, Homo sapien
actcgatttatatacaacaaattct

SEQ ID NO: 6008152 - DNA, 25 bp, Homo sapien
agtgccaatacttgtaagtagtgac

SEQ ID NO: 6008153 - DNA, 25 bp, Homo sapien
ttcttgttcaacaaccaatagattt

SEQ ID NO: 6008154 - DNA, 25 bp, Homo sapien
tcagataaattatgtgtttttcgtt

SEQ ID NO: 6008155 - DNA, 25 bp, Homo sapien
gcgttttctccaactatagaaactc

SEQ ID NO: 6008156 - DNA, 25 bp, Homo sapien
aatgatggagaattgtttaaaagaa

SEQ ID NO: 6008157 - DNA, 25 bp, Homo sapien
attctcctggcaaaatcgtcaacca

SEQ ID NO: 6008158 - DNA, 25 bp, Homo sapien
atccgtggcctttattttgataagg

SEQ ID NO: 6008159 - DNA, 25 bp, Homo sapien
tcggagtgcttctgaaagacagcat

SEQ ID NO: 6008160 - DNA, 25 bp, Homo sapien
ttgacgttaacatacggcttgaatg

SEQ ID NO: 6008161 - DNA, 25 bp, Homo sapien
atcgtcaaccaaactcgatttatat

SEQ ID NO: 6008162 - DNA, 25 bp, Homo sapien
gcttgaatgttactgaatcaaatgc

SEQ ID NO: 6008163 - DNA, 25 bp, Homo sapien
aaaacatcagataaattatgtgttt

SEQ ID NO: 6008164 - DNA, 25 bp, Homo sapien
tttggtagaaatgagagtaattttt

SEQ ID NO: 6008165 - DNA, 25 bp, Homo sapien
tttgttttcttgttcaacaaccaat

SEQ ID NO: 6008166 - DNA, 25 bp, Homo sapien
aagattggattatagcctcataaag

SEQ ID NO: 6008167 - DNA, 25 bp, Homo sapien
gtcgcgaagatcgtcaaatgcttcg

SEQ ID NO: 6008168 - DNA, 25 bp, Homo sapien
atttgaacacgacgatgcattctcc

SEQ ID NO: 6008169 - DNA, 25 bp, Homo sapien
aaataaatgaattttgtaaagcttc

SEQ ID NO: 6008170 - DNA, 25 bp, Homo sapien
attacatcatcctttggtagaaatg

SEQ ID NO: 6008171 - DNA, 25 bp, Homo sapien
atcagtttgatctagggcatcataa

SEQ ID NO: 6008172 - DNA, 25 bp, Homo sapien
gcctcataaagacaggatccgtggc

SEQ ID NO: 6008173 - DNA, 25 bp, Homo sapien
tagcctcataaagacaggatccgtg

SEQ ID NO: 6008174 - DNA, 25 bp, Homo sapien
atgaaaagatttgaacacgacgatg

SEQ ID NO: 6008175 - DNA, 25 bp, Homo sapien
gaaattgagatattttggctctgaa

SEQ ID NO: 6008176 - DNA, 25 bp, Homo sapien
ctaggtggatgatgagatccttata

SEQ ID NO: 6008177 - DNA, 25 bp, Homo sapien
tcattcctgtcgcgaagatcgtcaa

SEQ ID NO: 6008178 - DNA, 25 bp, Homo sapien
aatggtgaaaactgaacagcgtttt

SEQ ID NO: 6008179 - DNA, 25 bp, Homo sapien
acgcctataatcatctttgactaaa

SEQ ID NO: 6008180 - DNA, 25 bp, Homo sapien
gtaatacttttgtcttctagccaag

SEQ ID NO: 6008181 - DNA, 25 bp, Homo sapien
gataaggtggaaagatcagaaattg

SEQ ID NO: 6008182 - DNA, 25 bp, Homo sapien
gtttcaggcttgaaatcattggcag

SEQ ID NO: 6008183 - DNA, 25 bp, Homo sapien
tcaaccaaactcgatttatatacaa

SEQ ID NO: 6008184 - DNA, 25 bp, Homo sapien
tgatggagaattgtttaaaagaaga

SEQ ID NO: 6008185 - DNA, 25 bp, Homo sapien
ggagtcaccgtaaattggatacgtg

SEQ ID NO: 6008186 - DNA, 25 bp, Homo sapien
ataaatgaattttgtaaagcttctc

SEQ ID NO: 6008187 - DNA, 25 bp, Homo sapien
tttttcgttcttctgcaaagcaatc

SEQ ID NO: 6008188 - DNA, 25 bp, Homo sapien
ttttgctccaaggtagtgccaatac

SEQ ID NO: 6008189 - DNA, 25 bp, Homo sapien
ttgagatattttggctctgaatttt

SEQ ID NO: 6008190 - DNA, 25 bp, Homo sapien
aagtccacgtttcaggcttgaaatc

SEQ ID NO: 6008191 - DNA, 25 bp, Homo sapien
acaaccaatagatttgccaactcgg

SEQ ID NO: 6008192 - DNA, 25 bp, Homo sapien
ctttgactaaaataaatgaattttg

SEQ ID NO: 6008193 - DNA, 25 bp, Homo sapien
ctgtcgcgaagatcgtcaaatgctt

SEQ ID NO: 6008194 - DNA, 25 bp, Homo sapien
ctaacaattacatcatcctttggta

SEQ ID NO: 6008195 - DNA, 25 bp, Homo sapien
aatgctaggtggatgatgagatcct

SEQ ID NO: 6008196 - DNA, 25 bp, Homo sapien
tatgtgtttttcgttcttctgcaaa

SEQ ID NO: 6008197 - DNA, 25 bp, Homo sapien
ccttgagatttatttatcgactcta

SEQ ID NO: 6008198 - DNA, 25 bp, Homo sapien
ttatcgactctataatacgcctata

SEQ ID NO: 6008199 - DNA, 25 bp, Homo sapien
atgagagtaattttttttccacgtc

SEQ ID NO: 6008200 - DNA, 25 bp, Homo sapien
atcataatttttaatgtacaaccta

SEQ ID NO: 6008201 - DNA, 25 bp, Homo sapien
ttgactccaaaaactcatcagaaag

SEQ ID NO: 6008202 - DNA, 25 bp, Homo sapien
accgtaaattggatacgtgaataat

SEQ ID NO: 6008203 - DNA, 25 bp, Homo sapien
cccattcaacgaatactctgatact

SEQ ID NO: 6008204 - DNA, 25 bp, Homo sapien
aaagacagcatcataaccaagtttt

SEQ ID NO: 6008205 - DNA, 25 bp, Homo sapien
aatcatctttgactaaaataaatga

SEQ ID NO: 6008206 - DNA, 25 bp, Homo sapien
ttcggcttgactccaaaaactcatc

SEQ ID NO: 6008207 - DNA, 25 bp, Homo sapien
ctcgggtcagtctcatctatatagt

SEQ ID NO: 6008208 - DNA, 25 bp, Homo sapien
tcagtctcatctatatagttagcgg

SEQ ID NO: 6008209 - DNA, 25 bp, Homo sapien
tgccttttctggatcagtttgatct

SEQ ID NO: 6008210 - DNA, 25 bp, Homo sapien
agatttgaacacgacgatgcattct

SEQ ID NO: 6008211 - DNA, 25 bp, Homo sapien
aaagtaatgaaaagatttgaacacg

SEQ ID NO: 6008212 - DNA, 25 bp, Homo sapien
aaggtcggagtgcttctgaaagaca

SEQ ID NO: 6008213 - DNA, 25 bp, Homo sapien
tgccaatacttgtaagtagtgacga

SEQ ID NO: 6008214 - DNA, 25 bp, Homo sapien
aacatcagataaattatgtgttttt

SEQ ID NO: 6008215 - DNA, 25 bp, Homo sapien
catcagataaattatgtgtttttcg

SEQ ID NO: 6008216 - DNA, 25 bp, Homo sapien
gcttctcttgccttttctggatcag

SEQ ID NO: 6008217 - DNA, 25 bp, Homo sapien
ctcatcgaaagattttgctccaagg

SEQ ID NO: 6008218 - DNA, 25 bp, Homo sapien
attgtcgtctcctaattttgctgaa

SEQ ID NO: 6008219 - DNA, 25 bp, Homo sapien
aagattttcggcttgactccaaaaa

SEQ ID NO: 6008220 - DNA, 25 bp, Homo sapien
ttttcggcttgactccaaaaactca

SEQ ID NO: 6008221 - DNA, 25 bp, Homo sapien
aaagatttgaacacgacgatgcatt

SEQ ID NO: 6008222 - DNA, 25 bp, Homo sapien
atttccacaagacgattaaactgtc

SEQ ID NO: 6008223 - DNA, 25 bp, Homo sapien
cataaagacaggatccgtggccttt

SEQ ID NO: 6008224 - DNA, 25 bp, Homo sapien
acgtttcaggcttgaaatcattggc

SEQ ID NO: 6008225 - DNA, 25 bp, Homo sapien
ttctggatcagtttgatctagggca

SEQ ID NO: 6008226 - DNA, 25 bp, Homo sapien
aacaattacatcatcctttggtaga

SEQ ID NO: 6008227 - DNA, 25 bp, Homo sapien
ttatagccgtagatcttttcggagt

SEQ ID NO: 6008228 - DNA, 25 bp, Homo sapien
gtagtgccaatacttgtaagtagtg

SEQ ID NO: 6008229 - DNA, 25 bp, Homo sapien
tttgctgaatacttgacgttaacat

SEQ ID NO: 6008230 - DNA, 25 bp, Homo sapien
gattttgctccaaggtagtgccaat

SEQ ID NO: 6008231 - DNA, 25 bp, Homo sapien
gaatacttgacgttaacatacggct

SEQ ID NO: 6008232 - DNA, 25 bp, Homo sapien
ccttttctggatcagtttgatctag

SEQ ID NO: 6008233 - DNA, 25 bp, Homo sapien
atgaattttgtaaagcttctcttgc

SEQ ID NO: 6008234 - DNA, 25 bp, Homo sapien
ttcgataaaaagtaatgaaaagatt

SEQ ID NO: 6008235 - DNA, 25 bp, Homo sapien
cacgtctacaatattgtcgtctcct

SEQ ID NO: 6008236 - DNA, 25 bp, Homo sapien
acttgacgttaacatacggcttgaa

SEQ ID NO: 6008237 - DNA, 25 bp, Homo sapien
caaatgatggagaattgtttaaaag

SEQ ID NO: 6008238 - DNA, 25 bp, Homo sapien
tctcatctatatagttagcggcttc

SEQ ID NO: 6008239 - DNA, 25 bp, Homo sapien
gcttcgttggcgcttgaagtccacg

SEQ ID NO: 6008240 - DNA, 25 bp, Homo sapien
gtggaaagatcagaaattgagatat

SEQ ID NO: 6008241 - DNA, 25 bp, Homo sapien
ttttggctctgaattttttatctat

SEQ ID NO: 6008242 - DNA, 25 bp, Homo sapien
ttgataaggtggaaagatcagaaat

SEQ ID NO: 6008243 - DNA, 25 bp, Homo sapien
caaaaacatcagataaattatgtgt

SEQ ID NO: 6008244 - DNA, 25 bp, Homo sapien
gagatattttggctctgaatttttt

SEQ ID NO: 6008245 - DNA, 25 bp, Homo sapien
tgtcgtctcctaattttgctgaata

SEQ ID NO: 6008246 - DNA, 25 bp, Homo sapien
taaggcttcgttggcgcttgaagtc

SEQ ID NO: 6008247 - DNA, 25 bp, Homo sapien
cgcttgaagtccacgtttcaggctt

SEQ ID NO: 6008248 - DNA, 25 bp, Homo sapien
ttccacaagacgattaaactgtctt

SEQ ID NO: 6008249 - DNA, 25 bp, Homo sapien
atcagaaaggtcggagtgcttctga

SEQ ID NO: 6008250 - DNA, 25 bp, Homo sapien
aaccttgagatttatttatcgactc

SEQ ID NO: 6008251 - DNA, 25 bp, Homo sapien
atacgcctataatcatctttgacta

SEQ ID NO: 6008252 - DNA, 25 bp, Homo sapien
caaatgcttcgtttggatcctctac

SEQ ID NO: 6008253 - DNA, 25 bp, Homo sapien
agcatcataaccaagttttcgcagt

SEQ ID NO: 6008254 - DNA, 25 bp, Homo sapien
aacatacggcttgaatgttactgaa

SEQ ID NO: 6008255 - DNA, 25 bp, Homo sapien
gagtaattttttttccacgtctaca

SEQ ID NO: 6008256 - DNA, 25 bp, Homo sapien
agtctcatctatatagttagcggct

SEQ ID NO: 6008257 - DNA, 25 bp, Homo sapien
ggaaagatcagaaattgagatattt

SEQ ID NO: 6008258 - DNA, 25 bp, Homo sapien
gaattttgtaaagcttctcttgcct

SEQ ID NO: 6008259 - DNA, 25 bp, Homo sapien
ttttctggatcagtttgatctaggg

SEQ ID NO: 6008260 - DNA, 25 bp, Homo sapien
gatactttttcaaaaacatcagata

SEQ ID NO: 6008261 - DNA, 25 bp, Homo sapien
atagttagcggcttcgataaaaagt

SEQ ID NO: 6008262 - DNA, 25 bp, Homo sapien
taattttttttccacgtctacaata

SEQ ID NO: 6008263 - DNA, 25 bp, Homo sapien
taatgaaaagatttgaacacgacga

SEQ ID NO: 6008264 - DNA, 25 bp, Homo sapien
ggcaaaatcgtcaaccaaactcgat

SEQ ID NO: 6008265 - DNA, 25 bp, Homo sapien
aagattttgctccaaggtagtgcca

SEQ ID NO: 6008266 - DNA, 25 bp, Homo sapien
cttgttcaacaaccaatagatttgc

SEQ ID NO: 6008267 - DNA, 25 bp, Homo sapien
ggtcggagtgcttctgaaagacagc

SEQ ID NO: 6008268 - DNA, 25 bp, Homo sapien
catcataaccaagttttcgcagtct

SEQ ID NO: 6008269 - DNA, 25 bp, Homo sapien
taaggtggaaagatcagaaattgag

SEQ ID NO: 6008270 - DNA, 25 bp, Homo sapien
ttagcttcatccctaacaattacat

SEQ ID NO: 6008271 - DNA, 25 bp, Homo sapien
tccaactatagaaactcttaaggct

SEQ ID NO: 6008272 - DNA, 25 bp, Homo sapien
gtagatcttttcggagtcaccgtaa

SEQ ID NO: 6008273 - DNA, 25 bp, Homo sapien
ttcagtaatacttttgtcttctagc

SEQ ID NO: 6008274 - DNA, 25 bp, Homo sapien
gcatcataatttttaatgtacaacc

SEQ ID NO: 6008275 - DNA, 25 bp, Homo sapien
ctcttgccttttctggatcagtttg

SEQ ID NO: 6008276 - DNA, 25 bp, Homo sapien
ttcaggcttgaaatcattggcagac

SEQ ID NO: 6008277 - DNA, 25 bp, Homo sapien
tcgtctcctaattttgctgaatact

SEQ ID NO: 6008278 - DNA, 25 bp, Homo sapien
ccaactcgggtcagtctcatctata

SEQ ID NO: 6008279 - DNA, 25 bp, Homo sapien
ccaaaaactcatcagaaaggtcgga

SEQ ID NO: 6008280 - DNA, 25 bp, Homo sapien
agaagcatttccacaagacgattaa

SEQ ID NO: 6008281 - DNA, 25 bp, Homo sapien
caggcttgaaatcattggcagacat

SEQ ID NO: 6008282 - DNA, 25 bp, Homo sapien
cgactctataatacgcctataatca

SEQ ID NO: 6008283 - DNA, 25 bp, Homo sapien
caatctacccatttagcttcatccc

SEQ ID NO: 6008284 - DNA, 25 bp, Homo sapien
ctgaatacttgacgttaacatacgg

SEQ ID NO: 6008285 - DNA, 25 bp, Homo sapien
atacttgacgttaacatacggcttg

SEQ ID NO: 6008286 - DNA, 25 bp, Homo sapien
ttgagatttatttatcgactctata

SEQ ID NO: 6008287 - DNA, 25 bp, Homo sapien
tcctgtcgcgaagatcgtcaaatgc

SEQ ID NO: 6008288 - DNA, 25 bp, Homo sapien
ctatatagttagcggcttcgataaa

SEQ ID NO: 6008289 - DNA, 25 bp, Homo sapien
gttttcgcagtctttgaatatcatt

SEQ ID NO: 6008290 - DNA, 25 bp, Homo sapien
tattttggctctgaattttttatct

SEQ ID NO: 6008291 - DNA, 25 bp, Homo sapien
taattttgctgaatacttgacgtta

SEQ ID NO: 6008292 - DNA, 25 bp, Homo sapien
tgagatccttatagccgtagatctt

SEQ ID NO: 6008293 - DNA, 25 bp, Homo sapien
cctaattttgctgaatacttgacgt

SEQ ID NO: 6008294 - DNA, 25 bp, Homo sapien
tatctatatcctcatcgaaagattt

SEQ ID NO: 6008295 - DNA, 25 bp, Homo sapien
tcgcagtctttgaatatcattcctg

SEQ ID NO: 6008296 - DNA, 25 bp, Homo sapien
cagaaaggtcggagtgcttctgaaa

SEQ ID NO: 6008297 - DNA, 25 bp, Homo sapien
atgttactgaatcaaatgctaggtg

SEQ ID NO: 6008298 - DNA, 25 bp, Homo sapien
agcaatctacccatttagcttcatc

SEQ ID NO: 6008299 - DNA, 25 bp, Homo sapien
tcatctatatagttagcggcttcga

SEQ ID NO: 6008300 - DNA, 25 bp, Homo sapien
tactttttcaaaaacatcagataaa

SEQ ID NO: 6008301 - DNA, 25 bp, Homo sapien
ccaatacttgtaagtagtgacgaaa

SEQ ID NO: 6008302 - DNA, 25 bp, Homo sapien
tccacgtctacaatattgtcgtctc

SEQ ID NO: 6008303 - DNA, 25 bp, Homo sapien
ttgaatgttactgaatcaaatgcta

SEQ ID NO: 6008304 - DNA, 25 bp, Homo sapien
ttaattcaaatgatggagaattgtt

SEQ ID NO: 6008305 - DNA, 25 bp, Homo sapien
tggtagaaatgagagtaattttttt

SEQ ID NO: 6008306 - DNA, 25 bp, Homo sapien
gattggattatagcctcataaagac

SEQ ID NO: 6008307 - DNA, 25 bp, Homo sapien
cttgaagtccacgtttcaggcttga

SEQ ID NO: 6008308 - DNA, 25 bp, Homo sapien
tttcgttcttctgcaaagcaatcta

SEQ ID NO: 6008309 - DNA, 25 bp, Homo sapien
cgtcaaccaaactcgatttatatac

SEQ ID NO: 6008310 - DNA, 25 bp, Homo sapien
ccgtggcctttattttgataaggtg

SEQ ID NO: 6008311 - DNA, 25 bp, Homo sapien
agtaatgaaaagatttgaacacgac

SEQ ID NO: 6008312 - DNA, 25 bp, Homo sapien
gaaaggtcggagtgcttctgaaaga

SEQ ID NO: 6008313 - DNA, 25 bp, Homo sapien
gggcatcataatttttaatgtacaa

SEQ ID NO: 6008314 - DNA, 25 bp, Homo sapien
ttttcttgttcaacaaccaatagat

SEQ ID NO: 6008315 - DNA, 25 bp, Homo sapien
tctttgaatatcattcctgtcgcga

SEQ ID NO: 6008316 - DNA, 25 bp, Homo sapien
tttcgcagtctttgaatatcattcc

SEQ ID NO: 6008317 - DNA, 25 bp, Homo sapien
ataaccaagttttcgcagtctttga

SEQ ID NO: 6008318 - DNA, 25 bp, Homo sapien
tgaatatcattcctgtcgcgaagat

SEQ ID NO: 6008319 - DNA, 25 bp, Homo sapien
agtcaccgtaaattggatacgtgaa

SEQ ID NO: 6008320 - DNA, 25 bp, Homo sapien
cctttattttgataaggtggaaaga

SEQ ID NO: 6008321 - DNA, 25 bp, Homo sapien
cctctacagtaatttcagtaatact

SEQ ID NO: 6008322 - DNA, 25 bp, Homo sapien
gaaaagatttgaacacgacgatgca

SEQ ID NO: 6008323 - DNA, 25 bp, Homo sapien
acagcatcataaccaagttttcgca

SEQ ID NO: 6008324 - DNA, 25 bp, Homo sapien
tgtaagtagtgacgaaaccaatcaa

SEQ ID NO: 6008325 - DNA, 25 bp, Homo sapien
cgcgaagatcgtcaaatgcttcgtt

SEQ ID NO: 6008326 - DNA, 25 bp, Homo sapien
ggatcagtttgatctagggcatcat

SEQ ID NO: 6008327 - DNA, 25 bp, Homo sapien
taagtagtgacgaaaccaatcaatt

SEQ ID NO: 6008328 - DNA, 25 bp, Homo sapien
ccaagattggattatagcctcataa

SEQ ID NO: 6008329 - DNA, 25 bp, Homo sapien
ttggatacgtgaataatggtgaaaa

SEQ ID NO: 6008330 - DNA, 25 bp, Homo sapien
aagacaggatccgtggcctttattt

SEQ ID NO: 6008331 - DNA, 25 bp, Homo sapien
ttgactaaaataaatgaattttgta

SEQ ID NO: 6008332 - DNA, 25 bp, Homo sapien
aatgcttcgtttggatcctctacag

SEQ ID NO: 6008333 - DNA, 25 bp, Homo sapien
atactctgatactttttcaaaaaca

SEQ ID NO: 6008334 - DNA, 25 bp, Homo sapien
ttctcttgccttttctggatcagtt

SEQ ID NO: 6008335 - DNA, 25 bp, Homo sapien
cttgccttttctggatcagtttgat

SEQ ID NO: 6008336 - DNA, 25 bp, Homo sapien
agccgtagatcttttcggagtcacc

SEQ ID NO: 6008337 - DNA, 25 bp, Homo sapien
gaacacgacgatgcattctcctggc

SEQ ID NO: 6008338 - DNA, 25 bp, Homo sapien
gatctagggcatcataatttttaat

SEQ ID NO: 6008339 - DNA, 25 bp, Homo sapien
ggatcctctacagtaatttcagtaa

SEQ ID NO: 6008340 - DNA, 25 bp, Homo sapien
tagaaactcttaaggcttcgttggc

SEQ ID NO: 6008341 - DNA, 25 bp, Homo sapien
ttcaacgaatactctgatacttttt

SEQ ID NO: 6008342 - DNA, 25 bp, Homo sapien
atttatcgactctataatacgccta

SEQ ID NO: 6008343 - DNA, 25 bp, Homo sapien
tatagcctcataaagacaggatccg

SEQ ID NO: 6008344 - DNA, 25 bp, Homo sapien
tgctgaatacttgacgttaacatac

SEQ ID NO: 6008345 - DNA, 25 bp, Homo sapien
ctcctaattttgctgaatacttgac

SEQ ID NO: 6008346 - DNA, 25 bp, Homo sapien
aatacttttgtcttctagccaagat

SEQ ID NO: 6008347 - DNA, 25 bp, Homo sapien
aaactgaacagcgttttctccaact

SEQ ID NO: 6008348 - DNA, 25 bp, Homo sapien
catacggcttgaatgttactgaatc

SEQ ID NO: 6008349 - DNA, 25 bp, Homo sapien
ttctgcaaagcaatctacccattta

SEQ ID NO: 6008350 - DNA, 25 bp, Homo sapien
tttgtaaagcttctcttgccttttc

SEQ ID NO: 6008351 - DNA, 25 bp, Homo sapien
tgtttttcgttcttctgcaaagcaa

SEQ ID NO: 6008352 - DNA, 25 bp, Homo sapien
tttttatctatatcctcatcgaaag

SEQ ID NO: 6008353 - DNA, 25 bp, Homo sapien
atcgactctataatacgcctataat

SEQ ID NO: 6008354 - DNA, 25 bp, Homo sapien
tagtgacgaaaccaatcaattcttt

SEQ ID NO: 6008355 - DNA, 25 bp, Homo sapien
gtttggatcctctacagtaatttca

SEQ ID NO: 6008356 - DNA, 25 bp, Homo sapien
tagaaatgagagtaattttttttcc

SEQ ID NO: 6008357 - DNA, 25 bp, Homo sapien
cagaaattgagatattttggctctg

SEQ ID NO: 6008358 - DNA, 25 bp, Homo sapien
cttcatccctaacaattacatcatc

SEQ ID NO: 6008359 - DNA, 25 bp, Homo sapien
tgtcttctagccaagattggattat

SEQ ID NO: 6008360 - DNA, 25 bp, Homo sapien
atcttttcggagtcaccgtaaattg

SEQ ID NO: 6008361 - DNA, 25 bp, Homo sapien
tatcattcctgtcgcgaagatcgtc

SEQ ID NO: 6008362 - DNA, 25 bp, Homo sapien
ttagcggcttcgataaaaagtaatg

SEQ ID NO: 6008363 - DNA, 25 bp, Homo sapien
aaccaaactcgatttatatacaaca

SEQ ID NO: 6008364 - DNA, 25 bp, Homo sapien
agccaagattggattatagcctcat

SEQ ID NO: 6008365 - DNA, 25 bp, Homo sapien
gtctcctaattttgctgaatacttg

SEQ ID NO: 6008366 - DNA, 25 bp, Homo sapien
atctacccatttagcttcatcccta

SEQ ID NO: 6008367 - DNA, 25 bp, Homo sapien
ctcttaaggcttcgttggcgcttga

SEQ ID NO: 6008368 - DNA, 25 bp, Homo sapien
agtgcttctgaaagacagcatcata

SEQ ID NO: 6008369 - DNA, 25 bp, Homo sapien
gaagaagcatttccacaagacgatt

SEQ ID NO: 6008370 - DNA, 25 bp, Homo sapien
aatttcagtaatacttttgtcttct

SEQ ID NO: 6008371 - DNA, 25 bp, Homo sapien
gtaatttcagtaatacttttgtctt

SEQ ID NO: 6008372 - DNA, 25 bp, Homo sapien
agatccttatagccgtagatctttt

SEQ ID NO: 6008373 - DNA, 25 bp, Homo sapien
ggagaattgtttaaaagaagaagca

SEQ ID NO: 6008374 - DNA, 25 bp, Homo sapien
ttggcgcttgaagtccacgtttcag

SEQ ID NO: 6008375 - DNA, 25 bp, Homo sapien
taaattggatacgtgaataatggtg

SEQ ID NO: 6008376 - DNA, 25 bp, Homo sapien
cgtctacaatattgtcgtctcctaa

SEQ ID NO: 6008377 - DNA, 25 bp, Homo sapien
taaagattttcggcttgactccaaa

SEQ ID NO: 6008378 - DNA, 25 bp, Homo sapien
tttcggagtcaccgtaaattggata

SEQ ID NO: 6008379 - DNA, 25 bp, Homo sapien
ccatttagcttcatccctaacaatt

SEQ ID NO: 6008380 - DNA, 25 bp, Homo sapien
gacgatgcattctcctggcaaaatc

SEQ ID NO: 6008381 - DNA, 25 bp, Homo sapien
tttccacgtctacaatattgtcgtc

SEQ ID NO: 6008382 - DNA, 25 bp, Homo sapien
cagtaatacttttgtcttctagcca

SEQ ID NO: 6008383 - DNA, 25 bp, Homo sapien
atacgtgaataatggtgaaaactga

SEQ ID NO: 6008384 - DNA, 25 bp, Homo sapien
ggatgatgagatccttatagccgta

SEQ ID NO: 6008385 - DNA, 25 bp, Homo sapien
ctgcaaagcaatctacccatttagc

SEQ ID NO: 6008386 - DNA, 25 bp, Homo sapien
agtagtgacgaaaccaatcaattct

SEQ ID NO: 6008387 - DNA, 25 bp, Homo sapien
gaatgttactgaatcaaatgctagg

SEQ ID NO: 6008388 - DNA, 25 bp, Homo sapien
atatagttagcggcttcgataaaaa

SEQ ID NO: 6008389 - DNA, 25 bp, Homo sapien
gtggcctttattttgataaggtgga

SEQ ID NO: 6008390 - DNA, 25 bp, Homo sapien
tttaatgtacaacctattctttacc

SEQ ID NO: 6008391 - DNA, 25 bp, Homo sapien
tttgccaactcgggtcagtctcatc

SEQ ID NO: 6008392 - DNA, 25 bp, Homo sapien
tcggagtcaccgtaaattggatacg

SEQ ID NO: 6008393 - DNA, 25 bp, Homo sapien
gattttcggcttgactccaaaaact

SEQ ID NO: 6008394 - DNA, 25 bp, Homo sapien
tctagggcatcataatttttaatgt

SEQ ID NO: 6008395 - DNA, 25 bp, Homo sapien
caactatagaaactcttaaggcttc

SEQ ID NO: 6008396 - DNA, 25 bp, Homo sapien
cagcgttttctccaactatagaaac

SEQ ID NO: 6008397 - DNA, 25 bp, Homo sapien
aaccaagttttcgcagtctttgaat

SEQ ID NO: 6008398 - DNA, 25 bp, Homo sapien
catcgaaagattttgctccaaggta

SEQ ID NO: 6008399 - DNA, 25 bp, Homo sapien
agatcagaaattgagatattttggc

SEQ ID NO: 6008400 - DNA, 25 bp, Homo sapien
cttttcggagtcaccgtaaattgga

SEQ ID NO: 6008401 - DNA, 25 bp, Homo sapien
acccatttagcttcatccctaacaa

SEQ ID NO: 6008402 - DNA, 25 bp, Homo sapien
aggcttcgttggcgcttgaagtcca

SEQ ID NO: 6008403 - DNA, 25 bp, Homo sapien
attatagcctcataaagacaggatc

SEQ ID NO: 6008404 - DNA, 25 bp, Homo sapien
acgtgaataatggtgaaaactgaac

SEQ ID NO: 6008405 - DNA, 25 bp, Homo sapien
cgattaaactgtctttcttccagtt

SEQ ID NO: 6008406 - DNA, 25 bp, Homo sapien
ggctctgaattttttatctatatcc

SEQ ID NO: 6008407 - DNA, 25 bp, Homo sapien
tacaatattgtcgtctcctaatttt

SEQ ID NO: 6008408 - DNA, 25 bp, Homo sapien
tcgaaagattttgctccaaggtagt

SEQ ID NO: 6008409 - DNA, 25 bp, Homo sapien
atcctttggtagaaatgagagtaat

SEQ ID NO: 6008410 - DNA, 25 bp, Homo sapien
agataaattatgtgtttttcgttct

SEQ ID NO: 6008411 - DNA, 25 bp, Homo sapien
taaaataaatgaattttgtaaagct

SEQ ID NO: 6008412 - DNA, 25 bp, Homo sapien
tctacaatattgtcgtctcctaatt

SEQ ID NO: 6008413 - DNA, 25 bp, Homo sapien
atccttatagccgtagatcttttcg

SEQ ID NO: 6008414 - DNA, 25 bp, Homo sapien
aattcaaatgatggagaattgttta

SEQ ID NO: 6008415 - DNA, 25 bp, Homo sapien
gactccaaaaactcatcagaaaggt

SEQ ID NO: 6008416 - DNA, 25 bp, Homo sapien
atagccgtagatcttttcggagtca

SEQ ID NO: 6008417 - DNA, 25 bp, Homo sapien
ccacgtttcaggcttgaaatcattg

SEQ ID NO: 6008418 - DNA, 25 bp, Homo sapien
gtttgatctagggcatcataatttt

SEQ ID NO: 6008419 - DNA, 25 bp, Homo sapien
gaatactctgatactttttcaaaaa

SEQ ID NO: 6008420 - DNA, 25 bp, Homo sapien
ctacccatttagcttcatccctaac

SEQ ID NO: 6008421 - DNA, 25 bp, Homo sapien
aaattatgtgtttttcgttcttctg

SEQ ID NO: 6008422 - DNA, 25 bp, Homo sapien
actgaacagcgttttctccaactat

SEQ ID NO: 6008423 - DNA, 25 bp, Homo sapien
ccctaacaattacatcatcctttgg

SEQ ID NO: 6008424 - DNA, 25 bp, Homo sapien
ctggcaaaatcgtcaaccaaactcg

SEQ ID NO: 6008425 - DNA, 25 bp, Homo sapien
cttgtaagtagtgacgaaaccaatc

SEQ ID NO: 6008426 - DNA, 25 bp, Homo sapien
aagttttcgcagtctttgaatatca

SEQ ID NO: 6008427 - DNA, 25 bp, Homo sapien
ccaagttttcgcagtctttgaatat

SEQ ID NO: 6008428 - DNA, 25 bp, Homo sapien
aacagcgttttctccaactatagaa

SEQ ID NO: 6008429 - DNA, 25 bp, Homo sapien
gaatcaaatgctaggtggatgatga

SEQ ID NO: 6008430 - DNA, 25 bp, Homo sapien
cagtttgatctagggcatcataatt

SEQ ID NO: 6008431 - DNA, 25 bp, Homo sapien
tcgtcaaatgcttcgtttggatcct

SEQ ID NO: 6008432 - DNA, 25 bp, Homo sapien
tttatctatatcctcatcgaaagat

SEQ ID NO: 6008433 - DNA, 25 bp, Homo sapien
atgcattctcctggcaaaatcgtca

SEQ ID NO: 6008434 - DNA, 25 bp, Homo sapien
gcagtctttgaatatcattcctgtc

SEQ ID NO: 6008435 - DNA, 25 bp, Homo sapien
acctttaattcaaatgatggagaat

SEQ ID NO: 6008436 - DNA, 25 bp, Homo sapien
gaaaaagatagacgtaacttatatt

SEQ ID NO: 6008437 - DNA, 25 bp, Homo sapien
atgacaaaaagatgggcgatgatat

SEQ ID NO: 6008438 - DNA, 25 bp, Homo sapien
gtagaaaggtggctgttgattttgc

SEQ ID NO: 6008439 - DNA, 25 bp, Homo sapien
caagcttcaaaaaacaaagaatcga

SEQ ID NO: 6008440 - DNA, 25 bp, Homo sapien
aaatgaagatgctgaagaaaaccat

SEQ ID NO: 6008441 - DNA, 25 bp, Homo sapien
taacggacatatcttgagggtagac

SEQ ID NO: 6008442 - DNA, 25 bp, Homo sapien
aaagcccagccagaaatgaatgaca

SEQ ID NO: 6008443 - DNA, 25 bp, Homo sapien
gcagcgttaaatacgcattacctgt

SEQ ID NO: 6008444 - DNA, 25 bp, Homo sapien
cgggttcaagcgtaagagaaagcac

SEQ ID NO: 6008445 - DNA, 25 bp, Homo sapien
tgtcatgcctgagtatgtgtatgaa

SEQ ID NO: 6008446 - DNA, 25 bp, Homo sapien
atgagcagctggcagatttcttttc

SEQ ID NO: 6008447 - DNA, 25 bp, Homo sapien
attttgctgttcaaaaaaacagatg

SEQ ID NO: 6008448 - DNA, 25 bp, Homo sapien
cgtcgtggaggctaccattccaagg

SEQ ID NO: 6008449 - DNA, 25 bp, Homo sapien
accatgacgacgaagaagatgaaaa

SEQ ID NO: 6008450 - DNA, 25 bp, Homo sapien
tagaggttacggttttgtagaattc

SEQ ID NO: 6008451 - DNA, 25 bp, Homo sapien
ttgatgggcttaaggtggttgaatt

SEQ ID NO: 6008452 - DNA, 25 bp, Homo sapien
cgtaaagagaagaagggaacaattg

SEQ ID NO: 6008453 - DNA, 25 bp, Homo sapien
cacgaataaaaggtccaggggcttc

SEQ ID NO: 6008454 - DNA, 25 bp, Homo sapien
cttcgggttcgttagttttgctgta

SEQ ID NO: 6008455 - DNA, 25 bp, Homo sapien
attatcagaaatatgccatggagtt

SEQ ID NO: 6008456 - DNA, 25 bp, Homo sapien
aaaggtggctgttgattttgctgtt

SEQ ID NO: 6008457 - DNA, 25 bp, Homo sapien
accaatcccgatgacaaaaagatgg

SEQ ID NO: 6008458 - DNA, 25 bp, Homo sapien
cctgagtcatctgagaaaataacgg

SEQ ID NO: 6008459 - DNA, 25 bp, Homo sapien
gcctgagtatgtgtatgaaggtcgt

SEQ ID NO: 6008460 - DNA, 25 bp, Homo sapien
cctagatatgaagactttgtttgtg

SEQ ID NO: 6008461 - DNA, 25 bp, Homo sapien
tgttgaaggctcaaaaatggctgat

SEQ ID NO: 6008462 - DNA, 25 bp, Homo sapien
ctgatggtgaagactccatgctaaa

SEQ ID NO: 6008463 - DNA, 25 bp, Homo sapien
cgcacttcagtaaatttggcagcgt

SEQ ID NO: 6008464 - DNA, 25 bp, Homo sapien
caaaatgacgacggcctagatatga

SEQ ID NO: 6008465 - DNA, 25 bp, Homo sapien
agaggatgacacaaaagaagcccta

SEQ ID NO: 6008466 - DNA, 25 bp, Homo sapien
ttgtcaagcaagcaaaagttataat

SEQ ID NO: 6008467 - DNA, 25 bp, Homo sapien
cgacgcccaccaatcccgatgacaa

SEQ ID NO: 6008468 - DNA, 25 bp, Homo sapien
tcaaaaaaacagatgggaagattac

SEQ ID NO: 6008469 - DNA, 25 bp, Homo sapien
gtagatcaagcttcaaaaaacaaag

SEQ ID NO: 6008470 - DNA, 25 bp, Homo sapien
gttcaaaaaaacagatgggaagatt

SEQ ID NO: 6008471 - DNA, 25 bp, Homo sapien
aggaagcgtgatggtaaattgtgtg

SEQ ID NO: 6008472 - DNA, 25 bp, Homo sapien
taacgagtcaggaaatgaagatgct

SEQ ID NO: 6008473 - DNA, 25 bp, Homo sapien
acagatgagcagctggcagatttct

SEQ ID NO: 6008474 - DNA, 25 bp, Homo sapien
tgcgcctgcggctggctctacctct

SEQ ID NO: 6008475 - DNA, 25 bp, Homo sapien
ttgaatttgcgattgagaactctaa

SEQ ID NO: 6008476 - DNA, 25 bp, Homo sapien
ggaaaaatacaagttcatgggtcca

SEQ ID NO: 6008477 - DNA, 25 bp, Homo sapien
tgacgacgaagaagatgaaaatgaa

SEQ ID NO: 6008478 - DNA, 25 bp, Homo sapien
agaattgctttggaaaacaccaaag

SEQ ID NO: 6008479 - DNA, 25 bp, Homo sapien
ttgctccgatcaagcatgcggtagt

SEQ ID NO: 6008480 - DNA, 25 bp, Homo sapien
ggtacggcctttgtagccttcaaag

SEQ ID NO: 6008481 - DNA, 25 bp, Homo sapien
attacaaaaaagcccagccagaaat

SEQ ID NO: 6008482 - DNA, 25 bp, Homo sapien
taatggaagttaaaggatcaactgc

SEQ ID NO: 6008483 - DNA, 25 bp, Homo sapien
tcagaagtggttgaaaagagcacac

SEQ ID NO: 6008484 - DNA, 25 bp, Homo sapien
gagatcgttcaaagaaaacatcaga

SEQ ID NO: 6008485 - DNA, 25 bp, Homo sapien
atatgccatggagttgtcgtgatcc

SEQ ID NO: 6008486 - DNA, 25 bp, Homo sapien
aattaagagtggagcaactgaaaaa

SEQ ID NO: 6008487 - DNA, 25 bp, Homo sapien
agtcatctgagaaaataacgggcca

SEQ ID NO: 6008488 - DNA, 25 bp, Homo sapien
aaaaacagatgggaagattacaaaa

SEQ ID NO: 6008489 - DNA, 25 bp, Homo sapien
gacgtaacttatatttgctgaatga

SEQ ID NO: 6008490 - DNA, 25 bp, Homo sapien
gatggtagaaaggtggctgttgatt

SEQ ID NO: 6008491 - DNA, 25 bp, Homo sapien
ttgctgaatgaaggtagagttgttg

SEQ ID NO: 6008492 - DNA, 25 bp, Homo sapien
taagagaggatgctggaagaatggc

SEQ ID NO: 6008493 - DNA, 25 bp, Homo sapien
aaaagaaacaagtagacaatgactt

SEQ ID NO: 6008494 - DNA, 25 bp, Homo sapien
agagcacacctgagtcatctgagaa

SEQ ID NO: 6008495 - DNA, 25 bp, Homo sapien
gattatcagatctacaaaggaaaaa

SEQ ID NO: 6008496 - DNA, 25 bp, Homo sapien
agaaaacatcagaagtggttgaaaa

SEQ ID NO: 6008497 - DNA, 25 bp, Homo sapien
agccaaaaaaagaagaagcaacgac

SEQ ID NO: 6008498 - DNA, 25 bp, Homo sapien
atgaagatgaggacgatgctgatgg

SEQ ID NO: 6008499 - DNA, 25 bp, Homo sapien
gatgctggaagaatggcagaaaaga

SEQ ID NO: 6008500 - DNA, 25 bp, Homo sapien
ggatttgcgtttgttactatgaaga

SEQ ID NO: 6008501 - DNA, 25 bp, Homo sapien
gaaaacaccaaagacttgaaaattg

SEQ ID NO: 6008502 - DNA, 25 bp, Homo sapien
gttaaaggatcaactgcgggaagaa

SEQ ID NO: 6008503 - DNA, 25 bp, Homo sapien
ccaaaaaaagaagaagcaacgacgc

SEQ ID NO: 6008504 - DNA, 25 bp, Homo sapien
atgggtccagatgagattgaagctc

SEQ ID NO: 6008505 - DNA, 25 bp, Homo sapien
acaaagaatcgaaacgtaaagcaca

SEQ ID NO: 6008506 - DNA, 25 bp, Homo sapien
agctggcagatttcttttccaattt

SEQ ID NO: 6008507 - DNA, 25 bp, Homo sapien
aatgtctcaaaacaaaatgacgacg

SEQ ID NO: 6008508 - DNA, 25 bp, Homo sapien
aaataacgggccagaacaatgaaga

SEQ ID NO: 6008509 - DNA, 25 bp, Homo sapien
aataatcgggttcaagcgtaagaga

SEQ ID NO: 6008510 - DNA, 25 bp, Homo sapien
cgtaagagaaagcacgcaaaaaaat

SEQ ID NO: 6008511 - DNA, 25 bp, Homo sapien
ccaattttgctccgatcaagcatgc

SEQ ID NO: 6008512 - DNA, 25 bp, Homo sapien
tcaaagaaaacatcagaagtggttg

SEQ ID NO: 6008513 - DNA, 25 bp, Homo sapien
aagaagccctagctaaggccagaaa

SEQ ID NO: 6008514 - DNA, 25 bp, Homo sapien
gaatggcagaaaagaacgccgccaa

SEQ ID NO: 6008515 - DNA, 25 bp, Homo sapien
gctgtcgtggaatttgctacagaag

SEQ ID NO: 6008516 - DNA, 25 bp, Homo sapien
ccagatgagattgaagctcaaaaaa

SEQ ID NO: 6008517 - DNA, 25 bp, Homo sapien
aagagaagaagggaacaattgaagc

SEQ ID NO: 6008518 - DNA, 25 bp, Homo sapien
tacaaaggaaaaatacaagttcatg

SEQ ID NO: 6008519 - DNA, 25 bp, Homo sapien
acttatatttgctgaatgaaggtag

SEQ ID NO: 6008520 - DNA, 25 bp, Homo sapien
tatacatataacgagtgtatcaaaa

SEQ ID NO: 6008521 - DNA, 25 bp, Homo sapien
aaatggctgatttgttaaccaacac

SEQ ID NO: 6008522 - DNA, 25 bp, Homo sapien
aagaccaatatacatataacgagtg

SEQ ID NO: 6008523 - DNA, 25 bp, Homo sapien
cccgatgacaaaaagatgggcgatg

SEQ ID NO: 6008524 - DNA, 25 bp, Homo sapien
ccaacgttagtaagagaggatgctg

SEQ ID NO: 6008525 - DNA, 25 bp, Homo sapien
tgaatgacaaagatgataacgagtc

SEQ ID NO: 6008526 - DNA, 25 bp, Homo sapien
aaattaattatcagaaatatgccat

SEQ ID NO: 6008527 - DNA, 25 bp, Homo sapien
gttggctaaaggtacggcctttgta

SEQ ID NO: 6008528 - DNA, 25 bp, Homo sapien
accgaaattaattatcagaaatatg

SEQ ID NO: 6008529 - DNA, 25 bp, Homo sapien
gtagaattcagagatcataaaaacg

SEQ ID NO: 6008530 - DNA, 25 bp, Homo sapien
aggatgtcacagatgagcagctggc

SEQ ID NO: 6008531 - DNA, 25 bp, Homo sapien
ggcagatttcttttccaattttgct

SEQ ID NO: 6008532 - DNA, 25 bp, Homo sapien
aatgaaggtagagttgttgaaggct

SEQ ID NO: 6008533 - DNA, 25 bp, Homo sapien
agtagacaatgacttaggcaaagga

SEQ ID NO: 6008534 - DNA, 25 bp, Homo sapien
tctagtaatgtctcaaaacaaaatg

SEQ ID NO: 6008535 - DNA, 25 bp, Homo sapien
aagagatcgttcaaagaaaacatca

SEQ ID NO: 6008536 - DNA, 25 bp, Homo sapien
atcccgatgacaaaaagatgggcga

SEQ ID NO: 6008537 - DNA, 25 bp, Homo sapien
tggagatcagagaaaaatcttacaa

SEQ ID NO: 6008538 - DNA, 25 bp, Homo sapien
gtgtatcaaaaatgcgcctgcggct

SEQ ID NO: 6008539 - DNA, 25 bp, Homo sapien
tggctaaaggtacggcctttgtagc

SEQ ID NO: 6008540 - DNA, 25 bp, Homo sapien
aggatgctggaagaatggcagaaaa

SEQ ID NO: 6008541 - DNA, 25 bp, Homo sapien
ctgtccattactccaacgttagtaa

SEQ ID NO: 6008542 - DNA, 25 bp, Homo sapien
tgacaaagatgataacgagtcagga

SEQ ID NO: 6008543 - DNA, 25 bp, Homo sapien
gacaaaaagatgggcgatgatataa

SEQ ID NO: 6008544 - DNA, 25 bp, Homo sapien
aattgtagaattgctttggaaaaca

SEQ ID NO: 6008545 - DNA, 25 bp, Homo sapien
ccaggatgtcacagatgagcagctg

SEQ ID NO: 6008546 - DNA, 25 bp, Homo sapien
caagcatgcggtagttgttaaggac

SEQ ID NO: 6008547 - DNA, 25 bp, Homo sapien
ctccaacgttagtaagagaggatgc

SEQ ID NO: 6008548 - DNA, 25 bp, Homo sapien
agcaagcaaaagttataatggaagt

SEQ ID NO: 6008549 - DNA, 25 bp, Homo sapien
aatctttggctccgcacttcagtaa

SEQ ID NO: 6008550 - DNA, 25 bp, Homo sapien
tgttgaatttgcgattgagaactct

SEQ ID NO: 6008551 - DNA, 25 bp, Homo sapien
ttaaccaacactgacatggagatca

SEQ ID NO: 6008552 - DNA, 25 bp, Homo sapien
aatcgaaacgtaaagcacaaaacaa

SEQ ID NO: 6008553 - DNA, 25 bp, Homo sapien
tagatatgaagactttgtttgtgag

SEQ ID NO: 6008554 - DNA, 25 bp, Homo sapien
cttaggcaaaggaagacgtctttgt

SEQ ID NO: 6008555 - DNA, 25 bp, Homo sapien
gttgattttgctgttcaaaaaaaca

SEQ ID NO: 6008556 - DNA, 25 bp, Homo sapien
caaaaatgcgcctgcggctggctct

SEQ ID NO: 6008557 - DNA, 25 bp, Homo sapien
ttgataggtgatgatgtcatgcctg

SEQ ID NO: 6008558 - DNA, 25 bp, Homo sapien
aatatacatataacgagtgtatcaa

SEQ ID NO: 6008559 - DNA, 25 bp, Homo sapien
taaggacacgaataaaaggtccagg

SEQ ID NO: 6008560 - DNA, 25 bp, Homo sapien
gtgatccagttaaattgaaaaagat

SEQ ID NO: 6008561 - DNA, 25 bp, Homo sapien
cagaaatgaatgacaaagatgataa

SEQ ID NO: 6008562 - DNA, 25 bp, Homo sapien
agatgggaagattacaaaaaagccc

SEQ ID NO: 6008563 - DNA, 25 bp, Homo sapien
taggtgatgatgtcatgcctgagta

SEQ ID NO: 6008564 - DNA, 25 bp, Homo sapien
gaaaaccatgacgacgaagaagatg

SEQ ID NO: 6008565 - DNA, 25 bp, Homo sapien
aagggaacaattgaagcaagcaaga

SEQ ID NO: 6008566 - DNA, 25 bp, Homo sapien
agatactggagatgtcggagaatcc

SEQ ID NO: 6008567 - DNA, 25 bp, Homo sapien
ggagaatccgagaataagaagccaa

SEQ ID NO: 6008568 - DNA, 25 bp, Homo sapien
agaccaaatttaacggacatatctt

SEQ ID NO: 6008569 - DNA, 25 bp, Homo sapien
ttcaagcgtaagagaaagcacgcaa

SEQ ID NO: 6008570 - DNA, 25 bp, Homo sapien
aaagaaaacatcagaagtggttgaa

SEQ ID NO: 6008571 - DNA, 25 bp, Homo sapien
acaccaaagacttgaaaattgatgg

SEQ ID NO: 6008572 - DNA, 25 bp, Homo sapien
acgcccaccaatcccgatgacaaaa

SEQ ID NO: 6008573 - DNA, 25 bp, Homo sapien
cacctgagtcatctgagaaaataac

SEQ ID NO: 6008574 - DNA, 25 bp, Homo sapien
agcgttaaatacgcattacctgtta

SEQ ID NO: 6008575 - DNA, 25 bp, Homo sapien
agcaagaaccaagagaacaagacca

SEQ ID NO: 6008576 - DNA, 25 bp, Homo sapien
tccatgctaaaaggtaaaccgaaat

SEQ ID NO: 6008577 - DNA, 25 bp, Homo sapien
cgggccagaacaatgaagatgagga

SEQ ID NO: 6008578 - DNA, 25 bp, Homo sapien
gaagatgctgaagaaaaccatgacg

SEQ ID NO: 6008579 - DNA, 25 bp, Homo sapien
aaaataaggaaagacatccattgag

SEQ ID NO: 6008580 - DNA, 25 bp, Homo sapien
gctgaagaaaaccatgacgacgaag

SEQ ID NO: 6008581 - DNA, 25 bp, Homo sapien
gttcgttagttttgctgtagaggat

SEQ ID NO: 6008582 - DNA, 25 bp, Homo sapien
aagacatccattgagtaaagaagag

SEQ ID NO: 6008583 - DNA, 25 bp, Homo sapien
cttacaaattaagagtggagcaact

SEQ ID NO: 6008584 - DNA, 25 bp, Homo sapien
aagaaaaccatgacgacgaagaaga

SEQ ID NO: 6008585 - DNA, 25 bp, Homo sapien
actaggttggctatcagaaatcttc

SEQ ID NO: 6008586 - DNA, 25 bp, Homo sapien
tgactaggttggctatcagaaatct

SEQ ID NO: 6008587 - DNA, 25 bp, Homo sapien
cgtaaagctgtcgtggaatttgcta

SEQ ID NO: 6008588 - DNA, 25 bp, Homo sapien
atatcttgagggtagacattgctaa

SEQ ID NO: 6008589 - DNA, 25 bp, Homo sapien
tacatataacgagtgtatcaaaaat

SEQ ID NO: 6008590 - DNA, 25 bp, Homo sapien
gacattgctaaaagaagagatcgtt

SEQ ID NO: 6008591 - DNA, 25 bp, Homo sapien
ggatcaactgcgggaagaagtagag

SEQ ID NO: 6008592 - DNA, 25 bp, Homo sapien
attgaaaaagatctttggtagatat

SEQ ID NO: 6008593 - DNA, 25 bp, Homo sapien
gaccaatatacatataacgagtgta

SEQ ID NO: 6008594 - DNA, 25 bp, Homo sapien
gagatcagagaaaaatcttacaaat

SEQ ID NO: 6008595 - DNA, 25 bp, Homo sapien
tcgtggaatttgctacagaagttaa

SEQ ID NO: 6008596 - DNA, 25 bp, Homo sapien
taaagagaagaagggaacaattgaa

SEQ ID NO: 6008597 - DNA, 25 bp, Homo sapien
atgaagatactggagatgtcggaga

SEQ ID NO: 6008598 - DNA, 25 bp, Homo sapien
tcttcctagagcaatgaatgataaa

SEQ ID NO: 6008599 - DNA, 25 bp, Homo sapien
atcagaaatcttcctagagcaatga

SEQ ID NO: 6008600 - DNA, 25 bp, Homo sapien
attaattatcagaaatatgccatgg

SEQ ID NO: 6008601 - DNA, 25 bp, Homo sapien
aacactgacatggagatcagagaaa

SEQ ID NO: 6008602 - DNA, 25 bp, Homo sapien
gtagaggatgacacaaaagaagccc

SEQ ID NO: 6008603 - DNA, 25 bp, Homo sapien
catggagatcagagaaaaatcttac

SEQ ID NO: 6008604 - DNA, 25 bp, Homo sapien
tgcatttgtcgatgactaggttggc

SEQ ID NO: 6008605 - DNA, 25 bp, Homo sapien
caaagaccaatatacatataacgag

SEQ ID NO: 6008606 - DNA, 25 bp, Homo sapien
aagctgtcgtggaatttgctacaga

SEQ ID NO: 6008607 - DNA, 25 bp, Homo sapien
aaccaagagaacaagaccagataat

SEQ ID NO: 6008608 - DNA, 25 bp, Homo sapien
caagcgtaagagaaagcacgcaaaa

SEQ ID NO: 6008609 - DNA, 25 bp, Homo sapien
aaattttagagggtttgaatgatga

SEQ ID NO: 6008610 - DNA, 25 bp, Homo sapien
caagtagacaatgacttaggcaaag

SEQ ID NO: 6008611 - DNA, 25 bp, Homo sapien
ggtaaattgtgtggatttgcgtttg

SEQ ID NO: 6008612 - DNA, 25 bp, Homo sapien
atttgcgattgagaactctaacgtc

SEQ ID NO: 6008613 - DNA, 25 bp, Homo sapien
gatgatgaaaagaaacaagtagaca

SEQ ID NO: 6008614 - DNA, 25 bp, Homo sapien
gaccagataatgaagatactggaga

SEQ ID NO: 6008615 - DNA, 25 bp, Homo sapien
aaaacgctttgatgggcttaaggtg

SEQ ID NO: 6008616 - DNA, 25 bp, Homo sapien
aaatcttacaaattaagagtggagc

SEQ ID NO: 6008617 - DNA, 25 bp, Homo sapien
cccagccagaaatgaatgacaaaga

SEQ ID NO: 6008618 - DNA, 25 bp, Homo sapien
gaaaatcagtaattgtagaattgct

SEQ ID NO: 6008619 - DNA, 25 bp, Homo sapien
gtgccttctagtaatgtctcaaaac

SEQ ID NO: 6008620 - DNA, 25 bp, Homo sapien
aaaattgatggtagaaaggtggctg

SEQ ID NO: 6008621 - DNA, 25 bp, Homo sapien
gataatgaagatactggagatgtcg

SEQ ID NO: 6008622 - DNA, 25 bp, Homo sapien
ttgcgattgagaactctaacgtcgt

SEQ ID NO: 6008623 - DNA, 25 bp, Homo sapien
agtaaatttggcagcgttaaatacg

SEQ ID NO: 6008624 - DNA, 25 bp, Homo sapien
agagaataatcgggttcaagcgtaa

SEQ ID NO: 6008625 - DNA, 25 bp, Homo sapien
aggtggttgaattgtcatgccgtta

SEQ ID NO: 6008626 - DNA, 25 bp, Homo sapien
ccagaacaatgaagatgaggacgat

SEQ ID NO: 6008627 - DNA, 25 bp, Homo sapien
gtggagcaactgaaaaagaacccat

SEQ ID NO: 6008628 - DNA, 25 bp, Homo sapien
aaggaagacgtctttgtgttgaatt

SEQ ID NO: 6008629 - DNA, 25 bp, Homo sapien
aatttgctacagaagttaaaaataa

SEQ ID NO: 6008630 - DNA, 25 bp, Homo sapien
cagtaattgtagaattgctttggaa

SEQ ID NO: 6008631 - DNA, 25 bp, Homo sapien
gaaatgaatgacaaagatgataacg

SEQ ID NO: 6008632 - DNA, 25 bp, Homo sapien
atggctgatttgttaaccaacactg

SEQ ID NO: 6008633 - DNA, 25 bp, Homo sapien
cccttatgatgccactgaagaatct

SEQ ID NO: 6008634 - DNA, 25 bp, Homo sapien
taaagctgtcgtggaatttgctaca

SEQ ID NO: 6008635 - DNA, 25 bp, Homo sapien
acacaaaagaagccctagctaaggc

SEQ ID NO: 6008636 - DNA, 25 bp, Homo sapien
ttcagagatcataaaaacgctttga

SEQ ID NO: 6008637 - DNA, 25 bp, Homo sapien
ggtgttgtcaagcaagcaaaagtta

SEQ ID NO: 6008638 - DNA, 25 bp, Homo sapien
gctggctctacctctttattgatag

SEQ ID NO: 6008639 - DNA, 25 bp, Homo sapien
ctgttgattttgctgttcaaaaaaa

SEQ ID NO: 6008640 - DNA, 25 bp, Homo sapien
tcgttagttttgctgtagaggatga

SEQ ID NO: 6008641 - DNA, 25 bp, Homo sapien
cggctggctctacctctttattgat

SEQ ID NO: 6008642 - DNA, 25 bp, Homo sapien
aatgaatgacaaagatgataacgag

SEQ ID NO: 6008643 - DNA, 25 bp, Homo sapien
gtggaggctaccattccaaggaagc

SEQ ID NO: 6008644 - DNA, 25 bp, Homo sapien
gtcaagcaagcaaaagttataatgg

SEQ ID NO: 6008645 - DNA, 25 bp, Homo sapien
ccaatatacatataacgagtgtatc

SEQ ID NO: 6008646 - DNA, 25 bp, Homo sapien
aagaaaatcagtaattgtagaattg

SEQ ID NO: 6008647 - DNA, 25 bp, Homo sapien
aggaagatagacaagtagatcaagc

SEQ ID NO: 6008648 - DNA, 25 bp, Homo sapien
gtatgtgtatgaaggtcgtgttctg

SEQ ID NO: 6008649 - DNA, 25 bp, Homo sapien
agaaatatgccatggagttgtcgtg

SEQ ID NO: 6008650 - DNA, 25 bp, Homo sapien
tggctccgcacttcagtaaatttgg

SEQ ID NO: 6008651 - DNA, 25 bp, Homo sapien
caagcaagcaaaagttataatggaa

SEQ ID NO: 6008652 - DNA, 25 bp, Homo sapien
ttggtagatatggtaccgtcgtgga

SEQ ID NO: 6008653 - DNA, 25 bp, Homo sapien
gagtggagcaactgaaaaagaaccc

SEQ ID NO: 6008654 - DNA, 25 bp, Homo sapien
ttacggttttgtagaattcagagat

SEQ ID NO: 6008655 - DNA, 25 bp, Homo sapien
gtatcaaaaatgcgcctgcggctgg

SEQ ID NO: 6008656 - DNA, 25 bp, Homo sapien
tagatatggtaccgtcgtggaggct

SEQ ID NO: 6008657 - DNA, 25 bp, Homo sapien
ttatcagatctacaaaggaaaaata

SEQ ID NO: 6008658 - DNA, 25 bp, Homo sapien
gcattaaaggcgttagctcgtaaag

SEQ ID NO: 6008659 - DNA, 25 bp, Homo sapien
gtttgtgaggtctataccccaggat

SEQ ID NO: 6008660 - DNA, 25 bp, Homo sapien
aaatacgcattacctgttatcgata

SEQ ID NO: 6008661 - DNA, 25 bp, Homo sapien
tgaagaaaatcagtaattgtagaat

SEQ ID NO: 6008662 - DNA, 25 bp, Homo sapien
gatcataaaaacgctttgatgggct

SEQ ID NO: 6008663 - DNA, 25 bp, Homo sapien
tcatgggtccagatgagattgaagc

SEQ ID NO: 6008664 - DNA, 25 bp, Homo sapien
tttgtcgatgactaggttggctatc

SEQ ID NO: 6008665 - DNA, 25 bp, Homo sapien
atcaagcttcaaaaaacaaagaatc

SEQ ID NO: 6008666 - DNA, 25 bp, Homo sapien
ttgtttgtgaggtctataccccagg

SEQ ID NO: 6008667 - DNA, 25 bp, Homo sapien
tttgctacagaagttaaaaataagg

SEQ ID NO: 6008668 - DNA, 25 bp, Homo sapien
attaaaggcgttagctcgtaaagct

SEQ ID NO: 6008669 - DNA, 25 bp, Homo sapien
gttgtcgtgatccagttaaattgaa

SEQ ID NO: 6008670 - DNA, 25 bp, Homo sapien
gagaactctaacgtcgtaaagagaa

SEQ ID NO: 6008671 - DNA, 25 bp, Homo sapien
atggaagttaaaggatcaactgcgg

SEQ ID NO: 6008672 - DNA, 25 bp, Homo sapien
tttttgttcgtaacgtcccttatga

SEQ ID NO: 6008673 - DNA, 25 bp, Homo sapien
gacatccattgagtaaagaagagat

SEQ ID NO: 6008674 - DNA, 25 bp, Homo sapien
ggccagaaagaccaaatttaacgga

SEQ ID NO: 6008675 - DNA, 25 bp, Homo sapien
cactgaagaatctttggctccgcac

SEQ ID NO: 6008676 - DNA, 25 bp, Homo sapien
atgcctgagtatgtgtatgaaggtc

SEQ ID NO: 6008677 - DNA, 25 bp, Homo sapien
ggttgaattgtcatgccgttacctc

SEQ ID NO: 6008678 - DNA, 25 bp, Homo sapien
cattgctaaaagaagagatcgttca

SEQ ID NO: 6008679 - DNA, 25 bp, Homo sapien
gagatgtcggagaatccgagaataa

SEQ ID NO: 6008680 - DNA, 25 bp, Homo sapien
gggtccagatgagattgaagctcaa

SEQ ID NO: 6008681 - DNA, 25 bp, Homo sapien
caaaaagatgggcgatgatataaag

SEQ ID NO: 6008682 - DNA, 25 bp, Homo sapien
ccctaggtaaagcgccaggcgaaaa

SEQ ID NO: 6008683 - DNA, 25 bp, Homo sapien
tgaaaaagatctttggtagatatgg

SEQ ID NO: 6008684 - DNA, 25 bp, Homo sapien
tgggcgatgatataaagagaataat

SEQ ID NO: 6008685 - DNA, 25 bp, Homo sapien
gttataatggaagttaaaggatcaa

SEQ ID NO: 6008686 - DNA, 25 bp, Homo sapien
cgatgacaaaaagatgggcgatgat

SEQ ID NO: 6008687 - DNA, 25 bp, Homo sapien
caggaaatgaagatgctgaagaaaa

SEQ ID NO: 6008688 - DNA, 25 bp, Homo sapien
gatgtcatgcctgagtatgtgtatg

SEQ ID NO: 6008689 - DNA, 25 bp, Homo sapien
ttgaaggctcaaaaatggctgattt

SEQ ID NO: 6008690 - DNA, 25 bp, Homo sapien
gagcagctggcagatttcttttcca

SEQ ID NO: 6008691 - DNA, 25 bp, Homo sapien
tataacgagtgtatcaaaaatgcgc

SEQ ID NO: 6008692 - DNA, 25 bp, Homo sapien
agaatctttggctccgcacttcagt

SEQ ID NO: 6008693 - DNA, 25 bp, Homo sapien
cgagaataagaagccaaaaaaagaa

SEQ ID NO: 6008694 - DNA, 25 bp, Homo sapien
caactgcgggaagaagtagaggtta

SEQ ID NO: 6008695 - DNA, 25 bp, Homo sapien
aaagaagagatcgttcaaagaaaac

SEQ ID NO: 6008696 - DNA, 25 bp, Homo sapien
tgaagtgccttctagtaatgtctca

SEQ ID NO: 6008697 - DNA, 25 bp, Homo sapien
atcttgagggtagacattgctaaaa

SEQ ID NO: 6008698 - DNA, 25 bp, Homo sapien
ttgtgtggatttgcgtttgttacta

SEQ ID NO: 6008699 - DNA, 25 bp, Homo sapien
ttgagaactctaacgtcgtaaagag

SEQ ID NO: 6008700 - DNA, 25 bp, Homo sapien
aaaccatgacgacgaagaagatgaa

SEQ ID NO: 6008701 - DNA, 25 bp, Homo sapien
aagttataatggaagttaaaggatc

SEQ ID NO: 6008702 - DNA, 25 bp, Homo sapien
aaagaagagattatcagatctacaa

SEQ ID NO: 6008703 - DNA, 25 bp, Homo sapien
tgcgggaagaagtagaggttacggt

SEQ ID NO: 6008704 - DNA, 25 bp, Homo sapien
agccttcaaagaccaatatacatat

SEQ ID NO: 6008705 - DNA, 25 bp, Homo sapien
gttgaagtgccttctagtaatgtct

SEQ ID NO: 6008706 - DNA, 25 bp, Homo sapien
aatagaaaatgttgaagtgccttct

SEQ ID NO: 6008707 - DNA, 25 bp, Homo sapien
taccccaggatgtcacagatgagca

SEQ ID NO: 6008708 - DNA, 25 bp, Homo sapien
gaaggtcgtgttctgtccattactc

SEQ ID NO: 6008709 - DNA, 25 bp, Homo sapien
acagatgggaagattacaaaaaagc

SEQ ID NO: 6008710 - DNA, 25 bp, Homo sapien
atcgggttcaagcgtaagagaaagc

SEQ ID NO: 6008711 - DNA, 25 bp, Homo sapien
tctttgtgttgaatttgcgattgag

SEQ ID NO: 6008712 - DNA, 25 bp, Homo sapien
atgacgacggcctagatatgaagac

SEQ ID NO: 6008713 - DNA, 25 bp, Homo sapien
caagaaccaagagaacaagaccaga

SEQ ID NO: 6008714 - DNA, 25 bp, Homo sapien
ctttgatgggcttaaggtggttgaa

SEQ ID NO: 6008715 - DNA, 25 bp, Homo sapien
tcttttccaattttgctccgatcaa

SEQ ID NO: 6008716 - DNA, 25 bp, Homo sapien
gctaaaggtacggcctttgtagcct

SEQ ID NO: 6008717 - DNA, 25 bp, Homo sapien
gatatggtaccgtcgtggaggctac

SEQ ID NO: 6008718 - DNA, 25 bp, Homo sapien
actctaacgtcgtaaagagaagaag

SEQ ID NO: 6008719 - DNA, 25 bp, Homo sapien
gatcgttcaaagaaaacatcagaag

SEQ ID NO: 6008720 - DNA, 25 bp, Homo sapien
gatgggcttaaggtggttgaattgt

SEQ ID NO: 6008721 - DNA, 25 bp, Homo sapien
atataaagagaataatcgggttcaa

SEQ ID NO: 6008722 - DNA, 25 bp, Homo sapien
tctttggctccgcacttcagtaaat

SEQ ID NO: 6008723 - DNA, 25 bp, Homo sapien
taacgtcgtaaagagaagaagggaa

SEQ ID NO: 6008724 - DNA, 25 bp, Homo sapien
tactccaacgttagtaagagaggat

SEQ ID NO: 6008725 - DNA, 25 bp, Homo sapien
aaacaatagaaaatgttgaagtgcc

SEQ ID NO: 6008726 - DNA, 25 bp, Homo sapien
ctggcagatttcttttccaattttg

SEQ ID NO: 6008727 - DNA, 25 bp, Homo sapien
agcaagcaagaaccaagagaacaag

SEQ ID NO: 6008728 - DNA, 25 bp, Homo sapien
gacttaggcaaaggaagacgtcttt

SEQ ID NO: 6008729 - DNA, 25 bp, Homo sapien
tagtaatgtctcaaaacaaaatgac

SEQ ID NO: 6008730 - DNA, 25 bp, Homo sapien
ttgaagcaagcaagaaccaagagaa

SEQ ID NO: 6008731 - DNA, 25 bp, Homo sapien
gttagttttgctgtagaggatgaca

SEQ ID NO: 6008732 - DNA, 25 bp, Homo sapien
ctgacatggagatcagagaaaaatc

SEQ ID NO: 6008733 - DNA, 25 bp, Homo sapien
agccctagctaaggccagaaagacc

SEQ ID NO: 6008734 - DNA, 25 bp, Homo sapien
cttcagtaaatttggcagcgttaaa

SEQ ID NO: 6008735 - DNA, 25 bp, Homo sapien
cgtgatggtaaattgtgtggatttg

SEQ ID NO: 6008736 - DNA, 25 bp, Homo sapien
tgtgttgaatttgcgattgagaact

SEQ ID NO: 6008737 - DNA, 25 bp, Homo sapien
atgaatgataaagcattaaaggcgt

SEQ ID NO: 6008738 - DNA, 25 bp, Homo sapien
atgctgaagaaaaccatgacgacga

SEQ ID NO: 6008739 - DNA, 25 bp, Homo sapien
agaacgccgccaaaagaaaggaggc

SEQ ID NO: 6008740 - DNA, 25 bp, Homo sapien
agaaccaagagaacaagaccagata

SEQ ID NO: 6008741 - DNA, 25 bp, Homo sapien
ttgttaaggacacgaataaaaggtc

SEQ ID NO: 6008742 - DNA, 25 bp, Homo sapien
gaaaataacgggccagaacaatgaa

SEQ ID NO: 6008743 - DNA, 25 bp, Homo sapien
tttgctgttcaaaaaaacagatggg

SEQ ID NO: 6008744 - DNA, 25 bp, Homo sapien
gacaatgacttaggcaaaggaagac

SEQ ID NO: 6008745 - DNA, 25 bp, Homo sapien
atggcagaaaagaacgccgccaaaa

SEQ ID NO: 6008746 - DNA, 25 bp, Homo sapien
tggtgaagactccatgctaaaaggt

SEQ ID NO: 6008747 - DNA, 25 bp, Homo sapien
taaatttggcagcgttaaatacgca

SEQ ID NO: 6008748 - DNA, 25 bp, Homo sapien
catgcggtagttgttaaggacacga

SEQ ID NO: 6008749 - DNA, 25 bp, Homo sapien
agaattcagagatcataaaaacgct

SEQ ID NO: 6008750 - DNA, 25 bp, Homo sapien
taggttggctatcagaaatcttcct

SEQ ID NO: 6008751 - DNA, 25 bp, Homo sapien
ttttgtagaattcagagatcataaa

SEQ ID NO: 6008752 - DNA, 25 bp, Homo sapien
ttgctaaaagaagagatcgttcaaa

SEQ ID NO: 6008753 - DNA, 25 bp, Homo sapien
catgctaaaaggtaaaccgaaatta

SEQ ID NO: 6008754 - DNA, 25 bp, Homo sapien
gttaaggacacgaataaaaggtcca

SEQ ID NO: 6008755 - DNA, 25 bp, Homo sapien
ggaatttgctacagaagttaaaaat

SEQ ID NO: 6008756 - DNA, 25 bp, Homo sapien
ccattactccaacgttagtaagaga

SEQ ID NO: 6008757 - DNA, 25 bp, Homo sapien
cgatcaagcatgcggtagttgttaa

SEQ ID NO: 6008758 - DNA, 25 bp, Homo sapien
tgatgaaaagaaacaagtagacaat

SEQ ID NO: 6008759 - DNA, 25 bp, Homo sapien
aggaggccctaggtaaagcgccagg

SEQ ID NO: 6008760 - DNA, 25 bp, Homo sapien
ggttacggttttgtagaattcagag

SEQ ID NO: 6008761 - DNA, 25 bp, Homo sapien
cggtagttgttaaggacacgaataa

SEQ ID NO: 6008762 - DNA, 25 bp, Homo sapien
ggaagaatggcagaaaagaacgccg

SEQ ID NO: 6008763 - DNA, 25 bp, Homo sapien
gaagattacaaaaaagcccagccag

SEQ ID NO: 6008764 - DNA, 25 bp, Homo sapien
aaaaatacaagttcatgggtccaga

SEQ ID NO: 6008765 - DNA, 25 bp, Homo sapien
gccatggagttgtcgtgatccagtt

SEQ ID NO: 6008766 - DNA, 25 bp, Homo sapien
aaaaagatctttggtagatatggta

SEQ ID NO: 6008767 - DNA, 25 bp, Homo sapien
ccagttaaattgaaaaagatctttg

SEQ ID NO: 6008768 - DNA, 25 bp, Homo sapien
gaagatttttctgtttttgttcgta

SEQ ID NO: 6008769 - DNA, 25 bp, Homo sapien
aaatcagtaattgtagaattgcttt

SEQ ID NO: 6008770 - DNA, 25 bp, Homo sapien
tgttctgtccattactccaacgtta

SEQ ID NO: 6008771 - DNA, 25 bp, Homo sapien
ccaggcgaaaaagatagacgtaact

SEQ ID NO: 6008772 - DNA, 25 bp, Homo sapien
ccagaaagaccaaatttaacggaca

SEQ ID NO: 6008773 - DNA, 25 bp, Homo sapien
attactccaacgttagtaagagagg

SEQ ID NO: 6008774 - DNA, 25 bp, Homo sapien
atatttgctgaatgaaggtagagtt

SEQ ID NO: 6008775 - DNA, 25 bp, Homo sapien
gggttcgttagttttgctgtagagg

SEQ ID NO: 6008776 - DNA, 25 bp, Homo sapien
acaatagaaaatgttgaagtgcctt

SEQ ID NO: 6008777 - DNA, 25 bp, Homo sapien
gtggaatttgctacagaagttaaaa

SEQ ID NO: 6008778 - DNA, 25 bp, Homo sapien
taccattccaaggaagcgtgatggt

SEQ ID NO: 6008779 - DNA, 25 bp, Homo sapien
tgattttgctgttcaaaaaaacaga

SEQ ID NO: 6008780 - DNA, 25 bp, Homo sapien
agaatccgagaataagaagccaaaa

SEQ ID NO: 6008781 - DNA, 25 bp, Homo sapien
ttttccaattttgctccgatcaagc

SEQ ID NO: 6008782 - DNA, 25 bp, Homo sapien
aataaggaaagacatccattgagta

SEQ ID NO: 6008783 - DNA, 25 bp, Homo sapien
gagtaaagaagagattatcagatct

SEQ ID NO: 6008784 - DNA, 25 bp, Homo sapien
gtaaagcacaaaacaaaagggaaga

SEQ ID NO: 6008785 - DNA, 25 bp, Homo sapien
tccaaggaagcgtgatggtaaattg

SEQ ID NO: 6008786 - DNA, 25 bp, Homo sapien
tgggcttaaggtggttgaattgtca

SEQ ID NO: 6008787 - DNA, 25 bp, Homo sapien
gatttcttttccaattttgctccga

SEQ ID NO: 6008788 - DNA, 25 bp, Homo sapien
tttgtgttgaatttgcgattgagaa

SEQ ID NO: 6008789 - DNA, 25 bp, Homo sapien
agaaagaccaaatttaacggacata

SEQ ID NO: 6008790 - DNA, 25 bp, Homo sapien
caatcccgatgacaaaaagatgggc

SEQ ID NO: 6008791 - DNA, 25 bp, Homo sapien
ctttgtagccttcaaagaccaatat

SEQ ID NO: 6008792 - DNA, 25 bp, Homo sapien
tgctgttcaaaaaaacagatgggaa

SEQ ID NO: 6008793 - DNA, 25 bp, Homo sapien
gatctacaaaggaaaaatacaagtt

SEQ ID NO: 6008794 - DNA, 25 bp, Homo sapien
aagtgccttctagtaatgtctcaaa

SEQ ID NO: 6008795 - DNA, 25 bp, Homo sapien
tacaaaaaagcccagccagaaatga

SEQ ID NO: 6008796 - DNA, 25 bp, Homo sapien
tagttttgctgtagaggatgacaca

SEQ ID NO: 6008797 - DNA, 25 bp, Homo sapien
tagagttgttgaaggctcaaaaatg

SEQ ID NO: 6008798 - DNA, 25 bp, Homo sapien
aaagaatcgaaacgtaaagcacaaa

SEQ ID NO: 6008799 - DNA, 25 bp, Homo sapien
agattacaaaaaagcccagccagaa

SEQ ID NO: 6008800 - DNA, 25 bp, Homo sapien
gccgttacctccgatgaaattttag

SEQ ID NO: 6008801 - DNA, 25 bp, Homo sapien
acgcattacctgttatcgataagtc

SEQ ID NO: 6008802 - DNA, 25 bp, Homo sapien
gagtatgtgtatgaaggtcgtgttc

SEQ ID NO: 6008803 - DNA, 25 bp, Homo sapien
cgaaattaattatcagaaatatgcc

SEQ ID NO: 6008804 - DNA, 25 bp, Homo sapien
gatcagagaaaaatcttacaaatta

SEQ ID NO: 6008805 - DNA, 25 bp, Homo sapien
taaaggatcaactgcgggaagaagt

SEQ ID NO: 6008806 - DNA, 25 bp, Homo sapien
ctgagtatgtgtatgaaggtcgtgt

SEQ ID NO: 6008807 - DNA, 25 bp, Homo sapien
gctctacctctttattgataggtga

SEQ ID NO: 6008808 - DNA, 25 bp, Homo sapien
aacgctttgatgggcttaaggtggt

SEQ ID NO: 6008809 - DNA, 25 bp, Homo sapien
aagaagaagcaacgacgcccaccaa

SEQ ID NO: 6008810 - DNA, 25 bp, Homo sapien
ggtagacattgctaaaagaagagat

SEQ ID NO: 6008811 - DNA, 25 bp, Homo sapien
gatgtcggagaatccgagaataaga

SEQ ID NO: 6008812 - DNA, 25 bp, Homo sapien
agaaaggaggccctaggtaaagcgc

SEQ ID NO: 6008813 - DNA, 25 bp, Homo sapien
gaagaagggaacaattgaagcaagc

SEQ ID NO: 6008814 - DNA, 25 bp, Homo sapien
gaagcaagcaagaaccaagagaaca

SEQ ID NO: 6008815 - DNA, 25 bp, Homo sapien
aagagaacaagaccagataatgaag

SEQ ID NO: 6008816 - DNA, 25 bp, Homo sapien
agctaaggccagaaagaccaaattt

SEQ ID NO: 6008817 - DNA, 25 bp, Homo sapien
tgaatgaaggtagagttgttgaagg

SEQ ID NO: 6008818 - DNA, 25 bp, Homo sapien
ggctgatttgttaaccaacactgac

SEQ ID NO: 6008819 - DNA, 25 bp, Homo sapien
attgtcatgccgttacctccgatga

SEQ ID NO: 6008820 - DNA, 25 bp, Homo sapien
tcatgccgttacctccgatgaaatt

SEQ ID NO: 6008821 - DNA, 25 bp, Homo sapien
accaaagacttgaaaattgatggta

SEQ ID NO: 6008822 - DNA, 25 bp, Homo sapien
atacaagttcatgggtccagatgag

SEQ ID NO: 6008823 - DNA, 25 bp, Homo sapien
tgacacaaaagaagccctagctaag

SEQ ID NO: 6008824 - DNA, 25 bp, Homo sapien
tcacagatgagcagctggcagattt

SEQ ID NO: 6008825 - DNA, 25 bp, Homo sapien
atgccatggagttgtcgtgatccag

SEQ ID NO: 6008826 - DNA, 25 bp, Homo sapien
gttgttgaaggctcaaaaatggctg

SEQ ID NO: 6008827 - DNA, 25 bp, Homo sapien
aatcttcctagagcaatgaatgata

SEQ ID NO: 6008828 - DNA, 25 bp, Homo sapien
ggctatcagaaatcttcctagagca

SEQ ID NO: 6008829 - DNA, 25 bp, Homo sapien
gaggttacggttttgtagaattcag

SEQ ID NO: 6008830 - DNA, 25 bp, Homo sapien
actggagatgtcggagaatccgaga

SEQ ID NO: 6008831 - DNA, 25 bp, Homo sapien
gatgctgatggtgaagactccatgc

SEQ ID NO: 6008832 - DNA, 25 bp, Homo sapien
atcaaaaatgcgcctgcggctggct

SEQ ID NO: 6008833 - DNA, 25 bp, Homo sapien
ttgaaaagagcacacctgagtcatc

SEQ ID NO: 6008834 - DNA, 25 bp, Homo sapien
gagaagaagggaacaattgaagcaa

SEQ ID NO: 6008835 - DNA, 25 bp, Homo sapien
cagaaatcttcctagagcaatgaat

SEQ ID NO: 6008836 - DNA, 25 bp, Homo sapien
aaaagaagccctagctaaggccaga

SEQ ID NO: 6008837 - DNA, 25 bp, Homo sapien
tcgatgactaggttggctatcagaa

SEQ ID NO: 6008838 - DNA, 25 bp, Homo sapien
agggtagacattgctaaaagaagag

SEQ ID NO: 6008839 - DNA, 25 bp, Homo sapien
gaagtagaggttacggttttgtaga

SEQ ID NO: 6008840 - DNA, 25 bp, Homo sapien
cacacctgagtcatctgagaaaata

SEQ ID NO: 6008841 - DNA, 25 bp, Homo sapien
agaatcgaaacgtaaagcacaaaac

SEQ ID NO: 6008842 - DNA, 25 bp, Homo sapien
aaagatgataacgagtcaggaaatg

SEQ ID NO: 6008843 - DNA, 25 bp, Homo sapien
acaagaccagataatgaagatactg

SEQ ID NO: 6008844 - DNA, 25 bp, Homo sapien
tctataccccaggatgtcacagatg

SEQ ID NO: 6008845 - DNA, 25 bp, Homo sapien
tacaaattaagagtggagcaactga

SEQ ID NO: 6008846 - DNA, 25 bp, Homo sapien
aagaaacaagtagacaatgacttag

SEQ ID NO: 6008847 - DNA, 25 bp, Homo sapien
taatcgggttcaagcgtaagagaaa

SEQ ID NO: 6008848 - DNA, 25 bp, Homo sapien
accgtcgtggaggctaccattccaa

SEQ ID NO: 6008849 - DNA, 25 bp, Homo sapien
tatgatgccactgaagaatctttgg

SEQ ID NO: 6008850 - DNA, 25 bp, Homo sapien
aacgttagtaagagaggatgctgga

SEQ ID NO: 6008851 - DNA, 25 bp, Homo sapien
agatgaggacgatgctgatggtgaa

SEQ ID NO: 6008852 - DNA, 25 bp, Homo sapien
gtaattgtagaattgctttggaaaa

SEQ ID NO: 6008853 - DNA, 25 bp, Homo sapien
catctttgcatttgtcgatgactag

SEQ ID NO: 6008854 - DNA, 25 bp, Homo sapien
acatatcttgagggtagacattgct

SEQ ID NO: 6008855 - DNA, 25 bp, Homo sapien
tccgcacttcagtaaatttggcagc

SEQ ID NO: 6008856 - DNA, 25 bp, Homo sapien
agagaggatgctggaagaatggcag

SEQ ID NO: 6008857 - DNA, 25 bp, Homo sapien
cagatttcttttccaattttgctcc

SEQ ID NO: 6008858 - DNA, 25 bp, Homo sapien
tctcaaaacaaaatgacgacggcct

SEQ ID NO: 6008859 - DNA, 25 bp, Homo sapien
aatgcgcctgcggctggctctacct

SEQ ID NO: 6008860 - DNA, 25 bp, Homo sapien
agaagcaacgacgcccaccaatccc

SEQ ID NO: 6008861 - DNA, 25 bp, Homo sapien
aaggatcaactgcgggaagaagtag

SEQ ID NO: 6008862 - DNA, 25 bp, Homo sapien
tataatggaagttaaaggatcaact

SEQ ID NO: 6008863 - DNA, 25 bp, Homo sapien
caactgaaaaagaacccatctttgc

SEQ ID NO: 6008864 - DNA, 25 bp, Homo sapien
gaggccctaggtaaagcgccaggcg

SEQ ID NO: 6008865 - DNA, 25 bp, Homo sapien
taaggaaagacatccattgagtaaa

SEQ ID NO: 6008866 - DNA, 25 bp, Homo sapien
gacgacggcctagatatgaagactt

SEQ ID NO: 6008867 - DNA, 25 bp, Homo sapien
aggctaccattccaaggaagcgtga

SEQ ID NO: 6008868 - DNA, 25 bp, Homo sapien
aaagaacccatctttgcatttgtcg

SEQ ID NO: 6008869 - DNA, 25 bp, Homo sapien
atcttacaaattaagagtggagcaa

SEQ ID NO: 6008870 - DNA, 25 bp, Homo sapien
tgtcgtgatccagttaaattgaaaa

SEQ ID NO: 6008871 - DNA, 25 bp, Homo sapien
aaaaaagaagaagcaacgacgccca

SEQ ID NO: 6008872 - DNA, 25 bp, Homo sapien
aagaatggcagaaaagaacgccgcc

SEQ ID NO: 6008873 - DNA, 25 bp, Homo sapien
tttattgataggtgatgatgtcatg

SEQ ID NO: 6008874 - DNA, 25 bp, Homo sapien
tgaaaagaaacaagtagacaatgac

SEQ ID NO: 6008875 - DNA, 25 bp, Homo sapien
ttgtagaattcagagatcataaaaa

SEQ ID NO: 6008876 - DNA, 25 bp, Homo sapien
agaataatcgggttcaagcgtaaga

SEQ ID NO: 6008877 - DNA, 25 bp, Homo sapien
gctccgcacttcagtaaatttggca

SEQ ID NO: 6008878 - DNA, 25 bp, Homo sapien
gtggatttgcgtttgttactatgaa

SEQ ID NO: 6008879 - DNA, 25 bp, Homo sapien
atgttgaagtgccttctagtaatgt

SEQ ID NO: 6008880 - DNA, 25 bp, Homo sapien
aaaaagcccagccagaaatgaatga

SEQ ID NO: 6008881 - DNA, 25 bp, Homo sapien
catggagttgtcgtgatccagttaa

SEQ ID NO: 6008882 - DNA, 25 bp, Homo sapien
tgctggaagaatggcagaaaagaac

SEQ ID NO: 6008883 - DNA, 25 bp, Homo sapien
aattcagagatcataaaaacgcttt

SEQ ID NO: 6008884 - DNA, 25 bp, Homo sapien
tggctctacctctttattgataggt

SEQ ID NO: 6008885 - DNA, 25 bp, Homo sapien
aagactttgtttgtgaggtctatac

SEQ ID NO: 6008886 - DNA, 25 bp, Homo sapien
aaccaacactgacatggagatcaga

SEQ ID NO: 6008887 - DNA, 25 bp, Homo sapien
cgttagtaagagaggatgctggaag

SEQ ID NO: 6008888 - DNA, 25 bp, Homo sapien
aaaagatgggcgatgatataaagag

SEQ ID NO: 6008889 - DNA, 25 bp, Homo sapien
tttgttaaccaacactgacatggag

SEQ ID NO: 6008890 - DNA, 25 bp, Homo sapien
gacaaaaaaagtggtgttgtcaagc

SEQ ID NO: 6008891 - DNA, 25 bp, Homo sapien
agaagggaacaattgaagcaagcaa

SEQ ID NO: 6008892 - DNA, 25 bp, Homo sapien
aaaagatagacgtaacttatatttg

SEQ ID NO: 6008893 - DNA, 25 bp, Homo sapien
ggtagatatggtaccgtcgtggagg

SEQ ID NO: 6008894 - DNA, 25 bp, Homo sapien
agacaagtagatcaagcttcaaaaa

SEQ ID NO: 6008895 - DNA, 25 bp, Homo sapien
tctacaaaggaaaaatacaagttca

SEQ ID NO: 6008896 - DNA, 25 bp, Homo sapien
cgtaacttatatttgctgaatgaag

SEQ ID NO: 6008897 - DNA, 25 bp, Homo sapien
gcctttgtagccttcaaagaccaat

SEQ ID NO: 6008898 - DNA, 25 bp, Homo sapien
gtcgtaaagagaagaagggaacaat

SEQ ID NO: 6008899 - DNA, 25 bp, Homo sapien
acggacatatcttgagggtagacat

SEQ ID NO: 6008900 - DNA, 25 bp, Homo sapien
atggtaaattgtgtggatttgcgtt

SEQ ID NO: 6008901 - DNA, 25 bp, Homo sapien
ctgaagaatctttggctccgcactt

SEQ ID NO: 6008902 - DNA, 25 bp, Homo sapien
cgccaggcgaaaaagatagacgtaa

SEQ ID NO: 6008903 - DNA, 25 bp, Homo sapien
tcatgcctgagtatgtgtatgaagg

SEQ ID NO: 6008904 - DNA, 25 bp, Homo sapien
gagattatcagatctacaaaggaaa

SEQ ID NO: 6008905 - DNA, 25 bp, Homo sapien
gattgagaactctaacgtcgtaaag

SEQ ID NO: 6008906 - DNA, 25 bp, Homo sapien
aaaacatcagaagtggttgaaaaga

SEQ ID NO: 6008907 - DNA, 25 bp, Homo sapien
catccattgagtaaagaagagatta

SEQ ID NO: 6008908 - DNA, 25 bp, Homo sapien
catttgtcgatgactaggttggcta

SEQ ID NO: 6008909 - DNA, 25 bp, Homo sapien
aggtcgtgttctgtccattactcca

SEQ ID NO: 6008910 - DNA, 25 bp, Homo sapien
ttcctagagcaatgaatgataaagc

SEQ ID NO: 6008911 - DNA, 25 bp, Homo sapien
tgaagactttgtttgtgaggtctat

SEQ ID NO: 6008912 - DNA, 25 bp, Homo sapien
aagagattatcagatctacaaagga

SEQ ID NO: 6008913 - DNA, 25 bp, Homo sapien
taaagcattaaaggcgttagctcgt

SEQ ID NO: 6008914 - DNA, 25 bp, Homo sapien
gaaatcttcctagagcaatgaatga

SEQ ID NO: 6008915 - DNA, 25 bp, Homo sapien
gataacgagtcaggaaatgaagatg

SEQ ID NO: 6008916 - DNA, 25 bp, Homo sapien
acaagtagatcaagcttcaaaaaac

SEQ ID NO: 6008917 - DNA, 25 bp, Homo sapien
aaaagaagaagcaacgacgcccacc

SEQ ID NO: 6008918 - DNA, 25 bp, Homo sapien
gagtcaggaaatgaagatgctgaag

SEQ ID NO: 6008919 - DNA, 25 bp, Homo sapien
ggttttgtagaattcagagatcata

SEQ ID NO: 6008920 - DNA, 25 bp, Homo sapien
ttgagtaaagaagagattatcagat

SEQ ID NO: 6008921 - DNA, 25 bp, Homo sapien
aagaccagataatgaagatactgga

SEQ ID NO: 6008922 - DNA, 25 bp, Homo sapien
gccaaaagaaaggaggccctaggta

SEQ ID NO: 6008923 - DNA, 25 bp, Homo sapien
tagagggtttgaatgatgatgaaaa

SEQ ID NO: 6008924 - DNA, 25 bp, Homo sapien
tatgaagactttgtttgtgaggtct

SEQ ID NO: 6008925 - DNA, 25 bp, Homo sapien
gaagaggaagatagacaagtagatc

SEQ ID NO: 6008926 - DNA, 25 bp, Homo sapien
tgagtcatctgagaaaataacgggc

SEQ ID NO: 6008927 - DNA, 25 bp, Homo sapien
gtagttgttaaggacacgaataaaa

SEQ ID NO: 6008928 - DNA, 25 bp, Homo sapien
atgataacgagtcaggaaatgaaga

SEQ ID NO: 6008929 - DNA, 25 bp, Homo sapien
atagacaagtagatcaagcttcaaa

SEQ ID NO: 6008930 - DNA, 25 bp, Homo sapien
atgccgttacctccgatgaaatttt

SEQ ID NO: 6008931 - DNA, 25 bp, Homo sapien
gaaagacatccattgagtaaagaag

SEQ ID NO: 6008932 - DNA, 25 bp, Homo sapien
gccttctagtaatgtctcaaaacaa

SEQ ID NO: 6008933 - DNA, 25 bp, Homo sapien
gtgtggatttgcgtttgttactatg

SEQ ID NO: 6008934 - DNA, 25 bp, Homo sapien
tatcagaaatatgccatggagttgt

SEQ ID NO: 6008935 - DNA, 25 bp, Homo sapien
ttagtaagagaggatgctggaagaa

SEQ ID NO: 6008936 - DNA, 25 bp, Homo sapien
atcagtaattgtagaattgctttgg

SEQ ID NO: 6008937 - DNA, 25 bp, Homo sapien
gtgaagactccatgctaaaaggtaa

SEQ ID NO: 6008938 - DNA, 25 bp, Homo sapien
atcaagcatgcggtagttgttaagg

SEQ ID NO: 6008939 - DNA, 25 bp, Homo sapien
ttgcgtttgttactatgaagaaaat

SEQ ID NO: 6008940 - DNA, 25 bp, Homo sapien
gaagccctagctaaggccagaaaga

SEQ ID NO: 6008941 - DNA, 25 bp, Homo sapien
ttgctttggaaaacaccaaagactt

SEQ ID NO: 6008942 - DNA, 25 bp, Homo sapien
atgacttaggcaaaggaagacgtct

SEQ ID NO: 6008943 - DNA, 25 bp, Homo sapien
aagtagatcaagcttcaaaaaacaa

SEQ ID NO: 6008944 - DNA, 25 bp, Homo sapien
tcatctgagaaaataacgggccaga

SEQ ID NO: 6008945 - DNA, 25 bp, Homo sapien
gcgtttgttactatgaagaaaatca

SEQ ID NO: 6008946 - DNA, 25 bp, Homo sapien
acgtcccttatgatgccactgaaga

SEQ ID NO: 6008947 - DNA, 25 bp, Homo sapien
taacgtcccttatgatgccactgaa

SEQ ID NO: 6008948 - DNA, 25 bp, Homo sapien
ggcttaaggtggttgaattgtcatg

SEQ ID NO: 6008949 - DNA, 25 bp, Homo sapien
tgctgatggtgaagactccatgcta

SEQ ID NO: 6008950 - DNA, 25 bp, Homo sapien
agaagtggttgaaaagagcacacct

SEQ ID NO: 6008951 - DNA, 25 bp, Homo sapien
tacggcctttgtagccttcaaagac

SEQ ID NO: 6008952 - DNA, 25 bp, Homo sapien
cctctttattgataggtgatgatgt

SEQ ID NO: 6008953 - DNA, 25 bp, Homo sapien
ggttcaagcgtaagagaaagcacgc

SEQ ID NO: 6008954 - DNA, 25 bp, Homo sapien
atgaggacgatgctgatggtgaaga

SEQ ID NO: 6008955 - DNA, 25 bp, Homo sapien
gaaaatgttgaagtgccttctagta

SEQ ID NO: 6008956 - DNA, 25 bp, Homo sapien
tgttaaccaacactgacatggagat

SEQ ID NO: 6008957 - DNA, 25 bp, Homo sapien
ggtctataccccaggatgtcacaga

SEQ ID NO: 6008958 - DNA, 25 bp, Homo sapien
aagtggttgaaaagagcacacctga

SEQ ID NO: 6008959 - DNA, 25 bp, Homo sapien
atgaaggtcgtgttctgtccattac

SEQ ID NO: 6008960 - DNA, 25 bp, Homo sapien
tttgttcgtaacgtcccttatgatg

SEQ ID NO: 6008961 - DNA, 25 bp, Homo sapien
aagatgggcgatgatataaagagaa

SEQ ID NO: 6008962 - DNA, 25 bp, Homo sapien
gaagaagcaacgacgcccaccaatc

SEQ ID NO: 6008963 - DNA, 25 bp, Homo sapien
tttaacggacatatcttgagggtag

SEQ ID NO: 6008964 - DNA, 25 bp, Homo sapien
aacatcagaagtggttgaaaagagc

SEQ ID NO: 6008965 - DNA, 25 bp, Homo sapien
gtaccgtcgtggaggctaccattcc

SEQ ID NO: 6008966 - DNA, 25 bp, Homo sapien
gagcaatgaatgataaagcattaaa

SEQ ID NO: 6008967 - DNA, 25 bp, Homo sapien
ctatcagaaatcttcctagagcaat

SEQ ID NO: 6008968 - DNA, 25 bp, Homo sapien
gccactgaagaatctttggctccgc

SEQ ID NO: 6008969 - DNA, 25 bp, Homo sapien
cctgcggctggctctacctctttat

SEQ ID NO: 6008970 - DNA, 25 bp, Homo sapien
taaaaataaggaaagacatccattg

SEQ ID NO: 6008971 - DNA, 25 bp, Homo sapien
tttagagggtttgaatgatgatgaa

SEQ ID NO: 6008972 - DNA, 25 bp, Homo sapien
caaagacttgaaaattgatggtaga

SEQ ID NO: 6008973 - DNA, 25 bp, Homo sapien
gaagatactggagatgtcggagaat

SEQ ID NO: 6008974 - DNA, 25 bp, Homo sapien
agatcaagcttcaaaaaacaaagaa

SEQ ID NO: 6008975 - DNA, 25 bp, Homo sapien
aacccatctttgcatttgtcgatga

SEQ ID NO: 6008976 - DNA, 25 bp, Homo sapien
gattgaagctcaaaaaaagaaagac

SEQ ID NO: 6008977 - DNA, 25 bp, Homo sapien
tgtcgatgactaggttggctatcag

SEQ ID NO: 6008978 - DNA, 25 bp, Homo sapien
ggcaaaggaagacgtctttgtgttg

SEQ ID NO: 6008979 - DNA, 25 bp, Homo sapien
gtggttgaaaagagcacacctgagt

SEQ ID NO: 6008980 - DNA, 25 bp, Homo sapien
aaggtacggcctttgtagccttcaa

SEQ ID NO: 6008981 - DNA, 25 bp, Homo sapien
taaaagaagagatcgttcaaagaaa

SEQ ID NO: 6008982 - DNA, 25 bp, Homo sapien
attttagagggtttgaatgatgatg

SEQ ID NO: 6008983 - DNA, 25 bp, Homo sapien
aaggcgttagctcgtaaagctgtcg

SEQ ID NO: 6008984 - DNA, 25 bp, Homo sapien
ggccctaggtaaagcgccaggcgaa

SEQ ID NO: 6008985 - DNA, 25 bp, Homo sapien
tttcttttccaattttgctccgatc

SEQ ID NO: 6008986 - DNA, 25 bp, Homo sapien
ggcttcgggttcgttagttttgctg

SEQ ID NO: 6008987 - DNA, 25 bp, Homo sapien
gaagatagacaagtagatcaagctt

SEQ ID NO: 6008988 - DNA, 25 bp, Homo sapien
tttggcagcgttaaatacgcattac

SEQ ID NO: 6008989 - DNA, 25 bp, Homo sapien
aaggtagagttgttgaaggctcaaa

SEQ ID NO: 6008990 - DNA, 25 bp, Homo sapien
aaaaaaacagatgggaagattacaa

SEQ ID NO: 6008991 - DNA, 25 bp, Homo sapien
gaaacaagtagacaatgacttaggc

SEQ ID NO: 6008992 - DNA, 25 bp, Homo sapien
gaagaatctttggctccgcacttca

SEQ ID NO: 6008993 - DNA, 25 bp, Homo sapien
taacttatatttgctgaatgaaggt

SEQ ID NO: 6008994 - DNA, 25 bp, Homo sapien
aagacttgaaaattgatggtagaaa

SEQ ID NO: 6008995 - DNA, 25 bp, Homo sapien
tcagtaaatttggcagcgttaaata

SEQ ID NO: 6008996 - DNA, 25 bp, Homo sapien
gggaagattacaaaaaagcccagcc

SEQ ID NO: 6008997 - DNA, 25 bp, Homo sapien
gtcaggaaatgaagatgctgaagaa

SEQ ID NO: 6008998 - DNA, 25 bp, Homo sapien
gtgaggtctataccccaggatgtca

SEQ ID NO: 6008999 - DNA, 25 bp, Homo sapien
ggaagacgtctttgtgttgaatttg

SEQ ID NO: 6009000 - DNA, 25 bp, Homo sapien
ttgtgaggtctataccccaggatgt

SEQ ID NO: 6009001 - DNA, 25 bp, Homo sapien
atctttggtagatatggtaccgtcg

SEQ ID NO: 6009002 - DNA, 25 bp, Homo sapien
aagacgtctttgtgttgaatttgcg

SEQ ID NO: 6009003 - DNA, 25 bp, Homo sapien
ggtagagttgttgaaggctcaaaaa

SEQ ID NO: 6009004 - DNA, 25 bp, Homo sapien
gttttgctgtagaggatgacacaaa

SEQ ID NO: 6009005 - DNA, 25 bp, Homo sapien
caatgaagatgaggacgatgctgat

SEQ ID NO: 6009006 - DNA, 25 bp, Homo sapien
cgttagctcgtaaagctgtcgtgga

SEQ ID NO: 6009007 - DNA, 25 bp, Homo sapien
ggtgatgatgtcatgcctgagtatg

SEQ ID NO: 6009008 - DNA, 25 bp, Homo sapien
actgaaaaagaacccatctttgcat

SEQ ID NO: 6009009 - DNA, 25 bp, Homo sapien
gtggctgttgattttgctgttcaaa

SEQ ID NO: 6009010 - DNA, 25 bp, Homo sapien
acgtcgtaaagagaagaagggaaca

SEQ ID NO: 6009011 - DNA, 25 bp, Homo sapien
tagagcaatgaatgataaagcatta

SEQ ID NO: 6009012 - DNA, 25 bp, Homo sapien
acggcctagatatgaagactttgtt

SEQ ID NO: 6009013 - DNA, 25 bp, Homo sapien
gagaaaataacgggccagaacaatg

SEQ ID NO: 6009014 - DNA, 25 bp, Homo sapien
tctacctctttattgataggtgatg

SEQ ID NO: 6009015 - DNA, 25 bp, Homo sapien
aagttcatgggtccagatgagattg

SEQ ID NO: 6009016 - DNA, 25 bp, Homo sapien
gcaacgacgcccaccaatcccgatg

SEQ ID NO: 6009017 - DNA, 25 bp, Homo sapien
atttgcgtttgttactatgaagaaa

SEQ ID NO: 6009018 - DNA, 25 bp, Homo sapien
tcaaaaaacaaagaatcgaaacgta

SEQ ID NO: 6009019 - DNA, 25 bp, Homo sapien
tggtaccgtcgtggaggctaccatt

SEQ ID NO: 6009020 - DNA, 25 bp, Homo sapien
aacaatgaagatgaggacgatgctg

SEQ ID NO: 6009021 - DNA, 25 bp, Homo sapien
ttttgctccgatcaagcatgcggta

SEQ ID NO: 6009022 - DNA, 25 bp, Homo sapien
tgagggtagacattgctaaaagaag

SEQ ID NO: 6009023 - DNA, 25 bp, Homo sapien
taaaggcgttagctcgtaaagctgt

SEQ ID NO: 6009024 - DNA, 25 bp, Homo sapien
aaatgacgacggcctagatatgaag

SEQ ID NO: 6009025 - DNA, 25 bp, Homo sapien
aggtggctgttgattttgctgttca

SEQ ID NO: 6009026 - DNA, 25 bp, Homo sapien
gccagaaatgaatgacaaagatgat

SEQ ID NO: 6009027 - DNA, 25 bp, Homo sapien
accaaatttaacggacatatcttga

SEQ ID NO: 6009028 - DNA, 25 bp, Homo sapien
cgtaacgtcccttatgatgccactg

SEQ ID NO: 6009029 - DNA, 25 bp, Homo sapien
tgttatcgataagtctacggggttg

SEQ ID NO: 6009030 - DNA, 25 bp, Homo sapien
gtcccttatgatgccactgaagaat

SEQ ID NO: 6009031 - DNA, 25 bp, Homo sapien
cctagagcaatgaatgataaagcat

SEQ ID NO: 6009032 - DNA, 25 bp, Homo sapien
gctcaaaaatggctgatttgttaac

SEQ ID NO: 6009033 - DNA, 25 bp, Homo sapien
attacctgttatcgataagtctacg

SEQ ID NO: 6009034 - DNA, 25 bp, Homo sapien
tgatgccactgaagaatctttggct

SEQ ID NO: 6009035 - DNA, 25 bp, Homo sapien
gcccaccaatcccgatgacaaaaag

SEQ ID NO: 6009036 - DNA, 25 bp, Homo sapien
tcggagaatccgagaataagaagcc

SEQ ID NO: 6009037 - DNA, 25 bp, Homo sapien
tggagatgtcggagaatccgagaat

SEQ ID NO: 6009038 - DNA, 25 bp, Homo sapien
cggcctttgtagccttcaaagacca

SEQ ID NO: 6009039 - DNA, 25 bp, Homo sapien
cagccagaaatgaatgacaaagatg

SEQ ID NO: 6009040 - DNA, 25 bp, Homo sapien
tggtagaaaggtggctgttgatttt

SEQ ID NO: 6009041 - DNA, 25 bp, Homo sapien
cttaaggtggttgaattgtcatgcc

SEQ ID NO: 6009042 - DNA, 25 bp, Homo sapien
tgtcggagaatccgagaataagaag

SEQ ID NO: 6009043 - DNA, 25 bp, Homo sapien
tcaaaaatggctgatttgttaacca

SEQ ID NO: 6009044 - DNA, 25 bp, Homo sapien
ggccagaacaatgaagatgaggacg

SEQ ID NO: 6009045 - DNA, 25 bp, Homo sapien
caagcaagaaccaagagaacaagac

SEQ ID NO: 6009046 - DNA, 25 bp, Homo sapien
catcagaagtggttgaaaagagcac

SEQ ID NO: 6009047 - DNA, 25 bp, Homo sapien
aacaagtagacaatgacttaggcaa

SEQ ID NO: 6009048 - DNA, 25 bp, Homo sapien
tcgaaacgtaaagcacaaaacaaaa

SEQ ID NO: 6009049 - DNA, 25 bp, Homo sapien
gagttgttgaaggctcaaaaatggc

SEQ ID NO: 6009050 - DNA, 25 bp, Homo sapien
ttacctccgatgaaattttagaggg

SEQ ID NO: 6009051 - DNA, 25 bp, Homo sapien
gatgagattgaagctcaaaaaaaga

SEQ ID NO: 6009052 - DNA, 25 bp, Homo sapien
gaggacgatgctgatggtgaagact

SEQ ID NO: 6009053 - DNA, 25 bp, Homo sapien
cactgacatggagatcagagaaaaa

SEQ ID NO: 6009054 - DNA, 25 bp, Homo sapien
tttgctgtagaggatgacacaaaag

SEQ ID NO: 6009055 - DNA, 25 bp, Homo sapien
gcagctggcagatttcttttccaat

SEQ ID NO: 6009056 - DNA, 25 bp, Homo sapien
tgctgtagaggatgacacaaaagaa

SEQ ID NO: 6009057 - DNA, 25 bp, Homo sapien
aattgatggtagaaaggtggctgtt

SEQ ID NO: 6009058 - DNA, 25 bp, Homo sapien
agcacacctgagtcatctgagaaaa

SEQ ID NO: 6009059 - DNA, 25 bp, Homo sapien
aaagcgccaggcgaaaaagatagac

SEQ ID NO: 6009060 - DNA, 25 bp, Homo sapien
aatttggcagcgttaaatacgcatt

SEQ ID NO: 6009061 - DNA, 25 bp, Homo sapien
agaagagatcgttcaaagaaaacat

SEQ ID NO: 6009062 - DNA, 25 bp, Homo sapien
ttatcgataagtctacggggttggc

SEQ ID NO: 6009063 - DNA, 25 bp, Homo sapien
tataccccaggatgtcacagatgag

SEQ ID NO: 6009064 - DNA, 25 bp, Homo sapien
atcagatctacaaaggaaaaataca

SEQ ID NO: 6009065 - DNA, 25 bp, Homo sapien
ggcagaaaagaacgccgccaaaaga

SEQ ID NO: 6009066 - DNA, 25 bp, Homo sapien
tttggctccgcacttcagtaaattt

SEQ ID NO: 6009067 - DNA, 25 bp, Homo sapien
taattatcagaaatatgccatggag

SEQ ID NO: 6009068 - DNA, 25 bp, Homo sapien
gatgtcacagatgagcagctggcag

SEQ ID NO: 6009069 - DNA, 25 bp, Homo sapien
atgccactgaagaatctttggctcc

SEQ ID NO: 6009070 - DNA, 25 bp, Homo sapien
aaagatctttggtagatatggtacc

SEQ ID NO: 6009071 - DNA, 25 bp, Homo sapien
agactccatgctaaaaggtaaaccg

SEQ ID NO: 6009072 - DNA, 25 bp, Homo sapien
agaggatgctggaagaatggcagaa

SEQ ID NO: 6009073 - DNA, 25 bp, Homo sapien
ggacatatcttgagggtagacattg

SEQ ID NO: 6009074 - DNA, 25 bp, Homo sapien
ttcaaagaccaatatacatataacg

SEQ ID NO: 6009075 - DNA, 25 bp, Homo sapien
aaaacaaaatgacgacggcctagat

SEQ ID NO: 6009076 - DNA, 25 bp, Homo sapien
aaatgttgaagtgccttctagtaat

SEQ ID NO: 6009077 - DNA, 25 bp, Homo sapien
gtccattactccaacgttagtaaga

SEQ ID NO: 6009078 - DNA, 25 bp, Homo sapien
cccatctttgcatttgtcgatgact

SEQ ID NO: 6009079 - DNA, 25 bp, Homo sapien
tcaaaacaaaatgacgacggcctag

SEQ ID NO: 6009080 - DNA, 25 bp, Homo sapien
acaaagatgataacgagtcaggaaa

SEQ ID NO: 6009081 - DNA, 25 bp, Homo sapien
ccgatgaaattttagagggtttgaa

SEQ ID NO: 6009082 - DNA, 25 bp, Homo sapien
gatatgaagactttgtttgtgaggt

SEQ ID NO: 6009083 - DNA, 25 bp, Homo sapien
ggacgatgctgatggtgaagactcc

SEQ ID NO: 6009084 - DNA, 25 bp, Homo sapien
ataaagagaataatcgggttcaagc

SEQ ID NO: 6009085 - DNA, 25 bp, Homo sapien
ccattccaaggaagcgtgatggtaa

SEQ ID NO: 6009086 - DNA, 25 bp, Homo sapien
ggaaatgaagatgctgaagaaaacc

SEQ ID NO: 6009087 - DNA, 25 bp, Homo sapien
gttcaaagaaaacatcagaagtggt

SEQ ID NO: 6009088 - DNA, 25 bp, Homo sapien
aattgaagcaagcaagaaccaagag

SEQ ID NO: 6009089 - DNA, 25 bp, Homo sapien
tccgagaataagaagccaaaaaaag

SEQ ID NO: 6009090 - DNA, 25 bp, Homo sapien
aagtggtgttgtcaagcaagcaaaa

SEQ ID NO: 6009091 - DNA, 25 bp, Homo sapien
atctgagaaaataacgggccagaac

SEQ ID NO: 6009092 - DNA, 25 bp, Homo sapien
tcgtggaggctaccattccaaggaa

SEQ ID NO: 6009093 - DNA, 25 bp, Homo sapien
aacgacgcccaccaatcccgatgac

SEQ ID NO: 6009094 - DNA, 25 bp, Homo sapien
gatagacgtaacttatatttgctga

SEQ ID NO: 6009095 - DNA, 25 bp, Homo sapien
cgttacctccgatgaaattttagag

SEQ ID NO: 6009096 - DNA, 25 bp, Homo sapien
ggttgaaaagagcacacctgagtca

SEQ ID NO: 6009097 - DNA, 25 bp, Homo sapien
gaattgtcatgccgttacctccgat

SEQ ID NO: 6009098 - DNA, 25 bp, Homo sapien
gcgaaaaagatagacgtaacttata

SEQ ID NO: 6009099 - DNA, 25 bp, Homo sapien
acaaaagaagccctagctaaggcca

SEQ ID NO: 6009100 - DNA, 25 bp, Homo sapien
cgctttgatgggcttaaggtggttg

SEQ ID NO: 6009101 - DNA, 25 bp, Homo sapien
gctaaaagaagagatcgttcaaaga

SEQ ID NO: 6009102 - DNA, 25 bp, Homo sapien
gacacgaataaaaggtccaggggct

SEQ ID NO: 6009103 - DNA, 25 bp, Homo sapien
acaagttcatgggtccagatgagat

SEQ ID NO: 6009104 - DNA, 25 bp, Homo sapien
tcagaaatatgccatggagttgtcg

SEQ ID NO: 6009105 - DNA, 25 bp, Homo sapien
gtaatgtctcaaaacaaaatgacga

SEQ ID NO: 6009106 - DNA, 25 bp, Homo sapien
cagagatcataaaaacgctttgatg

SEQ ID NO: 6009107 - DNA, 25 bp, Homo sapien
ggcgttagctcgtaaagctgtcgtg

SEQ ID NO: 6009108 - DNA, 25 bp, Homo sapien
aaaccgaaattaattatcagaaata

SEQ ID NO: 6009109 - DNA, 25 bp, Homo sapien
gaaaagagcacacctgagtcatctg

SEQ ID NO: 6009110 - DNA, 25 bp, Homo sapien
taatgaagatactggagatgtcgga

SEQ ID NO: 6009111 - DNA, 25 bp, Homo sapien
tgaaaaagaacccatctttgcattt

SEQ ID NO: 6009112 - DNA, 25 bp, Homo sapien
aatgacaaagatgataacgagtcag

SEQ ID NO: 6009113 - DNA, 25 bp, Homo sapien
atcaactgcgggaagaagtagaggt

SEQ ID NO: 6009114 - DNA, 25 bp, Homo sapien
tagacaatgacttaggcaaaggaag

SEQ ID NO: 6009115 - DNA, 25 bp, Homo sapien
aaacaaagaatcgaaacgtaaagca

SEQ ID NO: 6009116 - DNA, 25 bp, Homo sapien
gaagatgaggacgatgctgatggtg

SEQ ID NO: 6009117 - DNA, 25 bp, Homo sapien
tgttcgtaacgtcccttatgatgcc

SEQ ID NO: 6009118 - DNA, 25 bp, Homo sapien
gctttggaaaacaccaaagacttga

SEQ ID NO: 6009119 - DNA, 25 bp, Homo sapien
ccccaggatgtcacagatgagcagc

SEQ ID NO: 6009120 - DNA, 25 bp, Homo sapien
tcataaaaacgctttgatgggctta

SEQ ID NO: 6009121 - DNA, 25 bp, Homo sapien
ggcctagatatgaagactttgtttg

SEQ ID NO: 6009122 - DNA, 25 bp, Homo sapien
gtttgttactatgaagaaaatcagt

SEQ ID NO: 6009123 - DNA, 25 bp, Homo sapien
ctccgatgaaattttagagggtttg

SEQ ID NO: 6009124 - DNA, 25 bp, Homo sapien
tgatataaagagaataatcgggttc

SEQ ID NO: 6009125 - DNA, 25 bp, Homo sapien
ctcgtaaagctgtcgtggaatttgc

SEQ ID NO: 6009126 - DNA, 25 bp, Homo sapien
aggatgacacaaaagaagccctagc

SEQ ID NO: 6009127 - DNA, 25 bp, Homo sapien
ttaagagtggagcaactgaaaaaga

SEQ ID NO: 6009128 - DNA, 25 bp, Homo sapien
ttatatttgctgaatgaaggtagag

SEQ ID NO: 6009129 - DNA, 25 bp, Homo sapien
gtgtatgaaggtcgtgttctgtcca

SEQ ID NO: 6009130 - DNA, 25 bp, Homo sapien
aaaatgcgcctgcggctggctctac

SEQ ID NO: 6009131 - DNA, 25 bp, Homo sapien
cgttaaatacgcattacctgttatc

SEQ ID NO: 6009132 - DNA, 25 bp, Homo sapien
aacgggccagaacaatgaagatgag

SEQ ID NO: 6009133 - DNA, 25 bp, Homo sapien
tgaaattttagagggtttgaatgat

SEQ ID NO: 6009134 - DNA, 25 bp, Homo sapien
atgaagatgctgaagaaaaccatga

SEQ ID NO: 6009135 - DNA, 25 bp, Homo sapien
gacatggagatcagagaaaaatctt

SEQ ID NO: 6009136 - DNA, 25 bp, Homo sapien
cttatgatgccactgaagaatcttt

SEQ ID NO: 6009137 - DNA, 25 bp, Homo sapien
atgtgtatgaaggtcgtgttctgtc

SEQ ID NO: 6009138 - DNA, 25 bp, Homo sapien
tttgcatttgtcgatgactaggttg

SEQ ID NO: 6009139 - DNA, 25 bp, Homo sapien
caaaggaaaaatacaagttcatggg

SEQ ID NO: 6009140 - DNA, 25 bp, Homo sapien
atgatgtcatgcctgagtatgtgta

SEQ ID NO: 6009141 - DNA, 25 bp, Homo sapien
gtaaagcgccaggcgaaaaagatag

SEQ ID NO: 6009142 - DNA, 25 bp, Homo sapien
acgacgaagaagatgaaaatgaaga

SEQ ID NO: 6009143 - DNA, 25 bp, Homo sapien
aaaagtggtgttgtcaagcaagcaa

SEQ ID NO: 6009144 - DNA, 25 bp, Homo sapien
aggtaaagcgccaggcgaaaaagat

SEQ ID NO: 6009145 - DNA, 25 bp, Homo sapien
caatgacttaggcaaaggaagacgt

SEQ ID NO: 6009146 - DNA, 25 bp, Homo sapien
atgaagaggaagatagacaagtaga

SEQ ID NO: 6009147 - DNA, 25 bp, Homo sapien
aaggaaaaatacaagttcatgggtc

SEQ ID NO: 6009148 - DNA, 25 bp, Homo sapien
cgcctgcggctggctctacctcttt

SEQ ID NO: 6009149 - DNA, 25 bp, Homo sapien
ccaacactgacatggagatcagaga

SEQ ID NO: 6009150 - DNA, 25 bp, Homo sapien
taaaggtacggcctttgtagccttc

SEQ ID NO: 6009151 - DNA, 25 bp, Homo sapien
aggcgaaaaagatagacgtaactta

SEQ ID NO: 6009152 - DNA, 25 bp, Homo sapien
cacttcagtaaatttggcagcgtta

SEQ ID NO: 6009153 - DNA, 25 bp, Homo sapien
ggctgttgattttgctgttcaaaaa

SEQ ID NO: 6009154 - DNA, 25 bp, Homo sapien
tgttgtcaagcaagcaaaagttata

SEQ ID NO: 6009155 - DNA, 25 bp, Homo sapien
gaactctaacgtcgtaaagagaaga

SEQ ID NO: 6009156 - DNA, 25 bp, Homo sapien
gatggtgaagactccatgctaaaag

SEQ ID NO: 6009157 - DNA, 25 bp, Homo sapien
ggttggctatcagaaatcttcctag

SEQ ID NO: 6009158 - DNA, 25 bp, Homo sapien
agatgctgaagaaaaccatgacgac

SEQ ID NO: 6009159 - DNA, 25 bp, Homo sapien
agcatgcggtagttgttaaggacac

SEQ ID NO: 6009160 - DNA, 25 bp, Homo sapien
agatgataacgagtcaggaaatgaa

SEQ ID NO: 6009161 - DNA, 25 bp, Homo sapien
tggcagcgttaaatacgcattacct

SEQ ID NO: 6009162 - DNA, 25 bp, Homo sapien
ataaaaacgctttgatgggcttaag

SEQ ID NO: 6009163 - DNA, 25 bp, Homo sapien
ctgagaaaataacgggccagaacaa

SEQ ID NO: 6009164 - DNA, 25 bp, Homo sapien
gcgattgagaactctaacgtcgtaa

SEQ ID NO: 6009165 - DNA, 25 bp, Homo sapien
ttgtagaattgctttggaaaacacc

SEQ ID NO: 6009166 - DNA, 25 bp, Homo sapien
ttgtagccttcaaagaccaatatac

SEQ ID NO: 6009167 - DNA, 25 bp, Homo sapien
tagaaaatgttgaagtgccttctag

SEQ ID NO: 6009168 - DNA, 25 bp, Homo sapien
agaacaatgaagatgaggacgatgc

SEQ ID NO: 6009169 - DNA, 25 bp, Homo sapien
actccatgctaaaaggtaaaccgaa

SEQ ID NO: 6009170 - DNA, 25 bp, Homo sapien
aagagtggagcaactgaaaaagaac

SEQ ID NO: 6009171 - DNA, 25 bp, Homo sapien
ataacgggccagaacaatgaagatg

SEQ ID NO: 6009172 - DNA, 25 bp, Homo sapien
tagacgtaacttatatttgctgaat

SEQ ID NO: 6009173 - DNA, 25 bp, Homo sapien
caaatttaacggacatatcttgagg

SEQ ID NO: 6009174 - DNA, 25 bp, Homo sapien
tgcggctggctctacctctttattg

SEQ ID NO: 6009175 - DNA, 25 bp, Homo sapien
aaaggaggccctaggtaaagcgcca

SEQ ID NO: 6009176 - DNA, 25 bp, Homo sapien
ggagcaactgaaaaagaacccatct

SEQ ID NO: 6009177 - DNA, 25 bp, Homo sapien
agcaactgaaaaagaacccatcttt

SEQ ID NO: 6009178 - DNA, 25 bp, Homo sapien
gtggtgttgtcaagcaagcaaaagt

SEQ ID NO: 6009179 - DNA, 25 bp, Homo sapien
gaatgataaagcattaaaggcgtta

SEQ ID NO: 6009180 - DNA, 25 bp, Homo sapien
actgcgggaagaagtagaggttacg

SEQ ID NO: 6009181 - DNA, 25 bp, Homo sapien
aatccgagaataagaagccaaaaaa

SEQ ID NO: 6009182 - DNA, 25 bp, Homo sapien
gctccgatcaagcatgcggtagttg

SEQ ID NO: 6009183 - DNA, 25 bp, Homo sapien
gagatcataaaaacgctttgatggg

SEQ ID NO: 6009184 - DNA, 25 bp, Homo sapien
ttgaattgtcatgccgttacctccg

SEQ ID NO: 6009185 - DNA, 25 bp, Homo sapien
aattgtgtggatttgcgtttgttac

SEQ ID NO: 6009186 - DNA, 25 bp, Homo sapien
aggtaaaccgaaattaattatcaga

SEQ ID NO: 6009187 - DNA, 25 bp, Homo sapien
cctgttatcgataagtctacggggt

SEQ ID NO: 6009188 - DNA, 25 bp, Homo sapien
taagagaaagcacgcaaaaaaatag

SEQ ID NO: 6009189 - DNA, 25 bp, Homo sapien
acaattgaagcaagcaagaaccaag

SEQ ID NO: 6009190 - DNA, 25 bp, Homo sapien
aggaaagacatccattgagtaaaga

SEQ ID NO: 6009191 - DNA, 25 bp, Homo sapien
tacctgttatcgataagtctacggg

SEQ ID NO: 6009192 - DNA, 25 bp, Homo sapien
agatagacaagtagatcaagcttca

SEQ ID NO: 6009193 - DNA, 25 bp, Homo sapien
ttccaattttgctccgatcaagcat

SEQ ID NO: 6009194 - DNA, 25 bp, Homo sapien
gctaccattccaaggaagcgtgatg

SEQ ID NO: 6009195 - DNA, 25 bp, Homo sapien
aatttaacggacatatcttgagggt

SEQ ID NO: 6009196 - DNA, 25 bp, Homo sapien
agcgtaagagaaagcacgcaaaaaa

SEQ ID NO: 6009197 - DNA, 25 bp, Homo sapien
ttgatggtagaaaggtggctgttga

SEQ ID NO: 6009198 - DNA, 25 bp, Homo sapien
tggaaaacaccaaagacttgaaaat

SEQ ID NO: 6009199 - DNA, 25 bp, Homo sapien
tgatggtaaattgtgtggatttgcg

SEQ ID NO: 6009200 - DNA, 25 bp, Homo sapien
ctttggtagatatggtaccgtcgtg

SEQ ID NO: 6009201 - DNA, 25 bp, Homo sapien
gacttgaaaattgatggtagaaagg

SEQ ID NO: 6009202 - DNA, 25 bp, Homo sapien
catataacgagtgtatcaaaaatgc

SEQ ID NO: 6009203 - DNA, 25 bp, Homo sapien
gaagactccatgctaaaaggtaaac

SEQ ID NO: 6009204 - DNA, 25 bp, Homo sapien
tcgttcaaagaaaacatcagaagtg

SEQ ID NO: 6009205 - DNA, 25 bp, Homo sapien
aagttaaaggatcaactgcgggaag

SEQ ID NO: 6009206 - DNA, 25 bp, Homo sapien
agcccagccagaaatgaatgacaaa

SEQ ID NO: 6009207 - DNA, 25 bp, Homo sapien
ctttgtttgtgaggtctatacccca

SEQ ID NO: 6009208 - DNA, 25 bp, Homo sapien
gtaaagaagagattatcagatctac

SEQ ID NO: 6009209 - DNA, 25 bp, Homo sapien
atttgctgaatgaaggtagagttgt

SEQ ID NO: 6009210 - DNA, 25 bp, Homo sapien
gaaggctcaaaaatggctgatttgt

SEQ ID NO: 6009211 - DNA, 25 bp, Homo sapien
tgatgatgtcatgcctgagtatgtg

SEQ ID NO: 6009212 - DNA, 25 bp, Homo sapien
cgataagtctacggggttggctaaa

SEQ ID NO: 6009213 - DNA, 25 bp, Homo sapien
aaattgaaaaagatctttggtagat

SEQ ID NO: 6009214 - DNA, 25 bp, Homo sapien
atgataaagcattaaaggcgttagc

SEQ ID NO: 6009215 - DNA, 25 bp, Homo sapien
aggctcaaaaatggctgatttgtta

SEQ ID NO: 6009216 - DNA, 25 bp, Homo sapien
tctttattgataggtgatgatgtca

SEQ ID NO: 6009217 - DNA, 25 bp, Homo sapien
aaaaaagtggtgttgtcaagcaagc

SEQ ID NO: 6009218 - DNA, 25 bp, Homo sapien
gagtgtatcaaaaatgcgcctgcgg

SEQ ID NO: 6009219 - DNA, 25 bp, Homo sapien
aaatacaagttcatgggtccagatg

SEQ ID NO: 6009220 - DNA, 25 bp, Homo sapien
atccagttaaattgaaaaagatctt

SEQ ID NO: 6009221 - DNA, 25 bp, Homo sapien
aaacaccaaagacttgaaaattgat

SEQ ID NO: 6009222 - DNA, 25 bp, Homo sapien
tagacattgctaaaagaagagatcg

SEQ ID NO: 6009223 - DNA, 25 bp, Homo sapien
taacgagtgtatcaaaaatgcgcct

SEQ ID NO: 6009224 - DNA, 25 bp, Homo sapien
gtagaattgctttggaaaacaccaa

SEQ ID NO: 6009225 - DNA, 25 bp, Homo sapien
tgtcgtggaatttgctacagaagtt

SEQ ID NO: 6009226 - DNA, 25 bp, Homo sapien
aattttgctccgatcaagcatgcgg

SEQ ID NO: 6009227 - DNA, 25 bp, Homo sapien
atgggaagattacaaaaaagcccag

SEQ ID NO: 6009228 - DNA, 25 bp, Homo sapien
aaagagaataatcgggttcaagcgt

SEQ ID NO: 6009229 - DNA, 25 bp, Homo sapien
tccgatcaagcatgcggtagttgtt

SEQ ID NO: 6009230 - DNA, 25 bp, Homo sapien
atactggagatgtcggagaatccga

SEQ ID NO: 6009231 - DNA, 25 bp, Homo sapien
atcgataagtctacggggttggcta

SEQ ID NO: 6009232 - DNA, 25 bp, Homo sapien
agatctttggtagatatggtaccgt

SEQ ID NO: 6009233 - DNA, 25 bp, Homo sapien
tgaaaattgatggtagaaaggtggc

SEQ ID NO: 6009234 - DNA, 25 bp, Homo sapien
tgcggtagttgttaaggacacgaat

SEQ ID NO: 6009235 - DNA, 25 bp, Homo sapien
ctagctaaggccagaaagaccaaat

SEQ ID NO: 6009236 - DNA, 25 bp, Homo sapien
caaattaagagtggagcaactgaaa

SEQ ID NO: 6009237 - DNA, 25 bp, Homo sapien
acgagtgtatcaaaaatgcgcctgc

SEQ ID NO: 6009238 - DNA, 25 bp, Homo sapien
cagaaaagaacgccgccaaaagaaa

SEQ ID NO: 6009239 - DNA, 25 bp, Homo sapien
aagcaacgacgcccaccaatcccga

SEQ ID NO: 6009240 - DNA, 25 bp, Homo sapien
ccaagagaacaagaccagataatga

SEQ ID NO: 6009241 - DNA, 25 bp, Homo sapien
gataggtgatgatgtcatgcctgag

SEQ ID NO: 6009242 - DNA, 25 bp, Homo sapien
cgccgccaaaagaaaggaggcccta

SEQ ID NO: 6009243 - DNA, 25 bp, Homo sapien
tatggtaccgtcgtggaggctacca

SEQ ID NO: 6009244 - DNA, 25 bp, Homo sapien
agatgagcagctggcagatttcttt

SEQ ID NO: 6009245 - DNA, 25 bp, Homo sapien
aaaaagaacccatctttgcatttgt

SEQ ID NO: 6009246 - DNA, 25 bp, Homo sapien
agaagagattatcagatctacaaag

SEQ ID NO: 6009247 - DNA, 25 bp, Homo sapien
agaacccatctttgcatttgtcgat

SEQ ID NO: 6009248 - DNA, 25 bp, Homo sapien
aaatatgccatggagttgtcgtgat

SEQ ID NO: 6009249 - DNA, 25 bp, Homo sapien
gatgaaattttagagggtttgaatg

SEQ ID NO: 6009250 - DNA, 25 bp, Homo sapien
catgacgacgaagaagatgaaaatg

SEQ ID NO: 6009251 - DNA, 25 bp, Homo sapien
tttggaaaacaccaaagacttgaaa

SEQ ID NO: 6009252 - DNA, 25 bp, Homo sapien
gtaaaccgaaattaattatcagaaa

SEQ ID NO: 6009253 - DNA, 25 bp, Homo sapien
tcgtgatccagttaaattgaaaaag

SEQ ID NO: 6009254 - DNA, 25 bp, Homo sapien
gatgggcgatgatataaagagaata

SEQ ID NO: 6009255 - DNA, 25 bp, Homo sapien
acggttttgtagaattcagagatca

SEQ ID NO: 6009256 - DNA, 25 bp, Homo sapien
ctgtagaggatgacacaaaagaagc

SEQ ID NO: 6009257 - DNA, 25 bp, Homo sapien
tgtcacagatgagcagctggcagat

SEQ ID NO: 6009258 - DNA, 25 bp, Homo sapien
tctttgcatttgtcgatgactaggt

SEQ ID NO: 6009259 - DNA, 25 bp, Homo sapien
ttaaatacgcattacctgttatcga

SEQ ID NO: 6009260 - DNA, 25 bp, Homo sapien
ctggaagaatggcagaaaagaacgc

SEQ ID NO: 6009261 - DNA, 25 bp, Homo sapien
ccaccaatcccgatgacaaaaagat

SEQ ID NO: 6009262 - DNA, 25 bp, Homo sapien
aacaaaatgacgacggcctagatat

SEQ ID NO: 6009263 - DNA, 25 bp, Homo sapien
cagatctacaaaggaaaaatacaag

SEQ ID NO: 6009264 - DNA, 25 bp, Homo sapien
ttggctatcagaaatcttcctagag

SEQ ID NO: 6009265 - DNA, 25 bp, Homo sapien
ggaggctaccattccaaggaagcgt

SEQ ID NO: 6009266 - DNA, 25 bp, Homo sapien
aaagagcacacctgagtcatctgag

SEQ ID NO: 6009267 - DNA, 25 bp, Homo sapien
tgtcatgccgttacctccgatgaaa

SEQ ID NO: 6009268 - DNA, 25 bp, Homo sapien
ctaaggccagaaagaccaaatttaa

SEQ ID NO: 6009269 - DNA, 25 bp, Homo sapien
tgaagaaaaccatgacgacgaagaa

SEQ ID NO: 6009270 - DNA, 25 bp, Homo sapien
caagcaaaagttataatggaagtta

SEQ ID NO: 6009271 - DNA, 25 bp, Homo sapien
ccttcaaagaccaatatacatataa

SEQ ID NO: 6009272 - DNA, 25 bp, Homo sapien
aagatagacgtaacttatatttgct

SEQ ID NO: 6009273 - DNA, 25 bp, Homo sapien
ccctagctaaggccagaaagaccaa

SEQ ID NO: 6009274 - DNA, 25 bp, Homo sapien
agcgccaggcgaaaaagatagacgt

SEQ ID NO: 6009275 - DNA, 25 bp, Homo sapien
attccaaggaagcgtgatggtaaat

SEQ ID NO: 6009276 - DNA, 25 bp, Homo sapien
tattgataggtgatgatgtcatgcc

SEQ ID NO: 6009277 - DNA, 25 bp, Homo sapien
ggaagttaaaggatcaactgcggga

SEQ ID NO: 6009278 - DNA, 25 bp, Homo sapien
gcattacctgttatcgataagtcta

SEQ ID NO: 6009279 - DNA, 25 bp, Homo sapien
atacgcattacctgttatcgataag

SEQ ID NO: 6009280 - DNA, 25 bp, Homo sapien
caaaaaaagtggtgttgtcaagcaa

SEQ ID NO: 6009281 - DNA, 25 bp, Homo sapien
gaatttgcgattgagaactctaacg

SEQ ID NO: 6009282 - DNA, 25 bp, Homo sapien
gagggtttgaatgatgatgaaaaga

SEQ ID NO: 6009283 - DNA, 25 bp, Homo sapien
gacgtctttgtgttgaatttgcgat

SEQ ID NO: 6009284 - DNA, 25 bp, Homo sapien
gactttgtttgtgaggtctataccc

SEQ ID NO: 6009285 - DNA, 25 bp, Homo sapien
tctaacgtcgtaaagagaagaaggg

SEQ ID NO: 6009286 - DNA, 25 bp, Homo sapien
ttctgtccattactccaacgttagt

SEQ ID NO: 6009287 - DNA, 25 bp, Homo sapien
aagcattaaaggcgttagctcgtaa

SEQ ID NO: 6009288 - DNA, 25 bp, Homo sapien
acgatgctgatggtgaagactccat

SEQ ID NO: 6009289 - DNA, 25 bp, Homo sapien
ttagctcgtaaagctgtcgtggaat

SEQ ID NO: 6009290 - DNA, 25 bp, Homo sapien
ttcgtaacgtcccttatgatgccac

SEQ ID NO: 6009291 - DNA, 25 bp, Homo sapien
aattgctttggaaaacaccaaagac

SEQ ID NO: 6009292 - DNA, 25 bp, Homo sapien
ctaggtaaagcgccaggcgaaaaag

SEQ ID NO: 6009293 - DNA, 25 bp, Homo sapien
tggagttgtcgtgatccagttaaat

SEQ ID NO: 6009294 - DNA, 25 bp, Homo sapien
gtcgtgttctgtccattactccaac

SEQ ID NO: 6009295 - DNA, 25 bp, Homo sapien
gaagcgtgatggtaaattgtgtgga

SEQ ID NO: 6009296 - DNA, 25 bp, Homo sapien
tcgggttcgttagttttgctgtaga

SEQ ID NO: 6009297 - DNA, 25 bp, Homo sapien
gaacaagaccagataatgaagatac

SEQ ID NO: 6009298 - DNA, 25 bp, Homo sapien
gggaacaattgaagcaagcaagaac

SEQ ID NO: 6009299 - DNA, 25 bp, Homo sapien
gtccagatgagattgaagctcaaaa

SEQ ID NO: 6009300 - DNA, 25 bp, Homo sapien
cgacggcctagatatgaagactttg

SEQ ID NO: 6009301 - DNA, 25 bp, Homo sapien
aaagaccaaatttaacggacatatc

SEQ ID NO: 6009302 - DNA, 25 bp, Homo sapien
gatgactaggttggctatcagaaat

SEQ ID NO: 6009303 - DNA, 25 bp, Homo sapien
aaacagatgggaagattacaaaaaa

SEQ ID NO: 6009304 - DNA, 25 bp, Homo sapien
gaggtctataccccaggatgtcaca

SEQ ID NO: 6009305 - DNA, 25 bp, Homo sapien
cgtctttgtgttgaatttgcgattg

SEQ ID NO: 6009306 - DNA, 25 bp, Homo sapien
gtatgaaggtcgtgttctgtccatt

SEQ ID NO: 6009307 - DNA, 25 bp, Homo sapien
ctgatttgttaaccaacactgacat

SEQ ID NO: 6009308 - DNA, 25 bp, Homo sapien
cgtgttctgtccattactccaacgt

SEQ ID NO: 6009309 - DNA, 25 bp, Homo sapien
caaaaaagcccagccagaaatgaat

SEQ ID NO: 6009310 - DNA, 25 bp, Homo sapien
cttgagggtagacattgctaaaaga

SEQ ID NO: 6009311 - DNA, 25 bp, Homo sapien
aaaaatggctgatttgttaaccaac

SEQ ID NO: 6009312 - DNA, 25 bp, Homo sapien
gataaagcattaaaggcgttagctc

SEQ ID NO: 6009313 - DNA, 25 bp, Homo sapien
taaggtggttgaattgtcatgccgt

SEQ ID NO: 6009314 - DNA, 25 bp, Homo sapien
gagttgtcgtgatccagttaaattg

SEQ ID NO: 6009315 - DNA, 25 bp, Homo sapien
gaacaattgaagcaagcaagaacca

SEQ ID NO: 6009316 - DNA, 25 bp, Homo sapien
agctcgtaaagctgtcgtggaattt

SEQ ID NO: 6009317 - DNA, 25 bp, Homo sapien
gtagccttcaaagaccaatatacat

SEQ ID NO: 6009318 - DNA, 25 bp, Homo sapien
taggcaaaggaagacgtctttgtgt

SEQ ID NO: 6009319 - DNA, 25 bp, Homo sapien
tacctctttattgataggtgatgat

SEQ ID NO: 6009320 - DNA, 25 bp, Homo sapien
agaaaggtggctgttgattttgctg

SEQ ID NO: 6009321 - DNA, 25 bp, Homo sapien
gagaacaagaccagataatgaagat

SEQ ID NO: 6009322 - DNA, 25 bp, Homo sapien
cttctagtaatgtctcaaaacaaaa

SEQ ID NO: 6009323 - DNA, 25 bp, Homo sapien
acgagtcaggaaatgaagatgctga

SEQ ID NO: 6009324 - DNA, 25 bp, Homo sapien
cagataatgaagatactggagatgt

SEQ ID NO: 6009325 - DNA, 25 bp, Homo sapien
tccattgagtaaagaagagattatc

SEQ ID NO: 6009326 - DNA, 25 bp, Homo sapien
gttcatgggtccagatgagattgaa

SEQ ID NO: 6009327 - DNA, 25 bp, Homo sapien
agtaagagaggatgctggaagaatg

SEQ ID NO: 6009328 - DNA, 25 bp, Homo sapien
tgtctcaaaacaaaatgacgacggc

SEQ ID NO: 6009329 - DNA, 25 bp, Homo sapien
caaggaagcgtgatggtaaattgtg

SEQ ID NO: 6009330 - DNA, 25 bp, Homo sapien
gatgacacaaaagaagccctagcta

SEQ ID NO: 6009331 - DNA, 25 bp, Homo sapien
gtggttgaattgtcatgccgttacc

SEQ ID NO: 6009332 - DNA, 25 bp, Homo sapien
agcgtgatggtaaattgtgtggatt

SEQ ID NO: 6009333 - DNA, 25 bp, Homo sapien
tgaaggtagagttgttgaaggctca

SEQ ID NO: 6009334 - DNA, 25 bp, Homo sapien
caaaggaagacgtctttgtgttgaa

SEQ ID NO: 6009335 - DNA, 25 bp, Homo sapien
gatttgttaaccaacactgacatgg

SEQ ID NO: 6009336 - DNA, 25 bp, Homo sapien
taaattgtgtggatttgcgtttgtt

SEQ ID NO: 6009337 - DNA, 25 bp, Homo sapien
gctgaatgaaggtagagttgttgaa

SEQ ID NO: 6009338 - DNA, 25 bp, Homo sapien
agaggaagatagacaagtagatcaa

SEQ ID NO: 6009339 - DNA, 25 bp, Homo sapien
acatctccagtatcttcattatctg

SEQ ID NO: 6009340 - DNA, 25 bp, Homo sapien
gcaaattccacgacagctttacgag

SEQ ID NO: 6009341 - DNA, 25 bp, Homo sapien
tctggcccgttattttctcagatga

SEQ ID NO: 6009342 - DNA, 25 bp, Homo sapien
ttaccatcacgcttccttggaatgg

SEQ ID NO: 6009343 - DNA, 25 bp, Homo sapien
gactcgttatcatctttgtcattca

SEQ ID NO: 6009344 - DNA, 25 bp, Homo sapien
tttaacgctgccaaatttactgaag

SEQ ID NO: 6009345 - DNA, 25 bp, Homo sapien
ttcttcagcatcttcatttcctgac

SEQ ID NO: 6009346 - DNA, 25 bp, Homo sapien
aacaaagtcttcatatctaggccgt

SEQ ID NO: 6009347 - DNA, 25 bp, Homo sapien
aggtagagccagccgcaggcgcatt

SEQ ID NO: 6009348 - DNA, 25 bp, Homo sapien
tatgtccgttaaatttggtctttct

SEQ ID NO: 6009349 - DNA, 25 bp, Homo sapien
ttttgcttgcttgacaacaccactt

SEQ ID NO: 6009350 - DNA, 25 bp, Homo sapien
atctaccaaagatctttttcaattt

SEQ ID NO: 6009351 - DNA, 25 bp, Homo sapien
ggcacttcaacattttctattgttt

SEQ ID NO: 6009352 - DNA, 25 bp, Homo sapien
gcccgttattttctcagatgactca

SEQ ID NO: 6009353 - DNA, 25 bp, Homo sapien
cttcgtcgtcatggttttcttcagc

SEQ ID NO: 6009354 - DNA, 25 bp, Homo sapien
ctagtcatcgacaaatgcaaagatg

SEQ ID NO: 6009355 - DNA, 25 bp, Homo sapien
tcttcattttcatcttcttcgtcgt

SEQ ID NO: 6009356 - DNA, 25 bp, Homo sapien
tctcttactaacgttggagtaatgg

SEQ ID NO: 6009357 - DNA, 25 bp, Homo sapien
gcatggagtcttcaccatcagcatc

SEQ ID NO: 6009358 - DNA, 25 bp, Homo sapien
tctgtagcaaattccacgacagctt

SEQ ID NO: 6009359 - DNA, 25 bp, Homo sapien
ttcattttcatcttcttcgtcgtca

SEQ ID NO: 6009360 - DNA, 25 bp, Homo sapien
agagttctcaatcgcaaattcaaca

SEQ ID NO: 6009361 - DNA, 25 bp, Homo sapien
ttcaccatcagcatcgtcctcatct

SEQ ID NO: 6009362 - DNA, 25 bp, Homo sapien
aggcgcatttttgatacactcgtta

SEQ ID NO: 6009363 - DNA, 25 bp, Homo sapien
cttcattatctggtcttgttctctt

SEQ ID NO: 6009364 - DNA, 25 bp, Homo sapien
ttgatcggagcaaaattggaaaaga

SEQ ID NO: 6009365 - DNA, 25 bp, Homo sapien
tcagcatcttcatttcctgactcgt

SEQ ID NO: 6009366 - DNA, 25 bp, Homo sapien
aacttgtatttttcctttgtagatc

SEQ ID NO: 6009367 - DNA, 25 bp, Homo sapien
agccaaagattcttcagtggcatca

SEQ ID NO: 6009368 - DNA, 25 bp, Homo sapien
tacgtttcgattctttgttttttga

SEQ ID NO: 6009369 - DNA, 25 bp, Homo sapien
ccgcaggcgcatttttgatacactc

SEQ ID NO: 6009370 - DNA, 25 bp, Homo sapien
ttttgtcatcgggattggtgggcgt

SEQ ID NO: 6009371 - DNA, 25 bp, Homo sapien
gtggcatcataagggacgttacgaa

SEQ ID NO: 6009372 - DNA, 25 bp, Homo sapien
ttttctcagatgactcaggtgtgct

SEQ ID NO: 6009373 - DNA, 25 bp, Homo sapien
acggtaccatatctaccaaagatct

SEQ ID NO: 6009374 - DNA, 25 bp, Homo sapien
catcgggattggtgggcgtcgttgc

SEQ ID NO: 6009375 - DNA, 25 bp, Homo sapien
acgcttccttggaatggtagcctcc

SEQ ID NO: 6009376 - DNA, 25 bp, Homo sapien
catgacatcatcacctatcaataaa

SEQ ID NO: 6009377 - DNA, 25 bp, Homo sapien
atcaattttcaagtctttggtgttt

SEQ ID NO: 6009378 - DNA, 25 bp, Homo sapien
tatcgataacaggtaatgcgtattt

SEQ ID NO: 6009379 - DNA, 25 bp, Homo sapien
cttcttattctcggattctccgaca

SEQ ID NO: 6009380 - DNA, 25 bp, Homo sapien
tgcgtatttaacgctgccaaattta

SEQ ID NO: 6009381 - DNA, 25 bp, Homo sapien
atgcaaagatgggttctttttcagt

SEQ ID NO: 6009382 - DNA, 25 bp, Homo sapien
acgtctatctttttcgcctggcgct

SEQ ID NO: 6009383 - DNA, 25 bp, Homo sapien
gtctttctttttttgagcttcaatc

SEQ ID NO: 6009384 - DNA, 25 bp, Homo sapien
tcacgcttccttggaatggtagcct

SEQ ID NO: 6009385 - DNA, 25 bp, Homo sapien
ctcaggcatgacatcatcacctatc

SEQ ID NO: 6009386 - DNA, 25 bp, Homo sapien
atcattcaaaccctctaaaatttca

SEQ ID NO: 6009387 - DNA, 25 bp, Homo sapien
acaactctaccttcattcagcaaat

SEQ ID NO: 6009388 - DNA, 25 bp, Homo sapien
gctaacgcctttaatgctttatcat

SEQ ID NO: 6009389 - DNA, 25 bp, Homo sapien
ttcgcctggcgctttacctagggcc

SEQ ID NO: 6009390 - DNA, 25 bp, Homo sapien
atatcatcgcccatctttttgtcat

SEQ ID NO: 6009391 - DNA, 25 bp, Homo sapien
gacttatcgataacaggtaatgcgt

SEQ ID NO: 6009392 - DNA, 25 bp, Homo sapien
tcttactaacgttggagtaatggac

SEQ ID NO: 6009393 - DNA, 25 bp, Homo sapien
catagtaacaaacgcaaatccacac

SEQ ID NO: 6009394 - DNA, 25 bp, Homo sapien
atgttttctttgaacgatctcttct

SEQ ID NO: 6009395 - DNA, 25 bp, Homo sapien
tgtgtcatcctctacagcaaaacta

SEQ ID NO: 6009396 - DNA, 25 bp, Homo sapien
gcttgacaacaccactttttttgtc

SEQ ID NO: 6009397 - DNA, 25 bp, Homo sapien
ctggatcacgacaactccatggcat

SEQ ID NO: 6009398 - DNA, 25 bp, Homo sapien
ttggtgttttccaaagcaattctac

SEQ ID NO: 6009399 - DNA, 25 bp, Homo sapien
taacctctacttcttcccgcagttg

SEQ ID NO: 6009400 - DNA, 25 bp, Homo sapien
cttggttcttgcttgcttcaattgt

SEQ ID NO: 6009401 - DNA, 25 bp, Homo sapien
tacctagggcctcctttcttttggc

SEQ ID NO: 6009402 - DNA, 25 bp, Homo sapien
caattttcaagtctttggtgttttc

SEQ ID NO: 6009403 - DNA, 25 bp, Homo sapien
ttttttggcttcttattctcggatt

SEQ ID NO: 6009404 - DNA, 25 bp, Homo sapien
tcacctatcaataaagaggtagagc

SEQ ID NO: 6009405 - DNA, 25 bp, Homo sapien
gtcgttgcttcttctttttttggct

SEQ ID NO: 6009406 - DNA, 25 bp, Homo sapien
tgtctacttgtttcttttcatcatc

SEQ ID NO: 6009407 - DNA, 25 bp, Homo sapien
cctggcgctttacctagggcctcct

SEQ ID NO: 6009408 - DNA, 25 bp, Homo sapien
gattctttgttttttgaagcttgat

SEQ ID NO: 6009409 - DNA, 25 bp, Homo sapien
agacattactagaaggcacttcaac

SEQ ID NO: 6009410 - DNA, 25 bp, Homo sapien
taacaaatcagccatttttgagcct

SEQ ID NO: 6009411 - DNA, 25 bp, Homo sapien
tgtagcaaattccacgacagcttta

SEQ ID NO: 6009412 - DNA, 25 bp, Homo sapien
gcatcgtcctcatcttcattgttct

SEQ ID NO: 6009413 - DNA, 25 bp, Homo sapien
tacgaacaaaaacagaaaaatcttc

SEQ ID NO: 6009414 - DNA, 25 bp, Homo sapien
tctaccatcaattttcaagtctttg

SEQ ID NO: 6009415 - DNA, 25 bp, Homo sapien
tgggcgtcgttgcttcttctttttt

SEQ ID NO: 6009416 - DNA, 25 bp, Homo sapien
ttcattgttctggcccgttattttc

SEQ ID NO: 6009417 - DNA, 25 bp, Homo sapien
accttcattcagcaaatataagtta

SEQ ID NO: 6009418 - DNA, 25 bp, Homo sapien
acttccattataacttttgcttgct

SEQ ID NO: 6009419 - DNA, 25 bp, Homo sapien
tctggacccatgaacttgtattttt

SEQ ID NO: 6009420 - DNA, 25 bp, Homo sapien
tctttttttgagcttcaatctcatc

SEQ ID NO: 6009421 - DNA, 25 bp, Homo sapien
acatcatcacctatcaataaagagg

SEQ ID NO: 6009422 - DNA, 25 bp, Homo sapien
ttctttttttggcttcttattctcg

SEQ ID NO: 6009423 - DNA, 25 bp, Homo sapien
attataacttttgcttgcttgacaa

SEQ ID NO: 6009424 - DNA, 25 bp, Homo sapien
atgtctaccctcaagatatgtccgt

SEQ ID NO: 6009425 - DNA, 25 bp, Homo sapien
ctttggtgttttccaaagcaattct

SEQ ID NO: 6009426 - DNA, 25 bp, Homo sapien
aggaagatttctgatagccaaccta

SEQ ID NO: 6009427 - DNA, 25 bp, Homo sapien
attcttcagtggcatcataagggac

SEQ ID NO: 6009428 - DNA, 25 bp, Homo sapien
cctggggtatagacctcacaaacaa

SEQ ID NO: 6009429 - DNA, 25 bp, Homo sapien
ttgtcatcgggattggtgggcgtcg

SEQ ID NO: 6009430 - DNA, 25 bp, Homo sapien
atcagcatcgtcctcatcttcattg

SEQ ID NO: 6009431 - DNA, 25 bp, Homo sapien
aagatttttctctgatctccatgtc

SEQ ID NO: 6009432 - DNA, 25 bp, Homo sapien
caatcgcaaattcaacacaaagacg

SEQ ID NO: 6009433 - DNA, 25 bp, Homo sapien
tataagttacgtctatctttttcgc

SEQ ID NO: 6009434 - DNA, 25 bp, Homo sapien
tcgggattggtgggcgtcgttgctt

SEQ ID NO: 6009435 - DNA, 25 bp, Homo sapien
tggcgctttacctagggcctccttt

SEQ ID NO: 6009436 - DNA, 25 bp, Homo sapien
gcttcaatctcatctggacccatga

SEQ ID NO: 6009437 - DNA, 25 bp, Homo sapien
ttcaacacaaagacgtcttcctttg

SEQ ID NO: 6009438 - DNA, 25 bp, Homo sapien
tggaccttttattcgtgtccttaac

SEQ ID NO: 6009439 - DNA, 25 bp, Homo sapien
cattgttctggcccgttattttctc

SEQ ID NO: 6009440 - DNA, 25 bp, Homo sapien
caatttaccatcacgcttccttgga

SEQ ID NO: 6009441 - DNA, 25 bp, Homo sapien
catacacatactcaggcatgacatc

SEQ ID NO: 6009442 - DNA, 25 bp, Homo sapien
tttagccaaccccgtagacttatcg

SEQ ID NO: 6009443 - DNA, 25 bp, Homo sapien
gcttccttggaatggtagcctccac

SEQ ID NO: 6009444 - DNA, 25 bp, Homo sapien
aaagacgtcttcctttgcctaagtc

SEQ ID NO: 6009445 - DNA, 25 bp, Homo sapien
ttccttggaatggtagcctccacga

SEQ ID NO: 6009446 - DNA, 25 bp, Homo sapien
atgctttatcattcattgctctagg

SEQ ID NO: 6009447 - DNA, 25 bp, Homo sapien
ccttcaacaactctaccttcattca

SEQ ID NO: 6009448 - DNA, 25 bp, Homo sapien
gcatttttgatacactcgttatatg

SEQ ID NO: 6009449 - DNA, 25 bp, Homo sapien
attatctggtcttgttctcttggtt

SEQ ID NO: 6009450 - DNA, 25 bp, Homo sapien
aagtctttggtgttttccaaagcaa

SEQ ID NO: 6009451 - DNA, 25 bp, Homo sapien
tttcttttggcggcgttcttttctg

SEQ ID NO: 6009452 - DNA, 25 bp, Homo sapien
ggtgttttccaaagcaattctacaa

SEQ ID NO: 6009453 - DNA, 25 bp, Homo sapien
caatggatgtctttccttattttta

SEQ ID NO: 6009454 - DNA, 25 bp, Homo sapien
cccttcttctctttacgacgttaga

SEQ ID NO: 6009455 - DNA, 25 bp, Homo sapien
gtcgtcatggttttcttcagcatct

SEQ ID NO: 6009456 - DNA, 25 bp, Homo sapien
atggagtcttcaccatcagcatcgt

SEQ ID NO: 6009457 - DNA, 25 bp, Homo sapien
caacaactctaccttcattcagcaa

SEQ ID NO: 6009458 - DNA, 25 bp, Homo sapien
ctttacgagctaacgcctttaatgc

SEQ ID NO: 6009459 - DNA, 25 bp, Homo sapien
tcttcatttcctgactcgttatcat

SEQ ID NO: 6009460 - DNA, 25 bp, Homo sapien
ttgatacactcgttatatgtatatt

SEQ ID NO: 6009461 - DNA, 25 bp, Homo sapien
tctgataattaatttcggtttacct

SEQ ID NO: 6009462 - DNA, 25 bp, Homo sapien
cttctgatgttttctttgaacgatc

SEQ ID NO: 6009463 - DNA, 25 bp, Homo sapien
gctgctcatctgtgacatcctgggg

SEQ ID NO: 6009464 - DNA, 25 bp, Homo sapien
cgtatttaacgctgccaaatttact

SEQ ID NO: 6009465 - DNA, 25 bp, Homo sapien
tctacttgtctatcttcctcttcat

SEQ ID NO: 6009466 - DNA, 25 bp, Homo sapien
aagcttgatctacttgtctatcttc

SEQ ID NO: 6009467 - DNA, 25 bp, Homo sapien
ctgccagctgctcatctgtgacatc

SEQ ID NO: 6009468 - DNA, 25 bp, Homo sapien
cagccatttttgagccttcaacaac

SEQ ID NO: 6009469 - DNA, 25 bp, Homo sapien
caattctacaattactgattttctt

SEQ ID NO: 6009470 - DNA, 25 bp, Homo sapien
tttttcagttgctccactcttaatt

SEQ ID NO: 6009471 - DNA, 25 bp, Homo sapien
gcttgatctacttgtctatcttcct

SEQ ID NO: 6009472 - DNA, 25 bp, Homo sapien
tatttaacgctgccaaatttactga

SEQ ID NO: 6009473 - DNA, 25 bp, Homo sapien
gagtaatggacagaacacgaccttc

SEQ ID NO: 6009474 - DNA, 25 bp, Homo sapien
cattcaaaccctctaaaatttcatc

SEQ ID NO: 6009475 - DNA, 25 bp, Homo sapien
gaaaagaaatctgccagctgctcat

SEQ ID NO: 6009476 - DNA, 25 bp, Homo sapien
gtctttgaaggctacaaaggccgta

SEQ ID NO: 6009477 - DNA, 25 bp, Homo sapien
ttcttccagcatcctctcttactaa

SEQ ID NO: 6009478 - DNA, 25 bp, Homo sapien
gttattttctcagatgactcaggtg

SEQ ID NO: 6009479 - DNA, 25 bp, Homo sapien
ttgttctggcccgttattttctcag

SEQ ID NO: 6009480 - DNA, 25 bp, Homo sapien
cgacaaatgcaaagatgggttcttt

SEQ ID NO: 6009481 - DNA, 25 bp, Homo sapien
tctccagtatcttcattatctggtc

SEQ ID NO: 6009482 - DNA, 25 bp, Homo sapien
taatgctttatcattcattgctcta

SEQ ID NO: 6009483 - DNA, 25 bp, Homo sapien
aactccatggcatatttctgataat

SEQ ID NO: 6009484 - DNA, 25 bp, Homo sapien
atctcatctggacccatgaacttgt

SEQ ID NO: 6009485 - DNA, 25 bp, Homo sapien
cagcatcctctcttactaacgttgg

SEQ ID NO: 6009486 - DNA, 25 bp, Homo sapien
tcttattctcggattctccgacatc

SEQ ID NO: 6009487 - DNA, 25 bp, Homo sapien
ctcaatggatgtctttccttatttt

SEQ ID NO: 6009488 - DNA, 25 bp, Homo sapien
tcaacagccacctttctaccatcaa

SEQ ID NO: 6009489 - DNA, 25 bp, Homo sapien
tctggtcttgttctcttggttcttg

SEQ ID NO: 6009490 - DNA, 25 bp, Homo sapien
cagcatcgtcctcatcttcattgtt

SEQ ID NO: 6009491 - DNA, 25 bp, Homo sapien
ctttgaaggctacaaaggccgtacc

SEQ ID NO: 6009492 - DNA, 25 bp, Homo sapien
ctcgttatcatctttgtcattcatt

SEQ ID NO: 6009493 - DNA, 25 bp, Homo sapien
catcacctatcaataaagaggtaga

SEQ ID NO: 6009494 - DNA, 25 bp, Homo sapien
ctatttttttgcgtgctttctctta

SEQ ID NO: 6009495 - DNA, 25 bp, Homo sapien
ttacgagctaacgcctttaatgctt

SEQ ID NO: 6009496 - DNA, 25 bp, Homo sapien
attttcttcatagtaacaaacgcaa

SEQ ID NO: 6009497 - DNA, 25 bp, Homo sapien
gacgttagagttctcaatcgcaaat

SEQ ID NO: 6009498 - DNA, 25 bp, Homo sapien
ctctaccttcattcagcaaatataa

SEQ ID NO: 6009499 - DNA, 25 bp, Homo sapien
acttttgcttgcttgacaacaccac

SEQ ID NO: 6009500 - DNA, 25 bp, Homo sapien
aattcaacacaaagacgtcttcctt

SEQ ID NO: 6009501 - DNA, 25 bp, Homo sapien
ctccatgtcagtgttggttaacaaa

SEQ ID NO: 6009502 - DNA, 25 bp, Homo sapien
ctttttgtcatcgggattggtgggc

SEQ ID NO: 6009503 - DNA, 25 bp, Homo sapien
caacctagtcatcgacaaatgcaaa

SEQ ID NO: 6009504 - DNA, 25 bp, Homo sapien
tctttgtcattcatttctggctggg

SEQ ID NO: 6009505 - DNA, 25 bp, Homo sapien
tccgttaaatttggtctttctggcc

SEQ ID NO: 6009506 - DNA, 25 bp, Homo sapien
aacagccacctttctaccatcaatt

SEQ ID NO: 6009507 - DNA, 25 bp, Homo sapien
aatttcatcggaggtaacggcatga

SEQ ID NO: 6009508 - DNA, 25 bp, Homo sapien
ttacgtctatctttttcgcctggcg

SEQ ID NO: 6009509 - DNA, 25 bp, Homo sapien
ctctacttcttcccgcagttgatcc

SEQ ID NO: 6009510 - DNA, 25 bp, Homo sapien
aaggcacttcaacattttctattgt

SEQ ID NO: 6009511 - DNA, 25 bp, Homo sapien
ttgcttgcttcaattgttcccttct

SEQ ID NO: 6009512 - DNA, 25 bp, Homo sapien
cccgtagacttatcgataacaggta

SEQ ID NO: 6009513 - DNA, 25 bp, Homo sapien
tttaatgctttatcattcattgctc

SEQ ID NO: 6009514 - DNA, 25 bp, Homo sapien
gccgtcgtcattttgttttgagaca

SEQ ID NO: 6009515 - DNA, 25 bp, Homo sapien
ttactaacgttggagtaatggacag

SEQ ID NO: 6009516 - DNA, 25 bp, Homo sapien
cgtagacttatcgataacaggtaat

SEQ ID NO: 6009517 - DNA, 25 bp, Homo sapien
tttatgatctctgaattctacaaaa

SEQ ID NO: 6009518 - DNA, 25 bp, Homo sapien
agccttcaacaactctaccttcatt

SEQ ID NO: 6009519 - DNA, 25 bp, Homo sapien
tcaaagcgtttttatgatctctgaa

SEQ ID NO: 6009520 - DNA, 25 bp, Homo sapien
tggttcttgcttgcttcaattgttc

SEQ ID NO: 6009521 - DNA, 25 bp, Homo sapien
cacaaacaaagtcttcatatctagg

SEQ ID NO: 6009522 - DNA, 25 bp, Homo sapien
attttcaagtctttggtgttttcca

SEQ ID NO: 6009523 - DNA, 25 bp, Homo sapien
gttggagtaatggacagaacacgac

SEQ ID NO: 6009524 - DNA, 25 bp, Homo sapien
cattttcatcttcttcgtcgtcatg

SEQ ID NO: 6009525 - DNA, 25 bp, Homo sapien
ttctgatagccaacctagtcatcga

SEQ ID NO: 6009526 - DNA, 25 bp, Homo sapien
attctcggattctccgacatctcca

SEQ ID NO: 6009527 - DNA, 25 bp, Homo sapien
cgtcatggttttcttcagcatcttc

SEQ ID NO: 6009528 - DNA, 25 bp, Homo sapien
ttttcaaccacttctgatgttttct

SEQ ID NO: 6009529 - DNA, 25 bp, Homo sapien
ttaacaactaccgcatgcttgatcg

SEQ ID NO: 6009530 - DNA, 25 bp, Homo sapien
accatcacgcttccttggaatggta

SEQ ID NO: 6009531 - DNA, 25 bp, Homo sapien
ctttgcctaagtcattgtctacttg

SEQ ID NO: 6009532 - DNA, 25 bp, Homo sapien
acaactccatggcatatttctgata

SEQ ID NO: 6009533 - DNA, 25 bp, Homo sapien
tgtgacatcctggggtatagacctc

SEQ ID NO: 6009534 - DNA, 25 bp, Homo sapien
agcccctggaccttttattcgtgtc

SEQ ID NO: 6009535 - DNA, 25 bp, Homo sapien
aggtgtgctcttttcaaccacttct

SEQ ID NO: 6009536 - DNA, 25 bp, Homo sapien
ttatatgtatattggtctttgaagg

SEQ ID NO: 6009537 - DNA, 25 bp, Homo sapien
ctgccattcttccagcatcctctct

SEQ ID NO: 6009538 - DNA, 25 bp, Homo sapien
cagcaaaactaacgaacccgaagcc

SEQ ID NO: 6009539 - DNA, 25 bp, Homo sapien
cagccacctttctaccatcaatttt

SEQ ID NO: 6009540 - DNA, 25 bp, Homo sapien
attcatttctggctgggcttttttg

SEQ ID NO: 6009541 - DNA, 25 bp, Homo sapien
tcaggtgtgctcttttcaaccactt

SEQ ID NO: 6009542 - DNA, 25 bp, Homo sapien
acaaagacgtcttcctttgcctaag

SEQ ID NO: 6009543 - DNA, 25 bp, Homo sapien
ctaaaatttcatcggaggtaacggc

SEQ ID NO: 6009544 - DNA, 25 bp, Homo sapien
tcagcaaatataagttacgtctatc

SEQ ID NO: 6009545 - DNA, 25 bp, Homo sapien
cgtaacctctacttcttcccgcagt

SEQ ID NO: 6009546 - DNA, 25 bp, Homo sapien
ttcccatctgtttttttgaacagca

SEQ ID NO: 6009547 - DNA, 25 bp, Homo sapien
agaaatctgccagctgctcatctgt

SEQ ID NO: 6009548 - DNA, 25 bp, Homo sapien
tatttctgataattaatttcggttt

SEQ ID NO: 6009549 - DNA, 25 bp, Homo sapien
tttttgagccttcaacaactctacc

SEQ ID NO: 6009550 - DNA, 25 bp, Homo sapien
tcttctctttacgacgttagagttc

SEQ ID NO: 6009551 - DNA, 25 bp, Homo sapien
ttgatcctttaacttccattataac

SEQ ID NO: 6009552 - DNA, 25 bp, Homo sapien
ctttgttttttgaagcttgatctac

SEQ ID NO: 6009553 - DNA, 25 bp, Homo sapien
atatctaccaaagatctttttcaat

SEQ ID NO: 6009554 - DNA, 25 bp, Homo sapien
aacgcaaatccacacaatttaccat

SEQ ID NO: 6009555 - DNA, 25 bp, Homo sapien
ttaacttctgtagcaaattccacga

SEQ ID NO: 6009556 - DNA, 25 bp, Homo sapien
attcattgctctaggaagatttctg

SEQ ID NO: 6009557 - DNA, 25 bp, Homo sapien
tacagcaaaactaacgaacccgaag

SEQ ID NO: 6009558 - DNA, 25 bp, Homo sapien
tcttttagcaatgtctaccctcaag

SEQ ID NO: 6009559 - DNA, 25 bp, Homo sapien
ttttcatcttcttcgtcgtcatggt

SEQ ID NO: 6009560 - DNA, 25 bp, Homo sapien
gtatattggtctttgaaggctacaa

SEQ ID NO: 6009561 - DNA, 25 bp, Homo sapien
ttttgttttgagacattactagaag

SEQ ID NO: 6009562 - DNA, 25 bp, Homo sapien
gaagcccctggaccttttattcgtg

SEQ ID NO: 6009563 - DNA, 25 bp, Homo sapien
tcctttgcctaagtcattgtctact

SEQ ID NO: 6009564 - DNA, 25 bp, Homo sapien
ccatgtcagtgttggttaacaaatc

SEQ ID NO: 6009565 - DNA, 25 bp, Homo sapien
atctcttctttactcaatggatgtc

SEQ ID NO: 6009566 - DNA, 25 bp, Homo sapien
aaagaggtagagccagccgcaggcg

SEQ ID NO: 6009567 - DNA, 25 bp, Homo sapien
tcatcggaggtaacggcatgacaat

SEQ ID NO: 6009568 - DNA, 25 bp, Homo sapien
ttgaacccgattattctctttatat

SEQ ID NO: 6009569 - DNA, 25 bp, Homo sapien
atatgtatattggtctttgaaggct

SEQ ID NO: 6009570 - DNA, 25 bp, Homo sapien
tcattatctggtcttgttctcttgg

SEQ ID NO: 6009571 - DNA, 25 bp, Homo sapien
ctcttctttactcaatggatgtctt

SEQ ID NO: 6009572 - DNA, 25 bp, Homo sapien
ttgttttgtgctttacgtttcgatt

SEQ ID NO: 6009573 - DNA, 25 bp, Homo sapien
tctacagcaaaactaacgaacccga

SEQ ID NO: 6009574 - DNA, 25 bp, Homo sapien
ttgttttttgaagcttgatctactt

SEQ ID NO: 6009575 - DNA, 25 bp, Homo sapien
cgtcgtcattttgttttgagacatt

SEQ ID NO: 6009576 - DNA, 25 bp, Homo sapien
atttggtctttctggccttagctag

SEQ ID NO: 6009577 - DNA, 25 bp, Homo sapien
caaacaaagtcttcatatctaggcc

SEQ ID NO: 6009578 - DNA, 25 bp, Homo sapien
tcttcagtggcatcataagggacgt

SEQ ID NO: 6009579 - DNA, 25 bp, Homo sapien
tttttctctgatctccatgtcagtg

SEQ ID NO: 6009580 - DNA, 25 bp, Homo sapien
catcttcattgttctggcccgttat

SEQ ID NO: 6009581 - DNA, 25 bp, Homo sapien
tccacgacggtaccatatctaccaa

SEQ ID NO: 6009582 - DNA, 25 bp, Homo sapien
cctggaccttttattcgtgtcctta

SEQ ID NO: 6009583 - DNA, 25 bp, Homo sapien
ccattataacttttgcttgcttgac

SEQ ID NO: 6009584 - DNA, 25 bp, Homo sapien
acacgaccttcatacacatactcag

SEQ ID NO: 6009585 - DNA, 25 bp, Homo sapien
tacacatactcaggcatgacatcat

SEQ ID NO: 6009586 - DNA, 25 bp, Homo sapien
gttggttaacaaatcagccattttt

SEQ ID NO: 6009587 - DNA, 25 bp, Homo sapien
atcgcaaattcaacacaaagacgtc

SEQ ID NO: 6009588 - DNA, 25 bp, Homo sapien
ttatcatctttgtcattcatttctg

SEQ ID NO: 6009589 - DNA, 25 bp, Homo sapien
attcgtgtccttaacaactaccgca

SEQ ID NO: 6009590 - DNA, 25 bp, Homo sapien
gtgttggttaacaaatcagccattt

SEQ ID NO: 6009591 - DNA, 25 bp, Homo sapien
atgcttgatcggagcaaaattggaa

SEQ ID NO: 6009592 - DNA, 25 bp, Homo sapien
cccatctgtttttttgaacagcaaa

SEQ ID NO: 6009593 - DNA, 25 bp, Homo sapien
ttttgatacactcgttatatgtata

SEQ ID NO: 6009594 - DNA, 25 bp, Homo sapien
cttcccgcagttgatcctttaactt

SEQ ID NO: 6009595 - DNA, 25 bp, Homo sapien
atctttttgtcatcgggattggtgg

SEQ ID NO: 6009596 - DNA, 25 bp, Homo sapien
caaaccctctaaaatttcatcggag

SEQ ID NO: 6009597 - DNA, 25 bp, Homo sapien
gaacccgattattctctttatatca

SEQ ID NO: 6009598 - DNA, 25 bp, Homo sapien
atctttttcaatttaactggatcac

SEQ ID NO: 6009599 - DNA, 25 bp, Homo sapien
gccttagctagggcttcttttgtgt

SEQ ID NO: 6009600 - DNA, 25 bp, Homo sapien
agcaattctacaattactgattttc

SEQ ID NO: 6009601 - DNA, 25 bp, Homo sapien
gttcttgcttgcttcaattgttccc

SEQ ID NO: 6009602 - DNA, 25 bp, Homo sapien
ctttatatcatcgcccatctttttg

SEQ ID NO: 6009603 - DNA, 25 bp, Homo sapien
tcaagtctttggtgttttccaaagc

SEQ ID NO: 6009604 - DNA, 25 bp, Homo sapien
atcatcacctatcaataaagaggta

SEQ ID NO: 6009605 - DNA, 25 bp, Homo sapien
gcatgcttgatcggagcaaaattgg

SEQ ID NO: 6009606 - DNA, 25 bp, Homo sapien
acacaaagacgtcttcctttgccta

SEQ ID NO: 6009607 - DNA, 25 bp, Homo sapien
tttctaccatcaattttcaagtctt

SEQ ID NO: 6009608 - DNA, 25 bp, Homo sapien
gggcttcttttgtgtcatcctctac

SEQ ID NO: 6009609 - DNA, 25 bp, Homo sapien
attggaaaagaaatctgccagctgc

SEQ ID NO: 6009610 - DNA, 25 bp, Homo sapien
accccgtagacttatcgataacagg

SEQ ID NO: 6009611 - DNA, 25 bp, Homo sapien
catttcctgactcgttatcatcttt

SEQ ID NO: 6009612 - DNA, 25 bp, Homo sapien
tacactcgttatatgtatattggtc

SEQ ID NO: 6009613 - DNA, 25 bp, Homo sapien
accgtaacctctacttcttcccgca

SEQ ID NO: 6009614 - DNA, 25 bp, Homo sapien
aacaaacgcaaatccacacaattta

SEQ ID NO: 6009615 - DNA, 25 bp, Homo sapien
tagacttatcgataacaggtaatgc

SEQ ID NO: 6009616 - DNA, 25 bp, Homo sapien
ttgatctacttgtctatcttcctct

SEQ ID NO: 6009617 - DNA, 25 bp, Homo sapien
atcatcgcccatctttttgtcatcg

SEQ ID NO: 6009618 - DNA, 25 bp, Homo sapien
tcttttcatcatcattcaaaccctc

SEQ ID NO: 6009619 - DNA, 25 bp, Homo sapien
tttgtcattcatttctggctgggct

SEQ ID NO: 6009620 - DNA, 25 bp, Homo sapien
cagatgactcaggtgtgctcttttc

SEQ ID NO: 6009621 - DNA, 25 bp, Homo sapien
gtcttcctttgcctaagtcattgtc

SEQ ID NO: 6009622 - DNA, 25 bp, Homo sapien
tctcttacgcttgaacccgattatt

SEQ ID NO: 6009623 - DNA, 25 bp, Homo sapien
atattggtctttgaaggctacaaag

SEQ ID NO: 6009624 - DNA, 25 bp, Homo sapien
tcatttctggctgggcttttttgta

SEQ ID NO: 6009625 - DNA, 25 bp, Homo sapien
gtcattgtctacttgtttcttttca

SEQ ID NO: 6009626 - DNA, 25 bp, Homo sapien
ctccatggcatatttctgataatta

SEQ ID NO: 6009627 - DNA, 25 bp, Homo sapien
agacgtcttcctttgcctaagtcat

SEQ ID NO: 6009628 - DNA, 25 bp, Homo sapien
ttacgacgttagagttctcaatcgc

SEQ ID NO: 6009629 - DNA, 25 bp, Homo sapien
tcgcccatctttttgtcatcgggat

SEQ ID NO: 6009630 - DNA, 25 bp, Homo sapien
atcgacaaatgcaaagatgggttct

SEQ ID NO: 6009631 - DNA, 25 bp, Homo sapien
atttactgaagtgcggagccaaaga

SEQ ID NO: 6009632 - DNA, 25 bp, Homo sapien
cacgacagctttacgagctaacgcc

SEQ ID NO: 6009633 - DNA, 25 bp, Homo sapien
tattctctttatatcatcgcccatc

SEQ ID NO: 6009634 - DNA, 25 bp, Homo sapien
ttttttgtaatcttcccatctgttt

SEQ ID NO: 6009635 - DNA, 25 bp, Homo sapien
aaaatttcatcggaggtaacggcat

SEQ ID NO: 6009636 - DNA, 25 bp, Homo sapien
accacttctgatgttttctttgaac

SEQ ID NO: 6009637 - DNA, 25 bp, Homo sapien
tctttgaacgatctcttcttttagc

SEQ ID NO: 6009638 - DNA, 25 bp, Homo sapien
tgtttttttgaacagcaaaatcaac

SEQ ID NO: 6009639 - DNA, 25 bp, Homo sapien
cgcctggcgctttacctagggcctc

SEQ ID NO: 6009640 - DNA, 25 bp, Homo sapien
ttctgccattcttccagcatcctct

SEQ ID NO: 6009641 - DNA, 25 bp, Homo sapien
ttccattataacttttgcttgcttg

SEQ ID NO: 6009642 - DNA, 25 bp, Homo sapien
gtaagatttttctctgatctccatg

SEQ ID NO: 6009643 - DNA, 25 bp, Homo sapien
ttcagtggcatcataagggacgtta

SEQ ID NO: 6009644 - DNA, 25 bp, Homo sapien
tggacccatgaacttgtatttttcc

SEQ ID NO: 6009645 - DNA, 25 bp, Homo sapien
caaatccacacaatttaccatcacg

SEQ ID NO: 6009646 - DNA, 25 bp, Homo sapien
caccatcagcatcgtcctcatcttc

SEQ ID NO: 6009647 - DNA, 25 bp, Homo sapien
tgctttacgtttcgattctttgttt

SEQ ID NO: 6009648 - DNA, 25 bp, Homo sapien
aaagcgtttttatgatctctgaatt

SEQ ID NO: 6009649 - DNA, 25 bp, Homo sapien
ttactgaagtgcggagccaaagatt

SEQ ID NO: 6009650 - DNA, 25 bp, Homo sapien
cgatctcttcttttagcaatgtcta

SEQ ID NO: 6009651 - DNA, 25 bp, Homo sapien
tcattgctctaggaagatttctgat

SEQ ID NO: 6009652 - DNA, 25 bp, Homo sapien
ctctaggaagatttctgatagccaa

SEQ ID NO: 6009653 - DNA, 25 bp, Homo sapien
ttaccttttagcatggagtcttcac

SEQ ID NO: 6009654 - DNA, 25 bp, Homo sapien
ttcatagtaacaaacgcaaatccac

SEQ ID NO: 6009655 - DNA, 25 bp, Homo sapien
aaattccacgacagctttacgagct

SEQ ID NO: 6009656 - DNA, 25 bp, Homo sapien
gctttctcttacgcttgaacccgat

SEQ ID NO: 6009657 - DNA, 25 bp, Homo sapien
ctaccctcaagatatgtccgttaaa

SEQ ID NO: 6009658 - DNA, 25 bp, Homo sapien
cgttatatgtatattggtctttgaa

SEQ ID NO: 6009659 - DNA, 25 bp, Homo sapien
cctcaagatatgtccgttaaatttg

SEQ ID NO: 6009660 - DNA, 25 bp, Homo sapien
tactcaggcatgacatcatcaccta

SEQ ID NO: 6009661 - DNA, 25 bp, Homo sapien
actgattttcttcatagtaacaaac

SEQ ID NO: 6009662 - DNA, 25 bp, Homo sapien
gtcattttgttttgagacattacta

SEQ ID NO: 6009663 - DNA, 25 bp, Homo sapien
agcccatcaaagcgtttttatgatc

SEQ ID NO: 6009664 - DNA, 25 bp, Homo sapien
cctctacagcaaaactaacgaaccc

SEQ ID NO: 6009665 - DNA, 25 bp, Homo sapien
caccttaagcccatcaaagcgtttt

SEQ ID NO: 6009666 - DNA, 25 bp, Homo sapien
tgaagcttgatctacttgtctatct

SEQ ID NO: 6009667 - DNA, 25 bp, Homo sapien
ttagagttctcaatcgcaaattcaa

SEQ ID NO: 6009668 - DNA, 25 bp, Homo sapien
catctgtgacatcctggggtataga

SEQ ID NO: 6009669 - DNA, 25 bp, Homo sapien
gaagatttctgatagccaacctagt

SEQ ID NO: 6009670 - DNA, 25 bp, Homo sapien
gtaacaaacgcaaatccacacaatt

SEQ ID NO: 6009671 - DNA, 25 bp, Homo sapien
ttcaatctcatctggacccatgaac

SEQ ID NO: 6009672 - DNA, 25 bp, Homo sapien
agtcatcgacaaatgcaaagatggg

SEQ ID NO: 6009673 - DNA, 25 bp, Homo sapien
ttcaaccaccttaagcccatcaaag

SEQ ID NO: 6009674 - DNA, 25 bp, Homo sapien
tcttcatagtaacaaacgcaaatcc

SEQ ID NO: 6009675 - DNA, 25 bp, Homo sapien
ctagaaggcacttcaacattttcta

SEQ ID NO: 6009676 - DNA, 25 bp, Homo sapien
ttcatttcctgactcgttatcatct

SEQ ID NO: 6009677 - DNA, 25 bp, Homo sapien
ggcatgacaattcaaccaccttaag

SEQ ID NO: 6009678 - DNA, 25 bp, Homo sapien
tttttttgaacagcaaaatcaacag

SEQ ID NO: 6009679 - DNA, 25 bp, Homo sapien
ggcatatttctgataattaatttcg

SEQ ID NO: 6009680 - DNA, 25 bp, Homo sapien
aaagaaatctgccagctgctcatct

SEQ ID NO: 6009681 - DNA, 25 bp, Homo sapien
caaatataagttacgtctatctttt

SEQ ID NO: 6009682 - DNA, 25 bp, Homo sapien
ggagccaaagattcttcagtggcat

SEQ ID NO: 6009683 - DNA, 25 bp, Homo sapien
aacttctgtagcaaattccacgaca

SEQ ID NO: 6009684 - DNA, 25 bp, Homo sapien
tcgtcgtcatggttttcttcagcat

SEQ ID NO: 6009685 - DNA, 25 bp, Homo sapien
tcgtcattttgttttgagacattac

SEQ ID NO: 6009686 - DNA, 25 bp, Homo sapien
ttcaattgttcccttcttctcttta

SEQ ID NO: 6009687 - DNA, 25 bp, Homo sapien
attggtctttgaaggctacaaaggc

SEQ ID NO: 6009688 - DNA, 25 bp, Homo sapien
tttcaagtctttggtgttttccaaa

SEQ ID NO: 6009689 - DNA, 25 bp, Homo sapien
catatttctgataattaatttcggt

SEQ ID NO: 6009690 - DNA, 25 bp, Homo sapien
caaagatctttttcaatttaactgg

SEQ ID NO: 6009691 - DNA, 25 bp, Homo sapien
tttatcattcattgctctaggaaga

SEQ ID NO: 6009692 - DNA, 25 bp, Homo sapien
ctttacgacgttagagttctcaatc

SEQ ID NO: 6009693 - DNA, 25 bp, Homo sapien
acctctacttcttcccgcagttgat

SEQ ID NO: 6009694 - DNA, 25 bp, Homo sapien
ttcaaaccctctaaaatttcatcgg

SEQ ID NO: 6009695 - DNA, 25 bp, Homo sapien
ttagcaatgtctaccctcaagatat

SEQ ID NO: 6009696 - DNA, 25 bp, Homo sapien
tgagacattactagaaggcacttca

SEQ ID NO: 6009697 - DNA, 25 bp, Homo sapien
tcgattctttgttttttgaagcttg

SEQ ID NO: 6009698 - DNA, 25 bp, Homo sapien
ttttattcgtgtccttaacaactac

SEQ ID NO: 6009699 - DNA, 25 bp, Homo sapien
acattactagaaggcacttcaacat

SEQ ID NO: 6009700 - DNA, 25 bp, Homo sapien
ttttcatcatcattcaaaccctcta

SEQ ID NO: 6009701 - DNA, 25 bp, Homo sapien
caaagtcttcatatctaggccgtcg

SEQ ID NO: 6009702 - DNA, 25 bp, Homo sapien
agatgggttctttttcagttgctcc

SEQ ID NO: 6009703 - DNA, 25 bp, Homo sapien
gatagccaacctagtcatcgacaaa

SEQ ID NO: 6009704 - DNA, 25 bp, Homo sapien
gtgtgctcttttcaaccacttctga

SEQ ID NO: 6009705 - DNA, 25 bp, Homo sapien
ggatcacgacaactccatggcatat

SEQ ID NO: 6009706 - DNA, 25 bp, Homo sapien
gtcttcatatctaggccgtcgtcat

SEQ ID NO: 6009707 - DNA, 25 bp, Homo sapien
cacgacggtaccatatctaccaaag

SEQ ID NO: 6009708 - DNA, 25 bp, Homo sapien
cgtttttatgatctctgaattctac

SEQ ID NO: 6009709 - DNA, 25 bp, Homo sapien
cttgttctcttggttcttgcttgct

SEQ ID NO: 6009710 - DNA, 25 bp, Homo sapien
caactaccgcatgcttgatcggagc

SEQ ID NO: 6009711 - DNA, 25 bp, Homo sapien
ctttttcgcctggcgctttacctag

SEQ ID NO: 6009712 - DNA, 25 bp, Homo sapien
agcaaaattggaaaagaaatctgcc

SEQ ID NO: 6009713 - DNA, 25 bp, Homo sapien
gccagctgctcatctgtgacatcct

SEQ ID NO: 6009714 - DNA, 25 bp, Homo sapien
gttttttgaagcttgatctacttgt

SEQ ID NO: 6009715 - DNA, 25 bp, Homo sapien
gttctggcccgttattttctcagat

SEQ ID NO: 6009716 - DNA, 25 bp, Homo sapien
gtgcggagccaaagattcttcagtg

SEQ ID NO: 6009717 - DNA, 25 bp, Homo sapien
cccatgaacttgtatttttcctttg

SEQ ID NO: 6009718 - DNA, 25 bp, Homo sapien
aaatctgccagctgctcatctgtga

SEQ ID NO: 6009719 - DNA, 25 bp, Homo sapien
tagcatggagtcttcaccatcagca

SEQ ID NO: 6009720 - DNA, 25 bp, Homo sapien
ggcttcttattctcggattctccga

SEQ ID NO: 6009721 - DNA, 25 bp, Homo sapien
agttctcaatcgcaaattcaacaca

SEQ ID NO: 6009722 - DNA, 25 bp, Homo sapien
tctttactcaatggatgtctttcct

SEQ ID NO: 6009723 - DNA, 25 bp, Homo sapien
tcattcagcaaatataagttacgtc

SEQ ID NO: 6009724 - DNA, 25 bp, Homo sapien
ccctctaaaatttcatcggaggtaa

SEQ ID NO: 6009725 - DNA, 25 bp, Homo sapien
acctatcaataaagaggtagagcca

SEQ ID NO: 6009726 - DNA, 25 bp, Homo sapien
aagatatgtccgttaaatttggtct

SEQ ID NO: 6009727 - DNA, 25 bp, Homo sapien
gcttcaattgttcccttcttctctt

SEQ ID NO: 6009728 - DNA, 25 bp, Homo sapien
tcctttgtagatctgataatctctt

SEQ ID NO: 6009729 - DNA, 25 bp, Homo sapien
gtcagtgttggttaacaaatcagcc

SEQ ID NO: 6009730 - DNA, 25 bp, Homo sapien
acaattcaaccaccttaagcccatc

SEQ ID NO: 6009731 - DNA, 25 bp, Homo sapien
agttacgtctatctttttcgcctgg

SEQ ID NO: 6009732 - DNA, 25 bp, Homo sapien
cattttgttttgagacattactaga

SEQ ID NO: 6009733 - DNA, 25 bp, Homo sapien
acgacgttagagttctcaatcgcaa

SEQ ID NO: 6009734 - DNA, 25 bp, Homo sapien
tctttctggccttagctagggcttc

SEQ ID NO: 6009735 - DNA, 25 bp, Homo sapien
ttttggcggcgttcttttctgccat

SEQ ID NO: 6009736 - DNA, 25 bp, Homo sapien
ttttgttttgtgctttacgtttcga

SEQ ID NO: 6009737 - DNA, 25 bp, Homo sapien
tcataagggacgttacgaacaaaaa

SEQ ID NO: 6009738 - DNA, 25 bp, Homo sapien
ctctttacgacgttagagttctcaa

SEQ ID NO: 6009739 - DNA, 25 bp, Homo sapien
gcttttttgtaatcttcccatctgt

SEQ ID NO: 6009740 - DNA, 25 bp, Homo sapien
aaatcagccatttttgagccttcaa

SEQ ID NO: 6009741 - DNA, 25 bp, Homo sapien
ccttatttttaacttctgtagcaaa

SEQ ID NO: 6009742 - DNA, 25 bp, Homo sapien
ctatctttttcgcctggcgctttac

SEQ ID NO: 6009743 - DNA, 25 bp, Homo sapien
gtcatcgggattggtgggcgtcgtt

SEQ ID NO: 6009744 - DNA, 25 bp, Homo sapien
cttctgtagcaaattccacgacagc

SEQ ID NO: 6009745 - DNA, 25 bp, Homo sapien
cagaacacgaccttcatacacatac

SEQ ID NO: 6009746 - DNA, 25 bp, Homo sapien
caataaagaggtagagccagccgca

SEQ ID NO: 6009747 - DNA, 25 bp, Homo sapien
ttgagcttcaatctcatctggaccc

SEQ ID NO: 6009748 - DNA, 25 bp, Homo sapien
gggcttttttgtaatcttcccatct

SEQ ID NO: 6009749 - DNA, 25 bp, Homo sapien
ttggcttcttattctcggattctcc

SEQ ID NO: 6009750 - DNA, 25 bp, Homo sapien
caaccaccttaagcccatcaaagcg

SEQ ID NO: 6009751 - DNA, 25 bp, Homo sapien
ttttctgccattcttccagcatcct

SEQ ID NO: 6009752 - DNA, 25 bp, Homo sapien
taacaggtaatgcgtatttaacgct

SEQ ID NO: 6009753 - DNA, 25 bp, Homo sapien
ttctctttatatcatcgcccatctt

SEQ ID NO: 6009754 - DNA, 25 bp, Homo sapien
gtaatcttcccatctgtttttttga

SEQ ID NO: 6009755 - DNA, 25 bp, Homo sapien
catcacgcttccttggaatggtagc

SEQ ID NO: 6009756 - DNA, 25 bp, Homo sapien
catcttcttcgtcgtcatggttttc

SEQ ID NO: 6009757 - DNA, 25 bp, Homo sapien
gccattcttccagcatcctctctta

SEQ ID NO: 6009758 - DNA, 25 bp, Homo sapien
ttcatcatcattcaaaccctctaaa

SEQ ID NO: 6009759 - DNA, 25 bp, Homo sapien
gtctttggtgttttccaaagcaatt

SEQ ID NO: 6009760 - DNA, 25 bp, Homo sapien
ttttgagcttcaatctcatctggac

SEQ ID NO: 6009761 - DNA, 25 bp, Homo sapien
cgttagagttctcaatcgcaaattc

SEQ ID NO: 6009762 - DNA, 25 bp, Homo sapien
acgttggagtaatggacagaacacg

SEQ ID NO: 6009763 - DNA, 25 bp, Homo sapien
aatggtagcctccacgacggtacca

SEQ ID NO: 6009764 - DNA, 25 bp, Homo sapien
aaatgcaaagatgggttctttttca

SEQ ID NO: 6009765 - DNA, 25 bp, Homo sapien
gtagcctccacgacggtaccatatc

SEQ ID NO: 6009766 - DNA, 25 bp, Homo sapien
cttccagcatcctctcttactaacg

SEQ ID NO: 6009767 - DNA, 25 bp, Homo sapien
catcatcattcaaaccctctaaaat

SEQ ID NO: 6009768 - DNA, 25 bp, Homo sapien
ttgcgtgctttctcttacgcttgaa

SEQ ID NO: 6009769 - DNA, 25 bp, Homo sapien
tgaacagcaaaatcaacagccacct

SEQ ID NO: 6009770 - DNA, 25 bp, Homo sapien
tgaacgatctcttcttttagcaatg

SEQ ID NO: 6009771 - DNA, 25 bp, Homo sapien
ttctctttacgacgttagagttctc

SEQ ID NO: 6009772 - DNA, 25 bp, Homo sapien
tcttcccttttgttttgtgctttac

SEQ ID NO: 6009773 - DNA, 25 bp, Homo sapien
attgctctaggaagatttctgatag

SEQ ID NO: 6009774 - DNA, 25 bp, Homo sapien
tttttgaagcttgatctacttgtct

SEQ ID NO: 6009775 - DNA, 25 bp, Homo sapien
tacaaaggccgtacctttagccaac

SEQ ID NO: 6009776 - DNA, 25 bp, Homo sapien
tttttatgatctctgaattctacaa

SEQ ID NO: 6009777 - DNA, 25 bp, Homo sapien
ttggaatggtagcctccacgacggt

SEQ ID NO: 6009778 - DNA, 25 bp, Homo sapien
ttttttgagcttcaatctcatctgg

SEQ ID NO: 6009779 - DNA, 25 bp, Homo sapien
gtgctttctcttacgcttgaacccg

SEQ ID NO: 6009780 - DNA, 25 bp, Homo sapien
gaaggctacaaaggccgtaccttta

SEQ ID NO: 6009781 - DNA, 25 bp, Homo sapien
cgacagctttacgagctaacgcctt

SEQ ID NO: 6009782 - DNA, 25 bp, Homo sapien
ctcttggttcttgcttgcttcaatt

SEQ ID NO: 6009783 - DNA, 25 bp, Homo sapien
atctgccagctgctcatctgtgaca

SEQ ID NO: 6009784 - DNA, 25 bp, Homo sapien
tcatcctctacagcaaaactaacga

SEQ ID NO: 6009785 - DNA, 25 bp, Homo sapien
atggttttcttcagcatcttcattt

SEQ ID NO: 6009786 - DNA, 25 bp, Homo sapien
aaatttggtctttctggccttagct

SEQ ID NO: 6009787 - DNA, 25 bp, Homo sapien
tgacatcatcacctatcaataaaga

SEQ ID NO: 6009788 - DNA, 25 bp, Homo sapien
ttctttgttttttgaagcttgatct

SEQ ID NO: 6009789 - DNA, 25 bp, Homo sapien
gcttcttttgtgtcatcctctacag

SEQ ID NO: 6009790 - DNA, 25 bp, Homo sapien
tggggtatagacctcacaaacaaag

SEQ ID NO: 6009791 - DNA, 25 bp, Homo sapien
attgtctacttgtttcttttcatca

SEQ ID NO: 6009792 - DNA, 25 bp, Homo sapien
ggcatgacatcatcacctatcaata

SEQ ID NO: 6009793 - DNA, 25 bp, Homo sapien
caatctcatctggacccatgaactt

SEQ ID NO: 6009794 - DNA, 25 bp, Homo sapien
tttgaacagcaaaatcaacagccac

SEQ ID NO: 6009795 - DNA, 25 bp, Homo sapien
tcctgactcgttatcatctttgtca

SEQ ID NO: 6009796 - DNA, 25 bp, Homo sapien
ttttagcaatgtctaccctcaagat

SEQ ID NO: 6009797 - DNA, 25 bp, Homo sapien
agacctcacaaacaaagtcttcata

SEQ ID NO: 6009798 - DNA, 25 bp, Homo sapien
taagcccatcaaagcgtttttatga

SEQ ID NO: 6009799 - DNA, 25 bp, Homo sapien
ttgttttgagacattactagaaggc

SEQ ID NO: 6009800 - DNA, 25 bp, Homo sapien
ctggctgggcttttttgtaatcttc

SEQ ID NO: 6009801 - DNA, 25 bp, Homo sapien
tttttcctttgtagatctgataatc

SEQ ID NO: 6009802 - DNA, 25 bp, Homo sapien
gatacactcgttatatgtatattgg

SEQ ID NO: 6009803 - DNA, 25 bp, Homo sapien
tttcctttgtagatctgataatctc

SEQ ID NO: 6009804 - DNA, 25 bp, Homo sapien
tctgtttttttgaacagcaaaatca

SEQ ID NO: 6009805 - DNA, 25 bp, Homo sapien
ctttttcaatttaactggatcacga

SEQ ID NO: 6009806 - DNA, 25 bp, Homo sapien
tctacaaaaccgtaacctctacttc

SEQ ID NO: 6009807 - DNA, 25 bp, Homo sapien
ttttaacttctgtagcaaattccac

SEQ ID NO: 6009808 - DNA, 25 bp, Homo sapien
cgacaactccatggcatatttctga

SEQ ID NO: 6009809 - DNA, 25 bp, Homo sapien
gaggtaacggcatgacaattcaacc

SEQ ID NO: 6009810 - DNA, 25 bp, Homo sapien
ttttcgcctggcgctttacctaggg

SEQ ID NO: 6009811 - DNA, 25 bp, Homo sapien
caatgtctaccctcaagatatgtcc

SEQ ID NO: 6009812 - DNA, 25 bp, Homo sapien
atcttcattatctggtcttgttctc

SEQ ID NO: 6009813 - DNA, 25 bp, Homo sapien
tgactcaggtgtgctcttttcaacc

SEQ ID NO: 6009814 - DNA, 25 bp, Homo sapien
atgtcagtgttggttaacaaatcag

SEQ ID NO: 6009815 - DNA, 25 bp, Homo sapien
gaattctacaaaaccgtaacctcta

SEQ ID NO: 6009816 - DNA, 25 bp, Homo sapien
aagtcttcatatctaggccgtcgtc

SEQ ID NO: 6009817 - DNA, 25 bp, Homo sapien
tgtcatcctctacagcaaaactaac

SEQ ID NO: 6009818 - DNA, 25 bp, Homo sapien
gcctaagtcattgtctacttgtttc

SEQ ID NO: 6009819 - DNA, 25 bp, Homo sapien
atctctgaattctacaaaaccgtaa

SEQ ID NO: 6009820 - DNA, 25 bp, Homo sapien
accaccttaagcccatcaaagcgtt

SEQ ID NO: 6009821 - DNA, 25 bp, Homo sapien
gcatcctctcttactaacgttggag

SEQ ID NO: 6009822 - DNA, 25 bp, Homo sapien
tggtagcctccacgacggtaccata

SEQ ID NO: 6009823 - DNA, 25 bp, Homo sapien
ttcccttcttctctttacgacgtta

SEQ ID NO: 6009824 - DNA, 25 bp, Homo sapien
agatttctgatagccaacctagtca

SEQ ID NO: 6009825 - DNA, 25 bp, Homo sapien
tgtcattcatttctggctgggcttt

SEQ ID NO: 6009826 - DNA, 25 bp, Homo sapien
ccatatctaccaaagatctttttca

SEQ ID NO: 6009827 - DNA, 25 bp, Homo sapien
gggattggtgggcgtcgttgcttct

SEQ ID NO: 6009828 - DNA, 25 bp, Homo sapien
cacatactcaggcatgacatcatca

SEQ ID NO: 6009829 - DNA, 25 bp, Homo sapien
tttcagttgctccactcttaatttg

SEQ ID NO: 6009830 - DNA, 25 bp, Homo sapien
attccacgacagctttacgagctaa

SEQ ID NO: 6009831 - DNA, 25 bp, Homo sapien
tttctgataattaatttcggtttac

SEQ ID NO: 6009832 - DNA, 25 bp, Homo sapien
aatataagttacgtctatctttttc

SEQ ID NO: 6009833 - DNA, 25 bp, Homo sapien
atcgtcctcatcttcattgttctgg

SEQ ID NO: 6009834 - DNA, 25 bp, Homo sapien
cttctttactcaatggatgtctttc

SEQ ID NO: 6009835 - DNA, 25 bp, Homo sapien
gcggagccaaagattcttcagtggc

SEQ ID NO: 6009836 - DNA, 25 bp, Homo sapien
agcctccacgacggtaccatatcta

SEQ ID NO: 6009837 - DNA, 25 bp, Homo sapien
ctgggcttttttgtaatcttcccat

SEQ ID NO: 6009838 - DNA, 25 bp, Homo sapien
cagtatcttcattatctggtcttgt

SEQ ID NO: 6009839 - DNA, 25 bp, Homo sapien
tttcctgactcgttatcatctttgt

SEQ ID NO: 6009840 - DNA, 25 bp, Homo sapien
acgcttgaacccgattattctcttt

SEQ ID NO: 6009841 - DNA, 25 bp, Homo sapien
atttaactggatcacgacaactcca

SEQ ID NO: 6009842 - DNA, 25 bp, Homo sapien
atctccatgtcagtgttggttaaca

SEQ ID NO: 6009843 - DNA, 25 bp, Homo sapien
gcccatctttttgtcatcgggattg

SEQ ID NO: 6009844 - DNA, 25 bp, Homo sapien
cttttgtgtcatcctctacagcaaa

SEQ ID NO: 6009845 - DNA, 25 bp, Homo sapien
gatcctttaacttccattataactt

SEQ ID NO: 6009846 - DNA, 25 bp, Homo sapien
atttttttgcgtgctttctcttacg

SEQ ID NO: 6009847 - DNA, 25 bp, Homo sapien
ccgcatgcttgatcggagcaaaatt

SEQ ID NO: 6009848 - DNA, 25 bp, Homo sapien
tagggcttcttttgtgtcatcctct

SEQ ID NO: 6009849 - DNA, 25 bp, Homo sapien
tggttaacaaatcagccatttttga

SEQ ID NO: 6009850 - DNA, 25 bp, Homo sapien
ctgactcgttatcatctttgtcatt

SEQ ID NO: 6009851 - DNA, 25 bp, Homo sapien
tagccaacctagtcatcgacaaatg

SEQ ID NO: 6009852 - DNA, 25 bp, Homo sapien
gcgcatttttgatacactcgttata

SEQ ID NO: 6009853 - DNA, 25 bp, Homo sapien
gcagttgatcctttaacttccatta

SEQ ID NO: 6009854 - DNA, 25 bp, Homo sapien
cctttctaccatcaattttcaagtc

SEQ ID NO: 6009855 - DNA, 25 bp, Homo sapien
aaagattcttcagtggcatcataag

SEQ ID NO: 6009856 - DNA, 25 bp, Homo sapien
atcagccatttttgagccttcaaca

SEQ ID NO: 6009857 - DNA, 25 bp, Homo sapien
gataacaggtaatgcgtatttaacg

SEQ ID NO: 6009858 - DNA, 25 bp, Homo sapien
taatctcttctttactcaatggatg

SEQ ID NO: 6009859 - DNA, 25 bp, Homo sapien
acctcacaaacaaagtcttcatatc

SEQ ID NO: 6009860 - DNA, 25 bp, Homo sapien
taccatcaattttcaagtctttggt

SEQ ID NO: 6009861 - DNA, 25 bp, Homo sapien
tcttttctgccattcttccagcatc

SEQ ID NO: 6009862 - DNA, 25 bp, Homo sapien
atttcggtttaccttttagcatgga

SEQ ID NO: 6009863 - DNA, 25 bp, Homo sapien
ttatttttaacttctgtagcaaatt

SEQ ID NO: 6009864 - DNA, 25 bp, Homo sapien
aactggatcacgacaactccatggc

SEQ ID NO: 6009865 - DNA, 25 bp, Homo sapien
tcgataacaggtaatgcgtatttaa

SEQ ID NO: 6009866 - DNA, 25 bp, Homo sapien
tcatatctaggccgtcgtcattttg

SEQ ID NO: 6009867 - DNA, 25 bp, Homo sapien
ttttcttcagcatcttcatttcctg

SEQ ID NO: 6009868 - DNA, 25 bp, Homo sapien
ccttcatacacatactcaggcatga

SEQ ID NO: 6009869 - DNA, 25 bp, Homo sapien
atatctaggccgtcgtcattttgtt

SEQ ID NO: 6009870 - DNA, 25 bp, Homo sapien
tgctcatctgtgacatcctggggta

SEQ ID NO: 6009871 - DNA, 25 bp, Homo sapien
atcacgacaactccatggcatattt

SEQ ID NO: 6009872 - DNA, 25 bp, Homo sapien
gatatgtccgttaaatttggtcttt

SEQ ID NO: 6009873 - DNA, 25 bp, Homo sapien
tgccaaatttactgaagtgcggagc

SEQ ID NO: 6009874 - DNA, 25 bp, Homo sapien
ggtaacggcatgacaattcaaccac

SEQ ID NO: 6009875 - DNA, 25 bp, Homo sapien
acgctgccaaatttactgaagtgcg

SEQ ID NO: 6009876 - DNA, 25 bp, Homo sapien
cggtttaccttttagcatggagtct

SEQ ID NO: 6009877 - DNA, 25 bp, Homo sapien
tccagcatcctctcttactaacgtt

SEQ ID NO: 6009878 - DNA, 25 bp, Homo sapien
aggctacaaaggccgtacctttagc

SEQ ID NO: 6009879 - DNA, 25 bp, Homo sapien
acagctttacgagctaacgccttta

SEQ ID NO: 6009880 - DNA, 25 bp, Homo sapien
ctaggaagatttctgatagccaacc

SEQ ID NO: 6009881 - DNA, 25 bp, Homo sapien
agccagccgcaggcgcatttttgat

SEQ ID NO: 6009882 - DNA, 25 bp, Homo sapien
taatttcggtttaccttttagcatg

SEQ ID NO: 6009883 - DNA, 25 bp, Homo sapien
ccaaagattcttcagtggcatcata

SEQ ID NO: 6009884 - DNA, 25 bp, Homo sapien
attattctctttatatcatcgccca

SEQ ID NO: 6009885 - DNA, 25 bp, Homo sapien
gcttgcttgacaacaccactttttt

SEQ ID NO: 6009886 - DNA, 25 bp, Homo sapien
gctccactcttaatttgtaagattt

SEQ ID NO: 6009887 - DNA, 25 bp, Homo sapien
cagctgctcatctgtgacatcctgg

SEQ ID NO: 6009888 - DNA, 25 bp, Homo sapien
ccttggaatggtagcctccacgacg

SEQ ID NO: 6009889 - DNA, 25 bp, Homo sapien
tgttttccaaagcaattctacaatt

SEQ ID NO: 6009890 - DNA, 25 bp, Homo sapien
tgaagtgcggagccaaagattcttc

SEQ ID NO: 6009891 - DNA, 25 bp, Homo sapien
ttattcgtgtccttaacaactaccg

SEQ ID NO: 6009892 - DNA, 25 bp, Homo sapien
ttgaaggctacaaaggccgtacctt

SEQ ID NO: 6009893 - DNA, 25 bp, Homo sapien
aatcttcccatctgtttttttgaac

SEQ ID NO: 6009894 - DNA, 25 bp, Homo sapien
aaagatgggttctttttcagttgct

SEQ ID NO: 6009895 - DNA, 25 bp, Homo sapien
caaccccgtagacttatcgataaca

SEQ ID NO: 6009896 - DNA, 25 bp, Homo sapien
cgttatcatctttgtcattcatttc

SEQ ID NO: 6009897 - DNA, 25 bp, Homo sapien
aagtgcggagccaaagattcttcag

SEQ ID NO: 6009898 - DNA, 25 bp, Homo sapien
aatgcgtatttaacgctgccaaatt

SEQ ID NO: 6009899 - DNA, 25 bp, Homo sapien
tagccaaccccgtagacttatcgat

SEQ ID NO: 6009900 - DNA, 25 bp, Homo sapien
ggattctccgacatctccagtatct

SEQ ID NO: 6009901 - DNA, 25 bp, Homo sapien
tgtccgttaaatttggtctttctgg

SEQ ID NO: 6009902 - DNA, 25 bp, Homo sapien
acttcttcccgcagttgatccttta

SEQ ID NO: 6009903 - DNA, 25 bp, Homo sapien
atttctggctgggcttttttgtaat

SEQ ID NO: 6009904 - DNA, 25 bp, Homo sapien
taacttttgcttgcttgacaacacc

SEQ ID NO: 6009905 - DNA, 25 bp, Homo sapien
aggccgtcgtcattttgttttgaga

SEQ ID NO: 6009906 - DNA, 25 bp, Homo sapien
taacgctgccaaatttactgaagtg

SEQ ID NO: 6009907 - DNA, 25 bp, Homo sapien
aaatttactgaagtgcggagccaaa

SEQ ID NO: 6009908 - DNA, 25 bp, Homo sapien
ttcaatttaactggatcacgacaac

SEQ ID NO: 6009909 - DNA, 25 bp, Homo sapien
taagttacgtctatctttttcgcct

SEQ ID NO: 6009910 - DNA, 25 bp, Homo sapien
tcggattctccgacatctccagtat

SEQ ID NO: 6009911 - DNA, 25 bp, Homo sapien
ttgtaatcttcccatctgttttttt

SEQ ID NO: 6009912 - DNA, 25 bp, Homo sapien
ttaaatttggtctttctggccttag

SEQ ID NO: 6009913 - DNA, 25 bp, Homo sapien
gttttgtgctttacgtttcgattct

SEQ ID NO: 6009914 - DNA, 25 bp, Homo sapien
aggtaatgcgtatttaacgctgcca

SEQ ID NO: 6009915 - DNA, 25 bp, Homo sapien
cctctcttactaacgttggagtaat

SEQ ID NO: 6009916 - DNA, 25 bp, Homo sapien
ttgcctaagtcattgtctacttgtt

SEQ ID NO: 6009917 - DNA, 25 bp, Homo sapien
ctaccttcattcagcaaatataagt

SEQ ID NO: 6009918 - DNA, 25 bp, Homo sapien
tactagaaggcacttcaacattttc

SEQ ID NO: 6009919 - DNA, 25 bp, Homo sapien
ttaactggatcacgacaactccatg

SEQ ID NO: 6009920 - DNA, 25 bp, Homo sapien
ttgtagatctgataatctcttcttt

SEQ ID NO: 6009921 - DNA, 25 bp, Homo sapien
ctcgttatatgtatattggtctttg

SEQ ID NO: 6009922 - DNA, 25 bp, Homo sapien
ttcatcttcttcgtcgtcatggttt

SEQ ID NO: 6009923 - DNA, 25 bp, Homo sapien
tggtctttgaaggctacaaaggccg

SEQ ID NO: 6009924 - DNA, 25 bp, Homo sapien
tgattttcttcatagtaacaaacgc

SEQ ID NO: 6009925 - DNA, 25 bp, Homo sapien
agagccagccgcaggcgcatttttg

SEQ ID NO: 6009926 - DNA, 25 bp, Homo sapien
atcctctacagcaaaactaacgaac

SEQ ID NO: 6009927 - DNA, 25 bp, Homo sapien
ttttgcgtgctttctcttacgcttg

SEQ ID NO: 6009928 - DNA, 25 bp, Homo sapien
gttcttttctgccattcttccagca

SEQ ID NO: 6009929 - DNA, 25 bp, Homo sapien
tctctgatctccatgtcagtgttgg

SEQ ID NO: 6009930 - DNA, 25 bp, Homo sapien
gtccttaacaactaccgcatgcttg

SEQ ID NO: 6009931 - DNA, 25 bp, Homo sapien
gacagaacacgaccttcatacacat

SEQ ID NO: 6009932 - DNA, 25 bp, Homo sapien
acaaatcagccatttttgagccttc

SEQ ID NO: 6009933 - DNA, 25 bp, Homo sapien
tattttctcagatgactcaggtgtg

SEQ ID NO: 6009934 - DNA, 25 bp, Homo sapien
gctgccaaatttactgaagtgcgga

SEQ ID NO: 6009935 - DNA, 25 bp, Homo sapien
ggtgggcgtcgttgcttcttctttt

SEQ ID NO: 6009936 - DNA, 25 bp, Homo sapien
tcttacgcttgaacccgattattct

SEQ ID NO: 6009937 - DNA, 25 bp, Homo sapien
catctggacccatgaacttgtattt

SEQ ID NO: 6009938 - DNA, 25 bp, Homo sapien
gcgttcttttctgccattcttccag

SEQ ID NO: 6009939 - DNA, 25 bp, Homo sapien
atctcttcttttagcaatgtctacc

SEQ ID NO: 6009940 - DNA, 25 bp, Homo sapien
cagtgttggttaacaaatcagccat

SEQ ID NO: 6009941 - DNA, 25 bp, Homo sapien
aacgatctcttcttttagcaatgtc

SEQ ID NO: 6009942 - DNA, 25 bp, Homo sapien
cttagctagggcttcttttgtgtca

SEQ ID NO: 6009943 - DNA, 25 bp, Homo sapien
catcttcatttcctgactcgttatc

SEQ ID NO: 6009944 - DNA, 25 bp, Homo sapien
cacttctgatgttttctttgaacga

SEQ ID NO: 6009945 - DNA, 25 bp, Homo sapien
attcagcaaatataagttacgtcta

SEQ ID NO: 6009946 - DNA, 25 bp, Homo sapien
gctagggcttcttttgtgtcatcct

SEQ ID NO: 6009947 - DNA, 25 bp, Homo sapien
taacttccattataacttttgcttg

SEQ ID NO: 6009948 - DNA, 25 bp, Homo sapien
tttttgaacagcaaaatcaacagcc

SEQ ID NO: 6009949 - DNA, 25 bp, Homo sapien
gatgactcaggtgtgctcttttcaa

SEQ ID NO: 6009950 - DNA, 25 bp, Homo sapien
tcttttcaaccacttctgatgtttt

SEQ ID NO: 6009951 - DNA, 25 bp, Homo sapien
atggcatatttctgataattaattt

SEQ ID NO: 6009952 - DNA, 25 bp, Homo sapien
tttcttcatagtaacaaacgcaaat

SEQ ID NO: 6009953 - DNA, 25 bp, Homo sapien
gctttatcattcattgctctaggaa

SEQ ID NO: 6009954 - DNA, 25 bp, Homo sapien
tttgaacgatctcttcttttagcaa

SEQ ID NO: 6009955 - DNA, 25 bp, Homo sapien
ccatggcatatttctgataattaat

SEQ ID NO: 6009956 - DNA, 25 bp, Homo sapien
gtgctcttttcaaccacttctgatg

SEQ ID NO: 6009957 - DNA, 25 bp, Homo sapien
tttgagacattactagaaggcactt

SEQ ID NO: 6009958 - DNA, 25 bp, Homo sapien
tcatggttttcttcagcatcttcat

SEQ ID NO: 6009959 - DNA, 25 bp, Homo sapien
gcaaagatgggttctttttcagttg

SEQ ID NO: 6009960 - DNA, 25 bp, Homo sapien
ataaagaggtagagccagccgcagg

SEQ ID NO: 6009961 - DNA, 25 bp, Homo sapien
gttctttttcagttgctccactctt

SEQ ID NO: 6009962 - DNA, 25 bp, Homo sapien
ctttgtagatctgataatctcttct

SEQ ID NO: 6009963 - DNA, 25 bp, Homo sapien
atctaggccgtcgtcattttgtttt

SEQ ID NO: 6009964 - DNA, 25 bp, Homo sapien
tccagtatcttcattatctggtctt

SEQ ID NO: 6009965 - DNA, 25 bp, Homo sapien
cgacggtaccatatctaccaaagat

SEQ ID NO: 6009966 - DNA, 25 bp, Homo sapien
gtatcttcattatctggtcttgttc

SEQ ID NO: 6009967 - DNA, 25 bp, Homo sapien
tagctagggcttcttttgtgtcatc

SEQ ID NO: 6009968 - DNA, 25 bp, Homo sapien
gtcttgttctcttggttcttgcttg

SEQ ID NO: 6009969 - DNA, 25 bp, Homo sapien
cgacatctccagtatcttcattatc

SEQ ID NO: 6009970 - DNA, 25 bp, Homo sapien
catctttgtcattcatttctggctg

SEQ ID NO: 6009971 - DNA, 25 bp, Homo sapien
agcaatgtctaccctcaagatatgt

SEQ ID NO: 6009972 - DNA, 25 bp, Homo sapien
agatctgataatctcttctttactc

SEQ ID NO: 6009973 - DNA, 25 bp, Homo sapien
tgttctcttggttcttgcttgcttc

SEQ ID NO: 6009974 - DNA, 25 bp, Homo sapien
ttttcaatttaactggatcacgaca

SEQ ID NO: 6009975 - DNA, 25 bp, Homo sapien
aacagcaaaatcaacagccaccttt

SEQ ID NO: 6009976 - DNA, 25 bp, Homo sapien
gatttttctctgatctccatgtcag

SEQ ID NO: 6009977 - DNA, 25 bp, Homo sapien
gtttaccttttagcatggagtcttc

SEQ ID NO: 6009978 - DNA, 25 bp, Homo sapien
gccaacctagtcatcgacaaatgca

SEQ ID NO: 6009979 - DNA, 25 bp, Homo sapien
gatctacttgtctatcttcctcttc

SEQ ID NO: 6009980 - DNA, 25 bp, Homo sapien
ttgcttgacaacaccactttttttg

SEQ ID NO: 6009981 - DNA, 25 bp, Homo sapien
ccgttattttctcagatgactcagg

SEQ ID NO: 6009982 - DNA, 25 bp, Homo sapien
tttactcaatggatgtctttcctta

SEQ ID NO: 6009983 - DNA, 25 bp, Homo sapien
agtcttcaccatcagcatcgtcctc

SEQ ID NO: 6009984 - DNA, 25 bp, Homo sapien
atttttaacttctgtagcaaattcc

SEQ ID NO: 6009985 - DNA, 25 bp, Homo sapien
ttttggcttcttattctcggattct

SEQ ID NO: 6009986 - DNA, 25 bp, Homo sapien
ttctcttggttcttgcttgcttcaa

SEQ ID NO: 6009987 - DNA, 25 bp, Homo sapien
ttgctccactcttaatttgtaagat

SEQ ID NO: 6009988 - DNA, 25 bp, Homo sapien
cgcaaatccacacaatttaccatca

SEQ ID NO: 6009989 - DNA, 25 bp, Homo sapien
tcttcaccatcagcatcgtcctcat

SEQ ID NO: 6009990 - DNA, 25 bp, Homo sapien
caggcatgacatcatcacctatcaa

SEQ ID NO: 6009991 - DNA, 25 bp, Homo sapien
tcttcattgttctggcccgttattt

SEQ ID NO: 6009992 - DNA, 25 bp, Homo sapien
tttctttgaacgatctcttctttta

SEQ ID NO: 6009993 - DNA, 25 bp, Homo sapien
tctccgacatctccagtatcttcat

SEQ ID NO: 6009994 - DNA, 25 bp, Homo sapien
ggttttcttcagcatcttcatttcc

SEQ ID NO: 6009995 - DNA, 25 bp, Homo sapien
aaattggaaaagaaatctgccagct

SEQ ID NO: 6009996 - DNA, 25 bp, Homo sapien
taatttgtaagatttttctctgatc

SEQ ID NO: 6009997 - DNA, 25 bp, Homo sapien
tatgatctctgaattctacaaaacc

SEQ ID NO: 6009998 - DNA, 25 bp, Homo sapien
tttgaagcttgatctacttgtctat

SEQ ID NO: 6009999 - DNA, 25 bp, Homo sapien
tggtcttgttctcttggttcttgct

SEQ ID NO: 6010000 - DNA, 25 bp, Homo sapien
tctcggattctccgacatctccagt

SEQ ID NO: 6010001 - DNA, 25 bp, Homo sapien
tctttttcagttgctccactcttaa

SEQ ID NO: 6010002 - DNA, 25 bp, Homo sapien
ctaggccgtcgtcattttgttttga

SEQ ID NO: 6010003 - DNA, 25 bp, Homo sapien
gcaaaatcaacagccacctttctac

SEQ ID NO: 6010004 - DNA, 25 bp, Homo sapien
tataacttttgcttgcttgacaaca

SEQ ID NO: 6010005 - DNA, 25 bp, Homo sapien
ggaatggtagcctccacgacggtac

SEQ ID NO: 6010006 - DNA, 25 bp, Homo sapien
acgagctaacgcctttaatgcttta

SEQ ID NO: 6010007 - DNA, 25 bp, Homo sapien
tgctctaggaagatttctgatagcc

SEQ ID NO: 6010008 - DNA, 25 bp, Homo sapien
tctgatgttttctttgaacgatctc

SEQ ID NO: 6010009 - DNA, 25 bp, Homo sapien
aattcaaccaccttaagcccatcaa

SEQ ID NO: 6010010 - DNA, 25 bp, Homo sapien
ttggtgggcgtcgttgcttcttctt

SEQ ID NO: 6010011 - DNA, 25 bp, Homo sapien
acatcctggggtatagacctcacaa

SEQ ID NO: 6010012 - DNA, 25 bp, Homo sapien
ttcaacaactctaccttcattcagc

SEQ ID NO: 6010013 - DNA, 25 bp, Homo sapien
tggccttagctagggcttcttttgt

SEQ ID NO: 6010014 - DNA, 25 bp, Homo sapien
cttcatatctaggccgtcgtcattt

SEQ ID NO: 6010015 - DNA, 25 bp, Homo sapien
ggcatcataagggacgttacgaaca

SEQ ID NO: 6010016 - DNA, 25 bp, Homo sapien
agttgatcctttaacttccattata

SEQ ID NO: 6010017 - DNA, 25 bp, Homo sapien
gacccatgaacttgtatttttcctt

SEQ ID NO: 6010018 - DNA, 25 bp, Homo sapien
tggcccgttattttctcagatgact

SEQ ID NO: 6010019 - DNA, 25 bp, Homo sapien
cacgacaactccatggcatatttct

SEQ ID NO: 6010020 - DNA, 25 bp, Homo sapien
ttatatcatcgcccatctttttgtc

SEQ ID NO: 6010021 - DNA, 25 bp, Homo sapien
tttcatcggaggtaacggcatgaca

SEQ ID NO: 6010022 - DNA, 25 bp, Homo sapien
tccgacatctccagtatcttcatta

SEQ ID NO: 6010023 - DNA, 25 bp, Homo sapien
atgtatattggtctttgaaggctac

SEQ ID NO: 6010024 - DNA, 25 bp, Homo sapien
catttttgagccttcaacaactcta

SEQ ID NO: 6010025 - DNA, 25 bp, Homo sapien
catcgcccatctttttgtcatcggg

SEQ ID NO: 6010026 - DNA, 25 bp, Homo sapien
tcagttgctccactcttaatttgta

SEQ ID NO: 6010027 - DNA, 25 bp, Homo sapien
tcattcatttctggctgggcttttt

SEQ ID NO: 6010028 - DNA, 25 bp, Homo sapien
attactagaaggcacttcaacattt

SEQ ID NO: 6010029 - DNA, 25 bp, Homo sapien
ctcttcttttagcaatgtctaccct

SEQ ID NO: 6010030 - DNA, 25 bp, Homo sapien
gagcttcaatctcatctggacccat

SEQ ID NO: 6010031 - DNA, 25 bp, Homo sapien
gttttctttgaacgatctcttcttt

SEQ ID NO: 6010032 - DNA, 25 bp, Homo sapien
tcttcttcgtcgtcatggttttctt

SEQ ID NO: 6010033 - DNA, 25 bp, Homo sapien
ctcacaaacaaagtcttcatatcta

SEQ ID NO: 6010034 - DNA, 25 bp, Homo sapien
actgaagtgcggagccaaagattct

SEQ ID NO: 6010035 - DNA, 25 bp, Homo sapien
tcctcatcttcattgttctggcccg

SEQ ID NO: 6010036 - DNA, 25 bp, Homo sapien
gtctaccctcaagatatgtccgtta

SEQ ID NO: 6010037 - DNA, 25 bp, Homo sapien
tttgagccttcaacaactctacctt

SEQ ID NO: 6010038 - DNA, 25 bp, Homo sapien
tagggcctcctttcttttggcggcg

SEQ ID NO: 6010039 - DNA, 25 bp, Homo sapien
ctctgaattctacaaaaccgtaacc

SEQ ID NO: 6010040 - DNA, 25 bp, Homo sapien
atttctgatagccaacctagtcatc

SEQ ID NO: 6010041 - DNA, 25 bp, Homo sapien
agaaggcacttcaacattttctatt

SEQ ID NO: 6010042 - DNA, 25 bp, Homo sapien
gcgtcgttgcttcttctttttttgg

SEQ ID NO: 6010043 - DNA, 25 bp, Homo sapien
ccagccgcaggcgcatttttgatac

SEQ ID NO: 6010044 - DNA, 25 bp, Homo sapien
ccaaagcaattctacaattactgat

SEQ ID NO: 6010045 - DNA, 25 bp, Homo sapien
acaaatgcaaagatgggttcttttt

SEQ ID NO: 6010046 - DNA, 25 bp, Homo sapien
atcctctcttactaacgttggagta

SEQ ID NO: 6010047 - DNA, 25 bp, Homo sapien
catctgtttttttgaacagcaaaat

SEQ ID NO: 6010048 - DNA, 25 bp, Homo sapien
gtagatctgataatctcttctttac

SEQ ID NO: 6010049 - DNA, 25 bp, Homo sapien
tagcaaattccacgacagctttacg

SEQ ID NO: 6010050 - DNA, 25 bp, Homo sapien
attgttcccttcttctctttacgac

SEQ ID NO: 6010051 - DNA, 25 bp, Homo sapien
attctccgacatctccagtatcttc

SEQ ID NO: 6010052 - DNA, 25 bp, Homo sapien
atctttttcgcctggcgctttacct

SEQ ID NO: 6010053 - DNA, 25 bp, Homo sapien
tggagtaatggacagaacacgacct

SEQ ID NO: 6010054 - DNA, 25 bp, Homo sapien
atcatctttgtcattcatttctggc

SEQ ID NO: 6010055 - DNA, 25 bp, Homo sapien
tgtatttttcctttgtagatctgat

SEQ ID NO: 6010056 - DNA, 25 bp, Homo sapien
tgagccttcaacaactctaccttca

SEQ ID NO: 6010057 - DNA, 25 bp, Homo sapien
tatctggtcttgttctcttggttct

SEQ ID NO: 6010058 - DNA, 25 bp, Homo sapien
aaagcaattctacaattactgattt

SEQ ID NO: 6010059 - DNA, 25 bp, Homo sapien
ttctcaatcgcaaattcaacacaaa

SEQ ID NO: 6010060 - DNA, 25 bp, Homo sapien
tctggccttagctagggcttctttt

SEQ ID NO: 6010061 - DNA, 25 bp, Homo sapien
gctcttttcaaccacttctgatgtt

SEQ ID NO: 6010062 - DNA, 25 bp, Homo sapien
gtctatctttttcgcctggcgcttt

SEQ ID NO: 6010063 - DNA, 25 bp, Homo sapien
gattggtgggcgtcgttgcttcttc

SEQ ID NO: 6010064 - DNA, 25 bp, Homo sapien
gaacacgaccttcatacacatactc

SEQ ID NO: 6010065 - DNA, 25 bp, Homo sapien
aagatctttttcaatttaactggat

SEQ ID NO: 6010066 - DNA, 25 bp, Homo sapien
tcattcattgctctaggaagatttc

SEQ ID NO: 6010067 - DNA, 25 bp, Homo sapien
atctgataatctcttctttactcaa

SEQ ID NO: 6010068 - DNA, 25 bp, Homo sapien
catgaacttgtatttttcctttgta

SEQ ID NO: 6010069 - DNA, 25 bp, Homo sapien
cttcagcatcttcatttcctgactc

SEQ ID NO: 6010070 - DNA, 25 bp, Homo sapien
accttttagcatggagtcttcacca

SEQ ID NO: 6010071 - DNA, 25 bp, Homo sapien
gtaatggacagaacacgaccttcat

SEQ ID NO: 6010072 - DNA, 25 bp, Homo sapien
gcctcctttcttttggcggcgttct

SEQ ID NO: 6010073 - DNA, 25 bp, Homo sapien
tccacgacagctttacgagctaacg

SEQ ID NO: 6010074 - DNA, 25 bp, Homo sapien
ttccaaagcaattctacaattactg

SEQ ID NO: 6010075 - DNA, 25 bp, Homo sapien
ctcatctggacccatgaacttgtat

SEQ ID NO: 6010076 - DNA, 25 bp, Homo sapien
accctcaagatatgtccgttaaatt

SEQ ID NO: 6010077 - DNA, 25 bp, Homo sapien
atgggttctttttcagttgctccac

SEQ ID NO: 6010078 - DNA, 25 bp, Homo sapien
cacacaatttaccatcacgcttcct

SEQ ID NO: 6010079 - DNA, 25 bp, Homo sapien
ttattctcggattctccgacatctc

SEQ ID NO: 6010080 - DNA, 25 bp, Homo sapien
caacacaaagacgtcttcctttgcc

SEQ ID NO: 6010081 - DNA, 25 bp, Homo sapien
ccatcaattttcaagtctttggtgt

SEQ ID NO: 6010082 - DNA, 25 bp, Homo sapien
ctttttttggcttcttattctcgga

SEQ ID NO: 6010083 - DNA, 25 bp, Homo sapien
tgatctctgaattctacaaaaccgt

SEQ ID NO: 6010084 - DNA, 25 bp, Homo sapien
tctgatctccatgtcagtgttggtt

SEQ ID NO: 6010085 - DNA, 25 bp, Homo sapien
atcggaggtaacggcatgacaattc

SEQ ID NO: 6010086 - DNA, 25 bp, Homo sapien
tttctggccttagctagggcttctt

SEQ ID NO: 6010087 - DNA, 25 bp, Homo sapien
agcgtttttatgatctctgaattct

SEQ ID NO: 6010088 - DNA, 25 bp, Homo sapien
attctacaattactgattttcttca

SEQ ID NO: 6010089 - DNA, 25 bp, Homo sapien
acgtcttcctttgcctaagtcattg

SEQ ID NO: 6010090 - DNA, 25 bp, Homo sapien
gccaaccccgtagacttatcgataa

SEQ ID NO: 6010091 - DNA, 25 bp, Homo sapien
agcaaatataagttacgtctatctt

SEQ ID NO: 6010092 - DNA, 25 bp, Homo sapien
ccatctttttgtcatcgggattggt

SEQ ID NO: 6010093 - DNA, 25 bp, Homo sapien
atagacctcacaaacaaagtcttca

SEQ ID NO: 6010094 - DNA, 25 bp, Homo sapien
ctgatagccaacctagtcatcgaca

SEQ ID NO: 6010095 - DNA, 25 bp, Homo sapien
cctccacgacggtaccatatctacc

SEQ ID NO: 6010096 - DNA, 25 bp, Homo sapien
caaaattggaaaagaaatctgccag

SEQ ID NO: 6010097 - DNA, 25 bp, Homo sapien
ttggcggcgttcttttctgccattc

SEQ ID NO: 6010098 - DNA, 25 bp, Homo sapien
catcataagggacgttacgaacaaa

SEQ ID NO: 6010099 - DNA, 25 bp, Homo sapien
ctctaaaatttcatcggaggtaacg

SEQ ID NO: 6010100 - DNA, 25 bp, Homo sapien
caaattcaacacaaagacgtcttcc

SEQ ID NO: 6010101 - DNA, 25 bp, Homo sapien
agccgcaggcgcatttttgatacac

SEQ ID NO: 6010102 - DNA, 25 bp, Homo sapien
ttctggctgggcttttttgtaatct

SEQ ID NO: 6010103 - DNA, 25 bp, Homo sapien
cttgtatttttcctttgtagatctg

SEQ ID NO: 6010104 - DNA, 25 bp, Homo sapien
ggagcaaaattggaaaagaaatctg

SEQ ID NO: 6010105 - DNA, 25 bp, Homo sapien
cagcaaaatcaacagccacctttct

SEQ ID NO: 6010106 - DNA, 25 bp, Homo sapien
tgatgttttctttgaacgatctctt

SEQ ID NO: 6010107 - DNA, 25 bp, Homo sapien
tctgtgacatcctggggtatagacc

SEQ ID NO: 6010108 - DNA, 25 bp, Homo sapien
gcttgaacccgattattctctttat

SEQ ID NO: 6010109 - DNA, 25 bp, Homo sapien
gttaacaaatcagccatttttgagc

SEQ ID NO: 6010110 - DNA, 25 bp, Homo sapien
gtagagccagccgcaggcgcatttt

SEQ ID NO: 6010111 - DNA, 25 bp, Homo sapien
ctgaattctacaaaaccgtaacctc

SEQ ID NO: 6010112 - DNA, 25 bp, Homo sapien
tttagcatggagtcttcaccatcag

SEQ ID NO: 6010113 - DNA, 25 bp, Homo sapien
tcaagatatgtccgttaaatttggt

SEQ ID NO: 6010114 - DNA, 25 bp, Homo sapien
acgaccttcatacacatactcaggc

SEQ ID NO: 6010115 - DNA, 25 bp, Homo sapien
ctacttcttcccgcagttgatcctt

SEQ ID NO: 6010116 - DNA, 25 bp, Homo sapien
gtgtccttaacaactaccgcatgct

SEQ ID NO: 6010117 - DNA, 25 bp, Homo sapien
aaaatcaacagccacctttctacca

SEQ ID NO: 6010118 - DNA, 25 bp, Homo sapien
catcaaagcgtttttatgatctctg

SEQ ID NO: 6010119 - DNA, 25 bp, Homo sapien
ttcaaccacttctgatgttttcttt

SEQ ID NO: 6010120 - DNA, 25 bp, Homo sapien
ttcggtttaccttttagcatggagt

SEQ ID NO: 6010121 - DNA, 25 bp, Homo sapien
gcgctttacctagggcctcctttct

SEQ ID NO: 6010122 - DNA, 25 bp, Homo sapien
acaggtaatgcgtatttaacgctgc

SEQ ID NO: 6010123 - DNA, 25 bp, Homo sapien
tcatcattcaaaccctctaaaattt

SEQ ID NO: 6010124 - DNA, 25 bp, Homo sapien
caattgttcccttcttctctttacg

SEQ ID NO: 6010125 - DNA, 25 bp, Homo sapien
atcaataaagaggtagagccagccg

SEQ ID NO: 6010126 - DNA, 25 bp, Homo sapien
ttgcttcaattgttcccttcttctc

SEQ ID NO: 6010127 - DNA, 25 bp, Homo sapien
gtaatgcgtatttaacgctgccaaa

SEQ ID NO: 6010128 - DNA, 25 bp, Homo sapien
ttcttcccgcagttgatcctttaac

SEQ ID NO: 6010129 - DNA, 25 bp, Homo sapien
ccgcagttgatcctttaacttccat

SEQ ID NO: 6010130 - DNA, 25 bp, Homo sapien
taacggcatgacaattcaaccacct

SEQ ID NO: 6010131 - DNA, 25 bp, Homo sapien
acctagtcatcgacaaatgcaaaga

SEQ ID NO: 6010132 - DNA, 25 bp, Homo sapien
tttctctgatctccatgtcagtgtt

SEQ ID NO: 6010133 - DNA, 25 bp, Homo sapien
tagtaacaaacgcaaatccacacaa

SEQ ID NO: 6010134 - DNA, 25 bp, Homo sapien
cttcctttgcctaagtcattgtcta

SEQ ID NO: 6010135 - DNA, 25 bp, Homo sapien
gctacaaaggccgtacctttagcca

SEQ ID NO: 6010136 - DNA, 25 bp, Homo sapien
ttacgcttgaacccgattattctct

SEQ ID NO: 6010137 - DNA, 25 bp, Homo sapien
tgaacttgtatttttcctttgtaga

SEQ ID NO: 6010138 - DNA, 25 bp, Homo sapien
agattcttcagtggcatcataaggg

SEQ ID NO: 6010139 - DNA, 25 bp, Homo sapien
actaccgcatgcttgatcggagcaa

SEQ ID NO: 6010140 - DNA, 25 bp, Homo sapien
acggcatgacaattcaaccacctta

SEQ ID NO: 6010141 - DNA, 25 bp, Homo sapien
taccatatctaccaaagatcttttt

SEQ ID NO: 6010142 - DNA, 25 bp, Homo sapien
aatggacagaacacgaccttcatac

SEQ ID NO: 6010143 - DNA, 25 bp, Homo sapien
ccttaacaactaccgcatgcttgat

SEQ ID NO: 6010144 - DNA, 25 bp, Homo sapien
ctcaatcgcaaattcaacacaaaga

SEQ ID NO: 6010145 - DNA, 25 bp, Homo sapien
cccatcaaagcgtttttatgatctc

SEQ ID NO: 6010146 - DNA, 25 bp, Homo sapien
ctaagtcattgtctacttgtttctt

SEQ ID NO: 6010147 - DNA, 25 bp, Homo sapien
taacgttggagtaatggacagaaca

SEQ ID NO: 6010148 - DNA, 25 bp, Homo sapien
aagtcattgtctacttgtttctttt

SEQ ID NO: 6010149 - DNA, 25 bp, Homo sapien
cacaatttaccatcacgcttccttg

SEQ ID NO: 6010150 - DNA, 25 bp, Homo sapien
cattcttccagcatcctctcttact

SEQ ID NO: 6010151 - DNA, 25 bp, Homo sapien
tgacaattcaaccaccttaagccca

SEQ ID NO: 6010152 - DNA, 25 bp, Homo sapien
gcttgatcggagcaaaattggaaaa

SEQ ID NO: 6010153 - DNA, 25 bp, Homo sapien
taccgcatgcttgatcggagcaaaa

SEQ ID NO: 6010154 - DNA, 25 bp, Homo sapien
gggttctttttcagttgctccactc

SEQ ID NO: 6010155 - DNA, 25 bp, Homo sapien
caaccacttctgatgttttctttga

SEQ ID NO: 6010156 - DNA, 25 bp, Homo sapien
aatcaacagccacctttctaccatc

SEQ ID NO: 6010157 - DNA, 25 bp, Homo sapien
cggcgttcttttctgccattcttcc

SEQ ID NO: 6010158 - DNA, 25 bp, Homo sapien
gaccttcatacacatactcaggcat

SEQ ID NO: 6010159 - DNA, 25 bp, Homo sapien
tttgtgtcatcctctacagcaaaac

SEQ ID NO: 6010160 - DNA, 25 bp, Homo sapien
ccaaatttactgaagtgcggagcca

SEQ ID NO: 6010161 - DNA, 25 bp, Homo sapien
ttttgtaatcttcccatctgttttt

SEQ ID NO: 6010162 - DNA, 25 bp, Homo sapien
tcccgcagttgatcctttaacttcc

SEQ ID NO: 6010163 - DNA, 25 bp, Homo sapien
ttcttcgtcgtcatggttttcttca

SEQ ID NO: 6010164 - DNA, 25 bp, Homo sapien
gaccttttattcgtgtccttaacaa

SEQ ID NO: 6010165 - DNA, 25 bp, Homo sapien
tccacacaatttaccatcacgcttc

SEQ ID NO: 6010166 - DNA, 25 bp, Homo sapien
atttttgatacactcgttatatgta

SEQ ID NO: 6010167 - DNA, 25 bp, Homo sapien
gccacctttctaccatcaattttca

SEQ ID NO: 6010168 - DNA, 25 bp, Homo sapien
tcgtgtccttaacaactaccgcatg

SEQ ID NO: 6010169 - DNA, 25 bp, Homo sapien
caaacgcaaatccacacaatttacc

SEQ ID NO: 6010170 - DNA, 25 bp, Homo sapien
ggctgggcttttttgtaatcttccc

SEQ ID NO: 6010171 - DNA, 25 bp, Homo sapien
ggcggcgttcttttctgccattctt

SEQ ID NO: 6010172 - DNA, 25 bp, Homo sapien
cttatcgataacaggtaatgcgtat

SEQ ID NO: 6010173 - DNA, 25 bp, Homo sapien
tcttttggcggcgttcttttctgcc

SEQ ID NO: 6010174 - DNA, 25 bp, Homo sapien
gcttgcttcaattgttcccttcttc

SEQ ID NO: 6010175 - DNA, 25 bp, Homo sapien
tactcaatggatgtctttccttatt

SEQ ID NO: 6010176 - DNA, 25 bp, Homo sapien
gttttgagacattactagaaggcac

SEQ ID NO: 6010177 - DNA, 25 bp, Homo sapien
gcaggcgcatttttgatacactcgt

SEQ ID NO: 6010178 - DNA, 25 bp, Homo sapien
actaacgttggagtaatggacagaa

SEQ ID NO: 6010179 - DNA, 25 bp, Homo sapien
cttcttttagcaatgtctaccctca

SEQ ID NO: 6010180 - DNA, 25 bp, Homo sapien
ggtctttctggccttagctagggct

SEQ ID NO: 6010181 - DNA, 25 bp, Homo sapien
ccatcagcatcgtcctcatcttcat

SEQ ID NO: 6010182 - DNA, 25 bp, Homo sapien
tcggagcaaaattggaaaagaaatc

SEQ ID NO: 6010183 - DNA, 25 bp, Homo sapien
caatttaactggatcacgacaactc

SEQ ID NO: 6010184 - DNA, 25 bp, Homo sapien
gatcggagcaaaattggaaaagaaa

SEQ ID NO: 6010185 - DNA, 25 bp, Homo sapien
ctatcaataaagaggtagagccagc

SEQ ID NO: 6010186 - DNA, 25 bp, Homo sapien
cggaggtaacggcatgacaattcaa

SEQ ID NO: 6010187 - DNA, 25 bp, Homo sapien
atcctggggtatagacctcacaaac

SEQ ID NO: 6010188 - DNA, 25 bp, Homo sapien
tatttttcctttgtagatctgataa

SEQ ID NO: 6010189 - DNA, 25 bp, Homo sapien
ctcagatgactcaggtgtgctcttt

SEQ ID NO: 6010190 - DNA, 25 bp, Homo sapien
gataatctcttctttactcaatgga

SEQ ID NO: 6010191 - DNA, 25 bp, Homo sapien
ttcttttgtgtcatcctctacagca

SEQ ID NO: 6010192 - DNA, 25 bp, Homo sapien
ctcatcttcattgttctggcccgtt

SEQ ID NO: 6010193 - DNA, 25 bp, Homo sapien
ttgtaagatttttctctgatctcca

SEQ ID NO: 6010194 - DNA, 25 bp, Homo sapien
tcttgcttgcttcaattgttccctt

SEQ ID NO: 6010195 - DNA, 25 bp, Homo sapien
tggacagaacacgaccttcatacac

SEQ ID NO: 6010196 - DNA, 25 bp, Homo sapien
atttaccatcacgcttccttggaat

SEQ ID NO: 6010197 - DNA, 25 bp, Homo sapien
ttttccaaagcaattctacaattac

SEQ ID NO: 6010198 - DNA, 25 bp, Homo sapien
gggtatagacctcacaaacaaagtc

SEQ ID NO: 6010199 - DNA, 25 bp, Homo sapien
ttctcagatgactcaggtgtgctct

SEQ ID NO: 6010200 - DNA, 25 bp, Homo sapien
gccatttttgagccttcaacaactc

SEQ ID NO: 6010201 - DNA, 25 bp, Homo sapien
tgatctccatgtcagtgttggttaa

SEQ ID NO: 6010202 - DNA, 25 bp, Homo sapien
tttgtgctttacgtttcgattcttt

SEQ ID NO: 6010203 - DNA, 25 bp, Homo sapien
agttgctccactcttaatttgtaag

SEQ ID NO: 6010204 - DNA, 25 bp, Homo sapien
ggagtcttcaccatcagcatcgtcc

SEQ ID NO: 6010205 - DNA, 25 bp, Homo sapien
atttgtaagatttttctctgatctc

SEQ ID NO: 6010206 - DNA, 25 bp, Homo sapien
ctcatctgtgacatcctggggtata

SEQ ID NO: 6010207 - DNA, 25 bp, Homo sapien
cttttagcatggagtcttcaccatc

SEQ ID NO: 6010208 - DNA, 25 bp, Homo sapien
agaggtagagccagccgcaggcgca

SEQ ID NO: 6010209 - DNA, 25 bp, Homo sapien
gagctaacgcctttaatgctttatc

SEQ ID NO: 6010210 - DNA, 25 bp, Homo sapien
tgtgctttacgtttcgattctttgt

SEQ ID NO: 6010211 - DNA, 25 bp, Homo sapien
cttaagcccatcaaagcgtttttat

SEQ ID NO: 6010212 - DNA, 25 bp, Homo sapien
cactcgttatatgtatattggtctt

SEQ ID NO: 6010213 - DNA, 25 bp, Homo sapien
tggaaaagaaatctgccagctgctc

SEQ ID NO: 6010214 - DNA, 25 bp, Homo sapien
aatccacacaatttaccatcacgct

SEQ ID NO: 6010215 - DNA, 25 bp, Homo sapien
ttggtctttctggccttagctaggg

SEQ ID NO: 6010216 - DNA, 25 bp, Homo sapien
cgcaaattcaacacaaagacgtctt

SEQ ID NO: 6010217 - DNA, 25 bp, Homo sapien
gtatagacctcacaaacaaagtctt

SEQ ID NO: 6010218 - DNA, 25 bp, Homo sapien
catgacaattcaaccaccttaagcc

SEQ ID NO: 6010219 - DNA, 25 bp, Homo sapien
cagtggcatcataagggacgttacg

SEQ ID NO: 6010220 - DNA, 25 bp, Homo sapien
agctttacgagctaacgcctttaat

SEQ ID NO: 6010221 - DNA, 25 bp, Homo sapien
cgtcctcatcttcattgttctggcc

SEQ ID NO: 6010222 - DNA, 25 bp, Homo sapien
taacgcctttaatgctttatcattc

SEQ ID NO: 6010223 - DNA, 25 bp, Homo sapien
aacaactaccgcatgcttgatcgga

SEQ ID NO: 6010224 - DNA, 25 bp, Homo sapien
tcatcgacaaatgcaaagatgggtt

SEQ ID NO: 6010225 - DNA, 25 bp, Homo sapien
catactcaggcatgacatcatcacc

SEQ ID NO: 6010226 - DNA, 25 bp, Homo sapien
tgacatcctggggtatagacctcac

SEQ ID NO: 6010227 - DNA, 25 bp, Homo sapien
ctctttatatcatcgcccatctttt

SEQ ID NO: 6010228 - DNA, 25 bp, Homo sapien
tgttcccttcttctctttacgacgt

SEQ ID NO: 6010229 - DNA, 25 bp, Homo sapien
ttttttgcgtgctttctcttacgct

SEQ ID NO: 6010230 - DNA, 25 bp, Homo sapien
tttctcttacgcttgaacccgatta

SEQ ID NO: 6010231 - DNA, 25 bp, Homo sapien
aactctaccttcattcagcaaatat

SEQ ID NO: 6010232 - DNA, 25 bp, Homo sapien
acgcctttaatgctttatcattcat

SEQ ID NO: 6010233 - DNA, 25 bp, Homo sapien
cttcattcagcaaatataagttacg

SEQ ID NO: 6010234 - DNA, 25 bp, Homo sapien
ttgcttgcttgacaacaccactttt

SEQ ID NO: 6010235 - DNA, 25 bp, Homo sapien
tatcattcattgctctaggaagatt

SEQ ID NO: 6010236 - DNA, 25 bp, Homo sapien
agcatcttcatttcctgactcgtta

SEQ ID NO: 6010237 - DNA, 25 bp, Homo sapien
gcgtgctttctcttacgcttgaacc

SEQ ID NO: 6010238 - DNA, 25 bp, Homo sapien
ggtaccatatctaccaaagatcttt

SEQ ID NO: 6010239 - DNA, 25 bp, Homo sapien
cttcttctctttacgacgttagagt

SEQ ID NO: 6010240 - DNA, 25 bp, Homo sapien
ttcatacacatactcaggcatgaca

SEQ ID NO: 6010241 - DNA, 25 bp, Homo sapien
actcaggtgtgctcttttcaaccac

SEQ ID NO: 6010242 - DNA, 25 bp, Homo sapien
gttgagctcttgcataattccagcc

SEQ ID NO: 6010243 - DNA, 25 bp, Homo sapien
cataattccagccttttaatcgacg

SEQ ID NO: 6010244 - DNA, 25 bp, Homo sapien
actataaacaccgcaaattatatgt

SEQ ID NO: 6010245 - DNA, 25 bp, Homo sapien
ttatgaatttgcccaaagaccagct

SEQ ID NO: 6010246 - DNA, 25 bp, Homo sapien
ttcataaatcttctgggtattattt

SEQ ID NO: 6010247 - DNA, 25 bp, Homo sapien
tacttgaatttgaaagatttccaaa

SEQ ID NO: 6010248 - DNA, 25 bp, Homo sapien
agatataaaactaaagctgattcaa

SEQ ID NO: 6010249 - DNA, 25 bp, Homo sapien
agactcatggaagcgctgtctcctt

SEQ ID NO: 6010250 - DNA, 25 bp, Homo sapien
cttgaatttgaaagatttccaaatg

SEQ ID NO: 6010251 - DNA, 25 bp, Homo sapien
aagaattctcctgttgaggacaagt

SEQ ID NO: 6010252 - DNA, 25 bp, Homo sapien
cacaatgaaattctaagaattctcc

SEQ ID NO: 6010253 - DNA, 25 bp, Homo sapien
gtccacgcccttaacttcactaaaa

SEQ ID NO: 6010254 - DNA, 25 bp, Homo sapien
tgacgaattgttatatataatagac

SEQ ID NO: 6010255 - DNA, 25 bp, Homo sapien
tatactggagagactttctgcctga

SEQ ID NO: 6010256 - DNA, 25 bp, Homo sapien
agagttatgaatttgcccaaagacc

SEQ ID NO: 6010257 - DNA, 25 bp, Homo sapien
tggccatagtttcgcaaattgttga

SEQ ID NO: 6010258 - DNA, 25 bp, Homo sapien
aaagcttgatttcaaaaccttataa

SEQ ID NO: 6010259 - DNA, 25 bp, Homo sapien
gccaccaatttacatgacgaattgt

SEQ ID NO: 6010260 - DNA, 25 bp, Homo sapien
gttatcttttcccatcgtccacgcc

SEQ ID NO: 6010261 - DNA, 25 bp, Homo sapien
ccgccaccaatttacatgacgaatt

SEQ ID NO: 6010262 - DNA, 25 bp, Homo sapien
ataatgctcccttgagaaggggaca

SEQ ID NO: 6010263 - DNA, 25 bp, Homo sapien
atagttcaaattaacagagttatga

SEQ ID NO: 6010264 - DNA, 25 bp, Homo sapien
ccagccaaaatgaaagcttgatttc

SEQ ID NO: 6010265 - DNA, 25 bp, Homo sapien
acagaggggaagttatcttttccca

SEQ ID NO: 6010266 - DNA, 25 bp, Homo sapien
tttgctgaggacattacagagggga

SEQ ID NO: 6010267 - DNA, 25 bp, Homo sapien
taaatcttctgggtattatttatca

SEQ ID NO: 6010268 - DNA, 25 bp, Homo sapien
cttcggtgtaccctccactataaac

SEQ ID NO: 6010269 - DNA, 25 bp, Homo sapien
agatttccaaatgtccagcgaaaaa

SEQ ID NO: 6010270 - DNA, 25 bp, Homo sapien
ttacctgatttggcttcgcattccg

SEQ ID NO: 6010271 - DNA, 25 bp, Homo sapien
aggccaagatagatgagctgatcaa

SEQ ID NO: 6010272 - DNA, 25 bp, Homo sapien
atgagctgatcaataatgatcctgt

SEQ ID NO: 6010273 - DNA, 25 bp, Homo sapien
tgtctccttcctcacaccacggcca

SEQ ID NO: 6010274 - DNA, 25 bp, Homo sapien
tatttatcagattagagatgattac

SEQ ID NO: 6010275 - DNA, 25 bp, Homo sapien
ccagcgaaaaaggctttgctgagga

SEQ ID NO: 6010276 - DNA, 25 bp, Homo sapien
aatgaaagcttgatttcaaaacctt

SEQ ID NO: 6010277 - DNA, 25 bp, Homo sapien
atcacatccttttgaaacctggcaa

SEQ ID NO: 6010278 - DNA, 25 bp, Homo sapien
ataaagatataaaactaaagctgat

SEQ ID NO: 6010279 - DNA, 25 bp, Homo sapien
ttatgaataaaacaggcggcctttt

SEQ ID NO: 6010280 - DNA, 25 bp, Homo sapien
accagctggccatagtttcgcaaat

SEQ ID NO: 6010281 - DNA, 25 bp, Homo sapien
ataagtatttacctgatttggcttc

SEQ ID NO: 6010282 - DNA, 25 bp, Homo sapien
tgcctgaaatcatacctactcagga

SEQ ID NO: 6010283 - DNA, 25 bp, Homo sapien
aaaggctttgctgaggacattacag

SEQ ID NO: 6010284 - DNA, 25 bp, Homo sapien
cttttgaaacctggcaagaacttta

SEQ ID NO: 6010285 - DNA, 25 bp, Homo sapien
aaaacgaaaggtcaaactgagcaac

SEQ ID NO: 6010286 - DNA, 25 bp, Homo sapien
gtattatttatcagattagagatga

SEQ ID NO: 6010287 - DNA, 25 bp, Homo sapien
gaataaaacaggcggccttttcaga

SEQ ID NO: 6010288 - DNA, 25 bp, Homo sapien
gaaattctaagaattctcctgttga

SEQ ID NO: 6010289 - DNA, 25 bp, Homo sapien
taatagttcaaattaacagagttat

SEQ ID NO: 6010290 - DNA, 25 bp, Homo sapien
cattacagaggggaagttatctttt

SEQ ID NO: 6010291 - DNA, 25 bp, Homo sapien
agatgtatttgaatatggttatgaa

SEQ ID NO: 6010292 - DNA, 25 bp, Homo sapien
ctggaattcgacaccaattcattgg

SEQ ID NO: 6010293 - DNA, 25 bp, Homo sapien
aaagatttccaaatgtccagcgaaa

SEQ ID NO: 6010294 - DNA, 25 bp, Homo sapien
atagatgagctgatcaataatgatc

SEQ ID NO: 6010295 - DNA, 25 bp, Homo sapien
ctcacttaatcttcggtgtaccctc

SEQ ID NO: 6010296 - DNA, 25 bp, Homo sapien
gcaaattatatgtatttcagagcca

SEQ ID NO: 6010297 - DNA, 25 bp, Homo sapien
atgcaacttgtatcgcagctaacca

SEQ ID NO: 6010298 - DNA, 25 bp, Homo sapien
ggggaagttatcttttcccatcgtc

SEQ ID NO: 6010299 - DNA, 25 bp, Homo sapien
aagttatcttttcccatcgtccacg

SEQ ID NO: 6010300 - DNA, 25 bp, Homo sapien
gctgatcaataatgatcctgtttgg

SEQ ID NO: 6010301 - DNA, 25 bp, Homo sapien
ggccattcgttggttcctttcataa

SEQ ID NO: 6010302 - DNA, 25 bp, Homo sapien
agataatgctcccttgagaagggga

SEQ ID NO: 6010303 - DNA, 25 bp, Homo sapien
gcttcgcattccgacaccgccacca

SEQ ID NO: 6010304 - DNA, 25 bp, Homo sapien
ctgattcaaatactggaattcgaca

SEQ ID NO: 6010305 - DNA, 25 bp, Homo sapien
taccctccactataaacaccgcaaa

SEQ ID NO: 6010306 - DNA, 25 bp, Homo sapien
ggacaaggcttggatatatactgga

SEQ ID NO: 6010307 - DNA, 25 bp, Homo sapien
tgagactcatggaagcgctgtctcc

SEQ ID NO: 6010308 - DNA, 25 bp, Homo sapien
gccttttcagattaacgttgagact

SEQ ID NO: 6010309 - DNA, 25 bp, Homo sapien
agccatgcaacttgtatcgcagcta

SEQ ID NO: 6010310 - DNA, 25 bp, Homo sapien
ttcccatcgtccacgcccttaactt

SEQ ID NO: 6010311 - DNA, 25 bp, Homo sapien
gtttcgcaaattgttgagctcttgc

SEQ ID NO: 6010312 - DNA, 25 bp, Homo sapien
ctttgtatcataatttgattacgat

SEQ ID NO: 6010313 - DNA, 25 bp, Homo sapien
tttgaaagatttccaaatgtccagc

SEQ ID NO: 6010314 - DNA, 25 bp, Homo sapien
tgaaacctggcaagaactttagact

SEQ ID NO: 6010315 - DNA, 25 bp, Homo sapien
acggccattcgttggttcctttcat

SEQ ID NO: 6010316 - DNA, 25 bp, Homo sapien
acgaattgttatatataatagacca

SEQ ID NO: 6010317 - DNA, 25 bp, Homo sapien
aatcttctgggtattatttatcaga

SEQ ID NO: 6010318 - DNA, 25 bp, Homo sapien
aaaccttataatcacatccttttga

SEQ ID NO: 6010319 - DNA, 25 bp, Homo sapien
cctgaaatcatacctactcaggaga

SEQ ID NO: 6010320 - DNA, 25 bp, Homo sapien
gctggccatagtttcgcaaattgtt

SEQ ID NO: 6010321 - DNA, 25 bp, Homo sapien
tttacatgacgaattgttatatata

SEQ ID NO: 6010322 - DNA, 25 bp, Homo sapien
aagcgctgtctccttcctcacacca

SEQ ID NO: 6010323 - DNA, 25 bp, Homo sapien
tctccttcctcacaccacggccatt

SEQ ID NO: 6010324 - DNA, 25 bp, Homo sapien
ttgattacgattttcaacgaagaat

SEQ ID NO: 6010325 - DNA, 25 bp, Homo sapien
atgaataaaacaggcggccttttca

SEQ ID NO: 6010326 - DNA, 25 bp, Homo sapien
atttgcccaaagaccagctggccat

SEQ ID NO: 6010327 - DNA, 25 bp, Homo sapien
taatgaaaataagtatttacctgat

SEQ ID NO: 6010328 - DNA, 25 bp, Homo sapien
cagccttttaatcgacgatatagaa

SEQ ID NO: 6010329 - DNA, 25 bp, Homo sapien
cttgtatcgcagctaaccacaaaag

SEQ ID NO: 6010330 - DNA, 25 bp, Homo sapien
tggttcctttcataaatcttctggg

SEQ ID NO: 6010331 - DNA, 25 bp, Homo sapien
cttgatttcaaaaccttataatcac

SEQ ID NO: 6010332 - DNA, 25 bp, Homo sapien
cgaaaaaggctttgctgaggacatt

SEQ ID NO: 6010333 - DNA, 25 bp, Homo sapien
agaccagctggccatagtttcgcaa

SEQ ID NO: 6010334 - DNA, 25 bp, Homo sapien
tgaaagatttccaaatgtccagcga

SEQ ID NO: 6010335 - DNA, 25 bp, Homo sapien
aatgctcccttgagaaggggacaga

SEQ ID NO: 6010336 - DNA, 25 bp, Homo sapien
aagagcctttgtatcataatttgat

SEQ ID NO: 6010337 - DNA, 25 bp, Homo sapien
tcagagccatgcaacttgtatcgca

SEQ ID NO: 6010338 - DNA, 25 bp, Homo sapien
aaccacaaaagagcctttgtatcat

SEQ ID NO: 6010339 - DNA, 25 bp, Homo sapien
ccattcgttggttcctttcataaat

SEQ ID NO: 6010340 - DNA, 25 bp, Homo sapien
catcgtccacgcccttaacttcact

SEQ ID NO: 6010341 - DNA, 25 bp, Homo sapien
cataaatcttctgggtattatttat

SEQ ID NO: 6010342 - DNA, 25 bp, Homo sapien
agagactttctgcctgaaatcatac

SEQ ID NO: 6010343 - DNA, 25 bp, Homo sapien
ctaagaattctcctgttgaggacaa

SEQ ID NO: 6010344 - DNA, 25 bp, Homo sapien
aaattaacagagttatgaatttgcc

SEQ ID NO: 6010345 - DNA, 25 bp, Homo sapien
cttttcagattaacgttgagactca

SEQ ID NO: 6010346 - DNA, 25 bp, Homo sapien
gctttgctgaggacattacagaggg

SEQ ID NO: 6010347 - DNA, 25 bp, Homo sapien
aactgagcaacacaatgaaattcta

SEQ ID NO: 6010348 - DNA, 25 bp, Homo sapien
tgaaatcatacctactcaggagatg

SEQ ID NO: 6010349 - DNA, 25 bp, Homo sapien
tttctgcctgaaatcatacctactc

SEQ ID NO: 6010350 - DNA, 25 bp, Homo sapien
agactttctgcctgaaatcatacct

SEQ ID NO: 6010351 - DNA, 25 bp, Homo sapien
acaaaagagcctttgtatcataatt

SEQ ID NO: 6010352 - DNA, 25 bp, Homo sapien
tagtttcgcaaattgttgagctctt

SEQ ID NO: 6010353 - DNA, 25 bp, Homo sapien
ctggagagactttctgcctgaaatc

SEQ ID NO: 6010354 - DNA, 25 bp, Homo sapien
tgatcctgtttggtccagccaaaat

SEQ ID NO: 6010355 - DNA, 25 bp, Homo sapien
tatcttttcccatcgtccacgccct

SEQ ID NO: 6010356 - DNA, 25 bp, Homo sapien
tatatgtatttcagagccatgcaac

SEQ ID NO: 6010357 - DNA, 25 bp, Homo sapien
aaagatataaaactaaagctgattc

SEQ ID NO: 6010358 - DNA, 25 bp, Homo sapien
atttgattacgattttcaacgaaga

SEQ ID NO: 6010359 - DNA, 25 bp, Homo sapien
tccttttgaaacctggcaagaactt

SEQ ID NO: 6010360 - DNA, 25 bp, Homo sapien
acgaagaattgatcaatctacatag

SEQ ID NO: 6010361 - DNA, 25 bp, Homo sapien
cctgtttggtccagccaaaatgaaa

SEQ ID NO: 6010362 - DNA, 25 bp, Homo sapien
acagagttatgaatttgcccaaaga

SEQ ID NO: 6010363 - DNA, 25 bp, Homo sapien
taacgttgagactcatggaagcgct

SEQ ID NO: 6010364 - DNA, 25 bp, Homo sapien
ccctccactataaacaccgcaaatt

SEQ ID NO: 6010365 - DNA, 25 bp, Homo sapien
cctactcaggagatgtatttgaata

SEQ ID NO: 6010366 - DNA, 25 bp, Homo sapien
acctggcaagaactttagactaaat

SEQ ID NO: 6010367 - DNA, 25 bp, Homo sapien
tgaatttgaaagatttccaaatgtc

SEQ ID NO: 6010368 - DNA, 25 bp, Homo sapien
ggaattcgacaccaattcattggcc

SEQ ID NO: 6010369 - DNA, 25 bp, Homo sapien
cacgcccttaacttcactaaaacga

SEQ ID NO: 6010370 - DNA, 25 bp, Homo sapien
gatatagaagataatgctcccttga

SEQ ID NO: 6010371 - DNA, 25 bp, Homo sapien
caataatgatcctgtttggtccagc

SEQ ID NO: 6010372 - DNA, 25 bp, Homo sapien
caaatactggaattcgacaccaatt

SEQ ID NO: 6010373 - DNA, 25 bp, Homo sapien
gagctgatcaataatgatcctgttt

SEQ ID NO: 6010374 - DNA, 25 bp, Homo sapien
ttcaacgaagaattgatcaatctac

SEQ ID NO: 6010375 - DNA, 25 bp, Homo sapien
gttgagactcatggaagcgctgtct

SEQ ID NO: 6010376 - DNA, 25 bp, Homo sapien
ggggacaaggcttggatatatactg

SEQ ID NO: 6010377 - DNA, 25 bp, Homo sapien
tatatactggagagactttctgcct

SEQ ID NO: 6010378 - DNA, 25 bp, Homo sapien
tgcataattccagccttttaatcga

SEQ ID NO: 6010379 - DNA, 25 bp, Homo sapien
aaaactaaagctgattcaaatactg

SEQ ID NO: 6010380 - DNA, 25 bp, Homo sapien
tagagatgattacttgaatttgaaa

SEQ ID NO: 6010381 - DNA, 25 bp, Homo sapien
attccagccttttaatcgacgatat

SEQ ID NO: 6010382 - DNA, 25 bp, Homo sapien
atggttatgaataaaacaggcggcc

SEQ ID NO: 6010383 - DNA, 25 bp, Homo sapien
agagccatgcaacttgtatcgcagc

SEQ ID NO: 6010384 - DNA, 25 bp, Homo sapien
tgaaagcttgatttcaaaaccttat

SEQ ID NO: 6010385 - DNA, 25 bp, Homo sapien
acaccaattcattggcctacaccaa

SEQ ID NO: 6010386 - DNA, 25 bp, Homo sapien
ttcaaaaccttataatcacatcctt

SEQ ID NO: 6010387 - DNA, 25 bp, Homo sapien
tacatgacgaattgttatatataat

SEQ ID NO: 6010388 - DNA, 25 bp, Homo sapien
ccaaaatgaaagcttgatttcaaaa

SEQ ID NO: 6010389 - DNA, 25 bp, Homo sapien
aggacattacagaggggaagttatc

SEQ ID NO: 6010390 - DNA, 25 bp, Homo sapien
ggcggccttttcagattaacgttga

SEQ ID NO: 6010391 - DNA, 25 bp, Homo sapien
catgacgaattgttatatataatag

SEQ ID NO: 6010392 - DNA, 25 bp, Homo sapien
tgatcaataatgatcctgtttggtc

SEQ ID NO: 6010393 - DNA, 25 bp, Homo sapien
tttcagagccatgcaacttgtatcg

SEQ ID NO: 6010394 - DNA, 25 bp, Homo sapien
agattagagatgattacttgaattt

SEQ ID NO: 6010395 - DNA, 25 bp, Homo sapien
aagtatttacctgatttggcttcgc

SEQ ID NO: 6010396 - DNA, 25 bp, Homo sapien
ataaaactaaagctgattcaaatac

SEQ ID NO: 6010397 - DNA, 25 bp, Homo sapien
tggtccagccaaaatgaaagcttga

SEQ ID NO: 6010398 - DNA, 25 bp, Homo sapien
ttccaaatgtccagcgaaaaaggct

SEQ ID NO: 6010399 - DNA, 25 bp, Homo sapien
tggatatatactggagagactttct

SEQ ID NO: 6010400 - DNA, 25 bp, Homo sapien
cattccgacaccgccaccaatttac

SEQ ID NO: 6010401 - DNA, 25 bp, Homo sapien
acgattttcaacgaagaattgatca

SEQ ID NO: 6010402 - DNA, 25 bp, Homo sapien
ctgggtattatttatcagattagag

SEQ ID NO: 6010403 - DNA, 25 bp, Homo sapien
caagatagatgagctgatcaataat

SEQ ID NO: 6010404 - DNA, 25 bp, Homo sapien
gaatttgcccaaagaccagctggcc

SEQ ID NO: 6010405 - DNA, 25 bp, Homo sapien
tgatttcaaaaccttataatcacat

SEQ ID NO: 6010406 - DNA, 25 bp, Homo sapien
ggtgtaccctccactataaacaccg

SEQ ID NO: 6010407 - DNA, 25 bp, Homo sapien
cagaccacttctcacttaatcttcg

SEQ ID NO: 6010408 - DNA, 25 bp, Homo sapien
ggagagactttctgcctgaaatcat

SEQ ID NO: 6010409 - DNA, 25 bp, Homo sapien
gcagctaaccacaaaagagcctttg

SEQ ID NO: 6010410 - DNA, 25 bp, Homo sapien
gcctttgtatcataatttgattacg

SEQ ID NO: 6010411 - DNA, 25 bp, Homo sapien
tttggcttcgcattccgacaccgcc

SEQ ID NO: 6010412 - DNA, 25 bp, Homo sapien
aattcgacaccaattcattggccta

SEQ ID NO: 6010413 - DNA, 25 bp, Homo sapien
atcgacgatatagaagataatgctc

SEQ ID NO: 6010414 - DNA, 25 bp, Homo sapien
tgattacttgaatttgaaagatttc

SEQ ID NO: 6010415 - DNA, 25 bp, Homo sapien
attacttgaatttgaaagatttcca

SEQ ID NO: 6010416 - DNA, 25 bp, Homo sapien
cataggggacaaggcttggatatat

SEQ ID NO: 6010417 - DNA, 25 bp, Homo sapien
gggtattatttatcagattagagat

SEQ ID NO: 6010418 - DNA, 25 bp, Homo sapien
agcgaaaaaggctttgctgaggaca

SEQ ID NO: 6010419 - DNA, 25 bp, Homo sapien
acgatatagaagataatgctccctt

SEQ ID NO: 6010420 - DNA, 25 bp, Homo sapien
ttccgacaccgccaccaatttacat

SEQ ID NO: 6010421 - DNA, 25 bp, Homo sapien
ccacggccattcgttggttcctttc

SEQ ID NO: 6010422 - DNA, 25 bp, Homo sapien
gatcaatctacataggggacaaggc

SEQ ID NO: 6010423 - DNA, 25 bp, Homo sapien
tccttcctcacaccacggccattcg

SEQ ID NO: 6010424 - DNA, 25 bp, Homo sapien
taggggacaaggcttggatatatac

SEQ ID NO: 6010425 - DNA, 25 bp, Homo sapien
tatgtatttcagagccatgcaactt

SEQ ID NO: 6010426 - DNA, 25 bp, Homo sapien
tatcgcagctaaccacaaaagagcc

SEQ ID NO: 6010427 - DNA, 25 bp, Homo sapien
caggagatgtatttgaatatggtta

SEQ ID NO: 6010428 - DNA, 25 bp, Homo sapien
aaattatatgtatttcagagccatg

SEQ ID NO: 6010429 - DNA, 25 bp, Homo sapien
taatcttcggtgtaccctccactat

SEQ ID NO: 6010430 - DNA, 25 bp, Homo sapien
agcttgatttcaaaaccttataatc

SEQ ID NO: 6010431 - DNA, 25 bp, Homo sapien
agctaaccacaaaagagcctttgta

SEQ ID NO: 6010432 - DNA, 25 bp, Homo sapien
ttgcccaaagaccagctggccatag

SEQ ID NO: 6010433 - DNA, 25 bp, Homo sapien
atggaagcgctgtctccttcctcac

SEQ ID NO: 6010434 - DNA, 25 bp, Homo sapien
taatcgacgatatagaagataatgc

SEQ ID NO: 6010435 - DNA, 25 bp, Homo sapien
gagcctttgtatcataatttgatta

SEQ ID NO: 6010436 - DNA, 25 bp, Homo sapien
tgtttggtccagccaaaatgaaagc

SEQ ID NO: 6010437 - DNA, 25 bp, Homo sapien
gtcaaactgagcaacacaatgaaat

SEQ ID NO: 6010438 - DNA, 25 bp, Homo sapien
catccttttgaaacctggcaagaac

SEQ ID NO: 6010439 - DNA, 25 bp, Homo sapien
ccttgagaaggggacagaccacttc

SEQ ID NO: 6010440 - DNA, 25 bp, Homo sapien
cacatccttttgaaacctggcaaga

SEQ ID NO: 6010441 - DNA, 25 bp, Homo sapien
ggcaagaactttagactaaatttaa

SEQ ID NO: 6010442 - DNA, 25 bp, Homo sapien
ctccactataaacaccgcaaattat

SEQ ID NO: 6010443 - DNA, 25 bp, Homo sapien
ccaaagaccagctggccatagtttc

SEQ ID NO: 6010444 - DNA, 25 bp, Homo sapien
atcttcggtgtaccctccactataa

SEQ ID NO: 6010445 - DNA, 25 bp, Homo sapien
gcgctgtctccttcctcacaccacg

SEQ ID NO: 6010446 - DNA, 25 bp, Homo sapien
ggttatgaataaaacaggcggcctt

SEQ ID NO: 6010447 - DNA, 25 bp, Homo sapien
aaaatgaaagcttgatttcaaaacc

SEQ ID NO: 6010448 - DNA, 25 bp, Homo sapien
gtatcataatttgattacgattttc

SEQ ID NO: 6010449 - DNA, 25 bp, Homo sapien
tactggaattcgacaccaattcatt

SEQ ID NO: 6010450 - DNA, 25 bp, Homo sapien
tcagattagagatgattacttgaat

SEQ ID NO: 6010451 - DNA, 25 bp, Homo sapien
tcagattaacgttgagactcatgga

SEQ ID NO: 6010452 - DNA, 25 bp, Homo sapien
tttatcagattagagatgattactt

SEQ ID NO: 6010453 - DNA, 25 bp, Homo sapien
agctgattcaaatactggaattcga

SEQ ID NO: 6010454 - DNA, 25 bp, Homo sapien
acgttgagactcatggaagcgctgt

SEQ ID NO: 6010455 - DNA, 25 bp, Homo sapien
atatggttatgaataaaacaggcgg

SEQ ID NO: 6010456 - DNA, 25 bp, Homo sapien
agatgagctgatcaataatgatcct

SEQ ID NO: 6010457 - DNA, 25 bp, Homo sapien
ggagatgtatttgaatatggttatg

SEQ ID NO: 6010458 - DNA, 25 bp, Homo sapien
ttgttgagctcttgcataattccag

SEQ ID NO: 6010459 - DNA, 25 bp, Homo sapien
aacaccgcaaattatatgtatttca

SEQ ID NO: 6010460 - DNA, 25 bp, Homo sapien
aatctacataggggacaaggcttgg

SEQ ID NO: 6010461 - DNA, 25 bp, Homo sapien
gagcaacacaatgaaattctaagaa

SEQ ID NO: 6010462 - DNA, 25 bp, Homo sapien
tgtatttcagagccatgcaacttgt

SEQ ID NO: 6010463 - DNA, 25 bp, Homo sapien
tttgaaacctggcaagaactttaga

SEQ ID NO: 6010464 - DNA, 25 bp, Homo sapien
aacgaaaggtcaaactgagcaacac

SEQ ID NO: 6010465 - DNA, 25 bp, Homo sapien
gacagaccacttctcacttaatctt

SEQ ID NO: 6010466 - DNA, 25 bp, Homo sapien
caatgaaattctaagaattctcctg

SEQ ID NO: 6010467 - DNA, 25 bp, Homo sapien
aaatgtccagcgaaaaaggctttgc

SEQ ID NO: 6010468 - DNA, 25 bp, Homo sapien
gtatttacctgatttggcttcgcat

SEQ ID NO: 6010469 - DNA, 25 bp, Homo sapien
ttatatataatagaccacttatccg

SEQ ID NO: 6010470 - DNA, 25 bp, Homo sapien
accttataatcacatccttttgaaa

SEQ ID NO: 6010471 - DNA, 25 bp, Homo sapien
ggcttggatatatactggagagact

SEQ ID NO: 6010472 - DNA, 25 bp, Homo sapien
tgtatcgcagctaaccacaaaagag

SEQ ID NO: 6010473 - DNA, 25 bp, Homo sapien
acctgatttggcttcgcattccgac

SEQ ID NO: 6010474 - DNA, 25 bp, Homo sapien
aaaagagcctttgtatcataatttg

SEQ ID NO: 6010475 - DNA, 25 bp, Homo sapien
aatgatcctgtttggtccagccaaa

SEQ ID NO: 6010476 - DNA, 25 bp, Homo sapien
ctcacaccacggccattcgttggtt

SEQ ID NO: 6010477 - DNA, 25 bp, Homo sapien
gcctacaccaaaaattttattaatc

SEQ ID NO: 6010478 - DNA, 25 bp, Homo sapien
ttcgcattccgacaccgccaccaat

SEQ ID NO: 6010479 - DNA, 25 bp, Homo sapien
cgcaaattgttgagctcttgcataa

SEQ ID NO: 6010480 - DNA, 25 bp, Homo sapien
acttctcacttaatcttcggtgtac

SEQ ID NO: 6010481 - DNA, 25 bp, Homo sapien
tcccttgagaaggggacagaccact

SEQ ID NO: 6010482 - DNA, 25 bp, Homo sapien
agattaacgttgagactcatggaag

SEQ ID NO: 6010483 - DNA, 25 bp, Homo sapien
ctcaggagatgtatttgaatatggt

SEQ ID NO: 6010484 - DNA, 25 bp, Homo sapien
atttcaaaaccttataatcacatcc

SEQ ID NO: 6010485 - DNA, 25 bp, Homo sapien
aaaaaggctttgctgaggacattac

SEQ ID NO: 6010486 - DNA, 25 bp, Homo sapien
tgttatatataatagaccacttatc

SEQ ID NO: 6010487 - DNA, 25 bp, Homo sapien
ccgacaccgccaccaatttacatga

SEQ ID NO: 6010488 - DNA, 25 bp, Homo sapien
atggaggccaagatagatgagctga

SEQ ID NO: 6010489 - DNA, 25 bp, Homo sapien
gattttcaacgaagaattgatcaat

SEQ ID NO: 6010490 - DNA, 25 bp, Homo sapien
agaggggaagttatcttttcccatc

SEQ ID NO: 6010491 - DNA, 25 bp, Homo sapien
aaatcatacctactcaggagatgta

SEQ ID NO: 6010492 - DNA, 25 bp, Homo sapien
caaattgttgagctcttgcataatt

SEQ ID NO: 6010493 - DNA, 25 bp, Homo sapien
attcgttggttcctttcataaatct

SEQ ID NO: 6010494 - DNA, 25 bp, Homo sapien
attaacagagttatgaatttgccca

SEQ ID NO: 6010495 - DNA, 25 bp, Homo sapien
tactggagagactttctgcctgaaa

SEQ ID NO: 6010496 - DNA, 25 bp, Homo sapien
gaagataatgctcccttgagaaggg

SEQ ID NO: 6010497 - DNA, 25 bp, Homo sapien
tcctgttgaggacaagtgataaaga

SEQ ID NO: 6010498 - DNA, 25 bp, Homo sapien
aattctaagaattctcctgttgagg

SEQ ID NO: 6010499 - DNA, 25 bp, Homo sapien
cttttaatcgacgatatagaagata

SEQ ID NO: 6010500 - DNA, 25 bp, Homo sapien
cttaatcttcggtgtaccctccact

SEQ ID NO: 6010501 - DNA, 25 bp, Homo sapien
gattacgattttcaacgaagaattg

SEQ ID NO: 6010502 - DNA, 25 bp, Homo sapien
aatttacatgacgaattgttatata

SEQ ID NO: 6010503 - DNA, 25 bp, Homo sapien
aaagctgattcaaatactggaattc

SEQ ID NO: 6010504 - DNA, 25 bp, Homo sapien
tcatggaagcgctgtctccttcctc

SEQ ID NO: 6010505 - DNA, 25 bp, Homo sapien
tgaggacaagtgataaagatataaa

SEQ ID NO: 6010506 - DNA, 25 bp, Homo sapien
ttctaagaattctcctgttgaggac

SEQ ID NO: 6010507 - DNA, 25 bp, Homo sapien
caaactgagcaacacaatgaaattc

SEQ ID NO: 6010508 - DNA, 25 bp, Homo sapien
tataatcacatccttttgaaacctg

SEQ ID NO: 6010509 - DNA, 25 bp, Homo sapien
cggccttttcagattaacgttgaga

SEQ ID NO: 6010510 - DNA, 25 bp, Homo sapien
atatataatagaccacttatccgaa

SEQ ID NO: 6010511 - DNA, 25 bp, Homo sapien
tgagctcttgcataattccagcctt

SEQ ID NO: 6010512 - DNA, 25 bp, Homo sapien
ttctgggtattatttatcagattag

SEQ ID NO: 6010513 - DNA, 25 bp, Homo sapien
tcggtgtaccctccactataaacac

SEQ ID NO: 6010514 - DNA, 25 bp, Homo sapien
ggaagttatcttttcccatcgtcca

SEQ ID NO: 6010515 - DNA, 25 bp, Homo sapien
atgaaaataagtatttacctgattt

SEQ ID NO: 6010516 - DNA, 25 bp, Homo sapien
caccgcaaattatatgtatttcaga

SEQ ID NO: 6010517 - DNA, 25 bp, Homo sapien
tcctttcataaatcttctgggtatt

SEQ ID NO: 6010518 - DNA, 25 bp, Homo sapien
tacataggggacaaggcttggatat

SEQ ID NO: 6010519 - DNA, 25 bp, Homo sapien
aggtcaaactgagcaacacaatgaa

SEQ ID NO: 6010520 - DNA, 25 bp, Homo sapien
ttaacttcactaaaacgaaaggtca

SEQ ID NO: 6010521 - DNA, 25 bp, Homo sapien
gaagaattgatcaatctacataggg

SEQ ID NO: 6010522 - DNA, 25 bp, Homo sapien
tatcagattagagatgattacttga

SEQ ID NO: 6010523 - DNA, 25 bp, Homo sapien
catacctactcaggagatgtatttg

SEQ ID NO: 6010524 - DNA, 25 bp, Homo sapien
ctgttgaggacaagtgataaagata

SEQ ID NO: 6010525 - DNA, 25 bp, Homo sapien
tatttcagagccatgcaacttgtat

SEQ ID NO: 6010526 - DNA, 25 bp, Homo sapien
ctcttgcataattccagccttttaa

SEQ ID NO: 6010527 - DNA, 25 bp, Homo sapien
tatagaagataatgctcccttgaga

SEQ ID NO: 6010528 - DNA, 25 bp, Homo sapien
tctacataggggacaaggcttggat

SEQ ID NO: 6010529 - DNA, 25 bp, Homo sapien
attaacgttgagactcatggaagcg

SEQ ID NO: 6010530 - DNA, 25 bp, Homo sapien
taacagagttatgaatttgcccaaa

SEQ ID NO: 6010531 - DNA, 25 bp, Homo sapien
gaatatggttatgaataaaacaggc

SEQ ID NO: 6010532 - DNA, 25 bp, Homo sapien
tcgcagctaaccacaaaagagcctt

SEQ ID NO: 6010533 - DNA, 25 bp, Homo sapien
gagaaggggacagaccacttctcac

SEQ ID NO: 6010534 - DNA, 25 bp, Homo sapien
tccagccttttaatcgacgatatag

SEQ ID NO: 6010535 - DNA, 25 bp, Homo sapien
cacttaatcttcggtgtaccctcca

SEQ ID NO: 6010536 - DNA, 25 bp, Homo sapien
agccaaaatgaaagcttgatttcaa

SEQ ID NO: 6010537 - DNA, 25 bp, Homo sapien
gatgattacttgaatttgaaagatt

SEQ ID NO: 6010538 - DNA, 25 bp, Homo sapien
tttcagattaacgttgagactcatg

SEQ ID NO: 6010539 - DNA, 25 bp, Homo sapien
gacaccgccaccaatttacatgacg

SEQ ID NO: 6010540 - DNA, 25 bp, Homo sapien
ttcactaaaacgaaaggtcaaactg

SEQ ID NO: 6010541 - DNA, 25 bp, Homo sapien
tcattggcctacaccaaaaatttta

SEQ ID NO: 6010542 - DNA, 25 bp, Homo sapien
gattcaaatactggaattcgacacc

SEQ ID NO: 6010543 - DNA, 25 bp, Homo sapien
cataatttgattacgattttcaacg

SEQ ID NO: 6010544 - DNA, 25 bp, Homo sapien
atcataatttgattacgattttcaa

SEQ ID NO: 6010545 - DNA, 25 bp, Homo sapien
tataaacaccgcaaattatatgtat

SEQ ID NO: 6010546 - DNA, 25 bp, Homo sapien
ataaaacaggcggccttttcagatt

SEQ ID NO: 6010547 - DNA, 25 bp, Homo sapien
tcgtccacgcccttaacttcactaa

SEQ ID NO: 6010548 - DNA, 25 bp, Homo sapien
attctcctgttgaggacaagtgata

SEQ ID NO: 6010549 - DNA, 25 bp, Homo sapien
attatatgtatttcagagccatgca

SEQ ID NO: 6010550 - DNA, 25 bp, Homo sapien
agctcttgcataattccagcctttt

SEQ ID NO: 6010551 - DNA, 25 bp, Homo sapien
ttttcaacgaagaattgatcaatct

SEQ ID NO: 6010552 - DNA, 25 bp, Homo sapien
ggaggccaagatagatgagctgatc

SEQ ID NO: 6010553 - DNA, 25 bp, Homo sapien
gcaacttgtatcgcagctaaccaca

SEQ ID NO: 6010554 - DNA, 25 bp, Homo sapien
actcatggaagcgctgtctccttcc

SEQ ID NO: 6010555 - DNA, 25 bp, Homo sapien
gagatgattacttgaatttgaaaga

SEQ ID NO: 6010556 - DNA, 25 bp, Homo sapien
caacgaagaattgatcaatctacat

SEQ ID NO: 6010557 - DNA, 25 bp, Homo sapien
gccttttaatcgacgatatagaaga

SEQ ID NO: 6010558 - DNA, 25 bp, Homo sapien
ttgtatcataatttgattacgattt

SEQ ID NO: 6010559 - DNA, 25 bp, Homo sapien
gttgaggacaagtgataaagatata

SEQ ID NO: 6010560 - DNA, 25 bp, Homo sapien
taattccagccttttaatcgacgat

SEQ ID NO: 6010561 - DNA, 25 bp, Homo sapien
ccgcaaattatatgtatttcagagc

SEQ ID NO: 6010562 - DNA, 25 bp, Homo sapien
gtccagcgaaaaaggctttgctgag

SEQ ID NO: 6010563 - DNA, 25 bp, Homo sapien
tcttttcccatcgtccacgccctta

SEQ ID NO: 6010564 - DNA, 25 bp, Homo sapien
attagagatgattacttgaatttga

SEQ ID NO: 6010565 - DNA, 25 bp, Homo sapien
ccaatttacatgacgaattgttata

SEQ ID NO: 6010566 - DNA, 25 bp, Homo sapien
ttacgattttcaacgaagaattgat

SEQ ID NO: 6010567 - DNA, 25 bp, Homo sapien
atgaatttgcccaaagaccagctgg

SEQ ID NO: 6010568 - DNA, 25 bp, Homo sapien
ttttcccatcgtccacgcccttaac

SEQ ID NO: 6010569 - DNA, 25 bp, Homo sapien
gttggttcctttcataaatcttctg

SEQ ID NO: 6010570 - DNA, 25 bp, Homo sapien
aaagaccagctggccatagtttcgc

SEQ ID NO: 6010571 - DNA, 25 bp, Homo sapien
gaattctcctgttgaggacaagtga

SEQ ID NO: 6010572 - DNA, 25 bp, Homo sapien
ccaaatgtccagcgaaaaaggcttt

SEQ ID NO: 6010573 - DNA, 25 bp, Homo sapien
gaccacttctcacttaatcttcggt

SEQ ID NO: 6010574 - DNA, 25 bp, Homo sapien
tcctcacaccacggccattcgttgg

SEQ ID NO: 6010575 - DNA, 25 bp, Homo sapien
agatagatgagctgatcaataatga

SEQ ID NO: 6010576 - DNA, 25 bp, Homo sapien
cccatcgtccacgcccttaacttca

SEQ ID NO: 6010577 - DNA, 25 bp, Homo sapien
ctaaaacgaaaggtcaaactgagca

SEQ ID NO: 6010578 - DNA, 25 bp, Homo sapien
cttataatcacatccttttgaaacc

SEQ ID NO: 6010579 - DNA, 25 bp, Homo sapien
cgacaccaattcattggcctacacc

SEQ ID NO: 6010580 - DNA, 25 bp, Homo sapien
aattgttgagctcttgcataattcc

SEQ ID NO: 6010581 - DNA, 25 bp, Homo sapien
aaaacaggcggccttttcagattaa

SEQ ID NO: 6010582 - DNA, 25 bp, Homo sapien
atgtccagcgaaaaaggctttgctg

SEQ ID NO: 6010583 - DNA, 25 bp, Homo sapien
ctgatttggcttcgcattccgacac

SEQ ID NO: 6010584 - DNA, 25 bp, Homo sapien
tacctactcaggagatgtatttgaa

SEQ ID NO: 6010585 - DNA, 25 bp, Homo sapien
aaacctggcaagaactttagactaa

SEQ ID NO: 6010586 - DNA, 25 bp, Homo sapien
caaaaccttataatcacatcctttt

SEQ ID NO: 6010587 - DNA, 25 bp, Homo sapien
gatttggcttcgcattccgacaccg

SEQ ID NO: 6010588 - DNA, 25 bp, Homo sapien
ttcgacaccaattcattggcctaca

SEQ ID NO: 6010589 - DNA, 25 bp, Homo sapien
gaaggggacagaccacttctcactt

SEQ ID NO: 6010590 - DNA, 25 bp, Homo sapien
ggaagcgctgtctccttcctcacac

SEQ ID NO: 6010591 - DNA, 25 bp, Homo sapien
gatatatactggagagactttctgc

SEQ ID NO: 6010592 - DNA, 25 bp, Homo sapien
aggggacagaccacttctcacttaa

SEQ ID NO: 6010593 - DNA, 25 bp, Homo sapien
ttcgcaaattgttgagctcttgcat

SEQ ID NO: 6010594 - DNA, 25 bp, Homo sapien
caccaatttacatgacgaattgtta

SEQ ID NO: 6010595 - DNA, 25 bp, Homo sapien
gccatagtttcgcaaattgttgagc

SEQ ID NO: 6010596 - DNA, 25 bp, Homo sapien
agttcaaattaacagagttatgaat

SEQ ID NO: 6010597 - DNA, 25 bp, Homo sapien
ttacagaggggaagttatcttttcc

SEQ ID NO: 6010598 - DNA, 25 bp, Homo sapien
ctttcataaatcttctgggtattat

SEQ ID NO: 6010599 - DNA, 25 bp, Homo sapien
tactcaggagatgtatttgaatatg

SEQ ID NO: 6010600 - DNA, 25 bp, Homo sapien
gggacagaccacttctcacttaatc

SEQ ID NO: 6010601 - DNA, 25 bp, Homo sapien
atcatacctactcaggagatgtatt

SEQ ID NO: 6010602 - DNA, 25 bp, Homo sapien
ccactataaacaccgcaaattatat

SEQ ID NO: 6010603 - DNA, 25 bp, Homo sapien
tcgttggttcctttcataaatcttc

SEQ ID NO: 6010604 - DNA, 25 bp, Homo sapien
atataaaactaaagctgattcaaat

SEQ ID NO: 6010605 - DNA, 25 bp, Homo sapien
tgtaccctccactataaacaccgca

SEQ ID NO: 6010606 - DNA, 25 bp, Homo sapien
gcaacacaatgaaattctaagaatt

SEQ ID NO: 6010607 - DNA, 25 bp, Homo sapien
aacaggcggccttttcagattaacg

SEQ ID NO: 6010608 - DNA, 25 bp, Homo sapien
cgcattccgacaccgccaccaattt

SEQ ID NO: 6010609 - DNA, 25 bp, Homo sapien
ttggcctacaccaaaaattttatta

SEQ ID NO: 6010610 - DNA, 25 bp, Homo sapien
gaaaataagtatttacctgatttgg

SEQ ID NO: 6010611 - DNA, 25 bp, Homo sapien
gccaagatagatgagctgatcaata

SEQ ID NO: 6010612 - DNA, 25 bp, Homo sapien
gttcctttcataaatcttctgggta

SEQ ID NO: 6010613 - DNA, 25 bp, Homo sapien
caccacggccattcgttggttcctt

SEQ ID NO: 6010614 - DNA, 25 bp, Homo sapien
cacaccacggccattcgttggttcc

SEQ ID NO: 6010615 - DNA, 25 bp, Homo sapien
atataatagaccacttatccgaatt

SEQ ID NO: 6010616 - DNA, 25 bp, Homo sapien
aacttgtatcgcagctaaccacaaa

SEQ ID NO: 6010617 - DNA, 25 bp, Homo sapien
tttaatcgacgatatagaagataat

SEQ ID NO: 6010618 - DNA, 25 bp, Homo sapien
gcccaaagaccagctggccatagtt

SEQ ID NO: 6010619 - DNA, 25 bp, Homo sapien
cagctggccatagtttcgcaaattg

SEQ ID NO: 6010620 - DNA, 25 bp, Homo sapien
taatttgattacgattttcaacgaa

SEQ ID NO: 6010621 - DNA, 25 bp, Homo sapien
caattcattggcctacaccaaaaat

SEQ ID NO: 6010622 - DNA, 25 bp, Homo sapien
caggcggccttttcagattaacgtt

SEQ ID NO: 6010623 - DNA, 25 bp, Homo sapien
gctgtctccttcctcacaccacggc

SEQ ID NO: 6010624 - DNA, 25 bp, Homo sapien
ctggcaagaactttagactaaattt

SEQ ID NO: 6010625 - DNA, 25 bp, Homo sapien
ccacaaaagagcctttgtatcataa

SEQ ID NO: 6010626 - DNA, 25 bp, Homo sapien
atcctgtttggtccagccaaaatga

SEQ ID NO: 6010627 - DNA, 25 bp, Homo sapien
ataatagaccacttatccgaattgt

SEQ ID NO: 6010628 - DNA, 25 bp, Homo sapien
gtccagccaaaatgaaagcttgatt

SEQ ID NO: 6010629 - DNA, 25 bp, Homo sapien
atcaataatgatcctgtttggtcca

SEQ ID NO: 6010630 - DNA, 25 bp, Homo sapien
taaacaccgcaaattatatgtattt

SEQ ID NO: 6010631 - DNA, 25 bp, Homo sapien
ctgagcaacacaatgaaattctaag

SEQ ID NO: 6010632 - DNA, 25 bp, Homo sapien
cttgcataattccagccttttaatc

SEQ ID NO: 6010633 - DNA, 25 bp, Homo sapien
tcaatctacataggggacaaggctt

SEQ ID NO: 6010634 - DNA, 25 bp, Homo sapien
atttccaaatgtccagcgaaaaagg

SEQ ID NO: 6010635 - DNA, 25 bp, Homo sapien
ttgatcaatctacataggggacaag

SEQ ID NO: 6010636 - DNA, 25 bp, Homo sapien
ctaaccacaaaagagcctttgtatc

SEQ ID NO: 6010637 - DNA, 25 bp, Homo sapien
ttgagaaggggacagaccacttctc

SEQ ID NO: 6010638 - DNA, 25 bp, Homo sapien
tctcctgttgaggacaagtgataaa

SEQ ID NO: 6010639 - DNA, 25 bp, Homo sapien
cttcctcacaccacggccattcgtt

SEQ ID NO: 6010640 - DNA, 25 bp, Homo sapien
cgaaaggtcaaactgagcaacacaa

SEQ ID NO: 6010641 - DNA, 25 bp, Homo sapien
tttggtccagccaaaatgaaagctt

SEQ ID NO: 6010642 - DNA, 25 bp, Homo sapien
ctaaagctgattcaaatactggaat

SEQ ID NO: 6010643 - DNA, 25 bp, Homo sapien
gacattacagaggggaagttatctt

SEQ ID NO: 6010644 - DNA, 25 bp, Homo sapien
ataatgatcctgtttggtccagcca

SEQ ID NO: 6010645 - DNA, 25 bp, Homo sapien
cgacgatatagaagataatgctccc

SEQ ID NO: 6010646 - DNA, 25 bp, Homo sapien
caccgccaccaatttacatgacgaa

SEQ ID NO: 6010647 - DNA, 25 bp, Homo sapien
aaggcttggatatatactggagaga

SEQ ID NO: 6010648 - DNA, 25 bp, Homo sapien
taatcacatccttttgaaacctggc

SEQ ID NO: 6010649 - DNA, 25 bp, Homo sapien
attcattggcctacaccaaaaattt

SEQ ID NO: 6010650 - DNA, 25 bp, Homo sapien
tggcttcgcattccgacaccgccac

SEQ ID NO: 6010651 - DNA, 25 bp, Homo sapien
aactaaagctgattcaaatactgga

SEQ ID NO: 6010652 - DNA, 25 bp, Homo sapien
ccacttctcacttaatcttcggtgt

SEQ ID NO: 6010653 - DNA, 25 bp, Homo sapien
ttcaaatactggaattcgacaccaa

SEQ ID NO: 6010654 - DNA, 25 bp, Homo sapien
gaattgttatatataatagaccact

SEQ ID NO: 6010655 - DNA, 25 bp, Homo sapien
aattgatcaatctacataggggaca

SEQ ID NO: 6010656 - DNA, 25 bp, Homo sapien
acaaggcttggatatatactggaga

SEQ ID NO: 6010657 - DNA, 25 bp, Homo sapien
aggctttgctgaggacattacagag

SEQ ID NO: 6010658 - DNA, 25 bp, Homo sapien
ccatgcaacttgtatcgcagctaac

SEQ ID NO: 6010659 - DNA, 25 bp, Homo sapien
aaaggtcaaactgagcaacacaatg

SEQ ID NO: 6010660 - DNA, 25 bp, Homo sapien
actttctgcctgaaatcatacctac

SEQ ID NO: 6010661 - DNA, 25 bp, Homo sapien
atgaaattctaagaattctcctgtt

SEQ ID NO: 6010662 - DNA, 25 bp, Homo sapien
attgttatatataatagaccactta

SEQ ID NO: 6010663 - DNA, 25 bp, Homo sapien
cttggatatatactggagagacttt

SEQ ID NO: 6010664 - DNA, 25 bp, Homo sapien
aaataagtatttacctgatttggct

SEQ ID NO: 6010665 - DNA, 25 bp, Homo sapien
aatactggaattcgacaccaattca

SEQ ID NO: 6010666 - DNA, 25 bp, Homo sapien
tcttctgggtattatttatcagatt

SEQ ID NO: 6010667 - DNA, 25 bp, Homo sapien
tctgcctgaaatcatacctactcag

SEQ ID NO: 6010668 - DNA, 25 bp, Homo sapien
ttctcacttaatcttcggtgtaccc

SEQ ID NO: 6010669 - DNA, 25 bp, Homo sapien
aatagaccacttatccgaattgtga

SEQ ID NO: 6010670 - DNA, 25 bp, Homo sapien
atttacctgatttggcttcgcattc

SEQ ID NO: 6010671 - DNA, 25 bp, Homo sapien
catagtttcgcaaattgttgagctc

SEQ ID NO: 6010672 - DNA, 25 bp, Homo sapien
accaattcattggcctacaccaaaa

SEQ ID NO: 6010673 - DNA, 25 bp, Homo sapien
agttatgaatttgcccaaagaccag

SEQ ID NO: 6010674 - DNA, 25 bp, Homo sapien
cactaaaacgaaaggtcaaactgag

SEQ ID NO: 6010675 - DNA, 25 bp, Homo sapien
tagaagataatgctcccttgagaag

SEQ ID NO: 6010676 - DNA, 25 bp, Homo sapien
aatttgaaagatttccaaatgtcca

SEQ ID NO: 6010677 - DNA, 25 bp, Homo sapien
agaattgatcaatctacatagggga

SEQ ID NO: 6010678 - DNA, 25 bp, Homo sapien
agattgatcaattcttcgttgaaaa

SEQ ID NO: 6010679 - DNA, 25 bp, Homo sapien
ggctcttttgtggttagctgcgata

SEQ ID NO: 6010680 - DNA, 25 bp, Homo sapien
ggttttgaaatcaagctttcatttt

SEQ ID NO: 6010681 - DNA, 25 bp, Homo sapien
tctttcaaattcaagtaatcatctc

SEQ ID NO: 6010682 - DNA, 25 bp, Homo sapien
tcattttggctggaccaaacaggat

SEQ ID NO: 6010683 - DNA, 25 bp, Homo sapien
atttcattgtgttgctcagtttgac

SEQ ID NO: 6010684 - DNA, 25 bp, Homo sapien
gagcattatcttctatatcgtcgat

SEQ ID NO: 6010685 - DNA, 25 bp, Homo sapien
cataaccatattcaaatacatctcc

SEQ ID NO: 6010686 - DNA, 25 bp, Homo sapien
gacgatgggaaaagataacttcccc

SEQ ID NO: 6010687 - DNA, 25 bp, Homo sapien
gacatttggaaatctttcaaattca

SEQ ID NO: 6010688 - DNA, 25 bp, Homo sapien
tcgttttagtgaagttaagggcgtg

SEQ ID NO: 6010689 - DNA, 25 bp, Homo sapien
gaagccaaatcaggtaaatacttat

SEQ ID NO: 6010690 - DNA, 25 bp, Homo sapien
gattaaaaggctggaattatgcaag

SEQ ID NO: 6010691 - DNA, 25 bp, Homo sapien
ccaaacaggatcattattgatcagc

SEQ ID NO: 6010692 - DNA, 25 bp, Homo sapien
gagtaggtatgatttcaggcagaaa

SEQ ID NO: 6010693 - DNA, 25 bp, Homo sapien
tttgcggtgtttatagtggagggta

SEQ ID NO: 6010694 - DNA, 25 bp, Homo sapien
ctcagcaaagcctttttcgctggac

SEQ ID NO: 6010695 - DNA, 25 bp, Homo sapien
taagggcgtggacgatgggaaaaga

SEQ ID NO: 6010696 - DNA, 25 bp, Homo sapien
catattcaaatacatctcctgagta

SEQ ID NO: 6010697 - DNA, 25 bp, Homo sapien
aatctgataaataatacccagaaga

SEQ ID NO: 6010698 - DNA, 25 bp, Homo sapien
ctaatctgataaataatacccagaa

SEQ ID NO: 6010699 - DNA, 25 bp, Homo sapien
aagccttgtcccctatgtagattga

SEQ ID NO: 6010700 - DNA, 25 bp, Homo sapien
aattcggataagtggtctattatat

SEQ ID NO: 6010701 - DNA, 25 bp, Homo sapien
tctgtccccttctcaagggagcatt

SEQ ID NO: 6010702 - DNA, 25 bp, Homo sapien
aattatgcaagagctcaacaatttg

SEQ ID NO: 6010703 - DNA, 25 bp, Homo sapien
tttatcacttgtcctcaacaggaga

SEQ ID NO: 6010704 - DNA, 25 bp, Homo sapien
gcaagagctcaacaatttgcgaaac

SEQ ID NO: 6010705 - DNA, 25 bp, Homo sapien
ttcgtcatgtaaattggtggcggtg

SEQ ID NO: 6010706 - DNA, 25 bp, Homo sapien
atgatacaaaggctcttttgtggtt

SEQ ID NO: 6010707 - DNA, 25 bp, Homo sapien
ctctaatctgataaataatacccag

SEQ ID NO: 6010708 - DNA, 25 bp, Homo sapien
tccagtatatatccaagccttgtcc

SEQ ID NO: 6010709 - DNA, 25 bp, Homo sapien
ggaaccaacgaatggccgtggtgtg

SEQ ID NO: 6010710 - DNA, 25 bp, Homo sapien
ccaacgaatggccgtggtgtgagga

SEQ ID NO: 6010711 - DNA, 25 bp, Homo sapien
tcaagctttcattttggctggacca

SEQ ID NO: 6010712 - DNA, 25 bp, Homo sapien
gatcagctcatctatcttggcctcc

SEQ ID NO: 6010713 - DNA, 25 bp, Homo sapien
gtacaccgaagattaagtgagaagt

SEQ ID NO: 6010714 - DNA, 25 bp, Homo sapien
aattcttagaatttcattgtgttgc

SEQ ID NO: 6010715 - DNA, 25 bp, Homo sapien
ggtgtaggccaatgaattggtgtcg

SEQ ID NO: 6010716 - DNA, 25 bp, Homo sapien
taatcaaattatgatacaaaggctc

SEQ ID NO: 6010717 - DNA, 25 bp, Homo sapien
acaccgaagattaagtgagaagtgg

SEQ ID NO: 6010718 - DNA, 25 bp, Homo sapien
ggatgtgattataaggttttgaaat

SEQ ID NO: 6010719 - DNA, 25 bp, Homo sapien
tggtgtgaggaaggagacagcgctt

SEQ ID NO: 6010720 - DNA, 25 bp, Homo sapien
agtggtctattatatataacaattc

SEQ ID NO: 6010721 - DNA, 25 bp, Homo sapien
aacgttaatctgaaaaggccgcctg

SEQ ID NO: 6010722 - DNA, 25 bp, Homo sapien
gttcttgccaggtttcaaaaggatg

SEQ ID NO: 6010723 - DNA, 25 bp, Homo sapien
gtgaggaaggagacagcgcttccat

SEQ ID NO: 6010724 - DNA, 25 bp, Homo sapien
gcattatcttctatatcgtcgatta

SEQ ID NO: 6010725 - DNA, 25 bp, Homo sapien
acaattcggataagtggtctattat

SEQ ID NO: 6010726 - DNA, 25 bp, Homo sapien
gaagatttatgaaaggaaccaacga

SEQ ID NO: 6010727 - DNA, 25 bp, Homo sapien
gtgtttatagtggagggtacaccga

SEQ ID NO: 6010728 - DNA, 25 bp, Homo sapien
aacaggagaattcttagaatttcat

SEQ ID NO: 6010729 - DNA, 25 bp, Homo sapien
gccgtggtgtgaggaaggagacagc

SEQ ID NO: 6010730 - DNA, 25 bp, Homo sapien
tcgaattccagtatttgaatcagct

SEQ ID NO: 6010731 - DNA, 25 bp, Homo sapien
tgtcctcagcaaagcctttttcgct

SEQ ID NO: 6010732 - DNA, 25 bp, Homo sapien
ctcagtttgacctttcgttttagtg

SEQ ID NO: 6010733 - DNA, 25 bp, Homo sapien
tataacaattcgtcatgtaaattgg

SEQ ID NO: 6010734 - DNA, 25 bp, Homo sapien
agctggtctttgggcaaattcataa

SEQ ID NO: 6010735 - DNA, 25 bp, Homo sapien
tcaaaaggatgtgattataaggttt

SEQ ID NO: 6010736 - DNA, 25 bp, Homo sapien
ccagctggtctttgggcaaattcat

SEQ ID NO: 6010737 - DNA, 25 bp, Homo sapien
gataagtggtctattatatataaca

SEQ ID NO: 6010738 - DNA, 25 bp, Homo sapien
atttgcgaaactatggccagctggt

SEQ ID NO: 6010739 - DNA, 25 bp, Homo sapien
gcgaagccaaatcaggtaaatactt

SEQ ID NO: 6010740 - DNA, 25 bp, Homo sapien
ggccagctggtctttgggcaaattc

SEQ ID NO: 6010741 - DNA, 25 bp, Homo sapien
gataacttcccctctgtaatgtcct

SEQ ID NO: 6010742 - DNA, 25 bp, Homo sapien
aaccaacgaatggccgtggtgtgag

SEQ ID NO: 6010743 - DNA, 25 bp, Homo sapien
tgcatggctctgaaatacatataat

SEQ ID NO: 6010744 - DNA, 25 bp, Homo sapien
ttaatctgaaaaggccgcctgtttt

SEQ ID NO: 6010745 - DNA, 25 bp, Homo sapien
tcttgccaggtttcaaaaggatgtg

SEQ ID NO: 6010746 - DNA, 25 bp, Homo sapien
aaggctggaattatgcaagagctca

SEQ ID NO: 6010747 - DNA, 25 bp, Homo sapien
atgcgaagccaaatcaggtaaatac

SEQ ID NO: 6010748 - DNA, 25 bp, Homo sapien
ttgaatcagctttagttttatatct

SEQ ID NO: 6010749 - DNA, 25 bp, Homo sapien
tttgtggttagctgcgatacaagtt

SEQ ID NO: 6010750 - DNA, 25 bp, Homo sapien
attcataactctgttaatttgaact

SEQ ID NO: 6010751 - DNA, 25 bp, Homo sapien
cgaatggccgtggtgtgaggaagga

SEQ ID NO: 6010752 - DNA, 25 bp, Homo sapien
aaaagataacttcccctctgtaatg

SEQ ID NO: 6010753 - DNA, 25 bp, Homo sapien
aaaaggctggaattatgcaagagct

SEQ ID NO: 6010754 - DNA, 25 bp, Homo sapien
cattgtgttgctcagtttgaccttt

SEQ ID NO: 6010755 - DNA, 25 bp, Homo sapien
tgcgatacaagttgcatggctctga

SEQ ID NO: 6010756 - DNA, 25 bp, Homo sapien
tccatgagtctcaacgttaatctga

SEQ ID NO: 6010757 - DNA, 25 bp, Homo sapien
gattataaggttttgaaatcaagct

SEQ ID NO: 6010758 - DNA, 25 bp, Homo sapien
cgtggacgatgggaaaagataactt

SEQ ID NO: 6010759 - DNA, 25 bp, Homo sapien
tcatctctaatctgataaataatac

SEQ ID NO: 6010760 - DNA, 25 bp, Homo sapien
ttatgcaagagctcaacaatttgcg

SEQ ID NO: 6010761 - DNA, 25 bp, Homo sapien
gaatgcgaagccaaatcaggtaaat

SEQ ID NO: 6010762 - DNA, 25 bp, Homo sapien
aattatgatacaaaggctcttttgt

SEQ ID NO: 6010763 - DNA, 25 bp, Homo sapien
ggccaatgaattggtgtcgaattcc

SEQ ID NO: 6010764 - DNA, 25 bp, Homo sapien
gtaatgtcctcagcaaagccttttt

SEQ ID NO: 6010765 - DNA, 25 bp, Homo sapien
ccctctgtaatgtcctcagcaaagc

SEQ ID NO: 6010766 - DNA, 25 bp, Homo sapien
gaaaatcgtaatcaaattatgatac

SEQ ID NO: 6010767 - DNA, 25 bp, Homo sapien
ccaagccttgtcccctatgtagatt

SEQ ID NO: 6010768 - DNA, 25 bp, Homo sapien
ttcaaatacatctcctgagtaggta

SEQ ID NO: 6010769 - DNA, 25 bp, Homo sapien
cctttttcgctggacatttggaaat

SEQ ID NO: 6010770 - DNA, 25 bp, Homo sapien
cggaatgcgaagccaaatcaggtaa

SEQ ID NO: 6010771 - DNA, 25 bp, Homo sapien
atgcaagagctcaacaatttgcgaa

SEQ ID NO: 6010772 - DNA, 25 bp, Homo sapien
ccaaatcaggtaaatacttattttc

SEQ ID NO: 6010773 - DNA, 25 bp, Homo sapien
tttggctggaccaaacaggatcatt

SEQ ID NO: 6010774 - DNA, 25 bp, Homo sapien
caaattatgatacaaaggctctttt

SEQ ID NO: 6010775 - DNA, 25 bp, Homo sapien
tgctcagtttgacctttcgttttag

SEQ ID NO: 6010776 - DNA, 25 bp, Homo sapien
tcagctcatctatcttggcctccat

SEQ ID NO: 6010777 - DNA, 25 bp, Homo sapien
aagggagcattatcttctatatcgt

SEQ ID NO: 6010778 - DNA, 25 bp, Homo sapien
cggtgtttatagtggagggtacacc

SEQ ID NO: 6010779 - DNA, 25 bp, Homo sapien
agcctttttcgctggacatttggaa

SEQ ID NO: 6010780 - DNA, 25 bp, Homo sapien
ggagaattcttagaatttcattgtg

SEQ ID NO: 6010781 - DNA, 25 bp, Homo sapien
tgaattggtgtcgaattccagtatt

SEQ ID NO: 6010782 - DNA, 25 bp, Homo sapien
tttttcgctggacatttggaaatct

SEQ ID NO: 6010783 - DNA, 25 bp, Homo sapien
tgtcccctatgtagattgatcaatt

SEQ ID NO: 6010784 - DNA, 25 bp, Homo sapien
cggataagtggtctattatatataa

SEQ ID NO: 6010785 - DNA, 25 bp, Homo sapien
tgaaaaggccgcctgttttattcat

SEQ ID NO: 6010786 - DNA, 25 bp, Homo sapien
gtaatcatctctaatctgataaata

SEQ ID NO: 6010787 - DNA, 25 bp, Homo sapien
taataaaatttttggtgtaggccaa

SEQ ID NO: 6010788 - DNA, 25 bp, Homo sapien
attttggctggaccaaacaggatca

SEQ ID NO: 6010789 - DNA, 25 bp, Homo sapien
gagaagtggtctgtccccttctcaa

SEQ ID NO: 6010790 - DNA, 25 bp, Homo sapien
ttttagtgaagttaagggcgtggac

SEQ ID NO: 6010791 - DNA, 25 bp, Homo sapien
gaaatcaagctttcattttggctgg

SEQ ID NO: 6010792 - DNA, 25 bp, Homo sapien
ataatttgcggtgtttatagtggag

SEQ ID NO: 6010793 - DNA, 25 bp, Homo sapien
atctctaatctgataaataataccc

SEQ ID NO: 6010794 - DNA, 25 bp, Homo sapien
tcaggcagaaagtctctccagtata

SEQ ID NO: 6010795 - DNA, 25 bp, Homo sapien
aatctgaaaaggccgcctgttttat

SEQ ID NO: 6010796 - DNA, 25 bp, Homo sapien
gtcctcaacaggagaattcttagaa

SEQ ID NO: 6010797 - DNA, 25 bp, Homo sapien
gtggcggtgtcggaatgcgaagcca

SEQ ID NO: 6010798 - DNA, 25 bp, Homo sapien
ttctatatcgtcgattaaaaggctg

SEQ ID NO: 6010799 - DNA, 25 bp, Homo sapien
atttttggtgtaggccaatgaattg

SEQ ID NO: 6010800 - DNA, 25 bp, Homo sapien
atacaagttgcatggctctgaaata

SEQ ID NO: 6010801 - DNA, 25 bp, Homo sapien
gagctcaacaatttgcgaaactatg

SEQ ID NO: 6010802 - DNA, 25 bp, Homo sapien
ctggaattatgcaagagctcaacaa

SEQ ID NO: 6010803 - DNA, 25 bp, Homo sapien
gccttgtcccctatgtagattgatc

SEQ ID NO: 6010804 - DNA, 25 bp, Homo sapien
ttaagtgagaagtggtctgtcccct

SEQ ID NO: 6010805 - DNA, 25 bp, Homo sapien
atccaagccttgtcccctatgtaga

SEQ ID NO: 6010806 - DNA, 25 bp, Homo sapien
tattgatcagctcatctatcttggc

SEQ ID NO: 6010807 - DNA, 25 bp, Homo sapien
tacccagaagatttatgaaaggaac

SEQ ID NO: 6010808 - DNA, 25 bp, Homo sapien
ttgaaaatcgtaatcaaattatgat

SEQ ID NO: 6010809 - DNA, 25 bp, Homo sapien
aaatttagtctaaagttcttgccag

SEQ ID NO: 6010810 - DNA, 25 bp, Homo sapien
acaggatcattattgatcagctcat

SEQ ID NO: 6010811 - DNA, 25 bp, Homo sapien
aatctttcaaattcaagtaatcatc

SEQ ID NO: 6010812 - DNA, 25 bp, Homo sapien
ataaggttttgaaatcaagctttca

SEQ ID NO: 6010813 - DNA, 25 bp, Homo sapien
ggctggaattatgcaagagctcaac

SEQ ID NO: 6010814 - DNA, 25 bp, Homo sapien
ctattatatataacaattcgtcatg

SEQ ID NO: 6010815 - DNA, 25 bp, Homo sapien
ttcggataagtggtctattatatat

SEQ ID NO: 6010816 - DNA, 25 bp, Homo sapien
tttatatctttatcacttgtcctca

SEQ ID NO: 6010817 - DNA, 25 bp, Homo sapien
ttggtgtaggccaatgaattggtgt

SEQ ID NO: 6010818 - DNA, 25 bp, Homo sapien
aatggccgtggtgtgaggaaggaga

SEQ ID NO: 6010819 - DNA, 25 bp, Homo sapien
ggccgcctgttttattcataaccat

SEQ ID NO: 6010820 - DNA, 25 bp, Homo sapien
taacaattcgtcatgtaaattggtg

SEQ ID NO: 6010821 - DNA, 25 bp, Homo sapien
gctctgaaatacatataatttgcgg

SEQ ID NO: 6010822 - DNA, 25 bp, Homo sapien
caaaggctcttttgtggttagctgc

SEQ ID NO: 6010823 - DNA, 25 bp, Homo sapien
ggaattatgcaagagctcaacaatt

SEQ ID NO: 6010824 - DNA, 25 bp, Homo sapien
tttcaggcagaaagtctctccagta

SEQ ID NO: 6010825 - DNA, 25 bp, Homo sapien
tcgctggacatttggaaatctttca

SEQ ID NO: 6010826 - DNA, 25 bp, Homo sapien
aaatcaggtaaatacttattttcat

SEQ ID NO: 6010827 - DNA, 25 bp, Homo sapien
ataatacccagaagatttatgaaag

SEQ ID NO: 6010828 - DNA, 25 bp, Homo sapien
ataaataatacccagaagatttatg

SEQ ID NO: 6010829 - DNA, 25 bp, Homo sapien
ccgcctgttttattcataaccatat

SEQ ID NO: 6010830 - DNA, 25 bp, Homo sapien
atacatataatttgcggtgtttata

SEQ ID NO: 6010831 - DNA, 25 bp, Homo sapien
attgatcaattcttcgttgaaaatc

SEQ ID NO: 6010832 - DNA, 25 bp, Homo sapien
aagtaatcatctctaatctgataaa

SEQ ID NO: 6010833 - DNA, 25 bp, Homo sapien
tttcaaaaggatgtgattataaggt

SEQ ID NO: 6010834 - DNA, 25 bp, Homo sapien
aacgaatggccgtggtgtgaggaag

SEQ ID NO: 6010835 - DNA, 25 bp, Homo sapien
ggtgtcgaattccagtatttgaatc

SEQ ID NO: 6010836 - DNA, 25 bp, Homo sapien
gctggacatttggaaatctttcaaa

SEQ ID NO: 6010837 - DNA, 25 bp, Homo sapien
atcgtaatcaaattatgatacaaag

SEQ ID NO: 6010838 - DNA, 25 bp, Homo sapien
tcataactctgttaatttgaactat

SEQ ID NO: 6010839 - DNA, 25 bp, Homo sapien
tgtccccttctcaagggagcattat

SEQ ID NO: 6010840 - DNA, 25 bp, Homo sapien
tgacctttcgttttagtgaagttaa

SEQ ID NO: 6010841 - DNA, 25 bp, Homo sapien
ttttggtgtaggccaatgaattggt

SEQ ID NO: 6010842 - DNA, 25 bp, Homo sapien
gtatttgaatcagctttagttttat

SEQ ID NO: 6010843 - DNA, 25 bp, Homo sapien
aattcgtcatgtaaattggtggcgg

SEQ ID NO: 6010844 - DNA, 25 bp, Homo sapien
gaattccagtatttgaatcagcttt

SEQ ID NO: 6010845 - DNA, 25 bp, Homo sapien
gatttcaggcagaaagtctctccag

SEQ ID NO: 6010846 - DNA, 25 bp, Homo sapien
tattcaaatacatctcctgagtagg

SEQ ID NO: 6010847 - DNA, 25 bp, Homo sapien
ttatagtggagggtacaccgaagat

SEQ ID NO: 6010848 - DNA, 25 bp, Homo sapien
tcttctatatcgtcgattaaaaggc

SEQ ID NO: 6010849 - DNA, 25 bp, Homo sapien
cccttctcaagggagcattatcttc

SEQ ID NO: 6010850 - DNA, 25 bp, Homo sapien
cttagaatttcattgtgttgctcag

SEQ ID NO: 6010851 - DNA, 25 bp, Homo sapien
tttcaaattcaagtaatcatctcta

SEQ ID NO: 6010852 - DNA, 25 bp, Homo sapien
gttgcatggctctgaaatacatata

SEQ ID NO: 6010853 - DNA, 25 bp, Homo sapien
atgtagattgatcaattcttcgttg

SEQ ID NO: 6010854 - DNA, 25 bp, Homo sapien
tcacaattcggataagtggtctatt

SEQ ID NO: 6010855 - DNA, 25 bp, Homo sapien
aaaaggccgcctgttttattcataa

SEQ ID NO: 6010856 - DNA, 25 bp, Homo sapien
gtgattataaggttttgaaatcaag

SEQ ID NO: 6010857 - DNA, 25 bp, Homo sapien
ccaatgaattggtgtcgaattccag

SEQ ID NO: 6010858 - DNA, 25 bp, Homo sapien
ggtctttgggcaaattcataactct

SEQ ID NO: 6010859 - DNA, 25 bp, Homo sapien
gccaggtttcaaaaggatgtgatta

SEQ ID NO: 6010860 - DNA, 25 bp, Homo sapien
taagtggtctattatatataacaat

SEQ ID NO: 6010861 - DNA, 25 bp, Homo sapien
catctcctgagtaggtatgatttca

SEQ ID NO: 6010862 - DNA, 25 bp, Homo sapien
tgtggttagctgcgatacaagttgc

SEQ ID NO: 6010863 - DNA, 25 bp, Homo sapien
atcaggtaaatacttattttcatta

SEQ ID NO: 6010864 - DNA, 25 bp, Homo sapien
ataactctgttaatttgaactatta

SEQ ID NO: 6010865 - DNA, 25 bp, Homo sapien
agtctctccagtatatatccaagcc

SEQ ID NO: 6010866 - DNA, 25 bp, Homo sapien
ttgtcctcaacaggagaattcttag

SEQ ID NO: 6010867 - DNA, 25 bp, Homo sapien
aaattcaagtaatcatctctaatct

SEQ ID NO: 6010868 - DNA, 25 bp, Homo sapien
cttctcaagggagcattatcttcta

SEQ ID NO: 6010869 - DNA, 25 bp, Homo sapien
agggcgtggacgatgggaaaagata

SEQ ID NO: 6010870 - DNA, 25 bp, Homo sapien
gctggaccaaacaggatcattattg

SEQ ID NO: 6010871 - DNA, 25 bp, Homo sapien
ttgaaatcaagctttcattttggct

SEQ ID NO: 6010872 - DNA, 25 bp, Homo sapien
aatacatctcctgagtaggtatgat

SEQ ID NO: 6010873 - DNA, 25 bp, Homo sapien
gcctgttttattcataaccatattc

SEQ ID NO: 6010874 - DNA, 25 bp, Homo sapien
gattaagtgagaagtggtctgtccc

SEQ ID NO: 6010875 - DNA, 25 bp, Homo sapien
ggcggtgtcggaatgcgaagccaaa

SEQ ID NO: 6010876 - DNA, 25 bp, Homo sapien
ttttgaaatcaagctttcattttgg

SEQ ID NO: 6010877 - DNA, 25 bp, Homo sapien
aattggtgtcgaattccagtatttg

SEQ ID NO: 6010878 - DNA, 25 bp, Homo sapien
atggccagctggtctttgggcaaat

SEQ ID NO: 6010879 - DNA, 25 bp, Homo sapien
acaattcgtcatgtaaattggtggc

SEQ ID NO: 6010880 - DNA, 25 bp, Homo sapien
aatttgcggtgtttatagtggaggg

SEQ ID NO: 6010881 - DNA, 25 bp, Homo sapien
tcccctctgtaatgtcctcagcaaa

SEQ ID NO: 6010882 - DNA, 25 bp, Homo sapien
tcctcagcaaagcctttttcgctgg

SEQ ID NO: 6010883 - DNA, 25 bp, Homo sapien
ttatgatacaaaggctcttttgtgg

SEQ ID NO: 6010884 - DNA, 25 bp, Homo sapien
tatcacttgtcctcaacaggagaat

SEQ ID NO: 6010885 - DNA, 25 bp, Homo sapien
agtctaaagttcttgccaggtttca

SEQ ID NO: 6010886 - DNA, 25 bp, Homo sapien
tctcaagggagcattatcttctata

SEQ ID NO: 6010887 - DNA, 25 bp, Homo sapien
tgataaataatacccagaagattta

SEQ ID NO: 6010888 - DNA, 25 bp, Homo sapien
aatgaattggtgtcgaattccagta

SEQ ID NO: 6010889 - DNA, 25 bp, Homo sapien
gtcggaatgcgaagccaaatcaggt

SEQ ID NO: 6010890 - DNA, 25 bp, Homo sapien
cagtatttgaatcagctttagtttt

SEQ ID NO: 6010891 - DNA, 25 bp, Homo sapien
tagaatttcattgtgttgctcagtt

SEQ ID NO: 6010892 - DNA, 25 bp, Homo sapien
tgaagttaagggcgtggacgatggg

SEQ ID NO: 6010893 - DNA, 25 bp, Homo sapien
atataatttgcggtgtttatagtgg

SEQ ID NO: 6010894 - DNA, 25 bp, Homo sapien
aagtgagaagtggtctgtccccttc

SEQ ID NO: 6010895 - DNA, 25 bp, Homo sapien
ggtttcaaaaggatgtgattataag

SEQ ID NO: 6010896 - DNA, 25 bp, Homo sapien
cgatacaagttgcatggctctgaaa

SEQ ID NO: 6010897 - DNA, 25 bp, Homo sapien
atgatttcaggcagaaagtctctcc

SEQ ID NO: 6010898 - DNA, 25 bp, Homo sapien
ctatatcgtcgattaaaaggctgga

SEQ ID NO: 6010899 - DNA, 25 bp, Homo sapien
tacaaaggctcttttgtggttagct

SEQ ID NO: 6010900 - DNA, 25 bp, Homo sapien
tcatgtaaattggtggcggtgtcgg

SEQ ID NO: 6010901 - DNA, 25 bp, Homo sapien
aaatacatataatttgcggtgttta

SEQ ID NO: 6010902 - DNA, 25 bp, Homo sapien
taggccaatgaattggtgtcgaatt

SEQ ID NO: 6010903 - DNA, 25 bp, Homo sapien
agccaaatcaggtaaatacttattt

SEQ ID NO: 6010904 - DNA, 25 bp, Homo sapien
aaggatgtgattataaggttttgaa

SEQ ID NO: 6010905 - DNA, 25 bp, Homo sapien
ctctgtaatgtcctcagcaaagcct

SEQ ID NO: 6010906 - DNA, 25 bp, Homo sapien
aaagtctctccagtatatatccaag

SEQ ID NO: 6010907 - DNA, 25 bp, Homo sapien
gaaactatggccagctggtctttgg

SEQ ID NO: 6010908 - DNA, 25 bp, Homo sapien
atttatgaaaggaaccaacgaatgg

SEQ ID NO: 6010909 - DNA, 25 bp, Homo sapien
tggtctattatatataacaattcgt

SEQ ID NO: 6010910 - DNA, 25 bp, Homo sapien
gcagaaagtctctccagtatatatc

SEQ ID NO: 6010911 - DNA, 25 bp, Homo sapien
ccctatgtagattgatcaattcttc

SEQ ID NO: 6010912 - DNA, 25 bp, Homo sapien
gattaataaaatttttggtgtaggc

SEQ ID NO: 6010913 - DNA, 25 bp, Homo sapien
ttagtgaagttaagggcgtggacga

SEQ ID NO: 6010914 - DNA, 25 bp, Homo sapien
gttgctcagtttgacctttcgtttt

SEQ ID NO: 6010915 - DNA, 25 bp, Homo sapien
cttccatgagtctcaacgttaatct

SEQ ID NO: 6010916 - DNA, 25 bp, Homo sapien
ttcataaccatattcaaatacatct

SEQ ID NO: 6010917 - DNA, 25 bp, Homo sapien
gaggaaggagacagcgcttccatga

SEQ ID NO: 6010918 - DNA, 25 bp, Homo sapien
tctcctgagtaggtatgatttcagg

SEQ ID NO: 6010919 - DNA, 25 bp, Homo sapien
accgaagattaagtgagaagtggtc

SEQ ID NO: 6010920 - DNA, 25 bp, Homo sapien
attatcttctatatcgtcgattaaa

SEQ ID NO: 6010921 - DNA, 25 bp, Homo sapien
gggtacaccgaagattaagtgagaa

SEQ ID NO: 6010922 - DNA, 25 bp, Homo sapien
aagttcttgccaggtttcaaaagga

SEQ ID NO: 6010923 - DNA, 25 bp, Homo sapien
aggatcattattgatcagctcatct

SEQ ID NO: 6010924 - DNA, 25 bp, Homo sapien
ttatgaaaggaaccaacgaatggcc

SEQ ID NO: 6010925 - DNA, 25 bp, Homo sapien
tgtaggccaatgaattggtgtcgaa

SEQ ID NO: 6010926 - DNA, 25 bp, Homo sapien
gatgggaaaagataacttcccctct

SEQ ID NO: 6010927 - DNA, 25 bp, Homo sapien
gtatatatccaagccttgtccccta

SEQ ID NO: 6010928 - DNA, 25 bp, Homo sapien
ttcattgtgttgctcagtttgacct

SEQ ID NO: 6010929 - DNA, 25 bp, Homo sapien
acttgtcctcaacaggagaattctt

SEQ ID NO: 6010930 - DNA, 25 bp, Homo sapien
aagctttcattttggctggaccaaa

SEQ ID NO: 6010931 - DNA, 25 bp, Homo sapien
agtggtctgtccccttctcaaggga

SEQ ID NO: 6010932 - DNA, 25 bp, Homo sapien
tgcggtgtttatagtggagggtaca

SEQ ID NO: 6010933 - DNA, 25 bp, Homo sapien
attattgatcagctcatctatcttg

SEQ ID NO: 6010934 - DNA, 25 bp, Homo sapien
cggtgtcggaatgcgaagccaaatc

SEQ ID NO: 6010935 - DNA, 25 bp, Homo sapien
aactatggccagctggtctttgggc

SEQ ID NO: 6010936 - DNA, 25 bp, Homo sapien
atatcgtcgattaaaaggctggaat

SEQ ID NO: 6010937 - DNA, 25 bp, Homo sapien
cagtttgacctttcgttttagtgaa

SEQ ID NO: 6010938 - DNA, 25 bp, Homo sapien
caattcttcgttgaaaatcgtaatc

SEQ ID NO: 6010939 - DNA, 25 bp, Homo sapien
ctcttttgtggttagctgcgataca

SEQ ID NO: 6010940 - DNA, 25 bp, Homo sapien
cagaagatttatgaaaggaaccaac

SEQ ID NO: 6010941 - DNA, 25 bp, Homo sapien
tcaagtaatcatctctaatctgata

SEQ ID NO: 6010942 - DNA, 25 bp, Homo sapien
attatatataacaattcgtcatgta

SEQ ID NO: 6010943 - DNA, 25 bp, Homo sapien
aaacaggatcattattgatcagctc

SEQ ID NO: 6010944 - DNA, 25 bp, Homo sapien
tgtcgaattccagtatttgaatcag

SEQ ID NO: 6010945 - DNA, 25 bp, Homo sapien
aggcagaaagtctctccagtatata

SEQ ID NO: 6010946 - DNA, 25 bp, Homo sapien
gcgaaactatggccagctggtcttt

SEQ ID NO: 6010947 - DNA, 25 bp, Homo sapien
tggctctgaaatacatataatttgc

SEQ ID NO: 6010948 - DNA, 25 bp, Homo sapien
tctgaaatacatataatttgcggtg

SEQ ID NO: 6010949 - DNA, 25 bp, Homo sapien
aatgtcctcagcaaagcctttttcg

SEQ ID NO: 6010950 - DNA, 25 bp, Homo sapien
tcccctatgtagattgatcaattct

SEQ ID NO: 6010951 - DNA, 25 bp, Homo sapien
gctgcgatacaagttgcatggctct

SEQ ID NO: 6010952 - DNA, 25 bp, Homo sapien
tggttagctgcgatacaagttgcat

SEQ ID NO: 6010953 - DNA, 25 bp, Homo sapien
agaaagtctctccagtatatatcca

SEQ ID NO: 6010954 - DNA, 25 bp, Homo sapien
aaaaggatgtgattataaggttttg

SEQ ID NO: 6010955 - DNA, 25 bp, Homo sapien
atgaaaggaaccaacgaatggccgt

SEQ ID NO: 6010956 - DNA, 25 bp, Homo sapien
taaaatttttggtgtaggccaatga

SEQ ID NO: 6010957 - DNA, 25 bp, Homo sapien
gaatttcattgtgttgctcagtttg

SEQ ID NO: 6010958 - DNA, 25 bp, Homo sapien
attggtggcggtgtcggaatgcgaa

SEQ ID NO: 6010959 - DNA, 25 bp, Homo sapien
caggtttcaaaaggatgtgattata

SEQ ID NO: 6010960 - DNA, 25 bp, Homo sapien
aatcaagctttcattttggctggac

SEQ ID NO: 6010961 - DNA, 25 bp, Homo sapien
aagagctcaacaatttgcgaaacta

SEQ ID NO: 6010962 - DNA, 25 bp, Homo sapien
gggagcattatcttctatatcgtcg

SEQ ID NO: 6010963 - DNA, 25 bp, Homo sapien
tctaaagttcttgccaggtttcaaa

SEQ ID NO: 6010964 - DNA, 25 bp, Homo sapien
aaggaaccaacgaatggccgtggtg

SEQ ID NO: 6010965 - DNA, 25 bp, Homo sapien
aagttgcatggctctgaaatacata

SEQ ID NO: 6010966 - DNA, 25 bp, Homo sapien
tgagtctcaacgttaatctgaaaag

SEQ ID NO: 6010967 - DNA, 25 bp, Homo sapien
caatttgcgaaactatggccagctg

SEQ ID NO: 6010968 - DNA, 25 bp, Homo sapien
atttgaatcagctttagttttatat

SEQ ID NO: 6010969 - DNA, 25 bp, Homo sapien
tctctccagtatatatccaagcctt

SEQ ID NO: 6010970 - DNA, 25 bp, Homo sapien
ttaaatttagtctaaagttcttgcc

SEQ ID NO: 6010971 - DNA, 25 bp, Homo sapien
ttgccaggtttcaaaaggatgtgat

SEQ ID NO: 6010972 - DNA, 25 bp, Homo sapien
atatatccaagccttgtcccctatg

SEQ ID NO: 6010973 - DNA, 25 bp, Homo sapien
aacaatttgcgaaactatggccagc

SEQ ID NO: 6010974 - DNA, 25 bp, Homo sapien
tctttatcacttgtcctcaacagga

SEQ ID NO: 6010975 - DNA, 25 bp, Homo sapien
acagcgcttccatgagtctcaacgt

SEQ ID NO: 6010976 - DNA, 25 bp, Homo sapien
gttagctgcgatacaagttgcatgg

SEQ ID NO: 6010977 - DNA, 25 bp, Homo sapien
ttataaggttttgaaatcaagcttt

SEQ ID NO: 6010978 - DNA, 25 bp, Homo sapien
gtgttgctcagtttgacctttcgtt

SEQ ID NO: 6010979 - DNA, 25 bp, Homo sapien
tttggaaatctttcaaattcaagta

SEQ ID NO: 6010980 - DNA, 25 bp, Homo sapien
agtctcaacgttaatctgaaaaggc

SEQ ID NO: 6010981 - DNA, 25 bp, Homo sapien
tacatctcctgagtaggtatgattt

SEQ ID NO: 6010982 - DNA, 25 bp, Homo sapien
ttcgttgaaaatcgtaatcaaatta

SEQ ID NO: 6010983 - DNA, 25 bp, Homo sapien
tggaccaaacaggatcattattgat

SEQ ID NO: 6010984 - DNA, 25 bp, Homo sapien
gaatcagctttagttttatatcttt

SEQ ID NO: 6010985 - DNA, 25 bp, Homo sapien
aagattaagtgagaagtggtctgtc

SEQ ID NO: 6010986 - DNA, 25 bp, Homo sapien
gatcattattgatcagctcatctat

SEQ ID NO: 6010987 - DNA, 25 bp, Homo sapien
gaagtggtctgtccccttctcaagg

SEQ ID NO: 6010988 - DNA, 25 bp, Homo sapien
gtagattgatcaattcttcgttgaa

SEQ ID NO: 6010989 - DNA, 25 bp, Homo sapien
gtgagaagtggtctgtccccttctc

SEQ ID NO: 6010990 - DNA, 25 bp, Homo sapien
tcttcgttgaaaatcgtaatcaaat

SEQ ID NO: 6010991 - DNA, 25 bp, Homo sapien
tttcattttggctggaccaaacagg

SEQ ID NO: 6010992 - DNA, 25 bp, Homo sapien
tctgataaataatacccagaagatt

SEQ ID NO: 6010993 - DNA, 25 bp, Homo sapien
tggtggcggtgtcggaatgcgaagc

SEQ ID NO: 6010994 - DNA, 25 bp, Homo sapien
gaaaggaaccaacgaatggccgtgg

SEQ ID NO: 6010995 - DNA, 25 bp, Homo sapien
gaaatctttcaaattcaagtaatca

SEQ ID NO: 6010996 - DNA, 25 bp, Homo sapien
atcaaattatgatacaaaggctctt

SEQ ID NO: 6010997 - DNA, 25 bp, Homo sapien
tatatctttatcacttgtcctcaac

SEQ ID NO: 6010998 - DNA, 25 bp, Homo sapien
tcgattaaaaggctggaattatgca

SEQ ID NO: 6010999 - DNA, 25 bp, Homo sapien
gtctattatatataacaattcgtca

SEQ ID NO: 6011000 - DNA, 25 bp, Homo sapien
tatctttatcacttgtcctcaacag

SEQ ID NO: 6011001 - DNA, 25 bp, Homo sapien
tccagtatttgaatcagctttagtt

SEQ ID NO: 6011002 - DNA, 25 bp, Homo sapien
cttttgtggttagctgcgatacaag

SEQ ID NO: 6011003 - DNA, 25 bp, Homo sapien
tcaacgttaatctgaaaaggccgcc

SEQ ID NO: 6011004 - DNA, 25 bp, Homo sapien
atcagctttagttttatatctttat

SEQ ID NO: 6011005 - DNA, 25 bp, Homo sapien
cgcttccatgagtctcaacgttaat

SEQ ID NO: 6011006 - DNA, 25 bp, Homo sapien
tgaaatacatataatttgcggtgtt

SEQ ID NO: 6011007 - DNA, 25 bp, Homo sapien
cgaagattaagtgagaagtggtctg

SEQ ID NO: 6011008 - DNA, 25 bp, Homo sapien
gatacaaaggctcttttgtggttag

SEQ ID NO: 6011009 - DNA, 25 bp, Homo sapien
tctttgggcaaattcataactctgt

SEQ ID NO: 6011010 - DNA, 25 bp, Homo sapien
tcaagggagcattatcttctatatc

SEQ ID NO: 6011011 - DNA, 25 bp, Homo sapien
gttaagggcgtggacgatgggaaaa

SEQ ID NO: 6011012 - DNA, 25 bp, Homo sapien
caggagaattcttagaatttcattg

SEQ ID NO: 6011013 - DNA, 25 bp, Homo sapien
tcattattgatcagctcatctatct

SEQ ID NO: 6011014 - DNA, 25 bp, Homo sapien
aaatttttggtgtaggccaatgaat

SEQ ID NO: 6011015 - DNA, 25 bp, Homo sapien
aaatcgtaatcaaattatgatacaa

SEQ ID NO: 6011016 - DNA, 25 bp, Homo sapien
tttcgctggacatttggaaatcttt

SEQ ID NO: 6011017 - DNA, 25 bp, Homo sapien
acatataatttgcggtgtttatagt

SEQ ID NO: 6011018 - DNA, 25 bp, Homo sapien
ttgatcagctcatctatcttggcct

SEQ ID NO: 6011019 - DNA, 25 bp, Homo sapien
catttggaaatctttcaaattcaag

SEQ ID NO: 6011020 - DNA, 25 bp, Homo sapien
tatcttctatatcgtcgattaaaag

SEQ ID NO: 6011021 - DNA, 25 bp, Homo sapien
gtttatagtggagggtacaccgaag

SEQ ID NO: 6011022 - DNA, 25 bp, Homo sapien
aatacccagaagatttatgaaagga

SEQ ID NO: 6011023 - DNA, 25 bp, Homo sapien
tctccagtatatatccaagccttgt

SEQ ID NO: 6011024 - DNA, 25 bp, Homo sapien
cgtggtgtgaggaaggagacagcgc

SEQ ID NO: 6011025 - DNA, 25 bp, Homo sapien
aaattggtggcggtgtcggaatgcg

SEQ ID NO: 6011026 - DNA, 25 bp, Homo sapien
ctggtctttgggcaaattcataact

SEQ ID NO: 6011027 - DNA, 25 bp, Homo sapien
tggacatttggaaatctttcaaatt

SEQ ID NO: 6011028 - DNA, 25 bp, Homo sapien
aaggttttgaaatcaagctttcatt

SEQ ID NO: 6011029 - DNA, 25 bp, Homo sapien
atatccaagccttgtcccctatgta

SEQ ID NO: 6011030 - DNA, 25 bp, Homo sapien
ggaaggagacagcgcttccatgagt

SEQ ID NO: 6011031 - DNA, 25 bp, Homo sapien
ttgtgttgctcagtttgacctttcg

SEQ ID NO: 6011032 - DNA, 25 bp, Homo sapien
ggcaaattcataactctgttaattt

SEQ ID NO: 6011033 - DNA, 25 bp, Homo sapien
ctatggccagctggtctttgggcaa

SEQ ID NO: 6011034 - DNA, 25 bp, Homo sapien
gctcaacaatttgcgaaactatggc

SEQ ID NO: 6011035 - DNA, 25 bp, Homo sapien
aggtatgatttcaggcagaaagtct

SEQ ID NO: 6011036 - DNA, 25 bp, Homo sapien
ttaaaaggctggaattatgcaagag

SEQ ID NO: 6011037 - DNA, 25 bp, Homo sapien
aaggctcttttgtggttagctgcga

SEQ ID NO: 6011038 - DNA, 25 bp, Homo sapien
ttagtctaaagttcttgccaggttt

SEQ ID NO: 6011039 - DNA, 25 bp, Homo sapien
gtaaattggtggcggtgtcggaatg

SEQ ID NO: 6011040 - DNA, 25 bp, Homo sapien
aagttaagggcgtggacgatgggaa

SEQ ID NO: 6011041 - DNA, 25 bp, Homo sapien
gcaaagcctttttcgctggacattt

SEQ ID NO: 6011042 - DNA, 25 bp, Homo sapien
agtgaagttaagggcgtggacgatg

SEQ ID NO: 6011043 - DNA, 25 bp, Homo sapien
ctgagtaggtatgatttcaggcaga

SEQ ID NO: 6011044 - DNA, 25 bp, Homo sapien
attccagtatttgaatcagctttag

SEQ ID NO: 6011045 - DNA, 25 bp, Homo sapien
atcgtcgattaaaaggctggaatta

SEQ ID NO: 6011046 - DNA, 25 bp, Homo sapien
tcctgagtaggtatgatttcaggca

SEQ ID NO: 6011047 - DNA, 25 bp, Homo sapien
ggagacagcgcttccatgagtctca

SEQ ID NO: 6011048 - DNA, 25 bp, Homo sapien
ctatgtagattgatcaattcttcgt

SEQ ID NO: 6011049 - DNA, 25 bp, Homo sapien
aaggagacagcgcttccatgagtct

SEQ ID NO: 6011050 - DNA, 25 bp, Homo sapien
gctttcattttggctggaccaaaca

SEQ ID NO: 6011051 - DNA, 25 bp, Homo sapien
acaagttgcatggctctgaaataca

SEQ ID NO: 6011052 - DNA, 25 bp, Homo sapien
tcaacaatttgcgaaactatggcca

SEQ ID NO: 6011053 - DNA, 25 bp, Homo sapien
ttcttagaatttcattgtgttgctc

SEQ ID NO: 6011054 - DNA, 25 bp, Homo sapien
accatattcaaatacatctcctgag

SEQ ID NO: 6011055 - DNA, 25 bp, Homo sapien
tatatataacaattcgtcatgtaaa

SEQ ID NO: 6011056 - DNA, 25 bp, Homo sapien
aaataatacccagaagatttatgaa

SEQ ID NO: 6011057 - DNA, 25 bp, Homo sapien
cttgtcccctatgtagattgatcaa

SEQ ID NO: 6011058 - DNA, 25 bp, Homo sapien
agatttatgaaaggaaccaacgaat

SEQ ID NO: 6011059 - DNA, 25 bp, Homo sapien
tcaaattcaagtaatcatctctaat

SEQ ID NO: 6011060 - DNA, 25 bp, Homo sapien
tctcaacgttaatctgaaaaggccg

SEQ ID NO: 6011061 - DNA, 25 bp, Homo sapien
catggctctgaaatacatataattt

SEQ ID NO: 6011062 - DNA, 25 bp, Homo sapien
cgttaatctgaaaaggccgcctgtt

SEQ ID NO: 6011063 - DNA, 25 bp, Homo sapien
ggaaaagataacttcccctctgtaa

SEQ ID NO: 6011064 - DNA, 25 bp, Homo sapien
gtaggtatgatttcaggcagaaagt

SEQ ID NO: 6011065 - DNA, 25 bp, Homo sapien
atagtggagggtacaccgaagatta

SEQ ID NO: 6011066 - DNA, 25 bp, Homo sapien
cgttgaaaatcgtaatcaaattatg

SEQ ID NO: 6011067 - DNA, 25 bp, Homo sapien
ttggtgtcgaattccagtatttgaa

SEQ ID NO: 6011068 - DNA, 25 bp, Homo sapien
tatataacaattcgtcatgtaaatt

SEQ ID NO: 6011069 - DNA, 25 bp, Homo sapien
tggagggtacaccgaagattaagtg

SEQ ID NO: 6011070 - DNA, 25 bp, Homo sapien
gtgtcggaatgcgaagccaaatcag

SEQ ID NO: 6011071 - DNA, 25 bp, Homo sapien
atgtgattataaggttttgaaatca

SEQ ID NO: 6011072 - DNA, 25 bp, Homo sapien
cctcaacaggagaattcttagaatt

SEQ ID NO: 6011073 - DNA, 25 bp, Homo sapien
tagctgcgatacaagttgcatggct

SEQ ID NO: 6011074 - DNA, 25 bp, Homo sapien
gaccaaacaggatcattattgatca

SEQ ID NO: 6011075 - DNA, 25 bp, Homo sapien
taaagttcttgccaggtttcaaaag

SEQ ID NO: 6011076 - DNA, 25 bp, Homo sapien
gtgtgaggaaggagacagcgcttcc

SEQ ID NO: 6011077 - DNA, 25 bp, Homo sapien
atcaattcttcgttgaaaatcgtaa

SEQ ID NO: 6011078 - DNA, 25 bp, Homo sapien
caaatacatctcctgagtaggtatg

SEQ ID NO: 6011079 - DNA, 25 bp, Homo sapien
attcaagtaatcatctctaatctga

SEQ ID NO: 6011080 - DNA, 25 bp, Homo sapien
ttgcgaaactatggccagctggtct

SEQ ID NO: 6011081 - DNA, 25 bp, Homo sapien
catgagtctcaacgttaatctgaaa

SEQ ID NO: 6011082 - DNA, 25 bp, Homo sapien
cagcaaagcctttttcgctggacat

SEQ ID NO: 6011083 - DNA, 25 bp, Homo sapien
tggctggaccaaacaggatcattat

SEQ ID NO: 6011084 - DNA, 25 bp, Homo sapien
atgtaaattggtggcggtgtcggaa

SEQ ID NO: 6011085 - DNA, 25 bp, Homo sapien
tgggcaaattcataactctgttaat

SEQ ID NO: 6011086 - DNA, 25 bp, Homo sapien
taaccatattcaaatacatctcctg

SEQ ID NO: 6011087 - DNA, 25 bp, Homo sapien
agacagcgcttccatgagtctcaac

SEQ ID NO: 6011088 - DNA, 25 bp, Homo sapien
gtatgatttcaggcagaaagtctct

SEQ ID NO: 6011089 - DNA, 25 bp, Homo sapien
cgtcgattaaaaggctggaattatg

SEQ ID NO: 6011090 - DNA, 25 bp, Homo sapien
tttgggcaaattcataactctgtta

SEQ ID NO: 6011091 - DNA, 25 bp, Homo sapien
tgggaaaagataacttcccctctgt

SEQ ID NO: 6011092 - DNA, 25 bp, Homo sapien
agcgcttccatgagtctcaacgtta

SEQ ID NO: 6011093 - DNA, 25 bp, Homo sapien
aaggccgcctgttttattcataacc

SEQ ID NO: 6011094 - DNA, 25 bp, Homo sapien
tccccttctcaagggagcattatct

SEQ ID NO: 6011095 - DNA, 25 bp, Homo sapien
atttagtctaaagttcttgccaggt

SEQ ID NO: 6011096 - DNA, 25 bp, Homo sapien
gagggtacaccgaagattaagtgag

SEQ ID NO: 6011097 - DNA, 25 bp, Homo sapien
ctgtaatgtcctcagcaaagccttt

SEQ ID NO: 6011098 - DNA, 25 bp, Homo sapien
ggcgtggacgatgggaaaagataac

SEQ ID NO: 6011099 - DNA, 25 bp, Homo sapien
tctgaaaaggccgcctgttttattc

SEQ ID NO: 6011100 - DNA, 25 bp, Homo sapien
cagtatatatccaagccttgtcccc

SEQ ID NO: 6011101 - DNA, 25 bp, Homo sapien
aaagcctttttcgctggacatttgg

SEQ ID NO: 6011102 - DNA, 25 bp, Homo sapien
tggacgatgggaaaagataacttcc

SEQ ID NO: 6011103 - DNA, 25 bp, Homo sapien
aagataacttcccctctgtaatgtc

SEQ ID NO: 6011104 - DNA, 25 bp, Homo sapien
tggccgtggtgtgaggaaggagaca

SEQ ID NO: 6011105 - DNA, 25 bp, Homo sapien
agtggagggtacaccgaagattaag

SEQ ID NO: 6011106 - DNA, 25 bp, Homo sapien
cccagaagatttatgaaaggaacca

SEQ ID NO: 6011107 - DNA, 25 bp, Homo sapien
tggaaatctttcaaattcaagtaat

SEQ ID NO: 6011108 - DNA, 25 bp, Homo sapien
tcaacaggagaattcttagaatttc

SEQ ID NO: 6011109 - DNA, 25 bp, Homo sapien
tgatcaattcttcgttgaaaatcgt

SEQ ID NO: 6011110 - DNA, 25 bp, Homo sapien
cgtcatgtaaattggtggcggtgtc

SEQ ID NO: 6011111 - DNA, 25 bp, Homo sapien
tcacttgtcctcaacaggagaattc

SEQ ID NO: 6011112 - DNA, 25 bp, Homo sapien
cgtaatcaaattatgatacaaaggc

SEQ ID NO: 6011113 - DNA, 25 bp, Homo sapien
attcttcgttgaaaatcgtaatcaa

SEQ ID NO: 6011114 - DNA, 25 bp, Homo sapien
aacgcaatagtttagtaaatatcaa

SEQ ID NO: 6011115 - DNA, 25 bp, Homo sapien
gagtgtacctgctaatggaatactt

SEQ ID NO: 6011116 - DNA, 25 bp, Homo sapien
atactaatagggttcaataatgtca

SEQ ID NO: 6011117 - DNA, 25 bp, Homo sapien
atgatacacgaaaataagaagctac

SEQ ID NO: 6011118 - DNA, 25 bp, Homo sapien
cagcaaagaaacccgaattcaaaaa

SEQ ID NO: 6011119 - DNA, 25 bp, Homo sapien
gaaaactgtctgtgggacaattgac

SEQ ID NO: 6011120 - DNA, 25 bp, Homo sapien
tcaataaaccatggagaatatccca

SEQ ID NO: 6011121 - DNA, 25 bp, Homo sapien
agtataataaatccgccagaaaata

SEQ ID NO: 6011122 - DNA, 25 bp, Homo sapien
acacggacccttcaacgatatttta

SEQ ID NO: 6011123 - DNA, 25 bp, Homo sapien
ccattcgccgcagcaaagaaacccg

SEQ ID NO: 6011124 - DNA, 25 bp, Homo sapien
ggcgtttgaactactgaccggtgcc

SEQ ID NO: 6011125 - DNA, 25 bp, Homo sapien
ccatggagaatatcccattcgccgc

SEQ ID NO: 6011126 - DNA, 25 bp, Homo sapien
attcatagagatattaaacctgaaa

SEQ ID NO: 6011127 - DNA, 25 bp, Homo sapien
aaggaaagcgacttcttccaaaatg

SEQ ID NO: 6011128 - DNA, 25 bp, Homo sapien
atatatttgcgcactgaaagtaatg

SEQ ID NO: 6011129 - DNA, 25 bp, Homo sapien
gcactgaaagtaatggagaaggaag

SEQ ID NO: 6011130 - DNA, 25 bp, Homo sapien
tctcaggatgcgcaagatttaatac

SEQ ID NO: 6011131 - DNA, 25 bp, Homo sapien
tcgccgcagcaaagaaacccgaatt

SEQ ID NO: 6011132 - DNA, 25 bp, Homo sapien
tcaggatgcgcaagatttaatactt

SEQ ID NO: 6011133 - DNA, 25 bp, Homo sapien
atcatccgaatctaactaaatcata

SEQ ID NO: 6011134 - DNA, 25 bp, Homo sapien
caacaagaccaaatacgtccaggat

SEQ ID NO: 6011135 - DNA, 25 bp, Homo sapien
agatgcatgggctcttggcgtcctg

SEQ ID NO: 6011136 - DNA, 25 bp, Homo sapien
ttcggtaaagtttattgcgttcggc

SEQ ID NO: 6011137 - DNA, 25 bp, Homo sapien
aatgtataaactattgaggttacac

SEQ ID NO: 6011138 - DNA, 25 bp, Homo sapien
gaatacttagtcaatggggaaatgt

SEQ ID NO: 6011139 - DNA, 25 bp, Homo sapien
acgaccccaaagatagaatgcgcct

SEQ ID NO: 6011140 - DNA, 25 bp, Homo sapien
gctcttggcgtcctggcgtttgaac

SEQ ID NO: 6011141 - DNA, 25 bp, Homo sapien
taataaatccgccagaaaatagaag

SEQ ID NO: 6011142 - DNA, 25 bp, Homo sapien
atagatgcatgggctcttggcgtcc

SEQ ID NO: 6011143 - DNA, 25 bp, Homo sapien
tcctggcgtttgaactactgaccgg

SEQ ID NO: 6011144 - DNA, 25 bp, Homo sapien
attaagttaacggacttcggatgga

SEQ ID NO: 6011145 - DNA, 25 bp, Homo sapien
tggatatggaaagctccaaaattcc

SEQ ID NO: 6011146 - DNA, 25 bp, Homo sapien
agggttcaataatgtcattaagtta

SEQ ID NO: 6011147 - DNA, 25 bp, Homo sapien
actattgaggttacacggacccttc

SEQ ID NO: 6011148 - DNA, 25 bp, Homo sapien
taaacgctaattcgccatcgaaaaa

SEQ ID NO: 6011149 - DNA, 25 bp, Homo sapien
gactacctttctccagaaatggtgg

SEQ ID NO: 6011150 - DNA, 25 bp, Homo sapien
ggagtacaggatatatttgcgcact

SEQ ID NO: 6011151 - DNA, 25 bp, Homo sapien
gaggttacacggacccttcaacgat

SEQ ID NO: 6011152 - DNA, 25 bp, Homo sapien
ttctccagaaatggtggagtcaagg

SEQ ID NO: 6011153 - DNA, 25 bp, Homo sapien
cacaacaagaccaaatacgtccagg

SEQ ID NO: 6011154 - DNA, 25 bp, Homo sapien
atcgaaaaagaccacaacaagacca

SEQ ID NO: 6011155 - DNA, 25 bp, Homo sapien
ctcgatgactttgaactggggaaga

SEQ ID NO: 6011156 - DNA, 25 bp, Homo sapien
aatgtcattaagttaacggacttcg

SEQ ID NO: 6011157 - DNA, 25 bp, Homo sapien
tttggatatggaaagctccaaaatt

SEQ ID NO: 6011158 - DNA, 25 bp, Homo sapien
attcgccgcagcaaagaaacccgaa

SEQ ID NO: 6011159 - DNA, 25 bp, Homo sapien
tccgaatctaactaaatcatacggc

SEQ ID NO: 6011160 - DNA, 25 bp, Homo sapien
tcaaaatgcccagtaacatttctca

SEQ ID NO: 6011161 - DNA, 25 bp, Homo sapien
cagattacctgtaaacaataagaag

SEQ ID NO: 6011162 - DNA, 25 bp, Homo sapien
tttatcaaattgccaatgccctaga

SEQ ID NO: 6011163 - DNA, 25 bp, Homo sapien
tttattgcgttcggcacaggagtac

SEQ ID NO: 6011164 - DNA, 25 bp, Homo sapien
aaaaggatagcagcactggatatca

SEQ ID NO: 6011165 - DNA, 25 bp, Homo sapien
tgtataaactattgaggttacacgg

SEQ ID NO: 6011166 - DNA, 25 bp, Homo sapien
ggatggagtataataaatccgccag

SEQ ID NO: 6011167 - DNA, 25 bp, Homo sapien
agatagaatgcgccttggagacgta

SEQ ID NO: 6011168 - DNA, 25 bp, Homo sapien
catcagattatatttatcaaattgc

SEQ ID NO: 6011169 - DNA, 25 bp, Homo sapien
acctgaaaatatactaatagggttc

SEQ ID NO: 6011170 - DNA, 25 bp, Homo sapien
agggaggtagaaatacaaacatcgc

SEQ ID NO: 6011171 - DNA, 25 bp, Homo sapien
cgacttcttccaaaatgatacacga

SEQ ID NO: 6011172 - DNA, 25 bp, Homo sapien
tatttatcaaattgccaatgcccta

SEQ ID NO: 6011173 - DNA, 25 bp, Homo sapien
aatctaactaaatcatacggctatt

SEQ ID NO: 6011174 - DNA, 25 bp, Homo sapien
ctggcgtttgaactactgaccggtg

SEQ ID NO: 6011175 - DNA, 25 bp, Homo sapien
ctatagatgcatgggctcttggcgt

SEQ ID NO: 6011176 - DNA, 25 bp, Homo sapien
aatggaatacttagtcaatggggaa

SEQ ID NO: 6011177 - DNA, 25 bp, Homo sapien
atcacactatagatgcatgggctct

SEQ ID NO: 6011178 - DNA, 25 bp, Homo sapien
acaattgactacctttctccagaaa

SEQ ID NO: 6011179 - DNA, 25 bp, Homo sapien
aaatggtggagtcaagggaatatga

SEQ ID NO: 6011180 - DNA, 25 bp, Homo sapien
tgccctagattatatgcataaaaag

SEQ ID NO: 6011181 - DNA, 25 bp, Homo sapien
catcacctataaggaaagcgacttc

SEQ ID NO: 6011182 - DNA, 25 bp, Homo sapien
tataatttacagaaacaattcagaa

SEQ ID NO: 6011183 - DNA, 25 bp, Homo sapien
acggctattttcatgatgaaaaaag

SEQ ID NO: 6011184 - DNA, 25 bp, Homo sapien
gccagaaaatagaaggaaaactgtc

SEQ ID NO: 6011185 - DNA, 25 bp, Homo sapien
acccttcaacgatattttagcatca

SEQ ID NO: 6011186 - DNA, 25 bp, Homo sapien
tggatatcaaaatgcccagtaacat

SEQ ID NO: 6011187 - DNA, 25 bp, Homo sapien
aaaatagaaggaaaactgtctgtgg

SEQ ID NO: 6011188 - DNA, 25 bp, Homo sapien
taagagaaaaattgaacagattacc

SEQ ID NO: 6011189 - DNA, 25 bp, Homo sapien
ctaaatcatccgaatctaactaaat

SEQ ID NO: 6011190 - DNA, 25 bp, Homo sapien
tcatgatgaaaaaagagtgtacctg

SEQ ID NO: 6011191 - DNA, 25 bp, Homo sapien
tcatacggctattttcatgatgaaa

SEQ ID NO: 6011192 - DNA, 25 bp, Homo sapien
caggatatatttgcgcactgaaagt

SEQ ID NO: 6011193 - DNA, 25 bp, Homo sapien
ggacccttcaacgatattttagcat

SEQ ID NO: 6011194 - DNA, 25 bp, Homo sapien
ctactaaaatacgaccccaaagata

SEQ ID NO: 6011195 - DNA, 25 bp, Homo sapien
atacaaacatcgctaaatcatccga

SEQ ID NO: 6011196 - DNA, 25 bp, Homo sapien
tgaacagattacctgtaaacaataa

SEQ ID NO: 6011197 - DNA, 25 bp, Homo sapien
cttccaaaatgatacacgaaaataa

SEQ ID NO: 6011198 - DNA, 25 bp, Homo sapien
gaaggaaaactgtctgtgggacaat

SEQ ID NO: 6011199 - DNA, 25 bp, Homo sapien
ggaatatgatcacactatagatgca

SEQ ID NO: 6011200 - DNA, 25 bp, Homo sapien
tggaaagctccaaaattccatcacc

SEQ ID NO: 6011201 - DNA, 25 bp, Homo sapien
acctaaatttaaatccctatcactc

SEQ ID NO: 6011202 - DNA, 25 bp, Homo sapien
atccgccagaaaatagaaggaaaac

SEQ ID NO: 6011203 - DNA, 25 bp, Homo sapien
tcatagagatattaaacctgaaaat

SEQ ID NO: 6011204 - DNA, 25 bp, Homo sapien
attcaaaaataccttcacctgtaag

SEQ ID NO: 6011205 - DNA, 25 bp, Homo sapien
ggttacacggacccttcaacgatat

SEQ ID NO: 6011206 - DNA, 25 bp, Homo sapien
gcaaagaaacccgaattcaaaaata

SEQ ID NO: 6011207 - DNA, 25 bp, Homo sapien
gatgaaaaaagagtgtacctgctaa

SEQ ID NO: 6011208 - DNA, 25 bp, Homo sapien
ctacctttctccagaaatggtggag

SEQ ID NO: 6011209 - DNA, 25 bp, Homo sapien
tataaactattgaggttacacggac

SEQ ID NO: 6011210 - DNA, 25 bp, Homo sapien
cggacttcggatggagtataataaa

SEQ ID NO: 6011211 - DNA, 25 bp, Homo sapien
tattattcatagagatattaaacct

SEQ ID NO: 6011212 - DNA, 25 bp, Homo sapien
agaaaaattgaacagattacctgta

SEQ ID NO: 6011213 - DNA, 25 bp, Homo sapien
ccttcaacgatattttagcatcaga

SEQ ID NO: 6011214 - DNA, 25 bp, Homo sapien
ccgccagaaaatagaaggaaaactg

SEQ ID NO: 6011215 - DNA, 25 bp, Homo sapien
aaacaattcagaagggaggtagaaa

SEQ ID NO: 6011216 - DNA, 25 bp, Homo sapien
caagggaatatgatcacactataga

SEQ ID NO: 6011217 - DNA, 25 bp, Homo sapien
tgatcacactatagatgcatgggct

SEQ ID NO: 6011218 - DNA, 25 bp, Homo sapien
cgcagcaaagaaacccgaattcaaa

SEQ ID NO: 6011219 - DNA, 25 bp, Homo sapien
tgcccagtaacatttctcaggatgc

SEQ ID NO: 6011220 - DNA, 25 bp, Homo sapien
agaccacaacaagaccaaatacgtc

SEQ ID NO: 6011221 - DNA, 25 bp, Homo sapien
aagaccaaatacgtccaggatcaat

SEQ ID NO: 6011222 - DNA, 25 bp, Homo sapien
ggaggtagaaatacaaacatcgcta

SEQ ID NO: 6011223 - DNA, 25 bp, Homo sapien
tcacctgtaagagaaaaattgaaca

SEQ ID NO: 6011224 - DNA, 25 bp, Homo sapien
aaatacaaacatcgctaaatcatcc

SEQ ID NO: 6011225 - DNA, 25 bp, Homo sapien
ttagcatcagattatatttatcaaa

SEQ ID NO: 6011226 - DNA, 25 bp, Homo sapien
tttctcaggatgcgcaagatttaat

SEQ ID NO: 6011227 - DNA, 25 bp, Homo sapien
acatataaaaggatagcagcactgg

SEQ ID NO: 6011228 - DNA, 25 bp, Homo sapien
cacgaaaataagaagctacctaaat

SEQ ID NO: 6011229 - DNA, 25 bp, Homo sapien
tactacatataaaaggatagcagca

SEQ ID NO: 6011230 - DNA, 25 bp, Homo sapien
attatatttatcaaattgccaatgc

SEQ ID NO: 6011231 - DNA, 25 bp, Homo sapien
cgatgactttgaactggggaagaaa

SEQ ID NO: 6011232 - DNA, 25 bp, Homo sapien
cgaaaaagaccacaacaagaccaaa

SEQ ID NO: 6011233 - DNA, 25 bp, Homo sapien
ggatagcagcactggatatcaaaat

SEQ ID NO: 6011234 - DNA, 25 bp, Homo sapien
agtacaggatatatttgcgcactga

SEQ ID NO: 6011235 - DNA, 25 bp, Homo sapien
aaattgccaatgccctagattatat

SEQ ID NO: 6011236 - DNA, 25 bp, Homo sapien
tatcccattcgccgcagcaaagaaa

SEQ ID NO: 6011237 - DNA, 25 bp, Homo sapien
tcggatggagtataataaatccgcc

SEQ ID NO: 6011238 - DNA, 25 bp, Homo sapien
ctgctaatggaatacttagtcaatg

SEQ ID NO: 6011239 - DNA, 25 bp, Homo sapien
gcgttcggcacaggagtacaggata

SEQ ID NO: 6011240 - DNA, 25 bp, Homo sapien
accacaacaagaccaaatacgtcca

SEQ ID NO: 6011241 - DNA, 25 bp, Homo sapien
gctaatggaatacttagtcaatggg

SEQ ID NO: 6011242 - DNA, 25 bp, Homo sapien
attccatcacctataaggaaagcga

SEQ ID NO: 6011243 - DNA, 25 bp, Homo sapien
caaaatgatacacgaaaataagaag

SEQ ID NO: 6011244 - DNA, 25 bp, Homo sapien
tccatcacctataaggaaagcgact

SEQ ID NO: 6011245 - DNA, 25 bp, Homo sapien
gtgtacctgctaatggaatacttag

SEQ ID NO: 6011246 - DNA, 25 bp, Homo sapien
ctataaggaaagcgacttcttccaa

SEQ ID NO: 6011247 - DNA, 25 bp, Homo sapien
aaatatactaatagggttcaataat

SEQ ID NO: 6011248 - DNA, 25 bp, Homo sapien
ttaacggacttcggatggagtataa

SEQ ID NO: 6011249 - DNA, 25 bp, Homo sapien
gaccccaaagatagaatgcgccttg

SEQ ID NO: 6011250 - DNA, 25 bp, Homo sapien
tcgaagaagaaatgaaagatactac

SEQ ID NO: 6011251 - DNA, 25 bp, Homo sapien
gggctcttggcgtcctggcgtttga

SEQ ID NO: 6011252 - DNA, 25 bp, Homo sapien
ttttagcatcagattatatttatca

SEQ ID NO: 6011253 - DNA, 25 bp, Homo sapien
taaactattgaggttacacggaccc

SEQ ID NO: 6011254 - DNA, 25 bp, Homo sapien
cactcgatgactttgaactggggaa

SEQ ID NO: 6011255 - DNA, 25 bp, Homo sapien
agattatatttatcaaattgccaat

SEQ ID NO: 6011256 - DNA, 25 bp, Homo sapien
ggaaagcgacttcttccaaaatgat

SEQ ID NO: 6011257 - DNA, 25 bp, Homo sapien
ccggtgcccctccgttcgaagaaga

SEQ ID NO: 6011258 - DNA, 25 bp, Homo sapien
attaaacctgaaaatatactaatag

SEQ ID NO: 6011259 - DNA, 25 bp, Homo sapien
acctttctccagaaatggtggagtc

SEQ ID NO: 6011260 - DNA, 25 bp, Homo sapien
aacagattacctgtaaacaataaga

SEQ ID NO: 6011261 - DNA, 25 bp, Homo sapien
acttcttccaaaatgatacacgaaa

SEQ ID NO: 6011262 - DNA, 25 bp, Homo sapien
tactgaccggtgcccctccgttcga

SEQ ID NO: 6011263 - DNA, 25 bp, Homo sapien
ataatgtcattaagttaacggactt

SEQ ID NO: 6011264 - DNA, 25 bp, Homo sapien
aaaatgcccagtaacatttctcagg

SEQ ID NO: 6011265 - DNA, 25 bp, Homo sapien
aattgactacctttctccagaaatg

SEQ ID NO: 6011266 - DNA, 25 bp, Homo sapien
ttcaacgatattttagcatcagatt

SEQ ID NO: 6011267 - DNA, 25 bp, Homo sapien
gtaaaaatgcatccttggatactaa

SEQ ID NO: 6011268 - DNA, 25 bp, Homo sapien
agagaaaaattgaacagattacctg

SEQ ID NO: 6011269 - DNA, 25 bp, Homo sapien
aagaagtttttggatatggaaagct

SEQ ID NO: 6011270 - DNA, 25 bp, Homo sapien
gatcaataaaccatggagaatatcc

SEQ ID NO: 6011271 - DNA, 25 bp, Homo sapien
gatatggaaagctccaaaattccat

SEQ ID NO: 6011272 - DNA, 25 bp, Homo sapien
ggcgtcctggcgtttgaactactga

SEQ ID NO: 6011273 - DNA, 25 bp, Homo sapien
ggacaattgactacctttctccaga

SEQ ID NO: 6011274 - DNA, 25 bp, Homo sapien
aatagaaggaaaactgtctgtggga

SEQ ID NO: 6011275 - DNA, 25 bp, Homo sapien
taactaaatcatacggctattttca

SEQ ID NO: 6011276 - DNA, 25 bp, Homo sapien
atataaaaggatagcagcactggat

SEQ ID NO: 6011277 - DNA, 25 bp, Homo sapien
gaaaatatactaatagggttcaata

SEQ ID NO: 6011278 - DNA, 25 bp, Homo sapien
ctacatataaaaggatagcagcact

SEQ ID NO: 6011279 - DNA, 25 bp, Homo sapien
acatcgctaaatcatccgaatctaa

SEQ ID NO: 6011280 - DNA, 25 bp, Homo sapien
catttctcaggatgcgcaagattta

SEQ ID NO: 6011281 - DNA, 25 bp, Homo sapien
atcactcgatgactttgaactgggg

SEQ ID NO: 6011282 - DNA, 25 bp, Homo sapien
agaatgcgccttggagacgtaaaaa

SEQ ID NO: 6011283 - DNA, 25 bp, Homo sapien
tgaaagatactacatataaaaggat

SEQ ID NO: 6011284 - DNA, 25 bp, Homo sapien
acctgctaatggaatacttagtcaa

SEQ ID NO: 6011285 - DNA, 25 bp, Homo sapien
atcgctaaatcatccgaatctaact

SEQ ID NO: 6011286 - DNA, 25 bp, Homo sapien
tatggaaagctccaaaattccatca

SEQ ID NO: 6011287 - DNA, 25 bp, Homo sapien
aagatactacatataaaaggatagc

SEQ ID NO: 6011288 - DNA, 25 bp, Homo sapien
tgcccctccgttcgaagaagaaatg

SEQ ID NO: 6011289 - DNA, 25 bp, Homo sapien
tattgcgttcggcacaggagtacag

SEQ ID NO: 6011290 - DNA, 25 bp, Homo sapien
ataagaagtttttggatatggaaag

SEQ ID NO: 6011291 - DNA, 25 bp, Homo sapien
gacttcggatggagtataataaatc

SEQ ID NO: 6011292 - DNA, 25 bp, Homo sapien
ttagtaaatatcaaactaaacgcta

SEQ ID NO: 6011293 - DNA, 25 bp, Homo sapien
ccaggatcaataaaccatggagaat

SEQ ID NO: 6011294 - DNA, 25 bp, Homo sapien
tcaaattgccaatgccctagattat

SEQ ID NO: 6011295 - DNA, 25 bp, Homo sapien
ggagacgtaaaaatgcatccttgga

SEQ ID NO: 6011296 - DNA, 25 bp, Homo sapien
aaaaatgcatccttggatactaaga

SEQ ID NO: 6011297 - DNA, 25 bp, Homo sapien
aaaaataccttcacctgtaagagaa

SEQ ID NO: 6011298 - DNA, 25 bp, Homo sapien
gcatgggctcttggcgtcctggcgt

SEQ ID NO: 6011299 - DNA, 25 bp, Homo sapien
gcactggatatcaaaatgcccagta

SEQ ID NO: 6011300 - DNA, 25 bp, Homo sapien
aaagatagaatgcgccttggagacg

SEQ ID NO: 6011301 - DNA, 25 bp, Homo sapien
aaaaattgaacagattacctgtaaa

SEQ ID NO: 6011302 - DNA, 25 bp, Homo sapien
ttggagacgtaaaaatgcatccttg

SEQ ID NO: 6011303 - DNA, 25 bp, Homo sapien
cagcactggatatcaaaatgcccag

SEQ ID NO: 6011304 - DNA, 25 bp, Homo sapien
aaatccgccagaaaatagaaggaaa

SEQ ID NO: 6011305 - DNA, 25 bp, Homo sapien
ccccaaagatagaatgcgccttgga

SEQ ID NO: 6011306 - DNA, 25 bp, Homo sapien
tccgttcgaagaagaaatgaaagat

SEQ ID NO: 6011307 - DNA, 25 bp, Homo sapien
ccaaatacgtccaggatcaataaac

SEQ ID NO: 6011308 - DNA, 25 bp, Homo sapien
cacaggagtacaggatatatttgcg

SEQ ID NO: 6011309 - DNA, 25 bp, Homo sapien
tcttggcgtcctggcgtttgaacta

SEQ ID NO: 6011310 - DNA, 25 bp, Homo sapien
gaaaataagaagctacctaaattta

SEQ ID NO: 6011311 - DNA, 25 bp, Homo sapien
ccttggagacgtaaaaatgcatcct

SEQ ID NO: 6011312 - DNA, 25 bp, Homo sapien
atgggctcttggcgtcctggcgttt

SEQ ID NO: 6011313 - DNA, 25 bp, Homo sapien
atgatgaaaaaagagtgtacctgct

SEQ ID NO: 6011314 - DNA, 25 bp, Homo sapien
ctacctaaatttaaatccctatcac

SEQ ID NO: 6011315 - DNA, 25 bp, Homo sapien
aacatttctcaggatgcgcaagatt

SEQ ID NO: 6011316 - DNA, 25 bp, Homo sapien
cccctccgttcgaagaagaaatgaa

SEQ ID NO: 6011317 - DNA, 25 bp, Homo sapien
aaagtttattgcgttcggcacagga

SEQ ID NO: 6011318 - DNA, 25 bp, Homo sapien
atgcatccttggatactaagaaaca

SEQ ID NO: 6011319 - DNA, 25 bp, Homo sapien
tctaactaaatcatacggctatttt

SEQ ID NO: 6011320 - DNA, 25 bp, Homo sapien
ctaaatttaaatccctatcactcga

SEQ ID NO: 6011321 - DNA, 25 bp, Homo sapien
agggaatatgatcacactatagatg

SEQ ID NO: 6011322 - DNA, 25 bp, Homo sapien
cactatagatgcatgggctcttggc

SEQ ID NO: 6011323 - DNA, 25 bp, Homo sapien
tattttagcatcagattatatttat

SEQ ID NO: 6011324 - DNA, 25 bp, Homo sapien
tgaaaaaagagtgtacctgctaatg

SEQ ID NO: 6011325 - DNA, 25 bp, Homo sapien
atgcaacgcaatagtttagtaaata

SEQ ID NO: 6011326 - DNA, 25 bp, Homo sapien
agaaatggtggagtcaagggaatat

SEQ ID NO: 6011327 - DNA, 25 bp, Homo sapien
tgcgcaagatttaatacttaaacta

SEQ ID NO: 6011328 - DNA, 25 bp, Homo sapien
ccgaattcaaaaataccttcacctg

SEQ ID NO: 6011329 - DNA, 25 bp, Homo sapien
ttggcgtcctggcgtttgaactact

SEQ ID NO: 6011330 - DNA, 25 bp, Homo sapien
tgtgggacaattgactacctttctc

SEQ ID NO: 6011331 - DNA, 25 bp, Homo sapien
caagatttaatacttaaactactaa

SEQ ID NO: 6011332 - DNA, 25 bp, Homo sapien
ttgcgcactgaaagtaatggagaag

SEQ ID NO: 6011333 - DNA, 25 bp, Homo sapien
ctatcactcgatgactttgaactgg

SEQ ID NO: 6011334 - DNA, 25 bp, Homo sapien
ttcagaagggaggtagaaatacaaa

SEQ ID NO: 6011335 - DNA, 25 bp, Homo sapien
actggatatcaaaatgcccagtaac

SEQ ID NO: 6011336 - DNA, 25 bp, Homo sapien
gtagaaatacaaacatcgctaaatc

SEQ ID NO: 6011337 - DNA, 25 bp, Homo sapien
aagctccaaaattccatcacctata

SEQ ID NO: 6011338 - DNA, 25 bp, Homo sapien
gcatccttggatactaagaaacaag

SEQ ID NO: 6011339 - DNA, 25 bp, Homo sapien
tacacgaaaataagaagctacctaa

SEQ ID NO: 6011340 - DNA, 25 bp, Homo sapien
tgaactactgaccggtgcccctccg

SEQ ID NO: 6011341 - DNA, 25 bp, Homo sapien
tgccaatgccctagattatatgcat

SEQ ID NO: 6011342 - DNA, 25 bp, Homo sapien
ttcaataatgtcattaagttaacgg

SEQ ID NO: 6011343 - DNA, 25 bp, Homo sapien
cagaagggaggtagaaatacaaaca

SEQ ID NO: 6011344 - DNA, 25 bp, Homo sapien
taatacttaaactactaaaatacga

SEQ ID NO: 6011345 - DNA, 25 bp, Homo sapien
tcggcacaggagtacaggatatatt

SEQ ID NO: 6011346 - DNA, 25 bp, Homo sapien
gatattttagcatcagattatattt

SEQ ID NO: 6011347 - DNA, 25 bp, Homo sapien
caaaattccatcacctataaggaaa

SEQ ID NO: 6011348 - DNA, 25 bp, Homo sapien
taagttaacggacttcggatggagt

SEQ ID NO: 6011349 - DNA, 25 bp, Homo sapien
cggtaaagtttattgcgttcggcac

SEQ ID NO: 6011350 - DNA, 25 bp, Homo sapien
agaaatacaaacatcgctaaatcat

SEQ ID NO: 6011351 - DNA, 25 bp, Homo sapien
agtataatttacagaaacaattcag

SEQ ID NO: 6011352 - DNA, 25 bp, Homo sapien
taaatatcaaactaaacgctaattc

SEQ ID NO: 6011353 - DNA, 25 bp, Homo sapien
acgatattttagcatcagattatat

SEQ ID NO: 6011354 - DNA, 25 bp, Homo sapien
tcaaaaataccttcacctgtaagag

SEQ ID NO: 6011355 - DNA, 25 bp, Homo sapien
ttattcatagagatattaaacctga

SEQ ID NO: 6011356 - DNA, 25 bp, Homo sapien
taatttacagaaacaattcagaagg

SEQ ID NO: 6011357 - DNA, 25 bp, Homo sapien
tatatttatcaaattgccaatgccc

SEQ ID NO: 6011358 - DNA, 25 bp, Homo sapien
agttaacggacttcggatggagtat

SEQ ID NO: 6011359 - DNA, 25 bp, Homo sapien
atacggctattttcatgatgaaaaa

SEQ ID NO: 6011360 - DNA, 25 bp, Homo sapien
aacggacttcggatggagtataata

SEQ ID NO: 6011361 - DNA, 25 bp, Homo sapien
tgggacaattgactacctttctcca

SEQ ID NO: 6011362 - DNA, 25 bp, Homo sapien
aatatcccattcgccgcagcaaaga

SEQ ID NO: 6011363 - DNA, 25 bp, Homo sapien
aaatacgaccccaaagatagaatgc

SEQ ID NO: 6011364 - DNA, 25 bp, Homo sapien
aaatgcatccttggatactaagaaa

SEQ ID NO: 6011365 - DNA, 25 bp, Homo sapien
aatgccctagattatatgcataaaa

SEQ ID NO: 6011366 - DNA, 25 bp, Homo sapien
ttgaggttacacggacccttcaacg

SEQ ID NO: 6011367 - DNA, 25 bp, Homo sapien
actaaatcatacggctattttcatg

SEQ ID NO: 6011368 - DNA, 25 bp, Homo sapien
aaatccctatcactcgatgactttg

SEQ ID NO: 6011369 - DNA, 25 bp, Homo sapien
ggcacaggagtacaggatatatttg

SEQ ID NO: 6011370 - DNA, 25 bp, Homo sapien
cagtaacatttctcaggatgcgcaa

SEQ ID NO: 6011371 - DNA, 25 bp, Homo sapien
accttcacctgtaagagaaaaattg

SEQ ID NO: 6011372 - DNA, 25 bp, Homo sapien
gatgcgcaagatttaatacttaaac

SEQ ID NO: 6011373 - DNA, 25 bp, Homo sapien
actaaaatacgaccccaaagataga

SEQ ID NO: 6011374 - DNA, 25 bp, Homo sapien
tttcatgatgaaaaaagagtgtacc

SEQ ID NO: 6011375 - DNA, 25 bp, Homo sapien
gccgcagcaaagaaacccgaattca

SEQ ID NO: 6011376 - DNA, 25 bp, Homo sapien
tataataaatccgccagaaaataga

SEQ ID NO: 6011377 - DNA, 25 bp, Homo sapien
aatgcgccttggagacgtaaaaatg

SEQ ID NO: 6011378 - DNA, 25 bp, Homo sapien
cttcacctgtaagagaaaaattgaa

SEQ ID NO: 6011379 - DNA, 25 bp, Homo sapien
agagatattaaacctgaaaatatac

SEQ ID NO: 6011380 - DNA, 25 bp, Homo sapien
aaattgaacagattacctgtaaaca

SEQ ID NO: 6011381 - DNA, 25 bp, Homo sapien
gaagaaatgaaagatactacatata

SEQ ID NO: 6011382 - DNA, 25 bp, Homo sapien
gaagggaggtagaaatacaaacatc

SEQ ID NO: 6011383 - DNA, 25 bp, Homo sapien
ggagaatatcccattcgccgcagca

SEQ ID NO: 6011384 - DNA, 25 bp, Homo sapien
aaatcatccgaatctaactaaatca

SEQ ID NO: 6011385 - DNA, 25 bp, Homo sapien
actaaacgctaattcgccatcgaaa

SEQ ID NO: 6011386 - DNA, 25 bp, Homo sapien
gttcggcacaggagtacaggatata

SEQ ID NO: 6011387 - DNA, 25 bp, Homo sapien
ctgaccggtgcccctccgttcgaag

SEQ ID NO: 6011388 - DNA, 25 bp, Homo sapien
taaaccatggagaatatcccattcg

SEQ ID NO: 6011389 - DNA, 25 bp, Homo sapien
tcaaactaaacgctaattcgccatc

SEQ ID NO: 6011390 - DNA, 25 bp, Homo sapien
aaaaaagagtgtacctgctaatgga

SEQ ID NO: 6011391 - DNA, 25 bp, Homo sapien
ttgcgttcggcacaggagtacagga

SEQ ID NO: 6011392 - DNA, 25 bp, Homo sapien
aaggatagcagcactggatatcaaa

SEQ ID NO: 6011393 - DNA, 25 bp, Homo sapien
aaactaaacgctaattcgccatcga

SEQ ID NO: 6011394 - DNA, 25 bp, Homo sapien
tttttggatatggaaagctccaaaa

SEQ ID NO: 6011395 - DNA, 25 bp, Homo sapien
acgtccaggatcaataaaccatgga

SEQ ID NO: 6011396 - DNA, 25 bp, Homo sapien
ttacagaaacaattcagaagggagg

SEQ ID NO: 6011397 - DNA, 25 bp, Homo sapien
acggacccttcaacgatattttagc

SEQ ID NO: 6011398 - DNA, 25 bp, Homo sapien
ataaatccgccagaaaatagaagga

SEQ ID NO: 6011399 - DNA, 25 bp, Homo sapien
aaatacgtccaggatcaataaacca

SEQ ID NO: 6011400 - DNA, 25 bp, Homo sapien
atgactttgaactggggaagaaatt

SEQ ID NO: 6011401 - DNA, 25 bp, Homo sapien
atttgcgcactgaaagtaatggaga

SEQ ID NO: 6011402 - DNA, 25 bp, Homo sapien
ggatactaagaaacaagcccttttg

SEQ ID NO: 6011403 - DNA, 25 bp, Homo sapien
atagcagcactggatatcaaaatgc

SEQ ID NO: 6011404 - DNA, 25 bp, Homo sapien
atacgtccaggatcaataaaccatg

SEQ ID NO: 6011405 - DNA, 25 bp, Homo sapien
acaaacatcgctaaatcatccgaat

SEQ ID NO: 6011406 - DNA, 25 bp, Homo sapien
aaccatggagaatatcccattcgcc

SEQ ID NO: 6011407 - DNA, 25 bp, Homo sapien
acctataaggaaagcgacttcttcc

SEQ ID NO: 6011408 - DNA, 25 bp, Homo sapien
attgccaatgccctagattatatgc

SEQ ID NO: 6011409 - DNA, 25 bp, Homo sapien
actactgaccggtgcccctccgttc

SEQ ID NO: 6011410 - DNA, 25 bp, Homo sapien
atgcatgggctcttggcgtcctggc

SEQ ID NO: 6011411 - DNA, 25 bp, Homo sapien
ccctagattatatgcataaaaagaa

SEQ ID NO: 6011412 - DNA, 25 bp, Homo sapien
atttacagaaacaattcagaaggga

SEQ ID NO: 6011413 - DNA, 25 bp, Homo sapien
attgaacagattacctgtaaacaat

SEQ ID NO: 6011414 - DNA, 25 bp, Homo sapien
atagggttcaataatgtcattaagt

SEQ ID NO: 6011415 - DNA, 25 bp, Homo sapien
ttacacggacccttcaacgatattt

SEQ ID NO: 6011416 - DNA, 25 bp, Homo sapien
ttaaatccctatcactcgatgactt

SEQ ID NO: 6011417 - DNA, 25 bp, Homo sapien
ttcgccatcgaaaaagaccacaaca

SEQ ID NO: 6011418 - DNA, 25 bp, Homo sapien
tagaaggaaaactgtctgtgggaca

SEQ ID NO: 6011419 - DNA, 25 bp, Homo sapien
ggatatatttgcgcactgaaagtaa

SEQ ID NO: 6011420 - DNA, 25 bp, Homo sapien
tcattaagttaacggacttcggatg

SEQ ID NO: 6011421 - DNA, 25 bp, Homo sapien
cgcaagatttaatacttaaactact

SEQ ID NO: 6011422 - DNA, 25 bp, Homo sapien
tatcaaactaaacgctaattcgcca

SEQ ID NO: 6011423 - DNA, 25 bp, Homo sapien
cctccgttcgaagaagaaatgaaag

SEQ ID NO: 6011424 - DNA, 25 bp, Homo sapien
caacgatattttagcatcagattat

SEQ ID NO: 6011425 - DNA, 25 bp, Homo sapien
tctgtgggacaattgactacctttc

SEQ ID NO: 6011426 - DNA, 25 bp, Homo sapien
tggagtcaagggaatatgatcacac

SEQ ID NO: 6011427 - DNA, 25 bp, Homo sapien
tacaggatatatttgcgcactgaaa

SEQ ID NO: 6011428 - DNA, 25 bp, Homo sapien
gtccaggatcaataaaccatggaga

SEQ ID NO: 6011429 - DNA, 25 bp, Homo sapien
tccaaaatgatacacgaaaataaga

SEQ ID NO: 6011430 - DNA, 25 bp, Homo sapien
aatgcccagtaacatttctcaggat

SEQ ID NO: 6011431 - DNA, 25 bp, Homo sapien
gaccaaatacgtccaggatcaataa

SEQ ID NO: 6011432 - DNA, 25 bp, Homo sapien
gctccaaaattccatcacctataag

SEQ ID NO: 6011433 - DNA, 25 bp, Homo sapien
agaaacaattcagaagggaggtaga

SEQ ID NO: 6011434 - DNA, 25 bp, Homo sapien
atatactaatagggttcaataatgt

SEQ ID NO: 6011435 - DNA, 25 bp, Homo sapien
ctaattcgccatcgaaaaagaccac

SEQ ID NO: 6011436 - DNA, 25 bp, Homo sapien
gaaagctccaaaattccatcaccta

SEQ ID NO: 6011437 - DNA, 25 bp, Homo sapien
acaagaccaaatacgtccaggatca

SEQ ID NO: 6011438 - DNA, 25 bp, Homo sapien
aagagtgtacctgctaatggaatac

SEQ ID NO: 6011439 - DNA, 25 bp, Homo sapien
aaactgtctgtgggacaattgacta

SEQ ID NO: 6011440 - DNA, 25 bp, Homo sapien
aaagaccacaacaagaccaaatacg

SEQ ID NO: 6011441 - DNA, 25 bp, Homo sapien
ttcttccaaaatgatacacgaaaat

SEQ ID NO: 6011442 - DNA, 25 bp, Homo sapien
ccatcgaaaaagaccacaacaagac

SEQ ID NO: 6011443 - DNA, 25 bp, Homo sapien
gcgcactgaaagtaatggagaagga

SEQ ID NO: 6011444 - DNA, 25 bp, Homo sapien
ggtgcccctccgttcgaagaagaaa

SEQ ID NO: 6011445 - DNA, 25 bp, Homo sapien
gatatcaaaatgcccagtaacattt

SEQ ID NO: 6011446 - DNA, 25 bp, Homo sapien
agcatcagattatatttatcaaatt

SEQ ID NO: 6011447 - DNA, 25 bp, Homo sapien
tccaaaattccatcacctataagga

SEQ ID NO: 6011448 - DNA, 25 bp, Homo sapien
tatcaaattgccaatgccctagatt

SEQ ID NO: 6011449 - DNA, 25 bp, Homo sapien
taaacctgaaaatatactaataggg

SEQ ID NO: 6011450 - DNA, 25 bp, Homo sapien
aatcatacggctattttcatgatga

SEQ ID NO: 6011451 - DNA, 25 bp, Homo sapien
aaattccatcacctataaggaaagc

SEQ ID NO: 6011452 - DNA, 25 bp, Homo sapien
aattcgccatcgaaaaagaccacaa

SEQ ID NO: 6011453 - DNA, 25 bp, Homo sapien
ggttcaataatgtcattaagttaac

SEQ ID NO: 6011454 - DNA, 25 bp, Homo sapien
aattcagaagggaggtagaaataca

SEQ ID NO: 6011455 - DNA, 25 bp, Homo sapien
caggagtacaggatatatttgcgca

SEQ ID NO: 6011456 - DNA, 25 bp, Homo sapien
gtcaatggggaaatgtataaactat

SEQ ID NO: 6011457 - DNA, 25 bp, Homo sapien
ataaaaggatagcagcactggatat

SEQ ID NO: 6011458 - DNA, 25 bp, Homo sapien
aaacatcgctaaatcatccgaatct

SEQ ID NO: 6011459 - DNA, 25 bp, Homo sapien
agtttattgcgttcggcacaggagt

SEQ ID NO: 6011460 - DNA, 25 bp, Homo sapien
atggagaatatcccattcgccgcag

SEQ ID NO: 6011461 - DNA, 25 bp, Homo sapien
aggtagaaatacaaacatcgctaaa

SEQ ID NO: 6011462 - DNA, 25 bp, Homo sapien
ccaaagatagaatgcgccttggaga

SEQ ID NO: 6011463 - DNA, 25 bp, Homo sapien
agtaaatatcaaactaaacgctaat

SEQ ID NO: 6011464 - DNA, 25 bp, Homo sapien
tcccattcgccgcagcaaagaaacc

SEQ ID NO: 6011465 - DNA, 25 bp, Homo sapien
cacactatagatgcatgggctcttg

SEQ ID NO: 6011466 - DNA, 25 bp, Homo sapien
cgcaatagtttagtaaatatcaaac

SEQ ID NO: 6011467 - DNA, 25 bp, Homo sapien
tgtctgtgggacaattgactacctt

SEQ ID NO: 6011468 - DNA, 25 bp, Homo sapien
atggagtataataaatccgccagaa

SEQ ID NO: 6011469 - DNA, 25 bp, Homo sapien
aaaaagaccacaacaagaccaaata

SEQ ID NO: 6011470 - DNA, 25 bp, Homo sapien
ttgactacctttctccagaaatggt

SEQ ID NO: 6011471 - DNA, 25 bp, Homo sapien
taatagggttcaataatgtcattaa

SEQ ID NO: 6011472 - DNA, 25 bp, Homo sapien
gtaaagtttattgcgttcggcacag

SEQ ID NO: 6011473 - DNA, 25 bp, Homo sapien
gaccggtgcccctccgttcgaagaa

SEQ ID NO: 6011474 - DNA, 25 bp, Homo sapien
acagaaacaattcagaagggaggta

SEQ ID NO: 6011475 - DNA, 25 bp, Homo sapien
tgcgccttggagacgtaaaaatgca

SEQ ID NO: 6011476 - DNA, 25 bp, Homo sapien
gggaaatgtataaactattgaggtt

SEQ ID NO: 6011477 - DNA, 25 bp, Homo sapien
ccctatcactcgatgactttgaact

SEQ ID NO: 6011478 - DNA, 25 bp, Homo sapien
ggtggagtcaagggaatatgatcac

SEQ ID NO: 6011479 - DNA, 25 bp, Homo sapien
cgctaattcgccatcgaaaaagacc

SEQ ID NO: 6011480 - DNA, 25 bp, Homo sapien
gaagctacctaaatttaaatcccta

SEQ ID NO: 6011481 - DNA, 25 bp, Homo sapien
aatatgatcacactatagatgcatg

SEQ ID NO: 6011482 - DNA, 25 bp, Homo sapien
taaaatacgaccccaaagatagaat

SEQ ID NO: 6011483 - DNA, 25 bp, Homo sapien
atttaaatccctatcactcgatgac

SEQ ID NO: 6011484 - DNA, 25 bp, Homo sapien
agaaaatagaaggaaaactgtctgt

SEQ ID NO: 6011485 - DNA, 25 bp, Homo sapien
actgtctgtgggacaattgactacc

SEQ ID NO: 6011486 - DNA, 25 bp, Homo sapien
agaatatcccattcgccgcagcaaa

SEQ ID NO: 6011487 - DNA, 25 bp, Homo sapien
tatcaaaatgcccagtaacatttct

SEQ ID NO: 6011488 - DNA, 25 bp, Homo sapien
catccgaatctaactaaatcatacg

SEQ ID NO: 6011489 - DNA, 25 bp, Homo sapien
aaaagagtgtacctgctaatggaat

SEQ ID NO: 6011490 - DNA, 25 bp, Homo sapien
ccagaaatggtggagtcaagggaat

SEQ ID NO: 6011491 - DNA, 25 bp, Homo sapien
agcagcactggatatcaaaatgccc

SEQ ID NO: 6011492 - DNA, 25 bp, Homo sapien
acgtaaaaatgcatccttggatact

SEQ ID NO: 6011493 - DNA, 25 bp, Homo sapien
atccctatcactcgatgactttgaa

SEQ ID NO: 6011494 - DNA, 25 bp, Homo sapien
atggtggagtcaagggaatatgatc

SEQ ID NO: 6011495 - DNA, 25 bp, Homo sapien
aatatcaaactaaacgctaattcgc

SEQ ID NO: 6011496 - DNA, 25 bp, Homo sapien
gtcaagggaatatgatcacactata

SEQ ID NO: 6011497 - DNA, 25 bp, Homo sapien
aaatgatacacgaaaataagaagct

SEQ ID NO: 6011498 - DNA, 25 bp, Homo sapien
ataagaagctacctaaatttaaatc

SEQ ID NO: 6011499 - DNA, 25 bp, Homo sapien
aggaaaactgtctgtgggacaattg

SEQ ID NO: 6011500 - DNA, 25 bp, Homo sapien
ataaggaaagcgacttcttccaaaa

SEQ ID NO: 6011501 - DNA, 25 bp, Homo sapien
aaataccttcacctgtaagagaaaa

SEQ ID NO: 6011502 - DNA, 25 bp, Homo sapien
cgtttgaactactgaccggtgcccc

SEQ ID NO: 6011503 - DNA, 25 bp, Homo sapien
taaatcatacggctattttcatgat

SEQ ID NO: 6011504 - DNA, 25 bp, Homo sapien
cgccatcgaaaaagaccacaacaag

SEQ ID NO: 6011505 - DNA, 25 bp, Homo sapien
tcagattatatttatcaaattgcca

SEQ ID NO: 6011506 - DNA, 25 bp, Homo sapien
actaatagggttcaataatgtcatt

SEQ ID NO: 6011507 - DNA, 25 bp, Homo sapien
gagtcaagggaatatgatcacacta

SEQ ID NO: 6011508 - DNA, 25 bp, Homo sapien
ataccttcacctgtaagagaaaaat

SEQ ID NO: 6011509 - DNA, 25 bp, Homo sapien
tgtcattaagttaacggacttcgga

SEQ ID NO: 6011510 - DNA, 25 bp, Homo sapien
atatttgcgcactgaaagtaatgga

SEQ ID NO: 6011511 - DNA, 25 bp, Homo sapien
ggagtataataaatccgccagaaaa

SEQ ID NO: 6011512 - DNA, 25 bp, Homo sapien
aacaataagaagtttttggatatgg

SEQ ID NO: 6011513 - DNA, 25 bp, Homo sapien
atagaatgcgccttggagacgtaaa

SEQ ID NO: 6011514 - DNA, 25 bp, Homo sapien
cgctaaatcatccgaatctaactaa

SEQ ID NO: 6011515 - DNA, 25 bp, Homo sapien
atacgaccccaaagatagaatgcgc

SEQ ID NO: 6011516 - DNA, 25 bp, Homo sapien
gatactacatataaaaggatagcag

SEQ ID NO: 6011517 - DNA, 25 bp, Homo sapien
ttggatactaagaaacaagcccttt

SEQ ID NO: 6011518 - DNA, 25 bp, Homo sapien
aaagcgacttcttccaaaatgatac

SEQ ID NO: 6011519 - DNA, 25 bp, Homo sapien
tattgaggttacacggacccttcaa

SEQ ID NO: 6011520 - DNA, 25 bp, Homo sapien
ctgaaaatatactaatagggttcaa

SEQ ID NO: 6011521 - DNA, 25 bp, Homo sapien
gaagtttttggatatggaaagctcc

SEQ ID NO: 6011522 - DNA, 25 bp, Homo sapien
agcgacttcttccaaaatgatacac

SEQ ID NO: 6011523 - DNA, 25 bp, Homo sapien
ctccagaaatggtggagtcaaggga

SEQ ID NO: 6011524 - DNA, 25 bp, Homo sapien
ccaatgccctagattatatgcataa

SEQ ID NO: 6011525 - DNA, 25 bp, Homo sapien
cgccttggagacgtaaaaatgcatc

SEQ ID NO: 6011526 - DNA, 25 bp, Homo sapien
ctttctccagaaatggtggagtcaa

SEQ ID NO: 6011527 - DNA, 25 bp, Homo sapien
gtaacatttctcaggatgcgcaaga

SEQ ID NO: 6011528 - DNA, 25 bp, Homo sapien
tttgaactactgaccggtgcccctc

SEQ ID NO: 6011529 - DNA, 25 bp, Homo sapien
cgaatctaactaaatcatacggcta

SEQ ID NO: 6011530 - DNA, 25 bp, Homo sapien
caataatgtcattaagttaacggac

SEQ ID NO: 6011531 - DNA, 25 bp, Homo sapien
gtacctgctaatggaatacttagtc

SEQ ID NO: 6011532 - DNA, 25 bp, Homo sapien
gcaacgcaatagtttagtaaatatc

SEQ ID NO: 6011533 - DNA, 25 bp, Homo sapien
aacgctaattcgccatcgaaaaaga

SEQ ID NO: 6011534 - DNA, 25 bp, Homo sapien
aggatcaataaaccatggagaatat

SEQ ID NO: 6011535 - DNA, 25 bp, Homo sapien
agctacctaaatttaaatccctatc

SEQ ID NO: 6011536 - DNA, 25 bp, Homo sapien
atccttggatactaagaaacaagcc

SEQ ID NO: 6011537 - DNA, 25 bp, Homo sapien
tactaagaaacaagcccttttggga

SEQ ID NO: 6011538 - DNA, 25 bp, Homo sapien
tggaatacttagtcaatggggaaat

SEQ ID NO: 6011539 - DNA, 25 bp, Homo sapien
gatacacgaaaataagaagctacct

SEQ ID NO: 6011540 - DNA, 25 bp, Homo sapien
cccagtaacatttctcaggatgcgc

SEQ ID NO: 6011541 - DNA, 25 bp, Homo sapien
agtttttggatatggaaagctccaa

SEQ ID NO: 6011542 - DNA, 25 bp, Homo sapien
tcacctataaggaaagcgacttctt

SEQ ID NO: 6011543 - DNA, 25 bp, Homo sapien
ccttggatactaagaaacaagccct

SEQ ID NO: 6011544 - DNA, 25 bp, Homo sapien
gaattcaaaaataccttcacctgta

SEQ ID NO: 6011545 - DNA, 25 bp, Homo sapien
cttcggatggagtataataaatccg

SEQ ID NO: 6011546 - DNA, 25 bp, Homo sapien
caataagaagtttttggatatggaa

SEQ ID NO: 6011547 - DNA, 25 bp, Homo sapien
agacgtaaaaatgcatccttggata

SEQ ID NO: 6011548 - DNA, 25 bp, Homo sapien
aataaaccatggagaatatcccatt

SEQ ID NO: 6011549 - DNA, 25 bp, Homo sapien
gaaatgtataaactattgaggttac

SEQ ID NO: 6011550 - DNA, 25 bp, Homo sapien
cgtcctggcgtttgaactactgacc

SEQ ID NO: 6011551 - DNA, 25 bp, Homo sapien
acaattcagaagggaggtagaaata

SEQ ID NO: 6011552 - DNA, 25 bp, Homo sapien
aggatgcgcaagatttaatacttaa

SEQ ID NO: 6011553 - DNA, 25 bp, Homo sapien
gattacctgtaaacaataagaagtt

SEQ ID NO: 6011554 - DNA, 25 bp, Homo sapien
tatgatcacactatagatgcatggg

SEQ ID NO: 6011555 - DNA, 25 bp, Homo sapien
aaatttaaatccctatcactcgatg

SEQ ID NO: 6011556 - DNA, 25 bp, Homo sapien
cttcttattgtttacaggtaatctg

SEQ ID NO: 6011557 - DNA, 25 bp, Homo sapien
tatctttggggtcgtattttagtag

SEQ ID NO: 6011558 - DNA, 25 bp, Homo sapien
ctcttacaggtgaaggtatttttga

SEQ ID NO: 6011559 - DNA, 25 bp, Homo sapien
caaggcgcattctatctttggggtc

SEQ ID NO: 6011560 - DNA, 25 bp, Homo sapien
cttgttgtggtctttttcgatggcg

SEQ ID NO: 6011561 - DNA, 25 bp, Homo sapien
cgcaaatatatcctgtactcctgtg

SEQ ID NO: 6011562 - DNA, 25 bp, Homo sapien
ttttggaagaagtcgctttccttat

SEQ ID NO: 6011563 - DNA, 25 bp, Homo sapien
ttctttttatgcatataatctaggg

SEQ ID NO: 6011564 - DNA, 25 bp, Homo sapien
cttgtttcttagtatccaaggatgc

SEQ ID NO: 6011565 - DNA, 25 bp, Homo sapien
ttattgatcctggacgtatttggtc

SEQ ID NO: 6011566 - DNA, 25 bp, Homo sapien
taaaatatcgttgaagggtccgtgt

SEQ ID NO: 6011567 - DNA, 25 bp, Homo sapien
ggcgaatgggatattctccatggtt

SEQ ID NO: 6011568 - DNA, 25 bp, Homo sapien
aagtattccattagcaggtacactc

SEQ ID NO: 6011569 - DNA, 25 bp, Homo sapien
gtttattgatcctggacgtatttgg

SEQ ID NO: 6011570 - DNA, 25 bp, Homo sapien
tctttgctgcggcgaatgggatatt

SEQ ID NO: 6011571 - DNA, 25 bp, Homo sapien
aaatataatctgatgctaaaatatc

SEQ ID NO: 6011572 - DNA, 25 bp, Homo sapien
attcccttgactccaccatttctgg

SEQ ID NO: 6011573 - DNA, 25 bp, Homo sapien
ggatattctccatggtttattgatc

SEQ ID NO: 6011574 - DNA, 25 bp, Homo sapien
aatctgatgctaaaatatcgttgaa

SEQ ID NO: 6011575 - DNA, 25 bp, Homo sapien
atccttttatatgtagtatctttca

SEQ ID NO: 6011576 - DNA, 25 bp, Homo sapien
acagacagttttccttctattttct

SEQ ID NO: 6011577 - DNA, 25 bp, Homo sapien
tctatagtgtgatcatattcccttg

SEQ ID NO: 6011578 - DNA, 25 bp, Homo sapien
tctattttctggcggatttattata

SEQ ID NO: 6011579 - DNA, 25 bp, Homo sapien
actcctgtgccgaacgcaataaact

SEQ ID NO: 6011580 - DNA, 25 bp, Homo sapien
tagttcaaacgccaggacgccaaga

SEQ ID NO: 6011581 - DNA, 25 bp, Homo sapien
ttcaaagtcatcgagtgatagggat

SEQ ID NO: 6011582 - DNA, 25 bp, Homo sapien
tatttttgaattcgggtttctttgc

SEQ ID NO: 6011583 - DNA, 25 bp, Homo sapien
tttacaggtaatctgttcaattttt

SEQ ID NO: 6011584 - DNA, 25 bp, Homo sapien
aggtagcttcttattttcgtgtatc

SEQ ID NO: 6011585 - DNA, 25 bp, Homo sapien
tgatcctggacgtatttggtcttgt

SEQ ID NO: 6011586 - DNA, 25 bp, Homo sapien
gtcaattgtcccacagacagttttc

SEQ ID NO: 6011587 - DNA, 25 bp, Homo sapien
tgctgctatccttttatatgtagta

SEQ ID NO: 6011588 - DNA, 25 bp, Homo sapien
acattattgaaccctattagtatat

SEQ ID NO: 6011589 - DNA, 25 bp, Homo sapien
attgtcccacagacagttttccttc

SEQ ID NO: 6011590 - DNA, 25 bp, Homo sapien
ccccagttcaaagtcatcgagtgat

SEQ ID NO: 6011591 - DNA, 25 bp, Homo sapien
tgcatctatagtgtgatcatattcc

SEQ ID NO: 6011592 - DNA, 25 bp, Homo sapien
ggtgatggaattttggagctttcca

SEQ ID NO: 6011593 - DNA, 25 bp, Homo sapien
atagtttatacatttccccattgac

SEQ ID NO: 6011594 - DNA, 25 bp, Homo sapien
tctccatggtttattgatcctggac

SEQ ID NO: 6011595 - DNA, 25 bp, Homo sapien
tcgtattttagtagtttaagtatta

SEQ ID NO: 6011596 - DNA, 25 bp, Homo sapien
tccaaggatgcatttttacgtctcc

SEQ ID NO: 6011597 - DNA, 25 bp, Homo sapien
atgctaaaatatcgttgaagggtcc

SEQ ID NO: 6011598 - DNA, 25 bp, Homo sapien
tagcgtttagtttgatatttactaa

SEQ ID NO: 6011599 - DNA, 25 bp, Homo sapien
agattcggatgatttagcgatgttt

SEQ ID NO: 6011600 - DNA, 25 bp, Homo sapien
gatttagcgatgtttgtatttctac

SEQ ID NO: 6011601 - DNA, 25 bp, Homo sapien
tctccattactttcagtgcgcaaat

SEQ ID NO: 6011602 - DNA, 25 bp, Homo sapien
tggagaaaggtagtcaattgtccca

SEQ ID NO: 6011603 - DNA, 25 bp, Homo sapien
tagggcattggcaatttgataaata

SEQ ID NO: 6011604 - DNA, 25 bp, Homo sapien
ctgtgccgaacgcaataaactttac

SEQ ID NO: 6011605 - DNA, 25 bp, Homo sapien
caaggatgcatttttacgtctccaa

SEQ ID NO: 6011606 - DNA, 25 bp, Homo sapien
gtagtatctttcatttcttcttcga

SEQ ID NO: 6011607 - DNA, 25 bp, Homo sapien
agcccatgcatctatagtgtgatca

SEQ ID NO: 6011608 - DNA, 25 bp, Homo sapien
tttttcatcatgaaaatagccgtat

SEQ ID NO: 6011609 - DNA, 25 bp, Homo sapien
tccaaggcgcattctatctttgggg

SEQ ID NO: 6011610 - DNA, 25 bp, Homo sapien
attttcgtgtatcattttggaagaa

SEQ ID NO: 6011611 - DNA, 25 bp, Homo sapien
ggggcaccggtcagtagttcaaacg

SEQ ID NO: 6011612 - DNA, 25 bp, Homo sapien
tagggatttaaatttaggtagcttc

SEQ ID NO: 6011613 - DNA, 25 bp, Homo sapien
aatagccgtatgatttagttagatt

SEQ ID NO: 6011614 - DNA, 25 bp, Homo sapien
tgtttacaggtaatctgttcaattt

SEQ ID NO: 6011615 - DNA, 25 bp, Homo sapien
tctatctttggggtcgtattttagt

SEQ ID NO: 6011616 - DNA, 25 bp, Homo sapien
gcgcattctatctttggggtcgtat

SEQ ID NO: 6011617 - DNA, 25 bp, Homo sapien
ttccccagttcaaagtcatcgagtg

SEQ ID NO: 6011618 - DNA, 25 bp, Homo sapien
tccatccgaagtccgttaacttaat

SEQ ID NO: 6011619 - DNA, 25 bp, Homo sapien
catttcttcttcgaacggaggggca

SEQ ID NO: 6011620 - DNA, 25 bp, Homo sapien
ctgaattgtttctgtaaattatact

SEQ ID NO: 6011621 - DNA, 25 bp, Homo sapien
ggacgccaagagcccatgcatctat

SEQ ID NO: 6011622 - DNA, 25 bp, Homo sapien
tatagtgtgatcatattcccttgac

SEQ ID NO: 6011623 - DNA, 25 bp, Homo sapien
tcatattcccttgactccaccattt

SEQ ID NO: 6011624 - DNA, 25 bp, Homo sapien
tattgaaccctattagtatattttc

SEQ ID NO: 6011625 - DNA, 25 bp, Homo sapien
cgttgaagggtccgtgtaacctcaa

SEQ ID NO: 6011626 - DNA, 25 bp, Homo sapien
aagtattaaatcttgcgcatcctga

SEQ ID NO: 6011627 - DNA, 25 bp, Homo sapien
tgctgcggcgaatgggatattctcc

SEQ ID NO: 6011628 - DNA, 25 bp, Homo sapien
ttttctcttacaggtgaaggtattt

SEQ ID NO: 6011629 - DNA, 25 bp, Homo sapien
gacgtatttggtcttgttgtggtct

SEQ ID NO: 6011630 - DNA, 25 bp, Homo sapien
tcttagtatccaaggatgcattttt

SEQ ID NO: 6011631 - DNA, 25 bp, Homo sapien
gatttaaatttaggtagcttcttat

SEQ ID NO: 6011632 - DNA, 25 bp, Homo sapien
ttcgggtttctttgctgcggcgaat

SEQ ID NO: 6011633 - DNA, 25 bp, Homo sapien
caggtaatctgttcaatttttctct

SEQ ID NO: 6011634 - DNA, 25 bp, Homo sapien
ctgtactcctgtgccgaacgcaata

SEQ ID NO: 6011635 - DNA, 25 bp, Homo sapien
atgcatataatctagggcattggca

SEQ ID NO: 6011636 - DNA, 25 bp, Homo sapien
cttataggtgatggaattttggagc

SEQ ID NO: 6011637 - DNA, 25 bp, Homo sapien
tcggatgatttagcgatgtttgtat

SEQ ID NO: 6011638 - DNA, 25 bp, Homo sapien
ggcggatttattatactccatccga

SEQ ID NO: 6011639 - DNA, 25 bp, Homo sapien
aagtccgttaacttaatgacattat

SEQ ID NO: 6011640 - DNA, 25 bp, Homo sapien
tccgaagtccgttaacttaatgaca

SEQ ID NO: 6011641 - DNA, 25 bp, Homo sapien
gcgcatcctgagaaatgttactggg

SEQ ID NO: 6011642 - DNA, 25 bp, Homo sapien
cccatgcatctatagtgtgatcata

SEQ ID NO: 6011643 - DNA, 25 bp, Homo sapien
ttatactccatccgaagtccgttaa

SEQ ID NO: 6011644 - DNA, 25 bp, Homo sapien
tacaggtaatctgttcaatttttct

SEQ ID NO: 6011645 - DNA, 25 bp, Homo sapien
taaatcttgcgcatcctgagaaatg

SEQ ID NO: 6011646 - DNA, 25 bp, Homo sapien
gcgatgtttgtatttctacctccct

SEQ ID NO: 6011647 - DNA, 25 bp, Homo sapien
ttgactaagtattccattagcaggt

SEQ ID NO: 6011648 - DNA, 25 bp, Homo sapien
tagtgtgatcatattcccttgactc

SEQ ID NO: 6011649 - DNA, 25 bp, Homo sapien
gactaagtattccattagcaggtac

SEQ ID NO: 6011650 - DNA, 25 bp, Homo sapien
aacctcaatagtttatacatttccc

SEQ ID NO: 6011651 - DNA, 25 bp, Homo sapien
tatttctacctcccttctgaattgt

SEQ ID NO: 6011652 - DNA, 25 bp, Homo sapien
atataatctgatgctaaaatatcgt

SEQ ID NO: 6011653 - DNA, 25 bp, Homo sapien
ttgaaccctattagtatattttcag

SEQ ID NO: 6011654 - DNA, 25 bp, Homo sapien
atttccccattgactaagtattcca

SEQ ID NO: 6011655 - DNA, 25 bp, Homo sapien
gctaaaatatcgttgaagggtccgt

SEQ ID NO: 6011656 - DNA, 25 bp, Homo sapien
gatttattatactccatccgaagtc

SEQ ID NO: 6011657 - DNA, 25 bp, Homo sapien
agcaggtacactcttttttcatcat

SEQ ID NO: 6011658 - DNA, 25 bp, Homo sapien
tttctttgctgcggcgaatgggata

SEQ ID NO: 6011659 - DNA, 25 bp, Homo sapien
tccttataggtgatggaattttgga

SEQ ID NO: 6011660 - DNA, 25 bp, Homo sapien
tgttgtggtctttttcgatggcgaa

SEQ ID NO: 6011661 - DNA, 25 bp, Homo sapien
cgtatgatttagttagattcggatg

SEQ ID NO: 6011662 - DNA, 25 bp, Homo sapien
tccattactttcagtgcgcaaatat

SEQ ID NO: 6011663 - DNA, 25 bp, Homo sapien
gtgtaacctcaatagtttatacatt

SEQ ID NO: 6011664 - DNA, 25 bp, Homo sapien
tcgaacggaggggcaccggtcagta

SEQ ID NO: 6011665 - DNA, 25 bp, Homo sapien
tgatgctaaaatatcgttgaagggt

SEQ ID NO: 6011666 - DNA, 25 bp, Homo sapien
tcgctttccttataggtgatggaat

SEQ ID NO: 6011667 - DNA, 25 bp, Homo sapien
gtactcctgtgccgaacgcaataaa

SEQ ID NO: 6011668 - DNA, 25 bp, Homo sapien
tcgtgtatcattttggaagaagtcg

SEQ ID NO: 6011669 - DNA, 25 bp, Homo sapien
atctttcatttcttcttcgaacgga

SEQ ID NO: 6011670 - DNA, 25 bp, Homo sapien
ttactttcagtgcgcaaatatatcc

SEQ ID NO: 6011671 - DNA, 25 bp, Homo sapien
aatcttgcgcatcctgagaaatgtt

SEQ ID NO: 6011672 - DNA, 25 bp, Homo sapien
attccattagcaggtacactctttt

SEQ ID NO: 6011673 - DNA, 25 bp, Homo sapien
tttagcgatgtttgtatttctacct

SEQ ID NO: 6011674 - DNA, 25 bp, Homo sapien
gtccgtgtaacctcaatagtttata

SEQ ID NO: 6011675 - DNA, 25 bp, Homo sapien
tgagaaatgttactgggcattttga

SEQ ID NO: 6011676 - DNA, 25 bp, Homo sapien
caagagcccatgcatctatagtgtg

SEQ ID NO: 6011677 - DNA, 25 bp, Homo sapien
gcaatttgataaatataatctgatg

SEQ ID NO: 6011678 - DNA, 25 bp, Homo sapien
ttattgtttacaggtaatctgttca

SEQ ID NO: 6011679 - DNA, 25 bp, Homo sapien
ttggaagaagtcgctttccttatag

SEQ ID NO: 6011680 - DNA, 25 bp, Homo sapien
ttgatatttactaaactattgcgtt

SEQ ID NO: 6011681 - DNA, 25 bp, Homo sapien
ctgctatccttttatatgtagtatc

SEQ ID NO: 6011682 - DNA, 25 bp, Homo sapien
tcctgtactcctgtgccgaacgcaa

SEQ ID NO: 6011683 - DNA, 25 bp, Homo sapien
tcccaaaagggcttgtttcttagta

SEQ ID NO: 6011684 - DNA, 25 bp, Homo sapien
aaaatagccgtatgatttagttaga

SEQ ID NO: 6011685 - DNA, 25 bp, Homo sapien
ccacagacagttttccttctatttt

SEQ ID NO: 6011686 - DNA, 25 bp, Homo sapien
acttaatgacattattgaaccctat

SEQ ID NO: 6011687 - DNA, 25 bp, Homo sapien
ttcaatttttctcttacaggtgaag

SEQ ID NO: 6011688 - DNA, 25 bp, Homo sapien
ttattttcgtgtatcattttggaag

SEQ ID NO: 6011689 - DNA, 25 bp, Homo sapien
ttaatgacattattgaaccctatta

SEQ ID NO: 6011690 - DNA, 25 bp, Homo sapien
attttgatatccagtgctgctatcc

SEQ ID NO: 6011691 - DNA, 25 bp, Homo sapien
catcgagtgatagggatttaaattt

SEQ ID NO: 6011692 - DNA, 25 bp, Homo sapien
tccattagcaggtacactctttttt

SEQ ID NO: 6011693 - DNA, 25 bp, Homo sapien
caattgtcccacagacagttttcct

SEQ ID NO: 6011694 - DNA, 25 bp, Homo sapien
ggtagtcaattgtcccacagacagt

SEQ ID NO: 6011695 - DNA, 25 bp, Homo sapien
tttccttctattttctggcggattt

SEQ ID NO: 6011696 - DNA, 25 bp, Homo sapien
ttctggcggatttattatactccat

SEQ ID NO: 6011697 - DNA, 25 bp, Homo sapien
ccatatccaaaaacttcttattgtt

SEQ ID NO: 6011698 - DNA, 25 bp, Homo sapien
tttattatactccatccgaagtccg

SEQ ID NO: 6011699 - DNA, 25 bp, Homo sapien
tgcgcaaatatatcctgtactcctg

SEQ ID NO: 6011700 - DNA, 25 bp, Homo sapien
tttccttataggtgatggaattttg

SEQ ID NO: 6011701 - DNA, 25 bp, Homo sapien
actttcagtgcgcaaatatatcctg

SEQ ID NO: 6011702 - DNA, 25 bp, Homo sapien
gacagttttccttctattttctggc

SEQ ID NO: 6011703 - DNA, 25 bp, Homo sapien
taaatttaggtagcttcttattttc

SEQ ID NO: 6011704 - DNA, 25 bp, Homo sapien
tatcctgtactcctgtgccgaacgc

SEQ ID NO: 6011705 - DNA, 25 bp, Homo sapien
atcgttgaagggtccgtgtaacctc

SEQ ID NO: 6011706 - DNA, 25 bp, Homo sapien
tggcgaattagcgtttagtttgata

SEQ ID NO: 6011707 - DNA, 25 bp, Homo sapien
gggtccgtgtaacctcaatagttta

SEQ ID NO: 6011708 - DNA, 25 bp, Homo sapien
tttttgaattcgggtttctttgctg

SEQ ID NO: 6011709 - DNA, 25 bp, Homo sapien
tttcttccccagttcaaagtcatcg

SEQ ID NO: 6011710 - DNA, 25 bp, Homo sapien
atcattttggaagaagtcgctttcc

SEQ ID NO: 6011711 - DNA, 25 bp, Homo sapien
atataatctagggcattggcaattt

SEQ ID NO: 6011712 - DNA, 25 bp, Homo sapien
tatatgtagtatctttcatttcttc

SEQ ID NO: 6011713 - DNA, 25 bp, Homo sapien
attgtttacaggtaatctgttcaat

SEQ ID NO: 6011714 - DNA, 25 bp, Homo sapien
tttcaggtttaatatctctatgaat

SEQ ID NO: 6011715 - DNA, 25 bp, Homo sapien
gggcattttgatatccagtgctgct

SEQ ID NO: 6011716 - DNA, 25 bp, Homo sapien
tctttttcgatggcgaattagcgtt

SEQ ID NO: 6011717 - DNA, 25 bp, Homo sapien
tagtttaagtattaaatcttgcgca

SEQ ID NO: 6011718 - DNA, 25 bp, Homo sapien
tatttggtcttgttgtggtcttttt

SEQ ID NO: 6011719 - DNA, 25 bp, Homo sapien
atcctgagaaatgttactgggcatt

SEQ ID NO: 6011720 - DNA, 25 bp, Homo sapien
tgttcaatttttctcttacaggtga

SEQ ID NO: 6011721 - DNA, 25 bp, Homo sapien
tcttattttcgtgtatcattttgga

SEQ ID NO: 6011722 - DNA, 25 bp, Homo sapien
cttcttattttcgtgtatcattttg

SEQ ID NO: 6011723 - DNA, 25 bp, Homo sapien
ttttggagctttccatatccaaaaa

SEQ ID NO: 6011724 - DNA, 25 bp, Homo sapien
tattatactccatccgaagtccgtt

SEQ ID NO: 6011725 - DNA, 25 bp, Homo sapien
attcggatgatttagcgatgtttgt

SEQ ID NO: 6011726 - DNA, 25 bp, Homo sapien
attagcgtttagtttgatatttact

SEQ ID NO: 6011727 - DNA, 25 bp, Homo sapien
cgaatgggatattctccatggttta

SEQ ID NO: 6011728 - DNA, 25 bp, Homo sapien
catgcatctatagtgtgatcatatt

SEQ ID NO: 6011729 - DNA, 25 bp, Homo sapien
tcctgtgccgaacgcaataaacttt

SEQ ID NO: 6011730 - DNA, 25 bp, Homo sapien
gagaaaggtagtcaattgtcccaca

SEQ ID NO: 6011731 - DNA, 25 bp, Homo sapien
agtagtttaagtattaaatcttgcg

SEQ ID NO: 6011732 - DNA, 25 bp, Homo sapien
agtatccaaggatgcatttttacgt

SEQ ID NO: 6011733 - DNA, 25 bp, Homo sapien
cattagcaggtacactcttttttca

SEQ ID NO: 6011734 - DNA, 25 bp, Homo sapien
tacgtctccaaggcgcattctatct

SEQ ID NO: 6011735 - DNA, 25 bp, Homo sapien
tcttcttcgaacggaggggcaccgg

SEQ ID NO: 6011736 - DNA, 25 bp, Homo sapien
cttccttctccattactttcagtgc

SEQ ID NO: 6011737 - DNA, 25 bp, Homo sapien
cgggtttctttgctgcggcgaatgg

SEQ ID NO: 6011738 - DNA, 25 bp, Homo sapien
tttctggagaaaggtagtcaattgt

SEQ ID NO: 6011739 - DNA, 25 bp, Homo sapien
atattcccttgactccaccatttct

SEQ ID NO: 6011740 - DNA, 25 bp, Homo sapien
atgatttagcgatgtttgtatttct

SEQ ID NO: 6011741 - DNA, 25 bp, Homo sapien
caggtgaaggtatttttgaattcgg

SEQ ID NO: 6011742 - DNA, 25 bp, Homo sapien
cgtatttggtcttgttgtggtcttt

SEQ ID NO: 6011743 - DNA, 25 bp, Homo sapien
tttgataaatataatctgatgctaa

SEQ ID NO: 6011744 - DNA, 25 bp, Homo sapien
gtatcattttggaagaagtcgcttt

SEQ ID NO: 6011745 - DNA, 25 bp, Homo sapien
tcccacagacagttttccttctatt

SEQ ID NO: 6011746 - DNA, 25 bp, Homo sapien
ccaccatttctggagaaaggtagtc

SEQ ID NO: 6011747 - DNA, 25 bp, Homo sapien
tttcgatggcgaattagcgtttagt

SEQ ID NO: 6011748 - DNA, 25 bp, Homo sapien
tttggtcttgttgtggtctttttcg

SEQ ID NO: 6011749 - DNA, 25 bp, Homo sapien
gaagggtccgtgtaacctcaatagt

SEQ ID NO: 6011750 - DNA, 25 bp, Homo sapien
tcttattgtttacaggtaatctgtt

SEQ ID NO: 6011751 - DNA, 25 bp, Homo sapien
tatttactaaactattgcgttgcat

SEQ ID NO: 6011752 - DNA, 25 bp, Homo sapien
gttcaaacgccaggacgccaagagc

SEQ ID NO: 6011753 - DNA, 25 bp, Homo sapien
gaaccctattagtatattttcaggt

SEQ ID NO: 6011754 - DNA, 25 bp, Homo sapien
cggaggggcaccggtcagtagttca

SEQ ID NO: 6011755 - DNA, 25 bp, Homo sapien
catttctggagaaaggtagtcaatt

SEQ ID NO: 6011756 - DNA, 25 bp, Homo sapien
ttgaagggtccgtgtaacctcaata

SEQ ID NO: 6011757 - DNA, 25 bp, Homo sapien
tgtcccacagacagttttccttcta

SEQ ID NO: 6011758 - DNA, 25 bp, Homo sapien
gttaacttaatgacattattgaacc

SEQ ID NO: 6011759 - DNA, 25 bp, Homo sapien
tctccaaggcgcattctatctttgg

SEQ ID NO: 6011760 - DNA, 25 bp, Homo sapien
ccctattagtatattttcaggttta

SEQ ID NO: 6011761 - DNA, 25 bp, Homo sapien
tgatttagttagattcggatgattt

SEQ ID NO: 6011762 - DNA, 25 bp, Homo sapien
caatttttctcttacaggtgaaggt

SEQ ID NO: 6011763 - DNA, 25 bp, Homo sapien
ccttgactccaccatttctggagaa

SEQ ID NO: 6011764 - DNA, 25 bp, Homo sapien
tctggagaaaggtagtcaattgtcc

SEQ ID NO: 6011765 - DNA, 25 bp, Homo sapien
gatgtttgtatttctacctcccttc

SEQ ID NO: 6011766 - DNA, 25 bp, Homo sapien
ggaagaagtcgctttccttataggt

SEQ ID NO: 6011767 - DNA, 25 bp, Homo sapien
ttaggtagcttcttattttcgtgta

SEQ ID NO: 6011768 - DNA, 25 bp, Homo sapien
aattcgggtttctttgctgcggcga

SEQ ID NO: 6011769 - DNA, 25 bp, Homo sapien
cttcgaacggaggggcaccggtcag

SEQ ID NO: 6011770 - DNA, 25 bp, Homo sapien
atatccagtgctgctatccttttat

SEQ ID NO: 6011771 - DNA, 25 bp, Homo sapien
aaatgttactgggcattttgatatc

SEQ ID NO: 6011772 - DNA, 25 bp, Homo sapien
ggtaatctgttcaatttttctctta

SEQ ID NO: 6011773 - DNA, 25 bp, Homo sapien
gtatattttcaggtttaatatctct

SEQ ID NO: 6011774 - DNA, 25 bp, Homo sapien
agtgcgcaaatatatcctgtactcc

SEQ ID NO: 6011775 - DNA, 25 bp, Homo sapien
ggtacactcttttttcatcatgaaa

SEQ ID NO: 6011776 - DNA, 25 bp, Homo sapien
gtgatcatattcccttgactccacc

SEQ ID NO: 6011777 - DNA, 25 bp, Homo sapien
attttcaggtttaatatctctatga

SEQ ID NO: 6011778 - DNA, 25 bp, Homo sapien
ttctcttacaggtgaaggtattttt

SEQ ID NO: 6011779 - DNA, 25 bp, Homo sapien
ccgtgtaacctcaatagtttataca

SEQ ID NO: 6011780 - DNA, 25 bp, Homo sapien
gtattaaatcttgcgcatcctgaga

SEQ ID NO: 6011781 - DNA, 25 bp, Homo sapien
tagtcaattgtcccacagacagttt

SEQ ID NO: 6011782 - DNA, 25 bp, Homo sapien
tcagtagttcaaacgccaggacgcc

SEQ ID NO: 6011783 - DNA, 25 bp, Homo sapien
tattttctggcggatttattatact

SEQ ID NO: 6011784 - DNA, 25 bp, Homo sapien
attattgaaccctattagtatattt

SEQ ID NO: 6011785 - DNA, 25 bp, Homo sapien
gatatttactaaactattgcgttgc

SEQ ID NO: 6011786 - DNA, 25 bp, Homo sapien
gtttgatatttactaaactattgcg

SEQ ID NO: 6011787 - DNA, 25 bp, Homo sapien
aaacgccaggacgccaagagcccat

SEQ ID NO: 6011788 - DNA, 25 bp, Homo sapien
tttacgtctccaaggcgcattctat

SEQ ID NO: 6011789 - DNA, 25 bp, Homo sapien
tcatcatgaaaatagccgtatgatt

SEQ ID NO: 6011790 - DNA, 25 bp, Homo sapien
tcttgcgcatcctgagaaatgttac

SEQ ID NO: 6011791 - DNA, 25 bp, Homo sapien
catggtttattgatcctggacgtat

SEQ ID NO: 6011792 - DNA, 25 bp, Homo sapien
gctttccttataggtgatggaattt

SEQ ID NO: 6011793 - DNA, 25 bp, Homo sapien
tcgagtgatagggatttaaatttag

SEQ ID NO: 6011794 - DNA, 25 bp, Homo sapien
gcgaattagcgtttagtttgatatt

SEQ ID NO: 6011795 - DNA, 25 bp, Homo sapien
ttttctggcggatttattatactcc

SEQ ID NO: 6011796 - DNA, 25 bp, Homo sapien
ggtttctttgctgcggcgaatggga

SEQ ID NO: 6011797 - DNA, 25 bp, Homo sapien
ttcttcgaacggaggggcaccggtc

SEQ ID NO: 6011798 - DNA, 25 bp, Homo sapien
gctatccttttatatgtagtatctt

SEQ ID NO: 6011799 - DNA, 25 bp, Homo sapien
atcctggacgtatttggtcttgttg

SEQ ID NO: 6011800 - DNA, 25 bp, Homo sapien
tcagtgcgcaaatatatcctgtact

SEQ ID NO: 6011801 - DNA, 25 bp, Homo sapien
gtcttgttgtggtctttttcgatgg

SEQ ID NO: 6011802 - DNA, 25 bp, Homo sapien
caggtacactcttttttcatcatga

SEQ ID NO: 6011803 - DNA, 25 bp, Homo sapien
tctacctcccttctgaattgtttct

SEQ ID NO: 6011804 - DNA, 25 bp, Homo sapien
gatcatattcccttgactccaccat

SEQ ID NO: 6011805 - DNA, 25 bp, Homo sapien
gttttccttctattttctggcggat

SEQ ID NO: 6011806 - DNA, 25 bp, Homo sapien
tcaggtttaatatctctatgaataa

SEQ ID NO: 6011807 - DNA, 25 bp, Homo sapien
ataatctagggcattggcaatttga

SEQ ID NO: 6011808 - DNA, 25 bp, Homo sapien
tgataaatataatctgatgctaaaa

SEQ ID NO: 6011809 - DNA, 25 bp, Homo sapien
tgacattattgaaccctattagtat

SEQ ID NO: 6011810 - DNA, 25 bp, Homo sapien
gaggggcaccggtcagtagttcaaa

SEQ ID NO: 6011811 - DNA, 25 bp, Homo sapien
gcattggcaatttgataaatataat

SEQ ID NO: 6011812 - DNA, 25 bp, Homo sapien
tggacgtatttggtcttgttgtggt

SEQ ID NO: 6011813 - DNA, 25 bp, Homo sapien
tctgatgctaaaatatcgttgaagg

SEQ ID NO: 6011814 - DNA, 25 bp, Homo sapien
atatcgttgaagggtccgtgtaacc

SEQ ID NO: 6011815 - DNA, 25 bp, Homo sapien
agttcaaagtcatcgagtgataggg

SEQ ID NO: 6011816 - DNA, 25 bp, Homo sapien
tggtcttgttgtggtctttttcgat

SEQ ID NO: 6011817 - DNA, 25 bp, Homo sapien
acgccaggacgccaagagcccatgc

SEQ ID NO: 6011818 - DNA, 25 bp, Homo sapien
gatggcgaattagcgtttagtttga

SEQ ID NO: 6011819 - DNA, 25 bp, Homo sapien
caaatatatcctgtactcctgtgcc

SEQ ID NO: 6011820 - DNA, 25 bp, Homo sapien
cattgactaagtattccattagcag

SEQ ID NO: 6011821 - DNA, 25 bp, Homo sapien
gtattccattagcaggtacactctt

SEQ ID NO: 6011822 - DNA, 25 bp, Homo sapien
tcaaacgccaggacgccaagagccc

SEQ ID NO: 6011823 - DNA, 25 bp, Homo sapien
tgaattcgggtttctttgctgcggc

SEQ ID NO: 6011824 - DNA, 25 bp, Homo sapien
cttacaggtgaaggtatttttgaat

SEQ ID NO: 6011825 - DNA, 25 bp, Homo sapien
tttcttcttcgaacggaggggcacc

SEQ ID NO: 6011826 - DNA, 25 bp, Homo sapien
tgatatccagtgctgctatcctttt

SEQ ID NO: 6011827 - DNA, 25 bp, Homo sapien
gccgtatgatttagttagattcgga

SEQ ID NO: 6011828 - DNA, 25 bp, Homo sapien
gccgaacgcaataaactttaccgaa

SEQ ID NO: 6011829 - DNA, 25 bp, Homo sapien
tctagggcattggcaatttgataaa

SEQ ID NO: 6011830 - DNA, 25 bp, Homo sapien
caggacgccaagagcccatgcatct

SEQ ID NO: 6011831 - DNA, 25 bp, Homo sapien
tggtttattgatcctggacgtattt

SEQ ID NO: 6011832 - DNA, 25 bp, Homo sapien
tgtttcttagtatccaaggatgcat

SEQ ID NO: 6011833 - DNA, 25 bp, Homo sapien
agagcccatgcatctatagtgtgat

SEQ ID NO: 6011834 - DNA, 25 bp, Homo sapien
tgaaaatagccgtatgatttagtta

SEQ ID NO: 6011835 - DNA, 25 bp, Homo sapien
agctttccatatccaaaaacttctt

SEQ ID NO: 6011836 - DNA, 25 bp, Homo sapien
agtagttcaaacgccaggacgccaa

SEQ ID NO: 6011837 - DNA, 25 bp, Homo sapien
ctaagtattccattagcaggtacac

SEQ ID NO: 6011838 - DNA, 25 bp, Homo sapien
gactccaccatttctggagaaaggt

SEQ ID NO: 6011839 - DNA, 25 bp, Homo sapien
gccaggacgccaagagcccatgcat

SEQ ID NO: 6011840 - DNA, 25 bp, Homo sapien
tatatcctgtactcctgtgccgaac

SEQ ID NO: 6011841 - DNA, 25 bp, Homo sapien
gccaagagcccatgcatctatagtg

SEQ ID NO: 6011842 - DNA, 25 bp, Homo sapien
ctttcatttcttcttcgaacggagg

SEQ ID NO: 6011843 - DNA, 25 bp, Homo sapien
ttagcaggtacactcttttttcatc

SEQ ID NO: 6011844 - DNA, 25 bp, Homo sapien
aaagggcttgtttcttagtatccaa

SEQ ID NO: 6011845 - DNA, 25 bp, Homo sapien
ttccatatccaaaaacttcttattg

SEQ ID NO: 6011846 - DNA, 25 bp, Homo sapien
aagtcatcgagtgatagggatttaa

SEQ ID NO: 6011847 - DNA, 25 bp, Homo sapien
atattctccatggtttattgatcct

SEQ ID NO: 6011848 - DNA, 25 bp, Homo sapien
cggatttattatactccatccgaag

SEQ ID NO: 6011849 - DNA, 25 bp, Homo sapien
ttggagctttccatatccaaaaact

SEQ ID NO: 6011850 - DNA, 25 bp, Homo sapien
gaaaggtagtcaattgtcccacaga

SEQ ID NO: 6011851 - DNA, 25 bp, Homo sapien
tcttccccagttcaaagtcatcgag

SEQ ID NO: 6011852 - DNA, 25 bp, Homo sapien
cttctccattactttcagtgcgcaa

SEQ ID NO: 6011853 - DNA, 25 bp, Homo sapien
tatccaaggatgcatttttacgtct

SEQ ID NO: 6011854 - DNA, 25 bp, Homo sapien
ccagtgctgctatccttttatatgt

SEQ ID NO: 6011855 - DNA, 25 bp, Homo sapien
ggtcagtagttcaaacgccaggacg

SEQ ID NO: 6011856 - DNA, 25 bp, Homo sapien
taacttaatgacattattgaaccct

SEQ ID NO: 6011857 - DNA, 25 bp, Homo sapien
ataatctgatgctaaaatatcgttg

SEQ ID NO: 6011858 - DNA, 25 bp, Homo sapien
ctgggcattttgatatccagtgctg

SEQ ID NO: 6011859 - DNA, 25 bp, Homo sapien
aatatatcctgtactcctgtgccga

SEQ ID NO: 6011860 - DNA, 25 bp, Homo sapien
agaaatgttactgggcattttgata

SEQ ID NO: 6011861 - DNA, 25 bp, Homo sapien
cagttttccttctattttctggcgg

SEQ ID NO: 6011862 - DNA, 25 bp, Homo sapien
tacaggtgaaggtatttttgaattc

SEQ ID NO: 6011863 - DNA, 25 bp, Homo sapien
ataaatataatctgatgctaaaata

SEQ ID NO: 6011864 - DNA, 25 bp, Homo sapien
cattttggaagaagtcgctttcctt

SEQ ID NO: 6011865 - DNA, 25 bp, Homo sapien
atgttactgggcattttgatatcca

SEQ ID NO: 6011866 - DNA, 25 bp, Homo sapien
agtcgctttccttataggtgatgga

SEQ ID NO: 6011867 - DNA, 25 bp, Homo sapien
aatctagggcattggcaatttgata

SEQ ID NO: 6011868 - DNA, 25 bp, Homo sapien
catttttacgtctccaaggcgcatt

SEQ ID NO: 6011869 - DNA, 25 bp, Homo sapien
atttaggtagcttcttattttcgtg

SEQ ID NO: 6011870 - DNA, 25 bp, Homo sapien
tttcagtgcgcaaatatatcctgta

SEQ ID NO: 6011871 - DNA, 25 bp, Homo sapien
aggatgcatttttacgtctccaagg

SEQ ID NO: 6011872 - DNA, 25 bp, Homo sapien
attggcaatttgataaatataatct

SEQ ID NO: 6011873 - DNA, 25 bp, Homo sapien
tttcatcatgaaaatagccgtatga

SEQ ID NO: 6011874 - DNA, 25 bp, Homo sapien
ctttccatatccaaaaacttcttat

SEQ ID NO: 6011875 - DNA, 25 bp, Homo sapien
gatgcatttttacgtctccaaggcg

SEQ ID NO: 6011876 - DNA, 25 bp, Homo sapien
gggcattggcaatttgataaatata

SEQ ID NO: 6011877 - DNA, 25 bp, Homo sapien
ggtctttttcgatggcgaattagcg

SEQ ID NO: 6011878 - DNA, 25 bp, Homo sapien
caaaagggcttgtttcttagtatcc

SEQ ID NO: 6011879 - DNA, 25 bp, Homo sapien
ttctgaattgtttctgtaaattata

SEQ ID NO: 6011880 - DNA, 25 bp, Homo sapien
gaagtcgctttccttataggtgatg

SEQ ID NO: 6011881 - DNA, 25 bp, Homo sapien
ttttatgcatataatctagggcatt

SEQ ID NO: 6011882 - DNA, 25 bp, Homo sapien
ggatgatttagcgatgtttgtattt

SEQ ID NO: 6011883 - DNA, 25 bp, Homo sapien
attaaatcttgcgcatcctgagaaa

SEQ ID NO: 6011884 - DNA, 25 bp, Homo sapien
atggaattttggagctttccatatc

SEQ ID NO: 6011885 - DNA, 25 bp, Homo sapien
tccttctattttctggcggatttat

SEQ ID NO: 6011886 - DNA, 25 bp, Homo sapien
gtgtatcattttggaagaagtcgct

SEQ ID NO: 6011887 - DNA, 25 bp, Homo sapien
gatagggatttaaatttaggtagct

SEQ ID NO: 6011888 - DNA, 25 bp, Homo sapien
tttgtatttctacctcccttctgaa

SEQ ID NO: 6011889 - DNA, 25 bp, Homo sapien
caaagtcatcgagtgatagggattt

SEQ ID NO: 6011890 - DNA, 25 bp, Homo sapien
gtaacctcaatagtttatacatttc

SEQ ID NO: 6011891 - DNA, 25 bp, Homo sapien
aaggtagtcaattgtcccacagaca

SEQ ID NO: 6011892 - DNA, 25 bp, Homo sapien
tttcttagtatccaaggatgcattt

SEQ ID NO: 6011893 - DNA, 25 bp, Homo sapien
atcatgaaaatagccgtatgattta

SEQ ID NO: 6011894 - DNA, 25 bp, Homo sapien
cttttttcatcatgaaaatagccgt

SEQ ID NO: 6011895 - DNA, 25 bp, Homo sapien
atttagttagattcggatgatttag

SEQ ID NO: 6011896 - DNA, 25 bp, Homo sapien
ggaattttggagctttccatatcca

SEQ ID NO: 6011897 - DNA, 25 bp, Homo sapien
gtccgttaacttaatgacattattg

SEQ ID NO: 6011898 - DNA, 25 bp, Homo sapien
aaatatcgttgaagggtccgtgtaa

SEQ ID NO: 6011899 - DNA, 25 bp, Homo sapien
tagccgtatgatttagttagattcg

SEQ ID NO: 6011900 - DNA, 25 bp, Homo sapien
ctccaccatttctggagaaaggtag

SEQ ID NO: 6011901 - DNA, 25 bp, Homo sapien
ttaagtattaaatcttgcgcatcct

SEQ ID NO: 6011902 - DNA, 25 bp, Homo sapien
tgcatttttacgtctccaaggcgca

SEQ ID NO: 6011903 - DNA, 25 bp, Homo sapien
cctcccttctgaattgtttctgtaa

SEQ ID NO: 6011904 - DNA, 25 bp, Homo sapien
gtgccgaacgcaataaactttaccg

SEQ ID NO: 6011905 - DNA, 25 bp, Homo sapien
attctccatggtttattgatcctgg

SEQ ID NO: 6011906 - DNA, 25 bp, Homo sapien
ccagttcaaagtcatcgagtgatag

SEQ ID NO: 6011907 - DNA, 25 bp, Homo sapien
tataggtgatggaattttggagctt

SEQ ID NO: 6011908 - DNA, 25 bp, Homo sapien
tttctacctcccttctgaattgttt

SEQ ID NO: 6011909 - DNA, 25 bp, Homo sapien
aatttgataaatataatctgatgct

SEQ ID NO: 6011910 - DNA, 25 bp, Homo sapien
tccatggtttattgatcctggacgt

SEQ ID NO: 6011911 - DNA, 25 bp, Homo sapien
ccttctgaattgtttctgtaaatta

SEQ ID NO: 6011912 - DNA, 25 bp, Homo sapien
gcggcgaatgggatattctccatgg

SEQ ID NO: 6011913 - DNA, 25 bp, Homo sapien
cattactttcagtgcgcaaatatat

SEQ ID NO: 6011914 - DNA, 25 bp, Homo sapien
ttgcgcatcctgagaaatgttactg

SEQ ID NO: 6011915 - DNA, 25 bp, Homo sapien
ggagctttccatatccaaaaacttc

SEQ ID NO: 6011916 - DNA, 25 bp, Homo sapien
aattttggagctttccatatccaaa

SEQ ID NO: 6011917 - DNA, 25 bp, Homo sapien
aggcgcattctatctttggggtcgt

SEQ ID NO: 6011918 - DNA, 25 bp, Homo sapien
tttttcgatggcgaattagcgttta

SEQ ID NO: 6011919 - DNA, 25 bp, Homo sapien
tcccttgactccaccatttctggag

SEQ ID NO: 6011920 - DNA, 25 bp, Homo sapien
ttgactccaccatttctggagaaag

SEQ ID NO: 6011921 - DNA, 25 bp, Homo sapien
ttagttagattcggatgatttagcg

SEQ ID NO: 6011922 - DNA, 25 bp, Homo sapien
tggcaatttgataaatataatctga

SEQ ID NO: 6011923 - DNA, 25 bp, Homo sapien
agcttcttattttcgtgtatcattt

SEQ ID NO: 6011924 - DNA, 25 bp, Homo sapien
aatgggatattctccatggtttatt

SEQ ID NO: 6011925 - DNA, 25 bp, Homo sapien
ctggcggatttattatactccatcc

SEQ ID NO: 6011926 - DNA, 25 bp, Homo sapien
tcgatggcgaattagcgtttagttt

SEQ ID NO: 6011927 - DNA, 25 bp, Homo sapien
gcattttgatatccagtgctgctat

SEQ ID NO: 6011928 - DNA, 25 bp, Homo sapien
gagtgatagggatttaaatttaggt

SEQ ID NO: 6011929 - DNA, 25 bp, Homo sapien
aatgacattattgaaccctattagt

SEQ ID NO: 6011930 - DNA, 25 bp, Homo sapien
caccggtcagtagttcaaacgccag

SEQ ID NO: 6011931 - DNA, 25 bp, Homo sapien
gttactgggcattttgatatccagt

SEQ ID NO: 6011932 - DNA, 25 bp, Homo sapien
taggtgatggaattttggagctttc

SEQ ID NO: 6011933 - DNA, 25 bp, Homo sapien
catgaaaatagccgtatgatttagt

SEQ ID NO: 6011934 - DNA, 25 bp, Homo sapien
agttagattcggatgatttagcgat

SEQ ID NO: 6011935 - DNA, 25 bp, Homo sapien
ctttttatgcatataatctagggca

SEQ ID NO: 6011936 - DNA, 25 bp, Homo sapien
gcatcctgagaaatgttactgggca

SEQ ID NO: 6011937 - DNA, 25 bp, Homo sapien
ttagtatccaaggatgcatttttac

SEQ ID NO: 6011938 - DNA, 25 bp, Homo sapien
tgatggaattttggagctttccata

SEQ ID NO: 6011939 - DNA, 25 bp, Homo sapien
agggcttgtttcttagtatccaagg

SEQ ID NO: 6011940 - DNA, 25 bp, Homo sapien
cctgagaaatgttactgggcatttt

SEQ ID NO: 6011941 - DNA, 25 bp, Homo sapien
accatttctggagaaaggtagtcaa

SEQ ID NO: 6011942 - DNA, 25 bp, Homo sapien
aatttcttccccagttcaaagtcat

SEQ ID NO: 6011943 - DNA, 25 bp, Homo sapien
acgccaagagcccatgcatctatag

SEQ ID NO: 6011944 - DNA, 25 bp, Homo sapien
catctatagtgtgatcatattccct

SEQ ID NO: 6011945 - DNA, 25 bp, Homo sapien
ttcatttcttcttcgaacggagggg

SEQ ID NO: 6011946 - DNA, 25 bp, Homo sapien
cccattgactaagtattccattagc

SEQ ID NO: 6011947 - DNA, 25 bp, Homo sapien
gtgatagggatttaaatttaggtag

SEQ ID NO: 6011948 - DNA, 25 bp, Homo sapien
gtggtctttttcgatggcgaattag

SEQ ID NO: 6011949 - DNA, 25 bp, Homo sapien
ttgtggtctttttcgatggcgaatt

SEQ ID NO: 6011950 - DNA, 25 bp, Homo sapien
attgatcctggacgtatttggtctt

SEQ ID NO: 6011951 - DNA, 25 bp, Homo sapien
cgaagtccgttaacttaatgacatt

SEQ ID NO: 6011952 - DNA, 25 bp, Homo sapien
ggcaccggtcagtagttcaaacgcc

SEQ ID NO: 6011953 - DNA, 25 bp, Homo sapien
gtttaagtattaaatcttgcgcatc

SEQ ID NO: 6011954 - DNA, 25 bp, Homo sapien
cttctattttctggcggatttatta

SEQ ID NO: 6011955 - DNA, 25 bp, Homo sapien
tactgggcattttgatatccagtgc

SEQ ID NO: 6011956 - DNA, 25 bp, Homo sapien
tttttacgtctccaaggcgcattct

SEQ ID NO: 6011957 - DNA, 25 bp, Homo sapien
tgggatattctccatggtttattga

SEQ ID NO: 6011958 - DNA, 25 bp, Homo sapien
atccagtgctgctatccttttatat

SEQ ID NO: 6011959 - DNA, 25 bp, Homo sapien
ctgcggcgaatgggatattctccat

SEQ ID NO: 6011960 - DNA, 25 bp, Homo sapien
ccggtcagtagttcaaacgccagga

SEQ ID NO: 6011961 - DNA, 25 bp, Homo sapien
catccgaagtccgttaacttaatga

SEQ ID NO: 6011962 - DNA, 25 bp, Homo sapien
gaacggaggggcaccggtcagtagt

SEQ ID NO: 6011963 - DNA, 25 bp, Homo sapien
acatttccccattgactaagtattc

SEQ ID NO: 6011964 - DNA, 25 bp, Homo sapien
aacttcttattgtttacaggtaatc

SEQ ID NO: 6011965 - DNA, 25 bp, Homo sapien
attctatctttggggtcgtatttta

SEQ ID NO: 6011966 - DNA, 25 bp, Homo sapien
tttcgtgtatcattttggaagaagt

SEQ ID NO: 6011967 - DNA, 25 bp, Homo sapien
ttagattcggatgatttagcgatgt

SEQ ID NO: 6011968 - DNA, 25 bp, Homo sapien
tccttctccattactttcagtgcgc

SEQ ID NO: 6011969 - DNA, 25 bp, Homo sapien
ggcttgtttcttagtatccaaggat

SEQ ID NO: 6011970 - DNA, 25 bp, Homo sapien
tagcgatgtttgtatttctacctcc

SEQ ID NO: 6011971 - DNA, 25 bp, Homo sapien
ttatgcatataatctagggcattgg

SEQ ID NO: 6011972 - DNA, 25 bp, Homo sapien
gtgtgatcatattcccttgactcca

SEQ ID NO: 6011973 - DNA, 25 bp, Homo sapien
tacctcccttctgaattgtttctgt

SEQ ID NO: 6011974 - DNA, 25 bp, Homo sapien
aagaagtcgctttccttataggtga

SEQ ID NO: 6011975 - DNA, 25 bp, Homo sapien
aggtttaatatctctatgaataata

SEQ ID NO: 6011976 - DNA, 25 bp, Homo sapien
tcccttctgaattgtttctgtaaat

SEQ ID NO: 6011977 - DNA, 25 bp, Homo sapien
cctggacgtatttggtcttgttgtg

SEQ ID NO: 6011978 - DNA, 25 bp, Homo sapien
tatgatttagttagattcggatgat

SEQ ID NO: 6011979 - DNA, 25 bp, Homo sapien
atttttctcttacaggtgaaggtat

SEQ ID NO: 6011980 - DNA, 25 bp, Homo sapien
ctattagtatattttcaggtttaat

SEQ ID NO: 6011981 - DNA, 25 bp, Homo sapien
tgtttgtatttctacctcccttctg

SEQ ID NO: 6011982 - DNA, 25 bp, Homo sapien
tgtatttctacctcccttctgaatt

SEQ ID NO: 6011983 - DNA, 25 bp, Homo sapien
gaattagcgtttagtttgatattta

SEQ ID NO: 6011984 - DNA, 25 bp, Homo sapien
atactccatccgaagtccgttaact

SEQ ID NO: 6011985 - DNA, 25 bp, Homo sapien
ccgttaacttaatgacattattgaa

SEQ ID NO: 6011986 - DNA, 25 bp, Homo sapien
tttgaattcgggtttctttgctgcg

SEQ ID NO: 6011987 - DNA, 25 bp, Homo sapien
ttccccattgactaagtattccatt

SEQ ID NO: 6011988 - DNA, 25 bp, Homo sapien
tttgctgcggcgaatgggatattct

SEQ ID NO: 6011989 - DNA, 25 bp, Homo sapien
agtgctgctatccttttatatgtag

SEQ ID NO: 6011990 - DNA, 25 bp, Homo sapien
actccatccgaagtccgttaactta

SEQ ID NO: 6011991 - DNA, 25 bp, Homo sapien
gtagcttcttattttcgtgtatcat

SEQ ID NO: 6011992 - DNA, 25 bp, Homo sapien
cgtctccaaggcgcattctatcttt

SEQ ID NO: 6011993 - DNA, 25 bp, Homo sapien
gtcatcgagtgatagggatttaaat

SEQ ID NO: 6011994 - DNA, 25 bp, Homo sapien
ttagtagtttaagtattaaatcttg

SEQ ID NO: 6011995 - DNA, 25 bp, Homo sapien
tttgatatccagtgctgctatcctt

SEQ ID NO: 6011996 - DNA, 25 bp, Homo sapien
gcattctatctttggggtcgtattt

SEQ ID NO: 6011997 - DNA, 25 bp, Homo sapien
gcatataatctagggcattggcaat

SEQ ID NO: 6011998 - DNA, 25 bp, Homo sapien
acactctatttgacatgtatgacga

SEQ ID NO: 6011999 - DNA, 25 bp, Homo sapien
tctaccaaccaagcgccaggccacg

SEQ ID NO: 6012000 - DNA, 25 bp, Homo sapien
gaagcaagcatcgaaaagactcaaa

SEQ ID NO: 6012001 - DNA, 25 bp, Homo sapien
agacacgaagctgccaagctatttg

SEQ ID NO: 6012002 - DNA, 25 bp, Homo sapien
ggtctagaacaagaatacactctat

SEQ ID NO: 6012003 - DNA, 25 bp, Homo sapien
gaggtgacaacattgttgtcttggc

SEQ ID NO: 6012004 - DNA, 25 bp, Homo sapien
gtacggtagcgataacgacatgaga

SEQ ID NO: 6012005 - DNA, 25 bp, Homo sapien
catgtaccggtattgacatgggtga

SEQ ID NO: 6012006 - DNA, 25 bp, Homo sapien
cgttccaaaggtagaactttgaaga

SEQ ID NO: 6012007 - DNA, 25 bp, Homo sapien
aaatgagacaaccaggtggtacgaa

SEQ ID NO: 6012008 - DNA, 25 bp, Homo sapien
ttggtatcaagatctcattccatcc

SEQ ID NO: 6012009 - DNA, 25 bp, Homo sapien
atgttacaacaatgacggtactcca

SEQ ID NO: 6012010 - DNA, 25 bp, Homo sapien
tttgacatgtatgacgatgtttacg

SEQ ID NO: 6012011 - DNA, 25 bp, Homo sapien
gtagctcaattagaatcccaagatc

SEQ ID NO: 6012012 - DNA, 25 bp, Homo sapien
ggtgaccaattatggatggccagat

SEQ ID NO: 6012013 - DNA, 25 bp, Homo sapien
ccatctcaatgggaattccaagtcg

SEQ ID NO: 6012014 - DNA, 25 bp, Homo sapien
acaagttcaaccacagacacgaagc

SEQ ID NO: 6012015 - DNA, 25 bp, Homo sapien
aggtatcatgtgtgaaactgtttgc

SEQ ID NO: 6012016 - DNA, 25 bp, Homo sapien
gagaagttatccaagagacacgctg

SEQ ID NO: 6012017 - DNA, 25 bp, Homo sapien
aagatctcattccatccaaagccat

SEQ ID NO: 6012018 - DNA, 25 bp, Homo sapien
cattgaccaattgccagaatggaac

SEQ ID NO: 6012019 - DNA, 25 bp, Homo sapien
atcacatccattgaccaattgccag

SEQ ID NO: 6012020 - DNA, 25 bp, Homo sapien
caaagaggtagaataattgccgaat

SEQ ID NO: 6012021 - DNA, 25 bp, Homo sapien
accgtagaccagcttccaacatcga

SEQ ID NO: 6012022 - DNA, 25 bp, Homo sapien
gataacgacatgagattaactggta

SEQ ID NO: 6012023 - DNA, 25 bp, Homo sapien
ggaacttcgacggttcttctaccaa

SEQ ID NO: 6012024 - DNA, 25 bp, Homo sapien
gacaaccaggtggtacgaaatacat

SEQ ID NO: 6012025 - DNA, 25 bp, Homo sapien
caagtcggtccatgtaccggtattg

SEQ ID NO: 6012026 - DNA, 25 bp, Homo sapien
ccgttgcttactacccagatccctt

SEQ ID NO: 6012027 - DNA, 25 bp, Homo sapien
cttttcttctggtgtcgccaacaga

SEQ ID NO: 6012028 - DNA, 25 bp, Homo sapien
aagcgccaggccacgactctgacat

SEQ ID NO: 6012029 - DNA, 25 bp, Homo sapien
caaccaggtggtacgaaatacatcg

SEQ ID NO: 6012030 - DNA, 25 bp, Homo sapien
ctcaattagaatcccaagatccgtc

SEQ ID NO: 6012031 - DNA, 25 bp, Homo sapien
ctacccagatcccttcaggagaggt

SEQ ID NO: 6012032 - DNA, 25 bp, Homo sapien
gaagttatccaagagacacgctgaa

SEQ ID NO: 6012033 - DNA, 25 bp, Homo sapien
tattgacatgggtgaccaattatgg

SEQ ID NO: 6012034 - DNA, 25 bp, Homo sapien
taagttgtacggtagcgataacgac

SEQ ID NO: 6012035 - DNA, 25 bp, Homo sapien
aagtcatgccatctcaatgggaatt

SEQ ID NO: 6012036 - DNA, 25 bp, Homo sapien
agattaactggtagacatgaaaccg

SEQ ID NO: 6012037 - DNA, 25 bp, Homo sapien
gactctgacatctatttgaaacccg

SEQ ID NO: 6012038 - DNA, 25 bp, Homo sapien
catctatttgaaacccgttgcttac

SEQ ID NO: 6012039 - DNA, 25 bp, Homo sapien
acatgatcgaagctcactacagagc

SEQ ID NO: 6012040 - DNA, 25 bp, Homo sapien
aactggaccaaagaggtagaataat

SEQ ID NO: 6012041 - DNA, 25 bp, Homo sapien
acaacattgttgtcttggccgcatg

SEQ ID NO: 6012042 - DNA, 25 bp, Homo sapien
taccaaccaagcgccaggccacgac

SEQ ID NO: 6012043 - DNA, 25 bp, Homo sapien
caattatggatggccagatactttt

SEQ ID NO: 6012044 - DNA, 25 bp, Homo sapien
tcgaagctcactacagagcttgttt

SEQ ID NO: 6012045 - DNA, 25 bp, Homo sapien
cataaggatgaagaaatctggtttg

SEQ ID NO: 6012046 - DNA, 25 bp, Homo sapien
aagccatcgagaagttatccaagag

SEQ ID NO: 6012047 - DNA, 25 bp, Homo sapien
aagaggtagaataattgccgaatac

SEQ ID NO: 6012048 - DNA, 25 bp, Homo sapien
acattaagttgtacggtagcgataa

SEQ ID NO: 6012049 - DNA, 25 bp, Homo sapien
acagagcttgtttgtatgccggatt

SEQ ID NO: 6012050 - DNA, 25 bp, Homo sapien
ttacggttactttgaagaccgtaga

SEQ ID NO: 6012051 - DNA, 25 bp, Homo sapien
ggtggtacgaaatacatcgaacaag

SEQ ID NO: 6012052 - DNA, 25 bp, Homo sapien
ggtactccaaacaagttcaaccaca

SEQ ID NO: 6012053 - DNA, 25 bp, Homo sapien
gtatcatgtgtgaaactgtttgcgg

SEQ ID NO: 6012054 - DNA, 25 bp, Homo sapien
atcccaagatccgtcgccaaggaag

SEQ ID NO: 6012055 - DNA, 25 bp, Homo sapien
agctcactacagagcttgtttgtat

SEQ ID NO: 6012056 - DNA, 25 bp, Homo sapien
gaatacactctatttgacatgtatg

SEQ ID NO: 6012057 - DNA, 25 bp, Homo sapien
aaccacagacacgaagctgccaagc

SEQ ID NO: 6012058 - DNA, 25 bp, Homo sapien
gaaatctggtttggtctagaacaag

SEQ ID NO: 6012059 - DNA, 25 bp, Homo sapien
gttactttgaagaccgtagaccagc

SEQ ID NO: 6012060 - DNA, 25 bp, Homo sapien
gaagctcactacagagcttgtttgt

SEQ ID NO: 6012061 - DNA, 25 bp, Homo sapien
gtgggtacccagctccacaaggtcc

SEQ ID NO: 6012062 - DNA, 25 bp, Homo sapien
atatctagaactggaccaaagaggt

SEQ ID NO: 6012063 - DNA, 25 bp, Homo sapien
ttcgacggttcttctaccaaccaag

SEQ ID NO: 6012064 - DNA, 25 bp, Homo sapien
tgtatgccggattagaaatttctgg

SEQ ID NO: 6012065 - DNA, 25 bp, Homo sapien
gggaattccaagtcggtccatgtac

SEQ ID NO: 6012066 - DNA, 25 bp, Homo sapien
tagaatcccaagatccgtcgccaag

SEQ ID NO: 6012067 - DNA, 25 bp, Homo sapien
actgtggtgttggtgccggtaaggt

SEQ ID NO: 6012068 - DNA, 25 bp, Homo sapien
tctagaacaagaatacactctattt

SEQ ID NO: 6012069 - DNA, 25 bp, Homo sapien
ttgaccaattgccagaatggaactt

SEQ ID NO: 6012070 - DNA, 25 bp, Homo sapien
atttgctgctcataaggatgaagaa

SEQ ID NO: 6012071 - DNA, 25 bp, Homo sapien
tgccagagacatgatcgaagctcac

SEQ ID NO: 6012072 - DNA, 25 bp, Homo sapien
caaagccattgaagggtgactggaa

SEQ ID NO: 6012073 - DNA, 25 bp, Homo sapien
aaaggtagaactttgaagaagagaa

SEQ ID NO: 6012074 - DNA, 25 bp, Homo sapien
tcgaacaagccatcgagaagttatc

SEQ ID NO: 6012075 - DNA, 25 bp, Homo sapien
ttgttgtcttggccgcatgttacaa

SEQ ID NO: 6012076 - DNA, 25 bp, Homo sapien
tgcttactacccagatcccttcagg

SEQ ID NO: 6012077 - DNA, 25 bp, Homo sapien
agagcttgtttgtatgccggattag

SEQ ID NO: 6012078 - DNA, 25 bp, Homo sapien
ccagagacatgatcgaagctcacta

SEQ ID NO: 6012079 - DNA, 25 bp, Homo sapien
ttggttacaggtatcatgtgtgaaa

SEQ ID NO: 6012080 - DNA, 25 bp, Homo sapien
acagaggtagctcaattagaatccc

SEQ ID NO: 6012081 - DNA, 25 bp, Homo sapien
acatgacgaaggaatttgaaagaga

SEQ ID NO: 6012082 - DNA, 25 bp, Homo sapien
gaaatttctggtattaacgctgaag

SEQ ID NO: 6012083 - DNA, 25 bp, Homo sapien
ttctggtgtcgccaacagaggtagc

SEQ ID NO: 6012084 - DNA, 25 bp, Homo sapien
gcgccaggccacgactctgacatct

SEQ ID NO: 6012085 - DNA, 25 bp, Homo sapien
tgtgtgaaactgtttgcggtgctat

SEQ ID NO: 6012086 - DNA, 25 bp, Homo sapien
tcaaccacagacacgaagctgccaa

SEQ ID NO: 6012087 - DNA, 25 bp, Homo sapien
catcgaaaagactcaaattttacaa

SEQ ID NO: 6012088 - DNA, 25 bp, Homo sapien
aagaaatctggtttggtctagaaca

SEQ ID NO: 6012089 - DNA, 25 bp, Homo sapien
ccagcttccaacatcgacccatact

SEQ ID NO: 6012090 - DNA, 25 bp, Homo sapien
ggtagcgataacgacatgagattaa

SEQ ID NO: 6012091 - DNA, 25 bp, Homo sapien
gccaagctatttgctgctcataagg

SEQ ID NO: 6012092 - DNA, 25 bp, Homo sapien
atgacgaaggaatttgaaagagaat

SEQ ID NO: 6012093 - DNA, 25 bp, Homo sapien
cggatggccaaagggtgggtaccca

SEQ ID NO: 6012094 - DNA, 25 bp, Homo sapien
ttgacatgggtgaccaattatggat

SEQ ID NO: 6012095 - DNA, 25 bp, Homo sapien
gaagctgccaagctatttgctgctc

SEQ ID NO: 6012096 - DNA, 25 bp, Homo sapien
cttactactgtggtgttggtgccgg

SEQ ID NO: 6012097 - DNA, 25 bp, Homo sapien
tgacatgacgaaggaatttgaaaga

SEQ ID NO: 6012098 - DNA, 25 bp, Homo sapien
aaactgtttgcggtgctattgacaa

SEQ ID NO: 6012099 - DNA, 25 bp, Homo sapien
atctagaactggaccaaagaggtag

SEQ ID NO: 6012100 - DNA, 25 bp, Homo sapien
ttccatgactgccttttcttctggt

SEQ ID NO: 6012101 - DNA, 25 bp, Homo sapien
atgctgacatgacgaaggaatttga

SEQ ID NO: 6012102 - DNA, 25 bp, Homo sapien
ccatgactgccttttcttctggtgt

SEQ ID NO: 6012103 - DNA, 25 bp, Homo sapien
gtttggtctagaacaagaatacact

SEQ ID NO: 6012104 - DNA, 25 bp, Homo sapien
aaggaaatgagacaaccaggtggta

SEQ ID NO: 6012105 - DNA, 25 bp, Homo sapien
tcttggccgcatgttacaacaatga

SEQ ID NO: 6012106 - DNA, 25 bp, Homo sapien
atcatgtgtgaaactgtttgcggtg

SEQ ID NO: 6012107 - DNA, 25 bp, Homo sapien
tctggtttggtctagaacaagaata

SEQ ID NO: 6012108 - DNA, 25 bp, Homo sapien
acagacacgaagctgccaagctatt

SEQ ID NO: 6012109 - DNA, 25 bp, Homo sapien
tggtattaacgctgaagtcatgcca

SEQ ID NO: 6012110 - DNA, 25 bp, Homo sapien
acacgaagctgccaagctatttgct

SEQ ID NO: 6012111 - DNA, 25 bp, Homo sapien
agcttgtttgtatgccggattagaa

SEQ ID NO: 6012112 - DNA, 25 bp, Homo sapien
aatacatcgaacaagccatcgagaa

SEQ ID NO: 6012113 - DNA, 25 bp, Homo sapien
cgacggttcttctaccaaccaagcg

SEQ ID NO: 6012114 - DNA, 25 bp, Homo sapien
tatgccagagacatgatcgaagctc

SEQ ID NO: 6012115 - DNA, 25 bp, Homo sapien
acaggtatcatgtgtgaaactgttt

SEQ ID NO: 6012116 - DNA, 25 bp, Homo sapien
ccggtattgacatgggtgaccaatt

SEQ ID NO: 6012117 - DNA, 25 bp, Homo sapien
acggtagcgataacgacatgagatt

SEQ ID NO: 6012118 - DNA, 25 bp, Homo sapien
agcttccaacatcgacccatacttg

SEQ ID NO: 6012119 - DNA, 25 bp, Homo sapien
gagacaaccaggtggtacgaaatac

SEQ ID NO: 6012120 - DNA, 25 bp, Homo sapien
aggtagctcaattagaatcccaaga

SEQ ID NO: 6012121 - DNA, 25 bp, Homo sapien
catccaaagccattgaagggtgact

SEQ ID NO: 6012122 - DNA, 25 bp, Homo sapien
tttccaccaaggaaatgagacaacc

SEQ ID NO: 6012123 - DNA, 25 bp, Homo sapien
tgccatctcaatgggaattccaagt

SEQ ID NO: 6012124 - DNA, 25 bp, Homo sapien
tcgagaagttatccaagagacacgc

SEQ ID NO: 6012125 - DNA, 25 bp, Homo sapien
agctatttgctgctcataaggatga

SEQ ID NO: 6012126 - DNA, 25 bp, Homo sapien
attaagttgtacggtagcgataacg

SEQ ID NO: 6012127 - DNA, 25 bp, Homo sapien
ctacagagcttgtttgtatgccgga

SEQ ID NO: 6012128 - DNA, 25 bp, Homo sapien
ggtgacaacattgttgtcttggccg

SEQ ID NO: 6012129 - DNA, 25 bp, Homo sapien
tccttactactgtggtgttggtgcc

SEQ ID NO: 6012130 - DNA, 25 bp, Homo sapien
actggaacggtgccggttgtcacgc

SEQ ID NO: 6012131 - DNA, 25 bp, Homo sapien
ttgctgctcataaggatgaagaaat

SEQ ID NO: 6012132 - DNA, 25 bp, Homo sapien
aactttgaagaagagaatcacatcc

SEQ ID NO: 6012133 - DNA, 25 bp, Homo sapien
tcgaaaagactcaaattttacaaaa

SEQ ID NO: 6012134 - DNA, 25 bp, Homo sapien
tctcattccatccaaagccattgaa

SEQ ID NO: 6012135 - DNA, 25 bp, Homo sapien
acccagatcccttcaggagaggtga

SEQ ID NO: 6012136 - DNA, 25 bp, Homo sapien
ccatacttggttacaggtatcatgt

SEQ ID NO: 6012137 - DNA, 25 bp, Homo sapien
tagcgataacgacatgagattaact

SEQ ID NO: 6012138 - DNA, 25 bp, Homo sapien
ataattgccgaatacgtttggatcg

SEQ ID NO: 6012139 - DNA, 25 bp, Homo sapien
tggcagaagagtttggtatcaagat

SEQ ID NO: 6012140 - DNA, 25 bp, Homo sapien
gatggccagatactttttgcacaga

SEQ ID NO: 6012141 - DNA, 25 bp, Homo sapien
tggccagatactttttgcacagagt

SEQ ID NO: 6012142 - DNA, 25 bp, Homo sapien
attagaaatttctggtattaacgct

SEQ ID NO: 6012143 - DNA, 25 bp, Homo sapien
agaagagaatcacatccattgacca

SEQ ID NO: 6012144 - DNA, 25 bp, Homo sapien
gcagaagagtttggtatcaagatct

SEQ ID NO: 6012145 - DNA, 25 bp, Homo sapien
aatacgtttggatcgatggtactgg

SEQ ID NO: 6012146 - DNA, 25 bp, Homo sapien
tttctggtattaacgctgaagtcat

SEQ ID NO: 6012147 - DNA, 25 bp, Homo sapien
cactacagagcttgtttgtatgccg

SEQ ID NO: 6012148 - DNA, 25 bp, Homo sapien
ttgcacagagtggcagaagagtttg

SEQ ID NO: 6012149 - DNA, 25 bp, Homo sapien
ggtagaataattgccgaatacgttt

SEQ ID NO: 6012150 - DNA, 25 bp, Homo sapien
tatggatggccagatactttttgca

SEQ ID NO: 6012151 - DNA, 25 bp, Homo sapien
tttgaaacccgttgcttactaccca

SEQ ID NO: 6012152 - DNA, 25 bp, Homo sapien
cgtagaccagcttccaacatcgacc

SEQ ID NO: 6012153 - DNA, 25 bp, Homo sapien
caggccacgactctgacatctattt

SEQ ID NO: 6012154 - DNA, 25 bp, Homo sapien
atacttggttacaggtatcatgtgt

SEQ ID NO: 6012155 - DNA, 25 bp, Homo sapien
ggaatttgaaagagaatcttcataa

SEQ ID NO: 6012156 - DNA, 25 bp, Homo sapien
agaactttgaagaagagaatcacat

SEQ ID NO: 6012157 - DNA, 25 bp, Homo sapien
acgactctgacatctatttgaaacc

SEQ ID NO: 6012158 - DNA, 25 bp, Homo sapien
ggtattgacatgggtgaccaattat

SEQ ID NO: 6012159 - DNA, 25 bp, Homo sapien
tccattgaccaattgccagaatgga

SEQ ID NO: 6012160 - DNA, 25 bp, Homo sapien
aagagaatcacatccattgaccaat

SEQ ID NO: 6012161 - DNA, 25 bp, Homo sapien
acggttcttctaccaaccaagcgcc

SEQ ID NO: 6012162 - DNA, 25 bp, Homo sapien
cgacccatacttggttacaggtatc

SEQ ID NO: 6012163 - DNA, 25 bp, Homo sapien
ctatttgctgctcataaggatgaag

SEQ ID NO: 6012164 - DNA, 25 bp, Homo sapien
gccatcgagaagttatccaagagac

SEQ ID NO: 6012165 - DNA, 25 bp, Homo sapien
gaagaccgtagaccagcttccaaca

SEQ ID NO: 6012166 - DNA, 25 bp, Homo sapien
gatcgaagctcactacagagcttgt

SEQ ID NO: 6012167 - DNA, 25 bp, Homo sapien
acgaaatacatcgaacaagccatcg

SEQ ID NO: 6012168 - DNA, 25 bp, Homo sapien
acacattaagttgtacggtagcgat

SEQ ID NO: 6012169 - DNA, 25 bp, Homo sapien
ccaagagacacgctgaacacattaa

SEQ ID NO: 6012170 - DNA, 25 bp, Homo sapien
cttccaacatcgacccatacttggt

SEQ ID NO: 6012171 - DNA, 25 bp, Homo sapien
ccacgactctgacatctatttgaaa

SEQ ID NO: 6012172 - DNA, 25 bp, Homo sapien
tacggatggccaaagggtgggtacc

SEQ ID NO: 6012173 - DNA, 25 bp, Homo sapien
caatgctgacatgacgaaggaattt

SEQ ID NO: 6012174 - DNA, 25 bp, Homo sapien
aggagaggtgacaacattgttgtct

SEQ ID NO: 6012175 - DNA, 25 bp, Homo sapien
gttgtcttggccgcatgttacaaca

SEQ ID NO: 6012176 - DNA, 25 bp, Homo sapien
cttcaggagaggtgacaacattgtt

SEQ ID NO: 6012177 - DNA, 25 bp, Homo sapien
aagagtttggtatcaagatctcatt

SEQ ID NO: 6012178 - DNA, 25 bp, Homo sapien
tggtgttggtgccggtaaggtttat

SEQ ID NO: 6012179 - DNA, 25 bp, Homo sapien
atgaaaccgcttccatgactgcctt

SEQ ID NO: 6012180 - DNA, 25 bp, Homo sapien
ggtttatgccagagacatgatcgaa

SEQ ID NO: 6012181 - DNA, 25 bp, Homo sapien
ctactgtggtgttggtgccggtaag

SEQ ID NO: 6012182 - DNA, 25 bp, Homo sapien
gaacacattaagttgtacggtagcg

SEQ ID NO: 6012183 - DNA, 25 bp, Homo sapien
gaacaagaatacactctatttgaca

SEQ ID NO: 6012184 - DNA, 25 bp, Homo sapien
aaccgcttccatgactgccttttct

SEQ ID NO: 6012185 - DNA, 25 bp, Homo sapien
catcgagaagttatccaagagacac

SEQ ID NO: 6012186 - DNA, 25 bp, Homo sapien
ttgccagaatggaacttcgacggtt

SEQ ID NO: 6012187 - DNA, 25 bp, Homo sapien
tggatcgatggtactggtaacttac

SEQ ID NO: 6012188 - DNA, 25 bp, Homo sapien
cagaatggaacttcgacggttcttc

SEQ ID NO: 6012189 - DNA, 25 bp, Homo sapien
taaggatgaagaaatctggtttggt

SEQ ID NO: 6012190 - DNA, 25 bp, Homo sapien
ctgaacacattaagttgtacggtag

SEQ ID NO: 6012191 - DNA, 25 bp, Homo sapien
cagatactttttgcacagagtggca

SEQ ID NO: 6012192 - DNA, 25 bp, Homo sapien
tgactggaacggtgccggttgtcac

SEQ ID NO: 6012193 - DNA, 25 bp, Homo sapien
aagagacacgctgaacacattaagt

SEQ ID NO: 6012194 - DNA, 25 bp, Homo sapien
attccaagtcggtccatgtaccggt

SEQ ID NO: 6012195 - DNA, 25 bp, Homo sapien
tgccggattagaaatttctggtatt

SEQ ID NO: 6012196 - DNA, 25 bp, Homo sapien
tgtttgtatgccggattagaaattt

SEQ ID NO: 6012197 - DNA, 25 bp, Homo sapien
ctgccaagctatttgctgctcataa

SEQ ID NO: 6012198 - DNA, 25 bp, Homo sapien
tactttttgcacagagtggcagaag

SEQ ID NO: 6012199 - DNA, 25 bp, Homo sapien
tatttgaaacccgttgcttactacc

SEQ ID NO: 6012200 - DNA, 25 bp, Homo sapien
attaacgctgaagtcatgccatctc

SEQ ID NO: 6012201 - DNA, 25 bp, Homo sapien
aagccattgaagggtgactggaacg

SEQ ID NO: 6012202 - DNA, 25 bp, Homo sapien
gcatgttacaacaatgacggtactc

SEQ ID NO: 6012203 - DNA, 25 bp, Homo sapien
gcttccatgactgccttttcttctg

SEQ ID NO: 6012204 - DNA, 25 bp, Homo sapien
gacacgctgaacacattaagttgta

SEQ ID NO: 6012205 - DNA, 25 bp, Homo sapien
gccagaatggaacttcgacggttct

SEQ ID NO: 6012206 - DNA, 25 bp, Homo sapien
ggccgcatgttacaacaatgacggt

SEQ ID NO: 6012207 - DNA, 25 bp, Homo sapien
tttggatcgatggtactggtaactt

SEQ ID NO: 6012208 - DNA, 25 bp, Homo sapien
tagaataattgccgaatacgtttgg

SEQ ID NO: 6012209 - DNA, 25 bp, Homo sapien
ccaagcgccaggccacgactctgac

SEQ ID NO: 6012210 - DNA, 25 bp, Homo sapien
gaatcacatccattgaccaattgcc

SEQ ID NO: 6012211 - DNA, 25 bp, Homo sapien
ttgaagaagagaatcacatccattg

SEQ ID NO: 6012212 - DNA, 25 bp, Homo sapien
cggtgctattgacaatgctgacatg

SEQ ID NO: 6012213 - DNA, 25 bp, Homo sapien
tgtggtgttggtgccggtaaggttt

SEQ ID NO: 6012214 - DNA, 25 bp, Homo sapien
gaggtagaataattgccgaatacgt

SEQ ID NO: 6012215 - DNA, 25 bp, Homo sapien
agctgccaagctatttgctgctcat

SEQ ID NO: 6012216 - DNA, 25 bp, Homo sapien
gtattaacgctgaagtcatgccatc

SEQ ID NO: 6012217 - DNA, 25 bp, Homo sapien
gtcatgccatctcaatgggaattcc

SEQ ID NO: 6012218 - DNA, 25 bp, Homo sapien
agctccacaaggtccttactactgt

SEQ ID NO: 6012219 - DNA, 25 bp, Homo sapien
acaaggtccttactactgtggtgtt

SEQ ID NO: 6012220 - DNA, 25 bp, Homo sapien
acttggttacaggtatcatgtgtga

SEQ ID NO: 6012221 - DNA, 25 bp, Homo sapien
gccaacagaggtagctcaattagaa

SEQ ID NO: 6012222 - DNA, 25 bp, Homo sapien
acgacatgagattaactggtagaca

SEQ ID NO: 6012223 - DNA, 25 bp, Homo sapien
ggccacgactctgacatctatttga

SEQ ID NO: 6012224 - DNA, 25 bp, Homo sapien
gcgataacgacatgagattaactgg

SEQ ID NO: 6012225 - DNA, 25 bp, Homo sapien
tccatccaaagccattgaagggtga

SEQ ID NO: 6012226 - DNA, 25 bp, Homo sapien
gctgaagtcatgccatctcaatggg

SEQ ID NO: 6012227 - DNA, 25 bp, Homo sapien
agatccgtcgccaaggaaggttacg

SEQ ID NO: 6012228 - DNA, 25 bp, Homo sapien
ctccacaaggtccttactactgtgg

SEQ ID NO: 6012229 - DNA, 25 bp, Homo sapien
aattgccagaatggaacttcgacgg

SEQ ID NO: 6012230 - DNA, 25 bp, Homo sapien
tagaaatttctggtattaacgctga

SEQ ID NO: 6012231 - DNA, 25 bp, Homo sapien
gaaatacatcgaacaagccatcgag

SEQ ID NO: 6012232 - DNA, 25 bp, Homo sapien
catgtgtgaaactgtttgcggtgct

SEQ ID NO: 6012233 - DNA, 25 bp, Homo sapien
acttcgacggttcttctaccaacca

SEQ ID NO: 6012234 - DNA, 25 bp, Homo sapien
tgacggtactccaaacaagttcaac

SEQ ID NO: 6012235 - DNA, 25 bp, Homo sapien
tttatgccagagacatgatcgaagc

SEQ ID NO: 6012236 - DNA, 25 bp, Homo sapien
gttggtgccggtaaggtttatgcca

SEQ ID NO: 6012237 - DNA, 25 bp, Homo sapien
gatctcattccatccaaagccattg

SEQ ID NO: 6012238 - DNA, 25 bp, Homo sapien
tatttgacatgtatgacgatgttta

SEQ ID NO: 6012239 - DNA, 25 bp, Homo sapien
gatgaagaaatctggtttggtctag

SEQ ID NO: 6012240 - DNA, 25 bp, Homo sapien
gtcacgctaacgtttccaccaagga

SEQ ID NO: 6012241 - DNA, 25 bp, Homo sapien
ctccaaacaagttcaaccacagaca

SEQ ID NO: 6012242 - DNA, 25 bp, Homo sapien
agacatgaaaccgcttccatgactg

SEQ ID NO: 6012243 - DNA, 25 bp, Homo sapien
gttacaacaatgacggtactccaaa

SEQ ID NO: 6012244 - DNA, 25 bp, Homo sapien
atcccttcaggagaggtgacaacat

SEQ ID NO: 6012245 - DNA, 25 bp, Homo sapien
agcaagcatcgaaaagactcaaatt

SEQ ID NO: 6012246 - DNA, 25 bp, Homo sapien
ttttacaaaaatatctagaactgga

SEQ ID NO: 6012247 - DNA, 25 bp, Homo sapien
cgtttggatcgatggtactggtaac

SEQ ID NO: 6012248 - DNA, 25 bp, Homo sapien
catccattgaccaattgccagaatg

SEQ ID NO: 6012249 - DNA, 25 bp, Homo sapien
tctatttgaaacccgttgcttacta

SEQ ID NO: 6012250 - DNA, 25 bp, Homo sapien
caggtggtacgaaatacatcgaaca

SEQ ID NO: 6012251 - DNA, 25 bp, Homo sapien
ttgaagaccgtagaccagcttccaa

SEQ ID NO: 6012252 - DNA, 25 bp, Homo sapien
agagacatgatcgaagctcactaca

SEQ ID NO: 6012253 - DNA, 25 bp, Homo sapien
gttcaaccacagacacgaagctgcc

SEQ ID NO: 6012254 - DNA, 25 bp, Homo sapien
tggtttggtctagaacaagaataca

SEQ ID NO: 6012255 - DNA, 25 bp, Homo sapien
ctttgaagaccgtagaccagcttcc

SEQ ID NO: 6012256 - DNA, 25 bp, Homo sapien
atgggaattccaagtcggtccatgt

SEQ ID NO: 6012257 - DNA, 25 bp, Homo sapien
ctggtgtcgccaacagaggtagctc

SEQ ID NO: 6012258 - DNA, 25 bp, Homo sapien
aaaaatatctagaactggaccaaag

SEQ ID NO: 6012259 - DNA, 25 bp, Homo sapien
accaattatggatggccagatactt

SEQ ID NO: 6012260 - DNA, 25 bp, Homo sapien
gaaaccgcttccatgactgcctttt

SEQ ID NO: 6012261 - DNA, 25 bp, Homo sapien
gaagggtgactggaacggtgccggt

SEQ ID NO: 6012262 - DNA, 25 bp, Homo sapien
tgaaactgtttgcggtgctattgac

SEQ ID NO: 6012263 - DNA, 25 bp, Homo sapien
taccggtattgacatgggtgaccaa

SEQ ID NO: 6012264 - DNA, 25 bp, Homo sapien
ttatccaagagacacgctgaacaca

SEQ ID NO: 6012265 - DNA, 25 bp, Homo sapien
tgggtgaccaattatggatggccag

SEQ ID NO: 6012266 - DNA, 25 bp, Homo sapien
ggttcttctaccaaccaagcgccag

SEQ ID NO: 6012267 - DNA, 25 bp, Homo sapien
acccatacttggttacaggtatcat

SEQ ID NO: 6012268 - DNA, 25 bp, Homo sapien
aattgccgaatacgtttggatcgat

SEQ ID NO: 6012269 - DNA, 25 bp, Homo sapien
tggaacggtgccggttgtcacgcta

SEQ ID NO: 6012270 - DNA, 25 bp, Homo sapien
aaggtttatgccagagacatgatcg

SEQ ID NO: 6012271 - DNA, 25 bp, Homo sapien
tactacccagatcccttcaggagag

SEQ ID NO: 6012272 - DNA, 25 bp, Homo sapien
tgtttgcggtgctattgacaatgct

SEQ ID NO: 6012273 - DNA, 25 bp, Homo sapien
gggtacccagctccacaaggtcctt

SEQ ID NO: 6012274 - DNA, 25 bp, Homo sapien
ttacgttccaaaggtagaactttga

SEQ ID NO: 6012275 - DNA, 25 bp, Homo sapien
ctgaagcaagcatcgaaaagactca

SEQ ID NO: 6012276 - DNA, 25 bp, Homo sapien
ccagctccacaaggtccttactact

SEQ ID NO: 6012277 - DNA, 25 bp, Homo sapien
acatgaaaccgcttccatgactgcc

SEQ ID NO: 6012278 - DNA, 25 bp, Homo sapien
tgaagaaatctggtttggtctagaa

SEQ ID NO: 6012279 - DNA, 25 bp, Homo sapien
gcacagagtggcagaagagtttggt

SEQ ID NO: 6012280 - DNA, 25 bp, Homo sapien
caagcatcgaaaagactcaaatttt

SEQ ID NO: 6012281 - DNA, 25 bp, Homo sapien
gacgatgtttacggatggccaaagg

SEQ ID NO: 6012282 - DNA, 25 bp, Homo sapien
ctctgacatctatttgaaacccgtt

SEQ ID NO: 6012283 - DNA, 25 bp, Homo sapien
ccagatcccttcaggagaggtgaca

SEQ ID NO: 6012284 - DNA, 25 bp, Homo sapien
gaattccaagtcggtccatgtaccg

SEQ ID NO: 6012285 - DNA, 25 bp, Homo sapien
tccaacatcgacccatacttggtta

SEQ ID NO: 6012286 - DNA, 25 bp, Homo sapien
gctattgacaatgctgacatgacga

SEQ ID NO: 6012287 - DNA, 25 bp, Homo sapien
tccaagtcggtccatgtaccggtat

SEQ ID NO: 6012288 - DNA, 25 bp, Homo sapien
ggtgtcgccaacagaggtagctcaa

SEQ ID NO: 6012289 - DNA, 25 bp, Homo sapien
gaataattgccgaatacgtttggat

SEQ ID NO: 6012290 - DNA, 25 bp, Homo sapien
gaacggtgccggttgtcacgctaac

SEQ ID NO: 6012291 - DNA, 25 bp, Homo sapien
agacatgatcgaagctcactacaga

SEQ ID NO: 6012292 - DNA, 25 bp, Homo sapien
tacaacaatgacggtactccaaaca

SEQ ID NO: 6012293 - DNA, 25 bp, Homo sapien
tgtgaaactgtttgcggtgctattg

SEQ ID NO: 6012294 - DNA, 25 bp, Homo sapien
tgagattaactggtagacatgaaac

SEQ ID NO: 6012295 - DNA, 25 bp, Homo sapien
ggttacaggtatcatgtgtgaaact

SEQ ID NO: 6012296 - DNA, 25 bp, Homo sapien
gttgcttactacccagatcccttca

SEQ ID NO: 6012297 - DNA, 25 bp, Homo sapien
tgtaccggtattgacatgggtgacc

SEQ ID NO: 6012298 - DNA, 25 bp, Homo sapien
taacgctgaagtcatgccatctcaa

SEQ ID NO: 6012299 - DNA, 25 bp, Homo sapien
gccaggccacgactctgacatctat

SEQ ID NO: 6012300 - DNA, 25 bp, Homo sapien
ttcttctaccaaccaagcgccaggc

SEQ ID NO: 6012301 - DNA, 25 bp, Homo sapien
gatggtactggtaacttacgttcca

SEQ ID NO: 6012302 - DNA, 25 bp, Homo sapien
gacatgggtgaccaattatggatgg

SEQ ID NO: 6012303 - DNA, 25 bp, Homo sapien
accaggtggtacgaaatacatcgaa

SEQ ID NO: 6012304 - DNA, 25 bp, Homo sapien
gatggccaaagggtgggtacccagc

SEQ ID NO: 6012305 - DNA, 25 bp, Homo sapien
cttgtttgtatgccggattagaaat

SEQ ID NO: 6012306 - DNA, 25 bp, Homo sapien
gaacaagccatcgagaagttatcca

SEQ ID NO: 6012307 - DNA, 25 bp, Homo sapien
gtgttggtgccggtaaggtttatgc

SEQ ID NO: 6012308 - DNA, 25 bp, Homo sapien
acaagccatcgagaagttatccaag

SEQ ID NO: 6012309 - DNA, 25 bp, Homo sapien
tcgatggtactggtaacttacgttc

SEQ ID NO: 6012310 - DNA, 25 bp, Homo sapien
ttacaaaaatatctagaactggacc

SEQ ID NO: 6012311 - DNA, 25 bp, Homo sapien
ggtgccggttgtcacgctaacgttt

SEQ ID NO: 6012312 - DNA, 25 bp, Homo sapien
acatcgacccatacttggttacagg

SEQ ID NO: 6012313 - DNA, 25 bp, Homo sapien
ctttttgcacagagtggcagaagag

SEQ ID NO: 6012314 - DNA, 25 bp, Homo sapien
cacgctgaacacattaagttgtacg

SEQ ID NO: 6012315 - DNA, 25 bp, Homo sapien
agaccgtagaccagcttccaacatc

SEQ ID NO: 6012316 - DNA, 25 bp, Homo sapien
agtcggtccatgtaccggtattgac

SEQ ID NO: 6012317 - DNA, 25 bp, Homo sapien
gatactttttgcacagagtggcaga

SEQ ID NO: 6012318 - DNA, 25 bp, Homo sapien
tactttgaagaccgtagaccagctt

SEQ ID NO: 6012319 - DNA, 25 bp, Homo sapien
tatgccggattagaaatttctggta

SEQ ID NO: 6012320 - DNA, 25 bp, Homo sapien
attccatccaaagccattgaagggt

SEQ ID NO: 6012321 - DNA, 25 bp, Homo sapien
accaaagaggtagaataattgccga

SEQ ID NO: 6012322 - DNA, 25 bp, Homo sapien
gagaggtgacaacattgttgtcttg

SEQ ID NO: 6012323 - DNA, 25 bp, Homo sapien
tgacatgtatgacgatgtttacgga

SEQ ID NO: 6012324 - DNA, 25 bp, Homo sapien
tttgcggtgctattgacaatgctga

SEQ ID NO: 6012325 - DNA, 25 bp, Homo sapien
tggtagacatgaaaccgcttccatg

SEQ ID NO: 6012326 - DNA, 25 bp, Homo sapien
ctcactacagagcttgtttgtatgc

SEQ ID NO: 6012327 - DNA, 25 bp, Homo sapien
ctaacgtttccaccaaggaaatgag

SEQ ID NO: 6012328 - DNA, 25 bp, Homo sapien
tggtacgaaatacatcgaacaagcc

SEQ ID NO: 6012329 - DNA, 25 bp, Homo sapien
catgagattaactggtagacatgaa

SEQ ID NO: 6012330 - DNA, 25 bp, Homo sapien
gtatgacgatgtttacggatggcca

SEQ ID NO: 6012331 - DNA, 25 bp, Homo sapien
gacgaaggaatttgaaagagaatct

SEQ ID NO: 6012332 - DNA, 25 bp, Homo sapien
atctcaatgggaattccaagtcggt

SEQ ID NO: 6012333 - DNA, 25 bp, Homo sapien
tccaccaaggaaatgagacaaccag

SEQ ID NO: 6012334 - DNA, 25 bp, Homo sapien
atgactgccttttcttctggtgtcg

SEQ ID NO: 6012335 - DNA, 25 bp, Homo sapien
caacaatgacggtactccaaacaag

SEQ ID NO: 6012336 - DNA, 25 bp, Homo sapien
tcttctggtgtcgccaacagaggta

SEQ ID NO: 6012337 - DNA, 25 bp, Homo sapien
tcattccatccaaagccattgaagg

SEQ ID NO: 6012338 - DNA, 25 bp, Homo sapien
aatttctggtattaacgctgaagtc

SEQ ID NO: 6012339 - DNA, 25 bp, Homo sapien
tgaagtcatgccatctcaatgggaa

SEQ ID NO: 6012340 - DNA, 25 bp, Homo sapien
caaagggtgggtacccagctccaca

SEQ ID NO: 6012341 - DNA, 25 bp, Homo sapien
ggctgaagcaagcatcgaaaagact

SEQ ID NO: 6012342 - DNA, 25 bp, Homo sapien
tggtgccggtaaggtttatgccaga

SEQ ID NO: 6012343 - DNA, 25 bp, Homo sapien
cgctgaacacattaagttgtacggt

SEQ ID NO: 6012344 - DNA, 25 bp, Homo sapien
tgctcataaggatgaagaaatctgg

SEQ ID NO: 6012345 - DNA, 25 bp, Homo sapien
atgtttacggatggccaaagggtgg

SEQ ID NO: 6012346 - DNA, 25 bp, Homo sapien
tcaagatctcattccatccaaagcc

SEQ ID NO: 6012347 - DNA, 25 bp, Homo sapien
aaatatctagaactggaccaaagag

SEQ ID NO: 6012348 - DNA, 25 bp, Homo sapien
ttgacaatgctgacatgacgaagga

SEQ ID NO: 6012349 - DNA, 25 bp, Homo sapien
atgatcgaagctcactacagagctt

SEQ ID NO: 6012350 - DNA, 25 bp, Homo sapien
aaacccgttgcttactacccagatc

SEQ ID NO: 6012351 - DNA, 25 bp, Homo sapien
ggaaatgagacaaccaggtggtacg

SEQ ID NO: 6012352 - DNA, 25 bp, Homo sapien
cgatgtttacggatggccaaagggt

SEQ ID NO: 6012353 - DNA, 25 bp, Homo sapien
tacgtttggatcgatggtactggta

SEQ ID NO: 6012354 - DNA, 25 bp, Homo sapien
aacattgttgtcttggccgcatgtt

SEQ ID NO: 6012355 - DNA, 25 bp, Homo sapien
cggtaaggtttatgccagagacatg

SEQ ID NO: 6012356 - DNA, 25 bp, Homo sapien
catcgaacaagccatcgagaagtta

SEQ ID NO: 6012357 - DNA, 25 bp, Homo sapien
cccaagatccgtcgccaaggaaggt

SEQ ID NO: 6012358 - DNA, 25 bp, Homo sapien
agcatcgaaaagactcaaattttac

SEQ ID NO: 6012359 - DNA, 25 bp, Homo sapien
ctgacatctatttgaaacccgttgc

SEQ ID NO: 6012360 - DNA, 25 bp, Homo sapien
tctatttgacatgtatgacgatgtt

SEQ ID NO: 6012361 - DNA, 25 bp, Homo sapien
gtaaggtttatgccagagacatgat

SEQ ID NO: 6012362 - DNA, 25 bp, Homo sapien
acatgtatgacgatgtttacggatg

SEQ ID NO: 6012363 - DNA, 25 bp, Homo sapien
agaagagtttggtatcaagatctca

SEQ ID NO: 6012364 - DNA, 25 bp, Homo sapien
ttttgcacagagtggcagaagagtt

SEQ ID NO: 6012365 - DNA, 25 bp, Homo sapien
ttggtctagaacaagaatacactct

SEQ ID NO: 6012366 - DNA, 25 bp, Homo sapien
gagacacgctgaacacattaagttg

SEQ ID NO: 6012367 - DNA, 25 bp, Homo sapien
tccaaagccattgaagggtgactgg

SEQ ID NO: 6012368 - DNA, 25 bp, Homo sapien
taactggtagacatgaaaccgcttc

SEQ ID NO: 6012369 - DNA, 25 bp, Homo sapien
aaccaagcgccaggccacgactctg

SEQ ID NO: 6012370 - DNA, 25 bp, Homo sapien
caagctatttgctgctcataaggat

SEQ ID NO: 6012371 - DNA, 25 bp, Homo sapien
cgaatacgtttggatcgatggtact

SEQ ID NO: 6012372 - DNA, 25 bp, Homo sapien
atccaagagacacgctgaacacatt

SEQ ID NO: 6012373 - DNA, 25 bp, Homo sapien
gctgctcataaggatgaagaaatct

SEQ ID NO: 6012374 - DNA, 25 bp, Homo sapien
tgtcgccaacagaggtagctcaatt

SEQ ID NO: 6012375 - DNA, 25 bp, Homo sapien
gtgccggtaaggtttatgccagaga

SEQ ID NO: 6012376 - DNA, 25 bp, Homo sapien
gaatggaacttcgacggttcttcta

SEQ ID NO: 6012377 - DNA, 25 bp, Homo sapien
gactgccttttcttctggtgtcgcc

SEQ ID NO: 6012378 - DNA, 25 bp, Homo sapien
acggtactccaaacaagttcaacca

SEQ ID NO: 6012379 - DNA, 25 bp, Homo sapien
ctgccttttcttctggtgtcgccaa

SEQ ID NO: 6012380 - DNA, 25 bp, Homo sapien
tgtcttggccgcatgttacaacaat

SEQ ID NO: 6012381 - DNA, 25 bp, Homo sapien
aagggtgggtacccagctccacaag

SEQ ID NO: 6012382 - DNA, 25 bp, Homo sapien
attatggatggccagatactttttg

SEQ ID NO: 6012383 - DNA, 25 bp, Homo sapien
atgagacaaccaggtggtacgaaat

SEQ ID NO: 6012384 - DNA, 25 bp, Homo sapien
cttactacccagatcccttcaggag

SEQ ID NO: 6012385 - DNA, 25 bp, Homo sapien
tacatcgaacaagccatcgagaagt

SEQ ID NO: 6012386 - DNA, 25 bp, Homo sapien
ggattagaaatttctggtattaacg

SEQ ID NO: 6012387 - DNA, 25 bp, Homo sapien
cattgttgtcttggccgcatgttac

SEQ ID NO: 6012388 - DNA, 25 bp, Homo sapien
gagaatcacatccattgaccaattg

SEQ ID NO: 6012389 - DNA, 25 bp, Homo sapien
ttggccgcatgttacaacaatgacg

SEQ ID NO: 6012390 - DNA, 25 bp, Homo sapien
ccaaacaagttcaaccacagacacg

SEQ ID NO: 6012391 - DNA, 25 bp, Homo sapien
aaggaatttgaaagagaatcttcat

SEQ ID NO: 6012392 - DNA, 25 bp, Homo sapien
acgaagctgccaagctatttgctgc

SEQ ID NO: 6012393 - DNA, 25 bp, Homo sapien
cgaaggaatttgaaagagaatcttc

SEQ ID NO: 6012394 - DNA, 25 bp, Homo sapien
caagatccgtcgccaaggaaggtta

SEQ ID NO: 6012395 - DNA, 25 bp, Homo sapien
tgcggtgctattgacaatgctgaca

SEQ ID NO: 6012396 - DNA, 25 bp, Homo sapien
tggatggccagatactttttgcaca

SEQ ID NO: 6012397 - DNA, 25 bp, Homo sapien
ggtgactggaacggtgccggttgtc

SEQ ID NO: 6012398 - DNA, 25 bp, Homo sapien
cacatccattgaccaattgccagaa

SEQ ID NO: 6012399 - DNA, 25 bp, Homo sapien
gtttggtatcaagatctcattccat

SEQ ID NO: 6012400 - DNA, 25 bp, Homo sapien
ttgtcacgctaacgtttccaccaag

SEQ ID NO: 6012401 - DNA, 25 bp, Homo sapien
acaatgacggtactccaaacaagtt

SEQ ID NO: 6012402 - DNA, 25 bp, Homo sapien
tcaggagaggtgacaacattgttgt

SEQ ID NO: 6012403 - DNA, 25 bp, Homo sapien
agtggcagaagagtttggtatcaag

SEQ ID NO: 6012404 - DNA, 25 bp, Homo sapien
acggtgccggttgtcacgctaacgt

SEQ ID NO: 6012405 - DNA, 25 bp, Homo sapien
ccgcatgttacaacaatgacggtac

SEQ ID NO: 6012406 - DNA, 25 bp, Homo sapien
tggtaacttacgttccaaaggtaga

SEQ ID NO: 6012407 - DNA, 25 bp, Homo sapien
catgggtgaccaattatggatggcc

SEQ ID NO: 6012408 - DNA, 25 bp, Homo sapien
acgctgaagtcatgccatctcaatg

SEQ ID NO: 6012409 - DNA, 25 bp, Homo sapien
ccggttgtcacgctaacgtttccac

SEQ ID NO: 6012410 - DNA, 25 bp, Homo sapien
ctagaactggaccaaagaggtagaa

SEQ ID NO: 6012411 - DNA, 25 bp, Homo sapien
atgtatgacgatgtttacggatggc

SEQ ID NO: 6012412 - DNA, 25 bp, Homo sapien
ggttgtcacgctaacgtttccacca

SEQ ID NO: 6012413 - DNA, 25 bp, Homo sapien
cttctaccaaccaagcgccaggcca

SEQ ID NO: 6012414 - DNA, 25 bp, Homo sapien
ctcaatgggaattccaagtcggtcc

SEQ ID NO: 6012415 - DNA, 25 bp, Homo sapien
cacgctaacgtttccaccaaggaaa

SEQ ID NO: 6012416 - DNA, 25 bp, Homo sapien
gtgctattgacaatgctgacatgac

SEQ ID NO: 6012417 - DNA, 25 bp, Homo sapien
ggtatcaagatctcattccatccaa

SEQ ID NO: 6012418 - DNA, 25 bp, Homo sapien
tcgccaacagaggtagctcaattag

SEQ ID NO: 6012419 - DNA, 25 bp, Homo sapien
acaagaatacactctatttgacatg

SEQ ID NO: 6012420 - DNA, 25 bp, Homo sapien
gccaaagggtgggtacccagctcca

SEQ ID NO: 6012421 - DNA, 25 bp, Homo sapien
agaactggaccaaagaggtagaata

SEQ ID NO: 6012422 - DNA, 25 bp, Homo sapien
gccggtaaggtttatgccagagaca

SEQ ID NO: 6012423 - DNA, 25 bp, Homo sapien
caacagaggtagctcaattagaatc

SEQ ID NO: 6012424 - DNA, 25 bp, Homo sapien
atgacgatgtttacggatggccaaa

SEQ ID NO: 6012425 - DNA, 25 bp, Homo sapien
ccaaggaaatgagacaaccaggtgg

SEQ ID NO: 6012426 - DNA, 25 bp, Homo sapien
cccttcaggagaggtgacaacattg

SEQ ID NO: 6012427 - DNA, 25 bp, Homo sapien
tcggtccatgtaccggtattgacat

SEQ ID NO: 6012428 - DNA, 25 bp, Homo sapien
tttgtatgccggattagaaatttct

SEQ ID NO: 6012429 - DNA, 25 bp, Homo sapien
gctgacatgacgaaggaatttgaaa

SEQ ID NO: 6012430 - DNA, 25 bp, Homo sapien
tgccggttgtcacgctaacgtttcc

SEQ ID NO: 6012431 - DNA, 25 bp, Homo sapien
gccttttcttctggtgtcgccaaca

SEQ ID NO: 6012432 - DNA, 25 bp, Homo sapien
tgaccaattatggatggccagatac

SEQ ID NO: 6012433 - DNA, 25 bp, Homo sapien
ttgaagggtgactggaacggtgccg

SEQ ID NO: 6012434 - DNA, 25 bp, Homo sapien
ctttgaagaagagaatcacatccat

SEQ ID NO: 6012435 - DNA, 25 bp, Homo sapien
attaactggtagacatgaaaccgct

SEQ ID NO: 6012436 - DNA, 25 bp, Homo sapien
ccacagacacgaagctgccaagcta

SEQ ID NO: 6012437 - DNA, 25 bp, Homo sapien
tccatgtaccggtattgacatgggt

SEQ ID NO: 6012438 - DNA, 25 bp, Homo sapien
gccattgaagggtgactggaacggt

SEQ ID NO: 6012439 - DNA, 25 bp, Homo sapien
ttacaggtatcatgtgtgaaactgt

SEQ ID NO: 6012440 - DNA, 25 bp, Homo sapien
aattttacaaaaatatctagaactg

SEQ ID NO: 6012441 - DNA, 25 bp, Homo sapien
agttgtacggtagcgataacgacat

SEQ ID NO: 6012442 - DNA, 25 bp, Homo sapien
ttgtacggtagcgataacgacatga

SEQ ID NO: 6012443 - DNA, 25 bp, Homo sapien
gaatcccaagatccgtcgccaagga

SEQ ID NO: 6012444 - DNA, 25 bp, Homo sapien
acccgttgcttactacccagatccc

SEQ ID NO: 6012445 - DNA, 25 bp, Homo sapien
aatgacggtactccaaacaagttca

SEQ ID NO: 6012446 - DNA, 25 bp, Homo sapien
tagaacaagaatacactctatttga

SEQ ID NO: 6012447 - DNA, 25 bp, Homo sapien
agatcccttcaggagaggtgacaac

SEQ ID NO: 6012448 - DNA, 25 bp, Homo sapien
caacatcgacccatacttggttaca

SEQ ID NO: 6012449 - DNA, 25 bp, Homo sapien
acaaaaatatctagaactggaccaa

SEQ ID NO: 6012450 - DNA, 25 bp, Homo sapien
ccacaaggtccttactactgtggtg

SEQ ID NO: 6012451 - DNA, 25 bp, Homo sapien
tggtactggtaacttacgttccaaa

SEQ ID NO: 6012452 - DNA, 25 bp, Homo sapien
aggtagaactttgaagaagagaatc

SEQ ID NO: 6012453 - DNA, 25 bp, Homo sapien
aaggtccttactactgtggtgttgg

SEQ ID NO: 6012454 - DNA, 25 bp, Homo sapien
ggtccatgtaccggtattgacatgg

SEQ ID NO: 6012455 - DNA, 25 bp, Homo sapien
actggtagacatgaaaccgcttcca

SEQ ID NO: 6012456 - DNA, 25 bp, Homo sapien
atacactctatttgacatgtatgac

SEQ ID NO: 6012457 - DNA, 25 bp, Homo sapien
gccgaatacgtttggatcgatggta

SEQ ID NO: 6012458 - DNA, 25 bp, Homo sapien
caccaaggaaatgagacaaccaggt

SEQ ID NO: 6012459 - DNA, 25 bp, Homo sapien
aggatgaagaaatctggtttggtct

SEQ ID NO: 6012460 - DNA, 25 bp, Homo sapien
gaccagcttccaacatcgacccata

SEQ ID NO: 6012461 - DNA, 25 bp, Homo sapien
cattgaagggtgactggaacggtgc

SEQ ID NO: 6012462 - DNA, 25 bp, Homo sapien
atcgacccatacttggttacaggta

SEQ ID NO: 6012463 - DNA, 25 bp, Homo sapien
ggaccaaagaggtagaataattgcc

SEQ ID NO: 6012464 - DNA, 25 bp, Homo sapien
tggccaaagggtgggtacccagctc

SEQ ID NO: 6012465 - DNA, 25 bp, Homo sapien
atggaacttcgacggttcttctacc

SEQ ID NO: 6012466 - DNA, 25 bp, Homo sapien
tactactgtggtgttggtgccggta

SEQ ID NO: 6012467 - DNA, 25 bp, Homo sapien
ccaaccaagcgccaggccacgactc

SEQ ID NO: 6012468 - DNA, 25 bp, Homo sapien
gaagaagagaatcacatccattgac

SEQ ID NO: 6012469 - DNA, 25 bp, Homo sapien
ctcataaggatgaagaaatctggtt

SEQ ID NO: 6012470 - DNA, 25 bp, Homo sapien
atggctgaagcaagcatcgaaaaga

SEQ ID NO: 6012471 - DNA, 25 bp, Homo sapien
agagtggcagaagagtttggtatca

SEQ ID NO: 6012472 - DNA, 25 bp, Homo sapien
gagtttggtatcaagatctcattcc

SEQ ID NO: 6012473 - DNA, 25 bp, Homo sapien
taacgacatgagattaactggtaga

SEQ ID NO: 6012474 - DNA, 25 bp, Homo sapien
ccgcttccatgactgccttttcttc

SEQ ID NO: 6012475 - DNA, 25 bp, Homo sapien
caatgggaattccaagtcggtccat

SEQ ID NO: 6012476 - DNA, 25 bp, Homo sapien
tttcttctggtgtcgccaacagagg

SEQ ID NO: 6012477 - DNA, 25 bp, Homo sapien
agggtgactggaacggtgccggttg

SEQ ID NO: 6012478 - DNA, 25 bp, Homo sapien
ccaattgccagaatggaacttcgac

SEQ ID NO: 6012479 - DNA, 25 bp, Homo sapien
gacatgagattaactggtagacatg

SEQ ID NO: 6012480 - DNA, 25 bp, Homo sapien
aagttcaaccacagacacgaagctg

SEQ ID NO: 6012481 - DNA, 25 bp, Homo sapien
tgaaacccgttgcttactacccaga

SEQ ID NO: 6012482 - DNA, 25 bp, Homo sapien
tatcaagatctcattccatccaaag

SEQ ID NO: 6012483 - DNA, 25 bp, Homo sapien
ttgccgaatacgtttggatcgatgg

SEQ ID NO: 6012484 - DNA, 25 bp, Homo sapien
cgctaacgtttccaccaaggaaatg

SEQ ID NO: 6012485 - DNA, 25 bp, Homo sapien
caattagaatcccaagatccgtcgc

SEQ ID NO: 6012486 - DNA, 25 bp, Homo sapien
gccagatactttttgcacagagtgg

SEQ ID NO: 6012487 - DNA, 25 bp, Homo sapien
gggtgggtacccagctccacaaggt

SEQ ID NO: 6012488 - DNA, 25 bp, Homo sapien
ggtccttactactgtggtgttggtg

SEQ ID NO: 6012489 - DNA, 25 bp, Homo sapien
aacgtttccaccaaggaaatgagac

SEQ ID NO: 6012490 - DNA, 25 bp, Homo sapien
gacaatgctgacatgacgaaggaat

SEQ ID NO: 6012491 - DNA, 25 bp, Homo sapien
agttatccaagagacacgctgaaca

SEQ ID NO: 6012492 - DNA, 25 bp, Homo sapien
ttccaaaggtagaactttgaagaag

SEQ ID NO: 6012493 - DNA, 25 bp, Homo sapien
acagagtggcagaagagtttggtat

SEQ ID NO: 6012494 - DNA, 25 bp, Homo sapien
tctggtattaacgctgaagtcatgc

SEQ ID NO: 6012495 - DNA, 25 bp, Homo sapien
ctggaccaaagaggtagaataattg

SEQ ID NO: 6012496 - DNA, 25 bp, Homo sapien
gtagacatgaaaccgcttccatgac

SEQ ID NO: 6012497 - DNA, 25 bp, Homo sapien
agaggtagctcaattagaatcccaa

SEQ ID NO: 6012498 - DNA, 25 bp, Homo sapien
tgacaacattgttgtcttggccgca

SEQ ID NO: 6012499 - DNA, 25 bp, Homo sapien
tattgacaatgctgacatgacgaag

SEQ ID NO: 6012500 - DNA, 25 bp, Homo sapien
aatctggtttggtctagaacaagaa

SEQ ID NO: 6012501 - DNA, 25 bp, Homo sapien
gtagaactttgaagaagagaatcac

SEQ ID NO: 6012502 - DNA, 25 bp, Homo sapien
agctcaattagaatcccaagatccg

SEQ ID NO: 6012503 - DNA, 25 bp, Homo sapien
catgccatctcaatgggaattccaa

SEQ ID NO: 6012504 - DNA, 25 bp, Homo sapien
tactccaaacaagttcaaccacaga

SEQ ID NO: 6012505 - DNA, 25 bp, Homo sapien
actgtttgcggtgctattgacaatg

SEQ ID NO: 6012506 - DNA, 25 bp, Homo sapien
gaccaattgccagaatggaacttcg

SEQ ID NO: 6012507 - DNA, 25 bp, Homo sapien
cgtttccaccaaggaaatgagacaa

SEQ ID NO: 6012508 - DNA, 25 bp, Homo sapien
ccggattagaaatttctggtattaa

SEQ ID NO: 6012509 - DNA, 25 bp, Homo sapien
tttacggatggccaaagggtgggta

SEQ ID NO: 6012510 - DNA, 25 bp, Homo sapien
tagaccagcttccaacatcgaccca

SEQ ID NO: 6012511 - DNA, 25 bp, Homo sapien
aaacaagttcaaccacagacacgaa

SEQ ID NO: 6012512 - DNA, 25 bp, Homo sapien
gtacgaaatacatcgaacaagccat

SEQ ID NO: 6012513 - DNA, 25 bp, Homo sapien
aagaatacactctatttgacatgta

SEQ ID NO: 6012514 - DNA, 25 bp, Homo sapien
attagaatcccaagatccgtcgcca

SEQ ID NO: 6012515 - DNA, 25 bp, Homo sapien
gatcgatggtactggtaacttacgt

SEQ ID NO: 6012516 - DNA, 25 bp, Homo sapien
actctatttgacatgtatgacgatg

SEQ ID NO: 6012517 - DNA, 25 bp, Homo sapien
cggttactttgaagaccgtagacca

SEQ ID NO: 6012518 - DNA, 25 bp, Homo sapien
gacatctatttgaaacccgttgctt

SEQ ID NO: 6012519 - DNA, 25 bp, Homo sapien
gtacccagctccacaaggtccttac

SEQ ID NO: 6012520 - DNA, 25 bp, Homo sapien
acccagctccacaaggtccttacta

SEQ ID NO: 6012521 - DNA, 25 bp, Homo sapien
ctctcctgaagggatctgggtagta

SEQ ID NO: 6012522 - DNA, 25 bp, Homo sapien
ggtcacccatgtcaataccggtaca

SEQ ID NO: 6012523 - DNA, 25 bp, Homo sapien
aacatgcggccaagacaacaatgtt

SEQ ID NO: 6012524 - DNA, 25 bp, Homo sapien
cgttatcgctaccgtacaacttaat

SEQ ID NO: 6012525 - DNA, 25 bp, Homo sapien
aaacagtttcacacatgatacctgt

SEQ ID NO: 6012526 - DNA, 25 bp, Homo sapien
attggtcaatggatgtgattctctt

SEQ ID NO: 6012527 - DNA, 25 bp, Homo sapien
ttgagctacctctgttggcgacacc

SEQ ID NO: 6012528 - DNA, 25 bp, Homo sapien
gctctgtagtgagcttcgatcatgt

SEQ ID NO: 6012529 - DNA, 25 bp, Homo sapien
ccaaacgtattcggcaattattcta

SEQ ID NO: 6012530 - DNA, 25 bp, Homo sapien
atggctttggatggaatgagatctt

SEQ ID NO: 6012531 - DNA, 25 bp, Homo sapien
atggcttgttcgatgtatttcgtac

SEQ ID NO: 6012532 - DNA, 25 bp, Homo sapien
tgttgtaacatgcggccaagacaac

SEQ ID NO: 6012533 - DNA, 25 bp, Homo sapien
gaacgtaagttaccagtaccatcga

SEQ ID NO: 6012534 - DNA, 25 bp, Homo sapien
tgcggccaagacaacaatgttgtca

SEQ ID NO: 6012535 - DNA, 25 bp, Homo sapien
catcgtcatacatgtcaaatagagt

SEQ ID NO: 6012536 - DNA, 25 bp, Homo sapien
cttcttcaaagttctacctttggaa

SEQ ID NO: 6012537 - DNA, 25 bp, Homo sapien
ttaatgtgttcagcgtgtctcttgg

SEQ ID NO: 6012538 - DNA, 25 bp, Homo sapien
taccacctggttgtctcatttcctt

SEQ ID NO: 6012539 - DNA, 25 bp, Homo sapien
tgtagtgagcttcgatcatgtctct

SEQ ID NO: 6012540 - DNA, 25 bp, Homo sapien
tggcatgacttcagcgttaatacca

SEQ ID NO: 6012541 - DNA, 25 bp, Homo sapien
tggataacttctcgatggcttgttc

SEQ ID NO: 6012542 - DNA, 25 bp, Homo sapien
tgcaaaaagtatctggccatccata

SEQ ID NO: 6012543 - DNA, 25 bp, Homo sapien
gtaaaatttgagtcttttcgatgct

SEQ ID NO: 6012544 - DNA, 25 bp, Homo sapien
atctggccatccataattggtcacc

SEQ ID NO: 6012545 - DNA, 25 bp, Homo sapien
acagtagtaaggaccttgtggagct

SEQ ID NO: 6012546 - DNA, 25 bp, Homo sapien
aatctcatgtcgttatcgctaccgt

SEQ ID NO: 6012547 - DNA, 25 bp, Homo sapien
tttggccatccgtaaacatcgtcat

SEQ ID NO: 6012548 - DNA, 25 bp, Homo sapien
tgggtagtaagcaacgggtttcaaa

SEQ ID NO: 6012549 - DNA, 25 bp, Homo sapien
ttcttcatccttatgagcagcaaat

SEQ ID NO: 6012550 - DNA, 25 bp, Homo sapien
atcttgataccaaactcttctgcca

SEQ ID NO: 6012551 - DNA, 25 bp, Homo sapien
gcatgacttcagcgttaataccaga

SEQ ID NO: 6012552 - DNA, 25 bp, Homo sapien
tttcaaattccttcgtcatgtcagc

SEQ ID NO: 6012553 - DNA, 25 bp, Homo sapien
caccaacaccacagtagtaaggacc

SEQ ID NO: 6012554 - DNA, 25 bp, Homo sapien
aaacgttagcgtgacaaccggcacc

SEQ ID NO: 6012555 - DNA, 25 bp, Homo sapien
acagtttcacacatgatacctgtaa

SEQ ID NO: 6012556 - DNA, 25 bp, Homo sapien
aattgagctacctctgttggcgaca

SEQ ID NO: 6012557 - DNA, 25 bp, Homo sapien
acttctcgatggcttgttcgatgta

SEQ ID NO: 6012558 - DNA, 25 bp, Homo sapien
gatgttggaagctggtctacggtct

SEQ ID NO: 6012559 - DNA, 25 bp, Homo sapien
ataattggtcacccatgtcaatacc

SEQ ID NO: 6012560 - DNA, 25 bp, Homo sapien
tattcttgttctagaccaaaccaga

SEQ ID NO: 6012561 - DNA, 25 bp, Homo sapien
atgtcaataccggtacatggaccga

SEQ ID NO: 6012562 - DNA, 25 bp, Homo sapien
tgtgcaaaaagtatctggccatcca

SEQ ID NO: 6012563 - DNA, 25 bp, Homo sapien
tggagtaccgtcattgttgtaacat

SEQ ID NO: 6012564 - DNA, 25 bp, Homo sapien
tccgtaaacatcgtcatacatgtca

SEQ ID NO: 6012565 - DNA, 25 bp, Homo sapien
ttgtcaatagcaccgcaaacagttt

SEQ ID NO: 6012566 - DNA, 25 bp, Homo sapien
aagggatctgggtagtaagcaacgg

SEQ ID NO: 6012567 - DNA, 25 bp, Homo sapien
ttcgatcatgtctctggcataaacc

SEQ ID NO: 6012568 - DNA, 25 bp, Homo sapien
cagtcatggaagcggtttcatgtct

SEQ ID NO: 6012569 - DNA, 25 bp, Homo sapien
tgtattcttgttctagaccaaacca

SEQ ID NO: 6012570 - DNA, 25 bp, Homo sapien
tgtctaccagttaatctcatgtcgt

SEQ ID NO: 6012571 - DNA, 25 bp, Homo sapien
ttggaagctggtctacggtcttcaa

SEQ ID NO: 6012572 - DNA, 25 bp, Homo sapien
ccaacaccacagtagtaaggacctt

SEQ ID NO: 6012573 - DNA, 25 bp, Homo sapien
ctaccgtacaacttaatgtgttcag

SEQ ID NO: 6012574 - DNA, 25 bp, Homo sapien
tgtggttgaacttgtttggagtacc

SEQ ID NO: 6012575 - DNA, 25 bp, Homo sapien
tacaacttaatgtgttcagcgtgtc

SEQ ID NO: 6012576 - DNA, 25 bp, Homo sapien
ttcgatgtatttcgtaccacctggt

SEQ ID NO: 6012577 - DNA, 25 bp, Homo sapien
caacttaatgtgttcagcgtgtctc

SEQ ID NO: 6012578 - DNA, 25 bp, Homo sapien
gcctggcgcttggttggtagaagaa

SEQ ID NO: 6012579 - DNA, 25 bp, Homo sapien
accgacttggaattcccattgagat

SEQ ID NO: 6012580 - DNA, 25 bp, Homo sapien
gtttcatgtctaccagttaatctca

SEQ ID NO: 6012581 - DNA, 25 bp, Homo sapien
cgaagttccattctggcaattggtc

SEQ ID NO: 6012582 - DNA, 25 bp, Homo sapien
atcatgtctctggcataaaccttac

SEQ ID NO: 6012583 - DNA, 25 bp, Homo sapien
atagagtgtattcttgttctagacc

SEQ ID NO: 6012584 - DNA, 25 bp, Homo sapien
accttccttggcgacggatcttggg

SEQ ID NO: 6012585 - DNA, 25 bp, Homo sapien
ctcctgaagggatctgggtagtaag

SEQ ID NO: 6012586 - DNA, 25 bp, Homo sapien
tttggaacgtaagttaccagtacca

SEQ ID NO: 6012587 - DNA, 25 bp, Homo sapien
aatccggcatacaaacaagctctgt

SEQ ID NO: 6012588 - DNA, 25 bp, Homo sapien
gtaccgtcattgttgtaacatgcgg

SEQ ID NO: 6012589 - DNA, 25 bp, Homo sapien
ttcccattgagatggcatgacttca

SEQ ID NO: 6012590 - DNA, 25 bp, Homo sapien
cgatcatgtctctggcataaacctt

SEQ ID NO: 6012591 - DNA, 25 bp, Homo sapien
aagctctgtagtgagcttcgatcat

SEQ ID NO: 6012592 - DNA, 25 bp, Homo sapien
caatggatgtgattctcttcttcaa

SEQ ID NO: 6012593 - DNA, 25 bp, Homo sapien
atgagcagcaaatagcttggcagct

SEQ ID NO: 6012594 - DNA, 25 bp, Homo sapien
cctgtaaccaagtatgggtcgatgt

SEQ ID NO: 6012595 - DNA, 25 bp, Homo sapien
agtttcacacatgatacctgtaacc

SEQ ID NO: 6012596 - DNA, 25 bp, Homo sapien
atcgctaccgtacaacttaatgtgt

SEQ ID NO: 6012597 - DNA, 25 bp, Homo sapien
ccgcaaacagtttcacacatgatac

SEQ ID NO: 6012598 - DNA, 25 bp, Homo sapien
ttatgagcagcaaatagcttggcag

SEQ ID NO: 6012599 - DNA, 25 bp, Homo sapien
aagtatctggccatccataattggt

SEQ ID NO: 6012600 - DNA, 25 bp, Homo sapien
atggaccgacttggaattcccattg

SEQ ID NO: 6012601 - DNA, 25 bp, Homo sapien
tcatgtcgttatcgctaccgtacaa

SEQ ID NO: 6012602 - DNA, 25 bp, Homo sapien
ttcatgtctaccagttaatctcatg

SEQ ID NO: 6012603 - DNA, 25 bp, Homo sapien
tcaaatagagtgtattcttgttcta

SEQ ID NO: 6012604 - DNA, 25 bp, Homo sapien
caaaccagatttcttcatccttatg

SEQ ID NO: 6012605 - DNA, 25 bp, Homo sapien
cttggttggtagaagaaccgtcgaa

SEQ ID NO: 6012606 - DNA, 25 bp, Homo sapien
acatggaccgacttggaattcccat

SEQ ID NO: 6012607 - DNA, 25 bp, Homo sapien
gagctgggtacccaccctttggcca

SEQ ID NO: 6012608 - DNA, 25 bp, Homo sapien
tggagctgggtacccaccctttggc

SEQ ID NO: 6012609 - DNA, 25 bp, Homo sapien
caaatagcttggcagcttcgtgtct

SEQ ID NO: 6012610 - DNA, 25 bp, Homo sapien
tctgttggcgacaccagaagaaaag

SEQ ID NO: 6012611 - DNA, 25 bp, Homo sapien
tctacggtcttcaaagtaaccgtaa

SEQ ID NO: 6012612 - DNA, 25 bp, Homo sapien
cttggcgacggatcttgggattcta

SEQ ID NO: 6012613 - DNA, 25 bp, Homo sapien
tagcttggcagcttcgtgtctgtgg

SEQ ID NO: 6012614 - DNA, 25 bp, Homo sapien
cgacttggaattcccattgagatgg

SEQ ID NO: 6012615 - DNA, 25 bp, Homo sapien
cttcagcgttaataccagaaatttc

SEQ ID NO: 6012616 - DNA, 25 bp, Homo sapien
atggatgtgattctcttcttcaaag

SEQ ID NO: 6012617 - DNA, 25 bp, Homo sapien
caagacaacaatgttgtcacctctc

SEQ ID NO: 6012618 - DNA, 25 bp, Homo sapien
ggaagctggtctacggtcttcaaag

SEQ ID NO: 6012619 - DNA, 25 bp, Homo sapien
accgtcattgttgtaacatgcggcc

SEQ ID NO: 6012620 - DNA, 25 bp, Homo sapien
tccttggcgacggatcttgggattc

SEQ ID NO: 6012621 - DNA, 25 bp, Homo sapien
acttaatgtgttcagcgtgtctctt

SEQ ID NO: 6012622 - DNA, 25 bp, Homo sapien
tagcgtgacaaccggcaccgttcca

SEQ ID NO: 6012623 - DNA, 25 bp, Homo sapien
gtcaatagcaccgcaaacagtttca

SEQ ID NO: 6012624 - DNA, 25 bp, Homo sapien
acgttagcgtgacaaccggcaccgt

SEQ ID NO: 6012625 - DNA, 25 bp, Homo sapien
accaagtatgggtcgatgttggaag

SEQ ID NO: 6012626 - DNA, 25 bp, Homo sapien
tctgggtagtaagcaacgggtttca

SEQ ID NO: 6012627 - DNA, 25 bp, Homo sapien
tggccatccgtaaacatcgtcatac

SEQ ID NO: 6012628 - DNA, 25 bp, Homo sapien
gggattctaattgagctacctctgt

SEQ ID NO: 6012629 - DNA, 25 bp, Homo sapien
agaaccgtcgaagttccattctggc

SEQ ID NO: 6012630 - DNA, 25 bp, Homo sapien
tcaaatagatgtcagagtcgtggcc

SEQ ID NO: 6012631 - DNA, 25 bp, Homo sapien
gcgtgtctcttggataacttctcga

SEQ ID NO: 6012632 - DNA, 25 bp, Homo sapien
aatgagatcttgataccaaactctt

SEQ ID NO: 6012633 - DNA, 25 bp, Homo sapien
accttaccggcaccaacaccacagt

SEQ ID NO: 6012634 - DNA, 25 bp, Homo sapien
agcaccgcaaacagtttcacacatg

SEQ ID NO: 6012635 - DNA, 25 bp, Homo sapien
accttgtggagctgggtacccaccc

SEQ ID NO: 6012636 - DNA, 25 bp, Homo sapien
aacaatgttgtcacctctcctgaag

SEQ ID NO: 6012637 - DNA, 25 bp, Homo sapien
tcgatgttggaagctggtctacggt

SEQ ID NO: 6012638 - DNA, 25 bp, Homo sapien
acaagctctgtagtgagcttcgatc

SEQ ID NO: 6012639 - DNA, 25 bp, Homo sapien
ttctcgatggcttgttcgatgtatt

SEQ ID NO: 6012640 - DNA, 25 bp, Homo sapien
gtattcggcaattattctacctctt

SEQ ID NO: 6012641 - DNA, 25 bp, Homo sapien
taccagttaatctcatgtcgttatc

SEQ ID NO: 6012642 - DNA, 25 bp, Homo sapien
gcaacgggtttcaaatagatgtcag

SEQ ID NO: 6012643 - DNA, 25 bp, Homo sapien
gattctaattgagctacctctgttg

SEQ ID NO: 6012644 - DNA, 25 bp, Homo sapien
cttgtttggagtaccgtcattgttg

SEQ ID NO: 6012645 - DNA, 25 bp, Homo sapien
cattctggcaattggtcaatggatg

SEQ ID NO: 6012646 - DNA, 25 bp, Homo sapien
ggcaattattctacctctttggtcc

SEQ ID NO: 6012647 - DNA, 25 bp, Homo sapien
gagtcgtggcctggcgcttggttgg

SEQ ID NO: 6012648 - DNA, 25 bp, Homo sapien
tctcatgtcgttatcgctaccgtac

SEQ ID NO: 6012649 - DNA, 25 bp, Homo sapien
tggcataaaccttaccggcaccaac

SEQ ID NO: 6012650 - DNA, 25 bp, Homo sapien
tggcgacggatcttgggattctaat

SEQ ID NO: 6012651 - DNA, 25 bp, Homo sapien
tctggcataaaccttaccggcacca

SEQ ID NO: 6012652 - DNA, 25 bp, Homo sapien
catttccttggtggaaacgttagcg

SEQ ID NO: 6012653 - DNA, 25 bp, Homo sapien
agtatgggtcgatgttggaagctgg

SEQ ID NO: 6012654 - DNA, 25 bp, Homo sapien
accctttggccatccgtaaacatcg

SEQ ID NO: 6012655 - DNA, 25 bp, Homo sapien
attattctacctctttggtccagtt

SEQ ID NO: 6012656 - DNA, 25 bp, Homo sapien
ggcgacaccagaagaaaaggcagtc

SEQ ID NO: 6012657 - DNA, 25 bp, Homo sapien
acatgatacctgtaaccaagtatgg

SEQ ID NO: 6012658 - DNA, 25 bp, Homo sapien
cagagtcgtggcctggcgcttggtt

SEQ ID NO: 6012659 - DNA, 25 bp, Homo sapien
ttgggattctaattgagctacctct

SEQ ID NO: 6012660 - DNA, 25 bp, Homo sapien
gcttcgtgtctgtggttgaacttgt

SEQ ID NO: 6012661 - DNA, 25 bp, Homo sapien
ataccaaactcttctgccactctgt

SEQ ID NO: 6012662 - DNA, 25 bp, Homo sapien
agaaaaggcagtcatggaagcggtt

SEQ ID NO: 6012663 - DNA, 25 bp, Homo sapien
gtcatgtcagcattgtcaatagcac

SEQ ID NO: 6012664 - DNA, 25 bp, Homo sapien
atgtatttcgtaccacctggttgtc

SEQ ID NO: 6012665 - DNA, 25 bp, Homo sapien
gtaaggaccttgtggagctgggtac

SEQ ID NO: 6012666 - DNA, 25 bp, Homo sapien
cttcgtcatgtcagcattgtcaata

SEQ ID NO: 6012667 - DNA, 25 bp, Homo sapien
ttggcgacaccagaagaaaaggcag

SEQ ID NO: 6012668 - DNA, 25 bp, Homo sapien
accggtacatggaccgacttggaat

SEQ ID NO: 6012669 - DNA, 25 bp, Homo sapien
tctgccactctgtgcaaaaagtatc

SEQ ID NO: 6012670 - DNA, 25 bp, Homo sapien
ttccagtcacccttcaatggctttg

SEQ ID NO: 6012671 - DNA, 25 bp, Homo sapien
ataaaccttaccggcaccaacacca

SEQ ID NO: 6012672 - DNA, 25 bp, Homo sapien
acctggttgtctcatttccttggtg

SEQ ID NO: 6012673 - DNA, 25 bp, Homo sapien
attccttcgtcatgtcagcattgtc

SEQ ID NO: 6012674 - DNA, 25 bp, Homo sapien
tgttctagaccaaaccagatttctt

SEQ ID NO: 6012675 - DNA, 25 bp, Homo sapien
caatgttgtcacctctcctgaaggg

SEQ ID NO: 6012676 - DNA, 25 bp, Homo sapien
tcggcaattattctacctctttggt

SEQ ID NO: 6012677 - DNA, 25 bp, Homo sapien
acttggaattcccattgagatggca

SEQ ID NO: 6012678 - DNA, 25 bp, Homo sapien
cgcttggttggtagaagaaccgtcg

SEQ ID NO: 6012679 - DNA, 25 bp, Homo sapien
tgtcagcattgtcaatagcaccgca

SEQ ID NO: 6012680 - DNA, 25 bp, Homo sapien
tgtctctggcataaaccttaccggc

SEQ ID NO: 6012681 - DNA, 25 bp, Homo sapien
cagaagaaaaggcagtcatggaagc

SEQ ID NO: 6012682 - DNA, 25 bp, Homo sapien
caataccggtacatggaccgacttg

SEQ ID NO: 6012683 - DNA, 25 bp, Homo sapien
cctttggccatccgtaaacatcgtc

SEQ ID NO: 6012684 - DNA, 25 bp, Homo sapien
acaacaatgttgtcacctctcctga

SEQ ID NO: 6012685 - DNA, 25 bp, Homo sapien
cgatgtatttcgtaccacctggttg

SEQ ID NO: 6012686 - DNA, 25 bp, Homo sapien
agcgttaataccagaaatttctaat

SEQ ID NO: 6012687 - DNA, 25 bp, Homo sapien
taccatcgatccaaacgtattcggc

SEQ ID NO: 6012688 - DNA, 25 bp, Homo sapien
catccgtaaacatcgtcatacatgt

SEQ ID NO: 6012689 - DNA, 25 bp, Homo sapien
gtcgaagttccattctggcaattgg

SEQ ID NO: 6012690 - DNA, 25 bp, Homo sapien
caaccggcaccgttccagtcaccct

SEQ ID NO: 6012691 - DNA, 25 bp, Homo sapien
cttgtggagctgggtacccaccctt

SEQ ID NO: 6012692 - DNA, 25 bp, Homo sapien
ctctttggtccagttctagatattt

SEQ ID NO: 6012693 - DNA, 25 bp, Homo sapien
ctaattgagctacctctgttggcga

SEQ ID NO: 6012694 - DNA, 25 bp, Homo sapien
atccataattggtcacccatgtcaa

SEQ ID NO: 6012695 - DNA, 25 bp, Homo sapien
ctcttctgccactctgtgcaaaaag

SEQ ID NO: 6012696 - DNA, 25 bp, Homo sapien
ccatcgatccaaacgtattcggcaa

SEQ ID NO: 6012697 - DNA, 25 bp, Homo sapien
ccaccctttggccatccgtaaacat

SEQ ID NO: 6012698 - DNA, 25 bp, Homo sapien
ccataattggtcacccatgtcaata

SEQ ID NO: 6012699 - DNA, 25 bp, Homo sapien
ccactctgtgcaaaaagtatctggc

SEQ ID NO: 6012700 - DNA, 25 bp, Homo sapien
aaatagatgtcagagtcgtggcctg

SEQ ID NO: 6012701 - DNA, 25 bp, Homo sapien
tctgtagtgagcttcgatcatgtct

SEQ ID NO: 6012702 - DNA, 25 bp, Homo sapien
tccggcatacaaacaagctctgtag

SEQ ID NO: 6012703 - DNA, 25 bp, Homo sapien
catgtctaccagttaatctcatgtc

SEQ ID NO: 6012704 - DNA, 25 bp, Homo sapien
gagctacctctgttggcgacaccag

SEQ ID NO: 6012705 - DNA, 25 bp, Homo sapien
cgggtttcaaatagatgtcagagtc

SEQ ID NO: 6012706 - DNA, 25 bp, Homo sapien
ttgtaacatgcggccaagacaacaa

SEQ ID NO: 6012707 - DNA, 25 bp, Homo sapien
gataacttctcgatggcttgttcga

SEQ ID NO: 6012708 - DNA, 25 bp, Homo sapien
cgttccagtcacccttcaatggctt

SEQ ID NO: 6012709 - DNA, 25 bp, Homo sapien
catgtcagcattgtcaatagcaccg

SEQ ID NO: 6012710 - DNA, 25 bp, Homo sapien
gaagcggtttcatgtctaccagtta

SEQ ID NO: 6012711 - DNA, 25 bp, Homo sapien
aaccgtcgaagttccattctggcaa

SEQ ID NO: 6012712 - DNA, 25 bp, Homo sapien
agtgtattcttgttctagaccaaac

SEQ ID NO: 6012713 - DNA, 25 bp, Homo sapien
gctgggtacccaccctttggccatc

SEQ ID NO: 6012714 - DNA, 25 bp, Homo sapien
tttcaaatagatgtcagagtcgtgg

SEQ ID NO: 6012715 - DNA, 25 bp, Homo sapien
tcttcaaagttctacctttggaacg

SEQ ID NO: 6012716 - DNA, 25 bp, Homo sapien
gtgagcttcgatcatgtctctggca

SEQ ID NO: 6012717 - DNA, 25 bp, Homo sapien
acccatgtcaataccggtacatgga

SEQ ID NO: 6012718 - DNA, 25 bp, Homo sapien
tctttcaaattccttcgtcatgtca

SEQ ID NO: 6012719 - DNA, 25 bp, Homo sapien
ggaccttgtggagctgggtacccac

SEQ ID NO: 6012720 - DNA, 25 bp, Homo sapien
aataccagaaatttctaatccggca

SEQ ID NO: 6012721 - DNA, 25 bp, Homo sapien
cgtacaacttaatgtgttcagcgtg

SEQ ID NO: 6012722 - DNA, 25 bp, Homo sapien
ctacctctttggtccagttctagat

SEQ ID NO: 6012723 - DNA, 25 bp, Homo sapien
gagtaccgtcattgttgtaacatgc

SEQ ID NO: 6012724 - DNA, 25 bp, Homo sapien
ttctagaccaaaccagatttcttca

SEQ ID NO: 6012725 - DNA, 25 bp, Homo sapien
ttgtctcatttccttggtggaaacg

SEQ ID NO: 6012726 - DNA, 25 bp, Homo sapien
atccttatgagcagcaaatagcttg

SEQ ID NO: 6012727 - DNA, 25 bp, Homo sapien
tttcacacatgatacctgtaaccaa

SEQ ID NO: 6012728 - DNA, 25 bp, Homo sapien
cttcatccttatgagcagcaaatag

SEQ ID NO: 6012729 - DNA, 25 bp, Homo sapien
tggtggaaacgttagcgtgacaacc

SEQ ID NO: 6012730 - DNA, 25 bp, Homo sapien
gatacctgtaaccaagtatgggtcg

SEQ ID NO: 6012731 - DNA, 25 bp, Homo sapien
gatggcatgacttcagcgttaatac

SEQ ID NO: 6012732 - DNA, 25 bp, Homo sapien
agcggtttcatgtctaccagttaat

SEQ ID NO: 6012733 - DNA, 25 bp, Homo sapien
tccttggtggaaacgttagcgtgac

SEQ ID NO: 6012734 - DNA, 25 bp, Homo sapien
cgtaaccttccttggcgacggatct

SEQ ID NO: 6012735 - DNA, 25 bp, Homo sapien
acccttcaatggctttggatggaat

SEQ ID NO: 6012736 - DNA, 25 bp, Homo sapien
ttatcgctaccgtacaacttaatgt

SEQ ID NO: 6012737 - DNA, 25 bp, Homo sapien
aagttaccagtaccatcgatccaaa

SEQ ID NO: 6012738 - DNA, 25 bp, Homo sapien
ttggaattcccattgagatggcatg

SEQ ID NO: 6012739 - DNA, 25 bp, Homo sapien
tctctggcataaaccttaccggcac

SEQ ID NO: 6012740 - DNA, 25 bp, Homo sapien
ggtccagttctagatatttttgtaa

SEQ ID NO: 6012741 - DNA, 25 bp, Homo sapien
taccagtaccatcgatccaaacgta

SEQ ID NO: 6012742 - DNA, 25 bp, Homo sapien
ttttgtaaaatttgagtcttttcga

SEQ ID NO: 6012743 - DNA, 25 bp, Homo sapien
tgttggaagctggtctacggtcttc

SEQ ID NO: 6012744 - DNA, 25 bp, Homo sapien
gttagcgtgacaaccggcaccgttc

SEQ ID NO: 6012745 - DNA, 25 bp, Homo sapien
aaggcagtcatggaagcggtttcat

SEQ ID NO: 6012746 - DNA, 25 bp, Homo sapien
tatgggtcgatgttggaagctggtc

SEQ ID NO: 6012747 - DNA, 25 bp, Homo sapien
cgtaaacatcgtcatacatgtcaaa

SEQ ID NO: 6012748 - DNA, 25 bp, Homo sapien
gttgtcacctctcctgaagggatct

SEQ ID NO: 6012749 - DNA, 25 bp, Homo sapien
gcaaacagtttcacacatgatacct

SEQ ID NO: 6012750 - DNA, 25 bp, Homo sapien
ccagaaatttctaatccggcataca

SEQ ID NO: 6012751 - DNA, 25 bp, Homo sapien
tgataccaaactcttctgccactct

SEQ ID NO: 6012752 - DNA, 25 bp, Homo sapien
cagttctagatatttttgtaaaatt

SEQ ID NO: 6012753 - DNA, 25 bp, Homo sapien
cgctaccgtacaacttaatgtgttc

SEQ ID NO: 6012754 - DNA, 25 bp, Homo sapien
gcagcaaatagcttggcagcttcgt

SEQ ID NO: 6012755 - DNA, 25 bp, Homo sapien
aaaagtatctggccatccataattg

SEQ ID NO: 6012756 - DNA, 25 bp, Homo sapien
aaaccttaccggcaccaacaccaca

SEQ ID NO: 6012757 - DNA, 25 bp, Homo sapien
tggtcaatggatgtgattctcttct

SEQ ID NO: 6012758 - DNA, 25 bp, Homo sapien
ttctcttcttcaaagttctaccttt

SEQ ID NO: 6012759 - DNA, 25 bp, Homo sapien
aaattccttcgtcatgtcagcattg

SEQ ID NO: 6012760 - DNA, 25 bp, Homo sapien
gatctgggtagtaagcaacgggttt

SEQ ID NO: 6012761 - DNA, 25 bp, Homo sapien
tggttggtagaagaaccgtcgaagt

SEQ ID NO: 6012762 - DNA, 25 bp, Homo sapien
tgtcacctctcctgaagggatctgg

SEQ ID NO: 6012763 - DNA, 25 bp, Homo sapien
cttgttctagaccaaaccagatttc

SEQ ID NO: 6012764 - DNA, 25 bp, Homo sapien
taccagaaatttctaatccggcata

SEQ ID NO: 6012765 - DNA, 25 bp, Homo sapien
aaatttctaatccggcatacaaaca

SEQ ID NO: 6012766 - DNA, 25 bp, Homo sapien
tggtctacggtcttcaaagtaaccg

SEQ ID NO: 6012767 - DNA, 25 bp, Homo sapien
ggctttggatggaatgagatcttga

SEQ ID NO: 6012768 - DNA, 25 bp, Homo sapien
tgttggcgacaccagaagaaaaggc

SEQ ID NO: 6012769 - DNA, 25 bp, Homo sapien
attgttgtaacatgcggccaagaca

SEQ ID NO: 6012770 - DNA, 25 bp, Homo sapien
agaaatttctaatccggcatacaaa

SEQ ID NO: 6012771 - DNA, 25 bp, Homo sapien
aacatcgtcatacatgtcaaataga

SEQ ID NO: 6012772 - DNA, 25 bp, Homo sapien
tttccttggtggaaacgttagcgtg

SEQ ID NO: 6012773 - DNA, 25 bp, Homo sapien
gtcaataccggtacatggaccgact

SEQ ID NO: 6012774 - DNA, 25 bp, Homo sapien
tacatgtcaaatagagtgtattctt

SEQ ID NO: 6012775 - DNA, 25 bp, Homo sapien
tagtaagcaacgggtttcaaataga

SEQ ID NO: 6012776 - DNA, 25 bp, Homo sapien
gtcatacatgtcaaatagagtgtat

SEQ ID NO: 6012777 - DNA, 25 bp, Homo sapien
acacatgatacctgtaaccaagtat

SEQ ID NO: 6012778 - DNA, 25 bp, Homo sapien
cttggtggaaacgttagcgtgacaa

SEQ ID NO: 6012779 - DNA, 25 bp, Homo sapien
tggcctggcgcttggttggtagaag

SEQ ID NO: 6012780 - DNA, 25 bp, Homo sapien
ttatgaagattctctttcaaattcc

SEQ ID NO: 6012781 - DNA, 25 bp, Homo sapien
ccacagtagtaaggaccttgtggag

SEQ ID NO: 6012782 - DNA, 25 bp, Homo sapien
tttggagtaccgtcattgttgtaac

SEQ ID NO: 6012783 - DNA, 25 bp, Homo sapien
catgtcaaatagagtgtattcttgt

SEQ ID NO: 6012784 - DNA, 25 bp, Homo sapien
atttctaatccggcatacaaacaag

SEQ ID NO: 6012785 - DNA, 25 bp, Homo sapien
atgtgattctcttcttcaaagttct

SEQ ID NO: 6012786 - DNA, 25 bp, Homo sapien
ataccggtacatggaccgacttgga

SEQ ID NO: 6012787 - DNA, 25 bp, Homo sapien
tgccactctgtgcaaaaagtatctg

SEQ ID NO: 6012788 - DNA, 25 bp, Homo sapien
caaaaagtatctggccatccataat

SEQ ID NO: 6012789 - DNA, 25 bp, Homo sapien
tctacctttggaacgtaagttacca

SEQ ID NO: 6012790 - DNA, 25 bp, Homo sapien
tctctttcaaattccttcgtcatgt

SEQ ID NO: 6012791 - DNA, 25 bp, Homo sapien
aacttgtttggagtaccgtcattgt

SEQ ID NO: 6012792 - DNA, 25 bp, Homo sapien
gtgattctcttcttcaaagttctac

SEQ ID NO: 6012793 - DNA, 25 bp, Homo sapien
cctctgttggcgacaccagaagaaa

SEQ ID NO: 6012794 - DNA, 25 bp, Homo sapien
tcattgttgtaacatgcggccaaga

SEQ ID NO: 6012795 - DNA, 25 bp, Homo sapien
accaaaccagatttcttcatcctta

SEQ ID NO: 6012796 - DNA, 25 bp, Homo sapien
caattattctacctctttggtccag

SEQ ID NO: 6012797 - DNA, 25 bp, Homo sapien
cagcttcgtgtctgtggttgaactt

SEQ ID NO: 6012798 - DNA, 25 bp, Homo sapien
cggtacatggaccgacttggaattc

SEQ ID NO: 6012799 - DNA, 25 bp, Homo sapien
taaccaagtatgggtcgatgttgga

SEQ ID NO: 6012800 - DNA, 25 bp, Homo sapien
accgtacaacttaatgtgttcagcg

SEQ ID NO: 6012801 - DNA, 25 bp, Homo sapien
caatagcaccgcaaacagtttcaca

SEQ ID NO: 6012802 - DNA, 25 bp, Homo sapien
cgtcattgttgtaacatgcggccaa

SEQ ID NO: 6012803 - DNA, 25 bp, Homo sapien
caagtatgggtcgatgttggaagct

SEQ ID NO: 6012804 - DNA, 25 bp, Homo sapien
ggcgcttggttggtagaagaaccgt

SEQ ID NO: 6012805 - DNA, 25 bp, Homo sapien
acctctttggtccagttctagatat

SEQ ID NO: 6012806 - DNA, 25 bp, Homo sapien
gacggatcttgggattctaattgag

SEQ ID NO: 6012807 - DNA, 25 bp, Homo sapien
gaagaaaaggcagtcatggaagcgg

SEQ ID NO: 6012808 - DNA, 25 bp, Homo sapien
ttaataccagaaatttctaatccgg

SEQ ID NO: 6012809 - DNA, 25 bp, Homo sapien
atttcttcatccttatgagcagcaa

SEQ ID NO: 6012810 - DNA, 25 bp, Homo sapien
tagtaaggaccttgtggagctgggt

SEQ ID NO: 6012811 - DNA, 25 bp, Homo sapien
ctggcgcttggttggtagaagaacc

SEQ ID NO: 6012812 - DNA, 25 bp, Homo sapien
cttccttggcgacggatcttgggat

SEQ ID NO: 6012813 - DNA, 25 bp, Homo sapien
agatcttgataccaaactcttctgc

SEQ ID NO: 6012814 - DNA, 25 bp, Homo sapien
accagaagaaaaggcagtcatggaa

SEQ ID NO: 6012815 - DNA, 25 bp, Homo sapien
aatagcttggcagcttcgtgtctgt

SEQ ID NO: 6012816 - DNA, 25 bp, Homo sapien
acgtaagttaccagtaccatcgatc

SEQ ID NO: 6012817 - DNA, 25 bp, Homo sapien
cttaccggcaccaacaccacagtag

SEQ ID NO: 6012818 - DNA, 25 bp, Homo sapien
catgtctctggcataaaccttaccg

SEQ ID NO: 6012819 - DNA, 25 bp, Homo sapien
tcatccttatgagcagcaaatagct

SEQ ID NO: 6012820 - DNA, 25 bp, Homo sapien
atgacttcagcgttaataccagaaa

SEQ ID NO: 6012821 - DNA, 25 bp, Homo sapien
accaaactcttctgccactctgtgc

SEQ ID NO: 6012822 - DNA, 25 bp, Homo sapien
atcgatccaaacgtattcggcaatt

SEQ ID NO: 6012823 - DNA, 25 bp, Homo sapien
accggcaccgttccagtcacccttc

SEQ ID NO: 6012824 - DNA, 25 bp, Homo sapien
cggatcttgggattctaattgagct

SEQ ID NO: 6012825 - DNA, 25 bp, Homo sapien
cgtaccacctggttgtctcatttcc

SEQ ID NO: 6012826 - DNA, 25 bp, Homo sapien
atgtcgttatcgctaccgtacaact

SEQ ID NO: 6012827 - DNA, 25 bp, Homo sapien
tacctctgttggcgacaccagaaga

SEQ ID NO: 6012828 - DNA, 25 bp, Homo sapien
gtggaaacgttagcgtgacaaccgg

SEQ ID NO: 6012829 - DNA, 25 bp, Homo sapien
tggaagcggtttcatgtctaccagt

SEQ ID NO: 6012830 - DNA, 25 bp, Homo sapien
ccttcaatggctttggatggaatga

SEQ ID NO: 6012831 - DNA, 25 bp, Homo sapien
cttggataacttctcgatggcttgt

SEQ ID NO: 6012832 - DNA, 25 bp, Homo sapien
tcacacatgatacctgtaaccaagt

SEQ ID NO: 6012833 - DNA, 25 bp, Homo sapien
ggcagtcatggaagcggtttcatgt

SEQ ID NO: 6012834 - DNA, 25 bp, Homo sapien
cgacaccagaagaaaaggcagtcat

SEQ ID NO: 6012835 - DNA, 25 bp, Homo sapien
gggatctgggtagtaagcaacgggt

SEQ ID NO: 6012836 - DNA, 25 bp, Homo sapien
ttctaatccggcatacaaacaagct

SEQ ID NO: 6012837 - DNA, 25 bp, Homo sapien
gtaacatgcggccaagacaacaatg

SEQ ID NO: 6012838 - DNA, 25 bp, Homo sapien
gtcgttatcgctaccgtacaactta

SEQ ID NO: 6012839 - DNA, 25 bp, Homo sapien
ttggatggaatgagatcttgatacc

SEQ ID NO: 6012840 - DNA, 25 bp, Homo sapien
catacatgtcaaatagagtgtattc

SEQ ID NO: 6012841 - DNA, 25 bp, Homo sapien
ttgagatggcatgacttcagcgtta

SEQ ID NO: 6012842 - DNA, 25 bp, Homo sapien
cgatccaaacgtattcggcaattat

SEQ ID NO: 6012843 - DNA, 25 bp, Homo sapien
agaccaaaccagatttcttcatcct

SEQ ID NO: 6012844 - DNA, 25 bp, Homo sapien
ctagaccaaaccagatttcttcatc

SEQ ID NO: 6012845 - DNA, 25 bp, Homo sapien
aaatagagtgtattcttgttctaga

SEQ ID NO: 6012846 - DNA, 25 bp, Homo sapien
tcgtcatacatgtcaaatagagtgt

SEQ ID NO: 6012847 - DNA, 25 bp, Homo sapien
actctgtgcaaaaagtatctggcca

SEQ ID NO: 6012848 - DNA, 25 bp, Homo sapien
tgttcgatgtatttcgtaccacctg

SEQ ID NO: 6012849 - DNA, 25 bp, Homo sapien
tgaacttgtttggagtaccgtcatt

SEQ ID NO: 6012850 - DNA, 25 bp, Homo sapien
tcttttcgatgcttgcttcagccat

SEQ ID NO: 6012851 - DNA, 25 bp, Homo sapien
tctgtggttgaacttgtttggagta

SEQ ID NO: 6012852 - DNA, 25 bp, Homo sapien
tccttcgtcatgtcagcattgtcaa

SEQ ID NO: 6012853 - DNA, 25 bp, Homo sapien
agcaaatagcttggcagcttcgtgt

SEQ ID NO: 6012854 - DNA, 25 bp, Homo sapien
tcaaattccttcgtcatgtcagcat

SEQ ID NO: 6012855 - DNA, 25 bp, Homo sapien
tattctacctctttggtccagttct

SEQ ID NO: 6012856 - DNA, 25 bp, Homo sapien
caccgcaaacagtttcacacatgat

SEQ ID NO: 6012857 - DNA, 25 bp, Homo sapien
cttgttcgatgtatttcgtaccacc

SEQ ID NO: 6012858 - DNA, 25 bp, Homo sapien
taaacatcgtcatacatgtcaaata

SEQ ID NO: 6012859 - DNA, 25 bp, Homo sapien
taccggcaccaacaccacagtagta

SEQ ID NO: 6012860 - DNA, 25 bp, Homo sapien
gtgtctcttggataacttctcgatg

SEQ ID NO: 6012861 - DNA, 25 bp, Homo sapien
agatttcttcatccttatgagcagc

SEQ ID NO: 6012862 - DNA, 25 bp, Homo sapien
ttggcagcttcgtgtctgtggttga

SEQ ID NO: 6012863 - DNA, 25 bp, Homo sapien
tgagatcttgataccaaactcttct

SEQ ID NO: 6012864 - DNA, 25 bp, Homo sapien
gtcatggaagcggtttcatgtctac

SEQ ID NO: 6012865 - DNA, 25 bp, Homo sapien
tttgagtcttttcgatgcttgcttc

SEQ ID NO: 6012866 - DNA, 25 bp, Homo sapien
gatcttgggattctaattgagctac

SEQ ID NO: 6012867 - DNA, 25 bp, Homo sapien
tggaacgtaagttaccagtaccatc

SEQ ID NO: 6012868 - DNA, 25 bp, Homo sapien
ggccatccataattggtcacccatg

SEQ ID NO: 6012869 - DNA, 25 bp, Homo sapien
ccggcaccaacaccacagtagtaag

SEQ ID NO: 6012870 - DNA, 25 bp, Homo sapien
agtcacccttcaatggctttggatg

SEQ ID NO: 6012871 - DNA, 25 bp, Homo sapien
aagctggtctacggtcttcaaagta

SEQ ID NO: 6012872 - DNA, 25 bp, Homo sapien
tacccaccctttggccatccgtaaa

SEQ ID NO: 6012873 - DNA, 25 bp, Homo sapien
ctggttgtctcatttccttggtgga

SEQ ID NO: 6012874 - DNA, 25 bp, Homo sapien
cgttaataccagaaatttctaatcc

SEQ ID NO: 6012875 - DNA, 25 bp, Homo sapien
gtaagcaacgggtttcaaatagatg

SEQ ID NO: 6012876 - DNA, 25 bp, Homo sapien
aacaccacagtagtaaggaccttgt

SEQ ID NO: 6012877 - DNA, 25 bp, Homo sapien
cggcaccgttccagtcacccttcaa

SEQ ID NO: 6012878 - DNA, 25 bp, Homo sapien
atgttgtcacctctcctgaagggat

SEQ ID NO: 6012879 - DNA, 25 bp, Homo sapien
ggatgtgattctcttcttcaaagtt

SEQ ID NO: 6012880 - DNA, 25 bp, Homo sapien
acaccagaagaaaaggcagtcatgg

SEQ ID NO: 6012881 - DNA, 25 bp, Homo sapien
ctcgatggcttgttcgatgtatttc

SEQ ID NO: 6012882 - DNA, 25 bp, Homo sapien
aattggtcacccatgtcaataccgg

SEQ ID NO: 6012883 - DNA, 25 bp, Homo sapien
gtctcatttccttggtggaaacgtt

SEQ ID NO: 6012884 - DNA, 25 bp, Homo sapien
ggaaacgttagcgtgacaaccggca

SEQ ID NO: 6012885 - DNA, 25 bp, Homo sapien
catgcggccaagacaacaatgttgt

SEQ ID NO: 6012886 - DNA, 25 bp, Homo sapien
aacgggtttcaaatagatgtcagag

SEQ ID NO: 6012887 - DNA, 25 bp, Homo sapien
atgtcagagtcgtggcctggcgctt

SEQ ID NO: 6012888 - DNA, 25 bp, Homo sapien
agtcttttcgatgcttgcttcagcc

SEQ ID NO: 6012889 - DNA, 25 bp, Homo sapien
gtctcttggataacttctcgatggc

SEQ ID NO: 6012890 - DNA, 25 bp, Homo sapien
gtacatggaccgacttggaattccc

SEQ ID NO: 6012891 - DNA, 25 bp, Homo sapien
gcttcgatcatgtctctggcataaa

SEQ ID NO: 6012892 - DNA, 25 bp, Homo sapien
gtatctggccatccataattggtca

SEQ ID NO: 6012893 - DNA, 25 bp, Homo sapien
ttcaatggctttggatggaatgaga

SEQ ID NO: 6012894 - DNA, 25 bp, Homo sapien
gcgtgacaaccggcaccgttccagt

SEQ ID NO: 6012895 - DNA, 25 bp, Homo sapien
ggtagaagaaccgtcgaagttccat

SEQ ID NO: 6012896 - DNA, 25 bp, Homo sapien
atccaaacgtattcggcaattattc

SEQ ID NO: 6012897 - DNA, 25 bp, Homo sapien
tgaagggatctgggtagtaagcaac

SEQ ID NO: 6012898 - DNA, 25 bp, Homo sapien
tacctgtaaccaagtatgggtcgat

SEQ ID NO: 6012899 - DNA, 25 bp, Homo sapien
atagcaccgcaaacagtttcacaca

SEQ ID NO: 6012900 - DNA, 25 bp, Homo sapien
tcacctctcctgaagggatctgggt

SEQ ID NO: 6012901 - DNA, 25 bp, Homo sapien
aagcaacgggtttcaaatagatgtc

SEQ ID NO: 6012902 - DNA, 25 bp, Homo sapien
gacttcagcgttaataccagaaatt

SEQ ID NO: 6012903 - DNA, 25 bp, Homo sapien
ttaatctcatgtcgttatcgctacc

SEQ ID NO: 6012904 - DNA, 25 bp, Homo sapien
tgggtcgatgttggaagctggtcta

SEQ ID NO: 6012905 - DNA, 25 bp, Homo sapien
gtcagagtcgtggcctggcgcttgg

SEQ ID NO: 6012906 - DNA, 25 bp, Homo sapien
acaaacaagctctgtagtgagcttc

SEQ ID NO: 6012907 - DNA, 25 bp, Homo sapien
taaccttccttggcgacggatcttg

SEQ ID NO: 6012908 - DNA, 25 bp, Homo sapien
ggcaccaacaccacagtagtaagga

SEQ ID NO: 6012909 - DNA, 25 bp, Homo sapien
cccattgagatggcatgacttcagc

SEQ ID NO: 6012910 - DNA, 25 bp, Homo sapien
gcataaaccttaccggcaccaacac

SEQ ID NO: 6012911 - DNA, 25 bp, Homo sapien
cggccaagacaacaatgttgtcacc

SEQ ID NO: 6012912 - DNA, 25 bp, Homo sapien
ttctaattgagctacctctgttggc

SEQ ID NO: 6012913 - DNA, 25 bp, Homo sapien
gtaagttaccagtaccatcgatcca

SEQ ID NO: 6012914 - DNA, 25 bp, Homo sapien
ctggcaattggtcaatggatgtgat

SEQ ID NO: 6012915 - DNA, 25 bp, Homo sapien
gtgacaaccggcaccgttccagtca

SEQ ID NO: 6012916 - DNA, 25 bp, Homo sapien
accgttccagtcacccttcaatggc

SEQ ID NO: 6012917 - DNA, 25 bp, Homo sapien
ttggtagaagaaccgtcgaagttcc

SEQ ID NO: 6012918 - DNA, 25 bp, Homo sapien
ctttggatggaatgagatcttgata

SEQ ID NO: 6012919 - DNA, 25 bp, Homo sapien
ggtcgatgttggaagctggtctacg

SEQ ID NO: 6012920 - DNA, 25 bp, Homo sapien
gcaccgttccagtcacccttcaatg

SEQ ID NO: 6012921 - DNA, 25 bp, Homo sapien
gttaccagtaccatcgatccaaacg

SEQ ID NO: 6012922 - DNA, 25 bp, Homo sapien
tgttcagcgtgtctcttggataact

SEQ ID NO: 6012923 - DNA, 25 bp, Homo sapien
tgtaaccaagtatgggtcgatgttg

SEQ ID NO: 6012924 - DNA, 25 bp, Homo sapien
ggaatgagatcttgataccaaactc

SEQ ID NO: 6012925 - DNA, 25 bp, Homo sapien
tagaagaaccgtcgaagttccattc

SEQ ID NO: 6012926 - DNA, 25 bp, Homo sapien
ggtttcaaatagatgtcagagtcgt

SEQ ID NO: 6012927 - DNA, 25 bp, Homo sapien
ggtacccaccctttggccatccgta

SEQ ID NO: 6012928 - DNA, 25 bp, Homo sapien
tccattctggcaattggtcaatgga

SEQ ID NO: 6012929 - DNA, 25 bp, Homo sapien
ttggtccagttctagatatttttgt

SEQ ID NO: 6012930 - DNA, 25 bp, Homo sapien
gctacctctgttggcgacaccagaa

SEQ ID NO: 6012931 - DNA, 25 bp, Homo sapien
tggttgaacttgtttggagtaccgt

SEQ ID NO: 6012932 - DNA, 25 bp, Homo sapien
attctctttcaaattccttcgtcat

SEQ ID NO: 6012933 - DNA, 25 bp, Homo sapien
gccaagacaacaatgttgtcacctc

SEQ ID NO: 6012934 - DNA, 25 bp, Homo sapien
aatgtgttcagcgtgtctcttggat

SEQ ID NO: 6012935 - DNA, 25 bp, Homo sapien
tcttgggattctaattgagctacct

SEQ ID NO: 6012936 - DNA, 25 bp, Homo sapien
ccgtcgaagttccattctggcaatt

SEQ ID NO: 6012937 - DNA, 25 bp, Homo sapien
ttctggcaattggtcaatggatgtg

SEQ ID NO: 6012938 - DNA, 25 bp, Homo sapien
agtagtaaggaccttgtggagctgg

SEQ ID NO: 6012939 - DNA, 25 bp, Homo sapien
cagcgtgtctcttggataacttctc

SEQ ID NO: 6012940 - DNA, 25 bp, Homo sapien
agatgtcagagtcgtggcctggcgc

SEQ ID NO: 6012941 - DNA, 25 bp, Homo sapien
tgtgttcagcgtgtctcttggataa

SEQ ID NO: 6012942 - DNA, 25 bp, Homo sapien
tgggtacccaccctttggccatccg

SEQ ID NO: 6012943 - DNA, 25 bp, Homo sapien
ctcatttccttggtggaaacgttag

SEQ ID NO: 6012944 - DNA, 25 bp, Homo sapien
ggtagtaagcaacgggtttcaaata

SEQ ID NO: 6012945 - DNA, 25 bp, Homo sapien
gctggtctacggtcttcaaagtaac

SEQ ID NO: 6012946 - DNA, 25 bp, Homo sapien
gcgacggatcttgggattctaattg

SEQ ID NO: 6012947 - DNA, 25 bp, Homo sapien
gaagaaccgtcgaagttccattctg

SEQ ID NO: 6012948 - DNA, 25 bp, Homo sapien
gagatggcatgacttcagcgttaat

SEQ ID NO: 6012949 - DNA, 25 bp, Homo sapien
cctgaagggatctgggtagtaagca

SEQ ID NO: 6012950 - DNA, 25 bp, Homo sapien
ctaatccggcatacaaacaagctct

SEQ ID NO: 6012951 - DNA, 25 bp, Homo sapien
gacaaccggcaccgttccagtcacc

SEQ ID NO: 6012952 - DNA, 25 bp, Homo sapien
aaacgtattcggcaattattctacc

SEQ ID NO: 6012953 - DNA, 25 bp, Homo sapien
ggcagcttcgtgtctgtggttgaac

SEQ ID NO: 6012954 - DNA, 25 bp, Homo sapien
cttctgccactctgtgcaaaaagta

SEQ ID NO: 6012955 - DNA, 25 bp, Homo sapien
agacaacaatgttgtcacctctcct

SEQ ID NO: 6012956 - DNA, 25 bp, Homo sapien
ccagtaccatcgatccaaacgtatt

SEQ ID NO: 6012957 - DNA, 25 bp, Homo sapien
cggcatacaaacaagctctgtagtg

SEQ ID NO: 6012958 - DNA, 25 bp, Homo sapien
aagttccattctggcaattggtcaa

SEQ ID NO: 6012959 - DNA, 25 bp, Homo sapien
aaacaagctctgtagtgagcttcga

SEQ ID NO: 6012960 - DNA, 25 bp, Homo sapien
aattcccattgagatggcatgactt

SEQ ID NO: 6012961 - DNA, 25 bp, Homo sapien
gttgaacttgtttggagtaccgtca

SEQ ID NO: 6012962 - DNA, 25 bp, Homo sapien
ccacctggttgtctcatttccttgg

SEQ ID NO: 6012963 - DNA, 25 bp, Homo sapien
cttgataccaaactcttctgccact

SEQ ID NO: 6012964 - DNA, 25 bp, Homo sapien
aaccagatttcttcatccttatgag

SEQ ID NO: 6012965 - DNA, 25 bp, Homo sapien
ttctacctctttggtccagttctag

SEQ ID NO: 6012966 - DNA, 25 bp, Homo sapien
ccagtcacccttcaatggctttgga

SEQ ID NO: 6012967 - DNA, 25 bp, Homo sapien
ggaccgacttggaattcccattgag

SEQ ID NO: 6012968 - DNA, 25 bp, Homo sapien
gattctcttcttcaaagttctacct

SEQ ID NO: 6012969 - DNA, 25 bp, Homo sapien
ttcgtgtctgtggttgaacttgttt

SEQ ID NO: 6012970 - DNA, 25 bp, Homo sapien
ttcgtaccacctggttgtctcattt

SEQ ID NO: 6012971 - DNA, 25 bp, Homo sapien
cgtggcctggcgcttggttggtaga

SEQ ID NO: 6012972 - DNA, 25 bp, Homo sapien
gcttggcagcttcgtgtctgtggtt

SEQ ID NO: 6012973 - DNA, 25 bp, Homo sapien
tcagcgttaataccagaaatttcta

SEQ ID NO: 6012974 - DNA, 25 bp, Homo sapien
aatttgagtcttttcgatgcttgct

SEQ ID NO: 6012975 - DNA, 25 bp, Homo sapien
agagtgtattcttgttctagaccaa

SEQ ID NO: 6012976 - DNA, 25 bp, Homo sapien
gaagattctctttcaaattccttcg

SEQ ID NO: 6012977 - DNA, 25 bp, Homo sapien
gtcaatggatgtgattctcttcttc

SEQ ID NO: 6012978 - DNA, 25 bp, Homo sapien
cggtttcatgtctaccagttaatct

SEQ ID NO: 6012979 - DNA, 25 bp, Homo sapien
tgtcaaatagagtgtattcttgttc

SEQ ID NO: 6012980 - DNA, 25 bp, Homo sapien
aaaaggcagtcatggaagcggtttc

SEQ ID NO: 6012981 - DNA, 25 bp, Homo sapien
ggttgtctcatttccttggtggaaa

SEQ ID NO: 6012982 - DNA, 25 bp, Homo sapien
agattctctttcaaattccttcgtc

SEQ ID NO: 6012983 - DNA, 25 bp, Homo sapien
tgtctgtggttgaacttgtttggag

SEQ ID NO: 6012984 - DNA, 25 bp, Homo sapien
ttcagcgtgtctcttggataacttc

SEQ ID NO: 6012985 - DNA, 25 bp, Homo sapien
gagcttcgatcatgtctctggcata

SEQ ID NO: 6012986 - DNA, 25 bp, Homo sapien
aactcttctgccactctgtgcaaaa

SEQ ID NO: 6012987 - DNA, 25 bp, Homo sapien
ctttggtccagttctagatattttt

SEQ ID NO: 6012988 - DNA, 25 bp, Homo sapien
caattggtcaatggatgtgattctc

SEQ ID NO: 6012989 - DNA, 25 bp, Homo sapien
ggatggaatgagatcttgataccaa

SEQ ID NO: 6012990 - DNA, 25 bp, Homo sapien
atacaaacaagctctgtagtgagct

SEQ ID NO: 6012991 - DNA, 25 bp, Homo sapien
catggaagcggtttcatgtctacca

SEQ ID NO: 6012992 - DNA, 25 bp, Homo sapien
agttaatctcatgtcgttatcgcta

SEQ ID NO: 6012993 - DNA, 25 bp, Homo sapien
caatggctttggatggaatgagatc

SEQ ID NO: 6012994 - DNA, 25 bp, Homo sapien
acctctcctgaagggatctgggtag

SEQ ID NO: 6012995 - DNA, 25 bp, Homo sapien
cattgagatggcatgacttcagcgt

SEQ ID NO: 6012996 - DNA, 25 bp, Homo sapien
atttcgtaccacctggttgtctcat

SEQ ID NO: 6012997 - DNA, 25 bp, Homo sapien
atgatacctgtaaccaagtatgggt

SEQ ID NO: 6012998 - DNA, 25 bp, Homo sapien
tctaccagttaatctcatgtcgtta

SEQ ID NO: 6012999 - DNA, 25 bp, Homo sapien
gtatttcgtaccacctggttgtctc

SEQ ID NO: 6013000 - DNA, 25 bp, Homo sapien
cgtgtctgtggttgaacttgtttgg

SEQ ID NO: 6013001 - DNA, 25 bp, Homo sapien
tcacccatgtcaataccggtacatg

SEQ ID NO: 6013002 - DNA, 25 bp, Homo sapien
tgagtcttttcgatgcttgcttcag

SEQ ID NO: 6013003 - DNA, 25 bp, Homo sapien
tctgtgcaaaaagtatctggccatc

SEQ ID NO: 6013004 - DNA, 25 bp, Homo sapien
tagtgagcttcgatcatgtctctgg

SEQ ID NO: 6013005 - DNA, 25 bp, Homo sapien
caaactcttctgccactctgtgcaa

SEQ ID NO: 6013006 - DNA, 25 bp, Homo sapien
ggaattcccattgagatggcatgac

SEQ ID NO: 6013007 - DNA, 25 bp, Homo sapien
tcagcattgtcaatagcaccgcaaa

SEQ ID NO: 6013008 - DNA, 25 bp, Homo sapien
gagcagcaaatagcttggcagcttc

SEQ ID NO: 6013009 - DNA, 25 bp, Homo sapien
gcatacaaacaagctctgtagtgag

SEQ ID NO: 6013010 - DNA, 25 bp, Homo sapien
ctcttggataacttctcgatggctt

SEQ ID NO: 6013011 - DNA, 25 bp, Homo sapien
gtcgtggcctggcgcttggttggta

SEQ ID NO: 6013012 - DNA, 25 bp, Homo sapien
atgaagattctctttcaaattcctt

SEQ ID NO: 6013013 - DNA, 25 bp, Homo sapien
taacttctcgatggcttgttcgatg

SEQ ID NO: 6013014 - DNA, 25 bp, Homo sapien
aaggaccttgtggagctgggtaccc

SEQ ID NO: 6013015 - DNA, 25 bp, Homo sapien
ttgtaaaatttgagtcttttcgatg

SEQ ID NO: 6013016 - DNA, 25 bp, Homo sapien
atagatgtcagagtcgtggcctggc

SEQ ID NO: 6013017 - DNA, 25 bp, Homo sapien
ggcttgttcgatgtatttcgtacca

SEQ ID NO: 6013018 - DNA, 25 bp, Homo sapien
ggcaattggtcaatggatgtgattc

SEQ ID NO: 6013019 - DNA, 25 bp, Homo sapien
attcggcaattattctacctctttg

SEQ ID NO: 6013020 - DNA, 25 bp, Homo sapien
agtaccatcgatccaaacgtattcg

SEQ ID NO: 6013021 - DNA, 25 bp, Homo sapien
ccagatttcttcatccttatgagca

SEQ ID NO: 6013022 - DNA, 25 bp, Homo sapien
agcattgtcaatagcaccgcaaaca

SEQ ID NO: 6013023 - DNA, 25 bp, Homo sapien
ctggccatccataattggtcaccca

SEQ ID NO: 6013024 - DNA, 25 bp, Homo sapien
tgtggagctgggtacccaccctttg

SEQ ID NO: 6013025 - DNA, 25 bp, Homo sapien
ttggtcacccatgtcaataccggta

SEQ ID NO: 6013026 - DNA, 25 bp, Homo sapien
ccatccataattggtcacccatgtc

SEQ ID NO: 6013027 - DNA, 25 bp, Homo sapien
tgtttggagtaccgtcattgttgta

SEQ ID NO: 6013028 - DNA, 25 bp, Homo sapien
cgatggcttgttcgatgtatttcgt

SEQ ID NO: 6013029 - DNA, 25 bp, Homo sapien
gccatccgtaaacatcgtcatacat

SEQ ID NO: 6013030 - DNA, 25 bp, Homo sapien
ccagttaatctcatgtcgttatcgc

SEQ ID NO: 6013031 - DNA, 25 bp, Homo sapien
ttcttgttctagaccaaaccagatt

SEQ ID NO: 6013032 - DNA, 25 bp, Homo sapien
tcacccttcaatggctttggatgga

SEQ ID NO: 6013033 - DNA, 25 bp, Homo sapien
tcgtcatgtcagcattgtcaatagc

SEQ ID NO: 6013034 - DNA, 25 bp, Homo sapien
tccagttctagatatttttgtaaaa

SEQ ID NO: 6013035 - DNA, 25 bp, Homo sapien
acgtattcggcaattattctacctc

SEQ ID NO: 6013036 - DNA, 25 bp, Homo sapien
aaaatttgagtcttttcgatgcttg

SEQ ID NO: 6013037 - DNA, 25 bp, Homo sapien
caccacagtagtaaggaccttgtgg

SEQ ID NO: 6013038 - DNA, 25 bp, Homo sapien
cattgtcaatagcaccgcaaacagt

SEQ ID NO: 6013039 - DNA, 25 bp, Homo sapien
ccttatgagcagcaaatagcttggc

SEQ ID NO: 6013040 - DNA, 25 bp, Homo sapien
atggaatgagatcttgataccaaac

SEQ ID NO: 6013041 - DNA, 25 bp, Homo sapien
gttccattctggcaattggtcaatg

SEQ ID NO: 6013042 - DNA, 25 bp, Homo sapien
tcaaagttctacctttggaacgtaa

SEQ ID NO: 6013043 - DNA, 25 bp, Homo sapien
ccatgtcaataccggtacatggacc

SEQ ID NO: 6013044 - DNA, 25 bp, Homo sapien
ctacacctaagattccaagacccaa

SEQ ID NO: 6013045 - DNA, 25 bp, Homo sapien
cgctcaaggtgtggaaataccccat

SEQ ID NO: 6013046 - DNA, 25 bp, Homo sapien
ataccccataattcaaacatttcta

SEQ ID NO: 6013047 - DNA, 25 bp, Homo sapien
ctgttcagacagcactaccacagga

SEQ ID NO: 6013048 - DNA, 25 bp, Homo sapien
taatagacgaatggaccgctcaagg

SEQ ID NO: 6013049 - DNA, 25 bp, Homo sapien
aagacccaagaacgcatttattctg

SEQ ID NO: 6013050 - DNA, 25 bp, Homo sapien
accgctcaaggtgtggaaatacccc

SEQ ID NO: 6013051 - DNA, 25 bp, Homo sapien
aacgcatttattctgttcagacagc

SEQ ID NO: 6013052 - DNA, 25 bp, Homo sapien
atagacgaatggaccgctcaaggtg

SEQ ID NO: 6013053 - DNA, 25 bp, Homo sapien
cactaccacaggatcttaatagacg

SEQ ID NO: 6013054 - DNA, 25 bp, Homo sapien
aattcaaacatttctaaaattattg

SEQ ID NO: 6013055 - DNA, 25 bp, Homo sapien
tcagacagcactaccacaggatctt

SEQ ID NO: 6013056 - DNA, 25 bp, Homo sapien
ctctacacctaagattccaagaccc

SEQ ID NO: 6013057 - DNA, 25 bp, Homo sapien
tattctgttcagacagcactaccac

SEQ ID NO: 6013058 - DNA, 25 bp, Homo sapien
caagaacgcatttattctgttcaga

SEQ ID NO: 6013059 - DNA, 25 bp, Homo sapien
aagattccaagacccaagaacgcat

SEQ ID NO: 6013060 - DNA, 25 bp, Homo sapien
agacgaatggaccgctcaaggtgtg

SEQ ID NO: 6013061 - DNA, 25 bp, Homo sapien
atcctaaatcctctacacctaagat

SEQ ID NO: 6013062 - DNA, 25 bp, Homo sapien
ttctgttcagacagcactaccacag

SEQ ID NO: 6013063 - DNA, 25 bp, Homo sapien
cccaagaacgcatttattctgttca

SEQ ID NO: 6013064 - DNA, 25 bp, Homo sapien
ggaccgctcaaggtgtggaaatacc

SEQ ID NO: 6013065 - DNA, 25 bp, Homo sapien
gaatcctaaatcctctacacctaag

SEQ ID NO: 6013066 - DNA, 25 bp, Homo sapien
ctaccacaggatcttaatagacgaa

SEQ ID NO: 6013067 - DNA, 25 bp, Homo sapien
acctaagattccaagacccaagaac

SEQ ID NO: 6013068 - DNA, 25 bp, Homo sapien
catttattctgttcagacagcacta

SEQ ID NO: 6013069 - DNA, 25 bp, Homo sapien
gattccaagacccaagaacgcattt

SEQ ID NO: 6013070 - DNA, 25 bp, Homo sapien
gtggaaataccccataattcaaaca

SEQ ID NO: 6013071 - DNA, 25 bp, Homo sapien
cttaatagacgaatggaccgctcaa

SEQ ID NO: 6013072 - DNA, 25 bp, Homo sapien
agaacgcatttattctgttcagaca

SEQ ID NO: 6013073 - DNA, 25 bp, Homo sapien
aggtgtggaaataccccataattca

SEQ ID NO: 6013074 - DNA, 25 bp, Homo sapien
taaatcctctacacctaagattcca

SEQ ID NO: 6013075 - DNA, 25 bp, Homo sapien
gtgtggaaataccccataattcaaa

SEQ ID NO: 6013076 - DNA, 25 bp, Homo sapien
ggatcttaatagacgaatggaccgc

SEQ ID NO: 6013077 - DNA, 25 bp, Homo sapien
ttccaagacccaagaacgcatttat

SEQ ID NO: 6013078 - DNA, 25 bp, Homo sapien
tttattctgttcagacagcactacc

SEQ ID NO: 6013079 - DNA, 25 bp, Homo sapien
atgaatcctaaatcctctacaccta

SEQ ID NO: 6013080 - DNA, 25 bp, Homo sapien
cctaaatcctctacacctaagattc

SEQ ID NO: 6013081 - DNA, 25 bp, Homo sapien
acacctaagattccaagacccaaga

SEQ ID NO: 6013082 - DNA, 25 bp, Homo sapien
ccaagacccaagaacgcatttattc

SEQ ID NO: 6013083 - DNA, 25 bp, Homo sapien
gaatggaccgctcaaggtgtggaaa

SEQ ID NO: 6013084 - DNA, 25 bp, Homo sapien
agcactaccacaggatcttaataga

SEQ ID NO: 6013085 - DNA, 25 bp, Homo sapien
ctcaaggtgtggaaataccccataa

SEQ ID NO: 6013086 - DNA, 25 bp, Homo sapien
atcttaatagacgaatggaccgctc

SEQ ID NO: 6013087 - DNA, 25 bp, Homo sapien
ctaagattccaagacccaagaacgc

SEQ ID NO: 6013088 - DNA, 25 bp, Homo sapien
agacagcactaccacaggatcttaa

SEQ ID NO: 6013089 - DNA, 25 bp, Homo sapien
aaataccccataattcaaacatttc

SEQ ID NO: 6013090 - DNA, 25 bp, Homo sapien
aatcctctacacctaagattccaag

SEQ ID NO: 6013091 - DNA, 25 bp, Homo sapien
tcctctacacctaagattccaagac

SEQ ID NO: 6013092 - DNA, 25 bp, Homo sapien
cgcatttattctgttcagacagcac

SEQ ID NO: 6013093 - DNA, 25 bp, Homo sapien
accccataattcaaacatttctaaa

SEQ ID NO: 6013094 - DNA, 25 bp, Homo sapien
cccataattcaaacatttctaaaat

SEQ ID NO: 6013095 - DNA, 25 bp, Homo sapien
gttcagacagcactaccacaggatc

SEQ ID NO: 6013096 - DNA, 25 bp, Homo sapien
ggaaataccccataattcaaacatt

SEQ ID NO: 6013097 - DNA, 25 bp, Homo sapien
acgaatggaccgctcaaggtgtgga

SEQ ID NO: 6013098 - DNA, 25 bp, Homo sapien
cacaggatcttaatagacgaatgga

SEQ ID NO: 6013099 - DNA, 25 bp, Homo sapien
caaggtgtggaaataccccataatt

SEQ ID NO: 6013100 - DNA, 25 bp, Homo sapien
acagcactaccacaggatcttaata

SEQ ID NO: 6013101 - DNA, 25 bp, Homo sapien
atggaccgctcaaggtgtggaaata

SEQ ID NO: 6013102 - DNA, 25 bp, Homo sapien
accacaggatcttaatagacgaatg

SEQ ID NO: 6013103 - DNA, 25 bp, Homo sapien
gacccaagaacgcatttattctgtt

SEQ ID NO: 6013104 - DNA, 25 bp, Homo sapien
caggatcttaatagacgaatggacc

SEQ ID NO: 6013105 - DNA, 25 bp, Homo sapien
tagtgctgtctgaacagaataaatg

SEQ ID NO: 6013106 - DNA, 25 bp, Homo sapien
tgtctgaacagaataaatgcgttct

SEQ ID NO: 6013107 - DNA, 25 bp, Homo sapien
caccttgagcggtccattcgtctat

SEQ ID NO: 6013108 - DNA, 25 bp, Homo sapien
tagaaatgtttgaattatggggtat

SEQ ID NO: 6013109 - DNA, 25 bp, Homo sapien
gtcttggaatcttaggtgtagagga

SEQ ID NO: 6013110 - DNA, 25 bp, Homo sapien
tttagaaatgtttgaattatggggt

SEQ ID NO: 6013111 - DNA, 25 bp, Homo sapien
taggtgtagaggatttaggattcat

SEQ ID NO: 6013112 - DNA, 25 bp, Homo sapien
tctattaagatcctgtggtagtgct

SEQ ID NO: 6013113 - DNA, 25 bp, Homo sapien
tccattcgtctattaagatcctgtg

SEQ ID NO: 6013114 - DNA, 25 bp, Homo sapien
ggggtatttccacaccttgagcggt

SEQ ID NO: 6013115 - DNA, 25 bp, Homo sapien
gctgtctgaacagaataaatgcgtt

SEQ ID NO: 6013116 - DNA, 25 bp, Homo sapien
gttcttgggtcttggaatcttaggt

SEQ ID NO: 6013117 - DNA, 25 bp, Homo sapien
gaaatgtttgaattatggggtattt

SEQ ID NO: 6013118 - DNA, 25 bp, Homo sapien
gaataaatgcgttcttgggtcttgg

SEQ ID NO: 6013119 - DNA, 25 bp, Homo sapien
atggggtatttccacaccttgagcg

SEQ ID NO: 6013120 - DNA, 25 bp, Homo sapien
ccttgagcggtccattcgtctatta

SEQ ID NO: 6013121 - DNA, 25 bp, Homo sapien
aattatggggtatttccacaccttg

SEQ ID NO: 6013122 - DNA, 25 bp, Homo sapien
tattaagatcctgtggtagtgctgt

SEQ ID NO: 6013123 - DNA, 25 bp, Homo sapien
gtgctgtctgaacagaataaatgcg

SEQ ID NO: 6013124 - DNA, 25 bp, Homo sapien
tcttgggtcttggaatcttaggtgt

SEQ ID NO: 6013125 - DNA, 25 bp, Homo sapien
tccacaccttgagcggtccattcgt

SEQ ID NO: 6013126 - DNA, 25 bp, Homo sapien
cagaataaatgcgttcttgggtctt

SEQ ID NO: 6013127 - DNA, 25 bp, Homo sapien
attttagaaatgtttgaattatggg

SEQ ID NO: 6013128 - DNA, 25 bp, Homo sapien
tgaacagaataaatgcgttcttggg

SEQ ID NO: 6013129 - DNA, 25 bp, Homo sapien
ggtagtgctgtctgaacagaataaa

SEQ ID NO: 6013130 - DNA, 25 bp, Homo sapien
tggaatcttaggtgtagaggattta

SEQ ID NO: 6013131 - DNA, 25 bp, Homo sapien
ggtatttccacaccttgagcggtcc

SEQ ID NO: 6013132 - DNA, 25 bp, Homo sapien
aatgtttgaattatggggtatttcc

SEQ ID NO: 6013133 - DNA, 25 bp, Homo sapien
cattcgtctattaagatcctgtggt

SEQ ID NO: 6013134 - DNA, 25 bp, Homo sapien
gcgttcttgggtcttggaatcttag

SEQ ID NO: 6013135 - DNA, 25 bp, Homo sapien
ctgtggtagtgctgtctgaacagaa

SEQ ID NO: 6013136 - DNA, 25 bp, Homo sapien
cacaccttgagcggtccattcgtct

SEQ ID NO: 6013137 - DNA, 25 bp, Homo sapien
aagatcctgtggtagtgctgtctga

SEQ ID NO: 6013138 - DNA, 25 bp, Homo sapien
aacagaataaatgcgttcttgggtc

SEQ ID NO: 6013139 - DNA, 25 bp, Homo sapien
cttaggtgtagaggatttaggattc

SEQ ID NO: 6013140 - DNA, 25 bp, Homo sapien
tctgaacagaataaatgcgttcttg

SEQ ID NO: 6013141 - DNA, 25 bp, Homo sapien
gtggtagtgctgtctgaacagaata

SEQ ID NO: 6013142 - DNA, 25 bp, Homo sapien
ttcgtctattaagatcctgtggtag

SEQ ID NO: 6013143 - DNA, 25 bp, Homo sapien
gggtcttggaatcttaggtgtagag

SEQ ID NO: 6013144 - DNA, 25 bp, Homo sapien
ttgagcggtccattcgtctattaag

SEQ ID NO: 6013145 - DNA, 25 bp, Homo sapien
atgcgttcttgggtcttggaatctt

SEQ ID NO: 6013146 - DNA, 25 bp, Homo sapien
cttggaatcttaggtgtagaggatt

SEQ ID NO: 6013147 - DNA, 25 bp, Homo sapien
ttatggggtatttccacaccttgag

SEQ ID NO: 6013148 - DNA, 25 bp, Homo sapien
tgtttgaattatggggtatttccac

SEQ ID NO: 6013149 - DNA, 25 bp, Homo sapien
tcctgtggtagtgctgtctgaacag

SEQ ID NO: 6013150 - DNA, 25 bp, Homo sapien
ggtccattcgtctattaagatcctg

SEQ ID NO: 6013151 - DNA, 25 bp, Homo sapien
tttgaattatggggtatttccacac

SEQ ID NO: 6013152 - DNA, 25 bp, Homo sapien
caataattttagaaatgtttgaatt

SEQ ID NO: 6013153 - DNA, 25 bp, Homo sapien
ttgggtcttggaatcttaggtgtag

SEQ ID NO: 6013154 - DNA, 25 bp, Homo sapien
tttccacaccttgagcggtccattc

SEQ ID NO: 6013155 - DNA, 25 bp, Homo sapien
tgaattatggggtatttccacacct

SEQ ID NO: 6013156 - DNA, 25 bp, Homo sapien
ataaatgcgttcttgggtcttggaa

SEQ ID NO: 6013157 - DNA, 25 bp, Homo sapien
gatcctgtggtagtgctgtctgaac

SEQ ID NO: 6013158 - DNA, 25 bp, Homo sapien
tatttccacaccttgagcggtccat

SEQ ID NO: 6013159 - DNA, 25 bp, Homo sapien
cgtctattaagatcctgtggtagtg

SEQ ID NO: 6013160 - DNA, 25 bp, Homo sapien
gaatcttaggtgtagaggatttagg

SEQ ID NO: 6013161 - DNA, 25 bp, Homo sapien
atcttaggtgtagaggatttaggat

SEQ ID NO: 6013162 - DNA, 25 bp, Homo sapien
ttaagatcctgtggtagtgctgtct

SEQ ID NO: 6013163 - DNA, 25 bp, Homo sapien
gcggtccattcgtctattaagatcc

SEQ ID NO: 6013164 - DNA, 25 bp, Homo sapien
gagcggtccattcgtctattaagat

SEQ ID NO: 6013165 - DNA, 25 bp, Homo sapien
aaatgcgttcttgggtcttggaatc

SEQ ID NO: 6013166 - DNA, 25 bp, Homo sapien
ttacgcgttgcttccgccagtggcg

SEQ ID NO: 6013167 - DNA, 25 bp, Homo sapien
cttgggtggtttttgtcacgcgcta

SEQ ID NO: 6013168 - DNA, 25 bp, Homo sapien
ccgctttggacataccatccgtaat

SEQ ID NO: 6013169 - DNA, 25 bp, Homo sapien
gaagatccctttcttgttaccgcca

SEQ ID NO: 6013170 - DNA, 25 bp, Homo sapien
acgacggcgctgacgcgatcaaaga

SEQ ID NO: 6013171 - DNA, 25 bp, Homo sapien
gttgcttccgccagtggcgaaatat

SEQ ID NO: 6013172 - DNA, 25 bp, Homo sapien
gacgcgatcaaagacgcggtgatac

SEQ ID NO: 6013173 - DNA, 25 bp, Homo sapien
ttcccgtgcacttgcggacgggtat

SEQ ID NO: 6013174 - DNA, 25 bp, Homo sapien
ttcaggcacagcacatcaaagagat

SEQ ID NO: 6013175 - DNA, 25 bp, Homo sapien
atgccttgcgaggtcgcaaaatcgg

SEQ ID NO: 6013176 - DNA, 25 bp, Homo sapien
gagcgtcgcagaacattacattgac

SEQ ID NO: 6013177 - DNA, 25 bp, Homo sapien
cgcgtcgggtcgagtttacgcgttg

SEQ ID NO: 6013178 - DNA, 25 bp, Homo sapien
tggtttttgtcacgcgctatcagct

SEQ ID NO: 6013179 - DNA, 25 bp, Homo sapien
gcgctgacgcgatcaaagacgcggt

SEQ ID NO: 6013180 - DNA, 25 bp, Homo sapien
attgacgcaggtgatcggacgcgtc

SEQ ID NO: 6013181 - DNA, 25 bp, Homo sapien
cactccacatgtcggtgtacattga

SEQ ID NO: 6013182 - DNA, 25 bp, Homo sapien
tctgccgtttccaaatcgccgcttt

SEQ ID NO: 6013183 - DNA, 25 bp, Homo sapien
tccacgccgtattcggtgatgataa

SEQ ID NO: 6013184 - DNA, 25 bp, Homo sapien
acatcaaagagatcgctgatggtat

SEQ ID NO: 6013185 - DNA, 25 bp, Homo sapien
catgccagtccagcgtttttgcagc

SEQ ID NO: 6013186 - DNA, 25 bp, Homo sapien
acctgttcaccgacgacggcgctga

SEQ ID NO: 6013187 - DNA, 25 bp, Homo sapien
gcggtcgcgagtgaagatccctttc

SEQ ID NO: 6013188 - DNA, 25 bp, Homo sapien
tccagtaccttctctgccgtttcca

SEQ ID NO: 6013189 - DNA, 25 bp, Homo sapien
tactccacatcaccacgcttgggtg

SEQ ID NO: 6013190 - DNA, 25 bp, Homo sapien
taccatccgtaataacggttcaggc

SEQ ID NO: 6013191 - DNA, 25 bp, Homo sapien
tcttgttaccgccaacgcgcaatat

SEQ ID NO: 6013192 - DNA, 25 bp, Homo sapien
ccgccgacttcggtttgcggtcgcg

SEQ ID NO: 6013193 - DNA, 25 bp, Homo sapien
actcttcactccacatgtcggtgta

SEQ ID NO: 6013194 - DNA, 25 bp, Homo sapien
gaagttcatgccagtccagcgtttt

SEQ ID NO: 6013195 - DNA, 25 bp, Homo sapien
tccgccagtggcgaaatattcccgt

SEQ ID NO: 6013196 - DNA, 25 bp, Homo sapien
tcgagtttacgcgttgcttccgcca

SEQ ID NO: 6013197 - DNA, 25 bp, Homo sapien
cgcaatatgccttgcgaggtcgcaa

SEQ ID NO: 6013198 - DNA, 25 bp, Homo sapien
cgcagaacattacattgacgcaggt

SEQ ID NO: 6013199 - DNA, 25 bp, Homo sapien
tgatgcagtttctcctgccaggcca

SEQ ID NO: 6013200 - DNA, 25 bp, Homo sapien
aacgtatccacgccgtattcggtga

SEQ ID NO: 6013201 - DNA, 25 bp, Homo sapien
aaatcggcgaaattccatacctgtt

SEQ ID NO: 6013202 - DNA, 25 bp, Homo sapien
gcgagtgaagatccctttcttgtta

SEQ ID NO: 6013203 - DNA, 25 bp, Homo sapien
ttccatacctgttcaccgacgacgg

SEQ ID NO: 6013204 - DNA, 25 bp, Homo sapien
atgataatcggctgatgcagtttct

SEQ ID NO: 6013205 - DNA, 25 bp, Homo sapien
tggtatcggtgtgagcgtcgcagaa

SEQ ID NO: 6013206 - DNA, 25 bp, Homo sapien
ccgtattcggtgatgataatcggct

SEQ ID NO: 6013207 - DNA, 25 bp, Homo sapien
tatccggttcgttggcaatactcca

SEQ ID NO: 6013208 - DNA, 25 bp, Homo sapien
acattgagtgcagcccggctaacgt

SEQ ID NO: 6013209 - DNA, 25 bp, Homo sapien
gacgcggtgatacatatccagccat

SEQ ID NO: 6013210 - DNA, 25 bp, Homo sapien
agtttctcctgccaggccagaagtt

SEQ ID NO: 6013211 - DNA, 25 bp, Homo sapien
tcaccgacgacggcgctgacgcgat

SEQ ID NO: 6013212 - DNA, 25 bp, Homo sapien
acttcggtttgcggtcgcgagtgaa

SEQ ID NO: 6013213 - DNA, 25 bp, Homo sapien
ccaacgcgcaatatgccttgcgagg

SEQ ID NO: 6013214 - DNA, 25 bp, Homo sapien
tctttttccagtaccttctctgccg

SEQ ID NO: 6013215 - DNA, 25 bp, Homo sapien
tcctgccaggccagaagttcttttt

SEQ ID NO: 6013216 - DNA, 25 bp, Homo sapien
tggcaatactccacatcaccacgct

SEQ ID NO: 6013217 - DNA, 25 bp, Homo sapien
cctttcttgttaccgccaacgcgca

SEQ ID NO: 6013218 - DNA, 25 bp, Homo sapien
gtttccaaatcgccgctttggacat

SEQ ID NO: 6013219 - DNA, 25 bp, Homo sapien
cagaaaagccgccgacttcggtttg

SEQ ID NO: 6013220 - DNA, 25 bp, Homo sapien
ccgtaataacggttcaggcacagca

SEQ ID NO: 6013221 - DNA, 25 bp, Homo sapien
atcggctgatgcagtttctcctgcc

SEQ ID NO: 6013222 - DNA, 25 bp, Homo sapien
caggccagaagttctttttccagta

SEQ ID NO: 6013223 - DNA, 25 bp, Homo sapien
gtgcagcccggctaacgtatccacg

SEQ ID NO: 6013224 - DNA, 25 bp, Homo sapien
tggacataccatccgtaataacggt

SEQ ID NO: 6013225 - DNA, 25 bp, Homo sapien
acatcaccacgcttgggtggttttt

SEQ ID NO: 6013226 - DNA, 25 bp, Homo sapien
acattacattgacgcaggtgatcgg

SEQ ID NO: 6013227 - DNA, 25 bp, Homo sapien
atgcacactgatactcttcactcca

SEQ ID NO: 6013228 - DNA, 25 bp, Homo sapien
aagagatcgctgatggtatcggtgt

SEQ ID NO: 6013229 - DNA, 25 bp, Homo sapien
gaaatattcccgtgcacttgcggac

SEQ ID NO: 6013230 - DNA, 25 bp, Homo sapien
ttaccgccaacgcgcaatatgcctt

SEQ ID NO: 6013231 - DNA, 25 bp, Homo sapien
cagccatgcacactgatactcttca

SEQ ID NO: 6013232 - DNA, 25 bp, Homo sapien
cggtgtgagcgtcgcagaacattac

SEQ ID NO: 6013233 - DNA, 25 bp, Homo sapien
gttcgttggcaatactccacatcac

SEQ ID NO: 6013234 - DNA, 25 bp, Homo sapien
tgcacttgcggacgggtatccggtt

SEQ ID NO: 6013235 - DNA, 25 bp, Homo sapien
atcaaagacgcggtgatacatatcc

SEQ ID NO: 6013236 - DNA, 25 bp, Homo sapien
tcgggtcgagtttacgcgttgcttc

SEQ ID NO: 6013237 - DNA, 25 bp, Homo sapien
gtttgcggtcgcgagtgaagatccc

SEQ ID NO: 6013238 - DNA, 25 bp, Homo sapien
catatccagccatgcacactgatac

SEQ ID NO: 6013239 - DNA, 25 bp, Homo sapien
tgcgaggtcgcaaaatcggcgaaat

SEQ ID NO: 6013240 - DNA, 25 bp, Homo sapien
gcaggtgatcggacgcgtcgggtcg

SEQ ID NO: 6013241 - DNA, 25 bp, Homo sapien
gatcggacgcgtcgggtcgagttta

SEQ ID NO: 6013242 - DNA, 25 bp, Homo sapien
cggtgtacattgagtgcagcccggc

SEQ ID NO: 6013243 - DNA, 25 bp, Homo sapien
agtccagcgtttttgcagcagaaaa

SEQ ID NO: 6013244 - DNA, 25 bp, Homo sapien
gtcgcaaaatcggcgaaattccata

SEQ ID NO: 6013245 - DNA, 25 bp, Homo sapien
gcgaaattccatacctgttcaccga

SEQ ID NO: 6013246 - DNA, 25 bp, Homo sapien
agtggcgaaatattcccgtgcactt

SEQ ID NO: 6013247 - DNA, 25 bp, Homo sapien
ttgcagcagaaaagccgccgacttc

SEQ ID NO: 6013248 - DNA, 25 bp, Homo sapien
taacggttcaggcacagcacatcaa

SEQ ID NO: 6013249 - DNA, 25 bp, Homo sapien
ccacgcttgggtggtttttgtcacg

SEQ ID NO: 6013250 - DNA, 25 bp, Homo sapien
acatgtcggtgtacattgagtgcag

SEQ ID NO: 6013251 - DNA, 25 bp, Homo sapien
accttctctgccgtttccaaatcgc

SEQ ID NO: 6013252 - DNA, 25 bp, Homo sapien
gcgtttttgcagcagaaaagccgcc

SEQ ID NO: 6013253 - DNA, 25 bp, Homo sapien
tcggtgatgataatcggctgatgca

SEQ ID NO: 6013254 - DNA, 25 bp, Homo sapien
cacagcacatcaaagagatcgctga

SEQ ID NO: 6013255 - DNA, 25 bp, Homo sapien
aaatcgccgctttggacataccatc

SEQ ID NO: 6013256 - DNA, 25 bp, Homo sapien
ccggctaacgtatccacgccgtatt

SEQ ID NO: 6013257 - DNA, 25 bp, Homo sapien
gtgatacatatccagccatgcacac

SEQ ID NO: 6013258 - DNA, 25 bp, Homo sapien
cgctgatggtatcggtgtgagcgtc

SEQ ID NO: 6013259 - DNA, 25 bp, Homo sapien
actgatactcttcactccacatgtc

SEQ ID NO: 6013260 - DNA, 25 bp, Homo sapien
actccttctttactccaccatctcg

SEQ ID NO: 6013261 - DNA, 25 bp, Homo sapien
cgctggaactgaagttaccaatcac

SEQ ID NO: 6013262 - DNA, 25 bp, Homo sapien
cccgcatgaataatattgatgaatg

SEQ ID NO: 6013263 - DNA, 25 bp, Homo sapien
tctcataaataacgtcatgcattac

SEQ ID NO: 6013264 - DNA, 25 bp, Homo sapien
ctccaacgagcataattcttcagaa

SEQ ID NO: 6013265 - DNA, 25 bp, Homo sapien
gcagtattccctcaaagtttcatag

SEQ ID NO: 6013266 - DNA, 25 bp, Homo sapien
ctttattgccaaatgtttgaacgat

SEQ ID NO: 6013267 - DNA, 25 bp, Homo sapien
ttccctcaaagtttcatagtcagta

SEQ ID NO: 6013268 - DNA, 25 bp, Homo sapien
gggcatgcatgatgcacgttatgag

SEQ ID NO: 6013269 - DNA, 25 bp, Homo sapien
catgttaattattacatgcttaacg

SEQ ID NO: 6013270 - DNA, 25 bp, Homo sapien
ttcatagtcagtatcatattcatca

SEQ ID NO: 6013271 - DNA, 25 bp, Homo sapien
tctgcttcgacgcactccttcttta

SEQ ID NO: 6013272 - DNA, 25 bp, Homo sapien
tttggcaatagctgcaattgccgcg

SEQ ID NO: 6013273 - DNA, 25 bp, Homo sapien
acgtgggtagcaccaaaacgaatca

SEQ ID NO: 6013274 - DNA, 25 bp, Homo sapien
atgtttgaacgatctgcttcgacgc

SEQ ID NO: 6013275 - DNA, 25 bp, Homo sapien
gaacgatctgcttcgacgcactcct

SEQ ID NO: 6013276 - DNA, 25 bp, Homo sapien
caagaccggcaacaggattcaatct

SEQ ID NO: 6013277 - DNA, 25 bp, Homo sapien
agaattgagacgcagtccacacgct

SEQ ID NO: 6013278 - DNA, 25 bp, Homo sapien
aatagctgcaattgccgcgacatcc

SEQ ID NO: 6013279 - DNA, 25 bp, Homo sapien
aaataacgtcatgcattacatgtta

SEQ ID NO: 6013280 - DNA, 25 bp, Homo sapien
gacatcctccaacgagcataattct

SEQ ID NO: 6013281 - DNA, 25 bp, Homo sapien
tgatttgccagttggattaatcttg

SEQ ID NO: 6013282 - DNA, 25 bp, Homo sapien
taattattacatgcttaacgtaatt

SEQ ID NO: 6013283 - DNA, 25 bp, Homo sapien
cgacgcactccttctttactccacc

SEQ ID NO: 6013284 - DNA, 25 bp, Homo sapien
ttgtcagggcatgcatgatgcacgt

SEQ ID NO: 6013285 - DNA, 25 bp, Homo sapien
gggtagcaccaaaacgaatcaagtc

SEQ ID NO: 6013286 - DNA, 25 bp, Homo sapien
ccttccggcgttcgtggtctatttg

SEQ ID NO: 6013287 - DNA, 25 bp, Homo sapien
cctttccccgcatgaataatattga

SEQ ID NO: 6013288 - DNA, 25 bp, Homo sapien
taattgcgggactctaatcataaaa

SEQ ID NO: 6013289 - DNA, 25 bp, Homo sapien
tattgaaaacgtgggtagcaccaaa

SEQ ID NO: 6013290 - DNA, 25 bp, Homo sapien
caatcacgctggatgatttgccagt

SEQ ID NO: 6013291 - DNA, 25 bp, Homo sapien
gcattacatgttaattattacatgc

SEQ ID NO: 6013292 - DNA, 25 bp, Homo sapien
cggcaacaggattcaatcttaagaa

SEQ ID NO: 6013293 - DNA, 25 bp, Homo sapien
gggtatttcgattttggcaatagct

SEQ ID NO: 6013294 - DNA, 25 bp, Homo sapien
tccatgttgtcagggcatgcatgat

SEQ ID NO: 6013295 - DNA, 25 bp, Homo sapien
tctaatcataaaaacccatctcata

SEQ ID NO: 6013296 - DNA, 25 bp, Homo sapien
tgcggcaaccttccggcgttcgtgg

SEQ ID NO: 6013297 - DNA, 25 bp, Homo sapien
ctccaccatctcgtccttattgaaa

SEQ ID NO: 6013298 - DNA, 25 bp, Homo sapien
tggattaatcttgcctttccccgca

SEQ ID NO: 6013299 - DNA, 25 bp, Homo sapien
gctggatgatttgccagttggatta

SEQ ID NO: 6013300 - DNA, 25 bp, Homo sapien
gtgacggtgctaggcagtattccct

SEQ ID NO: 6013301 - DNA, 25 bp, Homo sapien
tctttactccaccatctcgtcctta

SEQ ID NO: 6013302 - DNA, 25 bp, Homo sapien
atgcatgcgtgaggggtatttcgat

SEQ ID NO: 6013303 - DNA, 25 bp, Homo sapien
caagagagaattgagacgcagtcca

SEQ ID NO: 6013304 - DNA, 25 bp, Homo sapien
tgaataatattgatgaatgcatgcg

SEQ ID NO: 6013305 - DNA, 25 bp, Homo sapien
cgatgttccatgttgtcagggcatg

SEQ ID NO: 6013306 - DNA, 25 bp, Homo sapien
agttaccaatcacgctggatgattt

SEQ ID NO: 6013307 - DNA, 25 bp, Homo sapien
ggcgttcgtggtctatttgctcttg

SEQ ID NO: 6013308 - DNA, 25 bp, Homo sapien
tgctaggcagtattccctcaaagtt

SEQ ID NO: 6013309 - DNA, 25 bp, Homo sapien
cataaaaacccatctcataaataac

SEQ ID NO: 6013310 - DNA, 25 bp, Homo sapien
aacccatctcataaataacgtcatg

SEQ ID NO: 6013311 - DNA, 25 bp, Homo sapien
cgtaattcaacagaaattatatgat

SEQ ID NO: 6013312 - DNA, 25 bp, Homo sapien
ttcatcattgcattcctgcaagaga

SEQ ID NO: 6013313 - DNA, 25 bp, Homo sapien
gtcagtatcatattcatcattgcat

SEQ ID NO: 6013314 - DNA, 25 bp, Homo sapien
tgcaattgccgcgacatcctccaac

SEQ ID NO: 6013315 - DNA, 25 bp, Homo sapien
aggattcaatcttaagaaactttat

SEQ ID NO: 6013316 - DNA, 25 bp, Homo sapien
aagaaactttattgccaaatgtttg

SEQ ID NO: 6013317 - DNA, 25 bp, Homo sapien
cgggactctaatcataaaaacccat

SEQ ID NO: 6013318 - DNA, 25 bp, Homo sapien
caaagtttcatagtcagtatcatat

SEQ ID NO: 6013319 - DNA, 25 bp, Homo sapien
caacagaaattatatgataatcatc

SEQ ID NO: 6013320 - DNA, 25 bp, Homo sapien
caccaaaacgaatcaagtcgctgga

SEQ ID NO: 6013321 - DNA, 25 bp, Homo sapien
cagtccacacgctgcggcaaccttc

SEQ ID NO: 6013322 - DNA, 25 bp, Homo sapien
aacgaatcaagtcgctggaactgaa

SEQ ID NO: 6013323 - DNA, 25 bp, Homo sapien
cgtcatgcattacatgttaattatt

SEQ ID NO: 6013324 - DNA, 25 bp, Homo sapien
acacgctgcggcaaccttccggcgt

SEQ ID NO: 6013325 - DNA, 25 bp, Homo sapien
gcttaacgtaattcaacagaaatta

SEQ ID NO: 6013326 - DNA, 25 bp, Homo sapien
gccagttggattaatcttgcctttc

SEQ ID NO: 6013327 - DNA, 25 bp, Homo sapien
gagacgcagtccacacgctgcggca

SEQ ID NO: 6013328 - DNA, 25 bp, Homo sapien
tcaagtcgctggaactgaagttacc

SEQ ID NO: 6013329 - DNA, 25 bp, Homo sapien
ttcctgcaagagagaattgagacgc

SEQ ID NO: 6013330 - DNA, 25 bp, Homo sapien
tgccaaatgtttgaacgatctgctt

SEQ ID NO: 6013331 - DNA, 25 bp, Homo sapien
tatgaggtgacggtgctaggcagta

SEQ ID NO: 6013332 - DNA, 25 bp, Homo sapien
atcatcgcaagaccggcaacaggat

SEQ ID NO: 6013333 - DNA, 25 bp, Homo sapien
cgagcataattcttcagaaaaatag

SEQ ID NO: 6013334 - DNA, 25 bp, Homo sapien
ttcgattttggcaatagctgcaatt

SEQ ID NO: 6013335 - DNA, 25 bp, Homo sapien
aaattatatgataatcatcgcaaga

SEQ ID NO: 6013336 - DNA, 25 bp, Homo sapien
tgccgcgacatcctccaacgagcat

SEQ ID NO: 6013337 - DNA, 25 bp, Homo sapien
tgcacgttatgaggtgacggtgcta

SEQ ID NO: 6013338 - DNA, 25 bp, Homo sapien
ttacatgcttaacgtaattcaacag

SEQ ID NO: 6013339 - DNA, 25 bp, Homo sapien
ttcagaaaaatagcgatgttccatg

SEQ ID NO: 6013340 - DNA, 25 bp, Homo sapien
gtccttattgaaaacgtgggtagca

SEQ ID NO: 6013341 - DNA, 25 bp, Homo sapien
aaatagcgatgttccatgttgtcag

SEQ ID NO: 6013342 - DNA, 25 bp, Homo sapien
atcatattcatcattgcattcctgc

SEQ ID NO: 6013343 - DNA, 25 bp, Homo sapien
catctcgtccttattgaaaacgtgg

SEQ ID NO: 6013344 - DNA, 25 bp, Homo sapien
gcatgatgcacgttatgaggtgacg

SEQ ID NO: 6013345 - DNA, 25 bp, Homo sapien
tatgataatcatcgcaagaccggca

SEQ ID NO: 6013346 - DNA, 25 bp, Homo sapien
aatcttgcctttccccgcatgaata

SEQ ID NO: 6013347 - DNA, 25 bp, Homo sapien
attgcattcctgcaagagagaattg

SEQ ID NO: 6013348 - DNA, 25 bp, Homo sapien
aactgaagttaccaatcacgctgga

SEQ ID NO: 6013349 - DNA, 25 bp, Homo sapien
caatcttaagaaactttattgccaa

SEQ ID NO: 6013350 - DNA, 25 bp, Homo sapien
aatgtataattgcgggactctaatc

SEQ ID NO: 6013351 - DNA, 25 bp, Homo sapien
cgtgaggggtatttcgattttggca

SEQ ID NO: 6013352 - DNA, 25 bp, Homo sapien
atattgatgaatgcatgcgtgaggg

SEQ ID NO: 6013353 - DNA, 25 bp, Homo sapien
taattcttcagaaaaatagcgatgt

SEQ ID NO: 6013354 - DNA, 25 bp, Homo sapien
aatagtcggtgtcgccgagcaggaa
